United States Patent Application Publication US 2005/0244851 A1 - sequence listing, part 3

SEQ ID NO: 79258 - DNA, 25 bp, Homo sapien
ttttgggccaccgaccttgtgtcca

SEQ ID NO: 79259 - DNA, 25 bp, Homo sapien
tcagcactctttttgggccaccgac

SEQ ID NO: 79260 - DNA, 25 bp, Homo sapien
taagcatgtgcagcaaaaattcagc

SEQ ID NO: 79261 - DNA, 25 bp, Homo sapien
caatgaccagagaatctacatctaa

SEQ ID NO: 79262 - DNA, 25 bp, Homo sapien
gttcacttggatatgctcaatgacc

SEQ ID NO: 79263 - DNA, 25 bp, Homo sapien
gcctgagcagtttcacgagtgttct

SEQ ID NO: 79264 - DNA, 25 bp, Homo sapien
taacgtcggaatggtacacactgtt

SEQ ID NO: 79265 - DNA, 25 bp, Homo sapien
ttaaagtgaacacgaagattggaac

SEQ ID NO: 79266 - DNA, 25 bp, Homo sapien
taagcatgtgcagcaaaaattcagc

SEQ ID NO: 79267 - DNA, 25 bp, Homo sapien
caatgaccagagaatctacatctaa

SEQ ID NO: 79268 - DNA, 25 bp, Homo sapien
ctgcgcacacctgccaactccacca

SEQ ID NO: 79269 - DNA, 25 bp, Homo sapien
ttttgggccaccgaccttgtgtcca

SEQ ID NO: 79270 - DNA, 25 bp, Homo sapien
gcatacccttgatggcctgagcagt

SEQ ID NO: 79271 - DNA, 25 bp, Homo sapien
tcagcactctttttgggccaccgac

SEQ ID NO: 79272 - DNA, 25 bp, Homo sapien
gccccattgcttggcctgcgcacac

SEQ ID NO: 79273 - DNA, 25 bp, Homo sapien
gttcacttggatatgctcaatgacc

SEQ ID NO: 79274 - DNA, 25 bp, Homo sapien
ttaaagtgaacacgaagattggaac

SEQ ID NO: 79275 - DNA, 25 bp, Homo sapien
gcctgagcagtttcacgagtgttct

SEQ ID NO: 79276 - DNA, 25 bp, Homo sapien
gcatacccttgatggcctgagcagt

SEQ ID NO: 79277 - DNA, 25 bp, Homo sapien
taacgtcggaatggtacacactgtt

SEQ ID NO: 79278 - DNA, 25 bp, Homo sapien
ctgcgcacacctgccaactccacca

SEQ ID NO: 79279 - DNA, 25 bp, Homo sapien
gccccattgcttggcctgcgcacac

SEQ ID NO: 79280 - DNA, 25 bp, Homo sapien
ttttgggccaccgaccttgtgtcca

SEQ ID NO: 79281 - DNA, 25 bp, Homo sapien
tcagcactctttttgggccaccgac

SEQ ID NO: 79282 - DNA, 25 bp, Homo sapien
taagcatgtgcagcaaaaattcagc

SEQ ID NO: 79283 - DNA, 25 bp, Homo sapien
caatgaccagagaatctacatctaa

SEQ ID NO: 79284 - DNA, 25 bp, Homo sapien
gttcacttggatatgctcaatgacc

SEQ ID NO: 79285 - DNA, 25 bp, Homo sapien
ttttgggccaccgaccttgtgtcca

SEQ ID NO: 79286 - DNA, 25 bp, Homo sapien
gcctgagcagtttcacgagtgttct

SEQ ID NO: 79287 - DNA, 25 bp, Homo sapien
taagcatgtgcagcaaaaattcagc

SEQ ID NO: 79288 - DNA, 25 bp, Homo sapien
gcatacccttgatggcctgagcagt

SEQ ID NO: 79289 - DNA, 25 bp, Homo sapien
gccccattgcttggcctgcgcacac

SEQ ID NO: 79290 - DNA, 25 bp, Homo sapien
taacgtcggaatggtacacactgtt

SEQ ID NO: 79291 - DNA, 25 bp, Homo sapien
ctgcgcacacctgccaactccacca

SEQ ID NO: 79292 - DNA, 25 bp, Homo sapien
ttaaagtgaacacgaagattggaac

SEQ ID NO: 79293 - DNA, 25 bp, Homo sapien
caatgaccagagaatctacatctaa

SEQ ID NO: 79294 - DNA, 25 bp, Homo sapien
tcagcactctttttgggccaccgac

SEQ ID NO: 79295 - DNA, 25 bp, Homo sapien
gttcacttggatatgctcaatgacc

SEQ ID NO: 79296 - DNA, 25 bp, Homo sapien
ttaaagtgaacacgaagattggaac

SEQ ID NO: 79297 - DNA, 25 bp, Homo sapien
gcctgagcagtttcacgagtgttct

SEQ ID NO: 79298 - DNA, 25 bp, Homo sapien
gcatacccttgatggcctgagcagt

SEQ ID NO: 79299 - DNA, 25 bp, Homo sapien
taacgtcggaatggtacacactgtt

SEQ ID NO: 79300 - DNA, 25 bp, Homo sapien
ctgcgcacacctgccaactccacca

SEQ ID NO: 79301 - DNA, 25 bp, Homo sapien
gccccattgcttggcctgcgcacac

SEQ ID NO: 79302 - DNA, 25 bp, Homo sapien
ttttgggccaccgaccttgtgtcca

SEQ ID NO: 79303 - DNA, 25 bp, Homo sapien
tcagcactctttttgggccaccgac

SEQ ID NO: 79304 - DNA, 25 bp, Homo sapien
taagcatgtgcagcaaaaattcagc

SEQ ID NO: 79305 - DNA, 25 bp, Homo sapien
caatgaccagagaatctacatctaa

SEQ ID NO: 79306 - DNA, 25 bp, Homo sapien
gttcacttggatatgctcaatgacc

SEQ ID NO: 79307 - DNA, 25 bp, Homo sapien
gttcacttggatatgctcaatgacc

SEQ ID NO: 79308 - DNA, 25 bp, Homo sapien
gcatacccttgatggcctgagcagt

SEQ ID NO: 79309 - DNA, 25 bp, Homo sapien
taagcatgtgcagcaaaaattcagc

SEQ ID NO: 79310 - DNA, 25 bp, Homo sapien
tcagcactctttttgggccaccgac

SEQ ID NO: 79311 - DNA, 25 bp, Homo sapien
gcctgagcagtttcacgagtgttct

SEQ ID NO: 79312 - DNA, 25 bp, Homo sapien
ctgcgcacacctgccaactccacca

SEQ ID NO: 79313 - DNA, 25 bp, Homo sapien
gccccattgcttggcctgcgcacac

SEQ ID NO: 79314 - DNA, 25 bp, Homo sapien
taacgtcggaatggtacacactgtt

SEQ ID NO: 79315 - DNA, 25 bp, Homo sapien
ttaaagtgaacacgaagattggaac

SEQ ID NO: 79316 - DNA, 25 bp, Homo sapien
caatgaccagagaatctacatctaa

SEQ ID NO: 79317 - DNA, 25 bp, Homo sapien
ttttgggccaccgaccttgtgtcca

SEQ ID NO: 79318 - DNA, 25 bp, Homo sapien
ttaaagtgaacacgaagattggaac

SEQ ID NO: 79319 - DNA, 25 bp, Homo sapien
gcctgagcagtttcacgagtgttct

SEQ ID NO: 79320 - DNA, 25 bp, Homo sapien
gcatacccttgatggcctgagcagt

SEQ ID NO: 79321 - DNA, 25 bp, Homo sapien
taacgtcggaatggtacacactgtt

SEQ ID NO: 79322 - DNA, 25 bp, Homo sapien
ctgcgcacacctgccaactccacca

SEQ ID NO: 79323 - DNA, 25 bp, Homo sapien
gccccattgcttggcctgcgcacac

SEQ ID NO: 79324 - DNA, 25 bp, Homo sapien
ttttgggccaccgaccttgtgtcca

SEQ ID NO: 79325 - DNA, 25 bp, Homo sapien
tcagcactctttttgggccaccgac

SEQ ID NO: 79326 - DNA, 25 bp, Homo sapien
taagcatgtgcagcaaaaattcagc

SEQ ID NO: 79327 - DNA, 25 bp, Homo sapien
caatgaccagagaatctacatctaa

SEQ ID NO: 79328 - DNA, 25 bp, Homo sapien
gttcacttggatatgctcaatgacc

SEQ ID NO: 79329 - DNA, 25 bp, Homo sapien
ctgcgcacacctgccaactccacca

SEQ ID NO: 79330 - DNA, 25 bp, Homo sapien
gttcacttggatatgctcaatgacc

SEQ ID NO: 79331 - DNA, 25 bp, Homo sapien
taagcatgtgcagcaaaaattcagc

SEQ ID NO: 79332 - DNA, 25 bp, Homo sapien
gcctgagcagtttcacgagtgttct

SEQ ID NO: 79333 - DNA, 25 bp, Homo sapien
gccccattgcttggcctgcgcacac

SEQ ID NO: 79334 - DNA, 25 bp, Homo sapien
tcagcactctttttgggccaccgac

SEQ ID NO: 79335 - DNA, 25 bp, Homo sapien
ttaaagtgaacacgaagattggaac

SEQ ID NO: 79336 - DNA, 25 bp, Homo sapien
taacgtcggaatggtacacactgtt

SEQ ID NO: 79337 - DNA, 25 bp, Homo sapien
caatgaccagagaatctacatctaa

SEQ ID NO: 79338 - DNA, 25 bp, Homo sapien
ttttgggccaccgaccttgtgtcca

SEQ ID NO: 79339 - DNA, 25 bp, Homo sapien
gcatacccttgatggcctgagcagt

SEQ ID NO: 79340 - DNA, 25 bp, Homo sapien
ttaaagtgaacacgaagattggaac

SEQ ID NO: 79341 - DNA, 25 bp, Homo sapien
gcctgagcagtttcacgagtgttct

SEQ ID NO: 79342 - DNA, 25 bp, Homo sapien
gcatacccttgatggcctgagcagt

SEQ ID NO: 79343 - DNA, 25 bp, Homo sapien
taacgtcggaatggtacacactgtt

SEQ ID NO: 79344 - DNA, 25 bp, Homo sapien
ctgcgcacacctgccaactccacca

SEQ ID NO: 79345 - DNA, 25 bp, Homo sapien
gccccattgcttggcctgcgcacac

SEQ ID NO: 79346 - DNA, 25 bp, Homo sapien
ttttgggccaccgaccttgtgtcca

SEQ ID NO: 79347 - DNA, 25 bp, Homo sapien
tcagcactctttttgggccaccgac

SEQ ID NO: 79348 - DNA, 25 bp, Homo sapien
taagcatgtgcagcaaaaattcagc

SEQ ID NO: 79349 - DNA, 25 bp, Homo sapien
caatgaccagagaatctacatctaa

SEQ ID NO: 79350 - DNA, 25 bp, Homo sapien
gttcacttggatatgctcaatgacc

SEQ ID NO: 79351 - DNA, 25 bp, Homo sapien
taagcatgtgcagcaaaaattcagc

SEQ ID NO: 79352 - DNA, 25 bp, Homo sapien
ttaaagtgaacacgaagattggaac

SEQ ID NO: 79353 - DNA, 25 bp, Homo sapien
taacgtcggaatggtacacactgtt

SEQ ID NO: 79354 - DNA, 25 bp, Homo sapien
ctgcgcacacctgccaactccacca

SEQ ID NO: 79355 - DNA, 25 bp, Homo sapien
tcagcactctttttgggccaccgac

SEQ ID NO: 79356 - DNA, 25 bp, Homo sapien
gcctgagcagtttcacgagtgttct

SEQ ID NO: 79357 - DNA, 25 bp, Homo sapien
gccccattgcttggcctgcgcacac

SEQ ID NO: 79358 - DNA, 25 bp, Homo sapien
gttcacttggatatgctcaatgacc

SEQ ID NO: 79359 - DNA, 25 bp, Homo sapien
ttttgggccaccgaccttgtgtcca

SEQ ID NO: 79360 - DNA, 25 bp, Homo sapien
caatgaccagagaatctacatctaa

SEQ ID NO: 79361 - DNA, 25 bp, Homo sapien
gcatacccttgatggcctgagcagt

SEQ ID NO: 79362 - DNA, 25 bp, Homo sapien
ttaaagtgaacacgaagattggaac

SEQ ID NO: 79363 - DNA, 25 bp, Homo sapien
gcctgagcagtttcacgagtgttct

SEQ ID NO: 79364 - DNA, 25 bp, Homo sapien
gcatacccttgatggcctgagcagt

SEQ ID NO: 79365 - DNA, 25 bp, Homo sapien
taacgtcggaatggtacacactgtt

SEQ ID NO: 79366 - DNA, 25 bp, Homo sapien
ctgcgcacacctgccaactccacca

SEQ ID NO: 79367 - DNA, 25 bp, Homo sapien
gccccattgcttggcctgcgcacac

SEQ ID NO: 79368 - DNA, 25 bp, Homo sapien
ttttgggccaccgaccttgtgtcca

SEQ ID NO: 79369 - DNA, 25 bp, Homo sapien
tcagcactctttttgggccaccgac

SEQ ID NO: 79370 - DNA, 25 bp, Homo sapien
taagcatgtgcagcaaaaattcagc

SEQ ID NO: 79371 - DNA, 25 bp, Homo sapien
caatgaccagagaatctacatctaa

SEQ ID NO: 79372 - DNA, 25 bp, Homo sapien
gttcacttggatatgctcaatgacc

SEQ ID NO: 79373 - DNA, 25 bp, Homo sapien
ttaaagtgaacacgaagattggaac

SEQ ID NO: 79374 - DNA, 25 bp, Homo sapien
gcctgagcagtttcacgagtgttct

SEQ ID NO: 79375 - DNA, 25 bp, Homo sapien
gcatacccttgatggcctgagcagt

SEQ ID NO: 79376 - DNA, 25 bp, Homo sapien
taacgtcggaatggtacacactgtt

SEQ ID NO: 79377 - DNA, 25 bp, Homo sapien
ctgcgcacacctgccaactccacca

SEQ ID NO: 79378 - DNA, 25 bp, Homo sapien
gccccattgcttggcctgcgcacac

SEQ ID NO: 79379 - DNA, 25 bp, Homo sapien
ttttgggccaccgaccttgtgtcca

SEQ ID NO: 79380 - DNA, 25 bp, Homo sapien
tcagcactctttttgggccaccgac

SEQ ID NO: 79381 - DNA, 25 bp, Homo sapien
taagcatgtgcagcaaaaattcagc

SEQ ID NO: 79382 - DNA, 25 bp, Homo sapien
caatgaccagagaatctacatctaa

SEQ ID NO: 79383 - DNA, 25 bp, Homo sapien
gttcacttggatatgctcaatgacc

SEQ ID NO: 79384 - DNA, 25 bp, Homo sapien
gttcacttggatatgctcaatgacc

SEQ ID NO: 79385 - DNA, 25 bp, Homo sapien
gcatacccttgatggcctgagcagt

SEQ ID NO: 79386 - DNA, 25 bp, Homo sapien
tcagcactctttttgggccaccgac

SEQ ID NO: 79387 - DNA, 25 bp, Homo sapien
taagcatgtgcagcaaaaattcagc

SEQ ID NO: 79388 - DNA, 25 bp, Homo sapien
gcctgagcagtttcacgagtgttct

SEQ ID NO: 79389 - DNA, 25 bp, Homo sapien
ttaaagtgaacacgaagattggaac

SEQ ID NO: 79390 - DNA, 25 bp, Homo sapien
ttttgggccaccgaccttgtgtcca

SEQ ID NO: 79391 - DNA, 25 bp, Homo sapien
taacgtcggaatggtacacactgtt

SEQ ID NO: 79392 - DNA, 25 bp, Homo sapien
ctgcgcacacctgccaactccacca

SEQ ID NO: 79393 - DNA, 25 bp, Homo sapien
caatgaccagagaatctacatctaa

SEQ ID NO: 79394 - DNA, 25 bp, Homo sapien
gccccattgcttggcctgcgcacac

SEQ ID NO: 79395 - DNA, 25 bp, Homo sapien
gcatacccttgatggcctgagcagt

SEQ ID NO: 79396 - DNA, 25 bp, Homo sapien
tcagcactctttttgggccaccgac

SEQ ID NO: 79397 - DNA, 25 bp, Homo sapien
taagcatgtgcagcaaaaattcagc

SEQ ID NO: 79398 - DNA, 25 bp, Homo sapien
gcctgagcagtttcacgagtgttct

SEQ ID NO: 79399 - DNA, 25 bp, Homo sapien
gttcacttggatatgctcaatgacc

SEQ ID NO: 79400 - DNA, 25 bp, Homo sapien
ttaaagtgaacacgaagattggaac

SEQ ID NO: 79401 - DNA, 25 bp, Homo sapien
taacgtcggaatggtacacactgtt

SEQ ID NO: 79402 - DNA, 25 bp, Homo sapien
ctgcgcacacctgccaactccacca

SEQ ID NO: 79403 - DNA, 25 bp, Homo sapien
ttttgggccaccgaccttgtgtcca

SEQ ID NO: 79404 - DNA, 25 bp, Homo sapien
gccccattgcttggcctgcgcacac

SEQ ID NO: 79405 - DNA, 25 bp, Homo sapien
caatgaccagagaatctacatctaa

SEQ ID NO: 79406 - DNA, 25 bp, Homo sapien
caatgaccagagaatctacatctaa

SEQ ID NO: 79407 - DNA, 25 bp, Homo sapien
gcatacccttgatggcctgagcagt

SEQ ID NO: 79408 - DNA, 25 bp, Homo sapien
gccccattgcttggcctgcgcacac

SEQ ID NO: 79409 - DNA, 25 bp, Homo sapien
tcagcactctttttgggccaccgac

SEQ ID NO: 79410 - DNA, 25 bp, Homo sapien
taagcatgtgcagcaaaaattcagc

SEQ ID NO: 79411 - DNA, 25 bp, Homo sapien
gcctgagcagtttcacgagtgttct

SEQ ID NO: 79412 - DNA, 25 bp, Homo sapien
gttcacttggatatgctcaatgacc

SEQ ID NO: 79413 - DNA, 25 bp, Homo sapien
ttaaagtgaacacgaagattggaac

SEQ ID NO: 79414 - DNA, 25 bp, Homo sapien
taacgtcggaatggtacacactgtt

SEQ ID NO: 79415 - DNA, 25 bp, Homo sapien
ttttgggccaccgaccttgtgtcca

SEQ ID NO: 79416 - DNA, 25 bp, Homo sapien
ctgcgcacacctgccaactccacca

SEQ ID NO: 79417 - DNA, 25 bp, Homo sapien
gcatacccttgatggcctgagcagt

SEQ ID NO: 79418 - DNA, 25 bp, Homo sapien
gccccattgcttggcctgcgcacac

SEQ ID NO: 79419 - DNA, 25 bp, Homo sapien
tcagcactctttttgggccaccgac

SEQ ID NO: 79420 - DNA, 25 bp, Homo sapien
taagcatgtgcagcaaaaattcagc

SEQ ID NO: 79421 - DNA, 25 bp, Homo sapien
gcctgagcagtttcacgagtgttct

SEQ ID NO: 79422 - DNA, 25 bp, Homo sapien
gttcacttggatatgctcaatgacc

SEQ ID NO: 79423 - DNA, 25 bp, Homo sapien
ttaaagtgaacacgaagattggaac

SEQ ID NO: 79424 - DNA, 25 bp, Homo sapien
taacgtcggaatggtacacactgtt

SEQ ID NO: 79425 - DNA, 25 bp, Homo sapien
ctgcgcacacctgccaactccacca

SEQ ID NO: 79426 - DNA, 25 bp, Homo sapien
ttttgggccaccgaccttgtgtcca

SEQ ID NO: 79427 - DNA, 25 bp, Homo sapien
caatgaccagagaatctacatctaa

SEQ ID NO: 79428 - DNA, 25 bp, Homo sapien
gttcacttggatatgctcaatgacc

SEQ ID NO: 79429 - DNA, 25 bp, Homo sapien
gccccattgcttggcctgcgcacac

SEQ ID NO: 79430 - DNA, 25 bp, Homo sapien
gcatacccttgatggcctgagcagt

SEQ ID NO: 79431 - DNA, 25 bp, Homo sapien
tcagcactctttttgggccaccgac

SEQ ID NO: 79432 - DNA, 25 bp, Homo sapien
taagcatgtgcagcaaaaattcagc

SEQ ID NO: 79433 - DNA, 25 bp, Homo sapien
gcctgagcagtttcacgagtgttct

SEQ ID NO: 79434 - DNA, 25 bp, Homo sapien
ttaaagtgaacacgaagattggaac

SEQ ID NO: 79435 - DNA, 25 bp, Homo sapien
caatgaccagagaatctacatctaa

SEQ ID NO: 79436 - DNA, 25 bp, Homo sapien
taacgtcggaatggtacacactgtt

SEQ ID NO: 79437 - DNA, 25 bp, Homo sapien
ctgcgcacacctgccaactccacca

SEQ ID NO: 79438 - DNA, 25 bp, Homo sapien
ttttgggccaccgaccttgtgtcca

SEQ ID NO: 79439 - DNA, 25 bp, Homo sapien
gccccattgcttggcctgcgcacac

SEQ ID NO: 79440 - DNA, 25 bp, Homo sapien
gcatacccttgatggcctgagcagt

SEQ ID NO: 79441 - DNA, 25 bp, Homo sapien
tcagcactctttttgggccaccgac

SEQ ID NO: 79442 - DNA, 25 bp, Homo sapien
taagcatgtgcagcaaaaattcagc

SEQ ID NO: 79443 - DNA, 25 bp, Homo sapien
gcctgagcagtttcacgagtgttct

SEQ ID NO: 79444 - DNA, 25 bp, Homo sapien
gttcacttggatatgctcaatgacc

SEQ ID NO: 79445 - DNA, 25 bp, Homo sapien
ttaaagtgaacacgaagattggaac

SEQ ID NO: 79446 - DNA, 25 bp, Homo sapien
ctgcgcacacctgccaactccacca

SEQ ID NO: 79447 - DNA, 25 bp, Homo sapien
caatgaccagagaatctacatctaa

SEQ ID NO: 79448 - DNA, 25 bp, Homo sapien
taacgtcggaatggtacacactgtt

SEQ ID NO: 79449 - DNA, 25 bp, Homo sapien
ttttgggccaccgaccttgtgtcca

SEQ ID NO: 79450 - DNA, 25 bp, Homo sapien
gcatacccttgatggcctgagcagt

SEQ ID NO: 79451 - DNA, 25 bp, Homo sapien
tcagcactctttttgggccaccgac

SEQ ID NO: 79452 - DNA, 25 bp, Homo sapien
gttcacttggatatgctcaatgacc

SEQ ID NO: 79453 - DNA, 25 bp, Homo sapien
taagcatgtgcagcaaaaattcagc

SEQ ID NO: 79454 - DNA, 25 bp, Homo sapien
gcctgagcagtttcacgagtgttct

SEQ ID NO: 79455 - DNA, 25 bp, Homo sapien
ttaaagtgaacacgaagattggaac

SEQ ID NO: 79456 - DNA, 25 bp, Homo sapien
taacgtcggaatggtacacactgtt

SEQ ID NO: 79457 - DNA, 25 bp, Homo sapien
ctgcgcacacctgccaactccacca

SEQ ID NO: 79458 - DNA, 25 bp, Homo sapien
ttttgggccaccgaccttgtgtcca

SEQ ID NO: 79459 - DNA, 25 bp, Homo sapien
gccccattgcttggcctgcgcacac

SEQ ID NO: 79460 - DNA, 25 bp, Homo sapien
caatgaccagagaatctacatctaa

SEQ ID NO: 79461 - DNA, 25 bp, Homo sapien
gcatacccttgatggcctgagcagt

SEQ ID NO: 79462 - DNA, 25 bp, Homo sapien
tcagcactctttttgggccaccgac

SEQ ID NO: 79463 - DNA, 25 bp, Homo sapien
caatgaccagagaatctacatctaa

SEQ ID NO: 79464 - DNA, 25 bp, Homo sapien
gcctgagcagtttcacgagtgttct

SEQ ID NO: 79465 - DNA, 25 bp, Homo sapien
taagcatgtgcagcaaaaattcagc

SEQ ID NO: 79466 - DNA, 25 bp, Homo sapien
ttaaagtgaacacgaagattggaac

SEQ ID NO: 79467 - DNA, 25 bp, Homo sapien
gttcacttggatatgctcaatgacc

SEQ ID NO: 79468 - DNA, 25 bp, Homo sapien
taacgtcggaatggtacacactgtt

SEQ ID NO: 79469 - DNA, 25 bp, Homo sapien
ctgcgcacacctgccaactccacca

SEQ ID NO: 79470 - DNA, 25 bp, Homo sapien
ttttgggccaccgaccttgtgtcca

SEQ ID NO: 79471 - DNA, 25 bp, Homo sapien
gccccattgcttggcctgcgcacac

SEQ ID NO: 79472 - DNA, 25 bp, Homo sapien
gccccattgcttggcctgcgcacac

SEQ ID NO: 79473 - DNA, 25 bp, Homo sapien
gcatacccttgatggcctgagcagt

SEQ ID NO: 79474 - DNA, 25 bp, Homo sapien
tcagcactctttttgggccaccgac

SEQ ID NO: 79475 - DNA, 25 bp, Homo sapien
taagcatgtgcagcaaaaattcagc

SEQ ID NO: 79476 - DNA, 25 bp, Homo sapien
gcctgagcagtttcacgagtgttct

SEQ ID NO: 79477 - DNA, 25 bp, Homo sapien
gttcacttggatatgctcaatgacc

SEQ ID NO: 79478 - DNA, 25 bp, Homo sapien
ttaaagtgaacacgaagattggaac

SEQ ID NO: 79479 - DNA, 25 bp, Homo sapien
caatgaccagagaatctacatctaa

SEQ ID NO: 79480 - DNA, 25 bp, Homo sapien
ctgcgcacacctgccaactccacca

SEQ ID NO: 79481 - DNA, 25 bp, Homo sapien
taacgtcggaatggtacacactgtt

SEQ ID NO: 79482 - DNA, 25 bp, Homo sapien
ttttgggccaccgaccttgtgtcca

SEQ ID NO: 79483 - DNA, 25 bp, Homo sapien
caatgaccagagaatctacatctaa

SEQ ID NO: 79484 - DNA, 25 bp, Homo sapien
taacgtcggaatggtacacactgtt

SEQ ID NO: 79485 - DNA, 25 bp, Homo sapien
taagcatgtgcagcaaaaattcagc

SEQ ID NO: 79486 - DNA, 25 bp, Homo sapien
tcagcactctttttgggccaccgac

SEQ ID NO: 79487 - DNA, 25 bp, Homo sapien
gttcacttggatatgctcaatgacc

SEQ ID NO: 79488 - DNA, 25 bp, Homo sapien
gccccattgcttggcctgcgcacac

SEQ ID NO: 79489 - DNA, 25 bp, Homo sapien
ctgcgcacacctgccaactccacca

SEQ ID NO: 79490 - DNA, 25 bp, Homo sapien
gcatacccttgatggcctgagcagt

SEQ ID NO: 79491 - DNA, 25 bp, Homo sapien
gcctgagcagtttcacgagtgttct

SEQ ID NO: 79492 - DNA, 25 bp, Homo sapien
ttaaagtgaacacgaagattggaac

SEQ ID NO: 79493 - DNA, 25 bp, Homo sapien
ttttgggccaccgaccttgtgtcca

SEQ ID NO: 79494 - DNA, 25 bp, Homo sapien
caatgaccagagaatctacatctaa

SEQ ID NO: 79495 - DNA, 25 bp, Homo sapien
gcatacccttgatggcctgagcagt

SEQ ID NO: 79496 - DNA, 25 bp, Homo sapien
gccccattgcttggcctgcgcacac

SEQ ID NO: 79497 - DNA, 25 bp, Homo sapien
tcagcactctttttgggccaccgac

SEQ ID NO: 79498 - DNA, 25 bp, Homo sapien
taagcatgtgcagcaaaaattcagc

SEQ ID NO: 79499 - DNA, 25 bp, Homo sapien
gcctgagcagtttcacgagtgttct

SEQ ID NO: 79500 - DNA, 25 bp, Homo sapien
gttcacttggatatgctcaatgacc

SEQ ID NO: 79501 - DNA, 25 bp, Homo sapien
ttaaagtgaacacgaagattggaac

SEQ ID NO: 79502 - DNA, 25 bp, Homo sapien
taacgtcggaatggtacacactgtt

SEQ ID NO: 79503 - DNA, 25 bp, Homo sapien
ctgcgcacacctgccaactccacca

SEQ ID NO: 79504 - DNA, 25 bp, Homo sapien
ttttgggccaccgaccttgtgtcca

SEQ ID NO: 79505 - DNA, 25 bp, Homo sapien
ttaaagtgaacacgaagattggaac

SEQ ID NO: 79506 - DNA, 25 bp, Homo sapien
gcctgagcagtttcacgagtgttct

SEQ ID NO: 79507 - DNA, 25 bp, Homo sapien
gcatacccttgatggcctgagcagt

SEQ ID NO: 79508 - DNA, 25 bp, Homo sapien
taacgtcggaatggtacacactgtt

SEQ ID NO: 79509 - DNA, 25 bp, Homo sapien
ctgcgcacacctgccaactccacca

SEQ ID NO: 79510 - DNA, 25 bp, Homo sapien
gccccattgcttggcctgcgcacac

SEQ ID NO: 79511 - DNA, 25 bp, Homo sapien
ttttgggccaccgaccttgtgtcca

SEQ ID NO: 79512 - DNA, 25 bp, Homo sapien
tcagcactctttttgggccaccgac

SEQ ID NO: 79513 - DNA, 25 bp, Homo sapien
taagcatgtgcagcaaaaattcagc

SEQ ID NO: 79514 - DNA, 25 bp, Homo sapien
caatgaccagagaatctacatctaa

SEQ ID NO: 79515 - DNA, 25 bp, Homo sapien
gttcacttggatatgctcaatgacc

SEQ ID NO: 79516 - DNA, 25 bp, Homo sapien
aacagtgtgtaccattccgacgtta

SEQ ID NO: 79517 - DNA, 25 bp, Homo sapien
gtcggtggcccaaaaagagtgctga

SEQ ID NO: 79518 - DNA, 25 bp, Homo sapien
actgctcaggccatcaagggtatgc

SEQ ID NO: 79519 - DNA, 25 bp, Homo sapien
tggacacaaggtcggtggcccaaaa

SEQ ID NO: 79520 - DNA, 25 bp, Homo sapien
ttagatgtagattctctggtcattg

SEQ ID NO: 79521 - DNA, 25 bp, Homo sapien
gctgaatttttgctgcacatgctta

SEQ ID NO: 79522 - DNA, 25 bp, Homo sapien
ggtcattgagcatatccaagtgaac

SEQ ID NO: 79523 - DNA, 25 bp, Homo sapien
agaacactcgtgaaactgctcaggc

SEQ ID NO: 79524 - DNA, 25 bp, Homo sapien
gtgtgcgcaggccaagcaatggggc

SEQ ID NO: 79525 - DNA, 25 bp, Homo sapien
gttccaatcttcgtgttcactttaa

SEQ ID NO: 79526 - DNA, 25 bp, Homo sapien
tggtggagttggcaggtgtgcgcag

SEQ ID NO: 79527 - DNA, 25 bp, Homo sapien
gccccattgcttggcctgcgcacac

SEQ ID NO: 79528 - DNA, 25 bp, Homo sapien
caatgaccagagaatctacatctaa

SEQ ID NO: 79529 - DNA, 25 bp, Homo sapien
gcatacccttgatggcctgagcagt

SEQ ID NO: 79530 - DNA, 25 bp, Homo sapien
tcagcactctttttgggccaccgac

SEQ ID NO: 79531 - DNA, 25 bp, Homo sapien
taagcatgtgcagcaaaaattcagc

SEQ ID NO: 79532 - DNA, 25 bp, Homo sapien
gcctgagcagtttcacgagtgttct

SEQ ID NO: 79533 - DNA, 25 bp, Homo sapien
gttcacttggatatgctcaatgacc

SEQ ID NO: 79534 - DNA, 25 bp, Homo sapien
ttaaagtgaacacgaagattggaac

SEQ ID NO: 79535 - DNA, 25 bp, Homo sapien
ttttgggccaccgaccttgtgtcca

SEQ ID NO: 79536 - DNA, 25 bp, Homo sapien
ctgcgcacacctgccaactccacca

SEQ ID NO: 79537 - DNA, 25 bp, Homo sapien
taacgtcggaatggtacacactgtt

SEQ ID NO: 79538 - DNA, 25 bp, Homo sapien
taacgtcggaatggtacacactgtt

SEQ ID NO: 79539 - DNA, 25 bp, Homo sapien
taagcatgtgcagcaaaaattcagc

SEQ ID NO: 79540 - DNA, 25 bp, Homo sapien
ttaaagtgaacacgaagattggaac

SEQ ID NO: 79541 - DNA, 25 bp, Homo sapien
gttcacttggatatgctcaatgacc

SEQ ID NO: 79542 - DNA, 25 bp, Homo sapien
tcagcactctttttgggccaccgac

SEQ ID NO: 79543 - DNA, 25 bp, Homo sapien
gcatacccttgatggcctgagcagt

SEQ ID NO: 79544 - DNA, 25 bp, Homo sapien
ctgcgcacacctgccaactccacca

SEQ ID NO: 79545 - DNA, 25 bp, Homo sapien
gcctgagcagtttcacgagtgttct

SEQ ID NO: 79546 - DNA, 25 bp, Homo sapien
ttttgggccaccgaccttgtgtcca

SEQ ID NO: 79547 - DNA, 25 bp, Homo sapien
gccccattgcttggcctgcgcacac

SEQ ID NO: 79548 - DNA, 25 bp, Homo sapien
caatgaccagagaatctacatctaa

SEQ ID NO: 79549 - DNA, 25 bp, Homo sapien
ttaaagtgaacacgaagattggaac

SEQ ID NO: 79550 - DNA, 25 bp, Homo sapien
gcctgagcagtttcacgagtgttct

SEQ ID NO: 79551 - DNA, 25 bp, Homo sapien
gcatacccttgatggcctgagcagt

SEQ ID NO: 79552 - DNA, 25 bp, Homo sapien
taacgtcggaatggtacacactgtt

SEQ ID NO: 79553 - DNA, 25 bp, Homo sapien
ctgcgcacacctgccaactccacca

SEQ ID NO: 79554 - DNA, 25 bp, Homo sapien
gccccattgcttggcctgcgcacac

SEQ ID NO: 79555 - DNA, 25 bp, Homo sapien
ttttgggccaccgaccttgtgtcca

SEQ ID NO: 79556 - DNA, 25 bp, Homo sapien
tcagcactctttttgggccaccgac

SEQ ID NO: 79557 - DNA, 25 bp, Homo sapien
taagcatgtgcagcaaaaattcagc

SEQ ID NO: 79558 - DNA, 25 bp, Homo sapien
caatgaccagagaatctacatctaa

SEQ ID NO: 79559 - DNA, 25 bp, Homo sapien
gttcacttggatatgctcaatgacc

SEQ ID NO: 79560 - DNA, 25 bp, Homo sapien
gccccattgcttggcctgcgcacac

SEQ ID NO: 79561 - DNA, 25 bp, Homo sapien
caatgaccagagaatctacatctaa

SEQ ID NO: 79562 - DNA, 25 bp, Homo sapien
tcagcactctttttgggccaccgac

SEQ ID NO: 79563 - DNA, 25 bp, Homo sapien
gcatacccttgatggcctgagcagt

SEQ ID NO: 79564 - DNA, 25 bp, Homo sapien
gcctgagcagtttcacgagtgttct

SEQ ID NO: 79565 - DNA, 25 bp, Homo sapien
gttcacttggatatgctcaatgacc

SEQ ID NO: 79566 - DNA, 25 bp, Homo sapien
ctgcgcacacctgccaactccacca

SEQ ID NO: 79567 - DNA, 25 bp, Homo sapien
taagcatgtgcagcaaaaattcagc

SEQ ID NO: 79568 - DNA, 25 bp, Homo sapien
ttttgggccaccgaccttgtgtcca

SEQ ID NO: 79569 - DNA, 25 bp, Homo sapien
ttaaagtgaacacgaagattggaac

SEQ ID NO: 79570 - DNA, 25 bp, Homo sapien
taacgtcggaatggtacacactgtt

SEQ ID NO: 79571 - DNA, 25 bp, Homo sapien
ttaaagtgaacacgaagattggaac

SEQ ID NO: 79572 - DNA, 25 bp, Homo sapien
gcctgagcagtttcacgagtgttct

SEQ ID NO: 79573 - DNA, 25 bp, Homo sapien
gcatacccttgatggcctgagcagt

SEQ ID NO: 79574 - DNA, 25 bp, Homo sapien
taacgtcggaatggtacacactgtt

SEQ ID NO: 79575 - DNA, 25 bp, Homo sapien
ctgcgcacacctgccaactccacca

SEQ ID NO: 79576 - DNA, 25 bp, Homo sapien
gccccattgcttggcctgcgcacac

SEQ ID NO: 79577 - DNA, 25 bp, Homo sapien
ttttgggccaccgaccttgtgtcca

SEQ ID NO: 79578 - DNA, 25 bp, Homo sapien
tcagcactctttttgggccaccgac

SEQ ID NO: 79579 - DNA, 25 bp, Homo sapien
taagcatgtgcagcaaaaattcagc

SEQ ID NO: 79580 - DNA, 25 bp, Homo sapien
caatgaccagagaatctacatctaa

SEQ ID NO: 79581 - DNA, 25 bp, Homo sapien
gttcacttggatatgctcaatgacc

SEQ ID NO: 79582 - DNA, 25 bp, Homo sapien
taacgtcggaatggtacacactgtt

SEQ ID NO: 79583 - DNA, 25 bp, Homo sapien
ttttgggccaccgaccttgtgtcca

SEQ ID NO: 79584 - DNA, 25 bp, Homo sapien
ttaaagtgaacacgaagattggaac

SEQ ID NO: 79585 - DNA, 25 bp, Homo sapien
tcagcactctttttgggccaccgac

SEQ ID NO: 79586 - DNA, 25 bp, Homo sapien
gccccattgcttggcctgcgcacac

SEQ ID NO: 79587 - DNA, 25 bp, Homo sapien
ctgcgcacacctgccaactccacca

SEQ ID NO: 79588 - DNA, 25 bp, Homo sapien
gcctgagcagtttcacgagtgttct

SEQ ID NO: 79589 - DNA, 25 bp, Homo sapien
gttcacttggatatgctcaatgacc

SEQ ID NO: 79590 - DNA, 25 bp, Homo sapien
taagcatgtgcagcaaaaattcagc

SEQ ID NO: 79591 - DNA, 25 bp, Homo sapien
gcatacccttgatggcctgagcagt

SEQ ID NO: 79592 - DNA, 25 bp, Homo sapien
caatgaccagagaatctacatctaa

SEQ ID NO: 79593 - DNA, 25 bp, Homo sapien
ttaaagtgaacacgaagattggaac

SEQ ID NO: 79594 - DNA, 25 bp, Homo sapien
gcctgagcagtttcacgagtgttct

SEQ ID NO: 79595 - DNA, 25 bp, Homo sapien
gcatacccttgatggcctgagcagt

SEQ ID NO: 79596 - DNA, 25 bp, Homo sapien
taacgtcggaatggtacacactgtt

SEQ ID NO: 79597 - DNA, 25 bp, Homo sapien
ctgcgcacacctgccaactccacca

SEQ ID NO: 79598 - DNA, 25 bp, Homo sapien
gccccattgcttggcctgcgcacac

SEQ ID NO: 79599 - DNA, 25 bp, Homo sapien
ttttgggccaccgaccttgtgtcca

SEQ ID NO: 79600 - DNA, 25 bp, Homo sapien
tcagcactctttttgggccaccgac

SEQ ID NO: 79601 - DNA, 25 bp, Homo sapien
taagcatgtgcagcaaaaattcagc

SEQ ID NO: 79602 - DNA, 25 bp, Homo sapien
caatgaccagagaatctacatctaa

SEQ ID NO: 79603 - DNA, 25 bp, Homo sapien
gttcacttggatatgctcaatgacc

SEQ ID NO: 79604 - DNA, 25 bp, Homo sapien
ttaaagtgaacacgaagattggaac

SEQ ID NO: 79605 - DNA, 25 bp, Homo sapien
gcctgagcagtttcacgagtgttct

SEQ ID NO: 79606 - DNA, 25 bp, Homo sapien
gcatacccttgatggcctgagcagt

SEQ ID NO: 79607 - DNA, 25 bp, Homo sapien
taacgtcggaatggtacacactgtt

SEQ ID NO: 79608 - DNA, 25 bp, Homo sapien
ctgcgcacacctgccaactccacca

SEQ ID NO: 79609 - DNA, 25 bp, Homo sapien
gccccattgcttggcctgcgcacac

SEQ ID NO: 79610 - DNA, 25 bp, Homo sapien
ttttgggccaccgaccttgtgtcca

SEQ ID NO: 79611 - DNA, 25 bp, Homo sapien
tcagcactctttttgggccaccgac

SEQ ID NO: 79612 - DNA, 25 bp, Homo sapien
taagcatgtgcagcaaaaattcagc

SEQ ID NO: 79613 - DNA, 25 bp, Homo sapien
caatgaccagagaatctacatctaa

SEQ ID NO: 79614 - DNA, 25 bp, Homo sapien
gttcacttggatatgctcaatgacc

SEQ ID NO: 79615 - DNA, 25 bp, Homo sapien
taacgtcggaatggtacacactgtt

SEQ ID NO: 79616 - DNA, 25 bp, Homo sapien
ctgcgcacacctgccaactccacca

SEQ ID NO: 79617 - DNA, 25 bp, Homo sapien
gcatacccttgatggcctgagcagt

SEQ ID NO: 79618 - DNA, 25 bp, Homo sapien
ttttgggccaccgaccttgtgtcca

SEQ ID NO: 79619 - DNA, 25 bp, Homo sapien
gttcacttggatatgctcaatgacc

SEQ ID NO: 79620 - DNA, 25 bp, Homo sapien
gcctgagcagtttcacgagtgttct

SEQ ID NO: 79621 - DNA, 25 bp, Homo sapien
caatgaccagagaatctacatctaa

SEQ ID NO: 79622 - DNA, 25 bp, Homo sapien
ttaaagtgaacacgaagattggaac

SEQ ID NO: 79623 - DNA, 25 bp, Homo sapien
gccccattgcttggcctgcgcacac

SEQ ID NO: 79624 - DNA, 25 bp, Homo sapien
tcagcactctttttgggccaccgac

SEQ ID NO: 79625 - DNA, 25 bp, Homo sapien
taagcatgtgcagcaaaaattcagc

SEQ ID NO: 79626 - DNA, 25 bp, Homo sapien
ttaaagtgaacacgaagattggaac

SEQ ID NO: 79627 - DNA, 25 bp, Homo sapien
gcctgagcagtttcacgagtgttct

SEQ ID NO: 79628 - DNA, 25 bp, Homo sapien
gcatacccttgatggcctgagcagt

SEQ ID NO: 79629 - DNA, 25 bp, Homo sapien
taacgtcggaatggtacacactgtt

SEQ ID NO: 79630 - DNA, 25 bp, Homo sapien
ctgcgcacacctgccaactccacca

SEQ ID NO: 79631 - DNA, 25 bp, Homo sapien
gccccattgcttggcctgcgcacac

SEQ ID NO: 79632 - DNA, 25 bp, Homo sapien
ttttgggccaccgaccttgtgtcca

SEQ ID NO: 79633 - DNA, 25 bp, Homo sapien
tcagcactctttttgggccaccgac

SEQ ID NO: 79634 - DNA, 25 bp, Homo sapien
taagcatgtgcagcaaaaattcagc

SEQ ID NO: 79635 - DNA, 25 bp, Homo sapien
caatgaccagagaatctacatctaa

SEQ ID NO: 79636 - DNA, 25 bp, Homo sapien
gttcacttggatatgctcaatgacc

SEQ ID NO: 79637 - DNA, 25 bp, Homo sapien
tcagcactctttttgggccaccgac

SEQ ID NO: 79638 - DNA, 25 bp, Homo sapien
gcatacccttgatggcctgagcagt

SEQ ID NO: 79639 - DNA, 25 bp, Homo sapien
ttaaagtgaacacgaagattggaac

SEQ ID NO: 79640 - DNA, 25 bp, Homo sapien
ttttgggccaccgaccttgtgtcca

SEQ ID NO: 79641 - DNA, 25 bp, Homo sapien
gccccattgcttggcctgcgcacac

SEQ ID NO: 79642 - DNA, 25 bp, Homo sapien
taacgtcggaatggtacacactgtt

SEQ ID NO: 79643 - DNA, 25 bp, Homo sapien
caatgaccagagaatctacatctaa

SEQ ID NO: 79644 - DNA, 25 bp, Homo sapien
gcctgagcagtttcacgagtgttct

SEQ ID NO: 79645 - DNA, 25 bp, Homo sapien
ctgcgcacacctgccaactccacca

SEQ ID NO: 79646 - DNA, 25 bp, Homo sapien
taagcatgtgcagcaaaaattcagc

SEQ ID NO: 79647 - DNA, 25 bp, Homo sapien
gttcacttggatatgctcaatgacc

SEQ ID NO: 79648 - DNA, 25 bp, Homo sapien
ttaaagtgaacacgaagattggaac

SEQ ID NO: 79649 - DNA, 25 bp, Homo sapien
gcctgagcagtttcacgagtgttct

SEQ ID NO: 79650 - DNA, 25 bp, Homo sapien
gcatacccttgatggcctgagcagt

SEQ ID NO: 79651 - DNA, 25 bp, Homo sapien
taacgtcggaatggtacacactgtt

SEQ ID NO: 79652 - DNA, 25 bp, Homo sapien
ctgcgcacacctgccaactccacca

SEQ ID NO: 79653 - DNA, 25 bp, Homo sapien
gccccattgcttggcctgcgcacac

SEQ ID NO: 79654 - DNA, 25 bp, Homo sapien
ttttgggccaccgaccttgtgtcca

SEQ ID NO: 79655 - DNA, 25 bp, Homo sapien
tcagcactctttttgggccaccgac

SEQ ID NO: 79656 - DNA, 25 bp, Homo sapien
taagcatgtgcagcaaaaattcagc

SEQ ID NO: 79657 - DNA, 25 bp, Homo sapien
caatgaccagagaatctacatctaa

SEQ ID NO: 79658 - DNA, 25 bp, Homo sapien
gttcacttggatatgctcaatgacc

SEQ ID NO: 79659 - DNA, 25 bp, Homo sapien
ttaaagtgaacacgaagattggaac

SEQ ID NO: 79660 - DNA, 25 bp, Homo sapien
ttttgggccaccgaccttgtgtcca

SEQ ID NO: 79661 - DNA, 25 bp, Homo sapien
gcatacccttgatggcctgagcagt

SEQ ID NO: 79662 - DNA, 25 bp, Homo sapien
caatgaccagagaatctacatctaa

SEQ ID NO: 79663 - DNA, 25 bp, Homo sapien
taacgtcggaatggtacacactgtt

SEQ ID NO: 79664 - DNA, 25 bp, Homo sapien
gttcacttggatatgctcaatgacc

SEQ ID NO: 79665 - DNA, 25 bp, Homo sapien
ctgcgcacacctgccaactccacca

SEQ ID NO: 79666 - DNA, 25 bp, Homo sapien
tcagcactctttttgggccaccgac

SEQ ID NO: 79667 - DNA, 25 bp, Homo sapien
taagcatgtgcagcaaaaattcagc

SEQ ID NO: 79668 - DNA, 25 bp, Homo sapien
gcctgagcagtttcacgagtgttct

SEQ ID NO: 79669 - DNA, 25 bp, Homo sapien
gccccattgcttggcctgcgcacac

SEQ ID NO: 79670 - DNA, 25 bp, Homo sapien
ttaaagtgaacacgaagattggaac

SEQ ID NO: 79671 - DNA, 25 bp, Homo sapien
gcctgagcagtttcacgagtgttct

SEQ ID NO: 79672 - DNA, 25 bp, Homo sapien
gcatacccttgatggcctgagcagt

SEQ ID NO: 79673 - DNA, 25 bp, Homo sapien
taacgtcggaatggtacacactgtt

SEQ ID NO: 79674 - DNA, 25 bp, Homo sapien
ctgcgcacacctgccaactccacca

SEQ ID NO: 79675 - DNA, 25 bp, Homo sapien
gccccattgcttggcctgcgcacac

SEQ ID NO: 79676 - DNA, 25 bp, Homo sapien
ttttgggccaccgaccttgtgtcca

SEQ ID NO: 79677 - DNA, 25 bp, Homo sapien
tcagcactctttttgggccaccgac

SEQ ID NO: 79678 - DNA, 25 bp, Homo sapien
taagcatgtgcagcaaaaattcagc

SEQ ID NO: 79679 - DNA, 25 bp, Homo sapien
caatgaccagagaatctacatctaa

SEQ ID NO: 79680 - DNA, 25 bp, Homo sapien
gttcacttggatatgctcaatgacc

SEQ ID NO: 79681 - DNA, 25 bp, Homo sapien
taagcatgtgcagcaaaaattcagc

SEQ ID NO: 79682 - DNA, 25 bp, Homo sapien
caatgaccagagaatctacatctaa

SEQ ID NO: 79683 - DNA, 25 bp, Homo sapien
gccccattgcttggcctgcgcacac

SEQ ID NO: 79684 - DNA, 25 bp, Homo sapien
taacgtcggaatggtacacactgtt

SEQ ID NO: 79685 - DNA, 25 bp, Homo sapien
gttcacttggatatgctcaatgacc

SEQ ID NO: 79686 - DNA, 25 bp, Homo sapien
ctgcgcacacctgccaactccacca

SEQ ID NO: 79687 - DNA, 25 bp, Homo sapien
gcctgagcagtttcacgagtgttct

SEQ ID NO: 79688 - DNA, 25 bp, Homo sapien
gcatacccttgatggcctgagcagt

SEQ ID NO: 79689 - DNA, 25 bp, Homo sapien
ttaaagtgaacacgaagattggaac

SEQ ID NO: 79690 - DNA, 25 bp, Homo sapien
tcagcactctttttgggccaccgac

SEQ ID NO: 79691 - DNA, 25 bp, Homo sapien
ttttgggccaccgaccttgtgtcca

SEQ ID NO: 79692 - DNA, 25 bp, Homo sapien
ttaaagtgaacacgaagattggaac

SEQ ID NO: 79693 - DNA, 25 bp, Homo sapien
gcctgagcagtttcacgagtgttct

SEQ ID NO: 79694 - DNA, 25 bp, Homo sapien
gcatacccttgatggcctgagcagt

SEQ ID NO: 79695 - DNA, 25 bp, Homo sapien
taacgtcggaatggtacacactgtt

SEQ ID NO: 79696 - DNA, 25 bp, Homo sapien
ctgcgcacacctgccaactccacca

SEQ ID NO: 79697 - DNA, 25 bp, Homo sapien
gccccattgcttggcctgcgcacac

SEQ ID NO: 79698 - DNA, 25 bp, Homo sapien
ttttgggccaccgaccttgtgtcca

SEQ ID NO: 79699 - DNA, 25 bp, Homo sapien
tcagcactctttttgggccaccgac

SEQ ID NO: 79700 - DNA, 25 bp, Homo sapien
taagcatgtgcagcaaaaattcagc

SEQ ID NO: 79701 - DNA, 25 bp, Homo sapien
caatgaccagagaatctacatctaa

SEQ ID NO: 79702 - DNA, 25 bp, Homo sapien
gttcacttggatatgctcaatgacc

SEQ ID NO: 79703 - DNA, 25 bp, Homo sapien
gttcacttggatatgctcaatgacc

SEQ ID NO: 79704 - DNA, 25 bp, Homo sapien
gcctgagcagtttcacgagtgttct

SEQ ID NO: 79705 - DNA, 25 bp, Homo sapien
taagcatgtgcagcaaaaattcagc

SEQ ID NO: 79706 - DNA, 25 bp, Homo sapien
gccccattgcttggcctgcgcacac

SEQ ID NO: 79707 - DNA, 25 bp, Homo sapien
ttttgggccaccgaccttgtgtcca

SEQ ID NO: 79708 - DNA, 25 bp, Homo sapien
caatgaccagagaatctacatctaa

SEQ ID NO: 79709 - DNA, 25 bp, Homo sapien
taacgtcggaatggtacacactgtt

SEQ ID NO: 79710 - DNA, 25 bp, Homo sapien
ttaaagtgaacacgaagattggaac

SEQ ID NO: 79711 - DNA, 25 bp, Homo sapien
ctgcgcacacctgccaactccacca

SEQ ID NO: 79712 - DNA, 25 bp, Homo sapien
gcatacccttgatggcctgagcagt

SEQ ID NO: 79713 - DNA, 25 bp, Homo sapien
tcagcactctttttgggccaccgac

SEQ ID NO: 79714 - DNA, 25 bp, Homo sapien
gcatacccttgatggcctgagcagt

SEQ ID NO: 79715 - DNA, 25 bp, Homo sapien
tcagcactctttttgggccaccgac

SEQ ID NO: 79716 - DNA, 25 bp, Homo sapien
taagcatgtgcagcaaaaattcagc

SEQ ID NO: 79717 - DNA, 25 bp, Homo sapien
gttcacttggatatgctcaatgacc

SEQ ID NO: 79718 - DNA, 25 bp, Homo sapien
caatgaccagagaatctacatctaa

SEQ ID NO: 79719 - DNA, 25 bp, Homo sapien
gcctgagcagtttcacgagtgttct

SEQ ID NO: 79720 - DNA, 25 bp, Homo sapien
ttttgggccaccgaccttgtgtcca

SEQ ID NO: 79721 - DNA, 25 bp, Homo sapien
gccccattgcttggcctgcgcacac

SEQ ID NO: 79722 - DNA, 25 bp, Homo sapien
ctgcgcacacctgccaactccacca

SEQ ID NO: 79723 - DNA, 25 bp, Homo sapien
taacgtcggaatggtacacactgtt

SEQ ID NO: 79724 - DNA, 25 bp, Homo sapien
ttaaagtgaacacgaagattggaac

SEQ ID NO: 79725 - DNA, 25 bp, Homo sapien
ttaaagtgaacacgaagattggaac

SEQ ID NO: 79726 - DNA, 25 bp, Homo sapien
gcctgagcagtttcacgagtgttct

SEQ ID NO: 79727 - DNA, 25 bp, Homo sapien
gcatacccttgatggcctgagcagt

SEQ ID NO: 79728 - DNA, 25 bp, Homo sapien
taacgtcggaatggtacacactgtt

SEQ ID NO: 79729 - DNA, 25 bp, Homo sapien
ctgcgcacacctgccaactccacca

SEQ ID NO: 79730 - DNA, 25 bp, Homo sapien
gccccattgcttggcctgcgcacac

SEQ ID NO: 79731 - DNA, 25 bp, Homo sapien
ttttgggccaccgaccttgtgtcca

SEQ ID NO: 79732 - DNA, 25 bp, Homo sapien
tcagcactctttttgggccaccgac

SEQ ID NO: 79733 - DNA, 25 bp, Homo sapien
taagcatgtgcagcaaaaattcagc

SEQ ID NO: 79734 - DNA, 25 bp, Homo sapien
caatgaccagagaatctacatctaa

SEQ ID NO: 79735 - DNA, 25 bp, Homo sapien
gttcacttggatatgctcaatgacc

SEQ ID NO: 79736 - DNA, 25 bp, Homo sapien
gttcacttggatatgctcaatgacc

SEQ ID NO: 79737 - DNA, 25 bp, Homo sapien
caatgaccagagaatctacatctaa

SEQ ID NO: 79738 - DNA, 25 bp, Homo sapien
tcagcactctttttgggccaccgac

SEQ ID NO: 79739 - DNA, 25 bp, Homo sapien
taagcatgtgcagcaaaaattcagc

SEQ ID NO: 79740 - DNA, 25 bp, Homo sapien
gcatacccttgatggcctgagcagt

SEQ ID NO: 79741 - DNA, 25 bp, Homo sapien
ttttgggccaccgaccttgtgtcca

SEQ ID NO: 79742 - DNA, 25 bp, Homo sapien
ctgcgcacacctgccaactccacca

SEQ ID NO: 79743 - DNA, 25 bp, Homo sapien
taacgtcggaatggtacacactgtt

SEQ ID NO: 79744 - DNA, 25 bp, Homo sapien
gccccattgcttggcctgcgcacac

SEQ ID NO: 79745 - DNA, 25 bp, Homo sapien
gcctgagcagtttcacgagtgttct

SEQ ID NO: 79746 - DNA, 25 bp, Homo sapien
ttaaagtgaacacgaagattggaac

SEQ ID NO: 79747 - DNA, 25 bp, Homo sapien
ttaaagtgaacacgaagattggaac

SEQ ID NO: 79748 - DNA, 25 bp, Homo sapien
gcctgagcagtttcacgagtgttct

SEQ ID NO: 79749 - DNA, 25 bp, Homo sapien
gcatacccttgatggcctgagcagt

SEQ ID NO: 79750 - DNA, 25 bp, Homo sapien
taacgtcggaatggtacacactgtt

SEQ ID NO: 79751 - DNA, 25 bp, Homo sapien
ctgcgcacacctgccaactccacca

SEQ ID NO: 79752 - DNA, 25 bp, Homo sapien
gccccattgcttggcctgcgcacac

SEQ ID NO: 79753 - DNA, 25 bp, Homo sapien
ttttgggccaccgaccttgtgtcca

SEQ ID NO: 79754 - DNA, 25 bp, Homo sapien
tcagcactctttttgggccaccgac

SEQ ID NO: 79755 - DNA, 25 bp, Homo sapien
taagcatgtgcagcaaaaattcagc

SEQ ID NO: 79756 - DNA, 25 bp, Homo sapien
caatgaccagagaatctacatctaa

SEQ ID NO: 79757 - DNA, 25 bp, Homo sapien
gttcacttggatatgctcaatgacc

SEQ ID NO: 79758 - DNA, 25 bp, Homo sapien
tcagcactctttttgggccaccgac

SEQ ID NO: 79759 - DNA, 25 bp, Homo sapien
ctgcgcacacctgccaactccacca

SEQ ID NO: 79760 - DNA, 25 bp, Homo sapien
gcatacccttgatggcctgagcagt

SEQ ID NO: 79761 - DNA, 25 bp, Homo sapien
taacgtcggaatggtacacactgtt

SEQ ID NO: 79762 - DNA, 25 bp, Homo sapien
gcctgagcagtttcacgagtgttct

SEQ ID NO: 79763 - DNA, 25 bp, Homo sapien
caatgaccagagaatctacatctaa

SEQ ID NO: 79764 - DNA, 25 bp, Homo sapien
taagcatgtgcagcaaaaattcagc

SEQ ID NO: 79765 - DNA, 25 bp, Homo sapien
gttcacttggatatgctcaatgacc

SEQ ID NO: 79766 - DNA, 25 bp, Homo sapien
ttttgggccaccgaccttgtgtcca

SEQ ID NO: 79767 - DNA, 25 bp, Homo sapien
gccccattgcttggcctgcgcacac

SEQ ID NO: 79768 - DNA, 25 bp, Homo sapien
ttaaagtgaacacgaagattggaac

SEQ ID NO: 79769 - DNA, 25 bp, Homo sapien
ttaaagtgaacacgaagattggaac

SEQ ID NO: 79770 - DNA, 25 bp, Homo sapien
gcctgagcagtttcacgagtgttct

SEQ ID NO: 79771 - DNA, 25 bp, Homo sapien
gcatacccttgatggcctgagcagt

SEQ ID NO: 79772 - DNA, 25 bp, Homo sapien
taacgtcggaatggtacacactgtt

SEQ ID NO: 79773 - DNA, 25 bp, Homo sapien
ctgcgcacacctgccaactccacca

SEQ ID NO: 79774 - DNA, 25 bp, Homo sapien
gccccattgcttggcctgcgcacac

SEQ ID NO: 79775 - DNA, 25 bp, Homo sapien
ttttgggccaccgaccttgtgtcca

SEQ ID NO: 79776 - DNA, 25 bp, Homo sapien
tcagcactctttttgggccaccgac

SEQ ID NO: 79777 - DNA, 25 bp, Homo sapien
taagcatgtgcagcaaaaattcagc

SEQ ID NO: 79778 - DNA, 25 bp, Homo sapien
caatgaccagagaatctacatctaa

SEQ ID NO: 79779 - DNA, 25 bp, Homo sapien
gttcacttggatatgctcaatgacc

SEQ ID NO: 79780 - DNA, 25 bp, Homo sapien
gttcacttggatatgctcaatgacc

SEQ ID NO: 79781 - DNA, 25 bp, Homo sapien
gccccattgcttggcctgcgcacac

SEQ ID NO: 79782 - DNA, 25 bp, Homo sapien
ttttgggccaccgaccttgtgtcca

SEQ ID NO: 79783 - DNA, 25 bp, Homo sapien
ttaaagtgaacacgaagattggaac

SEQ ID NO: 79784 - DNA, 25 bp, Homo sapien
gcctgagcagtttcacgagtgttct

SEQ ID NO: 79785 - DNA, 25 bp, Homo sapien
gcatacccttgatggcctgagcagt

SEQ ID NO: 79786 - DNA, 25 bp, Homo sapien
tcagcactctttttgggccaccgac

SEQ ID NO: 79787 - DNA, 25 bp, Homo sapien
taagcatgtgcagcaaaaattcagc

SEQ ID NO: 79788 - DNA, 25 bp, Homo sapien
ctgcgcacacctgccaactccacca

SEQ ID NO: 79789 - DNA, 25 bp, Homo sapien
taacgtcggaatggtacacactgtt

SEQ ID NO: 79790 - DNA, 25 bp, Homo sapien
caatgaccagagaatctacatctaa

SEQ ID NO: 79791 - DNA, 25 bp, Homo sapien
ttaaagtgaacacgaagattggaac

SEQ ID NO: 79792 - DNA, 25 bp, Homo sapien
gcctgagcagtttcacgagtgttct

SEQ ID NO: 79793 - DNA, 25 bp, Homo sapien
gcatacccttgatggcctgagcagt

SEQ ID NO: 79794 - DNA, 25 bp, Homo sapien
taacgtcggaatggtacacactgtt

SEQ ID NO: 79795 - DNA, 25 bp, Homo sapien
ctgcgcacacctgccaactccacca

SEQ ID NO: 79796 - DNA, 25 bp, Homo sapien
gccccattgcttggcctgcgcacac

SEQ ID NO: 79797 - DNA, 25 bp, Homo sapien
ttttgggccaccgaccttgtgtcca

SEQ ID NO: 79798 - DNA, 25 bp, Homo sapien
tcagcactctttttgggccaccgac

SEQ ID NO: 79799 - DNA, 25 bp, Homo sapien
taagcatgtgcagcaaaaattcagc

SEQ ID NO: 79800 - DNA, 25 bp, Homo sapien
caatgaccagagaatctacatctaa

SEQ ID NO: 79801 - DNA, 25 bp, Homo sapien
gttcacttggatatgctcaatgacc

SEQ ID NO: 79802 - DNA, 25 bp, Homo sapien
gcatacccttgatggcctgagcagt

SEQ ID NO: 79803 - DNA, 25 bp, Homo sapien
ttaaagtgaacacgaagattggaac

SEQ ID NO: 79804 - DNA, 25 bp, Homo sapien
ttttgggccaccgaccttgtgtcca

SEQ ID NO: 79805 - DNA, 25 bp, Homo sapien
gttcacttggatatgctcaatgacc

SEQ ID NO: 79806 - DNA, 25 bp, Homo sapien
gccccattgcttggcctgcgcacac

SEQ ID NO: 79807 - DNA, 25 bp, Homo sapien
gcctgagcagtttcacgagtgttct

SEQ ID NO: 79808 - DNA, 25 bp, Homo sapien
tcagcactctttttgggccaccgac

SEQ ID NO: 79809 - DNA, 25 bp, Homo sapien
caatgaccagagaatctacatctaa

SEQ ID NO: 79810 - DNA, 25 bp, Homo sapien
ctgcgcacacctgccaactccacca

SEQ ID NO: 79811 - DNA, 25 bp, Homo sapien
taagcatgtgcagcaaaaattcagc

SEQ ID NO: 79812 - DNA, 25 bp, Homo sapien
taacgtcggaatggtacacactgtt

SEQ ID NO: 79813 - DNA, 25 bp, Homo sapien
ttaaagtgaacacgaagattggaac

SEQ ID NO: 79814 - DNA, 25 bp, Homo sapien
gcctgagcagtttcacgagtgttct

SEQ ID NO: 79815 - DNA, 25 bp, Homo sapien
gcatacccttgatggcctgagcagt

SEQ ID NO: 79816 - DNA, 25 bp, Homo sapien
taacgtcggaatggtacacactgtt

SEQ ID NO: 79817 - DNA, 25 bp, Homo sapien
ctgcgcacacctgccaactccacca

SEQ ID NO: 79818 - DNA, 25 bp, Homo sapien
gccccattgcttggcctgcgcacac

SEQ ID NO: 79819 - DNA, 25 bp, Homo sapien
ttttgggccaccgaccttgtgtcca

SEQ ID NO: 79820 - DNA, 25 bp, Homo sapien
tcagcactctttttgggccaccgac

SEQ ID NO: 79821 - DNA, 25 bp, Homo sapien
taagcatgtgcagcaaaaattcagc

SEQ ID NO: 79822 - DNA, 25 bp, Homo sapien
caatgaccagagaatctacatctaa

SEQ ID NO: 79823 - DNA, 25 bp, Homo sapien
gttcacttggatatgctcaatgacc

SEQ ID NO: 79824 - DNA, 25 bp, Homo sapien
caatgaccagagaatctacatctaa

SEQ ID NO: 79825 - DNA, 25 bp, Homo sapien
gcctgagcagtttcacgagtgttct

SEQ ID NO: 79826 - DNA, 25 bp, Homo sapien
tcagcactctttttgggccaccgac

SEQ ID NO: 79827 - DNA, 25 bp, Homo sapien
taagcatgtgcagcaaaaattcagc

SEQ ID NO: 79828 - DNA, 25 bp, Homo sapien
taacgtcggaatggtacacactgtt

SEQ ID NO: 79829 - DNA, 25 bp, Homo sapien
ctgcgcacacctgccaactccacca

SEQ ID NO: 79830 - DNA, 25 bp, Homo sapien
ttaaagtgaacacgaagattggaac

SEQ ID NO: 79831 - DNA, 25 bp, Homo sapien
gttcacttggatatgctcaatgacc

SEQ ID NO: 79832 - DNA, 25 bp, Homo sapien
gccccattgcttggcctgcgcacac

SEQ ID NO: 79833 - DNA, 25 bp, Homo sapien
gcatacccttgatggcctgagcagt

SEQ ID NO: 79834 - DNA, 25 bp, Homo sapien
ttttgggccaccgaccttgtgtcca

SEQ ID NO: 79835 - DNA, 25 bp, Homo sapien
ttaaagtgaacacgaagattggaac

SEQ ID NO: 79836 - DNA, 25 bp, Homo sapien
gcctgagcagtttcacgagtgttct

SEQ ID NO: 79837 - DNA, 25 bp, Homo sapien
gcatacccttgatggcctgagcagt

SEQ ID NO: 79838 - DNA, 25 bp, Homo sapien
taacgtcggaatggtacacactgtt

SEQ ID NO: 79839 - DNA, 25 bp, Homo sapien
ctgcgcacacctgccaactccacca

SEQ ID NO: 79840 - DNA, 25 bp, Homo sapien
gccccattgcttggcctgcgcacac

SEQ ID NO: 79841 - DNA, 25 bp, Homo sapien
ttttgggccaccgaccttgtgtcca

SEQ ID NO: 79842 - DNA, 25 bp, Homo sapien
tcagcactctttttgggccaccgac

SEQ ID NO: 79843 - DNA, 25 bp, Homo sapien
taagcatgtgcagcaaaaattcagc

SEQ ID NO: 79844 - DNA, 25 bp, Homo sapien
caatgaccagagaatctacatctaa

SEQ ID NO: 79845 - DNA, 25 bp, Homo sapien
gttcacttggatatgctcaatgacc

SEQ ID NO: 79846 - DNA, 25 bp, Homo sapien
ttaaagtgaacacgaagattggaac

SEQ ID NO: 79847 - DNA, 25 bp, Homo sapien
gcctgagcagtttcacgagtgttct

SEQ ID NO: 79848 - DNA, 25 bp, Homo sapien
gcatacccttgatggcctgagcagt

SEQ ID NO: 79849 - DNA, 25 bp, Homo sapien
taacgtcggaatggtacacactgtt

SEQ ID NO: 79850 - DNA, 25 bp, Homo sapien
ctgcgcacacctgccaactccacca

SEQ ID NO: 79851 - DNA, 25 bp, Homo sapien
gccccattgcttggcctgcgcacac

SEQ ID NO: 79852 - DNA, 25 bp, Homo sapien
ttttgggccaccgaccttgtgtcca

SEQ ID NO: 79853 - DNA, 25 bp, Homo sapien
tcagcactctttttgggccaccgac

SEQ ID NO: 79854 - DNA, 25 bp, Homo sapien
taagcatgtgcagcaaaaattcagc

SEQ ID NO: 79855 - DNA, 25 bp, Homo sapien
caatgaccagagaatctacatctaa

SEQ ID NO: 79856 - DNA, 25 bp, Homo sapien
gttcacttggatatgctcaatgacc

SEQ ID NO: 79857 - DNA, 25 bp, Homo sapien
tcagcactctttttgggccaccgac

SEQ ID NO: 79858 - DNA, 25 bp, Homo sapien
taacgtcggaatggtacacactgtt

SEQ ID NO: 79859 - DNA, 25 bp, Homo sapien
ttttgggccaccgaccttgtgtcca

SEQ ID NO: 79860 - DNA, 25 bp, Homo sapien
gcctgagcagtttcacgagtgttct

SEQ ID NO: 79861 - DNA, 25 bp, Homo sapien
gccccattgcttggcctgcgcacac

SEQ ID NO: 79862 - DNA, 25 bp, Homo sapien
ttaaagtgaacacgaagattggaac

SEQ ID NO: 79863 - DNA, 25 bp, Homo sapien
gcatacccttgatggcctgagcagt

SEQ ID NO: 79864 - DNA, 25 bp, Homo sapien
caatgaccagagaatctacatctaa

SEQ ID NO: 79865 - DNA, 25 bp, Homo sapien
gttcacttggatatgctcaatgacc

SEQ ID NO: 79866 - DNA, 25 bp, Homo sapien
taagcatgtgcagcaaaaattcagc

SEQ ID NO: 79867 - DNA, 25 bp, Homo sapien
ctgcgcacacctgccaactccacca

SEQ ID NO: 79868 - DNA, 25 bp, Homo sapien
ttaaagtgaacacgaagattggaac

SEQ ID NO: 79869 - DNA, 25 bp, Homo sapien
gcctgagcagtttcacgagtgttct

SEQ ID NO: 79870 - DNA, 25 bp, Homo sapien
gcatacccttgatggcctgagcagt

SEQ ID NO: 79871 - DNA, 25 bp, Homo sapien
taacgtcggaatggtacacactgtt

SEQ ID NO: 79872 - DNA, 25 bp, Homo sapien
ctgcgcacacctgccaactccacca

SEQ ID NO: 79873 - DNA, 25 bp, Homo sapien
gccccattgcttggcctgcgcacac

SEQ ID NO: 79874 - DNA, 25 bp, Homo sapien
ttttgggccaccgaccttgtgtcca

SEQ ID NO: 79875 - DNA, 25 bp, Homo sapien
tcagcactctttttgggccaccgac

SEQ ID NO: 79876 - DNA, 25 bp, Homo sapien
taagcatgtgcagcaaaaattcagc

SEQ ID NO: 79877 - DNA, 25 bp, Homo sapien
caatgaccagagaatctacatctaa

SEQ ID NO: 79878 - DNA, 25 bp, Homo sapien
gttcacttggatatgctcaatgacc

SEQ ID NO: 79879 - DNA, 25 bp, Homo sapien
gccccattgcttggcctgcgcacac

SEQ ID NO: 79880 - DNA, 25 bp, Homo sapien
gcctgagcagtttcacgagtgttct

SEQ ID NO: 79881 - DNA, 25 bp, Homo sapien
gcatacccttgatggcctgagcagt

SEQ ID NO: 79882 - DNA, 25 bp, Homo sapien
caatgaccagagaatctacatctaa

SEQ ID NO: 79883 - DNA, 25 bp, Homo sapien
ttaaagtgaacacgaagattggaac

SEQ ID NO: 79884 - DNA, 25 bp, Homo sapien
ctgcgcacacctgccaactccacca

SEQ ID NO: 79885 - DNA, 25 bp, Homo sapien
gttcacttggatatgctcaatgacc

SEQ ID NO: 79886 - DNA, 25 bp, Homo sapien
taagcatgtgcagcaaaaattcagc

SEQ ID NO: 79887 - DNA, 25 bp, Homo sapien
tcagcactctttttgggccaccgac

SEQ ID NO: 79888 - DNA, 25 bp, Homo sapien
taacgtcggaatggtacacactgtt

SEQ ID NO: 79889 - DNA, 25 bp, Homo sapien
ttttgggccaccgaccttgtgtcca

SEQ ID NO: 79890 - DNA, 25 bp, Homo sapien
ttaaagtgaacacgaagattggaac

SEQ ID NO: 79891 - DNA, 25 bp, Homo sapien
gcctgagcagtttcacgagtgttct

SEQ ID NO: 79892 - DNA, 25 bp, Homo sapien
gcatacccttgatggcctgagcagt

SEQ ID NO: 79893 - DNA, 25 bp, Homo sapien
taacgtcggaatggtacacactgtt

SEQ ID NO: 79894 - DNA, 25 bp, Homo sapien
ctgcgcacacctgccaactccacca

SEQ ID NO: 79895 - DNA, 25 bp, Homo sapien
gccccattgcttggcctgcgcacac

SEQ ID NO: 79896 - DNA, 25 bp, Homo sapien
ttttgggccaccgaccttgtgtcca

SEQ ID NO: 79897 - DNA, 25 bp, Homo sapien
tcagcactctttttgggccaccgac

SEQ ID NO: 79898 - DNA, 25 bp, Homo sapien
taagcatgtgcagcaaaaattcagc

SEQ ID NO: 79899 - DNA, 25 bp, Homo sapien
caatgaccagagaatctacatctaa

SEQ ID NO: 79900 - DNA, 25 bp, Homo sapien
gttcacttggatatgctcaatgacc

SEQ ID NO: 79901 - DNA, 25 bp, Homo sapien
tcagcactctttttgggccaccgac

SEQ ID NO: 79902 - DNA, 25 bp, Homo sapien
gccccattgcttggcctgcgcacac

SEQ ID NO: 79903 - DNA, 25 bp, Homo sapien
gcctgagcagtttcacgagtgttct

SEQ ID NO: 79904 - DNA, 25 bp, Homo sapien
taagcatgtgcagcaaaaattcagc

SEQ ID NO: 79905 - DNA, 25 bp, Homo sapien
caatgaccagagaatctacatctaa

SEQ ID NO: 79906 - DNA, 25 bp, Homo sapien
taacgtcggaatggtacacactgtt

SEQ ID NO: 79907 - DNA, 25 bp, Homo sapien
ctgcgcacacctgccaactccacca

SEQ ID NO: 79908 - DNA, 25 bp, Homo sapien
ttaaagtgaacacgaagattggaac

SEQ ID NO: 79909 - DNA, 25 bp, Homo sapien
gttcacttggatatgctcaatgacc

SEQ ID NO: 79910 - DNA, 25 bp, Homo sapien
ttttgggccaccgaccttgtgtcca

SEQ ID NO: 79911 - DNA, 25 bp, Homo sapien
gcatacccttgatggcctgagcagt

SEQ ID NO: 79912 - DNA, 25 bp, Homo sapien
ttaaagtgaacacgaagattggaac

SEQ ID NO: 79913 - DNA, 25 bp, Homo sapien
gcctgagcagtttcacgagtgttct

SEQ ID NO: 79914 - DNA, 25 bp, Homo sapien
gcatacccttgatggcctgagcagt

SEQ ID NO: 79915 - DNA, 25 bp, Homo sapien
taacgtcggaatggtacacactgtt

SEQ ID NO: 79916 - DNA, 25 bp, Homo sapien
ctgcgcacacctgccaactccacca

SEQ ID NO: 79917 - DNA, 25 bp, Homo sapien
gccccattgcttggcctgcgcacac

SEQ ID NO: 79918 - DNA, 25 bp, Homo sapien
ttttgggccaccgaccttgtgtcca

SEQ ID NO: 79919 - DNA, 25 bp, Homo sapien
tcagcactctttttgggccaccgac

SEQ ID NO: 79920 - DNA, 25 bp, Homo sapien
taagcatgtgcagcaaaaattcagc

SEQ ID NO: 79921 - DNA, 25 bp, Homo sapien
caatgaccagagaatctacatctaa

SEQ ID NO: 79922 - DNA, 25 bp, Homo sapien
gttcacttggatatgctcaatgacc

SEQ ID NO: 79923 - DNA, 25 bp, Homo sapien
gccccattgcttggcctgcgcacac

SEQ ID NO: 79924 - DNA, 25 bp, Homo sapien
ttaaagtgaacacgaagattggaac

SEQ ID NO: 79925 - DNA, 25 bp, Homo sapien
gcctgagcagtttcacgagtgttct

SEQ ID NO: 79926 - DNA, 25 bp, Homo sapien
ctgcgcacacctgccaactccacca

SEQ ID NO: 79927 - DNA, 25 bp, Homo sapien
gcatacccttgatggcctgagcagt

SEQ ID NO: 79928 - DNA, 25 bp, Homo sapien
caatgaccagagaatctacatctaa

SEQ ID NO: 79929 - DNA, 25 bp, Homo sapien
taagcatgtgcagcaaaaattcagc

SEQ ID NO: 79930 - DNA, 25 bp, Homo sapien
gttcacttggatatgctcaatgacc

SEQ ID NO: 79931 - DNA, 25 bp, Homo sapien
ttttgggccaccgaccttgtgtcca

SEQ ID NO: 79932 - DNA, 25 bp, Homo sapien
taacgtcggaatggtacacactgtt

SEQ ID NO: 79933 - DNA, 25 bp, Homo sapien
tcagcactctttttgggccaccgac

SEQ ID NO: 79934 - DNA, 25 bp, Homo sapien
ttaaagtgaacacgaagattggaac

SEQ ID NO: 79935 - DNA, 25 bp, Homo sapien
gcctgagcagtttcacgagtgttct

SEQ ID NO: 79936 - DNA, 25 bp, Homo sapien
gcatacccttgatggcctgagcagt

SEQ ID NO: 79937 - DNA, 25 bp, Homo sapien
taacgtcggaatggtacacactgtt

SEQ ID NO: 79938 - DNA, 25 bp, Homo sapien
ctgcgcacacctgccaactccacca

SEQ ID NO: 79939 - DNA, 25 bp, Homo sapien
gccccattgcttggcctgcgcacac

SEQ ID NO: 79940 - DNA, 25 bp, Homo sapien
ttttgggccaccgaccttgtgtcca

SEQ ID NO: 79941 - DNA, 25 bp, Homo sapien
tcagcactctttttgggccaccgac

SEQ ID NO: 79942 - DNA, 25 bp, Homo sapien
taagcatgtgcagcaaaaattcagc

SEQ ID NO: 79943 - DNA, 25 bp, Homo sapien
caatgaccagagaatctacatctaa

SEQ ID NO: 79944 - DNA, 25 bp, Homo sapien
gttcacttggatatgctcaatgacc

SEQ ID NO: 79945 - DNA, 25 bp, Homo sapien
ctgcgcacacctgccaactccacca

SEQ ID NO: 79946 - DNA, 25 bp, Homo sapien
caatgaccagagaatctacatctaa

SEQ ID NO: 79947 - DNA, 25 bp, Homo sapien
tcagcactctttttgggccaccgac

SEQ ID NO: 79948 - DNA, 25 bp, Homo sapien
taacgtcggaatggtacacactgtt

SEQ ID NO: 79949 - DNA, 25 bp, Homo sapien
gttcacttggatatgctcaatgacc

SEQ ID NO: 79950 - DNA, 25 bp, Homo sapien
ttttgggccaccgaccttgtgtcca

SEQ ID NO: 79951 - DNA, 25 bp, Homo sapien
gcctgagcagtttcacgagtgttct

SEQ ID NO: 79952 - DNA, 25 bp, Homo sapien
gcatacccttgatggcctgagcagt

SEQ ID NO: 79953 - DNA, 25 bp, Homo sapien
taagcatgtgcagcaaaaattcagc

SEQ ID NO: 79954 - DNA, 25 bp, Homo sapien
ttaaagtgaacacgaagattggaac

SEQ ID NO: 79955 - DNA, 25 bp, Homo sapien
gccccattgcttggcctgcgcacac

SEQ ID NO: 79956 - DNA, 25 bp, Homo sapien
taacgtcggaatggtacacactgtt

SEQ ID NO: 79957 - DNA, 25 bp, Homo sapien
ttttgggccaccgaccttgtgtcca

SEQ ID NO: 79958 - DNA, 25 bp, Homo sapien
caatgaccagagaatctacatctaa

SEQ ID NO: 79959 - DNA, 25 bp, Homo sapien
taagcatgtgcagcaaaaattcagc

SEQ ID NO: 79960 - DNA, 25 bp, Homo sapien
ttaaagtgaacacgaagattggaac

SEQ ID NO: 79961 - DNA, 25 bp, Homo sapien
gcctgagcagtttcacgagtgttct

SEQ ID NO: 79962 - DNA, 25 bp, Homo sapien
gttcacttggatatgctcaatgacc

SEQ ID NO: 79963 - DNA, 25 bp, Homo sapien
gccccattgcttggcctgcgcacac

SEQ ID NO: 79964 - DNA, 25 bp, Homo sapien
ctgcgcacacctgccaactccacca

SEQ ID NO: 79965 - DNA, 25 bp, Homo sapien
gcatacccttgatggcctgagcagt

SEQ ID NO: 79966 - DNA, 25 bp, Homo sapien
tcagcactctttttgggccaccgac

SEQ ID NO: 79967 - DNA, 25 bp, Homo sapien
ttaaagtgaacacgaagattggaac

SEQ ID NO: 79968 - DNA, 25 bp, Homo sapien
gcctgagcagtttcacgagtgttct

SEQ ID NO: 79969 - DNA, 25 bp, Homo sapien
gcatacccttgatggcctgagcagt

SEQ ID NO: 79970 - DNA, 25 bp, Homo sapien
taacgtcggaatggtacacactgtt

SEQ ID NO: 79971 - DNA, 25 bp, Homo sapien
ctgcgcacacctgccaactccacca

SEQ ID NO: 79972 - DNA, 25 bp, Homo sapien
gccccattgcttggcctgcgcacac

SEQ ID NO: 79973 - DNA, 25 bp, Homo sapien
ttttgggccaccgaccttgtgtcca

SEQ ID NO: 79974 - DNA, 25 bp, Homo sapien
tcagcactctttttgggccaccgac

SEQ ID NO: 79975 - DNA, 25 bp, Homo sapien
taagcatgtgcagcaaaaattcagc

SEQ ID NO: 79976 - DNA, 25 bp, Homo sapien
caatgaccagagaatctacatctaa

SEQ ID NO: 79977 - DNA, 25 bp, Homo sapien
gttcacttggatatgctcaatgacc

SEQ ID NO: 79978 - DNA, 25 bp, Homo sapien
caatgaccagagaatctacatctaa

SEQ ID NO: 79979 - DNA, 25 bp, Homo sapien
gccccattgcttggcctgcgcacac

SEQ ID NO: 79980 - DNA, 25 bp, Homo sapien
ctgcgcacacctgccaactccacca

SEQ ID NO: 79981 - DNA, 25 bp, Homo sapien
gttcacttggatatgctcaatgacc

SEQ ID NO: 79982 - DNA, 25 bp, Homo sapien
taagcatgtgcagcaaaaattcagc

SEQ ID NO: 79983 - DNA, 25 bp, Homo sapien
gcctgagcagtttcacgagtgttct

SEQ ID NO: 79984 - DNA, 25 bp, Homo sapien
ttttgggccaccgaccttgtgtcca

SEQ ID NO: 79985 - DNA, 25 bp, Homo sapien
gcatacccttgatggcctgagcagt

SEQ ID NO: 79986 - DNA, 25 bp, Homo sapien
taacgtcggaatggtacacactgtt

SEQ ID NO: 79987 - DNA, 25 bp, Homo sapien
ttaaagtgaacacgaagattggaac

SEQ ID NO: 79988 - DNA, 25 bp, Homo sapien
tcagcactctttttgggccaccgac

SEQ ID NO: 79989 - DNA, 25 bp, Homo sapien
ttaaagtgaacacgaagattggaac

SEQ ID NO: 79990 - DNA, 25 bp, Homo sapien
gcctgagcagtttcacgagtgttct

SEQ ID NO: 79991 - DNA, 25 bp, Homo sapien
gcatacccttgatggcctgagcagt

SEQ ID NO: 79992 - DNA, 25 bp, Homo sapien
taacgtcggaatggtacacactgtt

SEQ ID NO: 79993 - DNA, 25 bp, Homo sapien
ctgcgcacacctgccaactccacca

SEQ ID NO: 79994 - DNA, 25 bp, Homo sapien
gccccattgcttggcctgcgcacac

SEQ ID NO: 79995 - DNA, 25 bp, Homo sapien
ttttgggccaccgaccttgtgtcca

SEQ ID NO: 79996 - DNA, 25 bp, Homo sapien
tcagcactctttttgggccaccgac

SEQ ID NO: 79997 - DNA, 25 bp, Homo sapien
taagcatgtgcagcaaaaattcagc

SEQ ID NO: 79998 - DNA, 25 bp, Homo sapien
caatgaccagagaatctacatctaa

SEQ ID NO: 79999 - DNA, 25 bp, Homo sapien
gttcacttggatatgctcaatgacc

SEQ ID NO: 80000 - DNA, 25 bp, Homo sapien
gcctgagcagtttcacgagtgttct

SEQ ID NO: 80001 - DNA, 25 bp, Homo sapien
gcatacccttgatggcctgagcagt

SEQ ID NO: 80002 - DNA, 25 bp, Homo sapien
gccccattgcttggcctgcgcacac

SEQ ID NO: 80003 - DNA, 25 bp, Homo sapien
tcagcactctttttgggccaccgac

SEQ ID NO: 80004 - DNA, 25 bp, Homo sapien
taacgtcggaatggtacacactgtt

SEQ ID NO: 80005 - DNA, 25 bp, Homo sapien
ttttgggccaccgaccttgtgtcca

SEQ ID NO: 80006 - DNA, 25 bp, Homo sapien
caatgaccagagaatctacatctaa

SEQ ID NO: 80007 - DNA, 25 bp, Homo sapien
gttcacttggatatgctcaatgacc

SEQ ID NO: 80008 - DNA, 25 bp, Homo sapien
ttaaagtgaacacgaagattggaac

SEQ ID NO: 80009 - DNA, 25 bp, Homo sapien
ctgcgcacacctgccaactccacca

SEQ ID NO: 80010 - DNA, 25 bp, Homo sapien
taagcatgtgcagcaaaaattcagc

SEQ ID NO: 80011 - DNA, 25 bp, Homo sapien
ttaaagtgaacacgaagattggaac

SEQ ID NO: 80012 - DNA, 25 bp, Homo sapien
gcctgagcagtttcacgagtgttct

SEQ ID NO: 80013 - DNA, 25 bp, Homo sapien
gcatacccttgatggcctgagcagt

SEQ ID NO: 80014 - DNA, 25 bp, Homo sapien
taacgtcggaatggtacacactgtt

SEQ ID NO: 80015 - DNA, 25 bp, Homo sapien
ctgcgcacacctgccaactccacca

SEQ ID NO: 80016 - DNA, 25 bp, Homo sapien
gccccattgcttggcctgcgcacac

SEQ ID NO: 80017 - DNA, 25 bp, Homo sapien
ttttgggccaccgaccttgtgtcca

SEQ ID NO: 80018 - DNA, 25 bp, Homo sapien
tcagcactctttttgggccaccgac

SEQ ID NO: 80019 - DNA, 25 bp, Homo sapien
taagcatgtgcagcaaaaattcagc

SEQ ID NO: 80020 - DNA, 25 bp, Homo sapien
caatgaccagagaatctacatctaa

SEQ ID NO: 80021 - DNA, 25 bp, Homo sapien
gttcacttggatatgctcaatgacc

SEQ ID NO: 80022 - DNA, 25 bp, Homo sapien
tctcacgtgagatagtcggtgtgta

SEQ ID NO: 80023 - DNA, 25 bp, Homo sapien
aggacatgatgttaggagccctgtt

SEQ ID NO: 80024 - DNA, 25 bp, Homo sapien
tttatcaagagtgcgcctgaaaaga

SEQ ID NO: 80025 - DNA, 25 bp, Homo sapien
ctaaggagttccactgccctctcac

SEQ ID NO: 80026 - DNA, 25 bp, Homo sapien
tccgaagacagtcagccaggtttcg

SEQ ID NO: 80027 - DNA, 25 bp, Homo sapien
attcaggatgaagcgtttctggagc

SEQ ID NO: 80028 - DNA, 25 bp, Homo sapien
ggggaaggaaatgttatccaggtca

SEQ ID NO: 80029 - DNA, 25 bp, Homo sapien
agtatcggtcgaggatactgagagt

SEQ ID NO: 80030 - DNA, 25 bp, Homo sapien
cgaacactgaaggttggcagattca

SEQ ID NO: 80031 - DNA, 25 bp, Homo sapien
agccaggtttcggcgtgtgaagtta

SEQ ID NO: 80032 - DNA, 25 bp, Homo sapien
agtccatgtaatacagcgctggccc

SEQ ID NO: 80033 - DNA, 25 bp, Homo sapien
agccaggtttcggcgtgtgaagtta

SEQ ID NO: 80034 - DNA, 25 bp, Homo sapien
tccgaagacagtcagccaggtttcg

SEQ ID NO: 80035 - DNA, 25 bp, Homo sapien
agtccatgtaatacagcgctggccc

SEQ ID NO: 80036 - DNA, 25 bp, Homo sapien
agtatcggtcgaggatactgagagt

SEQ ID NO: 80037 - DNA, 25 bp, Homo sapien
tctcacgtgagatagtcggtgtgta

SEQ ID NO: 80038 - DNA, 25 bp, Homo sapien
ctaaggagttccactgccctctcac

SEQ ID NO: 80039 - DNA, 25 bp, Homo sapien
attcaggatgaagcgtttctggagc

SEQ ID NO: 80040 - DNA, 25 bp, Homo sapien
cgaacactgaaggttggcagattca

SEQ ID NO: 80041 - DNA, 25 bp, Homo sapien
ggggaaggaaatgttatccaggtca

SEQ ID NO: 80042 - DNA, 25 bp, Homo sapien
aggacatgatgttaggagccctgtt

SEQ ID NO: 80043 - DNA, 25 bp, Homo sapien
tttatcaagagtgcgcctgaaaaga

SEQ ID NO: 80044 - DNA, 25 bp, Homo sapien
ctaaggagttccactgccctctcac

SEQ ID NO: 80045 - DNA, 25 bp, Homo sapien
tttatcaagagtgcgcctgaaaaga

SEQ ID NO: 80046 - DNA, 25 bp, Homo sapien
agtccatgtaatacagcgctggccc

SEQ ID NO: 80047 - DNA, 25 bp, Homo sapien
ggggaaggaaatgttatccaggtca

SEQ ID NO: 80048 - DNA, 25 bp, Homo sapien
tctcacgtgagatagtcggtgtgta

SEQ ID NO: 80049 - DNA, 25 bp, Homo sapien
cgaacactgaaggttggcagattca

SEQ ID NO: 80050 - DNA, 25 bp, Homo sapien
agtatcggtcgaggatactgagagt

SEQ ID NO: 80051 - DNA, 25 bp, Homo sapien
aggacatgatgttaggagccctgtt

SEQ ID NO: 80052 - DNA, 25 bp, Homo sapien
tccgaagacagtcagccaggtttcg

SEQ ID NO: 80053 - DNA, 25 bp, Homo sapien
attcaggatgaagcgtttctggagc

SEQ ID NO: 80054 - DNA, 25 bp, Homo sapien
agccaggtttcggcgtgtgaagtta

SEQ ID NO: 80055 - DNA, 25 bp, Homo sapien
agccaggtttcggcgtgtgaagtta

SEQ ID NO: 80056 - DNA, 25 bp, Homo sapien
tccgaagacagtcagccaggtttcg

SEQ ID NO: 80057 - DNA, 25 bp, Homo sapien
agtccatgtaatacagcgctggccc

SEQ ID NO: 80058 - DNA, 25 bp, Homo sapien
agtatcggtcgaggatactgagagt

SEQ ID NO: 80059 - DNA, 25 bp, Homo sapien
tctcacgtgagatagtcggtgtgta

SEQ ID NO: 80060 - DNA, 25 bp, Homo sapien
ctaaggagttccactgccctctcac

SEQ ID NO: 80061 - DNA, 25 bp, Homo sapien
attcaggatgaagcgtttctggagc

SEQ ID NO: 80062 - DNA, 25 bp, Homo sapien
cgaacactgaaggttggcagattca

SEQ ID NO: 80063 - DNA, 25 bp, Homo sapien
ggggaaggaaatgttatccaggtca

SEQ ID NO: 80064 - DNA, 25 bp, Homo sapien
aggacatgatgttaggagccctgtt

SEQ ID NO: 80065 - DNA, 25 bp, Homo sapien
tttatcaagagtgcgcctgaaaaga

SEQ ID NO: 80066 - DNA, 25 bp, Homo sapien
tctcacgtgagatagtcggtgtgta

SEQ ID NO: 80067 - DNA, 25 bp, Homo sapien
agtatcggtcgaggatactgagagt

SEQ ID NO: 80068 - DNA, 25 bp, Homo sapien
aggacatgatgttaggagccctgtt

SEQ ID NO: 80069 - DNA, 25 bp, Homo sapien
agccaggtttcggcgtgtgaagtta

SEQ ID NO: 80070 - DNA, 25 bp, Homo sapien
ctaaggagttccactgccctctcac

SEQ ID NO: 80071 - DNA, 25 bp, Homo sapien
attcaggatgaagcgtttctggagc

SEQ ID NO: 80072 - DNA, 25 bp, Homo sapien
tccgaagacagtcagccaggtttcg

SEQ ID NO: 80073 - DNA, 25 bp, Homo sapien
agtccatgtaatacagcgctggccc

SEQ ID NO: 80074 - DNA, 25 bp, Homo sapien
ggggaaggaaatgttatccaggtca

SEQ ID NO: 80075 - DNA, 25 bp, Homo sapien
cgaacactgaaggttggcagattca

SEQ ID NO: 80076 - DNA, 25 bp, Homo sapien
tttatcaagagtgcgcctgaaaaga

SEQ ID NO: 80077 - DNA, 25 bp, Homo sapien
agccaggtttcggcgtgtgaagtta

SEQ ID NO: 80078 - DNA, 25 bp, Homo sapien
tccgaagacagtcagccaggtttcg

SEQ ID NO: 80079 - DNA, 25 bp, Homo sapien
agtccatgtaatacagcgctggccc

SEQ ID NO: 80080 - DNA, 25 bp, Homo sapien
agtatcggtcgaggatactgagagt

SEQ ID NO: 80081 - DNA, 25 bp, Homo sapien
tctcacgtgagatagtcggtgtgta

SEQ ID NO: 80082 - DNA, 25 bp, Homo sapien
ctaaggagttccactgccctctcac

SEQ ID NO: 80083 - DNA, 25 bp, Homo sapien
attcaggatgaagcgtttctggagc

SEQ ID NO: 80084 - DNA, 25 bp, Homo sapien
cgaacactgaaggttggcagattca

SEQ ID NO: 80085 - DNA, 25 bp, Homo sapien
ggggaaggaaatgttatccaggtca

SEQ ID NO: 80086 - DNA, 25 bp, Homo sapien
aggacatgatgttaggagccctgtt

SEQ ID NO: 80087 - DNA, 25 bp, Homo sapien
tttatcaagagtgcgcctgaaaaga

SEQ ID NO: 80088 - DNA, 25 bp, Homo sapien
agccaggtttcggcgtgtgaagtta

SEQ ID NO: 80089 - DNA, 25 bp, Homo sapien
tccgaagacagtcagccaggtttcg

SEQ ID NO: 80090 - DNA, 25 bp, Homo sapien
agtccatgtaatacagcgctggccc

SEQ ID NO: 80091 - DNA, 25 bp, Homo sapien
agtatcggtcgaggatactgagagt

SEQ ID NO: 80092 - DNA, 25 bp, Homo sapien
tctcacgtgagatagtcggtgtgta

SEQ ID NO: 80093 - DNA, 25 bp, Homo sapien
ctaaggagttccactgccctctcac

SEQ ID NO: 80094 - DNA, 25 bp, Homo sapien
attcaggatgaagcgtttctggagc

SEQ ID NO: 80095 - DNA, 25 bp, Homo sapien
cgaacactgaaggttggcagattca

SEQ ID NO: 80096 - DNA, 25 bp, Homo sapien
ggggaaggaaatgttatccaggtca

SEQ ID NO: 80097 - DNA, 25 bp, Homo sapien
aggacatgatgttaggagccctgtt

SEQ ID NO: 80098 - DNA, 25 bp, Homo sapien
tttatcaagagtgcgcctgaaaaga

SEQ ID NO: 80099 - DNA, 25 bp, Homo sapien
tctcacgtgagatagtcggtgtgta

SEQ ID NO: 80100 - DNA, 25 bp, Homo sapien
agccaggtttcggcgtgtgaagtta

SEQ ID NO: 80101 - DNA, 25 bp, Homo sapien
cgaacactgaaggttggcagattca

SEQ ID NO: 80102 - DNA, 25 bp, Homo sapien
tccgaagacagtcagccaggtttcg

SEQ ID NO: 80103 - DNA, 25 bp, Homo sapien
ctaaggagttccactgccctctcac

SEQ ID NO: 80104 - DNA, 25 bp, Homo sapien
agtatcggtcgaggatactgagagt

SEQ ID NO: 80105 - DNA, 25 bp, Homo sapien
ggggaaggaaatgttatccaggtca

SEQ ID NO: 80106 - DNA, 25 bp, Homo sapien
aggacatgatgttaggagccctgtt

SEQ ID NO: 80107 - DNA, 25 bp, Homo sapien
agtccatgtaatacagcgctggccc

SEQ ID NO: 80108 - DNA, 25 bp, Homo sapien
tttatcaagagtgcgcctgaaaaga

SEQ ID NO: 80109 - DNA, 25 bp, Homo sapien
attcaggatgaagcgtttctggagc

SEQ ID NO: 80110 - DNA, 25 bp, Homo sapien
agccaggtttcggcgtgtgaagtta

SEQ ID NO: 80111 - DNA, 25 bp, Homo sapien
tccgaagacagtcagccaggtttcg

SEQ ID NO: 80112 - DNA, 25 bp, Homo sapien
agtccatgtaatacagcgctggccc

SEQ ID NO: 80113 - DNA, 25 bp, Homo sapien
agtatcggtcgaggatactgagagt

SEQ ID NO: 80114 - DNA, 25 bp, Homo sapien
tctcacgtgagatagtcggtgtgta

SEQ ID NO: 80115 - DNA, 25 bp, Homo sapien
ctaaggagttccactgccctctcac

SEQ ID NO: 80116 - DNA, 25 bp, Homo sapien
attcaggatgaagcgtttctggagc

SEQ ID NO: 80117 - DNA, 25 bp, Homo sapien
cgaacactgaaggttggcagattca

SEQ ID NO: 80118 - DNA, 25 bp, Homo sapien
ggggaaggaaatgttatccaggtca

SEQ ID NO: 80119 - DNA, 25 bp, Homo sapien
aggacatgatgttaggagccctgtt

SEQ ID NO: 80120 - DNA, 25 bp, Homo sapien
tttatcaagagtgcgcctgaaaaga

SEQ ID NO: 80121 - DNA, 25 bp, Homo sapien
tttatcaagagtgcgcctgaaaaga

SEQ ID NO: 80122 - DNA, 25 bp, Homo sapien
tccgaagacagtcagccaggtttcg

SEQ ID NO: 80123 - DNA, 25 bp, Homo sapien
aggacatgatgttaggagccctgtt

SEQ ID NO: 80124 - DNA, 25 bp, Homo sapien
ctaaggagttccactgccctctcac

SEQ ID NO: 80125 - DNA, 25 bp, Homo sapien
agccaggtttcggcgtgtgaagtta

SEQ ID NO: 80126 - DNA, 25 bp, Homo sapien
attcaggatgaagcgtttctggagc

SEQ ID NO: 80127 - DNA, 25 bp, Homo sapien
cgaacactgaaggttggcagattca

SEQ ID NO: 80128 - DNA, 25 bp, Homo sapien
agtccatgtaatacagcgctggccc

SEQ ID NO: 80129 - DNA, 25 bp, Homo sapien
tctcacgtgagatagtcggtgtgta

SEQ ID NO: 80130 - DNA, 25 bp, Homo sapien
ggggaaggaaatgttatccaggtca

SEQ ID NO: 80131 - DNA, 25 bp, Homo sapien
agtatcggtcgaggatactgagagt

SEQ ID NO: 80132 - DNA, 25 bp, Homo sapien
agccaggtttcggcgtgtgaagtta

SEQ ID NO: 80133 - DNA, 25 bp, Homo sapien
tccgaagacagtcagccaggtttcg

SEQ ID NO: 80134 - DNA, 25 bp, Homo sapien
agtccatgtaatacagcgctggccc

SEQ ID NO: 80135 - DNA, 25 bp, Homo sapien
agtatcggtcgaggatactgagagt

SEQ ID NO: 80136 - DNA, 25 bp, Homo sapien
tctcacgtgagatagtcggtgtgta

SEQ ID NO: 80137 - DNA, 25 bp, Homo sapien
ctaaggagttccactgccctctcac

SEQ ID NO: 80138 - DNA, 25 bp, Homo sapien
attcaggatgaagcgtttctggagc

SEQ ID NO: 80139 - DNA, 25 bp, Homo sapien
cgaacactgaaggttggcagattca

SEQ ID NO: 80140 - DNA, 25 bp, Homo sapien
ggggaaggaaatgttatccaggtca

SEQ ID NO: 80141 - DNA, 25 bp, Homo sapien
aggacatgatgttaggagccctgtt

SEQ ID NO: 80142 - DNA, 25 bp, Homo sapien
tttatcaagagtgcgcctgaaaaga

SEQ ID NO: 80143 - DNA, 25 bp, Homo sapien
tttatcaagagtgcgcctgaaaaga

SEQ ID NO: 80144 - DNA, 25 bp, Homo sapien
tccgaagacagtcagccaggtttcg

SEQ ID NO: 80145 - DNA, 25 bp, Homo sapien
aggacatgatgttaggagccctgtt

SEQ ID NO: 80146 - DNA, 25 bp, Homo sapien
agtatcggtcgaggatactgagagt

SEQ ID NO: 80147 - DNA, 25 bp, Homo sapien
agtccatgtaatacagcgctggccc

SEQ ID NO: 80148 - DNA, 25 bp, Homo sapien
ggggaaggaaatgttatccaggtca

SEQ ID NO: 80149 - DNA, 25 bp, Homo sapien
tctcacgtgagatagtcggtgtgta

SEQ ID NO: 80150 - DNA, 25 bp, Homo sapien
agccaggtttcggcgtgtgaagtta

SEQ ID NO: 80151 - DNA, 25 bp, Homo sapien
cgaacactgaaggttggcagattca

SEQ ID NO: 80152 - DNA, 25 bp, Homo sapien
ctaaggagttccactgccctctcac

SEQ ID NO: 80153 - DNA, 25 bp, Homo sapien
attcaggatgaagcgtttctggagc

SEQ ID NO: 80154 - DNA, 25 bp, Homo sapien
agccaggtttcggcgtgtgaagtta

SEQ ID NO: 80155 - DNA, 25 bp, Homo sapien
tccgaagacagtcagccaggtttcg

SEQ ID NO: 80156 - DNA, 25 bp, Homo sapien
agtccatgtaatacagcgctggccc

SEQ ID NO: 80157 - DNA, 25 bp, Homo sapien
agtatcggtcgaggatactgagagt

SEQ ID NO: 80158 - DNA, 25 bp, Homo sapien
tctcacgtgagatagtcggtgtgta

SEQ ID NO: 80159 - DNA, 25 bp, Homo sapien
ctaaggagttccactgccctctcac

SEQ ID NO: 80160 - DNA, 25 bp, Homo sapien
attcaggatgaagcgtttctggagc

SEQ ID NO: 80161 - DNA, 25 bp, Homo sapien
cgaacactgaaggttggcagattca

SEQ ID NO: 80162 - DNA, 25 bp, Homo sapien
ggggaaggaaatgttatccaggtca

SEQ ID NO: 80163 - DNA, 25 bp, Homo sapien
aggacatgatgttaggagccctgtt

SEQ ID NO: 80164 - DNA, 25 bp, Homo sapien
tttatcaagagtgcgcctgaaaaga

SEQ ID NO: 80165 - DNA, 25 bp, Homo sapien
tttatcaagagtgcgcctgaaaaga

SEQ ID NO: 80166 - DNA, 25 bp, Homo sapien
tctcacgtgagatagtcggtgtgta

SEQ ID NO: 80167 - DNA, 25 bp, Homo sapien
attcaggatgaagcgtttctggagc

SEQ ID NO: 80168 - DNA, 25 bp, Homo sapien
agtccatgtaatacagcgctggccc

SEQ ID NO: 80169 - DNA, 25 bp, Homo sapien
tccgaagacagtcagccaggtttcg

SEQ ID NO: 80170 - DNA, 25 bp, Homo sapien
ctaaggagttccactgccctctcac

SEQ ID NO: 80171 - DNA, 25 bp, Homo sapien
agtatcggtcgaggatactgagagt

SEQ ID NO: 80172 - DNA, 25 bp, Homo sapien
ggggaaggaaatgttatccaggtca

SEQ ID NO: 80173 - DNA, 25 bp, Homo sapien
aggacatgatgttaggagccctgtt

SEQ ID NO: 80174 - DNA, 25 bp, Homo sapien
agccaggtttcggcgtgtgaagtta

SEQ ID NO: 80175 - DNA, 25 bp, Homo sapien
cgaacactgaaggttggcagattca

SEQ ID NO: 80176 - DNA, 25 bp, Homo sapien
agccaggtttcggcgtgtgaagtta

SEQ ID NO: 80177 - DNA, 25 bp, Homo sapien
tccgaagacagtcagccaggtttcg

SEQ ID NO: 80178 - DNA, 25 bp, Homo sapien
agtccatgtaatacagcgctggccc

SEQ ID NO: 80179 - DNA, 25 bp, Homo sapien
agtatcggtcgaggatactgagagt

SEQ ID NO: 80180 - DNA, 25 bp, Homo sapien
tctcacgtgagatagtcggtgtgta

SEQ ID NO: 80181 - DNA, 25 bp, Homo sapien
ctaaggagttccactgccctctcac

SEQ ID NO: 80182 - DNA, 25 bp, Homo sapien
attcaggatgaagcgtttctggagc

SEQ ID NO: 80183 - DNA, 25 bp, Homo sapien
cgaacactgaaggttggcagattca

SEQ ID NO: 80184 - DNA, 25 bp, Homo sapien
ggggaaggaaatgttatccaggtca

SEQ ID NO: 80185 - DNA, 25 bp, Homo sapien
aggacatgatgttaggagccctgtt

SEQ ID NO: 80186 - DNA, 25 bp, Homo sapien
tttatcaagagtgcgcctgaaaaga

SEQ ID NO: 80187 - DNA, 25 bp, Homo sapien
cgaacactgaaggttggcagattca

SEQ ID NO: 80188 - DNA, 25 bp, Homo sapien
agccaggtttcggcgtgtgaagtta

SEQ ID NO: 80189 - DNA, 25 bp, Homo sapien
ggggaaggaaatgttatccaggtca

SEQ ID NO: 80190 - DNA, 25 bp, Homo sapien
tccgaagacagtcagccaggtttcg

SEQ ID NO: 80191 - DNA, 25 bp, Homo sapien
tttatcaagagtgcgcctgaaaaga

SEQ ID NO: 80192 - DNA, 25 bp, Homo sapien
tctcacgtgagatagtcggtgtgta

SEQ ID NO: 80193 - DNA, 25 bp, Homo sapien
ctaaggagttccactgccctctcac

SEQ ID NO: 80194 - DNA, 25 bp, Homo sapien
agtatcggtcgaggatactgagagt

SEQ ID NO: 80195 - DNA, 25 bp, Homo sapien
agtccatgtaatacagcgctggccc

SEQ ID NO: 80196 - DNA, 25 bp, Homo sapien
attcaggatgaagcgtttctggagc

SEQ ID NO: 80197 - DNA, 25 bp, Homo sapien
aggacatgatgttaggagccctgtt

SEQ ID NO: 80198 - DNA, 25 bp, Homo sapien
aggacatgatgttaggagccctgtt

SEQ ID NO: 80199 - DNA, 25 bp, Homo sapien
tccgaagacagtcagccaggtttcg

SEQ ID NO: 80200 - DNA, 25 bp, Homo sapien
ggggaaggaaatgttatccaggtca

SEQ ID NO: 80201 - DNA, 25 bp, Homo sapien
tctcacgtgagatagtcggtgtgta

SEQ ID NO: 80202 - DNA, 25 bp, Homo sapien
agtccatgtaatacagcgctggccc

SEQ ID NO: 80203 - DNA, 25 bp, Homo sapien
attcaggatgaagcgtttctggagc

SEQ ID NO: 80204 - DNA, 25 bp, Homo sapien
tttatcaagagtgcgcctgaaaaga

SEQ ID NO: 80205 - DNA, 25 bp, Homo sapien
cgaacactgaaggttggcagattca

SEQ ID NO: 80206 - DNA, 25 bp, Homo sapien
ctaaggagttccactgccctctcac

SEQ ID NO: 80207 - DNA, 25 bp, Homo sapien
agtatcggtcgaggatactgagagt

SEQ ID NO: 80208 - DNA, 25 bp, Homo sapien
agccaggtttcggcgtgtgaagtta

SEQ ID NO: 80209 - DNA, 25 bp, Homo sapien
agccaggtttcggcgtgtgaagtta

SEQ ID NO: 80210 - DNA, 25 bp, Homo sapien
tccgaagacagtcagccaggtttcg

SEQ ID NO: 80211 - DNA, 25 bp, Homo sapien
agtccatgtaatacagcgctggccc

SEQ ID NO: 80212 - DNA, 25 bp, Homo sapien
agtatcggtcgaggatactgagagt

SEQ ID NO: 80213 - DNA, 25 bp, Homo sapien
tctcacgtgagatagtcggtgtgta

SEQ ID NO: 80214 - DNA, 25 bp, Homo sapien
ctaaggagttccactgccctctcac

SEQ ID NO: 80215 - DNA, 25 bp, Homo sapien
attcaggatgaagcgtttctggagc

SEQ ID NO: 80216 - DNA, 25 bp, Homo sapien
cgaacactgaaggttggcagattca

SEQ ID NO: 80217 - DNA, 25 bp, Homo sapien
ggggaaggaaatgttatccaggtca

SEQ ID NO: 80218 - DNA, 25 bp, Homo sapien
aggacatgatgttaggagccctgtt

SEQ ID NO: 80219 - DNA, 25 bp, Homo sapien
tttatcaagagtgcgcctgaaaaga

SEQ ID NO: 80220 - DNA, 25 bp, Homo sapien
ggggaaggaaatgttatccaggtca

SEQ ID NO: 80221 - DNA, 25 bp, Homo sapien
agccaggtttcggcgtgtgaagtta

SEQ ID NO: 80222 - DNA, 25 bp, Homo sapien
ctaaggagttccactgccctctcac

SEQ ID NO: 80223 - DNA, 25 bp, Homo sapien
tttatcaagagtgcgcctgaaaaga

SEQ ID NO: 80224 - DNA, 25 bp, Homo sapien
attcaggatgaagcgtttctggagc

SEQ ID NO: 80225 - DNA, 25 bp, Homo sapien
tccgaagacagtcagccaggtttcg

SEQ ID NO: 80226 - DNA, 25 bp, Homo sapien
cgaacactgaaggttggcagattca

SEQ ID NO: 80227 - DNA, 25 bp, Homo sapien
agtatcggtcgaggatactgagagt

SEQ ID NO: 80228 - DNA, 25 bp, Homo sapien
aggacatgatgttaggagccctgtt

SEQ ID NO: 80229 - DNA, 25 bp, Homo sapien
tctcacgtgagatagtcggtgtgta

SEQ ID NO: 80230 - DNA, 25 bp, Homo sapien
agtccatgtaatacagcgctggccc

SEQ ID NO: 80231 - DNA, 25 bp, Homo sapien
agccaggtttcggcgtgtgaagtta

SEQ ID NO: 80232 - DNA, 25 bp, Homo sapien
tccgaagacagtcagccaggtttcg

SEQ ID NO: 80233 - DNA, 25 bp, Homo sapien
agtccatgtaatacagcgctggccc

SEQ ID NO: 80234 - DNA, 25 bp, Homo sapien
agtatcggtcgaggatactgagagt

SEQ ID NO: 80235 - DNA, 25 bp, Homo sapien
tctcacgtgagatagtcggtgtgta

SEQ ID NO: 80236 - DNA, 25 bp, Homo sapien
ctaaggagttccactgccctctcac

SEQ ID NO: 80237 - DNA, 25 bp, Homo sapien
attcaggatgaagcgtttctggagc

SEQ ID NO: 80238 - DNA, 25 bp, Homo sapien
cgaacactgaaggttggcagattca

SEQ ID NO: 80239 - DNA, 25 bp, Homo sapien
ggggaaggaaatgttatccaggtca

SEQ ID NO: 80240 - DNA, 25 bp, Homo sapien
aggacatgatgttaggagccctgtt

SEQ ID NO: 80241 - DNA, 25 bp, Homo sapien
tttatcaagagtgcgcctgaaaaga

SEQ ID NO: 80242 - DNA, 25 bp, Homo sapien
agtccatgtaatacagcgctggccc

SEQ ID NO: 80243 - DNA, 25 bp, Homo sapien
ctaaggagttccactgccctctcac

SEQ ID NO: 80244 - DNA, 25 bp, Homo sapien
tctcacgtgagatagtcggtgtgta

SEQ ID NO: 80245 - DNA, 25 bp, Homo sapien
tttatcaagagtgcgcctgaaaaga

SEQ ID NO: 80246 - DNA, 25 bp, Homo sapien
cgaacactgaaggttggcagattca

SEQ ID NO: 80247 - DNA, 25 bp, Homo sapien
ggggaaggaaatgttatccaggtca

SEQ ID NO: 80248 - DNA, 25 bp, Homo sapien
agccaggtttcggcgtgtgaagtta

SEQ ID NO: 80249 - DNA, 25 bp, Homo sapien
agtatcggtcgaggatactgagagt

SEQ ID NO: 80250 - DNA, 25 bp, Homo sapien
tccgaagacagtcagccaggtttcg

SEQ ID NO: 80251 - DNA, 25 bp, Homo sapien
attcaggatgaagcgtttctggagc

SEQ ID NO: 80252 - DNA, 25 bp, Homo sapien
aggacatgatgttaggagccctgtt

SEQ ID NO: 80253 - DNA, 25 bp, Homo sapien
agccaggtttcggcgtgtgaagtta

SEQ ID NO: 80254 - DNA, 25 bp, Homo sapien
tccgaagacagtcagccaggtttcg

SEQ ID NO: 80255 - DNA, 25 bp, Homo sapien
agtccatgtaatacagcgctggccc

SEQ ID NO: 80256 - DNA, 25 bp, Homo sapien
agtatcggtcgaggatactgagagt

SEQ ID NO: 80257 - DNA, 25 bp, Homo sapien
tctcacgtgagatagtcggtgtgta

SEQ ID NO: 80258 - DNA, 25 bp, Homo sapien
ctaaggagttccactgccctctcac

SEQ ID NO: 80259 - DNA, 25 bp, Homo sapien
attcaggatgaagcgtttctggagc

SEQ ID NO: 80260 - DNA, 25 bp, Homo sapien
cgaacactgaaggttggcagattca

SEQ ID NO: 80261 - DNA, 25 bp, Homo sapien
ggggaaggaaatgttatccaggtca

SEQ ID NO: 80262 - DNA, 25 bp, Homo sapien
aggacatgatgttaggagccctgtt

SEQ ID NO: 80263 - DNA, 25 bp, Homo sapien
tttatcaagagtgcgcctgaaaaga

SEQ ID NO: 80264 - DNA, 25 bp, Homo sapien
agtatcggtcgaggatactgagagt

SEQ ID NO: 80265 - DNA, 25 bp, Homo sapien
ctaaggagttccactgccctctcac

SEQ ID NO: 80266 - DNA, 25 bp, Homo sapien
agtccatgtaatacagcgctggccc

SEQ ID NO: 80267 - DNA, 25 bp, Homo sapien
attcaggatgaagcgtttctggagc

SEQ ID NO: 80268 - DNA, 25 bp, Homo sapien
agccaggtttcggcgtgtgaagtta

SEQ ID NO: 80269 - DNA, 25 bp, Homo sapien
aggacatgatgttaggagccctgtt

SEQ ID NO: 80270 - DNA, 25 bp, Homo sapien
tccgaagacagtcagccaggtttcg

SEQ ID NO: 80271 - DNA, 25 bp, Homo sapien
tctcacgtgagatagtcggtgtgta

SEQ ID NO: 80272 - DNA, 25 bp, Homo sapien
cgaacactgaaggttggcagattca

SEQ ID NO: 80273 - DNA, 25 bp, Homo sapien
tttatcaagagtgcgcctgaaaaga

SEQ ID NO: 80274 - DNA, 25 bp, Homo sapien
ggggaaggaaatgttatccaggtca

SEQ ID NO: 80275 - DNA, 25 bp, Homo sapien
agccaggtttcggcgtgtgaagtta

SEQ ID NO: 80276 - DNA, 25 bp, Homo sapien
tccgaagacagtcagccaggtttcg

SEQ ID NO: 80277 - DNA, 25 bp, Homo sapien
agtccatgtaatacagcgctggccc

SEQ ID NO: 80278 - DNA, 25 bp, Homo sapien
agtatcggtcgaggatactgagagt

SEQ ID NO: 80279 - DNA, 25 bp, Homo sapien
tctcacgtgagatagtcggtgtgta

SEQ ID NO: 80280 - DNA, 25 bp, Homo sapien
ctaaggagttccactgccctctcac

SEQ ID NO: 80281 - DNA, 25 bp, Homo sapien
attcaggatgaagcgtttctggagc

SEQ ID NO: 80282 - DNA, 25 bp, Homo sapien
cgaacactgaaggttggcagattca

SEQ ID NO: 80283 - DNA, 25 bp, Homo sapien
ggggaaggaaatgttatccaggtca

SEQ ID NO: 80284 - DNA, 25 bp, Homo sapien
aggacatgatgttaggagccctgtt

SEQ ID NO: 80285 - DNA, 25 bp, Homo sapien
tttatcaagagtgcgcctgaaaaga

SEQ ID NO: 80286 - DNA, 25 bp, Homo sapien
tttatcaagagtgcgcctgaaaaga

SEQ ID NO: 80287 - DNA, 25 bp, Homo sapien
tccgaagacagtcagccaggtttcg

SEQ ID NO: 80288 - DNA, 25 bp, Homo sapien
agtatcggtcgaggatactgagagt

SEQ ID NO: 80289 - DNA, 25 bp, Homo sapien
ctaaggagttccactgccctctcac

SEQ ID NO: 80290 - DNA, 25 bp, Homo sapien
agccaggtttcggcgtgtgaagtta

SEQ ID NO: 80291 - DNA, 25 bp, Homo sapien
aggacatgatgttaggagccctgtt

SEQ ID NO: 80292 - DNA, 25 bp, Homo sapien
ggggaaggaaatgttatccaggtca

SEQ ID NO: 80293 - DNA, 25 bp, Homo sapien
agtccatgtaatacagcgctggccc

SEQ ID NO: 80294 - DNA, 25 bp, Homo sapien
cgaacactgaaggttggcagattca

SEQ ID NO: 80295 - DNA, 25 bp, Homo sapien
tctcacgtgagatagtcggtgtgta

SEQ ID NO: 80296 - DNA, 25 bp, Homo sapien
attcaggatgaagcgtttctggagc

SEQ ID NO: 80297 - DNA, 25 bp, Homo sapien
agccaggtttcggcgtgtgaagtta

SEQ ID NO: 80298 - DNA, 25 bp, Homo sapien
tccgaagacagtcagccaggtttcg

SEQ ID NO: 80299 - DNA, 25 bp, Homo sapien
agtccatgtaatacagcgctggccc

SEQ ID NO: 80300 - DNA, 25 bp, Homo sapien
agtatcggtcgaggatactgagagt

SEQ ID NO: 80301 - DNA, 25 bp, Homo sapien
tctcacgtgagatagtcggtgtgta

SEQ ID NO: 80302 - DNA, 25 bp, Homo sapien
ctaaggagttccactgccctctcac

SEQ ID NO: 80303 - DNA, 25 bp, Homo sapien
attcaggatgaagcgtttctggagc

SEQ ID NO: 80304 - DNA, 25 bp, Homo sapien
cgaacactgaaggttggcagattca

SEQ ID NO: 80305 - DNA, 25 bp, Homo sapien
ggggaaggaaatgttatccaggtca

SEQ ID NO: 80306 - DNA, 25 bp, Homo sapien
aggacatgatgttaggagccctgtt

SEQ ID NO: 80307 - DNA, 25 bp, Homo sapien
tttatcaagagtgcgcctgaaaaga

SEQ ID NO: 80308 - DNA, 25 bp, Homo sapien
aggacatgatgttaggagccctgtt

SEQ ID NO: 80309 - DNA, 25 bp, Homo sapien
agtccatgtaatacagcgctggccc

SEQ ID NO: 80310 - DNA, 25 bp, Homo sapien
tttatcaagagtgcgcctgaaaaga

SEQ ID NO: 80311 - DNA, 25 bp, Homo sapien
agtatcggtcgaggatactgagagt

SEQ ID NO: 80312 - DNA, 25 bp, Homo sapien
tccgaagacagtcagccaggtttcg

SEQ ID NO: 80313 - DNA, 25 bp, Homo sapien
ggggaaggaaatgttatccaggtca

SEQ ID NO: 80314 - DNA, 25 bp, Homo sapien
agccaggtttcggcgtgtgaagtta

SEQ ID NO: 80315 - DNA, 25 bp, Homo sapien
ctaaggagttccactgccctctcac

SEQ ID NO: 80316 - DNA, 25 bp, Homo sapien
attcaggatgaagcgtttctggagc

SEQ ID NO: 80317 - DNA, 25 bp, Homo sapien
cgaacactgaaggttggcagattca

SEQ ID NO: 80318 - DNA, 25 bp, Homo sapien
tctcacgtgagatagtcggtgtgta

SEQ ID NO: 80319 - DNA, 25 bp, Homo sapien
agccaggtttcggcgtgtgaagtta

SEQ ID NO: 80320 - DNA, 25 bp, Homo sapien
tccgaagacagtcagccaggtttcg

SEQ ID NO: 80321 - DNA, 25 bp, Homo sapien
agtccatgtaatacagcgctggccc

SEQ ID NO: 80322 - DNA, 25 bp, Homo sapien
agtatcggtcgaggatactgagagt

SEQ ID NO: 80323 - DNA, 25 bp, Homo sapien
tctcacgtgagatagtcggtgtgta

SEQ ID NO: 80324 - DNA, 25 bp, Homo sapien
ctaaggagttccactgccctctcac

SEQ ID NO: 80325 - DNA, 25 bp, Homo sapien
attcaggatgaagcgtttctggagc

SEQ ID NO: 80326 - DNA, 25 bp, Homo sapien
cgaacactgaaggttggcagattca

SEQ ID NO: 80327 - DNA, 25 bp, Homo sapien
ggggaaggaaatgttatccaggtca

SEQ ID NO: 80328 - DNA, 25 bp, Homo sapien
aggacatgatgttaggagccctgtt

SEQ ID NO: 80329 - DNA, 25 bp, Homo sapien
tttatcaagagtgcgcctgaaaaga

SEQ ID NO: 80330 - DNA, 25 bp, Homo sapien
agccaggtttcggcgtgtgaagtta

SEQ ID NO: 80331 - DNA, 25 bp, Homo sapien
tccgaagacagtcagccaggtttcg

SEQ ID NO: 80332 - DNA, 25 bp, Homo sapien
agtccatgtaatacagcgctggccc

SEQ ID NO: 80333 - DNA, 25 bp, Homo sapien
agtatcggtcgaggatactgagagt

SEQ ID NO: 80334 - DNA, 25 bp, Homo sapien
tctcacgtgagatagtcggtgtgta

SEQ ID NO: 80335 - DNA, 25 bp, Homo sapien
ctaaggagttccactgccctctcac

SEQ ID NO: 80336 - DNA, 25 bp, Homo sapien
attcaggatgaagcgtttctggagc

SEQ ID NO: 80337 - DNA, 25 bp, Homo sapien
cgaacactgaaggttggcagattca

SEQ ID NO: 80338 - DNA, 25 bp, Homo sapien
ggggaaggaaatgttatccaggtca

SEQ ID NO: 80339 - DNA, 25 bp, Homo sapien
aggacatgatgttaggagccctgtt

SEQ ID NO: 80340 - DNA, 25 bp, Homo sapien
tttatcaagagtgcgcctgaaaaga

SEQ ID NO: 80341 - DNA, 25 bp, Homo sapien
tttatcaagagtgcgcctgaaaaga

SEQ ID NO: 80342 - DNA, 25 bp, Homo sapien
ctaaggagttccactgccctctcac

SEQ ID NO: 80343 - DNA, 25 bp, Homo sapien
agccaggtttcggcgtgtgaagtta

SEQ ID NO: 80344 - DNA, 25 bp, Homo sapien
agtatcggtcgaggatactgagagt

SEQ ID NO: 80345 - DNA, 25 bp, Homo sapien
tctcacgtgagatagtcggtgtgta

SEQ ID NO: 80346 - DNA, 25 bp, Homo sapien
ggggaaggaaatgttatccaggtca

SEQ ID NO: 80347 - DNA, 25 bp, Homo sapien
tccgaagacagtcagccaggtttcg

SEQ ID NO: 80348 - DNA, 25 bp, Homo sapien
cgaacactgaaggttggcagattca

SEQ ID NO: 80349 - DNA, 25 bp, Homo sapien
agtccatgtaatacagcgctggccc

SEQ ID NO: 80350 - DNA, 25 bp, Homo sapien
attcaggatgaagcgtttctggagc

SEQ ID NO: 80351 - DNA, 25 bp, Homo sapien
aggacatgatgttaggagccctgtt

SEQ ID NO: 80352 - DNA, 25 bp, Homo sapien
tttatcaagagtgcgcctgaaaaga

SEQ ID NO: 80353 - DNA, 25 bp, Homo sapien
ctaaggagttccactgccctctcac

SEQ ID NO: 80354 - DNA, 25 bp, Homo sapien
agccaggtttcggcgtgtgaagtta

SEQ ID NO: 80355 - DNA, 25 bp, Homo sapien
agtatcggtcgaggatactgagagt

SEQ ID NO: 80356 - DNA, 25 bp, Homo sapien
tctcacgtgagatagtcggtgtgta

SEQ ID NO: 80357 - DNA, 25 bp, Homo sapien
ggggaaggaaatgttatccaggtca

SEQ ID NO: 80358 - DNA, 25 bp, Homo sapien
tccgaagacagtcagccaggtttcg

SEQ ID NO: 80359 - DNA, 25 bp, Homo sapien
cgaacactgaaggttggcagattca

SEQ ID NO: 80360 - DNA, 25 bp, Homo sapien
agtccatgtaatacagcgctggccc

SEQ ID NO: 80361 - DNA, 25 bp, Homo sapien
attcaggatgaagcgtttctggagc

SEQ ID NO: 80362 - DNA, 25 bp, Homo sapien
aggacatgatgttaggagccctgtt

SEQ ID NO: 80363 - DNA, 25 bp, Homo sapien
tttatcaagagtgcgcctgaaaaga

SEQ ID NO: 80364 - DNA, 25 bp, Homo sapien
agccaggtttcggcgtgtgaagtta

SEQ ID NO: 80365 - DNA, 25 bp, Homo sapien
tctcacgtgagatagtcggtgtgta

SEQ ID NO: 80366 - DNA, 25 bp, Homo sapien
agtatcggtcgaggatactgagagt

SEQ ID NO: 80367 - DNA, 25 bp, Homo sapien
ctaaggagttccactgccctctcac

SEQ ID NO: 80368 - DNA, 25 bp, Homo sapien
ggggaaggaaatgttatccaggtca

SEQ ID NO: 80369 - DNA, 25 bp, Homo sapien
tccgaagacagtcagccaggtttcg

SEQ ID NO: 80370 - DNA, 25 bp, Homo sapien
cgaacactgaaggttggcagattca

SEQ ID NO: 80371 - DNA, 25 bp, Homo sapien
attcaggatgaagcgtttctggagc

SEQ ID NO: 80372 - DNA, 25 bp, Homo sapien
agtccatgtaatacagcgctggccc

SEQ ID NO: 80373 - DNA, 25 bp, Homo sapien
aggacatgatgttaggagccctgtt

SEQ ID NO: 80374 - DNA, 25 bp, Homo sapien
ctaaggagttccactgccctctcac

SEQ ID NO: 80375 - DNA, 25 bp, Homo sapien
tttatcaagagtgcgcctgaaaaga

SEQ ID NO: 80376 - DNA, 25 bp, Homo sapien
agccaggtttcggcgtgtgaagtta

SEQ ID NO: 80377 - DNA, 25 bp, Homo sapien
agtatcggtcgaggatactgagagt

SEQ ID NO: 80378 - DNA, 25 bp, Homo sapien
tctcacgtgagatagtcggtgtgta

SEQ ID NO: 80379 - DNA, 25 bp, Homo sapien
ggggaaggaaatgttatccaggtca

SEQ ID NO: 80380 - DNA, 25 bp, Homo sapien
tccgaagacagtcagccaggtttcg

SEQ ID NO: 80381 - DNA, 25 bp, Homo sapien
cgaacactgaaggttggcagattca

SEQ ID NO: 80382 - DNA, 25 bp, Homo sapien
agtccatgtaatacagcgctggccc

SEQ ID NO: 80383 - DNA, 25 bp, Homo sapien
attcaggatgaagcgtttctggagc

SEQ ID NO: 80384 - DNA, 25 bp, Homo sapien
aggacatgatgttaggagccctgtt

SEQ ID NO: 80385 - DNA, 25 bp, Homo sapien
tttatcaagagtgcgcctgaaaaga

SEQ ID NO: 80386 - DNA, 25 bp, Homo sapien
ggggaaggaaatgttatccaggtca

SEQ ID NO: 80387 - DNA, 25 bp, Homo sapien
agccaggtttcggcgtgtgaagtta

SEQ ID NO: 80388 - DNA, 25 bp, Homo sapien
tctcacgtgagatagtcggtgtgta

SEQ ID NO: 80389 - DNA, 25 bp, Homo sapien
agtatcggtcgaggatactgagagt

SEQ ID NO: 80390 - DNA, 25 bp, Homo sapien
ctaaggagttccactgccctctcac

SEQ ID NO: 80391 - DNA, 25 bp, Homo sapien
tccgaagacagtcagccaggtttcg

SEQ ID NO: 80392 - DNA, 25 bp, Homo sapien
cgaacactgaaggttggcagattca

SEQ ID NO: 80393 - DNA, 25 bp, Homo sapien
attcaggatgaagcgtttctggagc

SEQ ID NO: 80394 - DNA, 25 bp, Homo sapien
agtccatgtaatacagcgctggccc

SEQ ID NO: 80395 - DNA, 25 bp, Homo sapien
aggacatgatgttaggagccctgtt

SEQ ID NO: 80396 - DNA, 25 bp, Homo sapien
tttatcaagagtgcgcctgaaaaga

SEQ ID NO: 80397 - DNA, 25 bp, Homo sapien
agccaggtttcggcgtgtgaagtta

SEQ ID NO: 80398 - DNA, 25 bp, Homo sapien
agtatcggtcgaggatactgagagt

SEQ ID NO: 80399 - DNA, 25 bp, Homo sapien
tctcacgtgagatagtcggtgtgta

SEQ ID NO: 80400 - DNA, 25 bp, Homo sapien
ctaaggagttccactgccctctcac

SEQ ID NO: 80401 - DNA, 25 bp, Homo sapien
tccgaagacagtcagccaggtttcg

SEQ ID NO: 80402 - DNA, 25 bp, Homo sapien
cgaacactgaaggttggcagattca

SEQ ID NO: 80403 - DNA, 25 bp, Homo sapien
aggacatgatgttaggagccctgtt

SEQ ID NO: 80404 - DNA, 25 bp, Homo sapien
attcaggatgaagcgtttctggagc

SEQ ID NO: 80405 - DNA, 25 bp, Homo sapien
agtccatgtaatacagcgctggccc

SEQ ID NO: 80406 - DNA, 25 bp, Homo sapien
ggggaaggaaatgttatccaggtca

SEQ ID NO: 80407 - DNA, 25 bp, Homo sapien
tttatcaagagtgcgcctgaaaaga

SEQ ID NO: 80408 - DNA, 25 bp, Homo sapien
ctaaggagttccactgccctctcac

SEQ ID NO: 80409 - DNA, 25 bp, Homo sapien
agccaggtttcggcgtgtgaagtta

SEQ ID NO: 80410 - DNA, 25 bp, Homo sapien
agtatcggtcgaggatactgagagt

SEQ ID NO: 80411 - DNA, 25 bp, Homo sapien
tctcacgtgagatagtcggtgtgta

SEQ ID NO: 80412 - DNA, 25 bp, Homo sapien
tccgaagacagtcagccaggtttcg

SEQ ID NO: 80413 - DNA, 25 bp, Homo sapien
ggggaaggaaatgttatccaggtca

SEQ ID NO: 80414 - DNA, 25 bp, Homo sapien
cgaacactgaaggttggcagattca

SEQ ID NO: 80415 - DNA, 25 bp, Homo sapien
agtccatgtaatacagcgctggccc

SEQ ID NO: 80416 - DNA, 25 bp, Homo sapien
attcaggatgaagcgtttctggagc

SEQ ID NO: 80417 - DNA, 25 bp, Homo sapien
aggacatgatgttaggagccctgtt

SEQ ID NO: 80418 - DNA, 25 bp, Homo sapien
ggggaaggaaatgttatccaggtca

SEQ ID NO: 80419 - DNA, 25 bp, Homo sapien
tttatcaagagtgcgcctgaaaaga

SEQ ID NO: 80420 - DNA, 25 bp, Homo sapien
ctaaggagttccactgccctctcac

SEQ ID NO: 80421 - DNA, 25 bp, Homo sapien
agccaggtttcggcgtgtgaagtta

SEQ ID NO: 80422 - DNA, 25 bp, Homo sapien
tctcacgtgagatagtcggtgtgta

SEQ ID NO: 80423 - DNA, 25 bp, Homo sapien
agtatcggtcgaggatactgagagt

SEQ ID NO: 80424 - DNA, 25 bp, Homo sapien
tccgaagacagtcagccaggtttcg

SEQ ID NO: 80425 - DNA, 25 bp, Homo sapien
cgaacactgaaggttggcagattca

SEQ ID NO: 80426 - DNA, 25 bp, Homo sapien
agtccatgtaatacagcgctggccc

SEQ ID NO: 80427 - DNA, 25 bp, Homo sapien
attcaggatgaagcgtttctggagc

SEQ ID NO: 80428 - DNA, 25 bp, Homo sapien
aggacatgatgttaggagccctgtt

SEQ ID NO: 80429 - DNA, 25 bp, Homo sapien
ctaaggagttccactgccctctcac

SEQ ID NO: 80430 - DNA, 25 bp, Homo sapien
tttatcaagagtgcgcctgaaaaga

SEQ ID NO: 80431 - DNA, 25 bp, Homo sapien
agccaggtttcggcgtgtgaagtta

SEQ ID NO: 80432 - DNA, 25 bp, Homo sapien
agtatcggtcgaggatactgagagt

SEQ ID NO: 80433 - DNA, 25 bp, Homo sapien
tctcacgtgagatagtcggtgtgta

SEQ ID NO: 80434 - DNA, 25 bp, Homo sapien
ggggaaggaaatgttatccaggtca

SEQ ID NO: 80435 - DNA, 25 bp, Homo sapien
tccgaagacagtcagccaggtttcg

SEQ ID NO: 80436 - DNA, 25 bp, Homo sapien
cgaacactgaaggttggcagattca

SEQ ID NO: 80437 - DNA, 25 bp, Homo sapien
agtccatgtaatacagcgctggccc

SEQ ID NO: 80438 - DNA, 25 bp, Homo sapien
aggacatgatgttaggagccctgtt

SEQ ID NO: 80439 - DNA, 25 bp, Homo sapien
attcaggatgaagcgtttctggagc

SEQ ID NO: 80440 - DNA, 25 bp, Homo sapien
aggacatgatgttaggagccctgtt

SEQ ID NO: 80441 - DNA, 25 bp, Homo sapien
tctcacgtgagatagtcggtgtgta

SEQ ID NO: 80442 - DNA, 25 bp, Homo sapien
tttatcaagagtgcgcctgaaaaga

SEQ ID NO: 80443 - DNA, 25 bp, Homo sapien
cgaacactgaaggttggcagattca

SEQ ID NO: 80444 - DNA, 25 bp, Homo sapien
agtccatgtaatacagcgctggccc

SEQ ID NO: 80445 - DNA, 25 bp, Homo sapien
ggggaaggaaatgttatccaggtca

SEQ ID NO: 80446 - DNA, 25 bp, Homo sapien
attcaggatgaagcgtttctggagc

SEQ ID NO: 80447 - DNA, 25 bp, Homo sapien
ctaaggagttccactgccctctcac

SEQ ID NO: 80448 - DNA, 25 bp, Homo sapien
tccgaagacagtcagccaggtttcg

SEQ ID NO: 80449 - DNA, 25 bp, Homo sapien
agtatcggtcgaggatactgagagt

SEQ ID NO: 80450 - DNA, 25 bp, Homo sapien
agccaggtttcggcgtgtgaagtta

SEQ ID NO: 80451 - DNA, 25 bp, Homo sapien
tttatcaagagtgcgcctgaaaaga

SEQ ID NO: 80452 - DNA, 25 bp, Homo sapien
agccaggtttcggcgtgtgaagtta

SEQ ID NO: 80453 - DNA, 25 bp, Homo sapien
agtatcggtcgaggatactgagagt

SEQ ID NO: 80454 - DNA, 25 bp, Homo sapien
tctcacgtgagatagtcggtgtgta

SEQ ID NO: 80455 - DNA, 25 bp, Homo sapien
ggggaaggaaatgttatccaggtca

SEQ ID NO: 80456 - DNA, 25 bp, Homo sapien
ctaaggagttccactgccctctcac

SEQ ID NO: 80457 - DNA, 25 bp, Homo sapien
tccgaagacagtcagccaggtttcg

SEQ ID NO: 80458 - DNA, 25 bp, Homo sapien
cgaacactgaaggttggcagattca

SEQ ID NO: 80459 - DNA, 25 bp, Homo sapien
agtccatgtaatacagcgctggccc

SEQ ID NO: 80460 - DNA, 25 bp, Homo sapien
attcaggatgaagcgtttctggagc

SEQ ID NO: 80461 - DNA, 25 bp, Homo sapien
aggacatgatgttaggagccctgtt

SEQ ID NO: 80462 - DNA, 25 bp, Homo sapien
agccaggtttcggcgtgtgaagtta

SEQ ID NO: 80463 - DNA, 25 bp, Homo sapien
tccgaagacagtcagccaggtttcg

SEQ ID NO: 80464 - DNA, 25 bp, Homo sapien
agtccatgtaatacagcgctggccc

SEQ ID NO: 80465 - DNA, 25 bp, Homo sapien
agtatcggtcgaggatactgagagt

SEQ ID NO: 80466 - DNA, 25 bp, Homo sapien
tctcacgtgagatagtcggtgtgta

SEQ ID NO: 80467 - DNA, 25 bp, Homo sapien
ctaaggagttccactgccctctcac

SEQ ID NO: 80468 - DNA, 25 bp, Homo sapien
attcaggatgaagcgtttctggagc

SEQ ID NO: 80469 - DNA, 25 bp, Homo sapien
cgaacactgaaggttggcagattca

SEQ ID NO: 80470 - DNA, 25 bp, Homo sapien
ggggaaggaaatgttatccaggtca

SEQ ID NO: 80471 - DNA, 25 bp, Homo sapien
aggacatgatgttaggagccctgtt

SEQ ID NO: 80472 - DNA, 25 bp, Homo sapien
tttatcaagagtgcgcctgaaaaga

SEQ ID NO: 80473 - DNA, 25 bp, Homo sapien
gtgagagggcagtggaactccttag

SEQ ID NO: 80474 - DNA, 25 bp, Homo sapien
aacagggctcctaacatcatgtcct

SEQ ID NO: 80475 - DNA, 25 bp, Homo sapien
taacttcacacgccgaaacctggct

SEQ ID NO: 80476 - DNA, 25 bp, Homo sapien
actctcagtatcctcgaccgatact

SEQ ID NO: 80477 - DNA, 25 bp, Homo sapien
tcttttcaggcgcactcttgataaa

SEQ ID NO: 80478 - DNA, 25 bp, Homo sapien
tgacctggataacatttccttcccc

SEQ ID NO: 80479 - DNA, 25 bp, Homo sapien
gctccagaaacgcttcatcctgaat

SEQ ID NO: 80480 - DNA, 25 bp, Homo sapien
gggccagcgctgtattacatggact

SEQ ID NO: 80481 - DNA, 25 bp, Homo sapien
tgaatctgccaaccttcagtgttcg

SEQ ID NO: 80482 - DNA, 25 bp, Homo sapien
tacacaccgactatctcacgtgaga

SEQ ID NO: 80483 - DNA, 25 bp, Homo sapien
cgaaacctggctgactgtcttcgga

SEQ ID NO: 80484 - DNA, 25 bp, Homo sapien
tttatcaagagtgcgcctgaaaaga

SEQ ID NO: 80485 - DNA, 25 bp, Homo sapien
ctaaggagttccactgccctctcac

SEQ ID NO: 80486 - DNA, 25 bp, Homo sapien
agccaggtttcggcgtgtgaagtta

SEQ ID NO: 80487 - DNA, 25 bp, Homo sapien
agtatcggtcgaggatactgagagt

SEQ ID NO: 80488 - DNA, 25 bp, Homo sapien
tctcacgtgagatagtcggtgtgta

SEQ ID NO: 80489 - DNA, 25 bp, Homo sapien
ggggaaggaaatgttatccaggtca

SEQ ID NO: 80490 - DNA, 25 bp, Homo sapien
tccgaagacagtcagccaggtttcg

SEQ ID NO: 80491 - DNA, 25 bp, Homo sapien
cgaacactgaaggttggcagattca

SEQ ID NO: 80492 - DNA, 25 bp, Homo sapien
attcaggatgaagcgtttctggagc

SEQ ID NO: 80493 - DNA, 25 bp, Homo sapien
agtccatgtaatacagcgctggccc

SEQ ID NO: 80494 - DNA, 25 bp, Homo sapien
aggacatgatgttaggagccctgtt

SEQ ID NO: 80495 - DNA, 25 bp, Homo sapien
attcaggatgaagcgtttctggagc

SEQ ID NO: 80496 - DNA, 25 bp, Homo sapien
agccaggtttcggcgtgtgaagtta

SEQ ID NO: 80497 - DNA, 25 bp, Homo sapien
agtatcggtcgaggatactgagagt

SEQ ID NO: 80498 - DNA, 25 bp, Homo sapien
tccgaagacagtcagccaggtttcg

SEQ ID NO: 80499 - DNA, 25 bp, Homo sapien
agtccatgtaatacagcgctggccc

SEQ ID NO: 80500 - DNA, 25 bp, Homo sapien
ggggaaggaaatgttatccaggtca

SEQ ID NO: 80501 - DNA, 25 bp, Homo sapien
cgaacactgaaggttggcagattca

SEQ ID NO: 80502 - DNA, 25 bp, Homo sapien
tttatcaagagtgcgcctgaaaaga

SEQ ID NO: 80503 - DNA, 25 bp, Homo sapien
aggacatgatgttaggagccctgtt

SEQ ID NO: 80504 - DNA, 25 bp, Homo sapien
tctcacgtgagatagtcggtgtgta

SEQ ID NO: 80505 - DNA, 25 bp, Homo sapien
ctaaggagttccactgccctctcac

SEQ ID NO: 80506 - DNA, 25 bp, Homo sapien
agccaggtttcggcgtgtgaagtta

SEQ ID NO: 80507 - DNA, 25 bp, Homo sapien
tccgaagacagtcagccaggtttcg

SEQ ID NO: 80508 - DNA, 25 bp, Homo sapien
agtccatgtaatacagcgctggccc

SEQ ID NO: 80509 - DNA, 25 bp, Homo sapien
agtatcggtcgaggatactgagagt

SEQ ID NO: 80510 - DNA, 25 bp, Homo sapien
tctcacgtgagatagtcggtgtgta

SEQ ID NO: 80511 - DNA, 25 bp, Homo sapien
ctaaggagttccactgccctctcac

SEQ ID NO: 80512 - DNA, 25 bp, Homo sapien
attcaggatgaagcgtttctggagc

SEQ ID NO: 80513 - DNA, 25 bp, Homo sapien
cgaacactgaaggttggcagattca

SEQ ID NO: 80514 - DNA, 25 bp, Homo sapien
ggggaaggaaatgttatccaggtca

SEQ ID NO: 80515 - DNA, 25 bp, Homo sapien
aggacatgatgttaggagccctgtt

SEQ ID NO: 80516 - DNA, 25 bp, Homo sapien
tttatcaagagtgcgcctgaaaaga

SEQ ID NO: 80517 - DNA, 25 bp, Homo sapien
ggggaaggaaatgttatccaggtca

SEQ ID NO: 80518 - DNA, 25 bp, Homo sapien
agccaggtttcggcgtgtgaagtta

SEQ ID NO: 80519 - DNA, 25 bp, Homo sapien
cgaacactgaaggttggcagattca

SEQ ID NO: 80520 - DNA, 25 bp, Homo sapien
ctaaggagttccactgccctctcac

SEQ ID NO: 80521 - DNA, 25 bp, Homo sapien
tctcacgtgagatagtcggtgtgta

SEQ ID NO: 80522 - DNA, 25 bp, Homo sapien
agtccatgtaatacagcgctggccc

SEQ ID NO: 80523 - DNA, 25 bp, Homo sapien
tttatcaagagtgcgcctgaaaaga

SEQ ID NO: 80524 - DNA, 25 bp, Homo sapien
tccgaagacagtcagccaggtttcg

SEQ ID NO: 80525 - DNA, 25 bp, Homo sapien
agtatcggtcgaggatactgagagt

SEQ ID NO: 80526 - DNA, 25 bp, Homo sapien
attcaggatgaagcgtttctggagc

SEQ ID NO: 80527 - DNA, 25 bp, Homo sapien
aggacatgatgttaggagccctgtt

SEQ ID NO: 80528 - DNA, 25 bp, Homo sapien
agccaggtttcggcgtgtgaagtta

SEQ ID NO: 80529 - DNA, 25 bp, Homo sapien
tccgaagacagtcagccaggtttcg

SEQ ID NO: 80530 - DNA, 25 bp, Homo sapien
agtccatgtaatacagcgctggccc

SEQ ID NO: 80531 - DNA, 25 bp, Homo sapien
agtatcggtcgaggatactgagagt

SEQ ID NO: 80532 - DNA, 25 bp, Homo sapien
tctcacgtgagatagtcggtgtgta

SEQ ID NO: 80533 - DNA, 25 bp, Homo sapien
ctaaggagttccactgccctctcac

SEQ ID NO: 80534 - DNA, 25 bp, Homo sapien
attcaggatgaagcgtttctggagc

SEQ ID NO: 80535 - DNA, 25 bp, Homo sapien
cgaacactgaaggttggcagattca

SEQ ID NO: 80536 - DNA, 25 bp, Homo sapien
ggggaaggaaatgttatccaggtca

SEQ ID NO: 80537 - DNA, 25 bp, Homo sapien
aggacatgatgttaggagccctgtt

SEQ ID NO: 80538 - DNA, 25 bp, Homo sapien
tttatcaagagtgcgcctgaaaaga

SEQ ID NO: 80539 - DNA, 25 bp, Homo sapien
ctaaggagttccactgccctctcac

SEQ ID NO: 80540 - DNA, 25 bp, Homo sapien
tttatcaagagtgcgcctgaaaaga

SEQ ID NO: 80541 - DNA, 25 bp, Homo sapien
agccaggtttcggcgtgtgaagtta

SEQ ID NO: 80542 - DNA, 25 bp, Homo sapien
attcaggatgaagcgtttctggagc

SEQ ID NO: 80543 - DNA, 25 bp, Homo sapien
aggacatgatgttaggagccctgtt

SEQ ID NO: 80544 - DNA, 25 bp, Homo sapien
agtccatgtaatacagcgctggccc

SEQ ID NO: 80545 - DNA, 25 bp, Homo sapien
ggggaaggaaatgttatccaggtca

SEQ ID NO: 80546 - DNA, 25 bp, Homo sapien
tctcacgtgagatagtcggtgtgta

SEQ ID NO: 80547 - DNA, 25 bp, Homo sapien
cgaacactgaaggttggcagattca

SEQ ID NO: 80548 - DNA, 25 bp, Homo sapien
agtatcggtcgaggatactgagagt

SEQ ID NO: 80549 - DNA, 25 bp, Homo sapien
tccgaagacagtcagccaggtttcg

SEQ ID NO: 80550 - DNA, 25 bp, Homo sapien
agccaggtttcggcgtgtgaagtta

SEQ ID NO: 80551 - DNA, 25 bp, Homo sapien
tccgaagacagtcagccaggtttcg

SEQ ID NO: 80552 - DNA, 25 bp, Homo sapien
agtccatgtaatacagcgctggccc

SEQ ID NO: 80553 - DNA, 25 bp, Homo sapien
agtatcggtcgaggatactgagagt

SEQ ID NO: 80554 - DNA, 25 bp, Homo sapien
tctcacgtgagatagtcggtgtgta

SEQ ID NO: 80555 - DNA, 25 bp, Homo sapien
ctaaggagttccactgccctctcac

SEQ ID NO: 80556 - DNA, 25 bp, Homo sapien
attcaggatgaagcgtttctggagc

SEQ ID NO: 80557 - DNA, 25 bp, Homo sapien
cgaacactgaaggttggcagattca

SEQ ID NO: 80558 - DNA, 25 bp, Homo sapien
ggggaaggaaatgttatccaggtca

SEQ ID NO: 80559 - DNA, 25 bp, Homo sapien
aggacatgatgttaggagccctgtt

SEQ ID NO: 80560 - DNA, 25 bp, Homo sapien
tttatcaagagtgcgcctgaaaaga

SEQ ID NO: 80561 - DNA, 25 bp, Homo sapien
agccaggtttcggcgtgtgaagtta

SEQ ID NO: 80562 - DNA, 25 bp, Homo sapien
tccgaagacagtcagccaggtttcg

SEQ ID NO: 80563 - DNA, 25 bp, Homo sapien
agtccatgtaatacagcgctggccc

SEQ ID NO: 80564 - DNA, 25 bp, Homo sapien
agtatcggtcgaggatactgagagt

SEQ ID NO: 80565 - DNA, 25 bp, Homo sapien
tctcacgtgagatagtcggtgtgta

SEQ ID NO: 80566 - DNA, 25 bp, Homo sapien
ctaaggagttccactgccctctcac

SEQ ID NO: 80567 - DNA, 25 bp, Homo sapien
attcaggatgaagcgtttctggagc

SEQ ID NO: 80568 - DNA, 25 bp, Homo sapien
cgaacactgaaggttggcagattca

SEQ ID NO: 80569 - DNA, 25 bp, Homo sapien
ggggaaggaaatgttatccaggtca

SEQ ID NO: 80570 - DNA, 25 bp, Homo sapien
aggacatgatgttaggagccctgtt

SEQ ID NO: 80571 - DNA, 25 bp, Homo sapien
tttatcaagagtgcgcctgaaaaga

SEQ ID NO: 80572 - DNA, 25 bp, Homo sapien
tccgaagacagtcagccaggtttcg

SEQ ID NO: 80573 - DNA, 25 bp, Homo sapien
agtatcggtcgaggatactgagagt

SEQ ID NO: 80574 - DNA, 25 bp, Homo sapien
attcaggatgaagcgtttctggagc

SEQ ID NO: 80575 - DNA, 25 bp, Homo sapien
tctcacgtgagatagtcggtgtgta

SEQ ID NO: 80576 - DNA, 25 bp, Homo sapien
ggggaaggaaatgttatccaggtca

SEQ ID NO: 80577 - DNA, 25 bp, Homo sapien
aggacatgatgttaggagccctgtt

SEQ ID NO: 80578 - DNA, 25 bp, Homo sapien
agccaggtttcggcgtgtgaagtta

SEQ ID NO: 80579 - DNA, 25 bp, Homo sapien
tttatcaagagtgcgcctgaaaaga

SEQ ID NO: 80580 - DNA, 25 bp, Homo sapien
cgaacactgaaggttggcagattca

SEQ ID NO: 80581 - DNA, 25 bp, Homo sapien
ctaaggagttccactgccctctcac

SEQ ID NO: 80582 - DNA, 25 bp, Homo sapien
agtccatgtaatacagcgctggccc

SEQ ID NO: 80583 - DNA, 25 bp, Homo sapien
agccaggtttcggcgtgtgaagtta

SEQ ID NO: 80584 - DNA, 25 bp, Homo sapien
tccgaagacagtcagccaggtttcg

SEQ ID NO: 80585 - DNA, 25 bp, Homo sapien
agtccatgtaatacagcgctggccc

SEQ ID NO: 80586 - DNA, 25 bp, Homo sapien
agtatcggtcgaggatactgagagt

SEQ ID NO: 80587 - DNA, 25 bp, Homo sapien
tctcacgtgagatagtcggtgtgta

SEQ ID NO: 80588 - DNA, 25 bp, Homo sapien
ctaaggagttccactgccctctcac

SEQ ID NO: 80589 - DNA, 25 bp, Homo sapien
attcaggatgaagcgtttctggagc

SEQ ID NO: 80590 - DNA, 25 bp, Homo sapien
cgaacactgaaggttggcagattca

SEQ ID NO: 80591 - DNA, 25 bp, Homo sapien
ggggaaggaaatgttatccaggtca

SEQ ID NO: 80592 - DNA, 25 bp, Homo sapien
aggacatgatgttaggagccctgtt

SEQ ID NO: 80593 - DNA, 25 bp, Homo sapien
tttatcaagagtgcgcctgaaaaga

SEQ ID NO: 80594 - DNA, 25 bp, Homo sapien
tccgaagacagtcagccaggtttcg

SEQ ID NO: 80595 - DNA, 25 bp, Homo sapien
ctaaggagttccactgccctctcac

SEQ ID NO: 80596 - DNA, 25 bp, Homo sapien
cgaacactgaaggttggcagattca

SEQ ID NO: 80597 - DNA, 25 bp, Homo sapien
tctcacgtgagatagtcggtgtgta

SEQ ID NO: 80598 - DNA, 25 bp, Homo sapien
agtccatgtaatacagcgctggccc

SEQ ID NO: 80599 - DNA, 25 bp, Homo sapien
agtatcggtcgaggatactgagagt

SEQ ID NO: 80600 - DNA, 25 bp, Homo sapien
aggacatgatgttaggagccctgtt

SEQ ID NO: 80601 - DNA, 25 bp, Homo sapien
agccaggtttcggcgtgtgaagtta

SEQ ID NO: 80602 - DNA, 25 bp, Homo sapien
attcaggatgaagcgtttctggagc

SEQ ID NO: 80603 - DNA, 25 bp, Homo sapien
ggggaaggaaatgttatccaggtca

SEQ ID NO: 80604 - DNA, 25 bp, Homo sapien
tttatcaagagtgcgcctgaaaaga

SEQ ID NO: 80605 - DNA, 25 bp, Homo sapien
agccaggtttcggcgtgtgaagtta

SEQ ID NO: 80606 - DNA, 25 bp, Homo sapien
tccgaagacagtcagccaggtttcg

SEQ ID NO: 80607 - DNA, 25 bp, Homo sapien
agtccatgtaatacagcgctggccc

SEQ ID NO: 80608 - DNA, 25 bp, Homo sapien
agtatcggtcgaggatactgagagt

SEQ ID NO: 80609 - DNA, 25 bp, Homo sapien
tctcacgtgagatagtcggtgtgta

SEQ ID NO: 80610 - DNA, 25 bp, Homo sapien
ctaaggagttccactgccctctcac

SEQ ID NO: 80611 - DNA, 25 bp, Homo sapien
attcaggatgaagcgtttctggagc

SEQ ID NO: 80612 - DNA, 25 bp, Homo sapien
cgaacactgaaggttggcagattca

SEQ ID NO: 80613 - DNA, 25 bp, Homo sapien
ggggaaggaaatgttatccaggtca

SEQ ID NO: 80614 - DNA, 25 bp, Homo sapien
aggacatgatgttaggagccctgtt

SEQ ID NO: 80615 - DNA, 25 bp, Homo sapien
tttatcaagagtgcgcctgaaaaga

SEQ ID NO: 80616 - DNA, 25 bp, Homo sapien
ggggaaggaaatgttatccaggtca

SEQ ID NO: 80617 - DNA, 25 bp, Homo sapien
cgaacactgaaggttggcagattca

SEQ ID NO: 80618 - DNA, 25 bp, Homo sapien
agccaggtttcggcgtgtgaagtta

SEQ ID NO: 80619 - DNA, 25 bp, Homo sapien
tctcacgtgagatagtcggtgtgta

SEQ ID NO: 80620 - DNA, 25 bp, Homo sapien
tccgaagacagtcagccaggtttcg

SEQ ID NO: 80621 - DNA, 25 bp, Homo sapien
agtccatgtaatacagcgctggccc

SEQ ID NO: 80622 - DNA, 25 bp, Homo sapien
agtatcggtcgaggatactgagagt

SEQ ID NO: 80623 - DNA, 25 bp, Homo sapien
ctaaggagttccactgccctctcac

SEQ ID NO: 80624 - DNA, 25 bp, Homo sapien
attcaggatgaagcgtttctggagc

SEQ ID NO: 80625 - DNA, 25 bp, Homo sapien
tttatcaagagtgcgcctgaaaaga

SEQ ID NO: 80626 - DNA, 25 bp, Homo sapien
aggacatgatgttaggagccctgtt

SEQ ID NO: 80627 - DNA, 25 bp, Homo sapien
agccaggtttcggcgtgtgaagtta

SEQ ID NO: 80628 - DNA, 25 bp, Homo sapien
tccgaagacagtcagccaggtttcg

SEQ ID NO: 80629 - DNA, 25 bp, Homo sapien
agtccatgtaatacagcgctggccc

SEQ ID NO: 80630 - DNA, 25 bp, Homo sapien
agtatcggtcgaggatactgagagt

SEQ ID NO: 80631 - DNA, 25 bp, Homo sapien
tctcacgtgagatagtcggtgtgta

SEQ ID NO: 80632 - DNA, 25 bp, Homo sapien
ctaaggagttccactgccctctcac

SEQ ID NO: 80633 - DNA, 25 bp, Homo sapien
attcaggatgaagcgtttctggagc

SEQ ID NO: 80634 - DNA, 25 bp, Homo sapien
cgaacactgaaggttggcagattca

SEQ ID NO: 80635 - DNA, 25 bp, Homo sapien
ggggaaggaaatgttatccaggtca

SEQ ID NO: 80636 - DNA, 25 bp, Homo sapien
aggacatgatgttaggagccctgtt

SEQ ID NO: 80637 - DNA, 25 bp, Homo sapien
tttatcaagagtgcgcctgaaaaga

SEQ ID NO: 80638 - DNA, 25 bp, Homo sapien
agtccatgtaatacagcgctggccc

SEQ ID NO: 80639 - DNA, 25 bp, Homo sapien
tctcacgtgagatagtcggtgtgta

SEQ ID NO: 80640 - DNA, 25 bp, Homo sapien
agtatcggtcgaggatactgagagt

SEQ ID NO: 80641 - DNA, 25 bp, Homo sapien
attcaggatgaagcgtttctggagc

SEQ ID NO: 80642 - DNA, 25 bp, Homo sapien
ggggaaggaaatgttatccaggtca

SEQ ID NO: 80643 - DNA, 25 bp, Homo sapien
tttatcaagagtgcgcctgaaaaga

SEQ ID NO: 80644 - DNA, 25 bp, Homo sapien
ctaaggagttccactgccctctcac

SEQ ID NO: 80645 - DNA, 25 bp, Homo sapien
tccgaagacagtcagccaggtttcg

SEQ ID NO: 80646 - DNA, 25 bp, Homo sapien
cgaacactgaaggttggcagattca

SEQ ID NO: 80647 - DNA, 25 bp, Homo sapien
aggacatgatgttaggagccctgtt

SEQ ID NO: 80648 - DNA, 25 bp, Homo sapien
agccaggtttcggcgtgtgaagtta

SEQ ID NO: 80649 - DNA, 25 bp, Homo sapien
agccaggtttcggcgtgtgaagtta

SEQ ID NO: 80650 - DNA, 25 bp, Homo sapien
tccgaagacagtcagccaggtttcg

SEQ ID NO: 80651 - DNA, 25 bp, Homo sapien
agtccatgtaatacagcgctggccc

SEQ ID NO: 80652 - DNA, 25 bp, Homo sapien
agtatcggtcgaggatactgagagt

SEQ ID NO: 80653 - DNA, 25 bp, Homo sapien
tctcacgtgagatagtcggtgtgta

SEQ ID NO: 80654 - DNA, 25 bp, Homo sapien
ctaaggagttccactgccctctcac

SEQ ID NO: 80655 - DNA, 25 bp, Homo sapien
attcaggatgaagcgtttctggagc

SEQ ID NO: 80656 - DNA, 25 bp, Homo sapien
cgaacactgaaggttggcagattca

SEQ ID NO: 80657 - DNA, 25 bp, Homo sapien
ggggaaggaaatgttatccaggtca

SEQ ID NO: 80658 - DNA, 25 bp, Homo sapien
aggacatgatgttaggagccctgtt

SEQ ID NO: 80659 - DNA, 25 bp, Homo sapien
tttatcaagagtgcgcctgaaaaga

SEQ ID NO: 80660 - DNA, 25 bp, Homo sapien
agccaggtttcggcgtgtgaagtta

SEQ ID NO: 80661 - DNA, 25 bp, Homo sapien
agtccatgtaatacagcgctggccc

SEQ ID NO: 80662 - DNA, 25 bp, Homo sapien
ctaaggagttccactgccctctcac

SEQ ID NO: 80663 - DNA, 25 bp, Homo sapien
aggacatgatgttaggagccctgtt

SEQ ID NO: 80664 - DNA, 25 bp, Homo sapien
agtatcggtcgaggatactgagagt

SEQ ID NO: 80665 - DNA, 25 bp, Homo sapien
tccgaagacagtcagccaggtttcg

SEQ ID NO: 80666 - DNA, 25 bp, Homo sapien
tctcacgtgagatagtcggtgtgta

SEQ ID NO: 80667 - DNA, 25 bp, Homo sapien
cgaacactgaaggttggcagattca

SEQ ID NO: 80668 - DNA, 25 bp, Homo sapien
attcaggatgaagcgtttctggagc

SEQ ID NO: 80669 - DNA, 25 bp, Homo sapien
tttatcaagagtgcgcctgaaaaga

SEQ ID NO: 80670 - DNA, 25 bp, Homo sapien
ggggaaggaaatgttatccaggtca

SEQ ID NO: 80671 - DNA, 25 bp, Homo sapien
cgaacactgaaggttggcagattca

SEQ ID NO: 80672 - DNA, 25 bp, Homo sapien
tctcacgtgagatagtcggtgtgta

SEQ ID NO: 80673 - DNA, 25 bp, Homo sapien
agccaggtttcggcgtgtgaagtta

SEQ ID NO: 80674 - DNA, 25 bp, Homo sapien
attcaggatgaagcgtttctggagc

SEQ ID NO: 80675 - DNA, 25 bp, Homo sapien
tccgaagacagtcagccaggtttcg

SEQ ID NO: 80676 - DNA, 25 bp, Homo sapien
agtatcggtcgaggatactgagagt

SEQ ID NO: 80677 - DNA, 25 bp, Homo sapien
ctaaggagttccactgccctctcac

SEQ ID NO: 80678 - DNA, 25 bp, Homo sapien
ggggaaggaaatgttatccaggtca

SEQ ID NO: 80679 - DNA, 25 bp, Homo sapien
aggacatgatgttaggagccctgtt

SEQ ID NO: 80680 - DNA, 25 bp, Homo sapien
tttatcaagagtgcgcctgaaaaga

SEQ ID NO: 80681 - DNA, 25 bp, Homo sapien
agtccatgtaatacagcgctggccc

SEQ ID NO: 80682 - DNA, 25 bp, Homo sapien
agccaggtttcggcgtgtgaagtta

SEQ ID NO: 80683 - DNA, 25 bp, Homo sapien
tccgaagacagtcagccaggtttcg

SEQ ID NO: 80684 - DNA, 25 bp, Homo sapien
agtccatgtaatacagcgctggccc

SEQ ID NO: 80685 - DNA, 25 bp, Homo sapien
agtatcggtcgaggatactgagagt

SEQ ID NO: 80686 - DNA, 25 bp, Homo sapien
tctcacgtgagatagtcggtgtgta

SEQ ID NO: 80687 - DNA, 25 bp, Homo sapien
ctaaggagttccactgccctctcac

SEQ ID NO: 80688 - DNA, 25 bp, Homo sapien
attcaggatgaagcgtttctggagc

SEQ ID NO: 80689 - DNA, 25 bp, Homo sapien
cgaacactgaaggttggcagattca

SEQ ID NO: 80690 - DNA, 25 bp, Homo sapien
ggggaaggaaatgttatccaggtca

SEQ ID NO: 80691 - DNA, 25 bp, Homo sapien
aggacatgatgttaggagccctgtt

SEQ ID NO: 80692 - DNA, 25 bp, Homo sapien
tttatcaagagtgcgcctgaaaaga

SEQ ID NO: 80693 - DNA, 25 bp, Homo sapien
cgaacactgaaggttggcagattca

SEQ ID NO: 80694 - DNA, 25 bp, Homo sapien
tccgaagacagtcagccaggtttcg

SEQ ID NO: 80695 - DNA, 25 bp, Homo sapien
agccaggtttcggcgtgtgaagtta

SEQ ID NO: 80696 - DNA, 25 bp, Homo sapien
aggacatgatgttaggagccctgtt

SEQ ID NO: 80697 - DNA, 25 bp, Homo sapien
agtccatgtaatacagcgctggccc

SEQ ID NO: 80698 - DNA, 25 bp, Homo sapien
agtatcggtcgaggatactgagagt

SEQ ID NO: 80699 - DNA, 25 bp, Homo sapien
ggggaaggaaatgttatccaggtca

SEQ ID NO: 80700 - DNA, 25 bp, Homo sapien
ctaaggagttccactgccctctcac

SEQ ID NO: 80701 - DNA, 25 bp, Homo sapien
tctcacgtgagatagtcggtgtgta

SEQ ID NO: 80702 - DNA, 25 bp, Homo sapien
attcaggatgaagcgtttctggagc

SEQ ID NO: 80703 - DNA, 25 bp, Homo sapien
tttatcaagagtgcgcctgaaaaga

SEQ ID NO: 80704 - DNA, 25 bp, Homo sapien
agccaggtttcggcgtgtgaagtta

SEQ ID NO: 80705 - DNA, 25 bp, Homo sapien
tccgaagacagtcagccaggtttcg

SEQ ID NO: 80706 - DNA, 25 bp, Homo sapien
agtccatgtaatacagcgctggccc

SEQ ID NO: 80707 - DNA, 25 bp, Homo sapien
agtatcggtcgaggatactgagagt

SEQ ID NO: 80708 - DNA, 25 bp, Homo sapien
tctcacgtgagatagtcggtgtgta

SEQ ID NO: 80709 - DNA, 25 bp, Homo sapien
ctaaggagttccactgccctctcac

SEQ ID NO: 80710 - DNA, 25 bp, Homo sapien
attcaggatgaagcgtttctggagc

SEQ ID NO: 80711 - DNA, 25 bp, Homo sapien
cgaacactgaaggttggcagattca

SEQ ID NO: 80712 - DNA, 25 bp, Homo sapien
ggggaaggaaatgttatccaggtca

SEQ ID NO: 80713 - DNA, 25 bp, Homo sapien
aggacatgatgttaggagccctgtt

SEQ ID NO: 80714 - DNA, 25 bp, Homo sapien
tttatcaagagtgcgcctgaaaaga

SEQ ID NO: 80715 - DNA, 25 bp, Homo sapien
ctaaggagttccactgccctctcac

SEQ ID NO: 80716 - DNA, 25 bp, Homo sapien
tctcacgtgagatagtcggtgtgta

SEQ ID NO: 80717 - DNA, 25 bp, Homo sapien
tccgaagacagtcagccaggtttcg

SEQ ID NO: 80718 - DNA, 25 bp, Homo sapien
tttatcaagagtgcgcctgaaaaga

SEQ ID NO: 80719 - DNA, 25 bp, Homo sapien
ggggaaggaaatgttatccaggtca

SEQ ID NO: 80720 - DNA, 25 bp, Homo sapien
agtccatgtaatacagcgctggccc

SEQ ID NO: 80721 - DNA, 25 bp, Homo sapien
agtatcggtcgaggatactgagagt

SEQ ID NO: 80722 - DNA, 25 bp, Homo sapien
agccaggtttcggcgtgtgaagtta

SEQ ID NO: 80723 - DNA, 25 bp, Homo sapien
cgaacactgaaggttggcagattca

SEQ ID NO: 80724 - DNA, 25 bp, Homo sapien
aggacatgatgttaggagccctgtt

SEQ ID NO: 80725 - DNA, 25 bp, Homo sapien
attcaggatgaagcgtttctggagc

SEQ ID NO: 80726 - DNA, 25 bp, Homo sapien
agccaggtttcggcgtgtgaagtta

SEQ ID NO: 80727 - DNA, 25 bp, Homo sapien
tccgaagacagtcagccaggtttcg

SEQ ID NO: 80728 - DNA, 25 bp, Homo sapien
agtccatgtaatacagcgctggccc

SEQ ID NO: 80729 - DNA, 25 bp, Homo sapien
agtatcggtcgaggatactgagagt

SEQ ID NO: 80730 - DNA, 25 bp, Homo sapien
tctcacgtgagatagtcggtgtgta

SEQ ID NO: 80731 - DNA, 25 bp, Homo sapien
ctaaggagttccactgccctctcac

SEQ ID NO: 80732 - DNA, 25 bp, Homo sapien
attcaggatgaagcgtttctggagc

SEQ ID NO: 80733 - DNA, 25 bp, Homo sapien
cgaacactgaaggttggcagattca

SEQ ID NO: 80734 - DNA, 25 bp, Homo sapien
ggggaaggaaatgttatccaggtca

SEQ ID NO: 80735 - DNA, 25 bp, Homo sapien
aggacatgatgttaggagccctgtt

SEQ ID NO: 80736 - DNA, 25 bp, Homo sapien
tttatcaagagtgcgcctgaaaaga

SEQ ID NO: 80737 - DNA, 25 bp, Homo sapien
ctaaggagttccactgccctctcac

SEQ ID NO: 80738 - DNA, 25 bp, Homo sapien
tttatcaagagtgcgcctgaaaaga

SEQ ID NO: 80739 - DNA, 25 bp, Homo sapien
tctcacgtgagatagtcggtgtgta

SEQ ID NO: 80740 - DNA, 25 bp, Homo sapien
aggacatgatgttaggagccctgtt

SEQ ID NO: 80741 - DNA, 25 bp, Homo sapien
attcaggatgaagcgtttctggagc

SEQ ID NO: 80742 - DNA, 25 bp, Homo sapien
tccgaagacagtcagccaggtttcg

SEQ ID NO: 80743 - DNA, 25 bp, Homo sapien
ggggaaggaaatgttatccaggtca

SEQ ID NO: 80744 - DNA, 25 bp, Homo sapien
cgaacactgaaggttggcagattca

SEQ ID NO: 80745 - DNA, 25 bp, Homo sapien
agtccatgtaatacagcgctggccc

SEQ ID NO: 80746 - DNA, 25 bp, Homo sapien
agtatcggtcgaggatactgagagt

SEQ ID NO: 80747 - DNA, 25 bp, Homo sapien
agccaggtttcggcgtgtgaagtta

SEQ ID NO: 80748 - DNA, 25 bp, Homo sapien
agccaggtttcggcgtgtgaagtta

SEQ ID NO: 80749 - DNA, 25 bp, Homo sapien
tccgaagacagtcagccaggtttcg

SEQ ID NO: 80750 - DNA, 25 bp, Homo sapien
agtccatgtaatacagcgctggccc

SEQ ID NO: 80751 - DNA, 25 bp, Homo sapien
agtatcggtcgaggatactgagagt

SEQ ID NO: 80752 - DNA, 25 bp, Homo sapien
tctcacgtgagatagtcggtgtgta

SEQ ID NO: 80753 - DNA, 25 bp, Homo sapien
ctaaggagttccactgccctctcac

SEQ ID NO: 80754 - DNA, 25 bp, Homo sapien
attcaggatgaagcgtttctggagc

SEQ ID NO: 80755 - DNA, 25 bp, Homo sapien
cgaacactgaaggttggcagattca

SEQ ID NO: 80756 - DNA, 25 bp, Homo sapien
ggggaaggaaatgttatccaggtca

SEQ ID NO: 80757 - DNA, 25 bp, Homo sapien
aggacatgatgttaggagccctgtt

SEQ ID NO: 80758 - DNA, 25 bp, Homo sapien
tttatcaagagtgcgcctgaaaaga

SEQ ID NO: 80759 - DNA, 25 bp, Homo sapien
ggggaaggaaatgttatccaggtca

SEQ ID NO: 80760 - DNA, 25 bp, Homo sapien
tctcacgtgagatagtcggtgtgta

SEQ ID NO: 80761 - DNA, 25 bp, Homo sapien
ctaaggagttccactgccctctcac

SEQ ID NO: 80762 - DNA, 25 bp, Homo sapien
attcaggatgaagcgtttctggagc

SEQ ID NO: 80763 - DNA, 25 bp, Homo sapien
cgaacactgaaggttggcagattca

SEQ ID NO: 80764 - DNA, 25 bp, Homo sapien
agccaggtttcggcgtgtgaagtta

SEQ ID NO: 80765 - DNA, 25 bp, Homo sapien
aggacatgatgttaggagccctgtt

SEQ ID NO: 80766 - DNA, 25 bp, Homo sapien
agtccatgtaatacagcgctggccc

SEQ ID NO: 80767 - DNA, 25 bp, Homo sapien
tccgaagacagtcagccaggtttcg

SEQ ID NO: 80768 - DNA, 25 bp, Homo sapien
agtatcggtcgaggatactgagagt

SEQ ID NO: 80769 - DNA, 25 bp, Homo sapien
tttatcaagagtgcgcctgaaaaga

SEQ ID NO: 80770 - DNA, 25 bp, Homo sapien
agccaggtttcggcgtgtgaagtta

SEQ ID NO: 80771 - DNA, 25 bp, Homo sapien
tccgaagacagtcagccaggtttcg

SEQ ID NO: 80772 - DNA, 25 bp, Homo sapien
agtccatgtaatacagcgctggccc

SEQ ID NO: 80773 - DNA, 25 bp, Homo sapien
agtatcggtcgaggatactgagagt

SEQ ID NO: 80774 - DNA, 25 bp, Homo sapien
tctcacgtgagatagtcggtgtgta

SEQ ID NO: 80775 - DNA, 25 bp, Homo sapien
ctaaggagttccactgccctctcac

SEQ ID NO: 80776 - DNA, 25 bp, Homo sapien
attcaggatgaagcgtttctggagc

SEQ ID NO: 80777 - DNA, 25 bp, Homo sapien
cgaacactgaaggttggcagattca

SEQ ID NO: 80778 - DNA, 25 bp, Homo sapien
ggggaaggaaatgttatccaggtca

SEQ ID NO: 80779 - DNA, 25 bp, Homo sapien
aggacatgatgttaggagccctgtt

SEQ ID NO: 80780 - DNA, 25 bp, Homo sapien
tttatcaagagtgcgcctgaaaaga

SEQ ID NO: 80781 - DNA, 25 bp, Homo sapien
agccaggtttcggcgtgtgaagtta

SEQ ID NO: 80782 - DNA, 25 bp, Homo sapien
tttatcaagagtgcgcctgaaaaga

SEQ ID NO: 80783 - DNA, 25 bp, Homo sapien
tctcacgtgagatagtcggtgtgta

SEQ ID NO: 80784 - DNA, 25 bp, Homo sapien
attcaggatgaagcgtttctggagc

SEQ ID NO: 80785 - DNA, 25 bp, Homo sapien
tccgaagacagtcagccaggtttcg

SEQ ID NO: 80786 - DNA, 25 bp, Homo sapien
aggacatgatgttaggagccctgtt

SEQ ID NO: 80787 - DNA, 25 bp, Homo sapien
ggggaaggaaatgttatccaggtca

SEQ ID NO: 80788 - DNA, 25 bp, Homo sapien
agtccatgtaatacagcgctggccc

SEQ ID NO: 80789 - DNA, 25 bp, Homo sapien
cgaacactgaaggttggcagattca

SEQ ID NO: 80790 - DNA, 25 bp, Homo sapien
agtatcggtcgaggatactgagagt

SEQ ID NO: 80791 - DNA, 25 bp, Homo sapien
ctaaggagttccactgccctctcac

SEQ ID NO: 80792 - DNA, 25 bp, Homo sapien
agccaggtttcggcgtgtgaagtta

SEQ ID NO: 80793 - DNA, 25 bp, Homo sapien
tccgaagacagtcagccaggtttcg

SEQ ID NO: 80794 - DNA, 25 bp, Homo sapien
agtccatgtaatacagcgctggccc

SEQ ID NO: 80795 - DNA, 25 bp, Homo sapien
agtatcggtcgaggatactgagagt

SEQ ID NO: 80796 - DNA, 25 bp, Homo sapien
tctcacgtgagatagtcggtgtgta

SEQ ID NO: 80797 - DNA, 25 bp, Homo sapien
ctaaggagttccactgccctctcac

SEQ ID NO: 80798 - DNA, 25 bp, Homo sapien
attcaggatgaagcgtttctggagc

SEQ ID NO: 80799 - DNA, 25 bp, Homo sapien
cgaacactgaaggttggcagattca

SEQ ID NO: 80800 - DNA, 25 bp, Homo sapien
ggggaaggaaatgttatccaggtca

SEQ ID NO: 80801 - DNA, 25 bp, Homo sapien
aggacatgatgttaggagccctgtt

SEQ ID NO: 80802 - DNA, 25 bp, Homo sapien
tttatcaagagtgcgcctgaaaaga

SEQ ID NO: 80803 - DNA, 25 bp, Homo sapien
agccaggtttcggcgtgtgaagtta

SEQ ID NO: 80804 - DNA, 25 bp, Homo sapien
tccgaagacagtcagccaggtttcg

SEQ ID NO: 80805 - DNA, 25 bp, Homo sapien
agtccatgtaatacagcgctggccc

SEQ ID NO: 80806 - DNA, 25 bp, Homo sapien
agtatcggtcgaggatactgagagt

SEQ ID NO: 80807 - DNA, 25 bp, Homo sapien
tctcacgtgagatagtcggtgtgta

SEQ ID NO: 80808 - DNA, 25 bp, Homo sapien
ctaaggagttccactgccctctcac

SEQ ID NO: 80809 - DNA, 25 bp, Homo sapien
attcaggatgaagcgtttctggagc

SEQ ID NO: 80810 - DNA, 25 bp, Homo sapien
cgaacactgaaggttggcagattca

SEQ ID NO: 80811 - DNA, 25 bp, Homo sapien
ggggaaggaaatgttatccaggtca

SEQ ID NO: 80812 - DNA, 25 bp, Homo sapien
aggacatgatgttaggagccctgtt

SEQ ID NO: 80813 - DNA, 25 bp, Homo sapien
tttatcaagagtgcgcctgaaaaga

SEQ ID NO: 80814 - DNA, 25 bp, Homo sapien
agtccatgtaatacagcgctggccc

SEQ ID NO: 80815 - DNA, 25 bp, Homo sapien
tctcacgtgagatagtcggtgtgta

SEQ ID NO: 80816 - DNA, 25 bp, Homo sapien
aggacatgatgttaggagccctgtt

SEQ ID NO: 80817 - DNA, 25 bp, Homo sapien
ggggaaggaaatgttatccaggtca

SEQ ID NO: 80818 - DNA, 25 bp, Homo sapien
attcaggatgaagcgtttctggagc

SEQ ID NO: 80819 - DNA, 25 bp, Homo sapien
agtatcggtcgaggatactgagagt

SEQ ID NO: 80820 - DNA, 25 bp, Homo sapien
tccgaagacagtcagccaggtttcg

SEQ ID NO: 80821 - DNA, 25 bp, Homo sapien
ctaaggagttccactgccctctcac

SEQ ID NO: 80822 - DNA, 25 bp, Homo sapien
tttatcaagagtgcgcctgaaaaga

SEQ ID NO: 80823 - DNA, 25 bp, Homo sapien
cgaacactgaaggttggcagattca

SEQ ID NO: 80824 - DNA, 25 bp, Homo sapien
agccaggtttcggcgtgtgaagtta

SEQ ID NO: 80825 - DNA, 25 bp, Homo sapien
agccaggtttcggcgtgtgaagtta

SEQ ID NO: 80826 - DNA, 25 bp, Homo sapien
tccgaagacagtcagccaggtttcg

SEQ ID NO: 80827 - DNA, 25 bp, Homo sapien
agtccatgtaatacagcgctggccc

SEQ ID NO: 80828 - DNA, 25 bp, Homo sapien
agtatcggtcgaggatactgagagt

SEQ ID NO: 80829 - DNA, 25 bp, Homo sapien
tctcacgtgagatagtcggtgtgta

SEQ ID NO: 80830 - DNA, 25 bp, Homo sapien
ctaaggagttccactgccctctcac

SEQ ID NO: 80831 - DNA, 25 bp, Homo sapien
attcaggatgaagcgtttctggagc

SEQ ID NO: 80832 - DNA, 25 bp, Homo sapien
cgaacactgaaggttggcagattca

SEQ ID NO: 80833 - DNA, 25 bp, Homo sapien
ggggaaggaaatgttatccaggtca

SEQ ID NO: 80834 - DNA, 25 bp, Homo sapien
aggacatgatgttaggagccctgtt

SEQ ID NO: 80835 - DNA, 25 bp, Homo sapien
tttatcaagagtgcgcctgaaaaga

SEQ ID NO: 80836 - DNA, 25 bp, Homo sapien
tctcacgtgagatagtcggtgtgta

SEQ ID NO: 80837 - DNA, 25 bp, Homo sapien
cgaacactgaaggttggcagattca

SEQ ID NO: 80838 - DNA, 25 bp, Homo sapien
ctaaggagttccactgccctctcac

SEQ ID NO: 80839 - DNA, 25 bp, Homo sapien
tccgaagacagtcagccaggtttcg

SEQ ID NO: 80840 - DNA, 25 bp, Homo sapien
ggggaaggaaatgttatccaggtca

SEQ ID NO: 80841 - DNA, 25 bp, Homo sapien
agccaggtttcggcgtgtgaagtta

SEQ ID NO: 80842 - DNA, 25 bp, Homo sapien
tttatcaagagtgcgcctgaaaaga

SEQ ID NO: 80843 - DNA, 25 bp, Homo sapien
agtccatgtaatacagcgctggccc

SEQ ID NO: 80844 - DNA, 25 bp, Homo sapien
attcaggatgaagcgtttctggagc

SEQ ID NO: 80845 - DNA, 25 bp, Homo sapien
agtatcggtcgaggatactgagagt

SEQ ID NO: 80846 - DNA, 25 bp, Homo sapien
aggacatgatgttaggagccctgtt

SEQ ID NO: 80847 - DNA, 25 bp, Homo sapien
agccaggtttcggcgtgtgaagtta

SEQ ID NO: 80848 - DNA, 25 bp, Homo sapien
tccgaagacagtcagccaggtttcg

SEQ ID NO: 80849 - DNA, 25 bp, Homo sapien
agtccatgtaatacagcgctggccc

SEQ ID NO: 80850 - DNA, 25 bp, Homo sapien
agtatcggtcgaggatactgagagt

SEQ ID NO: 80851 - DNA, 25 bp, Homo sapien
tctcacgtgagatagtcggtgtgta

SEQ ID NO: 80852 - DNA, 25 bp, Homo sapien
ctaaggagttccactgccctctcac

SEQ ID NO: 80853 - DNA, 25 bp, Homo sapien
attcaggatgaagcgtttctggagc

SEQ ID NO: 80854 - DNA, 25 bp, Homo sapien
cgaacactgaaggttggcagattca

SEQ ID NO: 80855 - DNA, 25 bp, Homo sapien
ggggaaggaaatgttatccaggtca

SEQ ID NO: 80856 - DNA, 25 bp, Homo sapien
aggacatgatgttaggagccctgtt

SEQ ID NO: 80857 - DNA, 25 bp, Homo sapien
tttatcaagagtgcgcctgaaaaga

SEQ ID NO: 80858 - DNA, 25 bp, Homo sapien
tttatcaagagtgcgcctgaaaaga

SEQ ID NO: 80859 - DNA, 25 bp, Homo sapien
aggacatgatgttaggagccctgtt

SEQ ID NO: 80860 - DNA, 25 bp, Homo sapien
tctcacgtgagatagtcggtgtgta

SEQ ID NO: 80861 - DNA, 25 bp, Homo sapien
tccgaagacagtcagccaggtttcg

SEQ ID NO: 80862 - DNA, 25 bp, Homo sapien
ggggaaggaaatgttatccaggtca

SEQ ID NO: 80863 - DNA, 25 bp, Homo sapien
ctaaggagttccactgccctctcac

SEQ ID NO: 80864 - DNA, 25 bp, Homo sapien
agccaggtttcggcgtgtgaagtta

SEQ ID NO: 80865 - DNA, 25 bp, Homo sapien
agtccatgtaatacagcgctggccc

SEQ ID NO: 80866 - DNA, 25 bp, Homo sapien
agtatcggtcgaggatactgagagt

SEQ ID NO: 80867 - DNA, 25 bp, Homo sapien
cgaacactgaaggttggcagattca

SEQ ID NO: 80868 - DNA, 25 bp, Homo sapien
attcaggatgaagcgtttctggagc

SEQ ID NO: 80869 - DNA, 25 bp, Homo sapien
agccaggtttcggcgtgtgaagtta

SEQ ID NO: 80870 - DNA, 25 bp, Homo sapien
tccgaagacagtcagccaggtttcg

SEQ ID NO: 80871 - DNA, 25 bp, Homo sapien
agtccatgtaatacagcgctggccc

SEQ ID NO: 80872 - DNA, 25 bp, Homo sapien
agtatcggtcgaggatactgagagt

SEQ ID NO: 80873 - DNA, 25 bp, Homo sapien
tctcacgtgagatagtcggtgtgta

SEQ ID NO: 80874 - DNA, 25 bp, Homo sapien
ctaaggagttccactgccctctcac

SEQ ID NO: 80875 - DNA, 25 bp, Homo sapien
attcaggatgaagcgtttctggagc

SEQ ID NO: 80876 - DNA, 25 bp, Homo sapien
cgaacactgaaggttggcagattca

SEQ ID NO: 80877 - DNA, 25 bp, Homo sapien
ggggaaggaaatgttatccaggtca

SEQ ID NO: 80878 - DNA, 25 bp, Homo sapien
aggacatgatgttaggagccctgtt

SEQ ID NO: 80879 - DNA, 25 bp, Homo sapien
tttatcaagagtgcgcctgaaaaga

SEQ ID NO: 80880 - DNA, 25 bp, Homo sapien
tctcacgtgagatagtcggtgtgta

SEQ ID NO: 80881 - DNA, 25 bp, Homo sapien
agtccatgtaatacagcgctggccc

SEQ ID NO: 80882 - DNA, 25 bp, Homo sapien
cgaacactgaaggttggcagattca

SEQ ID NO: 80883 - DNA, 25 bp, Homo sapien
attcaggatgaagcgtttctggagc

SEQ ID NO: 80884 - DNA, 25 bp, Homo sapien
aggacatgatgttaggagccctgtt

SEQ ID NO: 80885 - DNA, 25 bp, Homo sapien
tttatcaagagtgcgcctgaaaaga

SEQ ID NO: 80886 - DNA, 25 bp, Homo sapien
tccgaagacagtcagccaggtttcg

SEQ ID NO: 80887 - DNA, 25 bp, Homo sapien
ctaaggagttccactgccctctcac

SEQ ID NO: 80888 - DNA, 25 bp, Homo sapien
ggggaaggaaatgttatccaggtca

SEQ ID NO: 80889 - DNA, 25 bp, Homo sapien
agccaggtttcggcgtgtgaagtta

SEQ ID NO: 80890 - DNA, 25 bp, Homo sapien
agtatcggtcgaggatactgagagt

SEQ ID NO: 80891 - DNA, 25 bp, Homo sapien
agccaggtttcggcgtgtgaagtta

SEQ ID NO: 80892 - DNA, 25 bp, Homo sapien
tccgaagacagtcagccaggtttcg

SEQ ID NO: 80893 - DNA, 25 bp, Homo sapien
agtccatgtaatacagcgctggccc

SEQ ID NO: 80894 - DNA, 25 bp, Homo sapien
agtatcggtcgaggatactgagagt

SEQ ID NO: 80895 - DNA, 25 bp, Homo sapien
tctcacgtgagatagtcggtgtgta

SEQ ID NO: 80896 - DNA, 25 bp, Homo sapien
ctaaggagttccactgccctctcac

SEQ ID NO: 80897 - DNA, 25 bp, Homo sapien
attcaggatgaagcgtttctggagc

SEQ ID NO: 80898 - DNA, 25 bp, Homo sapien
cgaacactgaaggttggcagattca

SEQ ID NO: 80899 - DNA, 25 bp, Homo sapien
ggggaaggaaatgttatccaggtca

SEQ ID NO: 80900 - DNA, 25 bp, Homo sapien
aggacatgatgttaggagccctgtt

SEQ ID NO: 80901 - DNA, 25 bp, Homo sapien
tttatcaagagtgcgcctgaaaaga

SEQ ID NO: 80902 - DNA, 25 bp, Homo sapien
ctaaggagttccactgccctctcac

SEQ ID NO: 80903 - DNA, 25 bp, Homo sapien
ggggaaggaaatgttatccaggtca

SEQ ID NO: 80904 - DNA, 25 bp, Homo sapien
cgaacactgaaggttggcagattca

SEQ ID NO: 80905 - DNA, 25 bp, Homo sapien
aggacatgatgttaggagccctgtt

SEQ ID NO: 80906 - DNA, 25 bp, Homo sapien
tccgaagacagtcagccaggtttcg

SEQ ID NO: 80907 - DNA, 25 bp, Homo sapien
tttatcaagagtgcgcctgaaaaga

SEQ ID NO: 80908 - DNA, 25 bp, Homo sapien
tctcacgtgagatagtcggtgtgta

SEQ ID NO: 80909 - DNA, 25 bp, Homo sapien
agtatcggtcgaggatactgagagt

SEQ ID NO: 80910 - DNA, 25 bp, Homo sapien
agtccatgtaatacagcgctggccc

SEQ ID NO: 80911 - DNA, 25 bp, Homo sapien
attcaggatgaagcgtttctggagc

SEQ ID NO: 80912 - DNA, 25 bp, Homo sapien
agccaggtttcggcgtgtgaagtta

SEQ ID NO: 80913 - DNA, 25 bp, Homo sapien
ggggaaggaaatgttatccaggtca

SEQ ID NO: 80914 - DNA, 25 bp, Homo sapien
aggacatgatgttaggagccctgtt

SEQ ID NO: 80915 - DNA, 25 bp, Homo sapien
attcaggatgaagcgtttctggagc

SEQ ID NO: 80916 - DNA, 25 bp, Homo sapien
tctcacgtgagatagtcggtgtgta

SEQ ID NO: 80917 - DNA, 25 bp, Homo sapien
tccgaagacagtcagccaggtttcg

SEQ ID NO: 80918 - DNA, 25 bp, Homo sapien
agccaggtttcggcgtgtgaagtta

SEQ ID NO: 80919 - DNA, 25 bp, Homo sapien
ctaaggagttccactgccctctcac

SEQ ID NO: 80920 - DNA, 25 bp, Homo sapien
tttatcaagagtgcgcctgaaaaga

SEQ ID NO: 80921 - DNA, 25 bp, Homo sapien
agtccatgtaatacagcgctggccc

SEQ ID NO: 80922 - DNA, 25 bp, Homo sapien
cgaacactgaaggttggcagattca

SEQ ID NO: 80923 - DNA, 25 bp, Homo sapien
agtatcggtcgaggatactgagagt

SEQ ID NO: 80924 - DNA, 25 bp, Homo sapien
agccaggtttcggcgtgtgaagtta

SEQ ID NO: 80925 - DNA, 25 bp, Homo sapien
tccgaagacagtcagccaggtttcg

SEQ ID NO: 80926 - DNA, 25 bp, Homo sapien
agtccatgtaatacagcgctggccc

SEQ ID NO: 80927 - DNA, 25 bp, Homo sapien
agtatcggtcgaggatactgagagt

SEQ ID NO: 80928 - DNA, 25 bp, Homo sapien
tctcacgtgagatagtcggtgtgta

SEQ ID NO: 80929 - DNA, 25 bp, Homo sapien
ctaaggagttccactgccctctcac

SEQ ID NO: 80930 - DNA, 25 bp, Homo sapien
attcaggatgaagcgtttctggagc

SEQ ID NO: 80931 - DNA, 25 bp, Homo sapien
cgaacactgaaggttggcagattca

SEQ ID NO: 80932 - DNA, 25 bp, Homo sapien
ggggaaggaaatgttatccaggtca

SEQ ID NO: 80933 - DNA, 25 bp, Homo sapien
aggacatgatgttaggagccctgtt

SEQ ID NO: 80934 - DNA, 25 bp, Homo sapien
tttatcaagagtgcgcctgaaaaga

SEQ ID NO: 80935 - DNA, 25 bp, Homo sapien
ctaaggagttccactgccctctcac

SEQ ID NO: 80936 - DNA, 25 bp, Homo sapien
cgaacactgaaggttggcagattca

SEQ ID NO: 80937 - DNA, 25 bp, Homo sapien
tctcacgtgagatagtcggtgtgta

SEQ ID NO: 80938 - DNA, 25 bp, Homo sapien
tccgaagacagtcagccaggtttcg

SEQ ID NO: 80939 - DNA, 25 bp, Homo sapien
ggggaaggaaatgttatccaggtca

SEQ ID NO: 80940 - DNA, 25 bp, Homo sapien
tttatcaagagtgcgcctgaaaaga

SEQ ID NO: 80941 - DNA, 25 bp, Homo sapien
agtatcggtcgaggatactgagagt

SEQ ID NO: 80942 - DNA, 25 bp, Homo sapien
agccaggtttcggcgtgtgaagtta

SEQ ID NO: 80943 - DNA, 25 bp, Homo sapien
attcaggatgaagcgtttctggagc

SEQ ID NO: 80944 - DNA, 25 bp, Homo sapien
aggacatgatgttaggagccctgtt

SEQ ID NO: 80945 - DNA, 25 bp, Homo sapien
agtccatgtaatacagcgctggccc

SEQ ID NO: 80946 - DNA, 25 bp, Homo sapien
agccaggtttcggcgtgtgaagtta

SEQ ID NO: 80947 - DNA, 25 bp, Homo sapien
tccgaagacagtcagccaggtttcg

SEQ ID NO: 80948 - DNA, 25 bp, Homo sapien
agtccatgtaatacagcgctggccc

SEQ ID NO: 80949 - DNA, 25 bp, Homo sapien
agtatcggtcgaggatactgagagt

SEQ ID NO: 80950 - DNA, 25 bp, Homo sapien
tctcacgtgagatagtcggtgtgta

SEQ ID NO: 80951 - DNA, 25 bp, Homo sapien
ctaaggagttccactgccctctcac

SEQ ID NO: 80952 - DNA, 25 bp, Homo sapien
attcaggatgaagcgtttctggagc

SEQ ID NO: 80953 - DNA, 25 bp, Homo sapien
cgaacactgaaggttggcagattca

SEQ ID NO: 80954 - DNA, 25 bp, Homo sapien
ggggaaggaaatgttatccaggtca

SEQ ID NO: 80955 - DNA, 25 bp, Homo sapien
aggacatgatgttaggagccctgtt

SEQ ID NO: 80956 - DNA, 25 bp, Homo sapien
tttatcaagagtgcgcctgaaaaga

SEQ ID NO: 80957 - DNA, 25 bp, Homo sapien
aggacatgatgttaggagccctgtt

SEQ ID NO: 80958 - DNA, 25 bp, Homo sapien
tctcacgtgagatagtcggtgtgta

SEQ ID NO: 80959 - DNA, 25 bp, Homo sapien
cgaacactgaaggttggcagattca

SEQ ID NO: 80960 - DNA, 25 bp, Homo sapien
agtccatgtaatacagcgctggccc

SEQ ID NO: 80961 - DNA, 25 bp, Homo sapien
tttatcaagagtgcgcctgaaaaga

SEQ ID NO: 80962 - DNA, 25 bp, Homo sapien
agccaggtttcggcgtgtgaagtta

SEQ ID NO: 80963 - DNA, 25 bp, Homo sapien
attcaggatgaagcgtttctggagc

SEQ ID NO: 80964 - DNA, 25 bp, Homo sapien
ctaaggagttccactgccctctcac

SEQ ID NO: 80965 - DNA, 25 bp, Homo sapien
tccgaagacagtcagccaggtttcg

SEQ ID NO: 80966 - DNA, 25 bp, Homo sapien
ggggaaggaaatgttatccaggtca

SEQ ID NO: 80967 - DNA, 25 bp, Homo sapien
agtatcggtcgaggatactgagagt

SEQ ID NO: 80968 - DNA, 25 bp, Homo sapien
agccaggtttcggcgtgtgaagtta

SEQ ID NO: 80969 - DNA, 25 bp, Homo sapien
tccgaagacagtcagccaggtttcg

SEQ ID NO: 80970 - DNA, 25 bp, Homo sapien
agtccatgtaatacagcgctggccc

SEQ ID NO: 80971 - DNA, 25 bp, Homo sapien
agtatcggtcgaggatactgagagt

SEQ ID NO: 80972 - DNA, 25 bp, Homo sapien
tctcacgtgagatagtcggtgtgta

SEQ ID NO: 80973 - DNA, 25 bp, Homo sapien
ctaaggagttccactgccctctcac

SEQ ID NO: 80974 - DNA, 25 bp, Homo sapien
attcaggatgaagcgtttctggagc

SEQ ID NO: 80975 - DNA, 25 bp, Homo sapien
cgaacactgaaggttggcagattca

SEQ ID NO: 80976 - DNA, 25 bp, Homo sapien
ggggaaggaaatgttatccaggtca

SEQ ID NO: 80977 - DNA, 25 bp, Homo sapien
aggacatgatgttaggagccctgtt

SEQ ID NO: 80978 - DNA, 25 bp, Homo sapien
tttatcaagagtgcgcctgaaaaga

SEQ ID NO: 80979 - DNA, 25 bp, Homo sapien
agacctagtcccacgggacgggtca

SEQ ID NO: 80980 - DNA, 25 bp, Homo sapien
tgacccgtcccgtgggactaggtct

SEQ ID NO: 80981 - DNA, 25 bp, Homo sapien
taattggatttgtaccgtcctccca

SEQ ID NO: 80982 - DNA, 25 bp, Homo sapien
cctcccattttgttctcggaagatt

SEQ ID NO: 80983 - DNA, 25 bp, Homo sapien
gatgcagagctttttagccatgaag

SEQ ID NO: 80984 - DNA, 25 bp, Homo sapien
aatctagccccagacatactgtgtt

SEQ ID NO: 80985 - DNA, 25 bp, Homo sapien
gaaaagttcacttggacgctggggc

SEQ ID NO: 80986 - DNA, 25 bp, Homo sapien
tgactttttcattacgtgggttttg

SEQ ID NO: 80987 - DNA, 25 bp, Homo sapien
aggcctcctgaattgagtttgatgc

SEQ ID NO: 80988 - DNA, 25 bp, Homo sapien
gtccatttgagattctgcactccat

SEQ ID NO: 80989 - DNA, 25 bp, Homo sapien
gctacatgtgtaagtctgcctaaat

SEQ ID NO: 80990 - DNA, 25 bp, Homo sapien
ttgtcaatatatcgaactgttccca

SEQ ID NO: 80991 - DNA, 25 bp, Homo sapien
gtcaagtatgtctcaacactagcat

SEQ ID NO: 80992 - DNA, 25 bp, Homo sapien
aatcttccgagaacaaaatgggagg

SEQ ID NO: 80993 - DNA, 25 bp, Homo sapien
atttaggcagacttacacatgtagc

SEQ ID NO: 80994 - DNA, 25 bp, Homo sapien
aacacagtatgtctggggctagatt

SEQ ID NO: 80995 - DNA, 25 bp, Homo sapien
tgggaacagttcgatatattgacaa

SEQ ID NO: 80996 - DNA, 25 bp, Homo sapien
tgggaggacggtacaaatccaatta

SEQ ID NO: 80997 - DNA, 25 bp, Homo sapien
gccccagcgtccaagtgaacttttc

SEQ ID NO: 80998 - DNA, 25 bp, Homo sapien
gcatcaaactcaattcaggaggcct

SEQ ID NO: 80999 - DNA, 25 bp, Homo sapien
atggagtgcagaatctcaaatggac

SEQ ID NO: 81000 - DNA, 25 bp, Homo sapien
caaaacccacgtaatgaaaaagtca

SEQ ID NO: 81001 - DNA, 25 bp, Homo sapien
cttcatggctaaaaagctctgcatc

SEQ ID NO: 81002 - DNA, 25 bp, Homo sapien
atgctagtgttgagacatacttgac

SEQ ID NO: 81003 - DNA, 25 bp, Homo sapien
gccgaggcatggacatcgagcgggt

SEQ ID NO: 81004 - DNA, 25 bp, Homo sapien
tgagatagacatctcctcctacatt

SEQ ID NO: 81005 - DNA, 25 bp, Homo sapien
agaggctttctcggtatcagcagtt

SEQ ID NO: 81006 - DNA, 25 bp, Homo sapien
tagtgagctgcctgatgagatagac

SEQ ID NO: 81007 - DNA, 25 bp, Homo sapien
atgtgcaggatcgctttgaggtcaa

SEQ ID NO: 81008 - DNA, 25 bp, Homo sapien
aagggcttggctatcacatttgtgt

SEQ ID NO: 81009 - DNA, 25 bp, Homo sapien
gacatgcctgaggattctgacacct

SEQ ID NO: 81010 - DNA, 25 bp, Homo sapien
tcctcctacattgaacagacacggt

SEQ ID NO: 81011 - DNA, 25 bp, Homo sapien
gatgccaagatcctcaatgatgtgc

SEQ ID NO: 81012 - DNA, 25 bp, Homo sapien
gacgaattcttgtggctaccaacct

SEQ ID NO: 81013 - DNA, 25 bp, Homo sapien
gaagactcgcccattttggaatgtg

SEQ ID NO: 81014 - DNA, 25 bp, Homo sapien
gcacatcattgaggatcttggcatc

SEQ ID NO: 81015 - DNA, 25 bp, Homo sapien
gtctatctcatcaggcagctcacta

SEQ ID NO: 81016 - DNA, 25 bp, Homo sapien
aggtgtcagaatcctcaggcatgtc

SEQ ID NO: 81017 - DNA, 25 bp, Homo sapien
ttgacctcaaagcgatcctgcacat

SEQ ID NO: 81018 - DNA, 25 bp, Homo sapien
acacaaatgtgatagccaagccctt

SEQ ID NO: 81019 - DNA, 25 bp, Homo sapien
aatgtaggaggagatgtctatctca

SEQ ID NO: 81020 - DNA, 25 bp, Homo sapien
aactgctgataccgagaaagcctct

SEQ ID NO: 81021 - DNA, 25 bp, Homo sapien
aggttggtagccacaagaattcgtc

SEQ ID NO: 81022 - DNA, 25 bp, Homo sapien
accgtgtctgttcaatgtaggagga

SEQ ID NO: 81023 - DNA, 25 bp, Homo sapien
cacattccaaaatgggcgagtcttc

SEQ ID NO: 81024 - DNA, 25 bp, Homo sapien
acccgctcgatgtccatgcctcggc

SEQ ID NO: 81025 - DNA, 25 bp, Homo sapien
caccaagctctgtttacattccgag

SEQ ID NO: 81026 - DNA, 25 bp, Homo sapien
atcagattgatcttcttcacaccaa

SEQ ID NO: 81027 - DNA, 25 bp, Homo sapien
gactgacatgctcttctgacatcag

SEQ ID NO: 81028 - DNA, 25 bp, Homo sapien
ggtagatgtcaaactgccttacgca

SEQ ID NO: 81029 - DNA, 25 bp, Homo sapien
gaaccttggacagcagggctgcctg

SEQ ID NO: 81030 - DNA, 25 bp, Homo sapien
ttcaggggcccgtgcttgtaaaata

SEQ ID NO: 81031 - DNA, 25 bp, Homo sapien
aggaagaggcacattgcccaccttt

SEQ ID NO: 81032 - DNA, 25 bp, Homo sapien
atgggaattgcgatccgtgttgcct

SEQ ID NO: 81033 - DNA, 25 bp, Homo sapien
ttgcctcacccaaactggttatgga

SEQ ID NO: 81034 - DNA, 25 bp, Homo sapien
ggaagaggctcctgagtcctataag

SEQ ID NO: 81035 - DNA, 25 bp, Homo sapien
gtgtgcagctgtaactgctcacgcc

SEQ ID NO: 81036 - DNA, 25 bp, Homo sapien
tgcgtaaggcagtttgacatctacc

SEQ ID NO: 81037 - DNA, 25 bp, Homo sapien
ttggtgtgaagaagatcaatctgat

SEQ ID NO: 81038 - DNA, 25 bp, Homo sapien
tccataaccagtttgggtgaggcaa

SEQ ID NO: 81039 - DNA, 25 bp, Homo sapien
aaaggtgggcaatgtgcctcttcct

SEQ ID NO: 81040 - DNA, 25 bp, Homo sapien
ctgatgtcagaagagcatgtcagtc

SEQ ID NO: 81041 - DNA, 25 bp, Homo sapien
ggcgtgagcagttacagctgcacac

SEQ ID NO: 81042 - DNA, 25 bp, Homo sapien
cttataggactcaggagcctcttcc

SEQ ID NO: 81043 - DNA, 25 bp, Homo sapien
caggcagccctgctgtccaaggttc

SEQ ID NO: 81044 - DNA, 25 bp, Homo sapien
tattttacaagcacgggcccctgaa

SEQ ID NO: 81045 - DNA, 25 bp, Homo sapien
aggcaacacggatcgcaattcccat

SEQ ID NO: 81046 - DNA, 25 bp, Homo sapien
ctcggaatgtaaacagagcttggtg

SEQ ID NO: 81047 - DNA, 25 bp, Homo sapien
tgcagtttagccatgtcctcaagat

SEQ ID NO: 81048 - DNA, 25 bp, Homo sapien
catagtaatcctgtttccactttgt

SEQ ID NO: 81049 - DNA, 25 bp, Homo sapien
ttcacatactaacccttcttcaaga

SEQ ID NO: 81050 - DNA, 25 bp, Homo sapien
cgatgatctggcagacctcagctgc

SEQ ID NO: 81051 - DNA, 25 bp, Homo sapien
agctgcctggtttaccgagctgata

SEQ ID NO: 81052 - DNA, 25 bp, Homo sapien
cttaatgttggttccagtccttcaa

SEQ ID NO: 81053 - DNA, 25 bp, Homo sapien
gaggatcttgttcaatcggaaaccc

SEQ ID NO: 81054 - DNA, 25 bp, Homo sapien
gctgatacccagacataccagcctt

SEQ ID NO: 81055 - DNA, 25 bp, Homo sapien
tcggcaggcccaacaggctgggaaa

SEQ ID NO: 81056 - DNA, 25 bp, Homo sapien
gttgttcttcgtcacttaatgttgg

SEQ ID NO: 81057 - DNA, 25 bp, Homo sapien
agtccttcaactgttcatatctact

SEQ ID NO: 81058 - DNA, 25 bp, Homo sapien
gcagctgaggtctgccagatcatcg

SEQ ID NO: 81059 - DNA, 25 bp, Homo sapien
ccaacattaagtgacgaagaacaac

SEQ ID NO: 81060 - DNA, 25 bp, Homo sapien
gggtttccgattgaacaagatcctc

SEQ ID NO: 81061 - DNA, 25 bp, Homo sapien
tttcccagcctgttgggcctgccga

SEQ ID NO: 81062 - DNA, 25 bp, Homo sapien
acaaagtggaaacaggattactatg

SEQ ID NO: 81063 - DNA, 25 bp, Homo sapien
agtagatatgaacagttgaaggact

SEQ ID NO: 81064 - DNA, 25 bp, Homo sapien
ttgaaggactggaaccaacattaag

SEQ ID NO: 81065 - DNA, 25 bp, Homo sapien
tatcagctcggtaaaccaggcagct

SEQ ID NO: 81066 - DNA, 25 bp, Homo sapien
aaggctggtatgtctgggtatcagc

SEQ ID NO: 81067 - DNA, 25 bp, Homo sapien
atcttgaggacatggctaaactgca

SEQ ID NO: 81068 - DNA, 25 bp, Homo sapien
tcttgaagaagggttagtatgtgaa

SEQ ID NO: 81069 - DNA, 25 bp, Homo sapien
aattccgctctcatgagggtgaaac

SEQ ID NO: 81070 - DNA, 25 bp, Homo sapien
ttactgtgactgagtcggcccattc

SEQ ID NO: 81071 - DNA, 25 bp, Homo sapien
tgtatatttttcacccctgattatg

SEQ ID NO: 81072 - DNA, 25 bp, Homo sapien
gctttgtgctcagaatctacattcc

SEQ ID NO: 81073 - DNA, 25 bp, Homo sapien
actacataatttctaccagggccat

SEQ ID NO: 81074 - DNA, 25 bp, Homo sapien
ttttaggttaactgagctgctttgt

SEQ ID NO: 81075 - DNA, 25 bp, Homo sapien
ctggatgacaccaaattccgctctc

SEQ ID NO: 81076 - DNA, 25 bp, Homo sapien
gagtggggatggtcgagtatctcag

SEQ ID NO: 81077 - DNA, 25 bp, Homo sapien
gtggggttcgctctactatggagat

SEQ ID NO: 81078 - DNA, 25 bp, Homo sapien
aatcgttctgtctttgtggggttcg

SEQ ID NO: 81079 - DNA, 25 bp, Homo sapien
tatgccctgcgtaaactggatgaca

SEQ ID NO: 81080 - DNA, 25 bp, Homo sapien
cataatcaggggtgaaaaatataca

SEQ ID NO: 81081 - DNA, 25 bp, Homo sapien
atggccctggtagaaattatgtagt

SEQ ID NO: 81082 - DNA, 25 bp, Homo sapien
ctgagatactcgaccatccccactc

SEQ ID NO: 81083 - DNA, 25 bp, Homo sapien
tgtcatccagtttacgcagggcata

SEQ ID NO: 81084 - DNA, 25 bp, Homo sapien
gtttcaccctcatgagagcggaatt

SEQ ID NO: 81085 - DNA, 25 bp, Homo sapien
gagagcggaatttggtgtcatccag

SEQ ID NO: 81086 - DNA, 25 bp, Homo sapien
ggaatgtagattctgagcacaaagc

SEQ ID NO: 81087 - DNA, 25 bp, Homo sapien
acaaagcagctcagttaacctaaaa

SEQ ID NO: 81088 - DNA, 25 bp, Homo sapien
cgaaccccacaaagacagaacgatt

SEQ ID NO: 81089 - DNA, 25 bp, Homo sapien
gaatgggccgactcagtcacagtaa

SEQ ID NO: 81090 - DNA, 25 bp, Homo sapien
atctccatagtagagcgaaccccac

SEQ ID NO: 81091 - DNA, 25 bp, Homo sapien
tcagaagcctgcctctgatttaccc

SEQ ID NO: 81092 - DNA, 25 bp, Homo sapien
ctgatttaccctacagcttcaggcc

SEQ ID NO: 81093 - DNA, 25 bp, Homo sapien
ggtgaccaccttattgtgaggttcc

SEQ ID NO: 81094 - DNA, 25 bp, Homo sapien
gatttaatgctgactcactggtaca

SEQ ID NO: 81095 - DNA, 25 bp, Homo sapien
cctgcagcctcttgtctggttgagg

SEQ ID NO: 81096 - DNA, 25 bp, Homo sapien
taactgagctggccttatccttggc

SEQ ID NO: 81097 - DNA, 25 bp, Homo sapien
ttggcatccccctaaacaaacaaga

SEQ ID NO: 81098 - DNA, 25 bp, Homo sapien
ggttccatccagccaagtttatgtg

SEQ ID NO: 81099 - DNA, 25 bp, Homo sapien
aagacttgtttgttctgcttctctt

SEQ ID NO: 81100 - DNA, 25 bp, Homo sapien
gctgacctggcaaccattcaggcac

SEQ ID NO: 81101 - DNA, 25 bp, Homo sapien
atttgtgtggcctagaagtcctctg

SEQ ID NO: 81102 - DNA, 25 bp, Homo sapien
cctcaaccagacaagaggctgcagg

SEQ ID NO: 81103 - DNA, 25 bp, Homo sapien
cagaggacttctaggccacacaaat

SEQ ID NO: 81104 - DNA, 25 bp, Homo sapien
ggcctgaagctgtagggtaaatcag

SEQ ID NO: 81105 - DNA, 25 bp, Homo sapien
tgtaccagtgagtcagcattaaatc

SEQ ID NO: 81106 - DNA, 25 bp, Homo sapien
gtgcctgaatggttgccaggtcagc

SEQ ID NO: 81107 - DNA, 25 bp, Homo sapien
ggaacctcacaataaggtggtcacc

SEQ ID NO: 81108 - DNA, 25 bp, Homo sapien
gccaaggataaggccagctcagtta

SEQ ID NO: 81109 - DNA, 25 bp, Homo sapien
cacataaacttggctggatggaacc

SEQ ID NO: 81110 - DNA, 25 bp, Homo sapien
tcttgtttgtttagggggatgccaa

SEQ ID NO: 81111 - DNA, 25 bp, Homo sapien
aagagaagcagaacaaacaagtctt

SEQ ID NO: 81112 - DNA, 25 bp, Homo sapien
gggtaaatcagaggcaggcttctga

SEQ ID NO: 81113 - DNA, 25 bp, Homo sapien
ggctgaatcattctcatttacttaa

SEQ ID NO: 81114 - DNA, 25 bp, Homo sapien
ttcatcctagcggtttgcctgagaa

SEQ ID NO: 81115 - DNA, 25 bp, Homo sapien
atcctgcaccttgttgtcatgaact

SEQ ID NO: 81116 - DNA, 25 bp, Homo sapien
agaagagtacttgagctccactccg

SEQ ID NO: 81117 - DNA, 25 bp, Homo sapien
tttgacacttactgctagctctgct

SEQ ID NO: 81118 - DNA, 25 bp, Homo sapien
atgttcactctttgaatttcctgga

SEQ ID NO: 81119 - DNA, 25 bp, Homo sapien
aaagcccagagttcactgtgtgtca

SEQ ID NO: 81120 - DNA, 25 bp, Homo sapien
tccactccgcagcgtctgaagttgc

SEQ ID NO: 81121 - DNA, 25 bp, Homo sapien
gtacctgctgtatatactgctgacc

SEQ ID NO: 81122 - DNA, 25 bp, Homo sapien
tctgaagttgctggacgcgtacctg

SEQ ID NO: 81123 - DNA, 25 bp, Homo sapien
ggcttcatctcttgtgtggggagtt

SEQ ID NO: 81124 - DNA, 25 bp, Homo sapien
caggtacgcgtccagcaacttcaga

SEQ ID NO: 81125 - DNA, 25 bp, Homo sapien
ttctcaggcaaaccgctaggatgaa

SEQ ID NO: 81126 - DNA, 25 bp, Homo sapien
agcagagctagcagtaagtgtcaaa

SEQ ID NO: 81127 - DNA, 25 bp, Homo sapien
tccaggaaattcaaagagtgaacat

SEQ ID NO: 81128 - DNA, 25 bp, Homo sapien
tgacacacagtgaactctgggcttt

SEQ ID NO: 81129 - DNA, 25 bp, Homo sapien
gcaacttcagacgctgcggagtgga

SEQ ID NO: 81130 - DNA, 25 bp, Homo sapien
agttcatgacaacaaggtgcaggat

SEQ ID NO: 81131 - DNA, 25 bp, Homo sapien
aactccccacacaagagatgaagcc

SEQ ID NO: 81132 - DNA, 25 bp, Homo sapien
ttaagtaaatgagaatgattcagcc

SEQ ID NO: 81133 - DNA, 25 bp, Homo sapien
ggtcagcagtatatacagcaggtac

SEQ ID NO: 81134 - DNA, 25 bp, Homo sapien
cggagtggagctcaagtactcttct

SEQ ID NO: 81135 - DNA, 25 bp, Homo sapien
gtattgtaccttttaacacctgatg

SEQ ID NO: 81136 - DNA, 25 bp, Homo sapien
gttacagaaagtggtgctcagttgt

SEQ ID NO: 81137 - DNA, 25 bp, Homo sapien
ggttttgtttgctatcttaattttg

SEQ ID NO: 81138 - DNA, 25 bp, Homo sapien
ataattgtatcgtatagctgtattg

SEQ ID NO: 81139 - DNA, 25 bp, Homo sapien
aatactgccagatgctgatgttcag

SEQ ID NO: 81140 - DNA, 25 bp, Homo sapien
gatgttcagtgtaatttctttgcct

SEQ ID NO: 81141 - DNA, 25 bp, Homo sapien
tttctttgcctgttcagttacagaa

SEQ ID NO: 81142 - DNA, 25 bp, Homo sapien
agctgtattgaatcatgtagtatca

SEQ ID NO: 81143 - DNA, 25 bp, Homo sapien
ggtgctcagttgtagaatgtattgt

SEQ ID NO: 81144 - DNA, 25 bp, Homo sapien
acacctgatgtgtacatcccatgta

SEQ ID NO: 81145 - DNA, 25 bp, Homo sapien
attttggttgtattctttgatgtta

SEQ ID NO: 81146 - DNA, 25 bp, Homo sapien
catcaggtgttaaaaggtacaatac

SEQ ID NO: 81147 - DNA, 25 bp, Homo sapien
caaaattaagatagcaaacaaaacc

SEQ ID NO: 81148 - DNA, 25 bp, Homo sapien
acaatacattctacaactgagcacc

SEQ ID NO: 81149 - DNA, 25 bp, Homo sapien
ttctgtaactgaacaggcaaagaaa

SEQ ID NO: 81150 - DNA, 25 bp, Homo sapien
tgatactacatgattcaatacagct

SEQ ID NO: 81151 - DNA, 25 bp, Homo sapien
caatacagctatacgatacaattat

SEQ ID NO: 81152 - DNA, 25 bp, Homo sapien
aggcaaagaaattacactgaacatc

SEQ ID NO: 81153 - DNA, 25 bp, Homo sapien
acaactgagcaccactttctgtaac

SEQ ID NO: 81154 - DNA, 25 bp, Homo sapien
tacatgggatgtacacatcaggtgt

SEQ ID NO: 81155 - DNA, 25 bp, Homo sapien
taacatcaaagaatacaaccaaaat

SEQ ID NO: 81156 - DNA, 25 bp, Homo sapien
ctgaacatcagcatctggcagtatt

SEQ ID NO: 81157 - DNA, 25 bp, Homo sapien
ctttcaccttaaagctctgccaagc

SEQ ID NO: 81158 - DNA, 25 bp, Homo sapien
aaatcgagtccatatagctacattc

SEQ ID NO: 81159 - DNA, 25 bp, Homo sapien
gccgctcagctttgatggaacaacg

SEQ ID NO: 81160 - DNA, 25 bp, Homo sapien
tcattcgtcagcgacaattggacag

SEQ ID NO: 81161 - DNA, 25 bp, Homo sapien
catgctctaatttccgggctaaaac

SEQ ID NO: 81162 - DNA, 25 bp, Homo sapien
tgaaatggactgatttgcactcttg

SEQ ID NO: 81163 - DNA, 25 bp, Homo sapien
aaatcacatgcagctcatctaagag

SEQ ID NO: 81164 - DNA, 25 bp, Homo sapien
cagaggctcccgtgcaggaagagaa

SEQ ID NO: 81165 - DNA, 25 bp, Homo sapien
ccacccttgtatcctgggtcttaga

SEQ ID NO: 81166 - DNA, 25 bp, Homo sapien
gcacctcaaatttgccatgctggct

SEQ ID NO: 81167 - DNA, 25 bp, Homo sapien
atgagttcaaaagctgccgctcagc

SEQ ID NO: 81168 - DNA, 25 bp, Homo sapien
agccagcatggcaaatttgaggtgc

SEQ ID NO: 81169 - DNA, 25 bp, Homo sapien
ctgtccaattgtcgctgacgaatga

SEQ ID NO: 81170 - DNA, 25 bp, Homo sapien
gctgagcggcagcttttgaactcat

SEQ ID NO: 81171 - DNA, 25 bp, Homo sapien
tctaagacccaggatacaagggtgg

SEQ ID NO: 81172 - DNA, 25 bp, Homo sapien
gttttagcccggaaattagagcatg

SEQ ID NO: 81173 - DNA, 25 bp, Homo sapien
cgttgttccatcaaagctgagcggc

SEQ ID NO: 81174 - DNA, 25 bp, Homo sapien
gaatgtagctatatggactcgattt

SEQ ID NO: 81175 - DNA, 25 bp, Homo sapien
gcttggcagagctttaaggtgaaag

SEQ ID NO: 81176 - DNA, 25 bp, Homo sapien
ctcttagatgagctgcatgtgattt

SEQ ID NO: 81177 - DNA, 25 bp, Homo sapien
caagagtgcaaatcagtccatttca

SEQ ID NO: 81178 - DNA, 25 bp, Homo sapien
ttctcttcctgcacgggagcctctg

SEQ ID NO: 81179 - DNA, 25 bp, Homo sapien
taacctgctatcttggggcaacttt

SEQ ID NO: 81180 - DNA, 25 bp, Homo sapien
tgatgtatgacatgtcacccttccc

SEQ ID NO: 81181 - DNA, 25 bp, Homo sapien
atttctctctagcccattataacct

SEQ ID NO: 81182 - DNA, 25 bp, Homo sapien
ctcaccctccctctaggattaaagt

SEQ ID NO: 81183 - DNA, 25 bp, Homo sapien
tcctccatttcctttttgggatttg

SEQ ID NO: 81184 - DNA, 25 bp, Homo sapien
taaacccttccccacatgtggtaga

SEQ ID NO: 81185 - DNA, 25 bp, Homo sapien
agagatgttccctctaatttctctc

SEQ ID NO: 81186 - DNA, 25 bp, Homo sapien
cctgccaaagtttgcttctcttttc

SEQ ID NO: 81187 - DNA, 25 bp, Homo sapien
cttgtcatctctgtacactacttat

SEQ ID NO: 81188 - DNA, 25 bp, Homo sapien
tattctctggtcttctatttttggt

SEQ ID NO: 81189 - DNA, 25 bp, Homo sapien
ttaagcatgttcagtggcagctccc

SEQ ID NO: 81190 - DNA, 25 bp, Homo sapien
ataagtagtgtacagagatgacaag

SEQ ID NO: 81191 - DNA, 25 bp, Homo sapien
accaaaaatagaagaccagagaata

SEQ ID NO: 81192 - DNA, 25 bp, Homo sapien
gggagctgccactgaacatgcttaa

SEQ ID NO: 81193 - DNA, 25 bp, Homo sapien
gggaagggtgacatgtcatacatca

SEQ ID NO: 81194 - DNA, 25 bp, Homo sapien
gaaaagagaagcaaactttggcagg

SEQ ID NO: 81195 - DNA, 25 bp, Homo sapien
caaatcccaaaaaggaaatggagga

SEQ ID NO: 81196 - DNA, 25 bp, Homo sapien
gagagaaattagagggaacatctct

SEQ ID NO: 81197 - DNA, 25 bp, Homo sapien
actttaatcctagagggagggtgag

SEQ ID NO: 81198 - DNA, 25 bp, Homo sapien
aaagttgccccaagatagcaggtta

SEQ ID NO: 81199 - DNA, 25 bp, Homo sapien
aggttataatgggctagagagaaat

SEQ ID NO: 81200 - DNA, 25 bp, Homo sapien
tctaccacatgtggggaagggttta

SEQ ID NO: 81201 - DNA, 25 bp, Homo sapien
gtcatgttatactggattcatttcc

SEQ ID NO: 81202 - DNA, 25 bp, Homo sapien
taaaggggacttcagctttttatat

SEQ ID NO: 81203 - DNA, 25 bp, Homo sapien
ggtatagggatatcttgtcttattt

SEQ ID NO: 81204 - DNA, 25 bp, Homo sapien
aactcttgatagtggtcacctgtga

SEQ ID NO: 81205 - DNA, 25 bp, Homo sapien
gaggatgggaatgctgtatctgtgg

SEQ ID NO: 81206 - DNA, 25 bp, Homo sapien
gaaggatacagaccaaactcttgat

SEQ ID NO: 81207 - DNA, 25 bp, Homo sapien
cataaaactcagtactatctattgg

SEQ ID NO: 81208 - DNA, 25 bp, Homo sapien
ggacttgctctctatgtaatatgaa

SEQ ID NO: 81209 - DNA, 25 bp, Homo sapien
gttgaggggggatcaagttgcagaa

SEQ ID NO: 81210 - DNA, 25 bp, Homo sapien
atggatggacttgctctctatgtaa

SEQ ID NO: 81211 - DNA, 25 bp, Homo sapien
gatactgattgattctggattgtgg

SEQ ID NO: 81212 - DNA, 25 bp, Homo sapien
ggaaatgaatccagtataacatgac

SEQ ID NO: 81213 - DNA, 25 bp, Homo sapien
ttctgcaacttgatcccccctcaac

SEQ ID NO: 81214 - DNA, 25 bp, Homo sapien
atcaagagtttggtctgtatccttc

SEQ ID NO: 81215 - DNA, 25 bp, Homo sapien
atataaaaagctgaagtccccttta

SEQ ID NO: 81216 - DNA, 25 bp, Homo sapien
tcacaggtgaccactatcaagagtt

SEQ ID NO: 81217 - DNA, 25 bp, Homo sapien
aaataagacaagatatccctatacc

SEQ ID NO: 81218 - DNA, 25 bp, Homo sapien
ccaatagatagtactgagttttatg

SEQ ID NO: 81219 - DNA, 25 bp, Homo sapien
ccacaatccagaatcaatcagtatc

SEQ ID NO: 81220 - DNA, 25 bp, Homo sapien
ttcatattacatagagagcaagtcc

SEQ ID NO: 81221 - DNA, 25 bp, Homo sapien
ccacagatacagcattcccatcctc

SEQ ID NO: 81222 - DNA, 25 bp, Homo sapien
ttacatagagagcaagtccatccat

SEQ ID NO: 81223 - DNA, 25 bp, Homo sapien
aagaagatgagctccagcgacacgc

SEQ ID NO: 81224 - DNA, 25 bp, Homo sapien
aacaccatcaccaagtgacagcgcc

SEQ ID NO: 81225 - DNA, 25 bp, Homo sapien
accaccatcctggacgaggaaccga

SEQ ID NO: 81226 - DNA, 25 bp, Homo sapien
ccctcagccgtgtactgcatcgagg

SEQ ID NO: 81227 - DNA, 25 bp, Homo sapien
agagcatgaacgcgaacaccatcac

SEQ ID NO: 81228 - DNA, 25 bp, Homo sapien
agggaggaataccgaggcttcacac

SEQ ID NO: 81229 - DNA, 25 bp, Homo sapien
cttccatggcaagggctcaggcaag

SEQ ID NO: 81230 - DNA, 25 bp, Homo sapien
gagaaggacggctacaaacccgacg

SEQ ID NO: 81231 - DNA, 25 bp, Homo sapien
gatcgtgaatagggggctggcagct

SEQ ID NO: 81232 - DNA, 25 bp, Homo sapien
ctcagcggcagcggcaagagcatga

SEQ ID NO: 81233 - DNA, 25 bp, Homo sapien
gaaactcacacccaaggaggctttc

SEQ ID NO: 81234 - DNA, 25 bp, Homo sapien
gtgatggtgttcgcgttcatgctct

SEQ ID NO: 81235 - DNA, 25 bp, Homo sapien
agctgccagccccctattcacgatc

SEQ ID NO: 81236 - DNA, 25 bp, Homo sapien
gtgtgaagcctcggtattcctccct

SEQ ID NO: 81237 - DNA, 25 bp, Homo sapien
gcgtgtcgctggagctcatcttctt

SEQ ID NO: 81238 - DNA, 25 bp, Homo sapien
ggcgctgtcacttggtgatggtgtt

SEQ ID NO: 81239 - DNA, 25 bp, Homo sapien
tcggttcctcgtccaggatggtggt

SEQ ID NO: 81240 - DNA, 25 bp, Homo sapien
gaaagcctccttgggtgtgagtttc

SEQ ID NO: 81241 - DNA, 25 bp, Homo sapien
cctcgatgcagtacacggctgaggg

SEQ ID NO: 81242 - DNA, 25 bp, Homo sapien
cttgcctgagcccttgccatggaag

SEQ ID NO: 81243 - DNA, 25 bp, Homo sapien
tcatgctcttgccgctgccgctgag

SEQ ID NO: 81244 - DNA, 25 bp, Homo sapien
cgtcgggtttgtagccgtccttctc

SEQ ID NO: 81245 - DNA, 25 bp, Homo sapien
aatcctctcacatggtggctttagg

SEQ ID NO: 81246 - DNA, 25 bp, Homo sapien
atattctataatctccaactcctga

SEQ ID NO: 81247 - DNA, 25 bp, Homo sapien
cgaatcctctcacatggtggcttta

SEQ ID NO: 81248 - DNA, 25 bp, Homo sapien
ggagtgatagtaacaccttcagaaa

SEQ ID NO: 81249 - DNA, 25 bp, Homo sapien
tgatgccagctatcttgcttctgaa

SEQ ID NO: 81250 - DNA, 25 bp, Homo sapien
tggaaactcaggagtgacattccct

SEQ ID NO: 81251 - DNA, 25 bp, Homo sapien
ggacatggtctgctatacagctcag

SEQ ID NO: 81252 - DNA, 25 bp, Homo sapien
cttgcttctgaaatatctacctggg

SEQ ID NO: 81253 - DNA, 25 bp, Homo sapien
ctgctatacagctcagactctcgtc

SEQ ID NO: 81254 - DNA, 25 bp, Homo sapien
ggtggctttaggaagatccttggcc

SEQ ID NO: 81255 - DNA, 25 bp, Homo sapien
aaatatctacctgggatggagtgat

SEQ ID NO: 81256 - DNA, 25 bp, Homo sapien
ttcagaagcaagatagctggcatca

SEQ ID NO: 81257 - DNA, 25 bp, Homo sapien
atcactccatcccaggtagatattt

SEQ ID NO: 81258 - DNA, 25 bp, Homo sapien
cccaggtagatatttcagaagcaag

SEQ ID NO: 81259 - DNA, 25 bp, Homo sapien
tcaggagttggagattatagaatat

SEQ ID NO: 81260 - DNA, 25 bp, Homo sapien
gacgagagtctgagctgtatagcag

SEQ ID NO: 81261 - DNA, 25 bp, Homo sapien
agggaatgtcactcctgagtttcca

SEQ ID NO: 81262 - DNA, 25 bp, Homo sapien
ggccaaggatcttcctaaagccacc

SEQ ID NO: 81263 - DNA, 25 bp, Homo sapien
cctaaagccaccatgtgagaggatt

SEQ ID NO: 81264 - DNA, 25 bp, Homo sapien
taaagccaccatgtgagaggattcg

SEQ ID NO: 81265 - DNA, 25 bp, Homo sapien
tttctgaaggtgttactatcactcc

SEQ ID NO: 81266 - DNA, 25 bp, Homo sapien
ctgagctgtatagcagaccatgtcc

SEQ ID NO: 81267 - DNA, 25 bp, Homo sapien
cagcaggggcctgtggtggtgagcc

SEQ ID NO: 81268 - DNA, 25 bp, Homo sapien
ggctgctgctattagagcccatcct

SEQ ID NO: 81269 - DNA, 25 bp, Homo sapien
cagcccacatgctacaggccaataa

SEQ ID NO: 81270 - DNA, 25 bp, Homo sapien
caataagacctacggctgtgtgccc

SEQ ID NO: 81271 - DNA, 25 bp, Homo sapien
gatttgtcaccgttggagcttggat

SEQ ID NO: 81272 - DNA, 25 bp, Homo sapien
gctgtgtgcccgtggccaataagag

SEQ ID NO: 81273 - DNA, 25 bp, Homo sapien
gggacacacgctccattgaagaggc

SEQ ID NO: 81274 - DNA, 25 bp, Homo sapien
caaggacaagtacagccacctcatc

SEQ ID NO: 81275 - DNA, 25 bp, Homo sapien
tctgtattattccccgttcttggaa

SEQ ID NO: 81276 - DNA, 25 bp, Homo sapien
gagtggggaagagttgccgccaacc

SEQ ID NO: 81277 - DNA, 25 bp, Homo sapien
atggggctggggtactttacattca

SEQ ID NO: 81278 - DNA, 25 bp, Homo sapien
atccaagctccaacggtgacaaatc

SEQ ID NO: 81279 - DNA, 25 bp, Homo sapien
ttccaagaacggggaataatacaga

SEQ ID NO: 81280 - DNA, 25 bp, Homo sapien
tgaatgtaaagtaccccagccccat

SEQ ID NO: 81281 - DNA, 25 bp, Homo sapien
ggttggcggcaactcttccccactc

SEQ ID NO: 81282 - DNA, 25 bp, Homo sapien
aggatgggctctaatagcagcagcc

SEQ ID NO: 81283 - DNA, 25 bp, Homo sapien
gatgaggtggctgtacttgtccttg

SEQ ID NO: 81284 - DNA, 25 bp, Homo sapien
ctcttattggccacgggcacacagc

SEQ ID NO: 81285 - DNA, 25 bp, Homo sapien
ttattggcctgtagcatgtgggctg

SEQ ID NO: 81286 - DNA, 25 bp, Homo sapien
ggctcaccaccacaggcccctgctg

SEQ ID NO: 81287 - DNA, 25 bp, Homo sapien
gcctcttcaatggagcgtgtgtccc

SEQ ID NO: 81288 - DNA, 25 bp, Homo sapien
gggcacacagccgtaggtcttattg

SEQ ID NO: 81289 - DNA, 25 bp, Homo sapien
cgctgctctttctgtaggttattta

SEQ ID NO: 81290 - DNA, 25 bp, Homo sapien
cctccttccacataatgctttatcc

SEQ ID NO: 81291 - DNA, 25 bp, Homo sapien
cttttttcatatcaagtcctcaccc

SEQ ID NO: 81292 - DNA, 25 bp, Homo sapien
gagcgttacaagcgcacctttgacc

SEQ ID NO: 81293 - DNA, 25 bp, Homo sapien
gagcctattgtgttacttgacctta

SEQ ID NO: 81294 - DNA, 25 bp, Homo sapien
gtcagagatctgtgcacacttttta

SEQ ID NO: 81295 - DNA, 25 bp, Homo sapien
tggtggggaggacatctggtttgag

SEQ ID NO: 81296 - DNA, 25 bp, Homo sapien
agcagtgggtggctcaagggccagc

SEQ ID NO: 81297 - DNA, 25 bp, Homo sapien
aggcgaaggctgggagtgtctttcc

SEQ ID NO: 81298 - DNA, 25 bp, Homo sapien
gaaccaggggtatgtcatcactttt

SEQ ID NO: 81299 - DNA, 25 bp, Homo sapien
ctggctccgcaacggtagcagtggg

SEQ ID NO: 81300 - DNA, 25 bp, Homo sapien
ctcaaaccagatgtcctccccacca

SEQ ID NO: 81301 - DNA, 25 bp, Homo sapien
ggtcaaaggtgcgcttgtaacgctc

SEQ ID NO: 81302 - DNA, 25 bp, Homo sapien
ggaaagacactcccagccttcgcct

SEQ ID NO: 81303 - DNA, 25 bp, Homo sapien
taaaaagtgtgcacagatctctgac

SEQ ID NO: 81304 - DNA, 25 bp, Homo sapien
gggtgaggacttgatatgaaaaaag

SEQ ID NO: 81305 - DNA, 25 bp, Homo sapien
cccactgctaccgttgcggagccag

SEQ ID NO: 81306 - DNA, 25 bp, Homo sapien
gctggcccttgagccacccactgct

SEQ ID NO: 81307 - DNA, 25 bp, Homo sapien
ggataaagcattatgtggaaggagg

SEQ ID NO: 81308 - DNA, 25 bp, Homo sapien
taaggtcaagtaacacaataggctc

SEQ ID NO: 81309 - DNA, 25 bp, Homo sapien
taaataacctacagaaagagcagcg

SEQ ID NO: 81310 - DNA, 25 bp, Homo sapien
aaaagtgatgacatacccctggttc

SEQ ID NO: 81311 - DNA, 25 bp, Homo sapien
acctgaaccgtgctggctttgaggc

SEQ ID NO: 81312 - DNA, 25 bp, Homo sapien
tcatctccttagctgcccagaaatt

SEQ ID NO: 81313 - DNA, 25 bp, Homo sapien
tggtggacttcttgatgcagctgga

SEQ ID NO: 81314 - DNA, 25 bp, Homo sapien
tgagccacccaacctaaatgtactt

SEQ ID NO: 81315 - DNA, 25 bp, Homo sapien
attgccaatgatgccctacagcact

SEQ ID NO: 81316 - DNA, 25 bp, Homo sapien
taaccatggaggacttgacccctgc

SEQ ID NO: 81317 - DNA, 25 bp, Homo sapien
tgaagaagccgcactacttcacctg

SEQ ID NO: 81318 - DNA, 25 bp, Homo sapien
tggaagattacacgcctacgatccc

SEQ ID NO: 81319 - DNA, 25 bp, Homo sapien
agcaaggaccgcaagtacactctaa

SEQ ID NO: 81320 - DNA, 25 bp, Homo sapien
gtccagcacgcctttggtggacttc

SEQ ID NO: 81321 - DNA, 25 bp, Homo sapien
tcagacccacgcataattcggctca

SEQ ID NO: 81322 - DNA, 25 bp, Homo sapien
ttagagtgtacttgcggtccttgct

SEQ ID NO: 81323 - DNA, 25 bp, Homo sapien
caggtgaagtagtgcggcttcttca

SEQ ID NO: 81324 - DNA, 25 bp, Homo sapien
agtgctgtagggcatcattggcaat

SEQ ID NO: 81325 - DNA, 25 bp, Homo sapien
gggatcgtaggcgtgtaatcttcca

SEQ ID NO: 81326 - DNA, 25 bp, Homo sapien
aatttctgggcagctaaggagatga

SEQ ID NO: 81327 - DNA, 25 bp, Homo sapien
gcaggggtcaagtcctccatggtta

SEQ ID NO: 81328 - DNA, 25 bp, Homo sapien
gcctcaaagccagcacggttcaggt

SEQ ID NO: 81329 - DNA, 25 bp, Homo sapien
tccagctgcatcaagaagtccacca

SEQ ID NO: 81330 - DNA, 25 bp, Homo sapien
aagtacatttaggttgggtggctca

SEQ ID NO: 81331 - DNA, 25 bp, Homo sapien
tgagccgaattatgcgtgggtctga

SEQ ID NO: 81332 - DNA, 25 bp, Homo sapien
gaagtccaccaaaggcgtgctggac

SEQ ID NO: 81333 - DNA, 25 bp, Homo sapien
aggtcagtcttgcaagtaccatttt

SEQ ID NO: 81334 - DNA, 25 bp, Homo sapien
gactcttatttctttatataggtca

SEQ ID NO: 81335 - DNA, 25 bp, Homo sapien
gtaccattttataagcagctgtgaa

SEQ ID NO: 81336 - DNA, 25 bp, Homo sapien
atacattctcattaactttagatgg

SEQ ID NO: 81337 - DNA, 25 bp, Homo sapien
ggttgtactttaattcttggcatgt

SEQ ID NO: 81338 - DNA, 25 bp, Homo sapien
gaccttatgaagtatgctatctgta

SEQ ID NO: 81339 - DNA, 25 bp, Homo sapien
gtatgctatctgtaggctgaaatta

SEQ ID NO: 81340 - DNA, 25 bp, Homo sapien
aattcttggcatgttgcctctatgt

SEQ ID NO: 81341 - DNA, 25 bp, Homo sapien
aaattataggtacatctgttttcac

SEQ ID NO: 81342 - DNA, 25 bp, Homo sapien
tctttattgattagcactgaggatt

SEQ ID NO: 81343 - DNA, 25 bp, Homo sapien
ttaccatctcttgatgagactctta

SEQ ID NO: 81344 - DNA, 25 bp, Homo sapien
aaaatggtacttgcaagactgacct

SEQ ID NO: 81345 - DNA, 25 bp, Homo sapien
tacagatagcatacttcataaggtc

SEQ ID NO: 81346 - DNA, 25 bp, Homo sapien
aatcctcagtgctaatcaataaaga

SEQ ID NO: 81347 - DNA, 25 bp, Homo sapien
acatgccaagaattaaagtacaacc

SEQ ID NO: 81348 - DNA, 25 bp, Homo sapien
taatttcagcctacagatagcatac

SEQ ID NO: 81349 - DNA, 25 bp, Homo sapien
taagagtctcatcaagagatggtaa

SEQ ID NO: 81350 - DNA, 25 bp, Homo sapien
tgacctatataaagaaataagagtc

SEQ ID NO: 81351 - DNA, 25 bp, Homo sapien
gtgaaaacagatgtacctataattt

SEQ ID NO: 81352 - DNA, 25 bp, Homo sapien
acatagaggcaacatgccaagaatt

SEQ ID NO: 81353 - DNA, 25 bp, Homo sapien
ttcacagctgcttataaaatggtac

SEQ ID NO: 81354 - DNA, 25 bp, Homo sapien
ccatctaaagttaatgagaatgtat

SEQ ID NO: 81355 - DNA, 25 bp, Homo sapien
cacagcttttcttgataggcctagt

SEQ ID NO: 81356 - DNA, 25 bp, Homo sapien
ggtgtactgtgtttgatttgtctca

SEQ ID NO: 81357 - DNA, 25 bp, Homo sapien
aggtcacaggcagcgtacatacggt

SEQ ID NO: 81358 - DNA, 25 bp, Homo sapien
aaatcttgtgttaacttgcctccat

SEQ ID NO: 81359 - DNA, 25 bp, Homo sapien
tgacagtagctcttagactcgccta

SEQ ID NO: 81360 - DNA, 25 bp, Homo sapien
gccccagagaaactgccacatacac

SEQ ID NO: 81361 - DNA, 25 bp, Homo sapien
gctccattcactcccaggtgagaat

SEQ ID NO: 81362 - DNA, 25 bp, Homo sapien
ggaatgacccttttgtgtctatgat

SEQ ID NO: 81363 - DNA, 25 bp, Homo sapien
catacggttctgttataccccatat

SEQ ID NO: 81364 - DNA, 25 bp, Homo sapien
ggcaaacgtccacaaaggtcacagg

SEQ ID NO: 81365 - DNA, 25 bp, Homo sapien
tattaccccttcatgtcctaaagaa

SEQ ID NO: 81366 - DNA, 25 bp, Homo sapien
atggaggcaagttaacacaagattt

SEQ ID NO: 81367 - DNA, 25 bp, Homo sapien
taggcgagtctaagagctactgtca

SEQ ID NO: 81368 - DNA, 25 bp, Homo sapien
atcatagacacaaaagggtcattcc

SEQ ID NO: 81369 - DNA, 25 bp, Homo sapien
atatggggtataacagaaccgtatg

SEQ ID NO: 81370 - DNA, 25 bp, Homo sapien
accgtatgtacgctgcctgtgacct

SEQ ID NO: 81371 - DNA, 25 bp, Homo sapien
ttctttaggacatgaaggggtaata

SEQ ID NO: 81372 - DNA, 25 bp, Homo sapien
actaggcctatcaagaaaagctgtg

SEQ ID NO: 81373 - DNA, 25 bp, Homo sapien
cctgtgacctttgtggacgtttgcc

SEQ ID NO: 81374 - DNA, 25 bp, Homo sapien
tgagacaaatcaaacacagtacacc

SEQ ID NO: 81375 - DNA, 25 bp, Homo sapien
attctcacctgggagtgaatggagc

SEQ ID NO: 81376 - DNA, 25 bp, Homo sapien
gtgtatgtggcagtttctctggggc

SEQ ID NO: 81377 - DNA, 25 bp, Homo sapien
ggcatgttcctggtagttcttttga

SEQ ID NO: 81378 - DNA, 25 bp, Homo sapien
actctggatccagtgacagcaggtg

SEQ ID NO: 81379 - DNA, 25 bp, Homo sapien
aatcatatatagcattttcaggcat

SEQ ID NO: 81380 - DNA, 25 bp, Homo sapien
ggagtacaaattcagcgtggatgtg

SEQ ID NO: 81381 - DNA, 25 bp, Homo sapien
gattcagattgagtcctgaggcatt

SEQ ID NO: 81382 - DNA, 25 bp, Homo sapien
cccacaactacactctgtacttcat

SEQ ID NO: 81383 - DNA, 25 bp, Homo sapien
gaagtcacaggccctgtcattgcgc

SEQ ID NO: 81384 - DNA, 25 bp, Homo sapien
gtaggaatcctggttgtggggacca

SEQ ID NO: 81385 - DNA, 25 bp, Homo sapien
gatgccaagtccaatagcctcatct

SEQ ID NO: 81386 - DNA, 25 bp, Homo sapien
acagcaggtgtcatgggtcaagcat

SEQ ID NO: 81387 - DNA, 25 bp, Homo sapien
ctggtagttcttttgagtctgacat

SEQ ID NO: 81388 - DNA, 25 bp, Homo sapien
cacctgctgtcactggatccagagt

SEQ ID NO: 81389 - DNA, 25 bp, Homo sapien
agatgaggctattggacttggcatc

SEQ ID NO: 81390 - DNA, 25 bp, Homo sapien
cacatccacgctgaatttgtactcc

SEQ ID NO: 81391 - DNA, 25 bp, Homo sapien
tcaaaagaactaccaggaacatgcc

SEQ ID NO: 81392 - DNA, 25 bp, Homo sapien
tggtccccacaaccaggattcctac

SEQ ID NO: 81393 - DNA, 25 bp, Homo sapien
aatgcctcaggactcaatctgaatc

SEQ ID NO: 81394 - DNA, 25 bp, Homo sapien
atgaagtacagagtgtagttgtggg

SEQ ID NO: 81395 - DNA, 25 bp, Homo sapien
atgcctgaaaatgctatatatgatt

SEQ ID NO: 81396 - DNA, 25 bp, Homo sapien
atgcttgacccatgacacctgctgt

SEQ ID NO: 81397 - DNA, 25 bp, Homo sapien
atgtcagactcaaaagaactaccag

SEQ ID NO: 81398 - DNA, 25 bp, Homo sapien
gcgcaatgacagggcctgtgacttc

SEQ ID NO: 81399 - DNA, 25 bp, Homo sapien
acttcagggctttactccgtaacag

SEQ ID NO: 81400 - DNA, 25 bp, Homo sapien
aactaacatgtcctgcctattatct

SEQ ID NO: 81401 - DNA, 25 bp, Homo sapien
ggaatttcttaacttcttgcttctt

SEQ ID NO: 81402 - DNA, 25 bp, Homo sapien
gatttcctaatactgtcatcctcaa

SEQ ID NO: 81403 - DNA, 25 bp, Homo sapien
agtgccacttaatgtatgttaccaa

SEQ ID NO: 81404 - DNA, 25 bp, Homo sapien
gtccttttgacactgctctaacagc

SEQ ID NO: 81405 - DNA, 25 bp, Homo sapien
attatctgtcagctgcaaggtactc

SEQ ID NO: 81406 - DNA, 25 bp, Homo sapien
gttacagttctgtggtttcatgtta

SEQ ID NO: 81407 - DNA, 25 bp, Homo sapien
gacacaccaggcgctaattcaagga

SEQ ID NO: 81408 - DNA, 25 bp, Homo sapien
tattaacgatgtccaacccgtctgg

SEQ ID NO: 81409 - DNA, 25 bp, Homo sapien
gcaaggtactctggtgagtcaccac

SEQ ID NO: 81410 - DNA, 25 bp, Homo sapien
tccttgaattagcgcctggtgtgtc

SEQ ID NO: 81411 - DNA, 25 bp, Homo sapien
ccagacgggttggacatcgttaata

SEQ ID NO: 81412 - DNA, 25 bp, Homo sapien
ttgaggatgacagtattaggaaatc

SEQ ID NO: 81413 - DNA, 25 bp, Homo sapien
ctgttacggagtaaagccctgaagt

SEQ ID NO: 81414 - DNA, 25 bp, Homo sapien
gagtaccttgcagctgacagataat

SEQ ID NO: 81415 - DNA, 25 bp, Homo sapien
ttggtaacatacattaagtggcact

SEQ ID NO: 81416 - DNA, 25 bp, Homo sapien
gctgttagagcagtgtcaaaaggac

SEQ ID NO: 81417 - DNA, 25 bp, Homo sapien
aagaagcaagaagttaagaaattcc

SEQ ID NO: 81418 - DNA, 25 bp, Homo sapien
agataataggcaggacatgttagtt

SEQ ID NO: 81419 - DNA, 25 bp, Homo sapien
taacatgaaaccacagaactgtaac

SEQ ID NO: 81420 - DNA, 25 bp, Homo sapien
gtggtgactcaccagagtaccttgc

SEQ ID NO: 81421 - DNA, 25 bp, Homo sapien
ggtggtctttcaggttatcttggca

SEQ ID NO: 81422 - DNA, 25 bp, Homo sapien
atgacattgtgtttgtactttgttg

SEQ ID NO: 81423 - DNA, 25 bp, Homo sapien
tcaggttatcttggcaacatgtaca

SEQ ID NO: 81424 - DNA, 25 bp, Homo sapien
ccccgatgacctgggatggtggcca

SEQ ID NO: 81425 - DNA, 25 bp, Homo sapien
ttacctgggagcacacttttccctt

SEQ ID NO: 81426 - DNA, 25 bp, Homo sapien
cactgtactctgaaattggcgagtg

SEQ ID NO: 81427 - DNA, 25 bp, Homo sapien
ccttccccgatgacctgggatggtg

SEQ ID NO: 81428 - DNA, 25 bp, Homo sapien
ggtctttcaggttatcttggcaaca

SEQ ID NO: 81429 - DNA, 25 bp, Homo sapien
ccgttcatggtggtctttcaggtta

SEQ ID NO: 81430 - DNA, 25 bp, Homo sapien
cccaccactgtactctgaaattggc

SEQ ID NO: 81431 - DNA, 25 bp, Homo sapien
cagggaaaagtgaggctcttggggg

SEQ ID NO: 81432 - DNA, 25 bp, Homo sapien
aagggaaaagtgtgctcccaggtaa

SEQ ID NO: 81433 - DNA, 25 bp, Homo sapien
tgtacatgttgccaagataacctga

SEQ ID NO: 81434 - DNA, 25 bp, Homo sapien
cccccaagagcctcacttttccctg

SEQ ID NO: 81435 - DNA, 25 bp, Homo sapien
caacaaagtacaaacacaatgtcat

SEQ ID NO: 81436 - DNA, 25 bp, Homo sapien
tgttgccaagataacctgaaagacc

SEQ ID NO: 81437 - DNA, 25 bp, Homo sapien
tgccaagataacctgaaagaccacc

SEQ ID NO: 81438 - DNA, 25 bp, Homo sapien
tggccaccatcccaggtcatcgggg

SEQ ID NO: 81439 - DNA, 25 bp, Homo sapien
cactcgccaatttcagagtacagtg

SEQ ID NO: 81440 - DNA, 25 bp, Homo sapien
caccatcccaggtcatcggggaagg

SEQ ID NO: 81441 - DNA, 25 bp, Homo sapien
gccaatttcagagtacagtggtggg

SEQ ID NO: 81442 - DNA, 25 bp, Homo sapien
taacctgaaagaccaccatgaacgg

SEQ ID NO: 81443 - DNA, 25 bp, Homo sapien
aaatggtcattgatgtccttcaccc

SEQ ID NO: 81444 - DNA, 25 bp, Homo sapien
gaaagttcatgaccaaccgactact

SEQ ID NO: 81445 - DNA, 25 bp, Homo sapien
agatcgccatcatgaacgacaccgt

SEQ ID NO: 81446 - DNA, 25 bp, Homo sapien
ggtggcaagacaactggctttggca

SEQ ID NO: 81447 - DNA, 25 bp, Homo sapien
tggccactgtggatttttcgcaaga

SEQ ID NO: 81448 - DNA, 25 bp, Homo sapien
gacttgcaagacatggcctgtatga

SEQ ID NO: 81449 - DNA, 25 bp, Homo sapien
gcatgatttatgattccctggatta

SEQ ID NO: 81450 - DNA, 25 bp, Homo sapien
acaagaccacaccggatgtcatctt

SEQ ID NO: 81451 - DNA, 25 bp, Homo sapien
tccttcaccccgggaaggcgacagt

SEQ ID NO: 81452 - DNA, 25 bp, Homo sapien
tgaacgacaccgtaactatccgcac

SEQ ID NO: 81453 - DNA, 25 bp, Homo sapien
ttcagaactcattttggtggtggca

SEQ ID NO: 81454 - DNA, 25 bp, Homo sapien
tcttgcgaaaaatccacagtggcca

SEQ ID NO: 81455 - DNA, 25 bp, Homo sapien
tgccaccaccaaaatgagttctgaa

SEQ ID NO: 81456 - DNA, 25 bp, Homo sapien
gtgcggatagttacggtgtcgttca

SEQ ID NO: 81457 - DNA, 25 bp, Homo sapien
gggtgaaggacatcaatgaccattt

SEQ ID NO: 81458 - DNA, 25 bp, Homo sapien
agtagtcggttggtcatgaactttc

SEQ ID NO: 81459 - DNA, 25 bp, Homo sapien
actgtcgccttcccggggtgaagga

SEQ ID NO: 81460 - DNA, 25 bp, Homo sapien
aagatgacatccggtgtggtcttgt

SEQ ID NO: 81461 - DNA, 25 bp, Homo sapien
tgccaaagccagttgtcttgccacc

SEQ ID NO: 81462 - DNA, 25 bp, Homo sapien
tcatacaggccatgtcttgcaagtc

SEQ ID NO: 81463 - DNA, 25 bp, Homo sapien
acggtgtcgttcatgatggcgatct

SEQ ID NO: 81464 - DNA, 25 bp, Homo sapien
taatccagggaatcataaatcatgc

SEQ ID NO: 81465 - DNA, 25 bp, Homo sapien
tacgtcctggggtacaagcagactc

SEQ ID NO: 81466 - DNA, 25 bp, Homo sapien
cccgctcctaaggcaggaagatggt

SEQ ID NO: 81467 - DNA, 25 bp, Homo sapien
ctaacaactgcccagctttgaggaa

SEQ ID NO: 81468 - DNA, 25 bp, Homo sapien
gcacactggctatcattgatccagg

SEQ ID NO: 81469 - DNA, 25 bp, Homo sapien
aggcaaagcgaaattggtcattctc

SEQ ID NO: 81470 - DNA, 25 bp, Homo sapien
aactggtgtccatcactacagtggc

SEQ ID NO: 81471 - DNA, 25 bp, Homo sapien
aagtcgctggagtcgatcaactcta

SEQ ID NO: 81472 - DNA, 25 bp, Homo sapien
attgaactgggcacagcatgcggaa

SEQ ID NO: 81473 - DNA, 25 bp, Homo sapien
ttggtcattctcgctaacaactgcc

SEQ ID NO: 81474 - DNA, 25 bp, Homo sapien
ggagtcgatcaactctaggctccaa

SEQ ID NO: 81475 - DNA, 25 bp, Homo sapien
ctctaggctccaactcgttatgaaa

SEQ ID NO: 81476 - DNA, 25 bp, Homo sapien
ttcctcaaagctgggcagttgttag

SEQ ID NO: 81477 - DNA, 25 bp, Homo sapien
ttccgcatgctgtgcccagttcaat

SEQ ID NO: 81478 - DNA, 25 bp, Homo sapien
ggcagttgttagcgagaatgaccaa

SEQ ID NO: 81479 - DNA, 25 bp, Homo sapien
tagagttgatcgactccagcgactt

SEQ ID NO: 81480 - DNA, 25 bp, Homo sapien
gagaatgaccaatttcgctttgcct

SEQ ID NO: 81481 - DNA, 25 bp, Homo sapien
cctggatcaatgatagccagtgtgc

SEQ ID NO: 81482 - DNA, 25 bp, Homo sapien
accatcttcctgccttaggagcggg

SEQ ID NO: 81483 - DNA, 25 bp, Homo sapien
gccactgtagtgatggacaccagtt

SEQ ID NO: 81484 - DNA, 25 bp, Homo sapien
gagtctgcttgtaccccaggacgta

SEQ ID NO: 81485 - DNA, 25 bp, Homo sapien
tttcataacgagttggagcctagag

SEQ ID NO: 81486 - DNA, 25 bp, Homo sapien
ttggagcctagagttgatcgactcc

SEQ ID NO: 81487 - DNA, 25 bp, Homo sapien
gtccaggttctattgccaagaatgt

SEQ ID NO: 81488 - DNA, 25 bp, Homo sapien
aaagatggaactccaccctttgctt

SEQ ID NO: 81489 - DNA, 25 bp, Homo sapien
aagtggaagccaaattcatcaatta

SEQ ID NO: 81490 - DNA, 25 bp, Homo sapien
aaatgttgtccaggttctattgcca

SEQ ID NO: 81491 - DNA, 25 bp, Homo sapien
caagaggctattcaagatctctggc

SEQ ID NO: 81492 - DNA, 25 bp, Homo sapien
tgcagagtgagaactttccctaccg

SEQ ID NO: 81493 - DNA, 25 bp, Homo sapien
tgttgtccaggttctattgccaaga

SEQ ID NO: 81494 - DNA, 25 bp, Homo sapien
attttccgtcttatttcatttctgt

SEQ ID NO: 81495 - DNA, 25 bp, Homo sapien
ttttccgtcttatttcatttctgta

SEQ ID NO: 81496 - DNA, 25 bp, Homo sapien
gccaagaatgtgttgtccaaaatgc

SEQ ID NO: 81497 - DNA, 25 bp, Homo sapien
gatgactgaccaagaggctattcaa

SEQ ID NO: 81498 - DNA, 25 bp, Homo sapien
aagcaaagggtggagttccatcttt

SEQ ID NO: 81499 - DNA, 25 bp, Homo sapien
taattgatgaatttggcttccactt

SEQ ID NO: 81500 - DNA, 25 bp, Homo sapien
tcttggcaatagaacctggacaaca

SEQ ID NO: 81501 - DNA, 25 bp, Homo sapien
gccagagatcttgaatagcctcttg

SEQ ID NO: 81502 - DNA, 25 bp, Homo sapien
tacagaaatgaaataagacggaaaa

SEQ ID NO: 81503 - DNA, 25 bp, Homo sapien
gcattttggacaacacattcttggc

SEQ ID NO: 81504 - DNA, 25 bp, Homo sapien
ttgaatagcctcttggtcagtcatc

SEQ ID NO: 81505 - DNA, 25 bp, Homo sapien
cggtagggaaagttctcactctgca

SEQ ID NO: 81506 - DNA, 25 bp, Homo sapien
acagaaatgaaataagacggaaaat

SEQ ID NO: 81507 - DNA, 25 bp, Homo sapien
acattcttggcaatagaacctggac

SEQ ID NO: 81508 - DNA, 25 bp, Homo sapien
tggcaatagaacctggacaacattt

SEQ ID NO: 81509 - DNA, 25 bp, Homo sapien
tcccccctctcgagggcgatgagga

SEQ ID NO: 81510 - DNA, 25 bp, Homo sapien
gtgaccagcacctacggctggacag

SEQ ID NO: 81511 - DNA, 25 bp, Homo sapien
aatagacttgtgtcttcaccttgct

SEQ ID NO: 81512 - DNA, 25 bp, Homo sapien
gcagaggaacccaatgctgcagttc

SEQ ID NO: 81513 - DNA, 25 bp, Homo sapien
gggcgatgaggatgcgtctcgcatg

SEQ ID NO: 81514 - DNA, 25 bp, Homo sapien
aaaagcacctggagatcaaccctga

SEQ ID NO: 81515 - DNA, 25 bp, Homo sapien
caaccgcatctatcgcatgatcaag

SEQ ID NO: 81516 - DNA, 25 bp, Homo sapien
aacttgtgcccttgtatagtgtccc

SEQ ID NO: 81517 - DNA, 25 bp, Homo sapien
gtcttcaccttgctgcattgtgacc

SEQ ID NO: 81518 - DNA, 25 bp, Homo sapien
gagcggatcatgaaagcccaggcac

SEQ ID NO: 81519 - DNA, 25 bp, Homo sapien
tggtggtgctgctgtttgaaaccgc

SEQ ID NO: 81520 - DNA, 25 bp, Homo sapien
cttgatcatgcgatagatgcggttg

SEQ ID NO: 81521 - DNA, 25 bp, Homo sapien
gcggtttcaaacagcagcaccacca

SEQ ID NO: 81522 - DNA, 25 bp, Homo sapien
gggacactatacaagggcacaagtt

SEQ ID NO: 81523 - DNA, 25 bp, Homo sapien
agcaaggtgaagacacaagtctatt

SEQ ID NO: 81524 - DNA, 25 bp, Homo sapien
tcctcatcgccctcgagagggggga

SEQ ID NO: 81525 - DNA, 25 bp, Homo sapien
catgcgagacgcatcctcatcgccc

SEQ ID NO: 81526 - DNA, 25 bp, Homo sapien
tcagggttgatctccaggtgctttt

SEQ ID NO: 81527 - DNA, 25 bp, Homo sapien
gtgcctgggctttcatgatccgctc

SEQ ID NO: 81528 - DNA, 25 bp, Homo sapien
ctgtccagccgtaggtgctggtcac

SEQ ID NO: 81529 - DNA, 25 bp, Homo sapien
ggtcacaatgcagcaaggtgaagac

SEQ ID NO: 81530 - DNA, 25 bp, Homo sapien
gaactgcagcattgggttcctctgc

SEQ ID NO: 81531 - DNA, 25 bp, Homo sapien
gaacctcttactgctttcaatacac

SEQ ID NO: 81532 - DNA, 25 bp, Homo sapien
ccacctctgtgtgtgatgtagcttt

SEQ ID NO: 81533 - DNA, 25 bp, Homo sapien
cgcagcagactgcgatcaattctgc

SEQ ID NO: 81534 - DNA, 25 bp, Homo sapien
cctgcattccatagccatgtgcttg

SEQ ID NO: 81535 - DNA, 25 bp, Homo sapien
tgctcgctcagacactttggcagga

SEQ ID NO: 81536 - DNA, 25 bp, Homo sapien
cactttggcaggatgtctggggcct

SEQ ID NO: 81537 - DNA, 25 bp, Homo sapien
tgcattccatagccatgtgcttgtc

SEQ ID NO: 81538 - DNA, 25 bp, Homo sapien
cttactgctttcaatacacgattag

SEQ ID NO: 81539 - DNA, 25 bp, Homo sapien
tgcatggtcacagtagagatccccg

SEQ ID NO: 81540 - DNA, 25 bp, Homo sapien
gtggtggtggcgcagcagactgcga

SEQ ID NO: 81541 - DNA, 25 bp, Homo sapien
gccatcgaaaaagacaacctctact

SEQ ID NO: 81542 - DNA, 25 bp, Homo sapien
aggccccagacatcctgccaaagtg

SEQ ID NO: 81543 - DNA, 25 bp, Homo sapien
tcctgccaaagtgtctgagcgagca

SEQ ID NO: 81544 - DNA, 25 bp, Homo sapien
gtgtattgaaagcagtaagaggttc

SEQ ID NO: 81545 - DNA, 25 bp, Homo sapien
cggggatctctactgtgaccatgca

SEQ ID NO: 81546 - DNA, 25 bp, Homo sapien
gcagaattgatcgcagtctgctgcg

SEQ ID NO: 81547 - DNA, 25 bp, Homo sapien
caagcacatggctatggaatgcagg

SEQ ID NO: 81548 - DNA, 25 bp, Homo sapien
ctaatcgtgtattgaaagcagtaag

SEQ ID NO: 81549 - DNA, 25 bp, Homo sapien
agtagaggttgtctttttcgatggc

SEQ ID NO: 81550 - DNA, 25 bp, Homo sapien
gacaagcacatggctatggaatgca

SEQ ID NO: 81551 - DNA, 25 bp, Homo sapien
tcgcagtctgctgcgccaccaccac

SEQ ID NO: 81552 - DNA, 25 bp, Homo sapien
aaagctacatcacacacagaggtgg

SEQ ID NO: 81553 - DNA, 25 bp, Homo sapien
gatgctccacaaggatatgctcccc

SEQ ID NO: 81554 - DNA, 25 bp, Homo sapien
gaagggcggaaaaccaggcgcttca

SEQ ID NO: 81555 - DNA, 25 bp, Homo sapien
ggctgggaaggcacagaatcgctga

SEQ ID NO: 81556 - DNA, 25 bp, Homo sapien
gggactttgatacccaggaagaata

SEQ ID NO: 81557 - DNA, 25 bp, Homo sapien
gaaaagtttgctgggtctgctggct

SEQ ID NO: 81558 - DNA, 25 bp, Homo sapien
aaagcagagcttgatcgccagtgga

SEQ ID NO: 81559 - DNA, 25 bp, Homo sapien
gaagatggaagctgatggggttgaa

SEQ ID NO: 81560 - DNA, 25 bp, Homo sapien
agttatgcagagtgctacccagcca

SEQ ID NO: 81561 - DNA, 25 bp, Homo sapien
ctagttacaaccagagatgctccac

SEQ ID NO: 81562 - DNA, 25 bp, Homo sapien
gctacccagccacgatggatgacat

SEQ ID NO: 81563 - DNA, 25 bp, Homo sapien
aaagcagctgggagatttctttggc

SEQ ID NO: 81564 - DNA, 25 bp, Homo sapien
gtggagcatctctggttgtaactag

SEQ ID NO: 81565 - DNA, 25 bp, Homo sapien
tgaagcgcctggttttccgcccttc

SEQ ID NO: 81566 - DNA, 25 bp, Homo sapien
tccactggcgatcaagctctgcttt

SEQ ID NO: 81567 - DNA, 25 bp, Homo sapien
tcagcgattctgtgccttcccagcc

SEQ ID NO: 81568 - DNA, 25 bp, Homo sapien
agccagcagacccagcaaacttttc

SEQ ID NO: 81569 - DNA, 25 bp, Homo sapien
ttcaaccccatcagcttccatcttc

SEQ ID NO: 81570 - DNA, 25 bp, Homo sapien
tggctgggtagcactctgcataact

SEQ ID NO: 81571 - DNA, 25 bp, Homo sapien
tattcttcctgggtatcaaagtccc

SEQ ID NO: 81572 - DNA, 25 bp, Homo sapien
ggggagcatatccttgtggagcatc

SEQ ID NO: 81573 - DNA, 25 bp, Homo sapien
gccaaagaaatctcccagctgcttt

SEQ ID NO: 81574 - DNA, 25 bp, Homo sapien
atgtcatccatcgtggctgggtagc

SEQ ID NO: 81575 - DNA, 25 bp, Homo sapien
attggtttccaatactgcacacata

SEQ ID NO: 81576 - DNA, 25 bp, Homo sapien
tctttcccccttttaatttgtgatg

SEQ ID NO: 81577 - DNA, 25 bp, Homo sapien
gtgcagaaagtatcttcctccaggc

SEQ ID NO: 81578 - DNA, 25 bp, Homo sapien
atatacttctcattcctgtaactcc

SEQ ID NO: 81579 - DNA, 25 bp, Homo sapien
atttgtgatgtcacttgaccccatt

SEQ ID NO: 81580 - DNA, 25 bp, Homo sapien
gtaactccattccctttaaacagtg

SEQ ID NO: 81581 - DNA, 25 bp, Homo sapien
gaaaactgctttataatctcattta

SEQ ID NO: 81582 - DNA, 25 bp, Homo sapien
cctccaggcttgtaatacccttcac

SEQ ID NO: 81583 - DNA, 25 bp, Homo sapien
gtaggagcactacaccattggtttc

SEQ ID NO: 81584 - DNA, 25 bp, Homo sapien
tgaccccatttatgtgtaggagcac

SEQ ID NO: 81585 - DNA, 25 bp, Homo sapien
caaatatacttccatccattgaatg

SEQ ID NO: 81586 - DNA, 25 bp, Homo sapien
gtgctcctacacataaatggggtca

SEQ ID NO: 81587 - DNA, 25 bp, Homo sapien
cattcaatggatggaagtatatttg

SEQ ID NO: 81588 - DNA, 25 bp, Homo sapien
gaaaccaatggtgtagtgctcctac

SEQ ID NO: 81589 - DNA, 25 bp, Homo sapien
gcctggaggaagatactttctgcac

SEQ ID NO: 81590 - DNA, 25 bp, Homo sapien
catcacaaattaaaagggggaaaga

SEQ ID NO: 81591 - DNA, 25 bp, Homo sapien
tatgtgtgcagtattggaaaccaat

SEQ ID NO: 81592 - DNA, 25 bp, Homo sapien
cactgtttaaagggaatggagttac

SEQ ID NO: 81593 - DNA, 25 bp, Homo sapien
aatggggtcaagtgacatcacaaat

SEQ ID NO: 81594 - DNA, 25 bp, Homo sapien
gtgaagggtattacaagcctggagg

SEQ ID NO: 81595 - DNA, 25 bp, Homo sapien
ggagttacaggaatgagaagtatat

SEQ ID NO: 81596 - DNA, 25 bp, Homo sapien
taaatgagattataaagcagttttc

SEQ ID NO: 81597 - DNA, 25 bp, Homo sapien
ttttccttttcatctgttgttctgt

SEQ ID NO: 81598 - DNA, 25 bp, Homo sapien
ttcttgctgttcagtgctttttcct

SEQ ID NO: 81599 - DNA, 25 bp, Homo sapien
gtcacagtgaccttagctacatagc

SEQ ID NO: 81600 - DNA, 25 bp, Homo sapien
atgtctgcaggtttctccttgaagc

SEQ ID NO: 81601 - DNA, 25 bp, Homo sapien
attgtcagatcgttcattgcctttc

SEQ ID NO: 81602 - DNA, 25 bp, Homo sapien
ttgcatttccagaaatctgcctcct

SEQ ID NO: 81603 - DNA, 25 bp, Homo sapien
cagtatatgtcatgcctcactttct

SEQ ID NO: 81604 - DNA, 25 bp, Homo sapien
cttcaccctccgttgacagtatatg

SEQ ID NO: 81605 - DNA, 25 bp, Homo sapien
agctacatagcagactttcccaaat

SEQ ID NO: 81606 - DNA, 25 bp, Homo sapien
ctcactttcttctagctgagcttta

SEQ ID NO: 81607 - DNA, 25 bp, Homo sapien
cctctcccacaccactatagtgtaa

SEQ ID NO: 81608 - DNA, 25 bp, Homo sapien
gcttcaaggagaaacctgcagacat

SEQ ID NO: 81609 - DNA, 25 bp, Homo sapien
acagaacaacagatgaaaaggaaaa

SEQ ID NO: 81610 - DNA, 25 bp, Homo sapien
agaaagtgaggcatgacatatactg

SEQ ID NO: 81611 - DNA, 25 bp, Homo sapien
aggaggcagatttctggaaatgcaa

SEQ ID NO: 81612 - DNA, 25 bp, Homo sapien
gctatgtagctaaggtcactgtgac

SEQ ID NO: 81613 - DNA, 25 bp, Homo sapien
taaagctcagctagaagaaagtgag

SEQ ID NO: 81614 - DNA, 25 bp, Homo sapien
aggaaaaagcactgaacagcaagaa

SEQ ID NO: 81615 - DNA, 25 bp, Homo sapien
atttgggaaagtctgctatgtagct

SEQ ID NO: 81616 - DNA, 25 bp, Homo sapien
gaaaggcaatgaacgatctgacaat

SEQ ID NO: 81617 - DNA, 25 bp, Homo sapien
catatactgtcaacggagggtgaag

SEQ ID NO: 81618 - DNA, 25 bp, Homo sapien
ttacactatagtggtgtgggagagg

SEQ ID NO: 81619 - DNA, 25 bp, Homo sapien
gacgttctcttcaaaacttcttgct

SEQ ID NO: 81620 - DNA, 25 bp, Homo sapien
atgtcgtgggaatcaactcctcatt

SEQ ID NO: 81621 - DNA, 25 bp, Homo sapien
tttgtgcatcagtcgggttttctat

SEQ ID NO: 81622 - DNA, 25 bp, Homo sapien
atggtactcagatgtgcattcacat

SEQ ID NO: 81623 - DNA, 25 bp, Homo sapien
actcctcatttatctgttgcgtaag

SEQ ID NO: 81624 - DNA, 25 bp, Homo sapien
gaagcttgctttattaagacactct

SEQ ID NO: 81625 - DNA, 25 bp, Homo sapien
agcttttttacctcacatcttttat

SEQ ID NO: 81626 - DNA, 25 bp, Homo sapien
aagacgtcagggaatccttgtatat

SEQ ID NO: 81627 - DNA, 25 bp, Homo sapien
agtttgacactggagcttttgagct

SEQ ID NO: 81628 - DNA, 25 bp, Homo sapien
gaagtgggtgtaccttgctttacct

SEQ ID NO: 81629 - DNA, 25 bp, Homo sapien
tccagctgtgatgtgtcttcatttt

SEQ ID NO: 81630 - DNA, 25 bp, Homo sapien
atatacaaggattccctgacgtctt

SEQ ID NO: 81631 - DNA, 25 bp, Homo sapien
atagaaaacccgactgatgcacaaa

SEQ ID NO: 81632 - DNA, 25 bp, Homo sapien
agcaagaagttttgaagagaacgtc

SEQ ID NO: 81633 - DNA, 25 bp, Homo sapien
aggtaaagcaaggtacacccacttc

SEQ ID NO: 81634 - DNA, 25 bp, Homo sapien
atgtgaatgcacatctgagtaccat

SEQ ID NO: 81635 - DNA, 25 bp, Homo sapien
aatgaggagttgattcccacgacat

SEQ ID NO: 81636 - DNA, 25 bp, Homo sapien
agctcaaaagctccagtgtcaaact

SEQ ID NO: 81637 - DNA, 25 bp, Homo sapien
aaaatgaagacacatcacagctgga

SEQ ID NO: 81638 - DNA, 25 bp, Homo sapien
cttacgcaacagataaatgaggagt

SEQ ID NO: 81639 - DNA, 25 bp, Homo sapien
ataaaagatgtgaggtaaaaaagct

SEQ ID NO: 81640 - DNA, 25 bp, Homo sapien
agagtgtcttaataaagcaagcttc

SEQ ID NO: 81641 - DNA, 25 bp, Homo sapien
cagtgatgccaccagggagagcttc

SEQ ID NO: 81642 - DNA, 25 bp, Homo sapien
ggtttttcacgcttttgtagaactg

SEQ ID NO: 81643 - DNA, 25 bp, Homo sapien
cacgcttttgtagaactgaggtttc

SEQ ID NO: 81644 - DNA, 25 bp, Homo sapien
gactgatgggttcaggtgggagctg

SEQ ID NO: 81645 - DNA, 25 bp, Homo sapien
tctggccactgctttgtatcagggt

SEQ ID NO: 81646 - DNA, 25 bp, Homo sapien
tgctgggtgaggcagggaacccttt

SEQ ID NO: 81647 - DNA, 25 bp, Homo sapien
tgaggcagggaacccttttcactcc

SEQ ID NO: 81648 - DNA, 25 bp, Homo sapien
gtatcagggtttttcacgcttttgt

SEQ ID NO: 81649 - DNA, 25 bp, Homo sapien
agctttagtctaatggagccaagga

SEQ ID NO: 81650 - DNA, 25 bp, Homo sapien
ctcccattccttagctttagtctaa

SEQ ID NO: 81651 - DNA, 25 bp, Homo sapien
aagagccggggactgatgggttcag

SEQ ID NO: 81652 - DNA, 25 bp, Homo sapien
acaaaagcgtgaaaaaccctgatac

SEQ ID NO: 81653 - DNA, 25 bp, Homo sapien
cagctcccacctgaacccatcagtc

SEQ ID NO: 81654 - DNA, 25 bp, Homo sapien
ctgaacccatcagtccccggctctt

SEQ ID NO: 81655 - DNA, 25 bp, Homo sapien
ttagactaaagctaaggaatgggag

SEQ ID NO: 81656 - DNA, 25 bp, Homo sapien
aaagggttccctgcctcacccagca

SEQ ID NO: 81657 - DNA, 25 bp, Homo sapien
tccttggctccattagactaaagct

SEQ ID NO: 81658 - DNA, 25 bp, Homo sapien
ggagtgaaaagggttccctgcctca

SEQ ID NO: 81659 - DNA, 25 bp, Homo sapien
gaagctctccctggtggcatcactg

SEQ ID NO: 81660 - DNA, 25 bp, Homo sapien
accctgatacaaagcagtggccaga

SEQ ID NO: 81661 - DNA, 25 bp, Homo sapien
gaaacctcagttctacaaaagcgtg

SEQ ID NO: 81662 - DNA, 25 bp, Homo sapien
cagttctacaaaagcgtgaaaaacc

SEQ ID NO: 81663 - DNA, 25 bp, Homo sapien
aaccttaggatgagctcccttttct

SEQ ID NO: 81664 - DNA, 25 bp, Homo sapien
taatctgacgataatttccctgtat

SEQ ID NO: 81665 - DNA, 25 bp, Homo sapien
tgttttttccatttacggcagtggt

SEQ ID NO: 81666 - DNA, 25 bp, Homo sapien
aaaagctgatgtatagccctgtata

SEQ ID NO: 81667 - DNA, 25 bp, Homo sapien
aatttccctgtatattatgttcatt

SEQ ID NO: 81668 - DNA, 25 bp, Homo sapien
acggcagtggtaccatgttttggat

SEQ ID NO: 81669 - DNA, 25 bp, Homo sapien
gttatcctgagttgagtttaagcca

SEQ ID NO: 81670 - DNA, 25 bp, Homo sapien
gaacatcatcacagttatcctgagt

SEQ ID NO: 81671 - DNA, 25 bp, Homo sapien
attagatcaggttgtctgcatttgt

SEQ ID NO: 81672 - DNA, 25 bp, Homo sapien
gtatttcttgtgcattaatctgacg

SEQ ID NO: 81673 - DNA, 25 bp, Homo sapien
tagaaaagggtcttcctattaatgg

SEQ ID NO: 81674 - DNA, 25 bp, Homo sapien
aatgaacataatatacagggaaatt

SEQ ID NO: 81675 - DNA, 25 bp, Homo sapien
cgtcagattaatgcacaagaaatac

SEQ ID NO: 81676 - DNA, 25 bp, Homo sapien
acaaatgcagacaacctgatctaat

SEQ ID NO: 81677 - DNA, 25 bp, Homo sapien
actcaggataactgtgatgatgttc

SEQ ID NO: 81678 - DNA, 25 bp, Homo sapien
tatacagggctatacatcagctttt

SEQ ID NO: 81679 - DNA, 25 bp, Homo sapien
accactgccgtaaatggaaaaaaca

SEQ ID NO: 81680 - DNA, 25 bp, Homo sapien
atacagggaaattatcgtcagatta

SEQ ID NO: 81681 - DNA, 25 bp, Homo sapien
atccaaaacatggtaccactgccgt

SEQ ID NO: 81682 - DNA, 25 bp, Homo sapien
agaaaagggagctcatcctaaggtt

SEQ ID NO: 81683 - DNA, 25 bp, Homo sapien
ccattaataggaagacccttttcta

SEQ ID NO: 81684 - DNA, 25 bp, Homo sapien
tggcttaaactcaactcaggataac

SEQ ID NO: 81685 - DNA, 25 bp, Homo sapien
gagatggagcgtggcaacttcggag

SEQ ID NO: 81686 - DNA, 25 bp, Homo sapien
ggtgtggtgtggttaagttcgagtc

SEQ ID NO: 81687 - DNA, 25 bp, Homo sapien
gaagctgagtggccgagagattgac

SEQ ID NO: 81688 - DNA, 25 bp, Homo sapien
gctttgaccgtgccatcgagatgga

SEQ ID NO: 81689 - DNA, 25 bp, Homo sapien
tgctgtacgccgacatcaagatgga

SEQ ID NO: 81690 - DNA, 25 bp, Homo sapien
gccgagagagcctgccggatgatga

SEQ ID NO: 81691 - DNA, 25 bp, Homo sapien
aaattcaacgagtgcggccacgtgc

SEQ ID NO: 81692 - DNA, 25 bp, Homo sapien
aaggcctgccagatatttgtgagaa

SEQ ID NO: 81693 - DNA, 25 bp, Homo sapien
cattgagcgcatgggcctggccatg

SEQ ID NO: 81694 - DNA, 25 bp, Homo sapien
agttcgagtcgccagaggtggccga

SEQ ID NO: 81695 - DNA, 25 bp, Homo sapien
acttcggaggaagcttcgcaggttc

SEQ ID NO: 81696 - DNA, 25 bp, Homo sapien
gcacgtggccgcactcgttgaattt

SEQ ID NO: 81697 - DNA, 25 bp, Homo sapien
gtcaatctctcggccactcagcttc

SEQ ID NO: 81698 - DNA, 25 bp, Homo sapien
ttctcacaaatatctggcaggcctt

SEQ ID NO: 81699 - DNA, 25 bp, Homo sapien
tcggccacctctggcgactcgaact

SEQ ID NO: 81700 - DNA, 25 bp, Homo sapien
tccatctcgatggcacggtcaaagc

SEQ ID NO: 81701 - DNA, 25 bp, Homo sapien
catggccaggcccatgcgctcaatg

SEQ ID NO: 81702 - DNA, 25 bp, Homo sapien
gaacctgcgaagcttcctccgaagt

SEQ ID NO: 81703 - DNA, 25 bp, Homo sapien
tccatcttgatgtcggcgtacagca

SEQ ID NO: 81704 - DNA, 25 bp, Homo sapien
tcatcatccggcaggctctctcggc

SEQ ID NO: 81705 - DNA, 25 bp, Homo sapien
ctccgaagttgccacgctccatctc

SEQ ID NO: 81706 - DNA, 25 bp, Homo sapien
gactcgaacttaaccacaccacacc

SEQ ID NO: 81707 - DNA, 25 bp, Homo sapien
ggtggtcatcaaaatagctacaaac

SEQ ID NO: 81708 - DNA, 25 bp, Homo sapien
aggtggtgaagcagtattttccaat

SEQ ID NO: 81709 - DNA, 25 bp, Homo sapien
gaagtttaattctgagttctcatta

SEQ ID NO: 81710 - DNA, 25 bp, Homo sapien
gtatgacgttgggtccctctgaagt

SEQ ID NO: 81711 - DNA, 25 bp, Homo sapien
agaaatttgctttcattgttttatt

SEQ ID NO: 81712 - DNA, 25 bp, Homo sapien
aattttttgtatcaagtccctgaat

SEQ ID NO: 81713 - DNA, 25 bp, Homo sapien
ggaagagctcgtggaagaggtggtg

SEQ ID NO: 81714 - DNA, 25 bp, Homo sapien
gagtggttatgggaaggtatccagg

SEQ ID NO: 81715 - DNA, 25 bp, Homo sapien
tattccatttgcaacttatccccaa

SEQ ID NO: 81716 - DNA, 25 bp, Homo sapien
gggtccctctgaagtttaattctga

SEQ ID NO: 81717 - DNA, 25 bp, Homo sapien
agtccctgaatggaagtatgacgtt

SEQ ID NO: 81718 - DNA, 25 bp, Homo sapien
acttcagagggacccaacgtcatac

SEQ ID NO: 81719 - DNA, 25 bp, Homo sapien
ttggggataagttgcaaatggaata

SEQ ID NO: 81720 - DNA, 25 bp, Homo sapien
cctggataccttcccataaccactc

SEQ ID NO: 81721 - DNA, 25 bp, Homo sapien
gtttgtagctattttgatgaccacc

SEQ ID NO: 81722 - DNA, 25 bp, Homo sapien
tcagaattaaacttcagagggaccc

SEQ ID NO: 81723 - DNA, 25 bp, Homo sapien
attggaaaatactgcttcaccacct

SEQ ID NO: 81724 - DNA, 25 bp, Homo sapien
taatgagaactcagaattaaacttc

SEQ ID NO: 81725 - DNA, 25 bp, Homo sapien
attcagggacttgatacaaaaaatt

SEQ ID NO: 81726 - DNA, 25 bp, Homo sapien
aacgtcatacttccattcagggact

SEQ ID NO: 81727 - DNA, 25 bp, Homo sapien
caccacctcttccacgagctcttcc

SEQ ID NO: 81728 - DNA, 25 bp, Homo sapien
aataaaacaatgaaagcaaatttct

SEQ ID NO: 81729 - DNA, 25 bp, Homo sapien
aaatgggcagccacacgatgggcca

SEQ ID NO: 81730 - DNA, 25 bp, Homo sapien
aagatgacagattttgatcgtttta

SEQ ID NO: 81731 - DNA, 25 bp, Homo sapien
gaagcttcaaaaggcagctctcctg

SEQ ID NO: 81732 - DNA, 25 bp, Homo sapien
tgctgctgctaaagttccagcaaaa

SEQ ID NO: 81733 - DNA, 25 bp, Homo sapien
ggctttggtcgatggaccttgcact

SEQ ID NO: 81734 - DNA, 25 bp, Homo sapien
tcagaacagggctttggtcgatgga

SEQ ID NO: 81735 - DNA, 25 bp, Homo sapien
atgcagctcactgatttcatcctca

SEQ ID NO: 81736 - DNA, 25 bp, Homo sapien
tgcctttcaagtgcatgcagctcac

SEQ ID NO: 81737 - DNA, 25 bp, Homo sapien
ggcagccacacgatgggccaagaag

SEQ ID NO: 81738 - DNA, 25 bp, Homo sapien
gcacctggtactaagggtactgctg

SEQ ID NO: 81739 - DNA, 25 bp, Homo sapien
tcccaaaaaagcacctggtactaag

SEQ ID NO: 81740 - DNA, 25 bp, Homo sapien
gtgagctgcatgcacttgaaaggca

SEQ ID NO: 81741 - DNA, 25 bp, Homo sapien
cttagtaccaggtgcttttttggga

SEQ ID NO: 81742 - DNA, 25 bp, Homo sapien
tggcccatcgtgtggctgcccattt

SEQ ID NO: 81743 - DNA, 25 bp, Homo sapien
cagcagtacccttagtaccaggtgc

SEQ ID NO: 81744 - DNA, 25 bp, Homo sapien
ttttgctggaactttagcagcagca

SEQ ID NO: 81745 - DNA, 25 bp, Homo sapien
cttcttggcccatcgtgtggctgcc

SEQ ID NO: 81746 - DNA, 25 bp, Homo sapien
taaaacgatcaaaatctgtcatctt

SEQ ID NO: 81747 - DNA, 25 bp, Homo sapien
tgaggatgaaatcagtgagctgcat

SEQ ID NO: 81748 - DNA, 25 bp, Homo sapien
caggagagctgccttttgaagcttc

SEQ ID NO: 81749 - DNA, 25 bp, Homo sapien
agtgcaaggtccatcgaccaaagcc

SEQ ID NO: 81750 - DNA, 25 bp, Homo sapien
tccatcgaccaaagccctgttctga

SEQ ID NO: 81751 - DNA, 25 bp, Homo sapien
tgcccaggccgacatggagagcagc

SEQ ID NO: 81752 - DNA, 25 bp, Homo sapien
gaaggaggcgctctctgaggaaatc

SEQ ID NO: 81753 - DNA, 25 bp, Homo sapien
tcatcattaacgacagcctggacca

SEQ ID NO: 81754 - DNA, 25 bp, Homo sapien
gcggcagcgcaacactgaaaccgag

SEQ ID NO: 81755 - DNA, 25 bp, Homo sapien
gatgtggtcatcattaacgacagcc

SEQ ID NO: 81756 - DNA, 25 bp, Homo sapien
ggacctgcagggtgtgcggaacatc

SEQ ID NO: 81757 - DNA, 25 bp, Homo sapien
tcactctggacccagggctgacatc

SEQ ID NO: 81758 - DNA, 25 bp, Homo sapien
gtgcggaacatcaaggccaccgatc

SEQ ID NO: 81759 - DNA, 25 bp, Homo sapien
aatcaagaaagctcaaaggaccggc

SEQ ID NO: 81760 - DNA, 25 bp, Homo sapien
cccttggccagcatgtggagtggag

SEQ ID NO: 81761 - DNA, 25 bp, Homo sapien
ccgcatctgtgtgctggacgtggac

SEQ ID NO: 81762 - DNA, 25 bp, Homo sapien
gtccacgtccagcacacagatgcgg

SEQ ID NO: 81763 - DNA, 25 bp, Homo sapien
gatcggtggccttgatgttccgcac

SEQ ID NO: 81764 - DNA, 25 bp, Homo sapien
gccggtcctttgagctttcttgatt

SEQ ID NO: 81765 - DNA, 25 bp, Homo sapien
ggctgtcgttaatgatgaccacatc

SEQ ID NO: 81766 - DNA, 25 bp, Homo sapien
ctcggtttcagtgttgcgctgccgc

SEQ ID NO: 81767 - DNA, 25 bp, Homo sapien
gatgtcagccctgggtccagagtga

SEQ ID NO: 81768 - DNA, 25 bp, Homo sapien
tggtccaggctgtcgttaatgatga

SEQ ID NO: 81769 - DNA, 25 bp, Homo sapien
gatgttccgcacaccctgcaggtcc

SEQ ID NO: 81770 - DNA, 25 bp, Homo sapien
gatttcctcagagagcgcctccttc

SEQ ID NO: 81771 - DNA, 25 bp, Homo sapien
gctgctctccatgtcggcctgggca

SEQ ID NO: 81772 - DNA, 25 bp, Homo sapien
ctccactccacatgctggccaaggg

SEQ ID NO: 81773 - DNA, 25 bp, Homo sapien
tgaggtgcacaagcacggtctcctc

SEQ ID NO: 81774 - DNA, 25 bp, Homo sapien
aggtgtggaacctgaggggccagca

SEQ ID NO: 81775 - DNA, 25 bp, Homo sapien
accggtcaggacctccttgaggtgc

SEQ ID NO: 81776 - DNA, 25 bp, Homo sapien
gcctgacgtctgctctgaagaatgc

SEQ ID NO: 81777 - DNA, 25 bp, Homo sapien
tgagacggaggctggccatccattc

SEQ ID NO: 81778 - DNA, 25 bp, Homo sapien
cagccctgagcgtgctgagttctgt

SEQ ID NO: 81779 - DNA, 25 bp, Homo sapien
ccattccagctggagtcgtggggct

SEQ ID NO: 81780 - DNA, 25 bp, Homo sapien
tccatggagcaaacggagccacctc

SEQ ID NO: 81781 - DNA, 25 bp, Homo sapien
gtacccgatgtttacagatgctgtt

SEQ ID NO: 81782 - DNA, 25 bp, Homo sapien
tgccccttgctccgtaaaagtatca

SEQ ID NO: 81783 - DNA, 25 bp, Homo sapien
tttttccagagctgagcctgacgtc

SEQ ID NO: 81784 - DNA, 25 bp, Homo sapien
gaggtggctccgtttgctccatgga

SEQ ID NO: 81785 - DNA, 25 bp, Homo sapien
gcacctcaaggaggtcctgaccggt

SEQ ID NO: 81786 - DNA, 25 bp, Homo sapien
tgctggcccctcaggttccacacct

SEQ ID NO: 81787 - DNA, 25 bp, Homo sapien
agccccacgactccagctggaatgg

SEQ ID NO: 81788 - DNA, 25 bp, Homo sapien
gcattcttcagagcagacgtcaggc

SEQ ID NO: 81789 - DNA, 25 bp, Homo sapien
gaatggatggccagcctccgtctca

SEQ ID NO: 81790 - DNA, 25 bp, Homo sapien
aacagcatctgtaaacatcgggtac

SEQ ID NO: 81791 - DNA, 25 bp, Homo sapien
acagaactcagcacgctcagggctg

SEQ ID NO: 81792 - DNA, 25 bp, Homo sapien
gacgtcaggctcagctctggaaaaa

SEQ ID NO: 81793 - DNA, 25 bp, Homo sapien
gaggagaccgtgcttgtgcacctca

SEQ ID NO: 81794 - DNA, 25 bp, Homo sapien
tgatacttttacggagcaaggggca

SEQ ID NO: 81795 - DNA, 25 bp, Homo sapien
attagcggtgtatttcttgaagttt

SEQ ID NO: 81796 - DNA, 25 bp, Homo sapien
ttcatggcctacacgttcgagagag

SEQ ID NO: 81797 - DNA, 25 bp, Homo sapien
gttcgagagagagtcttcgggagag

SEQ ID NO: 81798 - DNA, 25 bp, Homo sapien
gaaccttcagctttttgggctttga

SEQ ID NO: 81799 - DNA, 25 bp, Homo sapien
attctactccgatgatcggctgaat

SEQ ID NO: 81800 - DNA, 25 bp, Homo sapien
gggtttgtccgcatgttgtaatcgt

SEQ ID NO: 81801 - DNA, 25 bp, Homo sapien
tgggtaggaaccgtagactcgctca

SEQ ID NO: 81802 - DNA, 25 bp, Homo sapien
ctccgaaccttcagctttttgggct

SEQ ID NO: 81803 - DNA, 25 bp, Homo sapien
ggcctacacgttcgagagagagtct

SEQ ID NO: 81804 - DNA, 25 bp, Homo sapien
ttgtccgcatgttgtaatcgtgcaa

SEQ ID NO: 81805 - DNA, 25 bp, Homo sapien
aatcgtgcaaataaacgctcactcc

SEQ ID NO: 81806 - DNA, 25 bp, Homo sapien
ggagtgagcgtttatttgcacgatt

SEQ ID NO: 81807 - DNA, 25 bp, Homo sapien
agcccaaaaagctgaaggttcggag

SEQ ID NO: 81808 - DNA, 25 bp, Homo sapien
aaacttcaagaaatacaccgctaat

SEQ ID NO: 81809 - DNA, 25 bp, Homo sapien
ctctcccgaagactctctctcgaac

SEQ ID NO: 81810 - DNA, 25 bp, Homo sapien
attcagccgatcatcggagtagaat

SEQ ID NO: 81811 - DNA, 25 bp, Homo sapien
tcaaagcccaaaaagctgaaggttc

SEQ ID NO: 81812 - DNA, 25 bp, Homo sapien
tgagcgagtctacggttcctaccca

SEQ ID NO: 81813 - DNA, 25 bp, Homo sapien
acgattacaacatgcggacaaaccc

SEQ ID NO: 81814 - DNA, 25 bp, Homo sapien
ttgcacgattacaacatgcggacaa

SEQ ID NO: 81815 - DNA, 25 bp, Homo sapien
agactctctctcgaacgtgtaggcc

SEQ ID NO: 81816 - DNA, 25 bp, Homo sapien
ctctctcgaacgtgtaggccatgaa

SEQ ID NO: 81817 - DNA, 25 bp, Homo sapien
catcgtggagatctttggcagcgcc

SEQ ID NO: 81818 - DNA, 25 bp, Homo sapien
ccaaggccatcggccatcggaacta

SEQ ID NO: 81819 - DNA, 25 bp, Homo sapien
tgcaggctactccatgtttggggct

SEQ ID NO: 81820 - DNA, 25 bp, Homo sapien
tcaacccatcttcctagtgtttgtg

SEQ ID NO: 81821 - DNA, 25 bp, Homo sapien
ccctcttgctgcgtgttgatttgga

SEQ ID NO: 81822 - DNA, 25 bp, Homo sapien
gtctaacctcttctgtggagtctgc

SEQ ID NO: 81823 - DNA, 25 bp, Homo sapien
tgctgctgactctgtgcagctgcgc

SEQ ID NO: 81824 - DNA, 25 bp, Homo sapien
gatttggaggcactgcagtccaggc

SEQ ID NO: 81825 - DNA, 25 bp, Homo sapien
agtctgcgtgggcatcgtgggcagt

SEQ ID NO: 81826 - DNA, 25 bp, Homo sapien
gtcatcgtcgcaattcttcagacct

SEQ ID NO: 81827 - DNA, 25 bp, Homo sapien
atcggaactaccatgcaggctactc

SEQ ID NO: 81828 - DNA, 25 bp, Homo sapien
agccccaaacatggagtagcctgca

SEQ ID NO: 81829 - DNA, 25 bp, Homo sapien
gcagactccacagaagaggttagac

SEQ ID NO: 81830 - DNA, 25 bp, Homo sapien
gcctggactgcagtgcctccaaatc

SEQ ID NO: 81831 - DNA, 25 bp, Homo sapien
aggtctgaagaattgcgacgatgac

SEQ ID NO: 81832 - DNA, 25 bp, Homo sapien
cacaaacactaggaagatgggttga

SEQ ID NO: 81833 - DNA, 25 bp, Homo sapien
gcgcagctgcacagagtcagcagca

SEQ ID NO: 81834 - DNA, 25 bp, Homo sapien
gagtagcctgcatggtagttccgat

SEQ ID NO: 81835 - DNA, 25 bp, Homo sapien
tccaaatcaacacgcagcaagaggg

SEQ ID NO: 81836 - DNA, 25 bp, Homo sapien
actgcccacgatgcccacgcagact

SEQ ID NO: 81837 - DNA, 25 bp, Homo sapien
tagttccgatggccgatggccttgg

SEQ ID NO: 81838 - DNA, 25 bp, Homo sapien
ggcgctgccaaagatctccacgatg

SEQ ID NO: 81839 - DNA, 25 bp, Homo sapien
gctggggcatgggcattgatcgagt

SEQ ID NO: 81840 - DNA, 25 bp, Homo sapien
gtgacttgcatcaatcctacattca

SEQ ID NO: 81841 - DNA, 25 bp, Homo sapien
gtttctcacggactccaacaacatc

SEQ ID NO: 81842 - DNA, 25 bp, Homo sapien
tcctacattcatctgtgatcaccca

SEQ ID NO: 81843 - DNA, 25 bp, Homo sapien
aaacttctgtactgccctggaatat

SEQ ID NO: 81844 - DNA, 25 bp, Homo sapien
tgcggcagcggcagctttttgaaga

SEQ ID NO: 81845 - DNA, 25 bp, Homo sapien
gactgagcgctttgagctgtttgtc

SEQ ID NO: 81846 - DNA, 25 bp, Homo sapien
agctgccagaaacgaacctctttga

SEQ ID NO: 81847 - DNA, 25 bp, Homo sapien
gagccctttggctaaatggcaccgc

SEQ ID NO: 81848 - DNA, 25 bp, Homo sapien
ttctgtttcctgccatgaaacccga

SEQ ID NO: 81849 - DNA, 25 bp, Homo sapien
ttgatcgagtcgccatgtttctcac

SEQ ID NO: 81850 - DNA, 25 bp, Homo sapien
tcttcaaaaagctgccgctgccgca

SEQ ID NO: 81851 - DNA, 25 bp, Homo sapien
gcggtgccatttagccaaagggctc

SEQ ID NO: 81852 - DNA, 25 bp, Homo sapien
tcgggtttcatggcaggaaacagaa

SEQ ID NO: 81853 - DNA, 25 bp, Homo sapien
atattccagggcagtacagaagttt

SEQ ID NO: 81854 - DNA, 25 bp, Homo sapien
tcaaagaggttcgtttctggcagct

SEQ ID NO: 81855 - DNA, 25 bp, Homo sapien
actcgatcaatgcccatgccccagc

SEQ ID NO: 81856 - DNA, 25 bp, Homo sapien
gtgagaaacatggcgactcgatcaa

SEQ ID NO: 81857 - DNA, 25 bp, Homo sapien
tgggtgatcacagatgaatgtagga

SEQ ID NO: 81858 - DNA, 25 bp, Homo sapien
tgaatgtaggattgatgcaagtcac

SEQ ID NO: 81859 - DNA, 25 bp, Homo sapien
gatgttgttggagtccgtgagaaac

SEQ ID NO: 81860 - DNA, 25 bp, Homo sapien
gacaaacagctcaaagcgctcagtc

SEQ ID NO: 81861 - DNA, 25 bp, Homo sapien
gtaaatttcttattgatggcaacta

SEQ ID NO: 81862 - DNA, 25 bp, Homo sapien
ggcaactaaatggtgtttgtagcat

SEQ ID NO: 81863 - DNA, 25 bp, Homo sapien
cattcactatacttttctaactgag

SEQ ID NO: 81864 - DNA, 25 bp, Homo sapien
gcggagacgtaaagcattaatgcaa

SEQ ID NO: 81865 - DNA, 25 bp, Homo sapien
ttctaactgagttgtcctacatgca

SEQ ID NO: 81866 - DNA, 25 bp, Homo sapien
tctcttcttcctgttattggtagtt

SEQ ID NO: 81867 - DNA, 25 bp, Homo sapien
atcatacagtagattccatccattc

SEQ ID NO: 81868 - DNA, 25 bp, Homo sapien
ctgtgctgttcctgtaagtttgcta

SEQ ID NO: 81869 - DNA, 25 bp, Homo sapien
acaagtttcagcggttcaactttat

SEQ ID NO: 81870 - DNA, 25 bp, Homo sapien
tgagttgtcctacatgcaagtacat

SEQ ID NO: 81871 - DNA, 25 bp, Homo sapien
atcaggtattggcagtttttccatt

SEQ ID NO: 81872 - DNA, 25 bp, Homo sapien
aatggaaaaactgccaatacctgat

SEQ ID NO: 81873 - DNA, 25 bp, Homo sapien
gaatggatggaatctactgtatgat

SEQ ID NO: 81874 - DNA, 25 bp, Homo sapien
ataaagttgaaccgctgaaacttgt

SEQ ID NO: 81875 - DNA, 25 bp, Homo sapien
tagcaaacttacaggaacagcacag

SEQ ID NO: 81876 - DNA, 25 bp, Homo sapien
tgcatgtaggacaactcagttagaa

SEQ ID NO: 81877 - DNA, 25 bp, Homo sapien
atgtacttgcatgtaggacaactca

SEQ ID NO: 81878 - DNA, 25 bp, Homo sapien
tagttgccatcaataagaaatttac

SEQ ID NO: 81879 - DNA, 25 bp, Homo sapien
ttgcattaatgctttacgtctccgc

SEQ ID NO: 81880 - DNA, 25 bp, Homo sapien
ctcagttagaaaagtatagtgaatg

SEQ ID NO: 81881 - DNA, 25 bp, Homo sapien
atgctacaaacaccatttagttgcc

SEQ ID NO: 81882 - DNA, 25 bp, Homo sapien
aactaccaataacaggaagaagaga

SEQ ID NO: 81883 - DNA, 25 bp, Homo sapien
gaagggttatgtggtccgaatcagt

SEQ ID NO: 81884 - DNA, 25 bp, Homo sapien
ggtccgaatcagtggtgggaacgac

SEQ ID NO: 81885 - DNA, 25 bp, Homo sapien
agcacccaagattcagcgtcttgtt

SEQ ID NO: 81886 - DNA, 25 bp, Homo sapien
acttcgtactttctatgagaagcgt

SEQ ID NO: 81887 - DNA, 25 bp, Homo sapien
aagcagggtgtcttgacccatggcc

SEQ ID NO: 81888 - DNA, 25 bp, Homo sapien
accaaagcacccaagattcagcgtc

SEQ ID NO: 81889 - DNA, 25 bp, Homo sapien
gcgtatggccacagaagttgctgct

SEQ ID NO: 81890 - DNA, 25 bp, Homo sapien
gagaagcgtatggccacagaagttg

SEQ ID NO: 81891 - DNA, 25 bp, Homo sapien
aaacaaggtttccccatgaagcagg

SEQ ID NO: 81892 - DNA, 25 bp, Homo sapien
ggtttccccatgaagcagggtgtct

SEQ ID NO: 81893 - DNA, 25 bp, Homo sapien
tgctgctgacgctctgggtgaagaa

SEQ ID NO: 81894 - DNA, 25 bp, Homo sapien
cctgcttcatggggaaaccttgttt

SEQ ID NO: 81895 - DNA, 25 bp, Homo sapien
gacgctgaatcttgggtgctttggt

SEQ ID NO: 81896 - DNA, 25 bp, Homo sapien
agcagcaacttctgtggccatacgc

SEQ ID NO: 81897 - DNA, 25 bp, Homo sapien
actgattcggaccacataacccttc

SEQ ID NO: 81898 - DNA, 25 bp, Homo sapien
aacaagacgctgaatcttgggtgct

SEQ ID NO: 81899 - DNA, 25 bp, Homo sapien
ttcttcacccagagcgtcagcagca

SEQ ID NO: 81900 - DNA, 25 bp, Homo sapien
agacaccctgcttcatggggaaacc

SEQ ID NO: 81901 - DNA, 25 bp, Homo sapien
acgcttctcatagaaagtacgaagt

SEQ ID NO: 81902 - DNA, 25 bp, Homo sapien
caacttctgtggccatacgcttctc

SEQ ID NO: 81903 - DNA, 25 bp, Homo sapien
gtcgttcccaccactgattcggacc

SEQ ID NO: 81904 - DNA, 25 bp, Homo sapien
ggccatgggtcaagacaccctgctt

SEQ ID NO: 81905 - DNA, 25 bp, Homo sapien
cggacgagttcgagtccggcatctc

SEQ ID NO: 81906 - DNA, 25 bp, Homo sapien
ggagctggagatgaactcggacctc

SEQ ID NO: 81907 - DNA, 25 bp, Homo sapien
gaagttggtggtggtcggaaagcta

SEQ ID NO: 81908 - DNA, 25 bp, Homo sapien
gaagcatgtcgtctttatcgctcag

SEQ ID NO: 81909 - DNA, 25 bp, Homo sapien
gctatcataatctttgttcccgttc

SEQ ID NO: 81910 - DNA, 25 bp, Homo sapien
agaaagccatgttcagttcgagcgc

SEQ ID NO: 81911 - DNA, 25 bp, Homo sapien
gttcagtgggaagcatgtcgtcttt

SEQ ID NO: 81912 - DNA, 25 bp, Homo sapien
gaagcccaatggcgagaagccggac

SEQ ID NO: 81913 - DNA, 25 bp, Homo sapien
tcgagcgccaagatcgtgaagccca

SEQ ID NO: 81914 - DNA, 25 bp, Homo sapien
ttcccgttcctcaactgaaatcttt

SEQ ID NO: 81915 - DNA, 25 bp, Homo sapien
tggagatgaactcggacctcaaggc

SEQ ID NO: 81916 - DNA, 25 bp, Homo sapien
aaagacgacatgcttcccactgaac

SEQ ID NO: 81917 - DNA, 25 bp, Homo sapien
gagatgccggactcgaactcgtccg

SEQ ID NO: 81918 - DNA, 25 bp, Homo sapien
gcgctcgaactgaacatggctttct

SEQ ID NO: 81919 - DNA, 25 bp, Homo sapien
ctgagcgataaagacgacatgcttc

SEQ ID NO: 81920 - DNA, 25 bp, Homo sapien
aaagatttcagttgaggaacgggaa

SEQ ID NO: 81921 - DNA, 25 bp, Homo sapien
gaacgggaacaaagattatgatagc

SEQ ID NO: 81922 - DNA, 25 bp, Homo sapien
gccttgaggtccgagttcatctcca

SEQ ID NO: 81923 - DNA, 25 bp, Homo sapien
tgggcttcacgatcttggcgctcga

SEQ ID NO: 81924 - DNA, 25 bp, Homo sapien
tagctttccgaccaccaccaacttc

SEQ ID NO: 81925 - DNA, 25 bp, Homo sapien
gaggtccgagttcatctccagctcc

SEQ ID NO: 81926 - DNA, 25 bp, Homo sapien
gtccggcttctcgccattgggcttc

SEQ ID NO: 81927 - DNA, 25 bp, Homo sapien
agcaccactgcaacatatagacctg

SEQ ID NO: 81928 - DNA, 25 bp, Homo sapien
tgaccactaaggggcccccttggtg

SEQ ID NO: 81929 - DNA, 25 bp, Homo sapien
aatcaccccatgtaggtgtacattg

SEQ ID NO: 81930 - DNA, 25 bp, Homo sapien
gtgattgttttgtttactgtaagtt

SEQ ID NO: 81931 - DNA, 25 bp, Homo sapien
gggcttcgtggtgagcactgcagcc

SEQ ID NO: 81932 - DNA, 25 bp, Homo sapien
gatgcctgaagggagtgctttgagg

SEQ ID NO: 81933 - DNA, 25 bp, Homo sapien
tttggcttggtgtgtatgctcttca

SEQ ID NO: 81934 - DNA, 25 bp, Homo sapien
aaatggcctgcattttggagatgct

SEQ ID NO: 81935 - DNA, 25 bp, Homo sapien
atatttacgcgttgggttcaggaat

SEQ ID NO: 81936 - DNA, 25 bp, Homo sapien
tgagtgctattgtattttggcttgg

SEQ ID NO: 81937 - DNA, 25 bp, Homo sapien
cccatctggctgtgaaattcaggaa

SEQ ID NO: 81938 - DNA, 25 bp, Homo sapien
ccaagccaaaatacaatagcactca

SEQ ID NO: 81939 - DNA, 25 bp, Homo sapien
agcatctccaaaatgcaggccattt

SEQ ID NO: 81940 - DNA, 25 bp, Homo sapien
caggtctatatgttgcagtggtgct

SEQ ID NO: 81941 - DNA, 25 bp, Homo sapien
cctcaaagcactcccttcaggcatc

SEQ ID NO: 81942 - DNA, 25 bp, Homo sapien
ggctgcagtgctcaccacgaagccc

SEQ ID NO: 81943 - DNA, 25 bp, Homo sapien
tgaagagcatacacaccaagccaaa

SEQ ID NO: 81944 - DNA, 25 bp, Homo sapien
caatgtacacctacatggggtgatt

SEQ ID NO: 81945 - DNA, 25 bp, Homo sapien
attcctgaacccaacgcgtaaatat

SEQ ID NO: 81946 - DNA, 25 bp, Homo sapien
caccaagggggccccttagtggtca

SEQ ID NO: 81947 - DNA, 25 bp, Homo sapien
ttcctgaatttcacagccagatggg

SEQ ID NO: 81948 - DNA, 25 bp, Homo sapien
aacttacagtaaacaaaacaatcac

SEQ ID NO: 81949 - DNA, 25 bp, Homo sapien
cctgttactgagttagctctactct

SEQ ID NO: 81950 - DNA, 25 bp, Homo sapien
ctgctgccagtcacaatctaaatta

SEQ ID NO: 81951 - DNA, 25 bp, Homo sapien
tatgatcccaagtagtctttttata

SEQ ID NO: 81952 - DNA, 25 bp, Homo sapien
gttcattatggatatttctgctgcc

SEQ ID NO: 81953 - DNA, 25 bp, Homo sapien
tcaccttatgggggaaatgcttctt

SEQ ID NO: 81954 - DNA, 25 bp, Homo sapien
acttcctttcatattagcatcatca

SEQ ID NO: 81955 - DNA, 25 bp, Homo sapien
caaccctctaattcaccttatgggg

SEQ ID NO: 81956 - DNA, 25 bp, Homo sapien
agctctactcttttggaccaaagca

SEQ ID NO: 81957 - DNA, 25 bp, Homo sapien
tagcatcatcaaccctctaattcac

SEQ ID NO: 81958 - DNA, 25 bp, Homo sapien
catgagagcaagtacttttcacact

SEQ ID NO: 81959 - DNA, 25 bp, Homo sapien
aattctctgatcatttagttctatc

SEQ ID NO: 81960 - DNA, 25 bp, Homo sapien
agtgtgaaaagtacttgctctcatg

SEQ ID NO: 81961 - DNA, 25 bp, Homo sapien
tgctttggtccaaaagagtagagct

SEQ ID NO: 81962 - DNA, 25 bp, Homo sapien
aagaagcatttcccccataaggtga

SEQ ID NO: 81963 - DNA, 25 bp, Homo sapien
taatttagattgtgactggcagcag

SEQ ID NO: 81964 - DNA, 25 bp, Homo sapien
tataaaaagactacttgggatcata

SEQ ID NO: 81965 - DNA, 25 bp, Homo sapien
tgatgatgctaatatgaaaggaagt

SEQ ID NO: 81966 - DNA, 25 bp, Homo sapien
ggcagcagaaatatccataatgaac

SEQ ID NO: 81967 - DNA, 25 bp, Homo sapien
ccccataaggtgaattagagggttg

SEQ ID NO: 81968 - DNA, 25 bp, Homo sapien
gtgaattagagggttgatgatgcta

SEQ ID NO: 81969 - DNA, 25 bp, Homo sapien
agagtagagctaactcagtaacagg

SEQ ID NO: 81970 - DNA, 25 bp, Homo sapien
gatagaactaaatgatcagagaatt

SEQ ID NO: 81971 - DNA, 25 bp, Homo sapien
catcgtcgagggcatcctcaagcgg

SEQ ID NO: 81972 - DNA, 25 bp, Homo sapien
gccccaggactcgggaagcagtgcc

SEQ ID NO: 81973 - DNA, 25 bp, Homo sapien
ggatgatggcaagacactgggcgag

SEQ ID NO: 81974 - DNA, 25 bp, Homo sapien
agacactgggcgagtgtggcttcac

SEQ ID NO: 81975 - DNA, 25 bp, Homo sapien
ggatgaccaactcttggatgatggc

SEQ ID NO: 81976 - DNA, 25 bp, Homo sapien
acaggccccagccacagtggggctg

SEQ ID NO: 81977 - DNA, 25 bp, Homo sapien
gcagcggctgtacaaggatgaccaa

SEQ ID NO: 81978 - DNA, 25 bp, Homo sapien
aggagtccagcacggtgttcgaact

SEQ ID NO: 81979 - DNA, 25 bp, Homo sapien
ccatcttcacggacgccaaggagtc

SEQ ID NO: 81980 - DNA, 25 bp, Homo sapien
gaactgaagcgcatcgtcgagggca

SEQ ID NO: 81981 - DNA, 25 bp, Homo sapien
cagagctgcccgatgtgatgaagcc

SEQ ID NO: 81982 - DNA, 25 bp, Homo sapien
ggcactgcttcccgagtcctggggc

SEQ ID NO: 81983 - DNA, 25 bp, Homo sapien
ctcgcccagtgtcttgccatcatcc

SEQ ID NO: 81984 - DNA, 25 bp, Homo sapien
agttcgaacaccgtgctggactcct

SEQ ID NO: 81985 - DNA, 25 bp, Homo sapien
gccatcatccaagagttggtcatcc

SEQ ID NO: 81986 - DNA, 25 bp, Homo sapien
gactccttggcgtccgtgaagatgg

SEQ ID NO: 81987 - DNA, 25 bp, Homo sapien
tgccctcgacgatgcgcttcagttc

SEQ ID NO: 81988 - DNA, 25 bp, Homo sapien
gtgaagccacactcgcccagtgtct

SEQ ID NO: 81989 - DNA, 25 bp, Homo sapien
ttggtcatccttgtacagccgctgc

SEQ ID NO: 81990 - DNA, 25 bp, Homo sapien
cagccccactgtggctggggcctgt

SEQ ID NO: 81991 - DNA, 25 bp, Homo sapien
ccgcttgaggatgccctcgacgatg

SEQ ID NO: 81992 - DNA, 25 bp, Homo sapien
ggcttcatcacatcgggcagctctg

SEQ ID NO: 81993 - DNA, 25 bp, Homo sapien
taagttcaaggagagctttgctgag

SEQ ID NO: 81994 - DNA, 25 bp, Homo sapien
gctcccagcttatatggatcggcgt

SEQ ID NO: 81995 - DNA, 25 bp, Homo sapien
gacaaagagtgggtggccaagcaga

SEQ ID NO: 81996 - DNA, 25 bp, Homo sapien
gcaactccatgcctatttactggaa

SEQ ID NO: 81997 - DNA, 25 bp, Homo sapien
gttgtaccactgctaataaatgacc

SEQ ID NO: 81998 - DNA, 25 bp, Homo sapien
ctgccagccagaaggcactgaagga

SEQ ID NO: 81999 - DNA, 25 bp, Homo sapien
tatgccaaacagttgtaccactgct

SEQ ID NO: 82000 - DNA, 25 bp, Homo sapien
tggagcagcctctccatggatgaga

SEQ ID NO: 82001 - DNA, 25 bp, Homo sapien
gagcgaagacttttcgctcccagct

SEQ ID NO: 82002 - DNA, 25 bp, Homo sapien
gcttagcctccaagtgggactacga

SEQ ID NO: 82003 - DNA, 25 bp, Homo sapien
catccagggcttagcctccaagtgg

SEQ ID NO: 82004 - DNA, 25 bp, Homo sapien
ggtcatttattagcagtggtacaac

SEQ ID NO: 82005 - DNA, 25 bp, Homo sapien
acgccgatccatataagctgggagc

SEQ ID NO: 82006 - DNA, 25 bp, Homo sapien
agctgggagcgaaaagtcttcgctc

SEQ ID NO: 82007 - DNA, 25 bp, Homo sapien
ccacttggaggctaagccctggatg

SEQ ID NO: 82008 - DNA, 25 bp, Homo sapien
tcgtagtcccacttggaggctaagc

SEQ ID NO: 82009 - DNA, 25 bp, Homo sapien
tctcatccatggagaggctgctcca

SEQ ID NO: 82010 - DNA, 25 bp, Homo sapien
ttccagtaaataggcatggagttgc

SEQ ID NO: 82011 - DNA, 25 bp, Homo sapien
tccttcagtgccttctggctggcag

SEQ ID NO: 82012 - DNA, 25 bp, Homo sapien
ctcagcaaagctctccttgaactta

SEQ ID NO: 82013 - DNA, 25 bp, Homo sapien
agcagtggtacaactgtttggcata

SEQ ID NO: 82014 - DNA, 25 bp, Homo sapien
tctgcttggccacccactctttgtc

SEQ ID NO: 82015 - DNA, 25 bp, Homo sapien
aggacaactgttgcatgccaagttt

SEQ ID NO: 82016 - DNA, 25 bp, Homo sapien
aaattactttctcttgttctctgat

SEQ ID NO: 82017 - DNA, 25 bp, Homo sapien
ttggttgtatctaatatgccccagg

SEQ ID NO: 82018 - DNA, 25 bp, Homo sapien
gatgatccaggattatgttgtgact

SEQ ID NO: 82019 - DNA, 25 bp, Homo sapien
gtgtcagcattagggttttggtttt

SEQ ID NO: 82020 - DNA, 25 bp, Homo sapien
taaaccatacttccaccttgggtga

SEQ ID NO: 82021 - DNA, 25 bp, Homo sapien
tttctcttgttctctgatgatgggt

SEQ ID NO: 82022 - DNA, 25 bp, Homo sapien
ggtgactttcaccttaggacaactg

SEQ ID NO: 82023 - DNA, 25 bp, Homo sapien
ttggcacatgtgaatcttgttttgt

SEQ ID NO: 82024 - DNA, 25 bp, Homo sapien
gggtactgaccatcagtgtcagcat

SEQ ID NO: 82025 - DNA, 25 bp, Homo sapien
gggtgagaacacttgcaacagttta

SEQ ID NO: 82026 - DNA, 25 bp, Homo sapien
atgctgacactgatggtcagtaccc

SEQ ID NO: 82027 - DNA, 25 bp, Homo sapien
aaaaccaaaaccctaatgctgacac

SEQ ID NO: 82028 - DNA, 25 bp, Homo sapien
aaacttggcatgcaacagttgtcct

SEQ ID NO: 82029 - DNA, 25 bp, Homo sapien
cctggggcatattagatacaaccaa

SEQ ID NO: 82030 - DNA, 25 bp, Homo sapien
cagttgtcctaaggtgaaagtcacc

SEQ ID NO: 82031 - DNA, 25 bp, Homo sapien
acccatcatcagagaacaagagaaa

SEQ ID NO: 82032 - DNA, 25 bp, Homo sapien
taaactgttgcaagtgttctcaccc

SEQ ID NO: 82033 - DNA, 25 bp, Homo sapien
agtcacaacataatcctggatcatc

SEQ ID NO: 82034 - DNA, 25 bp, Homo sapien
atcagagaacaagagaaagtaattt

SEQ ID NO: 82035 - DNA, 25 bp, Homo sapien
tcacccaaggtggaagtatggttta

SEQ ID NO: 82036 - DNA, 25 bp, Homo sapien
acaaaacaagattcacatgtgccaa

SEQ ID NO: 82037 - DNA, 25 bp, Homo sapien
ggcccagattgaggtggtgccttct

SEQ ID NO: 82038 - DNA, 25 bp, Homo sapien
gcaacgggtgactggaagggcctga

SEQ ID NO: 82039 - DNA, 25 bp, Homo sapien
gaagttcgaccccaacgagatcaaa

SEQ ID NO: 82040 - DNA, 25 bp, Homo sapien
agtcgtatacctgaggtgcaccgga

SEQ ID NO: 82041 - DNA, 25 bp, Homo sapien
gtggtgctgtggaatgcccagccag

SEQ ID NO: 82042 - DNA, 25 bp, Homo sapien
agatcctggggactgcccagtcagt

SEQ ID NO: 82043 - DNA, 25 bp, Homo sapien
accgatccttagccagagaactctc

SEQ ID NO: 82044 - DNA, 25 bp, Homo sapien
gaccattcagaacagacaggcccag

SEQ ID NO: 82045 - DNA, 25 bp, Homo sapien
tcgacagatgcggcaccgatcctta

SEQ ID NO: 82046 - DNA, 25 bp, Homo sapien
ggctgtaatgttgatggccgccatc

SEQ ID NO: 82047 - DNA, 25 bp, Homo sapien
cgccatcctcatgacatcatcgatg

SEQ ID NO: 82048 - DNA, 25 bp, Homo sapien
ctggctgggcattccacagcaccac

SEQ ID NO: 82049 - DNA, 25 bp, Homo sapien
tccggtgcacctcaggtatacgact

SEQ ID NO: 82050 - DNA, 25 bp, Homo sapien
ctgggcctgtctgttctgaatggtc

SEQ ID NO: 82051 - DNA, 25 bp, Homo sapien
gatggcggccatcaacattacagcc

SEQ ID NO: 82052 - DNA, 25 bp, Homo sapien
taaggatcggtgccgcatctgtcga

SEQ ID NO: 82053 - DNA, 25 bp, Homo sapien
actgactgggcagtccccaggatct

SEQ ID NO: 82054 - DNA, 25 bp, Homo sapien
catcgatgatgtcatgaggatggcg

SEQ ID NO: 82055 - DNA, 25 bp, Homo sapien
agaaggcaccacctcaatctgggcc

SEQ ID NO: 82056 - DNA, 25 bp, Homo sapien
tcaggcccttccagtcacccgttgc

SEQ ID NO: 82057 - DNA, 25 bp, Homo sapien
tttgatctcgttggggtcgaacttc

SEQ ID NO: 82058 - DNA, 25 bp, Homo sapien
gagagttctctggctaaggatcggt

SEQ ID NO: 82059 - DNA, 25 bp, Homo sapien
atgcaaagaccatgcgccggaacac

SEQ ID NO: 82060 - DNA, 25 bp, Homo sapien
actacaatcttcccatgcacaagat

SEQ ID NO: 82061 - DNA, 25 bp, Homo sapien
cagcagcggcactacaagccaaatc

SEQ ID NO: 82062 - DNA, 25 bp, Homo sapien
ggcggcggttgcaggcaagaagcct

SEQ ID NO: 82063 - DNA, 25 bp, Homo sapien
ggcaagaagcctgtggtaggtaaga

SEQ ID NO: 82064 - DNA, 25 bp, Homo sapien
agaaggctgctgttggtgttaagaa

SEQ ID NO: 82065 - DNA, 25 bp, Homo sapien
ggtcaaatcattttggacagcttct

SEQ ID NO: 82066 - DNA, 25 bp, Homo sapien
cctgctgcataaactcttaaatttg

SEQ ID NO: 82067 - DNA, 25 bp, Homo sapien
gaatcttgaaaagcccagagatcca

SEQ ID NO: 82068 - DNA, 25 bp, Homo sapien
gatgagaaggcggcggttgcaggca

SEQ ID NO: 82069 - DNA, 25 bp, Homo sapien
tcgccaggccaggaatcacaagctc

SEQ ID NO: 82070 - DNA, 25 bp, Homo sapien
tgcctgcaaccgccgccttctcatc

SEQ ID NO: 82071 - DNA, 25 bp, Homo sapien
ttcttaacaccaacagcagccttct

SEQ ID NO: 82072 - DNA, 25 bp, Homo sapien
agaagctgtccaaaatgatttgacc

SEQ ID NO: 82073 - DNA, 25 bp, Homo sapien
gatttggcttgtagtgccgctgctg

SEQ ID NO: 82074 - DNA, 25 bp, Homo sapien
gagcttgtgattcctggcctggcga

SEQ ID NO: 82075 - DNA, 25 bp, Homo sapien
gtgttccggcgcatggtctttgcat

SEQ ID NO: 82076 - DNA, 25 bp, Homo sapien
tcttacctaccacaggcttcttgcc

SEQ ID NO: 82077 - DNA, 25 bp, Homo sapien
caaatttaagagtttatgcagcagg

SEQ ID NO: 82078 - DNA, 25 bp, Homo sapien
aggcttcttgcctgcaaccgccgcc

SEQ ID NO: 82079 - DNA, 25 bp, Homo sapien
tggatctctgggcttttcaagattc

SEQ ID NO: 82080 - DNA, 25 bp, Homo sapien
atcttgtgcatgggaagattgtagt

SEQ ID NO: 82081 - DNA, 25 bp, Homo sapien
cacactcacattatcttgctatcac

SEQ ID NO: 82082 - DNA, 25 bp, Homo sapien
tcagtggtacatgcgtcaagatttg

SEQ ID NO: 82083 - DNA, 25 bp, Homo sapien
gaggtagccgaagtttggttcagta

SEQ ID NO: 82084 - DNA, 25 bp, Homo sapien
aatctaatcccttagcatcagctcc

SEQ ID NO: 82085 - DNA, 25 bp, Homo sapien
ctgctgctactcagactagctctaa

SEQ ID NO: 82086 - DNA, 25 bp, Homo sapien
cagtaataactgcaggtcacttgta

SEQ ID NO: 82087 - DNA, 25 bp, Homo sapien
atcttgctatcactgtaaccaacta

SEQ ID NO: 82088 - DNA, 25 bp, Homo sapien
gcagggaatacagtcgttccatcag

SEQ ID NO: 82089 - DNA, 25 bp, Homo sapien
ctttttaacaagaactgatgctcct

SEQ ID NO: 82090 - DNA, 25 bp, Homo sapien
gtcgttccatcagagctggtctgca

SEQ ID NO: 82091 - DNA, 25 bp, Homo sapien
tccctttgcctgtggtgtaaaagtg

SEQ ID NO: 82092 - DNA, 25 bp, Homo sapien
tactgaaccaaacttcggctacctc

SEQ ID NO: 82093 - DNA, 25 bp, Homo sapien
tacaagtgacctgcagttattactg

SEQ ID NO: 82094 - DNA, 25 bp, Homo sapien
caaatcttgacgcatgtaccactga

SEQ ID NO: 82095 - DNA, 25 bp, Homo sapien
tagttggttacagtgatagcaagat

SEQ ID NO: 82096 - DNA, 25 bp, Homo sapien
ttagagctagtctgagtagcagcag

SEQ ID NO: 82097 - DNA, 25 bp, Homo sapien
ggagctgatgctaagggattagatt

SEQ ID NO: 82098 - DNA, 25 bp, Homo sapien
aggagcatcagttcttgttaaaaag

SEQ ID NO: 82099 - DNA, 25 bp, Homo sapien
tgcagaccagctctgatggaacgac

SEQ ID NO: 82100 - DNA, 25 bp, Homo sapien
ctgatggaacgactgtattccctgc

SEQ ID NO: 82101 - DNA, 25 bp, Homo sapien
gtgatagcaagataatgtgagtgtg

SEQ ID NO: 82102 - DNA, 25 bp, Homo sapien
cacttttacaccacaggcaaaggga

SEQ ID NO: 82103 - DNA, 25 bp, Homo sapien
gggacaagctcaataacttagtctt

SEQ ID NO: 82104 - DNA, 25 bp, Homo sapien
gacgctggaaagtcggccaagaaag

SEQ ID NO: 82105 - DNA, 25 bp, Homo sapien
ctataaacttataaccccagctgtg

SEQ ID NO: 82106 - DNA, 25 bp, Homo sapien
gcatgaataggtccaaccagctgta

SEQ ID NO: 82107 - DNA, 25 bp, Homo sapien
tagtcttgtttgacaaagctaccta

SEQ ID NO: 82108 - DNA, 25 bp, Homo sapien
aaggcaaagttcgggacaagctcaa

SEQ ID NO: 82109 - DNA, 25 bp, Homo sapien
actctgtaaggaagttcccaactat

SEQ ID NO: 82110 - DNA, 25 bp, Homo sapien
gtgaacaaatccgggggcaaggcca

SEQ ID NO: 82111 - DNA, 25 bp, Homo sapien
aactggtttcaaagcacagagctca

SEQ ID NO: 82112 - DNA, 25 bp, Homo sapien
caaagctacctatgataaactctgt

SEQ ID NO: 82113 - DNA, 25 bp, Homo sapien
gccgcctaaggacgacaagaagaag

SEQ ID NO: 82114 - DNA, 25 bp, Homo sapien
ctttcttggccgactttccagcgtc

SEQ ID NO: 82115 - DNA, 25 bp, Homo sapien
cttcttcttgtcgtccttaggcggc

SEQ ID NO: 82116 - DNA, 25 bp, Homo sapien
tacagctggttggacctattcatgc

SEQ ID NO: 82117 - DNA, 25 bp, Homo sapien
ttgagcttgtcccgaactttgcctt

SEQ ID NO: 82118 - DNA, 25 bp, Homo sapien
taggtagctttgtcaaacaagacta

SEQ ID NO: 82119 - DNA, 25 bp, Homo sapien
acagagtttatcataggtagctttg

SEQ ID NO: 82120 - DNA, 25 bp, Homo sapien
aagactaagttattgagcttgtccc

SEQ ID NO: 82121 - DNA, 25 bp, Homo sapien
cacagctggggttataagtttatag

SEQ ID NO: 82122 - DNA, 25 bp, Homo sapien
tggccttgcccccggatttgttcac

SEQ ID NO: 82123 - DNA, 25 bp, Homo sapien
atagttgggaacttccttacagagt

SEQ ID NO: 82124 - DNA, 25 bp, Homo sapien
tgagctctgtgctttgaaaccagtt

SEQ ID NO: 82125 - DNA, 25 bp, Homo sapien
gaggcacctaaaaattgtataccgc

SEQ ID NO: 82126 - DNA, 25 bp, Homo sapien
tgtataccgcagattcaggcatgga

SEQ ID NO: 82127 - DNA, 25 bp, Homo sapien
gacgaagggaacgtcatcgtttgga

SEQ ID NO: 82128 - DNA, 25 bp, Homo sapien
ggaactggtcgaatgaggcacctaa

SEQ ID NO: 82129 - DNA, 25 bp, Homo sapien
tctggtctcggccgcagaagcgaga

SEQ ID NO: 82130 - DNA, 25 bp, Homo sapien
gaatgtcaacgattagtcatgcaat

SEQ ID NO: 82131 - DNA, 25 bp, Homo sapien
ataagacgcacacgttgtgccgccg

SEQ ID NO: 82132 - DNA, 25 bp, Homo sapien
gattcaggcatggattccgtgaagg

SEQ ID NO: 82133 - DNA, 25 bp, Homo sapien
agctgttgcagcatccagttcatct

SEQ ID NO: 82134 - DNA, 25 bp, Homo sapien
gtataactggagtgccaaggctaaa

SEQ ID NO: 82135 - DNA, 25 bp, Homo sapien
ctaaacccaagagggcagctgttgc

SEQ ID NO: 82136 - DNA, 25 bp, Homo sapien
agatgaactggatgctgcaacagct

SEQ ID NO: 82137 - DNA, 25 bp, Homo sapien
tccatgcctgaatctgcggtataca

SEQ ID NO: 82138 - DNA, 25 bp, Homo sapien
tctcgcttctgcggccgagaccaga

SEQ ID NO: 82139 - DNA, 25 bp, Homo sapien
tccaaacgatgacgttcccttcgtc

SEQ ID NO: 82140 - DNA, 25 bp, Homo sapien
attgcatgactaatcgttgacattc

SEQ ID NO: 82141 - DNA, 25 bp, Homo sapien
tttagccttggcactccagttatac

SEQ ID NO: 82142 - DNA, 25 bp, Homo sapien
ttaggtgcctcattcgaccagttcc

SEQ ID NO: 82143 - DNA, 25 bp, Homo sapien
gcggtatacaatttttaggtgcctc

SEQ ID NO: 82144 - DNA, 25 bp, Homo sapien
ccttcacggaatccatgcctgaatc

SEQ ID NO: 82145 - DNA, 25 bp, Homo sapien
cggcggcacaacgtgtgcgtcttat

SEQ ID NO: 82146 - DNA, 25 bp, Homo sapien
gcaacagctgccctcttgggtttag

SEQ ID NO: 82147 - DNA, 25 bp, Homo sapien
ttttgaggatgaccggtgccttgct

SEQ ID NO: 82148 - DNA, 25 bp, Homo sapien
gatctgggcctgaataagggttatc

SEQ ID NO: 82149 - DNA, 25 bp, Homo sapien
ctcaagcaccaacacattttctggt

SEQ ID NO: 82150 - DNA, 25 bp, Homo sapien
atgaaggttcagatggtggacagtc

SEQ ID NO: 82151 - DNA, 25 bp, Homo sapien
caaatgcattggcctcctggttaag

SEQ ID NO: 82152 - DNA, 25 bp, Homo sapien
atgttcttggaggtcggcaaatgca

SEQ ID NO: 82153 - DNA, 25 bp, Homo sapien
ctggtggcgacacgatctttgggaa

SEQ ID NO: 82154 - DNA, 25 bp, Homo sapien
tcctggttaagcacgttttggggat

SEQ ID NO: 82155 - DNA, 25 bp, Homo sapien
acacattttctggtgatacccaaga

SEQ ID NO: 82156 - DNA, 25 bp, Homo sapien
agaaatgtgctgctgatctgggcct

SEQ ID NO: 82157 - DNA, 25 bp, Homo sapien
acccaagaaacatatatcccagatt

SEQ ID NO: 82158 - DNA, 25 bp, Homo sapien
aatctgggatatatgtttcttgggt

SEQ ID NO: 82159 - DNA, 25 bp, Homo sapien
tcttgggtatcaccagaaaatgtgt

SEQ ID NO: 82160 - DNA, 25 bp, Homo sapien
agcaaggcaccggtcatcctcaaaa

SEQ ID NO: 82161 - DNA, 25 bp, Homo sapien
aggcccagatcagcagcacatttct

SEQ ID NO: 82162 - DNA, 25 bp, Homo sapien
ttcccaaagatcgtgtcgccaccag

SEQ ID NO: 82163 - DNA, 25 bp, Homo sapien
tgcatttgccgacctccaagaacat

SEQ ID NO: 82164 - DNA, 25 bp, Homo sapien
gataacccttattcaggcccagatc

SEQ ID NO: 82165 - DNA, 25 bp, Homo sapien
cttaaccaggaggccaatgcatttg

SEQ ID NO: 82166 - DNA, 25 bp, Homo sapien
gactgtccaccatctgaaccttcat

SEQ ID NO: 82167 - DNA, 25 bp, Homo sapien
atccccaaaacgtgcttaaccagga

SEQ ID NO: 82168 - DNA, 25 bp, Homo sapien
accagaaaatgtgttggtgcttgag

SEQ ID NO: 82169 - DNA, 25 bp, Homo sapien
cagctgtactagtgccattggaata

SEQ ID NO: 82170 - DNA, 25 bp, Homo sapien
ggggaaaggaacacgcgggtagatg

SEQ ID NO: 82171 - DNA, 25 bp, Homo sapien
gtgtgtttgaccactggcagatcct

SEQ ID NO: 82172 - DNA, 25 bp, Homo sapien
cgctgacctgaggtccaacacgggc

SEQ ID NO: 82173 - DNA, 25 bp, Homo sapien
caccacgtcctcgaattctcagacg

SEQ ID NO: 82174 - DNA, 25 bp, Homo sapien
tatttgggtacatggcccgcagtgg

SEQ ID NO: 82175 - DNA, 25 bp, Homo sapien
tcagacgacacctggagactgtccc

SEQ ID NO: 82176 - DNA, 25 bp, Homo sapien
ttcagagggaaactcagatgtccaa

SEQ ID NO: 82177 - DNA, 25 bp, Homo sapien
gcaggcaggaagtcctgtgcggtgt

SEQ ID NO: 82178 - DNA, 25 bp, Homo sapien
gggcctgaaagaaggcatccctgcc

SEQ ID NO: 82179 - DNA, 25 bp, Homo sapien
gcgggtagatgatttctagcaggca

SEQ ID NO: 82180 - DNA, 25 bp, Homo sapien
catctacccgcgtgttcctttcccc

SEQ ID NO: 82181 - DNA, 25 bp, Homo sapien
acaccgcacaggacttcctgcctgc

SEQ ID NO: 82182 - DNA, 25 bp, Homo sapien
tgcctgctagaaatcatctacccgc

SEQ ID NO: 82183 - DNA, 25 bp, Homo sapien
tattccaatggcactagtacagctg

SEQ ID NO: 82184 - DNA, 25 bp, Homo sapien
ccactgcgggccatgtacccaaata

SEQ ID NO: 82185 - DNA, 25 bp, Homo sapien
gcccgtgttggacctcaggtcagcg

SEQ ID NO: 82186 - DNA, 25 bp, Homo sapien
aggatctgccagtggtcaaacacac

SEQ ID NO: 82187 - DNA, 25 bp, Homo sapien
ttggacatctgagtttccctctgaa

SEQ ID NO: 82188 - DNA, 25 bp, Homo sapien
gggacagtctccaggtgtcgtctga

SEQ ID NO: 82189 - DNA, 25 bp, Homo sapien
cgtctgagaattcgaggacgtggtg

SEQ ID NO: 82190 - DNA, 25 bp, Homo sapien
ggcagggatgccttctttcaggccc

SEQ ID NO: 82191 - DNA, 25 bp, Homo sapien
ttggtcgtggacgtggtcagccacc

SEQ ID NO: 82192 - DNA, 25 bp, Homo sapien
cgtggtcagccacctcagtaaaatt

SEQ ID NO: 82193 - DNA, 25 bp, Homo sapien
gaaagccgaggctggggctgggtca

SEQ ID NO: 82194 - DNA, 25 bp, Homo sapien
agaggcggatttggtcgtggacgtg

SEQ ID NO: 82195 - DNA, 25 bp, Homo sapien
gcaaccgaattccagtttagaggcg

SEQ ID NO: 82196 - DNA, 25 bp, Homo sapien
gtatccagtatctccgtgattacct

SEQ ID NO: 82197 - DNA, 25 bp, Homo sapien
attggagaggattcttttgcattga

SEQ ID NO: 82198 - DNA, 25 bp, Homo sapien
ggctgggtcagcaaccgaattccag

SEQ ID NO: 82199 - DNA, 25 bp, Homo sapien
gcgacctgcgagactcacaagaggg

SEQ ID NO: 82200 - DNA, 25 bp, Homo sapien
ctacagacggagtgctgtgccacct

SEQ ID NO: 82201 - DNA, 25 bp, Homo sapien
gccacctggtgccgacaagaaagcc

SEQ ID NO: 82202 - DNA, 25 bp, Homo sapien
cacgtccacgaccaaatccgcctct

SEQ ID NO: 82203 - DNA, 25 bp, Homo sapien
aggtaatcacggagatactggatac

SEQ ID NO: 82204 - DNA, 25 bp, Homo sapien
ggtggctgaccacgtccacgaccaa

SEQ ID NO: 82205 - DNA, 25 bp, Homo sapien
ccctcttgtgagtctcgcaggtcgc

SEQ ID NO: 82206 - DNA, 25 bp, Homo sapien
aggtggcacagcactccgtctgtag

SEQ ID NO: 82207 - DNA, 25 bp, Homo sapien
ggctttcttgtcggcaccaggtggc

SEQ ID NO: 82208 - DNA, 25 bp, Homo sapien
tcaatgcaaaagaatcctctccaat

SEQ ID NO: 82209 - DNA, 25 bp, Homo sapien
aattttactgaggtggctgaccacg

SEQ ID NO: 82210 - DNA, 25 bp, Homo sapien
ctggaattcggttgctgacccagcc

SEQ ID NO: 82211 - DNA, 25 bp, Homo sapien
cgcctctaaactggaattcggttgc

SEQ ID NO: 82212 - DNA, 25 bp, Homo sapien
tgacccagccccagcctcggctttc

SEQ ID NO: 82213 - DNA, 25 bp, Homo sapien
ttaccatgttggtgacctgttcagt

SEQ ID NO: 82214 - DNA, 25 bp, Homo sapien
aaccggggagttatcattaccatgt

SEQ ID NO: 82215 - DNA, 25 bp, Homo sapien
ccattagctgccttaaacgttaaca

SEQ ID NO: 82216 - DNA, 25 bp, Homo sapien
aacagcacatttgaatgccttattc

SEQ ID NO: 82217 - DNA, 25 bp, Homo sapien
gttggtgacctgttcagtttgctgc

SEQ ID NO: 82218 - DNA, 25 bp, Homo sapien
acaatgcagcgtgttttcctttgcc

SEQ ID NO: 82219 - DNA, 25 bp, Homo sapien
ctgccttaaacgttaacagcacatt

SEQ ID NO: 82220 - DNA, 25 bp, Homo sapien
tgaactgtgccgactccacaaaacg

SEQ ID NO: 82221 - DNA, 25 bp, Homo sapien
tggtgaattacgtgcctccataacc

SEQ ID NO: 82222 - DNA, 25 bp, Homo sapien
gaatgccttattctacaatgcagcg

SEQ ID NO: 82223 - DNA, 25 bp, Homo sapien
ttctcacgtgggaatcagtgaagtg

SEQ ID NO: 82224 - DNA, 25 bp, Homo sapien
cacttcactgattcccacgtgagaa

SEQ ID NO: 82225 - DNA, 25 bp, Homo sapien
actgaacaggtcaccaacatggtaa

SEQ ID NO: 82226 - DNA, 25 bp, Homo sapien
tgttaacgtttaaggcagctaatgg

SEQ ID NO: 82227 - DNA, 25 bp, Homo sapien
ggcaaaggaaaacacgctgcattgt

SEQ ID NO: 82228 - DNA, 25 bp, Homo sapien
aatgtgctgttaacgtttaaggcag

SEQ ID NO: 82229 - DNA, 25 bp, Homo sapien
gcagcaaactgaacaggtcaccaac

SEQ ID NO: 82230 - DNA, 25 bp, Homo sapien
ggttatggaggcacgtaattcacca

SEQ ID NO: 82231 - DNA, 25 bp, Homo sapien
gaataaggcattcaaatgtgctgtt

SEQ ID NO: 82232 - DNA, 25 bp, Homo sapien
acatggtaatgataactccccggtt

SEQ ID NO: 82233 - DNA, 25 bp, Homo sapien
cgttttgtggagtcggcacagttca

SEQ ID NO: 82234 - DNA, 25 bp, Homo sapien
cgctgcattgtagaataaggcattc

SEQ ID NO: 82235 - DNA, 25 bp, Homo sapien
tggacatataagtgcatctcttgtt

SEQ ID NO: 82236 - DNA, 25 bp, Homo sapien
ggtttggaagtctattgctgggaag

SEQ ID NO: 82237 - DNA, 25 bp, Homo sapien
tttcagctcctctgttggacatata

SEQ ID NO: 82238 - DNA, 25 bp, Homo sapien
gaaattccatcatacatattcatgc

SEQ ID NO: 82239 - DNA, 25 bp, Homo sapien
gtcaatttgctctagtgtcttatta

SEQ ID NO: 82240 - DNA, 25 bp, Homo sapien
agtgcatctcttgttggacataggc

SEQ ID NO: 82241 - DNA, 25 bp, Homo sapien
tctggtgatttcttgatggtttgga

SEQ ID NO: 82242 - DNA, 25 bp, Homo sapien
aagaactaaggtggggagcagtact

SEQ ID NO: 82243 - DNA, 25 bp, Homo sapien
aagtttaattttcagctcctctgtt

SEQ ID NO: 82244 - DNA, 25 bp, Homo sapien
tttctctgttgtatgttggattatg

SEQ ID NO: 82245 - DNA, 25 bp, Homo sapien
cagaattctgattggcagcaagttt

SEQ ID NO: 82246 - DNA, 25 bp, Homo sapien
tccaaaccatcaagaaatcaccaga

SEQ ID NO: 82247 - DNA, 25 bp, Homo sapien
gcatgaatatgtatgatggaatttc

SEQ ID NO: 82248 - DNA, 25 bp, Homo sapien
aacagaggagctgaaaattaaactt

SEQ ID NO: 82249 - DNA, 25 bp, Homo sapien
gcctatgtccaacaagagatgcact

SEQ ID NO: 82250 - DNA, 25 bp, Homo sapien
aacaagagatgcacttatatgtcca

SEQ ID NO: 82251 - DNA, 25 bp, Homo sapien
cataatccaacatacaacagagaaa

SEQ ID NO: 82252 - DNA, 25 bp, Homo sapien
cttcccagcaatagacttccaaacc

SEQ ID NO: 82253 - DNA, 25 bp, Homo sapien
aaacttgctgccaatcagaattctg

SEQ ID NO: 82254 - DNA, 25 bp, Homo sapien
tatatgtccaacagaggagctgaaa

SEQ ID NO: 82255 - DNA, 25 bp, Homo sapien
agtactgctccccaccttagttctt

SEQ ID NO: 82256 - DNA, 25 bp, Homo sapien
taataagacactagagcaaattgac

SEQ ID NO: 82257 - DNA, 25 bp, Homo sapien
tgctgggctgctgtgcagagtataa

SEQ ID NO: 82258 - DNA, 25 bp, Homo sapien
ccatgttcttagtggccaagtgcca

SEQ ID NO: 82259 - DNA, 25 bp, Homo sapien
gatgtatttgtgacaccctatcttg

SEQ ID NO: 82260 - DNA, 25 bp, Homo sapien
cgagcccatcttggctgacggggct

SEQ ID NO: 82261 - DNA, 25 bp, Homo sapien
agctctggaggctgccatcgagaac

SEQ ID NO: 82262 - DNA, 25 bp, Homo sapien
ccctctcatggggtacccttgataa

SEQ ID NO: 82263 - DNA, 25 bp, Homo sapien
gtacccttgataaaccatctctaga

SEQ ID NO: 82264 - DNA, 25 bp, Homo sapien
acaccctatcttgtcaataaacagc

SEQ ID NO: 82265 - DNA, 25 bp, Homo sapien
aaaggttgactgcaaagagcgcatc

SEQ ID NO: 82266 - DNA, 25 bp, Homo sapien
cctggacaaaggtcgtgccatgttc

SEQ ID NO: 82267 - DNA, 25 bp, Homo sapien
aagagcgcatcagggacgtcgttta

SEQ ID NO: 82268 - DNA, 25 bp, Homo sapien
gttctcgatggcagcctccagagct

SEQ ID NO: 82269 - DNA, 25 bp, Homo sapien
gatgcgctctttgcagtcaaccttt

SEQ ID NO: 82270 - DNA, 25 bp, Homo sapien
caagatagggtgtcacaaatacatc

SEQ ID NO: 82271 - DNA, 25 bp, Homo sapien
ttatactctgcacagcagcccagca

SEQ ID NO: 82272 - DNA, 25 bp, Homo sapien
tctagagatggtttatcaagggtac

SEQ ID NO: 82273 - DNA, 25 bp, Homo sapien
gctgtttattgacaagatagggtgt

SEQ ID NO: 82274 - DNA, 25 bp, Homo sapien
ttatcaagggtaccccatgagaggg

SEQ ID NO: 82275 - DNA, 25 bp, Homo sapien
tggcacttggccactaagaacatgg

SEQ ID NO: 82276 - DNA, 25 bp, Homo sapien
gaacatggcacgacctttgtccagg

SEQ ID NO: 82277 - DNA, 25 bp, Homo sapien
taaacgacgtccctgatgcgctctt

SEQ ID NO: 82278 - DNA, 25 bp, Homo sapien
agccccgtcagccaagatgggctcg

SEQ ID NO: 82279 - DNA, 25 bp, Homo sapien
gagtcttgctgatttgcagaatgat

SEQ ID NO: 82280 - DNA, 25 bp, Homo sapien
tcaagctgattactgaagatgttca

SEQ ID NO: 82281 - DNA, 25 bp, Homo sapien
ggaaatcatgacccgagaggtgcag

SEQ ID NO: 82282 - DNA, 25 bp, Homo sapien
gtaaaaactgcctgactaacttcca

SEQ ID NO: 82283 - DNA, 25 bp, Homo sapien
aaactgcctgactaacttccatggc

SEQ ID NO: 82284 - DNA, 25 bp, Homo sapien
ttgaagtgagtcttgctgatttgca

SEQ ID NO: 82285 - DNA, 25 bp, Homo sapien
gacccgagaggtgcagacaaatgac

SEQ ID NO: 82286 - DNA, 25 bp, Homo sapien
ggcagacaatgattgaagctcacgt

SEQ ID NO: 82287 - DNA, 25 bp, Homo sapien
tacggaagacctcttatgctcagca

SEQ ID NO: 82288 - DNA, 25 bp, Homo sapien
ttgaagctcacgttgatgtcaagac

SEQ ID NO: 82289 - DNA, 25 bp, Homo sapien
gagaggtgcagacaaatgacttgaa

SEQ ID NO: 82290 - DNA, 25 bp, Homo sapien
gtcttgacatcaacgtgagcttcaa

SEQ ID NO: 82291 - DNA, 25 bp, Homo sapien
tgaacatcttcagtaatcagcttga

SEQ ID NO: 82292 - DNA, 25 bp, Homo sapien
tggaagttagtcaggcagtttttac

SEQ ID NO: 82293 - DNA, 25 bp, Homo sapien
tgctgagcataagaggtcttccgta

SEQ ID NO: 82294 - DNA, 25 bp, Homo sapien
gtcatttgtctgcacctctcgggtc

SEQ ID NO: 82295 - DNA, 25 bp, Homo sapien
atcattctgcaaatcagcaagactc

SEQ ID NO: 82296 - DNA, 25 bp, Homo sapien
acgtgagcttcaatcattgtctgcc

SEQ ID NO: 82297 - DNA, 25 bp, Homo sapien
gccatggaagttagtcaggcagttt

SEQ ID NO: 82298 - DNA, 25 bp, Homo sapien
ttcaagtcatttgtctgcacctctc

SEQ ID NO: 82299 - DNA, 25 bp, Homo sapien
ctgcacctctcgggtcatgatttcc

SEQ ID NO: 82300 - DNA, 25 bp, Homo sapien
tgcaaatcagcaagactcacttcaa

SEQ ID NO: 82301 - DNA, 25 bp, Homo sapien
cttggtggtgcagtctccgcagaag

SEQ ID NO: 82302 - DNA, 25 bp, Homo sapien
cttctgcggagactgcaccaccaag

SEQ ID NO: 82303 - DNA, 25 bp, Homo sapien
ccgtctccgaccgcagtgtccggta

SEQ ID NO: 82304 - DNA, 25 bp, Homo sapien
taccggacactgcggtcggagacgg

SEQ ID NO: 82305 - DNA, 25 bp, Homo sapien
atacttttacatcatcctcttttga

SEQ ID NO: 82306 - DNA, 25 bp, Homo sapien
tcaaaagaggatgatgtaaaagtat

SEQ ID NO: 82307 - DNA, 25 bp, Homo sapien
aatttataataactacacctacaac

SEQ ID NO: 82308 - DNA, 25 bp, Homo sapien
gttgtaggtgtagttattataaatt

SEQ ID NO: 82309 - DNA, 25 bp, Homo sapien
agtccaaactaaccgttcactcacg

SEQ ID NO: 82310 - DNA, 25 bp, Homo sapien
cgtgagtgaacggttagtttggact

SEQ ID NO: 82311 - DNA, 25 bp, Homo sapien
gaacttccgtatcgacaacacggtt

SEQ ID NO: 82312 - DNA, 25 bp, Homo sapien
aaccgtgttgtcgatacggaagttc

SEQ ID NO: 82313 - DNA, 25 bp, Homo sapien
gaggcgggtcgcaaaggggtccacc

SEQ ID NO: 82314 - DNA, 25 bp, Homo sapien
ggtggacccctttgcgacccgcctc

SEQ ID NO: 82315 - DNA, 25 bp, Homo sapien
ggactcttcgaacactggacccccg

SEQ ID NO: 82316 - DNA, 25 bp, Homo sapien
cgggggtccagtgttcgaagagtcc

SEQ ID NO: 82317 - DNA, 25 bp, Homo sapien
aacgtgtttattagagaggattaag

SEQ ID NO: 82318 - DNA, 25 bp, Homo sapien
cttaatcctctctaataaacacgtt

SEQ ID NO: 82319 - DNA, 25 bp, Homo sapien
gaagacagggtttgggcgtcggtcc

SEQ ID NO: 82320 - DNA, 25 bp, Homo sapien
ggaccgacgcccaaaccctgtcttc

SEQ ID NO: 82321 - DNA, 25 bp, Homo sapien
cgaagacagggtttgggcgtcggtc

SEQ ID NO: 82322 - DNA, 25 bp, Homo sapien
gaccgacgcccaaaccctgtcttcg

SEQ ID NO: 82323 - DNA, 25 bp, Homo sapien
ccggaagcgccctcctcggccggtg

SEQ ID NO: 82324 - DNA, 25 bp, Homo sapien
caccggccgaggagggcgcttccgg

SEQ ID NO: 82325 - DNA, 25 bp, Homo sapien
actacacttgttatgtcaatttaat

SEQ ID NO: 82326 - DNA, 25 bp, Homo sapien
attaaattgacataacaagtgtagt

SEQ ID NO: 82327 - DNA, 25 bp, Homo sapien
aagaatcttattgaacacataataa

SEQ ID NO: 82328 - DNA, 25 bp, Homo sapien
ttattatgtgttcaataagattctt

SEQ ID NO: 82329 - DNA, 25 bp, Homo sapien
tcaccacgagaatattaaacaacat

SEQ ID NO: 82330 - DNA, 25 bp, Homo sapien
atgttgtttaatattctcgtggtga

SEQ ID NO: 82331 - DNA, 25 bp, Homo sapien
ctaacaaaattgtgttctaggacag

SEQ ID NO: 82332 - DNA, 25 bp, Homo sapien
ctgtcctagaacacaattttgttag

SEQ ID NO: 82333 - DNA, 25 bp, Homo sapien
ggcggcgaggcgagagcgccaccgg

SEQ ID NO: 82334 - DNA, 25 bp, Homo sapien
ccggtggcgctctcgcctcgccgcc

SEQ ID NO: 82335 - DNA, 25 bp, Homo sapien
gaatagagtattcgaactcttaaat

SEQ ID NO: 82336 - DNA, 25 bp, Homo sapien
atttaagagttcgaatactctattc

SEQ ID NO: 82337 - DNA, 25 bp, Homo sapien
agtgtccttaaggaaagccaagtaa

SEQ ID NO: 82338 - DNA, 25 bp, Homo sapien
ttacttggctttccttaaggacact

SEQ ID NO: 82339 - DNA, 25 bp, Homo sapien
aaaatcgttactgtgcagaaaagta

SEQ ID NO: 82340 - DNA, 25 bp, Homo sapien
tacttttctgcacagtaacgatttt

SEQ ID NO: 82341 - DNA, 25 bp, Homo sapien
ttccgtcgccacgtcgtcgtacggg

SEQ ID NO: 82342 - DNA, 25 bp, Homo sapien
cccgtacgacgacgtggcgacggaa

SEQ ID NO: 82343 - DNA, 25 bp, Homo sapien
gacgacttactatgccaatatttat

SEQ ID NO: 82344 - DNA, 25 bp, Homo sapien
ataaatattggcatagtaagtcgtc

SEQ ID NO: 82345 - DNA, 25 bp, Homo sapien
gacccagaaacaactaccattcaaa

SEQ ID NO: 82346 - DNA, 25 bp, Homo sapien
tttgaatggtagttgtttctgggtc

SEQ ID NO: 82347 - DNA, 25 bp, Homo sapien
gaggttaaagataagcgagttaact

SEQ ID NO: 82348 - DNA, 25 bp, Homo sapien
agttaactcgcttatctttaacctc

SEQ ID NO: 82349 - DNA, 25 bp, Homo sapien
ctgttgatagttggtgtcgctgtcg

SEQ ID NO: 82350 - DNA, 25 bp, Homo sapien
cgacagcgacaccaactatcaacag

SEQ ID NO: 82351 - DNA, 25 bp, Homo sapien
tgtacttcactcaggtactcccact

SEQ ID NO: 82352 - DNA, 25 bp, Homo sapien
agtgggagtacctgagtgaagtaca

SEQ ID NO: 82353 - DNA, 25 bp, Homo sapien
tacccatgttcgttcacgcggtcgg

SEQ ID NO: 82354 - DNA, 25 bp, Homo sapien
ccgaccgcgtgaacgaacatgggta

SEQ ID NO: 82355 - DNA, 25 bp, Homo sapien
aataaggacttttgagagtattaaa

SEQ ID NO: 82356 - DNA, 25 bp, Homo sapien
tttaatactctcaaaagtccttatt

SEQ ID NO: 82357 - DNA, 25 bp, Homo sapien
gcccgacggcgcgtccactctcgcc

SEQ ID NO: 82358 - DNA, 25 bp, Homo sapien
ggcgagagtggacgcgccgtcgggc

SEQ ID NO: 82359 - DNA, 25 bp, Homo sapien
gagacggaggcgtcgaccattaggt

SEQ ID NO: 82360 - DNA, 25 bp, Homo sapien
acctaatggtcgacgcctccgtctc

SEQ ID NO: 82361 - DNA, 25 bp, Homo sapien
aactgtgtttttatggacaacgagt

SEQ ID NO: 82362 - DNA, 25 bp, Homo sapien
actcgttgtccataaaaacacagtt

SEQ ID NO: 82363 - DNA, 25 bp, Homo sapien
gatcggtcgacgagcgcatcccatc

SEQ ID NO: 82364 - DNA, 25 bp, Homo sapien
gatgggatgcgctcgtcgaccgatc

SEQ ID NO: 82365 - DNA, 25 bp, Homo sapien
cggaaacatggttagaaaacagagg

SEQ ID NO: 82366 - DNA, 25 bp, Homo sapien
cctctgttttctaaccatgtttccg

SEQ ID NO: 82367 - DNA, 25 bp, Homo sapien
ggtcggatctcacaggctgagaact

SEQ ID NO: 82368 - DNA, 25 bp, Homo sapien
ctagggactgccaggctgtttcagc

SEQ ID NO: 82369 - DNA, 25 bp, Homo sapien
tcatacaaactctcaccatgatgtg

SEQ ID NO: 82370 - DNA, 25 bp, Homo sapien
tgtcttttggagaaccagggctctt

SEQ ID NO: 82371 - DNA, 25 bp, Homo sapien
agccaggaaggccaaaatcaagagt

SEQ ID NO: 82372 - DNA, 25 bp, Homo sapien
gctgcttcttattaatcatacaaac

SEQ ID NO: 82373 - DNA, 25 bp, Homo sapien
cggactgtcagttctctgggaagtg

SEQ ID NO: 82374 - DNA, 25 bp, Homo sapien
ttgggagcacggactgtcagttctc

SEQ ID NO: 82375 - DNA, 25 bp, Homo sapien
gttggttcaaacttttgggagcacg

SEQ ID NO: 82376 - DNA, 25 bp, Homo sapien
gatgattgtcataaggtttttagca

SEQ ID NO: 82377 - DNA, 25 bp, Homo sapien
aatgggatggtcggatctcacaggc

SEQ ID NO: 82378 - DNA, 25 bp, Homo sapien
agttctcagcctgtgagatccgacc

SEQ ID NO: 82379 - DNA, 25 bp, Homo sapien
actcttgattttggccttcctggct

SEQ ID NO: 82380 - DNA, 25 bp, Homo sapien
cacatcatggtgagagtttgtatga

SEQ ID NO: 82381 - DNA, 25 bp, Homo sapien
gtttgtatgattaataagaagcagc

SEQ ID NO: 82382 - DNA, 25 bp, Homo sapien
gagaactgacagtccgtgctcccaa

SEQ ID NO: 82383 - DNA, 25 bp, Homo sapien
tgctaaaaaccttatgacaatcatc

SEQ ID NO: 82384 - DNA, 25 bp, Homo sapien
cacttcccagagaactgacagtccg

SEQ ID NO: 82385 - DNA, 25 bp, Homo sapien
aagagccctggttctccaaaagaca

SEQ ID NO: 82386 - DNA, 25 bp, Homo sapien
cgtgctcccaaaagtttgaaccaac

SEQ ID NO: 82387 - DNA, 25 bp, Homo sapien
gcctgtgagatccgaccatcccatt

SEQ ID NO: 82388 - DNA, 25 bp, Homo sapien
gctgaaacagcctggcagtccctag

SEQ ID NO: 82389 - DNA, 25 bp, Homo sapien
gtatcagagacggactcatacaccc

SEQ ID NO: 82390 - DNA, 25 bp, Homo sapien
gggtgtatgagtccgtctctgatac

SEQ ID NO: 82391 - DNA, 25 bp, Homo sapien
taaaggaaacattgttataaacatg

SEQ ID NO: 82392 - DNA, 25 bp, Homo sapien
catgtttataacaatgtttccttta

SEQ ID NO: 82393 - DNA, 25 bp, Homo sapien
agcctcaccaaaaaccaagtgaccg

SEQ ID NO: 82394 - DNA, 25 bp, Homo sapien
cggtcacttggtttttggtgaggct

SEQ ID NO: 82395 - DNA, 25 bp, Homo sapien
caagaaacggagtctggactaaggg

SEQ ID NO: 82396 - DNA, 25 bp, Homo sapien
cccttagtccagactccgtttcttg

SEQ ID NO: 82397 - DNA, 25 bp, Homo sapien
ctgcctcacctcctgtcttccggag

SEQ ID NO: 82398 - DNA, 25 bp, Homo sapien
ctccggaagacaggaggtgaggcag

SEQ ID NO: 82399 - DNA, 25 bp, Homo sapien
tgaaaagatccaaccatcatgtcgt

SEQ ID NO: 82400 - DNA, 25 bp, Homo sapien
acgacatgatggttggatcttttca

SEQ ID NO: 82401 - DNA, 25 bp, Homo sapien
atattcgagaagtttctatattaat

SEQ ID NO: 82402 - DNA, 25 bp, Homo sapien
attaatatagaaacttctcgaatat

SEQ ID NO: 82403 - DNA, 25 bp, Homo sapien
attcgagaagtttctatattaatta

SEQ ID NO: 82404 - DNA, 25 bp, Homo sapien
taattaatatagaaacttctcgaat

SEQ ID NO: 82405 - DNA, 25 bp, Homo sapien
tatattcgagaagtttctatattaa

SEQ ID NO: 82406 - DNA, 25 bp, Homo sapien
ttaatatagaaacttctcgaatata

SEQ ID NO: 82407 - DNA, 25 bp, Homo sapien
tttatattcgagaagtttctatatt

SEQ ID NO: 82408 - DNA, 25 bp, Homo sapien
aatatagaaacttctcgaatataaa

SEQ ID NO: 82409 - DNA, 25 bp, Homo sapien
caaccgaatcatgtttaaggtttcg

SEQ ID NO: 82410 - DNA, 25 bp, Homo sapien
cgaaaccttaaacatgattcggttg

SEQ ID NO: 82411 - DNA, 25 bp, Homo sapien
ggaacggaatgagaagcccctgacg

SEQ ID NO: 82412 - DNA, 25 bp, Homo sapien
cgtcaggggcttctcattccgttcc

SEQ ID NO: 82413 - DNA, 25 bp, Homo sapien
ttccaagcgctcactatatgcgtcg

SEQ ID NO: 82414 - DNA, 25 bp, Homo sapien
cgacgcatatagtgagcgcttggaa

SEQ ID NO: 82415 - DNA, 25 bp, Homo sapien
cctttattagaaccttttgatcgct

SEQ ID NO: 82416 - DNA, 25 bp, Homo sapien
agcgatcaaaaggttctaataaagg

SEQ ID NO: 82417 - DNA, 25 bp, Homo sapien
gacttctttaatgtcattataaaaa

SEQ ID NO: 82418 - DNA, 25 bp, Homo sapien
tttttataatgacattaaagaagtc

SEQ ID NO: 82419 - DNA, 25 bp, Homo sapien
agacttctttaatgtcattataaaa

SEQ ID NO: 82420 - DNA, 25 bp, Homo sapien
ttttataatgacattaaagaagtct

SEQ ID NO: 82421 - DNA, 25 bp, Homo sapien
ccaccgaagtacaggtggcgtagga

SEQ ID NO: 82422 - DNA, 25 bp, Homo sapien
tcctacgccacctgtacttcggtgg

SEQ ID NO: 82423 - DNA, 25 bp, Homo sapien
tagggaggttccgcaattttgaact

SEQ ID NO: 82424 - DNA, 25 bp, Homo sapien
agttcaaaattgcggaacctcccta

SEQ ID NO: 82425 - DNA, 25 bp, Homo sapien
acttctagtaaaacacctctgttag

SEQ ID NO: 82426 - DNA, 25 bp, Homo sapien
ctaacagaggtgttttactagaagt

SEQ ID NO: 82427 - DNA, 25 bp, Homo sapien
ggcggctcaggcggcgccgggtcag

SEQ ID NO: 82428 - DNA, 25 bp, Homo sapien
ctgacccggcgccgcctgagccgcc

SEQ ID NO: 82429 - DNA, 25 bp, Homo sapien
gctcaggcggcgccgggtcagggag

SEQ ID NO: 82430 - DNA, 25 bp, Homo sapien
ctccctgacccggcgccgcctgagc

SEQ ID NO: 82431 - DNA, 25 bp, Homo sapien
gcggctcaggcggcgccgggtcagg

SEQ ID NO: 82432 - DNA, 25 bp, Homo sapien
cctgacccggcgccgcctgagccgc

SEQ ID NO: 82433 - DNA, 25 bp, Homo sapien
cggggcgagccgctcgtcctggtgc

SEQ ID NO: 82434 - DNA, 25 bp, Homo sapien
gcaccaggacgagcggctcgccccg

SEQ ID NO: 82435 - DNA, 25 bp, Homo sapien
cggtgccgcgcacggaggtcccacg

SEQ ID NO: 82436 - DNA, 25 bp, Homo sapien
cgtgggacctccgtgcgcggcaccg

SEQ ID NO: 82437 - DNA, 25 bp, Homo sapien
gtgccgcgcacggaggtcccacggg

SEQ ID NO: 82438 - DNA, 25 bp, Homo sapien
cccgtgggacctccgtgcgcggcac

SEQ ID NO: 82439 - DNA, 25 bp, Homo sapien
cccgtcctctcgtctaggtgggagg

SEQ ID NO: 82440 - DNA, 25 bp, Homo sapien
cctcccacctagacgagaggacggg

SEQ ID NO: 82441 - DNA, 25 bp, Homo sapien
tcctttttgtggtctttacatattt

SEQ ID NO: 82442 - DNA, 25 bp, Homo sapien
aaatatgtaaagaccacaaaaagga

SEQ ID NO: 82443 - DNA, 25 bp, Homo sapien
tacacggtcagagacggctgtcaac

SEQ ID NO: 82444 - DNA, 25 bp, Homo sapien
gttgacagccgtctctgaccgtgta

SEQ ID NO: 82445 - DNA, 25 bp, Homo sapien
atacgtcacattttgtactagagta

SEQ ID NO: 82446 - DNA, 25 bp, Homo sapien
tactctagtacaaaatgtgacgtat

SEQ ID NO: 82447 - DNA, 25 bp, Homo sapien
ggcaagcttgccagtgtacctgctg

SEQ ID NO: 82448 - DNA, 25 bp, Homo sapien
attgaagacgtcattgcccagggta

SEQ ID NO: 82449 - DNA, 25 bp, Homo sapien
gacgaccggctcaacaaggttatca

SEQ ID NO: 82450 - DNA, 25 bp, Homo sapien
aaaaacattgaagacgtcattgccc

SEQ ID NO: 82451 - DNA, 25 bp, Homo sapien
ggggctgtagccgtctctgctgccc

SEQ ID NO: 82452 - DNA, 25 bp, Homo sapien
gcgatgcgctacgtcgcctcctacc

SEQ ID NO: 82453 - DNA, 25 bp, Homo sapien
agtgagctgaatggaaaaaacattg

SEQ ID NO: 82454 - DNA, 25 bp, Homo sapien
cttgccagtgtacctgctggtgggg

SEQ ID NO: 82455 - DNA, 25 bp, Homo sapien
cgccaaggacatcaagaagatcttg

SEQ ID NO: 82456 - DNA, 25 bp, Homo sapien
ttgcccagggtattggcaagcttgc

SEQ ID NO: 82457 - DNA, 25 bp, Homo sapien
ctcaacaaggttatcagtgagctga

SEQ ID NO: 82458 - DNA, 25 bp, Homo sapien
acagaagaccgatcacaccagaagt

SEQ ID NO: 82459 - DNA, 25 bp, Homo sapien
acttctggtgtgatcggtcttctgt

SEQ ID NO: 82460 - DNA, 25 bp, Homo sapien
ctccctagaccgccccgtcgggcgc

SEQ ID NO: 82461 - DNA, 25 bp, Homo sapien
gcgcccgacggggcggtctagggag

SEQ ID NO: 82462 - DNA, 25 bp, Homo sapien
tccctagaccgccccgtcgggcgcc

SEQ ID NO: 82463 - DNA, 25 bp, Homo sapien
ggcgcccgacggggcggtctaggga

SEQ ID NO: 82464 - DNA, 25 bp, Homo sapien
gacctatgagtatgtttccacgacg

SEQ ID NO: 82465 - DNA, 25 bp, Homo sapien
cgtcgtggaaacatactcataggtc

SEQ ID NO: 82466 - DNA, 25 bp, Homo sapien
ctggcaaaacttatacatcgtgaat

SEQ ID NO: 82467 - DNA, 25 bp, Homo sapien
attcacgatgtataagttttgccag

SEQ ID NO: 82468 - DNA, 25 bp, Homo sapien
ccgtcagggtggcgcttcccgaaac

SEQ ID NO: 82469 - DNA, 25 bp, Homo sapien
gtttcgggaagcgccaccctgacgg

SEQ ID NO: 82470 - DNA, 25 bp, Homo sapien
cgggctccgcgagggtgccgtaggg

SEQ ID NO: 82471 - DNA, 25 bp, Homo sapien
ccctacggcaccctcgcggagcccg

SEQ ID NO: 82472 - DNA, 25 bp, Homo sapien
tgtgtcagagcactgagctccaccc

SEQ ID NO: 82473 - DNA, 25 bp, Homo sapien
caaccctgtgatcagaacctccaaa

SEQ ID NO: 82474 - DNA, 25 bp, Homo sapien
gaaagggttgctgctgtcagccttg

SEQ ID NO: 82475 - DNA, 25 bp, Homo sapien
actttgttcactgtcctgtgtcaga

SEQ ID NO: 82476 - DNA, 25 bp, Homo sapien
tgttcttagcactttaattcctgtc

SEQ ID NO: 82477 - DNA, 25 bp, Homo sapien
ggttttctcttcatgtaagtccttg

SEQ ID NO: 82478 - DNA, 25 bp, Homo sapien
gtgttctcctactgcaaatattttc

SEQ ID NO: 82479 - DNA, 25 bp, Homo sapien
gctgaaactggtctactgtgtctct

SEQ ID NO: 82480 - DNA, 25 bp, Homo sapien
agatagggatattggcccctcactg

SEQ ID NO: 82481 - DNA, 25 bp, Homo sapien
agctccacccttttctgagagttat

SEQ ID NO: 82482 - DNA, 25 bp, Homo sapien
cactctcagccatagcactttgttc

SEQ ID NO: 82483 - DNA, 25 bp, Homo sapien
tttggaggttctgatcacagggttg

SEQ ID NO: 82484 - DNA, 25 bp, Homo sapien
caaggacttacatgaagagaaaacc

SEQ ID NO: 82485 - DNA, 25 bp, Homo sapien
ataactctcagaaaagggtggagct

SEQ ID NO: 82486 - DNA, 25 bp, Homo sapien
cagtgaggggccaatatccctatct

SEQ ID NO: 82487 - DNA, 25 bp, Homo sapien
agagacacagtagaccagtttcagc

SEQ ID NO: 82488 - DNA, 25 bp, Homo sapien
gaacaaagtgctatggctgagagtg

SEQ ID NO: 82489 - DNA, 25 bp, Homo sapien
gaaaatatttgcagtaggagaacac

SEQ ID NO: 82490 - DNA, 25 bp, Homo sapien
gacaggaattaaagtgctaagaaca

SEQ ID NO: 82491 - DNA, 25 bp, Homo sapien
caaggctgacagcagcaaccctttc

SEQ ID NO: 82492 - DNA, 25 bp, Homo sapien
tctgacacaggacagtgaacaaagt

SEQ ID NO: 82493 - DNA, 25 bp, Homo sapien
gggtggagctcagtgctctgacaca

SEQ ID NO: 82494 - DNA, 25 bp, Homo sapien
tttcaactataggtcgtcgttcgtt

SEQ ID NO: 82495 - DNA, 25 bp, Homo sapien
aacgaacgacgacctatagttgaaa

SEQ ID NO: 82496 - DNA, 25 bp, Homo sapien
gatttactttatgacagagaacaac

SEQ ID NO: 82497 - DNA, 25 bp, Homo sapien
gttgttctctgtcataaagtaaatc

SEQ ID NO: 82498 - DNA, 25 bp, Homo sapien
gaaagagacaaaaagattcaggttg

SEQ ID NO: 82499 - DNA, 25 bp, Homo sapien
caacctgaatctttttgtctctttc

SEQ ID NO: 82500 - DNA, 25 bp, Homo sapien
gactgactaggtgaccgaacatttt

SEQ ID NO: 82501 - DNA, 25 bp, Homo sapien
aaaatgttcggtcacctagtcagtc

SEQ ID NO: 82502 - DNA, 25 bp, Homo sapien
aataaaattatagcttacatcagtt

SEQ ID NO: 82503 - DNA, 25 bp, Homo sapien
aactgatgtaagctataattttatt

SEQ ID NO: 82504 - DNA, 25 bp, Homo sapien
aaataaaattatagcttacatcagt

SEQ ID NO: 82505 - DNA, 25 bp, Homo sapien
actgatgtaagctataattttattt

SEQ ID NO: 82506 - DNA, 25 bp, Homo sapien
aagtgattgaccgtccgtcggaaag

SEQ ID NO: 82507 - DNA, 25 bp, Homo sapien
ctttccgacggacggtcaatcactt

SEQ ID NO: 82508 - DNA, 25 bp, Homo sapien
cctcgggcacgccaggacgactcgg

SEQ ID NO: 82509 - DNA, 25 bp, Homo sapien
ccgagtcgtcctggcgtgcccgagg

SEQ ID NO: 82510 - DNA, 25 bp, Homo sapien
ccctcgcgcgcccagcagcgccgcg

SEQ ID NO: 82511 - DNA, 25 bp, Homo sapien
cgcggcgctgctgggcgcgcgaggg

SEQ ID NO: 82512 - DNA, 25 bp, Homo sapien
cccctcgcgcgcccagcagcgccgc

SEQ ID NO: 82513 - DNA, 25 bp, Homo sapien
gcggcgctgctgggcgcgcgagggg

SEQ ID NO: 82514 - DNA, 25 bp, Homo sapien
cctcgcgcgcccagcagcgccgcgt

SEQ ID NO: 82515 - DNA, 25 bp, Homo sapien
acgcggcgctgctgggcgcgcgagg

SEQ ID NO: 82516 - DNA, 25 bp, Homo sapien
ggttgtcagcacttaaccgaaagga

SEQ ID NO: 82517 - DNA, 25 bp, Homo sapien
tcctttcggttaagtgctgacaacc

SEQ ID NO: 82518 - DNA, 25 bp, Homo sapien
aaagcaccggagaagcagccgcggc

SEQ ID NO: 82519 - DNA, 25 bp, Homo sapien
gccgcggctgcttctccggtgcttt

SEQ ID NO: 82520 - DNA, 25 bp, Homo sapien
tgcggagctttctccggctgcccgt

SEQ ID NO: 82521 - DNA, 25 bp, Homo sapien
acgggcagccggagaaagctccgca

SEQ ID NO: 82522 - DNA, 25 bp, Homo sapien
ggcacgggagcctgagaaacaacag

SEQ ID NO: 82523 - DNA, 25 bp, Homo sapien
ctgttgtttctcaggctcccgtgcc

SEQ ID NO: 82524 - DNA, 25 bp, Homo sapien
gctgattgcaattctggcccaactc

SEQ ID NO: 82525 - DNA, 25 bp, Homo sapien
cagtgctcagtctttgaggtcacga

SEQ ID NO: 82526 - DNA, 25 bp, Homo sapien
aattctggcccaactcaaccctctc

SEQ ID NO: 82527 - DNA, 25 bp, Homo sapien
acatgctctacagtgctcagtcttt

SEQ ID NO: 82528 - DNA, 25 bp, Homo sapien
gaaaccatctggtatctgaagtatc

SEQ ID NO: 82529 - DNA, 25 bp, Homo sapien
tcttttggctgattgcaattctggc

SEQ ID NO: 82530 - DNA, 25 bp, Homo sapien
ctttggaccgcaattgaaaaatgaa

SEQ ID NO: 82531 - DNA, 25 bp, Homo sapien
caaccctctctttggaccgcaattg

SEQ ID NO: 82532 - DNA, 25 bp, Homo sapien
agtctttgaggtcacgagaagagaa

SEQ ID NO: 82533 - DNA, 25 bp, Homo sapien
cttgaggaagaagacatgctctaca

SEQ ID NO: 82534 - DNA, 25 bp, Homo sapien
accatctggtatctgaagtatcatt

SEQ ID NO: 82535 - DNA, 25 bp, Homo sapien
tctcgaaggataagtgtctaaatag

SEQ ID NO: 82536 - DNA, 25 bp, Homo sapien
ctatttagacacttatccttcgaga

SEQ ID NO: 82537 - DNA, 25 bp, Homo sapien
actcatcgacacgacacagtaagag

SEQ ID NO: 82538 - DNA, 25 bp, Homo sapien
ctcttactgtgtcgtgtcgatgagt

SEQ ID NO: 82539 - DNA, 25 bp, Homo sapien
ctggacaaccatttcagagtcataa

SEQ ID NO: 82540 - DNA, 25 bp, Homo sapien
ttatgactctgaaatggttgtccag

SEQ ID NO: 82541 - DNA, 25 bp, Homo sapien
agagagactccgtgcttcaacgtgg

SEQ ID NO: 82542 - DNA, 25 bp, Homo sapien
ccacgttgaagcacggagtctctct

SEQ ID NO: 82543 - DNA, 25 bp, Homo sapien
aaaactaagatatgagtgactacag

SEQ ID NO: 82544 - DNA, 25 bp, Homo sapien
ctgtagtcactcatatcttagtttt

SEQ ID NO: 82545 - DNA, 25 bp, Homo sapien
accgtgtcccggtgtatccgatccg

SEQ ID NO: 82546 - DNA, 25 bp, Homo sapien
cggatcggatacaccgggacacggt

SEQ ID NO: 82547 - DNA, 25 bp, Homo sapien
aatccaaaccagctaaacccaccac

SEQ ID NO: 82548 - DNA, 25 bp, Homo sapien
ggagaaatccatccaggaccttcag

SEQ ID NO: 82549 - DNA, 25 bp, Homo sapien
acatgtcagcatagccagagaagca

SEQ ID NO: 82550 - DNA, 25 bp, Homo sapien
gccatgggcactttggtgtctccac

SEQ ID NO: 82551 - DNA, 25 bp, Homo sapien
ccgggctgtgttgaaagctccaatt

SEQ ID NO: 82552 - DNA, 25 bp, Homo sapien
gacagggcatagataataccaggac

SEQ ID NO: 82553 - DNA, 25 bp, Homo sapien
agaagattcaaaaccagacatggac

SEQ ID NO: 82554 - DNA, 25 bp, Homo sapien
tgcaacaatacagtgctggggtcat

SEQ ID NO: 82555 - DNA, 25 bp, Homo sapien
tagtaagtgcttgcagtacgctcat

SEQ ID NO: 82556 - DNA, 25 bp, Homo sapien
tgctgaaatcataaggacagggcat

SEQ ID NO: 82557 - DNA, 25 bp, Homo sapien
gacatggacaaaggtccagtagctc

SEQ ID NO: 82558 - DNA, 25 bp, Homo sapien
gacacgtttcagtgtactccaaaat

SEQ ID NO: 82559 - DNA, 25 bp, Homo sapien
attttggagtacactgaaacgtgtc

SEQ ID NO: 82560 - DNA, 25 bp, Homo sapien
ataattctatacgtactctttgtaa

SEQ ID NO: 82561 - DNA, 25 bp, Homo sapien
ttacaaagagtacgtatagaattat

SEQ ID NO: 82562 - DNA, 25 bp, Homo sapien
cggtccgagacagacacctaagggt

SEQ ID NO: 82563 - DNA, 25 bp, Homo sapien
acccttaggtgtctgtctcggaccg

SEQ ID NO: 82564 - DNA, 25 bp, Homo sapien
ccccataggtccgtcgggctgtgga

SEQ ID NO: 82565 - DNA, 25 bp, Homo sapien
tccacagcccgacggacctatgggg

SEQ ID NO: 82566 - DNA, 25 bp, Homo sapien
tgatttttccggaaacgatagacgt

SEQ ID NO: 82567 - DNA, 25 bp, Homo sapien
acgtctatcgtttccggaaaaatca

SEQ ID NO: 82568 - DNA, 25 bp, Homo sapien
gtcgcacgcggtccaggagaggcgt

SEQ ID NO: 82569 - DNA, 25 bp, Homo sapien
acgcctctcctggaccgcgtgcgac

SEQ ID NO: 82570 - DNA, 25 bp, Homo sapien
gacggtctacttgacgtgaaatagt

SEQ ID NO: 82571 - DNA, 25 bp, Homo sapien
actatttcacgtcaagtagaccgtc

SEQ ID NO: 82572 - DNA, 25 bp, Homo sapien
ctaagtatcgacaccaaccgtcctt

SEQ ID NO: 82573 - DNA, 25 bp, Homo sapien
aaggacggttggtgtcgatacttag

SEQ ID NO: 82574 - DNA, 25 bp, Homo sapien
acgacttacgcaggggacatccact

SEQ ID NO: 82575 - DNA, 25 bp, Homo sapien
agtggatgtcccctgcgtaagtcgt

SEQ ID NO: 82576 - DNA, 25 bp, Homo sapien
ctctccaggaaggtgaagcaacact

SEQ ID NO: 82577 - DNA, 25 bp, Homo sapien
agtgttgcttcaccttcctggagag

SEQ ID NO: 82578 - DNA, 25 bp, Homo sapien
aggtagtctccaacgcaaacttgag

SEQ ID NO: 82579 - DNA, 25 bp, Homo sapien
ctcaagtttgcgttggagactacct

SEQ ID NO: 82580 - DNA, 25 bp, Homo sapien
gaagacacgggtatacgagaaggcc

SEQ ID NO: 82581 - DNA, 25 bp, Homo sapien
ggccttctcgtatacccgtgtcttc

SEQ ID NO: 82582 - DNA, 25 bp, Homo sapien
tccttggagtagagcccatcccttc

SEQ ID NO: 82583 - DNA, 25 bp, Homo sapien
gaagggatgggctctactccaagga

SEQ ID NO: 82584 - DNA, 25 bp, Homo sapien
tcaaaaccaaacctgagttgaaggt

SEQ ID NO: 82585 - DNA, 25 bp, Homo sapien
accttcaactcaggtttggttttga

SEQ ID NO: 82586 - DNA, 25 bp, Homo sapien
tatcactgtagacatctatgtctat

SEQ ID NO: 82587 - DNA, 25 bp, Homo sapien
atagacatagatgtctacagtgata

SEQ ID NO: 82588 - DNA, 25 bp, Homo sapien
cgcggcaccatggctgtgtttgtcg

SEQ ID NO: 82589 - DNA, 25 bp, Homo sapien
gctaccgtcatggtgatggtgaagg

SEQ ID NO: 82590 - DNA, 25 bp, Homo sapien
cccagacgtggctgcattgtccatg

SEQ ID NO: 82591 - DNA, 25 bp, Homo sapien
tccgaaatggaaattggcctatacc

SEQ ID NO: 82592 - DNA, 25 bp, Homo sapien
attaaaatcaccagggtctgttgtt

SEQ ID NO: 82593 - DNA, 25 bp, Homo sapien
tagtcttgacagtgttgcaaattcc

SEQ ID NO: 82594 - DNA, 25 bp, Homo sapien
tcgtaccctttggagaatgcagttc

SEQ ID NO: 82595 - DNA, 25 bp, Homo sapien
catcgtcctcgggctaccgtcatgg

SEQ ID NO: 82596 - DNA, 25 bp, Homo sapien
gaaattggcctataccaggagagcg

SEQ ID NO: 82597 - DNA, 25 bp, Homo sapien
gactcgcagtgggtaacctgtttca

SEQ ID NO: 82598 - DNA, 25 bp, Homo sapien
tgtgtttgtcgtgctcctggcgttg

SEQ ID NO: 82599 - DNA, 25 bp, Homo sapien
tgtggactcctacgatccaaccata

SEQ ID NO: 82600 - DNA, 25 bp, Homo sapien
gccgcccctgctctgtatgccgctc

SEQ ID NO: 82601 - DNA, 25 bp, Homo sapien
cccctgctctgtatgccgctctctc

SEQ ID NO: 82602 - DNA, 25 bp, Homo sapien
agtttcagtcgtgacttttctgggg

SEQ ID NO: 82603 - DNA, 25 bp, Homo sapien
cctgctctgtatgccgctctctccc

SEQ ID NO: 82604 - DNA, 25 bp, Homo sapien
gtggggaaatcctcattgacgattc

SEQ ID NO: 82605 - DNA, 25 bp, Homo sapien
cgcccctgctctgtatgccgctctc

SEQ ID NO: 82606 - DNA, 25 bp, Homo sapien
ctgtggggaaatcctcattgacgat

SEQ ID NO: 82607 - DNA, 25 bp, Homo sapien
ggtctgtggggaaatcctcattgac

SEQ ID NO: 82608 - DNA, 25 bp, Homo sapien
ctcctacgatccaaccatagaaaac

SEQ ID NO: 82609 - DNA, 25 bp, Homo sapien
cggtctgtggggaaatcctcattga

SEQ ID NO: 82610 - DNA, 25 bp, Homo sapien
aaaatagtcaacataacttttgtaa

SEQ ID NO: 82611 - DNA, 25 bp, Homo sapien
ttacaaaagttatgttgactatttt

SEQ ID NO: 82612 - DNA, 25 bp, Homo sapien
ttaaaatagtcaacataacttttgt

SEQ ID NO: 82613 - DNA, 25 bp, Homo sapien
acaaaagttatgttgactattttaa

SEQ ID NO: 82614 - DNA, 25 bp, Homo sapien
ttatggacttcataaaagtagtgag

SEQ ID NO: 82615 - DNA, 25 bp, Homo sapien
ctcactacttttatgaagtccataa

SEQ ID NO: 82616 - DNA, 25 bp, Homo sapien
agaagtccactattgaagagaggta

SEQ ID NO: 82617 - DNA, 25 bp, Homo sapien
tacctctcttcaatagtggacttct

SEQ ID NO: 82618 - DNA, 25 bp, Homo sapien
ccgctagcacggacacgaatcctgg

SEQ ID NO: 82619 - DNA, 25 bp, Homo sapien
ccaggattcgtgtccgtgctagcgg

SEQ ID NO: 82620 - DNA, 25 bp, Homo sapien
cgtcgaccgttaacacattattaaa

SEQ ID NO: 82621 - DNA, 25 bp, Homo sapien
tttaataatgtgttaacggtcgacg

SEQ ID NO: 82622 - DNA, 25 bp, Homo sapien
caatatagcgtaatacacttgttac

SEQ ID NO: 82623 - DNA, 25 bp, Homo sapien
gtaacaagtgtattacgctatattg

SEQ ID NO: 82624 - DNA, 25 bp, Homo sapien
cgtgacggtggtctatcgaccactg

SEQ ID NO: 82625 - DNA, 25 bp, Homo sapien
cagtggtcgatagaccaccgtcacg

SEQ ID NO: 82626 - DNA, 25 bp, Homo sapien
tcgtccacggagactactcccgtgt

SEQ ID NO: 82627 - DNA, 25 bp, Homo sapien
acacgggagtagtctccgtggacga

SEQ ID NO: 82628 - DNA, 25 bp, Homo sapien
ggccgctcacccgccccgcgacggt

SEQ ID NO: 82629 - DNA, 25 bp, Homo sapien
accgtcgcggggcgggtgagcggcc

SEQ ID NO: 82630 - DNA, 25 bp, Homo sapien
cggccgctcacccgccccgcgacgg

SEQ ID NO: 82631 - DNA, 25 bp, Homo sapien
ccgtcgcggggcgggtgagcggccg

SEQ ID NO: 82632 - DNA, 25 bp, Homo sapien
ggcgcacggccgctcacccgccccg

SEQ ID NO: 82633 - DNA, 25 bp, Homo sapien
cggggcgggtgagcggccgtgcgcc

SEQ ID NO: 82634 - DNA, 25 bp, Homo sapien
gaccaccgaacagccaccgtccggt

SEQ ID NO: 82635 - DNA, 25 bp, Homo sapien
accggacggtggctgttcggtggtc

SEQ ID NO: 82636 - DNA, 25 bp, Homo sapien
tcggcggccgcgaagaccgcgaaca

SEQ ID NO: 82637 - DNA, 25 bp, Homo sapien
tgttcgcggtcttcgcggccgccga

SEQ ID NO: 82638 - DNA, 25 bp, Homo sapien
cactttccacgaaacccaggctctt

SEQ ID NO: 82639 - DNA, 25 bp, Homo sapien
aagagcctgggtttcgtggaaagtg

SEQ ID NO: 82640 - DNA, 25 bp, Homo sapien
ccacgtcgttgtaggcaccctcaga

SEQ ID NO: 82641 - DNA, 25 bp, Homo sapien
tctgagggtgcctacaacgacgtgg

SEQ ID NO: 82642 - DNA, 25 bp, Homo sapien
ttgagctttaggtaaccaagagacc

SEQ ID NO: 82643 - DNA, 25 bp, Homo sapien
ggtctcttggttacctaaagctcaa

SEQ ID NO: 82644 - DNA, 25 bp, Homo sapien
gaaaagtttaacatcgggacagctc

SEQ ID NO: 82645 - DNA, 25 bp, Homo sapien
gagctgtcccgatgttaaacttttc

SEQ ID NO: 82646 - DNA, 25 bp, Homo sapien
ccgccgcccggctctccggaggacg

SEQ ID NO: 82647 - DNA, 25 bp, Homo sapien
cgtcctccggagagccgggcggcgg

SEQ ID NO: 82648 - DNA, 25 bp, Homo sapien
cccgccgcccggctctccggaggac

SEQ ID NO: 82649 - DNA, 25 bp, Homo sapien
gtcctccggagagccgggcggcggg

SEQ ID NO: 82650 - DNA, 25 bp, Homo sapien
gccccgccgcccggctctccggagg

SEQ ID NO: 82651 - DNA, 25 bp, Homo sapien
cctccggagagccgggcggcggggc

SEQ ID NO: 82652 - DNA, 25 bp, Homo sapien
cgccgcccggctctccggaggacgg

SEQ ID NO: 82653 - DNA, 25 bp, Homo sapien
ccgtcctccggagagccgggcggcg

SEQ ID NO: 82654 - DNA, 25 bp, Homo sapien
gtaccagtgacctaaccaagctcac

SEQ ID NO: 82655 - DNA, 25 bp, Homo sapien
gtgagcttggttaggtcactggtac

SEQ ID NO: 82656 - DNA, 25 bp, Homo sapien
ggacaaggtctccttaatggaaaac

SEQ ID NO: 82657 - DNA, 25 bp, Homo sapien
gttttccattaaggagaccttgtcc

SEQ ID NO: 82658 - DNA, 25 bp, Homo sapien
agacgtgaaccttcctggtactctt

SEQ ID NO: 82659 - DNA, 25 bp, Homo sapien
aagagtaccaggaaggttcacgtct

SEQ ID NO: 82660 - DNA, 25 bp, Homo sapien
gtggtgaggaccggcaccgccacac

SEQ ID NO: 82661 - DNA, 25 bp, Homo sapien
gtgtggcggtgccggtcctcaccac

SEQ ID NO: 82662 - DNA, 25 bp, Homo sapien
agcgcttaggcgtcgcaggaggcgt

SEQ ID NO: 82663 - DNA, 25 bp, Homo sapien
acgcctcctgcgacgcctaagcgct

SEQ ID NO: 82664 - DNA, 25 bp, Homo sapien
ggagtcgaccctacgtttcagagac

SEQ ID NO: 82665 - DNA, 25 bp, Homo sapien
gtctctgaaacgtagggtcgactcc

SEQ ID NO: 82666 - DNA, 25 bp, Homo sapien
taccacgacccaataccgttatagg

SEQ ID NO: 82667 - DNA, 25 bp, Homo sapien
cctataacggtattgggtcgtggta

SEQ ID NO: 82668 - DNA, 25 bp, Homo sapien
cactgaccctgccactggggtcatg

SEQ ID NO: 82669 - DNA, 25 bp, Homo sapien
tcaggcacatctgttcgttggacta

SEQ ID NO: 82670 - DNA, 25 bp, Homo sapien
tagtgatgagctgccagtccattcc

SEQ ID NO: 82671 - DNA, 25 bp, Homo sapien
tagttcagtcaaagcaggcaacccc

SEQ ID NO: 82672 - DNA, 25 bp, Homo sapien
cataggcgaatctgttctgcccgag

SEQ ID NO: 82673 - DNA, 25 bp, Homo sapien
gtcatcaacaatccaatgctcacct

SEQ ID NO: 82674 - DNA, 25 bp, Homo sapien
aaaacagtcccttcaaacacacaat

SEQ ID NO: 82675 - DNA, 25 bp, Homo sapien
ccaatgctcacctattcagttgctc

SEQ ID NO: 82676 - DNA, 25 bp, Homo sapien
aatacccccttgtgtaattgctttg

SEQ ID NO: 82677 - DNA, 25 bp, Homo sapien
gccatccattcagtcgattcagtca

SEQ ID NO: 82678 - DNA, 25 bp, Homo sapien
ctccagggagctgacccagaggtgg

SEQ ID NO: 82679 - DNA, 25 bp, Homo sapien
attgtgtgtttgaagggactgtttt

SEQ ID NO: 82680 - DNA, 25 bp, Homo sapien
ggggttgcctgctttgactgaacta

SEQ ID NO: 82681 - DNA, 25 bp, Homo sapien
gagcaactgaataggtgagcattgg

SEQ ID NO: 82682 - DNA, 25 bp, Homo sapien
tgactgaatcgactgaatggatggc

SEQ ID NO: 82683 - DNA, 25 bp, Homo sapien
ggaatggactggcagctcatcacta

SEQ ID NO: 82684 - DNA, 25 bp, Homo sapien
ctcgggcagaacagattcgcctatg

SEQ ID NO: 82685 - DNA, 25 bp, Homo sapien
catgaccccagtggcagggtcagtg

SEQ ID NO: 82686 - DNA, 25 bp, Homo sapien
aggtgagcattggattgttgatgac

SEQ ID NO: 82687 - DNA, 25 bp, Homo sapien
caaagcaattacacaagggggtatt

SEQ ID NO: 82688 - DNA, 25 bp, Homo sapien
tagtccaacgaacagatgtgcctga

SEQ ID NO: 82689 - DNA, 25 bp, Homo sapien
ccacctctgggtcagctccctggag

SEQ ID NO: 82690 - DNA, 25 bp, Homo sapien
ctcttcaactgtggagaaggcgttc

SEQ ID NO: 82691 - DNA, 25 bp, Homo sapien
gcgttcagagactcatgcaggagca

SEQ ID NO: 82692 - DNA, 25 bp, Homo sapien
ccgggcttccaaagtgtgtactttc

SEQ ID NO: 82693 - DNA, 25 bp, Homo sapien
gggggcttaagtggaatgattctta

SEQ ID NO: 82694 - DNA, 25 bp, Homo sapien
aggtgaccggcggctttctcagttt

SEQ ID NO: 82695 - DNA, 25 bp, Homo sapien
gaatgcactggtctaatgttggggg

SEQ ID NO: 82696 - DNA, 25 bp, Homo sapien
gtgcggccccactctgccccagaat

SEQ ID NO: 82697 - DNA, 25 bp, Homo sapien
gcaggagcacaagttaaaggttgct

SEQ ID NO: 82698 - DNA, 25 bp, Homo sapien
actggaaaaatacctcgaagcaatc

SEQ ID NO: 82699 - DNA, 25 bp, Homo sapien
aaaggttgctcgcctggacaacata

SEQ ID NO: 82700 - DNA, 25 bp, Homo sapien
attcctgacacgaatgcactggtct

SEQ ID NO: 82701 - DNA, 25 bp, Homo sapien
caccaaggacttagatgtttttaac

SEQ ID NO: 82702 - DNA, 25 bp, Homo sapien
gttaaaaacatctaagtccttggtg

SEQ ID NO: 82703 - DNA, 25 bp, Homo sapien
gtggggtatctcgctgctctgacct

SEQ ID NO: 82704 - DNA, 25 bp, Homo sapien
catttggttacagtaggtggagctg

SEQ ID NO: 82705 - DNA, 25 bp, Homo sapien
gagccgtttgtcaggcggcagtctg

SEQ ID NO: 82706 - DNA, 25 bp, Homo sapien
gcagtctgtgatgtgcatgctggag

SEQ ID NO: 82707 - DNA, 25 bp, Homo sapien
aggtagagtcctccacagaagcatc

SEQ ID NO: 82708 - DNA, 25 bp, Homo sapien
ggctcgtgcacaaaggtgttcactg

SEQ ID NO: 82709 - DNA, 25 bp, Homo sapien
tcttggcccgggattccttgcccag

SEQ ID NO: 82710 - DNA, 25 bp, Homo sapien
tgggggaactgtctgagtccatatg

SEQ ID NO: 82711 - DNA, 25 bp, Homo sapien
aagcatcaaagtggactggcacata

SEQ ID NO: 82712 - DNA, 25 bp, Homo sapien
cactggtttgcaccgcccctgtgtc

SEQ ID NO: 82713 - DNA, 25 bp, Homo sapien
tctggacatctaccaggggctcgtg

SEQ ID NO: 82714 - DNA, 25 bp, Homo sapien
gttggtattaatataggaagtgtat

SEQ ID NO: 82715 - DNA, 25 bp, Homo sapien
atacacttcctatattaataccaac

SEQ ID NO: 82716 - DNA, 25 bp, Homo sapien
gatagtgtccctgtacagagaggaa

SEQ ID NO: 82717 - DNA, 25 bp, Homo sapien
ccctgtacagagaggaaataacgta

SEQ ID NO: 82718 - DNA, 25 bp, Homo sapien
agtgtccctgtacagagaggaaata

SEQ ID NO: 82719 - DNA, 25 bp, Homo sapien
tctgtctcctggccgttgatagtgt

SEQ ID NO: 82720 - DNA, 25 bp, Homo sapien
tgtagcttatgtttgaatcagcttc

SEQ ID NO: 82721 - DNA, 25 bp, Homo sapien
ataacgtagtataatatgtagctta

SEQ ID NO: 82722 - DNA, 25 bp, Homo sapien
ggggccaagcaagaatgattctatc

SEQ ID NO: 82723 - DNA, 25 bp, Homo sapien
tctttctgaataggaatggagaaga

SEQ ID NO: 82724 - DNA, 25 bp, Homo sapien
tacagagaggaaataacgtagtata

SEQ ID NO: 82725 - DNA, 25 bp, Homo sapien
aggctggtctcggacacttgaattc

SEQ ID NO: 82726 - DNA, 25 bp, Homo sapien
tggtctcggacacttgaattcaagc

SEQ ID NO: 82727 - DNA, 25 bp, Homo sapien
ggtcgaaccagaacacatagacgct

SEQ ID NO: 82728 - DNA, 25 bp, Homo sapien
agcgtctatgtgttctggttcgacc

SEQ ID NO: 82729 - DNA, 25 bp, Homo sapien
gacccgtggaggatcctacgtgcag

SEQ ID NO: 82730 - DNA, 25 bp, Homo sapien
ctgcacgtaggatcctccacgggtc

SEQ ID NO: 82731 - DNA, 25 bp, Homo sapien
ggcactgacagagtttgaggtgtct

SEQ ID NO: 82732 - DNA, 25 bp, Homo sapien
gttatctgcaaccaggaaaggagtg

SEQ ID NO: 82733 - DNA, 25 bp, Homo sapien
gcagcttccttcagggaaacctgtc

SEQ ID NO: 82734 - DNA, 25 bp, Homo sapien
agaggctcatctcagtgtgagcagc

SEQ ID NO: 82735 - DNA, 25 bp, Homo sapien
gattctctgccagaatgccagggca

SEQ ID NO: 82736 - DNA, 25 bp, Homo sapien
tttccattgaaaaactagagatagt

SEQ ID NO: 82737 - DNA, 25 bp, Homo sapien
agcgcataattttaagacgaccctg

SEQ ID NO: 82738 - DNA, 25 bp, Homo sapien
gtgagaactggtgaggattctctgc

SEQ ID NO: 82739 - DNA, 25 bp, Homo sapien
cctgtttgccaggacgaagacatgg

SEQ ID NO: 82740 - DNA, 25 bp, Homo sapien
taagtaatgccttttgagtgctccc

SEQ ID NO: 82741 - DNA, 25 bp, Homo sapien
ttcagggaaacctgtcctggcagag

SEQ ID NO: 82742 - DNA, 25 bp, Homo sapien
gaaagactacatatattatacttat

SEQ ID NO: 82743 - DNA, 25 bp, Homo sapien
ataagtataatatatgtagtctttc

SEQ ID NO: 82744 - DNA, 25 bp, Homo sapien
agaaagactacatatattatactta

SEQ ID NO: 82745 - DNA, 25 bp, Homo sapien
taagtataatatatgtagtctttct

SEQ ID NO: 82746 - DNA, 25 bp, Homo sapien
aagaaagactacatatattatactt

SEQ ID NO: 82747 - DNA, 25 bp, Homo sapien
aagtataatatatgtagtctttctt

SEQ ID NO: 82748 - DNA, 25 bp, Homo sapien
aaagaaagactacatatattatact

SEQ ID NO: 82749 - DNA, 25 bp, Homo sapien
agtataatatatgtagtctttcttt

SEQ ID NO: 82750 - DNA, 25 bp, Homo sapien
tcccgcgcctctcgcgtgactcgag

SEQ ID NO: 82751 - DNA, 25 bp, Homo sapien
ctcgagtcacgcgagaggcgcggga

SEQ ID NO: 82752 - DNA, 25 bp, Homo sapien
gtgctggccctgtgacccggcggaa

SEQ ID NO: 82753 - DNA, 25 bp, Homo sapien
ttccgccgggtcacagggccagcac

SEQ ID NO: 82754 - DNA, 25 bp, Homo sapien
actgggtccgcgaccagcccgtcta

SEQ ID NO: 82755 - DNA, 25 bp, Homo sapien
tagacgggctggtcgcggacccagt

SEQ ID NO: 82756 - DNA, 25 bp, Homo sapien
gtggcggcgcccagccctcgacgtc

SEQ ID NO: 82757 - DNA, 25 bp, Homo sapien
gacgtcgagggctgggcgccgccac

SEQ ID NO: 82758 - DNA, 25 bp, Homo sapien
ctgaggtggcggcgcccagccctcg

SEQ ID NO: 82759 - DNA, 25 bp, Homo sapien
cgagggctgggcgccgccacctcag

SEQ ID NO: 82760 - DNA, 25 bp, Homo sapien
gcgggtgcggcacctgtacgagcgg

SEQ ID NO: 82761 - DNA, 25 bp, Homo sapien
ccgctcgtacaggtgccgcacccgc

SEQ ID NO: 82762 - DNA, 25 bp, Homo sapien
cgacgtgcgggcccgggtgttcgag

SEQ ID NO: 82763 - DNA, 25 bp, Homo sapien
ctcgaacacccgggcccgcacgtcg

SEQ ID NO: 82764 - DNA, 25 bp, Homo sapien
attgtatctgttatactcgtaacac

SEQ ID NO: 82765 - DNA, 25 bp, Homo sapien
gtgttacgagtataacagatacaat

SEQ ID NO: 82766 - DNA, 25 bp, Homo sapien
cactccgggtatcccgtgttatgac

SEQ ID NO: 82767 - DNA, 25 bp, Homo sapien
gtcataacacgggatacccggagtg

SEQ ID NO: 82768 - DNA, 25 bp, Homo sapien
atactaaactataaaacatgtcatg

SEQ ID NO: 82769 - DNA, 25 bp, Homo sapien
catgacatgttttatagtttagtat

SEQ ID NO: 82770 - DNA, 25 bp, Homo sapien
aatactaaactataaaacatgtcat

SEQ ID NO: 82771 - DNA, 25 bp, Homo sapien
atgacatgttttatagtttagtatt

SEQ ID NO: 82772 - DNA, 25 bp, Homo sapien
ataatactaaactataaaacatgtc

SEQ ID NO: 82773 - DNA, 25 bp, Homo sapien
gacatgttttatagtttagtattat

SEQ ID NO: 82774 - DNA, 25 bp, Homo sapien
aagtgtgactgactctaaacatcgc

SEQ ID NO: 82775 - DNA, 25 bp, Homo sapien
gcgatgtttagagtcagtcacactt

SEQ ID NO: 82776 - DNA, 25 bp, Homo sapien
ggcccctctgatttcgaccccagat

SEQ ID NO: 82777 - DNA, 25 bp, Homo sapien
atctggggtcgaaatcagaggggcc

SEQ ID NO: 82778 - DNA, 25 bp, Homo sapien
cacgacccttggcagagaccggaca

SEQ ID NO: 82779 - DNA, 25 bp, Homo sapien
tgtccggtctctgccaagggtcgtg

SEQ ID NO: 82780 - DNA, 25 bp, Homo sapien
cgtgtaaacgacattcccagtttat

SEQ ID NO: 82781 - DNA, 25 bp, Homo sapien
ataaactgggaatgtcgtttacacg

SEQ ID NO: 82782 - DNA, 25 bp, Homo sapien
cttgtgcctctttttatccttagga

SEQ ID NO: 82783 - DNA, 25 bp, Homo sapien
cgctttttctgaaacccgaggctgg

SEQ ID NO: 82784 - DNA, 25 bp, Homo sapien
tcctgttgctgtcgccgattaagtt

SEQ ID NO: 82785 - DNA, 25 bp, Homo sapien
ggacccaagacacctttaacaatag

SEQ ID NO: 82786 - DNA, 25 bp, Homo sapien
aacaaggctttggtattccgctggc

SEQ ID NO: 82787 - DNA, 25 bp, Homo sapien
ggcataataccaaaccggttccagg

SEQ ID NO: 82788 - DNA, 25 bp, Homo sapien
tcgaacacaccaagccgctaatgag

SEQ ID NO: 82789 - DNA, 25 bp, Homo sapien
gaggggaagaaccacaaccaggcat

SEQ ID NO: 82790 - DNA, 25 bp, Homo sapien
tgggacccagagtcacaaccaaatt

SEQ ID NO: 82791 - DNA, 25 bp, Homo sapien
tttccttcttgtttcagaacagcac

SEQ ID NO: 82792 - DNA, 25 bp, Homo sapien
tattatttatgtctgccgtatttta

SEQ ID NO: 82793 - DNA, 25 bp, Homo sapien
tcctaaggataaaaagaggcacaag

SEQ ID NO: 82794 - DNA, 25 bp, Homo sapien
ctattgttaaaggtgtcttgggtcc

SEQ ID NO: 82795 - DNA, 25 bp, Homo sapien
aatttggttgtgactctgggtccca

SEQ ID NO: 82796 - DNA, 25 bp, Homo sapien
aacttaatcggcgacagcaacagga

SEQ ID NO: 82797 - DNA, 25 bp, Homo sapien
ccagcctcgggtttcagaaaaagcg

SEQ ID NO: 82798 - DNA, 25 bp, Homo sapien
gtgctgttctgaaacaagaaggaaa

SEQ ID NO: 82799 - DNA, 25 bp, Homo sapien
atgcctggttgtggttcttcccctc

SEQ ID NO: 82800 - DNA, 25 bp, Homo sapien
ctcattagcggcttggtgtgttcga

SEQ ID NO: 82801 - DNA, 25 bp, Homo sapien
gccagcggaataccaaagccttgtt

SEQ ID NO: 82802 - DNA, 25 bp, Homo sapien
taaaatacggcagacataaataata

SEQ ID NO: 82803 - DNA, 25 bp, Homo sapien
cctggaaccggtttggtattatgcc

SEQ ID NO: 82804 - DNA, 25 bp, Homo sapien
aggaggaaactgagaaacaccagtc

SEQ ID NO: 82805 - DNA, 25 bp, Homo sapien
gactggtgtttctcagtttcctcct

SEQ ID NO: 82806 - DNA, 25 bp, Homo sapien
ctcgacagtctgaagttttccgccg

SEQ ID NO: 82807 - DNA, 25 bp, Homo sapien
cggcggaaaacttcagactgtcgag

SEQ ID NO: 82808 - DNA, 25 bp, Homo sapien
tactcagtaccgacaccccggtcag

SEQ ID NO: 82809 - DNA, 25 bp, Homo sapien
ctgaccggggtgtcggtactgagta

SEQ ID NO: 82810 - DNA, 25 bp, Homo sapien
agaaacatttatatttgcagaacac

SEQ ID NO: 82811 - DNA, 25 bp, Homo sapien
gtgttctgcaaatataaatgtttct

SEQ ID NO: 82812 - DNA, 25 bp, Homo sapien
actaaagtctttacaataatactac

SEQ ID NO: 82813 - DNA, 25 bp, Homo sapien
gtagtattattgtaaagactttagt

SEQ ID NO: 82814 - DNA, 25 bp, Homo sapien
cgtcctgcgttaacaagacaggagg

SEQ ID NO: 82815 - DNA, 25 bp, Homo sapien
cctcctgtcttgttaacgcaggacg

SEQ ID NO: 82816 - DNA, 25 bp, Homo sapien
ggggtctctcagtcgcactcccggg

SEQ ID NO: 82817 - DNA, 25 bp, Homo sapien
cccgggagtgcgactgagagacccc

SEQ ID NO: 82818 - DNA, 25 bp, Homo sapien
gtgattcattgaaaaattgttagta

SEQ ID NO: 82819 - DNA, 25 bp, Homo sapien
tactaacaatttttcaatgaatcac

SEQ ID NO: 82820 - DNA, 25 bp, Homo sapien
agtgattcattgaaaaattgttagt

SEQ ID NO: 82821 - DNA, 25 bp, Homo sapien
actaacaatttttcaatgaatcact

SEQ ID NO: 82822 - DNA, 25 bp, Homo sapien
gtatttttatttaataggtatccaa

SEQ ID NO: 82823 - DNA, 25 bp, Homo sapien
ttggatacctattaaataaaaatac

SEQ ID NO: 82824 - DNA, 25 bp, Homo sapien
tgtatttttatttaataggtatcca

SEQ ID NO: 82825 - DNA, 25 bp, Homo sapien
tggatacctattaaataaaaataca

SEQ ID NO: 82826 - DNA, 25 bp, Homo sapien
tctcttgaagtctccggcggttctg

SEQ ID NO: 82827 - DNA, 25 bp, Homo sapien
cagaaccgccggagacttcaagaga

SEQ ID NO: 82828 - DNA, 25 bp, Homo sapien
gatcaagaaaggtggctcgacgttg

SEQ ID NO: 82829 - DNA, 25 bp, Homo sapien
caacgtcgagccacctttcttgatc

SEQ ID NO: 82830 - DNA, 25 bp, Homo sapien
gagcacttgtaagtttattgttact

SEQ ID NO: 82831 - DNA, 25 bp, Homo sapien
agtaacaataaacttacaagtgctc

SEQ ID NO: 82832 - DNA, 25 bp, Homo sapien
tagttcaggttctccatcttgacat

SEQ ID NO: 82833 - DNA, 25 bp, Homo sapien
atgtcaagatggagaacctgaacta

SEQ ID NO: 82834 - DNA, 25 bp, Homo sapien
cattctggtagaaaataatacgagg

SEQ ID NO: 82835 - DNA, 25 bp, Homo sapien
cctcgtattattttctaccagaatg

SEQ ID NO: 82836 - DNA, 25 bp, Homo sapien
gcgacttccgagcacttcgggccgt

SEQ ID NO: 82837 - DNA, 25 bp, Homo sapien
acggcccgaagtgctcggaagtcgc

SEQ ID NO: 82838 - DNA, 25 bp, Homo sapien
taagagaaatgttagtctgatttcg

SEQ ID NO: 82839 - DNA, 25 bp, Homo sapien
cgaaatcagactaacatttctctta

SEQ ID NO: 82840 - DNA, 25 bp, Homo sapien
gtccgtgcggtgtacacgacacacg

SEQ ID NO: 82841 - DNA, 25 bp, Homo sapien
cgtgtgtcgtgtacaccgcacggac

SEQ ID NO: 82842 - DNA, 25 bp, Homo sapien
caccaggtcactggctcgcccgtgt

SEQ ID NO: 82843 - DNA, 25 bp, Homo sapien
acacgggcgagccagtgacctggtg

SEQ ID NO: 82844 - DNA, 25 bp, Homo sapien
ccgataaggtcttggactcgaaata

SEQ ID NO: 82845 - DNA, 25 bp, Homo sapien
tatttcgagtccaagaccttatcgg

SEQ ID NO: 82846 - DNA, 25 bp, Homo sapien
taccattatactccaacgctcaaat

SEQ ID NO: 82847 - DNA, 25 bp, Homo sapien
atttgagcgttggagtataatggta

SEQ ID NO: 82848 - DNA, 25 bp, Homo sapien
cagggtttcgatgttgtgtgaagtc

SEQ ID NO: 82849 - DNA, 25 bp, Homo sapien
gacttcacacaacatcgaaaccctg

SEQ ID NO: 82850 - DNA, 25 bp, Homo sapien
ttcggtattccggactaactcatgt

SEQ ID NO: 82851 - DNA, 25 bp, Homo sapien
acatgagttagtccggaataccgaa

SEQ ID NO: 82852 - DNA, 25 bp, Homo sapien
cgtgaacccggttcagacatgagag

SEQ ID NO: 82853 - DNA, 25 bp, Homo sapien
ctctcatgtctgaaccgggttcacg

SEQ ID NO: 82854 - DNA, 25 bp, Homo sapien
ggaggagtatcttgtataacgttac

SEQ ID NO: 82855 - DNA, 25 bp, Homo sapien
gtaacgttatacaagatactcctcc

SEQ ID NO: 82856 - DNA, 25 bp, Homo sapien
atgaccctcttaacaggcatcacaa

SEQ ID NO: 82857 - DNA, 25 bp, Homo sapien
ttgtgatgcctgttaagagggtcat

SEQ ID NO: 82858 - DNA, 25 bp, Homo sapien
tcgtccaagaggatacgggtttgac

SEQ ID NO: 82859 - DNA, 25 bp, Homo sapien
gtcaaacccgtatcctcttggacga

SEQ ID NO: 82860 - DNA, 25 bp, Homo sapien
gcggcgtttacgagacccacgtcct

SEQ ID NO: 82861 - DNA, 25 bp, Homo sapien
aggacgtgggtctcgtaaacgccgc

SEQ ID NO: 82862 - DNA, 25 bp, Homo sapien
ttttataaactcaagtcagtcaacg

SEQ ID NO: 82863 - DNA, 25 bp, Homo sapien
cgttgactgacttgagtttataaaa

SEQ ID NO: 82864 - DNA, 25 bp, Homo sapien
aggtcgcagacaagtcaggctaagt

SEQ ID NO: 82865 - DNA, 25 bp, Homo sapien
acttagcctgacttgtctgcgacct

SEQ ID NO: 82866 - DNA, 25 bp, Homo sapien
cagttctcacggtcgtttgtcgggt

SEQ ID NO: 82867 - DNA, 25 bp, Homo sapien
acccgacaaacgaccgtgagaactg

SEQ ID NO: 82868 - DNA, 25 bp, Homo sapien
acgtttaggatgacgacttcagtac

SEQ ID NO: 82869 - DNA, 25 bp, Homo sapien
gtactgaagtcgtcatcctaaacgt

SEQ ID NO: 82870 - DNA, 25 bp, Homo sapien
gggagctcccctggccgtggacgcg

SEQ ID NO: 82871 - DNA, 25 bp, Homo sapien
cgcgtccacggccaggggagctccc

SEQ ID NO: 82872 - DNA, 25 bp, Homo sapien
cggggagctcccctggccgtggacg

SEQ ID NO: 82873 - DNA, 25 bp, Homo sapien
cgtccacggccaggggagctccccg

SEQ ID NO: 82874 - DNA, 25 bp, Homo sapien
atccaagagaaataacgccgtccgg

SEQ ID NO: 82875 - DNA, 25 bp, Homo sapien
ccggacggcgttatttctcttggat

SEQ ID NO: 82876 - DNA, 25 bp, Homo sapien
agaataacgacttagaacttctcaa

SEQ ID NO: 82877 - DNA, 25 bp, Homo sapien
ttgagaagttctaagtcgttattct

SEQ ID NO: 82878 - DNA, 25 bp, Homo sapien
tatcttcacagtttataattatcgt

SEQ ID NO: 82879 - DNA, 25 bp, Homo sapien
acgataattataaactgtgaagata

SEQ ID NO: 82880 - DNA, 25 bp, Homo sapien
acgaggtcgacacacttactcagta

SEQ ID NO: 82881 - DNA, 25 bp, Homo sapien
tactgagtaagtgtgtcgacctcgt

SEQ ID NO: 82882 - DNA, 25 bp, Homo sapien
tcccgacttggaagagtcgaaggga

SEQ ID NO: 82883 - DNA, 25 bp, Homo sapien
tcccttcgactcttccaagtcggga

SEQ ID NO: 82884 - DNA, 25 bp, Homo sapien
agatatatatcattggttgctgctt

SEQ ID NO: 82885 - DNA, 25 bp, Homo sapien
gaagagagcaaatccaagtataagt

SEQ ID NO: 82886 - DNA, 25 bp, Homo sapien
ttgttagcccctacacagcacggaa

SEQ ID NO: 82887 - DNA, 25 bp, Homo sapien
attcatcgagcatcaaaaacgacca

SEQ ID NO: 82888 - DNA, 25 bp, Homo sapien
gcaaatccaagtataagtgaagaca

SEQ ID NO: 82889 - DNA, 25 bp, Homo sapien
tgtgtgacactctccacagatatat

SEQ ID NO: 82890 - DNA, 25 bp, Homo sapien
tctgggtgtccattgttagccccta

SEQ ID NO: 82891 - DNA, 25 bp, Homo sapien
ctgctttggaggttgaacgtccttc

SEQ ID NO: 82892 - DNA, 25 bp, Homo sapien
aattcccagcattcatcgagcatca

SEQ ID NO: 82893 - DNA, 25 bp, Homo sapien
ctctgcatctgattggatccctaga

SEQ ID NO: 82894 - DNA, 25 bp, Homo sapien
gaagacattcctctgaattcccagc

SEQ ID NO: 82895 - DNA, 25 bp, Homo sapien
ccatgaccaagatctatgggggacg

SEQ ID NO: 82896 - DNA, 25 bp, Homo sapien
ctgaaagtccccgaatgggtggata

SEQ ID NO: 82897 - DNA, 25 bp, Homo sapien
aacggcgtcatgcccagccacttca

SEQ ID NO: 82898 - DNA, 25 bp, Homo sapien
ccgcacgatgcctggagttactgta

SEQ ID NO: 82899 - DNA, 25 bp, Homo sapien
ctgtaaaagacgtgaaccagcagga

SEQ ID NO: 82900 - DNA, 25 bp, Homo sapien
tgctccctacgatgagaactggttc

SEQ ID NO: 82901 - DNA, 25 bp, Homo sapien
catgcccagccacttcagccgaggc

SEQ ID NO: 82902 - DNA, 25 bp, Homo sapien
acttcagccgaggctccaagagtgt

SEQ ID NO: 82903 - DNA, 25 bp, Homo sapien
gagaactggttctacacgcgagctg

SEQ ID NO: 82904 - DNA, 25 bp, Homo sapien
cacgcgagctgcttccacagcgcgg

SEQ ID NO: 82905 - DNA, 25 bp, Homo sapien
ggggttggctccatgaccaagatct

SEQ ID NO: 82906 - DNA, 25 bp, Homo sapien
aggaacagaccatccagtcgtgggt

SEQ ID NO: 82907 - DNA, 25 bp, Homo sapien
acccacgactggatggtctgttcct

SEQ ID NO: 82908 - DNA, 25 bp, Homo sapien
ttcgagtttctgtacaacttgtttt

SEQ ID NO: 82909 - DNA, 25 bp, Homo sapien
aaaacaagttgtacagaaactcgaa

SEQ ID NO: 82910 - DNA, 25 bp, Homo sapien
acgaggacgtgtcctgaacctcatc

SEQ ID NO: 82911 - DNA, 25 bp, Homo sapien
gatgaggttcaggacacgtcctcgt

SEQ ID NO: 82912 - DNA, 25 bp, Homo sapien
gaatcggtgtcaatacaataataat

SEQ ID NO: 82913 - DNA, 25 bp, Homo sapien
attattattgtattgacaccgattc

SEQ ID NO: 82914 - DNA, 25 bp, Homo sapien
ctaggagattcgtccctcggtttat

SEQ ID NO: 82915 - DNA, 25 bp, Homo sapien
ataaaccgagggacgaatctcctag

SEQ ID NO: 82916 - DNA, 25 bp, Homo sapien
ctaaagtccatatctcggtctaact

SEQ ID NO: 82917 - DNA, 25 bp, Homo sapien
agttagaccgagatatggactttag

SEQ ID NO: 82918 - DNA, 25 bp, Homo sapien
tctaattgtaagacgagttaataaa

SEQ ID NO: 82919 - DNA, 25 bp, Homo sapien
tttattaactcgtcttacaattaga

SEQ ID NO: 82920 - DNA, 25 bp, Homo sapien
ctgtgggacgattccacacaggacg

SEQ ID NO: 82921 - DNA, 25 bp, Homo sapien
cgtcctgtgtggaatcgtcccacag

SEQ ID NO: 82922 - DNA, 25 bp, Homo sapien
gcgcgagtgccctcgcgcaggactg

SEQ ID NO: 82923 - DNA, 25 bp, Homo sapien
cagtcctgcgcgagggcactcgcgc

SEQ ID NO: 82924 - DNA, 25 bp, Homo sapien
ggaaggcgcgagtgccctcgcgcag

SEQ ID NO: 82925 - DNA, 25 bp, Homo sapien
ctgcgcgagggcactcgcgccttcc

SEQ ID NO: 82926 - DNA, 25 bp, Homo sapien
ttgggcttctcacagtggttagagc

SEQ ID NO: 82927 - DNA, 25 bp, Homo sapien
ggaacttgagaggctcagaactcat

SEQ ID NO: 82928 - DNA, 25 bp, Homo sapien
gtctcattcacgtggaaagccagcc

SEQ ID NO: 82929 - DNA, 25 bp, Homo sapien
aagcccagctccgcaggttgcattt

SEQ ID NO: 82930 - DNA, 25 bp, Homo sapien
agggtaacgtgcctcacacaggaat

SEQ ID NO: 82931 - DNA, 25 bp, Homo sapien
ctgagactgcccagaaaagtctgac

SEQ ID NO: 82932 - DNA, 25 bp, Homo sapien
gcacaggaaatgcgtcactgagact

SEQ ID NO: 82933 - DNA, 25 bp, Homo sapien
gacgctgcagtgagtcccacagtta

SEQ ID NO: 82934 - DNA, 25 bp, Homo sapien
actgtgacctgggaaccaagcccag

SEQ ID NO: 82935 - DNA, 25 bp, Homo sapien
ctcgtgcctttaggataggacgctg

SEQ ID NO: 82936 - DNA, 25 bp, Homo sapien
ttctgactggctgtagcaccaaacc

SEQ ID NO: 82937 - DNA, 25 bp, Homo sapien
tttaaaccttatactatcttgacat

SEQ ID NO: 82938 - DNA, 25 bp, Homo sapien
atgtcaagatagtataaggtttaaa

SEQ ID NO: 82939 - DNA, 25 bp, Homo sapien
ataaattagcaagtgaattaacaag

SEQ ID NO: 82940 - DNA, 25 bp, Homo sapien
cttgttaattcacttgctaatttat

SEQ ID NO: 82941 - DNA, 25 bp, Homo sapien
ttagcaagtgaattaacaagaagag

SEQ ID NO: 82942 - DNA, 25 bp, Homo sapien
ctcttcttgttaattcacttgctaa

SEQ ID NO: 82943 - DNA, 25 bp, Homo sapien
tgacacacagtctacaagatacatc

SEQ ID NO: 82944 - DNA, 25 bp, Homo sapien
gatgtatcttgtagactgtgtgtca

SEQ ID NO: 82945 - DNA, 25 bp, Homo sapien
ttcttttcaatacgagagcagtaaa

SEQ ID NO: 82946 - DNA, 25 bp, Homo sapien
tttactgctctcgtattgaaaagaa

SEQ ID NO: 82947 - DNA, 25 bp, Homo sapien
gtcgagcggccctggtggactgcgc

SEQ ID NO: 82948 - DNA, 25 bp, Homo sapien
gcgcagtccaccagggccgctcgac

SEQ ID NO: 82949 - DNA, 25 bp, Homo sapien
cctggtggactgcgcccggaccgag

SEQ ID NO: 82950 - DNA, 25 bp, Homo sapien
ctcggtccgggcgcagtccaccagg

SEQ ID NO: 82951 - DNA, 25 bp, Homo sapien
gaggagaggcgcggcacggcacggg

SEQ ID NO: 82952 - DNA, 25 bp, Homo sapien
cccgtgccgtgccgcgcctctcctc

SEQ ID NO: 82953 - DNA, 25 bp, Homo sapien
gggcacggcaggtagcagtagtggg

SEQ ID NO: 82954 - DNA, 25 bp, Homo sapien
cccactactgctacctgccgtgccc

SEQ ID NO: 82955 - DNA, 25 bp, Homo sapien
ccgagtacaggacttggatgactga

SEQ ID NO: 82956 - DNA, 25 bp, Homo sapien
tcagtcatccaagtcctgtactcgg

SEQ ID NO: 82957 - DNA, 25 bp, Homo sapien
tacttttctgttttctcaccatttc

SEQ ID NO: 82958 - DNA, 25 bp, Homo sapien
gaaatggtgagaaaacagaaaagta

SEQ ID NO: 82959 - DNA, 25 bp, Homo sapien
tctcgccatgcttcgagactcgaac

SEQ ID NO: 82960 - DNA, 25 bp, Homo sapien
gttcgagtctcgaagcatggcgaga

SEQ ID NO: 82961 - DNA, 25 bp, Homo sapien
ggtcccgtgcaccagggtgggaccc

SEQ ID NO: 82962 - DNA, 25 bp, Homo sapien
gggtcccaccctggtgcacgggacc

SEQ ID NO: 82963 - DNA, 25 bp, Homo sapien
aggagacaacgtccttcgttgaaac

SEQ ID NO: 82964 - DNA, 25 bp, Homo sapien
gtttcaacgaaggacgttgtctcct

SEQ ID NO: 82965 - DNA, 25 bp, Homo sapien
ggcagggctgggtgcgcgcggcctc

SEQ ID NO: 82966 - DNA, 25 bp, Homo sapien
gaggccgcgcgcacccagccctgcc

SEQ ID NO: 82967 - DNA, 25 bp, Homo sapien
cggcagggctgggtgcgcgcggcct

SEQ ID NO: 82968 - DNA, 25 bp, Homo sapien
aggccgcgcgcacccagccctgccg

SEQ ID NO: 82969 - DNA, 25 bp, Homo sapien
gcggcagggctgggtgcgcgcggcc

SEQ ID NO: 82970 - DNA, 25 bp, Homo sapien
ggccgcgcgcacccagccctgccgc

SEQ ID NO: 82971 - DNA, 25 bp, Homo sapien
acgactatattctatcctagtggag

SEQ ID NO: 82972 - DNA, 25 bp, Homo sapien
ctccactaggatagaatatagtcgt

SEQ ID NO: 82973 - DNA, 25 bp, Homo sapien
ggtcttgcccccagcgagcgccctc

SEQ ID NO: 82974 - DNA, 25 bp, Homo sapien
gagggcgctcgctgggggcaagacc

SEQ ID NO: 82975 - DNA, 25 bp, Homo sapien
agggacccgcacgtcagagtctccc

SEQ ID NO: 82976 - DNA, 25 bp, Homo sapien
gggagactctgacgtgcgggtccct

SEQ ID NO: 82977 - DNA, 25 bp, Homo sapien
ttggccccggcctcgtgacaccggg

SEQ ID NO: 82978 - DNA, 25 bp, Homo sapien
cccggtgtcacgaggccggggccaa

SEQ ID NO: 82979 - DNA, 25 bp, Homo sapien
acgaacaacccgcaatataactaat

SEQ ID NO: 82980 - DNA, 25 bp, Homo sapien
attagttatattgcgggttgttcgt

SEQ ID NO: 82981 - DNA, 25 bp, Homo sapien
tcggtccaccggtacggctcgtcta

SEQ ID NO: 82982 - DNA, 25 bp, Homo sapien
tagacgagccgtaccggtggaccga

SEQ ID NO: 82983 - DNA, 25 bp, Homo sapien
gacgcccctgcaccgcccagagccc

SEQ ID NO: 82984 - DNA, 25 bp, Homo sapien
gggctctgggcggtgcaggggcgtc

SEQ ID NO: 82985 - DNA, 25 bp, Homo sapien
gacccaacagactcacccgttcgta

SEQ ID NO: 82986 - DNA, 25 bp, Homo sapien
tacgaacgggtgagtctgttgggtc

SEQ ID NO: 82987 - DNA, 25 bp, Homo sapien
gtagtgcacacggaatattcaggtc

SEQ ID NO: 82988 - DNA, 25 bp, Homo sapien
gacctgaatattccgtgtgcactac

SEQ ID NO: 82989 - DNA, 25 bp, Homo sapien
gcctggcatggtctccagactttca

SEQ ID NO: 82990 - DNA, 25 bp, Homo sapien
agactttcagcctggagcgaacctg

SEQ ID NO: 82991 - DNA, 25 bp, Homo sapien
gaaccatgtggcctccctcaacctg

SEQ ID NO: 82992 - DNA, 25 bp, Homo sapien
ctaccaggccttgctggtggatgag

SEQ ID NO: 82993 - DNA, 25 bp, Homo sapien
cctgctgctaccaggccttgctggt

SEQ ID NO: 82994 - DNA, 25 bp, Homo sapien
tttcccctaggggctgtaatctgat

SEQ ID NO: 82995 - DNA, 25 bp, Homo sapien
cagccccccacgccttcggctctcc

SEQ ID NO: 82996 - DNA, 25 bp, Homo sapien
actcctcttccagatcctggggcag

SEQ ID NO: 82997 - DNA, 25 bp, Homo sapien
gggctgtaatctgatccctggggac

SEQ ID NO: 82998 - DNA, 25 bp, Homo sapien
ttcggctctccttccaagagctcca

SEQ ID NO: 82999 - DNA, 25 bp, Homo sapien
ggcctccctcaacctggacaacatc

SEQ ID NO: 83000 - DNA, 25 bp, Homo sapien
tgtaaattcacttctttgtcctttt

SEQ ID NO: 83001 - DNA, 25 bp, Homo sapien
aaaaggacaaagaagtgaatttaca

SEQ ID NO: 83002 - DNA, 25 bp, Homo sapien
ccttgacgtatggtcgtctttcttt

SEQ ID NO: 83003 - DNA, 25 bp, Homo sapien
aaagaaagacgaccatacgtcaagg

SEQ ID NO: 83004 - DNA, 25 bp, Homo sapien
cccctccgcttcctcgggacgcgga

SEQ ID NO: 83005 - DNA, 25 bp, Homo sapien
tccgcgtcccgaggaagcggagggg

SEQ ID NO: 83006 - DNA, 25 bp, Homo sapien
ccagttattgccatgaaggatgtcg

SEQ ID NO: 83007 - DNA, 25 bp, Homo sapien
cgacatccttcatggcaataactgg

SEQ ID NO: 83008 - DNA, 25 bp, Homo sapien
agtcgtcgtctataaaacggctccc

SEQ ID NO: 83009 - DNA, 25 bp, Homo sapien
gggagccgttttatagacgacgact

SEQ ID NO: 83010 - DNA, 25 bp, Homo sapien
ctttcgatgtatgttggactaagta

SEQ ID NO: 83011 - DNA, 25 bp, Homo sapien
tacttagtccaacatacatcgaaag

SEQ ID NO: 83012 - DNA, 25 bp, Homo sapien
gtaaaatgaataacacgttacgagt

SEQ ID NO: 83013 - DNA, 25 bp, Homo sapien
actcgtaacgtgttattcattttac

SEQ ID NO: 83014 - DNA, 25 bp, Homo sapien
ccccgatatccgtggaaattacacc

SEQ ID NO: 83015 - DNA, 25 bp, Homo sapien
ggtgtaatttccacggatatcgggg

SEQ ID NO: 83016 - DNA, 25 bp, Homo sapien
agattttcagactaatcgatctccg

SEQ ID NO: 83017 - DNA, 25 bp, Homo sapien
cggagatcgattagtctgaaaatct

SEQ ID NO: 83018 - DNA, 25 bp, Homo sapien
ggctcagggactctggtgccaaatc

SEQ ID NO: 83019 - DNA, 25 bp, Homo sapien
ttgttttaagctttggcctctatcc

SEQ ID NO: 83020 - DNA, 25 bp, Homo sapien
catgactcatctgacggagctggcc

SEQ ID NO: 83021 - DNA, 25 bp, Homo sapien
ggcctctatccaggttattctgaca

SEQ ID NO: 83022 - DNA, 25 bp, Homo sapien
tagagcatctgaaaaccctggccaa

SEQ ID NO: 83023 - DNA, 25 bp, Homo sapien
taacagcatcttggcccatggggac

SEQ ID NO: 83024 - DNA, 25 bp, Homo sapien
ggacctacgcaacaacaagctcaac

SEQ ID NO: 83025 - DNA, 25 bp, Homo sapien
ctcttacggcaatttaggtttctca

SEQ ID NO: 83026 - DNA, 25 bp, Homo sapien
cctgaagcgccagagctcgttgggc

SEQ ID NO: 83027 - DNA, 25 bp, Homo sapien
tacgggggagactccaagttcctgg

SEQ ID NO: 83028 - DNA, 25 bp, Homo sapien
cacctggcacagaggcacggctgtg

SEQ ID NO: 83029 - DNA, 25 bp, Homo sapien
tgagaaacctaaattgccgtaagag

SEQ ID NO: 83030 - DNA, 25 bp, Homo sapien
gatttggcaccagagtccctgagcc

SEQ ID NO: 83031 - DNA, 25 bp, Homo sapien
ggccagctccgtcagatgagtcatg

SEQ ID NO: 83032 - DNA, 25 bp, Homo sapien
gcccaacgagctctggcgcttcagg

SEQ ID NO: 83033 - DNA, 25 bp, Homo sapien
ttggccagggttttcagatgctcta

SEQ ID NO: 83034 - DNA, 25 bp, Homo sapien
gtccccatgggccaagatgctgtta

SEQ ID NO: 83035 - DNA, 25 bp, Homo sapien
cacagccgtgcctctgtgccaggtg

SEQ ID NO: 83036 - DNA, 25 bp, Homo sapien
tgtcagaataacctggatagaggcc

SEQ ID NO: 83037 - DNA, 25 bp, Homo sapien
ccaggaacttggagtctcccccgta

SEQ ID NO: 83038 - DNA, 25 bp, Homo sapien
gttgagcttgttgttgcgtaggtcc

SEQ ID NO: 83039 - DNA, 25 bp, Homo sapien
ggatagaggccaaagcttaaaacaa

SEQ ID NO: 83040 - DNA, 25 bp, Homo sapien
tggccttggtgctggctcttccctg

SEQ ID NO: 83041 - DNA, 25 bp, Homo sapien
gctggtgctgattcgctgtcttggg

SEQ ID NO: 83042 - DNA, 25 bp, Homo sapien
ccggcgtccacgcattgccatggtg

SEQ ID NO: 83043 - DNA, 25 bp, Homo sapien
tgcaggatggcctgagtccctgctt

SEQ ID NO: 83044 - DNA, 25 bp, Homo sapien
ccgctggtgctgattcgctgtcttg

SEQ ID NO: 83045 - DNA, 25 bp, Homo sapien
cccctctccgagtgacaagtcccgg

SEQ ID NO: 83046 - DNA, 25 bp, Homo sapien
ttggtgctggctcttccctgcagac

SEQ ID NO: 83047 - DNA, 25 bp, Homo sapien
gggccggccctcgcatctctcccta

SEQ ID NO: 83048 - DNA, 25 bp, Homo sapien
cttcacgctcgtgccctcgacgcgg

SEQ ID NO: 83049 - DNA, 25 bp, Homo sapien
ggatggcctgagtccctgcttcttc

SEQ ID NO: 83050 - DNA, 25 bp, Homo sapien
atctctccctacgtgctgcagctgc

SEQ ID NO: 83051 - DNA, 25 bp, Homo sapien
ttattacacatgtgagcttagtaac

SEQ ID NO: 83052 - DNA, 25 bp, Homo sapien
gttactaagctcacatgtgtaataa

SEQ ID NO: 83053 - DNA, 25 bp, Homo sapien
agaatccctgggttaacgtcaattg

SEQ ID NO: 83054 - DNA, 25 bp, Homo sapien
caattgacgttaacccagggattct

SEQ ID NO: 83055 - DNA, 25 bp, Homo sapien
tagacgtgaaccaaatattcacttt

SEQ ID NO: 83056 - DNA, 25 bp, Homo sapien
aaagtgaatatttggttcacgtcta

SEQ ID NO: 83057 - DNA, 25 bp, Homo sapien
aggagacttgtctccacccgccaaa

SEQ ID NO: 83058 - DNA, 25 bp, Homo sapien
tttggcgggtggagacaagtctcct

SEQ ID NO: 83059 - DNA, 25 bp, Homo sapien
taaaaccgtaagtccgtgcgtcacc

SEQ ID NO: 83060 - DNA, 25 bp, Homo sapien
ggtgacgcacggacttacggtttta

SEQ ID NO: 83061 - DNA, 25 bp, Homo sapien
cctaaaggtacgtccgtatacagaa

SEQ ID NO: 83062 - DNA, 25 bp, Homo sapien
ttctgtatacggacgtacctttagg

SEQ ID NO: 83063 - DNA, 25 bp, Homo sapien
aattatcgtaaaggcaagagaaatt

SEQ ID NO: 83064 - DNA, 25 bp, Homo sapien
aatttctcttgcctttacgataatt

SEQ ID NO: 83065 - DNA, 25 bp, Homo sapien
gaaagaagggctggaaggaaacact

SEQ ID NO: 83066 - DNA, 25 bp, Homo sapien
agtgtttccttccagcccttctttc

SEQ ID NO: 83067 - DNA, 25 bp, Homo sapien
tggctgccgaccgagcgaacgcgaa

SEQ ID NO: 83068 - DNA, 25 bp, Homo sapien
ttcgcgttcgctcggtcggcagcca

SEQ ID NO: 83069 - DNA, 25 bp, Homo sapien
gggaatttgtatggggttattactc

SEQ ID NO: 83070 - DNA, 25 bp, Homo sapien
gagtaataaccccatacaaattccc

SEQ ID NO: 83071 - DNA, 25 bp, Homo sapien
gacgcgagcccggcacacccgagaa

SEQ ID NO: 83072 - DNA, 25 bp, Homo sapien
ttctcgggtgtgccgggctcgcgtc

SEQ ID NO: 83073 - DNA, 25 bp, Homo sapien
tttagtaaatgttgtcgaagtcttt

SEQ ID NO: 83074 - DNA, 25 bp, Homo sapien
aaagacttcgacaacatttactaaa

SEQ ID NO: 83075 - DNA, 25 bp, Homo sapien
gtcttatatcatctgtcgaaactag

SEQ ID NO: 83076 - DNA, 25 bp, Homo sapien
ctagtttcgacagatgatataagac

SEQ ID NO: 83077 - DNA, 25 bp, Homo sapien
taattaaacgtcctaccgaacacgc

SEQ ID NO: 83078 - DNA, 25 bp, Homo sapien
gcgtgttcggtaggacgtttaatta

SEQ ID NO: 83079 - DNA, 25 bp, Homo sapien
ttaagcacaagtagcagcagctcct

SEQ ID NO: 83080 - DNA, 25 bp, Homo sapien
cactaactagtgattcttctccaaa

SEQ ID NO: 83081 - DNA, 25 bp, Homo sapien
tttgaccctgaccactaactagtga

SEQ ID NO: 83082 - DNA, 25 bp, Homo sapien
gggcatcatggccctatgattaacc

SEQ ID NO: 83083 - DNA, 25 bp, Homo sapien
tcattttatcaaatcctctcttgcc

SEQ ID NO: 83084 - DNA, 25 bp, Homo sapien
cagcatcttcagttctccagtaaat

SEQ ID NO: 83085 - DNA, 25 bp, Homo sapien
aaatgatattgcgttcgtgcctcag

SEQ ID NO: 83086 - DNA, 25 bp, Homo sapien
tcaattcccctgtaacattcctgaa

SEQ ID NO: 83087 - DNA, 25 bp, Homo sapien
aaggactcagagccacacagaactt

SEQ ID NO: 83088 - DNA, 25 bp, Homo sapien
ggggctgttagcattgcgcagcatc

SEQ ID NO: 83089 - DNA, 25 bp, Homo sapien
gcacaagtttttctacactcagtgt

SEQ ID NO: 83090 - DNA, 25 bp, Homo sapien
ggcaagagaggatttgataaaatga

SEQ ID NO: 83091 - DNA, 25 bp, Homo sapien
aggagctgctgctacttgtgcttaa

SEQ ID NO: 83092 - DNA, 25 bp, Homo sapien
gatgctgcgcaatgctaacagcccc

SEQ ID NO: 83093 - DNA, 25 bp, Homo sapien
ttcaggaatgttacaggggaattga

SEQ ID NO: 83094 - DNA, 25 bp, Homo sapien
tttggagaagaatcactagttagtg

SEQ ID NO: 83095 - DNA, 25 bp, Homo sapien
acactgagtgtagaaaaacttgtgc

SEQ ID NO: 83096 - DNA, 25 bp, Homo sapien
ggttaatcatagggccatgatgccc

SEQ ID NO: 83097 - DNA, 25 bp, Homo sapien
aagttctgtgtggctctgagtcctt

SEQ ID NO: 83098 - DNA, 25 bp, Homo sapien
atttactggagaactgaagatgctg

SEQ ID NO: 83099 - DNA, 25 bp, Homo sapien
tcactagttagtggtcagggtcaaa

SEQ ID NO: 83100 - DNA, 25 bp, Homo sapien
ctgaggcacgaacgcaatatcattt

SEQ ID NO: 83101 - DNA, 25 bp, Homo sapien
cagaaacatgtacagggccacttct

SEQ ID NO: 83102 - DNA, 25 bp, Homo sapien
ttagagttgggcaagaggttacgca

SEQ ID NO: 83103 - DNA, 25 bp, Homo sapien
gcaaactccatgaatgtgttagagt

SEQ ID NO: 83104 - DNA, 25 bp, Homo sapien
gacatcacattgctgacaggcaaac

SEQ ID NO: 83105 - DNA, 25 bp, Homo sapien
tgttgacatcacattgctgacaggc

SEQ ID NO: 83106 - DNA, 25 bp, Homo sapien
cactctttcggaagtgctgctgttc

SEQ ID NO: 83107 - DNA, 25 bp, Homo sapien
cagtgggatgctcagtgcgcctcag

SEQ ID NO: 83108 - DNA, 25 bp, Homo sapien
gggatgctcagtgcgcctcagcagt

SEQ ID NO: 83109 - DNA, 25 bp, Homo sapien
tgcagtgggatgctcagtgcgcctc

SEQ ID NO: 83110 - DNA, 25 bp, Homo sapien
tcctgcagtgggatgctcagtgcgc

SEQ ID NO: 83111 - DNA, 25 bp, Homo sapien
attttgcatgtgtatcttcccaagt

SEQ ID NO: 83112 - DNA, 25 bp, Homo sapien
catttgggcttttggatagctaagg

SEQ ID NO: 83113 - DNA, 25 bp, Homo sapien
ctggccatcttccatttgggctttt

SEQ ID NO: 83114 - DNA, 25 bp, Homo sapien
gttcccattttgcatgtgtatcttc

SEQ ID NO: 83115 - DNA, 25 bp, Homo sapien
tgcatgcctgtagggagtctgtgtc

SEQ ID NO: 83116 - DNA, 25 bp, Homo sapien
tgggacactcgcctcttaacaatgg

SEQ ID NO: 83117 - DNA, 25 bp, Homo sapien
ctccactcacatgggacactcgcct

SEQ ID NO: 83118 - DNA, 25 bp, Homo sapien
actcacatgggacactcgcctctta

SEQ ID NO: 83119 - DNA, 25 bp, Homo sapien
tcactgaaatcatggaacccttatg

SEQ ID NO: 83120 - DNA, 25 bp, Homo sapien
tcaaggttacacaccattaacgaca

SEQ ID NO: 83121 - DNA, 25 bp, Homo sapien
caggtccttatcattggtccgtatt

SEQ ID NO: 83122 - DNA, 25 bp, Homo sapien
cgacaacagctgatccatatatttg

SEQ ID NO: 83123 - DNA, 25 bp, Homo sapien
gtatgattatctagcaagttcttca

SEQ ID NO: 83124 - DNA, 25 bp, Homo sapien
gttacttcaaccaactgacacagtt

SEQ ID NO: 83125 - DNA, 25 bp, Homo sapien
catcgttacttcaaccaactgacac

SEQ ID NO: 83126 - DNA, 25 bp, Homo sapien
tgccatcgttacttcaaccaactga

SEQ ID NO: 83127 - DNA, 25 bp, Homo sapien
cttgccatcgttacttcaaccaact

SEQ ID NO: 83128 - DNA, 25 bp, Homo sapien
gatgttcccataacccagtctgtca

SEQ ID NO: 83129 - DNA, 25 bp, Homo sapien
acatcatcatctgctgcttggtttg

SEQ ID NO: 83130 - DNA, 25 bp, Homo sapien
cagtctgtcaggtattctaccatct

SEQ ID NO: 83131 - DNA, 25 bp, Homo sapien
tgtcaggtattctaccatcttattc

SEQ ID NO: 83132 - DNA, 25 bp, Homo sapien
gcataataaaaaataggattcccag

SEQ ID NO: 83133 - DNA, 25 bp, Homo sapien
cgttttcaaagccttgatctcttct

SEQ ID NO: 83134 - DNA, 25 bp, Homo sapien
gaagccccagcttggtagaaaatac

SEQ ID NO: 83135 - DNA, 25 bp, Homo sapien
ggattcccagctttggaagccccag

SEQ ID NO: 83136 - DNA, 25 bp, Homo sapien
tagctttttctagatcaccacagag

SEQ ID NO: 83137 - DNA, 25 bp, Homo sapien
tcacggaaaccgaactgattgaatc

SEQ ID NO: 83138 - DNA, 25 bp, Homo sapien
caggtttcacggaaaccgaactgat

SEQ ID NO: 83139 - DNA, 25 bp, Homo sapien
gaactgattgaatctcactgaagta

SEQ ID NO: 83140 - DNA, 25 bp, Homo sapien
tgggcaaaccctgaggtgctcccca

SEQ ID NO: 83141 - DNA, 25 bp, Homo sapien
gtctggtggggcacggggccatcca

SEQ ID NO: 83142 - DNA, 25 bp, Homo sapien
cactgtctggtggggcacggggcca

SEQ ID NO: 83143 - DNA, 25 bp, Homo sapien
cccagaccctcagccaggtaggatg

SEQ ID NO: 83144 - DNA, 25 bp, Homo sapien
aggatgcccggaggatgccaggcag

SEQ ID NO: 83145 - DNA, 25 bp, Homo sapien
cagaccctcagccaggtaggatgcc

SEQ ID NO: 83146 - DNA, 25 bp, Homo sapien
gaccctcagccaggtaggatgcccg

SEQ ID NO: 83147 - DNA, 25 bp, Homo sapien
ctcagcaggaaggacagggatggct

SEQ ID NO: 83148 - DNA, 25 bp, Homo sapien
caggaaggacagggatggctgtcac

SEQ ID NO: 83149 - DNA, 25 bp, Homo sapien
cagcaggaaggacagggatggctgt

SEQ ID NO: 83150 - DNA, 25 bp, Homo sapien
gcaggaaggacagggatggctgtca

SEQ ID NO: 83151 - DNA, 25 bp, Homo sapien
ctttcacataagctttgacagcctg

SEQ ID NO: 83152 - DNA, 25 bp, Homo sapien
tcacataagctttgacagcctgccc

SEQ ID NO: 83153 - DNA, 25 bp, Homo sapien
gctgctttcacataagctttgacag

SEQ ID NO: 83154 - DNA, 25 bp, Homo sapien
tgctttcacataagctttgacagcc

SEQ ID NO: 83155 - DNA, 25 bp, Homo sapien
ccagggagcattgccttatgggctg

SEQ ID NO: 83156 - DNA, 25 bp, Homo sapien
gagcattgccttatgggctgtgact

SEQ ID NO: 83157 - DNA, 25 bp, Homo sapien
ggagcattgccttatgggctgtgac

SEQ ID NO: 83158 - DNA, 25 bp, Homo sapien
aggccagggagcattgccttatggg

SEQ ID NO: 83159 - DNA, 25 bp, Homo sapien
ggtaaaactggacgttattgcacaa

SEQ ID NO: 83160 - DNA, 25 bp, Homo sapien
tctgcataaaagctcctatgcacat

SEQ ID NO: 83161 - DNA, 25 bp, Homo sapien
tcattctgcttggtaaaactggacg

SEQ ID NO: 83162 - DNA, 25 bp, Homo sapien
aaagctcctatgcacatcattctgc

SEQ ID NO: 83163 - DNA, 25 bp, Homo sapien
tcagggttaacactgaaataatctt

SEQ ID NO: 83164 - DNA, 25 bp, Homo sapien
gggaaaatacattatatgaacacat

SEQ ID NO: 83165 - DNA, 25 bp, Homo sapien
taaaatatcaatcagggttaacact

SEQ ID NO: 83166 - DNA, 25 bp, Homo sapien
attactaaaatatcaatcagggtta

SEQ ID NO: 83167 - DNA, 25 bp, Homo sapien
gagaagcccccgagcagcactgacc

SEQ ID NO: 83168 - DNA, 25 bp, Homo sapien
gtgcccccaagtgcggagctccagg

SEQ ID NO: 83169 - DNA, 25 bp, Homo sapien
aggttgtgcccccaagtgcggagct

SEQ ID NO: 83170 - DNA, 25 bp, Homo sapien
cccaagtgcggagctccagggaccg

SEQ ID NO: 83171 - DNA, 25 bp, Homo sapien
ttgtgcccccaagtgcggagctcca

SEQ ID NO: 83172 - DNA, 25 bp, Homo sapien
agtcaccagagtggcgctgcctcat

SEQ ID NO: 83173 - DNA, 25 bp, Homo sapien
cggccagtcaccagagtggcgctgc

SEQ ID NO: 83174 - DNA, 25 bp, Homo sapien
cagtcaccagagtggcgctgcctca

SEQ ID NO: 83175 - DNA, 25 bp, Homo sapien
ggccggccagtcaccagagtggcgc

SEQ ID NO: 83176 - DNA, 25 bp, Homo sapien
tccaaactaatatcttgctgtcact

SEQ ID NO: 83177 - DNA, 25 bp, Homo sapien
cggatcttccggcagcggccatagg

SEQ ID NO: 83178 - DNA, 25 bp, Homo sapien
tggtgtacaacacttcacagtcctc

SEQ ID NO: 83179 - DNA, 25 bp, Homo sapien
aactaatatcttgctgtcactcttc

SEQ ID NO: 83180 - DNA, 25 bp, Homo sapien
actagccaggtctccttcttcacaa

SEQ ID NO: 83181 - DNA, 25 bp, Homo sapien
tcttcacaatattccattacaacgt

SEQ ID NO: 83182 - DNA, 25 bp, Homo sapien
tagccaggtctccttcttcacaata

SEQ ID NO: 83183 - DNA, 25 bp, Homo sapien
ttcacaatattccattacaacgtac

SEQ ID NO: 83184 - DNA, 25 bp, Homo sapien
gaacaaactcttcatctaagtattg

SEQ ID NO: 83185 - DNA, 25 bp, Homo sapien
aacaaactcttcatctaagtattgc

SEQ ID NO: 83186 - DNA, 25 bp, Homo sapien
gtaggacatgtgattcgtttgttca

SEQ ID NO: 83187 - DNA, 25 bp, Homo sapien
ggacatgtgattcgtttgttcagga

SEQ ID NO: 83188 - DNA, 25 bp, Homo sapien
catgtgattcgtttgttcaggagac

SEQ ID NO: 83189 - DNA, 25 bp, Homo sapien
gacatgtgattcgtttgttcaggag

SEQ ID NO: 83190 - DNA, 25 bp, Homo sapien
gaggcattaatgcatgcgactcata

SEQ ID NO: 83191 - DNA, 25 bp, Homo sapien
tctaaatggaggcattaatgcatgc

SEQ ID NO: 83192 - DNA, 25 bp, Homo sapien
ctggctaaaagctctaaatggaggc

SEQ ID NO: 83193 - DNA, 25 bp, Homo sapien
gcgagttctttctggctaaaagctc

SEQ ID NO: 83194 - DNA, 25 bp, Homo sapien
caattcatcagagtaacggtataga

SEQ ID NO: 83195 - DNA, 25 bp, Homo sapien
tcatcagagtaacggtatagaattc

SEQ ID NO: 83196 - DNA, 25 bp, Homo sapien
tcattcaattcatcagagtaacggt

SEQ ID NO: 83197 - DNA, 25 bp, Homo sapien
atcagagtaacggtatagaattcac

SEQ ID NO: 83198 - DNA, 25 bp, Homo sapien
cttcaacagaaggtcgatggtaatc

SEQ ID NO: 83199 - DNA, 25 bp, Homo sapien
tttcttcaacagaaggtcgatggta

SEQ ID NO: 83200 - DNA, 25 bp, Homo sapien
ctaattgtcgccctcttctctcaag

SEQ ID NO: 83201 - DNA, 25 bp, Homo sapien
tctggctctcctaattgtcgccctc

SEQ ID NO: 83202 - DNA, 25 bp, Homo sapien
gcaagatgtcatggtattaatgacc

SEQ ID NO: 83203 - DNA, 25 bp, Homo sapien
aagctaacagatttgaactacagag

SEQ ID NO: 83204 - DNA, 25 bp, Homo sapien
aaatctagacatgacaattgtaagc

SEQ ID NO: 83205 - DNA, 25 bp, Homo sapien
cacacaggattaaaagcccaaccaa

SEQ ID NO: 83206 - DNA, 25 bp, Homo sapien
aagatgaccaccaaaggcttcctca

SEQ ID NO: 83207 - DNA, 25 bp, Homo sapien
ttaaaagatgaccaccaaaggcttc

SEQ ID NO: 83208 - DNA, 25 bp, Homo sapien
ctgttaaaagatgaccaccaaaggc

SEQ ID NO: 83209 - DNA, 25 bp, Homo sapien
aaaagatgaccaccaaaggcttcct

SEQ ID NO: 83210 - DNA, 25 bp, Homo sapien
ctgccacgtggcctcaggtggttct

SEQ ID NO: 83211 - DNA, 25 bp, Homo sapien
gttggtgaagaagtcagcctcctgg

SEQ ID NO: 83212 - DNA, 25 bp, Homo sapien
cgtggcctcaggtggttctgcagtt

SEQ ID NO: 83213 - DNA, 25 bp, Homo sapien
tctgcagttggtgaagaagtcagcc

SEQ ID NO: 83214 - DNA, 25 bp, Homo sapien
tttgctgggtacataaataatttct

SEQ ID NO: 83215 - DNA, 25 bp, Homo sapien
catgcattatgaagcacaatttaag

SEQ ID NO: 83216 - DNA, 25 bp, Homo sapien
gcattatgaagcacaatttaagtgt

SEQ ID NO: 83217 - DNA, 25 bp, Homo sapien
tcaaagatctttaggtaactcaaaa

SEQ ID NO: 83218 - DNA, 25 bp, Homo sapien
cataggcaaagactgtggcgacctc

SEQ ID NO: 83219 - DNA, 25 bp, Homo sapien
tactttcagatcacatgttggttgg

SEQ ID NO: 83220 - DNA, 25 bp, Homo sapien
cacattcacgttctggaggatgaca

SEQ ID NO: 83221 - DNA, 25 bp, Homo sapien
cctcaagtgtagttgaagattgtca

SEQ ID NO: 83222 - DNA, 25 bp, Homo sapien
ttgctctttggggactagccctcat

SEQ ID NO: 83223 - DNA, 25 bp, Homo sapien
gactgtgtcaccactaggagccatt

SEQ ID NO: 83224 - DNA, 25 bp, Homo sapien
tgcttgcttgctctttggggactag

SEQ ID NO: 83225 - DNA, 25 bp, Homo sapien
accactaggagccattagggcttct

SEQ ID NO: 83226 - DNA, 25 bp, Homo sapien
tgtccacaagcttgctctacacatc

SEQ ID NO: 83227 - DNA, 25 bp, Homo sapien
acttgaggatgtccacaagcttgct

SEQ ID NO: 83228 - DNA, 25 bp, Homo sapien
acaagcttgctctacacatcctcat

SEQ ID NO: 83229 - DNA, 25 bp, Homo sapien
gaggatgtccacaagcttgctctac

SEQ ID NO: 83230 - DNA, 25 bp, Homo sapien
tgtgatagggcagcctcgagtgacc

SEQ ID NO: 83231 - DNA, 25 bp, Homo sapien
gaagttcttgacaagtggaagtcct

SEQ ID NO: 83232 - DNA, 25 bp, Homo sapien
agttcttgacaagtggaagtcctct

SEQ ID NO: 83233 - DNA, 25 bp, Homo sapien
cagcctcgagtgaccaaaacaggta

SEQ ID NO: 83234 - DNA, 25 bp, Homo sapien
cagccctgagaaaggtttttcagtt

SEQ ID NO: 83235 - DNA, 25 bp, Homo sapien
ctgcagccctgagaaaggtttttca

SEQ ID NO: 83236 - DNA, 25 bp, Homo sapien
gcagccctgagaaaggtttttcagt

SEQ ID NO: 83237 - DNA, 25 bp, Homo sapien
tgcagccctgagaaaggtttttcag

SEQ ID NO: 83238 - DNA, 25 bp, Homo sapien
aatcaatggcggttactcagttcac

SEQ ID NO: 83239 - DNA, 25 bp, Homo sapien
tcagttcactagtcagcaacgtgtg

SEQ ID NO: 83240 - DNA, 25 bp, Homo sapien
gatgttttacattagccagcttgac

SEQ ID NO: 83241 - DNA, 25 bp, Homo sapien
caaaggagactcttatacatgactt

SEQ ID NO: 83242 - DNA, 25 bp, Homo sapien
tggcatgggctctatagctggtcaa

SEQ ID NO: 83243 - DNA, 25 bp, Homo sapien
taagaacaaggttcaatgtggccct

SEQ ID NO: 83244 - DNA, 25 bp, Homo sapien
cataataaggtcagctgaatggctt

SEQ ID NO: 83245 - DNA, 25 bp, Homo sapien
tcctgctacgaacaacaatcctggc

SEQ ID NO: 83246 - DNA, 25 bp, Homo sapien
ctggaactcctcccgtgccggctgg

SEQ ID NO: 83247 - DNA, 25 bp, Homo sapien
tggaactcctcccgtgccggctggg

SEQ ID NO: 83248 - DNA, 25 bp, Homo sapien
ggaactcctcccgtgccggctgggc

SEQ ID NO: 83249 - DNA, 25 bp, Homo sapien
gctgtcaaagcatcagcccggacca

SEQ ID NO: 83250 - DNA, 25 bp, Homo sapien
gggctccaagcctcgccacagccgc

SEQ ID NO: 83251 - DNA, 25 bp, Homo sapien
ggctccaagcctcgccacagccgcc

SEQ ID NO: 83252 - DNA, 25 bp, Homo sapien
agggctccaagcctcgccacagccg

SEQ ID NO: 83253 - DNA, 25 bp, Homo sapien
cccagagaatctccgataagaaggt

SEQ ID NO: 83254 - DNA, 25 bp, Homo sapien
tttttcccagagaatctccgataag

SEQ ID NO: 83255 - DNA, 25 bp, Homo sapien
cacagtaaaggtcccaaaatacaca

SEQ ID NO: 83256 - DNA, 25 bp, Homo sapien
aaaccgaggctgttctcccaacgtg

SEQ ID NO: 83257 - DNA, 25 bp, Homo sapien
ctcccggcatcccatcgttgggggg

SEQ ID NO: 83258 - DNA, 25 bp, Homo sapien
ccggcatcccatcgttggggggaat

SEQ ID NO: 83259 - DNA, 25 bp, Homo sapien
tcccggcatcccatcgttgggggga

SEQ ID NO: 83260 - DNA, 25 bp, Homo sapien
ggcctcccggcatcccatcgttggg

SEQ ID NO: 83261 - DNA, 25 bp, Homo sapien
ccatcatgctgctaggattgtgagg

SEQ ID NO: 83262 - DNA, 25 bp, Homo sapien
gggtcccatcatgctgctaggattg

SEQ ID NO: 83263 - DNA, 25 bp, Homo sapien
tcccatcatgctgctaggattgtga

SEQ ID NO: 83264 - DNA, 25 bp, Homo sapien
catcatgctgctaggattgtgaggt

SEQ ID NO: 83265 - DNA, 25 bp, Homo sapien
gtggccttgctgtcgtgtgggatcc

SEQ ID NO: 83266 - DNA, 25 bp, Homo sapien
gctgtttcccaggaactcctccgga

SEQ ID NO: 83267 - DNA, 25 bp, Homo sapien
cctggggccgcctgcatatcgcggt

SEQ ID NO: 83268 - DNA, 25 bp, Homo sapien
tgcatatcgcggtgacataaaaggc

SEQ ID NO: 83269 - DNA, 25 bp, Homo sapien
agggttcattctctgcattgatcct

SEQ ID NO: 83270 - DNA, 25 bp, Homo sapien
ggaggagtatggaattgagttagca

SEQ ID NO: 83271 - DNA, 25 bp, Homo sapien
gagtatggaattgagttagcactgt

SEQ ID NO: 83272 - DNA, 25 bp, Homo sapien
ttgagttagcactgttaggattggg

SEQ ID NO: 83273 - DNA, 25 bp, Homo sapien
gaggagtatggaattgagttagcac

SEQ ID NO: 83274 - DNA, 25 bp, Homo sapien
caccaccagggggtgtcccacatag

SEQ ID NO: 83275 - DNA, 25 bp, Homo sapien
gccgccaccaccagggggtgtccca

SEQ ID NO: 83276 - DNA, 25 bp, Homo sapien
cgccaccaccagggggtgtcccaca

SEQ ID NO: 83277 - DNA, 25 bp, Homo sapien
ctggagggccgccaccaccaggggg

SEQ ID NO: 83278 - DNA, 25 bp, Homo sapien
ctaacaatccgttcatgtggtgtgg

SEQ ID NO: 83279 - DNA, 25 bp, Homo sapien
taacaatccgttcatgtggtgtggc

SEQ ID NO: 83280 - DNA, 25 bp, Homo sapien
cctaacaatccgttcatgtggtgtg

SEQ ID NO: 83281 - DNA, 25 bp, Homo sapien
tttggaagtcatttatgtcgcctga

SEQ ID NO: 83282 - DNA, 25 bp, Homo sapien
ctattcacgttgttaggagaatttt

SEQ ID NO: 83283 - DNA, 25 bp, Homo sapien
ttggaagtcatttatgtcgcctgac

SEQ ID NO: 83284 - DNA, 25 bp, Homo sapien
tgttaggagaattttttggaagtca

SEQ ID NO: 83285 - DNA, 25 bp, Homo sapien
ggagaaggggggatcacacactcat

SEQ ID NO: 83286 - DNA, 25 bp, Homo sapien
gaaggggggatcacacactcatcgt

SEQ ID NO: 83287 - DNA, 25 bp, Homo sapien
gagaaggggggatcacacactcatc

SEQ ID NO: 83288 - DNA, 25 bp, Homo sapien
agaaggggggatcacacactcatcg

SEQ ID NO: 83289 - DNA, 25 bp, Homo sapien
tcctagtagatctgtacctactaaa

SEQ ID NO: 83290 - DNA, 25 bp, Homo sapien
cctagtagatctgtacctactaaaa

SEQ ID NO: 83291 - DNA, 25 bp, Homo sapien
cggtttcaatgggactcggcgctcc

SEQ ID NO: 83292 - DNA, 25 bp, Homo sapien
ttcaatgggactcggcgctcctccg

SEQ ID NO: 83293 - DNA, 25 bp, Homo sapien
tgccggtttcaatgggactcggcgc

SEQ ID NO: 83294 - DNA, 25 bp, Homo sapien
ctcctccggctgctcacgctgcctc

SEQ ID NO: 83295 - DNA, 25 bp, Homo sapien
ctcaactgaagatcgaggagtcaca

SEQ ID NO: 83296 - DNA, 25 bp, Homo sapien
tcaactgaagatcgaggagtcacaa

SEQ ID NO: 83297 - DNA, 25 bp, Homo sapien
aactgaagatcgaggagtcacaaag

SEQ ID NO: 83298 - DNA, 25 bp, Homo sapien
ctgaagatcgaggagtcacaaagaa

SEQ ID NO: 83299 - DNA, 25 bp, Homo sapien
ttttggaagctgtacaaccgagaat

SEQ ID NO: 83300 - DNA, 25 bp, Homo sapien
tagaacttccatccaaagcgagggc

SEQ ID NO: 83301 - DNA, 25 bp, Homo sapien
gcctgagggttcagtgtgcttgaaa

SEQ ID NO: 83302 - DNA, 25 bp, Homo sapien
tgtccaagaccacctgagacaccat

SEQ ID NO: 83303 - DNA, 25 bp, Homo sapien
tgtcacccataaattctgcatcctc

SEQ ID NO: 83304 - DNA, 25 bp, Homo sapien
aactgacgggggcatgtcacccata

SEQ ID NO: 83305 - DNA, 25 bp, Homo sapien
tcctgggcgtaactgacgggggcat

SEQ ID NO: 83306 - DNA, 25 bp, Homo sapien
gggggcatgtcacccataaattctg

SEQ ID NO: 83307 - DNA, 25 bp, Homo sapien
cttgacagggtgtgtctgccagccc

SEQ ID NO: 83308 - DNA, 25 bp, Homo sapien
tatttgtccattagcaactccaagg

SEQ ID NO: 83309 - DNA, 25 bp, Homo sapien
agtatttgtccattagcaactccaa

SEQ ID NO: 83310 - DNA, 25 bp, Homo sapien
tttgtccattagcaactccaaggtt

SEQ ID NO: 83311 - DNA, 25 bp, Homo sapien
gtatttgtccattagcaactccaag

SEQ ID NO: 83312 - DNA, 25 bp, Homo sapien
ctgacaggaagggtgcctgatgcag

SEQ ID NO: 83313 - DNA, 25 bp, Homo sapien
aactccaccccgttggtagctgtgc

SEQ ID NO: 83314 - DNA, 25 bp, Homo sapien
tgcagagcccgtgccgtcagcagga

SEQ ID NO: 83315 - DNA, 25 bp, Homo sapien
tggtgtgcaactccaccccgttggt

SEQ ID NO: 83316 - DNA, 25 bp, Homo sapien
gaatacttagtttccacataggcca

SEQ ID NO: 83317 - DNA, 25 bp, Homo sapien
tagaatcgtgaaagagactggccca

SEQ ID NO: 83318 - DNA, 25 bp, Homo sapien
tttcagaaaccaggggagatatggc

SEQ ID NO: 83319 - DNA, 25 bp, Homo sapien
aggaagagggcttagaatcgtgaaa

SEQ ID NO: 83320 - DNA, 25 bp, Homo sapien
ctggctacaggatcccctgaaactg

SEQ ID NO: 83321 - DNA, 25 bp, Homo sapien
tcattcattagccaaacaaagctgt

SEQ ID NO: 83322 - DNA, 25 bp, Homo sapien
tctccaagagcttgtccgggttttg

SEQ ID NO: 83323 - DNA, 25 bp, Homo sapien
ccaagagcttgtccgggttttggag

SEQ ID NO: 83324 - DNA, 25 bp, Homo sapien
tttcatctccaagagcttgtccggg

SEQ ID NO: 83325 - DNA, 25 bp, Homo sapien
tcatctccaagagcttgtccgggtt

SEQ ID NO: 83326 - DNA, 25 bp, Homo sapien
ggcaactccagggtgaatatccctc

SEQ ID NO: 83327 - DNA, 25 bp, Homo sapien
tatacgtgggctcaaaggcaactcc

SEQ ID NO: 83328 - DNA, 25 bp, Homo sapien
ctaaatatacgtgggctcaaaggca

SEQ ID NO: 83329 - DNA, 25 bp, Homo sapien
gcaactccagggtgaatatccctca

SEQ ID NO: 83330 - DNA, 25 bp, Homo sapien
cttttcagacaggcttgacttgtta

SEQ ID NO: 83331 - DNA, 25 bp, Homo sapien
ttttcagacaggcttgacttgttaa

SEQ ID NO: 83332 - DNA, 25 bp, Homo sapien
aatgaagcctaagtattcctcagca

SEQ ID NO: 83333 - DNA, 25 bp, Homo sapien
gtccatttagaatgaagcctaagta

SEQ ID NO: 83334 - DNA, 25 bp, Homo sapien
gaagtccatttagaatgaagcctaa

SEQ ID NO: 83335 - DNA, 25 bp, Homo sapien
ttagaatgaagcctaagtattcctc

SEQ ID NO: 83336 - DNA, 25 bp, Homo sapien
tttttggggccattggaaatcgcac

SEQ ID NO: 83337 - DNA, 25 bp, Homo sapien
tggcaggtgacggaagtcttgttcc

SEQ ID NO: 83338 - DNA, 25 bp, Homo sapien
caggtgacggaagtcttgttccggg

SEQ ID NO: 83339 - DNA, 25 bp, Homo sapien
gcaggtgacggaagtcttgttccgg

SEQ ID NO: 83340 - DNA, 25 bp, Homo sapien
ctggcaggtgacggaagtcttgttc

SEQ ID NO: 83341 - DNA, 25 bp, Homo sapien
gatgtggccaccaaaaatgcggtga

SEQ ID NO: 83342 - DNA, 25 bp, Homo sapien
tgatgtggccaccaaaaatgcggtg

SEQ ID NO: 83343 - DNA, 25 bp, Homo sapien
aaatgcggtgattggagtctgaaca

SEQ ID NO: 83344 - DNA, 25 bp, Homo sapien
caaaaatgcggtgattggagtctga

SEQ ID NO: 83345 - DNA, 25 bp, Homo sapien
tgtggtataaccttggacagattct

SEQ ID NO: 83346 - DNA, 25 bp, Homo sapien
tttttgtggtataaccttggacaga

SEQ ID NO: 83347 - DNA, 25 bp, Homo sapien
gactggatatccaactgcaacgtga

SEQ ID NO: 83348 - DNA, 25 bp, Homo sapien
gaatcgtttcaggtgcagcacgagg

SEQ ID NO: 83349 - DNA, 25 bp, Homo sapien
gaaagcagttctttactaatttcca

SEQ ID NO: 83350 - DNA, 25 bp, Homo sapien
gagaaagcagttctttactaatttc

SEQ ID NO: 83351 - DNA, 25 bp, Homo sapien
tgcaaagagccgataggttctgtgg

SEQ ID NO: 83352 - DNA, 25 bp, Homo sapien
caaagagccgataggttctgtggca

SEQ ID NO: 83353 - DNA, 25 bp, Homo sapien
aagagccgataggttctgtggcatt

SEQ ID NO: 83354 - DNA, 25 bp, Homo sapien
ctgcaaagagccgataggttctgtg

SEQ ID NO: 83355 - DNA, 25 bp, Homo sapien
tcgcactgttgccgtgatggtagac

SEQ ID NO: 83356 - DNA, 25 bp, Homo sapien
ccgtcgcactgttgccgtgatggta

SEQ ID NO: 83357 - DNA, 25 bp, Homo sapien
cgtcgcactgttgccgtgatggtag

SEQ ID NO: 83358 - DNA, 25 bp, Homo sapien
gcactgttgccgtgatggtagacca

SEQ ID NO: 83359 - DNA, 25 bp, Homo sapien
gccagccattcagaccgatctggaa

SEQ ID NO: 83360 - DNA, 25 bp, Homo sapien
cattcagaccgatctggaagacgtc

SEQ ID NO: 83361 - DNA, 25 bp, Homo sapien
accttgactgtctggtcatcgatgc

SEQ ID NO: 83362 - DNA, 25 bp, Homo sapien
actgtctggtcatcgatgcgcagcc

SEQ ID NO: 83363 - DNA, 25 bp, Homo sapien
tgttgtgcacgaaccccaaggcatc

SEQ ID NO: 83364 - DNA, 25 bp, Homo sapien
ttattctactaagcaatgagactgg

SEQ ID NO: 83365 - DNA, 25 bp, Homo sapien
tactcctagatatcactaaactgtg

SEQ ID NO: 83366 - DNA, 25 bp, Homo sapien
agaattaaacagagcagactgaagg

SEQ ID NO: 83367 - DNA, 25 bp, Homo sapien
tctgcctgcctttgcgctcaaagct

SEQ ID NO: 83368 - DNA, 25 bp, Homo sapien
cacctggttaattcttactcagaca

SEQ ID NO: 83369 - DNA, 25 bp, Homo sapien
actcagacatcaaggctccctgtga

SEQ ID NO: 83370 - DNA, 25 bp, Homo sapien
cagtcacaaggaagtaaggcctcct

SEQ ID NO: 83371 - DNA, 25 bp, Homo sapien
ttccacactccctcaggtatatgtc

SEQ ID NO: 83372 - DNA, 25 bp, Homo sapien
ccctcaggtatatgtcagccagaca

SEQ ID NO: 83373 - DNA, 25 bp, Homo sapien
cacactccctcaggtatatgtcagc

SEQ ID NO: 83374 - DNA, 25 bp, Homo sapien
gccagacaaggctggtaattgctac

SEQ ID NO: 83375 - DNA, 25 bp, Homo sapien
cagaggaagagttgatttatcttca

SEQ ID NO: 83376 - DNA, 25 bp, Homo sapien
ctcccagaggaagagttgatttatc

SEQ ID NO: 83377 - DNA, 25 bp, Homo sapien
gaggaagagttgatttatcttcagg

SEQ ID NO: 83378 - DNA, 25 bp, Homo sapien
cccagaggaagagttgatttatctt

SEQ ID NO: 83379 - DNA, 25 bp, Homo sapien
tcatcccctggtggggaatatactg

SEQ ID NO: 83380 - DNA, 25 bp, Homo sapien
ttcatcccctggtggggaatatact

SEQ ID NO: 83381 - DNA, 25 bp, Homo sapien
gaagcacatcgatgaagttgtttat

SEQ ID NO: 83382 - DNA, 25 bp, Homo sapien
gcacatcgatgaagttgtttatccg

SEQ ID NO: 83383 - DNA, 25 bp, Homo sapien
ctgaagcacatcgatgaagttgttt

SEQ ID NO: 83384 - DNA, 25 bp, Homo sapien
atcgatgaagttgtttatccgtgcc

SEQ ID NO: 83385 - DNA, 25 bp, Homo sapien
catacagtgcatcagtgaatagggt

SEQ ID NO: 83386 - DNA, 25 bp, Homo sapien
tagtcagatgccaaagctggaagcc

SEQ ID NO: 83387 - DNA, 25 bp, Homo sapien
tccagttgattagagccaagtgacc

SEQ ID NO: 83388 - DNA, 25 bp, Homo sapien
ggctaggacctcagaacaatgttaa

SEQ ID NO: 83389 - DNA, 25 bp, Homo sapien
tctttcatggctccaaagggcctga

SEQ ID NO: 83390 - DNA, 25 bp, Homo sapien
tgttcaaagtaaagctagatgccca

SEQ ID NO: 83391 - DNA, 25 bp, Homo sapien
tgtgcttaatcctacttctctgcga

SEQ ID NO: 83392 - DNA, 25 bp, Homo sapien
cagaattactagagagtgtgttcaa

SEQ ID NO: 83393 - DNA, 25 bp, Homo sapien
tatcattcactaattcaatcaccag

SEQ ID NO: 83394 - DNA, 25 bp, Homo sapien
cattcactaattcaatcaccagcat

SEQ ID NO: 83395 - DNA, 25 bp, Homo sapien
ttttacactatcattcactaattca

SEQ ID NO: 83396 - DNA, 25 bp, Homo sapien
cttcttttacactatcattcactaa

SEQ ID NO: 83397 - DNA, 25 bp, Homo sapien
gctggggcaagccaggggactcgct

SEQ ID NO: 83398 - DNA, 25 bp, Homo sapien
cggcgggcgctggggcaagccaggg

SEQ ID NO: 83399 - DNA, 25 bp, Homo sapien
gcaagccaggggactcgctggcaag

SEQ ID NO: 83400 - DNA, 25 bp, Homo sapien
agccaggggactcgctggcaagcca

SEQ ID NO: 83401 - DNA, 25 bp, Homo sapien
gccgctggcacgtccgggccagtgg

SEQ ID NO: 83402 - DNA, 25 bp, Homo sapien
tggcacgtccgggccagtggtcagg

SEQ ID NO: 83403 - DNA, 25 bp, Homo sapien
gcacgtccgggccagtggtcagggc

SEQ ID NO: 83404 - DNA, 25 bp, Homo sapien
cgtccgggccagtggtcagggcggg

SEQ ID NO: 83405 - DNA, 25 bp, Homo sapien
ctcaatctggtgacactgcaagcgc

SEQ ID NO: 83406 - DNA, 25 bp, Homo sapien
gttggttcgctccagctcaatctgg

SEQ ID NO: 83407 - DNA, 25 bp, Homo sapien
taatcactgaactccagagtgggca

SEQ ID NO: 83408 - DNA, 25 bp, Homo sapien
taaaatccgggctgtccaagtagta

SEQ ID NO: 83409 - DNA, 25 bp, Homo sapien
ccagtgagcagagagccgtccttaa

SEQ ID NO: 83410 - DNA, 25 bp, Homo sapien
tcctcaacgccccagtgagcagaga

SEQ ID NO: 83411 - DNA, 25 bp, Homo sapien
ctgtcctcaacgccccagtgagcag

SEQ ID NO: 83412 - DNA, 25 bp, Homo sapien
gagcagagagccgtccttaatgagc

SEQ ID NO: 83413 - DNA, 25 bp, Homo sapien
tctgtttcaacatcaccaatacatt

SEQ ID NO: 83414 - DNA, 25 bp, Homo sapien
tttcatcatctgtttcaacatcacc

SEQ ID NO: 83415 - DNA, 25 bp, Homo sapien
atcatctgtttcaacatcaccaata

SEQ ID NO: 83416 - DNA, 25 bp, Homo sapien
ctgtttcaacatcaccaatacattc

SEQ ID NO: 83417 - DNA, 25 bp, Homo sapien
ttctcaagtggtgcaattaatacat

SEQ ID NO: 83418 - DNA, 25 bp, Homo sapien
tctcaagtggtgcaattaatacatc

SEQ ID NO: 83419 - DNA, 25 bp, Homo sapien
tttctcaagtggtgcaattaataca

SEQ ID NO: 83420 - DNA, 25 bp, Homo sapien
gctcttcaaggatagagtaatattt

SEQ ID NO: 83421 - DNA, 25 bp, Homo sapien
tgtatctgcctcttgcaaatgagac

SEQ ID NO: 83422 - DNA, 25 bp, Homo sapien
tctttgcagataaatttaaatgctc

SEQ ID NO: 83423 - DNA, 25 bp, Homo sapien
gcaaatgagactcctttttctttgc

SEQ ID NO: 83424 - DNA, 25 bp, Homo sapien
atacaagattttgaacatttccggt

SEQ ID NO: 83425 - DNA, 25 bp, Homo sapien
caagattttgaacatttccggtgag

SEQ ID NO: 83426 - DNA, 25 bp, Homo sapien
cttttgttggatacaagattttgaa

SEQ ID NO: 83427 - DNA, 25 bp, Homo sapien
gttggatacaagattttgaacattt

SEQ ID NO: 83428 - DNA, 25 bp, Homo sapien
gtgatgatcccatggctttcaacta

SEQ ID NO: 83429 - DNA, 25 bp, Homo sapien
actacttgtatgtcgaagcagaatt

SEQ ID NO: 83430 - DNA, 25 bp, Homo sapien
ttgtatgtcgaagcagaattgtttg

SEQ ID NO: 83431 - DNA, 25 bp, Homo sapien
atggctttcaactacttgtatgtcg

SEQ ID NO: 83432 - DNA, 25 bp, Homo sapien
gtggttccttcccatccgtggcttc

SEQ ID NO: 83433 - DNA, 25 bp, Homo sapien
ataaagtggttccttcccatccgtg

SEQ ID NO: 83434 - DNA, 25 bp, Homo sapien
aatgtcaggcagagtataaagtggt

SEQ ID NO: 83435 - DNA, 25 bp, Homo sapien
cagagtataaagtggttccttccca

SEQ ID NO: 83436 - DNA, 25 bp, Homo sapien
tttcagcccactcattattgtctta

SEQ ID NO: 83437 - DNA, 25 bp, Homo sapien
ctttgaccagatgttttattaagat

SEQ ID NO: 83438 - DNA, 25 bp, Homo sapien
tctggcaatgtgcacaccaatgcat

SEQ ID NO: 83439 - DNA, 25 bp, Homo sapien
caaatctttgtgtaacttgtaagtt

SEQ ID NO: 83440 - DNA, 25 bp, Homo sapien
agagaagagagtgacttgatgctcc

SEQ ID NO: 83441 - DNA, 25 bp, Homo sapien
tataggaatcactatcaagttcagc

SEQ ID NO: 83442 - DNA, 25 bp, Homo sapien
tgctgctataggaatcactatcaag

SEQ ID NO: 83443 - DNA, 25 bp, Homo sapien
tgtgctgctgctataggaatcacta

SEQ ID NO: 83444 - DNA, 25 bp, Homo sapien
gggttgcaatccaaggaatccctcc

SEQ ID NO: 83445 - DNA, 25 bp, Homo sapien
aagctgactttgtagtgctattttg

SEQ ID NO: 83446 - DNA, 25 bp, Homo sapien
gctgactttgtagtgctattttgtt

SEQ ID NO: 83447 - DNA, 25 bp, Homo sapien
tgcaatccaaggaatccctccagat

SEQ ID NO: 83448 - DNA, 25 bp, Homo sapien
tgcagagatggatctgagagaagaa

SEQ ID NO: 83449 - DNA, 25 bp, Homo sapien
agctgcagagatggatctgagagaa

SEQ ID NO: 83450 - DNA, 25 bp, Homo sapien
ctgcagagatggatctgagagaaga

SEQ ID NO: 83451 - DNA, 25 bp, Homo sapien
gctgcagagatggatctgagagaag

SEQ ID NO: 83452 - DNA, 25 bp, Homo sapien
cttgaggtggtgtctagtcttaacc

SEQ ID NO: 83453 - DNA, 25 bp, Homo sapien
ggctttggcttggtgcccagaagaa

SEQ ID NO: 83454 - DNA, 25 bp, Homo sapien
cgctgatagccattgcttgaggtgg

SEQ ID NO: 83455 - DNA, 25 bp, Homo sapien
tgccactactgagccaggacgctga

SEQ ID NO: 83456 - DNA, 25 bp, Homo sapien
gctgtgctctcctttataggagtac

SEQ ID NO: 83457 - DNA, 25 bp, Homo sapien
ttaaccatcctggttccactgatgg

SEQ ID NO: 83458 - DNA, 25 bp, Homo sapien
aaccatcctggttccactgatgggt

SEQ ID NO: 83459 - DNA, 25 bp, Homo sapien
taaccatcctggttccactgatggg

SEQ ID NO: 83460 - DNA, 25 bp, Homo sapien
gaagatactgccatccactaaatag

SEQ ID NO: 83461 - DNA, 25 bp, Homo sapien
agatactgccatccactaaatagta

SEQ ID NO: 83462 - DNA, 25 bp, Homo sapien
aagatactgccatccactaaatagt

SEQ ID NO: 83463 - DNA, 25 bp, Homo sapien
tcctgctggcaggatttgtttttgc

SEQ ID NO: 83464 - DNA, 25 bp, Homo sapien
cctgctggcaggatttgtttttgca

SEQ ID NO: 83465 - DNA, 25 bp, Homo sapien
tgctggcaggatttgtttttgcaac

SEQ ID NO: 83466 - DNA, 25 bp, Homo sapien
ctcctgctggcaggatttgtttttg

SEQ ID NO: 83467 - DNA, 25 bp, Homo sapien
acctgtgacttctatctgtggctca

SEQ ID NO: 83468 - DNA, 25 bp, Homo sapien
cacctgtgacttctatctgtggctc

SEQ ID NO: 83469 - DNA, 25 bp, Homo sapien
aacttcacaacccagtactggaatg

SEQ ID NO: 83470 - DNA, 25 bp, Homo sapien
caacttcacaacccagtactggaat

SEQ ID NO: 83471 - DNA, 25 bp, Homo sapien
tctgtggcccaaacattattgacca

SEQ ID NO: 83472 - DNA, 25 bp, Homo sapien
gctctatcctaatatcatgactggg

SEQ ID NO: 83473 - DNA, 25 bp, Homo sapien
catgactgggcatctctatgccaaa

SEQ ID NO: 83474 - DNA, 25 bp, Homo sapien
tgctatctgccgtcccttgctctat

SEQ ID NO: 83475 - DNA, 25 bp, Homo sapien
gatgggaacacgaaagactaagcca

SEQ ID NO: 83476 - DNA, 25 bp, Homo sapien
ggaacacgaaagactaagccattca

SEQ ID NO: 83477 - DNA, 25 bp, Homo sapien
cagatgggaacacgaaagactaagc

SEQ ID NO: 83478 - DNA, 25 bp, Homo sapien
tacagatgggaacacgaaagactaa

SEQ ID NO: 83479 - DNA, 25 bp, Homo sapien
ttatggttctaagatcaatcttaat

SEQ ID NO: 83480 - DNA, 25 bp, Homo sapien
tatggttctaagatcaatcttaatg

SEQ ID NO: 83481 - DNA, 25 bp, Homo sapien
atggttctaagatcaatcttaatga

SEQ ID NO: 83482 - DNA, 25 bp, Homo sapien
tggttctaagatcaatcttaatgac

SEQ ID NO: 83483 - DNA, 25 bp, Homo sapien
gcagacataatcatcacctagctca

SEQ ID NO: 83484 - DNA, 25 bp, Homo sapien
cagacataatcatcacctagctcat

SEQ ID NO: 83485 - DNA, 25 bp, Homo sapien
tgcagacataatcatcacctagctc

SEQ ID NO: 83486 - DNA, 25 bp, Homo sapien
cccagtcacaacataatttcccttg

SEQ ID NO: 83487 - DNA, 25 bp, Homo sapien
gccacattcaaaaacaccagcttca

SEQ ID NO: 83488 - DNA, 25 bp, Homo sapien
ataatttcccttgccaaagccctgc

SEQ ID NO: 83489 - DNA, 25 bp, Homo sapien
ccctgcagggcttggaaagccacat

SEQ ID NO: 83490 - DNA, 25 bp, Homo sapien
ctaaagaagaattaaatcagaacaa

SEQ ID NO: 83491 - DNA, 25 bp, Homo sapien
tttcccaggacaatagcaatgtaaa

SEQ ID NO: 83492 - DNA, 25 bp, Homo sapien
cagctcccaagaagatgataggccc

SEQ ID NO: 83493 - DNA, 25 bp, Homo sapien
ttcccaggacaatagcaatgtaaaa

SEQ ID NO: 83494 - DNA, 25 bp, Homo sapien
caagaagatgataggcccagaagaa

SEQ ID NO: 83495 - DNA, 25 bp, Homo sapien
taatacataggagattggagcaggt

SEQ ID NO: 83496 - DNA, 25 bp, Homo sapien
gtgagcatgggcttgcactgttacc

SEQ ID NO: 83497 - DNA, 25 bp, Homo sapien
gctcaggcataggtcaatgaaagag

SEQ ID NO: 83498 - DNA, 25 bp, Homo sapien
ggcacagtaacacagctcaggcata

SEQ ID NO: 83499 - DNA, 25 bp, Homo sapien
gcaaaaacatctcactggctcctag

SEQ ID NO: 83500 - DNA, 25 bp, Homo sapien
aaacatctcactggctcctagaaag

SEQ ID NO: 83501 - DNA, 25 bp, Homo sapien
ttgccctgctgtaggaaatccccta

SEQ ID NO: 83502 - DNA, 25 bp, Homo sapien
tcttgccctgctgtaggaaatcccc

SEQ ID NO: 83503 - DNA, 25 bp, Homo sapien
tatgacctgcatgatagagtggata

SEQ ID NO: 83504 - DNA, 25 bp, Homo sapien
cacaccagcaggcaagaaccaacca

SEQ ID NO: 83505 - DNA, 25 bp, Homo sapien
ggcagctggatgactagtatgacct

SEQ ID NO: 83506 - DNA, 25 bp, Homo sapien
gcacctctaccacataggtgtccat

SEQ ID NO: 83507 - DNA, 25 bp, Homo sapien
tagatgaatacgcatggcacgaaga

SEQ ID NO: 83508 - DNA, 25 bp, Homo sapien
aatacgcatggcacgaagatcaggc

SEQ ID NO: 83509 - DNA, 25 bp, Homo sapien
tcaaatagatgaatacgcatggcac

SEQ ID NO: 83510 - DNA, 25 bp, Homo sapien
cgcatggcacgaagatcaggctgac

SEQ ID NO: 83511 - DNA, 25 bp, Homo sapien
tcttcatagctgtcttcatatcagt

SEQ ID NO: 83512 - DNA, 25 bp, Homo sapien
aatggaatgccacatggttttatcc

SEQ ID NO: 83513 - DNA, 25 bp, Homo sapien
agctgtcttcatatcagtatttctg

SEQ ID NO: 83514 - DNA, 25 bp, Homo sapien
ttaacaaggcaatggaatgccacat

SEQ ID NO: 83515 - DNA, 25 bp, Homo sapien
tgacttcaatatccctcatagagac

SEQ ID NO: 83516 - DNA, 25 bp, Homo sapien
agcaagttctatctcacggaaaact

SEQ ID NO: 83517 - DNA, 25 bp, Homo sapien
catagagacattgtcacacatgtgc

SEQ ID NO: 83518 - DNA, 25 bp, Homo sapien
cgtgcaatagtgttcttgacttcaa

SEQ ID NO: 83519 - DNA, 25 bp, Homo sapien
gatgagttagagttaacctgatgat

SEQ ID NO: 83520 - DNA, 25 bp, Homo sapien
tgggcacaaaagaatagacagggca

SEQ ID NO: 83521 - DNA, 25 bp, Homo sapien
aggactgccttttcaaacgttgtca

SEQ ID NO: 83522 - DNA, 25 bp, Homo sapien
tgagtggaattctgatagatgagtt

SEQ ID NO: 83523 - DNA, 25 bp, Homo sapien
gaatatccatcgcattccagaatct

SEQ ID NO: 83524 - DNA, 25 bp, Homo sapien
aaagaatatccatcgcattccagaa

SEQ ID NO: 83525 - DNA, 25 bp, Homo sapien
gacaaagaatatccatcgcattcca

SEQ ID NO: 83526 - DNA, 25 bp, Homo sapien
taagacaaagaatatccatcgcatt

SEQ ID NO: 83527 - DNA, 25 bp, Homo sapien
tgggggtcagaaaagaccataagaa

SEQ ID NO: 83528 - DNA, 25 bp, Homo sapien
ttgggggtcagaaaagaccataaga

SEQ ID NO: 83529 - DNA, 25 bp, Homo sapien
gtgctgtggccgaggaataggcaat

SEQ ID NO: 83530 - DNA, 25 bp, Homo sapien
ggccgaggaataggcaatgtccaca

SEQ ID NO: 83531 - DNA, 25 bp, Homo sapien
tgtggccgaggaataggcaatgtcc

SEQ ID NO: 83532 - DNA, 25 bp, Homo sapien
aggaataggcaatgtccacaaaaga

SEQ ID NO: 83533 - DNA, 25 bp, Homo sapien
catctgagttatacagccccagtag

SEQ ID NO: 83534 - DNA, 25 bp, Homo sapien
aggtaaacatctgagttatacagcc

SEQ ID NO: 83535 - DNA, 25 bp, Homo sapien
ctgagttatacagccccagtaggaa

SEQ ID NO: 83536 - DNA, 25 bp, Homo sapien
taaacatctgagttatacagcccca

SEQ ID NO: 83537 - DNA, 25 bp, Homo sapien
aagatacacggaacaaagaagaaag

SEQ ID NO: 83538 - DNA, 25 bp, Homo sapien
aaagtagtggatggacggagataaa

SEQ ID NO: 83539 - DNA, 25 bp, Homo sapien
tctttacatcctcattcctcagagt

SEQ ID NO: 83540 - DNA, 25 bp, Homo sapien
cacagctttatccaatgggaaagta

SEQ ID NO: 83541 - DNA, 25 bp, Homo sapien
ctgtttttccttcaaggagatcttg

SEQ ID NO: 83542 - DNA, 25 bp, Homo sapien
tgtttttccttcaaggagatcttgc

SEQ ID NO: 83543 - DNA, 25 bp, Homo sapien
gtttttccttcaaggagatcttgct

SEQ ID NO: 83544 - DNA, 25 bp, Homo sapien
gggacctcgagtgtcataaataaac

SEQ ID NO: 83545 - DNA, 25 bp, Homo sapien
gaagcatcttcaccatatagacggg

SEQ ID NO: 83546 - DNA, 25 bp, Homo sapien
catatagacgggtataggaaaccca

SEQ ID NO: 83547 - DNA, 25 bp, Homo sapien
tgaggaaggagtatacagaagcatc

SEQ ID NO: 83548 - DNA, 25 bp, Homo sapien
aatggaagagtaccaaatatcaagg

SEQ ID NO: 83549 - DNA, 25 bp, Homo sapien
gattagccaacaggaaatacatagg

SEQ ID NO: 83550 - DNA, 25 bp, Homo sapien
ctgatggtgcaaatgataaggatat

SEQ ID NO: 83551 - DNA, 25 bp, Homo sapien
taacaaataggactagttggacctc

SEQ ID NO: 83552 - DNA, 25 bp, Homo sapien
cactgtgagcaagaacatctccgaa

SEQ ID NO: 83553 - DNA, 25 bp, Homo sapien
actgtgagcaagaacatctccgaag

SEQ ID NO: 83554 - DNA, 25 bp, Homo sapien
tgtgagcaagaacatctccgaagcc

SEQ ID NO: 83555 - DNA, 25 bp, Homo sapien
tgagcaagaacatctccgaagcccc

SEQ ID NO: 83556 - DNA, 25 bp, Homo sapien
gatcatcactaactcctctgggaag

SEQ ID NO: 83557 - DNA, 25 bp, Homo sapien
gtaactgtctaactcattgggccca

SEQ ID NO: 83558 - DNA, 25 bp, Homo sapien
gcaatccggacaacctgtgtgatgt

SEQ ID NO: 83559 - DNA, 25 bp, Homo sapien
ggaagtcgaacaatgagagccacct

SEQ ID NO: 83560 - DNA, 25 bp, Homo sapien
accacaatggtaatgtgggaatagc

SEQ ID NO: 83561 - DNA, 25 bp, Homo sapien
tggacatggccctgttggtattctc

SEQ ID NO: 83562 - DNA, 25 bp, Homo sapien
ggcccaaacattagcaccacaatgg

SEQ ID NO: 83563 - DNA, 25 bp, Homo sapien
aatgggcgagcataaatgtagatgg

SEQ ID NO: 83564 - DNA, 25 bp, Homo sapien
ggattcctgattatgaagtttggtg

SEQ ID NO: 83565 - DNA, 25 bp, Homo sapien
ttccctgcataattcagttccttag

SEQ ID NO: 83566 - DNA, 25 bp, Homo sapien
tagtctcttcctaccagtatgtttc

SEQ ID NO: 83567 - DNA, 25 bp, Homo sapien
ggtttcgccatgtagttcagttgct

SEQ ID NO: 83568 - DNA, 25 bp, Homo sapien
ctattatgtgcccaaatgtgcatct

SEQ ID NO: 83569 - DNA, 25 bp, Homo sapien
ttttcttgtcgcagagtctggttct

SEQ ID NO: 83570 - DNA, 25 bp, Homo sapien
tgcagttctactattatgtgcccaa

SEQ ID NO: 83571 - DNA, 25 bp, Homo sapien
gttctactattatgtgcccaaatgt

SEQ ID NO: 83572 - DNA, 25 bp, Homo sapien
ctgaggtgttacaatatctgtttcc

SEQ ID NO: 83573 - DNA, 25 bp, Homo sapien
gaggtgttacaatatctgtttccat

SEQ ID NO: 83574 - DNA, 25 bp, Homo sapien
tgaggtgttacaatatctgtttcca

SEQ ID NO: 83575 - DNA, 25 bp, Homo sapien
gtctaggctcttgttagaaaattca

SEQ ID NO: 83576 - DNA, 25 bp, Homo sapien
tagagtctaggctcttgttagaaaa

SEQ ID NO: 83577 - DNA, 25 bp, Homo sapien
attccagctaaaggctgccctgtgc

SEQ ID NO: 83578 - DNA, 25 bp, Homo sapien
taggctcttgttagaaaattcatgg

SEQ ID NO: 83579 - DNA, 25 bp, Homo sapien
ctgtcactactgtgttgtttgctat

SEQ ID NO: 83580 - DNA, 25 bp, Homo sapien
cactactgtgttgtttgctatcttt

SEQ ID NO: 83581 - DNA, 25 bp, Homo sapien
tcactactgtgttgtttgctatctt

SEQ ID NO: 83582 - DNA, 25 bp, Homo sapien
ctactgtgttgtttgctatctttat

SEQ ID NO: 83583 - DNA, 25 bp, Homo sapien
agctgaatatcttgagactgagtca

SEQ ID NO: 83584 - DNA, 25 bp, Homo sapien
tgaatatcttgagactgagtcagac

SEQ ID NO: 83585 - DNA, 25 bp, Homo sapien
gagctgaatatcttgagactgagtc

SEQ ID NO: 83586 - DNA, 25 bp, Homo sapien
gctgaatatcttgagactgagtcag

SEQ ID NO: 83587 - DNA, 25 bp, Homo sapien
cattcttcgcagagaggaagtccac

SEQ ID NO: 83588 - DNA, 25 bp, Homo sapien
ctctgtaggagattacattcttcgc

SEQ ID NO: 83589 - DNA, 25 bp, Homo sapien
gccaagttgcccagaaagaaataga

SEQ ID NO: 83590 - DNA, 25 bp, Homo sapien
catccggggagccacaatgaaggag

SEQ ID NO: 83591 - DNA, 25 bp, Homo sapien
aagaaaaagagctgagtgatgcagc

SEQ ID NO: 83592 - DNA, 25 bp, Homo sapien
tcctcctccaaggaagtgcaagaaa

SEQ ID NO: 83593 - DNA, 25 bp, Homo sapien
cctccaaggaagtgcaagaaaaaga

SEQ ID NO: 83594 - DNA, 25 bp, Homo sapien
ctcctccaaggaagtgcaagaaaaa

SEQ ID NO: 83595 - DNA, 25 bp, Homo sapien
cagaggccggcagatggcgatgtag

SEQ ID NO: 83596 - DNA, 25 bp, Homo sapien
ccacaaaaaggcaagcggaggatga

SEQ ID NO: 83597 - DNA, 25 bp, Homo sapien
aaaaggcaagcggaggatgaggacc

SEQ ID NO: 83598 - DNA, 25 bp, Homo sapien
cacaaaaaggcaagcggaggatgag

SEQ ID NO: 83599 - DNA, 25 bp, Homo sapien
aaaggcaagcggaggatgaggacca

SEQ ID NO: 83600 - DNA, 25 bp, Homo sapien
cgtgtcggtgcaagccagcttgatg

SEQ ID NO: 83601 - DNA, 25 bp, Homo sapien
acaaacgtgtcggtgcaagccagct

SEQ ID NO: 83602 - DNA, 25 bp, Homo sapien
cacaaacgtgtcggtgcaagccagc

SEQ ID NO: 83603 - DNA, 25 bp, Homo sapien
aaacgtgtcggtgcaagccagcttg

SEQ ID NO: 83604 - DNA, 25 bp, Homo sapien
tgttgaagaccatcagaagctccac

SEQ ID NO: 83605 - DNA, 25 bp, Homo sapien
ctgttgaagaccatcagaagctcca

SEQ ID NO: 83606 - DNA, 25 bp, Homo sapien
ctgcataggaagccagaagccccag

SEQ ID NO: 83607 - DNA, 25 bp, Homo sapien
cataggaagccagaagccccagaaa

SEQ ID NO: 83608 - DNA, 25 bp, Homo sapien
tgcataggaagccagaagccccaga

SEQ ID NO: 83609 - DNA, 25 bp, Homo sapien
taggaagccagaagccccagaaaga

SEQ ID NO: 83610 - DNA, 25 bp, Homo sapien
tcaattcagaagctgccttacgaac

SEQ ID NO: 83611 - DNA, 25 bp, Homo sapien
taaggccctgaaggggtgcatgtag

SEQ ID NO: 83612 - DNA, 25 bp, Homo sapien
ttcttcaattcagaagctgccttac

SEQ ID NO: 83613 - DNA, 25 bp, Homo sapien
tcttcaattcagaagctgccttacg

SEQ ID NO: 83614 - DNA, 25 bp, Homo sapien
atggaaagatcactgtgtgaaagaa

SEQ ID NO: 83615 - DNA, 25 bp, Homo sapien
ccaagggtataaatcataggattca

SEQ ID NO: 83616 - DNA, 25 bp, Homo sapien
tcacttcctggtttccaagggtata

SEQ ID NO: 83617 - DNA, 25 bp, Homo sapien
cataggattcatcaatggaaagatc

SEQ ID NO: 83618 - DNA, 25 bp, Homo sapien
acttgacagactacatgtcgactca

SEQ ID NO: 83619 - DNA, 25 bp, Homo sapien
acagactacatgtcgactcaataac

SEQ ID NO: 83620 - DNA, 25 bp, Homo sapien
tccacttgacagactacatgtcgac

SEQ ID NO: 83621 - DNA, 25 bp, Homo sapien
tgacagactacatgtcgactcaata

SEQ ID NO: 83622 - DNA, 25 bp, Homo sapien
agctgagttctaccagatgcataaa

SEQ ID NO: 83623 - DNA, 25 bp, Homo sapien
cacaggaattcacagctgagttcta

SEQ ID NO: 83624 - DNA, 25 bp, Homo sapien
cagaaaaagcccaggatcacaggaa

SEQ ID NO: 83625 - DNA, 25 bp, Homo sapien
aaaaagcccaggatcacaggaattc

SEQ ID NO: 83626 - DNA, 25 bp, Homo sapien
agggttcatgacagtaggatagtgc

SEQ ID NO: 83627 - DNA, 25 bp, Homo sapien
acacctttttcatggaagctttcac

SEQ ID NO: 83628 - DNA, 25 bp, Homo sapien
tattaaacacctttttcatggaagc

SEQ ID NO: 83629 - DNA, 25 bp, Homo sapien
tgcttattaaacacctttttcatgg

SEQ ID NO: 83630 - DNA, 25 bp, Homo sapien
gctatgtgcttattaaacacctttt

SEQ ID NO: 83631 - DNA, 25 bp, Homo sapien
tatagtcagctagttaaagggatgc

SEQ ID NO: 83632 - DNA, 25 bp, Homo sapien
tccagatgttttggatgctgcccat

SEQ ID NO: 83633 - DNA, 25 bp, Homo sapien
gaagcaacgcaataaacagagtgag

SEQ ID NO: 83634 - DNA, 25 bp, Homo sapien
taggagcaggatcaggtcactcagt

SEQ ID NO: 83635 - DNA, 25 bp, Homo sapien
caaagttcatgttataggtgaggga

SEQ ID NO: 83636 - DNA, 25 bp, Homo sapien
aaggagagttaccagagtaattgcc

SEQ ID NO: 83637 - DNA, 25 bp, Homo sapien
cacgctaaaggttacacccaatagg

SEQ ID NO: 83638 - DNA, 25 bp, Homo sapien
gaagaaatgtggttacacgctaaag

SEQ ID NO: 83639 - DNA, 25 bp, Homo sapien
tccacagttgctatactggtttaca

SEQ ID NO: 83640 - DNA, 25 bp, Homo sapien
ttgtaaattctaggtattagcccac

SEQ ID NO: 83641 - DNA, 25 bp, Homo sapien
aatgtctatttatatcctttggcca

SEQ ID NO: 83642 - DNA, 25 bp, Homo sapien
ttgtaaggaatctccataatgtttt

SEQ ID NO: 83643 - DNA, 25 bp, Homo sapien
tgctgagctgtccaccttgccatcc

SEQ ID NO: 83644 - DNA, 25 bp, Homo sapien
ccttgccatcctcactggtcaacat

SEQ ID NO: 83645 - DNA, 25 bp, Homo sapien
tccaccttgccatcctcactggtca

SEQ ID NO: 83646 - DNA, 25 bp, Homo sapien
ggctgctgagctgtccaccttgcca

SEQ ID NO: 83647 - DNA, 25 bp, Homo sapien
cattccccacaggtctggcaataga

SEQ ID NO: 83648 - DNA, 25 bp, Homo sapien
ttccctagctgaccacatttctagc

SEQ ID NO: 83649 - DNA, 25 bp, Homo sapien
tacattccccacaggtctggcaata

SEQ ID NO: 83650 - DNA, 25 bp, Homo sapien
tgaccacatttctagcactctttga

SEQ ID NO: 83651 - DNA, 25 bp, Homo sapien
cagtaagtccaagtaacatgaattc

SEQ ID NO: 83652 - DNA, 25 bp, Homo sapien
agacaggttgctgagcaggaagtac

SEQ ID NO: 83653 - DNA, 25 bp, Homo sapien
gtcaatgagagacaggttgctgagc

SEQ ID NO: 83654 - DNA, 25 bp, Homo sapien
atgtcaatgagagacaggttgctga

SEQ ID NO: 83655 - DNA, 25 bp, Homo sapien
caatgagagacaggttgctgagcag

SEQ ID NO: 83656 - DNA, 25 bp, Homo sapien
taatcatctttggtgtggcaaagga

SEQ ID NO: 83657 - DNA, 25 bp, Homo sapien
aaaagagatggtcttacgcagagca

SEQ ID NO: 83658 - DNA, 25 bp, Homo sapien
ataatcatctttggtgtggcaaagg

SEQ ID NO: 83659 - DNA, 25 bp, Homo sapien
tcttacgcagagcaaaaaagtccat

SEQ ID NO: 83660 - DNA, 25 bp, Homo sapien
cggtgaagaggtgcaaaaaaagatc

SEQ ID NO: 83661 - DNA, 25 bp, Homo sapien
cagtcccggtgaagaggtgcaaaaa

SEQ ID NO: 83662 - DNA, 25 bp, Homo sapien
tctcagtcccggtgaagaggtgcaa

SEQ ID NO: 83663 - DNA, 25 bp, Homo sapien
atctcagtcccggtgaagaggtgca

SEQ ID NO: 83664 - DNA, 25 bp, Homo sapien
aatagagggtaaaagctaattggct

SEQ ID NO: 83665 - DNA, 25 bp, Homo sapien
gcaaatagagggtaaaagctaattg

SEQ ID NO: 83666 - DNA, 25 bp, Homo sapien
caaatagagggtaaaagctaattgg

SEQ ID NO: 83667 - DNA, 25 bp, Homo sapien
atagagggtaaaagctaattggctc

SEQ ID NO: 83668 - DNA, 25 bp, Homo sapien
aattttgtctaccaggaagtttgtg

SEQ ID NO: 83669 - DNA, 25 bp, Homo sapien
tggatgaccaaaggaagatcacaga

SEQ ID NO: 83670 - DNA, 25 bp, Homo sapien
tagaaagagccttggaggatcctgt

SEQ ID NO: 83671 - DNA, 25 bp, Homo sapien
gatcctgtggaggagtagtccctga

SEQ ID NO: 83672 - DNA, 25 bp, Homo sapien
tattcattgcatgaagaatcacgga

SEQ ID NO: 83673 - DNA, 25 bp, Homo sapien
gagatctctattcattgcatgaaga

SEQ ID NO: 83674 - DNA, 25 bp, Homo sapien
gcatgaagaatcacggagcagtttt

SEQ ID NO: 83675 - DNA, 25 bp, Homo sapien
cattgcatgaagaatcacggagcag

SEQ ID NO: 83676 - DNA, 25 bp, Homo sapien
tctctttggcagtccttcctgctcc

SEQ ID NO: 83677 - DNA, 25 bp, Homo sapien
ctatcatcttaatgtctaggcttcc

SEQ ID NO: 83678 - DNA, 25 bp, Homo sapien
tcccctccaggtgttctatcatctt

SEQ ID NO: 83679 - DNA, 25 bp, Homo sapien
gcctcccttgtgagggatatctaga

SEQ ID NO: 83680 - DNA, 25 bp, Homo sapien
ttcccaggaattagagagccccagc

SEQ ID NO: 83681 - DNA, 25 bp, Homo sapien
tggtagacttattgcccacatccat

SEQ ID NO: 83682 - DNA, 25 bp, Homo sapien
ctgtagttcccaggaattagagagc

SEQ ID NO: 83683 - DNA, 25 bp, Homo sapien
gcaaaacaaattcagacatggtaga

SEQ ID NO: 83684 - DNA, 25 bp, Homo sapien
gacatatcaatgattgaaagattgg

SEQ ID NO: 83685 - DNA, 25 bp, Homo sapien
tgactatgaggctgttacccaccat

SEQ ID NO: 83686 - DNA, 25 bp, Homo sapien
ggtggcgaaagaagcaagagacata

SEQ ID NO: 83687 - DNA, 25 bp, Homo sapien
ggtgagggtccactataactgtgat

SEQ ID NO: 83688 - DNA, 25 bp, Homo sapien
gaatatctgggtaaggcagccatca

SEQ ID NO: 83689 - DNA, 25 bp, Homo sapien
gaaagggccttagatgatcctctgg

SEQ ID NO: 83690 - DNA, 25 bp, Homo sapien
gagaaagctgcttagtggccacatg

SEQ ID NO: 83691 - DNA, 25 bp, Homo sapien
cacagaatggtaacgtgagggcaaa

SEQ ID NO: 83692 - DNA, 25 bp, Homo sapien
tcagtttcctcatggctatctttac

SEQ ID NO: 83693 - DNA, 25 bp, Homo sapien
ctatgaaggcattgccttattaaaa

SEQ ID NO: 83694 - DNA, 25 bp, Homo sapien
aaacctatttttcagtttcctcatg

SEQ ID NO: 83695 - DNA, 25 bp, Homo sapien
tatgaaggcattgccttattaaaat

SEQ ID NO: 83696 - DNA, 25 bp, Homo sapien
tattgcttaacgagtccatggccat

SEQ ID NO: 83697 - DNA, 25 bp, Homo sapien
tgaacagcacagctgagatatggat

SEQ ID NO: 83698 - DNA, 25 bp, Homo sapien
agcacagctgagatatggatgagca

SEQ ID NO: 83699 - DNA, 25 bp, Homo sapien
tacacctccagcatgaacagcacag

SEQ ID NO: 83700 - DNA, 25 bp, Homo sapien
cttcctacacctccagcatgaacag

SEQ ID NO: 83701 - DNA, 25 bp, Homo sapien
tagagaatggcaccatatcctctac

SEQ ID NO: 83702 - DNA, 25 bp, Homo sapien
tgatgatagccgtaaaatgaagatt

SEQ ID NO: 83703 - DNA, 25 bp, Homo sapien
ttactatatgagaatatgtaaactg

SEQ ID NO: 83704 - DNA, 25 bp, Homo sapien
tattagtagataaggtgatgatagc

SEQ ID NO: 83705 - DNA, 25 bp, Homo sapien
taatcttaatccatattgtctctga

SEQ ID NO: 83706 - DNA, 25 bp, Homo sapien
tcatgaaggaaatcatggataatct

SEQ ID NO: 83707 - DNA, 25 bp, Homo sapien
catattgtctctgaagttacgttaa

SEQ ID NO: 83708 - DNA, 25 bp, Homo sapien
gccctcaaaggagatagtcttgggt

SEQ ID NO: 83709 - DNA, 25 bp, Homo sapien
catatgccatggctacaaggagcac

SEQ ID NO: 83710 - DNA, 25 bp, Homo sapien
taactccagtgacccaagatcctac

SEQ ID NO: 83711 - DNA, 25 bp, Homo sapien
aagctaactggctcagggagtgcat

SEQ ID NO: 83712 - DNA, 25 bp, Homo sapien
catgtgcacaagttcatgatggttg

SEQ ID NO: 83713 - DNA, 25 bp, Homo sapien
taataactgtccactatgtttgggc

SEQ ID NO: 83714 - DNA, 25 bp, Homo sapien
actgtccactatgtttgggccacag

SEQ ID NO: 83715 - DNA, 25 bp, Homo sapien
agtaaggtcacaataataactgtcc

SEQ ID NO: 83716 - DNA, 25 bp, Homo sapien
ggtcacaataataactgtccactat

SEQ ID NO: 83717 - DNA, 25 bp, Homo sapien
tatctgtacaggcaagtttgatgac

SEQ ID NO: 83718 - DNA, 25 bp, Homo sapien
tcagggatataagtatctgtacagg

SEQ ID NO: 83719 - DNA, 25 bp, Homo sapien
agtatctgtacaggcaagtttgatg

SEQ ID NO: 83720 - DNA, 25 bp, Homo sapien
cttcagggatataagtatctgtaca

SEQ ID NO: 83721 - DNA, 25 bp, Homo sapien
gtcgctgcacagtaatcagaatgac

SEQ ID NO: 83722 - DNA, 25 bp, Homo sapien
ccgtgtaggagatcagcaaaagcaa

SEQ ID NO: 83723 - DNA, 25 bp, Homo sapien
tcagaatgaccgtgtaggagatcag

SEQ ID NO: 83724 - DNA, 25 bp, Homo sapien
tgaggaaggtcgctgcacagtaatc

SEQ ID NO: 83725 - DNA, 25 bp, Homo sapien
tgctgaaaggccaggcatagatgaa

SEQ ID NO: 83726 - DNA, 25 bp, Homo sapien
cagtcagagtgctgcgagccttggc

SEQ ID NO: 83727 - DNA, 25 bp, Homo sapien
accacagtcacgtgggcagtcagag

SEQ ID NO: 83728 - DNA, 25 bp, Homo sapien
gatacaaggcccaaagaacagggtc

SEQ ID NO: 83729 - DNA, 25 bp, Homo sapien
gggtcttcaggttatgaattgctga

SEQ ID NO: 83730 - DNA, 25 bp, Homo sapien
aagacagcctggaagttacatactg

SEQ ID NO: 83731 - DNA, 25 bp, Homo sapien
caaatctggtcctatgagagagagc

SEQ ID NO: 83732 - DNA, 25 bp, Homo sapien
cctggaagttacatactgggtcttc

SEQ ID NO: 83733 - DNA, 25 bp, Homo sapien
cattttcttagaatcgcctgttccc

SEQ ID NO: 83734 - DNA, 25 bp, Homo sapien
cacacccactataacaaagaaggag

SEQ ID NO: 83735 - DNA, 25 bp, Homo sapien
taactgcccatgaattgctgctgcc

SEQ ID NO: 83736 - DNA, 25 bp, Homo sapien
gaaattcttcaacccaaatcaggct

SEQ ID NO: 83737 - DNA, 25 bp, Homo sapien
tgtgtgctggagagatcaggcatcc

SEQ ID NO: 83738 - DNA, 25 bp, Homo sapien
ctggagagatcaggcatccttggcc

SEQ ID NO: 83739 - DNA, 25 bp, Homo sapien
gatatccaagcatctgcagttgact

SEQ ID NO: 83740 - DNA, 25 bp, Homo sapien
tgtgctggagagatcaggcatcctt

SEQ ID NO: 83741 - DNA, 25 bp, Homo sapien
gttccaagctgcaaacttgttctga

SEQ ID NO: 83742 - DNA, 25 bp, Homo sapien
ggttccaagctgcaaacttgttctg

SEQ ID NO: 83743 - DNA, 25 bp, Homo sapien
gctgcaaacttgttctgaaacaact

SEQ ID NO: 83744 - DNA, 25 bp, Homo sapien
caagctgcaaacttgttctgaaaca

SEQ ID NO: 83745 - DNA, 25 bp, Homo sapien
gagtgcaggctggtatcagaagtca

SEQ ID NO: 83746 - DNA, 25 bp, Homo sapien
taaagaaaatttgggctatgcagcc

SEQ ID NO: 83747 - DNA, 25 bp, Homo sapien
aagatatggtctcgtgtgcactcag

SEQ ID NO: 83748 - DNA, 25 bp, Homo sapien
gaagatttcccagcacaatgactgt

SEQ ID NO: 83749 - DNA, 25 bp, Homo sapien
tcataggccatcgaaacaagtagca

SEQ ID NO: 83750 - DNA, 25 bp, Homo sapien
cataggccatcgaaacaagtagcac

SEQ ID NO: 83751 - DNA, 25 bp, Homo sapien
taggccatcgaaacaagtagcacca

SEQ ID NO: 83752 - DNA, 25 bp, Homo sapien
aggccatcgaaacaagtagcaccat

SEQ ID NO: 83753 - DNA, 25 bp, Homo sapien
accacatagtataagggtttgcata

SEQ ID NO: 83754 - DNA, 25 bp, Homo sapien
ccacatagtataagggtttgcatat

SEQ ID NO: 83755 - DNA, 25 bp, Homo sapien
taatgtgtgcaccaagctcacagcc

SEQ ID NO: 83756 - DNA, 25 bp, Homo sapien
tgggaagccagcgtagaaaatgcct

SEQ ID NO: 83757 - DNA, 25 bp, Homo sapien
caggagatcattaccaagacagtgc

SEQ ID NO: 83758 - DNA, 25 bp, Homo sapien
caggcaagtttggtgactcgaggaa

SEQ ID NO: 83759 - DNA, 25 bp, Homo sapien
gcctcaggtaatggttcacaatttt

SEQ ID NO: 83760 - DNA, 25 bp, Homo sapien
caggtaatggttcacaattttcctt

SEQ ID NO: 83761 - DNA, 25 bp, Homo sapien
gacatttcagaaattctccttggcc

SEQ ID NO: 83762 - DNA, 25 bp, Homo sapien
gtgacatttcagaaattctccttgg

SEQ ID NO: 83763 - DNA, 25 bp, Homo sapien
cagagaatttaaggccaaggctggc

SEQ ID NO: 83764 - DNA, 25 bp, Homo sapien
ctgaacataagccactggcagctgc

SEQ ID NO: 83765 - DNA, 25 bp, Homo sapien
taaaacttgctggaggatgagtacc

SEQ ID NO: 83766 - DNA, 25 bp, Homo sapien
gatgagtaccactgggtgcctgaac

SEQ ID NO: 83767 - DNA, 25 bp, Homo sapien
tcccagtttggtgtcctctggtttg

SEQ ID NO: 83768 - DNA, 25 bp, Homo sapien
ttgaaaaagttgtccaagtctttca

SEQ ID NO: 83769 - DNA, 25 bp, Homo sapien
aaagttgtccaagtctttcacttct

SEQ ID NO: 83770 - DNA, 25 bp, Homo sapien
cagtttggtgtcctctggtttgttt

SEQ ID NO: 83771 - DNA, 25 bp, Homo sapien
tgcctagcactgatgtcacatagac

SEQ ID NO: 83772 - DNA, 25 bp, Homo sapien
accctcaaaggagatagtcttgcgc

SEQ ID NO: 83773 - DNA, 25 bp, Homo sapien
aaagtacaaactcagacaccatcga

SEQ ID NO: 83774 - DNA, 25 bp, Homo sapien
aactgtgaagaacgaatatctgggc

SEQ ID NO: 83775 - DNA, 25 bp, Homo sapien
tgtactgtagtgcagaggcttacat

SEQ ID NO: 83776 - DNA, 25 bp, Homo sapien
caggccactgttcgttagggtcata

SEQ ID NO: 83777 - DNA, 25 bp, Homo sapien
gaaagagccttagatgacccactgg

SEQ ID NO: 83778 - DNA, 25 bp, Homo sapien
gaatggcaggtccactgtaaaagcc

SEQ ID NO: 83779 - DNA, 25 bp, Homo sapien
tgacggtttctcagcttccacatgg

SEQ ID NO: 83780 - DNA, 25 bp, Homo sapien
acagcctcttctttctgtaattgag

SEQ ID NO: 83781 - DNA, 25 bp, Homo sapien
tcacagcctcttctttctgtaattg

SEQ ID NO: 83782 - DNA, 25 bp, Homo sapien
ctttgctaatgatttcacagcctct

SEQ ID NO: 83783 - DNA, 25 bp, Homo sapien
ttgctaatgatttcacagcctcttc

SEQ ID NO: 83784 - DNA, 25 bp, Homo sapien
agaataagctttttaccattttgca

SEQ ID NO: 83785 - DNA, 25 bp, Homo sapien
taagctttttaccattttgcaaatc

SEQ ID NO: 83786 - DNA, 25 bp, Homo sapien
gaaaagataattaagatggattaag

SEQ ID NO: 83787 - DNA, 25 bp, Homo sapien
gctttttaccattttgcaaatcaaa

SEQ ID NO: 83788 - DNA, 25 bp, Homo sapien
gatttattactccatccattaactg

SEQ ID NO: 83789 - DNA, 25 bp, Homo sapien
gctagacagccccaacaaattgaat

SEQ ID NO: 83790 - DNA, 25 bp, Homo sapien
caaattgaattcagtaaccactgat

SEQ ID NO: 83791 - DNA, 25 bp, Homo sapien
gaagacttggagttcccaagagcta

SEQ ID NO: 83792 - DNA, 25 bp, Homo sapien
ggaatgcaaatgagagtctataatt

SEQ ID NO: 83793 - DNA, 25 bp, Homo sapien
aatgcaaatgagagtctataattac

SEQ ID NO: 83794 - DNA, 25 bp, Homo sapien
tggggaatgcaaatgagagtctata

SEQ ID NO: 83795 - DNA, 25 bp, Homo sapien
gggaatgcaaatgagagtctataat

SEQ ID NO: 83796 - DNA, 25 bp, Homo sapien
catcgatggaagagagattgctaag

SEQ ID NO: 83797 - DNA, 25 bp, Homo sapien
cacatcgatggaagagagattgcta

SEQ ID NO: 83798 - DNA, 25 bp, Homo sapien
ctgacacacatcgatggaagagaga

SEQ ID NO: 83799 - DNA, 25 bp, Homo sapien
cacacatcgatggaagagagattgc

SEQ ID NO: 83800 - DNA, 25 bp, Homo sapien
aaagtggtggtcttgtgttcgttga

SEQ ID NO: 83801 - DNA, 25 bp, Homo sapien
tcttgtgttcgttgaggaagtctgc

SEQ ID NO: 83802 - DNA, 25 bp, Homo sapien
tccctggaaagtggtggtcttgtgt

SEQ ID NO: 83803 - DNA, 25 bp, Homo sapien
tggtcttgtgttcgttgaggaagtc

SEQ ID NO: 83804 - DNA, 25 bp, Homo sapien
gcaacaagaagcaccatctcactac

SEQ ID NO: 83805 - DNA, 25 bp, Homo sapien
gtttgcatatagcaatgtatctatc

SEQ ID NO: 83806 - DNA, 25 bp, Homo sapien
ggcagattgactttgaatgccaggt

SEQ ID NO: 83807 - DNA, 25 bp, Homo sapien
ggtccacagaaaggcagattgactt

SEQ ID NO: 83808 - DNA, 25 bp, Homo sapien
actttgaatgccaggtgggtggctg

SEQ ID NO: 83809 - DNA, 25 bp, Homo sapien
ctgagtgtgagatgccaatggccca

SEQ ID NO: 83810 - DNA, 25 bp, Homo sapien
ccataggtgtctaagcaggcaagct

SEQ ID NO: 83811 - DNA, 25 bp, Homo sapien
tggacatcccatcagaggcttggcg

SEQ ID NO: 83812 - DNA, 25 bp, Homo sapien
gagcagaccactgttagtgagcacc

SEQ ID NO: 83813 - DNA, 25 bp, Homo sapien
aaaaaccctgcttggaacccacatg

SEQ ID NO: 83814 - DNA, 25 bp, Homo sapien
tgagggacaaagatagagaatccat

SEQ ID NO: 83815 - DNA, 25 bp, Homo sapien
aattcaccgggagccattggatgag

SEQ ID NO: 83816 - DNA, 25 bp, Homo sapien
aaacaaaattcaccgggagccattg

SEQ ID NO: 83817 - DNA, 25 bp, Homo sapien
gatgagggacaaagatagagaatcc

SEQ ID NO: 83818 - DNA, 25 bp, Homo sapien
agtgtcctacggagaccctccggtg

SEQ ID NO: 83819 - DNA, 25 bp, Homo sapien
aaatactgcattgaatccctaaggc

SEQ ID NO: 83820 - DNA, 25 bp, Homo sapien
taagcacaaggaatgagtgtcctac

SEQ ID NO: 83821 - DNA, 25 bp, Homo sapien
tcataggtactccatcagaaagagc

SEQ ID NO: 83822 - DNA, 25 bp, Homo sapien
cagttaatgaagtgagcatgggttt

SEQ ID NO: 83823 - DNA, 25 bp, Homo sapien
ccaattcctattgctatgtatgtgt

SEQ ID NO: 83824 - DNA, 25 bp, Homo sapien
gagaaacagagatcagttaatgaag

SEQ ID NO: 83825 - DNA, 25 bp, Homo sapien
aacttttcagaattccaattcctat

SEQ ID NO: 83826 - DNA, 25 bp, Homo sapien
tttggaagggacttaatttcagcta

SEQ ID NO: 83827 - DNA, 25 bp, Homo sapien
ttggaagggacttaatttcagctac

SEQ ID NO: 83828 - DNA, 25 bp, Homo sapien
tggagctcccttgaactagacagtc

SEQ ID NO: 83829 - DNA, 25 bp, Homo sapien
aacaagaaaggttggagctcccttg

SEQ ID NO: 83830 - DNA, 25 bp, Homo sapien
gctcccttgaactagacagtcccag

SEQ ID NO: 83831 - DNA, 25 bp, Homo sapien
gaaaggttggagctcccttgaacta

SEQ ID NO: 83832 - DNA, 25 bp, Homo sapien
gcacaacacatacacgacggctcat

SEQ ID NO: 83833 - DNA, 25 bp, Homo sapien
cgggccttcgccatgcttgcagagg

SEQ ID NO: 83834 - DNA, 25 bp, Homo sapien
catacacgacggctcatgactgtca

SEQ ID NO: 83835 - DNA, 25 bp, Homo sapien
tgactaggcttcagataccgactct

SEQ ID NO: 83836 - DNA, 25 bp, Homo sapien
ggaaaagaacatttcttatgactac

SEQ ID NO: 83837 - DNA, 25 bp, Homo sapien
gaacatttcttatgactacagaaac

SEQ ID NO: 83838 - DNA, 25 bp, Homo sapien
aagaacatttcttatgactacagaa

SEQ ID NO: 83839 - DNA, 25 bp, Homo sapien
taggaaaagaacatttcttatgact

SEQ ID NO: 83840 - DNA, 25 bp, Homo sapien
tactgctttatctggagtacctttt

SEQ ID NO: 83841 - DNA, 25 bp, Homo sapien
tgcttgtactgctttatctggagta

SEQ ID NO: 83842 - DNA, 25 bp, Homo sapien
cttgtactgctttatctggagtacc

SEQ ID NO: 83843 - DNA, 25 bp, Homo sapien
ctttgcttgtactgctttatctgga

SEQ ID NO: 83844 - DNA, 25 bp, Homo sapien
caagctactaacttccacatgatgc

SEQ ID NO: 83845 - DNA, 25 bp, Homo sapien
gctccaagctactaacttccacatg

SEQ ID NO: 83846 - DNA, 25 bp, Homo sapien
tggctccaagctactaacttccaca

SEQ ID NO: 83847 - DNA, 25 bp, Homo sapien
agctactaacttccacatgatgcat

SEQ ID NO: 83848 - DNA, 25 bp, Homo sapien
gtacaaatagccctgcttcaataga

SEQ ID NO: 83849 - DNA, 25 bp, Homo sapien
gatggtgtctgtgagaaccctgaca

SEQ ID NO: 83850 - DNA, 25 bp, Homo sapien
tagccctgcttcaatagatggtgtc

SEQ ID NO: 83851 - DNA, 25 bp, Homo sapien
gatgaggacattgccaacccaaatg

SEQ ID NO: 83852 - DNA, 25 bp, Homo sapien
ggtgatgaattcaggtatttatcag

SEQ ID NO: 83853 - DNA, 25 bp, Homo sapien
ttcaggtatttatcagatgctactg

SEQ ID NO: 83854 - DNA, 25 bp, Homo sapien
ggtatttatcagatgctactgtgac

SEQ ID NO: 83855 - DNA, 25 bp, Homo sapien
tatttatcagatgctactgtgacca

SEQ ID NO: 83856 - DNA, 25 bp, Homo sapien
gttgaataacataggtccagaaatg

SEQ ID NO: 83857 - DNA, 25 bp, Homo sapien
ttgaataacataggtccagaaatga

SEQ ID NO: 83858 - DNA, 25 bp, Homo sapien
tgttgaataacataggtccagaaat

SEQ ID NO: 83859 - DNA, 25 bp, Homo sapien
ctgttgaataacataggtccagaaa

SEQ ID NO: 83860 - DNA, 25 bp, Homo sapien
gaagagttgcacaatgcattggtca

SEQ ID NO: 83861 - DNA, 25 bp, Homo sapien
aagtcagccagaagcttaggggtcg

SEQ ID NO: 83862 - DNA, 25 bp, Homo sapien
caatgcattggtcataggaaatgag

SEQ ID NO: 83863 - DNA, 25 bp, Homo sapien
atctcagctgcccctacaaaatgca

SEQ ID NO: 83864 - DNA, 25 bp, Homo sapien
ccccgactcatgacagtggtgtagt

SEQ ID NO: 83865 - DNA, 25 bp, Homo sapien
agtgcagcgggcgacagattgcaac

SEQ ID NO: 83866 - DNA, 25 bp, Homo sapien
actcatgacagtggtgtagtgcagc

SEQ ID NO: 83867 - DNA, 25 bp, Homo sapien
cagcgggcgacagattgcaacatag

SEQ ID NO: 83868 - DNA, 25 bp, Homo sapien
gtgcacaaatcctcccatccaggag

SEQ ID NO: 83869 - DNA, 25 bp, Homo sapien
atccaggaggcagcaaccaacacac

SEQ ID NO: 83870 - DNA, 25 bp, Homo sapien
catccaggaggcagcaaccaacaca

SEQ ID NO: 83871 - DNA, 25 bp, Homo sapien
ggacagtggagtgcacaaatcctcc

SEQ ID NO: 83872 - DNA, 25 bp, Homo sapien
agggtagatggacagtgagaatggt

SEQ ID NO: 83873 - DNA, 25 bp, Homo sapien
aaaagggtagatggacagtgagaat

SEQ ID NO: 83874 - DNA, 25 bp, Homo sapien
aagggtagatggacagtgagaatgg

SEQ ID NO: 83875 - DNA, 25 bp, Homo sapien
aaagggtagatggacagtgagaatg

SEQ ID NO: 83876 - DNA, 25 bp, Homo sapien
gatgacagggggaacatcacaaaaa

SEQ ID NO: 83877 - DNA, 25 bp, Homo sapien
tgagcaattcaatgacaaaagtgtc

SEQ ID NO: 83878 - DNA, 25 bp, Homo sapien
agtgtcagcacaagcaagtttgatg

SEQ ID NO: 83879 - DNA, 25 bp, Homo sapien
catgagcaattcaatgacaaaagtg

SEQ ID NO: 83880 - DNA, 25 bp, Homo sapien
gcaccacaaaggagatggtggagat

SEQ ID NO: 83881 - DNA, 25 bp, Homo sapien
ctaggatagtggtgtaggaggaaat

SEQ ID NO: 83882 - DNA, 25 bp, Homo sapien
cagcaccacaaaggagatggtggag

SEQ ID NO: 83883 - DNA, 25 bp, Homo sapien
aggatagtggtgtaggaggaaatca

SEQ ID NO: 83884 - DNA, 25 bp, Homo sapien
cacacgtggagagtgcctttcgcct

SEQ ID NO: 83885 - DNA, 25 bp, Homo sapien
cattgtagagtacagacaccatctt

SEQ ID NO: 83886 - DNA, 25 bp, Homo sapien
ttttccaagtaagcccatttctgac

SEQ ID NO: 83887 - DNA, 25 bp, Homo sapien
cctctttgttccgaagtgtgtagat

SEQ ID NO: 83888 - DNA, 25 bp, Homo sapien
cataatgtgggctgaaagcgtggac

SEQ ID NO: 83889 - DNA, 25 bp, Homo sapien
tacaggcaagttttatcacaaggca

SEQ ID NO: 83890 - DNA, 25 bp, Homo sapien
taaagatgcaagctccaaagaacag

SEQ ID NO: 83891 - DNA, 25 bp, Homo sapien
tcttaggagtagcaaaggaggccag

SEQ ID NO: 83892 - DNA, 25 bp, Homo sapien
ggcattgtcagaaaccacagagatg

SEQ ID NO: 83893 - DNA, 25 bp, Homo sapien
gcaagccaagatgaccagagactcg

SEQ ID NO: 83894 - DNA, 25 bp, Homo sapien
gcttgtacagcagtcgtttgtgcca

SEQ ID NO: 83895 - DNA, 25 bp, Homo sapien
caccctgggagcgttaggacttaag

SEQ ID NO: 83896 - DNA, 25 bp, Homo sapien
tacaagggagaatgaagggttgacc

SEQ ID NO: 83897 - DNA, 25 bp, Homo sapien
ccagggtgtatgtttcaatgcaagc

SEQ ID NO: 83898 - DNA, 25 bp, Homo sapien
cacagtagcaccgtagatcagggaa

SEQ ID NO: 83899 - DNA, 25 bp, Homo sapien
gcgccttggagagcccatgtgatga

SEQ ID NO: 83900 - DNA, 25 bp, Homo sapien
agcgattgcagtgaggtttcctgcc

SEQ ID NO: 83901 - DNA, 25 bp, Homo sapien
gaccatcttagagattgtgactgtg

SEQ ID NO: 83902 - DNA, 25 bp, Homo sapien
aggattggaggttacagcgattgca

SEQ ID NO: 83903 - DNA, 25 bp, Homo sapien
attctccctgagaacgtctggacca

SEQ ID NO: 83904 - DNA, 25 bp, Homo sapien
gaagtggagatctgagccatacagc

SEQ ID NO: 83905 - DNA, 25 bp, Homo sapien
tcctaagaagtggagatctgagcca

SEQ ID NO: 83906 - DNA, 25 bp, Homo sapien
ggagatctgagccatacagccccat

SEQ ID NO: 83907 - DNA, 25 bp, Homo sapien
tgcctcctaagaagtggagatctga

SEQ ID NO: 83908 - DNA, 25 bp, Homo sapien
gtgaagaggtctgcatattgcaatg

SEQ ID NO: 83909 - DNA, 25 bp, Homo sapien
tctgcatattgcaatgtgctgatca

SEQ ID NO: 83910 - DNA, 25 bp, Homo sapien
gtgctgatcaacagccataaatatg

SEQ ID NO: 83911 - DNA, 25 bp, Homo sapien
tgatcaacagccataaatatgagaa

SEQ ID NO: 83912 - DNA, 25 bp, Homo sapien
tggccatgagtaccctgcagttcgt

SEQ ID NO: 83913 - DNA, 25 bp, Homo sapien
gagtggccatgagtaccctgcagtt

SEQ ID NO: 83914 - DNA, 25 bp, Homo sapien
tgagtaccctgcagttcgtgatggt

SEQ ID NO: 83915 - DNA, 25 bp, Homo sapien
cccatgagtggccatgagtaccctg

SEQ ID NO: 83916 - DNA, 25 bp, Homo sapien
gtgataataaaaacaatctggctta

SEQ ID NO: 83917 - DNA, 25 bp, Homo sapien
gaaggtctcaaaataaattgtccac

SEQ ID NO: 83918 - DNA, 25 bp, Homo sapien
tctggcttatagtatgcacaaaacc

SEQ ID NO: 83919 - DNA, 25 bp, Homo sapien
aataaattgtccaccacactggggc

SEQ ID NO: 83920 - DNA, 25 bp, Homo sapien
agtgcatcagaggatcgatgctgca

SEQ ID NO: 83921 - DNA, 25 bp, Homo sapien
gttaccagaataatagtgtagaaaa

SEQ ID NO: 83922 - DNA, 25 bp, Homo sapien
gatcgatgctgcacagttaccagaa

SEQ ID NO: 83923 - DNA, 25 bp, Homo sapien
tagcaattaccagcaactccagatc

SEQ ID NO: 83924 - DNA, 25 bp, Homo sapien
cagctcgctcttggatgacctgtag

SEQ ID NO: 83925 - DNA, 25 bp, Homo sapien
tgtgaccacatagataaccgagaag

SEQ ID NO: 83926 - DNA, 25 bp, Homo sapien
tggtcagtcccagcaaaatgaattc

SEQ ID NO: 83927 - DNA, 25 bp, Homo sapien
gaagaaactctacatcctgggagct

SEQ ID NO: 83928 - DNA, 25 bp, Homo sapien
aagccatggagaccaacagtaccat

SEQ ID NO: 83929 - DNA, 25 bp, Homo sapien
catatctgtcaaaagccatggagac

SEQ ID NO: 83930 - DNA, 25 bp, Homo sapien
gtagtgtaggggcttacaaatggcc

SEQ ID NO: 83931 - DNA, 25 bp, Homo sapien
tctgtcaaaagccatggagaccaac

SEQ ID NO: 83932 - DNA, 25 bp, Homo sapien
ctgagtgaaggagacccaagagcca

SEQ ID NO: 83933 - DNA, 25 bp, Homo sapien
gaggtcactacaagcaaaacacata

SEQ ID NO: 83934 - DNA, 25 bp, Homo sapien
gtgaaggagacccaagagccatgag

SEQ ID NO: 83935 - DNA, 25 bp, Homo sapien
caagagccatgaggtcactacaagc

SEQ ID NO: 83936 - DNA, 25 bp, Homo sapien
gggaccacaaaagggcaagttcaca

SEQ ID NO: 83937 - DNA, 25 bp, Homo sapien
aaatgctgtctaccacattgggacc

SEQ ID NO: 83938 - DNA, 25 bp, Homo sapien
tgttggcaacaatgactacctgtac

SEQ ID NO: 83939 - DNA, 25 bp, Homo sapien
tacagagtggttgccgaagggccaa

SEQ ID NO: 83940 - DNA, 25 bp, Homo sapien
tagaattcacaaaagctctccagag

SEQ ID NO: 83941 - DNA, 25 bp, Homo sapien
tcaagataggagtgatgatggtata

SEQ ID NO: 83942 - DNA, 25 bp, Homo sapien
gataggagtgatgatggtataaaac

SEQ ID NO: 83943 - DNA, 25 bp, Homo sapien
gagtatagataattggattcaagat

SEQ ID NO: 83944 - DNA, 25 bp, Homo sapien
taagactagcacaaagaccagaagt

SEQ ID NO: 83945 - DNA, 25 bp, Homo sapien
gaaccaacgataatgcatagcaggc

SEQ ID NO: 83946 - DNA, 25 bp, Homo sapien
gaggagtgctcccttatacgacaga

SEQ ID NO: 83947 - DNA, 25 bp, Homo sapien
gccatcacaacgaggaggaacatct

SEQ ID NO: 83948 - DNA, 25 bp, Homo sapien
gcctgaaaatgggaagtacttaata

SEQ ID NO: 83949 - DNA, 25 bp, Homo sapien
tctattcagcaaaacatatgttgac

SEQ ID NO: 83950 - DNA, 25 bp, Homo sapien
aactggactttctccgttcttgctt

SEQ ID NO: 83951 - DNA, 25 bp, Homo sapien
aatgactgactgattcaatgcatga

SEQ ID NO: 83952 - DNA, 25 bp, Homo sapien
acctgtatttatccccttgaatata

SEQ ID NO: 83953 - DNA, 25 bp, Homo sapien
ctgtatttatccccttgaatataaa

SEQ ID NO: 83954 - DNA, 25 bp, Homo sapien
cctgtatttatccccttgaatataa

SEQ ID NO: 83955 - DNA, 25 bp, Homo sapien
gctaatctctagcataataccactt

SEQ ID NO: 83956 - DNA, 25 bp, Homo sapien
tactactcatagttctgtaatcaga

SEQ ID NO: 83957 - DNA, 25 bp, Homo sapien
tcttgtactagtcagcctttttgcc

SEQ ID NO: 83958 - DNA, 25 bp, Homo sapien
tttcagctaaacaccacttgaggcc

SEQ ID NO: 83959 - DNA, 25 bp, Homo sapien
gcatggttgtttctttcgaatcata

SEQ ID NO: 83960 - DNA, 25 bp, Homo sapien
ttgggcactgtgaatcggccaagaa

SEQ ID NO: 83961 - DNA, 25 bp, Homo sapien
aaatctacctttctcttgcctataa

SEQ ID NO: 83962 - DNA, 25 bp, Homo sapien
gctgcagtggcttcacttaccatct

SEQ ID NO: 83963 - DNA, 25 bp, Homo sapien
gggcactgtgaatcggccaagaaaa

SEQ ID NO: 83964 - DNA, 25 bp, Homo sapien
tactgtgttactgactgacgtggac

SEQ ID NO: 83965 - DNA, 25 bp, Homo sapien
actgtgttactgactgacgtggact

SEQ ID NO: 83966 - DNA, 25 bp, Homo sapien
aaatactgtgttactgactgacgtg

SEQ ID NO: 83967 - DNA, 25 bp, Homo sapien
aatactgtgttactgactgacgtgg

SEQ ID NO: 83968 - DNA, 25 bp, Homo sapien
gctgtaagaatggttcagagaaagt

SEQ ID NO: 83969 - DNA, 25 bp, Homo sapien
aagaatggttcagagaaagtgctgc

SEQ ID NO: 83970 - DNA, 25 bp, Homo sapien
cattaggggttggattcctttatag

SEQ ID NO: 83971 - DNA, 25 bp, Homo sapien
agaaagtgctgcgaatgttcattag

SEQ ID NO: 83972 - DNA, 25 bp, Homo sapien
tgttgaagattttcatgtgcctgtg

SEQ ID NO: 83973 - DNA, 25 bp, Homo sapien
ggtgttgaagattttcatgtgcctg

SEQ ID NO: 83974 - DNA, 25 bp, Homo sapien
aagccagtgaaggtgctggagttgc

SEQ ID NO: 83975 - DNA, 25 bp, Homo sapien
ttgaagattttcatgtgcctgtgac

SEQ ID NO: 83976 - DNA, 25 bp, Homo sapien
aacagtgaagagcacaacgaggagg

SEQ ID NO: 83977 - DNA, 25 bp, Homo sapien
tagaggtgacataacagatctccag

SEQ ID NO: 83978 - DNA, 25 bp, Homo sapien
tgtcagagaggaagttggccagcac

SEQ ID NO: 83979 - DNA, 25 bp, Homo sapien
tacatgggggcatggagtctctgac

SEQ ID NO: 83980 - DNA, 25 bp, Homo sapien
agaagttggcgagcaggatgtacat

SEQ ID NO: 83981 - DNA, 25 bp, Homo sapien
aggaagcagccagagaacgagatga

SEQ ID NO: 83982 - DNA, 25 bp, Homo sapien
ggaagcagccagagaacgagatgat

SEQ ID NO: 83983 - DNA, 25 bp, Homo sapien
aaaaaagtagaattggaggaagcag

SEQ ID NO: 83984 - DNA, 25 bp, Homo sapien
aaagtagaattggaggaagcagcca

SEQ ID NO: 83985 - DNA, 25 bp, Homo sapien
tacaggtgagggctaacagaggacc

SEQ ID NO: 83986 - DNA, 25 bp, Homo sapien
tagagaacttaaggtggagctagtc

SEQ ID NO: 83987 - DNA, 25 bp, Homo sapien
ccggcagatggcaaggtataggtca

SEQ ID NO: 83988 - DNA, 25 bp, Homo sapien
ggagctagtcaactctagtagaggg

SEQ ID NO: 83989 - DNA, 25 bp, Homo sapien
ctcaggaccagagcatagcacccca

SEQ ID NO: 83990 - DNA, 25 bp, Homo sapien
tcaggaccagagcatagcaccccac

SEQ ID NO: 83991 - DNA, 25 bp, Homo sapien
tccagatgctgaaggaaccctcaac

SEQ ID NO: 83992 - DNA, 25 bp, Homo sapien
gatgctgaaggaaccctcaacacag

SEQ ID NO: 83993 - DNA, 25 bp, Homo sapien
ttcttccagatgctgaaggaaccct

SEQ ID NO: 83994 - DNA, 25 bp, Homo sapien
cttccagatgctgaaggaaccctca

SEQ ID NO: 83995 - DNA, 25 bp, Homo sapien
ttccgaattcatgcccagatgttgg

SEQ ID NO: 83996 - DNA, 25 bp, Homo sapien
gagtcacagtcttctgcattccgaa

SEQ ID NO: 83997 - DNA, 25 bp, Homo sapien
cattacagtgtagttcctcattgca

SEQ ID NO: 83998 - DNA, 25 bp, Homo sapien
gatcatcattgagccataaacagtg

SEQ ID NO: 83999 - DNA, 25 bp, Homo sapien
gagacagctctctactgggtattcc

SEQ ID NO: 84000 - DNA, 25 bp, Homo sapien
tattcgtcgtagaattcaggtactg

SEQ ID NO: 84001 - DNA, 25 bp, Homo sapien
cacccagggtaagacatctgtattg

SEQ ID NO: 84002 - DNA, 25 bp, Homo sapien
tactgtaagttgagcctgtcctttg

SEQ ID NO: 84003 - DNA, 25 bp, Homo sapien
catcatctcctttcatggacaaaag

SEQ ID NO: 84004 - DNA, 25 bp, Homo sapien
ggaaactttgtccattgcatcatct

SEQ ID NO: 84005 - DNA, 25 bp, Homo sapien
tggacaaaaggggatcacaaacctg

SEQ ID NO: 84006 - DNA, 25 bp, Homo sapien
aaacctgaagtttctctgagactgt

SEQ ID NO: 84007 - DNA, 25 bp, Homo sapien
tactgaatgacggtgcaaacataga

SEQ ID NO: 84008 - DNA, 25 bp, Homo sapien
tgtaaaagcaccagcaattactgaa

SEQ ID NO: 84009 - DNA, 25 bp, Homo sapien
taaaagcaccagcaattactgaatg

SEQ ID NO: 84010 - DNA, 25 bp, Homo sapien
gaatgacggtgcaaacatagatggg

SEQ ID NO: 84011 - DNA, 25 bp, Homo sapien
gcattctgtagagcccaaggagaag

SEQ ID NO: 84012 - DNA, 25 bp, Homo sapien
ttggatagcgtagaggccgacagat

SEQ ID NO: 84013 - DNA, 25 bp, Homo sapien
tcgatcaaatgccataactgccagg

SEQ ID NO: 84014 - DNA, 25 bp, Homo sapien
ccacaagattggtacagagacgtct

SEQ ID NO: 84015 - DNA, 25 bp, Homo sapien
gccttttttgcaagtgagagttaga

SEQ ID NO: 84016 - DNA, 25 bp, Homo sapien
gaaagagcataaagacaggcagagg

SEQ ID NO: 84017 - DNA, 25 bp, Homo sapien
gaaaagacaagctctatcacagggc

SEQ ID NO: 84018 - DNA, 25 bp, Homo sapien
cacgaccagagcataggaccccaca

SEQ ID NO: 84019 - DNA, 25 bp, Homo sapien
tactgagccgtagaacagtgaaacc

SEQ ID NO: 84020 - DNA, 25 bp, Homo sapien
gaccagtactgagccgtagaacagt

SEQ ID NO: 84021 - DNA, 25 bp, Homo sapien
cagtactgagccgtagaacagtgaa

SEQ ID NO: 84022 - DNA, 25 bp, Homo sapien
atgaccagtactgagccgtagaaca

SEQ ID NO: 84023 - DNA, 25 bp, Homo sapien
tccagcttcattcttagatggtggg

SEQ ID NO: 84024 - DNA, 25 bp, Homo sapien
ccagcttcattcttagatggtgggc

SEQ ID NO: 84025 - DNA, 25 bp, Homo sapien
tcttcagagcttttctcatatcttt

SEQ ID NO: 84026 - DNA, 25 bp, Homo sapien
tttcttcagagcttttctcatatct

SEQ ID NO: 84027 - DNA, 25 bp, Homo sapien
tcagagcttttctcatatctttgtt

SEQ ID NO: 84028 - DNA, 25 bp, Homo sapien
ccaaaatttcttcagagcttttctc

SEQ ID NO: 84029 - DNA, 25 bp, Homo sapien
ggagaacaaattccgtcatagtgct

SEQ ID NO: 84030 - DNA, 25 bp, Homo sapien
aactttgcatctcctgacaaccagg

SEQ ID NO: 84031 - DNA, 25 bp, Homo sapien
tggtaaatacatagatcacaaagaa

SEQ ID NO: 84032 - DNA, 25 bp, Homo sapien
ttgtttgtgaattccagggctgtag

SEQ ID NO: 84033 - DNA, 25 bp, Homo sapien
gaaagcaaagttccctaggagaata

SEQ ID NO: 84034 - DNA, 25 bp, Homo sapien
tatgaagccgtttgtccaatctcac

SEQ ID NO: 84035 - DNA, 25 bp, Homo sapien
gcaaagttccctaggagaatataca

SEQ ID NO: 84036 - DNA, 25 bp, Homo sapien
gttccctaggagaatatacattggg

SEQ ID NO: 84037 - DNA, 25 bp, Homo sapien
gaggaaacagccaacaaaagagatg

SEQ ID NO: 84038 - DNA, 25 bp, Homo sapien
ctggaggaaacagccaacaaaagag

SEQ ID NO: 84039 - DNA, 25 bp, Homo sapien
aaagagatggtttttgtctctgaga

SEQ ID NO: 84040 - DNA, 25 bp, Homo sapien
tctctgagaggaagttgactagcat

SEQ ID NO: 84041 - DNA, 25 bp, Homo sapien
gatgcagaggaagtatgcttctatt

SEQ ID NO: 84042 - DNA, 25 bp, Homo sapien
gaggaagtatgcttctattgtacca

SEQ ID NO: 84043 - DNA, 25 bp, Homo sapien
gaagtatgcttctattgtaccaagg

SEQ ID NO: 84044 - DNA, 25 bp, Homo sapien
cagaggaagtatgcttctattgtac

SEQ ID NO: 84045 - DNA, 25 bp, Homo sapien
gatagcaaggtaccgatcatatgcc

SEQ ID NO: 84046 - DNA, 25 bp, Homo sapien
tctcagtgataggagctgaggcaca

SEQ ID NO: 84047 - DNA, 25 bp, Homo sapien
taggagccacagatgtacagaagag

SEQ ID NO: 84048 - DNA, 25 bp, Homo sapien
cacagaaaggcagttgagacagttg

SEQ ID NO: 84049 - DNA, 25 bp, Homo sapien
acattgccagtagggccccaaagaa

SEQ ID NO: 84050 - DNA, 25 bp, Homo sapien
caaagaataaacacaccactgtcag

SEQ ID NO: 84051 - DNA, 25 bp, Homo sapien
ggactttcttcaacgcagccttcat

SEQ ID NO: 84052 - DNA, 25 bp, Homo sapien
gctgctgaagggacttttaatacag

SEQ ID NO: 84053 - DNA, 25 bp, Homo sapien
cagaagtaaccaaagaatgaataat

SEQ ID NO: 84054 - DNA, 25 bp, Homo sapien
acagaagtaaccaaagaatgaataa

SEQ ID NO: 84055 - DNA, 25 bp, Homo sapien
gaagtaaccaaagaatgaataataa

SEQ ID NO: 84056 - DNA, 25 bp, Homo sapien
aaacagaagtaaccaaagaatgaat

SEQ ID NO: 84057 - DNA, 25 bp, Homo sapien
gaaacactctgttgtacccagtgaa

SEQ ID NO: 84058 - DNA, 25 bp, Homo sapien
gacaatagctccattccctagcagt

SEQ ID NO: 84059 - DNA, 25 bp, Homo sapien
tattgactagcatgtttgggacagt

SEQ ID NO: 84060 - DNA, 25 bp, Homo sapien
tgtggagccgcctgtccaatttcac

SEQ ID NO: 84061 - DNA, 25 bp, Homo sapien
gaggggtagtgtaatggacgacaga

SEQ ID NO: 84062 - DNA, 25 bp, Homo sapien
ggtagtgtaatggacgacagatggc

SEQ ID NO: 84063 - DNA, 25 bp, Homo sapien
tgtaatggacgacagatggccaggt

SEQ ID NO: 84064 - DNA, 25 bp, Homo sapien
tagtgtaatggacgacagatggcca

SEQ ID NO: 84065 - DNA, 25 bp, Homo sapien
gatgcaggccagtgcaaacaatggg

SEQ ID NO: 84066 - DNA, 25 bp, Homo sapien
tttagttcgaccagcaccagaggga

SEQ ID NO: 84067 - DNA, 25 bp, Homo sapien
cagagtgtaagatcccaagatggag

SEQ ID NO: 84068 - DNA, 25 bp, Homo sapien
ggaagggcccaaagataatcatcga

SEQ ID NO: 84069 - DNA, 25 bp, Homo sapien
atgacaatttgctttgctgatgaag

SEQ ID NO: 84070 - DNA, 25 bp, Homo sapien
gagaacaccgatggtcaatgacaat

SEQ ID NO: 84071 - DNA, 25 bp, Homo sapien
agactgtggagagaacaccgatggt

SEQ ID NO: 84072 - DNA, 25 bp, Homo sapien
caatttgctttgctgatgaagcatc

SEQ ID NO: 84073 - DNA, 25 bp, Homo sapien
gagaagttggctaggagcacgtaca

SEQ ID NO: 84074 - DNA, 25 bp, Homo sapien
gcaggtcacataccagatctctagg

SEQ ID NO: 84075 - DNA, 25 bp, Homo sapien
ccagtcagagtgaagatgtagacca

SEQ ID NO: 84076 - DNA, 25 bp, Homo sapien
ggtatggagtcgatggtcccacctc

SEQ ID NO: 84077 - DNA, 25 bp, Homo sapien
gacaatgccatcagtgggtctacat

SEQ ID NO: 84078 - DNA, 25 bp, Homo sapien
gtggaactgagtgaaacatccagag

SEQ ID NO: 84079 - DNA, 25 bp, Homo sapien
cacagagctggccagtcataatgga

SEQ ID NO: 84080 - DNA, 25 bp, Homo sapien
tggaaattgaatgtccaaggaaacc

SEQ ID NO: 84081 - DNA, 25 bp, Homo sapien
gatgaaaagagagctcacagaatgg

SEQ ID NO: 84082 - DNA, 25 bp, Homo sapien
catggtgaggttgatgaaaagagag

SEQ ID NO: 84083 - DNA, 25 bp, Homo sapien
ggtgaggttgatgaaaagagagctc

SEQ ID NO: 84084 - DNA, 25 bp, Homo sapien
gaggttgatgaaaagagagctcaca

SEQ ID NO: 84085 - DNA, 25 bp, Homo sapien
gttctgagcaccaaggtataggacc

SEQ ID NO: 84086 - DNA, 25 bp, Homo sapien
cagttctgagcaccaaggtatagga

SEQ ID NO: 84087 - DNA, 25 bp, Homo sapien
acagttctgagcaccaaggtatagg

SEQ ID NO: 84088 - DNA, 25 bp, Homo sapien
ttctgagcaccaaggtataggaccc

SEQ ID NO: 84089 - DNA, 25 bp, Homo sapien
gcttatgcatagcaactgagttgcc

SEQ ID NO: 84090 - DNA, 25 bp, Homo sapien
ggtgttaccacagaatatatcagtg

SEQ ID NO: 84091 - DNA, 25 bp, Homo sapien
catacatcagcattatggctccata

SEQ ID NO: 84092 - DNA, 25 bp, Homo sapien
tccatagaacagagacacaacaacc

SEQ ID NO: 84093 - DNA, 25 bp, Homo sapien
tattcatgatctctggataattctc

SEQ ID NO: 84094 - DNA, 25 bp, Homo sapien
tcatgatctctggataattctcatt

SEQ ID NO: 84095 - DNA, 25 bp, Homo sapien
ctctggataattctcattccacaga

SEQ ID NO: 84096 - DNA, 25 bp, Homo sapien
ggataattctcattccacagaagac

SEQ ID NO: 84097 - DNA, 25 bp, Homo sapien
ccaagtctcttggagtgtaatccaa

SEQ ID NO: 84098 - DNA, 25 bp, Homo sapien
gaaagacatgagtgtaatccaagtc

SEQ ID NO: 84099 - DNA, 25 bp, Homo sapien
tggagtgtaatccaattgcttgcta

SEQ ID NO: 84100 - DNA, 25 bp, Homo sapien
gcttgctacgtatctcaaggatttt

SEQ ID NO: 84101 - DNA, 25 bp, Homo sapien
gtgtgtagtagtgggttgcatctca

SEQ ID NO: 84102 - DNA, 25 bp, Homo sapien
ttccagcaaccagggaatcccagga

SEQ ID NO: 84103 - DNA, 25 bp, Homo sapien
acgatgtgtgttgctgacctgttca

SEQ ID NO: 84104 - DNA, 25 bp, Homo sapien
gcatctcactgcatagatgatggct

SEQ ID NO: 84105 - DNA, 25 bp, Homo sapien
caaggaaggcaaaatttcccagcag

SEQ ID NO: 84106 - DNA, 25 bp, Homo sapien
gaggacacataccagatctcaagga

SEQ ID NO: 84107 - DNA, 25 bp, Homo sapien
acacataccagatctcaaggaaggc

SEQ ID NO: 84108 - DNA, 25 bp, Homo sapien
gagaatgttgactagcatgttagga

SEQ ID NO: 84109 - DNA, 25 bp, Homo sapien
catgatggcagggtactgcagtggg

SEQ ID NO: 84110 - DNA, 25 bp, Homo sapien
atgatggcagggtactgcagtgggt

SEQ ID NO: 84111 - DNA, 25 bp, Homo sapien
acagtcatgatggcagggtactgca

SEQ ID NO: 84112 - DNA, 25 bp, Homo sapien
agtcatgatggcagggtactgcagt

SEQ ID NO: 84113 - DNA, 25 bp, Homo sapien
aaggaatccaataagccaacagaaa

SEQ ID NO: 84114 - DNA, 25 bp, Homo sapien
aggaatccaataagccaacagaaag

SEQ ID NO: 84115 - DNA, 25 bp, Homo sapien
caaggaatccaataagccaacagaa

SEQ ID NO: 84116 - DNA, 25 bp, Homo sapien
tagtaacaggatataggatcgaaga

SEQ ID NO: 84117 - DNA, 25 bp, Homo sapien
ggatcgaagaatgtacatactagtg

SEQ ID NO: 84118 - DNA, 25 bp, Homo sapien
caggatataggatcgaagaatgtac

SEQ ID NO: 84119 - DNA, 25 bp, Homo sapien
acatactagtgaaaaagaggacaag

SEQ ID NO: 84120 - DNA, 25 bp, Homo sapien
tagagaaggcttttctccgaccagc

SEQ ID NO: 84121 - DNA, 25 bp, Homo sapien
gagataccacaaccaaatgagaacc

SEQ ID NO: 84122 - DNA, 25 bp, Homo sapien
atacattaccatgactgtcccatag

SEQ ID NO: 84123 - DNA, 25 bp, Homo sapien
tttctccgaccagctgcagaaggga

SEQ ID NO: 84124 - DNA, 25 bp, Homo sapien
agttgggatcccatatgtaggactt

SEQ ID NO: 84125 - DNA, 25 bp, Homo sapien
ttgggatcccatatgtaggacttac

SEQ ID NO: 84126 - DNA, 25 bp, Homo sapien
ctgcaataaagttgggatcccatat

SEQ ID NO: 84127 - DNA, 25 bp, Homo sapien
aaagttgggatcccatatgtaggac

SEQ ID NO: 84128 - DNA, 25 bp, Homo sapien
taaaaagaggagtcgttactgaata

SEQ ID NO: 84129 - DNA, 25 bp, Homo sapien
gacatttctcagagcgagtttcatg

SEQ ID NO: 84130 - DNA, 25 bp, Homo sapien
tactgaatataccagtgtgaggatc

SEQ ID NO: 84131 - DNA, 25 bp, Homo sapien
catgtccttattacgaagagtatag

SEQ ID NO: 84132 - DNA, 25 bp, Homo sapien
tcttagctctcctaaagtcataagg

SEQ ID NO: 84133 - DNA, 25 bp, Homo sapien
cataatgagtaaatagcccagcacc

SEQ ID NO: 84134 - DNA, 25 bp, Homo sapien
cttattgattccttacatgttctgg

SEQ ID NO: 84135 - DNA, 25 bp, Homo sapien
tactgatctttaaagcccagtctgt

SEQ ID NO: 84136 - DNA, 25 bp, Homo sapien
cactgctgtattggatgtcaaattg

SEQ ID NO: 84137 - DNA, 25 bp, Homo sapien
taatattttctctcggtaaaatgcc

SEQ ID NO: 84138 - DNA, 25 bp, Homo sapien
tttctctcggtaaaatgcctattcg

SEQ ID NO: 84139 - DNA, 25 bp, Homo sapien
agtctttgcacactgctgtattgga

SEQ ID NO: 84140 - DNA, 25 bp, Homo sapien
tatgtactgcccgtgaattcctcgg

SEQ ID NO: 84141 - DNA, 25 bp, Homo sapien
tccagaacgccagatgtcgctgtgg

SEQ ID NO: 84142 - DNA, 25 bp, Homo sapien
cgtgcgtctgtgtggttactataac

SEQ ID NO: 84143 - DNA, 25 bp, Homo sapien
ttttgttactccgaatgaagcaggg

SEQ ID NO: 84144 - DNA, 25 bp, Homo sapien
ctctttccagagactatgtagaagc

SEQ ID NO: 84145 - DNA, 25 bp, Homo sapien
tgctctttgtaagcgatagtcttgc

SEQ ID NO: 84146 - DNA, 25 bp, Homo sapien
atagtcttgccagtgtcttgtgtct

SEQ ID NO: 84147 - DNA, 25 bp, Homo sapien
gaaaattttcttcgctcacccacag

SEQ ID NO: 84148 - DNA, 25 bp, Homo sapien
taaggcttacgttgagattgagaag

SEQ ID NO: 84149 - DNA, 25 bp, Homo sapien
taaatcctggatatactgtagatga

SEQ ID NO: 84150 - DNA, 25 bp, Homo sapien
ctttggtgctgtaaatcctggatat

SEQ ID NO: 84151 - DNA, 25 bp, Homo sapien
gatgagtactgcgtttttcttttat

SEQ ID NO: 84152 - DNA, 25 bp, Homo sapien
aattgaattctgcttgttggaattc

SEQ ID NO: 84153 - DNA, 25 bp, Homo sapien
gcaattgaattctgcttgttggaat

SEQ ID NO: 84154 - DNA, 25 bp, Homo sapien
ttgaattctgcttgttggaattcat

SEQ ID NO: 84155 - DNA, 25 bp, Homo sapien
ctgcaattgaattctgcttgttgga

SEQ ID NO: 84156 - DNA, 25 bp, Homo sapien
ctcactagctggttgagcttgggca

SEQ ID NO: 84157 - DNA, 25 bp, Homo sapien
tttattacctcagtcttcacggaag

SEQ ID NO: 84158 - DNA, 25 bp, Homo sapien
gcttgggcaagacatagaaataaca

SEQ ID NO: 84159 - DNA, 25 bp, Homo sapien
cacagcaaatacatgagagagccag

SEQ ID NO: 84160 - DNA, 25 bp, Homo sapien
cttctattgatcctgccatctaggt

SEQ ID NO: 84161 - DNA, 25 bp, Homo sapien
gcttctattgatcctgccatctagg

SEQ ID NO: 84162 - DNA, 25 bp, Homo sapien
ggcttctattgatcctgccatctag

SEQ ID NO: 84163 - DNA, 25 bp, Homo sapien
agagtttaattctccggtgagtgtc

SEQ ID NO: 84164 - DNA, 25 bp, Homo sapien
cctggccttcgctcagatcatttcg

SEQ ID NO: 84165 - DNA, 25 bp, Homo sapien
ggaagctgcagcgtaccttgtcttt

SEQ ID NO: 84166 - DNA, 25 bp, Homo sapien
ttctccggtgagtgtctagagggcc

SEQ ID NO: 84167 - DNA, 25 bp, Homo sapien
cacgagctgagtgcgtcctgtcact

SEQ ID NO: 84168 - DNA, 25 bp, Homo sapien
tcaatggctgaggtgaggtaccccg

SEQ ID NO: 84169 - DNA, 25 bp, Homo sapien
tcacggccagcgaagtgagttcaat

SEQ ID NO: 84170 - DNA, 25 bp, Homo sapien
ggagcttggaacagactcacggcca

SEQ ID NO: 84171 - DNA, 25 bp, Homo sapien
ccgccgccggtgctccgtcgccgcc

SEQ ID NO: 84172 - DNA, 25 bp, Homo sapien
gccgccgccggtgctccgtcgccgc

SEQ ID NO: 84173 - DNA, 25 bp, Homo sapien
cgccggtgctccgtcgccgccgcgc

SEQ ID NO: 84174 - DNA, 25 bp, Homo sapien
ccctgccgccgccggtgctccgtcg

SEQ ID NO: 84175 - DNA, 25 bp, Homo sapien
ccgtcccgcgatattgagctccgaa

SEQ ID NO: 84176 - DNA, 25 bp, Homo sapien
tagccaagtgcaggttatagggagc

SEQ ID NO: 84177 - DNA, 25 bp, Homo sapien
taggtattaacaacagtactggcac

SEQ ID NO: 84178 - DNA, 25 bp, Homo sapien
cattagttgttacagctccgcaagg

SEQ ID NO: 84179 - DNA, 25 bp, Homo sapien
tttttcgactcctgtctctggcatc

SEQ ID NO: 84180 - DNA, 25 bp, Homo sapien
ctttttcgactcctgtctctggcat

SEQ ID NO: 84181 - DNA, 25 bp, Homo sapien
gtgttgccattattaactcttttgc

SEQ ID NO: 84182 - DNA, 25 bp, Homo sapien
ctggagccgtgttgccattattaac

SEQ ID NO: 84183 - DNA, 25 bp, Homo sapien
gtcttctgtcctgtccttattagct

SEQ ID NO: 84184 - DNA, 25 bp, Homo sapien
tgtcttctgtcctgtccttattagc

SEQ ID NO: 84185 - DNA, 25 bp, Homo sapien
gagacccttttgctggcccatgacc

SEQ ID NO: 84186 - DNA, 25 bp, Homo sapien
gaggaaagacagataggtactactt

SEQ ID NO: 84187 - DNA, 25 bp, Homo sapien
ggaaagacagataggtactacttta

SEQ ID NO: 84188 - DNA, 25 bp, Homo sapien
ctgaggaaagacagataggtactac

SEQ ID NO: 84189 - DNA, 25 bp, Homo sapien
aagacagataggtactactttatgg

SEQ ID NO: 84190 - DNA, 25 bp, Homo sapien
cttggctgtacactctgggtccaca

SEQ ID NO: 84191 - DNA, 25 bp, Homo sapien
ctttaacagcaaggccttcacagat

SEQ ID NO: 84192 - DNA, 25 bp, Homo sapien
ggagctttgccctttaacagcaagg

SEQ ID NO: 84193 - DNA, 25 bp, Homo sapien
caccttggctgtacactctgggtcc

SEQ ID NO: 84194 - DNA, 25 bp, Homo sapien
tagcatgacatcatagacatcattt

SEQ ID NO: 84195 - DNA, 25 bp, Homo sapien
atcatttccttcacaatacacatga

SEQ ID NO: 84196 - DNA, 25 bp, Homo sapien
ctgatttagcatgacatcatagaca

SEQ ID NO: 84197 - DNA, 25 bp, Homo sapien
catttccttcacaatacacatgagc

SEQ ID NO: 84198 - DNA, 25 bp, Homo sapien
tcctctgggcatcatcttctaatag

SEQ ID NO: 84199 - DNA, 25 bp, Homo sapien
tagctgaatcagatagtacttgttg

SEQ ID NO: 84200 - DNA, 25 bp, Homo sapien
catcatcttctaatagctgaatcag

SEQ ID NO: 84201 - DNA, 25 bp, Homo sapien
cagatagtacttgttgttgttgaac

SEQ ID NO: 84202 - DNA, 25 bp, Homo sapien
cacccactaagctgcttctgacttt

SEQ ID NO: 84203 - DNA, 25 bp, Homo sapien
ccacccactaagctgcttctgactt

SEQ ID NO: 84204 - DNA, 25 bp, Homo sapien
tagttccctaagagtaacaggccag

SEQ ID NO: 84205 - DNA, 25 bp, Homo sapien
gatctctctgcttaacatctgacaa

SEQ ID NO: 84206 - DNA, 25 bp, Homo sapien
gggaactctaaggaggatgcctgcc

SEQ ID NO: 84207 - DNA, 25 bp, Homo sapien
tgattcctaaggctctcccagactt

SEQ ID NO: 84208 - DNA, 25 bp, Homo sapien
ttccttggccttgttgagattgcct

SEQ ID NO: 84209 - DNA, 25 bp, Homo sapien
gcctgaacaagccaccaggctgtgc

SEQ ID NO: 84210 - DNA, 25 bp, Homo sapien
ccttggccttgttgagattgcctga

SEQ ID NO: 84211 - DNA, 25 bp, Homo sapien
gaaagatttccttggccttgttgag

SEQ ID NO: 84212 - DNA, 25 bp, Homo sapien
ggtggcatagtccatctgtagcata

SEQ ID NO: 84213 - DNA, 25 bp, Homo sapien
catctgtagcatatcatattttcca

SEQ ID NO: 84214 - DNA, 25 bp, Homo sapien
catagtccatctgtagcatatcata

SEQ ID NO: 84215 - DNA, 25 bp, Homo sapien
cttttctcgatcttcccaattgttt

SEQ ID NO: 84216 - DNA, 25 bp, Homo sapien
gggagatttaagagattcctctttc

SEQ ID NO: 84217 - DNA, 25 bp, Homo sapien
cttcaagggagatttaagagattcc

SEQ ID NO: 84218 - DNA, 25 bp, Homo sapien
aagggagatttaagagattcctctt

SEQ ID NO: 84219 - DNA, 25 bp, Homo sapien
tcaagggagatttaagagattcctc

SEQ ID NO: 84220 - DNA, 25 bp, Homo sapien
ttattaactcctgtacccgaagatc

SEQ ID NO: 84221 - DNA, 25 bp, Homo sapien
ccatggcctgaacattacagatcaa

SEQ ID NO: 84222 - DNA, 25 bp, Homo sapien
cattacagatcaactttattaactc

SEQ ID NO: 84223 - DNA, 25 bp, Homo sapien
cccgaagatctagctgtgactctgg

SEQ ID NO: 84224 - DNA, 25 bp, Homo sapien
gactccaaactaggatcccatctag

SEQ ID NO: 84225 - DNA, 25 bp, Homo sapien
gaactgtacttaacatccttcccta

SEQ ID NO: 84226 - DNA, 25 bp, Homo sapien
ccacccagagatcagactccaaact

SEQ ID NO: 84227 - DNA, 25 bp, Homo sapien
gatcccatctagtgaactgtactta

SEQ ID NO: 84228 - DNA, 25 bp, Homo sapien
gtagaattcattgcatgcttccatg

SEQ ID NO: 84229 - DNA, 25 bp, Homo sapien
gagactggtaacctgccttgatttg

SEQ ID NO: 84230 - DNA, 25 bp, Homo sapien
catgagagctcgtccatgctggcca

SEQ ID NO: 84231 - DNA, 25 bp, Homo sapien
tggccagcccgaatacaatcctcaa

SEQ ID NO: 84232 - DNA, 25 bp, Homo sapien
caaataggaaaagggggtgatatgc

SEQ ID NO: 84233 - DNA, 25 bp, Homo sapien
tcggatgtaaaccagaaaacagaat

SEQ ID NO: 84234 - DNA, 25 bp, Homo sapien
ggtggttggatagctagacccattc

SEQ ID NO: 84235 - DNA, 25 bp, Homo sapien
attttgtctatctaatatcacttga

SEQ ID NO: 84236 - DNA, 25 bp, Homo sapien
gttgaccactcagggttatttctag

SEQ ID NO: 84237 - DNA, 25 bp, Homo sapien
tttctgacatgtggctaaaaggcgc

SEQ ID NO: 84238 - DNA, 25 bp, Homo sapien
tatactcggtataagatgaactatg

SEQ ID NO: 84239 - DNA, 25 bp, Homo sapien
tacagttctatctagaagcacaggt

SEQ ID NO: 84240 - DNA, 25 bp, Homo sapien
acaggtatgagaaacaggttttcca

SEQ ID NO: 84241 - DNA, 25 bp, Homo sapien
tgtgtccggattagtggaggagtac

SEQ ID NO: 84242 - DNA, 25 bp, Homo sapien
ccggattagtggaggagtacggagt

SEQ ID NO: 84243 - DNA, 25 bp, Homo sapien
cttctgtgtccggattagtggagga

SEQ ID NO: 84244 - DNA, 25 bp, Homo sapien
ccttctgtgtccggattagtggagg

SEQ ID NO: 84245 - DNA, 25 bp, Homo sapien
taactttcatggtcaagggggcgca

SEQ ID NO: 84246 - DNA, 25 bp, Homo sapien
ttttcaccagcttaatagcaatttc

SEQ ID NO: 84247 - DNA, 25 bp, Homo sapien
tatagtgttggtccaatgggtgttc

SEQ ID NO: 84248 - DNA, 25 bp, Homo sapien
tagcaatttcaatgtctcccaaagc

SEQ ID NO: 84249 - DNA, 25 bp, Homo sapien
caaggtcatggtatagtcgctgtgt

SEQ ID NO: 84250 - DNA, 25 bp, Homo sapien
tggtatagtcgctgtgtgtgggagc

SEQ ID NO: 84251 - DNA, 25 bp, Homo sapien
tcatggtatagtcgctgtgtgtggg

SEQ ID NO: 84252 - DNA, 25 bp, Homo sapien
aaggtcctctctgaaggcttctttc

SEQ ID NO: 84253 - DNA, 25 bp, Homo sapien
aaggagtgtctttccaaacgcaaag

SEQ ID NO: 84254 - DNA, 25 bp, Homo sapien
tccaaacgcaaagctagactcagac

SEQ ID NO: 84255 - DNA, 25 bp, Homo sapien
gcaaggagtgtctttccaaacgcaa

SEQ ID NO: 84256 - DNA, 25 bp, Homo sapien
gggcaaggagtgtctttccaaacgc

SEQ ID NO: 84257 - DNA, 25 bp, Homo sapien
ctccctcttataagttctacagctg

SEQ ID NO: 84258 - DNA, 25 bp, Homo sapien
gactccctcttataagttctacagc

SEQ ID NO: 84259 - DNA, 25 bp, Homo sapien
cctcttataagttctacagctgtac

SEQ ID NO: 84260 - DNA, 25 bp, Homo sapien
tgactccctcttataagttctacag

SEQ ID NO: 84261 - DNA, 25 bp, Homo sapien
tctgcacagataggccataagcata

SEQ ID NO: 84262 - DNA, 25 bp, Homo sapien
tctgttgttctgcacagataggcca

SEQ ID NO: 84263 - DNA, 25 bp, Homo sapien
gcacagataggccataagcataaaa

SEQ ID NO: 84264 - DNA, 25 bp, Homo sapien
tgttctgcacagataggccataagc

SEQ ID NO: 84265 - DNA, 25 bp, Homo sapien
taaggaaaagccaatattattgtac

SEQ ID NO: 84266 - DNA, 25 bp, Homo sapien
ctaaggaaaagccaatattattgta

SEQ ID NO: 84267 - DNA, 25 bp, Homo sapien
tcaagattcccacccagttactcat

SEQ ID NO: 84268 - DNA, 25 bp, Homo sapien
gggcaattcgaagcccatggctcaa

SEQ ID NO: 84269 - DNA, 25 bp, Homo sapien
gaagcccatggctcaagattcccac

SEQ ID NO: 84270 - DNA, 25 bp, Homo sapien
catggctcaagattcccacccagtt

SEQ ID NO: 84271 - DNA, 25 bp, Homo sapien
gctcctcccagagttcaatttcact

SEQ ID NO: 84272 - DNA, 25 bp, Homo sapien
tactgtatccctttcccctgtgctc

SEQ ID NO: 84273 - DNA, 25 bp, Homo sapien
tgtgctcctcccagagttcaatttc

SEQ ID NO: 84274 - DNA, 25 bp, Homo sapien
ccctgtgctcctcccagagttcaat

SEQ ID NO: 84275 - DNA, 25 bp, Homo sapien
cctgtattctttaggcgagaggcaa

SEQ ID NO: 84276 - DNA, 25 bp, Homo sapien
gagcagcagtcctgtattctttagg

SEQ ID NO: 84277 - DNA, 25 bp, Homo sapien
tctttaggcgagaggcaaagcagta

SEQ ID NO: 84278 - DNA, 25 bp, Homo sapien
cagtcctgtattctttaggcgagag

SEQ ID NO: 84279 - DNA, 25 bp, Homo sapien
tctctcaagctatcccaggtaaacc

SEQ ID NO: 84280 - DNA, 25 bp, Homo sapien
taaactagagatcacagacatactc

SEQ ID NO: 84281 - DNA, 25 bp, Homo sapien
tactaagaattagatggctccaaag

SEQ ID NO: 84282 - DNA, 25 bp, Homo sapien
gaaattgtacttggtcctctctcaa

SEQ ID NO: 84283 - DNA, 25 bp, Homo sapien
aatccttcggccttaggattggcct

SEQ ID NO: 84284 - DNA, 25 bp, Homo sapien
tgtttaccttgaagcaatccttcgg

SEQ ID NO: 84285 - DNA, 25 bp, Homo sapien
gttcattacactgacctagagctac

SEQ ID NO: 84286 - DNA, 25 bp, Homo sapien
gattggcctctagtagttcattaca

SEQ ID NO: 84287 - DNA, 25 bp, Homo sapien
tcagaagctgcaatagagaacgtag

SEQ ID NO: 84288 - DNA, 25 bp, Homo sapien
aggagtcttctagtcctcctggttc

SEQ ID NO: 84289 - DNA, 25 bp, Homo sapien
caaaaggagtcttctagtcctcctg

SEQ ID NO: 84290 - DNA, 25 bp, Homo sapien
gagaacgtagtcttatctggccaaa

SEQ ID NO: 84291 - DNA, 25 bp, Homo sapien
aaggtaccgcatacggacctggttg

SEQ ID NO: 84292 - DNA, 25 bp, Homo sapien
attcattgtagttgagggtataacc

SEQ ID NO: 84293 - DNA, 25 bp, Homo sapien
gagggtataaccatctggattcaga

SEQ ID NO: 84294 - DNA, 25 bp, Homo sapien
gacctggttggggttatatacaata

SEQ ID NO: 84295 - DNA, 25 bp, Homo sapien
cagatctctggtttatttaatatca

SEQ ID NO: 84296 - DNA, 25 bp, Homo sapien
gatcagatctctggtttatttaata

SEQ ID NO: 84297 - DNA, 25 bp, Homo sapien
gaagatcagatctctggtttattta

SEQ ID NO: 84298 - DNA, 25 bp, Homo sapien
ttgaagatcagatctctggtttatt

SEQ ID NO: 84299 - DNA, 25 bp, Homo sapien
aaattcacaagtacaacactgctta

SEQ ID NO: 84300 - DNA, 25 bp, Homo sapien
tattacataaaatatcacaaaattc

SEQ ID NO: 84301 - DNA, 25 bp, Homo sapien
cacaaaattcacaagtacaacactg

SEQ ID NO: 84302 - DNA, 25 bp, Homo sapien
gacctgtacagtttttattacataa

SEQ ID NO: 84303 - DNA, 25 bp, Homo sapien
atataaaagcatcccagctaaggct

SEQ ID NO: 84304 - DNA, 25 bp, Homo sapien
ccaataggctcaatagattcagtct

SEQ ID NO: 84305 - DNA, 25 bp, Homo sapien
tataaccactggattgtgagaccat

SEQ ID NO: 84306 - DNA, 25 bp, Homo sapien
gagtttcagtgtctcccaaaggctg

SEQ ID NO: 84307 - DNA, 25 bp, Homo sapien
attgtgcccggcccataaaagaact

SEQ ID NO: 84308 - DNA, 25 bp, Homo sapien
gttatctgcacacctcagcctctta

SEQ ID NO: 84309 - DNA, 25 bp, Homo sapien
aggttatctgcacacctcagcctct

SEQ ID NO: 84310 - DNA, 25 bp, Homo sapien
ccattgtgcccggcccataaaagaa

SEQ ID NO: 84311 - DNA, 25 bp, Homo sapien
tctcaggcggaggtttctctaccac

SEQ ID NO: 84312 - DNA, 25 bp, Homo sapien
gggctgcagtcaaaccttgggaaac

SEQ ID NO: 84313 - DNA, 25 bp, Homo sapien
tgtttcccagcaagggtcagtctgt

SEQ ID NO: 84314 - DNA, 25 bp, Homo sapien
tgtcagattgtgagcaagcccttcc

SEQ ID NO: 84315 - DNA, 25 bp, Homo sapien
tacagaaccctttttgaagaccaca

SEQ ID NO: 84316 - DNA, 25 bp, Homo sapien
aaatgtaattggatatacagaaccc

SEQ ID NO: 84317 - DNA, 25 bp, Homo sapien
cagtggaaaaaacttgagtcgacaa

SEQ ID NO: 84318 - DNA, 25 bp, Homo sapien
gagtcgacaatggatgcaatagttc

SEQ ID NO: 84319 - DNA, 25 bp, Homo sapien
gccctcaattctgagcggaagctca

SEQ ID NO: 84320 - DNA, 25 bp, Homo sapien
gactggtggcaatagaggtttctaa

SEQ ID NO: 84321 - DNA, 25 bp, Homo sapien
caagggtacctctctaaggaaagca

SEQ ID NO: 84322 - DNA, 25 bp, Homo sapien
tatcgtggaaaaagagctagctagc

SEQ ID NO: 84323 - DNA, 25 bp, Homo sapien
ctaaccaagcccaaccctgctcagc

SEQ ID NO: 84324 - DNA, 25 bp, Homo sapien
gatcagaggagatcgggcgcgttcg

SEQ ID NO: 84325 - DNA, 25 bp, Homo sapien
ccaagcccaaccctgctcagcttcc

SEQ ID NO: 84326 - DNA, 25 bp, Homo sapien
atcagaggagatcgggcgcgttcgg

SEQ ID NO: 84327 - DNA, 25 bp, Homo sapien
aaatggaatacttgcatgtccatag

SEQ ID NO: 84328 - DNA, 25 bp, Homo sapien
cagtgtcctcatccttgtaagcagt

SEQ ID NO: 84329 - DNA, 25 bp, Homo sapien
caggactacggagttggcatagaac

SEQ ID NO: 84330 - DNA, 25 bp, Homo sapien
ggcatagaactcgtagcagggtcca

SEQ ID NO: 84331 - DNA, 25 bp, Homo sapien
caagctgtatggagccatcccagga

SEQ ID NO: 84332 - DNA, 25 bp, Homo sapien
gagcaaagagttctcgcctgcctag

SEQ ID NO: 84333 - DNA, 25 bp, Homo sapien
cagacttagggaaccatgagcgcca

SEQ ID NO: 84334 - DNA, 25 bp, Homo sapien
tcctctcgaggtggacgtggcacta

SEQ ID NO: 84335 - DNA, 25 bp, Homo sapien
ggccttgccgattttggccccagaa

SEQ ID NO: 84336 - DNA, 25 bp, Homo sapien
ctgcaggtagagaatgatgccccag

SEQ ID NO: 84337 - DNA, 25 bp, Homo sapien
tgcctgagcagcgatccaaggcagc

SEQ ID NO: 84338 - DNA, 25 bp, Homo sapien
gcctgagcagcgatccaaggcagct

SEQ ID NO: 84339 - DNA, 25 bp, Homo sapien
gaatgatgccccagatattgagcat

SEQ ID NO: 84340 - DNA, 25 bp, Homo sapien
agaacaggatgatgagccatgtgag

SEQ ID NO: 84341 - DNA, 25 bp, Homo sapien
aacaggatgatgagccatgtgagcc

SEQ ID NO: 84342 - DNA, 25 bp, Homo sapien
gaggccaagaacaggatgatgagcc

SEQ ID NO: 84343 - DNA, 25 bp, Homo sapien
ggccaagaacaggatgatgagccat

SEQ ID NO: 84344 - DNA, 25 bp, Homo sapien
ctgagatagacaatccagtgacagt

SEQ ID NO: 84345 - DNA, 25 bp, Homo sapien
gagatagacaatccagtgacagtat

SEQ ID NO: 84346 - DNA, 25 bp, Homo sapien
tgagatagacaatccagtgacagta

SEQ ID NO: 84347 - DNA, 25 bp, Homo sapien
gatagacaatccagtgacagtatga

SEQ ID NO: 84348 - DNA, 25 bp, Homo sapien
agccttgattttgccgttgctggag

SEQ ID NO: 84349 - DNA, 25 bp, Homo sapien
gccttgattttgccgttgctggaga

SEQ ID NO: 84350 - DNA, 25 bp, Homo sapien
ccttgattttgccgttgctggagat

SEQ ID NO: 84351 - DNA, 25 bp, Homo sapien
ggacccttgctctcgacaactgctg

SEQ ID NO: 84352 - DNA, 25 bp, Homo sapien
gtcagtcctattttcggaagcacgt

SEQ ID NO: 84353 - DNA, 25 bp, Homo sapien
gaagcacgttgaatcatacaggagc

SEQ ID NO: 84354 - DNA, 25 bp, Homo sapien
atactggcactttgcgcccaggcgg

SEQ ID NO: 84355 - DNA, 25 bp, Homo sapien
gtgtatggtttatcctggcacagct

SEQ ID NO: 84356 - DNA, 25 bp, Homo sapien
gccagtgattgtgtatggtttatcc

SEQ ID NO: 84357 - DNA, 25 bp, Homo sapien
aggaaggtgagcagatagccccaca

SEQ ID NO: 84358 - DNA, 25 bp, Homo sapien
cacagaggctcgtggttcttgccat

SEQ ID NO: 84359 - DNA, 25 bp, Homo sapien
aggcgtagagacagccaaagttgag

SEQ ID NO: 84360 - DNA, 25 bp, Homo sapien
ggtgggggcaatgatactcagctcg

SEQ ID NO: 84361 - DNA, 25 bp, Homo sapien
cagacaaccaggtaagggaggcgta

SEQ ID NO: 84362 - DNA, 25 bp, Homo sapien
gtgggggcaatgatactcagctcgg

SEQ ID NO: 84363 - DNA, 25 bp, Homo sapien
gacagcgccatttggtaggtgtctg

SEQ ID NO: 84364 - DNA, 25 bp, Homo sapien
gcctgggctgaagagccccagttca

SEQ ID NO: 84365 - DNA, 25 bp, Homo sapien
tgagtaggacagcgccatttggtag

SEQ ID NO: 84366 - DNA, 25 bp, Homo sapien
catttggtaggtgtctgcctgggct

SEQ ID NO: 84367 - DNA, 25 bp, Homo sapien
acttcagttggttcaaacatgagac

SEQ ID NO: 84368 - DNA, 25 bp, Homo sapien
caagaccagcacattggacttcagt

SEQ ID NO: 84369 - DNA, 25 bp, Homo sapien
tactccatggcagatacaggccctt

SEQ ID NO: 84370 - DNA, 25 bp, Homo sapien
aattttgcttatatcccaagaccag

SEQ ID NO: 84371 - DNA, 25 bp, Homo sapien
ggtgtctgcttctctaacccgctct

SEQ ID NO: 84372 - DNA, 25 bp, Homo sapien
ggcttctctccgcattgactaaccg

SEQ ID NO: 84373 - DNA, 25 bp, Homo sapien
taacccgctctacaactctgttatt

SEQ ID NO: 84374 - DNA, 25 bp, Homo sapien
ctagagaaacgtcatgtggcttctc

SEQ ID NO: 84375 - DNA, 25 bp, Homo sapien
cctccggccttgcttggattggaac

SEQ ID NO: 84376 - DNA, 25 bp, Homo sapien
ttcatcatcaccgagccagtacacg

SEQ ID NO: 84377 - DNA, 25 bp, Homo sapien
cttggattggaacattgaggctgct

SEQ ID NO: 84378 - DNA, 25 bp, Homo sapien
ggtttatatgtcactatcttccctc

SEQ ID NO: 84379 - DNA, 25 bp, Homo sapien
tagcaaagctatagactccaagcaa

SEQ ID NO: 84380 - DNA, 25 bp, Homo sapien
ggtcctttatggaaccccaggatga

SEQ ID NO: 84381 - DNA, 25 bp, Homo sapien
aaaggaccccgtgcctcaatctcta

SEQ ID NO: 84382 - DNA, 25 bp, Homo sapien
tcctgatgtcatgggagtcctagca

SEQ ID NO: 84383 - DNA, 25 bp, Homo sapien
gaaggatgacatacaaggtcagaga

SEQ ID NO: 84384 - DNA, 25 bp, Homo sapien
agaaatccctaacagcactgggaag

SEQ ID NO: 84385 - DNA, 25 bp, Homo sapien
gagcagtgacggttttgtcttcctc

SEQ ID NO: 84386 - DNA, 25 bp, Homo sapien
ccctcggtgttataagtctgcagaa

SEQ ID NO: 84387 - DNA, 25 bp, Homo sapien
agaagatgaggcacatgtttcccat

SEQ ID NO: 84388 - DNA, 25 bp, Homo sapien
gaaatagttcagcattgtccccagc

SEQ ID NO: 84389 - DNA, 25 bp, Homo sapien
catgaaagggttgtgtcgagaagat

SEQ ID NO: 84390 - DNA, 25 bp, Homo sapien
cccagctcatgaaagggttgtgtcg

SEQ ID NO: 84391 - DNA, 25 bp, Homo sapien
cctagcaactccggaggctgggcag

SEQ ID NO: 84392 - DNA, 25 bp, Homo sapien
cagcatgatcagaacattagatggc

SEQ ID NO: 84393 - DNA, 25 bp, Homo sapien
tcttagcaattgaaactaacagttg

SEQ ID NO: 84394 - DNA, 25 bp, Homo sapien
cattgcaaattttggcagcatgatc

SEQ ID NO: 84395 - DNA, 25 bp, Homo sapien
caaagatggacttatctgaacctaa

SEQ ID NO: 84396 - DNA, 25 bp, Homo sapien
taaggcacagagttggctcggcgtc

SEQ ID NO: 84397 - DNA, 25 bp, Homo sapien
gacttaagagttttccgcgcacttc

SEQ ID NO: 84398 - DNA, 25 bp, Homo sapien
ctggcagttaggaagacaggtccct

SEQ ID NO: 84399 - DNA, 25 bp, Homo sapien
ttcctctgcgctccggaaagctgcg

SEQ ID NO: 84400 - DNA, 25 bp, Homo sapien
tcacgtgatcagaggcgcgcttgtc

SEQ ID NO: 84401 - DNA, 25 bp, Homo sapien
cccacgtgggtagcggacctggtca

SEQ ID NO: 84402 - DNA, 25 bp, Homo sapien
acaaagaagggtgcacgctgagccc

SEQ ID NO: 84403 - DNA, 25 bp, Homo sapien
cgcgcttgtcgtggccgaagaatgc

SEQ ID NO: 84404 - DNA, 25 bp, Homo sapien
cgttcagactgccagcgaagcccct

SEQ ID NO: 84405 - DNA, 25 bp, Homo sapien
gaagcccctcttatgagcaaaagag

SEQ ID NO: 84406 - DNA, 25 bp, Homo sapien
gtatctgcaccggcccgatggcagc

SEQ ID NO: 84407 - DNA, 25 bp, Homo sapien
gagcaaccccgtatctgcaccggcc

SEQ ID NO: 84408 - DNA, 25 bp, Homo sapien
gaggatcttaattaagggtcctgac

SEQ ID NO: 84409 - DNA, 25 bp, Homo sapien
ctgccctccagccaattgaggatct

SEQ ID NO: 84410 - DNA, 25 bp, Homo sapien
ccagccaattgaggatcttaattaa

SEQ ID NO: 84411 - DNA, 25 bp, Homo sapien
caattgaggatcttaattaagggtc

SEQ ID NO: 84412 - DNA, 25 bp, Homo sapien
acgaaactagatcatttcatagtgc

SEQ ID NO: 84413 - DNA, 25 bp, Homo sapien
cacgaaactagatcatttcatagtg

SEQ ID NO: 84414 - DNA, 25 bp, Homo sapien
ccacgaaactagatcatttcatagt

SEQ ID NO: 84415 - DNA, 25 bp, Homo sapien
cctccgtgcatcataggcccttcag

SEQ ID NO: 84416 - DNA, 25 bp, Homo sapien
gaaatcatgaaaccagctaaggctg

SEQ ID NO: 84417 - DNA, 25 bp, Homo sapien
tcccaagagcgtccccgcaccaggt

SEQ ID NO: 84418 - DNA, 25 bp, Homo sapien
cgcctttcaaaccacgttatctcta

SEQ ID NO: 84419 - DNA, 25 bp, Homo sapien
cgcgtcacccaccgaagcaatattt

SEQ ID NO: 84420 - DNA, 25 bp, Homo sapien
ttgggcagctgtaccgcgtcaccca

SEQ ID NO: 84421 - DNA, 25 bp, Homo sapien
tcacccaccgaagcaatatttttac

SEQ ID NO: 84422 - DNA, 25 bp, Homo sapien
cgtcacccaccgaagcaatattttt

SEQ ID NO: 84423 - DNA, 25 bp, Homo sapien
ctgtcctgagctcatccccgtcttc

SEQ ID NO: 84424 - DNA, 25 bp, Homo sapien
tcatccccgtcttccgccaccgctc

SEQ ID NO: 84425 - DNA, 25 bp, Homo sapien
ctgagctcatccccgtcttccgcca

SEQ ID NO: 84426 - DNA, 25 bp, Homo sapien
agctcatccccgtcttccgccaccg

SEQ ID NO: 84427 - DNA, 25 bp, Homo sapien
agaagggctgatttcattcccttac

SEQ ID NO: 84428 - DNA, 25 bp, Homo sapien
gaagaagggctgatttcattccctt

SEQ ID NO: 84429 - DNA, 25 bp, Homo sapien
aggaagaagggctgatttcattccc

SEQ ID NO: 84430 - DNA, 25 bp, Homo sapien
ctaggaagaagggctgatttcattc

SEQ ID NO: 84431 - DNA, 25 bp, Homo sapien
cgtacatcaagggaatgacaaacac

SEQ ID NO: 84432 - DNA, 25 bp, Homo sapien
caacgaaagcctacggttcctgcga

SEQ ID NO: 84433 - DNA, 25 bp, Homo sapien
tgcaaaaatgagtcggcccgtactt

SEQ ID NO: 84434 - DNA, 25 bp, Homo sapien
tggtttccaactgcgatccggcgtt

SEQ ID NO: 84435 - DNA, 25 bp, Homo sapien
atatactgacaaaaagctggtggtt

SEQ ID NO: 84436 - DNA, 25 bp, Homo sapien
caagagcagatcttgagtgtggcag

SEQ ID NO: 84437 - DNA, 25 bp, Homo sapien
ctttgcggccgtcttactcttcttg

SEQ ID NO: 84438 - DNA, 25 bp, Homo sapien
agcccatccacattccaagagcaga

SEQ ID NO: 84439 - DNA, 25 bp, Homo sapien
tcttcttaatccaggctcgaagccc

SEQ ID NO: 84440 - DNA, 25 bp, Homo sapien
taagaaactttgagtgggcactggc

SEQ ID NO: 84441 - DNA, 25 bp, Homo sapien
tgtccgaaggagctgaccagtattg

SEQ ID NO: 84442 - DNA, 25 bp, Homo sapien
tttggtctcttgaaggcacagtata

SEQ ID NO: 84443 - DNA, 25 bp, Homo sapien
cactgtacccttccttgtccgaagg

SEQ ID NO: 84444 - DNA, 25 bp, Homo sapien
gttaccagcacaaacgagtcaaatt

SEQ ID NO: 84445 - DNA, 25 bp, Homo sapien
cagcacaaacgagtcaaattcagcc

SEQ ID NO: 84446 - DNA, 25 bp, Homo sapien
taccagcacaaacgagtcaaattca

SEQ ID NO: 84447 - DNA, 25 bp, Homo sapien
gcacaaacgagtcaaattcagccac

SEQ ID NO: 84448 - DNA, 25 bp, Homo sapien
tgcaggtaacagagagtgggacaac

SEQ ID NO: 84449 - DNA, 25 bp, Homo sapien
tgcgaaaggcttcatcccagcgctg

SEQ ID NO: 84450 - DNA, 25 bp, Homo sapien
ggaacggatcttgctgtcacacaat

SEQ ID NO: 84451 - DNA, 25 bp, Homo sapien
gacagtgatcactgccgagggcctt

SEQ ID NO: 84452 - DNA, 25 bp, Homo sapien
caaagtcattagtagtctttgttca

SEQ ID NO: 84453 - DNA, 25 bp, Homo sapien
tggaggattcctagttttatacatg

SEQ ID NO: 84454 - DNA, 25 bp, Homo sapien
tcacaggagcctggttggaggattc

SEQ ID NO: 84455 - DNA, 25 bp, Homo sapien
ctgaagagtgtttaaagaaggaatg

SEQ ID NO: 84456 - DNA, 25 bp, Homo sapien
agagaatgtgtagccccacgaaggg

SEQ ID NO: 84457 - DNA, 25 bp, Homo sapien
ccacaggaactgatgtgtatataac

SEQ ID NO: 84458 - DNA, 25 bp, Homo sapien
tagggacttatcctgtgcttgtaaa

SEQ ID NO: 84459 - DNA, 25 bp, Homo sapien
ggtcatgactctacgctttttcagt

SEQ ID NO: 84460 - DNA, 25 bp, Homo sapien
cctgtcctgaaagtgactctagcga

SEQ ID NO: 84461 - DNA, 25 bp, Homo sapien
aacccagtcttgtgtcctgtcctga

SEQ ID NO: 84462 - DNA, 25 bp, Homo sapien
caaaggctggagtgataatcttaac

SEQ ID NO: 84463 - DNA, 25 bp, Homo sapien
gaaatcttctagtagtggagacact

SEQ ID NO: 84464 - DNA, 25 bp, Homo sapien
gtaaaggcacggtggcttgtccctg

SEQ ID NO: 84465 - DNA, 25 bp, Homo sapien
gttggtggtcataaaactgagtaaa

SEQ ID NO: 84466 - DNA, 25 bp, Homo sapien
aactgagtaaaggcacggtggcttg

SEQ ID NO: 84467 - DNA, 25 bp, Homo sapien
cataaaactgagtaaaggcacggtg

SEQ ID NO: 84468 - DNA, 25 bp, Homo sapien
gatccgatcggatccgctccgctat

SEQ ID NO: 84469 - DNA, 25 bp, Homo sapien
tccgctatgctgaactgagcaaggc

SEQ ID NO: 84470 - DNA, 25 bp, Homo sapien
ggtctggttcgcacagttggctcac

SEQ ID NO: 84471 - DNA, 25 bp, Homo sapien
gatgagcctgctccggtgtgctccg

SEQ ID NO: 84472 - DNA, 25 bp, Homo sapien
accccagctcgattcccgcgtgcgt

SEQ ID NO: 84473 - DNA, 25 bp, Homo sapien
ttgctcccgacactaggctcagtgc

SEQ ID NO: 84474 - DNA, 25 bp, Homo sapien
agtgtgccaggttcccgggtcacag

SEQ ID NO: 84475 - DNA, 25 bp, Homo sapien
tggctgccgcatgactctgccgcct

SEQ ID NO: 84476 - DNA, 25 bp, Homo sapien
gctttacccagaccctagcatggga

SEQ ID NO: 84477 - DNA, 25 bp, Homo sapien
cacaacggctgcttttacggagtag

SEQ ID NO: 84478 - DNA, 25 bp, Homo sapien
tacggagtagcttagaccgcaccga

SEQ ID NO: 84479 - DNA, 25 bp, Homo sapien
tgagcaccaaaagtacctcgcagct

SEQ ID NO: 84480 - DNA, 25 bp, Homo sapien
gatctgggcctgagttaatttatca

SEQ ID NO: 84481 - DNA, 25 bp, Homo sapien
cggtgcttagtgtgagacagaagcc

SEQ ID NO: 84482 - DNA, 25 bp, Homo sapien
gattattgcaacttgaggtcggtgc

SEQ ID NO: 84483 - DNA, 25 bp, Homo sapien
ggatttcaccgtagtcaaagatctg

SEQ ID NO: 84484 - DNA, 25 bp, Homo sapien
tactcgctctgctcaaaatgttagg

SEQ ID NO: 84485 - DNA, 25 bp, Homo sapien
tggttacactaaagcacagacgtca

SEQ ID NO: 84486 - DNA, 25 bp, Homo sapien
gtgtacatatggacctacagagtga

SEQ ID NO: 84487 - DNA, 25 bp, Homo sapien
taatacaagccatactgccagagag

SEQ ID NO: 84488 - DNA, 25 bp, Homo sapien
gagtgggtacccttcatacatgtgg

SEQ ID NO: 84489 - DNA, 25 bp, Homo sapien
cttccagagtgggtacccttcatac

SEQ ID NO: 84490 - DNA, 25 bp, Homo sapien
tcatacatgtggaacctgccctgca

SEQ ID NO: 84491 - DNA, 25 bp, Homo sapien
tacccttcatacatgtggaacctgc

SEQ ID NO: 84492 - DNA, 25 bp, Homo sapien
cagatagctaggtagtgaaagaggc

SEQ ID NO: 84493 - DNA, 25 bp, Homo sapien
gaaatgcatgacatacatcgtgaaa

SEQ ID NO: 84494 - DNA, 25 bp, Homo sapien
ggagaggaccaaaaatccacctagc

SEQ ID NO: 84495 - DNA, 25 bp, Homo sapien
gaaagaggctagatagttctctcct

SEQ ID NO: 84496 - DNA, 25 bp, Homo sapien
aaaccaggtaggttgatatggtcac

SEQ ID NO: 84497 - DNA, 25 bp, Homo sapien
cctcctgctgcattggtgactacca

SEQ ID NO: 84498 - DNA, 25 bp, Homo sapien
cacggatcagcatgatatctccaac

SEQ ID NO: 84499 - DNA, 25 bp, Homo sapien
cagaaggtggaaaaccctcactggg

SEQ ID NO: 84500 - DNA, 25 bp, Homo sapien
ggccctctgagagggttctgaccac

SEQ ID NO: 84501 - DNA, 25 bp, Homo sapien
ctttcatcattgggccctctgagag

SEQ ID NO: 84502 - DNA, 25 bp, Homo sapien
catcattgggccctctgagagggtt

SEQ ID NO: 84503 - DNA, 25 bp, Homo sapien
ttgggccctctgagagggttctgac

SEQ ID NO: 84504 - DNA, 25 bp, Homo sapien
tagagaagtctttaaatcctaccca

SEQ ID NO: 84505 - DNA, 25 bp, Homo sapien
tatctcacataaacggaattttaaa

SEQ ID NO: 84506 - DNA, 25 bp, Homo sapien
cacagctcctagagaagtctttaaa

SEQ ID NO: 84507 - DNA, 25 bp, Homo sapien
tctcccacagctcctagagaagtct

SEQ ID NO: 84508 - DNA, 25 bp, Homo sapien
catttgtttccaggtactgagagcc

SEQ ID NO: 84509 - DNA, 25 bp, Homo sapien
ccggtcgtaggcatcagacatggca

SEQ ID NO: 84510 - DNA, 25 bp, Homo sapien
cctctgcctcatagtccggtcgtag

SEQ ID NO: 84511 - DNA, 25 bp, Homo sapien
gtagctcacgttgctcccccatttg

SEQ ID NO: 84512 - DNA, 25 bp, Homo sapien
ataaagagacctcggctcaaaaaat

SEQ ID NO: 84513 - DNA, 25 bp, Homo sapien
caacataaagagacctcggctcaaa

SEQ ID NO: 84514 - DNA, 25 bp, Homo sapien
tcagaactgtagtgagctagagatg

SEQ ID NO: 84515 - DNA, 25 bp, Homo sapien
cataaagagacctcggctcaaaaaa

SEQ ID NO: 84516 - DNA, 25 bp, Homo sapien
tcagggagtggaatgctggccataa

SEQ ID NO: 84517 - DNA, 25 bp, Homo sapien
caatttctgtgcagcttgtttgcca

SEQ ID NO: 84518 - DNA, 25 bp, Homo sapien
gtgagaagccaaagactcgaagtcc

SEQ ID NO: 84519 - DNA, 25 bp, Homo sapien
cagtgccgtgcaacgataacttctg

SEQ ID NO: 84520 - DNA, 25 bp, Homo sapien
ttctgctacaacctaaggacagagg

SEQ ID NO: 84521 - DNA, 25 bp, Homo sapien
gccaaagaaggtagcagctacttgg

SEQ ID NO: 84522 - DNA, 25 bp, Homo sapien
aggtctcactatgctcacacctgta

SEQ ID NO: 84523 - DNA, 25 bp, Homo sapien
tgtgggagatgccagacgactccaa

SEQ ID NO: 84524 - DNA, 25 bp, Homo sapien
tctcaaagagctagtagcagctgct

SEQ ID NO: 84525 - DNA, 25 bp, Homo sapien
ctgagcccctcggaatgtattatct

SEQ ID NO: 84526 - DNA, 25 bp, Homo sapien
tttagataaggcagaactgagcccc

SEQ ID NO: 84527 - DNA, 25 bp, Homo sapien
ctgctatgcaaagttctaaggcccg

SEQ ID NO: 84528 - DNA, 25 bp, Homo sapien
tttattctgacaacattatgacatt

SEQ ID NO: 84529 - DNA, 25 bp, Homo sapien
tattctgacaacattatgacattaa

SEQ ID NO: 84530 - DNA, 25 bp, Homo sapien
tctttattctgacaacattatgaca

SEQ ID NO: 84531 - DNA, 25 bp, Homo sapien
caacattatgacattaaataaaatc

SEQ ID NO: 84532 - DNA, 25 bp, Homo sapien
cacagggaggttctgacaagcacaa

SEQ ID NO: 84533 - DNA, 25 bp, Homo sapien
taaggaagaggctaaccagtgaact

SEQ ID NO: 84534 - DNA, 25 bp, Homo sapien
caaagataatagtgcggtgagccaa

SEQ ID NO: 84535 - DNA, 25 bp, Homo sapien
cctgacagaagtggcaatcaagtgc

SEQ ID NO: 84536 - DNA, 25 bp, Homo sapien
gtgaatctcccacctagtatgtgtg

SEQ ID NO: 84537 - DNA, 25 bp, Homo sapien
cagctccggtgatggtcctcttctc

SEQ ID NO: 84538 - DNA, 25 bp, Homo sapien
tctgtaaggcctaaataatgtctca

SEQ ID NO: 84539 - DNA, 25 bp, Homo sapien
tgcagttccgcaatcataaagccca

SEQ ID NO: 84540 - DNA, 25 bp, Homo sapien
tcaacaaacgaactgagaagtggca

SEQ ID NO: 84541 - DNA, 25 bp, Homo sapien
gaaaaaccaagcagataaccagtgt

SEQ ID NO: 84542 - DNA, 25 bp, Homo sapien
tgtttgttcgaaggcatccctgaga

SEQ ID NO: 84543 - DNA, 25 bp, Homo sapien
caaattgaattaggcagaaggcaca

SEQ ID NO: 84544 - DNA, 25 bp, Homo sapien
acagtttggttctctaaggcatctc

SEQ ID NO: 84545 - DNA, 25 bp, Homo sapien
cctgaactcggtattgtggaactga

SEQ ID NO: 84546 - DNA, 25 bp, Homo sapien
gacagtatatcctggtctgagaaca

SEQ ID NO: 84547 - DNA, 25 bp, Homo sapien
ggatctttgacagaccagctaacag

SEQ ID NO: 84548 - DNA, 25 bp, Homo sapien
ggtggtgaaggtgtaagcaaataaa

SEQ ID NO: 84549 - DNA, 25 bp, Homo sapien
tgaaggtgtaagcaaataaacacat

SEQ ID NO: 84550 - DNA, 25 bp, Homo sapien
gagaatccagaggatcaaagaggat

SEQ ID NO: 84551 - DNA, 25 bp, Homo sapien
ccagaggatcaaagaggatcgagtc

SEQ ID NO: 84552 - DNA, 25 bp, Homo sapien
gaaaagatgccagctctctgatatt

SEQ ID NO: 84553 - DNA, 25 bp, Homo sapien
gggtgtcatcctcgataaaaatcat

SEQ ID NO: 84554 - DNA, 25 bp, Homo sapien
ctgctagaaaagatgccagctctct

SEQ ID NO: 84555 - DNA, 25 bp, Homo sapien
tctgggtgtcatcctcgataaaaat

SEQ ID NO: 84556 - DNA, 25 bp, Homo sapien
taactgagtgatttgggcagcttct

SEQ ID NO: 84557 - DNA, 25 bp, Homo sapien
ttcagtccatggattgatctctggg

SEQ ID NO: 84558 - DNA, 25 bp, Homo sapien
tctgggggagttaccacattatgtc

SEQ ID NO: 84559 - DNA, 25 bp, Homo sapien
tgttcaggccctgcatagccatggg

SEQ ID NO: 84560 - DNA, 25 bp, Homo sapien
tcttgggatgcgagacatgggaaca

SEQ ID NO: 84561 - DNA, 25 bp, Homo sapien
gttcacatgcccaccagataaacaa

SEQ ID NO: 84562 - DNA, 25 bp, Homo sapien
cctacggtttttgtcgttcacatgc

SEQ ID NO: 84563 - DNA, 25 bp, Homo sapien
tccagttgactggatataagaatcc

SEQ ID NO: 84564 - DNA, 25 bp, Homo sapien
tagtgtctcgctacactgtgcacac

SEQ ID NO: 84565 - DNA, 25 bp, Homo sapien
ttagtgtctcgctacactgtgcaca

SEQ ID NO: 84566 - DNA, 25 bp, Homo sapien
ctagccaataaccacattcccataa

SEQ ID NO: 84567 - DNA, 25 bp, Homo sapien
gccaataaccacattcccataagaa

SEQ ID NO: 84568 - DNA, 25 bp, Homo sapien
caataaccacattcccataagaata

SEQ ID NO: 84569 - DNA, 25 bp, Homo sapien
tccattcccctagccaataaccaca

SEQ ID NO: 84570 - DNA, 25 bp, Homo sapien
tgcagagattcttgtgtcctctcgt

SEQ ID NO: 84571 - DNA, 25 bp, Homo sapien
ttccttcttcgtgagcagtgccctg

SEQ ID NO: 84572 - DNA, 25 bp, Homo sapien
cagggtttccttcttcgtgagcagt

SEQ ID NO: 84573 - DNA, 25 bp, Homo sapien
gattcttgtgtcctctcgttcccca

SEQ ID NO: 84574 - DNA, 25 bp, Homo sapien
acatgaaaaagatctgcaccagatt

SEQ ID NO: 84575 - DNA, 25 bp, Homo sapien
tgaaaaagatctgcaccagattcag

SEQ ID NO: 84576 - DNA, 25 bp, Homo sapien
aacatgaaaaagatctgcaccagat

SEQ ID NO: 84577 - DNA, 25 bp, Homo sapien
gactgggctccttcatcttgtgtgc

SEQ ID NO: 84578 - DNA, 25 bp, Homo sapien
caccgaggatgggatcttctggcca

SEQ ID NO: 84579 - DNA, 25 bp, Homo sapien
aatgtcaaatcaaaaggtcgggagc

SEQ ID NO: 84580 - DNA, 25 bp, Homo sapien
tactgggctatgcaactctgactgg

SEQ ID NO: 84581 - DNA, 25 bp, Homo sapien
tcattacaggttataataatgtgct

SEQ ID NO: 84582 - DNA, 25 bp, Homo sapien
taactggcgcttcatgtcattacag

SEQ ID NO: 84583 - DNA, 25 bp, Homo sapien
ttgtccagttggtaactggcgcttc

SEQ ID NO: 84584 - DNA, 25 bp, Homo sapien
ttaggtaattgcagttaggagtgac

SEQ ID NO: 84585 - DNA, 25 bp, Homo sapien
gaacaaaatgcaagttgggtgaccc

SEQ ID NO: 84586 - DNA, 25 bp, Homo sapien
gaaacaaatggatggccaggactac

SEQ ID NO: 84587 - DNA, 25 bp, Homo sapien
tgcagttgtgcaaaacccaagagtc

SEQ ID NO: 84588 - DNA, 25 bp, Homo sapien
gactacagtacggactacagcagct

SEQ ID NO: 84589 - DNA, 25 bp, Homo sapien
tgaagggcctgcttctagtgagttg

SEQ ID NO: 84590 - DNA, 25 bp, Homo sapien
ttagcctcctcttgaaattcccaag

SEQ ID NO: 84591 - DNA, 25 bp, Homo sapien
tagtgagttgttgccttccctaaga

SEQ ID NO: 84592 - DNA, 25 bp, Homo sapien
cacttcagtagacgctgtgctgaca

SEQ ID NO: 84593 - DNA, 25 bp, Homo sapien
ggttgctgcagatttcggtgtatcc

SEQ ID NO: 84594 - DNA, 25 bp, Homo sapien
ttgctgcagatttcggtgtatcctg

SEQ ID NO: 84595 - DNA, 25 bp, Homo sapien
aggttgctgcagatttcggtgtatc

SEQ ID NO: 84596 - DNA, 25 bp, Homo sapien
caggttgctgcagatttcggtgtat

SEQ ID NO: 84597 - DNA, 25 bp, Homo sapien
actgtcctgtcagaggatatcttga

SEQ ID NO: 84598 - DNA, 25 bp, Homo sapien
ccttgtccaggtgtcatgtccataa

SEQ ID NO: 84599 - DNA, 25 bp, Homo sapien
gctccttgtccaggtgtcatgtcca

SEQ ID NO: 84600 - DNA, 25 bp, Homo sapien
catgtccataactgtcctgtcagag

SEQ ID NO: 84601 - DNA, 25 bp, Homo sapien
cttctgtgggtcgtaacagaaacct

SEQ ID NO: 84602 - DNA, 25 bp, Homo sapien
ttcttctgtgggtcgtaacagaaac

SEQ ID NO: 84603 - DNA, 25 bp, Homo sapien
ttctgtgggtcgtaacagaaacctc

SEQ ID NO: 84604 - DNA, 25 bp, Homo sapien
tcttctgtgggtcgtaacagaaacc

SEQ ID NO: 84605 - DNA, 25 bp, Homo sapien
accatctgatacacctgacctcctt

SEQ ID NO: 84606 - DNA, 25 bp, Homo sapien
caccatctgatacacctgacctcct

SEQ ID NO: 84607 - DNA, 25 bp, Homo sapien
catctgatacacctgacctccttgt

SEQ ID NO: 84608 - DNA, 25 bp, Homo sapien
ccatctgatacacctgacctccttg

SEQ ID NO: 84609 - DNA, 25 bp, Homo sapien
caggtatctgctttactaaaaggca

SEQ ID NO: 84610 - DNA, 25 bp, Homo sapien
gctttactaaaaggcaccatcaaga

SEQ ID NO: 84611 - DNA, 25 bp, Homo sapien
tcatggagccatgaagtcgatcagg

SEQ ID NO: 84612 - DNA, 25 bp, Homo sapien
gatcaggctcccacaggtatctgct

SEQ ID NO: 84613 - DNA, 25 bp, Homo sapien
ttccatcttaggtggccgtttttca

SEQ ID NO: 84614 - DNA, 25 bp, Homo sapien
gtaaccatcaagttccatgcgattg

SEQ ID NO: 84615 - DNA, 25 bp, Homo sapien
gaaggacagtttgcaaccttgtgag

SEQ ID NO: 84616 - DNA, 25 bp, Homo sapien
taggcaacgcttactcatctcatgg

SEQ ID NO: 84617 - DNA, 25 bp, Homo sapien
tcagctgttcattgctcatttggac

SEQ ID NO: 84618 - DNA, 25 bp, Homo sapien
tggacttagttcaaggtcatgtcaa

SEQ ID NO: 84619 - DNA, 25 bp, Homo sapien
tctgagctatggcatttcaatcctg

SEQ ID NO: 84620 - DNA, 25 bp, Homo sapien
ctgtatgtgagagctagagactcat

SEQ ID NO: 84621 - DNA, 25 bp, Homo sapien
ctttcagagtgagacaaagttcaaa

SEQ ID NO: 84622 - DNA, 25 bp, Homo sapien
tctcccaagaaggttgcttgccaaa

SEQ ID NO: 84623 - DNA, 25 bp, Homo sapien
ctcccaagaaggttgcttgccaaaa

SEQ ID NO: 84624 - DNA, 25 bp, Homo sapien
tcccaagaaggttgcttgccaaaac

SEQ ID NO: 84625 - DNA, 25 bp, Homo sapien
ttctcccaagaaggttgcttgccaa

SEQ ID NO: 84626 - DNA, 25 bp, Homo sapien
tctgggaaaatgaggtgaatgatga

SEQ ID NO: 84627 - DNA, 25 bp, Homo sapien
tagaacacttgcatgtggactaccc

SEQ ID NO: 84628 - DNA, 25 bp, Homo sapien
taccctcagaatgacgttcccgttc

SEQ ID NO: 84629 - DNA, 25 bp, Homo sapien
tgaatgatgaagcagtgatgtcaac

SEQ ID NO: 84630 - DNA, 25 bp, Homo sapien
ggcagctagatcttccattgcaaag

SEQ ID NO: 84631 - DNA, 25 bp, Homo sapien
gggtggtggcagctagatcttccat

SEQ ID NO: 84632 - DNA, 25 bp, Homo sapien
cttctacttctgtttgggtggtggc

SEQ ID NO: 84633 - DNA, 25 bp, Homo sapien
acttctgtttgggtggtggcagcta

SEQ ID NO: 84634 - DNA, 25 bp, Homo sapien
gtagatttcaaaattattcgaagag

SEQ ID NO: 84635 - DNA, 25 bp, Homo sapien
tctcgctattaaaaaaggatctgca

SEQ ID NO: 84636 - DNA, 25 bp, Homo sapien
atgttctcgctattaaaaaaggatc

SEQ ID NO: 84637 - DNA, 25 bp, Homo sapien
gatttcaaaattattcgaagagtag

SEQ ID NO: 84638 - DNA, 25 bp, Homo sapien
ctgaattctctggccgtggtgtgta

SEQ ID NO: 84639 - DNA, 25 bp, Homo sapien
tctgaattctctggccgtggtgtgt

SEQ ID NO: 84640 - DNA, 25 bp, Homo sapien
gtctgaattctctggccgtggtgtg

SEQ ID NO: 84641 - DNA, 25 bp, Homo sapien
tgaattctctggccgtggtgtgtaa

SEQ ID NO: 84642 - DNA, 25 bp, Homo sapien
ccttggaccttggatgcattgacat

SEQ ID NO: 84643 - DNA, 25 bp, Homo sapien
tggatgcattgacataccaaccgca

SEQ ID NO: 84644 - DNA, 25 bp, Homo sapien
acgctgccaactcttgccacaagag

SEQ ID NO: 84645 - DNA, 25 bp, Homo sapien
tgcattgacataccaaccgcacgct

SEQ ID NO: 84646 - DNA, 25 bp, Homo sapien
tatgagtcagccaagggccaggttt

SEQ ID NO: 84647 - DNA, 25 bp, Homo sapien
ttcttaacagaagcaggatacgcgt

SEQ ID NO: 84648 - DNA, 25 bp, Homo sapien
catccatcatggacactatgagtca

SEQ ID NO: 84649 - DNA, 25 bp, Homo sapien
tgtgatgcctcctatccaaagcccg

SEQ ID NO: 84650 - DNA, 25 bp, Homo sapien
tcagtaggcaaccatcccacagtga

SEQ ID NO: 84651 - DNA, 25 bp, Homo sapien
tatgtttgcacaaacctcagtaggc

SEQ ID NO: 84652 - DNA, 25 bp, Homo sapien
acatagggccaaccccaggtacaat

SEQ ID NO: 84653 - DNA, 25 bp, Homo sapien
cagtggctcccagttatgtggcgac

SEQ ID NO: 84654 - DNA, 25 bp, Homo sapien
tacacaaacgatagtgactgagagc

SEQ ID NO: 84655 - DNA, 25 bp, Homo sapien
tctttatgttgtgcctacacggcta

SEQ ID NO: 84656 - DNA, 25 bp, Homo sapien
tctatagtaatgacgcctgctccag

SEQ ID NO: 84657 - DNA, 25 bp, Homo sapien
gatatgggactgtgcacttgtgccc

SEQ ID NO: 84658 - DNA, 25 bp, Homo sapien
aatacatgttgtgaaaggcgtcgcg

SEQ ID NO: 84659 - DNA, 25 bp, Homo sapien
tacctgttaaggacgagatgccttc

SEQ ID NO: 84660 - DNA, 25 bp, Homo sapien
gcgcacggcggtcggtacctgttaa

SEQ ID NO: 84661 - DNA, 25 bp, Homo sapien
tcaggtctaacggtttggagcgcca

SEQ ID NO: 84662 - DNA, 25 bp, Homo sapien
agagactggagccttaatccagcgc

SEQ ID NO: 84663 - DNA, 25 bp, Homo sapien
acgcccccgaagagactggagcctt

SEQ ID NO: 84664 - DNA, 25 bp, Homo sapien
cccgaagagactggagccttaatcc

SEQ ID NO: 84665 - DNA, 25 bp, Homo sapien
gagactggagccttaatccagcgcc

SEQ ID NO: 84666 - DNA, 25 bp, Homo sapien
tcttcggcgcctcttcggctgtcat

SEQ ID NO: 84667 - DNA, 25 bp, Homo sapien
gtcggacaacgcggcagcaacgtga

SEQ ID NO: 84668 - DNA, 25 bp, Homo sapien
agcaacgtgactgccgcttggcaca

SEQ ID NO: 84669 - DNA, 25 bp, Homo sapien
gcacatctgcatgtcttcggcgcct

SEQ ID NO: 84670 - DNA, 25 bp, Homo sapien
tacggtgggagttgtgtcattcaca

SEQ ID NO: 84671 - DNA, 25 bp, Homo sapien
tttgacgcctatgggcttcccaagt

SEQ ID NO: 84672 - DNA, 25 bp, Homo sapien
tcagacctatgggtgctgccacatg

SEQ ID NO: 84673 - DNA, 25 bp, Homo sapien
tctgaagctagtatctttgacgcct

SEQ ID NO: 84674 - DNA, 25 bp, Homo sapien
caaaggcaagactattaagaagttc

SEQ ID NO: 84675 - DNA, 25 bp, Homo sapien
ttcatcattcaaaacgtagtagaga

SEQ ID NO: 84676 - DNA, 25 bp, Homo sapien
cattcaaaacgtagtagagactgca

SEQ ID NO: 84677 - DNA, 25 bp, Homo sapien
ccaaaggcaagactattaagaagtt

SEQ ID NO: 84678 - DNA, 25 bp, Homo sapien
caaaacgaacgaagacaatactcat

SEQ ID NO: 84679 - DNA, 25 bp, Homo sapien
ttgttttgacctagtgtagtggccc

SEQ ID NO: 84680 - DNA, 25 bp, Homo sapien
gctggtaacatgcttctcctacttc

SEQ ID NO: 84681 - DNA, 25 bp, Homo sapien
caacacaaaacgaacgaagacaata

SEQ ID NO: 84682 - DNA, 25 bp, Homo sapien
ccagcgcagaaagggtggtcccggg

SEQ ID NO: 84683 - DNA, 25 bp, Homo sapien
ccccagcgcagaaagggtggtcccg

SEQ ID NO: 84684 - DNA, 25 bp, Homo sapien
agcgcagaaagggtggtcccgggct

SEQ ID NO: 84685 - DNA, 25 bp, Homo sapien
cccagcgcagaaagggtggtcccgg

SEQ ID NO: 84686 - DNA, 25 bp, Homo sapien
tgttgaggaagaaggccgctctgca

SEQ ID NO: 84687 - DNA, 25 bp, Homo sapien
tgtaagcctgtcaccgcgttcaaag

SEQ ID NO: 84688 - DNA, 25 bp, Homo sapien
caattgccgggtttcttgttgagga

SEQ ID NO: 84689 - DNA, 25 bp, Homo sapien
ttcaaaggaaactcgatggccgctc

SEQ ID NO: 84690 - DNA, 25 bp, Homo sapien
cccccgaagagactggagcctaaat

SEQ ID NO: 84691 - DNA, 25 bp, Homo sapien
agcctaaatccagcgccttagaccg

SEQ ID NO: 84692 - DNA, 25 bp, Homo sapien
acgcccccgaagagactggagccta

SEQ ID NO: 84693 - DNA, 25 bp, Homo sapien
ggagcctaaatccagcgccttagac

SEQ ID NO: 84694 - DNA, 25 bp, Homo sapien
tgacgggctgtagtggctgaaaaac

SEQ ID NO: 84695 - DNA, 25 bp, Homo sapien
cacagtgggttagtttctacgcgaa

SEQ ID NO: 84696 - DNA, 25 bp, Homo sapien
taggacaaccattctgagacgatac

SEQ ID NO: 84697 - DNA, 25 bp, Homo sapien
gacgataccactaaataggccctga

SEQ ID NO: 84698 - DNA, 25 bp, Homo sapien
tccgactccgagatgctaggaagag

SEQ ID NO: 84699 - DNA, 25 bp, Homo sapien
caagttggcgcttagaaaagcctgg

SEQ ID NO: 84700 - DNA, 25 bp, Homo sapien
ggaatctgtgaccaagccggactcc

SEQ ID NO: 84701 - DNA, 25 bp, Homo sapien
gcttcaggtaacttagaggaatctg

SEQ ID NO: 84702 - DNA, 25 bp, Homo sapien
cacccaaagcgagaatcataccact

SEQ ID NO: 84703 - DNA, 25 bp, Homo sapien
atcataccactagaccaacgagcca

SEQ ID NO: 84704 - DNA, 25 bp, Homo sapien
cgcacccaaagcgagaatcatacca

SEQ ID NO: 84705 - DNA, 25 bp, Homo sapien
agaatcataccactagaccaacgag

SEQ ID NO: 84706 - DNA, 25 bp, Homo sapien
tgggtaagaactgcccgaacactct

SEQ ID NO: 84707 - DNA, 25 bp, Homo sapien
cgaacactctgctcctgacaaaaga

SEQ ID NO: 84708 - DNA, 25 bp, Homo sapien
ttggcccttcgcagcgtcttcgttg

SEQ ID NO: 84709 - DNA, 25 bp, Homo sapien
gattctttcagcgaaagtagccgca

SEQ ID NO: 84710 - DNA, 25 bp, Homo sapien
tgacctagtgaaaagtgcactagtt

SEQ ID NO: 84711 - DNA, 25 bp, Homo sapien
gaagtgacctagtgaaaagtgcact

SEQ ID NO: 84712 - DNA, 25 bp, Homo sapien
aaaagtgcactagtttgttccacac

SEQ ID NO: 84713 - DNA, 25 bp, Homo sapien
tagtgaaaagtgcactagtttgttc

SEQ ID NO: 84714 - DNA, 25 bp, Homo sapien
cagcgcttgcaactgtcggaaaggc

SEQ ID NO: 84715 - DNA, 25 bp, Homo sapien
cattcgaacgatgcaacagcgcttg

SEQ ID NO: 84716 - DNA, 25 bp, Homo sapien
tacaacaaccaagagtgcaacactg

SEQ ID NO: 84717 - DNA, 25 bp, Homo sapien
agttcccagggctgcgacttcgcat

SEQ ID NO: 84718 - DNA, 25 bp, Homo sapien
gataaccgtggtatcttccgtgaaa

SEQ ID NO: 84719 - DNA, 25 bp, Homo sapien
ttccctggagaacgtcaagcttact

SEQ ID NO: 84720 - DNA, 25 bp, Homo sapien
cttggctggaaatgtatagacctat

SEQ ID NO: 84721 - DNA, 25 bp, Homo sapien
tgacaaaaccgctgtgctcaccttt

SEQ ID NO: 84722 - DNA, 25 bp, Homo sapien
gtggctatcagagcccgagagacac

SEQ ID NO: 84723 - DNA, 25 bp, Homo sapien
tgtagaaaggtggatgctcagggag

SEQ ID NO: 84724 - DNA, 25 bp, Homo sapien
cctcgtggatggtggctatcagagc

SEQ ID NO: 84725 - DNA, 25 bp, Homo sapien
atggtggctatcagagcccgagaga

SEQ ID NO: 84726 - DNA, 25 bp, Homo sapien
tccttgataagatgtggcggtacca

SEQ ID NO: 84727 - DNA, 25 bp, Homo sapien
gagatcccagcctcgaatgacattg

SEQ ID NO: 84728 - DNA, 25 bp, Homo sapien
ggtctatactggatatgtccttgat

SEQ ID NO: 84729 - DNA, 25 bp, Homo sapien
aagtagaacctttggtctatactgg

SEQ ID NO: 84730 - DNA, 25 bp, Homo sapien
acaggtactcttcaacgcaaagggc

SEQ ID NO: 84731 - DNA, 25 bp, Homo sapien
gagggccatggactctagcaacatt

SEQ ID NO: 84732 - DNA, 25 bp, Homo sapien
catggactctagcaacattgtgtgc

SEQ ID NO: 84733 - DNA, 25 bp, Homo sapien
gtggccaggaaacacgcccgtaagc

SEQ ID NO: 84734 - DNA, 25 bp, Homo sapien
gagagcctcccgtcctggattgtgg

SEQ ID NO: 84735 - DNA, 25 bp, Homo sapien
gattgtggctatcagcgctctggga

SEQ ID NO: 84736 - DNA, 25 bp, Homo sapien
tgtgttgactccagcgttccaagga

SEQ ID NO: 84737 - DNA, 25 bp, Homo sapien
tctaaggcgggttccaatcaactct

SEQ ID NO: 84738 - DNA, 25 bp, Homo sapien
cattcattttcaaccctcagaggct

SEQ ID NO: 84739 - DNA, 25 bp, Homo sapien
gaggctaacttgaggtacatattct

SEQ ID NO: 84740 - DNA, 25 bp, Homo sapien
ccattcagtcggttgtgggtgctta

SEQ ID NO: 84741 - DNA, 25 bp, Homo sapien
cagagcttatagaaaagatgggaca

SEQ ID NO: 84742 - DNA, 25 bp, Homo sapien
aagagacctgtaactgcttgtgatc

SEQ ID NO: 84743 - DNA, 25 bp, Homo sapien
acaaagagacctgtaactgcttgtg

SEQ ID NO: 84744 - DNA, 25 bp, Homo sapien
aggaacaaagagacctgtaactgct

SEQ ID NO: 84745 - DNA, 25 bp, Homo sapien
gaacaaagagacctgtaactgcttg

SEQ ID NO: 84746 - DNA, 25 bp, Homo sapien
gaaactgctgacatccgcattttgt

SEQ ID NO: 84747 - DNA, 25 bp, Homo sapien
tgtttcctgcttgactcaggacttc

SEQ ID NO: 84748 - DNA, 25 bp, Homo sapien
gacttcgtaccagcaactgtctgcc

SEQ ID NO: 84749 - DNA, 25 bp, Homo sapien
agctgcgagtctcagtgccagagca

SEQ ID NO: 84750 - DNA, 25 bp, Homo sapien
tgctctaacccctgagctatagggc

SEQ ID NO: 84751 - DNA, 25 bp, Homo sapien
cagcgagatttgaactcgcgacccc

SEQ ID NO: 84752 - DNA, 25 bp, Homo sapien
gccccagcgagatttgaactcgcga

SEQ ID NO: 84753 - DNA, 25 bp, Homo sapien
ctctaacccctgagctatagggcct

SEQ ID NO: 84754 - DNA, 25 bp, Homo sapien
gccgcattccaggagctaaagcagc

SEQ ID NO: 84755 - DNA, 25 bp, Homo sapien
tggattccgccgcattccaggagct

SEQ ID NO: 84756 - DNA, 25 bp, Homo sapien
ctgtgtaatggattccgccgcattc

SEQ ID NO: 84757 - DNA, 25 bp, Homo sapien
ttccaggagctaaagcagcattact

SEQ ID NO: 84758 - DNA, 25 bp, Homo sapien
ggctctcgccgccagtccgcaagcc

SEQ ID NO: 84759 - DNA, 25 bp, Homo sapien
cagtccgcaagccagggcgtgggca

SEQ ID NO: 84760 - DNA, 25 bp, Homo sapien
agaggctgacggtgatttccaccgc

SEQ ID NO: 84761 - DNA, 25 bp, Homo sapien
ggcagaggctgacggtgatttccac

SEQ ID NO: 84762 - DNA, 25 bp, Homo sapien
gaagtggaaccttgatctctactcc

SEQ ID NO: 84763 - DNA, 25 bp, Homo sapien
atctctcttctggacgcctggccgg

SEQ ID NO: 84764 - DNA, 25 bp, Homo sapien
tagcttaaagggctattgtctcgcc

SEQ ID NO: 84765 - DNA, 25 bp, Homo sapien
tggctcttcccgtttcagaagtgga

SEQ ID NO: 84766 - DNA, 25 bp, Homo sapien
cacattaagtactacagtcctccgc

SEQ ID NO: 84767 - DNA, 25 bp, Homo sapien
acacattaagtactacagtcctccg

SEQ ID NO: 84768 - DNA, 25 bp, Homo sapien
cacacattaagtactacagtcctcc

SEQ ID NO: 84769 - DNA, 25 bp, Homo sapien
accacacattaagtactacagtcct

SEQ ID NO: 84770 - DNA, 25 bp, Homo sapien
tgaacccgggacctctcgcacccaa

SEQ ID NO: 84771 - DNA, 25 bp, Homo sapien
ggacctctcgcacccaaagcgagaa

SEQ ID NO: 84772 - DNA, 25 bp, Homo sapien
acccaaagcgagaatcataccccta

SEQ ID NO: 84773 - DNA, 25 bp, Homo sapien
ccaaagcgagaatcatacccctaga

SEQ ID NO: 84774 - DNA, 25 bp, Homo sapien
aaacttggtcttgacactggtcgac

SEQ ID NO: 84775 - DNA, 25 bp, Homo sapien
gccggtagaaaacgcaaagatgttc

SEQ ID NO: 84776 - DNA, 25 bp, Homo sapien
cgtgccagcctctgcgtagttggga

SEQ ID NO: 84777 - DNA, 25 bp, Homo sapien
cagatggcgggaaactggcttctgc

SEQ ID NO: 84778 - DNA, 25 bp, Homo sapien
agaacaagtccgcagaaacgggcag

SEQ ID NO: 84779 - DNA, 25 bp, Homo sapien
caggacaatggaaagaagttttgtt

SEQ ID NO: 84780 - DNA, 25 bp, Homo sapien
tcagaacaagtccgcagaaacgggc

SEQ ID NO: 84781 - DNA, 25 bp, Homo sapien
ggcaggacaatggaaagaagttttg

SEQ ID NO: 84782 - DNA, 25 bp, Homo sapien
tgcccagctgcgcaaagtaaacctg

SEQ ID NO: 84783 - DNA, 25 bp, Homo sapien
tgcctctactaggaaaggactcccc

SEQ ID NO: 84784 - DNA, 25 bp, Homo sapien
aaacctgagtgggaatgtaaagtcg

SEQ ID NO: 84785 - DNA, 25 bp, Homo sapien
taaacgccccttatgaagctaccag

SEQ ID NO: 84786 - DNA, 25 bp, Homo sapien
tagtggctctgtggttaagtaagtc

SEQ ID NO: 84787 - DNA, 25 bp, Homo sapien
cttctgggaaggtggtcctgtgcca

SEQ ID NO: 84788 - DNA, 25 bp, Homo sapien
gaaggaaacctacattgactattac

SEQ ID NO: 84789 - DNA, 25 bp, Homo sapien
tgaaagttgctgttcgaaggaaacc

SEQ ID NO: 84790 - DNA, 25 bp, Homo sapien
tttcatggcattcttccgggaataa

SEQ ID NO: 84791 - DNA, 25 bp, Homo sapien
atttcatggcattcttccgggaata

SEQ ID NO: 84792 - DNA, 25 bp, Homo sapien
catttgcttttcaaccaactctggg

SEQ ID NO: 84793 - DNA, 25 bp, Homo sapien
aactctgggctttgtgcccactcac

SEQ ID NO: 84794 - DNA, 25 bp, Homo sapien
aacatttgcttttcaaccaactctg

SEQ ID NO: 84795 - DNA, 25 bp, Homo sapien
tgcttttcaaccaactctgggcttt

SEQ ID NO: 84796 - DNA, 25 bp, Homo sapien
aggcaacactactgattgaaggaca

SEQ ID NO: 84797 - DNA, 25 bp, Homo sapien
ggcaagaagaaccacgtctccagga

SEQ ID NO: 84798 - DNA, 25 bp, Homo sapien
tattcaataacggaagtaacaggta

SEQ ID NO: 84799 - DNA, 25 bp, Homo sapien
agcacacgtggcaagaagaaccacg

SEQ ID NO: 84800 - DNA, 25 bp, Homo sapien
agctcaagcaacaccacctctgagt

SEQ ID NO: 84801 - DNA, 25 bp, Homo sapien
tagctcaagcaacaccacctctgag

SEQ ID NO: 84802 - DNA, 25 bp, Homo sapien
tcaacgggagatgggttccagctgt

SEQ ID NO: 84803 - DNA, 25 bp, Homo sapien
ctggcagtttcccttcaacgggaga

SEQ ID NO: 84804 - DNA, 25 bp, Homo sapien
tcccttcaacgggagatgggttcca

SEQ ID NO: 84805 - DNA, 25 bp, Homo sapien
tcctggagatgggttccagttgtgt

SEQ ID NO: 84806 - DNA, 25 bp, Homo sapien
tccactttgtttgaaagagcatcca

SEQ ID NO: 84807 - DNA, 25 bp, Homo sapien
ttccactttgtttgaaagagcatcc

SEQ ID NO: 84808 - DNA, 25 bp, Homo sapien
tcaacctgccagtgagccttctttt

SEQ ID NO: 84809 - DNA, 25 bp, Homo sapien
ttgatcttgggatgtgttccacttt

SEQ ID NO: 84810 - DNA, 25 bp, Homo sapien
agcatcaccaaattaggccaaaagg

SEQ ID NO: 84811 - DNA, 25 bp, Homo sapien
aagaacagcatcaccaaattaggcc

SEQ ID NO: 84812 - DNA, 25 bp, Homo sapien
tgcggagggcaaaaggaggtgtggt

SEQ ID NO: 84813 - DNA, 25 bp, Homo sapien
gaggtgtggtagacccaagaacagc

SEQ ID NO: 84814 - DNA, 25 bp, Homo sapien
cgaagaccaacaacaaaacgcccag

SEQ ID NO: 84815 - DNA, 25 bp, Homo sapien
agacccagcacgaagaccaacaaca

SEQ ID NO: 84816 - DNA, 25 bp, Homo sapien
gcacgaagaccaacaacaaaacgcc

SEQ ID NO: 84817 - DNA, 25 bp, Homo sapien
cagcacgaagaccaacaacaaaacg

SEQ ID NO: 84818 - DNA, 25 bp, Homo sapien
cagtatctgtcatcccggccctgtg

SEQ ID NO: 84819 - DNA, 25 bp, Homo sapien
gcgcttgttgccatgaataaatgtg

SEQ ID NO: 84820 - DNA, 25 bp, Homo sapien
atggccttgatgctgcgcttgttgc

SEQ ID NO: 84821 - DNA, 25 bp, Homo sapien
caggccccgtctcctcatgatgctt

SEQ ID NO: 84822 - DNA, 25 bp, Homo sapien
ggaaagaagacttgcttattcttag

SEQ ID NO: 84823 - DNA, 25 bp, Homo sapien
tggaaagaagacttgcttattctta

SEQ ID NO: 84824 - DNA, 25 bp, Homo sapien
caagtggacaggtaagccattttca

SEQ ID NO: 84825 - DNA, 25 bp, Homo sapien
aacgtttctgaaccccgctgtggct

SEQ ID NO: 84826 - DNA, 25 bp, Homo sapien
gacggaaaattgactgatccaagtg

SEQ ID NO: 84827 - DNA, 25 bp, Homo sapien
ttcacaagcaacaacaacgtttctg

SEQ ID NO: 84828 - DNA, 25 bp, Homo sapien
tttctttgggcccttggcaatgaat

SEQ ID NO: 84829 - DNA, 25 bp, Homo sapien
agctctttctttgggcccttggcaa

SEQ ID NO: 84830 - DNA, 25 bp, Homo sapien
ctttgggcccttggcaatgaatgtt

SEQ ID NO: 84831 - DNA, 25 bp, Homo sapien
tattaaacatgttgtcaaacagaaa

SEQ ID NO: 84832 - DNA, 25 bp, Homo sapien
cctggacaatgttctataacctgag

SEQ ID NO: 84833 - DNA, 25 bp, Homo sapien
ttctagtgacagaggtttggaatac

SEQ ID NO: 84834 - DNA, 25 bp, Homo sapien
tgaaacagactaacccaaggaagag

SEQ ID NO: 84835 - DNA, 25 bp, Homo sapien
tggcccatttcagggcaataccagg

SEQ ID NO: 84836 - DNA, 25 bp, Homo sapien
taccaatgggtgcatctcaaagctg

SEQ ID NO: 84837 - DNA, 25 bp, Homo sapien
gacccaggacgtcagcttttctgca

SEQ ID NO: 84838 - DNA, 25 bp, Homo sapien
gagaaaacctcacctatgcatgcga

SEQ ID NO: 84839 - DNA, 25 bp, Homo sapien
ctataacaaggcctagcacagggta

SEQ ID NO: 84840 - DNA, 25 bp, Homo sapien
cagcatacgtcacagaaagtttaca

SEQ ID NO: 84841 - DNA, 25 bp, Homo sapien
aactccgtaggtgtatgatctttgg

SEQ ID NO: 84842 - DNA, 25 bp, Homo sapien
ggaggctccaattcccgacagtttg

SEQ ID NO: 84843 - DNA, 25 bp, Homo sapien
tacttttaataccttacatctggga

SEQ ID NO: 84844 - DNA, 25 bp, Homo sapien
caaaagcagaagcaatgaatgggtc

SEQ ID NO: 84845 - DNA, 25 bp, Homo sapien
gaacttcctgtgtccctgcaatctg

SEQ ID NO: 84846 - DNA, 25 bp, Homo sapien
cgtgttgccgcaggaatcgctggta

SEQ ID NO: 84847 - DNA, 25 bp, Homo sapien
gtctagtgctcgctatggcccgata

SEQ ID NO: 84848 - DNA, 25 bp, Homo sapien
tttttaatgcctccctgacaggtga

SEQ ID NO: 84849 - DNA, 25 bp, Homo sapien
tggataagtggccagctacactgga

SEQ ID NO: 84850 - DNA, 25 bp, Homo sapien
taagtgtaaggtcaaccactcgcga

SEQ ID NO: 84851 - DNA, 25 bp, Homo sapien
tcgcgataatccctacatggtggca

SEQ ID NO: 84852 - DNA, 25 bp, Homo sapien
tattaaacccaaacataagaatgcc

SEQ ID NO: 84853 - DNA, 25 bp, Homo sapien
cacataagtcttaatgatctagtac

SEQ ID NO: 84854 - DNA, 25 bp, Homo sapien
ttcaatcagtaagagcacataagtc

SEQ ID NO: 84855 - DNA, 25 bp, Homo sapien
actagggtgattcaaagtttcagga

SEQ ID NO: 84856 - DNA, 25 bp, Homo sapien
cagagacctgacagctccctaattt

SEQ ID NO: 84857 - DNA, 25 bp, Homo sapien
ggaagagctgtgagaattgtctttg

SEQ ID NO: 84858 - DNA, 25 bp, Homo sapien
ggtcaaagtgggttattctctagcg

SEQ ID NO: 84859 - DNA, 25 bp, Homo sapien
gagctgtgagaattgtctttgagag

SEQ ID NO: 84860 - DNA, 25 bp, Homo sapien
gctgtgacatccgtgccagaaagat

SEQ ID NO: 84861 - DNA, 25 bp, Homo sapien
agttgtattcctctgtctgccggca

SEQ ID NO: 84862 - DNA, 25 bp, Homo sapien
cactttgcgtgatttggctgtgaca

SEQ ID NO: 84863 - DNA, 25 bp, Homo sapien
gaaagatggcgtcagttaacggcag

SEQ ID NO: 84864 - DNA, 25 bp, Homo sapien
tgtacaagtagcctgcaaagaatgc

SEQ ID NO: 84865 - DNA, 25 bp, Homo sapien
cctgggcccatacataggcatatct

SEQ ID NO: 84866 - DNA, 25 bp, Homo sapien
caggaaacgtccttgctgtgtacaa

SEQ ID NO: 84867 - DNA, 25 bp, Homo sapien
tgcagggtcatgaattctctccagg

SEQ ID NO: 84868 - DNA, 25 bp, Homo sapien
tagttactgataggctccaccatcc

SEQ ID NO: 84869 - DNA, 25 bp, Homo sapien
ttggaaaacacggatgcataagtgc

SEQ ID NO: 84870 - DNA, 25 bp, Homo sapien
gaagcactgaataccaatccctgag

SEQ ID NO: 84871 - DNA, 25 bp, Homo sapien
ggatgtgcatggaccttctagttac

SEQ ID NO: 84872 - DNA, 25 bp, Homo sapien
ctgcaagtgagcctgagctgaaagt

SEQ ID NO: 84873 - DNA, 25 bp, Homo sapien
ctgagctgaaagttggcagtgccat

SEQ ID NO: 84874 - DNA, 25 bp, Homo sapien
tgcaagtgagcctgagctgaaagtt

SEQ ID NO: 84875 - DNA, 25 bp, Homo sapien
ccctgcaagtgagcctgagctgaaa

SEQ ID NO: 84876 - DNA, 25 bp, Homo sapien
gcttgcaaggtacgggcttgatctg

SEQ ID NO: 84877 - DNA, 25 bp, Homo sapien
ttgatctggggacactgtaatattc

SEQ ID NO: 84878 - DNA, 25 bp, Homo sapien
caatgcagcttgcaaggtacgggct

SEQ ID NO: 84879 - DNA, 25 bp, Homo sapien
gcaacaatgcagcttgcaaggtacg

SEQ ID NO: 84880 - DNA, 25 bp, Homo sapien
gagttcaggtcactgattgtagtgg

SEQ ID NO: 84881 - DNA, 25 bp, Homo sapien
gtcactgattgtagtggggatcagc

SEQ ID NO: 84882 - DNA, 25 bp, Homo sapien
gattgtagtggggatcagcatgtgg

SEQ ID NO: 84883 - DNA, 25 bp, Homo sapien
actgattgtagtggggatcagcatg

SEQ ID NO: 84884 - DNA, 25 bp, Homo sapien
ttgaggagccaatcactatcgagct

SEQ ID NO: 84885 - DNA, 25 bp, Homo sapien
atcgagctctcttttaccaaataag

SEQ ID NO: 84886 - DNA, 25 bp, Homo sapien
ttcaaatatctcctgtctaccctgt

SEQ ID NO: 84887 - DNA, 25 bp, Homo sapien
taagctctcaggagatcatgtgtcc

SEQ ID NO: 84888 - DNA, 25 bp, Homo sapien
ctcagtcaccacgtccacctgcgtg

SEQ ID NO: 84889 - DNA, 25 bp, Homo sapien
tcagtcaccacgtccacctgcgtgt

SEQ ID NO: 84890 - DNA, 25 bp, Homo sapien
cagggccaagagtatgccccaaatc

SEQ ID NO: 84891 - DNA, 25 bp, Homo sapien
atgccccaaatctttagagaggatg

SEQ ID NO: 84892 - DNA, 25 bp, Homo sapien
cccaaatctttagagaggatgtcat

SEQ ID NO: 84893 - DNA, 25 bp, Homo sapien
caaaggatgcaaagcagggccaaga

SEQ ID NO: 84894 - DNA, 25 bp, Homo sapien
tattgttgtacttctcccagtgaca

SEQ ID NO: 84895 - DNA, 25 bp, Homo sapien
tgcatgcacgctgaattttgaacca

SEQ ID NO: 84896 - DNA, 25 bp, Homo sapien
tgcatttctatatcggtcgctcccc

SEQ ID NO: 84897 - DNA, 25 bp, Homo sapien
tccccttctcattgatgcatgcacg

SEQ ID NO: 84898 - DNA, 25 bp, Homo sapien
tagttgctgataggttctataatcc

SEQ ID NO: 84899 - DNA, 25 bp, Homo sapien
tcaacatatccatctacgccacaat

SEQ ID NO: 84900 - DNA, 25 bp, Homo sapien
tgataggttctataatcctcaggtc

SEQ ID NO: 84901 - DNA, 25 bp, Homo sapien
catctacgccacaatggaattcaat

SEQ ID NO: 84902 - DNA, 25 bp, Homo sapien
caagaaatcacgaggtacataaact

SEQ ID NO: 84903 - DNA, 25 bp, Homo sapien
gagtcaatatcaggaaagtcttagg

SEQ ID NO: 84904 - DNA, 25 bp, Homo sapien
cttaggttagtcgaggacagatgcc

SEQ ID NO: 84905 - DNA, 25 bp, Homo sapien
tgaatactctaccaatatctgagga

SEQ ID NO: 84906 - DNA, 25 bp, Homo sapien
tcttgttctagcaggagaatcagcc

SEQ ID NO: 84907 - DNA, 25 bp, Homo sapien
gaatcagccattctggcatatagag

SEQ ID NO: 84908 - DNA, 25 bp, Homo sapien
cagtgtctgttctggtgggacctgc

SEQ ID NO: 84909 - DNA, 25 bp, Homo sapien
tgggacctgcaggtataattgctgt

SEQ ID NO: 84910 - DNA, 25 bp, Homo sapien
tctgtaggacttcacaagtgactgc

SEQ ID NO: 84911 - DNA, 25 bp, Homo sapien
gcaaggtgatatctgagtcatccaa

SEQ ID NO: 84912 - DNA, 25 bp, Homo sapien
tcagcttctggattagcacacctag

SEQ ID NO: 84913 - DNA, 25 bp, Homo sapien
aatgcttgaaggcaagggtccaccc

SEQ ID NO: 84914 - DNA, 25 bp, Homo sapien
ggttgtagttgggatcagtgtgtgg

SEQ ID NO: 84915 - DNA, 25 bp, Homo sapien
gtcactggttgtagttgggatcagt

SEQ ID NO: 84916 - DNA, 25 bp, Homo sapien
aagttcaggtcactggttgtagttg

SEQ ID NO: 84917 - DNA, 25 bp, Homo sapien
caagttcaggtcactggttgtagtt

SEQ ID NO: 84918 - DNA, 25 bp, Homo sapien
taatagctccctacagacctgcaag

SEQ ID NO: 84919 - DNA, 25 bp, Homo sapien
gggtcggtacttcctatctgtggaa

SEQ ID NO: 84920 - DNA, 25 bp, Homo sapien
tgagacgcatgtatttgagagcact

SEQ ID NO: 84921 - DNA, 25 bp, Homo sapien
ggaaccctgtcctgatgataaagac

SEQ ID NO: 84922 - DNA, 25 bp, Homo sapien
gtgtccacagagaagagaaagaaaa

SEQ ID NO: 84923 - DNA, 25 bp, Homo sapien
ccacagagaagagaaagaaaagcat

SEQ ID NO: 84924 - DNA, 25 bp, Homo sapien
ctgcgtgtccacagagaagagaaag

SEQ ID NO: 84925 - DNA, 25 bp, Homo sapien
tccacagagaagagaaagaaaagca

SEQ ID NO: 84926 - DNA, 25 bp, Homo sapien
tgtacaagcagtgtgcataggatgc

SEQ ID NO: 84927 - DNA, 25 bp, Homo sapien
cacttgagtactttgagaggattct

SEQ ID NO: 84928 - DNA, 25 bp, Homo sapien
tctcgacttggacttaagtagtgct

SEQ ID NO: 84929 - DNA, 25 bp, Homo sapien
tacatatgcatttcggaagcgatcc

SEQ ID NO: 84930 - DNA, 25 bp, Homo sapien
catctttaggtcttctatgctatca

SEQ ID NO: 84931 - DNA, 25 bp, Homo sapien
tctttaggtcttctatgctatcaac

SEQ ID NO: 84932 - DNA, 25 bp, Homo sapien
taggtcttctatgctatcaacatac

SEQ ID NO: 84933 - DNA, 25 bp, Homo sapien
ctttaggtcttctatgctatcaaca

SEQ ID NO: 84934 - DNA, 25 bp, Homo sapien
gagtcaatatcaggaaagtcttggg

SEQ ID NO: 84935 - DNA, 25 bp, Homo sapien
tgaatactctaccaatacctgagga

SEQ ID NO: 84936 - DNA, 25 bp, Homo sapien
tatgagctgaatgtcgacaaaagta

SEQ ID NO: 84937 - DNA, 25 bp, Homo sapien
ttgggttaatcaagaacagatgcca

SEQ ID NO: 84938 - DNA, 25 bp, Homo sapien
ggaactgatcacttcctgatatgga

SEQ ID NO: 84939 - DNA, 25 bp, Homo sapien
tttgaggaactgatcacttcctgat

SEQ ID NO: 84940 - DNA, 25 bp, Homo sapien
tgaggaactgatcacttcctgatat

SEQ ID NO: 84941 - DNA, 25 bp, Homo sapien
aactgatcacttcctgatatggaat

SEQ ID NO: 84942 - DNA, 25 bp, Homo sapien
catgtatacaggaaggctaaaccaa

SEQ ID NO: 84943 - DNA, 25 bp, Homo sapien
cacatgtatacaggaaggctaaacc

SEQ ID NO: 84944 - DNA, 25 bp, Homo sapien
tatcacatgtatacaggaaggctaa

SEQ ID NO: 84945 - DNA, 25 bp, Homo sapien
tatacaggaaggctaaaccaactta

SEQ ID NO: 84946 - DNA, 25 bp, Homo sapien
cttgtgcagagtctggattaaactc

SEQ ID NO: 84947 - DNA, 25 bp, Homo sapien
ttggcagattaacttcttgtgcaga

SEQ ID NO: 84948 - DNA, 25 bp, Homo sapien
ggattaaactcttagactttcacac

SEQ ID NO: 84949 - DNA, 25 bp, Homo sapien
ttcagaaggagaatcctagggtttg

SEQ ID NO: 84950 - DNA, 25 bp, Homo sapien
aggctgtgattagtccaaagctcag

SEQ ID NO: 84951 - DNA, 25 bp, Homo sapien
cagaggctgtgattagtccaaagct

SEQ ID NO: 84952 - DNA, 25 bp, Homo sapien
gaacagaggctgtgattagtccaaa

SEQ ID NO: 84953 - DNA, 25 bp, Homo sapien
gagaacagaggctgtgattagtcca

SEQ ID NO: 84954 - DNA, 25 bp, Homo sapien
catgaagtggacacactggtcccca

SEQ ID NO: 84955 - DNA, 25 bp, Homo sapien
aaccagcagcagtaaaagaagagga

SEQ ID NO: 84956 - DNA, 25 bp, Homo sapien
acactggtccccatagaaccagcag

SEQ ID NO: 84957 - DNA, 25 bp, Homo sapien
cttaggccaagcatgaagtggacac

SEQ ID NO: 84958 - DNA, 25 bp, Homo sapien
ttggagaggacttggctgtatatgc

SEQ ID NO: 84959 - DNA, 25 bp, Homo sapien
gagaggacttggctgtatatgctga

SEQ ID NO: 84960 - DNA, 25 bp, Homo sapien
tttcaaaccagtgagccttggtgag

SEQ ID NO: 84961 - DNA, 25 bp, Homo sapien
aatttcaaaccagtgagccttggtg

SEQ ID NO: 84962 - DNA, 25 bp, Homo sapien
gctgggtataattgttgatgccact

SEQ ID NO: 84963 - DNA, 25 bp, Homo sapien
ctgggtataattgttgatgccactc

SEQ ID NO: 84964 - DNA, 25 bp, Homo sapien
tgggtataattgttgatgccactca

SEQ ID NO: 84965 - DNA, 25 bp, Homo sapien
gggtataattgttgatgccactcat

SEQ ID NO: 84966 - DNA, 25 bp, Homo sapien
cagaaaggtattttgatgcttacag

SEQ ID NO: 84967 - DNA, 25 bp, Homo sapien
agaaaggtattttgatgcttacagt

SEQ ID NO: 84968 - DNA, 25 bp, Homo sapien
cagttgtgccgacgatttttgcaga

SEQ ID NO: 84969 - DNA, 25 bp, Homo sapien
caatgaagaatttgtactgggcagc

SEQ ID NO: 84970 - DNA, 25 bp, Homo sapien
tactgggcagcagcactatagcggc

SEQ ID NO: 84971 - DNA, 25 bp, Homo sapien
tgaagtgagtctgcagtcagtcatg

SEQ ID NO: 84972 - DNA, 25 bp, Homo sapien
gcaaaagttgcagggttagaaatct

SEQ ID NO: 84973 - DNA, 25 bp, Homo sapien
tattcccttctctcgaaaagtacag

SEQ ID NO: 84974 - DNA, 25 bp, Homo sapien
tggtctggcatcctaggcactcgaa

SEQ ID NO: 84975 - DNA, 25 bp, Homo sapien
cagggcaataaagcttggcaaaagt

SEQ ID NO: 84976 - DNA, 25 bp, Homo sapien
tcttaggtgccatattgccctgacc

SEQ ID NO: 84977 - DNA, 25 bp, Homo sapien
tttgttcctaagatatgacataaat

SEQ ID NO: 84978 - DNA, 25 bp, Homo sapien
tgacataaatgtgtagcgtaaagga

SEQ ID NO: 84979 - DNA, 25 bp, Homo sapien
ggagggcccttgatcagtcatcacc

SEQ ID NO: 84980 - DNA, 25 bp, Homo sapien
cgtatacttgttcataccaaacgtg

SEQ ID NO: 84981 - DNA, 25 bp, Homo sapien
tctggcaatttccaggtaatgttca

SEQ ID NO: 84982 - DNA, 25 bp, Homo sapien
gttcatataaatccattcaacccct

SEQ ID NO: 84983 - DNA, 25 bp, Homo sapien
cctttcagatgctgctactttcgta

SEQ ID NO: 84984 - DNA, 25 bp, Homo sapien
ctttgtgcacgagcccctggtagat

SEQ ID NO: 84985 - DNA, 25 bp, Homo sapien
tgaagggagcccatatgtgccagtc

SEQ ID NO: 84986 - DNA, 25 bp, Homo sapien
aaaaggtcacctgcaagaacgggca

SEQ ID NO: 84987 - DNA, 25 bp, Homo sapien
taaggtcagagcagcgagatacccc

SEQ ID NO: 84988 - DNA, 25 bp, Homo sapien
taatctgtataaggtccacaccccg

SEQ ID NO: 84989 - DNA, 25 bp, Homo sapien
agaggtgttctcaggtgccgcttct

SEQ ID NO: 84990 - DNA, 25 bp, Homo sapien
gtgattgcagaaactggccttccat

SEQ ID NO: 84991 - DNA, 25 bp, Homo sapien
aaagattgggtgatgctagcgctga

SEQ ID NO: 84992 - DNA, 25 bp, Homo sapien
tcagactcagacatacttcctcaga

SEQ ID NO: 84993 - DNA, 25 bp, Homo sapien
agactcagacatacttcctcagaca

SEQ ID NO: 84994 - DNA, 25 bp, Homo sapien
ctcagactcagacatacttcctcag

SEQ ID NO: 84995 - DNA, 25 bp, Homo sapien
ccctcagactcagacatacttcctc

SEQ ID NO: 84996 - DNA, 25 bp, Homo sapien
tcgcactcaggcttatcacaagttt

SEQ ID NO: 84997 - DNA, 25 bp, Homo sapien
accattccttcgcactcaggcttat

SEQ ID NO: 84998 - DNA, 25 bp, Homo sapien
tccagctccttgtttctcaccttcc

SEQ ID NO: 84999 - DNA, 25 bp, Homo sapien
ccttcctgcaattggatgtttcccc

SEQ ID NO: 85000 - DNA, 25 bp, Homo sapien
tcttttcagattccctaaccaccat

SEQ ID NO: 85001 - DNA, 25 bp, Homo sapien
ttcttttcagattccctaaccacca

SEQ ID NO: 85002 - DNA, 25 bp, Homo sapien
gaaaatgctacagtagtttctttct

SEQ ID NO: 85003 - DNA, 25 bp, Homo sapien
agaaaatgctacagtagtttctttc

SEQ ID NO: 85004 - DNA, 25 bp, Homo sapien
tgactctgttcctttagctctaata

SEQ ID NO: 85005 - DNA, 25 bp, Homo sapien
ctgttcctttagctctaatattctc

SEQ ID NO: 85006 - DNA, 25 bp, Homo sapien
tcctttagctctaatattctcttca

SEQ ID NO: 85007 - DNA, 25 bp, Homo sapien
tgccaagctccttgttgactctgtt

SEQ ID NO: 85008 - DNA, 25 bp, Homo sapien
ccccagtgtgactctcagtgtgtct

SEQ ID NO: 85009 - DNA, 25 bp, Homo sapien
gattaattgtacacagtgccccaag

SEQ ID NO: 85010 - DNA, 25 bp, Homo sapien
tgcccgcctggtattccttgacatg

SEQ ID NO: 85011 - DNA, 25 bp, Homo sapien
gaagatgccttaaagcaggctctgc

SEQ ID NO: 85012 - DNA, 25 bp, Homo sapien
taagagctgcaactccggtcatctg

SEQ ID NO: 85013 - DNA, 25 bp, Homo sapien
ataagagctgcaactccggtcatct

SEQ ID NO: 85014 - DNA, 25 bp, Homo sapien
atagcaatttcaatggtctgctttt

SEQ ID NO: 85015 - DNA, 25 bp, Homo sapien
aagagctgcaactccggtcatctga

SEQ ID NO: 85016 - DNA, 25 bp, Homo sapien
gggacattttttggaacttgagcag

SEQ ID NO: 85017 - DNA, 25 bp, Homo sapien
cattttttggaacttgagcagcagc

SEQ ID NO: 85018 - DNA, 25 bp, Homo sapien
agcagctcagaaatgtgaaacaaat

SEQ ID NO: 85019 - DNA, 25 bp, Homo sapien
gacattttttggaacttgagcagca

SEQ ID NO: 85020 - DNA, 25 bp, Homo sapien
ccaaatcaagctttgctggcgtttt

SEQ ID NO: 85021 - DNA, 25 bp, Homo sapien
aaggagtgtgaatgacttggagcag

SEQ ID NO: 85022 - DNA, 25 bp, Homo sapien
tcaagctttgctggcgtttttgaaa

SEQ ID NO: 85023 - DNA, 25 bp, Homo sapien
tagaaaccgaggtgaaggagtgtga

SEQ ID NO: 85024 - DNA, 25 bp, Homo sapien
tatgagctttacagttcagctgcgc

SEQ ID NO: 85025 - DNA, 25 bp, Homo sapien
tcagctgcgctggagaagagtttat

SEQ ID NO: 85026 - DNA, 25 bp, Homo sapien
caagcttcctgcacaagagtccaaa

SEQ ID NO: 85027 - DNA, 25 bp, Homo sapien
tcttggttgctgacacgggtagacg

SEQ ID NO: 85028 - DNA, 25 bp, Homo sapien
gggacccgacctcttcactgccact

SEQ ID NO: 85029 - DNA, 25 bp, Homo sapien
cagggacccgacctcttcactgcca

SEQ ID NO: 85030 - DNA, 25 bp, Homo sapien
agggacccgacctcttcactgccac

SEQ ID NO: 85031 - DNA, 25 bp, Homo sapien
gatgtcaatgtcactgactgctttg

SEQ ID NO: 85032 - DNA, 25 bp, Homo sapien
tagcagatttctgcagaactccacc

SEQ ID NO: 85033 - DNA, 25 bp, Homo sapien
gcagatttctgcagaactccaccac

SEQ ID NO: 85034 - DNA, 25 bp, Homo sapien
gatttctgcagaactccaccactgc

SEQ ID NO: 85035 - DNA, 25 bp, Homo sapien
caccatagcagatttctgcagaact

SEQ ID NO: 85036 - DNA, 25 bp, Homo sapien
gggtaaatgcgagcagatccacaca

SEQ ID NO: 85037 - DNA, 25 bp, Homo sapien
caccgatactgtgatgtgatgatga

SEQ ID NO: 85038 - DNA, 25 bp, Homo sapien
tgatctataggggtaaatgcgagca

SEQ ID NO: 85039 - DNA, 25 bp, Homo sapien
ctagaggacaccaccgatactgtga

SEQ ID NO: 85040 - DNA, 25 bp, Homo sapien
gaatctgatgtggaccctcctcctt

SEQ ID NO: 85041 - DNA, 25 bp, Homo sapien
cacaggaaacatgaatctgatgtgg

SEQ ID NO: 85042 - DNA, 25 bp, Homo sapien
tttggacgtaactgtcttcattcca

SEQ ID NO: 85043 - DNA, 25 bp, Homo sapien
tccttttggacgtaactgtcttcat

SEQ ID NO: 85044 - DNA, 25 bp, Homo sapien
taagtatagggccaagacttcttag

SEQ ID NO: 85045 - DNA, 25 bp, Homo sapien
agtatagggccaagacttcttagga

SEQ ID NO: 85046 - DNA, 25 bp, Homo sapien
atagggccaagacttcttaggaaca

SEQ ID NO: 85047 - DNA, 25 bp, Homo sapien
tatagggccaagacttcttaggaac

SEQ ID NO: 85048 - DNA, 25 bp, Homo sapien
tgcattctggcaacctatggaacca

SEQ ID NO: 85049 - DNA, 25 bp, Homo sapien
ggcataggccaacctacatcaggtg

SEQ ID NO: 85050 - DNA, 25 bp, Homo sapien
caagggtcacgtgaccagaggtcac

SEQ ID NO: 85051 - DNA, 25 bp, Homo sapien
tggaaccagggctcataactcaacc

SEQ ID NO: 85052 - DNA, 25 bp, Homo sapien
ctctagatccagtaatgtggatatc

SEQ ID NO: 85053 - DNA, 25 bp, Homo sapien
tttctctagatccagtaatgtggat

SEQ ID NO: 85054 - DNA, 25 bp, Homo sapien
taatgtggatatctcttcaatgaat

SEQ ID NO: 85055 - DNA, 25 bp, Homo sapien
gatccagtaatgtggatatctcttc

SEQ ID NO: 85056 - DNA, 25 bp, Homo sapien
acatgctcttcctttgaaacccgga

SEQ ID NO: 85057 - DNA, 25 bp, Homo sapien
tgaaacccggatattttccttcatg

SEQ ID NO: 85058 - DNA, 25 bp, Homo sapien
tgctcttcctttgaaacccggatat

SEQ ID NO: 85059 - DNA, 25 bp, Homo sapien
cctgtcaagacatgctcttcctttg

SEQ ID NO: 85060 - DNA, 25 bp, Homo sapien
tcaagtttctggcatgaaagaggaa

SEQ ID NO: 85061 - DNA, 25 bp, Homo sapien
tttgatcaagtttctggcatgaaag

SEQ ID NO: 85062 - DNA, 25 bp, Homo sapien
gatcaagtttctggcatgaaagagg

SEQ ID NO: 85063 - DNA, 25 bp, Homo sapien
tgatcaagtttctggcatgaaagag

SEQ ID NO: 85064 - DNA, 25 bp, Homo sapien
accattgaataagtagatctgacac

SEQ ID NO: 85065 - DNA, 25 bp, Homo sapien
tcctgcatgtctcctctgaaaacca

SEQ ID NO: 85066 - DNA, 25 bp, Homo sapien
ggccctaggccttccttcttgtgtg

SEQ ID NO: 85067 - DNA, 25 bp, Homo sapien
tcttgtgtgggtcctcctgcatgtc

SEQ ID NO: 85068 - DNA, 25 bp, Homo sapien
ggctcctgtgagaactgatccagct

SEQ ID NO: 85069 - DNA, 25 bp, Homo sapien
ctgtgagaactgatccagctggttg

SEQ ID NO: 85070 - DNA, 25 bp, Homo sapien
gtggctcctgtgagaactgatccag

SEQ ID NO: 85071 - DNA, 25 bp, Homo sapien
tcctgtgagaactgatccagctggt

SEQ ID NO: 85072 - DNA, 25 bp, Homo sapien
gatccggtctcggttatgacacact

SEQ ID NO: 85073 - DNA, 25 bp, Homo sapien
ctccccgatccggtctcggttatga

SEQ ID NO: 85074 - DNA, 25 bp, Homo sapien
cactctatagtgtctcaacccacag

SEQ ID NO: 85075 - DNA, 25 bp, Homo sapien
ctcggttatgacacactctatagtg

SEQ ID NO: 85076 - DNA, 25 bp, Homo sapien
cacaggataccgtggagaatcccgt

SEQ ID NO: 85077 - DNA, 25 bp, Homo sapien
tgagggcagcgtatactttggttac

SEQ ID NO: 85078 - DNA, 25 bp, Homo sapien
gaatcccgtggatctctgttgtcac

SEQ ID NO: 85079 - DNA, 25 bp, Homo sapien
taaaggcacccggaatctactccga

SEQ ID NO: 85080 - DNA, 25 bp, Homo sapien
tcttggctatgattgaggagcttgg

SEQ ID NO: 85081 - DNA, 25 bp, Homo sapien
cttggctatgattgaggagcttggc

SEQ ID NO: 85082 - DNA, 25 bp, Homo sapien
atcttggctatgattgaggagcttg

SEQ ID NO: 85083 - DNA, 25 bp, Homo sapien
ttggctatgattgaggagcttggca

SEQ ID NO: 85084 - DNA, 25 bp, Homo sapien
ttctcatggattcctgagtgaagcc

SEQ ID NO: 85085 - DNA, 25 bp, Homo sapien
aagccctgtgttggagtccagggca

SEQ ID NO: 85086 - DNA, 25 bp, Homo sapien
agtgaagccctgtgttggagtccag

SEQ ID NO: 85087 - DNA, 25 bp, Homo sapien
ctgtttctcatggattcctgagtga

SEQ ID NO: 85088 - DNA, 25 bp, Homo sapien
ctctcttgcattctgagtcgggcca

SEQ ID NO: 85089 - DNA, 25 bp, Homo sapien
tcgggccattcaaaaagacccactc

SEQ ID NO: 85090 - DNA, 25 bp, Homo sapien
tcttgcattctgagtcgggccattc

SEQ ID NO: 85091 - DNA, 25 bp, Homo sapien
tctgagtcgggccattcaaaaagac

SEQ ID NO: 85092 - DNA, 25 bp, Homo sapien
gaggaggagaaatatagaagtcaga

SEQ ID NO: 85093 - DNA, 25 bp, Homo sapien
agaaatatagaagtcagaaatctca

SEQ ID NO: 85094 - DNA, 25 bp, Homo sapien
agaaatctcagactgaaggaccaag

SEQ ID NO: 85095 - DNA, 25 bp, Homo sapien
aagaggaggagaaatatagaagtca

SEQ ID NO: 85096 - DNA, 25 bp, Homo sapien
cacaggaaacgtggctccagctttc

SEQ ID NO: 85097 - DNA, 25 bp, Homo sapien
ttcacaggaaacgtggctccagctt

SEQ ID NO: 85098 - DNA, 25 bp, Homo sapien
aggaaacgtggctccagctttcaga

SEQ ID NO: 85099 - DNA, 25 bp, Homo sapien
ttcttcacaggaaacgtggctccag

SEQ ID NO: 85100 - DNA, 25 bp, Homo sapien
gagggaaggtttgcacttggagtaa

SEQ ID NO: 85101 - DNA, 25 bp, Homo sapien
aaggtttgcacttggagtaagacat

SEQ ID NO: 85102 - DNA, 25 bp, Homo sapien
gaaggtttgcacttggagtaagaca

SEQ ID NO: 85103 - DNA, 25 bp, Homo sapien
gggaaggtttgcacttggagtaaga

SEQ ID NO: 85104 - DNA, 25 bp, Homo sapien
gaaatttggatacctcttcaatgaa

SEQ ID NO: 85105 - DNA, 25 bp, Homo sapien
tcctggtaagattgtctttccttag

SEQ ID NO: 85106 - DNA, 25 bp, Homo sapien
cttagacccagaaatttggatacct

SEQ ID NO: 85107 - DNA, 25 bp, Homo sapien
tggtaagattgtctttccttagacc

SEQ ID NO: 85108 - DNA, 25 bp, Homo sapien
tcaagtttctggcatgaaagaggaa

SEQ ID NO: 85109 - DNA, 25 bp, Homo sapien
gatcaagtttctggcatgaaagagg

SEQ ID NO: 85110 - DNA, 25 bp, Homo sapien
tgatcaagtttctggcatgaaagag

SEQ ID NO: 85111 - DNA, 25 bp, Homo sapien
tttgatcaagtttctggcatgaaag

SEQ ID NO: 85112 - DNA, 25 bp, Homo sapien
acagtctccgcgctgtggctcctat

SEQ ID NO: 85113 - DNA, 25 bp, Homo sapien
ggccaatctgctgccactcttgggt

SEQ ID NO: 85114 - DNA, 25 bp, Homo sapien
cacaggccaatctgctgccactctt

SEQ ID NO: 85115 - DNA, 25 bp, Homo sapien
tgctgccactcttgggtcccatttc

SEQ ID NO: 85116 - DNA, 25 bp, Homo sapien
ttcctgtccccaaagtgtgccacat

SEQ ID NO: 85117 - DNA, 25 bp, Homo sapien
caaatttgggaagtgaacagttttg

SEQ ID NO: 85118 - DNA, 25 bp, Homo sapien
gttcctactgatggacgtcaaaccc

SEQ ID NO: 85119 - DNA, 25 bp, Homo sapien
ctactgatggacgtcaaacccctga

SEQ ID NO: 85120 - DNA, 25 bp, Homo sapien
gatggacgtcaaacccctgagccca

SEQ ID NO: 85121 - DNA, 25 bp, Homo sapien
actgatggacgtcaaacccctgagc

SEQ ID NO: 85122 - DNA, 25 bp, Homo sapien
gcaggttatagttgggttaccacaa

SEQ ID NO: 85123 - DNA, 25 bp, Homo sapien
ttaaaggcacctggactccactatg

SEQ ID NO: 85124 - DNA, 25 bp, Homo sapien
ggcacctggactccactatgatgac

SEQ ID NO: 85125 - DNA, 25 bp, Homo sapien
ctgttatgagggcaggttatagttg

SEQ ID NO: 85126 - DNA, 25 bp, Homo sapien
tcttggctatgattgaggagcttgg

SEQ ID NO: 85127 - DNA, 25 bp, Homo sapien
ttggctatgattgaggagcttggca

SEQ ID NO: 85128 - DNA, 25 bp, Homo sapien
atcttggctatgattgaggagcttg

SEQ ID NO: 85129 - DNA, 25 bp, Homo sapien
cttggctatgattgaggagcttggc

SEQ ID NO: 85130 - DNA, 25 bp, Homo sapien
cagaacgggcaggagccaattcacc

SEQ ID NO: 85131 - DNA, 25 bp, Homo sapien
ggtctgaacctcattaactcctatc

SEQ ID NO: 85132 - DNA, 25 bp, Homo sapien
tcttctatcttcacaagcatgaagg

SEQ ID NO: 85133 - DNA, 25 bp, Homo sapien
caagcatgaagggtctgaacctcat

SEQ ID NO: 85134 - DNA, 25 bp, Homo sapien
tcttcacaagcatgaagggtctgaa

SEQ ID NO: 85135 - DNA, 25 bp, Homo sapien
tcctcatttatacagatttcttcgt

SEQ ID NO: 85136 - DNA, 25 bp, Homo sapien
ttcctcatttatacagatttcttcg

SEQ ID NO: 85137 - DNA, 25 bp, Homo sapien
tacagatttcttcgtataattcctc

SEQ ID NO: 85138 - DNA, 25 bp, Homo sapien
cttcgtataattcctctatgtcccc

SEQ ID NO: 85139 - DNA, 25 bp, Homo sapien
agtttagagcctcactctgtgacca

SEQ ID NO: 85140 - DNA, 25 bp, Homo sapien
gacacatgtaatacgggccagttta

SEQ ID NO: 85141 - DNA, 25 bp, Homo sapien
tctacctgctgacttgggatagtca

SEQ ID NO: 85142 - DNA, 25 bp, Homo sapien
gggatagtcacactcttcctccgag

SEQ ID NO: 85143 - DNA, 25 bp, Homo sapien
gcattctgccagacgttctgttcct

SEQ ID NO: 85144 - DNA, 25 bp, Homo sapien
ggctggcgctacatgtcctggatca

SEQ ID NO: 85145 - DNA, 25 bp, Homo sapien
gatcatagggtccttctgcattctg

SEQ ID NO: 85146 - DNA, 25 bp, Homo sapien
tattagggacgataccctggtggga

SEQ ID NO: 85147 - DNA, 25 bp, Homo sapien
ggagggagcctgaattacggaaata

SEQ ID NO: 85148 - DNA, 25 bp, Homo sapien
ctgaattacggaaataattctctgg

SEQ ID NO: 85149 - DNA, 25 bp, Homo sapien
gcctgaattacggaaataattctct

SEQ ID NO: 85150 - DNA, 25 bp, Homo sapien
ggagcctgaattacggaaataattc

SEQ ID NO: 85151 - DNA, 25 bp, Homo sapien
tcccctatccctgccacagtgtcag

SEQ ID NO: 85152 - DNA, 25 bp, Homo sapien
ccccacgtcccctatccctgccaca

SEQ ID NO: 85153 - DNA, 25 bp, Homo sapien
cacgtcccctatccctgccacagtg

SEQ ID NO: 85154 - DNA, 25 bp, Homo sapien
cgtcccctatccctgccacagtgtc

SEQ ID NO: 85155 - DNA, 25 bp, Homo sapien
gggacccgacctcttcactgccact

SEQ ID NO: 85156 - DNA, 25 bp, Homo sapien
cagggacccgacctcttcactgcca

SEQ ID NO: 85157 - DNA, 25 bp, Homo sapien
agggacccgacctcttcactgccac

SEQ ID NO: 85158 - DNA, 25 bp, Homo sapien
gatgtcaatgtcactgactgctttg

SEQ ID NO: 85159 - DNA, 25 bp, Homo sapien
ctgtaccaacagcccctccatgtgc

SEQ ID NO: 85160 - DNA, 25 bp, Homo sapien
gtaccaacagcccctccatgtgcag

SEQ ID NO: 85161 - DNA, 25 bp, Homo sapien
tgtaccaacagcccctccatgtgca

SEQ ID NO: 85162 - DNA, 25 bp, Homo sapien
gatttctgcagaactccaccactgc

SEQ ID NO: 85163 - DNA, 25 bp, Homo sapien
gcagatttctgcagaactccaccac

SEQ ID NO: 85164 - DNA, 25 bp, Homo sapien
caccatagcagatttctgcagaact

SEQ ID NO: 85165 - DNA, 25 bp, Homo sapien
tagcagatttctgcagaactccacc

SEQ ID NO: 85166 - DNA, 25 bp, Homo sapien
ataggggtaaatgcgagcagatcca

SEQ ID NO: 85167 - DNA, 25 bp, Homo sapien
aggggtaaatgcgagcagatccaca

SEQ ID NO: 85168 - DNA, 25 bp, Homo sapien
ctataggggtaaatgcgagcagatc

SEQ ID NO: 85169 - DNA, 25 bp, Homo sapien
gggtaaatgcgagcagatccacaca

SEQ ID NO: 85170 - DNA, 25 bp, Homo sapien
tgggtccctagaggacaccaccgat

SEQ ID NO: 85171 - DNA, 25 bp, Homo sapien
cctagaggacaccaccgatactgtg

SEQ ID NO: 85172 - DNA, 25 bp, Homo sapien
caggtcgtgggtccctagaggacac

SEQ ID NO: 85173 - DNA, 25 bp, Homo sapien
caccgatactgtgatgtgatgatga

SEQ ID NO: 85174 - DNA, 25 bp, Homo sapien
tgacaggcctgagagttttccatac

SEQ ID NO: 85175 - DNA, 25 bp, Homo sapien
aatctgtttaaaatcattgacaggc

SEQ ID NO: 85176 - DNA, 25 bp, Homo sapien
gagagttttccatacggcctgcacc

SEQ ID NO: 85177 - DNA, 25 bp, Homo sapien
gcctgcaccctaacctctgggaaga

SEQ ID NO: 85178 - DNA, 25 bp, Homo sapien
gatccagtaatgtggatatctcttc

SEQ ID NO: 85179 - DNA, 25 bp, Homo sapien
taatgtggatatctcttcaatgaat

SEQ ID NO: 85180 - DNA, 25 bp, Homo sapien
ctctagatccagtaatgtggatatc

SEQ ID NO: 85181 - DNA, 25 bp, Homo sapien
tttctctagatccagtaatgtggat

SEQ ID NO: 85182 - DNA, 25 bp, Homo sapien
cagatgtggaccctcttcctgttca

SEQ ID NO: 85183 - DNA, 25 bp, Homo sapien
tccactgagatgaaaacgtgacaca

SEQ ID NO: 85184 - DNA, 25 bp, Homo sapien
tgagatgaaaacgtgacacagatgt

SEQ ID NO: 85185 - DNA, 25 bp, Homo sapien
ccctccactgagatgaaaacgtgac

SEQ ID NO: 85186 - DNA, 25 bp, Homo sapien
cagtctccgcgctgtagctcctgtg

SEQ ID NO: 85187 - DNA, 25 bp, Homo sapien
ctgtgagaactgatccagctggttg

SEQ ID NO: 85188 - DNA, 25 bp, Homo sapien
ccgcgctgtagctcctgtgagaact

SEQ ID NO: 85189 - DNA, 25 bp, Homo sapien
tctccgcgctgtagctcctgtgaga

SEQ ID NO: 85190 - DNA, 25 bp, Homo sapien
ccactgtggtgacaatttttgcgag

SEQ ID NO: 85191 - DNA, 25 bp, Homo sapien
cgagttttgttactaggacaggtca

SEQ ID NO: 85192 - DNA, 25 bp, Homo sapien
tattgatgtgctgggtttcaaacca

SEQ ID NO: 85193 - DNA, 25 bp, Homo sapien
gacaggtcatatttgggttaccaca

SEQ ID NO: 85194 - DNA, 25 bp, Homo sapien
gtttgctggtgtctgcgcatacctg

SEQ ID NO: 85195 - DNA, 25 bp, Homo sapien
gtctgcgcatacctgcagtttgaaa

SEQ ID NO: 85196 - DNA, 25 bp, Homo sapien
gaaatattctgtggacttggagttg

SEQ ID NO: 85197 - DNA, 25 bp, Homo sapien
gtcacatgcaactatatagaacatg

SEQ ID NO: 85198 - DNA, 25 bp, Homo sapien
cccaaagtatatggagagatgggat

SEQ ID NO: 85199 - DNA, 25 bp, Homo sapien
ccaaagtatatggagagatgggatc

SEQ ID NO: 85200 - DNA, 25 bp, Homo sapien
acccaaagtatatggagagatggga

SEQ ID NO: 85201 - DNA, 25 bp, Homo sapien
ccccatcggcttaagcgcacttata

SEQ ID NO: 85202 - DNA, 25 bp, Homo sapien
atgaacacccccatcggcttaagcg

SEQ ID NO: 85203 - DNA, 25 bp, Homo sapien
tcggcttaagcgcacttatagccca

SEQ ID NO: 85204 - DNA, 25 bp, Homo sapien
taagcgcacttatagcccacatctc

SEQ ID NO: 85205 - DNA, 25 bp, Homo sapien
cagtttcagccaacgagaagagcga

SEQ ID NO: 85206 - DNA, 25 bp, Homo sapien
ccggaaacggaaatacaggtgcctg

SEQ ID NO: 85207 - DNA, 25 bp, Homo sapien
aaggagcagccttcgcagaacttct

SEQ ID NO: 85208 - DNA, 25 bp, Homo sapien
cagaaaccgtgtttgggccgacttg

SEQ ID NO: 85209 - DNA, 25 bp, Homo sapien
ccatcttcctaatgtcagtagacac

SEQ ID NO: 85210 - DNA, 25 bp, Homo sapien
atgtcagtagacacttcagtgccgc

SEQ ID NO: 85211 - DNA, 25 bp, Homo sapien
agtagacacttcagtgccgccgcca

SEQ ID NO: 85212 - DNA, 25 bp, Homo sapien
gccggggcaccatcttcctaatgtc

SEQ ID NO: 85213 - DNA, 25 bp, Homo sapien
agatccagagtctctccgacagcag

SEQ ID NO: 85214 - DNA, 25 bp, Homo sapien
gcagatccagagtctctccgacagc

SEQ ID NO: 85215 - DNA, 25 bp, Homo sapien
cgctcctcctctgcgcggagatgtc

SEQ ID NO: 85216 - DNA, 25 bp, Homo sapien
tgcgcggagatgtctctgcagatcc

SEQ ID NO: 85217 - DNA, 25 bp, Homo sapien
tcactccgggtactaaggcggcgag

SEQ ID NO: 85218 - DNA, 25 bp, Homo sapien
gcaggaaaccggacttgttatctac

SEQ ID NO: 85219 - DNA, 25 bp, Homo sapien
cacgtgcggcagctttaggatgcca

SEQ ID NO: 85220 - DNA, 25 bp, Homo sapien
agtagcaataactgggcaccgttag

SEQ ID NO: 85221 - DNA, 25 bp, Homo sapien
aggtccagtcccgtttcttctcgct

SEQ ID NO: 85222 - DNA, 25 bp, Homo sapien
gcggaatcacttgcatgtaggtcca

SEQ ID NO: 85223 - DNA, 25 bp, Homo sapien
tgcatgtaggtccagtcccgtttct

SEQ ID NO: 85224 - DNA, 25 bp, Homo sapien
ccaaagacgaaaagcggaatcactt

SEQ ID NO: 85225 - DNA, 25 bp, Homo sapien
gattctccatagtgggcccagcgct

SEQ ID NO: 85226 - DNA, 25 bp, Homo sapien
ttctccatagtgggcccagcgctcc

SEQ ID NO: 85227 - DNA, 25 bp, Homo sapien
tgattctccatagtgggcccagcgc

SEQ ID NO: 85228 - DNA, 25 bp, Homo sapien
ctgattctccatagtgggcccagcg

SEQ ID NO: 85229 - DNA, 25 bp, Homo sapien
cagagataactggtcagtgtttgca

SEQ ID NO: 85230 - DNA, 25 bp, Homo sapien
tctttgcaactcctctggctctaca

SEQ ID NO: 85231 - DNA, 25 bp, Homo sapien
caggcaaatgtctgctccagagata

SEQ ID NO: 85232 - DNA, 25 bp, Homo sapien
tctcaagatgcctagcccgtctttg

SEQ ID NO: 85233 - DNA, 25 bp, Homo sapien
tatctactgaactactgtgagccag

SEQ ID NO: 85234 - DNA, 25 bp, Homo sapien
taacagtatattggtagccaggcgc

SEQ ID NO: 85235 - DNA, 25 bp, Homo sapien
tgggcagggaccatccagggacttt

SEQ ID NO: 85236 - DNA, 25 bp, Homo sapien
aaatggtagtgtcaaggagctcaca

SEQ ID NO: 85237 - DNA, 25 bp, Homo sapien
aaagccttaaagctcaagggagacg

SEQ ID NO: 85238 - DNA, 25 bp, Homo sapien
tcaggcaagaattaacggtaacaac

SEQ ID NO: 85239 - DNA, 25 bp, Homo sapien
ggtaacaactaccactaacagattg

SEQ ID NO: 85240 - DNA, 25 bp, Homo sapien
taaccaatcctgtcccacaggtttg

SEQ ID NO: 85241 - DNA, 25 bp, Homo sapien
ctgtggtgagaacaaggactggaag

SEQ ID NO: 85242 - DNA, 25 bp, Homo sapien
gtgagaacaaggactggaagtcagg

SEQ ID NO: 85243 - DNA, 25 bp, Homo sapien
gagaacaaggactggaagtcaggac

SEQ ID NO: 85244 - DNA, 25 bp, Homo sapien
tggtgagaacaaggactggaagtca

SEQ ID NO: 85245 - DNA, 25 bp, Homo sapien
tacgtagtgcgtgtagcactgctcc

SEQ ID NO: 85246 - DNA, 25 bp, Homo sapien
tcttgccaatggtaggtagttttac

SEQ ID NO: 85247 - DNA, 25 bp, Homo sapien
tagttttacgtagtgcgtgtagcac

SEQ ID NO: 85248 - DNA, 25 bp, Homo sapien
tagcactgctccacgaagtttctcc

SEQ ID NO: 85249 - DNA, 25 bp, Homo sapien
ggagactgctgcaaagccaccatcc

SEQ ID NO: 85250 - DNA, 25 bp, Homo sapien
gagactgctgcaaagccaccatcca

SEQ ID NO: 85251 - DNA, 25 bp, Homo sapien
tagggaactgatggtcaaaaagttc

SEQ ID NO: 85252 - DNA, 25 bp, Homo sapien
tactttatgaatagggaactgatgg

SEQ ID NO: 85253 - DNA, 25 bp, Homo sapien
aatgcatatgcaatgtcccaagaat

SEQ ID NO: 85254 - DNA, 25 bp, Homo sapien
cccatcctagaaaactactttatga

SEQ ID NO: 85255 - DNA, 25 bp, Homo sapien
ctgaaatgctggatttcgagcccgg

SEQ ID NO: 85256 - DNA, 25 bp, Homo sapien
tggctgaaatgctggatttcgagcc

SEQ ID NO: 85257 - DNA, 25 bp, Homo sapien
tttgtggctgaaatgctggatttcg

SEQ ID NO: 85258 - DNA, 25 bp, Homo sapien
agtttgtggctgaaatgctggattt

SEQ ID NO: 85259 - DNA, 25 bp, Homo sapien
caagatagggctgaagaaagttact

SEQ ID NO: 85260 - DNA, 25 bp, Homo sapien
gatagggctgaagaaagttactcac

SEQ ID NO: 85261 - DNA, 25 bp, Homo sapien
tcccaacttgcctattctccctctg

SEQ ID NO: 85262 - DNA, 25 bp, Homo sapien
tttctagagctaaaattgaccaaga

SEQ ID NO: 85263 - DNA, 25 bp, Homo sapien
catctctacaagaggcccatttaca

SEQ ID NO: 85264 - DNA, 25 bp, Homo sapien
catgaccaagagtcatctctacaag

SEQ ID NO: 85265 - DNA, 25 bp, Homo sapien
caagagtcatctctacaagaggccc

SEQ ID NO: 85266 - DNA, 25 bp, Homo sapien
gaaaagagagtgttatgttaaagta

SEQ ID NO: 85267 - DNA, 25 bp, Homo sapien
ttcacgtaggctctggccccaaata

SEQ ID NO: 85268 - DNA, 25 bp, Homo sapien
tattcacgtaggctctggccccaaa

SEQ ID NO: 85269 - DNA, 25 bp, Homo sapien
tatattcacgtaggctctggcccca

SEQ ID NO: 85270 - DNA, 25 bp, Homo sapien
acatatattcacgtaggctctggcc

SEQ ID NO: 85271 - DNA, 25 bp, Homo sapien
tagtttttctgccaaaaccaacatg

SEQ ID NO: 85272 - DNA, 25 bp, Homo sapien
tctgccaaaaccaacatggcagctg

SEQ ID NO: 85273 - DNA, 25 bp, Homo sapien
ttcagtagtttttctgccaaaacca

SEQ ID NO: 85274 - DNA, 25 bp, Homo sapien
tgccaaaaccaacatggcagctgat

SEQ ID NO: 85275 - DNA, 25 bp, Homo sapien
agcagaaacctctaataccaccctt

SEQ ID NO: 85276 - DNA, 25 bp, Homo sapien
agtccagcagaaacctctaatacca

SEQ ID NO: 85277 - DNA, 25 bp, Homo sapien
cctcagtccagcagaaacctctaat

SEQ ID NO: 85278 - DNA, 25 bp, Homo sapien
atcctcagtccagcagaaacctcta

SEQ ID NO: 85279 - DNA, 25 bp, Homo sapien
gacacctggaatataaggctcccca

SEQ ID NO: 85280 - DNA, 25 bp, Homo sapien
tggaatataaggctccccagattct

SEQ ID NO: 85281 - DNA, 25 bp, Homo sapien
aaagacacctggaatataaggctcc

SEQ ID NO: 85282 - DNA, 25 bp, Homo sapien
cacctggaatataaggctccccaga

SEQ ID NO: 85283 - DNA, 25 bp, Homo sapien
gctgcaaagctcaagccatagtttt

SEQ ID NO: 85284 - DNA, 25 bp, Homo sapien
ggtttgaactacctcagtgcggtca

SEQ ID NO: 85285 - DNA, 25 bp, Homo sapien
cctgtcttacgccataaggtttgaa

SEQ ID NO: 85286 - DNA, 25 bp, Homo sapien
caggaaatgacctgtcttacgccat

SEQ ID NO: 85287 - DNA, 25 bp, Homo sapien
ggaaaaagctgacactactacatca

SEQ ID NO: 85288 - DNA, 25 bp, Homo sapien
aatcaggatggagaccctcaaagag

SEQ ID NO: 85289 - DNA, 25 bp, Homo sapien
taaagacaatgagaggagcaaaggc

SEQ ID NO: 85290 - DNA, 25 bp, Homo sapien
tggagaccctcaaagagggataaag

SEQ ID NO: 85291 - DNA, 25 bp, Homo sapien
agaaataggcattacataatcagga

SEQ ID NO: 85292 - DNA, 25 bp, Homo sapien
tatgcagaagacttgaattacacga

SEQ ID NO: 85293 - DNA, 25 bp, Homo sapien
taaatgtcagtagctgtgtaagagc

SEQ ID NO: 85294 - DNA, 25 bp, Homo sapien
taagagcaatcatagagggagaagg

SEQ ID NO: 85295 - DNA, 25 bp, Homo sapien
gaattacacgaaagtataaatgtca

SEQ ID NO: 85296 - DNA, 25 bp, Homo sapien
ttaaggaccagatccctggcatcca

SEQ ID NO: 85297 - DNA, 25 bp, Homo sapien
cttaaggaccagatccctggcatcc

SEQ ID NO: 85298 - DNA, 25 bp, Homo sapien
cctggcatccatgagaaggctgtgc

SEQ ID NO: 85299 - DNA, 25 bp, Homo sapien
ccctggcatccatgagaaggctgtg

SEQ ID NO: 85300 - DNA, 25 bp, Homo sapien
ccaggtcgagggtccaaaggtgact

SEQ ID NO: 85301 - DNA, 25 bp, Homo sapien
caggtcgagggtccaaaggtgactt

SEQ ID NO: 85302 - DNA, 25 bp, Homo sapien
gagtggcttagctttaccatcttac

SEQ ID NO: 85303 - DNA, 25 bp, Homo sapien
tgggacaggcagaagtaatactcac

SEQ ID NO: 85304 - DNA, 25 bp, Homo sapien
ggaactggataggaacacaaagtag

SEQ ID NO: 85305 - DNA, 25 bp, Homo sapien
cgcctaagttcagatccgtgtggtg

SEQ ID NO: 85306 - DNA, 25 bp, Homo sapien
tgagaagctacaggccaggttggtc

SEQ ID NO: 85307 - DNA, 25 bp, Homo sapien
gaagctacaggccaggttggtcaac

SEQ ID NO: 85308 - DNA, 25 bp, Homo sapien
aggggatgggatggtacgcctgtga

SEQ ID NO: 85309 - DNA, 25 bp, Homo sapien
ctacaggccaggttggtcaactggg

SEQ ID NO: 85310 - DNA, 25 bp, Homo sapien
gataaggaacatagagactgtttag

SEQ ID NO: 85311 - DNA, 25 bp, Homo sapien
gctattctacaaattatccaactcc

SEQ ID NO: 85312 - DNA, 25 bp, Homo sapien
agatatgggaaaaaagtttgtacag

SEQ ID NO: 85313 - DNA, 25 bp, Homo sapien
acatgtaggccctaaagtctccagg

SEQ ID NO: 85314 - DNA, 25 bp, Homo sapien
gagcaaggatcaccatagagaactt

SEQ ID NO: 85315 - DNA, 25 bp, Homo sapien
caaggatcaccatagagaacttttc

SEQ ID NO: 85316 - DNA, 25 bp, Homo sapien
ccccgagcaaggatcaccatagaga

SEQ ID NO: 85317 - DNA, 25 bp, Homo sapien
ctggagacccccgagcaaggatcac

SEQ ID NO: 85318 - DNA, 25 bp, Homo sapien
tgcacatggcgaggccgtttaagga

SEQ ID NO: 85319 - DNA, 25 bp, Homo sapien
tggacagcacaagtgacaatgcaca

SEQ ID NO: 85320 - DNA, 25 bp, Homo sapien
tgacaatgcacatggcgaggccgtt

SEQ ID NO: 85321 - DNA, 25 bp, Homo sapien
tgatacggggccagcgatgagcctc

SEQ ID NO: 85322 - DNA, 25 bp, Homo sapien
tgtgagcacagcatgctgcatgtgc

SEQ ID NO: 85323 - DNA, 25 bp, Homo sapien
agcacagcatgctgcatgtgcccat

SEQ ID NO: 85324 - DNA, 25 bp, Homo sapien
ctgtgagcacagcatgctgcatgtg

SEQ ID NO: 85325 - DNA, 25 bp, Homo sapien
tgagcacagcatgctgcatgtgccc

SEQ ID NO: 85326 - DNA, 25 bp, Homo sapien
gaaacagatgctggcgtgggctgca

SEQ ID NO: 85327 - DNA, 25 bp, Homo sapien
ggaaacagatgctggcgtgggctgc

SEQ ID NO: 85328 - DNA, 25 bp, Homo sapien
gacacgggcacaacgatacaaatcc

SEQ ID NO: 85329 - DNA, 25 bp, Homo sapien
tgacacgggcacaacgatacaaatc

SEQ ID NO: 85330 - DNA, 25 bp, Homo sapien
ctgacacgggcacaacgatacaaat

SEQ ID NO: 85331 - DNA, 25 bp, Homo sapien
agagggatcctgagccgtagatgga

SEQ ID NO: 85332 - DNA, 25 bp, Homo sapien
cctgagccgtagatggaggaaacgc

SEQ ID NO: 85333 - DNA, 25 bp, Homo sapien
gaggaaacgcagacggagtaagcac

SEQ ID NO: 85334 - DNA, 25 bp, Homo sapien
cagacggagtaagcacaggtaaaag

SEQ ID NO: 85335 - DNA, 25 bp, Homo sapien
gacatatggggataccagcattccc

SEQ ID NO: 85336 - DNA, 25 bp, Homo sapien
gataccagcattcccctcctggata

SEQ ID NO: 85337 - DNA, 25 bp, Homo sapien
agccctggcaggcacgatagaagaa

SEQ ID NO: 85338 - DNA, 25 bp, Homo sapien
tggcaggcacgatagaagaaaatac

SEQ ID NO: 85339 - DNA, 25 bp, Homo sapien
gggcatttcccatacatactctagg

SEQ ID NO: 85340 - DNA, 25 bp, Homo sapien
cagttctgatgggaatcactcttga

SEQ ID NO: 85341 - DNA, 25 bp, Homo sapien
tctgatgggaatcactcttgatgga

SEQ ID NO: 85342 - DNA, 25 bp, Homo sapien
aatcactcttgatggaaatgtctgg

SEQ ID NO: 85343 - DNA, 25 bp, Homo sapien
gtagggtaagcccaggagtcagaat

SEQ ID NO: 85344 - DNA, 25 bp, Homo sapien
caggagtggtatcttaggtggtcaa

SEQ ID NO: 85345 - DNA, 25 bp, Homo sapien
tggagtgtccactctcgtgagtttc

SEQ ID NO: 85346 - DNA, 25 bp, Homo sapien
acaagggagctgtaatctttggagc

SEQ ID NO: 85347 - DNA, 25 bp, Homo sapien
agcagatgggagtaaggccacagcc

SEQ ID NO: 85348 - DNA, 25 bp, Homo sapien
agttttattcctagtagttgctcca

SEQ ID NO: 85349 - DNA, 25 bp, Homo sapien
ctggaaccatttgaagcagatggga

SEQ ID NO: 85350 - DNA, 25 bp, Homo sapien
ctctggctgcatcaatctggaacca

SEQ ID NO: 85351 - DNA, 25 bp, Homo sapien
aaagcagaagttacaacccacttga

SEQ ID NO: 85352 - DNA, 25 bp, Homo sapien
aagcagaagttacaacccacttgac

SEQ ID NO: 85353 - DNA, 25 bp, Homo sapien
aaaagcagaagttacaacccacttg

SEQ ID NO: 85354 - DNA, 25 bp, Homo sapien
agcagaagttacaacccacttgaca

SEQ ID NO: 85355 - DNA, 25 bp, Homo sapien
gtcatatgcatgaaccctgctccca

SEQ ID NO: 85356 - DNA, 25 bp, Homo sapien
aacttctgaatctgtgattcaattt

SEQ ID NO: 85357 - DNA, 25 bp, Homo sapien
agtctgaggactagccggtgatgac

SEQ ID NO: 85358 - DNA, 25 bp, Homo sapien
agggcttcagcagtcatatgcatga

SEQ ID NO: 85359 - DNA, 25 bp, Homo sapien
agaagaatttctctcacttgctgat

SEQ ID NO: 85360 - DNA, 25 bp, Homo sapien
atgagctgaatcagcatcaccagaa

SEQ ID NO: 85361 - DNA, 25 bp, Homo sapien
agcatcaccagaagaatttctctca

SEQ ID NO: 85362 - DNA, 25 bp, Homo sapien
accagaagaatttctctcacttgct

SEQ ID NO: 85363 - DNA, 25 bp, Homo sapien
ggactagctagctcccgtggaagaa

SEQ ID NO: 85364 - DNA, 25 bp, Homo sapien
ggccatgaaggcaaaaccagcggct

SEQ ID NO: 85365 - DNA, 25 bp, Homo sapien
ggagttcgaagatatgagccccacc

SEQ ID NO: 85366 - DNA, 25 bp, Homo sapien
gaacactgcccatcgtgagctggta

SEQ ID NO: 85367 - DNA, 25 bp, Homo sapien
gtcaaagccatttgggaggtctccc

SEQ ID NO: 85368 - DNA, 25 bp, Homo sapien
tagagaggttgtcctaaataggtcc

SEQ ID NO: 85369 - DNA, 25 bp, Homo sapien
gaataaaatctggagcgtctctgta

SEQ ID NO: 85370 - DNA, 25 bp, Homo sapien
gggcattttattacacacagtagca

SEQ ID NO: 85371 - DNA, 25 bp, Homo sapien
tgtaggaacataatcgatccacgtc

SEQ ID NO: 85372 - DNA, 25 bp, Homo sapien
caggtagcatctaggcaaccaggag

SEQ ID NO: 85373 - DNA, 25 bp, Homo sapien
gaattttagcaaggtgccatgtcta

SEQ ID NO: 85374 - DNA, 25 bp, Homo sapien
gctaggagccctaattccagaataa

SEQ ID NO: 85375 - DNA, 25 bp, Homo sapien
taatccctcaacacaaggcagctgg

SEQ ID NO: 85376 - DNA, 25 bp, Homo sapien
tcctgcaagagccaagtaatcatcc

SEQ ID NO: 85377 - DNA, 25 bp, Homo sapien
cacagggctcggtgtgaaaaaacag

SEQ ID NO: 85378 - DNA, 25 bp, Homo sapien
caattggtaagacaggcaggagaaa

SEQ ID NO: 85379 - DNA, 25 bp, Homo sapien
ggtacttgggcttccatgctgaaaa

SEQ ID NO: 85380 - DNA, 25 bp, Homo sapien
ctgaaaatactagaaagggccaact

SEQ ID NO: 85381 - DNA, 25 bp, Homo sapien
tatgcaatagccatcctgttcctac

SEQ ID NO: 85382 - DNA, 25 bp, Homo sapien
tgaagctggccttctcactgatctc

SEQ ID NO: 85383 - DNA, 25 bp, Homo sapien
cctggggccgtttggctgcactaac

SEQ ID NO: 85384 - DNA, 25 bp, Homo sapien
ctcagtgtgcatctagagtgggact

SEQ ID NO: 85385 - DNA, 25 bp, Homo sapien
tgtgtggagggtgccctcccgtctc

SEQ ID NO: 85386 - DNA, 25 bp, Homo sapien
gagttggcgggcagtgaacgagtgt

SEQ ID NO: 85387 - DNA, 25 bp, Homo sapien
tttaggactctgaagggtatggacc

SEQ ID NO: 85388 - DNA, 25 bp, Homo sapien
taatatctcttagggacccagaccc

SEQ ID NO: 85389 - DNA, 25 bp, Homo sapien
ttgattgctaccctaaccttgacct

SEQ ID NO: 85390 - DNA, 25 bp, Homo sapien
cattgggccaccgtaagcaagggaa

SEQ ID NO: 85391 - DNA, 25 bp, Homo sapien
gaatggcccttgttgccctagagtg

SEQ ID NO: 85392 - DNA, 25 bp, Homo sapien
gttgaatggcccttgttgccctaga

SEQ ID NO: 85393 - DNA, 25 bp, Homo sapien
tgaatggcccttgttgccctagagt

SEQ ID NO: 85394 - DNA, 25 bp, Homo sapien
atggcccttgttgccctagagtggg

SEQ ID NO: 85395 - DNA, 25 bp, Homo sapien
cgttgatggcaaccggtcccgctct

SEQ ID NO: 85396 - DNA, 25 bp, Homo sapien
ctctctgaccagtgcagcatccgtt

SEQ ID NO: 85397 - DNA, 25 bp, Homo sapien
gagcagcgagtctggaactctttct

SEQ ID NO: 85398 - DNA, 25 bp, Homo sapien
gtcccggtctcgtacagcctctctg

SEQ ID NO: 85399 - DNA, 25 bp, Homo sapien
gcctgaactgatgcccttgtagcct

SEQ ID NO: 85400 - DNA, 25 bp, Homo sapien
tattgattccggctcgagcctagag

SEQ ID NO: 85401 - DNA, 25 bp, Homo sapien
cgtccctgaaagaccccaggtctgt

SEQ ID NO: 85402 - DNA, 25 bp, Homo sapien
ccccagagtcagaaggagtgagaac

SEQ ID NO: 85403 - DNA, 25 bp, Homo sapien
ggccacgcaagggtgtcagtctcca

SEQ ID NO: 85404 - DNA, 25 bp, Homo sapien
ttgctgcgcacaaaggctgaggctc

SEQ ID NO: 85405 - DNA, 25 bp, Homo sapien
gaagcgacggcaccaatctttgtgt

SEQ ID NO: 85406 - DNA, 25 bp, Homo sapien
cgtgggacctacacggagactgagt

SEQ ID NO: 85407 - DNA, 25 bp, Homo sapien
tgttcctgactggcctggcgcccag

SEQ ID NO: 85408 - DNA, 25 bp, Homo sapien
tggggagaaattcagtcaggtttcc

SEQ ID NO: 85409 - DNA, 25 bp, Homo sapien
ccccgaaatggcaactcaggaacca

SEQ ID NO: 85410 - DNA, 25 bp, Homo sapien
tcggtgctggtgttgcagttggcag

SEQ ID NO: 85411 - DNA, 25 bp, Homo sapien
tcaacattattcttgggcagggcac

SEQ ID NO: 85412 - DNA, 25 bp, Homo sapien
atcaacattattcttgggcagggca

SEQ ID NO: 85413 - DNA, 25 bp, Homo sapien
ctctcatcaacattattcttgggca

SEQ ID NO: 85414 - DNA, 25 bp, Homo sapien
tataacagatgtggacaggtcagga

SEQ ID NO: 85415 - DNA, 25 bp, Homo sapien
cactacagatagatgaacctcacgg

SEQ ID NO: 85416 - DNA, 25 bp, Homo sapien
taaatagcttccagtgttgggccca

SEQ ID NO: 85417 - DNA, 25 bp, Homo sapien
taaaaggccagtcgcaatagaaaca

SEQ ID NO: 85418 - DNA, 25 bp, Homo sapien
cggcctttgtatttaagtgtgtgca

SEQ ID NO: 85419 - DNA, 25 bp, Homo sapien
atggtggtctgacccttcccggcct

SEQ ID NO: 85420 - DNA, 25 bp, Homo sapien
ttagagtacccggatggtggtctga

SEQ ID NO: 85421 - DNA, 25 bp, Homo sapien
gcagatatgtgggagccggttggct

SEQ ID NO: 85422 - DNA, 25 bp, Homo sapien
ttgcacctacgcaactacagcatga

SEQ ID NO: 85423 - DNA, 25 bp, Homo sapien
tacctactgaatgatcctctctttc

SEQ ID NO: 85424 - DNA, 25 bp, Homo sapien
gagtgttatggtaaaatcagtcagc

SEQ ID NO: 85425 - DNA, 25 bp, Homo sapien
gagataccagtgtggatcctaccta

SEQ ID NO: 85426 - DNA, 25 bp, Homo sapien
tcagctagaggtcggggagggcagt

SEQ ID NO: 85427 - DNA, 25 bp, Homo sapien
tcggggagggcagtcgtgggagaca

SEQ ID NO: 85428 - DNA, 25 bp, Homo sapien
gagggcagtcgtgggagacacttgg

SEQ ID NO: 85429 - DNA, 25 bp, Homo sapien
gggagggcagtcgtgggagacactt

SEQ ID NO: 85430 - DNA, 25 bp, Homo sapien
catgatgccacagtctttgcacagc

SEQ ID NO: 85431 - DNA, 25 bp, Homo sapien
tcagtgccactgcttgatgattctc

SEQ ID NO: 85432 - DNA, 25 bp, Homo sapien
tgaacacgatgtccacgtccgtgga

SEQ ID NO: 85433 - DNA, 25 bp, Homo sapien
ggtgactgtcttgccatccatgatg

SEQ ID NO: 85434 - DNA, 25 bp, Homo sapien
gtctcgaagacaaaggatagcacag

SEQ ID NO: 85435 - DNA, 25 bp, Homo sapien
gtcctatcaatcagtgagtgtctcg

SEQ ID NO: 85436 - DNA, 25 bp, Homo sapien
taccctgtggtgcttggtaggccca

SEQ ID NO: 85437 - DNA, 25 bp, Homo sapien
ggtaggcccactgcaaatgttccac

SEQ ID NO: 85438 - DNA, 25 bp, Homo sapien
tctttgaactgttgaaacgtgatgg

SEQ ID NO: 85439 - DNA, 25 bp, Homo sapien
actgttgaaacgtgatggttcgggc

SEQ ID NO: 85440 - DNA, 25 bp, Homo sapien
tgcctctttgaactgttgaaacgtg

SEQ ID NO: 85441 - DNA, 25 bp, Homo sapien
aaacgtgatggttcgggcgttcttg

SEQ ID NO: 85442 - DNA, 25 bp, Homo sapien
cgccagtggtggctgggtctttgcc

SEQ ID NO: 85443 - DNA, 25 bp, Homo sapien
ggacttcatctggactcttcccttt

SEQ ID NO: 85444 - DNA, 25 bp, Homo sapien
agtagcgccagtggtggctgggtct

SEQ ID NO: 85445 - DNA, 25 bp, Homo sapien
caggacttcatctggactcttccct

SEQ ID NO: 85446 - DNA, 25 bp, Homo sapien
agctaccaagccctaattgcctggc

SEQ ID NO: 85447 - DNA, 25 bp, Homo sapien
taaagtctgtttcggccctgtctct

SEQ ID NO: 85448 - DNA, 25 bp, Homo sapien
agaaagagcttttagttcagacagg

SEQ ID NO: 85449 - DNA, 25 bp, Homo sapien
gcctggctcagatactagacacttg

SEQ ID NO: 85450 - DNA, 25 bp, Homo sapien
tttccagaggagttattctgactag

SEQ ID NO: 85451 - DNA, 25 bp, Homo sapien
agaggagttattctgactaggctgc

SEQ ID NO: 85452 - DNA, 25 bp, Homo sapien
tttgtttccagaggagttattctga

SEQ ID NO: 85453 - DNA, 25 bp, Homo sapien
tgtggcgtgtgcagagggagggtag

SEQ ID NO: 85454 - DNA, 25 bp, Homo sapien
ggtaagagccgttcactcatggggg

SEQ ID NO: 85455 - DNA, 25 bp, Homo sapien
tggtaagagccgttcactcatgggg

SEQ ID NO: 85456 - DNA, 25 bp, Homo sapien
ctggtaagagccgttcactcatggg

SEQ ID NO: 85457 - DNA, 25 bp, Homo sapien
ccagggatggatttgagctctcttc

SEQ ID NO: 85458 - DNA, 25 bp, Homo sapien
aaagatggcccgagatacttagaac

SEQ ID NO: 85459 - DNA, 25 bp, Homo sapien
tacttagaacaagtgcttggagctc

SEQ ID NO: 85460 - DNA, 25 bp, Homo sapien
tttccttacgctgtcatatcccttc

SEQ ID NO: 85461 - DNA, 25 bp, Homo sapien
ttgtgggtgccggtgtacttgctgg

SEQ ID NO: 85462 - DNA, 25 bp, Homo sapien
tgtgttgtcagtcatctcttcccgt

SEQ ID NO: 85463 - DNA, 25 bp, Homo sapien
tcatctcttcccgtcccgcaatgcc

SEQ ID NO: 85464 - DNA, 25 bp, Homo sapien
ccttgtgggtgccggtgtacttgct

SEQ ID NO: 85465 - DNA, 25 bp, Homo sapien
tgccagaacccttgtaaccactcac

SEQ ID NO: 85466 - DNA, 25 bp, Homo sapien
ggtgccagaacccttgtaaccactc

SEQ ID NO: 85467 - DNA, 25 bp, Homo sapien
taggtgccagaacccttgtaaccac

SEQ ID NO: 85468 - DNA, 25 bp, Homo sapien
gtgccagaacccttgtaaccactca

SEQ ID NO: 85469 - DNA, 25 bp, Homo sapien
gctccctggtgttaaacatgcaggg

SEQ ID NO: 85470 - DNA, 25 bp, Homo sapien
aagctccctggtgttaaacatgcag

SEQ ID NO: 85471 - DNA, 25 bp, Homo sapien
ccctggtgttaaacatgcagggtca

SEQ ID NO: 85472 - DNA, 25 bp, Homo sapien
tccctggtgttaaacatgcagggtc

SEQ ID NO: 85473 - DNA, 25 bp, Homo sapien
taactgatggctggtaggcataagg

SEQ ID NO: 85474 - DNA, 25 bp, Homo sapien
tggtaggcataaggctaagcagagc

SEQ ID NO: 85475 - DNA, 25 bp, Homo sapien
cataaggctaagcagagcgaagggt

SEQ ID NO: 85476 - DNA, 25 bp, Homo sapien
gaggaatgctaactgatggctggta

SEQ ID NO: 85477 - DNA, 25 bp, Homo sapien
tcttccatcctgttcttggaagcag

SEQ ID NO: 85478 - DNA, 25 bp, Homo sapien
ggttcatctctttactccaaatata

SEQ ID NO: 85479 - DNA, 25 bp, Homo sapien
tctttactccaaatatattcttcca

SEQ ID NO: 85480 - DNA, 25 bp, Homo sapien
catctggttcatctctttactccaa

SEQ ID NO: 85481 - DNA, 25 bp, Homo sapien
tatagtcatagtccatcacgtgagg

SEQ ID NO: 85482 - DNA, 25 bp, Homo sapien
tagaagtcaggcaaccttagctggc

SEQ ID NO: 85483 - DNA, 25 bp, Homo sapien
gaggaattgctacacccttttgagg

SEQ ID NO: 85484 - DNA, 25 bp, Homo sapien
tcttcagtgcaccagaactcctgct

SEQ ID NO: 85485 - DNA, 25 bp, Homo sapien
tgtcaacccataatcaattcaaaat

SEQ ID NO: 85486 - DNA, 25 bp, Homo sapien
tgtaacttcctgtcaacccataatc

SEQ ID NO: 85487 - DNA, 25 bp, Homo sapien
cgagccccctctgtaccattttttg

SEQ ID NO: 85488 - DNA, 25 bp, Homo sapien
ttcctgtcaacccataatcaattca

SEQ ID NO: 85489 - DNA, 25 bp, Homo sapien
ggctctaatcgaacataaatttcta

SEQ ID NO: 85490 - DNA, 25 bp, Homo sapien
ccctgaccaggcagcgaatgaggca

SEQ ID NO: 85491 - DNA, 25 bp, Homo sapien
gtcttcttaccttggctcactggca

SEQ ID NO: 85492 - DNA, 25 bp, Homo sapien
gcaggcccggctctaatcgaacata

SEQ ID NO: 85493 - DNA, 25 bp, Homo sapien
ggtatcgctggtctctattcgggaa

SEQ ID NO: 85494 - DNA, 25 bp, Homo sapien
gaatttaattcctgagccactcccc

SEQ ID NO: 85495 - DNA, 25 bp, Homo sapien
tctgctcccgcaagtatgaagctga

SEQ ID NO: 85496 - DNA, 25 bp, Homo sapien
gaagctgatccaataggtatcgctg

SEQ ID NO: 85497 - DNA, 25 bp, Homo sapien
catactgccgtgaggtaaaaaatac

SEQ ID NO: 85498 - DNA, 25 bp, Homo sapien
tgccgggcactggtctaaaaactct

SEQ ID NO: 85499 - DNA, 25 bp, Homo sapien
tgatcttaaccaccatgcaggaccg

SEQ ID NO: 85500 - DNA, 25 bp, Homo sapien
gggtctaggatcactttcaggtttc

SEQ ID NO: 85501 - DNA, 25 bp, Homo sapien
tgagaaacaagctattgcagacttt

SEQ ID NO: 85502 - DNA, 25 bp, Homo sapien
tgagttgagtcttactggagttgga

SEQ ID NO: 85503 - DNA, 25 bp, Homo sapien
taagagatatatttgagttgagtct

SEQ ID NO: 85504 - DNA, 25 bp, Homo sapien
gaaagaagggatcacactttttctc

SEQ ID NO: 85505 - DNA, 25 bp, Homo sapien
cagtgggctgaggtggtgtccacgc

SEQ ID NO: 85506 - DNA, 25 bp, Homo sapien
ttggtcttcgtgctgtgactcctgc

SEQ ID NO: 85507 - DNA, 25 bp, Homo sapien
aactccttaagagctggcccgggct

SEQ ID NO: 85508 - DNA, 25 bp, Homo sapien
gtgtccacgcactcctaggctgtca

SEQ ID NO: 85509 - DNA, 25 bp, Homo sapien
aggagcagtcaggatggagggcagg

SEQ ID NO: 85510 - DNA, 25 bp, Homo sapien
cttaggaggagcagtcaggatggag

SEQ ID NO: 85511 - DNA, 25 bp, Homo sapien
gagcagtcaggatggagggcagggg

SEQ ID NO: 85512 - DNA, 25 bp, Homo sapien
cagtcaggatggagggcaggggtcg

SEQ ID NO: 85513 - DNA, 25 bp, Homo sapien
ggccactacgtaagacttgttctgt

SEQ ID NO: 85514 - DNA, 25 bp, Homo sapien
tgtacctgcagttcggatgcttccc

SEQ ID NO: 85515 - DNA, 25 bp, Homo sapien
gagcttacacatggtcagggacacg

SEQ ID NO: 85516 - DNA, 25 bp, Homo sapien
ggcactgactgggatctctgccacc

SEQ ID NO: 85517 - DNA, 25 bp, Homo sapien
taaaggactctgtccaagtgtacag

SEQ ID NO: 85518 - DNA, 25 bp, Homo sapien
ctaaaggactctgtccaagtgtaca

SEQ ID NO: 85519 - DNA, 25 bp, Homo sapien
aaggactctgtccaagtgtacagga

SEQ ID NO: 85520 - DNA, 25 bp, Homo sapien
gactctgtccaagtgtacaggaacc

SEQ ID NO: 85521 - DNA, 25 bp, Homo sapien
ttgaaggtcagccaaagagcaagcc

SEQ ID NO: 85522 - DNA, 25 bp, Homo sapien
ggaagagaatgctctgggtgtaggg

SEQ ID NO: 85523 - DNA, 25 bp, Homo sapien
gccaaagagcaagccagtctggaaa

SEQ ID NO: 85524 - DNA, 25 bp, Homo sapien
agagggaattgaaggtcagccaaag

SEQ ID NO: 85525 - DNA, 25 bp, Homo sapien
caggggagacatgtgcaatggcata

SEQ ID NO: 85526 - DNA, 25 bp, Homo sapien
ccttgtcatgctgccctaatgccag

SEQ ID NO: 85527 - DNA, 25 bp, Homo sapien
tggcatagaccagggaacccacaga

SEQ ID NO: 85528 - DNA, 25 bp, Homo sapien
ggggataagcatctgggaaaacagc

SEQ ID NO: 85529 - DNA, 25 bp, Homo sapien
taaagaaggcatacaatccctgtca

SEQ ID NO: 85530 - DNA, 25 bp, Homo sapien
cactgtatttagagcaaggagacct

SEQ ID NO: 85531 - DNA, 25 bp, Homo sapien
tatgtcacaagggattagaggattc

SEQ ID NO: 85532 - DNA, 25 bp, Homo sapien
ggaagacttctagttcaggaacaga

SEQ ID NO: 85533 - DNA, 25 bp, Homo sapien
ggctcttcagagcactcgtttcttc

SEQ ID NO: 85534 - DNA, 25 bp, Homo sapien
cttggctagagaggtaatgaccttt

SEQ ID NO: 85535 - DNA, 25 bp, Homo sapien
tattgcagccaacacagggtaactg

SEQ ID NO: 85536 - DNA, 25 bp, Homo sapien
ttacctagttcaccgcttgcctctg

SEQ ID NO: 85537 - DNA, 25 bp, Homo sapien
tactttctttactgaactccatttc

SEQ ID NO: 85538 - DNA, 25 bp, Homo sapien
gctcctttactccatgttgaaacaa

SEQ ID NO: 85539 - DNA, 25 bp, Homo sapien
ctcagatagtctcccttctaggaga

SEQ ID NO: 85540 - DNA, 25 bp, Homo sapien
agactgggcaaagctcccctggaca

SEQ ID NO: 85541 - DNA, 25 bp, Homo sapien
tagaaaagtctcctccccagtctac

SEQ ID NO: 85542 - DNA, 25 bp, Homo sapien
gtagaaaagtctcctccccagtcta

SEQ ID NO: 85543 - DNA, 25 bp, Homo sapien
tgtagaaaagtctcctccccagtct

SEQ ID NO: 85544 - DNA, 25 bp, Homo sapien
taaatgcttgggatatctcaggccc

SEQ ID NO: 85545 - DNA, 25 bp, Homo sapien
acaggatctctgtaatgttttcacc

SEQ ID NO: 85546 - DNA, 25 bp, Homo sapien
tctagttgaccatgaagatcctgtt

SEQ ID NO: 85547 - DNA, 25 bp, Homo sapien
ctggatatgccaaattcaagggtaa

SEQ ID NO: 85548 - DNA, 25 bp, Homo sapien
tataaaacactcatatgcacggcta

SEQ ID NO: 85549 - DNA, 25 bp, Homo sapien
agtactctcgtgtgcataaccacag

SEQ ID NO: 85550 - DNA, 25 bp, Homo sapien
tcagagaaagcccaagctcattggg

SEQ ID NO: 85551 - DNA, 25 bp, Homo sapien
gctcattgggcactactttaggtgt

SEQ ID NO: 85552 - DNA, 25 bp, Homo sapien
tagtaagtagccagcaccttactag

SEQ ID NO: 85553 - DNA, 25 bp, Homo sapien
tagccagcaccttactagtatgaag

SEQ ID NO: 85554 - DNA, 25 bp, Homo sapien
gcctaatagtagactctgaaggtgc

SEQ ID NO: 85555 - DNA, 25 bp, Homo sapien
tactagtatgaaggagaggcctaat

SEQ ID NO: 85556 - DNA, 25 bp, Homo sapien
cagctattcttgcaggctatgttgg

SEQ ID NO: 85557 - DNA, 25 bp, Homo sapien
caccgttctgtgtacttattgatga

SEQ ID NO: 85558 - DNA, 25 bp, Homo sapien
tacctgcagtttgggtacttccctg

SEQ ID NO: 85559 - DNA, 25 bp, Homo sapien
gtaaggtgtgttcaggtgcttctct

SEQ ID NO: 85560 - DNA, 25 bp, Homo sapien
ttagacaactttatccaagtgcaca

SEQ ID NO: 85561 - DNA, 25 bp, Homo sapien
agacaactttatccaagtgcacagg

SEQ ID NO: 85562 - DNA, 25 bp, Homo sapien
ttatccaagtgcacaggaacaagtg

SEQ ID NO: 85563 - DNA, 25 bp, Homo sapien
tttatccaagtgcacaggaacaagt

SEQ ID NO: 85564 - DNA, 25 bp, Homo sapien
ttcttagaggcaagaagaggcctct

SEQ ID NO: 85565 - DNA, 25 bp, Homo sapien
cttcttagaggcaagaagaggcctc

SEQ ID NO: 85566 - DNA, 25 bp, Homo sapien
tccttcttagaggcaagaagaggcc

SEQ ID NO: 85567 - DNA, 25 bp, Homo sapien
cttagaggcaagaagaggcctctgc

SEQ ID NO: 85568 - DNA, 25 bp, Homo sapien
gagctcttctaaagggtggacggaa

SEQ ID NO: 85569 - DNA, 25 bp, Homo sapien
tgcagttcctcggaggccggagcct

SEQ ID NO: 85570 - DNA, 25 bp, Homo sapien
ggagatcggaaagccgaatagtccc

SEQ ID NO: 85571 - DNA, 25 bp, Homo sapien
tgatgagaaaacgtctggcctcgcc

SEQ ID NO: 85572 - DNA, 25 bp, Homo sapien
ggcggggagatgccctgcctggcct

SEQ ID NO: 85573 - DNA, 25 bp, Homo sapien
gatgccctgcctggcctctgagcag

SEQ ID NO: 85574 - DNA, 25 bp, Homo sapien
ccctgcctggcctctgagcaggcac

SEQ ID NO: 85575 - DNA, 25 bp, Homo sapien
atgccctgcctggcctctgagcagg

SEQ ID NO: 85576 - DNA, 25 bp, Homo sapien
gcgtcccccgacagtgtctgaatga

SEQ ID NO: 85577 - DNA, 25 bp, Homo sapien
cccgagcgtcccccgacagtgtctg

SEQ ID NO: 85578 - DNA, 25 bp, Homo sapien
cgtcccccgacagtgtctgaatgag

SEQ ID NO: 85579 - DNA, 25 bp, Homo sapien
gagcgtcccccgacagtgtctgaat

SEQ ID NO: 85580 - DNA, 25 bp, Homo sapien
caggcctccagttcgaggattcggt

SEQ ID NO: 85581 - DNA, 25 bp, Homo sapien
tcgtggccatgggaatgggtgggta

SEQ ID NO: 85582 - DNA, 25 bp, Homo sapien
tggctatagagtcccgcagggccgc

SEQ ID NO: 85583 - DNA, 25 bp, Homo sapien
gattcggtactggatgccagcccct

SEQ ID NO: 85584 - DNA, 25 bp, Homo sapien
gtctggctaagggacagctccggcc

SEQ ID NO: 85585 - DNA, 25 bp, Homo sapien
cgtccgacgcttggtcgggcgggcg

SEQ ID NO: 85586 - DNA, 25 bp, Homo sapien
ctggctaagggacagctccggccgc

SEQ ID NO: 85587 - DNA, 25 bp, Homo sapien
gcgccgggccgcgtccgacgcttgg

SEQ ID NO: 85588 - DNA, 25 bp, Homo sapien
gacattcagtgcgtcagcgcgcaga

SEQ ID NO: 85589 - DNA, 25 bp, Homo sapien
gagttgcccgtttgtcttgaccgtc

SEQ ID NO: 85590 - DNA, 25 bp, Homo sapien
tcaatgcagcctttaccttggtctc

SEQ ID NO: 85591 - DNA, 25 bp, Homo sapien
agttagggcaaccactccagagacg

SEQ ID NO: 85592 - DNA, 25 bp, Homo sapien
ccgataagtcctctccaccacctgg

SEQ ID NO: 85593 - DNA, 25 bp, Homo sapien
atacagggcggcgagagtgctctgc

SEQ ID NO: 85594 - DNA, 25 bp, Homo sapien
agtgcgtcctcccgataagtcctct

SEQ ID NO: 85595 - DNA, 25 bp, Homo sapien
ttgcctcaaagggtggatacagggc

SEQ ID NO: 85596 - DNA, 25 bp, Homo sapien
gcttggctggtaccaggaagtccag

SEQ ID NO: 85597 - DNA, 25 bp, Homo sapien
tggtaccaggaagtccagcgtgtac

SEQ ID NO: 85598 - DNA, 25 bp, Homo sapien
gtgcttggctggtaccaggaagtcc

SEQ ID NO: 85599 - DNA, 25 bp, Homo sapien
tggctggtaccaggaagtccagcgt

SEQ ID NO: 85600 - DNA, 25 bp, Homo sapien
agaagaggaatccactgtattgggc

SEQ ID NO: 85601 - DNA, 25 bp, Homo sapien
gaagaagaggaatccactgtattgg

SEQ ID NO: 85602 - DNA, 25 bp, Homo sapien
ggaagaagaggaatccactgtattg

SEQ ID NO: 85603 - DNA, 25 bp, Homo sapien
atggaagaagaggaatccactgtat

SEQ ID NO: 85604 - DNA, 25 bp, Homo sapien
tgagggcaccacctgcagatagaag

SEQ ID NO: 85605 - DNA, 25 bp, Homo sapien
tactgaggcgacctgttggccggtc

SEQ ID NO: 85606 - DNA, 25 bp, Homo sapien
ctgaatcccagagggcgcagacagt

SEQ ID NO: 85607 - DNA, 25 bp, Homo sapien
taggtaggcacaagcctcattgggc

SEQ ID NO: 85608 - DNA, 25 bp, Homo sapien
tcgccgggtgggcgtgctccatcct

SEQ ID NO: 85609 - DNA, 25 bp, Homo sapien
tccagcgcccttgcgggtgggtacc

SEQ ID NO: 85610 - DNA, 25 bp, Homo sapien
actgtcccctcctcggctaagagcc

SEQ ID NO: 85611 - DNA, 25 bp, Homo sapien
tcgacctgcagctcgcttctttctt

SEQ ID NO: 85612 - DNA, 25 bp, Homo sapien
cctccttaaccaggtggcattctgg

SEQ ID NO: 85613 - DNA, 25 bp, Homo sapien
tcctccttaaccaggtggcattctg

SEQ ID NO: 85614 - DNA, 25 bp, Homo sapien
ttctcgcctgctgttttgagctctt

SEQ ID NO: 85615 - DNA, 25 bp, Homo sapien
agctgaggctctttctcgcctgctg

SEQ ID NO: 85616 - DNA, 25 bp, Homo sapien
ctgctttggcccttgccccatgagc

SEQ ID NO: 85617 - DNA, 25 bp, Homo sapien
tcctgccccctcccataggcccgac

SEQ ID NO: 85618 - DNA, 25 bp, Homo sapien
ttcctgcacagtctccagcggaggt

SEQ ID NO: 85619 - DNA, 25 bp, Homo sapien
caagtcccaagctacatcagggtga

SEQ ID NO: 85620 - DNA, 25 bp, Homo sapien
tcagagacggagactgcaagggcct

SEQ ID NO: 85621 - DNA, 25 bp, Homo sapien
gatgaggaatccagatgccatcaag

SEQ ID NO: 85622 - DNA, 25 bp, Homo sapien
aagcccacccaattgcttctctttc

SEQ ID NO: 85623 - DNA, 25 bp, Homo sapien
ccccaagcccacccaattgcttctc

SEQ ID NO: 85624 - DNA, 25 bp, Homo sapien
ccaagcccacccaattgcttctctt

SEQ ID NO: 85625 - DNA, 25 bp, Homo sapien
caagcccacccaattgcttctcttt

SEQ ID NO: 85626 - DNA, 25 bp, Homo sapien
ctgaagacacaaaatggccaggctg

SEQ ID NO: 85627 - DNA, 25 bp, Homo sapien
tgaagacacaaaatggccaggctgt

SEQ ID NO: 85628 - DNA, 25 bp, Homo sapien
gacacaaaatggccaggctgtcctg

SEQ ID NO: 85629 - DNA, 25 bp, Homo sapien
aagacacaaaatggccaggctgtcc

SEQ ID NO: 85630 - DNA, 25 bp, Homo sapien
taatggtcagcagagctcgcccact

SEQ ID NO: 85631 - DNA, 25 bp, Homo sapien
tgttcagcgtgtctcgggagggtgg

SEQ ID NO: 85632 - DNA, 25 bp, Homo sapien
gggtaatggtcagcagagctcgccc

SEQ ID NO: 85633 - DNA, 25 bp, Homo sapien
gtcagcagagctcgcccactctggt

SEQ ID NO: 85634 - DNA, 25 bp, Homo sapien
cagccccagtgtctgtagatcaggc

SEQ ID NO: 85635 - DNA, 25 bp, Homo sapien
acagccccagtgtctgtagatcagg

SEQ ID NO: 85636 - DNA, 25 bp, Homo sapien
ggcaggaatgagtgctggaggcagt

SEQ ID NO: 85637 - DNA, 25 bp, Homo sapien
gcaggaatgagtgctggaggcagtg

SEQ ID NO: 85638 - DNA, 25 bp, Homo sapien
acagagttcagttggaaggtcatca

SEQ ID NO: 85639 - DNA, 25 bp, Homo sapien
ctgaaatccacagagttcagttgga

SEQ ID NO: 85640 - DNA, 25 bp, Homo sapien
tccacagagttcagttggaaggtca

SEQ ID NO: 85641 - DNA, 25 bp, Homo sapien
gccgctgaacaaggggaggatctcc

SEQ ID NO: 85642 - DNA, 25 bp, Homo sapien
tgtatctctacccagtgactgggag

SEQ ID NO: 85643 - DNA, 25 bp, Homo sapien
gccactcttttcagatcattctctg

SEQ ID NO: 85644 - DNA, 25 bp, Homo sapien
tggccactcttttcagatcattctc

SEQ ID NO: 85645 - DNA, 25 bp, Homo sapien
ctggtgtatctctacccagtgactg

SEQ ID NO: 85646 - DNA, 25 bp, Homo sapien
tggcacaggcgacatagccttacca

SEQ ID NO: 85647 - DNA, 25 bp, Homo sapien
cttggcacaggcgacatagccttac

SEQ ID NO: 85648 - DNA, 25 bp, Homo sapien
gcacaggcgacatagccttaccact

SEQ ID NO: 85649 - DNA, 25 bp, Homo sapien
acaggcgacatagccttaccacttc

SEQ ID NO: 85650 - DNA, 25 bp, Homo sapien
cctcaatggcctgccgtaccgagcc

SEQ ID NO: 85651 - DNA, 25 bp, Homo sapien
tggcctgccgtaccgagcccagcac

SEQ ID NO: 85652 - DNA, 25 bp, Homo sapien
caatggcctgccgtaccgagcccag

SEQ ID NO: 85653 - DNA, 25 bp, Homo sapien
tcctcaatggcctgccgtaccgagc

SEQ ID NO: 85654 - DNA, 25 bp, Homo sapien
ccgtcagccggggatctgccagcac

SEQ ID NO: 85655 - DNA, 25 bp, Homo sapien
gcagtgccgtcagccggggatctgc

SEQ ID NO: 85656 - DNA, 25 bp, Homo sapien
gctgggagtggagcgcagcctcatc

SEQ ID NO: 85657 - DNA, 25 bp, Homo sapien
ctgctgggagtggagcgcagcctca

SEQ ID NO: 85658 - DNA, 25 bp, Homo sapien
gcctccgcacacccatacttcgtac

SEQ ID NO: 85659 - DNA, 25 bp, Homo sapien
tgcctccgcacacccatacttcgta

SEQ ID NO: 85660 - DNA, 25 bp, Homo sapien
ctgcctccgcacacccatacttcgt

SEQ ID NO: 85661 - DNA, 25 bp, Homo sapien
acttcctgatacagtgtagctgggc

SEQ ID NO: 85662 - DNA, 25 bp, Homo sapien
tcttgctgctgcacgtgcaggttgg

SEQ ID NO: 85663 - DNA, 25 bp, Homo sapien
gaatggcctcgtccacttcctgata

SEQ ID NO: 85664 - DNA, 25 bp, Homo sapien
tgcacgtgcaggttggagaggcgca

SEQ ID NO: 85665 - DNA, 25 bp, Homo sapien
cccaggcatagcaaagcttgccagc

SEQ ID NO: 85666 - DNA, 25 bp, Homo sapien
gcacggaatcgcagctctgtctcct

SEQ ID NO: 85667 - DNA, 25 bp, Homo sapien
tgtccccaggcatagcaaagcttgc

SEQ ID NO: 85668 - DNA, 25 bp, Homo sapien
tggacctcagcgctgaaagcacgga

SEQ ID NO: 85669 - DNA, 25 bp, Homo sapien
cgctgttcaaagatatccagcacct

SEQ ID NO: 85670 - DNA, 25 bp, Homo sapien
tccagccgctgttcaaagatatcca

SEQ ID NO: 85671 - DNA, 25 bp, Homo sapien
aagaagcgctgtagccgcagggccc

SEQ ID NO: 85672 - DNA, 25 bp, Homo sapien
agggcccgatggaggccactctcaa

SEQ ID NO: 85673 - DNA, 25 bp, Homo sapien
taacaacttgattagcctctccagg

SEQ ID NO: 85674 - DNA, 25 bp, Homo sapien
cactgcctaaccatgtcactcggag

SEQ ID NO: 85675 - DNA, 25 bp, Homo sapien
tgtgttgctcacgaaggatgcccag

SEQ ID NO: 85676 - DNA, 25 bp, Homo sapien
tatgtattgcctcgtgtaatcccca

SEQ ID NO: 85677 - DNA, 25 bp, Homo sapien
tcctgccagccgagcaaagccctca

SEQ ID NO: 85678 - DNA, 25 bp, Homo sapien
cagctcctgccagccgagcaaagcc

SEQ ID NO: 85679 - DNA, 25 bp, Homo sapien
gctcctgccagccgagcaaagccct

SEQ ID NO: 85680 - DNA, 25 bp, Homo sapien
cctgccagccgagcaaagccctcat

SEQ ID NO: 85681 - DNA, 25 bp, Homo sapien
gtctgcccgccgtcgtcggtagccc

SEQ ID NO: 85682 - DNA, 25 bp, Homo sapien
cgtcgtcggtagccccgtgggctcg

SEQ ID NO: 85683 - DNA, 25 bp, Homo sapien
ctgcccgccgtcgtcggtagccccg

SEQ ID NO: 85684 - DNA, 25 bp, Homo sapien
gtcggtagccccgtgggctcgcctc

SEQ ID NO: 85685 - DNA, 25 bp, Homo sapien
tggtgagcacgtcctgtctaccacc

SEQ ID NO: 85686 - DNA, 25 bp, Homo sapien
gcagcacgtgttcccgtggtgagca

SEQ ID NO: 85687 - DNA, 25 bp, Homo sapien
tgatgcttcgcttgcgctccatccg

SEQ ID NO: 85688 - DNA, 25 bp, Homo sapien
ggcctcggatcagcacagctcttgg

SEQ ID NO: 85689 - DNA, 25 bp, Homo sapien
gagggagccagtacccccaacaatg

SEQ ID NO: 85690 - DNA, 25 bp, Homo sapien
ctcttagcaccagttgggctgggat

SEQ ID NO: 85691 - DNA, 25 bp, Homo sapien
ctgcaggcacaataggagtggcaga

SEQ ID NO: 85692 - DNA, 25 bp, Homo sapien
tactgggcagttggctccgcctctt

SEQ ID NO: 85693 - DNA, 25 bp, Homo sapien
tggaagctgcgaagcctttcccggg

SEQ ID NO: 85694 - DNA, 25 bp, Homo sapien
tcccgcagaaagtgtgtccggtgga

SEQ ID NO: 85695 - DNA, 25 bp, Homo sapien
ggctcactcaaggtggccacgtaat

SEQ ID NO: 85696 - DNA, 25 bp, Homo sapien
cgaagttcaggcgtcagctcaggcc

SEQ ID NO: 85697 - DNA, 25 bp, Homo sapien
actgtgcataaaggctgaactggtc

SEQ ID NO: 85698 - DNA, 25 bp, Homo sapien
tcggtgcttcacgtactgtgcataa

SEQ ID NO: 85699 - DNA, 25 bp, Homo sapien
cttgcttaagggactgagcgcagcc

SEQ ID NO: 85700 - DNA, 25 bp, Homo sapien
ttctccagtttgtgtcggtgcttca

SEQ ID NO: 85701 - DNA, 25 bp, Homo sapien
aggagccgcccataccgagtcagct

SEQ ID NO: 85702 - DNA, 25 bp, Homo sapien
gagccgcccataccgagtcagctgt

SEQ ID NO: 85703 - DNA, 25 bp, Homo sapien
gcccataccgagtcagctgttccag

SEQ ID NO: 85704 - DNA, 25 bp, Homo sapien
cataccgagtcagctgttccagagg

SEQ ID NO: 85705 - DNA, 25 bp, Homo sapien
caaggtgctctgcatagtagggttt

SEQ ID NO: 85706 - DNA, 25 bp, Homo sapien
cctgcctctgaagacggcaaggtgc

SEQ ID NO: 85707 - DNA, 25 bp, Homo sapien
acctgtggggaagcctttgcatgct

SEQ ID NO: 85708 - DNA, 25 bp, Homo sapien
tgcatagtagggtttatagccacct

SEQ ID NO: 85709 - DNA, 25 bp, Homo sapien
tcagcctagggtccatcaactggtc

SEQ ID NO: 85710 - DNA, 25 bp, Homo sapien
ctttgtttgtattttacagggagca

SEQ ID NO: 85711 - DNA, 25 bp, Homo sapien
catcaactggtcaccatgcacagtg

SEQ ID NO: 85712 - DNA, 25 bp, Homo sapien
caagtggcctaatgcactggttctc

SEQ ID NO: 85713 - DNA, 25 bp, Homo sapien
tgcttgtaaacaaacatctctgacc

SEQ ID NO: 85714 - DNA, 25 bp, Homo sapien
gggtctcgatgcaagagctgtccct

SEQ ID NO: 85715 - DNA, 25 bp, Homo sapien
aagagaaagacatggcgaaggcact

SEQ ID NO: 85716 - DNA, 25 bp, Homo sapien
ttcggccacagatgacagtgaaggg

SEQ ID NO: 85717 - DNA, 25 bp, Homo sapien
cctattctagatgatgcagattctg

SEQ ID NO: 85718 - DNA, 25 bp, Homo sapien
gccaaagcctattctagatgatgca

SEQ ID NO: 85719 - DNA, 25 bp, Homo sapien
gatagtcgattacaagccaaagcct

SEQ ID NO: 85720 - DNA, 25 bp, Homo sapien
cctgacaccctaactcgatagtcga

SEQ ID NO: 85721 - DNA, 25 bp, Homo sapien
gagtgtatgcctctcgtgcacgccg

SEQ ID NO: 85722 - DNA, 25 bp, Homo sapien
gatgttttctgtcagccccatatca

SEQ ID NO: 85723 - DNA, 25 bp, Homo sapien
cagagtccgctgtccccgatgtttt

SEQ ID NO: 85724 - DNA, 25 bp, Homo sapien
gctgggcaatagaacttgtccactt

SEQ ID NO: 85725 - DNA, 25 bp, Homo sapien
tggcaatgatggtgtgacttcctcc

SEQ ID NO: 85726 - DNA, 25 bp, Homo sapien
gaaaacttcctgctataaccctgac

SEQ ID NO: 85727 - DNA, 25 bp, Homo sapien
tctccaatatgttgcatcctggctg

SEQ ID NO: 85728 - DNA, 25 bp, Homo sapien
cagttcttaaatccaagcgagcagt

SEQ ID NO: 85729 - DNA, 25 bp, Homo sapien
caagggctttgatgtccaggaaggg

SEQ ID NO: 85730 - DNA, 25 bp, Homo sapien
agtgagcagggcactcagcgtccgc

SEQ ID NO: 85731 - DNA, 25 bp, Homo sapien
tttattcccaatgcccatggacacc

SEQ ID NO: 85732 - DNA, 25 bp, Homo sapien
gaagggtttattcccaatgcccatg

SEQ ID NO: 85733 - DNA, 25 bp, Homo sapien
caaggtcttcactcctgggggccac

SEQ ID NO: 85734 - DNA, 25 bp, Homo sapien
tcaaggtcttcactcctgggggcca

SEQ ID NO: 85735 - DNA, 25 bp, Homo sapien
tcccactgatttggggacgagatgc

SEQ ID NO: 85736 - DNA, 25 bp, Homo sapien
agccagtcccactgatttggggacg

SEQ ID NO: 85737 - DNA, 25 bp, Homo sapien
tccctggaatgaccctcagtctcac

SEQ ID NO: 85738 - DNA, 25 bp, Homo sapien
gatttggggacgagatgcctttcct

SEQ ID NO: 85739 - DNA, 25 bp, Homo sapien
agggagcaggctcccggcgaaaggc

SEQ ID NO: 85740 - DNA, 25 bp, Homo sapien
ccagggaaatttgcttgacgtccag

SEQ ID NO: 85741 - DNA, 25 bp, Homo sapien
atttgcttgacgtccagatcccagg

SEQ ID NO: 85742 - DNA, 25 bp, Homo sapien
gcatgctcaaaggatgacacggcca

SEQ ID NO: 85743 - DNA, 25 bp, Homo sapien
gctgttgtaagcatcaccctagcaa

SEQ ID NO: 85744 - DNA, 25 bp, Homo sapien
gcaactgggcttcttggctagaaaa

SEQ ID NO: 85745 - DNA, 25 bp, Homo sapien
cctagcaaccagatggaaggctctt

SEQ ID NO: 85746 - DNA, 25 bp, Homo sapien
tcaccaccatgaccgagctgttggg

SEQ ID NO: 85747 - DNA, 25 bp, Homo sapien
caggaaactataaggattgccgtgg

SEQ ID NO: 85748 - DNA, 25 bp, Homo sapien
ggcaggaaattgtcagcagcatcat

SEQ ID NO: 85749 - DNA, 25 bp, Homo sapien
cgtggtgaaccaggagggtacaaca

SEQ ID NO: 85750 - DNA, 25 bp, Homo sapien
accagggaagaagcgacaggaaact

SEQ ID NO: 85751 - DNA, 25 bp, Homo sapien
tagcgatccagttgcaagggaaccc

SEQ ID NO: 85752 - DNA, 25 bp, Homo sapien
agctgtgagtcaccatagcgatcca

SEQ ID NO: 85753 - DNA, 25 bp, Homo sapien
tgagtcaccatagcgatccagttgc

SEQ ID NO: 85754 - DNA, 25 bp, Homo sapien
tcaccatagcgatccagttgcaagg

SEQ ID NO: 85755 - DNA, 25 bp, Homo sapien
cacatctccagaagagtcaagtgtt

SEQ ID NO: 85756 - DNA, 25 bp, Homo sapien
gatagccctaagatccctcgactgg

SEQ ID NO: 85757 - DNA, 25 bp, Homo sapien
gtcgggatagccctaagatccctcg

SEQ ID NO: 85758 - DNA, 25 bp, Homo sapien
acatctccagaagagtcaagtgttt

SEQ ID NO: 85759 - DNA, 25 bp, Homo sapien
ttgatgcctcttagccaggtcccgg

SEQ ID NO: 85760 - DNA, 25 bp, Homo sapien
tataggtgcgcacccctcaaaagtc

SEQ ID NO: 85761 - DNA, 25 bp, Homo sapien
gccaaagagatcacattgttcccag

SEQ ID NO: 85762 - DNA, 25 bp, Homo sapien
taaatccagactgtagcctcagctg

SEQ ID NO: 85763 - DNA, 25 bp, Homo sapien
gctacagtgaatttagggacatatt

SEQ ID NO: 85764 - DNA, 25 bp, Homo sapien
gtgaatttagggacatatttcttgt

SEQ ID NO: 85765 - DNA, 25 bp, Homo sapien
gaatttagggacatatttcttgtct

SEQ ID NO: 85766 - DNA, 25 bp, Homo sapien
acagtgaatttagggacatatttct

SEQ ID NO: 85767 - DNA, 25 bp, Homo sapien
ggtcactcagggctcgagcatgact

SEQ ID NO: 85768 - DNA, 25 bp, Homo sapien
gggtcactcagggctcgagcatgac

SEQ ID NO: 85769 - DNA, 25 bp, Homo sapien
ggtagaaattggggatgctgactca

SEQ ID NO: 85770 - DNA, 25 bp, Homo sapien
tacatgcaagatggtaggagtgctg

SEQ ID NO: 85771 - DNA, 25 bp, Homo sapien
gaaggaaggtacatgcaagatggta

SEQ ID NO: 85772 - DNA, 25 bp, Homo sapien
agaagagggagatgagttgggagag

SEQ ID NO: 85773 - DNA, 25 bp, Homo sapien
cagggactccagttgacctggcaga

SEQ ID NO: 85774 - DNA, 25 bp, Homo sapien
gagaaggcaccaagctagggagact

SEQ ID NO: 85775 - DNA, 25 bp, Homo sapien
tgatgtcctggatacagtggcccag

SEQ ID NO: 85776 - DNA, 25 bp, Homo sapien
aagaaattcagcgatcgcccagggc

SEQ ID NO: 85777 - DNA, 25 bp, Homo sapien
ccccaggtttcgatgcagtagctct

SEQ ID NO: 85778 - DNA, 25 bp, Homo sapien
tcgtgtccccaataaacaggtgtct

SEQ ID NO: 85779 - DNA, 25 bp, Homo sapien
catccctattgcagagtcgtgtccc

SEQ ID NO: 85780 - DNA, 25 bp, Homo sapien
tgtgaccagttcagcctcaaggagt

SEQ ID NO: 85781 - DNA, 25 bp, Homo sapien
ttagcttagtgagcttaccccgccg

SEQ ID NO: 85782 - DNA, 25 bp, Homo sapien
cctatgcccgagtaccatcaggaga

SEQ ID NO: 85783 - DNA, 25 bp, Homo sapien
tggcagagaaggtttgtgtccctgt

SEQ ID NO: 85784 - DNA, 25 bp, Homo sapien
gggcagcgtgggacccatatcccag

SEQ ID NO: 85785 - DNA, 25 bp, Homo sapien
ttcggccccgcaatctggagccaag

SEQ ID NO: 85786 - DNA, 25 bp, Homo sapien
ggggttcggccccgcaatctggagc

SEQ ID NO: 85787 - DNA, 25 bp, Homo sapien
gttcggccccgcaatctggagccaa

SEQ ID NO: 85788 - DNA, 25 bp, Homo sapien
ggttcggccccgcaatctggagcca

SEQ ID NO: 85789 - DNA, 25 bp, Homo sapien
tcctttctgcggaaaatctttccgc

SEQ ID NO: 85790 - DNA, 25 bp, Homo sapien
ggcgccaccggcaaggattgtcctt

SEQ ID NO: 85791 - DNA, 25 bp, Homo sapien
ctgttggttggagggacccggcctg

SEQ ID NO: 85792 - DNA, 25 bp, Homo sapien
tcacctcaaagtgcatctgcgagtg

SEQ ID NO: 85793 - DNA, 25 bp, Homo sapien
gagcctcttgggctacctgagcctg

SEQ ID NO: 85794 - DNA, 25 bp, Homo sapien
cctggttccttaagaaccacatgaa

SEQ ID NO: 85795 - DNA, 25 bp, Homo sapien
cctgctggcctatgagccgttgggc

SEQ ID NO: 85796 - DNA, 25 bp, Homo sapien
acatgaaggtgcacgccagcaagct

SEQ ID NO: 85797 - DNA, 25 bp, Homo sapien
tagtctagactacaatcgcctggaa

SEQ ID NO: 85798 - DNA, 25 bp, Homo sapien
taataatgtttcttatacggccgac

SEQ ID NO: 85799 - DNA, 25 bp, Homo sapien
aaaatagaattcgagaggaaggcgc

SEQ ID NO: 85800 - DNA, 25 bp, Homo sapien
tatcaagaacggaaaggaccgaaga

SEQ ID NO: 85801 - DNA, 25 bp, Homo sapien
gatgaggtcacaccgataagtctga

SEQ ID NO: 85802 - DNA, 25 bp, Homo sapien
tgttgacgataagaggagactgcgc

SEQ ID NO: 85803 - DNA, 25 bp, Homo sapien
tctacagtcggaagcagaaccagct

SEQ ID NO: 85804 - DNA, 25 bp, Homo sapien
gatctacctaggtgcccttggcaag

SEQ ID NO: 85805 - DNA, 25 bp, Homo sapien
gagcagacgacaaacttgtcctggc

SEQ ID NO: 85806 - DNA, 25 bp, Homo sapien
agctcagagcagacgacaaacttgt

SEQ ID NO: 85807 - DNA, 25 bp, Homo sapien
tgggacccagctgggtcctaggtct

SEQ ID NO: 85808 - DNA, 25 bp, Homo sapien
cctaggtctcctaaggggcttgata

SEQ ID NO: 85809 - DNA, 25 bp, Homo sapien
tttgcccacaagaattaggtgcttc

SEQ ID NO: 85810 - DNA, 25 bp, Homo sapien
ctttgcccacaagaattaggtgctt

SEQ ID NO: 85811 - DNA, 25 bp, Homo sapien
cagctctatcttccatggctccttt

SEQ ID NO: 85812 - DNA, 25 bp, Homo sapien
ttgcccagtgttgtagcttttccag

SEQ ID NO: 85813 - DNA, 25 bp, Homo sapien
aagaggtgcccactctgcctgtgcc

SEQ ID NO: 85814 - DNA, 25 bp, Homo sapien
ctgtgccttgcccagtgttgtagct

SEQ ID NO: 85815 - DNA, 25 bp, Homo sapien
gctagcaccaagaggtgcccactct

SEQ ID NO: 85816 - DNA, 25 bp, Homo sapien
tcaggcaggcgactgagacagcaag

SEQ ID NO: 85817 - DNA, 25 bp, Homo sapien
tgacaatcagagttcaggcaggcga

SEQ ID NO: 85818 - DNA, 25 bp, Homo sapien
tgtggccatgtgacaatcagagttc

SEQ ID NO: 85819 - DNA, 25 bp, Homo sapien
gttcaggcaggcgactgagacagca

SEQ ID NO: 85820 - DNA, 25 bp, Homo sapien
ggtgctctgcgaagctccagagtga

SEQ ID NO: 85821 - DNA, 25 bp, Homo sapien
gctccagagtgacagtcccagtgag

SEQ ID NO: 85822 - DNA, 25 bp, Homo sapien
tgctctgcgaagctccagagtgaca

SEQ ID NO: 85823 - DNA, 25 bp, Homo sapien
gagtgacagtcccagtgaggagacc

SEQ ID NO: 85824 - DNA, 25 bp, Homo sapien
aaggtgttgaatatcatcatggccc

SEQ ID NO: 85825 - DNA, 25 bp, Homo sapien
ctatgaaacccaagatcaagttgaa

SEQ ID NO: 85826 - DNA, 25 bp, Homo sapien
accaccactatgaaacccaagatca

SEQ ID NO: 85827 - DNA, 25 bp, Homo sapien
tgttgaatatcatcatggcccgcac

SEQ ID NO: 85828 - DNA, 25 bp, Homo sapien
ggctgagaatgcagggaccccgcac

SEQ ID NO: 85829 - DNA, 25 bp, Homo sapien
agaatgcagggaccccgcacctgtt

SEQ ID NO: 85830 - DNA, 25 bp, Homo sapien
ccgcacctgtttgcccctgcccttt

SEQ ID NO: 85831 - DNA, 25 bp, Homo sapien
gacagggctgagaatgcagggaccc

SEQ ID NO: 85832 - DNA, 25 bp, Homo sapien
tggctcagcaagaatagggcgtgca

SEQ ID NO: 85833 - DNA, 25 bp, Homo sapien
gctcttgatagtgcagactctggct

SEQ ID NO: 85834 - DNA, 25 bp, Homo sapien
actccccctagggtgaaggcctcag

SEQ ID NO: 85835 - DNA, 25 bp, Homo sapien
caagaatagggcgtgcactgagacc

SEQ ID NO: 85836 - DNA, 25 bp, Homo sapien
cgtgctttcttccctgcccccatac

SEQ ID NO: 85837 - DNA, 25 bp, Homo sapien
ctattcgtgctttcttccctgcccc

SEQ ID NO: 85838 - DNA, 25 bp, Homo sapien
ttcgtgctttcttccctgcccccat

SEQ ID NO: 85839 - DNA, 25 bp, Homo sapien
tattcgtgctttcttccctgccccc

SEQ ID NO: 85840 - DNA, 25 bp, Homo sapien
tcgcgtcagaaatcgacacgaggac

SEQ ID NO: 85841 - DNA, 25 bp, Homo sapien
gtcctcgtgtcgatttctgacgcga

SEQ ID NO: 85842 - DNA, 25 bp, Homo sapien
tgctggccaccgtgggaccattctc

SEQ ID NO: 85843 - DNA, 25 bp, Homo sapien
ctgtgctggccaccgtgggaccatt

SEQ ID NO: 85844 - DNA, 25 bp, Homo sapien
aggaacctcttccaactcagagaag

SEQ ID NO: 85845 - DNA, 25 bp, Homo sapien
ggccaccgtgggaccattctccaaa

SEQ ID NO: 85846 - DNA, 25 bp, Homo sapien
caggtgtatcttcccctaacaggga

SEQ ID NO: 85847 - DNA, 25 bp, Homo sapien
tcccggacttcctattggactcgaa

SEQ ID NO: 85848 - DNA, 25 bp, Homo sapien
ggactcgaaggatcccagcaagctt

SEQ ID NO: 85849 - DNA, 25 bp, Homo sapien
gtgaaaactgaaggcactcccggac

SEQ ID NO: 85850 - DNA, 25 bp, Homo sapien
gaaaagtgcgatgaggcaaatgtga

SEQ ID NO: 85851 - DNA, 25 bp, Homo sapien
aagagaggatatggatgcaagggag

SEQ ID NO: 85852 - DNA, 25 bp, Homo sapien
cagggagttggcgtgtgcagggtcc

SEQ ID NO: 85853 - DNA, 25 bp, Homo sapien
tgggattatgaaaggtggacagaaa

SEQ ID NO: 85854 - DNA, 25 bp, Homo sapien
ggacttgtagtctccgctacagtag

SEQ ID NO: 85855 - DNA, 25 bp, Homo sapien
tagtctccgctacagtagaaaggag

SEQ ID NO: 85856 - DNA, 25 bp, Homo sapien
tttcctagccggtcacgggctagcg

SEQ ID NO: 85857 - DNA, 25 bp, Homo sapien
gagagaaggctctttatttcctagc

SEQ ID NO: 85858 - DNA, 25 bp, Homo sapien
cagctccgagccctcgccagtctct

SEQ ID NO: 85859 - DNA, 25 bp, Homo sapien
gccctcctgcgagggggtgcggcga

SEQ ID NO: 85860 - DNA, 25 bp, Homo sapien
agctctgccaagcgtcagctccgag

SEQ ID NO: 85861 - DNA, 25 bp, Homo sapien
ggtgcggcgacagcatctgggaagc

SEQ ID NO: 85862 - DNA, 25 bp, Homo sapien
ttctcgcgcgcgctccaagtctcag

SEQ ID NO: 85863 - DNA, 25 bp, Homo sapien
gccccgcgcttctgactcatcatct

SEQ ID NO: 85864 - DNA, 25 bp, Homo sapien
gcgcgcgctccaagtctcaggactt

SEQ ID NO: 85865 - DNA, 25 bp, Homo sapien
gcgctccaagtctcaggacttcgga

SEQ ID NO: 85866 - DNA, 25 bp, Homo sapien
cctgtccatcttcagcgcccaggcc

SEQ ID NO: 85867 - DNA, 25 bp, Homo sapien
ccaagcccaagcgagcctgttatct

SEQ ID NO: 85868 - DNA, 25 bp, Homo sapien
tcccgctcccgcgttggagataaag

SEQ ID NO: 85869 - DNA, 25 bp, Homo sapien
ggtgaacgcagccagaacttcagca

SEQ ID NO: 85870 - DNA, 25 bp, Homo sapien
gaccgcagccgagatcaaaggtcgg

SEQ ID NO: 85871 - DNA, 25 bp, Homo sapien
aaagaggcagatacagtggttgctg

SEQ ID NO: 85872 - DNA, 25 bp, Homo sapien
ggaacacaggacaagtctccaatag

SEQ ID NO: 85873 - DNA, 25 bp, Homo sapien
agtctccaatagtctttgcttgcag

SEQ ID NO: 85874 - DNA, 25 bp, Homo sapien
tgcagcaaagcagaacgctgtcatg

SEQ ID NO: 85875 - DNA, 25 bp, Homo sapien
ccgtaggaaattatatgagcaggcc

SEQ ID NO: 85876 - DNA, 25 bp, Homo sapien
aattatatgagcaggcctttccttc

SEQ ID NO: 85877 - DNA, 25 bp, Homo sapien
tggcctgaggccgtaggaaattata

SEQ ID NO: 85878 - DNA, 25 bp, Homo sapien
taatggggacatcaggttaaagcaa

SEQ ID NO: 85879 - DNA, 25 bp, Homo sapien
taatactaacaatcttttagctata

SEQ ID NO: 85880 - DNA, 25 bp, Homo sapien
gggactatatgtgcatgacacctgc

SEQ ID NO: 85881 - DNA, 25 bp, Homo sapien
tccttcatagatttattggccattt

SEQ ID NO: 85882 - DNA, 25 bp, Homo sapien
ggctattttgtctttatcaatgttt

SEQ ID NO: 85883 - DNA, 25 bp, Homo sapien
ctccggatttcataaatacgaaggg

SEQ ID NO: 85884 - DNA, 25 bp, Homo sapien
cttgagcccaacaagaatctggtgg

SEQ ID NO: 85885 - DNA, 25 bp, Homo sapien
caatgccagatgctggacatacagc

SEQ ID NO: 85886 - DNA, 25 bp, Homo sapien
gaagcttgaatgcttcttgagccca

SEQ ID NO: 85887 - DNA, 25 bp, Homo sapien
tcttccagcgttctgacttatgtct

SEQ ID NO: 85888 - DNA, 25 bp, Homo sapien
ttccagcgttctgacttatgtcttc

SEQ ID NO: 85889 - DNA, 25 bp, Homo sapien
ccagtttcttccagcgttctgactt

SEQ ID NO: 85890 - DNA, 25 bp, Homo sapien
agtttcttccagcgttctgacttat

SEQ ID NO: 85891 - DNA, 25 bp, Homo sapien
catggtctggctatctgttggtttc

SEQ ID NO: 85892 - DNA, 25 bp, Homo sapien
gaatgaatctgagaccctgcaggca

SEQ ID NO: 85893 - DNA, 25 bp, Homo sapien
ttctcagttcctaagaatgaatctg

SEQ ID NO: 85894 - DNA, 25 bp, Homo sapien
tgcaggcagaaaaagcgcccgcagc

SEQ ID NO: 85895 - DNA, 25 bp, Homo sapien
cttagtagattaaattctcagttcc

SEQ ID NO: 85896 - DNA, 25 bp, Homo sapien
ggattgtatcccacaaaccctgatg

SEQ ID NO: 85897 - DNA, 25 bp, Homo sapien
ttgtaggtgagatgactgtatggat

SEQ ID NO: 85898 - DNA, 25 bp, Homo sapien
cacaaaccctgatgtgctgggcatt

SEQ ID NO: 85899 - DNA, 25 bp, Homo sapien
cagcctgtagttgttgtaggtgaga

SEQ ID NO: 85900 - DNA, 25 bp, Homo sapien
gaatcataataccagaggatgccat

SEQ ID NO: 85901 - DNA, 25 bp, Homo sapien
tggtggttttggaatcataatacca

SEQ ID NO: 85902 - DNA, 25 bp, Homo sapien
ggcatcagcagcttatctgatggtt

SEQ ID NO: 85903 - DNA, 25 bp, Homo sapien
gggcatcagcagcttatctgatggt

SEQ ID NO: 85904 - DNA, 25 bp, Homo sapien
taggtcagggttggaagccttgact

SEQ ID NO: 85905 - DNA, 25 bp, Homo sapien
tggaagccttgacttggtcccagac

SEQ ID NO: 85906 - DNA, 25 bp, Homo sapien
ttaggtcagggttggaagccttgac

SEQ ID NO: 85907 - DNA, 25 bp, Homo sapien
ggttggaagccttgacttggtccca

SEQ ID NO: 85908 - DNA, 25 bp, Homo sapien
catgggagaattatgataggacttc

SEQ ID NO: 85909 - DNA, 25 bp, Homo sapien
cttgccacgtgccatcaaataatct

SEQ ID NO: 85910 - DNA, 25 bp, Homo sapien
tgtaagcaaggtacatgggagaatt

SEQ ID NO: 85911 - DNA, 25 bp, Homo sapien
tgagatcttgccacgtgccatcaaa

SEQ ID NO: 85912 - DNA, 25 bp, Homo sapien
ggcagtggctgtatgcttgcttcac

SEQ ID NO: 85913 - DNA, 25 bp, Homo sapien
caggcagtggctgtatgcttgcttc

SEQ ID NO: 85914 - DNA, 25 bp, Homo sapien
gaaacaggcagtggctgtatgcttg

SEQ ID NO: 85915 - DNA, 25 bp, Homo sapien
aacaggcagtggctgtatgcttgct

SEQ ID NO: 85916 - DNA, 25 bp, Homo sapien
tcctcgtcttcgggtatcgttcctc

SEQ ID NO: 85917 - DNA, 25 bp, Homo sapien
gccgctctgactgcgcttagcttgg

SEQ ID NO: 85918 - DNA, 25 bp, Homo sapien
tcctcaccttagttggccgcgtgct

SEQ ID NO: 85919 - DNA, 25 bp, Homo sapien
tgcgcttagcttggtctgccacctc

SEQ ID NO: 85920 - DNA, 25 bp, Homo sapien
ccttgtcttaaggagtagatgtgcc

SEQ ID NO: 85921 - DNA, 25 bp, Homo sapien
attattcttggcttgcaaatcttca

SEQ ID NO: 85922 - DNA, 25 bp, Homo sapien
cagcagtactctatcaatgtggcaa

SEQ ID NO: 85923 - DNA, 25 bp, Homo sapien
aatcttcacaaaggtgttcagctgc

SEQ ID NO: 85924 - DNA, 25 bp, Homo sapien
ctgtgatacatctgattgaagtgaa

SEQ ID NO: 85925 - DNA, 25 bp, Homo sapien
ccattctatttttagccatccaatt

SEQ ID NO: 85926 - DNA, 25 bp, Homo sapien
atttggttcttatgtcttctatttc

SEQ ID NO: 85927 - DNA, 25 bp, Homo sapien
tgtcttttgagaacacgcatgtgta

SEQ ID NO: 85928 - DNA, 25 bp, Homo sapien
ccttgctggcacttggtattgattg

SEQ ID NO: 85929 - DNA, 25 bp, Homo sapien
cagcactgaaagacgtttggattat

SEQ ID NO: 85930 - DNA, 25 bp, Homo sapien
acctttagatatagaggctgccaac

SEQ ID NO: 85931 - DNA, 25 bp, Homo sapien
cactctgatcaggatgtggaacata

SEQ ID NO: 85932 - DNA, 25 bp, Homo sapien
gcccggctgttcatctgtttttcaa

SEQ ID NO: 85933 - DNA, 25 bp, Homo sapien
taaacatgccagttgaaacaccact

SEQ ID NO: 85934 - DNA, 25 bp, Homo sapien
gggaatctcttgtaccacttaacac

SEQ ID NO: 85935 - DNA, 25 bp, Homo sapien
tttaacacagtccacaaggccagag

SEQ ID NO: 85936 - DNA, 25 bp, Homo sapien
tctttcttaaccaggccgataggct

SEQ ID NO: 85937 - DNA, 25 bp, Homo sapien
taagaacgtgcatactcctgaatcg

SEQ ID NO: 85938 - DNA, 25 bp, Homo sapien
gagcagggaccacatctattacttg

SEQ ID NO: 85939 - DNA, 25 bp, Homo sapien
agcttggtcagtcccaaggtcccag

SEQ ID NO: 85940 - DNA, 25 bp, Homo sapien
aagcttctgtagcaccagcttggtc

SEQ ID NO: 85941 - DNA, 25 bp, Homo sapien
ccataaaagcttctgtagcaccagc

SEQ ID NO: 85942 - DNA, 25 bp, Homo sapien
caccagcttggtcagtcccaaggtc

SEQ ID NO: 85943 - DNA, 25 bp, Homo sapien
gtgaacaccacaatctgcagatgtt

SEQ ID NO: 85944 - DNA, 25 bp, Homo sapien
tgcacagagcagtctgtttagctgt

SEQ ID NO: 85945 - DNA, 25 bp, Homo sapien
tgcttaggagagagtgtcagatgta

SEQ ID NO: 85946 - DNA, 25 bp, Homo sapien
tagtccacaatcaagtgtctacttt

SEQ ID NO: 85947 - DNA, 25 bp, Homo sapien
tggcgacagctgcataatggaaccc

SEQ ID NO: 85948 - DNA, 25 bp, Homo sapien
tgaagtatgaactacccttggagcc

SEQ ID NO: 85949 - DNA, 25 bp, Homo sapien
gatattccatagactgccttcccag

SEQ ID NO: 85950 - DNA, 25 bp, Homo sapien
tgtttcatagcatgcggcactggcc

SEQ ID NO: 85951 - DNA, 25 bp, Homo sapien
caaaaataacccacagtatcaactt

SEQ ID NO: 85952 - DNA, 25 bp, Homo sapien
ccaaacatcaggctgttcacaaaaa

SEQ ID NO: 85953 - DNA, 25 bp, Homo sapien
catttgacatgccaactctcattca

SEQ ID NO: 85954 - DNA, 25 bp, Homo sapien
tcttaagactataacactaattatt

SEQ ID NO: 85955 - DNA, 25 bp, Homo sapien
tatttttctagaggatgcatttgac

SEQ ID NO: 85956 - DNA, 25 bp, Homo sapien
aaacatcaggctgttcacaaaaata

SEQ ID NO: 85957 - DNA, 25 bp, Homo sapien
gtcaaatgcatcctctagaaaaata

SEQ ID NO: 85958 - DNA, 25 bp, Homo sapien
tgaatgagagttggcatgtcaaatg

SEQ ID NO: 85959 - DNA, 25 bp, Homo sapien
aagttgatactgtgggttatttttg

SEQ ID NO: 85960 - DNA, 25 bp, Homo sapien
tttttgtgaacagcctgatgtttgg

SEQ ID NO: 85961 - DNA, 25 bp, Homo sapien
tatttttgtgaacagcctgatgttt

SEQ ID NO: 85962 - DNA, 25 bp, Homo sapien
aataattagtgttatagtcttaaga

SEQ ID NO: 85963 - DNA, 25 bp, Homo sapien
cacacagcacactaatgtgagggtg

SEQ ID NO: 85964 - DNA, 25 bp, Homo sapien
cctttgcagttagggaagcaactac

SEQ ID NO: 85965 - DNA, 25 bp, Homo sapien
tgctttcaagagctactcaactaaa

SEQ ID NO: 85966 - DNA, 25 bp, Homo sapien
cacagcacactaatgtgagggtgta

SEQ ID NO: 85967 - DNA, 25 bp, Homo sapien
gattgcctttgcagttagggaagca

SEQ ID NO: 85968 - DNA, 25 bp, Homo sapien
cagcacactaatgtgagggtgtaac

SEQ ID NO: 85969 - DNA, 25 bp, Homo sapien
gtgtaacacacatacttctaactca

SEQ ID NO: 85970 - DNA, 25 bp, Homo sapien
ggtgtaacacacatacttctaactc

SEQ ID NO: 85971 - DNA, 25 bp, Homo sapien
gggtgtaacacacatacttctaact

SEQ ID NO: 85972 - DNA, 25 bp, Homo sapien
gagttagaagtatgtgtgttacacc

SEQ ID NO: 85973 - DNA, 25 bp, Homo sapien
agttagaagtatgtgtgttacaccc

SEQ ID NO: 85974 - DNA, 25 bp, Homo sapien
tgagttagaagtatgtgtgttacac

SEQ ID NO: 85975 - DNA, 25 bp, Homo sapien
gttacaccctcacattagtgtgctg

SEQ ID NO: 85976 - DNA, 25 bp, Homo sapien
tgcttccctaactgcaaaggcaatc

SEQ ID NO: 85977 - DNA, 25 bp, Homo sapien
gtagttgcttccctaactgcaaagg

SEQ ID NO: 85978 - DNA, 25 bp, Homo sapien
tttagttgagtagctcttgaaagca

SEQ ID NO: 85979 - DNA, 25 bp, Homo sapien
caccctcacattagtgtgctgtgtg

SEQ ID NO: 85980 - DNA, 25 bp, Homo sapien
tagttgcttccctaactgcaaaggc

SEQ ID NO: 85981 - DNA, 25 bp, Homo sapien
gaaaagaactgtactccctgcataa

SEQ ID NO: 85982 - DNA, 25 bp, Homo sapien
aaagaactgtactccctgcataaca

SEQ ID NO: 85983 - DNA, 25 bp, Homo sapien
gaactgtactccctgcataacaaga

SEQ ID NO: 85984 - DNA, 25 bp, Homo sapien
tgtactccctgcataacaagagatt

SEQ ID NO: 85985 - DNA, 25 bp, Homo sapien
tgataaaaaccatacatccttttta

SEQ ID NO: 85986 - DNA, 25 bp, Homo sapien
tgaaaagaactgtactccctgcata

SEQ ID NO: 85987 - DNA, 25 bp, Homo sapien
ccattggcgctgtctctgtcatcct

SEQ ID NO: 85988 - DNA, 25 bp, Homo sapien
tgttaagtcataaagaggtatcaaa

SEQ ID NO: 85989 - DNA, 25 bp, Homo sapien
taaaccccactatgtgcttaagagt

SEQ ID NO: 85990 - DNA, 25 bp, Homo sapien
taagagtcatcctcgccattggcgc

SEQ ID NO: 85991 - DNA, 25 bp, Homo sapien
ttagacaagcgcctaggtaaagaaa

SEQ ID NO: 85992 - DNA, 25 bp, Homo sapien
ttgatcttagacaagcgcctaggta

SEQ ID NO: 85993 - DNA, 25 bp, Homo sapien
ttaattcatattgccccgcgcctag

SEQ ID NO: 85994 - DNA, 25 bp, Homo sapien
tttgatacctctttatgacttaaca

SEQ ID NO: 85995 - DNA, 25 bp, Homo sapien
ggatgactcttaagcacatagtggg

SEQ ID NO: 85996 - DNA, 25 bp, Homo sapien
tacctaggcgcttgtctaagatcaa

SEQ ID NO: 85997 - DNA, 25 bp, Homo sapien
aggatgacagagacagcgccaatgg

SEQ ID NO: 85998 - DNA, 25 bp, Homo sapien
gcgccaatggcgaggatgactctta

SEQ ID NO: 85999 - DNA, 25 bp, Homo sapien
tctcttgttatgcagggagtacagt

SEQ ID NO: 86000 - DNA, 25 bp, Homo sapien
tgttatgcagggagtacagttcttt

SEQ ID NO: 86001 - DNA, 25 bp, Homo sapien
tcttgttatgcagggagtacagttc

SEQ ID NO: 86002 - DNA, 25 bp, Homo sapien
taaaaaggatgtatggtttttatca

SEQ ID NO: 86003 - DNA, 25 bp, Homo sapien
tatgcagggagtacagttcttttca

SEQ ID NO: 86004 - DNA, 25 bp, Homo sapien
aatctcttgttatgcagggagtaca

SEQ ID NO: 86005 - DNA, 25 bp, Homo sapien
ggtcatccccccgatcttcattatc

SEQ ID NO: 86006 - DNA, 25 bp, Homo sapien
tggtcatccccccgatcttcattat

SEQ ID NO: 86007 - DNA, 25 bp, Homo sapien
cacctggtcatccccccgatcttca

SEQ ID NO: 86008 - DNA, 25 bp, Homo sapien
atccccccgatcttcattatcatca

SEQ ID NO: 86009 - DNA, 25 bp, Homo sapien
gtcatccccccgatcttcattatca

SEQ ID NO: 86010 - DNA, 25 bp, Homo sapien
tcatccccccgatcttcattatcat

SEQ ID NO: 86011 - DNA, 25 bp, Homo sapien
tgataatgaagatcggggggatgac

SEQ ID NO: 86012 - DNA, 25 bp, Homo sapien
atgataatgaagatcggggggatga

SEQ ID NO: 86013 - DNA, 25 bp, Homo sapien
ataatgaagatcggggggatgacca

SEQ ID NO: 86014 - DNA, 25 bp, Homo sapien
tgaagatcggggggatgaccaggtg

SEQ ID NO: 86015 - DNA, 25 bp, Homo sapien
gatgataatgaagatcggggggatg

SEQ ID NO: 86016 - DNA, 25 bp, Homo sapien
tgatgataatgaagatcggggggat

SEQ ID NO: 86017 - DNA, 25 bp, Homo sapien
tatggcaacgtatgaaaaggtcttc

SEQ ID NO: 86018 - DNA, 25 bp, Homo sapien
tacgcttaattccaacagggcagag

SEQ ID NO: 86019 - DNA, 25 bp, Homo sapien
aaaatacttcttacatggacatcag

SEQ ID NO: 86020 - DNA, 25 bp, Homo sapien
caactaacttaatgcaaaggcccag

SEQ ID NO: 86021 - DNA, 25 bp, Homo sapien
gataaagatacaccaaagcagtggc

SEQ ID NO: 86022 - DNA, 25 bp, Homo sapien
cactggccagtacacacttagcact

SEQ ID NO: 86023 - DNA, 25 bp, Homo sapien
gaaacagcaattagttgagcaacca

SEQ ID NO: 86024 - DNA, 25 bp, Homo sapien
gaagaccttttcatacgttgccata

SEQ ID NO: 86025 - DNA, 25 bp, Homo sapien
tagaactgatgtccatgtaagaagt

SEQ ID NO: 86026 - DNA, 25 bp, Homo sapien
gagtgctaagtgtgtactggccagt

SEQ ID NO: 86027 - DNA, 25 bp, Homo sapien
caagatagacagtggtctctgccct

SEQ ID NO: 86028 - DNA, 25 bp, Homo sapien
tctctgccctgttggaattaagcgt

SEQ ID NO: 86029 - DNA, 25 bp, Homo sapien
tatgcctgctgtaaggacatcacaa

SEQ ID NO: 86030 - DNA, 25 bp, Homo sapien
gcctgtgatgaacgtgaatttggag

SEQ ID NO: 86031 - DNA, 25 bp, Homo sapien
caactgcagtctgggttatttcctt

SEQ ID NO: 86032 - DNA, 25 bp, Homo sapien
cattcgctctacaactgcagtctgg

SEQ ID NO: 86033 - DNA, 25 bp, Homo sapien
tgatttttgcagcattctagacctg

SEQ ID NO: 86034 - DNA, 25 bp, Homo sapien
ccttcctgaagagtaggctttagtc

SEQ ID NO: 86035 - DNA, 25 bp, Homo sapien
caggtctagaatgctgcaaaaatca

SEQ ID NO: 86036 - DNA, 25 bp, Homo sapien
ccagactgcagttgtagagcgaatg

SEQ ID NO: 86037 - DNA, 25 bp, Homo sapien
tatttgtgatgtccttacagcaggc

SEQ ID NO: 86038 - DNA, 25 bp, Homo sapien
aggaaggaaataacccagactgcag

SEQ ID NO: 86039 - DNA, 25 bp, Homo sapien
gactaaagcctactcttcaggaagg

SEQ ID NO: 86040 - DNA, 25 bp, Homo sapien
caaattcacgttcatcacaggcaca

SEQ ID NO: 86041 - DNA, 25 bp, Homo sapien
aaaaagagcccggcgtggtgatgca

SEQ ID NO: 86042 - DNA, 25 bp, Homo sapien
aaaagagcccggcgtggtgatgcat

SEQ ID NO: 86043 - DNA, 25 bp, Homo sapien
tgcatcaccacgccgggctcttttt

SEQ ID NO: 86044 - DNA, 25 bp, Homo sapien
atgcatcaccacgccgggctctttt

SEQ ID NO: 86045 - DNA, 25 bp, Homo sapien
ggccagatctcgaggtcaggtgttc

SEQ ID NO: 86046 - DNA, 25 bp, Homo sapien
caaaaagaaaagcaacaccaaggag

SEQ ID NO: 86047 - DNA, 25 bp, Homo sapien
gctactccggaagctgagccagaag

SEQ ID NO: 86048 - DNA, 25 bp, Homo sapien
tcctggcaaatacggtgaaactgcg

SEQ ID NO: 86049 - DNA, 25 bp, Homo sapien
gactagcctgcccaacacggtgaag

SEQ ID NO: 86050 - DNA, 25 bp, Homo sapien
aaaaacaccagctgggcgtgatggc

SEQ ID NO: 86051 - DNA, 25 bp, Homo sapien
agtttcaccgtatttgccaggatgg

SEQ ID NO: 86052 - DNA, 25 bp, Homo sapien
accgtgttgggcaggctagtctcga

SEQ ID NO: 86053 - DNA, 25 bp, Homo sapien
tagagacgcagtttcaccgtatttg

SEQ ID NO: 86054 - DNA, 25 bp, Homo sapien
cgaacacctgacctcgagatctggc

SEQ ID NO: 86055 - DNA, 25 bp, Homo sapien
gattcttctggctcagcttccggag

SEQ ID NO: 86056 - DNA, 25 bp, Homo sapien
gccatcacgcccagctggtgttttt

SEQ ID NO: 86057 - DNA, 25 bp, Homo sapien
ttattacaacacctttcgcaaaaca

SEQ ID NO: 86058 - DNA, 25 bp, Homo sapien
caaaacaaaaccagcgccttcaaat

SEQ ID NO: 86059 - DNA, 25 bp, Homo sapien
aaaacaaaaccagcgccttcaaatg

SEQ ID NO: 86060 - DNA, 25 bp, Homo sapien
ctttgaatacttgtgcattcccaac

SEQ ID NO: 86061 - DNA, 25 bp, Homo sapien
aaacaaaaccagcgccttcaaatga

SEQ ID NO: 86062 - DNA, 25 bp, Homo sapien
tattacaacacctttcgcaaaacaa

SEQ ID NO: 86063 - DNA, 25 bp, Homo sapien
tcatttgaaggcgctggttttgttt

SEQ ID NO: 86064 - DNA, 25 bp, Homo sapien
ttgttttgcgaaaggtgttgtaata

SEQ ID NO: 86065 - DNA, 25 bp, Homo sapien
atttgaaggcgctggttttgttttg

SEQ ID NO: 86066 - DNA, 25 bp, Homo sapien
catttgaaggcgctggttttgtttt

SEQ ID NO: 86067 - DNA, 25 bp, Homo sapien
gttgggaatgcacaagtattcaaag

SEQ ID NO: 86068 - DNA, 25 bp, Homo sapien
tgttttgcgaaaggtgttgtaataa

SEQ ID NO: 86069 - DNA, 25 bp, Homo sapien
atggcaaaatcactatcctacagac

SEQ ID NO: 86070 - DNA, 25 bp, Homo sapien
tcactatcctacagacagcatttaa

SEQ ID NO: 86071 - DNA, 25 bp, Homo sapien
gacagcatttaaatcaaaattccaa

SEQ ID NO: 86072 - DNA, 25 bp, Homo sapien
tcctacagacagcatttaaatcaaa

SEQ ID NO: 86073 - DNA, 25 bp, Homo sapien
aaaatcactatcctacagacagcat

SEQ ID NO: 86074 - DNA, 25 bp, Homo sapien
ggcaaaatcactatcctacagacag

SEQ ID NO: 86075 - DNA, 25 bp, Homo sapien
ttggaattttgatttaaatgctgtc

SEQ ID NO: 86076 - DNA, 25 bp, Homo sapien
gtctgtaggatagtgattttgccat

SEQ ID NO: 86077 - DNA, 25 bp, Homo sapien
ttaaatgctgtctgtaggatagtga

SEQ ID NO: 86078 - DNA, 25 bp, Homo sapien
taaatgctgtctgtaggatagtgat

SEQ ID NO: 86079 - DNA, 25 bp, Homo sapien
tttgatttaaatgctgtctgtagga

SEQ ID NO: 86080 - DNA, 25 bp, Homo sapien
ctgtctgtaggatagtgattttgcc

SEQ ID NO: 86081 - DNA, 25 bp, Homo sapien
atatatggtttcactgactgtggga

SEQ ID NO: 86082 - DNA, 25 bp, Homo sapien
tatatggtttcactgactgtgggag

SEQ ID NO: 86083 - DNA, 25 bp, Homo sapien
catatatggtttcactgactgtggg

SEQ ID NO: 86084 - DNA, 25 bp, Homo sapien
atatggtttcactgactgtgggaga

SEQ ID NO: 86085 - DNA, 25 bp, Homo sapien
tatggtttcactgactgtgggagaa

SEQ ID NO: 86086 - DNA, 25 bp, Homo sapien
gcatatatggtttcactgactgtgg

SEQ ID NO: 86087 - DNA, 25 bp, Homo sapien
ctcccacagtcagtgaaaccatata

SEQ ID NO: 86088 - DNA, 25 bp, Homo sapien
tctcccacagtcagtgaaaccatat

SEQ ID NO: 86089 - DNA, 25 bp, Homo sapien
cccacagtcagtgaaaccatatatg

SEQ ID NO: 86090 - DNA, 25 bp, Homo sapien
tcccacagtcagtgaaaccatatat

SEQ ID NO: 86091 - DNA, 25 bp, Homo sapien
ccacagtcagtgaaaccatatatgc

SEQ ID NO: 86092 - DNA, 25 bp, Homo sapien
ttctcccacagtcagtgaaaccata

SEQ ID NO: 86093 - DNA, 25 bp, Homo sapien
cagttgctatccgaagagtggggct

SEQ ID NO: 86094 - DNA, 25 bp, Homo sapien
tatccgaagagtggggcttacacag

SEQ ID NO: 86095 - DNA, 25 bp, Homo sapien
tgctatccgaagagtggggcttaca

SEQ ID NO: 86096 - DNA, 25 bp, Homo sapien
atggcagttgctatccgaagagtgg

SEQ ID NO: 86097 - DNA, 25 bp, Homo sapien
tggcagttgctatccgaagagtggg

SEQ ID NO: 86098 - DNA, 25 bp, Homo sapien
cgaagagtggggcttacacaggaat

SEQ ID NO: 86099 - DNA, 25 bp, Homo sapien
ccactcttcggatagcaactgccat

SEQ ID NO: 86100 - DNA, 25 bp, Homo sapien
agccccactcttcggatagcaactg

SEQ ID NO: 86101 - DNA, 25 bp, Homo sapien
taagccccactcttcggatagcaac

SEQ ID NO: 86102 - DNA, 25 bp, Homo sapien
tgtaagccccactcttcggatagca

SEQ ID NO: 86103 - DNA, 25 bp, Homo sapien
attcctgtgtaagccccactcttcg

SEQ ID NO: 86104 - DNA, 25 bp, Homo sapien
tgtgtaagccccactcttcggatag

SEQ ID NO: 86105 - DNA, 25 bp, Homo sapien
cctggacaacagagcaagactccct

SEQ ID NO: 86106 - DNA, 25 bp, Homo sapien
acaacagagcaagactccctctcaa

SEQ ID NO: 86107 - DNA, 25 bp, Homo sapien
gacaacagagcaagactccctctca

SEQ ID NO: 86108 - DNA, 25 bp, Homo sapien
agaatggtgggaacctgggaggcag

SEQ ID NO: 86109 - DNA, 25 bp, Homo sapien
tggacaacagagcaagactccctct

SEQ ID NO: 86110 - DNA, 25 bp, Homo sapien
ctggacaacagagcaagactccctc

SEQ ID NO: 86111 - DNA, 25 bp, Homo sapien
ttgagagggagtcttgctctgttgt

SEQ ID NO: 86112 - DNA, 25 bp, Homo sapien
gagggagtcttgctctgttgtccag

SEQ ID NO: 86113 - DNA, 25 bp, Homo sapien
agggagtcttgctctgttgtccagg

SEQ ID NO: 86114 - DNA, 25 bp, Homo sapien
ctgcctcccaggttcccaccattct

SEQ ID NO: 86115 - DNA, 25 bp, Homo sapien
gagagggagtcttgctctgttgtcc

SEQ ID NO: 86116 - DNA, 25 bp, Homo sapien
agagggagtcttgctctgttgtcca

SEQ ID NO: 86117 - DNA, 25 bp, Homo sapien
gaattatgaagtcaggagatcaaga

SEQ ID NO: 86118 - DNA, 25 bp, Homo sapien
gagatcaagaccattatggccaata

SEQ ID NO: 86119 - DNA, 25 bp, Homo sapien
ggagatcaagaccattatggccaat

SEQ ID NO: 86120 - DNA, 25 bp, Homo sapien
ggtgaattatgaagtcaggagatca

SEQ ID NO: 86121 - DNA, 25 bp, Homo sapien
gcaggtgaattatgaagtcaggaga

SEQ ID NO: 86122 - DNA, 25 bp, Homo sapien
gatcaagaccattatggccaatatg

SEQ ID NO: 86123 - DNA, 25 bp, Homo sapien
tattggccataatggtcttgatctc

SEQ ID NO: 86124 - DNA, 25 bp, Homo sapien
tcttgatctcctgacttcataattc

SEQ ID NO: 86125 - DNA, 25 bp, Homo sapien
tctcctgacttcataattcacctgc

SEQ ID NO: 86126 - DNA, 25 bp, Homo sapien
catattggccataatggtcttgatc

SEQ ID NO: 86127 - DNA, 25 bp, Homo sapien
attggccataatggtcttgatctcc

SEQ ID NO: 86128 - DNA, 25 bp, Homo sapien
gatctcctgacttcataattcacct

SEQ ID NO: 86129 - DNA, 25 bp, Homo sapien
taaacttattagcttctggagaaca

SEQ ID NO: 86130 - DNA, 25 bp, Homo sapien
gtggccgctaacactgccaataaat

SEQ ID NO: 86131 - DNA, 25 bp, Homo sapien
aattaagtattagtggccgctaaca

SEQ ID NO: 86132 - DNA, 25 bp, Homo sapien
tagcttctggagaacaaacttaaga

SEQ ID NO: 86133 - DNA, 25 bp, Homo sapien
tattagtggccgctaacactgccaa

SEQ ID NO: 86134 - DNA, 25 bp, Homo sapien
tagtggccgctaacactgccaataa

SEQ ID NO: 86135 - DNA, 25 bp, Homo sapien
atttattggcagtgttagcggccac

SEQ ID NO: 86136 - DNA, 25 bp, Homo sapien
tcttaagtttgttctccagaagcta

SEQ ID NO: 86137 - DNA, 25 bp, Homo sapien
tccagaagctaataagtttagcaat

SEQ ID NO: 86138 - DNA, 25 bp, Homo sapien
tgttctccagaagctaataagttta

SEQ ID NO: 86139 - DNA, 25 bp, Homo sapien
tattggcagtgttagcggccactaa

SEQ ID NO: 86140 - DNA, 25 bp, Homo sapien
tgttagcggccactaatacttaatt

SEQ ID NO: 86141 - DNA, 25 bp, Homo sapien
atgtattactttattcggatcaaag

SEQ ID NO: 86142 - DNA, 25 bp, Homo sapien
tctatgagcatgtattactttattc

SEQ ID NO: 86143 - DNA, 25 bp, Homo sapien
gttctatgagcatgtattactttat

SEQ ID NO: 86144 - DNA, 25 bp, Homo sapien
atgttctatgagcatgtattacttt

SEQ ID NO: 86145 - DNA, 25 bp, Homo sapien
tgttctatgagcatgtattacttta

SEQ ID NO: 86146 - DNA, 25 bp, Homo sapien
ttctatgagcatgtattactttatt

SEQ ID NO: 86147 - DNA, 25 bp, Homo sapien
aataaagtaatacatgctcatagaa

SEQ ID NO: 86148 - DNA, 25 bp, Homo sapien
ataaagtaatacatgctcatagaac

SEQ ID NO: 86149 - DNA, 25 bp, Homo sapien
aaagtaatacatgctcatagaacat

SEQ ID NO: 86150 - DNA, 25 bp, Homo sapien
ctttgatccgaataaagtaatacat

SEQ ID NO: 86151 - DNA, 25 bp, Homo sapien
gaataaagtaatacatgctcataga

SEQ ID NO: 86152 - DNA, 25 bp, Homo sapien
taaagtaatacatgctcatagaaca

SEQ ID NO: 86153 - DNA, 25 bp, Homo sapien
gattttctaataggccaaaggtgag

SEQ ID NO: 86154 - DNA, 25 bp, Homo sapien
tgacattcgaaagaaaagtataggc

SEQ ID NO: 86155 - DNA, 25 bp, Homo sapien
ggatggctagccaaaatctttggcc

SEQ ID NO: 86156 - DNA, 25 bp, Homo sapien
gagactggtttgaggcatgaacatc

SEQ ID NO: 86157 - DNA, 25 bp, Homo sapien
caacagagttgtcatgcaggtaaac

SEQ ID NO: 86158 - DNA, 25 bp, Homo sapien
tgtcgaaatcagcttataggtggta

SEQ ID NO: 86159 - DNA, 25 bp, Homo sapien
gatgttcatgcctcaaaccagtctc

SEQ ID NO: 86160 - DNA, 25 bp, Homo sapien
taccacctataagctgatttcgaca

SEQ ID NO: 86161 - DNA, 25 bp, Homo sapien
gccaaagattttggctagccatcct

SEQ ID NO: 86162 - DNA, 25 bp, Homo sapien
tcacctttggcctattagaaaatca

SEQ ID NO: 86163 - DNA, 25 bp, Homo sapien
gatttcgacacttaagatcaacagc

SEQ ID NO: 86164 - DNA, 25 bp, Homo sapien
gtttacctgcatgacaactctgttg

SEQ ID NO: 86165 - DNA, 25 bp, Homo sapien
ttaacaatgccatcacaaccatggt

SEQ ID NO: 86166 - DNA, 25 bp, Homo sapien
tggaaccaacaggtcaagtgagatg

SEQ ID NO: 86167 - DNA, 25 bp, Homo sapien
gctgcaactggcctaaagctcactt

SEQ ID NO: 86168 - DNA, 25 bp, Homo sapien
tagttaatgcatccgtctccgtggt

SEQ ID NO: 86169 - DNA, 25 bp, Homo sapien
aggacccctgggcttagttaatgca

SEQ ID NO: 86170 - DNA, 25 bp, Homo sapien
atgaggattgaaaaaggacccctgg

SEQ ID NO: 86171 - DNA, 25 bp, Homo sapien
catctcacttgacctgttggttcca

SEQ ID NO: 86172 - DNA, 25 bp, Homo sapien
aaaagaaccacggagacggatgcat

SEQ ID NO: 86173 - DNA, 25 bp, Homo sapien
gacggatgcattaactaagcccagg

SEQ ID NO: 86174 - DNA, 25 bp, Homo sapien
agcttaaggccaggaaagtctggca

SEQ ID NO: 86175 - DNA, 25 bp, Homo sapien
gcattgttaatagggaagcaagcac

SEQ ID NO: 86176 - DNA, 25 bp, Homo sapien
aaagtgagctttaggccagttgcag

SEQ ID NO: 86177 - DNA, 25 bp, Homo sapien
tttcttacagaatgagcttcaccat

SEQ ID NO: 86178 - DNA, 25 bp, Homo sapien
acgtagctaagcttccctggcagca

SEQ ID NO: 86179 - DNA, 25 bp, Homo sapien
aaccagggcaagttattgttaggct

SEQ ID NO: 86180 - DNA, 25 bp, Homo sapien
tattatttcttacttggaggccaag

SEQ ID NO: 86181 - DNA, 25 bp, Homo sapien
taaggtcccgtgctatgaaatgttt

SEQ ID NO: 86182 - DNA, 25 bp, Homo sapien
taataggtctccaaacttactgccc

SEQ ID NO: 86183 - DNA, 25 bp, Homo sapien
aaacatttcatagcacgggacctta

SEQ ID NO: 86184 - DNA, 25 bp, Homo sapien
tacgtggaagtagctaatggtgaag

SEQ ID NO: 86185 - DNA, 25 bp, Homo sapien
caagcctaacaataacttgccctgg

SEQ ID NO: 86186 - DNA, 25 bp, Homo sapien
tgctgccagggaagcttagctacgt

SEQ ID NO: 86187 - DNA, 25 bp, Homo sapien
tggagacctattagagtaggccact

SEQ ID NO: 86188 - DNA, 25 bp, Homo sapien
cttggcctccaagtaagaaataata

SEQ ID NO: 86189 - DNA, 25 bp, Homo sapien
tgttcatccctatatgcccaaacct

SEQ ID NO: 86190 - DNA, 25 bp, Homo sapien
gaatgttccttgaatacctccaaga

SEQ ID NO: 86191 - DNA, 25 bp, Homo sapien
cagcaatcatgccaaatctgtgttc

SEQ ID NO: 86192 - DNA, 25 bp, Homo sapien
tccaagccaggtcgttattctttct

SEQ ID NO: 86193 - DNA, 25 bp, Homo sapien
tagcattacctttgtccaagccagg

SEQ ID NO: 86194 - DNA, 25 bp, Homo sapien
ctatcccagaagctagaaaccagca

SEQ ID NO: 86195 - DNA, 25 bp, Homo sapien
tcttggaggtattcaaggaacattc

SEQ ID NO: 86196 - DNA, 25 bp, Homo sapien
taggtttgggcatatagggatgaac

SEQ ID NO: 86197 - DNA, 25 bp, Homo sapien
gctggtttctagcttctgggatagg

SEQ ID NO: 86198 - DNA, 25 bp, Homo sapien
cctggcttggacaaaggtaatgcta

SEQ ID NO: 86199 - DNA, 25 bp, Homo sapien
tccaagaaagaataacgacctggct

SEQ ID NO: 86200 - DNA, 25 bp, Homo sapien
gaacacagatttggcatgattgctg

SEQ ID NO: 86201 - DNA, 25 bp, Homo sapien
ctctcagggttagttaggtaaccat

SEQ ID NO: 86202 - DNA, 25 bp, Homo sapien
gttagttaggtaaccatttctgcat

SEQ ID NO: 86203 - DNA, 25 bp, Homo sapien
tgacctctcagggttagttaggtaa

SEQ ID NO: 86204 - DNA, 25 bp, Homo sapien
cctgacctctcagggttagttaggt

SEQ ID NO: 86205 - DNA, 25 bp, Homo sapien
ccctttatgtgattaaggtagaagg

SEQ ID NO: 86206 - DNA, 25 bp, Homo sapien
aaatccctttatgtgattaaggtag

SEQ ID NO: 86207 - DNA, 25 bp, Homo sapien
ttacctaactaaccctgagaggtca

SEQ ID NO: 86208 - DNA, 25 bp, Homo sapien
acctaactaaccctgagaggtcagg

SEQ ID NO: 86209 - DNA, 25 bp, Homo sapien
ccttctaccttaatcacataaaggg

SEQ ID NO: 86210 - DNA, 25 bp, Homo sapien
tctaccttaatcacataaagggatt

SEQ ID NO: 86211 - DNA, 25 bp, Homo sapien
tgcagaaatggttacctaactaacc

SEQ ID NO: 86212 - DNA, 25 bp, Homo sapien
atggttacctaactaaccctgagag

SEQ ID NO: 86213 - DNA, 25 bp, Homo sapien
tcccaagatgcaaaactccaaagtc

SEQ ID NO: 86214 - DNA, 25 bp, Homo sapien
tccaaagtcaatcaggaggccggag

SEQ ID NO: 86215 - DNA, 25 bp, Homo sapien
aaggtcatagacttaacagccagta

SEQ ID NO: 86216 - DNA, 25 bp, Homo sapien
gggaaaatgccatcacgatcataag

SEQ ID NO: 86217 - DNA, 25 bp, Homo sapien
aaaatacagacgtccagagatgctc

SEQ ID NO: 86218 - DNA, 25 bp, Homo sapien
ggtgtgcatctgttccgaaggcccc

SEQ ID NO: 86219 - DNA, 25 bp, Homo sapien
gagcatctctggacgtctgtatttt

SEQ ID NO: 86220 - DNA, 25 bp, Homo sapien
ctaagaatttctccggcctcctgat

SEQ ID NO: 86221 - DNA, 25 bp, Homo sapien
gactttggagttttgcatcttggga

SEQ ID NO: 86222 - DNA, 25 bp, Homo sapien
gggccttcggaacagatgcacaccc

SEQ ID NO: 86223 - DNA, 25 bp, Homo sapien
tatgatcgtgatggcattttccctg

SEQ ID NO: 86224 - DNA, 25 bp, Homo sapien
caaaccacaagctgcagcaacatgg

SEQ ID NO: 86225 - DNA, 25 bp, Homo sapien
ccgcaaggataaagttttcagtagc

SEQ ID NO: 86226 - DNA, 25 bp, Homo sapien
aaagccctttccacatcatcaatca

SEQ ID NO: 86227 - DNA, 25 bp, Homo sapien
ttaaaaatacacgaggaagtagaga

SEQ ID NO: 86228 - DNA, 25 bp, Homo sapien
taaagttttcagtagcagacaagca

SEQ ID NO: 86229 - DNA, 25 bp, Homo sapien
cagtttccacaaaaaccgcaaggat

SEQ ID NO: 86230 - DNA, 25 bp, Homo sapien
tcaatcttaaaaatacacgaggaag

SEQ ID NO: 86231 - DNA, 25 bp, Homo sapien
atccttgcggtttttgtggaaactg

SEQ ID NO: 86232 - DNA, 25 bp, Homo sapien
tgattgatgatgtggaaagggcttt

SEQ ID NO: 86233 - DNA, 25 bp, Homo sapien
taagattgattgatgatgtggaaag

SEQ ID NO: 86234 - DNA, 25 bp, Homo sapien
tctacttcctcgtgtatttttaaga

SEQ ID NO: 86235 - DNA, 25 bp, Homo sapien
gctactgaaaactttatccttgcgg

SEQ ID NO: 86236 - DNA, 25 bp, Homo sapien
tgcttgtctgctactgaaaacttta

SEQ ID NO: 86237 - DNA, 25 bp, Homo sapien
ctcctctaacccaactgctgcagaa

SEQ ID NO: 86238 - DNA, 25 bp, Homo sapien
ttctgcagcagttgggttagaggag

SEQ ID NO: 86239 - DNA, 25 bp, Homo sapien
caactgctgcagaaaaaatagaaat

SEQ ID NO: 86240 - DNA, 25 bp, Homo sapien
gtcagtttatgagaggctaaaaggc

SEQ ID NO: 86241 - DNA, 25 bp, Homo sapien
gagaggctaaaaggctcctcctcct

SEQ ID NO: 86242 - DNA, 25 bp, Homo sapien
ttatgagaggctaaaaggctcctcc

SEQ ID NO: 86243 - DNA, 25 bp, Homo sapien
ggctaaaaggctcctcctcctctaa

SEQ ID NO: 86244 - DNA, 25 bp, Homo sapien
tcctctaacccaactgctgcagaaa

SEQ ID NO: 86245 - DNA, 25 bp, Homo sapien
tttctgcagcagttgggttagagga

SEQ ID NO: 86246 - DNA, 25 bp, Homo sapien
ggaggagccttttagcctctcataa

SEQ ID NO: 86247 - DNA, 25 bp, Homo sapien
tctatttctattttttctgcagcag

SEQ ID NO: 86248 - DNA, 25 bp, Homo sapien
tctattttttctgcagcagttgggt

SEQ ID NO: 86249 - DNA, 25 bp, Homo sapien
gccttttagcctctcataaactgac

SEQ ID NO: 86250 - DNA, 25 bp, Homo sapien
tagaggaggaggagccttttagcct

SEQ ID NO: 86251 - DNA, 25 bp, Homo sapien
tcctctagagatttaattacaaacg

SEQ ID NO: 86252 - DNA, 25 bp, Homo sapien
ccattccatccaaaacaaggtcgaa

SEQ ID NO: 86253 - DNA, 25 bp, Homo sapien
tcaaccaccaagtattcccgagagt

SEQ ID NO: 86254 - DNA, 25 bp, Homo sapien
gagatttaattacaaacgtaagctg

SEQ ID NO: 86255 - DNA, 25 bp, Homo sapien
gaatgccatgtcaaatcctctagag

SEQ ID NO: 86256 - DNA, 25 bp, Homo sapien
tccaaaacaaggtcgaatgccatgt

SEQ ID NO: 86257 - DNA, 25 bp, Homo sapien
cgtttgtaattaaatctctagagga

SEQ ID NO: 86258 - DNA, 25 bp, Homo sapien
gcattcgaccttgttttggatggaa

SEQ ID NO: 86259 - DNA, 25 bp, Homo sapien
gatttgacatggcattcgaccttgt

SEQ ID NO: 86260 - DNA, 25 bp, Homo sapien
ctctagaggatttgacatggcattc

SEQ ID NO: 86261 - DNA, 25 bp, Homo sapien
gccactctcgggaatacttggtggt

SEQ ID NO: 86262 - DNA, 25 bp, Homo sapien
actctcgggaatacttggtggttga

SEQ ID NO: 86263 - DNA, 25 bp, Homo sapien
tccgtcatcaggttcttggcaaaga

SEQ ID NO: 86264 - DNA, 25 bp, Homo sapien
gatgaatttcttaccctgcagaatg

SEQ ID NO: 86265 - DNA, 25 bp, Homo sapien
tccagttacctcgtggtttccgtca

SEQ ID NO: 86266 - DNA, 25 bp, Homo sapien
taacgccagaatatcccgaaagtca

SEQ ID NO: 86267 - DNA, 25 bp, Homo sapien
aaaaagcgatgtcccagataagtca

SEQ ID NO: 86268 - DNA, 25 bp, Homo sapien
tttgcccacatttaggcggacggga

SEQ ID NO: 86269 - DNA, 25 bp, Homo sapien
tctttgccaagaacctgatgacgga

SEQ ID NO: 86270 - DNA, 25 bp, Homo sapien
tgatgacggaaaccacgaggtaact

SEQ ID NO: 86271 - DNA, 25 bp, Homo sapien
tcccgtccgcctaaatgtgggcaaa

SEQ ID NO: 86272 - DNA, 25 bp, Homo sapien
ggaaattcccaaattgcgcttaaga

SEQ ID NO: 86273 - DNA, 25 bp, Homo sapien
cacattgacttatctgggacatcgc

SEQ ID NO: 86274 - DNA, 25 bp, Homo sapien
gactttcgggatattctggcgttaa

SEQ ID NO: 86275 - DNA, 25 bp, Homo sapien
tcctcgcggtcgtagaaaatgaaag

SEQ ID NO: 86276 - DNA, 25 bp, Homo sapien
ttcatgatcccgtagtcctcgcggt

SEQ ID NO: 86277 - DNA, 25 bp, Homo sapien
ggacattttccctggcgatcgtggc

SEQ ID NO: 86278 - DNA, 25 bp, Homo sapien
aacggaggtaatagaaggcatcggc

SEQ ID NO: 86279 - DNA, 25 bp, Homo sapien
gcagccgttaacacaggaagagcga

SEQ ID NO: 86280 - DNA, 25 bp, Homo sapien
ggcatcggcgctacgttaacttcga

SEQ ID NO: 86281 - DNA, 25 bp, Homo sapien
catgaaaatgaagatcgtgatgctc

SEQ ID NO: 86282 - DNA, 25 bp, Homo sapien
tcgctcttcctgtgttaacggctgc

SEQ ID NO: 86283 - DNA, 25 bp, Homo sapien
tctacgaccgcgaggactacgggat

SEQ ID NO: 86284 - DNA, 25 bp, Homo sapien
gccacgatcgccagggaaaatgtcc

SEQ ID NO: 86285 - DNA, 25 bp, Homo sapien
cgtagcgccgatgccttctattacc

SEQ ID NO: 86286 - DNA, 25 bp, Homo sapien
tatagtcgaagttaacgtagcgccg

SEQ ID NO: 86287 - DNA, 25 bp, Homo sapien
gattctgagtctcctactcccgggt

SEQ ID NO: 86288 - DNA, 25 bp, Homo sapien
ctgagtctcctactcccgggttctg

SEQ ID NO: 86289 - DNA, 25 bp, Homo sapien
ttctgagtctcctactcccgggttc

SEQ ID NO: 86290 - DNA, 25 bp, Homo sapien
tctgagtctcctactcccgggttct

SEQ ID NO: 86291 - DNA, 25 bp, Homo sapien
attctgagtctcctactcccgggtt

SEQ ID NO: 86292 - DNA, 25 bp, Homo sapien
tgagtctcctactcccgggttctgc

SEQ ID NO: 86293 - DNA, 25 bp, Homo sapien
aacccgggagtaggagactcagaat

SEQ ID NO: 86294 - DNA, 25 bp, Homo sapien
gcagaacccgggagtaggagactca

SEQ ID NO: 86295 - DNA, 25 bp, Homo sapien
acccgggagtaggagactcagaatc

SEQ ID NO: 86296 - DNA, 25 bp, Homo sapien
agaacccgggagtaggagactcaga

SEQ ID NO: 86297 - DNA, 25 bp, Homo sapien
cagaacccgggagtaggagactcag

SEQ ID NO: 86298 - DNA, 25 bp, Homo sapien
gaacccgggagtaggagactcagaa

SEQ ID NO: 86299 - DNA, 25 bp, Homo sapien
aacgcggccacaaccgctcagtctt

SEQ ID NO: 86300 - DNA, 25 bp, Homo sapien
tcttcacaaaatggcccccgagtct

SEQ ID NO: 86301 - DNA, 25 bp, Homo sapien
tcttcgtctcttcacaaaatggccc

SEQ ID NO: 86302 - DNA, 25 bp, Homo sapien
cagtcttcgtctcttcacaaaatgg

SEQ ID NO: 86303 - DNA, 25 bp, Homo sapien
tggaggtcggcaacgcggccacaac

SEQ ID NO: 86304 - DNA, 25 bp, Homo sapien
cgctcagtcttcgtctcttcacaaa

SEQ ID NO: 86305 - DNA, 25 bp, Homo sapien
gggccattttgtgaagagacgaaga

SEQ ID NO: 86306 - DNA, 25 bp, Homo sapien
ccattttgtgaagagacgaagactg

SEQ ID NO: 86307 - DNA, 25 bp, Homo sapien
gaagactgagcggttgtggccgcgt

SEQ ID NO: 86308 - DNA, 25 bp, Homo sapien
actcgggggccattttgtgaagaga

SEQ ID NO: 86309 - DNA, 25 bp, Homo sapien
tttgtgaagagacgaagactgagcg

SEQ ID NO: 86310 - DNA, 25 bp, Homo sapien
gttgtggccgcgttgccgacctcca

SEQ ID NO: 86311 - DNA, 25 bp, Homo sapien
gccccattcctgagaatcttcctat

SEQ ID NO: 86312 - DNA, 25 bp, Homo sapien
attcctgagaatcttcctattggct

SEQ ID NO: 86313 - DNA, 25 bp, Homo sapien
ccccattcctgagaatcttcctatt

SEQ ID NO: 86314 - DNA, 25 bp, Homo sapien
cccattcctgagaatcttcctattg

SEQ ID NO: 86315 - DNA, 25 bp, Homo sapien
ccattcctgagaatcttcctattgg

SEQ ID NO: 86316 - DNA, 25 bp, Homo sapien
cattcctgagaatcttcctattggc

SEQ ID NO: 86317 - DNA, 25 bp, Homo sapien
aataggaagattctcaggaatgggg

SEQ ID NO: 86318 - DNA, 25 bp, Homo sapien
ataggaagattctcaggaatggggc

SEQ ID NO: 86319 - DNA, 25 bp, Homo sapien
ccaataggaagattctcaggaatgg

SEQ ID NO: 86320 - DNA, 25 bp, Homo sapien
gccaataggaagattctcaggaatg

SEQ ID NO: 86321 - DNA, 25 bp, Homo sapien
agccaataggaagattctcaggaat

SEQ ID NO: 86322 - DNA, 25 bp, Homo sapien
caataggaagattctcaggaatggg

SEQ ID NO: 86323 - DNA, 25 bp, Homo sapien
gaagattctcaggaatggggcgggg

SEQ ID NO: 86324 - DNA, 25 bp, Homo sapien
aagattctcaggaatggggcgggga

SEQ ID NO: 86325 - DNA, 25 bp, Homo sapien
ccaataggaagattctcaggaatgg

SEQ ID NO: 86326 - DNA, 25 bp, Homo sapien
gccaataggaagattctcaggaatg

SEQ ID NO: 86327 - DNA, 25 bp, Homo sapien
agccaataggaagattctcaggaat

SEQ ID NO: 86328 - DNA, 25 bp, Homo sapien
caataggaagattctcaggaatggg

SEQ ID NO: 86329 - DNA, 25 bp, Homo sapien
gcttgctccagatagctgtcgctaa

SEQ ID NO: 86330 - DNA, 25 bp, Homo sapien
agttcttgcttgctccagatagctg

SEQ ID NO: 86331 - DNA, 25 bp, Homo sapien
gctccagatagctgtcgctaattct

SEQ ID NO: 86332 - DNA, 25 bp, Homo sapien
gatagctgtcgctaattcttttctc

SEQ ID NO: 86333 - DNA, 25 bp, Homo sapien
ccaagctgtaagagatcccagagga

SEQ ID NO: 86334 - DNA, 25 bp, Homo sapien
tgttcccaagctgtaagagatccca

SEQ ID NO: 86335 - DNA, 25 bp, Homo sapien
ctgttcccaagctgtaagagatccc

SEQ ID NO: 86336 - DNA, 25 bp, Homo sapien
gttcccaagctgtaagagatcccag

SEQ ID NO: 86337 - DNA, 25 bp, Homo sapien
tatgtctctaactggcaagtctcct

SEQ ID NO: 86338 - DNA, 25 bp, Homo sapien
tttgaggctggtagcaccagaggta

SEQ ID NO: 86339 - DNA, 25 bp, Homo sapien
caccagaggtatagcatctatgtct

SEQ ID NO: 86340 - DNA, 25 bp, Homo sapien
gatgtagggtccaccagatgtgaca

SEQ ID NO: 86341 - DNA, 25 bp, Homo sapien
ccaacatgtgatcttcgcgaagtcg

SEQ ID NO: 86342 - DNA, 25 bp, Homo sapien
tgtgatcttcgcgaagtcgaaagaa

SEQ ID NO: 86343 - DNA, 25 bp, Homo sapien
cgaagtcgaaagaaactgtcctcca

SEQ ID NO: 86344 - DNA, 25 bp, Homo sapien
tcttcgcgaagtcgaaagaaactgt

SEQ ID NO: 86345 - DNA, 25 bp, Homo sapien
tgtgtcccacttggacgcgaggctg

SEQ ID NO: 86346 - DNA, 25 bp, Homo sapien
ctcttgggtttctccggcaccggtg

SEQ ID NO: 86347 - DNA, 25 bp, Homo sapien
gtcaaccgcagcaaggtggtcctca

SEQ ID NO: 86348 - DNA, 25 bp, Homo sapien
ccgacgcagtggaaatgcccttgca

SEQ ID NO: 86349 - DNA, 25 bp, Homo sapien
tgttttcatttgtcgcatgctcctt

SEQ ID NO: 86350 - DNA, 25 bp, Homo sapien
cactgggtttactggctacttcacc

SEQ ID NO: 86351 - DNA, 25 bp, Homo sapien
agttcactgggtttactggctactt

SEQ ID NO: 86352 - DNA, 25 bp, Homo sapien
cgcatgctccttaaacgatggaggg

SEQ ID NO: 86353 - DNA, 25 bp, Homo sapien
aacagagagacgcttgttttccact

SEQ ID NO: 86354 - DNA, 25 bp, Homo sapien
gacctagggtcgactttcatcttcc

SEQ ID NO: 86355 - DNA, 25 bp, Homo sapien
cagtaaccttggtacatgtcgagga

SEQ ID NO: 86356 - DNA, 25 bp, Homo sapien
taaagtggcaggaataacaacatgg

SEQ ID NO: 86357 - DNA, 25 bp, Homo sapien
tgggtttagccatacttatgacact

SEQ ID NO: 86358 - DNA, 25 bp, Homo sapien
ctgttaggcatgcatagaccaatgg

SEQ ID NO: 86359 - DNA, 25 bp, Homo sapien
tagaccaatgggtttagccatactt

SEQ ID NO: 86360 - DNA, 25 bp, Homo sapien
catgcatagaccaatgggtttagcc

SEQ ID NO: 86361 - DNA, 25 bp, Homo sapien
gagcacactccaatgagcttctctg

SEQ ID NO: 86362 - DNA, 25 bp, Homo sapien
gcacactccaatgagcttctctgtt

SEQ ID NO: 86363 - DNA, 25 bp, Homo sapien
cttccacttgcatggtattgctggc

SEQ ID NO: 86364 - DNA, 25 bp, Homo sapien
catggtattgctggccatgatgtgg

SEQ ID NO: 86365 - DNA, 25 bp, Homo sapien
gaacttctgttaattgtgcttttgt

SEQ ID NO: 86366 - DNA, 25 bp, Homo sapien
aagagcttcttaagtcgaatcagct

SEQ ID NO: 86367 - DNA, 25 bp, Homo sapien
gcttcttaagtcgaatcagctctac

SEQ ID NO: 86368 - DNA, 25 bp, Homo sapien
tcttaagtcgaatcagctctacctt

SEQ ID NO: 86369 - DNA, 25 bp, Homo sapien
cagagtcatctgcaagatagacaca

SEQ ID NO: 86370 - DNA, 25 bp, Homo sapien
tcttccagttggctcttcaagctca

SEQ ID NO: 86371 - DNA, 25 bp, Homo sapien
ctgagctcattcacttgcttgagga

SEQ ID NO: 86372 - DNA, 25 bp, Homo sapien
agctcattcacttgcttgaggaggg

SEQ ID NO: 86373 - DNA, 25 bp, Homo sapien
aattgtcattcagcaattttcgttc

SEQ ID NO: 86374 - DNA, 25 bp, Homo sapien
tgtcattcagcaattttcgttcttt

SEQ ID NO: 86375 - DNA, 25 bp, Homo sapien
tgtcataattgtcattcagcaattt

SEQ ID NO: 86376 - DNA, 25 bp, Homo sapien
cataattgtcattcagcaattttcg

SEQ ID NO: 86377 - DNA, 25 bp, Homo sapien
ctcctggacctagttcctcattctc

SEQ ID NO: 86378 - DNA, 25 bp, Homo sapien
agctctcagatggataccccaaggg

SEQ ID NO: 86379 - DNA, 25 bp, Homo sapien
ctggcaatggaaagcaagctctcag

SEQ ID NO: 86380 - DNA, 25 bp, Homo sapien
ccccaaggggtgtgatatgacgtct

SEQ ID NO: 86381 - DNA, 25 bp, Homo sapien
gatatgacgtctttattatccagtt

SEQ ID NO: 86382 - DNA, 25 bp, Homo sapien
gtagctgttccgctatgagctcgtt

SEQ ID NO: 86383 - DNA, 25 bp, Homo sapien
tccctggacagctcaagtaaaactt

SEQ ID NO: 86384 - DNA, 25 bp, Homo sapien
cgctatgagctcgttgctccagtgg

SEQ ID NO: 86385 - DNA, 25 bp, Homo sapien
ggacagctcaagtaaaacttttctc

SEQ ID NO: 86386 - DNA, 25 bp, Homo sapien
tatgcttctgaagtatgttggtgac

SEQ ID NO: 86387 - DNA, 25 bp, Homo sapien
tatgttggtgacttcaagcttcaga

SEQ ID NO: 86388 - DNA, 25 bp, Homo sapien
aggttgggaaattgtggctgcattt

SEQ ID NO: 86389 - DNA, 25 bp, Homo sapien
gagtggctggttcagattgcctgtc

SEQ ID NO: 86390 - DNA, 25 bp, Homo sapien
gggagatgatacagccactaatggc

SEQ ID NO: 86391 - DNA, 25 bp, Homo sapien
gttttccaaaaagtgtcctcaagca

SEQ ID NO: 86392 - DNA, 25 bp, Homo sapien
aatgggtggagctcatgaagttctc

SEQ ID NO: 86393 - DNA, 25 bp, Homo sapien
tagttctcatgttcagtagcagcag

SEQ ID NO: 86394 - DNA, 25 bp, Homo sapien
ctgggacagtttcttttcttcttgg

SEQ ID NO: 86395 - DNA, 25 bp, Homo sapien
tctagttccaatgtggtctctgcgt

SEQ ID NO: 86396 - DNA, 25 bp, Homo sapien
ccaatgtggtctctgcgtgtgatac

SEQ ID NO: 86397 - DNA, 25 bp, Homo sapien
tctctgcgtgtgatacttgcaactc

SEQ ID NO: 86398 - DNA, 25 bp, Homo sapien
gtgatacttgcaactcatttagcac

SEQ ID NO: 86399 - DNA, 25 bp, Homo sapien
ttgattttgcgctgcagaataagca

SEQ ID NO: 86400 - DNA, 25 bp, Homo sapien
gttgattttgcgctgcagaataagc

SEQ ID NO: 86401 - DNA, 25 bp, Homo sapien
tgattttgcgctgcagaataagcat

SEQ ID NO: 86402 - DNA, 25 bp, Homo sapien
ggttcccacgttcctgttatccatc

SEQ ID NO: 86403 - DNA, 25 bp, Homo sapien
aaacttaggtcttgcttcattccca

SEQ ID NO: 86404 - DNA, 25 bp, Homo sapien
ctggtatcagccctggaaacttagg

SEQ ID NO: 86405 - DNA, 25 bp, Homo sapien
agtcctgtgagtggttcccacgttc

SEQ ID NO: 86406 - DNA, 25 bp, Homo sapien
ttattcttgaggtctagtagtcgag

SEQ ID NO: 86407 - DNA, 25 bp, Homo sapien
gtagtcgagtcaacctctccagctt

SEQ ID NO: 86408 - DNA, 25 bp, Homo sapien
tccagctgcttgatacggttattct

SEQ ID NO: 86409 - DNA, 25 bp, Homo sapien
tgatacggttattcttgaggtctag

SEQ ID NO: 86410 - DNA, 25 bp, Homo sapien
tgaactgtggttccaagttcctcat

SEQ ID NO: 86411 - DNA, 25 bp, Homo sapien
attttgcttcccgaaagagggctgc

SEQ ID NO: 86412 - DNA, 25 bp, Homo sapien
gagggctgccctgaactgtggttcc

SEQ ID NO: 86413 - DNA, 25 bp, Homo sapien
taatttggttttcgtgagtcagatc

SEQ ID NO: 86414 - DNA, 25 bp, Homo sapien
caagtttggtatattggccgtggag

SEQ ID NO: 86415 - DNA, 25 bp, Homo sapien
caggagcattgaattccgatagcca

SEQ ID NO: 86416 - DNA, 25 bp, Homo sapien
tctagccaggtcagtcaggagatct

SEQ ID NO: 86417 - DNA, 25 bp, Homo sapien
cagtgggacgcaaagataggtagac

SEQ ID NO: 86418 - DNA, 25 bp, Homo sapien
tggcagtgtttccaaacataacgac

SEQ ID NO: 86419 - DNA, 25 bp, Homo sapien
agtgtttccaaacataacgacaacg

SEQ ID NO: 86420 - DNA, 25 bp, Homo sapien
acaacggtcgggtgccataagcaac

SEQ ID NO: 86421 - DNA, 25 bp, Homo sapien
caaacataacgacaacggtcgggtg

SEQ ID NO: 86422 - DNA, 25 bp, Homo sapien
gggtacagtgggtttcaaagtcata

SEQ ID NO: 86423 - DNA, 25 bp, Homo sapien
catagaaggaataggtgcagaaagt

SEQ ID NO: 86424 - DNA, 25 bp, Homo sapien
gagctagggcggcagatgtcaggaa

SEQ ID NO: 86425 - DNA, 25 bp, Homo sapien
ggttgggtatctccagcctgagcta

SEQ ID NO: 86426 - DNA, 25 bp, Homo sapien
tctagcaccctgtcaaagcaaatcc

SEQ ID NO: 86427 - DNA, 25 bp, Homo sapien
gagtgctgtgttcactggccatggc

SEQ ID NO: 86428 - DNA, 25 bp, Homo sapien
tgtcaagccgggctgaagcctcttg

SEQ ID NO: 86429 - DNA, 25 bp, Homo sapien
gccatggcctggtgtatgtcaagcc

SEQ ID NO: 86430 - DNA, 25 bp, Homo sapien
cctgggctttctttcgtttattgca

SEQ ID NO: 86431 - DNA, 25 bp, Homo sapien
aacgcagcctcatccagtactctag

SEQ ID NO: 86432 - DNA, 25 bp, Homo sapien
caagcacatcggttgacaggtagac

SEQ ID NO: 86433 - DNA, 25 bp, Homo sapien
cacgcctgtaggctgggttttatgg

SEQ ID NO: 86434 - DNA, 25 bp, Homo sapien
caaggcctcccgtctcagataatgg

SEQ ID NO: 86435 - DNA, 25 bp, Homo sapien
cactgggaatcgagcctggtctcta

SEQ ID NO: 86436 - DNA, 25 bp, Homo sapien
tgaggttcccaagactccgatctga

SEQ ID NO: 86437 - DNA, 25 bp, Homo sapien
tcggccaagatacgagccaggctct

SEQ ID NO: 86438 - DNA, 25 bp, Homo sapien
tagtcaaagagttgacccctcttgg

SEQ ID NO: 86439 - DNA, 25 bp, Homo sapien
ccaggactgtagtcaaagagttgac

SEQ ID NO: 86440 - DNA, 25 bp, Homo sapien
gactgtagtcaaagagttgacccct

SEQ ID NO: 86441 - DNA, 25 bp, Homo sapien
tcaaagagttgacccctcttggtac

SEQ ID NO: 86442 - DNA, 25 bp, Homo sapien
aaacttaagcaaaatggctctttcg

SEQ ID NO: 86443 - DNA, 25 bp, Homo sapien
aactgttacctctaccctcaagtgg

SEQ ID NO: 86444 - DNA, 25 bp, Homo sapien
taacaggtggcttatactgcctccc

SEQ ID NO: 86445 - DNA, 25 bp, Homo sapien
gctctttcgaaatgccagatgtctg

SEQ ID NO: 86446 - DNA, 25 bp, Homo sapien
aatagatccgttgggtttctctgca

SEQ ID NO: 86447 - DNA, 25 bp, Homo sapien
gcagggtcagtgaggttaaaatcac

SEQ ID NO: 86448 - DNA, 25 bp, Homo sapien
tccagttgcacttgaatagatccgt

SEQ ID NO: 86449 - DNA, 25 bp, Homo sapien
tgcagggtcagtgaggttaaaatca

SEQ ID NO: 86450 - DNA, 25 bp, Homo sapien
cttggtatccttccccttagtctga

SEQ ID NO: 86451 - DNA, 25 bp, Homo sapien
tccccttagtctgagcttctggttt

SEQ ID NO: 86452 - DNA, 25 bp, Homo sapien
ctctcagggggtatgtagggaaact

SEQ ID NO: 86453 - DNA, 25 bp, Homo sapien
agatgagatctttgaactgtccttg

SEQ ID NO: 86454 - DNA, 25 bp, Homo sapien
agatcagagatagcattacaagctg

SEQ ID NO: 86455 - DNA, 25 bp, Homo sapien
tagaaagatcagagatagcattaca

SEQ ID NO: 86456 - DNA, 25 bp, Homo sapien
ctgaatagaaagatcagagatagca

SEQ ID NO: 86457 - DNA, 25 bp, Homo sapien
aaagatcagagatagcattacaagc

SEQ ID NO: 86458 - DNA, 25 bp, Homo sapien
tcttgagtagctcacaacctggtgc

SEQ ID NO: 86459 - DNA, 25 bp, Homo sapien
gatgttaaggctaagatactccatt

SEQ ID NO: 86460 - DNA, 25 bp, Homo sapien
tcttagatcgatactggccagcttc

SEQ ID NO: 86461 - DNA, 25 bp, Homo sapien
catgaggaggttttctcttagatcg

SEQ ID NO: 86462 - DNA, 25 bp, Homo sapien
gctgaatgggataatgtcatttcct

SEQ ID NO: 86463 - DNA, 25 bp, Homo sapien
tcttcctcgtgctgatttttaaagc

SEQ ID NO: 86464 - DNA, 25 bp, Homo sapien
gccatcacctatgaagctgttagtc

SEQ ID NO: 86465 - DNA, 25 bp, Homo sapien
agtgctgaatgggataatgtcattt

SEQ ID NO: 86466 - DNA, 25 bp, Homo sapien
tgacttcagaaccttgttcagagga

SEQ ID NO: 86467 - DNA, 25 bp, Homo sapien
cggtagtttgtgcttcactgacttc

SEQ ID NO: 86468 - DNA, 25 bp, Homo sapien
tgacatcatcactgtcggtagtttg

SEQ ID NO: 86469 - DNA, 25 bp, Homo sapien
tttctgagacatgggtggcactatg

SEQ ID NO: 86470 - DNA, 25 bp, Homo sapien
ctgataaggaaaatgtttatttagt

SEQ ID NO: 86471 - DNA, 25 bp, Homo sapien
gtctctgtctccgacaagggtaggt

SEQ ID NO: 86472 - DNA, 25 bp, Homo sapien
ttctcctgccctaggcttccttagg

SEQ ID NO: 86473 - DNA, 25 bp, Homo sapien
ggtagaaggccagggagacaatttc

SEQ ID NO: 86474 - DNA, 25 bp, Homo sapien
gaatttgtactccacatacacctgt

SEQ ID NO: 86475 - DNA, 25 bp, Homo sapien
ctttcattagtggtattcatggtag

SEQ ID NO: 86476 - DNA, 25 bp, Homo sapien
gttgcagtgtgagccccaagacttt

SEQ ID NO: 86477 - DNA, 25 bp, Homo sapien
gtggtattcatggtagttttcataa

SEQ ID NO: 86478 - DNA, 25 bp, Homo sapien
gcaaagaatcatatactgttgcagt

SEQ ID NO: 86479 - DNA, 25 bp, Homo sapien
ttgtccattcagcatgtcgaacaga

SEQ ID NO: 86480 - DNA, 25 bp, Homo sapien
agaaaccgccttcggccttgctgct

SEQ ID NO: 86481 - DNA, 25 bp, Homo sapien
tgtcgaacagaaaccgccttcggcc

SEQ ID NO: 86482 - DNA, 25 bp, Homo sapien
tcagcatgtcgaacagaaaccgcct

SEQ ID NO: 86483 - DNA, 25 bp, Homo sapien
tagctcttgctctagaatatctctt

SEQ ID NO: 86484 - DNA, 25 bp, Homo sapien
gccacagttgaagatatgcatatcc

SEQ ID NO: 86485 - DNA, 25 bp, Homo sapien
ttcagccttcctattggggtagcca

SEQ ID NO: 86486 - DNA, 25 bp, Homo sapien
atctccttgtaaatagcatggagga

SEQ ID NO: 86487 - DNA, 25 bp, Homo sapien
cagccttcctattggggtagccaga

SEQ ID NO: 86488 - DNA, 25 bp, Homo sapien
ccttgtaaatagcatggaggacagc

SEQ ID NO: 86489 - DNA, 25 bp, Homo sapien
gataaaccatacagcttgagccagt

SEQ ID NO: 86490 - DNA, 25 bp, Homo sapien
ggaggctcccgctgttaataaatat

SEQ ID NO: 86491 - DNA, 25 bp, Homo sapien
tgctaaggtactggagaaaaatgcc

SEQ ID NO: 86492 - DNA, 25 bp, Homo sapien
taagaagcagtgatactccctggct

SEQ ID NO: 86493 - DNA, 25 bp, Homo sapien
taacttctgaactttggccctgagc

SEQ ID NO: 86494 - DNA, 25 bp, Homo sapien
tagcggaccgagaaagtcgttacga

SEQ ID NO: 86495 - DNA, 25 bp, Homo sapien
catctgtgcacagttcgggccgtgg

SEQ ID NO: 86496 - DNA, 25 bp, Homo sapien
gaacaaagtcgaagtatgagccgga

SEQ ID NO: 86497 - DNA, 25 bp, Homo sapien
tagttccagcagtccaaatacaagt

SEQ ID NO: 86498 - DNA, 25 bp, Homo sapien
cctggtagttccagcagtccaaata

SEQ ID NO: 86499 - DNA, 25 bp, Homo sapien
ggtagttccagcagtccaaatacaa

SEQ ID NO: 86500 - DNA, 25 bp, Homo sapien
aacctggtagttccagcagtccaaa

SEQ ID NO: 86501 - DNA, 25 bp, Homo sapien
tgccgcctcggcaaaaagtctgagg

SEQ ID NO: 86502 - DNA, 25 bp, Homo sapien
gatccctcgagtcctggagcagtca

SEQ ID NO: 86503 - DNA, 25 bp, Homo sapien
ccccagcttgggtcgtagtttatca

SEQ ID NO: 86504 - DNA, 25 bp, Homo sapien
tagtttatcacgaggctgggctcca

SEQ ID NO: 86505 - DNA, 25 bp, Homo sapien
acagactatgtagcgctggccctag

SEQ ID NO: 86506 - DNA, 25 bp, Homo sapien
aaaaaatgtacctgattgctcccaa

SEQ ID NO: 86507 - DNA, 25 bp, Homo sapien
tcacctccattaaccacagactatg

SEQ ID NO: 86508 - DNA, 25 bp, Homo sapien
tcctggccgaactgtggatacagct

SEQ ID NO: 86509 - DNA, 25 bp, Homo sapien
cactgcaacctgaggaggatgacga

SEQ ID NO: 86510 - DNA, 25 bp, Homo sapien
cccttggactatggaaacgtgggag

SEQ ID NO: 86511 - DNA, 25 bp, Homo sapien
ctatgatagctcagaaagggacttc

SEQ ID NO: 86512 - DNA, 25 bp, Homo sapien
tggtactaccttgcggttgccacca

SEQ ID NO: 86513 - DNA, 25 bp, Homo sapien
taccctgctttgatgtgctaataga

SEQ ID NO: 86514 - DNA, 25 bp, Homo sapien
tgatctgtcttgaatttaccctgct

SEQ ID NO: 86515 - DNA, 25 bp, Homo sapien
aattgacagtgaatctagcactacg

SEQ ID NO: 86516 - DNA, 25 bp, Homo sapien
tacgttattcttgggacctgcagga

SEQ ID NO: 86517 - DNA, 25 bp, Homo sapien
gagtttgctgttgatccccgatttc

SEQ ID NO: 86518 - DNA, 25 bp, Homo sapien
gatgtggttacagggtcatccagag

SEQ ID NO: 86519 - DNA, 25 bp, Homo sapien
gcatggaagagcctaatcaccttga

SEQ ID NO: 86520 - DNA, 25 bp, Homo sapien
gatttctagcggtgagtggcagtcc

SEQ ID NO: 86521 - DNA, 25 bp, Homo sapien
gccttctagccgtaggagccaggaa

SEQ ID NO: 86522 - DNA, 25 bp, Homo sapien
tagtagtgcagcttccatggcagag

SEQ ID NO: 86523 - DNA, 25 bp, Homo sapien
caaacttcgccgaggcatggatgaa

SEQ ID NO: 86524 - DNA, 25 bp, Homo sapien
gataaaccgtattgacctcgtctgc

SEQ ID NO: 86525 - DNA, 25 bp, Homo sapien
tcactggtgtcactcggctggacct

SEQ ID NO: 86526 - DNA, 25 bp, Homo sapien
cagagatctgcatctctatgtcagc

SEQ ID NO: 86527 - DNA, 25 bp, Homo sapien
cttgtcgtggatcttggctttgaca

SEQ ID NO: 86528 - DNA, 25 bp, Homo sapien
cagagggaaggctcaataatgtcac

SEQ ID NO: 86529 - DNA, 25 bp, Homo sapien
cataaggcctagctggtgtgattcc

SEQ ID NO: 86530 - DNA, 25 bp, Homo sapien
caatgcgcaatctgatggctggtcc

SEQ ID NO: 86531 - DNA, 25 bp, Homo sapien
tggaggagcccataggcaatgcgca

SEQ ID NO: 86532 - DNA, 25 bp, Homo sapien
tcaaattgtgattcctcacggcccg

SEQ ID NO: 86533 - DNA, 25 bp, Homo sapien
aagagtaaaacatctggtgcctcca

SEQ ID NO: 86534 - DNA, 25 bp, Homo sapien
tactccttgctattgggatgggaca

SEQ ID NO: 86535 - DNA, 25 bp, Homo sapien
ccttgctattgggatggtacatttg

SEQ ID NO: 86536 - DNA, 25 bp, Homo sapien
gagtactccttgctattgggatggt

SEQ ID NO: 86537 - DNA, 25 bp, Homo sapien
gccctaacattgctcctatcccggg

SEQ ID NO: 86538 - DNA, 25 bp, Homo sapien
gcagcttccgccctaacattgctcc

SEQ ID NO: 86539 - DNA, 25 bp, Homo sapien
gggtgaggcacagctcgttttctcc

SEQ ID NO: 86540 - DNA, 25 bp, Homo sapien
cagggcttgtcgggcctctcggcct

SEQ ID NO: 86541 - DNA, 25 bp, Homo sapien
tcttttcgcctttggtgagtggcag

SEQ ID NO: 86542 - DNA, 25 bp, Homo sapien
catcaggttaggttgcgcaggagga

SEQ ID NO: 86543 - DNA, 25 bp, Homo sapien
cctttgcgctgttttgcgtcttttc

SEQ ID NO: 86544 - DNA, 25 bp, Homo sapien
gggcgggcaggagcatcaggttagg

SEQ ID NO: 86545 - DNA, 25 bp, Homo sapien
tttaatctccaggactggtttcgcg

SEQ ID NO: 86546 - DNA, 25 bp, Homo sapien
tagaaaccggataggcctctccgtg

SEQ ID NO: 86547 - DNA, 25 bp, Homo sapien
gcgtactatgagactgttcctctgg

SEQ ID NO: 86548 - DNA, 25 bp, Homo sapien
tcagagtagatggtagggaatttaa

SEQ ID NO: 86549 - DNA, 25 bp, Homo sapien
caggaattactgtctaaaaagccgt

SEQ ID NO: 86550 - DNA, 25 bp, Homo sapien
gctgactcccacgatggagggaaga

SEQ ID NO: 86551 - DNA, 25 bp, Homo sapien
tttaaaaggccccatattccagctg

SEQ ID NO: 86552 - DNA, 25 bp, Homo sapien
gccgtattggtattgaagggtcaca

SEQ ID NO: 86553 - DNA, 25 bp, Homo sapien
catcacagcggcgtctacagatcgt

SEQ ID NO: 86554 - DNA, 25 bp, Homo sapien
gcgtctacagatcgtttcatctcca

SEQ ID NO: 86555 - DNA, 25 bp, Homo sapien
gcggcgtctacagatcgtttcatct

SEQ ID NO: 86556 - DNA, 25 bp, Homo sapien
acagcggcgtctacagatcgtttca

SEQ ID NO: 86557 - DNA, 25 bp, Homo sapien
ttactccagggtttcacgtcgtgac

SEQ ID NO: 86558 - DNA, 25 bp, Homo sapien
tggttgttgcccgtaaccacatacg

SEQ ID NO: 86559 - DNA, 25 bp, Homo sapien
gaggggcctcctaagtgtatacagc

SEQ ID NO: 86560 - DNA, 25 bp, Homo sapien
tgtatacagcagagtatgttcgggc

SEQ ID NO: 86561 - DNA, 25 bp, Homo sapien
tccatgaggcatacagtaaggctgc

SEQ ID NO: 86562 - DNA, 25 bp, Homo sapien
tcacataagtgggtacctatccagc

SEQ ID NO: 86563 - DNA, 25 bp, Homo sapien
cattcctttacagtgcctagtgcta

SEQ ID NO: 86564 - DNA, 25 bp, Homo sapien
cagccctgaggtcttacgaattttt

SEQ ID NO: 86565 - DNA, 25 bp, Homo sapien
aagttggtcagggacatgtggccac

SEQ ID NO: 86566 - DNA, 25 bp, Homo sapien
gactttctactccaatcaggctaat

SEQ ID NO: 86567 - DNA, 25 bp, Homo sapien
tagttggcctttggttgatagatcc

SEQ ID NO: 86568 - DNA, 25 bp, Homo sapien
gcagtttcctctacttgcccaagag

SEQ ID NO: 86569 - DNA, 25 bp, Homo sapien
gagaggcctttgctagggagcatgg

SEQ ID NO: 86570 - DNA, 25 bp, Homo sapien
cctttgctagggagcatggacttat

SEQ ID NO: 86571 - DNA, 25 bp, Homo sapien
gcatggacttatattcatggaaact

SEQ ID NO: 86572 - DNA, 25 bp, Homo sapien
gctagggagcatggacttatattca

SEQ ID NO: 86573 - DNA, 25 bp, Homo sapien
tggttagaggatgcccggcagcact

SEQ ID NO: 86574 - DNA, 25 bp, Homo sapien
ttatcatgctcattgggaataagag

SEQ ID NO: 86575 - DNA, 25 bp, Homo sapien
cggcagcactctagttccaacatgg

SEQ ID NO: 86576 - DNA, 25 bp, Homo sapien
aaccacctgacctcatggttagagg

SEQ ID NO: 86577 - DNA, 25 bp, Homo sapien
tctatcacccgttcctactacaggg

SEQ ID NO: 86578 - DNA, 25 bp, Homo sapien
tgggcaagaatccttccgttctatc

SEQ ID NO: 86579 - DNA, 25 bp, Homo sapien
agcactgctggtgtacgacattaca

SEQ ID NO: 86580 - DNA, 25 bp, Homo sapien
ggagcactgctggtgtacgacatta

SEQ ID NO: 86581 - DNA, 25 bp, Homo sapien
tggctgctgttcgtgagaatcacat

SEQ ID NO: 86582 - DNA, 25 bp, Homo sapien
gagtttggagctcgtatggtcaaca

SEQ ID NO: 86583 - DNA, 25 bp, Homo sapien
tctttctctcggtctttaccgacag

SEQ ID NO: 86584 - DNA, 25 bp, Homo sapien
tttaccgacaggtgtggagtttgga

SEQ ID NO: 86585 - DNA, 25 bp, Homo sapien
tattgctacttccaagtcccacctg

SEQ ID NO: 86586 - DNA, 25 bp, Homo sapien
gctacttccaagtcccacctgtatg

SEQ ID NO: 86587 - DNA, 25 bp, Homo sapien
cacctgtatggaaacctgaagctac

SEQ ID NO: 86588 - DNA, 25 bp, Homo sapien
aacctgaagctaccactgttcctaa

SEQ ID NO: 86589 - DNA, 25 bp, Homo sapien
gtttacagataagcggttccagcct

SEQ ID NO: 86590 - DNA, 25 bp, Homo sapien
ataagcggttccagcctgtccacga

SEQ ID NO: 86591 - DNA, 25 bp, Homo sapien
gtgtggggaagtcatgtctcctcct

SEQ ID NO: 86592 - DNA, 25 bp, Homo sapien
tcctgcagtttacagataagcggtt

SEQ ID NO: 86593 - DNA, 25 bp, Homo sapien
gaacccagaggacgcgacaccatga

SEQ ID NO: 86594 - DNA, 25 bp, Homo sapien
gacgcgacaccatgacttatgctta

SEQ ID NO: 86595 - DNA, 25 bp, Homo sapien
aagtatatcatcatcggagacacag

SEQ ID NO: 86596 - DNA, 25 bp, Homo sapien
tcttcaagtatatcatcatcggaga

SEQ ID NO: 86597 - DNA, 25 bp, Homo sapien
tccgcaaggacgtgtgttctctctg

SEQ ID NO: 86598 - DNA, 25 bp, Homo sapien
ggaactgccgtcacttccgcaagga

SEQ ID NO: 86599 - DNA, 25 bp, Homo sapien
tagggtactcccgacctaaggatga

SEQ ID NO: 86600 - DNA, 25 bp, Homo sapien
catgtagaagtgctagaagcgtccc

SEQ ID NO: 86601 - DNA, 25 bp, Homo sapien
cgaaggccctgtgatcgtcaggtaa

SEQ ID NO: 86602 - DNA, 25 bp, Homo sapien
gcgaaggccctgtgatcgtcaggta

SEQ ID NO: 86603 - DNA, 25 bp, Homo sapien
tgcgaaggccctgtgatcgtcaggt

SEQ ID NO: 86604 - DNA, 25 bp, Homo sapien
ggtgcgaaggccctgtgatcgtcag

SEQ ID NO: 86605 - DNA, 25 bp, Homo sapien
taccacgcagttcttgatgggaaaa

SEQ ID NO: 86606 - DNA, 25 bp, Homo sapien
tcgttgtctgagatataagtagcac

SEQ ID NO: 86607 - DNA, 25 bp, Homo sapien
acagttctcagctggtagtggtggc

SEQ ID NO: 86608 - DNA, 25 bp, Homo sapien
tagcacacggagcataagaacacac

SEQ ID NO: 86609 - DNA, 25 bp, Homo sapien
cagaaattcgctgtcagccagccaa

SEQ ID NO: 86610 - DNA, 25 bp, Homo sapien
gattactccagttggctaaagaccc

SEQ ID NO: 86611 - DNA, 25 bp, Homo sapien
tcatgcagctaacagacaatgtctg

SEQ ID NO: 86612 - DNA, 25 bp, Homo sapien
gaatgaggccaccactcatgcagct

SEQ ID NO: 86613 - DNA, 25 bp, Homo sapien
caaccacatctgagacagccaatga

SEQ ID NO: 86614 - DNA, 25 bp, Homo sapien
aaccacatctgagacagccaatgag

SEQ ID NO: 86615 - DNA, 25 bp, Homo sapien
cagccaatgagggatcagaatccaa

SEQ ID NO: 86616 - DNA, 25 bp, Homo sapien
gacagccaatgagggatcagaatcc

SEQ ID NO: 86617 - DNA, 25 bp, Homo sapien
catcaagccatgggtcatgcccaca

SEQ ID NO: 86618 - DNA, 25 bp, Homo sapien
atcaagccatgggtcatgcccacag

SEQ ID NO: 86619 - DNA, 25 bp, Homo sapien
gagcctttagccacaagaagagaaa

SEQ ID NO: 86620 - DNA, 25 bp, Homo sapien
tacccaagtgtagcagggaatagag

SEQ ID NO: 86621 - DNA, 25 bp, Homo sapien
ggtaagcctgacaatgtcttgcccc

SEQ ID NO: 86622 - DNA, 25 bp, Homo sapien
agtaactttgtctcccctaatgcca

SEQ ID NO: 86623 - DNA, 25 bp, Homo sapien
tgaataaatccctccgtgtgccagc

SEQ ID NO: 86624 - DNA, 25 bp, Homo sapien
tcagagaagtcgcactgttggacaa

SEQ ID NO: 86625 - DNA, 25 bp, Homo sapien
ttactggttcgatgtgctggaagcc

SEQ ID NO: 86626 - DNA, 25 bp, Homo sapien
tctgctggctgctcaacgtgattca

SEQ ID NO: 86627 - DNA, 25 bp, Homo sapien
cctcgtgaagtgaactagtaggtga

SEQ ID NO: 86628 - DNA, 25 bp, Homo sapien
gtgggttggcactatactgagttcc

SEQ ID NO: 86629 - DNA, 25 bp, Homo sapien
catcaattgtaacaggtgggttggc

SEQ ID NO: 86630 - DNA, 25 bp, Homo sapien
ggtcaactggctatgccccatcaag

SEQ ID NO: 86631 - DNA, 25 bp, Homo sapien
aacctcaccaaaagtggcattagga

SEQ ID NO: 86632 - DNA, 25 bp, Homo sapien
catggaggccacaatttttgaaacc

SEQ ID NO: 86633 - DNA, 25 bp, Homo sapien
aagcatatgctgaaactggtttctg

SEQ ID NO: 86634 - DNA, 25 bp, Homo sapien
ctccaagactatcccacatggaggc

SEQ ID NO: 86635 - DNA, 25 bp, Homo sapien
ctgacactcctggttgtctttgtaa

SEQ ID NO: 86636 - DNA, 25 bp, Homo sapien
actcctggttgtctttgtaagcagc

SEQ ID NO: 86637 - DNA, 25 bp, Homo sapien
agccagtgccttcagatactctttc

SEQ ID NO: 86638 - DNA, 25 bp, Homo sapien
tgtctttgtaagcagccagtgcctt

SEQ ID NO: 86639 - DNA, 25 bp, Homo sapien
tagtagctgtactggtttggcctag

SEQ ID NO: 86640 - DNA, 25 bp, Homo sapien
ggatagtagctgtactggtttggcc

SEQ ID NO: 86641 - DNA, 25 bp, Homo sapien
tagctgtactggtttggcctagttg

SEQ ID NO: 86642 - DNA, 25 bp, Homo sapien
gatagtagctgtactggtttggcct

SEQ ID NO: 86643 - DNA, 25 bp, Homo sapien
tggtgggactaaggtagtctgcatt

SEQ ID NO: 86644 - DNA, 25 bp, Homo sapien
cagttggtgggactaaggtagtctg

SEQ ID NO: 86645 - DNA, 25 bp, Homo sapien
gttcataggccgctcaggactactt

SEQ ID NO: 86646 - DNA, 25 bp, Homo sapien
caggactactttccacagttggtgg

SEQ ID NO: 86647 - DNA, 25 bp, Homo sapien
tcaggaactacatctgtgatcatct

SEQ ID NO: 86648 - DNA, 25 bp, Homo sapien
ctcaggaactacatctgtgatcatc

SEQ ID NO: 86649 - DNA, 25 bp, Homo sapien
ggaactacatctgtgatcatctcac

SEQ ID NO: 86650 - DNA, 25 bp, Homo sapien
caggaactacatctgtgatcatctc

SEQ ID NO: 86651 - DNA, 25 bp, Homo sapien
aggagacccactcaccaattcaaca

SEQ ID NO: 86652 - DNA, 25 bp, Homo sapien
gtcccagtccttactcacaatggga

SEQ ID NO: 86653 - DNA, 25 bp, Homo sapien
cccagtccttactcacaatgggagg

SEQ ID NO: 86654 - DNA, 25 bp, Homo sapien
ggagacccactcaccaattcaacat

SEQ ID NO: 86655 - DNA, 25 bp, Homo sapien
taaggtaaggtgacactgagatgct

SEQ ID NO: 86656 - DNA, 25 bp, Homo sapien
ggttcccagataatttcctacagca

SEQ ID NO: 86657 - DNA, 25 bp, Homo sapien
tatgtttcccagtagaattgaccag

SEQ ID NO: 86658 - DNA, 25 bp, Homo sapien
tctagtagaccagatacagcaacct

SEQ ID NO: 86659 - DNA, 25 bp, Homo sapien
gtgtttgaatttctagaggctaccc

SEQ ID NO: 86660 - DNA, 25 bp, Homo sapien
actgtgtttgaatttctagaggcta

SEQ ID NO: 86661 - DNA, 25 bp, Homo sapien
tgtgtttgaatttctagaggctacc

SEQ ID NO: 86662 - DNA, 25 bp, Homo sapien
ctgtgtttgaatttctagaggctac

SEQ ID NO: 86663 - DNA, 25 bp, Homo sapien
gtgaaacatgaacagccatcatggg

SEQ ID NO: 86664 - DNA, 25 bp, Homo sapien
ggtgaaacatgaacagccatcatgg

SEQ ID NO: 86665 - DNA, 25 bp, Homo sapien
tgaaacatgaacagccatcatgggt

SEQ ID NO: 86666 - DNA, 25 bp, Homo sapien
gaaacatgaacagccatcatgggtt

SEQ ID NO: 86667 - DNA, 25 bp, Homo sapien
tcagtggccctgctccatagcctgg

SEQ ID NO: 86668 - DNA, 25 bp, Homo sapien
cagtggccctgctccatagcctggc

SEQ ID NO: 86669 - DNA, 25 bp, Homo sapien
aaagcatctccagattacagcaaat

SEQ ID NO: 86670 - DNA, 25 bp, Homo sapien
gtaaaaagcatctccagattacagc

SEQ ID NO: 86671 - DNA, 25 bp, Homo sapien
cgcttatggttgaaagtaaaaagca

SEQ ID NO: 86672 - DNA, 25 bp, Homo sapien
aaaaagcatctccagattacagcaa

SEQ ID NO: 86673 - DNA, 25 bp, Homo sapien
gtcctatgacaattataccaacaag

SEQ ID NO: 86674 - DNA, 25 bp, Homo sapien
ttttaggcaagtcctatgacaatta

SEQ ID NO: 86675 - DNA, 25 bp, Homo sapien
tatgacaattataccaacaagtttc

SEQ ID NO: 86676 - DNA, 25 bp, Homo sapien
ggcaagtcctatgacaattatacca

SEQ ID NO: 86677 - DNA, 25 bp, Homo sapien
ggactatcatgctgtaaacttctgc

SEQ ID NO: 86678 - DNA, 25 bp, Homo sapien
tgtagcccagtatgcccatgttgaa

SEQ ID NO: 86679 - DNA, 25 bp, Homo sapien
tttaaaatggatgcacacagtggca

SEQ ID NO: 86680 - DNA, 25 bp, Homo sapien
taactcagataaggatggtaactgc

SEQ ID NO: 86681 - DNA, 25 bp, Homo sapien
gaaagactatctcctggcactcgca

SEQ ID NO: 86682 - DNA, 25 bp, Homo sapien
gaaactcaacaggttctaggaccca

SEQ ID NO: 86683 - DNA, 25 bp, Homo sapien
tgcacggttcaagcaaaggtaccca

SEQ ID NO: 86684 - DNA, 25 bp, Homo sapien
tacactgtttcaggatcacccttgg

SEQ ID NO: 86685 - DNA, 25 bp, Homo sapien
aacataatagaaagggctagaattg

SEQ ID NO: 86686 - DNA, 25 bp, Homo sapien
taaacataatagaaagggctagaat

SEQ ID NO: 86687 - DNA, 25 bp, Homo sapien
ataaacataatagaaagggctagaa

SEQ ID NO: 86688 - DNA, 25 bp, Homo sapien
cataatagaaagggctagaattgca

SEQ ID NO: 86689 - DNA, 25 bp, Homo sapien
gcccaattcaataggtggagcacaa

SEQ ID NO: 86690 - DNA, 25 bp, Homo sapien
gggtgaagacaaatcaactgcaacg

SEQ ID NO: 86691 - DNA, 25 bp, Homo sapien
tgcaacgcatcattcggacaggccg

SEQ ID NO: 86692 - DNA, 25 bp, Homo sapien
tatgccccacaggtatgaacgggta

SEQ ID NO: 86693 - DNA, 25 bp, Homo sapien
tacacagagtgtcggaggtgattcc

SEQ ID NO: 86694 - DNA, 25 bp, Homo sapien
aactgttggatctacatctggagca

SEQ ID NO: 86695 - DNA, 25 bp, Homo sapien
tgcttgcatggattctgaggcccct

SEQ ID NO: 86696 - DNA, 25 bp, Homo sapien
gcttgccttccagtggtaaaacagg

SEQ ID NO: 86697 - DNA, 25 bp, Homo sapien
tgaactcttcagcatcggaaccagc

SEQ ID NO: 86698 - DNA, 25 bp, Homo sapien
gcgtgcagaacaggactcgactaca

SEQ ID NO: 86699 - DNA, 25 bp, Homo sapien
tgattgaggtaaagcgaggtctcct

SEQ ID NO: 86700 - DNA, 25 bp, Homo sapien
gaggtctcctacaagatgatgcaca

SEQ ID NO: 86701 - DNA, 25 bp, Homo sapien
aaagaatattggatcccagcctagg

SEQ ID NO: 86702 - DNA, 25 bp, Homo sapien
tagatctacggaatccagaggcagc

SEQ ID NO: 86703 - DNA, 25 bp, Homo sapien
tagagaagaagttgctacaccacct

SEQ ID NO: 86704 - DNA, 25 bp, Homo sapien
tgttataggtaacactgttggcccc

SEQ ID NO: 86705 - DNA, 25 bp, Homo sapien
cctctccgtcttgtaatgagttgta

SEQ ID NO: 86706 - DNA, 25 bp, Homo sapien
tccgtcttgtaatgagttgtagtat

SEQ ID NO: 86707 - DNA, 25 bp, Homo sapien
cctccctgcctctccgtcttgtaat

SEQ ID NO: 86708 - DNA, 25 bp, Homo sapien
tgtaatgagttgtagtatttactct

SEQ ID NO: 86709 - DNA, 25 bp, Homo sapien
tctgtgagggagtcaaaagctatct

SEQ ID NO: 86710 - DNA, 25 bp, Homo sapien
cccattccccatatcatagctgagg

SEQ ID NO: 86711 - DNA, 25 bp, Homo sapien
cctttaagatatagcttccacctgg

SEQ ID NO: 86712 - DNA, 25 bp, Homo sapien
tgtggaactatgctgaacacccctc

SEQ ID NO: 86713 - DNA, 25 bp, Homo sapien
gtttctcattgttgggctgaactga

SEQ ID NO: 86714 - DNA, 25 bp, Homo sapien
gctgaactgagagccgatcagagct

SEQ ID NO: 86715 - DNA, 25 bp, Homo sapien
actgagagccgatcagagctcccag

SEQ ID NO: 86716 - DNA, 25 bp, Homo sapien
gaactgagagccgatcagagctccc

SEQ ID NO: 86717 - DNA, 25 bp, Homo sapien
taagtaacgtcctcagacctgaaga

SEQ ID NO: 86718 - DNA, 25 bp, Homo sapien
tcagacctgaagaccgtctcttcgg

SEQ ID NO: 86719 - DNA, 25 bp, Homo sapien
ggtctttgtgccgttgctaagtaac

SEQ ID NO: 86720 - DNA, 25 bp, Homo sapien
gaattggataaacgtgaaggctccc

SEQ ID NO: 86721 - DNA, 25 bp, Homo sapien
cagcggaaaccccaacagttaatct

SEQ ID NO: 86722 - DNA, 25 bp, Homo sapien
ccgggaatgtctcggcgaaagcagc

SEQ ID NO: 86723 - DNA, 25 bp, Homo sapien
tcggactgcgaaggtcccagcgcgt

SEQ ID NO: 86724 - DNA, 25 bp, Homo sapien
atgtctcggcgaaagcagcggaaac

SEQ ID NO: 86725 - DNA, 25 bp, Homo sapien
gacaacactcagtctgaatgaccct

SEQ ID NO: 86726 - DNA, 25 bp, Homo sapien
catcttctgctgaatgaactctgaa

SEQ ID NO: 86727 - DNA, 25 bp, Homo sapien
aaaagaaacaccagacaacactcag

SEQ ID NO: 86728 - DNA, 25 bp, Homo sapien
gtctgaatgaccctccttgatcttc

SEQ ID NO: 86729 - DNA, 25 bp, Homo sapien
ggcaagccggggcaatcctggggtc

SEQ ID NO: 86730 - DNA, 25 bp, Homo sapien
caagccggggcaatcctggggtcga

SEQ ID NO: 86731 - DNA, 25 bp, Homo sapien
gccggggcaatcctggggtcgagca

SEQ ID NO: 86732 - DNA, 25 bp, Homo sapien
ccggggcaatcctggggtcgagcat

SEQ ID NO: 86733 - DNA, 25 bp, Homo sapien
tcatcgaaggctgcttccttgacgg

SEQ ID NO: 86734 - DNA, 25 bp, Homo sapien
tccatcatcgaaggctgcttccttg

SEQ ID NO: 86735 - DNA, 25 bp, Homo sapien
atcgaaggctgcttccttgacggcc

SEQ ID NO: 86736 - DNA, 25 bp, Homo sapien
catcatcgaaggctgcttccttgac

SEQ ID NO: 86737 - DNA, 25 bp, Homo sapien
tttccgtattttgtactcatcgttg

SEQ ID NO: 86738 - DNA, 25 bp, Homo sapien
cgtattttgtactcatcgttgatca

SEQ ID NO: 86739 - DNA, 25 bp, Homo sapien
tccgtattttgtactcatcgttgat

SEQ ID NO: 86740 - DNA, 25 bp, Homo sapien
ccgtattttgtactcatcgttgatc

SEQ ID NO: 86741 - DNA, 25 bp, Homo sapien
gaagtaaagatacgtctgggactct

SEQ ID NO: 86742 - DNA, 25 bp, Homo sapien
tgcggcatgtaacgggccctattta

SEQ ID NO: 86743 - DNA, 25 bp, Homo sapien
ggtctactggtcttcatgtgcatgc

SEQ ID NO: 86744 - DNA, 25 bp, Homo sapien
cacccactgttagggctaatggtat

SEQ ID NO: 86745 - DNA, 25 bp, Homo sapien
aaatggagatgcatcaaacatcaaa

SEQ ID NO: 86746 - DNA, 25 bp, Homo sapien
tcagcccagggctaccattgtgcac

SEQ ID NO: 86747 - DNA, 25 bp, Homo sapien
tactttctgaagtcaaggaacgcgg

SEQ ID NO: 86748 - DNA, 25 bp, Homo sapien
catctggaagaggattgcggtcagc

SEQ ID NO: 86749 - DNA, 25 bp, Homo sapien
cggtcagctttttgaagttcagcca

SEQ ID NO: 86750 - DNA, 25 bp, Homo sapien
ccaactttccccaagattttgctgc

SEQ ID NO: 86751 - DNA, 25 bp, Homo sapien
accaactttccccaagattttgctg

SEQ ID NO: 86752 - DNA, 25 bp, Homo sapien
ctcatctgggaaatgtttcaaggta

SEQ ID NO: 86753 - DNA, 25 bp, Homo sapien
gaaatgtttcaaggtaggattccaa

SEQ ID NO: 86754 - DNA, 25 bp, Homo sapien
tcttcaaatctcttgacagtgtttt

SEQ ID NO: 86755 - DNA, 25 bp, Homo sapien
taggattccaaggaggtggatagtt

SEQ ID NO: 86756 - DNA, 25 bp, Homo sapien
ggaaatgaataagccagcccaggac

SEQ ID NO: 86757 - DNA, 25 bp, Homo sapien
ctgggctgccccgtagaatcatcaa

SEQ ID NO: 86758 - DNA, 25 bp, Homo sapien
gctgccccgtagaatcatcaaggac

SEQ ID NO: 86759 - DNA, 25 bp, Homo sapien
ggagtggagccggagacgggaccag

SEQ ID NO: 86760 - DNA, 25 bp, Homo sapien
ctgagctaaaccgaagagccaggtc

SEQ ID NO: 86761 - DNA, 25 bp, Homo sapien
gagctaaaccgaagagccaggtcac

SEQ ID NO: 86762 - DNA, 25 bp, Homo sapien
agctaaaccgaagagccaggtcact

SEQ ID NO: 86763 - DNA, 25 bp, Homo sapien
tgagctaaaccgaagagccaggtca

SEQ ID NO: 86764 - DNA, 25 bp, Homo sapien
ctcccatcttcatggaaacatagag

SEQ ID NO: 86765 - DNA, 25 bp, Homo sapien
tctgctgcaggataccatgagcctg

SEQ ID NO: 86766 - DNA, 25 bp, Homo sapien
atctgctgcaggataccatgagcct

SEQ ID NO: 86767 - DNA, 25 bp, Homo sapien
tagagaaggaaagctccccacatct

SEQ ID NO: 86768 - DNA, 25 bp, Homo sapien
tcagagggctgctcaaggctttgtc

SEQ ID NO: 86769 - DNA, 25 bp, Homo sapien
cccagatgtctggtacgtgcagttt

SEQ ID NO: 86770 - DNA, 25 bp, Homo sapien
tcctgtagaaggaggtaaccataac

SEQ ID NO: 86771 - DNA, 25 bp, Homo sapien
ggacaatggctccttccacagctgt

SEQ ID NO: 86772 - DNA, 25 bp, Homo sapien
ttccatcttccatacgtggaaccac

SEQ ID NO: 86773 - DNA, 25 bp, Homo sapien
catcttccatacgtggaaccacagg

SEQ ID NO: 86774 - DNA, 25 bp, Homo sapien
ccatcttccatacgtggaaccacag

SEQ ID NO: 86775 - DNA, 25 bp, Homo sapien
tcttccatacgtggaaccacaggat

SEQ ID NO: 86776 - DNA, 25 bp, Homo sapien
atgatcttctcttcaccctctaagt

SEQ ID NO: 86777 - DNA, 25 bp, Homo sapien
tgatcttctcttcaccctctaagtc

SEQ ID NO: 86778 - DNA, 25 bp, Homo sapien
cttcaccctctaagtccacagcccc

SEQ ID NO: 86779 - DNA, 25 bp, Homo sapien
tctcttcaccctctaagtccacagc

SEQ ID NO: 86780 - DNA, 25 bp, Homo sapien
cagattgggttgagttttgtcacaa

SEQ ID NO: 86781 - DNA, 25 bp, Homo sapien
tgacagaaggtgaaacttctttttg

SEQ ID NO: 86782 - DNA, 25 bp, Homo sapien
ggatgacagaaggtgaaacttcttt

SEQ ID NO: 86783 - DNA, 25 bp, Homo sapien
gaagcagattgggttgagttttgtc

SEQ ID NO: 86784 - DNA, 25 bp, Homo sapien
tctgctgcaggataccacgagcctg

SEQ ID NO: 86785 - DNA, 25 bp, Homo sapien
atctgctgcaggataccacgagcct

SEQ ID NO: 86786 - DNA, 25 bp, Homo sapien
cccagatgtctggtacgtgcagttg

SEQ ID NO: 86787 - DNA, 25 bp, Homo sapien
tggtcaatgttttgtcctgtagtgc

SEQ ID NO: 86788 - DNA, 25 bp, Homo sapien
tggacaatggcaccttccgtagctg

SEQ ID NO: 86789 - DNA, 25 bp, Homo sapien
gaacagcccgttgaacccagatgtc

SEQ ID NO: 86790 - DNA, 25 bp, Homo sapien
ttatgttcatgctccccaagtctga

SEQ ID NO: 86791 - DNA, 25 bp, Homo sapien
catcattaggtggagctttagatcc

SEQ ID NO: 86792 - DNA, 25 bp, Homo sapien
aatagtggtcaggatttcaccttcc

SEQ ID NO: 86793 - DNA, 25 bp, Homo sapien
tgcacataatgaagatagcctttcg

SEQ ID NO: 86794 - DNA, 25 bp, Homo sapien
gaagacaaattcagtcactcttgtt

SEQ ID NO: 86795 - DNA, 25 bp, Homo sapien
ttccagcacccggttatcagtgagt

SEQ ID NO: 86796 - DNA, 25 bp, Homo sapien
cccggttatcagtgagtcccaagaa

SEQ ID NO: 86797 - DNA, 25 bp, Homo sapien
tcagtcactcttgtttggtttagac

SEQ ID NO: 86798 - DNA, 25 bp, Homo sapien
ctgagaatgccatgaaaaacagcat

SEQ ID NO: 86799 - DNA, 25 bp, Homo sapien
gagatggttccactattggtcacaa

SEQ ID NO: 86800 - DNA, 25 bp, Homo sapien
gaaggtctgccctagtgagtgaaca

SEQ ID NO: 86801 - DNA, 25 bp, Homo sapien
accatataggaggtgaccacggcca

SEQ ID NO: 86802 - DNA, 25 bp, Homo sapien
ccacagtaaggtagacgaatagtca

SEQ ID NO: 86803 - DNA, 25 bp, Homo sapien
tatatgatttcgtgaaaaaaacttg

SEQ ID NO: 86804 - DNA, 25 bp, Homo sapien
tgagctgcttcatggcactttttac

SEQ ID NO: 86805 - DNA, 25 bp, Homo sapien
ttatgtatatgatttcgtgaaaaaa

SEQ ID NO: 86806 - DNA, 25 bp, Homo sapien
aaaaaacttgtctctgcctgagctg

SEQ ID NO: 86807 - DNA, 25 bp, Homo sapien
ctgggcatggtggcagtctcctgtg

SEQ ID NO: 86808 - DNA, 25 bp, Homo sapien
catggtggcagtctcctgtgatccc

SEQ ID NO: 86809 - DNA, 25 bp, Homo sapien
ctcctgtgatcccagctactcggga

SEQ ID NO: 86810 - DNA, 25 bp, Homo sapien
cctgtgatcccagctactcgggagg

SEQ ID NO: 86811 - DNA, 25 bp, Homo sapien
agagttgaggagaagccctagccac

SEQ ID NO: 86812 - DNA, 25 bp, Homo sapien
agttgaggagaagccctagccacac

SEQ ID NO: 86813 - DNA, 25 bp, Homo sapien
agagagttgaggagaagccctagcc

SEQ ID NO: 86814 - DNA, 25 bp, Homo sapien
gttgaggagaagccctagccacacc

SEQ ID NO: 86815 - DNA, 25 bp, Homo sapien
gaagttgtaagcattggacacagag

SEQ ID NO: 86816 - DNA, 25 bp, Homo sapien
tatcgtccctgctgagaaggctttg

SEQ ID NO: 86817 - DNA, 25 bp, Homo sapien
cacagagtgattacagaagatttcc

SEQ ID NO: 86818 - DNA, 25 bp, Homo sapien
tcttggtgcacatcccgggaagtga

SEQ ID NO: 86819 - DNA, 25 bp, Homo sapien
ggaggaaaattcactaggcatggtg

SEQ ID NO: 86820 - DNA, 25 bp, Homo sapien
tattttctggtccaggtgcattggc

SEQ ID NO: 86821 - DNA, 25 bp, Homo sapien
cacagagagaactcgtgtctacaaa

SEQ ID NO: 86822 - DNA, 25 bp, Homo sapien
tatagtctcacctagtcagaaggct

SEQ ID NO: 86823 - DNA, 25 bp, Homo sapien
ctggaggccagaagttcaaggccgc

SEQ ID NO: 86824 - DNA, 25 bp, Homo sapien
ggccagaagttcaaggccgcagtga

SEQ ID NO: 86825 - DNA, 25 bp, Homo sapien
tggaggccagaagttcaaggccgca

SEQ ID NO: 86826 - DNA, 25 bp, Homo sapien
gaggccagaagttcaaggccgcagt

SEQ ID NO: 86827 - DNA, 25 bp, Homo sapien
tgccctcctacctccaaacaaagga

SEQ ID NO: 86828 - DNA, 25 bp, Homo sapien
aaaggagatcaagaatcagtggcca

SEQ ID NO: 86829 - DNA, 25 bp, Homo sapien
tacttcacataagttagggaactct

SEQ ID NO: 86830 - DNA, 25 bp, Homo sapien
gacaaaatatacagtccaactaagc

SEQ ID NO: 86831 - DNA, 25 bp, Homo sapien
taactaatcacaggccaaaggcgac

SEQ ID NO: 86832 - DNA, 25 bp, Homo sapien
aactacaagggaaggtgaagcacct

SEQ ID NO: 86833 - DNA, 25 bp, Homo sapien
ggtaaacccaaccagatgccaatgg

SEQ ID NO: 86834 - DNA, 25 bp, Homo sapien
ggagaccagtccacataacgtatag

SEQ ID NO: 86835 - DNA, 25 bp, Homo sapien
ctccagctaagctcacggcgggcgg

SEQ ID NO: 86836 - DNA, 25 bp, Homo sapien
ctctgctggagatatggccccaccc

SEQ ID NO: 86837 - DNA, 25 bp, Homo sapien
gcttttggaaatggcccttcctcag

SEQ ID NO: 86838 - DNA, 25 bp, Homo sapien
gaggaaccagcaaccctgtgtcagc

SEQ ID NO: 86839 - DNA, 25 bp, Homo sapien
tcgcaagcatcgagatgggtgcaga

SEQ ID NO: 86840 - DNA, 25 bp, Homo sapien
tcaatgtgaagagcatcgcaagcat

SEQ ID NO: 86841 - DNA, 25 bp, Homo sapien
gagcatcgcaagcatcgagatgggt

SEQ ID NO: 86842 - DNA, 25 bp, Homo sapien
tgtgaagagcatcgcaagcatcgag

SEQ ID NO: 86843 - DNA, 25 bp, Homo sapien
tatttcagaaggaactggaggcctc

SEQ ID NO: 86844 - DNA, 25 bp, Homo sapien
tccagagactgaataggtgcatttc

SEQ ID NO: 86845 - DNA, 25 bp, Homo sapien
ggttatcccctgtgatgtatttcag

SEQ ID NO: 86846 - DNA, 25 bp, Homo sapien
ttcacagtcagaggattcccttcag

SEQ ID NO: 86847 - DNA, 25 bp, Homo sapien
caccgttctcatgtgaaggaacaaa

SEQ ID NO: 86848 - DNA, 25 bp, Homo sapien
catatcctggaagcacaccgttctc

SEQ ID NO: 86849 - DNA, 25 bp, Homo sapien
tatgaccggtgctttgcccagtacc

SEQ ID NO: 86850 - DNA, 25 bp, Homo sapien
taatggtctcaacagggtatgtaac

SEQ ID NO: 86851 - DNA, 25 bp, Homo sapien
attctaggtgcaaactaggacccag

SEQ ID NO: 86852 - DNA, 25 bp, Homo sapien
caaactaggacccaggttctaggct

SEQ ID NO: 86853 - DNA, 25 bp, Homo sapien
caggttctaggctcttttgctgtgt

SEQ ID NO: 86854 - DNA, 25 bp, Homo sapien
ggacccaggttctaggctcttttgc

SEQ ID NO: 86855 - DNA, 25 bp, Homo sapien
ggaacacgatcactctcgccacttg

SEQ ID NO: 86856 - DNA, 25 bp, Homo sapien
tcagggtcaggaacacgatcactct

SEQ ID NO: 86857 - DNA, 25 bp, Homo sapien
gggtcaggaacacgatcactctcgc

SEQ ID NO: 86858 - DNA, 25 bp, Homo sapien
gtcaggaacacgatcactctcgcca

SEQ ID NO: 86859 - DNA, 25 bp, Homo sapien
tgggtggtcttagcaaggctcaaag

SEQ ID NO: 86860 - DNA, 25 bp, Homo sapien
gtggtcttagcaaggctcaaagtac

SEQ ID NO: 86861 - DNA, 25 bp, Homo sapien
tttctgtcggcagggataaacaggg

SEQ ID NO: 86862 - DNA, 25 bp, Homo sapien
cagggaggccacttcgtttgtaact

SEQ ID NO: 86863 - DNA, 25 bp, Homo sapien
tgggaaactgttggtaccacgtgat

SEQ ID NO: 86864 - DNA, 25 bp, Homo sapien
gaataataaatcgtggtccttggct

SEQ ID NO: 86865 - DNA, 25 bp, Homo sapien
ggcagtagtacacagcagtgtcgct

SEQ ID NO: 86866 - DNA, 25 bp, Homo sapien
gaggcagtagtacacagcagtgtcg

SEQ ID NO: 86867 - DNA, 25 bp, Homo sapien
ccacgaggcagtagtacacagcagt

SEQ ID NO: 86868 - DNA, 25 bp, Homo sapien
gtagtacacagcagtgtcgctcagg

SEQ ID NO: 86869 - DNA, 25 bp, Homo sapien
cccacagaggaaaacggcacaggtg

SEQ ID NO: 86870 - DNA, 25 bp, Homo sapien
ttctttctaggctgtgactcccacc

SEQ ID NO: 86871 - DNA, 25 bp, Homo sapien
tttggacttctttctaggctgtgac

SEQ ID NO: 86872 - DNA, 25 bp, Homo sapien
cacagaggaaaacggcacaggtgca

SEQ ID NO: 86873 - DNA, 25 bp, Homo sapien
aaacaggaacgaaaatccagcaaat

SEQ ID NO: 86874 - DNA, 25 bp, Homo sapien
aacaggaacgaaaatccagcaaatg

SEQ ID NO: 86875 - DNA, 25 bp, Homo sapien
ctccaggttcttgcttataccagta

SEQ ID NO: 86876 - DNA, 25 bp, Homo sapien
tgcagtttataacggagctgtctcc

SEQ ID NO: 86877 - DNA, 25 bp, Homo sapien
gagctgtctgtgtaagtgcagttta

SEQ ID NO: 86878 - DNA, 25 bp, Homo sapien
tccctctcggacactcaggaaaaga

SEQ ID NO: 86879 - DNA, 25 bp, Homo sapien
tagatagctgagtccccagtctggg

SEQ ID NO: 86880 - DNA, 25 bp, Homo sapien
ggtcttgtttcatgtccatatttga

SEQ ID NO: 86881 - DNA, 25 bp, Homo sapien
aaaaaatatacgtcagcaactggag

SEQ ID NO: 86882 - DNA, 25 bp, Homo sapien
tctgcaatgcgcagagacagatgtt

SEQ ID NO: 86883 - DNA, 25 bp, Homo sapien
gaaatagagtgtggctttagtccca

SEQ ID NO: 86884 - DNA, 25 bp, Homo sapien
tacaggatacaggtgcctgagaagc

SEQ ID NO: 86885 - DNA, 25 bp, Homo sapien
cccaggtgcaggtttgggtacagga

SEQ ID NO: 86886 - DNA, 25 bp, Homo sapien
cagcaaaatccctgacttaaaggta

SEQ ID NO: 86887 - DNA, 25 bp, Homo sapien
tgacatcagtgggcaagcacatgcc

SEQ ID NO: 86888 - DNA, 25 bp, Homo sapien
ctgacatcagtgggcaagcacatgc

SEQ ID NO: 86889 - DNA, 25 bp, Homo sapien
gacatcagtgggcaagcacatgcca

SEQ ID NO: 86890 - DNA, 25 bp, Homo sapien
acatcagtgggcaagcacatgccat

SEQ ID NO: 86891 - DNA, 25 bp, Homo sapien
gattcactgacagcatagggctgtc

SEQ ID NO: 86892 - DNA, 25 bp, Homo sapien
taggagccttgaatatggcagacaa

SEQ ID NO: 86893 - DNA, 25 bp, Homo sapien
tttgcacaagttggcgtgaacaaag

SEQ ID NO: 86894 - DNA, 25 bp, Homo sapien
tgccagatgactctcccttctcaga

SEQ ID NO: 86895 - DNA, 25 bp, Homo sapien
tgcagctctgccagtactccaagac

SEQ ID NO: 86896 - DNA, 25 bp, Homo sapien
ctatgccaatggagccaggttttgg

SEQ ID NO: 86897 - DNA, 25 bp, Homo sapien
tccaagactcaacactggtttgatg

SEQ ID NO: 86898 - DNA, 25 bp, Homo sapien
ctactatgccaatggagccaggttt

SEQ ID NO: 86899 - DNA, 25 bp, Homo sapien
gcagaagagatgacatatcgttttg

SEQ ID NO: 86900 - DNA, 25 bp, Homo sapien
agagatgacatatcgttttggggtt

SEQ ID NO: 86901 - DNA, 25 bp, Homo sapien
agaagagatgacatatcgttttggg

SEQ ID NO: 86902 - DNA, 25 bp, Homo sapien
gatgacatatcgttttggggttgta

SEQ ID NO: 86903 - DNA, 25 bp, Homo sapien
aggagcttcctcaatacgatgaccc

SEQ ID NO: 86904 - DNA, 25 bp, Homo sapien
gacccttagacataaccagtgctgg

SEQ ID NO: 86905 - DNA, 25 bp, Homo sapien
ctcaatacgatgacccttagacata

SEQ ID NO: 86906 - DNA, 25 bp, Homo sapien
tacgatgacccttagacataaccag

SEQ ID NO: 86907 - DNA, 25 bp, Homo sapien
ctgcgccggatacggtgatggtttc

SEQ ID NO: 86908 - DNA, 25 bp, Homo sapien
gccggatacggtgatggtttctcgt

SEQ ID NO: 86909 - DNA, 25 bp, Homo sapien
cgccggatacggtgatggtttctcg

SEQ ID NO: 86910 - DNA, 25 bp, Homo sapien
gcgccggatacggtgatggtttctc

SEQ ID NO: 86911 - DNA, 25 bp, Homo sapien
tttttaagacgctgctaaggtctgt

SEQ ID NO: 86912 - DNA, 25 bp, Homo sapien
tcctcattacagatgatgcggcgcc

SEQ ID NO: 86913 - DNA, 25 bp, Homo sapien
gatctctgggctttttaagacgctg

SEQ ID NO: 86914 - DNA, 25 bp, Homo sapien
cctcattacagatgatgcggcgccc

SEQ ID NO: 86915 - DNA, 25 bp, Homo sapien
gaatcttcttgcaaggtgctcgaag

SEQ ID NO: 86916 - DNA, 25 bp, Homo sapien
tgttccggcgcatgatctgtgtgta

SEQ ID NO: 86917 - DNA, 25 bp, Homo sapien
gatgaatcttcttgcaaggtgctcg

SEQ ID NO: 86918 - DNA, 25 bp, Homo sapien
gtgttccggcgcatgatctgtgtgt

SEQ ID NO: 86919 - DNA, 25 bp, Homo sapien
tccacccagagtttgtgattcctgg

SEQ ID NO: 86920 - DNA, 25 bp, Homo sapien
ccacccagagtttgtgattcctggc

SEQ ID NO: 86921 - DNA, 25 bp, Homo sapien
ttatccacccagagtttgtgattcc

SEQ ID NO: 86922 - DNA, 25 bp, Homo sapien
gccggctgctgccttatccacccag

SEQ ID NO: 86923 - DNA, 25 bp, Homo sapien
taacatcaacaatggccttctttcc

SEQ ID NO: 86924 - DNA, 25 bp, Homo sapien
ttctgcttcttaacatcaacaatgg

SEQ ID NO: 86925 - DNA, 25 bp, Homo sapien
caggctccttttcctccgtagtaga

SEQ ID NO: 86926 - DNA, 25 bp, Homo sapien
catctgatctggcttctagtgctgc

SEQ ID NO: 86927 - DNA, 25 bp, Homo sapien
ctttattcaaaagaagctgttcaaa

SEQ ID NO: 86928 - DNA, 25 bp, Homo sapien
gaagctgttcaaaatgatttgactt

SEQ ID NO: 86929 - DNA, 25 bp, Homo sapien
gatttgacttttatggaataatcaa

SEQ ID NO: 86930 - DNA, 25 bp, Homo sapien
ttaggtctttattcaaaagaagctg

SEQ ID NO: 86931 - DNA, 25 bp, Homo sapien
tcagcgagaattcaaacgagtgaag

SEQ ID NO: 86932 - DNA, 25 bp, Homo sapien
taataatggaacgtgctcccaggtc

SEQ ID NO: 86933 - DNA, 25 bp, Homo sapien
taagtaacaagtccagaagaatgct

SEQ ID NO: 86934 - DNA, 25 bp, Homo sapien
tatggctgaattctaggaaactttc

SEQ ID NO: 86935 - DNA, 25 bp, Homo sapien
aggaatgactccattcgtctcccca

SEQ ID NO: 86936 - DNA, 25 bp, Homo sapien
tgtggcctgaaatgtagacccagcc

SEQ ID NO: 86937 - DNA, 25 bp, Homo sapien
tcgtctccccaaatgtggcctgaaa

SEQ ID NO: 86938 - DNA, 25 bp, Homo sapien
agacccagccttctcagccaaaaag

SEQ ID NO: 86939 - DNA, 25 bp, Homo sapien
tcttcctggatcttgtcggtaccac

SEQ ID NO: 86940 - DNA, 25 bp, Homo sapien
tcggtaccactgtaagtatgctggg

SEQ ID NO: 86941 - DNA, 25 bp, Homo sapien
tgttcagggcctcggaattctgttc

SEQ ID NO: 86942 - DNA, 25 bp, Homo sapien
tatgagtagcaagaaaacagggcct

SEQ ID NO: 86943 - DNA, 25 bp, Homo sapien
tgtttaagggtggtatcaaaggtga

SEQ ID NO: 86944 - DNA, 25 bp, Homo sapien
ctgtttaagggtggtatcaaaggtg

SEQ ID NO: 86945 - DNA, 25 bp, Homo sapien
ataattaggacaggtctccgcatct

SEQ ID NO: 86946 - DNA, 25 bp, Homo sapien
aatataattaggacaggtctccgca

SEQ ID NO: 86947 - DNA, 25 bp, Homo sapien
tataattaggacaggtctccgcatc

SEQ ID NO: 86948 - DNA, 25 bp, Homo sapien
atataattaggacaggtctccgcat

SEQ ID NO: 86949 - DNA, 25 bp, Homo sapien
cccagaaaatgagggctgtgctcca

SEQ ID NO: 86950 - DNA, 25 bp, Homo sapien
aatgagggctgtgctccacctggtt

SEQ ID NO: 86951 - DNA, 25 bp, Homo sapien
gaaaatgagggctgtgctccacctg

SEQ ID NO: 86952 - DNA, 25 bp, Homo sapien
gaggcaacgtctccctgctggggtc

SEQ ID NO: 86953 - DNA, 25 bp, Homo sapien
aaacgactgacagagtacgtgcagc

SEQ ID NO: 86954 - DNA, 25 bp, Homo sapien
gactgacagagtacgtgcagctcat

SEQ ID NO: 86955 - DNA, 25 bp, Homo sapien
ctgcaaattgttaaaacgactgaca

SEQ ID NO: 86956 - DNA, 25 bp, Homo sapien
ttgttaaaacgactgacagagtacg

SEQ ID NO: 86957 - DNA, 25 bp, Homo sapien
tttggatacaggttgcaggtgccta

SEQ ID NO: 86958 - DNA, 25 bp, Homo sapien
tatggtacttctacccagctgcatg

SEQ ID NO: 86959 - DNA, 25 bp, Homo sapien
tcagggcccctattgctgatgcttc

SEQ ID NO: 86960 - DNA, 25 bp, Homo sapien
caggctgcacggctgtaatgtacaa

SEQ ID NO: 86961 - DNA, 25 bp, Homo sapien
tatctcctcccctctctggtcatac

SEQ ID NO: 86962 - DNA, 25 bp, Homo sapien
cctttatctcctcccctctctggtc

SEQ ID NO: 86963 - DNA, 25 bp, Homo sapien
tttatctcctcccctctctggtcat

SEQ ID NO: 86964 - DNA, 25 bp, Homo sapien
ttatctcctcccctctctggtcata

SEQ ID NO: 86965 - DNA, 25 bp, Homo sapien
aaagatacatgagtcaaatgaacag

SEQ ID NO: 86966 - DNA, 25 bp, Homo sapien
tgaagggtggcctgataaaagatac

SEQ ID NO: 86967 - DNA, 25 bp, Homo sapien
taaggcacaaagacggtctttgtga

SEQ ID NO: 86968 - DNA, 25 bp, Homo sapien
acaaagacggtctttgtgaagggtg

SEQ ID NO: 86969 - DNA, 25 bp, Homo sapien
tcgctggacctggtgaaaattccat

SEQ ID NO: 86970 - DNA, 25 bp, Homo sapien
aatcgctggacctggtgaaaattcc

SEQ ID NO: 86971 - DNA, 25 bp, Homo sapien
gtaatcgctggacctggtgaaaatt

SEQ ID NO: 86972 - DNA, 25 bp, Homo sapien
taatcgctggacctggtgaaaattc

SEQ ID NO: 86973 - DNA, 25 bp, Homo sapien
caatagggagagctccttctgagaa

SEQ ID NO: 86974 - DNA, 25 bp, Homo sapien
ccatggtggcataggaacagtttac

SEQ ID NO: 86975 - DNA, 25 bp, Homo sapien
cctttgcagttctcaagaggagctg

SEQ ID NO: 86976 - DNA, 25 bp, Homo sapien
cagactttcaccaggatattgaaca

SEQ ID NO: 86977 - DNA, 25 bp, Homo sapien
tagagtcgatgtaggtgatctttac

SEQ ID NO: 86978 - DNA, 25 bp, Homo sapien
atattcacttcccgttcttctgctg

SEQ ID NO: 86979 - DNA, 25 bp, Homo sapien
gctgtgtccttagagtcgatgtagg

SEQ ID NO: 86980 - DNA, 25 bp, Homo sapien
tgtaggtgatctttacatctgctag

SEQ ID NO: 86981 - DNA, 25 bp, Homo sapien
cagcactggtatgagcaacaggagc

SEQ ID NO: 86982 - DNA, 25 bp, Homo sapien
ctgcaggcgtctctttggaaattct

SEQ ID NO: 86983 - DNA, 25 bp, Homo sapien
ccccagcactggtatgagcaacagg

SEQ ID NO: 86984 - DNA, 25 bp, Homo sapien
ctgtggaaacactgcaggcgtctct

SEQ ID NO: 86985 - DNA, 25 bp, Homo sapien
tgtatcagtgaaaatagtgcagact

SEQ ID NO: 86986 - DNA, 25 bp, Homo sapien
ttgtatcagtgaaaatagtgcagac

SEQ ID NO: 86987 - DNA, 25 bp, Homo sapien
agagagaattacgtggtggttatgc

SEQ ID NO: 86988 - DNA, 25 bp, Homo sapien
agagaattacgtggtggttatgctg

SEQ ID NO: 86989 - DNA, 25 bp, Homo sapien
ttcagagagaattacgtggtggtta

SEQ ID NO: 86990 - DNA, 25 bp, Homo sapien
gaattacgtggtggttatgctggct

SEQ ID NO: 86991 - DNA, 25 bp, Homo sapien
tgttgaccagggtactggacatacc

SEQ ID NO: 86992 - DNA, 25 bp, Homo sapien
cagacactgtggcattcacggcaca

SEQ ID NO: 86993 - DNA, 25 bp, Homo sapien
gatgcctttaaccagtggatcccct

SEQ ID NO: 86994 - DNA, 25 bp, Homo sapien
tggatcccctgaaaagtacttgagg

SEQ ID NO: 86995 - DNA, 25 bp, Homo sapien
aaaatctttcagaggcagttattct

SEQ ID NO: 86996 - DNA, 25 bp, Homo sapien
ctgtactgtggaataagaacatcat

SEQ ID NO: 86997 - DNA, 25 bp, Homo sapien
ctgagcatctctgtactgtggaata

SEQ ID NO: 86998 - DNA, 25 bp, Homo sapien
tctgtactgtggaataagaacatca

SEQ ID NO: 86999 - DNA, 25 bp, Homo sapien
gcatctctgtactgtggaataagaa

SEQ ID NO: 87000 - DNA, 25 bp, Homo sapien
agaggccatggagcagaaggcagtg

SEQ ID NO: 87001 - DNA, 25 bp, Homo sapien
gaggccatggagcagaaggcagtga

SEQ ID NO: 87002 - DNA, 25 bp, Homo sapien
tagaggccatggagcagaaggcagt

SEQ ID NO: 87003 - DNA, 25 bp, Homo sapien
ggccatggagcagaaggcagtgaga

SEQ ID NO: 87004 - DNA, 25 bp, Homo sapien
gctgcagtagtttgcagaacccaag

SEQ ID NO: 87005 - DNA, 25 bp, Homo sapien
agctgcggaggacaccgtgcctttg

SEQ ID NO: 87006 - DNA, 25 bp, Homo sapien
gaaatggatgtcgcagaggaagaag

SEQ ID NO: 87007 - DNA, 25 bp, Homo sapien
aggaagaagaatggcggccgccaga

SEQ ID NO: 87008 - DNA, 25 bp, Homo sapien
tgtgtcagatctctgtgatcaagct

SEQ ID NO: 87009 - DNA, 25 bp, Homo sapien
cctgtgtcagatctctgtgatcaag

SEQ ID NO: 87010 - DNA, 25 bp, Homo sapien
tgtcagatctctgtgatcaagctgc

SEQ ID NO: 87011 - DNA, 25 bp, Homo sapien
tcagatctctgtgatcaagctgcat

SEQ ID NO: 87012 - DNA, 25 bp, Homo sapien
gaatagtgcaatcgctggtcctgga

SEQ ID NO: 87013 - DNA, 25 bp, Homo sapien
tagtgcaatcgctggtcctggagaa

SEQ ID NO: 87014 - DNA, 25 bp, Homo sapien
taagaatagtgcaatcgctggtcct

SEQ ID NO: 87015 - DNA, 25 bp, Homo sapien
ttaagaatagtgcaatcgctggtcc

SEQ ID NO: 87016 - DNA, 25 bp, Homo sapien
gatcttagctgtacccgttagagaa

SEQ ID NO: 87017 - DNA, 25 bp, Homo sapien
tataccaagttaccttagacgtgat

SEQ ID NO: 87018 - DNA, 25 bp, Homo sapien
ttagacgtgatcttagctgtacccg

SEQ ID NO: 87019 - DNA, 25 bp, Homo sapien
gttaccttagacgtgatcttagctg

SEQ ID NO: 87020 - DNA, 25 bp, Homo sapien
gtggtttcataggagcagttcacaa

SEQ ID NO: 87021 - DNA, 25 bp, Homo sapien
cagttcacaatcagggaatcccctt

SEQ ID NO: 87022 - DNA, 25 bp, Homo sapien
tcccttgtcattggccttcatggct

SEQ ID NO: 87023 - DNA, 25 bp, Homo sapien
tctccaggatattggacataccaaa

SEQ ID NO: 87024 - DNA, 25 bp, Homo sapien
gcggagtctgactcttgaactgagt

SEQ ID NO: 87025 - DNA, 25 bp, Homo sapien
aagtacacagcggagtctgactctt

SEQ ID NO: 87026 - DNA, 25 bp, Homo sapien
cagaagtacacagcggagtctgact

SEQ ID NO: 87027 - DNA, 25 bp, Homo sapien
cacagcggagtctgactcttgaact

SEQ ID NO: 87028 - DNA, 25 bp, Homo sapien
gagtttgtgctcagcttcccctgca

SEQ ID NO: 87029 - DNA, 25 bp, Homo sapien
gtttgtgctcagcttcccctgcagt

SEQ ID NO: 87030 - DNA, 25 bp, Homo sapien
ttgtgctcagcttcccctgcagtcc

SEQ ID NO: 87031 - DNA, 25 bp, Homo sapien
tcagagtttgtgctcagcttcccct

SEQ ID NO: 87032 - DNA, 25 bp, Homo sapien
tattctgcagagatctgctcccaga

SEQ ID NO: 87033 - DNA, 25 bp, Homo sapien
tctgcagagatctgctcccagaagt

SEQ ID NO: 87034 - DNA, 25 bp, Homo sapien
tttattctgcagagatctgctccca

SEQ ID NO: 87035 - DNA, 25 bp, Homo sapien
gcagagatctgctcccagaagttga

SEQ ID NO: 87036 - DNA, 25 bp, Homo sapien
aaaatcaccaagaaggtcgtcagat

SEQ ID NO: 87037 - DNA, 25 bp, Homo sapien
caccaagaaggtcgtcagatgcttt

SEQ ID NO: 87038 - DNA, 25 bp, Homo sapien
caagaaggtcgtcagatgctttttc

SEQ ID NO: 87039 - DNA, 25 bp, Homo sapien
aatcaccaagaaggtcgtcagatgc

SEQ ID NO: 87040 - DNA, 25 bp, Homo sapien
tccaggatgatcagggactgaggac

SEQ ID NO: 87041 - DNA, 25 bp, Homo sapien
gggctcactgtataattgcattgaa

SEQ ID NO: 87042 - DNA, 25 bp, Homo sapien
ttataccaccttaagttgctgaagg

SEQ ID NO: 87043 - DNA, 25 bp, Homo sapien
caggacctctcccagtatcttgctt

SEQ ID NO: 87044 - DNA, 25 bp, Homo sapien
cacacagatgtaggaggctgaatcg

SEQ ID NO: 87045 - DNA, 25 bp, Homo sapien
tccgttcgactttgtgttctcactg

SEQ ID NO: 87046 - DNA, 25 bp, Homo sapien
catccagagttgctgtatatcttcc

SEQ ID NO: 87047 - DNA, 25 bp, Homo sapien
atgtaggaggctgaatcgctgagct

SEQ ID NO: 87048 - DNA, 25 bp, Homo sapien
aagtgcctgtggagcacagtgcgct

SEQ ID NO: 87049 - DNA, 25 bp, Homo sapien
gtgcctgtggagcacagtgcgctca

SEQ ID NO: 87050 - DNA, 25 bp, Homo sapien
tcaagtgcctgtggagcacagtgcg

SEQ ID NO: 87051 - DNA, 25 bp, Homo sapien
tgcctgtggagcacagtgcgctcac

SEQ ID NO: 87052 - DNA, 25 bp, Homo sapien
gaaaagcctggcacagttgttctgc

SEQ ID NO: 87053 - DNA, 25 bp, Homo sapien
tctagaacactgatggttgaaaagc

SEQ ID NO: 87054 - DNA, 25 bp, Homo sapien
tctgctgcctgagagtgactgtgtc

SEQ ID NO: 87055 - DNA, 25 bp, Homo sapien
gcctgagagtgactgtgtctgccag

SEQ ID NO: 87056 - DNA, 25 bp, Homo sapien
gaatgaaactcccaagggcttctcc

SEQ ID NO: 87057 - DNA, 25 bp, Homo sapien
atgaaactcccaagggcttctccgt

SEQ ID NO: 87058 - DNA, 25 bp, Homo sapien
aatgaaactcccaagggcttctccg

SEQ ID NO: 87059 - DNA, 25 bp, Homo sapien
ctgataagtacaattaagaacggca

SEQ ID NO: 87060 - DNA, 25 bp, Homo sapien
tccagtgtatgtagtctattcaccc

SEQ ID NO: 87061 - DNA, 25 bp, Homo sapien
tgcattccctcctgaatattcagga

SEQ ID NO: 87062 - DNA, 25 bp, Homo sapien
ctctgctccagtgtatgtagtctat

SEQ ID NO: 87063 - DNA, 25 bp, Homo sapien
gtcttctccccggatcctgccggaa

SEQ ID NO: 87064 - DNA, 25 bp, Homo sapien
cggatcctgccggaaccagtggaaa

SEQ ID NO: 87065 - DNA, 25 bp, Homo sapien
cctgccggaaccagtggaaattgaa

SEQ ID NO: 87066 - DNA, 25 bp, Homo sapien
ggtcaaagacacaagtcttctcccc

SEQ ID NO: 87067 - DNA, 25 bp, Homo sapien
caaggctagcctgtgtcaagggtcc

SEQ ID NO: 87068 - DNA, 25 bp, Homo sapien
gaagtaggtggctgaatctcccaga

SEQ ID NO: 87069 - DNA, 25 bp, Homo sapien
gatgcgggtcataaagaaagttccc

SEQ ID NO: 87070 - DNA, 25 bp, Homo sapien
tgagaggctgcgatattccaaacac

SEQ ID NO: 87071 - DNA, 25 bp, Homo sapien
taggaacgacgtggagaatagatag

SEQ ID NO: 87072 - DNA, 25 bp, Homo sapien
aggaacgacgtggagaatagatagc

SEQ ID NO: 87073 - DNA, 25 bp, Homo sapien
gtaggaacgacgtggagaatagata

SEQ ID NO: 87074 - DNA, 25 bp, Homo sapien
agtaggaacgacgtggagaatagat

SEQ ID NO: 87075 - DNA, 25 bp, Homo sapien
cagagttcactgagcataggaaggc

SEQ ID NO: 87076 - DNA, 25 bp, Homo sapien
gccagcattaaagaactctaccaga

SEQ ID NO: 87077 - DNA, 25 bp, Homo sapien
aattgagtgaggacagattgagacc

SEQ ID NO: 87078 - DNA, 25 bp, Homo sapien
gcagggagcacatacacgaagttca

SEQ ID NO: 87079 - DNA, 25 bp, Homo sapien
gaaatgaacatagcagagatacttt

SEQ ID NO: 87080 - DNA, 25 bp, Homo sapien
tctgccctggttcactgaggattaa

SEQ ID NO: 87081 - DNA, 25 bp, Homo sapien
aaagaaatgaacatagcagagatac

SEQ ID NO: 87082 - DNA, 25 bp, Homo sapien
tgccctggttcactgaggattaaaa

SEQ ID NO: 87083 - DNA, 25 bp, Homo sapien
gccacaggatcaccagtaaaactct

SEQ ID NO: 87084 - DNA, 25 bp, Homo sapien
cacaggatcaccagtaaaactctca

SEQ ID NO: 87085 - DNA, 25 bp, Homo sapien
acaggatcaccagtaaaactctcaa

SEQ ID NO: 87086 - DNA, 25 bp, Homo sapien
ccacaggatcaccagtaaaactctc

SEQ ID NO: 87087 - DNA, 25 bp, Homo sapien
cagggaaatatactggctggctcta

SEQ ID NO: 87088 - DNA, 25 bp, Homo sapien
gagtatacggacatcagcaacttag

SEQ ID NO: 87089 - DNA, 25 bp, Homo sapien
tcttcattaccactggagtatacgg

SEQ ID NO: 87090 - DNA, 25 bp, Homo sapien
taccagaagaaagactgagaagcac

SEQ ID NO: 87091 - DNA, 25 bp, Homo sapien
cccagcaggtttgggtacagactgc

SEQ ID NO: 87092 - DNA, 25 bp, Homo sapien
cagcaggtttgggtacagactgcag

SEQ ID NO: 87093 - DNA, 25 bp, Homo sapien
gtttgggtacagactgcaggtgtct

SEQ ID NO: 87094 - DNA, 25 bp, Homo sapien
gggcccagcaggtttgggtacagac

SEQ ID NO: 87095 - DNA, 25 bp, Homo sapien
ctggacaagtccctggctttgaaaa

SEQ ID NO: 87096 - DNA, 25 bp, Homo sapien
gaaaggctttctcttaaggagtctg

SEQ ID NO: 87097 - DNA, 25 bp, Homo sapien
tcttgctctcgtcacagctccctgt

SEQ ID NO: 87098 - DNA, 25 bp, Homo sapien
tgagcctcaggagctaggagcaatg

SEQ ID NO: 87099 - DNA, 25 bp, Homo sapien
aatcacctcgagcactgggacgagc

SEQ ID NO: 87100 - DNA, 25 bp, Homo sapien
aaaaatcacctcgagcactgggacg

SEQ ID NO: 87101 - DNA, 25 bp, Homo sapien
gtaaaaatcacctcgagcactggga

SEQ ID NO: 87102 - DNA, 25 bp, Homo sapien
acctcgagcactgggacgagcagca

SEQ ID NO: 87103 - DNA, 25 bp, Homo sapien
gagacagagacgtggctgtcaagct

SEQ ID NO: 87104 - DNA, 25 bp, Homo sapien
ttgcacataccagaagagagatggt

SEQ ID NO: 87105 - DNA, 25 bp, Homo sapien
tgaataagaagatgagtagttgcac

SEQ ID NO: 87106 - DNA, 25 bp, Homo sapien
tctaaacttgccagtgcaaaaccag

SEQ ID NO: 87107 - DNA, 25 bp, Homo sapien
tataaaacagacttcaaggtcgagt

SEQ ID NO: 87108 - DNA, 25 bp, Homo sapien
gaccctggagagttagtcatatgta

SEQ ID NO: 87109 - DNA, 25 bp, Homo sapien
tataaagctacctaaaggaaacaca

SEQ ID NO: 87110 - DNA, 25 bp, Homo sapien
tgtgaggaagtttcgctggagaaac

SEQ ID NO: 87111 - DNA, 25 bp, Homo sapien
aagagaccaagaccaagaggtgtga

SEQ ID NO: 87112 - DNA, 25 bp, Homo sapien
gaccaagaccaagaggtgtgaggaa

SEQ ID NO: 87113 - DNA, 25 bp, Homo sapien
aggaagtttcgctggagaaactcct

SEQ ID NO: 87114 - DNA, 25 bp, Homo sapien
gggaaacactgcaggctcttttctg

SEQ ID NO: 87115 - DNA, 25 bp, Homo sapien
ctgcaagatctccagagaacaggaa

SEQ ID NO: 87116 - DNA, 25 bp, Homo sapien
cttttctgcaagatctccagagaac

SEQ ID NO: 87117 - DNA, 25 bp, Homo sapien
ctgaacaagggaaacactgcaggct

SEQ ID NO: 87118 - DNA, 25 bp, Homo sapien
gtatccccagcagtgggataagctc

SEQ ID NO: 87119 - DNA, 25 bp, Homo sapien
gcagtgggataagctccaggagcat

SEQ ID NO: 87120 - DNA, 25 bp, Homo sapien
aatgtatccccagcagtgggataag

SEQ ID NO: 87121 - DNA, 25 bp, Homo sapien
atccccagcagtgggataagctcca

SEQ ID NO: 87122 - DNA, 25 bp, Homo sapien
ctcaactccagtgaggctccttcag

SEQ ID NO: 87123 - DNA, 25 bp, Homo sapien
tcaactccagtgaggctccttcaga

SEQ ID NO: 87124 - DNA, 25 bp, Homo sapien
ccataggaatagttacatctcaact

SEQ ID NO: 87125 - DNA, 25 bp, Homo sapien
ggaatagttacatctcaactccagt

SEQ ID NO: 87126 - DNA, 25 bp, Homo sapien
gattgactcctcttaaattcagcct

SEQ ID NO: 87127 - DNA, 25 bp, Homo sapien
tgtctcctgaaaagtacttcaggag

SEQ ID NO: 87128 - DNA, 25 bp, Homo sapien
agattgactcctcttaaattcagcc

SEQ ID NO: 87129 - DNA, 25 bp, Homo sapien
tctcctgaaaagtacttcaggagca

SEQ ID NO: 87130 - DNA, 25 bp, Homo sapien
tatcaggacatggagcataacagga

SEQ ID NO: 87131 - DNA, 25 bp, Homo sapien
taacaggaactgcagaattacatag

SEQ ID NO: 87132 - DNA, 25 bp, Homo sapien
caccacagggagatatactgaaact

SEQ ID NO: 87133 - DNA, 25 bp, Homo sapien
gaaatgcctgggtcggcttagccct

SEQ ID NO: 87134 - DNA, 25 bp, Homo sapien
tagcagctggaaagattcatcctcc

SEQ ID NO: 87135 - DNA, 25 bp, Homo sapien
caaggcttcaagcaaacaagaagta

SEQ ID NO: 87136 - DNA, 25 bp, Homo sapien
tgctaccctccaaggcttcaagcaa

SEQ ID NO: 87137 - DNA, 25 bp, Homo sapien
tttttctccagactacttgctaccc

SEQ ID NO: 87138 - DNA, 25 bp, Homo sapien
gagtcacctgaagttagccatctta

SEQ ID NO: 87139 - DNA, 25 bp, Homo sapien
ccatcttatcaaaggtagaagacag

SEQ ID NO: 87140 - DNA, 25 bp, Homo sapien
gtggctgagctgataacagtgagtc

SEQ ID NO: 87141 - DNA, 25 bp, Homo sapien
cttatcaaaggtagaagacagtgtg

SEQ ID NO: 87142 - DNA, 25 bp, Homo sapien
ctcctttaagattcgcataaagtgc

SEQ ID NO: 87143 - DNA, 25 bp, Homo sapien
cctttaagattcgcataaagtgccc

SEQ ID NO: 87144 - DNA, 25 bp, Homo sapien
tcctttaagattcgcataaagtgcc

SEQ ID NO: 87145 - DNA, 25 bp, Homo sapien
ctttaagattcgcataaagtgccca

SEQ ID NO: 87146 - DNA, 25 bp, Homo sapien
tgggttgactggaaaggcacacaca

SEQ ID NO: 87147 - DNA, 25 bp, Homo sapien
tataaggtgcagtccctactcctag

SEQ ID NO: 87148 - DNA, 25 bp, Homo sapien
tgcagtaccacgcaaaaatggaagt

SEQ ID NO: 87149 - DNA, 25 bp, Homo sapien
gaaaaccataatctagggtgccgat

SEQ ID NO: 87150 - DNA, 25 bp, Homo sapien
acaaaagccccaagagagctcccag

SEQ ID NO: 87151 - DNA, 25 bp, Homo sapien
aaaagccccaagagagctcccagtc

SEQ ID NO: 87152 - DNA, 25 bp, Homo sapien
ctggacccacaaaagccccaagaga

SEQ ID NO: 87153 - DNA, 25 bp, Homo sapien
ggacccacaaaagccccaagagagc

SEQ ID NO: 87154 - DNA, 25 bp, Homo sapien
ccactgcacgttgttcacagaggta

SEQ ID NO: 87155 - DNA, 25 bp, Homo sapien
tgtgtagggtaccacagagctcctc

SEQ ID NO: 87156 - DNA, 25 bp, Homo sapien
caggattctgttggaaccactgcac

SEQ ID NO: 87157 - DNA, 25 bp, Homo sapien
tggagactcggaactgaaggactct

SEQ ID NO: 87158 - DNA, 25 bp, Homo sapien
gcgcaacgtcaatcagaaaacccga

SEQ ID NO: 87159 - DNA, 25 bp, Homo sapien
gttaaatggcaatcctgaagtgtct

SEQ ID NO: 87160 - DNA, 25 bp, Homo sapien
ttagcagagataaaagcgcaacgtc

SEQ ID NO: 87161 - DNA, 25 bp, Homo sapien
gcaacatgcctctctcacggaaggg

SEQ ID NO: 87162 - DNA, 25 bp, Homo sapien
tctttaaaagttgctccagtagttc

SEQ ID NO: 87163 - DNA, 25 bp, Homo sapien
caaacatcgagaaggagaatcccag

SEQ ID NO: 87164 - DNA, 25 bp, Homo sapien
ctgacatccaatgacgttacgtgct

SEQ ID NO: 87165 - DNA, 25 bp, Homo sapien
ttgtcagcacccagataatatatgt

SEQ ID NO: 87166 - DNA, 25 bp, Homo sapien
gacatgtgtgccctataatcctcag

SEQ ID NO: 87167 - DNA, 25 bp, Homo sapien
ggtcaaactgattggaccaagtctt

SEQ ID NO: 87168 - DNA, 25 bp, Homo sapien
cagacccaaactgcagaggtcaaag

SEQ ID NO: 87169 - DNA, 25 bp, Homo sapien
gattggaccaagtctttcccagacc

SEQ ID NO: 87170 - DNA, 25 bp, Homo sapien
tctcatggtcaaactgattggacca

SEQ ID NO: 87171 - DNA, 25 bp, Homo sapien
atcagtcattgacctgcaacctcca

SEQ ID NO: 87172 - DNA, 25 bp, Homo sapien
gagttacttctatcatcaggttgtc

SEQ ID NO: 87173 - DNA, 25 bp, Homo sapien
ccttgttcttcccaattaagatcag

SEQ ID NO: 87174 - DNA, 25 bp, Homo sapien
tataagagttacttctatcatcagg

SEQ ID NO: 87175 - DNA, 25 bp, Homo sapien
ataaatacagctcgaatggatgtca

SEQ ID NO: 87176 - DNA, 25 bp, Homo sapien
tataaatacagctcgaatggatgtc

SEQ ID NO: 87177 - DNA, 25 bp, Homo sapien
taaatacagctcgaatggatgtcat

SEQ ID NO: 87178 - DNA, 25 bp, Homo sapien
gaagtagtttgaggcactgtctgaa

SEQ ID NO: 87179 - DNA, 25 bp, Homo sapien
aagtacacttgataacagcgctgtc

SEQ ID NO: 87180 - DNA, 25 bp, Homo sapien
tcaatgtaacagcaattcgttggtc

SEQ ID NO: 87181 - DNA, 25 bp, Homo sapien
cactcagggttgaaggatgctgctc

SEQ ID NO: 87182 - DNA, 25 bp, Homo sapien
taattgacgatctatgacaaaggaa

SEQ ID NO: 87183 - DNA, 25 bp, Homo sapien
cagctccagtctcaggtttgtgtac

SEQ ID NO: 87184 - DNA, 25 bp, Homo sapien
tctcaggtttgtgtacgggtagcag

SEQ ID NO: 87185 - DNA, 25 bp, Homo sapien
ctataattgacgatctatgacaaag

SEQ ID NO: 87186 - DNA, 25 bp, Homo sapien
accctcaggcagctggagagcaaca

SEQ ID NO: 87187 - DNA, 25 bp, Homo sapien
caccctcaggcagctggagagcaac

SEQ ID NO: 87188 - DNA, 25 bp, Homo sapien
tactacactcgctctttttcatatt

SEQ ID NO: 87189 - DNA, 25 bp, Homo sapien
agatactacactcgctctttttcat

SEQ ID NO: 87190 - DNA, 25 bp, Homo sapien
acagctcccaagagaaaatcaagaa

SEQ ID NO: 87191 - DNA, 25 bp, Homo sapien
aataagatactacactcgctctttt

SEQ ID NO: 87192 - DNA, 25 bp, Homo sapien
aaatgcacctagaatggatatttct

SEQ ID NO: 87193 - DNA, 25 bp, Homo sapien
tgcacctagaatggatatttctact

SEQ ID NO: 87194 - DNA, 25 bp, Homo sapien
aatgcacctagaatggatatttcta

SEQ ID NO: 87195 - DNA, 25 bp, Homo sapien
gccctggttcactgaggattcaaat

SEQ ID NO: 87196 - DNA, 25 bp, Homo sapien
ggatcactagtaaaactctcaagga

SEQ ID NO: 87197 - DNA, 25 bp, Homo sapien
agctcaactgaagccacaggatcac

SEQ ID NO: 87198 - DNA, 25 bp, Homo sapien
tcactagtaaaactctcaaggattt

SEQ ID NO: 87199 - DNA, 25 bp, Homo sapien
tgaagccacaggatcactagtaaaa

SEQ ID NO: 87200 - DNA, 25 bp, Homo sapien
agaagactggctgggtaatagatgc

SEQ ID NO: 87201 - DNA, 25 bp, Homo sapien
aaagacagtggtcagacagagaaga

SEQ ID NO: 87202 - DNA, 25 bp, Homo sapien
ttaaatcctcttttcactggtgccc

SEQ ID NO: 87203 - DNA, 25 bp, Homo sapien
tagatgcttactccccagaatttaa

SEQ ID NO: 87204 - DNA, 25 bp, Homo sapien
taccagaagaaggactgggaacctc

SEQ ID NO: 87205 - DNA, 25 bp, Homo sapien
tgggaacctcggtcactgtaagtgc

SEQ ID NO: 87206 - DNA, 25 bp, Homo sapien
tatatgaacattatcaactcagggc

SEQ ID NO: 87207 - DNA, 25 bp, Homo sapien
cccagaatattgtctgtaccagaag

SEQ ID NO: 87208 - DNA, 25 bp, Homo sapien
ggtaggtggctgaatcactgggctg

SEQ ID NO: 87209 - DNA, 25 bp, Homo sapien
aggtaggtggctgaatcactgggct

SEQ ID NO: 87210 - DNA, 25 bp, Homo sapien
catggcaggtttgggtacagactgc

SEQ ID NO: 87211 - DNA, 25 bp, Homo sapien
gggcatggcaggtttgggtacagac

SEQ ID NO: 87212 - DNA, 25 bp, Homo sapien
aggcattcctggggcatggcaggtt

SEQ ID NO: 87213 - DNA, 25 bp, Homo sapien
gtttgggtacagactgcaggtgtct

SEQ ID NO: 87214 - DNA, 25 bp, Homo sapien
gacaccagtgagctacatcagccag

SEQ ID NO: 87215 - DNA, 25 bp, Homo sapien
aggcaggttaggctggacaagtctc

SEQ ID NO: 87216 - DNA, 25 bp, Homo sapien
taggctggacaagtctctgcctttg

SEQ ID NO: 87217 - DNA, 25 bp, Homo sapien
gccctgagcagagcggacagaagcc

SEQ ID NO: 87218 - DNA, 25 bp, Homo sapien
ctcgagcactgggacgagcagcagg

SEQ ID NO: 87219 - DNA, 25 bp, Homo sapien
cgagcactgggacgagcagcaggag

SEQ ID NO: 87220 - DNA, 25 bp, Homo sapien
tcgagcactgggacgagcagcagga

SEQ ID NO: 87221 - DNA, 25 bp, Homo sapien
gatatggtggaacagacgatgagta

SEQ ID NO: 87222 - DNA, 25 bp, Homo sapien
tgagtagttgcacctcagcagaacc

SEQ ID NO: 87223 - DNA, 25 bp, Homo sapien
gatgagtagttgcacctcagcagaa

SEQ ID NO: 87224 - DNA, 25 bp, Homo sapien
aagagatatggtggaacagacgatg

SEQ ID NO: 87225 - DNA, 25 bp, Homo sapien
ctctcctgcagtctcaagcactgtg

SEQ ID NO: 87226 - DNA, 25 bp, Homo sapien
gctccagtgtgtgcagcatcgctct

SEQ ID NO: 87227 - DNA, 25 bp, Homo sapien
aaacaaaagctccagtgtgtgcagc

SEQ ID NO: 87228 - DNA, 25 bp, Homo sapien
aaagctccagtgtgtgcagcatcgc

SEQ ID NO: 87229 - DNA, 25 bp, Homo sapien
caaaagctccagtgtgtgcagcatc

SEQ ID NO: 87230 - DNA, 25 bp, Homo sapien
gggaaggtttgctggacaagctctt

SEQ ID NO: 87231 - DNA, 25 bp, Homo sapien
gaaggtttgctggacaagctctttg

SEQ ID NO: 87232 - DNA, 25 bp, Homo sapien
aggtttgctggacaagctctttgtt

SEQ ID NO: 87233 - DNA, 25 bp, Homo sapien
tgtggggaaggtttgctggacaagc

SEQ ID NO: 87234 - DNA, 25 bp, Homo sapien
gctgagcaatggaaacactgcaggc

SEQ ID NO: 87235 - DNA, 25 bp, Homo sapien
atgagcaccaggagcatggctgagc

SEQ ID NO: 87236 - DNA, 25 bp, Homo sapien
tatccccagcagtgggatgagcacc

SEQ ID NO: 87237 - DNA, 25 bp, Homo sapien
ttctgcaagatctccagagaacagg

SEQ ID NO: 87238 - DNA, 25 bp, Homo sapien
ctcaactccagtgaggctccttcag

SEQ ID NO: 87239 - DNA, 25 bp, Homo sapien
tcaactccagtgaggctccttcaga

SEQ ID NO: 87240 - DNA, 25 bp, Homo sapien
ggaatagttacatctcaactccagt

SEQ ID NO: 87241 - DNA, 25 bp, Homo sapien
ccataggaatagttacatctcaact

SEQ ID NO: 87242 - DNA, 25 bp, Homo sapien
ttgtttgaacacacatgctctataa

SEQ ID NO: 87243 - DNA, 25 bp, Homo sapien
tatttcacccctacagttttgacta

SEQ ID NO: 87244 - DNA, 25 bp, Homo sapien
agttttgactatagaagatggccac

SEQ ID NO: 87245 - DNA, 25 bp, Homo sapien
ggcacgtattctcttccccagggat

SEQ ID NO: 87246 - DNA, 25 bp, Homo sapien
atgccagaagagagaaggtgttgcc

SEQ ID NO: 87247 - DNA, 25 bp, Homo sapien
gacatgccagaagagagaaggtgtt

SEQ ID NO: 87248 - DNA, 25 bp, Homo sapien
ctggacatgccagaagagagaaggt

SEQ ID NO: 87249 - DNA, 25 bp, Homo sapien
catgccagaagagagaaggtgttgc

SEQ ID NO: 87250 - DNA, 25 bp, Homo sapien
agcagctggaggccttggccggggg

SEQ ID NO: 87251 - DNA, 25 bp, Homo sapien
aaaagtactttaggagcagctggag

SEQ ID NO: 87252 - DNA, 25 bp, Homo sapien
gcagctggaggccttggccggggga

SEQ ID NO: 87253 - DNA, 25 bp, Homo sapien
ctgaaaagtactttaggagcagctg

SEQ ID NO: 87254 - DNA, 25 bp, Homo sapien
agattgactcctcttaaattcagct

SEQ ID NO: 87255 - DNA, 25 bp, Homo sapien
ctgcagcacagaagtactcagcagc

SEQ ID NO: 87256 - DNA, 25 bp, Homo sapien
gcacagaagtactcagcagcatcac

SEQ ID NO: 87257 - DNA, 25 bp, Homo sapien
cagcacagaagtactcagcagcatc

SEQ ID NO: 87258 - DNA, 25 bp, Homo sapien
gcagcacagaagtactcagcagcat

SEQ ID NO: 87259 - DNA, 25 bp, Homo sapien
tagcataggcagtttgtgttcagct

SEQ ID NO: 87260 - DNA, 25 bp, Homo sapien
ctagcataggcagtttgtgttcagc

SEQ ID NO: 87261 - DNA, 25 bp, Homo sapien
ccactcccagttctgattctttcat

SEQ ID NO: 87262 - DNA, 25 bp, Homo sapien
aatccacttttactaccactcccag

SEQ ID NO: 87263 - DNA, 25 bp, Homo sapien
taccactcccagttctgattctttc

SEQ ID NO: 87264 - DNA, 25 bp, Homo sapien
acttttactaccactcccagttctg

SEQ ID NO: 87265 - DNA, 25 bp, Homo sapien
gatcagtcataaacctgcaatctcc

SEQ ID NO: 87266 - DNA, 25 bp, Homo sapien
gcaatctccagccataagagctact

SEQ ID NO: 87267 - DNA, 25 bp, Homo sapien
ttcttcccaaataggatcagtcata

SEQ ID NO: 87268 - DNA, 25 bp, Homo sapien
cctgcaatctccagccataagagct

SEQ ID NO: 87269 - DNA, 25 bp, Homo sapien
acataaataaagctcgaatgcctgc

SEQ ID NO: 87270 - DNA, 25 bp, Homo sapien
ataaataaagctcgaatgcctgcca

SEQ ID NO: 87271 - DNA, 25 bp, Homo sapien
taaataaagctcgaatgcctgccat

SEQ ID NO: 87272 - DNA, 25 bp, Homo sapien
cataaataaagctcgaatgcctgcc

SEQ ID NO: 87273 - DNA, 25 bp, Homo sapien
gttgataatagagttgtcaccctcc

SEQ ID NO: 87274 - DNA, 25 bp, Homo sapien
gaagtagtctgaggcgctgtttgaa

SEQ ID NO: 87275 - DNA, 25 bp, Homo sapien
tttccagattcttgcttgtaccaaa

SEQ ID NO: 87276 - DNA, 25 bp, Homo sapien
tggacactcagggtaggaagatgca

SEQ ID NO: 87277 - DNA, 25 bp, Homo sapien
ttcactgtcttattcaataaaacgg

SEQ ID NO: 87278 - DNA, 25 bp, Homo sapien
tcttattcaataaaacggtgactct

SEQ ID NO: 87279 - DNA, 25 bp, Homo sapien
aaacggtgactctttggccttgcct

SEQ ID NO: 87280 - DNA, 25 bp, Homo sapien
gccttttgtccatatttgaacgaat

SEQ ID NO: 87281 - DNA, 25 bp, Homo sapien
gtgatggttacagatgcctggaaag

SEQ ID NO: 87282 - DNA, 25 bp, Homo sapien
ctcaggtttgggtgatggttacaga

SEQ ID NO: 87283 - DNA, 25 bp, Homo sapien
cccatctcaggtttgggtgatggtt

SEQ ID NO: 87284 - DNA, 25 bp, Homo sapien
ggtgatggttacagatgcctggaaa

SEQ ID NO: 87285 - DNA, 25 bp, Homo sapien
acaaaatgacaagtgctataactaa

SEQ ID NO: 87286 - DNA, 25 bp, Homo sapien
aacaaaatgacaagtgctataacta

SEQ ID NO: 87287 - DNA, 25 bp, Homo sapien
tgggccatgtgctgctgctactgct

SEQ ID NO: 87288 - DNA, 25 bp, Homo sapien
ggccatgtgctgctgctactgctgc

SEQ ID NO: 87289 - DNA, 25 bp, Homo sapien
gggccatgtgctgctgctactgctg

SEQ ID NO: 87290 - DNA, 25 bp, Homo sapien
gccatgtgctgctgctactgctgcc

SEQ ID NO: 87291 - DNA, 25 bp, Homo sapien
tttcaggactctgtactgtgaggtg

SEQ ID NO: 87292 - DNA, 25 bp, Homo sapien
caggactctgtactgtgaggtgaac

SEQ ID NO: 87293 - DNA, 25 bp, Homo sapien
tcaggactctgtactgtgaggtgaa

SEQ ID NO: 87294 - DNA, 25 bp, Homo sapien
ttttcaggactctgtactgtgaggt

SEQ ID NO: 87295 - DNA, 25 bp, Homo sapien
accaccttcagcaggctagaaagtg

SEQ ID NO: 87296 - DNA, 25 bp, Homo sapien
ccttcagcaggctagaaagtgacat

SEQ ID NO: 87297 - DNA, 25 bp, Homo sapien
ccaccttcagcaggctagaaagtga

SEQ ID NO: 87298 - DNA, 25 bp, Homo sapien
accttcagcaggctagaaagtgaca

SEQ ID NO: 87299 - DNA, 25 bp, Homo sapien
tgtcatatgtgcagtccagagtcac

SEQ ID NO: 87300 - DNA, 25 bp, Homo sapien
gaatagaccataactttgatcactg

SEQ ID NO: 87301 - DNA, 25 bp, Homo sapien
ctccttttcctgcacgaacattcct

SEQ ID NO: 87302 - DNA, 25 bp, Homo sapien
gcttgtaccagaatagaccataact

SEQ ID NO: 87303 - DNA, 25 bp, Homo sapien
ccccagttgtgaagcggagatgaca

SEQ ID NO: 87304 - DNA, 25 bp, Homo sapien
caaggttggcggattttcttgcctt

SEQ ID NO: 87305 - DNA, 25 bp, Homo sapien
ctggaaattcaatgagtagcgacct

SEQ ID NO: 87306 - DNA, 25 bp, Homo sapien
ttgcattttgctcgtcataagaccc

SEQ ID NO: 87307 - DNA, 25 bp, Homo sapien
gcaggtccccagggcttttgtacac

SEQ ID NO: 87308 - DNA, 25 bp, Homo sapien
agcaggtccccagggcttttgtaca

SEQ ID NO: 87309 - DNA, 25 bp, Homo sapien
tcaagcaggtccccagggcttttgt

SEQ ID NO: 87310 - DNA, 25 bp, Homo sapien
caagcaggtccccagggcttttgta

SEQ ID NO: 87311 - DNA, 25 bp, Homo sapien
tcagagatactaagcctggagaata

SEQ ID NO: 87312 - DNA, 25 bp, Homo sapien
caagcagtaagagtatcagagatac

SEQ ID NO: 87313 - DNA, 25 bp, Homo sapien
agttcatctttagtgtgttacccaa

SEQ ID NO: 87314 - DNA, 25 bp, Homo sapien
ccaaataatggtcttgatccttaac

SEQ ID NO: 87315 - DNA, 25 bp, Homo sapien
ctgggtcactgaatttccacgggtt

SEQ ID NO: 87316 - DNA, 25 bp, Homo sapien
cttctgagagagtcactggcccttc

SEQ ID NO: 87317 - DNA, 25 bp, Homo sapien
tctgagagagtcactggcccttcca

SEQ ID NO: 87318 - DNA, 25 bp, Homo sapien
ttctgagagagtcactggcccttcc

SEQ ID NO: 87319 - DNA, 25 bp, Homo sapien
ctgagagagtcactggcccttccat

SEQ ID NO: 87320 - DNA, 25 bp, Homo sapien
cctgtggctgtgtacgtgcagttta

SEQ ID NO: 87321 - DNA, 25 bp, Homo sapien
gctgtgtacgtgcagtttatagtca

SEQ ID NO: 87322 - DNA, 25 bp, Homo sapien
aaagggaagggtatcctgtggctgt

SEQ ID NO: 87323 - DNA, 25 bp, Homo sapien
ggtatcctgtggctgtgtacgtgca

SEQ ID NO: 87324 - DNA, 25 bp, Homo sapien
tgtggcttcaaaacctttgttgctt

SEQ ID NO: 87325 - DNA, 25 bp, Homo sapien
tgagtctgacacttgaactgagcct

SEQ ID NO: 87326 - DNA, 25 bp, Homo sapien
cagccttcgtggctttcaggaggag

SEQ ID NO: 87327 - DNA, 25 bp, Homo sapien
ctgagtctgacacttgaactgagcc

SEQ ID NO: 87328 - DNA, 25 bp, Homo sapien
cagctccccctgcagtccctgtcac

SEQ ID NO: 87329 - DNA, 25 bp, Homo sapien
tcagagtttgtgctcagctccccct

SEQ ID NO: 87330 - DNA, 25 bp, Homo sapien
gctcagctccccctgcagtccctgt

SEQ ID NO: 87331 - DNA, 25 bp, Homo sapien
cagagtttgtgctcagctccccctg

SEQ ID NO: 87332 - DNA, 25 bp, Homo sapien
gagacattgtacagacgccaccttc

SEQ ID NO: 87333 - DNA, 25 bp, Homo sapien
caaggatgatcacagagacagcttc

SEQ ID NO: 87334 - DNA, 25 bp, Homo sapien
tgaactgaattgaggagctgtggct

SEQ ID NO: 87335 - DNA, 25 bp, Homo sapien
tgtggctctcacgtcatctctcctg

SEQ ID NO: 87336 - DNA, 25 bp, Homo sapien
tacatgtgacattctgtccctcctc

SEQ ID NO: 87337 - DNA, 25 bp, Homo sapien
acatgtgacattctgtccctcctcc

SEQ ID NO: 87338 - DNA, 25 bp, Homo sapien
ttttacatgtgacattctgtccctc

SEQ ID NO: 87339 - DNA, 25 bp, Homo sapien
tttacatgtgacattctgtccctcc

SEQ ID NO: 87340 - DNA, 25 bp, Homo sapien
tggtctccagcatcagttgcatatt

SEQ ID NO: 87341 - DNA, 25 bp, Homo sapien
gttgcatattccttacaatgacagg

SEQ ID NO: 87342 - DNA, 25 bp, Homo sapien
caccgagtttggattactgatggag

SEQ ID NO: 87343 - DNA, 25 bp, Homo sapien
aatccctggtctccagcatcagttg

SEQ ID NO: 87344 - DNA, 25 bp, Homo sapien
cagccaaccacaaacaagatccatt

SEQ ID NO: 87345 - DNA, 25 bp, Homo sapien
cagataacacagctcctcctgatgt

SEQ ID NO: 87346 - DNA, 25 bp, Homo sapien
cctcccagccaaccacaaacaagat

SEQ ID NO: 87347 - DNA, 25 bp, Homo sapien
acagataacacagctcctcctgatg

SEQ ID NO: 87348 - DNA, 25 bp, Homo sapien
tctgggagccctcaaacactaccaa

SEQ ID NO: 87349 - DNA, 25 bp, Homo sapien
gtctgggagccctcaaacactacca

SEQ ID NO: 87350 - DNA, 25 bp, Homo sapien
ctgggagccctcaaacactaccaag

SEQ ID NO: 87351 - DNA, 25 bp, Homo sapien
tgggagccctcaaacactaccaagc

SEQ ID NO: 87352 - DNA, 25 bp, Homo sapien
tgaatctccaggatgagagaccagc

SEQ ID NO: 87353 - DNA, 25 bp, Homo sapien
gaacgttctctcctcataagtgcaa

SEQ ID NO: 87354 - DNA, 25 bp, Homo sapien
ctccagaatatggaggctgttcacc

SEQ ID NO: 87355 - DNA, 25 bp, Homo sapien
tccctcccggatactcaggaatgaa

SEQ ID NO: 87356 - DNA, 25 bp, Homo sapien
ctgaggattcaaaccttaaacacga

SEQ ID NO: 87357 - DNA, 25 bp, Homo sapien
tgaggattcaaaccttaaacacgaa

SEQ ID NO: 87358 - DNA, 25 bp, Homo sapien
cactgaggattcaaaccttaaacac

SEQ ID NO: 87359 - DNA, 25 bp, Homo sapien
tcactgaggattcaaaccttaaaca

SEQ ID NO: 87360 - DNA, 25 bp, Homo sapien
gccacaggatcaccagtaaaactct

SEQ ID NO: 87361 - DNA, 25 bp, Homo sapien
cacaggatcaccagtaaaactctca

SEQ ID NO: 87362 - DNA, 25 bp, Homo sapien
acaggatcaccagtaaaactctcaa

SEQ ID NO: 87363 - DNA, 25 bp, Homo sapien
ccacaggatcaccagtaaaactctc

SEQ ID NO: 87364 - DNA, 25 bp, Homo sapien
ggaatactgtctgtaccacatgaag

SEQ ID NO: 87365 - DNA, 25 bp, Homo sapien
gtatgtgtacatcagcaactcaggg

SEQ ID NO: 87366 - DNA, 25 bp, Homo sapien
aagtattgaaaagcactgttgctgt

SEQ ID NO: 87367 - DNA, 25 bp, Homo sapien
tctttgttaccactggagtatgtgt

SEQ ID NO: 87368 - DNA, 25 bp, Homo sapien
tgtgagtctctgatgaacaaggaga

SEQ ID NO: 87369 - DNA, 25 bp, Homo sapien
gagtctctgatgaacaaggagatat

SEQ ID NO: 87370 - DNA, 25 bp, Homo sapien
agtctctgatgaacaaggagatata

SEQ ID NO: 87371 - DNA, 25 bp, Homo sapien
gtgagtctctgatgaacaaggagat

SEQ ID NO: 87372 - DNA, 25 bp, Homo sapien
ttgcacagaggtaggtggctgaatc

SEQ ID NO: 87373 - DNA, 25 bp, Homo sapien
tcattgcacagaggtaggtggctga

SEQ ID NO: 87374 - DNA, 25 bp, Homo sapien
gcacagaggtaggtggctgaatcac

SEQ ID NO: 87375 - DNA, 25 bp, Homo sapien
cacagaggtaggtggctgaatcact

SEQ ID NO: 87376 - DNA, 25 bp, Homo sapien
tttgggtacagactgcaagtgtctg

SEQ ID NO: 87377 - DNA, 25 bp, Homo sapien
cagcaggtttgggtacagactgcaa

SEQ ID NO: 87378 - DNA, 25 bp, Homo sapien
caggtttgggtacagactgcaagtg

SEQ ID NO: 87379 - DNA, 25 bp, Homo sapien
ggtttgggtacagactgcaagtgtc

SEQ ID NO: 87380 - DNA, 25 bp, Homo sapien
gtttcattcttaaagcaatgtctat

SEQ ID NO: 87381 - DNA, 25 bp, Homo sapien
gctgtttcattcttaaagcaatgtc

SEQ ID NO: 87382 - DNA, 25 bp, Homo sapien
ttcattcttaaagcaatgtctatca

SEQ ID NO: 87383 - DNA, 25 bp, Homo sapien
ctgtttcattcttaaagcaatgtct

SEQ ID NO: 87384 - DNA, 25 bp, Homo sapien
catcagtgactgtcaataaaactgg

SEQ ID NO: 87385 - DNA, 25 bp, Homo sapien
tttcatcagtgactgtcaataaaac

SEQ ID NO: 87386 - DNA, 25 bp, Homo sapien
tcattttcatcagtgactgtcaata

SEQ ID NO: 87387 - DNA, 25 bp, Homo sapien
cagtgactgtcaataaaactggaca

SEQ ID NO: 87388 - DNA, 25 bp, Homo sapien
gtcacagctccctatccacacagat

SEQ ID NO: 87389 - DNA, 25 bp, Homo sapien
acagctccctatccacacagatatc

SEQ ID NO: 87390 - DNA, 25 bp, Homo sapien
cttgagctgggcggacagaagccaa

SEQ ID NO: 87391 - DNA, 25 bp, Homo sapien
ggaccttgagctgggcggacagaag

SEQ ID NO: 87392 - DNA, 25 bp, Homo sapien
acgctgggacgagcagcaggagcat

SEQ ID NO: 87393 - DNA, 25 bp, Homo sapien
aaatcacctggaacgctgggacgag

SEQ ID NO: 87394 - DNA, 25 bp, Homo sapien
cagggtaaaaatcacctggaacgct

SEQ ID NO: 87395 - DNA, 25 bp, Homo sapien
acctggaacgctgggacgagcagca

SEQ ID NO: 87396 - DNA, 25 bp, Homo sapien
aatgctgtttgagtaaaaaatgtgt

SEQ ID NO: 87397 - DNA, 25 bp, Homo sapien
atgtgtctcaatttagattcagtta

SEQ ID NO: 87398 - DNA, 25 bp, Homo sapien
aatgtgtctcaatttagattcagtt

SEQ ID NO: 87399 - DNA, 25 bp, Homo sapien
atgctgtttgagtaaaaaatgtgtc

SEQ ID NO: 87400 - DNA, 25 bp, Homo sapien
cgatgagtagttgcacctcagctcc

SEQ ID NO: 87401 - DNA, 25 bp, Homo sapien
gtagttgcacctcagctccacaggg

SEQ ID NO: 87402 - DNA, 25 bp, Homo sapien
gagtagttgcacctcagctccacag

SEQ ID NO: 87403 - DNA, 25 bp, Homo sapien
tgagtagttgcacctcagctccaca

SEQ ID NO: 87404 - DNA, 25 bp, Homo sapien
gcctttaaccagggtggatcctgat

SEQ ID NO: 87405 - DNA, 25 bp, Homo sapien
ttaaccagggtggatcctgataaat

SEQ ID NO: 87406 - DNA, 25 bp, Homo sapien
cctttaaccagggtggatcctgata

SEQ ID NO: 87407 - DNA, 25 bp, Homo sapien
ccagggtggatcctgataaatactt

SEQ ID NO: 87408 - DNA, 25 bp, Homo sapien
tgtcgcttatatggactgagggttt

SEQ ID NO: 87409 - DNA, 25 bp, Homo sapien
ccgtgtcgcttatatggactgaggg

SEQ ID NO: 87410 - DNA, 25 bp, Homo sapien
gtgtcgcttatatggactgagggtt

SEQ ID NO: 87411 - DNA, 25 bp, Homo sapien
cgtgtcgcttatatggactgagggt

SEQ ID NO: 87412 - DNA, 25 bp, Homo sapien
atctcaggaggtttgtgttcagctc

SEQ ID NO: 87413 - DNA, 25 bp, Homo sapien
tttgtgttcagctctcctgcagtct

SEQ ID NO: 87414 - DNA, 25 bp, Homo sapien
caggaggtttgtgttcagctctcct

SEQ ID NO: 87415 - DNA, 25 bp, Homo sapien
agcatctcaggaggtttgtgttcag

SEQ ID NO: 87416 - DNA, 25 bp, Homo sapien
gtatagccaaaagctattcttcaaa

SEQ ID NO: 87417 - DNA, 25 bp, Homo sapien
gatcaggttgtttttggctatcaaa

SEQ ID NO: 87418 - DNA, 25 bp, Homo sapien
tagccaaaagctattcttcaaaaag

SEQ ID NO: 87419 - DNA, 25 bp, Homo sapien
atcaggttgtttttggctatcaaat

SEQ ID NO: 87420 - DNA, 25 bp, Homo sapien
ctggaaacgattcagccacatagac

SEQ ID NO: 87421 - DNA, 25 bp, Homo sapien
aaacgattcagccacatagacactc

SEQ ID NO: 87422 - DNA, 25 bp, Homo sapien
ggaaacgattcagccacatagacac

SEQ ID NO: 87423 - DNA, 25 bp, Homo sapien
acgattcagccacatagacactctg

SEQ ID NO: 87424 - DNA, 25 bp, Homo sapien
aacaggaagctattttctggaggtc

SEQ ID NO: 87425 - DNA, 25 bp, Homo sapien
gagaaacaggaagctattttctgga

SEQ ID NO: 87426 - DNA, 25 bp, Homo sapien
ggagaaacaggaagctattttctgg

SEQ ID NO: 87427 - DNA, 25 bp, Homo sapien
gaaacaggaagctattttctggagg

SEQ ID NO: 87428 - DNA, 25 bp, Homo sapien
atcacaagcactgagatgagggtgg

SEQ ID NO: 87429 - DNA, 25 bp, Homo sapien
tattatcacaagcactgagatgagg

SEQ ID NO: 87430 - DNA, 25 bp, Homo sapien
gatgagggtgggcttcatgtctgac

SEQ ID NO: 87431 - DNA, 25 bp, Homo sapien
tgagtataaatattatcacaagcac

SEQ ID NO: 87432 - DNA, 25 bp, Homo sapien
ctggggcccctttaaagacagagag

SEQ ID NO: 87433 - DNA, 25 bp, Homo sapien
ataggaatagttgcacttcagctcc

SEQ ID NO: 87434 - DNA, 25 bp, Homo sapien
tcaggactcccagaataggaatagt

SEQ ID NO: 87435 - DNA, 25 bp, Homo sapien
gagcttctcgggctgagtcactctc

SEQ ID NO: 87436 - DNA, 25 bp, Homo sapien
cgttgtctggagtactggacatacc

SEQ ID NO: 87437 - DNA, 25 bp, Homo sapien
gttgtctggagtactggacatacca

SEQ ID NO: 87438 - DNA, 25 bp, Homo sapien
gcgttgtctggagtactggacatac

SEQ ID NO: 87439 - DNA, 25 bp, Homo sapien
ctttgttaaggtcagcagtgaagcc

SEQ ID NO: 87440 - DNA, 25 bp, Homo sapien
gctctctctagagatgtgtctcaag

SEQ ID NO: 87441 - DNA, 25 bp, Homo sapien
caggtggaaagatgtctcgcctttg

SEQ ID NO: 87442 - DNA, 25 bp, Homo sapien
gagatgtgtctcaagagtaactgga

SEQ ID NO: 87443 - DNA, 25 bp, Homo sapien
agggtttgtgttctgcttccttgca

SEQ ID NO: 87444 - DNA, 25 bp, Homo sapien
ctgtatttaaagggtttgtgttctg

SEQ ID NO: 87445 - DNA, 25 bp, Homo sapien
ggtttgtgttctgcttccttgcaaa

SEQ ID NO: 87446 - DNA, 25 bp, Homo sapien
agagagtttgcaaagaaatatttcc

SEQ ID NO: 87447 - DNA, 25 bp, Homo sapien
gactgatgatataatatctacgaga

SEQ ID NO: 87448 - DNA, 25 bp, Homo sapien
gaaagtatgtttccagtactactag

SEQ ID NO: 87449 - DNA, 25 bp, Homo sapien
tttctggagaaagaatgccctgctg

SEQ ID NO: 87450 - DNA, 25 bp, Homo sapien
ggttaatctatagctaactgatgac

SEQ ID NO: 87451 - DNA, 25 bp, Homo sapien
tccttattgaaatcacagaagacct

SEQ ID NO: 87452 - DNA, 25 bp, Homo sapien
caccaaagacactcccaggagagtt

SEQ ID NO: 87453 - DNA, 25 bp, Homo sapien
gaagccatagaatcaccaaagacac

SEQ ID NO: 87454 - DNA, 25 bp, Homo sapien
agttgaagccatagaatcaccaaag

SEQ ID NO: 87455 - DNA, 25 bp, Homo sapien
tagaatcaccaaagacactcccagg

SEQ ID NO: 87456 - DNA, 25 bp, Homo sapien
ctcctggatgctcaaggcctgagga

SEQ ID NO: 87457 - DNA, 25 bp, Homo sapien
ctagttttgtaactgcagttcatgg

SEQ ID NO: 87458 - DNA, 25 bp, Homo sapien
gtttatactagttttgtaactgcag

SEQ ID NO: 87459 - DNA, 25 bp, Homo sapien
gtaactgcagttcatggtggcattt

SEQ ID NO: 87460 - DNA, 25 bp, Homo sapien
gcgtgactcttaatcttccactgtg

SEQ ID NO: 87461 - DNA, 25 bp, Homo sapien
tctgctgcccgggaagccgtgatca

SEQ ID NO: 87462 - DNA, 25 bp, Homo sapien
tcttggaagtgtcaagcgtgactct

SEQ ID NO: 87463 - DNA, 25 bp, Homo sapien
gccgtgatcaacaaggaactgcttt

SEQ ID NO: 87464 - DNA, 25 bp, Homo sapien
cagggtttgcgtagaggctgcaggt

SEQ ID NO: 87465 - DNA, 25 bp, Homo sapien
ggtttgcgtagaggctgcaggttcc

SEQ ID NO: 87466 - DNA, 25 bp, Homo sapien
ggcagggtttgcgtagaggctgcag

SEQ ID NO: 87467 - DNA, 25 bp, Homo sapien
tttggcagggtttgcgtagaggctg

SEQ ID NO: 87468 - DNA, 25 bp, Homo sapien
tcttcaaggcgcagagcaatatgat

SEQ ID NO: 87469 - DNA, 25 bp, Homo sapien
taatttagttttaggcatctcagga

SEQ ID NO: 87470 - DNA, 25 bp, Homo sapien
cattccctgcatctaatgtgttcac

SEQ ID NO: 87471 - DNA, 25 bp, Homo sapien
tcatcgtgtgggtgattcctgtcgc

SEQ ID NO: 87472 - DNA, 25 bp, Homo sapien
ggactcaaggaaggagcatcaaaca

SEQ ID NO: 87473 - DNA, 25 bp, Homo sapien
aaggaaggagcatcaaacactctgc

SEQ ID NO: 87474 - DNA, 25 bp, Homo sapien
gactcaaggaaggagcatcaaacac

SEQ ID NO: 87475 - DNA, 25 bp, Homo sapien
aaggagcatcaaacactctgctgac

SEQ ID NO: 87476 - DNA, 25 bp, Homo sapien
cagaaagaaaacggtgtccgaggtg

SEQ ID NO: 87477 - DNA, 25 bp, Homo sapien
actcagaaagaaaacggtgtccgag

SEQ ID NO: 87478 - DNA, 25 bp, Homo sapien
ctcagaaagaaaacggtgtccgagg

SEQ ID NO: 87479 - DNA, 25 bp, Homo sapien
tgagagatatccaaaccgaaaggta

SEQ ID NO: 87480 - DNA, 25 bp, Homo sapien
ctgagaagcagtagaaggttttgtt

SEQ ID NO: 87481 - DNA, 25 bp, Homo sapien
caagatcacaagtcctgagcaggaa

SEQ ID NO: 87482 - DNA, 25 bp, Homo sapien
tgttgttgagtctttggcggaatct

SEQ ID NO: 87483 - DNA, 25 bp, Homo sapien
gactttattatagtggcaatagaag

SEQ ID NO: 87484 - DNA, 25 bp, Homo sapien
catggtctccagtttggaaggggtt

SEQ ID NO: 87485 - DNA, 25 bp, Homo sapien
tggcaatagaagaggcatggtctcc

SEQ ID NO: 87486 - DNA, 25 bp, Homo sapien
ttatagtggcaatagaagaggcatg

SEQ ID NO: 87487 - DNA, 25 bp, Homo sapien
gtttaatgtcagagctgccctctca

SEQ ID NO: 87488 - DNA, 25 bp, Homo sapien
tgggtaaccgagtctccactggtcc

SEQ ID NO: 87489 - DNA, 25 bp, Homo sapien
gctctttgtttagatactggacata

SEQ ID NO: 87490 - DNA, 25 bp, Homo sapien
ctgggccttctgtctgggtaaccga

SEQ ID NO: 87491 - DNA, 25 bp, Homo sapien
ctgcgttccccagggtttgtgctgg

SEQ ID NO: 87492 - DNA, 25 bp, Homo sapien
agtccctcccactctgtctctcaga

SEQ ID NO: 87493 - DNA, 25 bp, Homo sapien
tctgtctctcagagcgcagtagtac

SEQ ID NO: 87494 - DNA, 25 bp, Homo sapien
ttgtgctgggctctcgctgcagtcc

SEQ ID NO: 87495 - DNA, 25 bp, Homo sapien
gaggtactagcaaagttactgggct

SEQ ID NO: 87496 - DNA, 25 bp, Homo sapien
gaaatgttccgtgctccgtctcaaa

SEQ ID NO: 87497 - DNA, 25 bp, Homo sapien
tgagtgaaatgttccgtgctccgtc

SEQ ID NO: 87498 - DNA, 25 bp, Homo sapien
tctccaccttgcactcaagaggtac

SEQ ID NO: 87499 - DNA, 25 bp, Homo sapien
gatggaggctatgactgccctcaac

SEQ ID NO: 87500 - DNA, 25 bp, Homo sapien
caacacagatggaggctatgactgc

SEQ ID NO: 87501 - DNA, 25 bp, Homo sapien
gaggctatgactgccctcaacaggc

SEQ ID NO: 87502 - DNA, 25 bp, Homo sapien
cacagatggaggctatgactgccct

SEQ ID NO: 87503 - DNA, 25 bp, Homo sapien
cacttggtggttgcttgtaccagaa

SEQ ID NO: 87504 - DNA, 25 bp, Homo sapien
tgcgcttgagttaccttctgagcca

SEQ ID NO: 87505 - DNA, 25 bp, Homo sapien
acagaaatttcagtctgcgcttgag

SEQ ID NO: 87506 - DNA, 25 bp, Homo sapien
tatcacgggtttcatacacacagtc

SEQ ID NO: 87507 - DNA, 25 bp, Homo sapien
caagaataccgaccacttatttcat

SEQ ID NO: 87508 - DNA, 25 bp, Homo sapien
tgatggtgaagttgaaggaactggt

SEQ ID NO: 87509 - DNA, 25 bp, Homo sapien
gaagttgaaggaactggtggatttc

SEQ ID NO: 87510 - DNA, 25 bp, Homo sapien
tctggaagttccaagaataccgacc

SEQ ID NO: 87511 - DNA, 25 bp, Homo sapien
actgctgagtccacgacttgtgagg

SEQ ID NO: 87512 - DNA, 25 bp, Homo sapien
atactgctgagtccacgacttgtga

SEQ ID NO: 87513 - DNA, 25 bp, Homo sapien
tactgctgagtccacgacttgtgag

SEQ ID NO: 87514 - DNA, 25 bp, Homo sapien
tgaggtttttgtagggctcccacag

SEQ ID NO: 87515 - DNA, 25 bp, Homo sapien
ctgacacagaccctccttgcttctt

SEQ ID NO: 87516 - DNA, 25 bp, Homo sapien
ttgaggtttttgtagggctcccaca

SEQ ID NO: 87517 - DNA, 25 bp, Homo sapien
gctgacacagaccctccttgcttct

SEQ ID NO: 87518 - DNA, 25 bp, Homo sapien
aatgttatatctagacattgtacat

SEQ ID NO: 87519 - DNA, 25 bp, Homo sapien
tagacattgtacatgaattgaactc

SEQ ID NO: 87520 - DNA, 25 bp, Homo sapien
tgttatatctagacattgtacatga

SEQ ID NO: 87521 - DNA, 25 bp, Homo sapien
tatctagacattgtacatgaattga

SEQ ID NO: 87522 - DNA, 25 bp, Homo sapien
gtatgagggtgactaatttcaggga

SEQ ID NO: 87523 - DNA, 25 bp, Homo sapien
ggtgactaatttcagggaacacctg

SEQ ID NO: 87524 - DNA, 25 bp, Homo sapien
tttcagggaacacctgaagaggttc

SEQ ID NO: 87525 - DNA, 25 bp, Homo sapien
taatttcagggaacacctgaagagg

SEQ ID NO: 87526 - DNA, 25 bp, Homo sapien
caaactttagcccagggatactgga

SEQ ID NO: 87527 - DNA, 25 bp, Homo sapien
tcaaactttagcccagggatactgg

SEQ ID NO: 87528 - DNA, 25 bp, Homo sapien
aacaattctgcagtgaagacatcca

SEQ ID NO: 87529 - DNA, 25 bp, Homo sapien
gggatactggaacaattctgcagtg

SEQ ID NO: 87530 - DNA, 25 bp, Homo sapien
ggctgcatctgcgaactctggattc

SEQ ID NO: 87531 - DNA, 25 bp, Homo sapien
tccaagttggcatgctgaggtttcg

SEQ ID NO: 87532 - DNA, 25 bp, Homo sapien
gagacgctaaagaactctgcacagt

SEQ ID NO: 87533 - DNA, 25 bp, Homo sapien
tggtgatccattggagcaccccggg

SEQ ID NO: 87534 - DNA, 25 bp, Homo sapien
atctttattacttggactgggtggc

SEQ ID NO: 87535 - DNA, 25 bp, Homo sapien
catgggcacattagcgttggctact

SEQ ID NO: 87536 - DNA, 25 bp, Homo sapien
tactttgcgtgtgggtaaatagcct

SEQ ID NO: 87537 - DNA, 25 bp, Homo sapien
aaatagcctatgtccttaggtgtgg

SEQ ID NO: 87538 - DNA, 25 bp, Homo sapien
tagcctatgtccttaggtgtgggtg

SEQ ID NO: 87539 - DNA, 25 bp, Homo sapien
caggctggcagtgcacctgcactcc

SEQ ID NO: 87540 - DNA, 25 bp, Homo sapien
ctgcactccactgattcactgccac

SEQ ID NO: 87541 - DNA, 25 bp, Homo sapien
aggctggcagtgcacctgcactcca

SEQ ID NO: 87542 - DNA, 25 bp, Homo sapien
gcacctgcactccactgattcactg

SEQ ID NO: 87543 - DNA, 25 bp, Homo sapien
tcaatgtagatctgcttggtgagct

SEQ ID NO: 87544 - DNA, 25 bp, Homo sapien
gatgtgggaggcccacacgttcatc

SEQ ID NO: 87545 - DNA, 25 bp, Homo sapien
tgtggctgcccaaagtcttcagggt

SEQ ID NO: 87546 - DNA, 25 bp, Homo sapien
gccttctggctaagcaaaaccacag

SEQ ID NO: 87547 - DNA, 25 bp, Homo sapien
cctgccctgccacagtggaggatgt

SEQ ID NO: 87548 - DNA, 25 bp, Homo sapien
tgagggagcaaagcactcagtatgg

SEQ ID NO: 87549 - DNA, 25 bp, Homo sapien
gatgttggtgtgcagtatcttggct

SEQ ID NO: 87550 - DNA, 25 bp, Homo sapien
cagagtgctgaaggtagaagggatg

SEQ ID NO: 87551 - DNA, 25 bp, Homo sapien
caaagcactcagtatgggacacatg

SEQ ID NO: 87552 - DNA, 25 bp, Homo sapien
tcttggacgggtctaatgccatagt

SEQ ID NO: 87553 - DNA, 25 bp, Homo sapien
cctttcttggacgggtctaatgcca

SEQ ID NO: 87554 - DNA, 25 bp, Homo sapien
tggacgggtctaatgccatagtgga

SEQ ID NO: 87555 - DNA, 25 bp, Homo sapien
cgggtctaatgccatagtggagaaa

SEQ ID NO: 87556 - DNA, 25 bp, Homo sapien
tgtttgtgaaactgtaccctgaggt

SEQ ID NO: 87557 - DNA, 25 bp, Homo sapien
tgtgaaactgtaccctgaggtttcc

SEQ ID NO: 87558 - DNA, 25 bp, Homo sapien
atccatgagaagctatcagtcccaa

SEQ ID NO: 87559 - DNA, 25 bp, Homo sapien
ttgtgaaactgtaccctgaggtttc

SEQ ID NO: 87560 - DNA, 25 bp, Homo sapien
tatgggttgccattgcctgttgcca

SEQ ID NO: 87561 - DNA, 25 bp, Homo sapien
tacagagtgcatatgggttgccatt

SEQ ID NO: 87562 - DNA, 25 bp, Homo sapien
gagtgcatatgggttgccattgcct

SEQ ID NO: 87563 - DNA, 25 bp, Homo sapien
caggtacagagtgcatatgggttgc

SEQ ID NO: 87564 - DNA, 25 bp, Homo sapien
gactgcccgtgtgcatctgaatatg

SEQ ID NO: 87565 - DNA, 25 bp, Homo sapien
gctacaggtaattgggcaacaggcc

SEQ ID NO: 87566 - DNA, 25 bp, Homo sapien
ggatcaggatcataaggtcacaggg

SEQ ID NO: 87567 - DNA, 25 bp, Homo sapien
ttacctcaaggagtgtaggcctgcc

SEQ ID NO: 87568 - DNA, 25 bp, Homo sapien
gcatctaaggaagccgtcatggaag

SEQ ID NO: 87569 - DNA, 25 bp, Homo sapien
tcatggaaggagatacggggatctt

SEQ ID NO: 87570 - DNA, 25 bp, Homo sapien
gatggcacttgtactgccatcctca

SEQ ID NO: 87571 - DNA, 25 bp, Homo sapien
tacatcggtgcttttggggacatca

SEQ ID NO: 87572 - DNA, 25 bp, Homo sapien
tgtgcctcactattggccagagagt

SEQ ID NO: 87573 - DNA, 25 bp, Homo sapien
cctggagacaagattgagggtccta

SEQ ID NO: 87574 - DNA, 25 bp, Homo sapien
gtgtagctgggcctctaacaaaggg

SEQ ID NO: 87575 - DNA, 25 bp, Homo sapien
gagggtcctacaaatatacctggaa

SEQ ID NO: 87576 - DNA, 25 bp, Homo sapien
gattccttacaacagtgtccacatt

SEQ ID NO: 87577 - DNA, 25 bp, Homo sapien
cccatggtgtgctgagttattgttc

SEQ ID NO: 87578 - DNA, 25 bp, Homo sapien
tcaagtgtgggggtatactgattcc

SEQ ID NO: 87579 - DNA, 25 bp, Homo sapien
tgttcaccccatgtgtcatatagta

SEQ ID NO: 87580 - DNA, 25 bp, Homo sapien
tggagatggtggtgttattcatgat

SEQ ID NO: 87581 - DNA, 25 bp, Homo sapien
ccaggagggtaggaatacagctaca

SEQ ID NO: 87582 - DNA, 25 bp, Homo sapien
tacagctacactggatcagagagag

SEQ ID NO: 87583 - DNA, 25 bp, Homo sapien
tattcatgatggagacagcctccaa

SEQ ID NO: 87584 - DNA, 25 bp, Homo sapien
tttccacatccgcaatgacacctga

SEQ ID NO: 87585 - DNA, 25 bp, Homo sapien
aatgacacctgattggtagccatca

SEQ ID NO: 87586 - DNA, 25 bp, Homo sapien
tggtttttccacatccgcaatgaca

SEQ ID NO: 87587 - DNA, 25 bp, Homo sapien
tccgcaatgacacctgattggtagc

SEQ ID NO: 87588 - DNA, 25 bp, Homo sapien
tccaggaagtaaaggaactgatgtt

SEQ ID NO: 87589 - DNA, 25 bp, Homo sapien
ggaactgatgtttgggaatgctgtc

SEQ ID NO: 87590 - DNA, 25 bp, Homo sapien
tgtttgggaatgctgtcaatagcac

SEQ ID NO: 87591 - DNA, 25 bp, Homo sapien
ttcttccaggaagtaaaggaactga

SEQ ID NO: 87592 - DNA, 25 bp, Homo sapien
ccttccatgcaagttaagctaagct

SEQ ID NO: 87593 - DNA, 25 bp, Homo sapien
cataaacgtcatttgcataccagta

SEQ ID NO: 87594 - DNA, 25 bp, Homo sapien
caaccttcataaacgtcatttgcat

SEQ ID NO: 87595 - DNA, 25 bp, Homo sapien
gcaagttaagctaagctggaaaaaa

SEQ ID NO: 87596 - DNA, 25 bp, Homo sapien
taagttccaatgattccaccttgaa

SEQ ID NO: 87597 - DNA, 25 bp, Homo sapien
ttaggctaagtagttgtctcttcca

SEQ ID NO: 87598 - DNA, 25 bp, Homo sapien
tccactgtggttcaataagttccaa

SEQ ID NO: 87599 - DNA, 25 bp, Homo sapien
tgcatacggttaccaatacccttca

SEQ ID NO: 87600 - DNA, 25 bp, Homo sapien
gcatttgggaagtatgaggaggaca

SEQ ID NO: 87601 - DNA, 25 bp, Homo sapien
gtatgaggaggacattggcactctt

SEQ ID NO: 87602 - DNA, 25 bp, Homo sapien
ggaggacattggcactcttgcggtt

SEQ ID NO: 87603 - DNA, 25 bp, Homo sapien
cattggcactcttgcggttctgact

SEQ ID NO: 87604 - DNA, 25 bp, Homo sapien
aaacatccgtcatgtgctgcttctc

SEQ ID NO: 87605 - DNA, 25 bp, Homo sapien
cagggtaggtactggtgggggagca

SEQ ID NO: 87606 - DNA, 25 bp, Homo sapien
tccaaaagtacagtcataggaggtt

SEQ ID NO: 87607 - DNA, 25 bp, Homo sapien
aattccaaccttcttttctcagagg

SEQ ID NO: 87608 - DNA, 25 bp, Homo sapien
tctcagaggcgccacttctgtatct

SEQ ID NO: 87609 - DNA, 25 bp, Homo sapien
gctggtatctcagcctagaaacaaa

SEQ ID NO: 87610 - DNA, 25 bp, Homo sapien
caaattacgataattccaaccttct

SEQ ID NO: 87611 - DNA, 25 bp, Homo sapien
agccaagctgaagccacaagactat

SEQ ID NO: 87612 - DNA, 25 bp, Homo sapien
aagactatgaatgcacactccaaca

SEQ ID NO: 87613 - DNA, 25 bp, Homo sapien
tgaatgcacactccaacattttctc

SEQ ID NO: 87614 - DNA, 25 bp, Homo sapien
gaagccacaagactatgaatgcaca

SEQ ID NO: 87615 - DNA, 25 bp, Homo sapien
tcttaaaccgctgactgtgtaactg

SEQ ID NO: 87616 - DNA, 25 bp, Homo sapien
tcttccccagctgaatacagggtga

SEQ ID NO: 87617 - DNA, 25 bp, Homo sapien
aggatcttgcctataccagaacagc

SEQ ID NO: 87618 - DNA, 25 bp, Homo sapien
tgaagaggaattcagggcctttccc

SEQ ID NO: 87619 - DNA, 25 bp, Homo sapien
tgatacaagttgcaggtgcctgggg

SEQ ID NO: 87620 - DNA, 25 bp, Homo sapien
ttgatacaagttgcaggtgcctggg

SEQ ID NO: 87621 - DNA, 25 bp, Homo sapien
catgcccagtgcagaaacccaggca

SEQ ID NO: 87622 - DNA, 25 bp, Homo sapien
gcccagtgcagaaacccaggcaggc

SEQ ID NO: 87623 - DNA, 25 bp, Homo sapien
cagtgcagaaacccaggcaggccat

SEQ ID NO: 87624 - DNA, 25 bp, Homo sapien
tgcccagtgcagaaacccaggcagg

SEQ ID NO: 87625 - DNA, 25 bp, Homo sapien
gccaaaggataagcaggcccaagag

SEQ ID NO: 87626 - DNA, 25 bp, Homo sapien
tatctgaaatatggagaatggctca

SEQ ID NO: 87627 - DNA, 25 bp, Homo sapien
ccttctgtcacttagactcactgag

SEQ ID NO: 87628 - DNA, 25 bp, Homo sapien
ggcccaagagggtctccattccttc

SEQ ID NO: 87629 - DNA, 25 bp, Homo sapien
ctggaggttgtaaatagcgctatca

SEQ ID NO: 87630 - DNA, 25 bp, Homo sapien
tgcagttgagaaccaagttttctcc

SEQ ID NO: 87631 - DNA, 25 bp, Homo sapien
gtaaatagcgctatcagtgaaactg

SEQ ID NO: 87632 - DNA, 25 bp, Homo sapien
atcagtgaaactgcagttgagaacc

SEQ ID NO: 87633 - DNA, 25 bp, Homo sapien
tatccagcgaggcattaagtcttcc

SEQ ID NO: 87634 - DNA, 25 bp, Homo sapien
tacgtcctgatgatttatccagcga

SEQ ID NO: 87635 - DNA, 25 bp, Homo sapien
tgctctctctgacttgactgaataa

SEQ ID NO: 87636 - DNA, 25 bp, Homo sapien
caatgtataaagtactacgtcctga

SEQ ID NO: 87637 - DNA, 25 bp, Homo sapien
agcacagaggtaggtggctgagtca

SEQ ID NO: 87638 - DNA, 25 bp, Homo sapien
gcacagaggtaggtggctgagtcac

SEQ ID NO: 87639 - DNA, 25 bp, Homo sapien
caggtgcctgttgtgcactgtgcct

SEQ ID NO: 87640 - DNA, 25 bp, Homo sapien
gttgcaggtgcctgttgtgcactgt

SEQ ID NO: 87641 - DNA, 25 bp, Homo sapien
gcaggtgcctgttgtgcactgtgcc

SEQ ID NO: 87642 - DNA, 25 bp, Homo sapien
gtacttcaggagaagctggagtcct

SEQ ID NO: 87643 - DNA, 25 bp, Homo sapien
acttcaggagaagctggagtccttg

SEQ ID NO: 87644 - DNA, 25 bp, Homo sapien
ctgataggtacttcaggagaagctg

SEQ ID NO: 87645 - DNA, 25 bp, Homo sapien
ttcaggagaagctggagtccttggc

SEQ ID NO: 87646 - DNA, 25 bp, Homo sapien
actgaagtcaggatactgggtaaaa

SEQ ID NO: 87647 - DNA, 25 bp, Homo sapien
cctcaaaggactgtagctcactgaa

SEQ ID NO: 87648 - DNA, 25 bp, Homo sapien
tgaagtcaggatactgggtaaaata

SEQ ID NO: 87649 - DNA, 25 bp, Homo sapien
ggactgtagctcactgaagtcagga

SEQ ID NO: 87650 - DNA, 25 bp, Homo sapien
gaggtcggtgtcatgacttggctct

SEQ ID NO: 87651 - DNA, 25 bp, Homo sapien
ccataagatatatttaactaaacct

SEQ ID NO: 87652 - DNA, 25 bp, Homo sapien
cttgctccgggcattttcaccataa

SEQ ID NO: 87653 - DNA, 25 bp, Homo sapien
ctgcaaccaatcagctccacccgac

SEQ ID NO: 87654 - DNA, 25 bp, Homo sapien
ctgggcactcaagagccccagcaga

SEQ ID NO: 87655 - DNA, 25 bp, Homo sapien
ccagcagagctcccaatatcctctt

SEQ ID NO: 87656 - DNA, 25 bp, Homo sapien
agcaaacctgggcactcaagagccc

SEQ ID NO: 87657 - DNA, 25 bp, Homo sapien
gcagagctcccaatatcctcttcat

SEQ ID NO: 87658 - DNA, 25 bp, Homo sapien
agtcataggtgatgggcagtttaac

SEQ ID NO: 87659 - DNA, 25 bp, Homo sapien
cataggtgatgggcagtttaacatc

SEQ ID NO: 87660 - DNA, 25 bp, Homo sapien
aaatggagaaaaagtcataggtgat

SEQ ID NO: 87661 - DNA, 25 bp, Homo sapien
gtcataggtgatgggcagtttaaca

SEQ ID NO: 87662 - DNA, 25 bp, Homo sapien
taaaacaggttgatgagctgtcccc

SEQ ID NO: 87663 - DNA, 25 bp, Homo sapien
cagcgtggaattggctccctcctgg

SEQ ID NO: 87664 - DNA, 25 bp, Homo sapien
tcacagagtcagaaaaattgcaccg

SEQ ID NO: 87665 - DNA, 25 bp, Homo sapien
gggaatgtaaaacaggttgatgagc

SEQ ID NO: 87666 - DNA, 25 bp, Homo sapien
aatgtacaataagctgtagcgttcc

SEQ ID NO: 87667 - DNA, 25 bp, Homo sapien
aaacgcctgagtctgtggtctggga

SEQ ID NO: 87668 - DNA, 25 bp, Homo sapien
tagcgttccgtagcgacagtcgtgg

SEQ ID NO: 87669 - DNA, 25 bp, Homo sapien
gaaataaacgcctgagtctgtggtc

SEQ ID NO: 87670 - DNA, 25 bp, Homo sapien
tactggtagaggaaccgagcccgga

SEQ ID NO: 87671 - DNA, 25 bp, Homo sapien
aatattaagctgtgcaaaatgctgc

SEQ ID NO: 87672 - DNA, 25 bp, Homo sapien
ggtttgtgtacaggccgcaggtgcc

SEQ ID NO: 87673 - DNA, 25 bp, Homo sapien
gtggcctcgtgatgtggttgttact

SEQ ID NO: 87674 - DNA, 25 bp, Homo sapien
tacccttttggagtcctgcatactg

SEQ ID NO: 87675 - DNA, 25 bp, Homo sapien
gaatgtgcttgagacacacaactaa

SEQ ID NO: 87676 - DNA, 25 bp, Homo sapien
caactaagctggatcactgtctaac

SEQ ID NO: 87677 - DNA, 25 bp, Homo sapien
caaacctgtagagccaaaaagaatc

SEQ ID NO: 87678 - DNA, 25 bp, Homo sapien
caaccagctgaaactctgtaaattc

SEQ ID NO: 87679 - DNA, 25 bp, Homo sapien
aaaatgatgctcctaagatcttgtc

SEQ ID NO: 87680 - DNA, 25 bp, Homo sapien
gagctcaatgacagcccaggtggtc

SEQ ID NO: 87681 - DNA, 25 bp, Homo sapien
accagagctcaatgacagcccaggt

SEQ ID NO: 87682 - DNA, 25 bp, Homo sapien
tcacatctggacgtatggctatcaa

SEQ ID NO: 87683 - DNA, 25 bp, Homo sapien
taccatggaaagtagtcaaacgcag

SEQ ID NO: 87684 - DNA, 25 bp, Homo sapien
caaacgcagtgttctcataagcaca

SEQ ID NO: 87685 - DNA, 25 bp, Homo sapien
gctatcaataatgcagggcctttcc

SEQ ID NO: 87686 - DNA, 25 bp, Homo sapien
aactgcttggcacttttattgaagg

SEQ ID NO: 87687 - DNA, 25 bp, Homo sapien
gctgagtctccaggctgggaatcca

SEQ ID NO: 87688 - DNA, 25 bp, Homo sapien
tattgaaggagattgtgaatcttcc

SEQ ID NO: 87689 - DNA, 25 bp, Homo sapien
catgatatgcaatgagaactgcttg

SEQ ID NO: 87690 - DNA, 25 bp, Homo sapien
tgggttctgatgctatctccccaaa

SEQ ID NO: 87691 - DNA, 25 bp, Homo sapien
ttcctgggttctgatgctatctccc

SEQ ID NO: 87692 - DNA, 25 bp, Homo sapien
gctatctccccaaacaggaaattga

SEQ ID NO: 87693 - DNA, 25 bp, Homo sapien
ctgatgctatctccccaaacaggaa

SEQ ID NO: 87694 - DNA, 25 bp, Homo sapien
tttgcacaaatgtgagttgtgctgc

SEQ ID NO: 87695 - DNA, 25 bp, Homo sapien
gtggcatgtagctctttgcacaaat

SEQ ID NO: 87696 - DNA, 25 bp, Homo sapien
tgcacaaatgtgagttgtgctgcct

SEQ ID NO: 87697 - DNA, 25 bp, Homo sapien
gcatgtagctctttgcacaaatgtg

SEQ ID NO: 87698 - DNA, 25 bp, Homo sapien
atacacacagcaggctggagaacag

SEQ ID NO: 87699 - DNA, 25 bp, Homo sapien
cagagtagctgaaggccacaaatac

SEQ ID NO: 87700 - DNA, 25 bp, Homo sapien
cacaaatacacacagcaggctggag

SEQ ID NO: 87701 - DNA, 25 bp, Homo sapien
agagtagctgaaggccacaaataca

SEQ ID NO: 87702 - DNA, 25 bp, Homo sapien
tatcgtaagagctagactaatttag

SEQ ID NO: 87703 - DNA, 25 bp, Homo sapien
cagagctgatcctttgatatagtga

SEQ ID NO: 87704 - DNA, 25 bp, Homo sapien
gaaaacagagctgatcctttgatat

SEQ ID NO: 87705 - DNA, 25 bp, Homo sapien
atagtgaataaaatatcgtaagagc

SEQ ID NO: 87706 - DNA, 25 bp, Homo sapien
cctcactggcatggatactgatgac

SEQ ID NO: 87707 - DNA, 25 bp, Homo sapien
tcatcagaaccctggcgaataagga

SEQ ID NO: 87708 - DNA, 25 bp, Homo sapien
tgaatcttctagctgtaaggctgaa

SEQ ID NO: 87709 - DNA, 25 bp, Homo sapien
taaggctgaaatggttaaggcgacg

SEQ ID NO: 87710 - DNA, 25 bp, Homo sapien
cagtgtccagatcaagaagatatac

SEQ ID NO: 87711 - DNA, 25 bp, Homo sapien
gtccagatcaagaagatatacctct

SEQ ID NO: 87712 - DNA, 25 bp, Homo sapien
ccagatcaagaagatatacctctaa

SEQ ID NO: 87713 - DNA, 25 bp, Homo sapien
gatcaagaagatatacctctaacag

SEQ ID NO: 87714 - DNA, 25 bp, Homo sapien
gaggattagtaatggggctgccaaa

SEQ ID NO: 87715 - DNA, 25 bp, Homo sapien
gtcaagatgaaaccagaggattagt

SEQ ID NO: 87716 - DNA, 25 bp, Homo sapien
agtcaagatgaaaccagaggattag

SEQ ID NO: 87717 - DNA, 25 bp, Homo sapien
gggctgccaaaggattcttctccat

SEQ ID NO: 87718 - DNA, 25 bp, Homo sapien
taaagtcattacaaacaaggcctcg

SEQ ID NO: 87719 - DNA, 25 bp, Homo sapien
tgttccacgttcagtatgctgctca

SEQ ID NO: 87720 - DNA, 25 bp, Homo sapien
cctccttggtattaagagtggcact

SEQ ID NO: 87721 - DNA, 25 bp, Homo sapien
tcccatctgtaccagtgtaaggcat

SEQ ID NO: 87722 - DNA, 25 bp, Homo sapien
tcttcaggctgggatcctttgatgt

SEQ ID NO: 87723 - DNA, 25 bp, Homo sapien
agtcttcaggctgggatcctttgat

SEQ ID NO: 87724 - DNA, 25 bp, Homo sapien
gtcttcaggctgggatcctttgatg

SEQ ID NO: 87725 - DNA, 25 bp, Homo sapien
gtaacagtgcaacaccagacacagg

SEQ ID NO: 87726 - DNA, 25 bp, Homo sapien
tcaatgctggtaacagtgcaacacc

SEQ ID NO: 87727 - DNA, 25 bp, Homo sapien
caacaccagacacaggtttgcgtat

SEQ ID NO: 87728 - DNA, 25 bp, Homo sapien
acacaggtttgcgtatgggctgcag

SEQ ID NO: 87729 - DNA, 25 bp, Homo sapien
aacttctcctaaatgggttgcctgg

SEQ ID NO: 87730 - DNA, 25 bp, Homo sapien
ttgatgtgatgagtagcatctccct

SEQ ID NO: 87731 - DNA, 25 bp, Homo sapien
gggttgcctggtacaagcttcttcc

SEQ ID NO: 87732 - DNA, 25 bp, Homo sapien
tagttgcggtctattttggaaagta

SEQ ID NO: 87733 - DNA, 25 bp, Homo sapien
taaagtagttgaggaattgcagtac

SEQ ID NO: 87734 - DNA, 25 bp, Homo sapien
tacatgctggtactgaggaatttgc

SEQ ID NO: 87735 - DNA, 25 bp, Homo sapien
caccaggcctttgcttataccactg

SEQ ID NO: 87736 - DNA, 25 bp, Homo sapien
tgcagtacgtggtgaagtcctctcc

SEQ ID NO: 87737 - DNA, 25 bp, Homo sapien
agacccagggcaagatttggagaca

SEQ ID NO: 87738 - DNA, 25 bp, Homo sapien
gacccagggcaagatttggagacag

SEQ ID NO: 87739 - DNA, 25 bp, Homo sapien
cccagggcaagatttggagacaggc

SEQ ID NO: 87740 - DNA, 25 bp, Homo sapien
acccagggcaagatttggagacagg

SEQ ID NO: 87741 - DNA, 25 bp, Homo sapien
taacagagtgaatttctacatgcat

SEQ ID NO: 87742 - DNA, 25 bp, Homo sapien
tccaggtcttaacagagtgaatttc

SEQ ID NO: 87743 - DNA, 25 bp, Homo sapien
gagttgctcgagatcctcacagaca

SEQ ID NO: 87744 - DNA, 25 bp, Homo sapien
cagacattgtgactttggctttctc

SEQ ID NO: 87745 - DNA, 25 bp, Homo sapien
caaatgaggattgtggacccagagt

SEQ ID NO: 87746 - DNA, 25 bp, Homo sapien
ctagtaaagacttgcaaggagtgca

SEQ ID NO: 87747 - DNA, 25 bp, Homo sapien
tgttgttgtcaggatcttgtcagcc

SEQ ID NO: 87748 - DNA, 25 bp, Homo sapien
tgtcagccaatgatagagcagttgc

SEQ ID NO: 87749 - DNA, 25 bp, Homo sapien
cagttactcttgccaccagcctcat

SEQ ID NO: 87750 - DNA, 25 bp, Homo sapien
acagttactcttgccaccagcctca

SEQ ID NO: 87751 - DNA, 25 bp, Homo sapien
cacagttactcttgccaccagcctc

SEQ ID NO: 87752 - DNA, 25 bp, Homo sapien
acacagttactcttgccaccagcct

SEQ ID NO: 87753 - DNA, 25 bp, Homo sapien
gtggtcttagcatcaattatagttc

SEQ ID NO: 87754 - DNA, 25 bp, Homo sapien
ggtggtcttagcatcaattatagtt

SEQ ID NO: 87755 - DNA, 25 bp, Homo sapien
tgggtggtcttagcatcaattatag

SEQ ID NO: 87756 - DNA, 25 bp, Homo sapien
gggtggtcttagcatcaattatagt

SEQ ID NO: 87757 - DNA, 25 bp, Homo sapien
tagagtgattacaaggcaggtttgc

SEQ ID NO: 87758 - DNA, 25 bp, Homo sapien
tgtcgataccaatacacatactcat

SEQ ID NO: 87759 - DNA, 25 bp, Homo sapien
gattacaaggcaggtttgcagctct

SEQ ID NO: 87760 - DNA, 25 bp, Homo sapien
ttccactgatggtagagtgattaca

SEQ ID NO: 87761 - DNA, 25 bp, Homo sapien
ttagaccatgaatgatatactgtgg

SEQ ID NO: 87762 - DNA, 25 bp, Homo sapien
tttttagaccatgaatgatatactg

SEQ ID NO: 87763 - DNA, 25 bp, Homo sapien
ttgttttttagaccatgaatgatat

SEQ ID NO: 87764 - DNA, 25 bp, Homo sapien
gttttttagaccatgaatgatatac

SEQ ID NO: 87765 - DNA, 25 bp, Homo sapien
gatgcaatagtacacagcagtgtct

SEQ ID NO: 87766 - DNA, 25 bp, Homo sapien
tgcaatagtacacagcagtgtctct

SEQ ID NO: 87767 - DNA, 25 bp, Homo sapien
atgcaatagtacacagcagtgtctc

SEQ ID NO: 87768 - DNA, 25 bp, Homo sapien
tgcagccccatctgtcccagtgtgc

SEQ ID NO: 87769 - DNA, 25 bp, Homo sapien
gtgcagccccatctgtcccagtgtg

SEQ ID NO: 87770 - DNA, 25 bp, Homo sapien
aggtgcagccccatctgtcccagtg

SEQ ID NO: 87771 - DNA, 25 bp, Homo sapien
cagccccatctgtcccagtgtgcga

SEQ ID NO: 87772 - DNA, 25 bp, Homo sapien
tgttactttttgactcctatcgaca

SEQ ID NO: 87773 - DNA, 25 bp, Homo sapien
tctaggtgaatgctaccctcctcct

SEQ ID NO: 87774 - DNA, 25 bp, Homo sapien
gactcctatcgacattttgctctag

SEQ ID NO: 87775 - DNA, 25 bp, Homo sapien
cattttgctctaggtgaatgctacc

SEQ ID NO: 87776 - DNA, 25 bp, Homo sapien
aaggcctagagaccactagtaagag

SEQ ID NO: 87777 - DNA, 25 bp, Homo sapien
caagagttccctgcttaggtaaggc

SEQ ID NO: 87778 - DNA, 25 bp, Homo sapien
ccctgcttaggtaaggcctagagac

SEQ ID NO: 87779 - DNA, 25 bp, Homo sapien
ggattcaagagttccctgcttaggt

SEQ ID NO: 87780 - DNA, 25 bp, Homo sapien
gaatgaccactaagagcatggctag

SEQ ID NO: 87781 - DNA, 25 bp, Homo sapien
cactaagagcatggctaggcagtga

SEQ ID NO: 87782 - DNA, 25 bp, Homo sapien
aagaacattccaagcagcagaatga

SEQ ID NO: 87783 - DNA, 25 bp, Homo sapien
agcagaatgaccactaagagcatgg

SEQ ID NO: 87784 - DNA, 25 bp, Homo sapien
gatgtggccatcaagctgggtcacc

SEQ ID NO: 87785 - DNA, 25 bp, Homo sapien
agtgatgtggccatcaagctgggtc

SEQ ID NO: 87786 - DNA, 25 bp, Homo sapien
actataggaatagttgcacttcagt

SEQ ID NO: 87787 - DNA, 25 bp, Homo sapien
tggcctctgttaggtctttgaggag

SEQ ID NO: 87788 - DNA, 25 bp, Homo sapien
aaaacctctgatgcctttaacctgg

SEQ ID NO: 87789 - DNA, 25 bp, Homo sapien
ctgatgcctttaacctgggtggcct

SEQ ID NO: 87790 - DNA, 25 bp, Homo sapien
cctcaggtagaaggaggtttcgctc

SEQ ID NO: 87791 - DNA, 25 bp, Homo sapien
gttctctgttgtacctgcagtcaca

SEQ ID NO: 87792 - DNA, 25 bp, Homo sapien
tctctgttgtacctgcagtcacaga

SEQ ID NO: 87793 - DNA, 25 bp, Homo sapien
gtgttctctgttgtacctgcagtca

SEQ ID NO: 87794 - DNA, 25 bp, Homo sapien
ctgttgtacctgcagtcacagagcc

SEQ ID NO: 87795 - DNA, 25 bp, Homo sapien
atcacatggtggacatggcccctga

SEQ ID NO: 87796 - DNA, 25 bp, Homo sapien
tcacatggtggacatggcccctgac

SEQ ID NO: 87797 - DNA, 25 bp, Homo sapien
cacatggtggacatggcccctgact

SEQ ID NO: 87798 - DNA, 25 bp, Homo sapien
tggacacggagaatttcaggaccat

SEQ ID NO: 87799 - DNA, 25 bp, Homo sapien
atggacacggagaatttcaggacca

SEQ ID NO: 87800 - DNA, 25 bp, Homo sapien
cagtgatgtggagagaactgtcctt

SEQ ID NO: 87801 - DNA, 25 bp, Homo sapien
ccgtaactactgtcaccaggaggac

SEQ ID NO: 87802 - DNA, 25 bp, Homo sapien
tgtctgtaccattgtaagctggaaa

SEQ ID NO: 87803 - DNA, 25 bp, Homo sapien
cttggatgcttagaaactgagggct

SEQ ID NO: 87804 - DNA, 25 bp, Homo sapien
tgcacagaggtagaggcctgtatca

SEQ ID NO: 87805 - DNA, 25 bp, Homo sapien
ctgcacagaggtagaggcctgtatc

SEQ ID NO: 87806 - DNA, 25 bp, Homo sapien
gcacagaggtagaggcctgtatcac

SEQ ID NO: 87807 - DNA, 25 bp, Homo sapien
cctgcacagaggtagaggcctgtat

SEQ ID NO: 87808 - DNA, 25 bp, Homo sapien
gcaagattcctattaatgccttcat

SEQ ID NO: 87809 - DNA, 25 bp, Homo sapien
agcccagcaagattcctattaatgc

SEQ ID NO: 87810 - DNA, 25 bp, Homo sapien
ccagcaagattcctattaatgcctt

SEQ ID NO: 87811 - DNA, 25 bp, Homo sapien
ggaagcccagcaagattcctattaa

SEQ ID NO: 87812 - DNA, 25 bp, Homo sapien
aattcagttgtgatactcctccagg

SEQ ID NO: 87813 - DNA, 25 bp, Homo sapien
ccttatgatagaggacacagcttaa

SEQ ID NO: 87814 - DNA, 25 bp, Homo sapien
tttccaagtgtagaaaatttctctg

SEQ ID NO: 87815 - DNA, 25 bp, Homo sapien
cacagcttaattgagagttgcgttc

SEQ ID NO: 87816 - DNA, 25 bp, Homo sapien
tataggtggccataaagttcctcag

SEQ ID NO: 87817 - DNA, 25 bp, Homo sapien
tagaacaactgcacaccaggaatga

SEQ ID NO: 87818 - DNA, 25 bp, Homo sapien
caggctgggaatctgatgtataggt

SEQ ID NO: 87819 - DNA, 25 bp, Homo sapien
tgaaaccactgcacacggatcatgt

SEQ ID NO: 87820 - DNA, 25 bp, Homo sapien
tgctttattcatgtccttccacaga

SEQ ID NO: 87821 - DNA, 25 bp, Homo sapien
gtgctttattcatgtccttccacag

SEQ ID NO: 87822 - DNA, 25 bp, Homo sapien
gctttattcatgtccttccacagac

SEQ ID NO: 87823 - DNA, 25 bp, Homo sapien
cctagaaagctgcaaatctgacttc

SEQ ID NO: 87824 - DNA, 25 bp, Homo sapien
agaatcagcactgatgcccccagga

SEQ ID NO: 87825 - DNA, 25 bp, Homo sapien
tctggctgaagccacagaatcagca

SEQ ID NO: 87826 - DNA, 25 bp, Homo sapien
aagccacagaatcagcactgatgcc

SEQ ID NO: 87827 - DNA, 25 bp, Homo sapien
ctgaagccacagaatcagcactgat

SEQ ID NO: 87828 - DNA, 25 bp, Homo sapien
caaacatgctgttagtatagtcaca

SEQ ID NO: 87829 - DNA, 25 bp, Homo sapien
ttagtatagtcacagttcagaatag

SEQ ID NO: 87830 - DNA, 25 bp, Homo sapien
ttccttcctggacgctcagggatgg

SEQ ID NO: 87831 - DNA, 25 bp, Homo sapien
cttcctggacgctcagggatggtga

SEQ ID NO: 87832 - DNA, 25 bp, Homo sapien
tgcagagagaggtgcttggcacttt

SEQ ID NO: 87833 - DNA, 25 bp, Homo sapien
cttttgtttaagaagacagtgaatc

SEQ ID NO: 87834 - DNA, 25 bp, Homo sapien
gcacagaagtacactgcagagtctc

SEQ ID NO: 87835 - DNA, 25 bp, Homo sapien
gctgcacagaagtacactgcagagt

SEQ ID NO: 87836 - DNA, 25 bp, Homo sapien
ttgctgcacagaagtacactgcaga

SEQ ID NO: 87837 - DNA, 25 bp, Homo sapien
agaagtacactgcagagtctccagg

SEQ ID NO: 87838 - DNA, 25 bp, Homo sapien
tgtgtaaatggaagcgagtctatgt

SEQ ID NO: 87839 - DNA, 25 bp, Homo sapien
aagcataatctctcatattggcatg

SEQ ID NO: 87840 - DNA, 25 bp, Homo sapien
gaagcgagtctatgtgtctcccagt

SEQ ID NO: 87841 - DNA, 25 bp, Homo sapien
tcaaagcataatctctcatattggc

SEQ ID NO: 87842 - DNA, 25 bp, Homo sapien
aactctcgcgtgtctgcccttttgc

SEQ ID NO: 87843 - DNA, 25 bp, Homo sapien
tggctacagctttgaatttgggaac

SEQ ID NO: 87844 - DNA, 25 bp, Homo sapien
gaagacagcaacaactctcgcgtgt

SEQ ID NO: 87845 - DNA, 25 bp, Homo sapien
ccttttgctgggatctgtggctaca

SEQ ID NO: 87846 - DNA, 25 bp, Homo sapien
attttgagttgtatgctctggccat

SEQ ID NO: 87847 - DNA, 25 bp, Homo sapien
tcttgctataagaaggtcctatcaa

SEQ ID NO: 87848 - DNA, 25 bp, Homo sapien
ttaaacagctctcccctgtggccag

SEQ ID NO: 87849 - DNA, 25 bp, Homo sapien
gaggaatgttgattaaactgtggat

SEQ ID NO: 87850 - DNA, 25 bp, Homo sapien
gagaactaaatgcatctacctagaa

SEQ ID NO: 87851 - DNA, 25 bp, Homo sapien
tctgaatgggcttccttaacaggag

SEQ ID NO: 87852 - DNA, 25 bp, Homo sapien
gaactcagaatgaggcctgttgcaa

SEQ ID NO: 87853 - DNA, 25 bp, Homo sapien
caggagttgctttgaactcagaatg

SEQ ID NO: 87854 - DNA, 25 bp, Homo sapien
ttggcctgccagaatatccagtcag

SEQ ID NO: 87855 - DNA, 25 bp, Homo sapien
ggtcaactgccacaacaaggtgcct

SEQ ID NO: 87856 - DNA, 25 bp, Homo sapien
aggtcaactgccacaacaaggtgcc

SEQ ID NO: 87857 - DNA, 25 bp, Homo sapien
cattaagatgctgtcatatcacaac

SEQ ID NO: 87858 - DNA, 25 bp, Homo sapien
tctcccagactgaatcgtgtactca

SEQ ID NO: 87859 - DNA, 25 bp, Homo sapien
gatgctgtcatatcacaacctctcc

SEQ ID NO: 87860 - DNA, 25 bp, Homo sapien
ttgtcattaagatgctgtcatatca

SEQ ID NO: 87861 - DNA, 25 bp, Homo sapien
aatataaagccttggaggaactgca

SEQ ID NO: 87862 - DNA, 25 bp, Homo sapien
tatcatcaggaagacgggtgcttca

SEQ ID NO: 87863 - DNA, 25 bp, Homo sapien
tctgtgccgcagaagtaggttcctg

SEQ ID NO: 87864 - DNA, 25 bp, Homo sapien
tctcggaggatcacggcttgaggac

SEQ ID NO: 87865 - DNA, 25 bp, Homo sapien
gcccgtaatatgctgccaacagtca

SEQ ID NO: 87866 - DNA, 25 bp, Homo sapien
ggcagaggccatgagtgcccgtaat

SEQ ID NO: 87867 - DNA, 25 bp, Homo sapien
gaggccatgagtgcccgtaatatgc

SEQ ID NO: 87868 - DNA, 25 bp, Homo sapien
catgagtgcccgtaatatgctgcca

SEQ ID NO: 87869 - DNA, 25 bp, Homo sapien
tcccattgggagaccttttgtacca

SEQ ID NO: 87870 - DNA, 25 bp, Homo sapien
agaatattgaccctgtgtcgcattg

SEQ ID NO: 87871 - DNA, 25 bp, Homo sapien
cggtctcaccctcctgcgtagatat

SEQ ID NO: 87872 - DNA, 25 bp, Homo sapien
tattagttttgtatgcacagtccag

SEQ ID NO: 87873 - DNA, 25 bp, Homo sapien
gatatgataagctgaatagttttag

SEQ ID NO: 87874 - DNA, 25 bp, Homo sapien
gatgatgatatgataagctgaatag

SEQ ID NO: 87875 - DNA, 25 bp, Homo sapien
ctggctgtgatgatgatatgataag

SEQ ID NO: 87876 - DNA, 25 bp, Homo sapien
ctgtgatgatgatatgataagctga

SEQ ID NO: 87877 - DNA, 25 bp, Homo sapien
attcataggagggatttttaggaga

SEQ ID NO: 87878 - DNA, 25 bp, Homo sapien
gaggattcataggagggatttttag

SEQ ID NO: 87879 - DNA, 25 bp, Homo sapien
ggattcataggagggatttttagga

SEQ ID NO: 87880 - DNA, 25 bp, Homo sapien
aggattcataggagggatttttagg

SEQ ID NO: 87881 - DNA, 25 bp, Homo sapien
cctcaaagactcgaagaagttcaag

SEQ ID NO: 87882 - DNA, 25 bp, Homo sapien
gaacacaaagaggtagcatatgaac

SEQ ID NO: 87883 - DNA, 25 bp, Homo sapien
tagtggcttattggtgcctaccaca

SEQ ID NO: 87884 - DNA, 25 bp, Homo sapien
aaaggatatgacgtatttcaagagc

SEQ ID NO: 87885 - DNA, 25 bp, Homo sapien
agctcccagggacttttccattctt

SEQ ID NO: 87886 - DNA, 25 bp, Homo sapien
gcttcagctgaatttgaataaagct

SEQ ID NO: 87887 - DNA, 25 bp, Homo sapien
atttgaataaagctcccagggactt

SEQ ID NO: 87888 - DNA, 25 bp, Homo sapien
ataaagctcccagggacttttccat

SEQ ID NO: 87889 - DNA, 25 bp, Homo sapien
ctgtcattaataacggccatttctc

SEQ ID NO: 87890 - DNA, 25 bp, Homo sapien
tcattaataacggccatttctctct

SEQ ID NO: 87891 - DNA, 25 bp, Homo sapien
cattaataacggccatttctctctc

SEQ ID NO: 87892 - DNA, 25 bp, Homo sapien
tgtcattaataacggccatttctct

SEQ ID NO: 87893 - DNA, 25 bp, Homo sapien
cattaagatattagggccttccccg

SEQ ID NO: 87894 - DNA, 25 bp, Homo sapien
tctcactgcacagaagtacaggaat

SEQ ID NO: 87895 - DNA, 25 bp, Homo sapien
ttgagtacaggttgcaggtgcctga

SEQ ID NO: 87896 - DNA, 25 bp, Homo sapien
tattcaacagtacagtgagccttct

SEQ ID NO: 87897 - DNA, 25 bp, Homo sapien
ggaccacgaatgcccacagcaggcc

SEQ ID NO: 87898 - DNA, 25 bp, Homo sapien
gaagccaaaggggaccacgaatgcc

SEQ ID NO: 87899 - DNA, 25 bp, Homo sapien
accacgaatgcccacagcaggccag

SEQ ID NO: 87900 - DNA, 25 bp, Homo sapien
tgaagccaaaggggaccacgaatgc

SEQ ID NO: 87901 - DNA, 25 bp, Homo sapien
gatactccaccagttccaatttgtg

SEQ ID NO: 87902 - DNA, 25 bp, Homo sapien
atttgtgcagcccagctctcgagga

SEQ ID NO: 87903 - DNA, 25 bp, Homo sapien
agctctcgaggaagctgcagtccca

SEQ ID NO: 87904 - DNA, 25 bp, Homo sapien
gaagctgcagtcccatgtttggggc

SEQ ID NO: 87905 - DNA, 25 bp, Homo sapien
ggtctgaacttgggttactttctga

SEQ ID NO: 87906 - DNA, 25 bp, Homo sapien
tggtctgaacttgggttactttctg

SEQ ID NO: 87907 - DNA, 25 bp, Homo sapien
tgtggtctgaacttgggttactttc

SEQ ID NO: 87908 - DNA, 25 bp, Homo sapien
gcttgtaccagtataaagtgtacga

SEQ ID NO: 87909 - DNA, 25 bp, Homo sapien
catttgacttagaataaccctgatg

SEQ ID NO: 87910 - DNA, 25 bp, Homo sapien
gaattctatctggtttcaaacatgc

SEQ ID NO: 87911 - DNA, 25 bp, Homo sapien
cacagaagtacttggctgagtcagt

SEQ ID NO: 87912 - DNA, 25 bp, Homo sapien
tcttccactgtcatttctacttctg

SEQ ID NO: 87913 - DNA, 25 bp, Homo sapien
tttatcttccactgtcatttctact

SEQ ID NO: 87914 - DNA, 25 bp, Homo sapien
tatcttccactgtcatttctacttc

SEQ ID NO: 87915 - DNA, 25 bp, Homo sapien
tccactgtcatttctacttctgtgg

SEQ ID NO: 87916 - DNA, 25 bp, Homo sapien
taaggtctcaactgtgccactaatg

SEQ ID NO: 87917 - DNA, 25 bp, Homo sapien
aaggtctcaactgtgccactaatgt

SEQ ID NO: 87918 - DNA, 25 bp, Homo sapien
tttccctaagctcctgagcaggtgg

SEQ ID NO: 87919 - DNA, 25 bp, Homo sapien
tataaggtctcaactgtgccactaa

SEQ ID NO: 87920 - DNA, 25 bp, Homo sapien
gataggagtacagtaatgcttgtca

SEQ ID NO: 87921 - DNA, 25 bp, Homo sapien
ccaaagataggagtacagtaatgct

SEQ ID NO: 87922 - DNA, 25 bp, Homo sapien
cagtaatgcttgtcaccaacttcat

SEQ ID NO: 87923 - DNA, 25 bp, Homo sapien
gagtacagtaatgcttgtcaccaac

SEQ ID NO: 87924 - DNA, 25 bp, Homo sapien
tgtcttcagcgattgccagagaggc

SEQ ID NO: 87925 - DNA, 25 bp, Homo sapien
tagcacggtgcaggatcaaggtact

SEQ ID NO: 87926 - DNA, 25 bp, Homo sapien
atgaatcacgtactctggaccctgg

SEQ ID NO: 87927 - DNA, 25 bp, Homo sapien
gcagcatctctcaaggtagcacggt

SEQ ID NO: 87928 - DNA, 25 bp, Homo sapien
agggagatattgcacagctgcagcc

SEQ ID NO: 87929 - DNA, 25 bp, Homo sapien
cagggagatattgcacagctgcagc

SEQ ID NO: 87930 - DNA, 25 bp, Homo sapien
tactgaatgagcttccccagcagaa

SEQ ID NO: 87931 - DNA, 25 bp, Homo sapien
cccttagctatttagaaaacacagt

SEQ ID NO: 87932 - DNA, 25 bp, Homo sapien
atcagattttactgaatgagcttcc

SEQ ID NO: 87933 - DNA, 25 bp, Homo sapien
gattttactgaatgagcttccccag

SEQ ID NO: 87934 - DNA, 25 bp, Homo sapien
tatccctaggagtacttgcagaaca

SEQ ID NO: 87935 - DNA, 25 bp, Homo sapien
ctgcttggaaccccaatatccctag

SEQ ID NO: 87936 - DNA, 25 bp, Homo sapien
accccaatatccctaggagtacttg

SEQ ID NO: 87937 - DNA, 25 bp, Homo sapien
taggagtacttgcagaacagtctcc

SEQ ID NO: 87938 - DNA, 25 bp, Homo sapien
tggacgatcaaggactgaggactct

SEQ ID NO: 87939 - DNA, 25 bp, Homo sapien
gaggactctgctccagttcttggct

SEQ ID NO: 87940 - DNA, 25 bp, Homo sapien
tgacgtgcagtttatggtgagattc

SEQ ID NO: 87941 - DNA, 25 bp, Homo sapien
tcatcaagaagataagaccttcacc

SEQ ID NO: 87942 - DNA, 25 bp, Homo sapien
ggaggctgtgatatgcagggaactt

SEQ ID NO: 87943 - DNA, 25 bp, Homo sapien
aggctgtgatatgcagggaactttg

SEQ ID NO: 87944 - DNA, 25 bp, Homo sapien
ggctgtgatatgcagggaactttgc

SEQ ID NO: 87945 - DNA, 25 bp, Homo sapien
gaggctgtgatatgcagggaacttt

SEQ ID NO: 87946 - DNA, 25 bp, Homo sapien
tctcaggagccccatgtcagaagag

SEQ ID NO: 87947 - DNA, 25 bp, Homo sapien
aacgttctgagacttcatgtcttgg

SEQ ID NO: 87948 - DNA, 25 bp, Homo sapien
caggagccccatgtcagaagagcat

SEQ ID NO: 87949 - DNA, 25 bp, Homo sapien
taagacaattgcaacgttctgagac

SEQ ID NO: 87950 - DNA, 25 bp, Homo sapien
cttctctattcctgttatgtggtgg

SEQ ID NO: 87951 - DNA, 25 bp, Homo sapien
ctctattcctgttatgtggtggcat

SEQ ID NO: 87952 - DNA, 25 bp, Homo sapien
tctctattcctgttatgtggtggca

SEQ ID NO: 87953 - DNA, 25 bp, Homo sapien
ttctctattcctgttatgtggtggc

SEQ ID NO: 87954 - DNA, 25 bp, Homo sapien
atgttcaaggagcatccttatcagc

SEQ ID NO: 87955 - DNA, 25 bp, Homo sapien
aatgttcaaggagcatccttatcag

SEQ ID NO: 87956 - DNA, 25 bp, Homo sapien
tcctgcttgtaccatagccaggtgt

SEQ ID NO: 87957 - DNA, 25 bp, Homo sapien
tccttcctggataaacatagattga

SEQ ID NO: 87958 - DNA, 25 bp, Homo sapien
tagattgaggactctgattcagctg

SEQ ID NO: 87959 - DNA, 25 bp, Homo sapien
gcttgtaccatagccaggtgttaaa

SEQ ID NO: 87960 - DNA, 25 bp, Homo sapien
ccttatataaggctatcaagaggac

SEQ ID NO: 87961 - DNA, 25 bp, Homo sapien
cagccttatataaggctatcaagag

SEQ ID NO: 87962 - DNA, 25 bp, Homo sapien
tatataaggctatcaagaggacagg

SEQ ID NO: 87963 - DNA, 25 bp, Homo sapien
ttatataaggctatcaagaggacag

SEQ ID NO: 87964 - DNA, 25 bp, Homo sapien
tagatgcctacatcactaggtatgg

SEQ ID NO: 87965 - DNA, 25 bp, Homo sapien
cccagcacagaagtagatgcctaca

SEQ ID NO: 87966 - DNA, 25 bp, Homo sapien
tggatgctgagatattcaggaagct

SEQ ID NO: 87967 - DNA, 25 bp, Homo sapien
tggttataccaaactgagcagtcag

SEQ ID NO: 87968 - DNA, 25 bp, Homo sapien
caagttcatcaagcaaagagcacaa

SEQ ID NO: 87969 - DNA, 25 bp, Homo sapien
aaggcagcatagagactagagttcc

SEQ ID NO: 87970 - DNA, 25 bp, Homo sapien
ttcatgccaagaggactaagagctg

SEQ ID NO: 87971 - DNA, 25 bp, Homo sapien
gatcaattctcctcatatcgtggca

SEQ ID NO: 87972 - DNA, 25 bp, Homo sapien
gatagctagtaaagcctgtggacac

SEQ ID NO: 87973 - DNA, 25 bp, Homo sapien
atccttcagttatcaagtgtgtttt

SEQ ID NO: 87974 - DNA, 25 bp, Homo sapien
ccttcagttatcaagtgtgttttcc

SEQ ID NO: 87975 - DNA, 25 bp, Homo sapien
agaagccaaaagatagctagtaaag

SEQ ID NO: 87976 - DNA, 25 bp, Homo sapien
cgtggacaaccagagatagagggct

SEQ ID NO: 87977 - DNA, 25 bp, Homo sapien
gagttacggtgtctccctcgtggac

SEQ ID NO: 87978 - DNA, 25 bp, Homo sapien
cacagaggtagatggccgagtctcc

SEQ ID NO: 87979 - DNA, 25 bp, Homo sapien
tagagggctttgtaccaccttgtct

SEQ ID NO: 87980 - DNA, 25 bp, Homo sapien
aatttgagtacaggctgcaggtgac

SEQ ID NO: 87981 - DNA, 25 bp, Homo sapien
cctcagctgtagaatttgagtacag

SEQ ID NO: 87982 - DNA, 25 bp, Homo sapien
ggctgcaggtgactagggagcactg

SEQ ID NO: 87983 - DNA, 25 bp, Homo sapien
caggtgactagggagcactgtgcct

SEQ ID NO: 87984 - DNA, 25 bp, Homo sapien
tgctcaatgtagcaagttccccatc

SEQ ID NO: 87985 - DNA, 25 bp, Homo sapien
caataactgcttttccgtatagttt

SEQ ID NO: 87986 - DNA, 25 bp, Homo sapien
ggcttgctcaatgtagcaagttccc

SEQ ID NO: 87987 - DNA, 25 bp, Homo sapien
ttttgagggcttgctcaatgtagca

SEQ ID NO: 87988 - DNA, 25 bp, Homo sapien
gcgatatgactctgagttaggattc

SEQ ID NO: 87989 - DNA, 25 bp, Homo sapien
tgaatgcagcgatatgactctgagt

SEQ ID NO: 87990 - DNA, 25 bp, Homo sapien
agtagtgaatgcagcgatatgactc

SEQ ID NO: 87991 - DNA, 25 bp, Homo sapien
agaaagtagtgaatgcagcgatatg

SEQ ID NO: 87992 - DNA, 25 bp, Homo sapien
tagattccctaatgtgtagtgcaca

SEQ ID NO: 87993 - DNA, 25 bp, Homo sapien
tacctataaatgtgcctgtcctggg

SEQ ID NO: 87994 - DNA, 25 bp, Homo sapien
cctgtacaatcctgataaaagggct

SEQ ID NO: 87995 - DNA, 25 bp, Homo sapien
tagtatcctgagtgaccctctagaa

SEQ ID NO: 87996 - DNA, 25 bp, Homo sapien
cattgtgttctcaggtgatagatga

SEQ ID NO: 87997 - DNA, 25 bp, Homo sapien
atcattgtccctcccattgtgttct

SEQ ID NO: 87998 - DNA, 25 bp, Homo sapien
gcttagggattgttagtcagtctag

SEQ ID NO: 87999 - DNA, 25 bp, Homo sapien
tagggattgttagtcagtctaggaa

SEQ ID NO: 88000 - DNA, 25 bp, Homo sapien
gctgatactgaagagccttgtttag

SEQ ID NO: 88001 - DNA, 25 bp, Homo sapien
atactgaagagccttgtttagaaac

SEQ ID NO: 88002 - DNA, 25 bp, Homo sapien
aatgagctgatactgaagagccttg

SEQ ID NO: 88003 - DNA, 25 bp, Homo sapien
tgagctgatactgaagagccttgtt

SEQ ID NO: 88004 - DNA, 25 bp, Homo sapien
aaagaaaataagttgagctatttgc

SEQ ID NO: 88005 - DNA, 25 bp, Homo sapien
catgttgggactgaataaccctttc

SEQ ID NO: 88006 - DNA, 25 bp, Homo sapien
ttcttgtgtaaagatcccatgttgg

SEQ ID NO: 88007 - DNA, 25 bp, Homo sapien
taaagatcccatgttgggactgaat

SEQ ID NO: 88008 - DNA, 25 bp, Homo sapien
gtttagggcccgtggatctctccca

SEQ ID NO: 88009 - DNA, 25 bp, Homo sapien
tcttttggtctcataactgaaatgg

SEQ ID NO: 88010 - DNA, 25 bp, Homo sapien
tcttgagtgcacagaaactgtttcc

SEQ ID NO: 88011 - DNA, 25 bp, Homo sapien
ggcagctatttgcaggttcacagaa

SEQ ID NO: 88012 - DNA, 25 bp, Homo sapien
ggtggtcagcaacactcagtccaga

SEQ ID NO: 88013 - DNA, 25 bp, Homo sapien
gagcaaacggtgcatttcctccgga

SEQ ID NO: 88014 - DNA, 25 bp, Homo sapien
caggtgagctaagtgtccctgagca

SEQ ID NO: 88015 - DNA, 25 bp, Homo sapien
cacaagtggagaccgagagaaaacg

SEQ ID NO: 88016 - DNA, 25 bp, Homo sapien
catttttcagaggtctcctttgcca

SEQ ID NO: 88017 - DNA, 25 bp, Homo sapien
tttcagaggtctcctttgccaaagc

SEQ ID NO: 88018 - DNA, 25 bp, Homo sapien
tgccatttttcagaggtctcctttg

SEQ ID NO: 88019 - DNA, 25 bp, Homo sapien
ctaagtgccatttttcagaggtctc

SEQ ID NO: 88020 - DNA, 25 bp, Homo sapien
aggaatgtcctcaaagaagggattt

SEQ ID NO: 88021 - DNA, 25 bp, Homo sapien
caggaatgtcctcaaagaagggatt

SEQ ID NO: 88022 - DNA, 25 bp, Homo sapien
cagcagcagagtgctcagtggagtt

SEQ ID NO: 88023 - DNA, 25 bp, Homo sapien
gcagcagcagagtgctcagtggagt

SEQ ID NO: 88024 - DNA, 25 bp, Homo sapien
cagcagagtgctcagtggagtttcc

SEQ ID NO: 88025 - DNA, 25 bp, Homo sapien
gcagagtgctcagtggagtttccat

SEQ ID NO: 88026 - DNA, 25 bp, Homo sapien
gggaaggagcattctgttccactgg

SEQ ID NO: 88027 - DNA, 25 bp, Homo sapien
actgcagttcagtgtgacgctgtca

SEQ ID NO: 88028 - DNA, 25 bp, Homo sapien
tgaagggctgtctctgtaactgcag

SEQ ID NO: 88029 - DNA, 25 bp, Homo sapien
cagtgtgacgctgtcaccttccttg

SEQ ID NO: 88030 - DNA, 25 bp, Homo sapien
tgcttgctgcgcagaagaatgtggt

SEQ ID NO: 88031 - DNA, 25 bp, Homo sapien
gtctccttttttaagcctggctgtg

SEQ ID NO: 88032 - DNA, 25 bp, Homo sapien
gctgtgaatcttccactgatcttct

SEQ ID NO: 88033 - DNA, 25 bp, Homo sapien
tggagctgggaatcctgtatgtgca

SEQ ID NO: 88034 - DNA, 25 bp, Homo sapien
tatttccctttgtatgcagcagagt

SEQ ID NO: 88035 - DNA, 25 bp, Homo sapien
ggtacttgatcttctaagccaatct

SEQ ID NO: 88036 - DNA, 25 bp, Homo sapien
cactactgaatttgatggtcatggc

SEQ ID NO: 88037 - DNA, 25 bp, Homo sapien
agagttatagtcagtgccccagggc

SEQ ID NO: 88038 - DNA, 25 bp, Homo sapien
gtctcctgctctgatgggttctcct

SEQ ID NO: 88039 - DNA, 25 bp, Homo sapien
aaagtctcctgctctgatgggttct

SEQ ID NO: 88040 - DNA, 25 bp, Homo sapien
aagtctcctgctctgatgggttctc

SEQ ID NO: 88041 - DNA, 25 bp, Homo sapien
tcctgctctgatgggttctcctctg

SEQ ID NO: 88042 - DNA, 25 bp, Homo sapien
gactgcccacagcaagctaactcgt

SEQ ID NO: 88043 - DNA, 25 bp, Homo sapien
tggagaccacgactgcccacagcaa

SEQ ID NO: 88044 - DNA, 25 bp, Homo sapien
aggtggagaccacgactgcccacag

SEQ ID NO: 88045 - DNA, 25 bp, Homo sapien
cccacagcaagctaactcgtgtcat

SEQ ID NO: 88046 - DNA, 25 bp, Homo sapien
tgagactgagtgactgtctgggcca

SEQ ID NO: 88047 - DNA, 25 bp, Homo sapien
gttcacagagaaacgattctccgtt

SEQ ID NO: 88048 - DNA, 25 bp, Homo sapien
gaagttcacagagaaacgattctcc

SEQ ID NO: 88049 - DNA, 25 bp, Homo sapien
acagagaaacgattctccgttgcat

SEQ ID NO: 88050 - DNA, 25 bp, Homo sapien
tcacagagaaacgattctccgttgc

SEQ ID NO: 88051 - DNA, 25 bp, Homo sapien
gtgagaagcctcctcttctgatctg

SEQ ID NO: 88052 - DNA, 25 bp, Homo sapien
ggtgagaagcctcctcttctgatct

SEQ ID NO: 88053 - DNA, 25 bp, Homo sapien
acaggtggagatcacaagtgcccac

SEQ ID NO: 88054 - DNA, 25 bp, Homo sapien
cccacaggaagccagggcatgccat

SEQ ID NO: 88055 - DNA, 25 bp, Homo sapien
caagacaggtggagatcacaagtgc

SEQ ID NO: 88056 - DNA, 25 bp, Homo sapien
agacaggtggagatcacaagtgccc

SEQ ID NO: 88057 - DNA, 25 bp, Homo sapien
ctcactggtgtcatatgtgcagctc

SEQ ID NO: 88058 - DNA, 25 bp, Homo sapien
acagagaaacgattctctgttgcat

SEQ ID NO: 88059 - DNA, 25 bp, Homo sapien
tgagactgagtgactgtctgagcca

SEQ ID NO: 88060 - DNA, 25 bp, Homo sapien
gaagttcacagagaaacgattctct

SEQ ID NO: 88061 - DNA, 25 bp, Homo sapien
gaggtttctgtaagcctctccctgt

SEQ ID NO: 88062 - DNA, 25 bp, Homo sapien
ttacagcttatagacatcccctctg

SEQ ID NO: 88063 - DNA, 25 bp, Homo sapien
tgtttcctatagtcagatacatttt

SEQ ID NO: 88064 - DNA, 25 bp, Homo sapien
tttatgttcctataaccctgaacac

SEQ ID NO: 88065 - DNA, 25 bp, Homo sapien
tccacatccagtcactctcaccact

SEQ ID NO: 88066 - DNA, 25 bp, Homo sapien
ttccacatccagtcactctcaccac

SEQ ID NO: 88067 - DNA, 25 bp, Homo sapien
cctcttccacatccagtcactctca

SEQ ID NO: 88068 - DNA, 25 bp, Homo sapien
acatccagtcactctcaccactcat

SEQ ID NO: 88069 - DNA, 25 bp, Homo sapien
agtgtttcctcctgtcaaaaagcgg

SEQ ID NO: 88070 - DNA, 25 bp, Homo sapien
ccttcattaggcagaaagtgtttcc

SEQ ID NO: 88071 - DNA, 25 bp, Homo sapien
tcctggtgtcacagagaaaacgcag

SEQ ID NO: 88072 - DNA, 25 bp, Homo sapien
gctgtatttgaatggaaatgctgat

SEQ ID NO: 88073 - DNA, 25 bp, Homo sapien
cagatgccacgtgtaagaaataatc

SEQ ID NO: 88074 - DNA, 25 bp, Homo sapien
gcagatgccacgtgtaagaaataat

SEQ ID NO: 88075 - DNA, 25 bp, Homo sapien
gaagccacagaatcattgctagtag

SEQ ID NO: 88076 - DNA, 25 bp, Homo sapien
gccacagaatcattgctagtagctt

SEQ ID NO: 88077 - DNA, 25 bp, Homo sapien
agaatcattgctagtagcttcttca

SEQ ID NO: 88078 - DNA, 25 bp, Homo sapien
gaatcattgctagtagcttcttcat

SEQ ID NO: 88079 - DNA, 25 bp, Homo sapien
cagagaggtcatgcacggcagctgt

SEQ ID NO: 88080 - DNA, 25 bp, Homo sapien
acagagattccagacttttcccagg

SEQ ID NO: 88081 - DNA, 25 bp, Homo sapien
tgctgagacgggctttggtatcaag

SEQ ID NO: 88082 - DNA, 25 bp, Homo sapien
tcaagtgaggccattaatcgtccct

SEQ ID NO: 88083 - DNA, 25 bp, Homo sapien
ttgggtacagactggtggcgtcagg

SEQ ID NO: 88084 - DNA, 25 bp, Homo sapien
tgggtacagactggtggcgtcaggg

SEQ ID NO: 88085 - DNA, 25 bp, Homo sapien
acagactggtggcgtcaggggagca

SEQ ID NO: 88086 - DNA, 25 bp, Homo sapien
gactggtggcgtcaggggagcactg

SEQ ID NO: 88087 - DNA, 25 bp, Homo sapien
tcatagttcctgcaggaggagtggg

SEQ ID NO: 88088 - DNA, 25 bp, Homo sapien
gttcctgcaggaggagtgggcccac

SEQ ID NO: 88089 - DNA, 25 bp, Homo sapien
catagttcctgcaggaggagtgggc

SEQ ID NO: 88090 - DNA, 25 bp, Homo sapien
tagttcctgcaggaggagtgggccc

SEQ ID NO: 88091 - DNA, 25 bp, Homo sapien
tgccaacaaattgctgcagaagctg

SEQ ID NO: 88092 - DNA, 25 bp, Homo sapien
cactgctgtggctgacttttcataa

SEQ ID NO: 88093 - DNA, 25 bp, Homo sapien
caggagcttttggtctgtacactgc

SEQ ID NO: 88094 - DNA, 25 bp, Homo sapien
ctctgagtggtagcaggagcttttg

SEQ ID NO: 88095 - DNA, 25 bp, Homo sapien
tcaaatatgtctttagcccctcttc

SEQ ID NO: 88096 - DNA, 25 bp, Homo sapien
gatctacagaaaggctatcaaatat

SEQ ID NO: 88097 - DNA, 25 bp, Homo sapien
tgcagtcaagagatctacagaaagg

SEQ ID NO: 88098 - DNA, 25 bp, Homo sapien
aggtcatctgcagtcaagagatcta

SEQ ID NO: 88099 - DNA, 25 bp, Homo sapien
gctgctccagtgctggggactggag

SEQ ID NO: 88100 - DNA, 25 bp, Homo sapien
cagtgctggggactggagaacccat

SEQ ID NO: 88101 - DNA, 25 bp, Homo sapien
ggctgctccagtgctggggactgga

SEQ ID NO: 88102 - DNA, 25 bp, Homo sapien
ctccagtgctggggactggagaacc

SEQ ID NO: 88103 - DNA, 25 bp, Homo sapien
aacagcctcacaagcattgaagtgg

SEQ ID NO: 88104 - DNA, 25 bp, Homo sapien
taacagcctcacaagcattgaagtg

SEQ ID NO: 88105 - DNA, 25 bp, Homo sapien
agcctcacaagcattgaagtggagg

SEQ ID NO: 88106 - DNA, 25 bp, Homo sapien
cagcctcacaagcattgaagtggag

SEQ ID NO: 88107 - DNA, 25 bp, Homo sapien
tgtgcctagtgcttggatagaggtt

SEQ ID NO: 88108 - DNA, 25 bp, Homo sapien
tcctctgttagtctcccctactgtg

SEQ ID NO: 88109 - DNA, 25 bp, Homo sapien
ccttgcaatttgcactcaactcctc

SEQ ID NO: 88110 - DNA, 25 bp, Homo sapien
gtcattaggaacataaaagtacaca

SEQ ID NO: 88111 - DNA, 25 bp, Homo sapien
taggcttgtagttttgatcagtgag

SEQ ID NO: 88112 - DNA, 25 bp, Homo sapien
ttagtgtctctggcctagcagaggg

SEQ ID NO: 88113 - DNA, 25 bp, Homo sapien
gttagtgtctctggcctagcagagg

SEQ ID NO: 88114 - DNA, 25 bp, Homo sapien
tgttagtgtctctggcctagcagag

SEQ ID NO: 88115 - DNA, 25 bp, Homo sapien
gatcagaattagaaagtccagagag

SEQ ID NO: 88116 - DNA, 25 bp, Homo sapien
aaacattaagatcagaattagaaag

SEQ ID NO: 88117 - DNA, 25 bp, Homo sapien
cattaagatcagaattagaaagtcc

SEQ ID NO: 88118 - DNA, 25 bp, Homo sapien
taagatcagaattagaaagtccaga

SEQ ID NO: 88119 - DNA, 25 bp, Homo sapien
cagatgctccctccgagacggttat

SEQ ID NO: 88120 - DNA, 25 bp, Homo sapien
tatttggcccgtctgcttgactgaa

SEQ ID NO: 88121 - DNA, 25 bp, Homo sapien
tacacggctgagtctgatacctgga

SEQ ID NO: 88122 - DNA, 25 bp, Homo sapien
tgcagttcatagtcacagatgctcc

SEQ ID NO: 88123 - DNA, 25 bp, Homo sapien
gacatagaggtcatgcttgtaccaa

SEQ ID NO: 88124 - DNA, 25 bp, Homo sapien
caatagcttattggatctgggaaga

SEQ ID NO: 88125 - DNA, 25 bp, Homo sapien
ttttgagcatgtagtccttttccac

SEQ ID NO: 88126 - DNA, 25 bp, Homo sapien
tctgggaagatactacgctcattaa

SEQ ID NO: 88127 - DNA, 25 bp, Homo sapien
tcaccattattactgcagcagaagc

SEQ ID NO: 88128 - DNA, 25 bp, Homo sapien
tctctgttggaggatttcggaatat

SEQ ID NO: 88129 - DNA, 25 bp, Homo sapien
tcggaatatatcttggacaaaggag

SEQ ID NO: 88130 - DNA, 25 bp, Homo sapien
gccaacaaaaattgccggatcttca

SEQ ID NO: 88131 - DNA, 25 bp, Homo sapien
tattcctaccgagtaactgcagttg

SEQ ID NO: 88132 - DNA, 25 bp, Homo sapien
tgtggcaattaatcttccatgcttc

SEQ ID NO: 88133 - DNA, 25 bp, Homo sapien
atgtagacggcagagtctctgggat

SEQ ID NO: 88134 - DNA, 25 bp, Homo sapien
ccttcctgggcagtcaggttctgag

SEQ ID NO: 88135 - DNA, 25 bp, Homo sapien
ctccaggtgcctggggagcactgtg

SEQ ID NO: 88136 - DNA, 25 bp, Homo sapien
ggctccaggtgcctggggagcactg

SEQ ID NO: 88137 - DNA, 25 bp, Homo sapien
ttaggtacgggctccaggtgcctgg

SEQ ID NO: 88138 - DNA, 25 bp, Homo sapien
cgggctccaggtgcctggggagcac

SEQ ID NO: 88139 - DNA, 25 bp, Homo sapien
tgatgatgttgtagagaagagagat

SEQ ID NO: 88140 - DNA, 25 bp, Homo sapien
aagacaggagtaagaaatgatgcct

SEQ ID NO: 88141 - DNA, 25 bp, Homo sapien
ctggttaacataattggtgatgatg

SEQ ID NO: 88142 - DNA, 25 bp, Homo sapien
aaaaatcacatactgtctggttaac

SEQ ID NO: 88143 - DNA, 25 bp, Homo sapien
aaacacaggcctgctcgtagcactg

SEQ ID NO: 88144 - DNA, 25 bp, Homo sapien
aggcctgctcgtagcactgtgcctc

SEQ ID NO: 88145 - DNA, 25 bp, Homo sapien
gaaaacacaggcctgctcgtagcac

SEQ ID NO: 88146 - DNA, 25 bp, Homo sapien
cagtgaaaacacaggcctgctcgta

SEQ ID NO: 88147 - DNA, 25 bp, Homo sapien
ggcagatacgacattcctccattcc

SEQ ID NO: 88148 - DNA, 25 bp, Homo sapien
ctaaaccactggcagatacgacatt

SEQ ID NO: 88149 - DNA, 25 bp, Homo sapien
aaccactggcagatacgacattcct

SEQ ID NO: 88150 - DNA, 25 bp, Homo sapien
cactggcagatacgacattcctcca

SEQ ID NO: 88151 - DNA, 25 bp, Homo sapien
ttcaggtctttcaaggatcctgcag

SEQ ID NO: 88152 - DNA, 25 bp, Homo sapien
cttttgctgtcagtccaagctccat

SEQ ID NO: 88153 - DNA, 25 bp, Homo sapien
tggtcttttgctgtcagtccaagct

SEQ ID NO: 88154 - DNA, 25 bp, Homo sapien
ttcctcgtgtgttttcaggtctttc

SEQ ID NO: 88155 - DNA, 25 bp, Homo sapien
taccgggctgagaagatagagaatc

SEQ ID NO: 88156 - DNA, 25 bp, Homo sapien
tcagtgtgataaggctcttaccggg

SEQ ID NO: 88157 - DNA, 25 bp, Homo sapien
gaaccaccttggtacaacaaagaga

SEQ ID NO: 88158 - DNA, 25 bp, Homo sapien
tgaaaggaatagctggtggaaagac

SEQ ID NO: 88159 - DNA, 25 bp, Homo sapien
catctgttgattttataacggggct

SEQ ID NO: 88160 - DNA, 25 bp, Homo sapien
tgcatctgttgattttataacgggg

SEQ ID NO: 88161 - DNA, 25 bp, Homo sapien
tgttgattttataacggggctgaag

SEQ ID NO: 88162 - DNA, 25 bp, Homo sapien
tctgttgattttataacggggctga

SEQ ID NO: 88163 - DNA, 25 bp, Homo sapien
gctgcatgctgtatagccctttgtg

SEQ ID NO: 88164 - DNA, 25 bp, Homo sapien
gatggtaccagatgtgtccaggccc

SEQ ID NO: 88165 - DNA, 25 bp, Homo sapien
cacagagctagcaaccagagtccgt

SEQ ID NO: 88166 - DNA, 25 bp, Homo sapien
gctgagctgaaccaatcccctatta

SEQ ID NO: 88167 - DNA, 25 bp, Homo sapien
gtggagctggttgggaagatgtatg

SEQ ID NO: 88168 - DNA, 25 bp, Homo sapien
tggacaggcctacccaagactccca

SEQ ID NO: 88169 - DNA, 25 bp, Homo sapien
cctggacaggcctacccaagactcc

SEQ ID NO: 88170 - DNA, 25 bp, Homo sapien
tttgtgacagtggagctggttggga

SEQ ID NO: 88171 - DNA, 25 bp, Homo sapien
cattggtggccagaggcttgcccat

SEQ ID NO: 88172 - DNA, 25 bp, Homo sapien
tggcattggtggccagaggcttgcc

SEQ ID NO: 88173 - DNA, 25 bp, Homo sapien
gggtggcattggtggccagaggctt

SEQ ID NO: 88174 - DNA, 25 bp, Homo sapien
gcattggtggccagaggcttgccca

SEQ ID NO: 88175 - DNA, 25 bp, Homo sapien
tatggtgccattcgcttatcagccc

SEQ ID NO: 88176 - DNA, 25 bp, Homo sapien
cctgtgttttcagcatatggtgcca

SEQ ID NO: 88177 - DNA, 25 bp, Homo sapien
ggttgatgctgatgctatcaaaaga

SEQ ID NO: 88178 - DNA, 25 bp, Homo sapien
tgcaatccaacaggctcctcagagg

SEQ ID NO: 88179 - DNA, 25 bp, Homo sapien
tcattgtggccatgttggaaggctg

SEQ ID NO: 88180 - DNA, 25 bp, Homo sapien
tgtgatttcagtcttgcaggagcca

SEQ ID NO: 88181 - DNA, 25 bp, Homo sapien
ttagcgttggaacttgacatctgtc

SEQ ID NO: 88182 - DNA, 25 bp, Homo sapien
cttgacatctgtcccaatcattgtg

SEQ ID NO: 88183 - DNA, 25 bp, Homo sapien
ccagagttgtaagtgtcctgtagga

SEQ ID NO: 88184 - DNA, 25 bp, Homo sapien
agtgccccatgttaacattcagcag

SEQ ID NO: 88185 - DNA, 25 bp, Homo sapien
agagtatacagcagggttaccagag

SEQ ID NO: 88186 - DNA, 25 bp, Homo sapien
tcctgtaggaaacctgagtgcccca

SEQ ID NO: 88187 - DNA, 25 bp, Homo sapien
tgtctccagctggttggacaagcaa

SEQ ID NO: 88188 - DNA, 25 bp, Homo sapien
ctgtgtctccagctggttggacaag

SEQ ID NO: 88189 - DNA, 25 bp, Homo sapien
tttgctttctggtttctctgctgtg

SEQ ID NO: 88190 - DNA, 25 bp, Homo sapien
tctttgctttctggtttctctgctg

SEQ ID NO: 88191 - DNA, 25 bp, Homo sapien
gaagaactggctggttgaattctca

SEQ ID NO: 88192 - DNA, 25 bp, Homo sapien
ggagtcaccatggatagggcagcac

SEQ ID NO: 88193 - DNA, 25 bp, Homo sapien
taccaagaaaggtgtgctggagacc

SEQ ID NO: 88194 - DNA, 25 bp, Homo sapien
ggttgaattctcaactctaccaaga

SEQ ID NO: 88195 - DNA, 25 bp, Homo sapien
tcatttccccgataacctcaaggag

SEQ ID NO: 88196 - DNA, 25 bp, Homo sapien
ttgggtgcaccagacaaatcaacca

SEQ ID NO: 88197 - DNA, 25 bp, Homo sapien
gggtcactctacctctgctcagaca

SEQ ID NO: 88198 - DNA, 25 bp, Homo sapien
tgtgttttgggcctcatttgggaac

SEQ ID NO: 88199 - DNA, 25 bp, Homo sapien
cagctctgcctctcaaccaccttct

SEQ ID NO: 88200 - DNA, 25 bp, Homo sapien
ccctcctctgaaccaacacacttgt

SEQ ID NO: 88201 - DNA, 25 bp, Homo sapien
gcctctcaaccaccttctgcctggt

SEQ ID NO: 88202 - DNA, 25 bp, Homo sapien
ctggtccctcctctgaaccaacaca

SEQ ID NO: 88203 - DNA, 25 bp, Homo sapien
ggatgagggaggagatcctctgcat

SEQ ID NO: 88204 - DNA, 25 bp, Homo sapien
agagatggatgagggaggagatcct

SEQ ID NO: 88205 - DNA, 25 bp, Homo sapien
tggatgagggaggagatcctctgca

SEQ ID NO: 88206 - DNA, 25 bp, Homo sapien
gatggatgagggaggagatcctctg

SEQ ID NO: 88207 - DNA, 25 bp, Homo sapien
agggacccctattgacacaggcact

SEQ ID NO: 88208 - DNA, 25 bp, Homo sapien
ggcaccaactcaatggctgacatga

SEQ ID NO: 88209 - DNA, 25 bp, Homo sapien
cttcctgtaccagttgatatagtag

SEQ ID NO: 88210 - DNA, 25 bp, Homo sapien
tagtagttaccgatcgcttctcctt

SEQ ID NO: 88211 - DNA, 25 bp, Homo sapien
tagatgtccttttctcggtatatga

SEQ ID NO: 88212 - DNA, 25 bp, Homo sapien
ccttttctcggtatatgaaagtcat

SEQ ID NO: 88213 - DNA, 25 bp, Homo sapien
gaaaccagggccatagatgtccttt

SEQ ID NO: 88214 - DNA, 25 bp, Homo sapien
aaccagggccatagatgtccttttc

SEQ ID NO: 88215 - DNA, 25 bp, Homo sapien
ctctctgatggtgcaagtatcttaa

SEQ ID NO: 88216 - DNA, 25 bp, Homo sapien
gtcacaggcacagtagtaagaccct

SEQ ID NO: 88217 - DNA, 25 bp, Homo sapien
aagtatcttaagtacagccaggttc

SEQ ID NO: 88218 - DNA, 25 bp, Homo sapien
aagacccttcatctctctctgatgg

SEQ ID NO: 88219 - DNA, 25 bp, Homo sapien
ctatggttttcgctccaggcaagcc

SEQ ID NO: 88220 - DNA, 25 bp, Homo sapien
tatggttttcgctccaggcaagccc

SEQ ID NO: 88221 - DNA, 25 bp, Homo sapien
tctgttgtaaattggctcaaagcct

SEQ ID NO: 88222 - DNA, 25 bp, Homo sapien
gttgttgtgacccacatctgttgta

SEQ ID NO: 88223 - DNA, 25 bp, Homo sapien
tgggatcacacgtatgggaatatct

SEQ ID NO: 88224 - DNA, 25 bp, Homo sapien
agaagctgattctcacgctgcgttc

SEQ ID NO: 88225 - DNA, 25 bp, Homo sapien
gagtaaaagtattcgtttgagtgac

SEQ ID NO: 88226 - DNA, 25 bp, Homo sapien
ggaagccatttggttaatgtcaaaa

SEQ ID NO: 88227 - DNA, 25 bp, Homo sapien
tactatatctatttgaacatggagt

SEQ ID NO: 88228 - DNA, 25 bp, Homo sapien
tttgagtgactatttccactttggg

SEQ ID NO: 88229 - DNA, 25 bp, Homo sapien
gtaggaaggcacaatgaaacacatc

SEQ ID NO: 88230 - DNA, 25 bp, Homo sapien
tcacggctgggtgtttttggacaaa

SEQ ID NO: 88231 - DNA, 25 bp, Homo sapien
aacacatcagtataaaaaccctctt

SEQ ID NO: 88232 - DNA, 25 bp, Homo sapien
tttggacaaaggcttaatgcactcc

SEQ ID NO: 88233 - DNA, 25 bp, Homo sapien
ggttggaattgttcatcactgatgt

SEQ ID NO: 88234 - DNA, 25 bp, Homo sapien
tattgctgtagaccaacatggagta

SEQ ID NO: 88235 - DNA, 25 bp, Homo sapien
aacagaaaataattgggacacaggg

SEQ ID NO: 88236 - DNA, 25 bp, Homo sapien
taaacattgaaatgtgtggttggaa

SEQ ID NO: 88237 - DNA, 25 bp, Homo sapien
tatacaggttctcagtcacgatcag

SEQ ID NO: 88238 - DNA, 25 bp, Homo sapien
acaggttctcagtcacgatcagtcc

SEQ ID NO: 88239 - DNA, 25 bp, Homo sapien
gtagcctactatacaggttctcagt

SEQ ID NO: 88240 - DNA, 25 bp, Homo sapien
cctactatacaggttctcagtcacg

SEQ ID NO: 88241 - DNA, 25 bp, Homo sapien
ggtttcacactatatggcccctgag

SEQ ID NO: 88242 - DNA, 25 bp, Homo sapien
gtatcccccagtcacagtgctacag

SEQ ID NO: 88243 - DNA, 25 bp, Homo sapien
agggaaatggcacttttgcccctgc

SEQ ID NO: 88244 - DNA, 25 bp, Homo sapien
cagggtgaggatatcccagggaaat

SEQ ID NO: 88245 - DNA, 25 bp, Homo sapien
gacctttccagcacagtacacttga

SEQ ID NO: 88246 - DNA, 25 bp, Homo sapien
caactgtggccggtgattgcctaca

SEQ ID NO: 88247 - DNA, 25 bp, Homo sapien
tagaaattccgtatgaggtggctca

SEQ ID NO: 88248 - DNA, 25 bp, Homo sapien
gttaaggcctttacagacaccagtg

SEQ ID NO: 88249 - DNA, 25 bp, Homo sapien
cacagtcacacgggttccttttcca

SEQ ID NO: 88250 - DNA, 25 bp, Homo sapien
tccacagtcacacgggttccttttc

SEQ ID NO: 88251 - DNA, 25 bp, Homo sapien
aaggggaatgctgctttgggtaact

SEQ ID NO: 88252 - DNA, 25 bp, Homo sapien
tcttccttggtgagagaagtgatgg

SEQ ID NO: 88253 - DNA, 25 bp, Homo sapien
ggaatgctgctttgggtaactggtt

SEQ ID NO: 88254 - DNA, 25 bp, Homo sapien
gttcttccttggtgagagaagtgat

SEQ ID NO: 88255 - DNA, 25 bp, Homo sapien
gttgttgtacctccagataggttcc

SEQ ID NO: 88256 - DNA, 25 bp, Homo sapien
tgttgtacctccagataggttcctt

SEQ ID NO: 88257 - DNA, 25 bp, Homo sapien
tgtacctccagataggttcctttgc

SEQ ID NO: 88258 - DNA, 25 bp, Homo sapien
acctccagataggttcctttgccaa

SEQ ID NO: 88259 - DNA, 25 bp, Homo sapien
ctttccaaagaagagttgtgctgtc

SEQ ID NO: 88260 - DNA, 25 bp, Homo sapien
caaatggccgttgtaggcagaaacg

SEQ ID NO: 88261 - DNA, 25 bp, Homo sapien
gatgagttgtgttccctttccaaag

SEQ ID NO: 88262 - DNA, 25 bp, Homo sapien
tgctgtcaaagcactaccacaggca

SEQ ID NO: 88263 - DNA, 25 bp, Homo sapien
cctcacaggtaactagcctggagct

SEQ ID NO: 88264 - DNA, 25 bp, Homo sapien
gtttgatgccagttccgaaaaacat

SEQ ID NO: 88265 - DNA, 25 bp, Homo sapien
gggtagaattccttcaccagacaag

SEQ ID NO: 88266 - DNA, 25 bp, Homo sapien
gacaatagcaggatcaaactctgtt

SEQ ID NO: 88267 - DNA, 25 bp, Homo sapien
agcattgtacttcccactgggagag

SEQ ID NO: 88268 - DNA, 25 bp, Homo sapien
tcatgacaaaaacggatggtttggt

SEQ ID NO: 88269 - DNA, 25 bp, Homo sapien
ggagtgcacagttttattgtcgtgt

SEQ ID NO: 88270 - DNA, 25 bp, Homo sapien
gttgaactgaacatgtcactgaatt

SEQ ID NO: 88271 - DNA, 25 bp, Homo sapien
gcacagttttattgtcgtgttgaac

SEQ ID NO: 88272 - DNA, 25 bp, Homo sapien
tattgtcgtgttgaactgaacatgt

SEQ ID NO: 88273 - DNA, 25 bp, Homo sapien
ctttgggtttatggcagctctttga

SEQ ID NO: 88274 - DNA, 25 bp, Homo sapien
ggcagctctttgaaggttgctttgt

SEQ ID NO: 88275 - DNA, 25 bp, Homo sapien
ttgaaggttgctttgtgttttcagt

SEQ ID NO: 88276 - DNA, 25 bp, Homo sapien
tctttgaaggttgctttgtgttttc

SEQ ID NO: 88277 - DNA, 25 bp, Homo sapien
catgttcaccttctcggtatgaact

SEQ ID NO: 88278 - DNA, 25 bp, Homo sapien
atgttcaccttctcggtatgaacta

SEQ ID NO: 88279 - DNA, 25 bp, Homo sapien
ttcaccttctcggtatgaactatgg

SEQ ID NO: 88280 - DNA, 25 bp, Homo sapien
tgttcaccttctcggtatgaactat

SEQ ID NO: 88281 - DNA, 25 bp, Homo sapien
cttggcagtcaagagaaaattgacg

SEQ ID NO: 88282 - DNA, 25 bp, Homo sapien
ttgcaaacagcattcgtagcccaag

SEQ ID NO: 88283 - DNA, 25 bp, Homo sapien
aacagcattcgtagcccaagcactg

SEQ ID NO: 88284 - DNA, 25 bp, Homo sapien
tgacggcaacagtctttgcaaacag

SEQ ID NO: 88285 - DNA, 25 bp, Homo sapien
tctgggtcagatcagtcaagtactc

SEQ ID NO: 88286 - DNA, 25 bp, Homo sapien
catggtctcttggtcgatgaacaaa

SEQ ID NO: 88287 - DNA, 25 bp, Homo sapien
tgagaacggaatgcaagtaacaggc

SEQ ID NO: 88288 - DNA, 25 bp, Homo sapien
taaggagtgtgagctggcattccct

SEQ ID NO: 88289 - DNA, 25 bp, Homo sapien
aaagtcccaggccagagaatcagtg

SEQ ID NO: 88290 - DNA, 25 bp, Homo sapien
tgtttagataaaagggcacccgctc

SEQ ID NO: 88291 - DNA, 25 bp, Homo sapien
tttgtcttcccatcaagctggagga

SEQ ID NO: 88292 - DNA, 25 bp, Homo sapien
gaaaaagtggtttggctagcagcca

SEQ ID NO: 88293 - DNA, 25 bp, Homo sapien
tgcaaagagtaaagccagaggcgag

SEQ ID NO: 88294 - DNA, 25 bp, Homo sapien
caggaaacccgaggctgggtctcca

SEQ ID NO: 88295 - DNA, 25 bp, Homo sapien
cttttggctgactaatagtgagctc

SEQ ID NO: 88296 - DNA, 25 bp, Homo sapien
agtgcagtgtgacccataagttcaa

SEQ ID NO: 88297 - DNA, 25 bp, Homo sapien
caagtggagttgttggcgacagtca

SEQ ID NO: 88298 - DNA, 25 bp, Homo sapien
cgacttgatgctccacataggtgct

SEQ ID NO: 88299 - DNA, 25 bp, Homo sapien
tgctgagagaaccacaataatgggt

SEQ ID NO: 88300 - DNA, 25 bp, Homo sapien
taatgggttgctagggctctgcacc

SEQ ID NO: 88301 - DNA, 25 bp, Homo sapien
taatattacacaaggtaactcgtga

SEQ ID NO: 88302 - DNA, 25 bp, Homo sapien
tacacaaggtaactcgtgaatgttt

SEQ ID NO: 88303 - DNA, 25 bp, Homo sapien
ttacacaaggtaactcgtgaatgtt

SEQ ID NO: 88304 - DNA, 25 bp, Homo sapien
tattacacaaggtaactcgtgaatg

SEQ ID NO: 88305 - DNA, 25 bp, Homo sapien
cctcttagggtgctatctcatatcc

SEQ ID NO: 88306 - DNA, 25 bp, Homo sapien
gcacttgtctctatccatccaaaga

SEQ ID NO: 88307 - DNA, 25 bp, Homo sapien
gaaatttccctatgtcctctactgt

SEQ ID NO: 88308 - DNA, 25 bp, Homo sapien
tactgttgcattaggctttttgtag

SEQ ID NO: 88309 - DNA, 25 bp, Homo sapien
agcaaggtctttccccaaagcagag

SEQ ID NO: 88310 - DNA, 25 bp, Homo sapien
tagtagggttcttcacacttgttct

SEQ ID NO: 88311 - DNA, 25 bp, Homo sapien
tgtcccagggatctcggatggaatt

SEQ ID NO: 88312 - DNA, 25 bp, Homo sapien
tgtggagggcattgggcaaaaaacc

SEQ ID NO: 88313 - DNA, 25 bp, Homo sapien
gcggtggcaacaacaacaccatgga

SEQ ID NO: 88314 - DNA, 25 bp, Homo sapien
tgttcttgctacaggctgctccagc

SEQ ID NO: 88315 - DNA, 25 bp, Homo sapien
ggttggaccaagactgttcttgcta

SEQ ID NO: 88316 - DNA, 25 bp, Homo sapien
tccagcggtggcaacaacaacacca

SEQ ID NO: 88317 - DNA, 25 bp, Homo sapien
caggcaacagcaattgatagcaggg

SEQ ID NO: 88318 - DNA, 25 bp, Homo sapien
tcttcctctgagtatagatgtggcc

SEQ ID NO: 88319 - DNA, 25 bp, Homo sapien
ttagcaagagtcaggtcaggtccca

SEQ ID NO: 88320 - DNA, 25 bp, Homo sapien
gaatctttcttaccagcatgctccg

SEQ ID NO: 88321 - DNA, 25 bp, Homo sapien
tctagtgttggctccaaatgtcagt

SEQ ID NO: 88322 - DNA, 25 bp, Homo sapien
tgagtttcatgattcctctagtgtt

SEQ ID NO: 88323 - DNA, 25 bp, Homo sapien
tcatgattcctctagtgttggctcc

SEQ ID NO: 88324 - DNA, 25 bp, Homo sapien
tgattcctctagtgttggctccaaa

SEQ ID NO: 88325 - DNA, 25 bp, Homo sapien
attaaacactcatcttttgttcctg

SEQ ID NO: 88326 - DNA, 25 bp, Homo sapien
tttgttaaggcacattagaatctct

SEQ ID NO: 88327 - DNA, 25 bp, Homo sapien
ttttgttcctgtttgttaaggcaca

SEQ ID NO: 88328 - DNA, 25 bp, Homo sapien
tcctgtttgttaaggcacattagaa

SEQ ID NO: 88329 - DNA, 25 bp, Homo sapien
tgtggttaaccatgtcccggtccca

SEQ ID NO: 88330 - DNA, 25 bp, Homo sapien
ctgttgtcatttttcatcccacctc

SEQ ID NO: 88331 - DNA, 25 bp, Homo sapien
taaggcaacgataatgtttcctcgg

SEQ ID NO: 88332 - DNA, 25 bp, Homo sapien
cccagctcccttaaggcaacgataa

SEQ ID NO: 88333 - DNA, 25 bp, Homo sapien
ggttccgctaaagctacctctggag

SEQ ID NO: 88334 - DNA, 25 bp, Homo sapien
cagccttttcccaccggataagaga

SEQ ID NO: 88335 - DNA, 25 bp, Homo sapien
tggagttgaggtactcacccaggct

SEQ ID NO: 88336 - DNA, 25 bp, Homo sapien
taagagaattcattatctggccaag

SEQ ID NO: 88337 - DNA, 25 bp, Homo sapien
tcactctcacttgcgtccccattcc

SEQ ID NO: 88338 - DNA, 25 bp, Homo sapien
tgcgtccccattccaaatgtaaatt

SEQ ID NO: 88339 - DNA, 25 bp, Homo sapien
tcacttgcgtccccattccaaatgt

SEQ ID NO: 88340 - DNA, 25 bp, Homo sapien
actctcacttgcgtccccattccaa

SEQ ID NO: 88341 - DNA, 25 bp, Homo sapien
ggcatcagcttaacgaaccctgctt

SEQ ID NO: 88342 - DNA, 25 bp, Homo sapien
caaaggtcaacctagagccactggt

SEQ ID NO: 88343 - DNA, 25 bp, Homo sapien
gctttagaggaaggataagtcatgg

SEQ ID NO: 88344 - DNA, 25 bp, Homo sapien
gcagagcttcccaagaactagaatt

SEQ ID NO: 88345 - DNA, 25 bp, Homo sapien
acccccacagactgctttacaaata

SEQ ID NO: 88346 - DNA, 25 bp, Homo sapien
cacccccacagactgctttacaaat

SEQ ID NO: 88347 - DNA, 25 bp, Homo sapien
tccctttccaaagaccagcttttca

SEQ ID NO: 88348 - DNA, 25 bp, Homo sapien
tactgtcagtttcgttccctttcca

SEQ ID NO: 88349 - DNA, 25 bp, Homo sapien
aaagaccagcttttcagatccgccc

SEQ ID NO: 88350 - DNA, 25 bp, Homo sapien
gaccagcttttcagatccgccctga

SEQ ID NO: 88351 - DNA, 25 bp, Homo sapien
ttgcactggaatccattaatgggac

SEQ ID NO: 88352 - DNA, 25 bp, Homo sapien
gttgttttgcactggaatccattaa

SEQ ID NO: 88353 - DNA, 25 bp, Homo sapien
tagtaggaatacaccagcagttgtt

SEQ ID NO: 88354 - DNA, 25 bp, Homo sapien
ctgcgtgtagtaggaatacaccagc

SEQ ID NO: 88355 - DNA, 25 bp, Homo sapien
aaaatagcacatgagggcaaacaac

SEQ ID NO: 88356 - DNA, 25 bp, Homo sapien
gaatgaagccttcgaacagtctgac

SEQ ID NO: 88357 - DNA, 25 bp, Homo sapien
gactccttaactcagtgctccattg

SEQ ID NO: 88358 - DNA, 25 bp, Homo sapien
tgctccattggtactgtcattctca

SEQ ID NO: 88359 - DNA, 25 bp, Homo sapien
ttccaaatgtcagcttactattggc

SEQ ID NO: 88360 - DNA, 25 bp, Homo sapien
tgtcagcttactattggctccagta

SEQ ID NO: 88361 - DNA, 25 bp, Homo sapien
cagcttactattggctccagtataa

SEQ ID NO: 88362 - DNA, 25 bp, Homo sapien
caaatgtcagcttactattggctcc

SEQ ID NO: 88363 - DNA, 25 bp, Homo sapien
gcagagattccctcatggaacaaaa

SEQ ID NO: 88364 - DNA, 25 bp, Homo sapien
cagtgaacacacaggttagcgtgga

SEQ ID NO: 88365 - DNA, 25 bp, Homo sapien
gcttctctggtgcagaaagctcaga

SEQ ID NO: 88366 - DNA, 25 bp, Homo sapien
gccaccttttcaatgagggactcag

SEQ ID NO: 88367 - DNA, 25 bp, Homo sapien
ccaacaggagcattaccagcacttg

SEQ ID NO: 88368 - DNA, 25 bp, Homo sapien
ccccaacaggagcattaccagcact

SEQ ID NO: 88369 - DNA, 25 bp, Homo sapien
caacaggagcattaccagcacttgt

SEQ ID NO: 88370 - DNA, 25 bp, Homo sapien
cccaacaggagcattaccagcactt

SEQ ID NO: 88371 - DNA, 25 bp, Homo sapien
ggccaaataccagcttctgggctcc

SEQ ID NO: 88372 - DNA, 25 bp, Homo sapien
tggccaaataccagcttctgggctc

SEQ ID NO: 88373 - DNA, 25 bp, Homo sapien
ttataggttatttgataataagtcc

SEQ ID NO: 88374 - DNA, 25 bp, Homo sapien
taggttatttgataataagtccaga

SEQ ID NO: 88375 - DNA, 25 bp, Homo sapien
tacaggtttataggttatttgataa

SEQ ID NO: 88376 - DNA, 25 bp, Homo sapien
aggttatttgataataagtccagaa

SEQ ID NO: 88377 - DNA, 25 bp, Homo sapien
agggtcctgggggtcaatatagtca

SEQ ID NO: 88378 - DNA, 25 bp, Homo sapien
cagaagctgctctttgcagaagggt

SEQ ID NO: 88379 - DNA, 25 bp, Homo sapien
aacagaagctgctctttgcagaagg

SEQ ID NO: 88380 - DNA, 25 bp, Homo sapien
gtcacgattgctcaactcttcatta

SEQ ID NO: 88381 - DNA, 25 bp, Homo sapien
tccttttccaaatgtcagtttatag

SEQ ID NO: 88382 - DNA, 25 bp, Homo sapien
tggattcacggttaagagagttcct

SEQ ID NO: 88383 - DNA, 25 bp, Homo sapien
ttggattcacggttaagagagttcc

SEQ ID NO: 88384 - DNA, 25 bp, Homo sapien
aatgtcagctttccatagctagtac

SEQ ID NO: 88385 - DNA, 25 bp, Homo sapien
tgtcagctttccatagctagtacca

SEQ ID NO: 88386 - DNA, 25 bp, Homo sapien
agctttccatagctagtaccaccag

SEQ ID NO: 88387 - DNA, 25 bp, Homo sapien
tcagctttccatagctagtaccacc

SEQ ID NO: 88388 - DNA, 25 bp, Homo sapien
ttggcttcacagttagtcatgtctc

SEQ ID NO: 88389 - DNA, 25 bp, Homo sapien
ggggcttcagactctcttcaatcca

SEQ ID NO: 88390 - DNA, 25 bp, Homo sapien
ttgactctcttagaatccctacagg

SEQ ID NO: 88391 - DNA, 25 bp, Homo sapien
tgactctcttagaatccctacagga

SEQ ID NO: 88392 - DNA, 25 bp, Homo sapien
ggcttcagactctcttcaatccatt

SEQ ID NO: 88393 - DNA, 25 bp, Homo sapien
cctttacaataactgacaggtgact

SEQ ID NO: 88394 - DNA, 25 bp, Homo sapien
ccaaatatcaccttgtcgtaggagg

SEQ ID NO: 88395 - DNA, 25 bp, Homo sapien
aatatcaccttgtcgtaggaggttt

SEQ ID NO: 88396 - DNA, 25 bp, Homo sapien
tatcaccttgtcgtaggaggttttc

SEQ ID NO: 88397 - DNA, 25 bp, Homo sapien
caaatatcaccttgtcgtaggaggt

SEQ ID NO: 88398 - DNA, 25 bp, Homo sapien
ggattaaaaggaaggctaacgtgca

SEQ ID NO: 88399 - DNA, 25 bp, Homo sapien
caagggtattactgggaaggagctc

SEQ ID NO: 88400 - DNA, 25 bp, Homo sapien
accaaaaggcagaccggtaggcagg

SEQ ID NO: 88401 - DNA, 25 bp, Homo sapien
gaagctcaacaaaaaccaggcagaa

SEQ ID NO: 88402 - DNA, 25 bp, Homo sapien
tcaacacaatggtgatggaaaattt

SEQ ID NO: 88403 - DNA, 25 bp, Homo sapien
tgctcaacacaatggtgatggaaaa

SEQ ID NO: 88404 - DNA, 25 bp, Homo sapien
gggtttgctcaacacaatggtgatg

SEQ ID NO: 88405 - DNA, 25 bp, Homo sapien
aagggtttgctcaacacaatggtga

SEQ ID NO: 88406 - DNA, 25 bp, Homo sapien
tactctggtccagataaagttatac

SEQ ID NO: 88407 - DNA, 25 bp, Homo sapien
ttactctggtccagataaagttata

SEQ ID NO: 88408 - DNA, 25 bp, Homo sapien
ataaatcattctcggggtgggtcgg

SEQ ID NO: 88409 - DNA, 25 bp, Homo sapien
tgtccaagcataaatcattctcggg

SEQ ID NO: 88410 - DNA, 25 bp, Homo sapien
ctgtccaagcataaatcattctcgg

SEQ ID NO: 88411 - DNA, 25 bp, Homo sapien
agcataaatcattctcggggtgggt

SEQ ID NO: 88412 - DNA, 25 bp, Homo sapien
taatgacaatttgggtgaggcacag

SEQ ID NO: 88413 - DNA, 25 bp, Homo sapien
caatttgggtgaggcacagaatcaa

SEQ ID NO: 88414 - DNA, 25 bp, Homo sapien
tgacaatttgggtgaggcacagaat

SEQ ID NO: 88415 - DNA, 25 bp, Homo sapien
ttaatgacaatttgggtgaggcaca

SEQ ID NO: 88416 - DNA, 25 bp, Homo sapien
tatgatggtgagtcttgttccagtc

SEQ ID NO: 88417 - DNA, 25 bp, Homo sapien
ggtatgatggtgagtcttgttccag

SEQ ID NO: 88418 - DNA, 25 bp, Homo sapien
tgggtatgatggtgagtcttgttcc

SEQ ID NO: 88419 - DNA, 25 bp, Homo sapien
gggtatgatggtgagtcttgttcca

SEQ ID NO: 88420 - DNA, 25 bp, Homo sapien
gtttcctgaacggttgtggctacta

SEQ ID NO: 88421 - DNA, 25 bp, Homo sapien
gcagactaaccgtcactgggtccct

SEQ ID NO: 88422 - DNA, 25 bp, Homo sapien
tgggagggagcagactaaccgtcac

SEQ ID NO: 88423 - DNA, 25 bp, Homo sapien
tggctactatagcacccgtgggagg

SEQ ID NO: 88424 - DNA, 25 bp, Homo sapien
tgactctcagaatggttcctgcgcc

SEQ ID NO: 88425 - DNA, 25 bp, Homo sapien
tgcgccaaagaccagtttgtttcca

SEQ ID NO: 88426 - DNA, 25 bp, Homo sapien
ggttcctgcgccaaagaccagtttg

SEQ ID NO: 88427 - DNA, 25 bp, Homo sapien
cagaatggttcctgcgccaaagacc

SEQ ID NO: 88428 - DNA, 25 bp, Homo sapien
tgtctccgctgcttttcttctcacg

SEQ ID NO: 88429 - DNA, 25 bp, Homo sapien
caaaagtcagcttgtctccgctgct

SEQ ID NO: 88430 - DNA, 25 bp, Homo sapien
tgggcctaactgctaaacgagtccc

SEQ ID NO: 88431 - DNA, 25 bp, Homo sapien
cttttcttctcacggctgtcagcag

SEQ ID NO: 88432 - DNA, 25 bp, Homo sapien
ctctgccagaaaaactcatgccctg

SEQ ID NO: 88433 - DNA, 25 bp, Homo sapien
ctgaacctcccgtaacctccacagc

SEQ ID NO: 88434 - DNA, 25 bp, Homo sapien
accctttacataaactcctctgcca

SEQ ID NO: 88435 - DNA, 25 bp, Homo sapien
agaaaaactcatgccctgaacctcc

SEQ ID NO: 88436 - DNA, 25 bp, Homo sapien
ccaaaggtgagtccgtcagcacctc

SEQ ID NO: 88437 - DNA, 25 bp, Homo sapien
ctttgccaaaggtgagtccgtcagc

SEQ ID NO: 88438 - DNA, 25 bp, Homo sapien
tgattagatgagtccctttgccaaa

SEQ ID NO: 88439 - DNA, 25 bp, Homo sapien
agggctggatgattagatgagtccc

SEQ ID NO: 88440 - DNA, 25 bp, Homo sapien
tgttccagtcccaaaggtgagttta

SEQ ID NO: 88441 - DNA, 25 bp, Homo sapien
gtctggtccctgctccaaagcgcat

SEQ ID NO: 88442 - DNA, 25 bp, Homo sapien
ggtccctgctccaaagcgcatgtca

SEQ ID NO: 88443 - DNA, 25 bp, Homo sapien
tggtccctgctccaaagcgcatgtc

SEQ ID NO: 88444 - DNA, 25 bp, Homo sapien
ctggtccctgctccaaagcgcatgt

SEQ ID NO: 88445 - DNA, 25 bp, Homo sapien
acagagagtttagtgccttttccaa

SEQ ID NO: 88446 - DNA, 25 bp, Homo sapien
taacagagagtttagtgccttttcc

SEQ ID NO: 88447 - DNA, 25 bp, Homo sapien
cagagagtttagtgccttttccaaa

SEQ ID NO: 88448 - DNA, 25 bp, Homo sapien
aacagagagtttagtgccttttcca

SEQ ID NO: 88449 - DNA, 25 bp, Homo sapien
tcctatgtccagcagaacgacgtgc

SEQ ID NO: 88450 - DNA, 25 bp, Homo sapien
cagcagaacgacgtgctggtctgga

SEQ ID NO: 88451 - DNA, 25 bp, Homo sapien
gcagaacgacgtgctggtctggact

SEQ ID NO: 88452 - DNA, 25 bp, Homo sapien
tgtccagcagaacgacgtgctggtc

SEQ ID NO: 88453 - DNA, 25 bp, Homo sapien
tccacagtgcgttctccctaaacaa

SEQ ID NO: 88454 - DNA, 25 bp, Homo sapien
aaaaaccccttgcagtagccaccat

SEQ ID NO: 88455 - DNA, 25 bp, Homo sapien
tgagttccacagtgcgttctcccta

SEQ ID NO: 88456 - DNA, 25 bp, Homo sapien
gttccacagtgcgttctccctaaac

SEQ ID NO: 88457 - DNA, 25 bp, Homo sapien
ggtgcctttgccgaagttgagtgca

SEQ ID NO: 88458 - DNA, 25 bp, Homo sapien
caacagcgaggtgcctttgccgaag

SEQ ID NO: 88459 - DNA, 25 bp, Homo sapien
ccgaagttgagtgcatacccggaat

SEQ ID NO: 88460 - DNA, 25 bp, Homo sapien
gtgaccaacagcgaggtgcctttgc

SEQ ID NO: 88461 - DNA, 25 bp, Homo sapien
aaagatgtatttgtaggttcctgag

SEQ ID NO: 88462 - DNA, 25 bp, Homo sapien
ccaaagatgtatttgtaggttcctg

SEQ ID NO: 88463 - DNA, 25 bp, Homo sapien
tccaaagatgtatttgtaggttcct

SEQ ID NO: 88464 - DNA, 25 bp, Homo sapien
caaagatgtatttgtaggttcctga

SEQ ID NO: 88465 - DNA, 25 bp, Homo sapien
tgatcttcggctgagcaaaaacctc

SEQ ID NO: 88466 - DNA, 25 bp, Homo sapien
cacagtgatcttcggctgagcaaaa

SEQ ID NO: 88467 - DNA, 25 bp, Homo sapien
tcggctgagcaaaaacctcctagaa

SEQ ID NO: 88468 - DNA, 25 bp, Homo sapien
tcacacagtgatcttcggctgagca

SEQ ID NO: 88469 - DNA, 25 bp, Homo sapien
ttgttccccctccaaaggtgagcat

SEQ ID NO: 88470 - DNA, 25 bp, Homo sapien
cttgttccccctccaaaggtgagca

SEQ ID NO: 88471 - DNA, 25 bp, Homo sapien
taccaaaaccgaccaggccaatgtg

SEQ ID NO: 88472 - DNA, 25 bp, Homo sapien
aatccccaaatctggccggcgtgct

SEQ ID NO: 88473 - DNA, 25 bp, Homo sapien
cgaccaggccaatgtgtatcaggaa

SEQ ID NO: 88474 - DNA, 25 bp, Homo sapien
tcatagaaagctttaccaaaaccga

SEQ ID NO: 88475 - DNA, 25 bp, Homo sapien
tcggatttactgccaggcttgttcc

SEQ ID NO: 88476 - DNA, 25 bp, Homo sapien
cggatttactgccaggcttgttccc

SEQ ID NO: 88477 - DNA, 25 bp, Homo sapien
ggatttactgccaggcttgttccca

SEQ ID NO: 88478 - DNA, 25 bp, Homo sapien
cccttgcccaaagattagtttgcct

SEQ ID NO: 88479 - DNA, 25 bp, Homo sapien
tgtcccttgcccaaagattagtttg

SEQ ID NO: 88480 - DNA, 25 bp, Homo sapien
agttgtcccttgcccaaagattagt

SEQ ID NO: 88481 - DNA, 25 bp, Homo sapien
aagttgtcccttgcccaaagattag

SEQ ID NO: 88482 - DNA, 25 bp, Homo sapien
taacggtgagtctcgttccagtccc

SEQ ID NO: 88483 - DNA, 25 bp, Homo sapien
agtctcgttccagtcccaaagaaga

SEQ ID NO: 88484 - DNA, 25 bp, Homo sapien
gggaataacggtgagtctcgttcca

SEQ ID NO: 88485 - DNA, 25 bp, Homo sapien
gaataacggtgagtctcgttccagt

SEQ ID NO: 88486 - DNA, 25 bp, Homo sapien
cactcaaggagctaggaaagtcctc

SEQ ID NO: 88487 - DNA, 25 bp, Homo sapien
cagctgatggttacagaggcaggca

SEQ ID NO: 88488 - DNA, 25 bp, Homo sapien
aacaatcacttgagtgccggacccg

SEQ ID NO: 88489 - DNA, 25 bp, Homo sapien
catgggcatagcagtcaggaattca

SEQ ID NO: 88490 - DNA, 25 bp, Homo sapien
aagacttgtaatctggtcccagtcc

SEQ ID NO: 88491 - DNA, 25 bp, Homo sapien
ggaaagacttgtaatctggtcccag

SEQ ID NO: 88492 - DNA, 25 bp, Homo sapien
gaaagacttgtaatctggtcccagt

SEQ ID NO: 88493 - DNA, 25 bp, Homo sapien
ttggaaagacttgtaatctggtccc

SEQ ID NO: 88494 - DNA, 25 bp, Homo sapien
tataattagcttggtcccagcgccc

SEQ ID NO: 88495 - DNA, 25 bp, Homo sapien
gtcccagcgccccagattaactgat

SEQ ID NO: 88496 - DNA, 25 bp, Homo sapien
agcgccccagattaactgatagttg

SEQ ID NO: 88497 - DNA, 25 bp, Homo sapien
ctggctttataattagcttggtccc

SEQ ID NO: 88498 - DNA, 25 bp, Homo sapien
gggatgaggacagctttgtgtcttt

SEQ ID NO: 88499 - DNA, 25 bp, Homo sapien
gagccttacactaaccctcaaggag

SEQ ID NO: 88500 - DNA, 25 bp, Homo sapien
ttgggatgaggacagctttgtgtct

SEQ ID NO: 88501 - DNA, 25 bp, Homo sapien
ttcagagccttacactaaccctcaa

SEQ ID NO: 88502 - DNA, 25 bp, Homo sapien
gagtgccagttccaaagatgagctt

SEQ ID NO: 88503 - DNA, 25 bp, Homo sapien
gatgagcttgtttgtagcaccgcca

SEQ ID NO: 88504 - DNA, 25 bp, Homo sapien
agcagagtgccagttccaaagatga

SEQ ID NO: 88505 - DNA, 25 bp, Homo sapien
aaagatgagcttgtttgtagcaccg

SEQ ID NO: 88506 - DNA, 25 bp, Homo sapien
caagaggaagtgttcaaaactgatc

SEQ ID NO: 88507 - DNA, 25 bp, Homo sapien
taagcttggagagagaagaagtccc

SEQ ID NO: 88508 - DNA, 25 bp, Homo sapien
cccaacatgactgtaacttgttgat

SEQ ID NO: 88509 - DNA, 25 bp, Homo sapien
gcagtgggtgtccagagcaaacaaa

SEQ ID NO: 88510 - DNA, 25 bp, Homo sapien
cacagcacttcctgcctttactgaa

SEQ ID NO: 88511 - DNA, 25 bp, Homo sapien
catgagtctggcattgttattccca

SEQ ID NO: 88512 - DNA, 25 bp, Homo sapien
acagcacttcctgcctttactgaaa

SEQ ID NO: 88513 - DNA, 25 bp, Homo sapien
ctccaaacatgagtctggcattgtt

SEQ ID NO: 88514 - DNA, 25 bp, Homo sapien
gcaggaataggtcacttagggcaca

SEQ ID NO: 88515 - DNA, 25 bp, Homo sapien
taggaatccacttttcagagcccaa

SEQ ID NO: 88516 - DNA, 25 bp, Homo sapien
ttccacctgagaaggaactgcatta

SEQ ID NO: 88517 - DNA, 25 bp, Homo sapien
cagacagccactgagctaggaatcc

SEQ ID NO: 88518 - DNA, 25 bp, Homo sapien
atgaagtcgtgtcccttttccaaag

SEQ ID NO: 88519 - DNA, 25 bp, Homo sapien
gggagaatatgaagtcgtgtccctt

SEQ ID NO: 88520 - DNA, 25 bp, Homo sapien
gaatatgaagtcgtgtcccttttcc

SEQ ID NO: 88521 - DNA, 25 bp, Homo sapien
tatgaagtcgtgtcccttttccaaa

SEQ ID NO: 88522 - DNA, 25 bp, Homo sapien
cagaggactggtagcaacttttcca

SEQ ID NO: 88523 - DNA, 25 bp, Homo sapien
aaggctgaggactggacctctgcaa

SEQ ID NO: 88524 - DNA, 25 bp, Homo sapien
taggttctggacaaagtgtcacgat

SEQ ID NO: 88525 - DNA, 25 bp, Homo sapien
tacaggccacccacatgtcttagaa

SEQ ID NO: 88526 - DNA, 25 bp, Homo sapien
cagaaagtcttgtgccctttccaaa

SEQ ID NO: 88527 - DNA, 25 bp, Homo sapien
tcacagaaagtcttgtgccctttcc

SEQ ID NO: 88528 - DNA, 25 bp, Homo sapien
ttccaaagacaagaggtgtgtttcc

SEQ ID NO: 88529 - DNA, 25 bp, Homo sapien
tgcaatcacagaaagtcttgtgccc

SEQ ID NO: 88530 - DNA, 25 bp, Homo sapien
ttggtatgaccgagagtttggtccc

SEQ ID NO: 88531 - DNA, 25 bp, Homo sapien
cgaaagtgagttggtaactcccagc

SEQ ID NO: 88532 - DNA, 25 bp, Homo sapien
tggtatgaccgagagtttggtcccc

SEQ ID NO: 88533 - DNA, 25 bp, Homo sapien
tactaataagtagcaactccccagc

SEQ ID NO: 88534 - DNA, 25 bp, Homo sapien
acctgagatgactgcccatggccaa

SEQ ID NO: 88535 - DNA, 25 bp, Homo sapien
tagaacgtgggaggaatactaataa

SEQ ID NO: 88536 - DNA, 25 bp, Homo sapien
caggtggaggttagggaggaaagca

SEQ ID NO: 88537 - DNA, 25 bp, Homo sapien
gtgctattgcaataaccttgactca

SEQ ID NO: 88538 - DNA, 25 bp, Homo sapien
tagtgctattgcaataaccttgact

SEQ ID NO: 88539 - DNA, 25 bp, Homo sapien
ttagtgctattgcaataaccttgac

SEQ ID NO: 88540 - DNA, 25 bp, Homo sapien
gctattgcaataaccttgactcagg

SEQ ID NO: 88541 - DNA, 25 bp, Homo sapien
catccccaaaggttgatttgcctgc

SEQ ID NO: 88542 - DNA, 25 bp, Homo sapien
ggcttcacagtgagcgtagtcccat

SEQ ID NO: 88543 - DNA, 25 bp, Homo sapien
agtgagcgtagtcccatccccaaag

SEQ ID NO: 88544 - DNA, 25 bp, Homo sapien
tccccaaaggttgatttgcctgcat

SEQ ID NO: 88545 - DNA, 25 bp, Homo sapien
tgtgtgtagccttgaggatcccagc

SEQ ID NO: 88546 - DNA, 25 bp, Homo sapien
aagtacaaggtttcagttctgcaac

SEQ ID NO: 88547 - DNA, 25 bp, Homo sapien
gctgctgatgcacaacagaaccttg

SEQ ID NO: 88548 - DNA, 25 bp, Homo sapien
tctttacgatgactcaacgaggtag

SEQ ID NO: 88549 - DNA, 25 bp, Homo sapien
cacggacaatctggttccgggacca

SEQ ID NO: 88550 - DNA, 25 bp, Homo sapien
gacaatctggttccgggaccaaaga

SEQ ID NO: 88551 - DNA, 25 bp, Homo sapien
agggcagcacggacaatctggttcc

SEQ ID NO: 88552 - DNA, 25 bp, Homo sapien
cagcacggacaatctggttccggga

SEQ ID NO: 88553 - DNA, 25 bp, Homo sapien
cagccttgtccccttcccaaagata

SEQ ID NO: 88554 - DNA, 25 bp, Homo sapien
ttggcttgacaagcagccttgtccc

SEQ ID NO: 88555 - DNA, 25 bp, Homo sapien
agataaaggagaagccttgtccttc

SEQ ID NO: 88556 - DNA, 25 bp, Homo sapien
cccaaagataaaggagaagccttgt

SEQ ID NO: 88557 - DNA, 25 bp, Homo sapien
aagaaggtgacgaggtactgggcct

SEQ ID NO: 88558 - DNA, 25 bp, Homo sapien
gaagaaggtgacgaggtactgggcc

SEQ ID NO: 88559 - DNA, 25 bp, Homo sapien
agaaggtgacgaggtactgggcctt

SEQ ID NO: 88560 - DNA, 25 bp, Homo sapien
tgaagaaggtgacgaggtactgggc

SEQ ID NO: 88561 - DNA, 25 bp, Homo sapien
aactgctcatggggaaacaatcttg

SEQ ID NO: 88562 - DNA, 25 bp, Homo sapien
tgtgacaaacacctctacaaaatgg

SEQ ID NO: 88563 - DNA, 25 bp, Homo sapien
ctgctgaatgaagacaaactgctca

SEQ ID NO: 88564 - DNA, 25 bp, Homo sapien
tacaaaatggcttccccagagaaga

SEQ ID NO: 88565 - DNA, 25 bp, Homo sapien
tgggtccctgctccaaactgcaatt

SEQ ID NO: 88566 - DNA, 25 bp, Homo sapien
gggtccctgctccaaactgcaattt

SEQ ID NO: 88567 - DNA, 25 bp, Homo sapien
cctgggtccctgctccaaactgcaa

SEQ ID NO: 88568 - DNA, 25 bp, Homo sapien
ctgggtccctgctccaaactgcaat

SEQ ID NO: 88569 - DNA, 25 bp, Homo sapien
atccacagcagattgctcccacacc

SEQ ID NO: 88570 - DNA, 25 bp, Homo sapien
caaatccacagcagattgctcccac

SEQ ID NO: 88571 - DNA, 25 bp, Homo sapien
aatccacagcagattgctcccacac

SEQ ID NO: 88572 - DNA, 25 bp, Homo sapien
aaatccacagcagattgctcccaca

SEQ ID NO: 88573 - DNA, 25 bp, Homo sapien
tccgttccctgtccgaagataagct

SEQ ID NO: 88574 - DNA, 25 bp, Homo sapien
tccctgtccgaagataagctttcct

SEQ ID NO: 88575 - DNA, 25 bp, Homo sapien
gataactccgttccctgtccgaaga

SEQ ID NO: 88576 - DNA, 25 bp, Homo sapien
tgggtttcacagataactccgttcc

SEQ ID NO: 88577 - DNA, 25 bp, Homo sapien
aaggtcagttgccttgcagaaccag

SEQ ID NO: 88578 - DNA, 25 bp, Homo sapien
cagttgccttgcagaaccagaagaa

SEQ ID NO: 88579 - DNA, 25 bp, Homo sapien
aattgtgtcccagatccaaaggtca

SEQ ID NO: 88580 - DNA, 25 bp, Homo sapien
caggtaaaacagtcaattgtgtccc

SEQ ID NO: 88581 - DNA, 25 bp, Homo sapien
aaaccttagtgccaacagttagacg

SEQ ID NO: 88582 - DNA, 25 bp, Homo sapien
gcattacaaaaaatcccctggcact

SEQ ID NO: 88583 - DNA, 25 bp, Homo sapien
cagttagacgcccacacagtttgga

SEQ ID NO: 88584 - DNA, 25 bp, Homo sapien
tgcacttgacaactagacctgagct

SEQ ID NO: 88585 - DNA, 25 bp, Homo sapien
tacattgagtttggtcccagatcca

SEQ ID NO: 88586 - DNA, 25 bp, Homo sapien
tttacattgagtttggtcccagatc

SEQ ID NO: 88587 - DNA, 25 bp, Homo sapien
gttttacattgagtttggtcccaga

SEQ ID NO: 88588 - DNA, 25 bp, Homo sapien
attgagtttggtcccagatccaaag

SEQ ID NO: 88589 - DNA, 25 bp, Homo sapien
cacagtgcgaggtcgcctacacaaa

SEQ ID NO: 88590 - DNA, 25 bp, Homo sapien
catctgcggtgagcccttgggtaac

SEQ ID NO: 88591 - DNA, 25 bp, Homo sapien
gataggtaatatctatcccagaggg

SEQ ID NO: 88592 - DNA, 25 bp, Homo sapien
tcaccaagaccatggttaagagagt

SEQ ID NO: 88593 - DNA, 25 bp, Homo sapien
tgctcttacagttactgtggttccg

SEQ ID NO: 88594 - DNA, 25 bp, Homo sapien
tcttacagttactgtggttccggct

SEQ ID NO: 88595 - DNA, 25 bp, Homo sapien
gttactgtggttccggctccaaagc

SEQ ID NO: 88596 - DNA, 25 bp, Homo sapien
tacagttactgtggttccggctcca

SEQ ID NO: 88597 - DNA, 25 bp, Homo sapien
cagatgctatatctccagggacaag

SEQ ID NO: 88598 - DNA, 25 bp, Homo sapien
tattttcgagtacaaaaggctgctc

SEQ ID NO: 88599 - DNA, 25 bp, Homo sapien
ggagcccagaggtgattcaatctaa

SEQ ID NO: 88600 - DNA, 25 bp, Homo sapien
ttatctgaccacaaagactgcgcca

SEQ ID NO: 88601 - DNA, 25 bp, Homo sapien
caactgagttcctcttccaaagtat

SEQ ID NO: 88602 - DNA, 25 bp, Homo sapien
caggccagacagtcaactgagttcc

SEQ ID NO: 88603 - DNA, 25 bp, Homo sapien
tcttccaaagtatagcctccccagg

SEQ ID NO: 88604 - DNA, 25 bp, Homo sapien
aaagtatagcctccccagggttgag

SEQ ID NO: 88605 - DNA, 25 bp, Homo sapien
ctggaatagaaagcgactcactcac

SEQ ID NO: 88606 - DNA, 25 bp, Homo sapien
ggtggggaccatcaagttctctctg

SEQ ID NO: 88607 - DNA, 25 bp, Homo sapien
tctacctaggactggggtcctccag

SEQ ID NO: 88608 - DNA, 25 bp, Homo sapien
gcttcctcgtcctaatctacctagg

SEQ ID NO: 88609 - DNA, 25 bp, Homo sapien
tttggtggggaccatcaagttctct

SEQ ID NO: 88610 - DNA, 25 bp, Homo sapien
tccaaaagttagcttgttgcctgca

SEQ ID NO: 88611 - DNA, 25 bp, Homo sapien
cctccaaaagttagcttgttgcctg

SEQ ID NO: 88612 - DNA, 25 bp, Homo sapien
tcctcctccaaaagttagcttgttg

SEQ ID NO: 88613 - DNA, 25 bp, Homo sapien
tcctccaaaagttagcttgttgcct

SEQ ID NO: 88614 - DNA, 25 bp, Homo sapien
ctttaacatggttccccttgcaaag

SEQ ID NO: 88615 - DNA, 25 bp, Homo sapien
tttaacatggttccccttgcaaaga

SEQ ID NO: 88616 - DNA, 25 bp, Homo sapien
cacctttaacatggttccccttgca

SEQ ID NO: 88617 - DNA, 25 bp, Homo sapien
ttaacatggttccccttgcaaagag

SEQ ID NO: 88618 - DNA, 25 bp, Homo sapien
ctcactgataaggtgggttcccttc

SEQ ID NO: 88619 - DNA, 25 bp, Homo sapien
tggaactcactgataaggtgggttc

SEQ ID NO: 88620 - DNA, 25 bp, Homo sapien
gaactcactgataaggtgggttccc

SEQ ID NO: 88621 - DNA, 25 bp, Homo sapien
aactcactgataaggtgggttccct

SEQ ID NO: 88622 - DNA, 25 bp, Homo sapien
aggttttactgataatcttgtccca

SEQ ID NO: 88623 - DNA, 25 bp, Homo sapien
tttactgataatcttgtcccactcc

SEQ ID NO: 88624 - DNA, 25 bp, Homo sapien
tgataatcttgtcccactcccaaag

SEQ ID NO: 88625 - DNA, 25 bp, Homo sapien
tcttgtcccactcccaaagatgaat

SEQ ID NO: 88626 - DNA, 25 bp, Homo sapien
ttgggatgacttggagctttgttcc

SEQ ID NO: 88627 - DNA, 25 bp, Homo sapien
gatgacttggagctttgttccaatt

SEQ ID NO: 88628 - DNA, 25 bp, Homo sapien
ttggagctttgttccaattccaaag

SEQ ID NO: 88629 - DNA, 25 bp, Homo sapien
gagctttgttccaattccaaaggta

SEQ ID NO: 88630 - DNA, 25 bp, Homo sapien
tagtcagtcaaaaacacccagaagc

SEQ ID NO: 88631 - DNA, 25 bp, Homo sapien
cacagtgtttcttagtcagtcaaaa

SEQ ID NO: 88632 - DNA, 25 bp, Homo sapien
cctacaaggagatacgggttacatt

SEQ ID NO: 88633 - DNA, 25 bp, Homo sapien
tacctaagacctagagatatggcct

SEQ ID NO: 88634 - DNA, 25 bp, Homo sapien
gcagtctggtcccactcccgaagat

SEQ ID NO: 88635 - DNA, 25 bp, Homo sapien
ccgaagatcaatttatagctgctat

SEQ ID NO: 88636 - DNA, 25 bp, Homo sapien
cactcccgaagatcaatttatagct

SEQ ID NO: 88637 - DNA, 25 bp, Homo sapien
ggtcccactcccgaagatcaattta

SEQ ID NO: 88638 - DNA, 25 bp, Homo sapien
ggagagactagaagcatagtcccct

SEQ ID NO: 88639 - DNA, 25 bp, Homo sapien
ctagaagcatagtccccttcccaaa

SEQ ID NO: 88640 - DNA, 25 bp, Homo sapien
gagactagaagcatagtccccttcc

SEQ ID NO: 88641 - DNA, 25 bp, Homo sapien
gactagaagcatagtccccttccca

SEQ ID NO: 88642 - DNA, 25 bp, Homo sapien
cagtgtttgatgcctcacaataaac

SEQ ID NO: 88643 - DNA, 25 bp, Homo sapien
caataaactcccttttgtcacttca

SEQ ID NO: 88644 - DNA, 25 bp, Homo sapien
agtgtttgatgcctcacaataaact

SEQ ID NO: 88645 - DNA, 25 bp, Homo sapien
gtgtttgatgcctcacaataaactc

SEQ ID NO: 88646 - DNA, 25 bp, Homo sapien
tccacttttagctgagtgcctgtcc

SEQ ID NO: 88647 - DNA, 25 bp, Homo sapien
gttccacttttagctgagtgcctgt

SEQ ID NO: 88648 - DNA, 25 bp, Homo sapien
ttccacttttagctgagtgcctgtc

SEQ ID NO: 88649 - DNA, 25 bp, Homo sapien
ccaaagatagttttgaagcctccag

SEQ ID NO: 88650 - DNA, 25 bp, Homo sapien
tagtcttgttcctgctccaaagata

SEQ ID NO: 88651 - DNA, 25 bp, Homo sapien
aacaaatagtcttgttcctgctcca

SEQ ID NO: 88652 - DNA, 25 bp, Homo sapien
ttgctttaacaaatagtcttgttcc

SEQ ID NO: 88653 - DNA, 25 bp, Homo sapien
cctgtgttcacactctgacataact

SEQ ID NO: 88654 - DNA, 25 bp, Homo sapien
cagaagtcgggtgccagttccaaat

SEQ ID NO: 88655 - DNA, 25 bp, Homo sapien
ttggactgaccagaagtcgggtgcc

SEQ ID NO: 88656 - DNA, 25 bp, Homo sapien
gactgaccagaagtcgggtgccagt

SEQ ID NO: 88657 - DNA, 25 bp, Homo sapien
gctatcaataaacacagctttggct

SEQ ID NO: 88658 - DNA, 25 bp, Homo sapien
ctatcaataaacacagctttggcta

SEQ ID NO: 88659 - DNA, 25 bp, Homo sapien
cccttcccaaaagcgagtctgttgt

SEQ ID NO: 88660 - DNA, 25 bp, Homo sapien
ttttccttgtaatgggtggtatgaa

SEQ ID NO: 88661 - DNA, 25 bp, Homo sapien
ctggaaaccctgaaaggcggatgct

SEQ ID NO: 88662 - DNA, 25 bp, Homo sapien
agtagctctaagatctggaaaccct

SEQ ID NO: 88663 - DNA, 25 bp, Homo sapien
cttccaaatgtaggtatgtagcttc

SEQ ID NO: 88664 - DNA, 25 bp, Homo sapien
cggatgaacaataaggctggttcct

SEQ ID NO: 88665 - DNA, 25 bp, Homo sapien
ttccaaatgtaggtatgtagcttcc

SEQ ID NO: 88666 - DNA, 25 bp, Homo sapien
atgaacaataaggctggttcctctt

SEQ ID NO: 88667 - DNA, 25 bp, Homo sapien
cacttggagtcttgttccactccca

SEQ ID NO: 88668 - DNA, 25 bp, Homo sapien
ggttgcacttggagtcttgttccac

SEQ ID NO: 88669 - DNA, 25 bp, Homo sapien
tgcacttggagtcttgttccactcc

SEQ ID NO: 88670 - DNA, 25 bp, Homo sapien
ttggttgcacttggagtcttgttcc

SEQ ID NO: 88671 - DNA, 25 bp, Homo sapien
acacaatcagatggtgctttacaag

SEQ ID NO: 88672 - DNA, 25 bp, Homo sapien
caatcagatggtgctttacaagaac

SEQ ID NO: 88673 - DNA, 25 bp, Homo sapien
cacaatcagatggtgctttacaaga

SEQ ID NO: 88674 - DNA, 25 bp, Homo sapien
acacacaatcagatggtgctttaca

SEQ ID NO: 88675 - DNA, 25 bp, Homo sapien
caaaaatcagcttattgtagccacc

SEQ ID NO: 88676 - DNA, 25 bp, Homo sapien
tgggtgtacagccagcctggtccct

SEQ ID NO: 88677 - DNA, 25 bp, Homo sapien
tccaaaaatcagcttattgtagcca

SEQ ID NO: 88678 - DNA, 25 bp, Homo sapien
cctgctccaaaaatcagcttattgt

SEQ ID NO: 88679 - DNA, 25 bp, Homo sapien
agttctttttgcactggtcacttgc

SEQ ID NO: 88680 - DNA, 25 bp, Homo sapien
tcagttctttttgcactggtcactt

SEQ ID NO: 88681 - DNA, 25 bp, Homo sapien
cagttctttttgcactggtcacttg

SEQ ID NO: 88682 - DNA, 25 bp, Homo sapien
cggatgctgagtctggtccctgatc

SEQ ID NO: 88683 - DNA, 25 bp, Homo sapien
caaagattatcttggaagcactgct

SEQ ID NO: 88684 - DNA, 25 bp, Homo sapien
ctggtccctgatccaaagattatct

SEQ ID NO: 88685 - DNA, 25 bp, Homo sapien
gatccaaagattatcttggaagcac

SEQ ID NO: 88686 - DNA, 25 bp, Homo sapien
taatgaatacatgggtccctttccc

SEQ ID NO: 88687 - DNA, 25 bp, Homo sapien
tccagtattcataccgtaggtgaca

SEQ ID NO: 88688 - DNA, 25 bp, Homo sapien
tataatgaatacatgggtccctttc

SEQ ID NO: 88689 - DNA, 25 bp, Homo sapien
gacaccattgcacaaactcacagga

SEQ ID NO: 88690 - DNA, 25 bp, Homo sapien
tggttcctttgccaaattgcaactg

SEQ ID NO: 88691 - DNA, 25 bp, Homo sapien
tcctttgccaaattgcaactgggag

SEQ ID NO: 88692 - DNA, 25 bp, Homo sapien
cctttgccaaattgcaactgggagg

SEQ ID NO: 88693 - DNA, 25 bp, Homo sapien
tttgccaaattgcaactgggaggta

SEQ ID NO: 88694 - DNA, 25 bp, Homo sapien
tgtcagactggagaagatctaggct

SEQ ID NO: 88695 - DNA, 25 bp, Homo sapien
gggctggtgggtgtcagactggaga

SEQ ID NO: 88696 - DNA, 25 bp, Homo sapien
ggctgctctgtctggtataatagtc

SEQ ID NO: 88697 - DNA, 25 bp, Homo sapien
tataatagtctctagctacatgtgg

SEQ ID NO: 88698 - DNA, 25 bp, Homo sapien
caaaatcggtgaataggcagacaga

SEQ ID NO: 88699 - DNA, 25 bp, Homo sapien
tgttgaaggcgtttgcacatgcaaa

SEQ ID NO: 88700 - DNA, 25 bp, Homo sapien
ggatttagagtctctcagctggtac

SEQ ID NO: 88701 - DNA, 25 bp, Homo sapien
aagtcagatttgttgctccaggcca

SEQ ID NO: 88702 - DNA, 25 bp, Homo sapien
cttttctcgaccagcttgacatcac

SEQ ID NO: 88703 - DNA, 25 bp, Homo sapien
tcaaagcttttctcgaccagcttga

SEQ ID NO: 88704 - DNA, 25 bp, Homo sapien
aaagcttttctcgaccagcttgaca

SEQ ID NO: 88705 - DNA, 25 bp, Homo sapien
ctgtttcaaagcttttctcgaccag

SEQ ID NO: 88706 - DNA, 25 bp, Homo sapien
cgctgccacaggaaggatgactcaa

SEQ ID NO: 88707 - DNA, 25 bp, Homo sapien
cagatgggccccttagtgagttccg

SEQ ID NO: 88708 - DNA, 25 bp, Homo sapien
attcttgagagacaggaccattgcc

SEQ ID NO: 88709 - DNA, 25 bp, Homo sapien
gatctggttcgtttagggctatccc

SEQ ID NO: 88710 - DNA, 25 bp, Homo sapien
caagacaggaaacaccgactagact

SEQ ID NO: 88711 - DNA, 25 bp, Homo sapien
agacaggaaacaccgactagacttg

SEQ ID NO: 88712 - DNA, 25 bp, Homo sapien
caggaaacaccgactagacttggct

SEQ ID NO: 88713 - DNA, 25 bp, Homo sapien
aaacaccgactagacttggctctta

SEQ ID NO: 88714 - DNA, 25 bp, Homo sapien
cacagccgcagcgtcatgagcagat

SEQ ID NO: 88715 - DNA, 25 bp, Homo sapien
gagcagattaaacccggccactttc

SEQ ID NO: 88716 - DNA, 25 bp, Homo sapien
gaggaggattcggaacccaatcact

SEQ ID NO: 88717 - DNA, 25 bp, Homo sapien
gattcggaacccaatcactgacagg

SEQ ID NO: 88718 - DNA, 25 bp, Homo sapien
caggctgtcttacaatcttgcagat

SEQ ID NO: 88719 - DNA, 25 bp, Homo sapien
cacaggctgtcttacaatcttgcag

SEQ ID NO: 88720 - DNA, 25 bp, Homo sapien
gagcacaggctgtcttacaatcttg

SEQ ID NO: 88721 - DNA, 25 bp, Homo sapien
agggagcacaggctgtcttacaatc

SEQ ID NO: 88722 - DNA, 25 bp, Homo sapien
taatcataaattcgggtaggatcca

SEQ ID NO: 88723 - DNA, 25 bp, Homo sapien
ctcttcagcaatcttaatcataaat

SEQ ID NO: 88724 - DNA, 25 bp, Homo sapien
cagcaatcttaatcataaattcggg

SEQ ID NO: 88725 - DNA, 25 bp, Homo sapien
attcgggtaggatccagttggtgca

SEQ ID NO: 88726 - DNA, 25 bp, Homo sapien
atgtgcacagccagcggagctgcag

SEQ ID NO: 88727 - DNA, 25 bp, Homo sapien
agcagccttgcctctgccgtgaatg

SEQ ID NO: 88728 - DNA, 25 bp, Homo sapien
ggaatgtgcacagccagcggagctg

SEQ ID NO: 88729 - DNA, 25 bp, Homo sapien
gcagcagccttgcctctgccgtgaa

SEQ ID NO: 88730 - DNA, 25 bp, Homo sapien
acacagcatagcagggcctcgataa

SEQ ID NO: 88731 - DNA, 25 bp, Homo sapien
tcacaacattctccgggacctagag

SEQ ID NO: 88732 - DNA, 25 bp, Homo sapien
gagcccaagagaacccactgaagat

SEQ ID NO: 88733 - DNA, 25 bp, Homo sapien
ttttaatgaaggcatcggcagcagg

SEQ ID NO: 88734 - DNA, 25 bp, Homo sapien
tctgccctgtactaagcaagcgctt

SEQ ID NO: 88735 - DNA, 25 bp, Homo sapien
gcaagcgcttaatcaggtgagatca

SEQ ID NO: 88736 - DNA, 25 bp, Homo sapien
caggtgagatcaaggtctgatcttg

SEQ ID NO: 88737 - DNA, 25 bp, Homo sapien
ctgagcataagtctcgagggtctgc

SEQ ID NO: 88738 - DNA, 25 bp, Homo sapien
tgggtcccggacgtgtccatcaagg

SEQ ID NO: 88739 - DNA, 25 bp, Homo sapien
cgatcaagcctggtatttttgggtt

SEQ ID NO: 88740 - DNA, 25 bp, Homo sapien
cgaagagcaggcgatcaagcctggt

SEQ ID NO: 88741 - DNA, 25 bp, Homo sapien
ttctgcggctccctgagacctgcag

SEQ ID NO: 88742 - DNA, 25 bp, Homo sapien
cttgtgggataaaagtcacctgccc

SEQ ID NO: 88743 - DNA, 25 bp, Homo sapien
cccatgcgggtggatggcgacacta

SEQ ID NO: 88744 - DNA, 25 bp, Homo sapien
tctttttggtggagcgctgctgccc

SEQ ID NO: 88745 - DNA, 25 bp, Homo sapien
gggtctgacgatcccggacgaacag

SEQ ID NO: 88746 - DNA, 25 bp, Homo sapien
gaatccccagagcacgacacagcct

SEQ ID NO: 88747 - DNA, 25 bp, Homo sapien
gcacatggcaggtatacaatgccaa

SEQ ID NO: 88748 - DNA, 25 bp, Homo sapien
tatggagtcatagtttgcacagaga

SEQ ID NO: 88749 - DNA, 25 bp, Homo sapien
cttcatctgtatggagtcatagttt

SEQ ID NO: 88750 - DNA, 25 bp, Homo sapien
ctcaaaggtggcgaaccgtcctgga

SEQ ID NO: 88751 - DNA, 25 bp, Homo sapien
gcagaggtctggctccgtgctttca

SEQ ID NO: 88752 - DNA, 25 bp, Homo sapien
cacatttccagagcgaacagacact

SEQ ID NO: 88753 - DNA, 25 bp, Homo sapien
tgctttcagatgtgttcggccaggg

SEQ ID NO: 88754 - DNA, 25 bp, Homo sapien
cactcctccccactaatcagtggga

SEQ ID NO: 88755 - DNA, 25 bp, Homo sapien
actcctccccactaatcagtgggat

SEQ ID NO: 88756 - DNA, 25 bp, Homo sapien
gcactcctccccactaatcagtggg

SEQ ID NO: 88757 - DNA, 25 bp, Homo sapien
gacacagccctatcctgtccaggag

SEQ ID NO: 88758 - DNA, 25 bp, Homo sapien
tattttcaaaccaccagagaggcag

SEQ ID NO: 88759 - DNA, 25 bp, Homo sapien
tggcaaactgttaagcgccctcctg

SEQ ID NO: 88760 - DNA, 25 bp, Homo sapien
ggcagcctggtgttgcggaaaacac

SEQ ID NO: 88761 - DNA, 25 bp, Homo sapien
tcttaatcaggtgtctaatgagtta

SEQ ID NO: 88762 - DNA, 25 bp, Homo sapien
ggaagaggataactcaagtcttaat

SEQ ID NO: 88763 - DNA, 25 bp, Homo sapien
aactcaagtcttaatcaggtgtcta

SEQ ID NO: 88764 - DNA, 25 bp, Homo sapien
aggtgtctaatgagttaaattgtat

SEQ ID NO: 88765 - DNA, 25 bp, Homo sapien
ggataactcaagtcttaatcaggtg

SEQ ID NO: 88766 - DNA, 25 bp, Homo sapien
caagtcttaatcaggtgtctaatga

SEQ ID NO: 88767 - DNA, 25 bp, Homo sapien
tagacacctgattaagacttgagtt

SEQ ID NO: 88768 - DNA, 25 bp, Homo sapien
gattaagacttgagttatcctcttc

SEQ ID NO: 88769 - DNA, 25 bp, Homo sapien
atacaatttaactcattagacacct

SEQ ID NO: 88770 - DNA, 25 bp, Homo sapien
taactcattagacacctgattaaga

SEQ ID NO: 88771 - DNA, 25 bp, Homo sapien
cacctgattaagacttgagttatcc

SEQ ID NO: 88772 - DNA, 25 bp, Homo sapien
cattagacacctgattaagacttga

SEQ ID NO: 88773 - DNA, 25 bp, Homo sapien
cattcattcaacatacactggatgc

SEQ ID NO: 88774 - DNA, 25 bp, Homo sapien
gaaaacaatggtccagcattaaaag

SEQ ID NO: 88775 - DNA, 25 bp, Homo sapien
tactttaaggcacatattagcaaat

SEQ ID NO: 88776 - DNA, 25 bp, Homo sapien
caaatctaaaggcaaaacctaccat

SEQ ID NO: 88777 - DNA, 25 bp, Homo sapien
gaaccaagcagcatcccatcttata

SEQ ID NO: 88778 - DNA, 25 bp, Homo sapien
ctggatgctatcaaatttaagtgct

SEQ ID NO: 88779 - DNA, 25 bp, Homo sapien
gacttttaatgctggaccattgttt

SEQ ID NO: 88780 - DNA, 25 bp, Homo sapien
tagcatccagtgtatgttgaatgaa

SEQ ID NO: 88781 - DNA, 25 bp, Homo sapien
agcacttaaatttgatagcatccag

SEQ ID NO: 88782 - DNA, 25 bp, Homo sapien
cataaatggtaggttttgcctttag

SEQ ID NO: 88783 - DNA, 25 bp, Homo sapien
aaagaatcttggtatataaagcaga

SEQ ID NO: 88784 - DNA, 25 bp, Homo sapien
tataagatgggatgctgcttggttc

SEQ ID NO: 88785 - DNA, 25 bp, Homo sapien
taatgcatactttgcagaccaatgg

SEQ ID NO: 88786 - DNA, 25 bp, Homo sapien
caatagcagtatgggagcctggcca

SEQ ID NO: 88787 - DNA, 25 bp, Homo sapien
gaccaagagcagtagcactgatgaa

SEQ ID NO: 88788 - DNA, 25 bp, Homo sapien
aatgaccaagagcagtagcactgat

SEQ ID NO: 88789 - DNA, 25 bp, Homo sapien
ggaaaattctgcaaatgtcaatagc

SEQ ID NO: 88790 - DNA, 25 bp, Homo sapien
taaaatcaacattataggacaagga

SEQ ID NO: 88791 - DNA, 25 bp, Homo sapien
ccatactgctattgacatttgcaga

SEQ ID NO: 88792 - DNA, 25 bp, Homo sapien
tggccaggctcccatactgctattg

SEQ ID NO: 88793 - DNA, 25 bp, Homo sapien
ccattggtctgcaaagtatgcatta

SEQ ID NO: 88794 - DNA, 25 bp, Homo sapien
tcatcagtgctactgctcttggtca

SEQ ID NO: 88795 - DNA, 25 bp, Homo sapien
ccttgtcctataatgttgattttag

SEQ ID NO: 88796 - DNA, 25 bp, Homo sapien
gctattgacatttgcagaattttcc

SEQ ID NO: 88797 - DNA, 25 bp, Homo sapien
gccaacaaagttcatgacaacaagg

SEQ ID NO: 88798 - DNA, 25 bp, Homo sapien
caaagttcatgacaacaaggtgcag

SEQ ID NO: 88799 - DNA, 25 bp, Homo sapien
aacaaagttcatgacaacaaggtgc

SEQ ID NO: 88800 - DNA, 25 bp, Homo sapien
caaaggctcgctctggggagatgcc

SEQ ID NO: 88801 - DNA, 25 bp, Homo sapien
aaagttcatgacaacaaggtgcagg

SEQ ID NO: 88802 - DNA, 25 bp, Homo sapien
caacaaagttcatgacaacaaggtg

SEQ ID NO: 88803 - DNA, 25 bp, Homo sapien
aaggcatctccccagagcgagcctt

SEQ ID NO: 88804 - DNA, 25 bp, Homo sapien
tgcaccttgttgtcatgaactttgt

SEQ ID NO: 88805 - DNA, 25 bp, Homo sapien
cctgcaccttgttgtcatgaacttt

SEQ ID NO: 88806 - DNA, 25 bp, Homo sapien
caccttgttgtcatgaactttgttg

SEQ ID NO: 88807 - DNA, 25 bp, Homo sapien
ggcatctccccagagcgagcctttg

SEQ ID NO: 88808 - DNA, 25 bp, Homo sapien
ccttgttgtcatgaactttgttggc

SEQ ID NO: 88809 - DNA, 25 bp, Homo sapien
tgggttgatctgtattctcaggcaa

SEQ ID NO: 88810 - DNA, 25 bp, Homo sapien
gggttgatctgtattctcaggcaaa

SEQ ID NO: 88811 - DNA, 25 bp, Homo sapien
ggttgatctgtattctcaggcaaac

SEQ ID NO: 88812 - DNA, 25 bp, Homo sapien
gtgggttgatctgtattctcaggca

SEQ ID NO: 88813 - DNA, 25 bp, Homo sapien
gtttgcctgagaatacagatcaacc

SEQ ID NO: 88814 - DNA, 25 bp, Homo sapien
tgcctgagaatacagatcaacccac

SEQ ID NO: 88815 - DNA, 25 bp, Homo sapien
ttgcctgagaatacagatcaaccca

SEQ ID NO: 88816 - DNA, 25 bp, Homo sapien
tttgcctgagaatacagatcaaccc

SEQ ID NO: 88817 - DNA, 25 bp, Homo sapien
agaattacttaggacccaaagagct

SEQ ID NO: 88818 - DNA, 25 bp, Homo sapien
cttaggacccaaagagctcagggga

SEQ ID NO: 88819 - DNA, 25 bp, Homo sapien
gaattacttaggacccaaagagctc

SEQ ID NO: 88820 - DNA, 25 bp, Homo sapien
tacttaggacccaaagagctcaggg

SEQ ID NO: 88821 - DNA, 25 bp, Homo sapien
aattacttaggacccaaagagctca

SEQ ID NO: 88822 - DNA, 25 bp, Homo sapien
ttacttaggacccaaagagctcagg

SEQ ID NO: 88823 - DNA, 25 bp, Homo sapien
cctgagctctttgggtcctaagtaa

SEQ ID NO: 88824 - DNA, 25 bp, Homo sapien
cccctgagctctttgggtcctaagt

SEQ ID NO: 88825 - DNA, 25 bp, Homo sapien
ccctgagctctttgggtcctaagta

SEQ ID NO: 88826 - DNA, 25 bp, Homo sapien
gagctctttgggtcctaagtaattc

SEQ ID NO: 88827 - DNA, 25 bp, Homo sapien
tcccctgagctctttgggtcctaag

SEQ ID NO: 88828 - DNA, 25 bp, Homo sapien
tgagctctttgggtcctaagtaatt

SEQ ID NO: 88829 - DNA, 25 bp, Homo sapien
aaatgacagacactaccgacgccga

SEQ ID NO: 88830 - DNA, 25 bp, Homo sapien
ggagctcaagtactcttctaagaac

SEQ ID NO: 88831 - DNA, 25 bp, Homo sapien
tatatacagcaggtacgcgtccagc

SEQ ID NO: 88832 - DNA, 25 bp, Homo sapien
cgacgccgacataactgcacgcaag

SEQ ID NO: 88833 - DNA, 25 bp, Homo sapien
tctaagaaccgcgaaatgacagaca

SEQ ID NO: 88834 - DNA, 25 bp, Homo sapien
aacttcagacgctgcggagtggagc

SEQ ID NO: 88835 - DNA, 25 bp, Homo sapien
tcttagaagagtacttgagctccac

SEQ ID NO: 88836 - DNA, 25 bp, Homo sapien
cttgcgtgcagttatgtcggcgtcg

SEQ ID NO: 88837 - DNA, 25 bp, Homo sapien
tgtcatttcgcggttcttagaagag

SEQ ID NO: 88838 - DNA, 25 bp, Homo sapien
cggcgtcggtagtgtctgtcatttc

SEQ ID NO: 88839 - DNA, 25 bp, Homo sapien
gctccactccgcagcgtctgaagtt

SEQ ID NO: 88840 - DNA, 25 bp, Homo sapien
tgaagttgctggacgcgtacctgct

SEQ ID NO: 88841 - DNA, 25 bp, Homo sapien
cggatgtgctgtttgcgcatgcgca

SEQ ID NO: 88842 - DNA, 25 bp, Homo sapien
ggccagggcgcgtaacaactaatgc

SEQ ID NO: 88843 - DNA, 25 bp, Homo sapien
gcggactgcatcaacagactcaact

SEQ ID NO: 88844 - DNA, 25 bp, Homo sapien
cccggtgtgccaatttgcgcaggcg

SEQ ID NO: 88845 - DNA, 25 bp, Homo sapien
caactaatgcgcagacgcggactgc

SEQ ID NO: 88846 - DNA, 25 bp, Homo sapien
agttaatgcgtctgcgcaatggccc

SEQ ID NO: 88847 - DNA, 25 bp, Homo sapien
gcattagttgttacgcgccctggcc

SEQ ID NO: 88848 - DNA, 25 bp, Homo sapien
tagttgagtctgttgatgcagtccg

SEQ ID NO: 88849 - DNA, 25 bp, Homo sapien
acatccggtgtggtcgacgggtcct

SEQ ID NO: 88850 - DNA, 25 bp, Homo sapien
ggtgcgcatgcgcaaacagcacatc

SEQ ID NO: 88851 - DNA, 25 bp, Homo sapien
gatgcagtccgcgtctgcgcattag

SEQ ID NO: 88852 - DNA, 25 bp, Homo sapien
gggccattgcgcagacgcattaact

SEQ ID NO: 88853 - DNA, 25 bp, Homo sapien
cgccgggtctcactgcggatgaact

SEQ ID NO: 88854 - DNA, 25 bp, Homo sapien
cttaacagaattagggtcaggctgg

SEQ ID NO: 88855 - DNA, 25 bp, Homo sapien
tcaaagtagatgcaaaccgttaaat

SEQ ID NO: 88856 - DNA, 25 bp, Homo sapien
acatctgcagacagcgcccttaaca

SEQ ID NO: 88857 - DNA, 25 bp, Homo sapien
cattgcagggccagatcccgagttc

SEQ ID NO: 88858 - DNA, 25 bp, Homo sapien
agatcccgagttccagttcagaacc

SEQ ID NO: 88859 - DNA, 25 bp, Homo sapien
tccagttcagaaccctgctgaggtc

SEQ ID NO: 88860 - DNA, 25 bp, Homo sapien
ttgcagggccagatcccgagttcca

SEQ ID NO: 88861 - DNA, 25 bp, Homo sapien
agctaaaaggtgagatgaactgggt

SEQ ID NO: 88862 - DNA, 25 bp, Homo sapien
ttgccaggtcctggcgagcccgccc

SEQ ID NO: 88863 - DNA, 25 bp, Homo sapien
ccaggtcctggcgagcccgcccagc

SEQ ID NO: 88864 - DNA, 25 bp, Homo sapien
ccttgccaggtcctggcgagcccgc

SEQ ID NO: 88865 - DNA, 25 bp, Homo sapien
gcgcctgacgccagcaccagctgac

SEQ ID NO: 88866 - DNA, 25 bp, Homo sapien
ggactaaggtagaaagccaggatcc

SEQ ID NO: 88867 - DNA, 25 bp, Homo sapien
ggcactcgcgaggactaaggtagaa

SEQ ID NO: 88868 - DNA, 25 bp, Homo sapien
caagcttgctttcggggatctcaca

SEQ ID NO: 88869 - DNA, 25 bp, Homo sapien
aatgaggggcactcgcgaggactaa

SEQ ID NO: 88870 - DNA, 25 bp, Homo sapien
agtcgagacgagcacgcctggctgc

SEQ ID NO: 88871 - DNA, 25 bp, Homo sapien
caatttcagcgcgatggagacctct

SEQ ID NO: 88872 - DNA, 25 bp, Homo sapien
ccacgactgccgttctggggggcaa

SEQ ID NO: 88873 - DNA, 25 bp, Homo sapien
catcttctctttgccgggcggaggg

SEQ ID NO: 88874 - DNA, 25 bp, Homo sapien
cattcttcagctgagacatggaagt

SEQ ID NO: 88875 - DNA, 25 bp, Homo sapien
gccagctactcagccagccttgaga

SEQ ID NO: 88876 - DNA, 25 bp, Homo sapien
gaagtggggcgccacgtgggcagcc

SEQ ID NO: 88877 - DNA, 25 bp, Homo sapien
ggaggatcctggcttccacattctt

SEQ ID NO: 88878 - DNA, 25 bp, Homo sapien
ccaagcagatcgaaggtgtgcagtg

SEQ ID NO: 88879 - DNA, 25 bp, Homo sapien
tgagtccatgttgaggatccagaga

SEQ ID NO: 88880 - DNA, 25 bp, Homo sapien
tttgggagggatacatatctggcca

SEQ ID NO: 88881 - DNA, 25 bp, Homo sapien
gccatgtctctatcgatgtcacaaa

SEQ ID NO: 88882 - DNA, 25 bp, Homo sapien
gattggaacgtcctaggacagatgc

SEQ ID NO: 88883 - DNA, 25 bp, Homo sapien
ggtccaccaggatgaggtgtttaac

SEQ ID NO: 88884 - DNA, 25 bp, Homo sapien
cagctactcgaagaacagccaatgg

SEQ ID NO: 88885 - DNA, 25 bp, Homo sapien
agatgccacggctttgacccaggct

SEQ ID NO: 88886 - DNA, 25 bp, Homo sapien
gatctggttcagattaacagcttta

SEQ ID NO: 88887 - DNA, 25 bp, Homo sapien
tgggccttctagaacgttatagcct

SEQ ID NO: 88888 - DNA, 25 bp, Homo sapien
ctttaaataacaaggctaggccaat

SEQ ID NO: 88889 - DNA, 25 bp, Homo sapien
taaggagatactacaggctactcac

SEQ ID NO: 88890 - DNA, 25 bp, Homo sapien
tgcgtttgaagtccggccggaatcg

SEQ ID NO: 88891 - DNA, 25 bp, Homo sapien
gtctgcaaacttgcgtttgaagtcc

SEQ ID NO: 88892 - DNA, 25 bp, Homo sapien
gccggaatcgctgcaccagaccagg

SEQ ID NO: 88893 - DNA, 25 bp, Homo sapien
ggattctgtgcgttgcagtggtaaa

SEQ ID NO: 88894 - DNA, 25 bp, Homo sapien
tgtctcggacataggaatccggccg

SEQ ID NO: 88895 - DNA, 25 bp, Homo sapien
tttcccgtactggtatctatccagg

SEQ ID NO: 88896 - DNA, 25 bp, Homo sapien
tgtcggacccgtagatcatagtgat

SEQ ID NO: 88897 - DNA, 25 bp, Homo sapien
catagtgataggcacatcttttcga

SEQ ID NO: 88898 - DNA, 25 bp, Homo sapien
tgagtcgcagatctcctccaccaca

SEQ ID NO: 88899 - DNA, 25 bp, Homo sapien
catggtgggaggcacccttaatctc

SEQ ID NO: 88900 - DNA, 25 bp, Homo sapien
cattgaagatgtgtggctggtcagc

SEQ ID NO: 88901 - DNA, 25 bp, Homo sapien
tgtggctggtcagcatagacatggt

SEQ ID NO: 88902 - DNA, 25 bp, Homo sapien
tgaggaaaggccactggaagccctt

SEQ ID NO: 88903 - DNA, 25 bp, Homo sapien
tggcagttaagcagaccctggatgg

SEQ ID NO: 88904 - DNA, 25 bp, Homo sapien
acaagcacagggtgtcggcagacct

SEQ ID NO: 88905 - DNA, 25 bp, Homo sapien
tgcaggtgaagggaactccaggacc

SEQ ID NO: 88906 - DNA, 25 bp, Homo sapien
tgagacacaggcaggacaacagcac

SEQ ID NO: 88907 - DNA, 25 bp, Homo sapien
agcacttgagtgtccctagcttagg

SEQ ID NO: 88908 - DNA, 25 bp, Homo sapien
tgggcatggagaacccagacatggc

SEQ ID NO: 88909 - DNA, 25 bp, Homo sapien
tgtgggacagggacgggcttatcct

SEQ ID NO: 88910 - DNA, 25 bp, Homo sapien
ctgataaggacagggaacttgtggc

SEQ ID NO: 88911 - DNA, 25 bp, Homo sapien
ggaccagtagtacaaagcaccagga

SEQ ID NO: 88912 - DNA, 25 bp, Homo sapien
tgggaaccacccagtggctgataag

SEQ ID NO: 88913 - DNA, 25 bp, Homo sapien
tagagggtcatgcagtgggaaccac

SEQ ID NO: 88914 - DNA, 25 bp, Homo sapien
cgggcaaacgccacactaaaaggag

SEQ ID NO: 88915 - DNA, 25 bp, Homo sapien
ttagaaccgtggaattctgggccca

SEQ ID NO: 88916 - DNA, 25 bp, Homo sapien
cacttcccgtggcatgatgaaaaca

SEQ ID NO: 88917 - DNA, 25 bp, Homo sapien
tctctcaggcatcacacaggctgtt

SEQ ID NO: 88918 - DNA, 25 bp, Homo sapien
ttctgccagatagaccaggaccctg

SEQ ID NO: 88919 - DNA, 25 bp, Homo sapien
gacctcatccgaggactctgtatga

SEQ ID NO: 88920 - DNA, 25 bp, Homo sapien
ctgagagaaaggaccctccagacct

SEQ ID NO: 88921 - DNA, 25 bp, Homo sapien
gacagaccctcagaatctcaagtgg

SEQ ID NO: 88922 - DNA, 25 bp, Homo sapien
ggagacctctggcactactgtaact

SEQ ID NO: 88923 - DNA, 25 bp, Homo sapien
ggtgaagtctacagatctcctaggc

SEQ ID NO: 88924 - DNA, 25 bp, Homo sapien
gcagagtcaccaaccaagataatgg

SEQ ID NO: 88925 - DNA, 25 bp, Homo sapien
gagcatcagccatcagtaaggtgaa

SEQ ID NO: 88926 - DNA, 25 bp, Homo sapien
caattattctgccttagccacccga

SEQ ID NO: 88927 - DNA, 25 bp, Homo sapien
tgcctccctggttctagcaattatt

SEQ ID NO: 88928 - DNA, 25 bp, Homo sapien
cctccctggttctagcaattattct

SEQ ID NO: 88929 - DNA, 25 bp, Homo sapien
ccctggttctagcaattattctgcc

SEQ ID NO: 88930 - DNA, 25 bp, Homo sapien
cacaaagccgccattgtcatcctga

SEQ ID NO: 88931 - DNA, 25 bp, Homo sapien
acaaagccgccattgtcatcctgac

SEQ ID NO: 88932 - DNA, 25 bp, Homo sapien
gccgccattgtcatcctgacccgtt

SEQ ID NO: 88933 - DNA, 25 bp, Homo sapien
aagccgccattgtcatcctgacccg

SEQ ID NO: 88934 - DNA, 25 bp, Homo sapien
gtgcatcccttcagagtaatgccaa

SEQ ID NO: 88935 - DNA, 25 bp, Homo sapien
gcatcccttcagagtaatgccaaca

SEQ ID NO: 88936 - DNA, 25 bp, Homo sapien
cccttcagagtaatgccaacatttt

SEQ ID NO: 88937 - DNA, 25 bp, Homo sapien
tcccttcagagtaatgccaacattt

SEQ ID NO: 88938 - DNA, 25 bp, Homo sapien
caccccagcaaagtggttaccactg

SEQ ID NO: 88939 - DNA, 25 bp, Homo sapien
tactcaggcttatctgcagagcctc

SEQ ID NO: 88940 - DNA, 25 bp, Homo sapien
agagagggctgaaggtgtactttat

SEQ ID NO: 88941 - DNA, 25 bp, Homo sapien
ttcccaccactgactactcaggctt

SEQ ID NO: 88942 - DNA, 25 bp, Homo sapien
tgtttcacgtgtggtttctggtgca

SEQ ID NO: 88943 - DNA, 25 bp, Homo sapien
cagcatcaagaatcgtgatgttggg

SEQ ID NO: 88944 - DNA, 25 bp, Homo sapien
gatgttggggacctgagaacaacct

SEQ ID NO: 88945 - DNA, 25 bp, Homo sapien
ttggggacctgagaacaacctggaa

SEQ ID NO: 88946 - DNA, 25 bp, Homo sapien
gagggctgatcaaaggtgttcagca

SEQ ID NO: 88947 - DNA, 25 bp, Homo sapien
cagcaggacaaactcggtgacggtg

SEQ ID NO: 88948 - DNA, 25 bp, Homo sapien
tccgggacagcaaagttgcggagga

SEQ ID NO: 88949 - DNA, 25 bp, Homo sapien
tgtggaggcgcctgtccatgagggt

SEQ ID NO: 88950 - DNA, 25 bp, Homo sapien
agtgtgaggaggtaggtcaggagga

SEQ ID NO: 88951 - DNA, 25 bp, Homo sapien
gacagcaaagttgcggaggaagtag

SEQ ID NO: 88952 - DNA, 25 bp, Homo sapien
ttgtatcctgtgaggatgttggcca

SEQ ID NO: 88953 - DNA, 25 bp, Homo sapien
aaatagagcaaactttgcaggaagc

SEQ ID NO: 88954 - DNA, 25 bp, Homo sapien
gatggtggcataatgcaaagggtta

SEQ ID NO: 88955 - DNA, 25 bp, Homo sapien
tacggccacgtacctgtcaaaggac

SEQ ID NO: 88956 - DNA, 25 bp, Homo sapien
tgcaaagggttacatacggccacgt

SEQ ID NO: 88957 - DNA, 25 bp, Homo sapien
tgtcatccactaacagaggactagc

SEQ ID NO: 88958 - DNA, 25 bp, Homo sapien
aacagaggactagctggacacagac

SEQ ID NO: 88959 - DNA, 25 bp, Homo sapien
cactaacagaggactagctggacac

SEQ ID NO: 88960 - DNA, 25 bp, Homo sapien
catccactaacagaggactagctgg

SEQ ID NO: 88961 - DNA, 25 bp, Homo sapien
caaaacccaggagctctatcagagt

SEQ ID NO: 88962 - DNA, 25 bp, Homo sapien
tcaccacggtgttaagcaatgccgc

SEQ ID NO: 88963 - DNA, 25 bp, Homo sapien
tcatagacagagtgcccagtaagct

SEQ ID NO: 88964 - DNA, 25 bp, Homo sapien
ggttgagcatcagggtcaccacggt

SEQ ID NO: 88965 - DNA, 25 bp, Homo sapien
tggggatgctgagcttcagtttttt

SEQ ID NO: 88966 - DNA, 25 bp, Homo sapien
tctggggatgctgagcttcagtttt

SEQ ID NO: 88967 - DNA, 25 bp, Homo sapien
gggatgctgagcttcagtttttttt

SEQ ID NO: 88968 - DNA, 25 bp, Homo sapien
ggatgctgagcttcagttttttttt

SEQ ID NO: 88969 - DNA, 25 bp, Homo sapien
tgtgcaagattaagacggacaaaaa

SEQ ID NO: 88970 - DNA, 25 bp, Homo sapien
gcaagattaagacggacaaaaacca

SEQ ID NO: 88971 - DNA, 25 bp, Homo sapien
agattaagacggacaaaaaccacat

SEQ ID NO: 88972 - DNA, 25 bp, Homo sapien
gcttgtgcaagattaagacggacaa

SEQ ID NO: 88973 - DNA, 25 bp, Homo sapien
caaaggcaatagtcaaaagcccaca

SEQ ID NO: 88974 - DNA, 25 bp, Homo sapien
cattattgggatattctgaggactc

SEQ ID NO: 88975 - DNA, 25 bp, Homo sapien
ggcatatgtgactcccatgagagta

SEQ ID NO: 88976 - DNA, 25 bp, Homo sapien
ttaaatttgtgaaagggacatgact

SEQ ID NO: 88977 - DNA, 25 bp, Homo sapien
ccagagcatgcgcttgccatagaaa

SEQ ID NO: 88978 - DNA, 25 bp, Homo sapien
cgcttgccatagaaaggctgggttg

SEQ ID NO: 88979 - DNA, 25 bp, Homo sapien
gagcatgcgcttgccatagaaaggc

SEQ ID NO: 88980 - DNA, 25 bp, Homo sapien
catgcgcttgccatagaaaggctgg

SEQ ID NO: 88981 - DNA, 25 bp, Homo sapien
tctgcctgcagacataatccttttt

SEQ ID NO: 88982 - DNA, 25 bp, Homo sapien
ctctgcctgcagacataatcctttt

SEQ ID NO: 88983 - DNA, 25 bp, Homo sapien
tcctctgcctgcagacataatcctt

SEQ ID NO: 88984 - DNA, 25 bp, Homo sapien
tgcctgcagacataatcctttttcc

SEQ ID NO: 88985 - DNA, 25 bp, Homo sapien
ttggtggccccaaatgaaccaggct

SEQ ID NO: 88986 - DNA, 25 bp, Homo sapien
cagtacactgctactttggtggccc

SEQ ID NO: 88987 - DNA, 25 bp, Homo sapien
cacttggcagggtgactatcttaca

SEQ ID NO: 88988 - DNA, 25 bp, Homo sapien
gtgaaaagcccaaccaaccatgtga

SEQ ID NO: 88989 - DNA, 25 bp, Homo sapien
gtttccagatgaaaagctcacgtgc

SEQ ID NO: 88990 - DNA, 25 bp, Homo sapien
gggtaattttcctctaatgtcgcga

SEQ ID NO: 88991 - DNA, 25 bp, Homo sapien
taatattgtaatcgcaggtccagtg

SEQ ID NO: 88992 - DNA, 25 bp, Homo sapien
tcctcccagataaaaagacgaagct

SEQ ID NO: 88993 - DNA, 25 bp, Homo sapien
gaattgtagccgcagatcaggcggt

SEQ ID NO: 88994 - DNA, 25 bp, Homo sapien
gaggacttgcttttgcgcctgcgca

SEQ ID NO: 88995 - DNA, 25 bp, Homo sapien
catcgccattttgcccggaagagga

SEQ ID NO: 88996 - DNA, 25 bp, Homo sapien
taaaagagaacggagcttggcggcc

SEQ ID NO: 88997 - DNA, 25 bp, Homo sapien
attcaggtcccggtgagcaggtcag

SEQ ID NO: 88998 - DNA, 25 bp, Homo sapien
tgatacccctagcacgagctgtcct

SEQ ID NO: 88999 - DNA, 25 bp, Homo sapien
agcgcgtcctcacatgacccgaggt

SEQ ID NO: 89000 - DNA, 25 bp, Homo sapien
ggcctggttcactgggtcagggcag

SEQ ID NO: 89001 - DNA, 25 bp, Homo sapien
ccctgagaacgaggccgaggtgctc

SEQ ID NO: 89002 - DNA, 25 bp, Homo sapien
aattccagaagctgacaccgggctg

SEQ ID NO: 89003 - DNA, 25 bp, Homo sapien
agttatcgcagacccacatcggagg

SEQ ID NO: 89004 - DNA, 25 bp, Homo sapien
tgggttccccgcatctcagttatcg

SEQ ID NO: 89005 - DNA, 25 bp, Homo sapien
tggtgcctgcagagcgaagctcgaa

SEQ ID NO: 89006 - DNA, 25 bp, Homo sapien
gggaggacattgctatcaccgcgcg

SEQ ID NO: 89007 - DNA, 25 bp, Homo sapien
gattcattatgctaactccccaaga

SEQ ID NO: 89008 - DNA, 25 bp, Homo sapien
agcagaagtcctcgcgtgggtgcaa

SEQ ID NO: 89009 - DNA, 25 bp, Homo sapien
gagcgtgtaaaaggatgatggagcc

SEQ ID NO: 89010 - DNA, 25 bp, Homo sapien
ctgagcgtgtaaaaggatgatggag

SEQ ID NO: 89011 - DNA, 25 bp, Homo sapien
agcgtgtaaaaggatgatggagccc

SEQ ID NO: 89012 - DNA, 25 bp, Homo sapien
tgagcgtgtaaaaggatgatggagc

SEQ ID NO: 89013 - DNA, 25 bp, Homo sapien
tgcgagggccctgcgacgctgtgga

SEQ ID NO: 89014 - DNA, 25 bp, Homo sapien
gcgagggccctgcgacgctgtggac

SEQ ID NO: 89015 - DNA, 25 bp, Homo sapien
caaggaagaggtagtgtgggcgaca

SEQ ID NO: 89016 - DNA, 25 bp, Homo sapien
gccgtgtggtcagcggtttcccaag

SEQ ID NO: 89017 - DNA, 25 bp, Homo sapien
aaaagagatagcagaggtactgagg

SEQ ID NO: 89018 - DNA, 25 bp, Homo sapien
ccggaagccgcaaggaagaggtagt

SEQ ID NO: 89019 - DNA, 25 bp, Homo sapien
attgcaggaacgaaaggcctcttac

SEQ ID NO: 89020 - DNA, 25 bp, Homo sapien
ctcctaatattgcaggaacgaaagg

SEQ ID NO: 89021 - DNA, 25 bp, Homo sapien
accactcctaatattgcaggaacga

SEQ ID NO: 89022 - DNA, 25 bp, Homo sapien
aatattgcaggaacgaaaggcctct

SEQ ID NO: 89023 - DNA, 25 bp, Homo sapien
tactttgagtaagaatccatgactt

SEQ ID NO: 89024 - DNA, 25 bp, Homo sapien
tattcagtagcgaacacaaagcaag

SEQ ID NO: 89025 - DNA, 25 bp, Homo sapien
tagcctagtgtctgcagatttcaag

SEQ ID NO: 89026 - DNA, 25 bp, Homo sapien
cagccatttgaatatcactatcatg

SEQ ID NO: 89027 - DNA, 25 bp, Homo sapien
tgggtgagggagttgcagcaacaac

SEQ ID NO: 89028 - DNA, 25 bp, Homo sapien
tgtgggtgagggagttgcagcaaca

SEQ ID NO: 89029 - DNA, 25 bp, Homo sapien
gtgggtgagggagttgcagcaacaa

SEQ ID NO: 89030 - DNA, 25 bp, Homo sapien
ggtgtatgaccccagccccagttca

SEQ ID NO: 89031 - DNA, 25 bp, Homo sapien
cagtaaattctggatcagtcccact

SEQ ID NO: 89032 - DNA, 25 bp, Homo sapien
aaggtaggcccagatcaacatgcat

SEQ ID NO: 89033 - DNA, 25 bp, Homo sapien
ctctgcagcagtttggactacatct

SEQ ID NO: 89034 - DNA, 25 bp, Homo sapien
caaaagcaatgctagtggcttccca

SEQ ID NO: 89035 - DNA, 25 bp, Homo sapien
taagtgcctgacctgaacctctgtt

SEQ ID NO: 89036 - DNA, 25 bp, Homo sapien
tgatggagcaacgtggcagaaagac

SEQ ID NO: 89037 - DNA, 25 bp, Homo sapien
ggtaacacatgggtgtgcctgagca

SEQ ID NO: 89038 - DNA, 25 bp, Homo sapien
tgtaacttaaaggataaatgcttaa

SEQ ID NO: 89039 - DNA, 25 bp, Homo sapien
aatgcttaaggggatggatatctca

SEQ ID NO: 89040 - DNA, 25 bp, Homo sapien
ataaaataaaagtgtaattggattg

SEQ ID NO: 89041 - DNA, 25 bp, Homo sapien
gatatctcattctccataatgtgat

SEQ ID NO: 89042 - DNA, 25 bp, Homo sapien
ttcgactggaaaacttctggatctc

SEQ ID NO: 89043 - DNA, 25 bp, Homo sapien
aacttggcctctctgattcgactgg

SEQ ID NO: 89044 - DNA, 25 bp, Homo sapien
cccgtcacgatgagaggaaaaatca

SEQ ID NO: 89045 - DNA, 25 bp, Homo sapien
caagtgattgtggatcctggctgcc

SEQ ID NO: 89046 - DNA, 25 bp, Homo sapien
tgaaatttctaaccaaccctggcca

SEQ ID NO: 89047 - DNA, 25 bp, Homo sapien
caaatgtggacttctcccacgctca

SEQ ID NO: 89048 - DNA, 25 bp, Homo sapien
tagaactttcccgactgtggcaact

SEQ ID NO: 89049 - DNA, 25 bp, Homo sapien
ggtaacagttacatcagtggaggtg

SEQ ID NO: 89050 - DNA, 25 bp, Homo sapien
ggtaaagtgccatctccgaggaagc

SEQ ID NO: 89051 - DNA, 25 bp, Homo sapien
tttttctggtaaagtgccatctccg

SEQ ID NO: 89052 - DNA, 25 bp, Homo sapien
gaggtttatagagtttaataccatg

SEQ ID NO: 89053 - DNA, 25 bp, Homo sapien
gaatgagaggtttatagagtttaat

SEQ ID NO: 89054 - DNA, 25 bp, Homo sapien
tattacacaagataaacagtgtcag

SEQ ID NO: 89055 - DNA, 25 bp, Homo sapien
gaaagccatgtataatccaccacca

SEQ ID NO: 89056 - DNA, 25 bp, Homo sapien
acagagaggaaatttcatgggtact

SEQ ID NO: 89057 - DNA, 25 bp, Homo sapien
catgctttaccagagagaacatttt

SEQ ID NO: 89058 - DNA, 25 bp, Homo sapien
gtagcagtgactgccagtggtaata

SEQ ID NO: 89059 - DNA, 25 bp, Homo sapien
gataccgtgagatcctggaaccacc

SEQ ID NO: 89060 - DNA, 25 bp, Homo sapien
gaaggttggccatctctctcaaagc

SEQ ID NO: 89061 - DNA, 25 bp, Homo sapien
taatatgtagatgggatcggatacc

SEQ ID NO: 89062 - DNA, 25 bp, Homo sapien
cgggaaagctgtcagtttcagtgaa

SEQ ID NO: 89063 - DNA, 25 bp, Homo sapien
ttctccagcaagtgaaggatgacca

SEQ ID NO: 89064 - DNA, 25 bp, Homo sapien
tgtctctaatctcttacccatcaac

SEQ ID NO: 89065 - DNA, 25 bp, Homo sapien
tggcacttggccaatctgggcttac

SEQ ID NO: 89066 - DNA, 25 bp, Homo sapien
catccactgaaggtcagaactttgc

SEQ ID NO: 89067 - DNA, 25 bp, Homo sapien
atgcatggttatgggcaaggttatc

SEQ ID NO: 89068 - DNA, 25 bp, Homo sapien
tatcaggggcatcattctgatgaca

SEQ ID NO: 89069 - DNA, 25 bp, Homo sapien
ttctcatccactgaaggtcagaact

SEQ ID NO: 89070 - DNA, 25 bp, Homo sapien
aatccggagacaggatacttggacc

SEQ ID NO: 89071 - DNA, 25 bp, Homo sapien
tggaggagagccagtacataaacac

SEQ ID NO: 89072 - DNA, 25 bp, Homo sapien
tgtccaggtcatgtacaacacgctg

SEQ ID NO: 89073 - DNA, 25 bp, Homo sapien
agtgcgtactgctggaatccggaga

SEQ ID NO: 89074 - DNA, 25 bp, Homo sapien
cctttttcacagaggatgagccctt

SEQ ID NO: 89075 - DNA, 25 bp, Homo sapien
ctttttcacagaggatgagccctta

SEQ ID NO: 89076 - DNA, 25 bp, Homo sapien
tttttcacagaggatgagcccttac

SEQ ID NO: 89077 - DNA, 25 bp, Homo sapien
gcagctgacgcgtcatttcagcatt

SEQ ID NO: 89078 - DNA, 25 bp, Homo sapien
gattccgcatgcgttgttcacgctc

SEQ ID NO: 89079 - DNA, 25 bp, Homo sapien
gttgttcacgctctcgcagctgacg

SEQ ID NO: 89080 - DNA, 25 bp, Homo sapien
tagctccaactgattccgcatgcgt

SEQ ID NO: 89081 - DNA, 25 bp, Homo sapien
ctgctgctgctagggatattgggag

SEQ ID NO: 89082 - DNA, 25 bp, Homo sapien
tcagccaagtgtgtcgtgccaggga

SEQ ID NO: 89083 - DNA, 25 bp, Homo sapien
ttccaggttgtaggagagggttgtg

SEQ ID NO: 89084 - DNA, 25 bp, Homo sapien
gtgtgtcgtgccagggatactttga

SEQ ID NO: 89085 - DNA, 25 bp, Homo sapien
tgccagaatgcgcacagaacataag

SEQ ID NO: 89086 - DNA, 25 bp, Homo sapien
tgtgtgccacagttcctaggactgg

SEQ ID NO: 89087 - DNA, 25 bp, Homo sapien
catgggccagcaaaagcaatcatga

SEQ ID NO: 89088 - DNA, 25 bp, Homo sapien
ggaagatcacttggctacccagtgc

SEQ ID NO: 89089 - DNA, 25 bp, Homo sapien
tttaaaagggcccacaatgctccaa

SEQ ID NO: 89090 - DNA, 25 bp, Homo sapien
tagtatctatctctaggacagctcc

SEQ ID NO: 89091 - DNA, 25 bp, Homo sapien
gaagcacctgggtgtgcctacctac

SEQ ID NO: 89092 - DNA, 25 bp, Homo sapien
gacatgaaactatcacaggtgctgg

SEQ ID NO: 89093 - DNA, 25 bp, Homo sapien
ggtctgccacaaggtacctccaggt

SEQ ID NO: 89094 - DNA, 25 bp, Homo sapien
tcagtgacacttgaactcagcccag

SEQ ID NO: 89095 - DNA, 25 bp, Homo sapien
gagagatgcccaagcaacgggatcc

SEQ ID NO: 89096 - DNA, 25 bp, Homo sapien
gtaaatccagcctccaaagacatct

SEQ ID NO: 89097 - DNA, 25 bp, Homo sapien
gtctgtagtcgtagattgttcactt

SEQ ID NO: 89098 - DNA, 25 bp, Homo sapien
tgtttattcttagtgctgtttagta

SEQ ID NO: 89099 - DNA, 25 bp, Homo sapien
ttattcttagtgctgtttagtattt

SEQ ID NO: 89100 - DNA, 25 bp, Homo sapien
ttgtctgtagtcgtagattgttcac

SEQ ID NO: 89101 - DNA, 25 bp, Homo sapien
ccaaaaattcctgatgcattgtgaa

SEQ ID NO: 89102 - DNA, 25 bp, Homo sapien
gctgacagttgcttaaaggcgttag

SEQ ID NO: 89103 - DNA, 25 bp, Homo sapien
ggcgttagtcacagttgtaattcca

SEQ ID NO: 89104 - DNA, 25 bp, Homo sapien
gcaaattgcaggatgtagccctggg

SEQ ID NO: 89105 - DNA, 25 bp, Homo sapien
cccagtaaaactgtgaaagccatac

SEQ ID NO: 89106 - DNA, 25 bp, Homo sapien
aaggacatgcgcaggagcctagcca

SEQ ID NO: 89107 - DNA, 25 bp, Homo sapien
tcaaatcattctaggcctcccagta

SEQ ID NO: 89108 - DNA, 25 bp, Homo sapien
gggtactccttgcttaggagccaga

SEQ ID NO: 89109 - DNA, 25 bp, Homo sapien
cacgcgcgacgctatcggggaagca

SEQ ID NO: 89110 - DNA, 25 bp, Homo sapien
ctgagcaggagtagccggggtagcc

SEQ ID NO: 89111 - DNA, 25 bp, Homo sapien
tcggtggccacgcgcgacgctatcg

SEQ ID NO: 89112 - DNA, 25 bp, Homo sapien
ggtagccggaagtaggcgtggcctc

SEQ ID NO: 89113 - DNA, 25 bp, Homo sapien
tgaagagaacagtccctaaagcagc

SEQ ID NO: 89114 - DNA, 25 bp, Homo sapien
agagaacagtccctaaagcagccat

SEQ ID NO: 89115 - DNA, 25 bp, Homo sapien
gaagagaacagtccctaaagcagcc

SEQ ID NO: 89116 - DNA, 25 bp, Homo sapien
aagagaacagtccctaaagcagcca

SEQ ID NO: 89117 - DNA, 25 bp, Homo sapien
ccgagtccacggtccctatctatac

SEQ ID NO: 89118 - DNA, 25 bp, Homo sapien
cccgagtccacggtccctatctata

SEQ ID NO: 89119 - DNA, 25 bp, Homo sapien
ccgcgcagccggatcaggggtcctg

SEQ ID NO: 89120 - DNA, 25 bp, Homo sapien
gcagccggatcaggggtcctgtgcc

SEQ ID NO: 89121 - DNA, 25 bp, Homo sapien
gagaggccgcgcagccggatcaggg

SEQ ID NO: 89122 - DNA, 25 bp, Homo sapien
gggagaggccgcgcagccggatcag

SEQ ID NO: 89123 - DNA, 25 bp, Homo sapien
cccaagcggctacgctgcagtgcag

SEQ ID NO: 89124 - DNA, 25 bp, Homo sapien
tggccgcccgcccaagcggctacgc

SEQ ID NO: 89125 - DNA, 25 bp, Homo sapien
ccgcccaagcggctacgctgcagtg

SEQ ID NO: 89126 - DNA, 25 bp, Homo sapien
aagcggctacgctgcagtgcagcct

SEQ ID NO: 89127 - DNA, 25 bp, Homo sapien
tagccggaggggttggcagccagtc

SEQ ID NO: 89128 - DNA, 25 bp, Homo sapien
gccggaggggttggcagccagtccc

SEQ ID NO: 89129 - DNA, 25 bp, Homo sapien
ggaggggttggcagccagtccctgc

SEQ ID NO: 89130 - DNA, 25 bp, Homo sapien
gtagccggaggggttggcagccagt

SEQ ID NO: 89131 - DNA, 25 bp, Homo sapien
gcatatgaccagtctgggagctcgg

SEQ ID NO: 89132 - DNA, 25 bp, Homo sapien
tatgaccagtctgggagctcggtaa

SEQ ID NO: 89133 - DNA, 25 bp, Homo sapien
gaccagtctgggagctcggtaaggg

SEQ ID NO: 89134 - DNA, 25 bp, Homo sapien
catatgaccagtctgggagctcggt

SEQ ID NO: 89135 - DNA, 25 bp, Homo sapien
aaatctccccagtggagttaactgc

SEQ ID NO: 89136 - DNA, 25 bp, Homo sapien
tccaggggcgttccctctaggtgaa

SEQ ID NO: 89137 - DNA, 25 bp, Homo sapien
cccagtggagttaactgccagatca

SEQ ID NO: 89138 - DNA, 25 bp, Homo sapien
gcgttccctctaggtgaaaatctcc

SEQ ID NO: 89139 - DNA, 25 bp, Homo sapien
tggcggccccaagtcagaattatct

SEQ ID NO: 89140 - DNA, 25 bp, Homo sapien
gaaaaacgcagaagtcttgtcaccc

SEQ ID NO: 89141 - DNA, 25 bp, Homo sapien
tctgtgttgtcaaggaggactggcc

SEQ ID NO: 89142 - DNA, 25 bp, Homo sapien
tgtgcaattcacttctgtaggcctc

SEQ ID NO: 89143 - DNA, 25 bp, Homo sapien
ttcctcagtcaccaattatccaatt

SEQ ID NO: 89144 - DNA, 25 bp, Homo sapien
cttcctcagtcaccaattatccaat

SEQ ID NO: 89145 - DNA, 25 bp, Homo sapien
gatgcagtatctaacccaagtagtt

SEQ ID NO: 89146 - DNA, 25 bp, Homo sapien
aagtccatgctttgtcccagttaga

SEQ ID NO: 89147 - DNA, 25 bp, Homo sapien
caaacttagcgagaagggaagcctg

SEQ ID NO: 89148 - DNA, 25 bp, Homo sapien
taagaataaggtccataggctgggc

SEQ ID NO: 89149 - DNA, 25 bp, Homo sapien
gagaaaagtcaagtgttagagatgg

SEQ ID NO: 89150 - DNA, 25 bp, Homo sapien
tcttccatttcatatacattgtagc

SEQ ID NO: 89151 - DNA, 25 bp, Homo sapien
ggaagaaccaatctctagctcctct

SEQ ID NO: 89152 - DNA, 25 bp, Homo sapien
caccttgtgcaaatactgtgatagg

SEQ ID NO: 89153 - DNA, 25 bp, Homo sapien
cttttcttcgaagctggcctttcat

SEQ ID NO: 89154 - DNA, 25 bp, Homo sapien
cagcttttcttcgaagctggccttt

SEQ ID NO: 89155 - DNA, 25 bp, Homo sapien
agcttttcttcgaagctggcctttc

SEQ ID NO: 89156 - DNA, 25 bp, Homo sapien
gcttttcttcgaagctggcctttca

SEQ ID NO: 89157 - DNA, 25 bp, Homo sapien
gtaatccagcgtccatttcctgtga

SEQ ID NO: 89158 - DNA, 25 bp, Homo sapien
tcctgtgacagcagtacaactcgtc

SEQ ID NO: 89159 - DNA, 25 bp, Homo sapien
cctgtgacagcagtacaactcgtct

SEQ ID NO: 89160 - DNA, 25 bp, Homo sapien
cctgagctgccatgcttgtaatcca

SEQ ID NO: 89161 - DNA, 25 bp, Homo sapien
attgacttggaagtgggctcttcag

SEQ ID NO: 89162 - DNA, 25 bp, Homo sapien
cttggaagtgggctcttcagtgaag

SEQ ID NO: 89163 - DNA, 25 bp, Homo sapien
ttattgacttggaagtgggctcttc

SEQ ID NO: 89164 - DNA, 25 bp, Homo sapien
tgacttggaagtgggctcttcagtg

SEQ ID NO: 89165 - DNA, 25 bp, Homo sapien
gaaccagagatgagagtactaagcc

SEQ ID NO: 89166 - DNA, 25 bp, Homo sapien
gctgtacatggcctaaactgtgcat

SEQ ID NO: 89167 - DNA, 25 bp, Homo sapien
tagttgggctagtcctatggcctgc

SEQ ID NO: 89168 - DNA, 25 bp, Homo sapien
gacttagctgaactggaatggaacc

SEQ ID NO: 89169 - DNA, 25 bp, Homo sapien
tggctgcacctttaattggaactcg

SEQ ID NO: 89170 - DNA, 25 bp, Homo sapien
ctgtggctccaacctttgtagaaag

SEQ ID NO: 89171 - DNA, 25 bp, Homo sapien
ggtggtggggtcttcttccatgccc

SEQ ID NO: 89172 - DNA, 25 bp, Homo sapien
ggggcaacgaggagctcagagtgtg

SEQ ID NO: 89173 - DNA, 25 bp, Homo sapien
atggtggtggggtcttcttccatgc

SEQ ID NO: 89174 - DNA, 25 bp, Homo sapien
gggctatgtggctaggggcaacgag

SEQ ID NO: 89175 - DNA, 25 bp, Homo sapien
ggcgcctttgtcttcggtaggcact

SEQ ID NO: 89176 - DNA, 25 bp, Homo sapien
tcttctgcttagtcggcgaactggg

SEQ ID NO: 89177 - DNA, 25 bp, Homo sapien
gaccgctgtcggcttggagttaaag

SEQ ID NO: 89178 - DNA, 25 bp, Homo sapien
taaaggggattgttcctcaaagtgc

SEQ ID NO: 89179 - DNA, 25 bp, Homo sapien
aggcgagcgcggtgccgagcgtgag

SEQ ID NO: 89180 - DNA, 25 bp, Homo sapien
tgctttgggccgagccgagggaggc

SEQ ID NO: 89181 - DNA, 25 bp, Homo sapien
agcgcggtgccgagcgtgagcaggg

SEQ ID NO: 89182 - DNA, 25 bp, Homo sapien
agcaggagacaacgggggggtcttg

SEQ ID NO: 89183 - DNA, 25 bp, Homo sapien
gctgagagcagagcccaagggaatc

SEQ ID NO: 89184 - DNA, 25 bp, Homo sapien
agcagagcccaagggaatcggggaa

SEQ ID NO: 89185 - DNA, 25 bp, Homo sapien
tcgccccagttgtaaagttcttcca

SEQ ID NO: 89186 - DNA, 25 bp, Homo sapien
tatcaggcggttccagagctgagag

SEQ ID NO: 89187 - DNA, 25 bp, Homo sapien
aagcgcccatcggagggcgcgccgg

SEQ ID NO: 89188 - DNA, 25 bp, Homo sapien
agactcgtccgctgaaggcctgggc

SEQ ID NO: 89189 - DNA, 25 bp, Homo sapien
gaagaaacaacaaactctcgcgcat

SEQ ID NO: 89190 - DNA, 25 bp, Homo sapien
tggccgcagactcgtccgctgaagg

SEQ ID NO: 89191 - DNA, 25 bp, Homo sapien
gagatgcaaggtatcccctaggaga

SEQ ID NO: 89192 - DNA, 25 bp, Homo sapien
taggagaaagtcaacggaacacctc

SEQ ID NO: 89193 - DNA, 25 bp, Homo sapien
gaatttgcctagagcagaacgacag

SEQ ID NO: 89194 - DNA, 25 bp, Homo sapien
gaaatcccctctggagtcgttcaag

SEQ ID NO: 89195 - DNA, 25 bp, Homo sapien
caggctagacctgatctctggccca

SEQ ID NO: 89196 - DNA, 25 bp, Homo sapien
gacaatgcccagcatacagccttgg

SEQ ID NO: 89197 - DNA, 25 bp, Homo sapien
tcccagcttggctccggcagcaggt

SEQ ID NO: 89198 - DNA, 25 bp, Homo sapien
acagccttggcttggcaaggaaagg

SEQ ID NO: 89199 - DNA, 25 bp, Homo sapien
caagccgtaaaacttctgcatggca

SEQ ID NO: 89200 - DNA, 25 bp, Homo sapien
gcgatggccgctgagagtgactggg

SEQ ID NO: 89201 - DNA, 25 bp, Homo sapien
gcctgttacttgcaagccgtaaaac

SEQ ID NO: 89202 - DNA, 25 bp, Homo sapien
aggcaggtagccatattgctgtagc

SEQ ID NO: 89203 - DNA, 25 bp, Homo sapien
gatggcgtagcgcttccttcgaaca

SEQ ID NO: 89204 - DNA, 25 bp, Homo sapien
catttgagaccctggatggcgtagc

SEQ ID NO: 89205 - DNA, 25 bp, Homo sapien
gaacattggccttgatctcagcccc

SEQ ID NO: 89206 - DNA, 25 bp, Homo sapien
aacttgtctggaacaccacatcggg

SEQ ID NO: 89207 - DNA, 25 bp, Homo sapien
ggaacgccttgcgaatggcctcgta

SEQ ID NO: 89208 - DNA, 25 bp, Homo sapien
tccaaggctcggcagagtcaaagtg

SEQ ID NO: 89209 - DNA, 25 bp, Homo sapien
cctcaccatcgaagggcgtgctgtc

SEQ ID NO: 89210 - DNA, 25 bp, Homo sapien
aaagaagatcatgatgtcggcctgc

SEQ ID NO: 89211 - DNA, 25 bp, Homo sapien
gtgacgatagcagcctgagtccctt

SEQ ID NO: 89212 - DNA, 25 bp, Homo sapien
ggacagtgacgatagcagcctgagt

SEQ ID NO: 89213 - DNA, 25 bp, Homo sapien
atggggacagtgacgatagcagcct

SEQ ID NO: 89214 - DNA, 25 bp, Homo sapien
cagtgacgatagcagcctgagtccc

SEQ ID NO: 89215 - DNA, 25 bp, Homo sapien
ggtcactggaatgctcgagccccag

SEQ ID NO: 89216 - DNA, 25 bp, Homo sapien
gatgccccggcggtcatcatcgggc

SEQ ID NO: 89217 - DNA, 25 bp, Homo sapien
ctccgtgtccatccactggtaaaag

SEQ ID NO: 89218 - DNA, 25 bp, Homo sapien
tcatcatcgggcagcacaaaattct

SEQ ID NO: 89219 - DNA, 25 bp, Homo sapien
tgggttgagggggcatcttggtggg

SEQ ID NO: 89220 - DNA, 25 bp, Homo sapien
tgagggggcatcttggtggggaacc

SEQ ID NO: 89221 - DNA, 25 bp, Homo sapien
ctgggttgagggggcatcttggtgg

SEQ ID NO: 89222 - DNA, 25 bp, Homo sapien
gttgagggggcatcttggtggggaa

SEQ ID NO: 89223 - DNA, 25 bp, Homo sapien
tctcccctcggagcatggccacggt

SEQ ID NO: 89224 - DNA, 25 bp, Homo sapien
caaacatctcccctcggagcatggc

SEQ ID NO: 89225 - DNA, 25 bp, Homo sapien
caggaacagaaggccgggaggtagt

SEQ ID NO: 89226 - DNA, 25 bp, Homo sapien
gtcacagatgttgggcccataggtg

SEQ ID NO: 89227 - DNA, 25 bp, Homo sapien
tgccatccttcctctcgtaggcagt

SEQ ID NO: 89228 - DNA, 25 bp, Homo sapien
ctcgtaggcagtgttgatggacgca

SEQ ID NO: 89229 - DNA, 25 bp, Homo sapien
aggccccgccagaactggccaatgg

SEQ ID NO: 89230 - DNA, 25 bp, Homo sapien
ttggttattcctcacccgccagaac

SEQ ID NO: 89231 - DNA, 25 bp, Homo sapien
aggtctttccattgggcatccagaa

SEQ ID NO: 89232 - DNA, 25 bp, Homo sapien
catcaatcttgtcggtaggcagccc

SEQ ID NO: 89233 - DNA, 25 bp, Homo sapien
tcggcccagctccttaatgtgcttg

SEQ ID NO: 89234 - DNA, 25 bp, Homo sapien
agggacgcctcatcaaacacccaat

SEQ ID NO: 89235 - DNA, 25 bp, Homo sapien
catgaatgaccctctgggagactca

SEQ ID NO: 89236 - DNA, 25 bp, Homo sapien
gggatcccttcccagactttgatgt

SEQ ID NO: 89237 - DNA, 25 bp, Homo sapien
actttgatgttcttggggtactcgc

SEQ ID NO: 89238 - DNA, 25 bp, Homo sapien
gggtactcgctatccactgccctga

SEQ ID NO: 89239 - DNA, 25 bp, Homo sapien
gcccggttctaccttcagcttctgg

SEQ ID NO: 89240 - DNA, 25 bp, Homo sapien
atccggccggcctcccgatgggcag

SEQ ID NO: 89241 - DNA, 25 bp, Homo sapien
gctgacttggggtagcccggttcta

SEQ ID NO: 89242 - DNA, 25 bp, Homo sapien
tccagtccctcagggctgacttggg

SEQ ID NO: 89243 - DNA, 25 bp, Homo sapien
tcaatgatgatcacctccgtctcct

SEQ ID NO: 89244 - DNA, 25 bp, Homo sapien
ctcctcgtccacctcaatgatgatc

SEQ ID NO: 89245 - DNA, 25 bp, Homo sapien
tcgtccacctcaatgatgatcacct

SEQ ID NO: 89246 - DNA, 25 bp, Homo sapien
acctcaatgatgatcacctccgtct

SEQ ID NO: 89247 - DNA, 25 bp, Homo sapien
cagcacgggcagcaccacggcagcc

SEQ ID NO: 89248 - DNA, 25 bp, Homo sapien
acgggcagcaccacggcagccgcgc

SEQ ID NO: 89249 - DNA, 25 bp, Homo sapien
gcagcaccacggcagccgcgctcac

SEQ ID NO: 89250 - DNA, 25 bp, Homo sapien
gggcagcaccacggcagccgcgctc

SEQ ID NO: 89251 - DNA, 25 bp, Homo sapien
cttgtccagcagggaacgctggcag

SEQ ID NO: 89252 - DNA, 25 bp, Homo sapien
tgtccagcagggaacgctggcagta

SEQ ID NO: 89253 - DNA, 25 bp, Homo sapien
cagcagggaacgctggcagtagagc

SEQ ID NO: 89254 - DNA, 25 bp, Homo sapien
gcagggaacgctggcagtagagcag

SEQ ID NO: 89255 - DNA, 25 bp, Homo sapien
agtccttgtggtaggagtgggcggg

SEQ ID NO: 89256 - DNA, 25 bp, Homo sapien
ggctcgggacgatgggaacagccca

SEQ ID NO: 89257 - DNA, 25 bp, Homo sapien
gagggggctcgggacgatgggaaca

SEQ ID NO: 89258 - DNA, 25 bp, Homo sapien
gggctcgggacgatgggaacagccc

SEQ ID NO: 89259 - DNA, 25 bp, Homo sapien
gggggctcgggacgatgggaacagc

SEQ ID NO: 89260 - DNA, 25 bp, Homo sapien
cctatctagggaagatgcaatgccg

SEQ ID NO: 89261 - DNA, 25 bp, Homo sapien
gggacctatctagggaagatgcaat

SEQ ID NO: 89262 - DNA, 25 bp, Homo sapien
tatctagggaagatgcaatgccggg

SEQ ID NO: 89263 - DNA, 25 bp, Homo sapien
tcaggggacctatctagggaagatg

SEQ ID NO: 89264 - DNA, 25 bp, Homo sapien
tgactgactgagcaacgaagaccct

SEQ ID NO: 89265 - DNA, 25 bp, Homo sapien
ctaacattcgagaggcacagggctg

SEQ ID NO: 89266 - DNA, 25 bp, Homo sapien
caaaattgtccttagagggcaccga

SEQ ID NO: 89267 - DNA, 25 bp, Homo sapien
gatctccgaggaacttgactgactg

SEQ ID NO: 89268 - DNA, 25 bp, Homo sapien
atagcagctggatagactgactggc

SEQ ID NO: 89269 - DNA, 25 bp, Homo sapien
gaatagcagctggatagactgactg

SEQ ID NO: 89270 - DNA, 25 bp, Homo sapien
aatagcagctggatagactgactgg

SEQ ID NO: 89271 - DNA, 25 bp, Homo sapien
tggtgtccaattccaccgagacaca

SEQ ID NO: 89272 - DNA, 25 bp, Homo sapien
ccgagacacacagactgccaaacag

SEQ ID NO: 89273 - DNA, 25 bp, Homo sapien
caccttatcaaggtccccatcccct

SEQ ID NO: 89274 - DNA, 25 bp, Homo sapien
gtggtgaggtggtgtccaattccac

SEQ ID NO: 89275 - DNA, 25 bp, Homo sapien
tgtgaacaccactgtaacaagccag

SEQ ID NO: 89276 - DNA, 25 bp, Homo sapien
ttgtgaacaccactgtaacaagcca

SEQ ID NO: 89277 - DNA, 25 bp, Homo sapien
gaacaccactgtaacaagccagcca

SEQ ID NO: 89278 - DNA, 25 bp, Homo sapien
aaaggctaatcaaataagcagtggg

SEQ ID NO: 89279 - DNA, 25 bp, Homo sapien
tgagaccacttcctcttcgggccaa

SEQ ID NO: 89280 - DNA, 25 bp, Homo sapien
ctggtctggcctggtcgccacctgc

SEQ ID NO: 89281 - DNA, 25 bp, Homo sapien
gggccaaactttgccgactgtcagc

SEQ ID NO: 89282 - DNA, 25 bp, Homo sapien
ggcggtgcctttcgccaactttgga

SEQ ID NO: 89283 - DNA, 25 bp, Homo sapien
gctcgacccgtactctggatgccag

SEQ ID NO: 89284 - DNA, 25 bp, Homo sapien
cgggctcgacccgtactctggatgc

SEQ ID NO: 89285 - DNA, 25 bp, Homo sapien
cagaggtgccggaagggtcccggag

SEQ ID NO: 89286 - DNA, 25 bp, Homo sapien
gagcttctgtggtctacccgatggg

SEQ ID NO: 89287 - DNA, 25 bp, Homo sapien
ggaggaggagggtggccaacagcat

SEQ ID NO: 89288 - DNA, 25 bp, Homo sapien
ggaggaggaggagggtggccaacag

SEQ ID NO: 89289 - DNA, 25 bp, Homo sapien
aggaggaggagggtggccaacagca

SEQ ID NO: 89290 - DNA, 25 bp, Homo sapien
aggaggaggaggagggtggccaaca

SEQ ID NO: 89291 - DNA, 25 bp, Homo sapien
ctgagcaactcaagggagccatccg

SEQ ID NO: 89292 - DNA, 25 bp, Homo sapien
caagggagccatccgggacttccgg

SEQ ID NO: 89293 - DNA, 25 bp, Homo sapien
cttccgggcagttaatcggaagagg

SEQ ID NO: 89294 - DNA, 25 bp, Homo sapien
gacttccgggcagttaatcggaaga

SEQ ID NO: 89295 - DNA, 25 bp, Homo sapien
taatccggtctggatgggccagagc

SEQ ID NO: 89296 - DNA, 25 bp, Homo sapien
aaaataatccggtctggatgggcca

SEQ ID NO: 89297 - DNA, 25 bp, Homo sapien
aataatccggtctggatgggccaga

SEQ ID NO: 89298 - DNA, 25 bp, Homo sapien
tccggtctggatgggccagagcgcc

SEQ ID NO: 89299 - DNA, 25 bp, Homo sapien
cacacacagcctagagttacagcct

SEQ ID NO: 89300 - DNA, 25 bp, Homo sapien
ggagcagagtatctgcccctgccca

SEQ ID NO: 89301 - DNA, 25 bp, Homo sapien
ttccaaaagtctgggctctgcaagg

SEQ ID NO: 89302 - DNA, 25 bp, Homo sapien
acacgggtagtagacagcccctttg

SEQ ID NO: 89303 - DNA, 25 bp, Homo sapien
gggaggtgcggctgtcccggaccag

SEQ ID NO: 89304 - DNA, 25 bp, Homo sapien
gcacttctaagagcactgctggggg

SEQ ID NO: 89305 - DNA, 25 bp, Homo sapien
ggcctctgtaaggtgccctgcactt

SEQ ID NO: 89306 - DNA, 25 bp, Homo sapien
tgatggtgacagtctgttccttgct

SEQ ID NO: 89307 - DNA, 25 bp, Homo sapien
tggccccagcatagctgtaagtgat

SEQ ID NO: 89308 - DNA, 25 bp, Homo sapien
gcgtagggttaagcgctctgagcca

SEQ ID NO: 89309 - DNA, 25 bp, Homo sapien
ggaggtgcctcacacagggagatca

SEQ ID NO: 89310 - DNA, 25 bp, Homo sapien
ccagcatagctgtaagtgatggtga

SEQ ID NO: 89311 - DNA, 25 bp, Homo sapien
gtggttcaggcactgaaactcttcc

SEQ ID NO: 89312 - DNA, 25 bp, Homo sapien
atcgccacaggcatcaaccccatca

SEQ ID NO: 89313 - DNA, 25 bp, Homo sapien
cccatcacagcgctggacagcagat

SEQ ID NO: 89314 - DNA, 25 bp, Homo sapien
gacagcagatacacagcggtggttc

SEQ ID NO: 89315 - DNA, 25 bp, Homo sapien
actacgcagtagtcgggagctctca

SEQ ID NO: 89316 - DNA, 25 bp, Homo sapien
tgtggtaggacacaacagcctggcc

SEQ ID NO: 89317 - DNA, 25 bp, Homo sapien
tgtactcctgggtgcgaatggcata

SEQ ID NO: 89318 - DNA, 25 bp, Homo sapien
gactgaggctaggtgtgtatatcca

SEQ ID NO: 89319 - DNA, 25 bp, Homo sapien
ctctgtaggaaagtcttctacaggt

SEQ ID NO: 89320 - DNA, 25 bp, Homo sapien
gagctgcccgtaggaagggggtgcc

SEQ ID NO: 89321 - DNA, 25 bp, Homo sapien
gcaatgagctgcccgtaggaagggg

SEQ ID NO: 89322 - DNA, 25 bp, Homo sapien
atcattaggattctctgtaggaaag

SEQ ID NO: 89323 - DNA, 25 bp, Homo sapien
taagatctgtagcagagaacgcagg

SEQ ID NO: 89324 - DNA, 25 bp, Homo sapien
tcctggagtcatatcctggcgtaag

SEQ ID NO: 89325 - DNA, 25 bp, Homo sapien
aagcggccccgctgacgacggcggg

SEQ ID NO: 89326 - DNA, 25 bp, Homo sapien
agcagagaacgcaggttgcccagca

SEQ ID NO: 89327 - DNA, 25 bp, Homo sapien
ttggttcgagggagcaagccccagc

SEQ ID NO: 89328 - DNA, 25 bp, Homo sapien
gggtgttggttcgagggagcaagcc

SEQ ID NO: 89329 - DNA, 25 bp, Homo sapien
atctagggcctcaaggggagcagca

SEQ ID NO: 89330 - DNA, 25 bp, Homo sapien
ctgtgccaccatctagggcctcaag

SEQ ID NO: 89331 - DNA, 25 bp, Homo sapien
ggctggagacgtgctagcagatggg

SEQ ID NO: 89332 - DNA, 25 bp, Homo sapien
gctggagacgtgctagcagatggga

SEQ ID NO: 89333 - DNA, 25 bp, Homo sapien
gatgggaggggagccttgatgggca

SEQ ID NO: 89334 - DNA, 25 bp, Homo sapien
aggctgggcaacaggcggcctcgca

SEQ ID NO: 89335 - DNA, 25 bp, Homo sapien
accactccagacaatagtgatggct

SEQ ID NO: 89336 - DNA, 25 bp, Homo sapien
tgcaccactccagacaatagtgatg

SEQ ID NO: 89337 - DNA, 25 bp, Homo sapien
ggctgggcaacaggcggcctcgcag

SEQ ID NO: 89338 - DNA, 25 bp, Homo sapien
tggctcatcctctgcctcagctacc

SEQ ID NO: 89339 - DNA, 25 bp, Homo sapien
ggctcatcctctgcctcagctaccc

SEQ ID NO: 89340 - DNA, 25 bp, Homo sapien
catcctctgcctcagctacccacac

SEQ ID NO: 89341 - DNA, 25 bp, Homo sapien
ctcatcctctgcctcagctacccac

SEQ ID NO: 89342 - DNA, 25 bp, Homo sapien
aaaaggttgtgccactatgagtaga

SEQ ID NO: 89343 - DNA, 25 bp, Homo sapien
gttgtgccactatgagtagagcccc

SEQ ID NO: 89344 - DNA, 25 bp, Homo sapien
ctctaaaaggttgtgccactatgag

SEQ ID NO: 89345 - DNA, 25 bp, Homo sapien
agaggcctcagtagagcccccaggt

SEQ ID NO: 89346 - DNA, 25 bp, Homo sapien
gggtgtctggccatggccacgtaca

SEQ ID NO: 89347 - DNA, 25 bp, Homo sapien
gctacatagggtcaacgggaggccc

SEQ ID NO: 89348 - DNA, 25 bp, Homo sapien
cctgcctgagggacacttaacttta

SEQ ID NO: 89349 - DNA, 25 bp, Homo sapien
catggccacgtacagaggagactct

SEQ ID NO: 89350 - DNA, 25 bp, Homo sapien
ctggagggtctctagttaattggca

SEQ ID NO: 89351 - DNA, 25 bp, Homo sapien
tgtggatggcaaaacctcaggttct

SEQ ID NO: 89352 - DNA, 25 bp, Homo sapien
ttggcaaggatggagtgtccagacc

SEQ ID NO: 89353 - DNA, 25 bp, Homo sapien
ggcattccggtgcttaaggccactt

SEQ ID NO: 89354 - DNA, 25 bp, Homo sapien
tggaatagaagcatttgttgcactc

SEQ ID NO: 89355 - DNA, 25 bp, Homo sapien
catttgttgcactctttttgtgagc

SEQ ID NO: 89356 - DNA, 25 bp, Homo sapien
tgagcaatgccgtagctatggaata

SEQ ID NO: 89357 - DNA, 25 bp, Homo sapien
aatgccgtagctatggaatagaagc

SEQ ID NO: 89358 - DNA, 25 bp, Homo sapien
gagatgtatgattcctttatttttg

SEQ ID NO: 89359 - DNA, 25 bp, Homo sapien
ggctcagggtatgctccaaaaatga

SEQ ID NO: 89360 - DNA, 25 bp, Homo sapien
gacagctgctcctatgatctgggct

SEQ ID NO: 89361 - DNA, 25 bp, Homo sapien
aatgagaaccttcctgaccgcaggg

SEQ ID NO: 89362 - DNA, 25 bp, Homo sapien
tcaggctcgcagctaatttgcaaaa

SEQ ID NO: 89363 - DNA, 25 bp, Homo sapien
tgccttgaggtatcctggctgagaa

SEQ ID NO: 89364 - DNA, 25 bp, Homo sapien
ttcatctgtcttgcataggacagac

SEQ ID NO: 89365 - DNA, 25 bp, Homo sapien
ttgaggtatcctggctgagaattca

SEQ ID NO: 89366 - DNA, 25 bp, Homo sapien
tttgcctgccttgaggtatcctggc

SEQ ID NO: 89367 - DNA, 25 bp, Homo sapien
cagctctattccaactgctgacagc

SEQ ID NO: 89368 - DNA, 25 bp, Homo sapien
tccagtttgggccctcttccaggaa

SEQ ID NO: 89369 - DNA, 25 bp, Homo sapien
ctgctgacagcattcttttggttcc

SEQ ID NO: 89370 - DNA, 25 bp, Homo sapien
agctctattccaactgctgacagca

SEQ ID NO: 89371 - DNA, 25 bp, Homo sapien
tgtctcctccgtttgcttgttctgg

SEQ ID NO: 89372 - DNA, 25 bp, Homo sapien
ctgacagggtgtaatcaacagggcc

SEQ ID NO: 89373 - DNA, 25 bp, Homo sapien
ctgggtccgttagggaattcctcag

SEQ ID NO: 89374 - DNA, 25 bp, Homo sapien
tccaacactgcttgcgaatcattcc

SEQ ID NO: 89375 - DNA, 25 bp, Homo sapien
caaaagaccaggctatggagaggca

SEQ ID NO: 89376 - DNA, 25 bp, Homo sapien
aagaaccaggttctccagagccctc

SEQ ID NO: 89377 - DNA, 25 bp, Homo sapien
cattgggcctgacgctgagtggatc

SEQ ID NO: 89378 - DNA, 25 bp, Homo sapien
gcagtgaaaggagctcgggtcttcc

SEQ ID NO: 89379 - DNA, 25 bp, Homo sapien
ttgtccactttcagtttgcaatacc

SEQ ID NO: 89380 - DNA, 25 bp, Homo sapien
tttgtccactttcagtttgcaatac

SEQ ID NO: 89381 - DNA, 25 bp, Homo sapien
tgtccactttcagtttgcaatacca

SEQ ID NO: 89382 - DNA, 25 bp, Homo sapien
tggaagcattccaccatgaggagca

SEQ ID NO: 89383 - DNA, 25 bp, Homo sapien
gaagaatctggcatcatcgggcact

SEQ ID NO: 89384 - DNA, 25 bp, Homo sapien
caagggtgagatttggaacgaagcc

SEQ ID NO: 89385 - DNA, 25 bp, Homo sapien
ggttgtgcacttgcccgtatccagg

SEQ ID NO: 89386 - DNA, 25 bp, Homo sapien
ttgtagtcagggaggcaacaccaca

SEQ ID NO: 89387 - DNA, 25 bp, Homo sapien
ggaaattgtcccaccccctgatgag

SEQ ID NO: 89388 - DNA, 25 bp, Homo sapien
atgccctcccccctagacacctggg

SEQ ID NO: 89389 - DNA, 25 bp, Homo sapien
gggaaattgtcccaccccctgatga

SEQ ID NO: 89390 - DNA, 25 bp, Homo sapien
cacatgccctcccccctagacacct

SEQ ID NO: 89391 - DNA, 25 bp, Homo sapien
ggcagagtgctgtggtttctgtgtc

SEQ ID NO: 89392 - DNA, 25 bp, Homo sapien
agagtgctgtggtttctgtgtccat

SEQ ID NO: 89393 - DNA, 25 bp, Homo sapien
ctggtgtgggcgtccctggagggga

SEQ ID NO: 89394 - DNA, 25 bp, Homo sapien
aggcccggcggctgccagaggggca

SEQ ID NO: 89395 - DNA, 25 bp, Homo sapien
gtaacccgctccggtccaactctgc

SEQ ID NO: 89396 - DNA, 25 bp, Homo sapien
ttctttagtagcgtggcatctgctt

SEQ ID NO: 89397 - DNA, 25 bp, Homo sapien
ccgctccggtccaactctgccaaca

SEQ ID NO: 89398 - DNA, 25 bp, Homo sapien
tgacttctttagtagcgtggcatct

SEQ ID NO: 89399 - DNA, 25 bp, Homo sapien
gtcaagttcatctacagcctgggcc

SEQ ID NO: 89400 - DNA, 25 bp, Homo sapien
caaggagtcagacgagccagaggat

SEQ ID NO: 89401 - DNA, 25 bp, Homo sapien
tctccggttcgtgagcactgtctcc

SEQ ID NO: 89402 - DNA, 25 bp, Homo sapien
ccaaaagtgcctgctagggtgctct

SEQ ID NO: 89403 - DNA, 25 bp, Homo sapien
ctgttcccagatgtcataaacgact

SEQ ID NO: 89404 - DNA, 25 bp, Homo sapien
catgatgcgtctctcataggtatcc

SEQ ID NO: 89405 - DNA, 25 bp, Homo sapien
tgtcataaacgactagagtcacttc

SEQ ID NO: 89406 - DNA, 25 bp, Homo sapien
cttatccaccatgatgcgtctctca

SEQ ID NO: 89407 - DNA, 25 bp, Homo sapien
catcctaagtttgctctgagtcaga

SEQ ID NO: 89408 - DNA, 25 bp, Homo sapien
gatcctagactagggtagccatcct

SEQ ID NO: 89409 - DNA, 25 bp, Homo sapien
aatggcagaatctccctacccagag

SEQ ID NO: 89410 - DNA, 25 bp, Homo sapien
gaaagaagccacctgcttaggacag

SEQ ID NO: 89411 - DNA, 25 bp, Homo sapien
cagcccggagccgaagtagggtctc

SEQ ID NO: 89412 - DNA, 25 bp, Homo sapien
tggagaaactccgtcggtcggtgac

SEQ ID NO: 89413 - DNA, 25 bp, Homo sapien
gaagacgatgagaaaggcgtccccg

SEQ ID NO: 89414 - DNA, 25 bp, Homo sapien
gctcttgtttccaacgaggataacg

SEQ ID NO: 89415 - DNA, 25 bp, Homo sapien
tgacttggaagggagagcattcccc

SEQ ID NO: 89416 - DNA, 25 bp, Homo sapien
agatcgcaagtatggaatctgttca

SEQ ID NO: 89417 - DNA, 25 bp, Homo sapien
tgcgtccgcgatggtaaaaaggcct

SEQ ID NO: 89418 - DNA, 25 bp, Homo sapien
cctgggtctgattgcaagtgagtgc

SEQ ID NO: 89419 - DNA, 25 bp, Homo sapien
gtggaggtgcgaaggagagggagaa

SEQ ID NO: 89420 - DNA, 25 bp, Homo sapien
tgtggaggtgcgaaggagagggaga

SEQ ID NO: 89421 - DNA, 25 bp, Homo sapien
ggcaagggattggtactagtgaatc

SEQ ID NO: 89422 - DNA, 25 bp, Homo sapien
acatggctgagctcatatggtgggt

SEQ ID NO: 89423 - DNA, 25 bp, Homo sapien
cctgggcgtgcggtggcaagggatt

SEQ ID NO: 89424 - DNA, 25 bp, Homo sapien
tgaatcttgcaaccgagagaacatg

SEQ ID NO: 89425 - DNA, 25 bp, Homo sapien
ggcaccggctcaggcgcccgctggg

SEQ ID NO: 89426 - DNA, 25 bp, Homo sapien
gaaggcaccggctcaggcgcccgct

SEQ ID NO: 89427 - DNA, 25 bp, Homo sapien
tgcaggaaggcaccggctcaggcgc

SEQ ID NO: 89428 - DNA, 25 bp, Homo sapien
ctgcaggaaggcaccggctcaggcg

SEQ ID NO: 89429 - DNA, 25 bp, Homo sapien
cttgaagaacttggcgttgcgcggc

SEQ ID NO: 89430 - DNA, 25 bp, Homo sapien
ctttcttggtgaggctctcgcggcg

SEQ ID NO: 89431 - DNA, 25 bp, Homo sapien
tcgatgtgcttgcagctcagcgtcc

SEQ ID NO: 89432 - DNA, 25 bp, Homo sapien
aagagctccctcgtgttgtggtgca

SEQ ID NO: 89433 - DNA, 25 bp, Homo sapien
agagcaccgagaggtcgtgacacga

SEQ ID NO: 89434 - DNA, 25 bp, Homo sapien
gagcaccgagaggtcgtgacacgac

SEQ ID NO: 89435 - DNA, 25 bp, Homo sapien
cagagcaccgagaggtcgtgacacg

SEQ ID NO: 89436 - DNA, 25 bp, Homo sapien
tcagagcaccgagaggtcgtgacac

SEQ ID NO: 89437 - DNA, 25 bp, Homo sapien
caccagatgagagccagaacgtttt

SEQ ID NO: 89438 - DNA, 25 bp, Homo sapien
tcacgcagcgtacaaaggaggcaaa

SEQ ID NO: 89439 - DNA, 25 bp, Homo sapien
taaaggtgaggcatgttcacgcagc

SEQ ID NO: 89440 - DNA, 25 bp, Homo sapien
gatgaggtggccaagcgcgaattaa

SEQ ID NO: 89441 - DNA, 25 bp, Homo sapien
gggaggcagtgacagtttcagtact

SEQ ID NO: 89442 - DNA, 25 bp, Homo sapien
tgacagtttcagtactcacacgggc

SEQ ID NO: 89443 - DNA, 25 bp, Homo sapien
tttcagtactcacacgggctttgca

SEQ ID NO: 89444 - DNA, 25 bp, Homo sapien
caggtagctgtattgtatgtctagg

SEQ ID NO: 89445 - DNA, 25 bp, Homo sapien
gcttgaggccagacctactgtagcc

SEQ ID NO: 89446 - DNA, 25 bp, Homo sapien
ccttagcttgaagcagcttgaggcc

SEQ ID NO: 89447 - DNA, 25 bp, Homo sapien
tgagaagccagcctcagaccttagc

SEQ ID NO: 89448 - DNA, 25 bp, Homo sapien
catcccttacctgggcatgtgtgag

SEQ ID NO: 89449 - DNA, 25 bp, Homo sapien
atttcgagttcagcatccccggacg

SEQ ID NO: 89450 - DNA, 25 bp, Homo sapien
gcactggtctagtctacgcgagcac

SEQ ID NO: 89451 - DNA, 25 bp, Homo sapien
tcagcaaatccgagtagggacggcc

SEQ ID NO: 89452 - DNA, 25 bp, Homo sapien
gaaggttgtttaggtagccggctca

SEQ ID NO: 89453 - DNA, 25 bp, Homo sapien
ttacagcagcccataacggtacgtg

SEQ ID NO: 89454 - DNA, 25 bp, Homo sapien
tggatttgaagctacgcactcagcc

SEQ ID NO: 89455 - DNA, 25 bp, Homo sapien
tattcttgagctactgcacgggcaa

SEQ ID NO: 89456 - DNA, 25 bp, Homo sapien
tataattaattgcagggctcaagcc

SEQ ID NO: 89457 - DNA, 25 bp, Homo sapien
tcttccctattaaggtaggaactgc

SEQ ID NO: 89458 - DNA, 25 bp, Homo sapien
ggctttcccgcatctactctggcta

SEQ ID NO: 89459 - DNA, 25 bp, Homo sapien
tctcccaggaagatagttgactatg

SEQ ID NO: 89460 - DNA, 25 bp, Homo sapien
gatttcatatgctcttggatcccag

SEQ ID NO: 89461 - DNA, 25 bp, Homo sapien
caggctggcttagtaatgtgacaac

SEQ ID NO: 89462 - DNA, 25 bp, Homo sapien
tgcagatgatggtgtgagcatcccc

SEQ ID NO: 89463 - DNA, 25 bp, Homo sapien
ccatgacagtagttggaagcaggct

SEQ ID NO: 89464 - DNA, 25 bp, Homo sapien
tgaggtaaagaaccactctctctgg

SEQ ID NO: 89465 - DNA, 25 bp, Homo sapien
gagccagccaggagtcgaacctgga

SEQ ID NO: 89466 - DNA, 25 bp, Homo sapien
gccagccaggagtcgaacctggaat

SEQ ID NO: 89467 - DNA, 25 bp, Homo sapien
gccaggagtcgaacctggaatcttc

SEQ ID NO: 89468 - DNA, 25 bp, Homo sapien
gtcgaacctggaatcttctgatccg

SEQ ID NO: 89469 - DNA, 25 bp, Homo sapien
gcttgtgtaagagcttgggacccag

SEQ ID NO: 89470 - DNA, 25 bp, Homo sapien
tgttctggcaaaacacccacagctc

SEQ ID NO: 89471 - DNA, 25 bp, Homo sapien
cccaggatgtgtggtataggccctc

SEQ ID NO: 89472 - DNA, 25 bp, Homo sapien
tttcagcgcactccatgttctggca

SEQ ID NO: 89473 - DNA, 25 bp, Homo sapien
cgtttgctatggacattatgcctga

SEQ ID NO: 89474 - DNA, 25 bp, Homo sapien
tattaagcatgaaaggtggcagctg

SEQ ID NO: 89475 - DNA, 25 bp, Homo sapien
ctattttgttccaagtgccgtttgc

SEQ ID NO: 89476 - DNA, 25 bp, Homo sapien
tcagcacacctaacggagattcctt

SEQ ID NO: 89477 - DNA, 25 bp, Homo sapien
tgaattacttcttgtacagctgaga

SEQ ID NO: 89478 - DNA, 25 bp, Homo sapien
gtcagatttatacaactgagcgcca

SEQ ID NO: 89479 - DNA, 25 bp, Homo sapien
atttatacaactgagcgccagaggg

SEQ ID NO: 89480 - DNA, 25 bp, Homo sapien
tctgaaactgaattacttcttgtac

SEQ ID NO: 89481 - DNA, 25 bp, Homo sapien
tctctcaggcacttttcagggtctc

SEQ ID NO: 89482 - DNA, 25 bp, Homo sapien
catggtagcctagcagatcagctgg

SEQ ID NO: 89483 - DNA, 25 bp, Homo sapien
tggatcccatcaccacagattgtga

SEQ ID NO: 89484 - DNA, 25 bp, Homo sapien
tgagccagatcctacaagcaatggg

SEQ ID NO: 89485 - DNA, 25 bp, Homo sapien
tctgtcttcctctttatggctctct

SEQ ID NO: 89486 - DNA, 25 bp, Homo sapien
tctcaccatttctgtaccagtctct

SEQ ID NO: 89487 - DNA, 25 bp, Homo sapien
cgtctctgaacctctttatgcattt

SEQ ID NO: 89488 - DNA, 25 bp, Homo sapien
acgtctctgaacctctttatgcatt

SEQ ID NO: 89489 - DNA, 25 bp, Homo sapien
tgttcgctagccctaaaaccaggcc

SEQ ID NO: 89490 - DNA, 25 bp, Homo sapien
aaaccaggccttcgatctccacagt

SEQ ID NO: 89491 - DNA, 25 bp, Homo sapien
caaagggagaaggtgttcgctagcc

SEQ ID NO: 89492 - DNA, 25 bp, Homo sapien
gtatcaccagtcttctgtggaccaa

SEQ ID NO: 89493 - DNA, 25 bp, Homo sapien
tagtttggcacaaattaatttccca

SEQ ID NO: 89494 - DNA, 25 bp, Homo sapien
cgaagaagccaaatagtttggcaca

SEQ ID NO: 89495 - DNA, 25 bp, Homo sapien
cacagcaggttctagatgcaatccg

SEQ ID NO: 89496 - DNA, 25 bp, Homo sapien
gagaaaagccgtggccttgaccagg

SEQ ID NO: 89497 - DNA, 25 bp, Homo sapien
gaagagggcctttggagatcccagc

SEQ ID NO: 89498 - DNA, 25 bp, Homo sapien
aaatatggattagggagtcacctgc

SEQ ID NO: 89499 - DNA, 25 bp, Homo sapien
tggaaaagctcaagcaagagctggt

SEQ ID NO: 89500 - DNA, 25 bp, Homo sapien
agtccccacaattacactgataagg

SEQ ID NO: 89501 - DNA, 25 bp, Homo sapien
ccacaaagttgattagtgctgggta

SEQ ID NO: 89502 - DNA, 25 bp, Homo sapien
gtttgtctggctcttacaaagccga

SEQ ID NO: 89503 - DNA, 25 bp, Homo sapien
cagagagaggtacagcattgaggcc

SEQ ID NO: 89504 - DNA, 25 bp, Homo sapien
ctcttgaggattgctgctagggatc

SEQ ID NO: 89505 - DNA, 25 bp, Homo sapien
tcccttaggagagtgtggtggaact

SEQ ID NO: 89506 - DNA, 25 bp, Homo sapien
tctggaggactagtcagggagttct

SEQ ID NO: 89507 - DNA, 25 bp, Homo sapien
gaaccatcagcttctttggcagaag

SEQ ID NO: 89508 - DNA, 25 bp, Homo sapien
tttccttcagggatagtcagctcta

SEQ ID NO: 89509 - DNA, 25 bp, Homo sapien
tctctctcagtagctccgcatggca

SEQ ID NO: 89510 - DNA, 25 bp, Homo sapien
cagagggctattcctcctaggtgct

SEQ ID NO: 89511 - DNA, 25 bp, Homo sapien
acttatgtgaagtgttctgaacacc

SEQ ID NO: 89512 - DNA, 25 bp, Homo sapien
ccagatgccggaaggtccttctgaa

SEQ ID NO: 89513 - DNA, 25 bp, Homo sapien
ggacctggagtaatatgtttcctag

SEQ ID NO: 89514 - DNA, 25 bp, Homo sapien
tctgaacaccttaaggaacaatgtc

SEQ ID NO: 89515 - DNA, 25 bp, Homo sapien
cacgggtgatttctctgggctcctg

SEQ ID NO: 89516 - DNA, 25 bp, Homo sapien
taagttcccgggagtgttctcagtg

SEQ ID NO: 89517 - DNA, 25 bp, Homo sapien
catggcccaggtacacgactatgtg

SEQ ID NO: 89518 - DNA, 25 bp, Homo sapien
tggatccacccttaaggagcttgag

SEQ ID NO: 89519 - DNA, 25 bp, Homo sapien
ttttccacatcactacaggtcatca

SEQ ID NO: 89520 - DNA, 25 bp, Homo sapien
tgaggctccctcataaagccgtttg

SEQ ID NO: 89521 - DNA, 25 bp, Homo sapien
tgccacaggcaacatcgaaggaagc

SEQ ID NO: 89522 - DNA, 25 bp, Homo sapien
cagaaccaaaaccaagtggctggga

SEQ ID NO: 89523 - DNA, 25 bp, Homo sapien
aaatttagccgcttgggaagtacag

SEQ ID NO: 89524 - DNA, 25 bp, Homo sapien
cagactggctctaccctaagtgcct

SEQ ID NO: 89525 - DNA, 25 bp, Homo sapien
cagtcagactggctctaccctaagt

SEQ ID NO: 89526 - DNA, 25 bp, Homo sapien
aagtatcagcagtgttgatttcttc

SEQ ID NO: 89527 - DNA, 25 bp, Homo sapien
tcaaagtatcagcagtgttgatttc

SEQ ID NO: 89528 - DNA, 25 bp, Homo sapien
taccagtcattaatgagctgctgca

SEQ ID NO: 89529 - DNA, 25 bp, Homo sapien
agctctggcacattgacctctatgt

SEQ ID NO: 89530 - DNA, 25 bp, Homo sapien
cacattgacctctatgtgttaccag

SEQ ID NO: 89531 - DNA, 25 bp, Homo sapien
gttaccagtcattaatgagctgctg

SEQ ID NO: 89532 - DNA, 25 bp, Homo sapien
agtcaacctctaccacgtgcgggag

SEQ ID NO: 89533 - DNA, 25 bp, Homo sapien
ttggtaatacggacacagtgaccca

SEQ ID NO: 89534 - DNA, 25 bp, Homo sapien
gagtctccagtgacaatgtggctga

SEQ ID NO: 89535 - DNA, 25 bp, Homo sapien
catgagaagtatagtggctctaccc

SEQ ID NO: 89536 - DNA, 25 bp, Homo sapien
atggtctgagcctggccgcgccagg

SEQ ID NO: 89537 - DNA, 25 bp, Homo sapien
ccagaagagccaggaatcgaaatgc

SEQ ID NO: 89538 - DNA, 25 bp, Homo sapien
gagccaggaatcgaaatgcttcatg

SEQ ID NO: 89539 - DNA, 25 bp, Homo sapien
aagagccaggaatcgaaatgcttca

SEQ ID NO: 89540 - DNA, 25 bp, Homo sapien
gaagcagcagcgatgtaacctgttg

SEQ ID NO: 89541 - DNA, 25 bp, Homo sapien
gaggactcaccgctaagggttcaga

SEQ ID NO: 89542 - DNA, 25 bp, Homo sapien
gatggcaacctcaggcgcgttaaca

SEQ ID NO: 89543 - DNA, 25 bp, Homo sapien
gatccaggactacttgcatgaccaa

SEQ ID NO: 89544 - DNA, 25 bp, Homo sapien
tgaagtttggaagaagcaagccagg

SEQ ID NO: 89545 - DNA, 25 bp, Homo sapien
ggtctggtgggataggagggacgct

SEQ ID NO: 89546 - DNA, 25 bp, Homo sapien
gagggacgctacagagaagctgggc

SEQ ID NO: 89547 - DNA, 25 bp, Homo sapien
gccagaaccggccaggaaggtgtgt

SEQ ID NO: 89548 - DNA, 25 bp, Homo sapien
cacgccgtaggcatagggagatcca

SEQ ID NO: 89549 - DNA, 25 bp, Homo sapien
cacgtggaaaaggtctacagagccc

SEQ ID NO: 89550 - DNA, 25 bp, Homo sapien
tagctgccacaggaggaacgcgtgt

SEQ ID NO: 89551 - DNA, 25 bp, Homo sapien
tcatgtcgtagcgatagccacggtc

SEQ ID NO: 89552 - DNA, 25 bp, Homo sapien
cagagagctctctatcttctgcagc

SEQ ID NO: 89553 - DNA, 25 bp, Homo sapien
caggagcttctgtaactccacgtac

SEQ ID NO: 89554 - DNA, 25 bp, Homo sapien
tggcaggctcaggatgggcatggct

SEQ ID NO: 89555 - DNA, 25 bp, Homo sapien
tgctggcatcctggagtctcctggt

SEQ ID NO: 89556 - DNA, 25 bp, Homo sapien
caataggaacttgttgggcagagcc

SEQ ID NO: 89557 - DNA, 25 bp, Homo sapien
caatccactgggagtcaataggaac

SEQ ID NO: 89558 - DNA, 25 bp, Homo sapien
ttgaatgaaagacggacttggtgcc

SEQ ID NO: 89559 - DNA, 25 bp, Homo sapien
aagagggtctagcacctagcatgcg

SEQ ID NO: 89560 - DNA, 25 bp, Homo sapien
gaaaaagacaaagacgctgaagctg

SEQ ID NO: 89561 - DNA, 25 bp, Homo sapien
tcccgggtgccccatcttaccatgc

SEQ ID NO: 89562 - DNA, 25 bp, Homo sapien
catgctgacaaagtgatcaggagaa

SEQ ID NO: 89563 - DNA, 25 bp, Homo sapien
gctgagacacataaaggaccgaaac

SEQ ID NO: 89564 - DNA, 25 bp, Homo sapien
tccaaagggtgtctatcactacgcc

SEQ ID NO: 89565 - DNA, 25 bp, Homo sapien
tgtgctgaaagagcatggaccctgg

SEQ ID NO: 89566 - DNA, 25 bp, Homo sapien
caaagggttgcgatgagaactgcat

SEQ ID NO: 89567 - DNA, 25 bp, Homo sapien
gaaggcctggatctaagtgtcatcc

SEQ ID NO: 89568 - DNA, 25 bp, Homo sapien
gctagccagacagttcccactggca

SEQ ID NO: 89569 - DNA, 25 bp, Homo sapien
caggagaggatgtgctagccagaca

SEQ ID NO: 89570 - DNA, 25 bp, Homo sapien
tgtgctagccagacagttcccactg

SEQ ID NO: 89571 - DNA, 25 bp, Homo sapien
gaggatgtgctagccagacagttcc

SEQ ID NO: 89572 - DNA, 25 bp, Homo sapien
ccctcctggaggtgttagtctggat

SEQ ID NO: 89573 - DNA, 25 bp, Homo sapien
cctggaggtgttagtctggatcttc

SEQ ID NO: 89574 - DNA, 25 bp, Homo sapien
cctcctggaggtgttagtctggatc

SEQ ID NO: 89575 - DNA, 25 bp, Homo sapien
ctcctggaggtgttagtctggatct

SEQ ID NO: 89576 - DNA, 25 bp, Homo sapien
aggcaggcggctgttattcttggga

SEQ ID NO: 89577 - DNA, 25 bp, Homo sapien
cttgggactggaagctttaggattg

SEQ ID NO: 89578 - DNA, 25 bp, Homo sapien
caggcggctgttattcttgggactg

SEQ ID NO: 89579 - DNA, 25 bp, Homo sapien
tcttgggactggaagctttaggatt

SEQ ID NO: 89580 - DNA, 25 bp, Homo sapien
tgcaaggtttgctagatgtcagccc

SEQ ID NO: 89581 - DNA, 25 bp, Homo sapien
gatgggtcagcctttcacatggaga

SEQ ID NO: 89582 - DNA, 25 bp, Homo sapien
gaacatcatcacctacgacgacgag

SEQ ID NO: 89583 - DNA, 25 bp, Homo sapien
ccatggtcacatagcgagtaagggc

SEQ ID NO: 89584 - DNA, 25 bp, Homo sapien
tgaccgggaggaaaaggcgcaatat

SEQ ID NO: 89585 - DNA, 25 bp, Homo sapien
caatatgtgctactggcccaagccg

SEQ ID NO: 89586 - DNA, 25 bp, Homo sapien
ctactggcccaagccgtggaccgag

SEQ ID NO: 89587 - DNA, 25 bp, Homo sapien
gaggaaaaggcgcaatatgtgctac

SEQ ID NO: 89588 - DNA, 25 bp, Homo sapien
gactgggtcacctatgagctgaatc

SEQ ID NO: 89589 - DNA, 25 bp, Homo sapien
agagggataggcacagtctccacca

SEQ ID NO: 89590 - DNA, 25 bp, Homo sapien
tagctgggaaaacactagagctgca

SEQ ID NO: 89591 - DNA, 25 bp, Homo sapien
tatctcttgggacttagcccgaccc

SEQ ID NO: 89592 - DNA, 25 bp, Homo sapien
gatcgggacaaagttcgagaagggc

SEQ ID NO: 89593 - DNA, 25 bp, Homo sapien
gcagaacgggaacgggaaatggagc

SEQ ID NO: 89594 - DNA, 25 bp, Homo sapien
ccgcaaggaacgtgcgaagtctaaa

SEQ ID NO: 89595 - DNA, 25 bp, Homo sapien
gagcggactcgatcagagcgtgaat

SEQ ID NO: 89596 - DNA, 25 bp, Homo sapien
tccctgcggtggctggaaagtctaa

SEQ ID NO: 89597 - DNA, 25 bp, Homo sapien
ggatttcatcacgaggtttctgccc

SEQ ID NO: 89598 - DNA, 25 bp, Homo sapien
tcaggctggcccttaacagagacca

SEQ ID NO: 89599 - DNA, 25 bp, Homo sapien
caaggagacttggttagacgacaca

SEQ ID NO: 89600 - DNA, 25 bp, Homo sapien
gaagtagtgcccagactctagacgt

SEQ ID NO: 89601 - DNA, 25 bp, Homo sapien
ctaacgggaaagtctgataatggcc

SEQ ID NO: 89602 - DNA, 25 bp, Homo sapien
catctagtggacattggtggttctc

SEQ ID NO: 89603 - DNA, 25 bp, Homo sapien
gaagccagcacttgtgatccggaag

SEQ ID NO: 89604 - DNA, 25 bp, Homo sapien
ctagtgatccctcttacacggtggg

SEQ ID NO: 89605 - DNA, 25 bp, Homo sapien
ggaagtgaccatggacacaagtgaa

SEQ ID NO: 89606 - DNA, 25 bp, Homo sapien
ctcccatgcctattgcagaccaagt

SEQ ID NO: 89607 - DNA, 25 bp, Homo sapien
gaaagaggtaaacatccaagccacc

SEQ ID NO: 89608 - DNA, 25 bp, Homo sapien
gggataaacagcacttccaggggga

SEQ ID NO: 89609 - DNA, 25 bp, Homo sapien
ggataaacagcacttccagggggag

SEQ ID NO: 89610 - DNA, 25 bp, Homo sapien
gataaacagcacttccagggggaga

SEQ ID NO: 89611 - DNA, 25 bp, Homo sapien
gagatgcaatccctacccttgagga

SEQ ID NO: 89612 - DNA, 25 bp, Homo sapien
cattactttgtgttaggccctgggc

SEQ ID NO: 89613 - DNA, 25 bp, Homo sapien
gaaaacctgtcatgccaatcactga

SEQ ID NO: 89614 - DNA, 25 bp, Homo sapien
caagcagtctactcttttgaggaaa

SEQ ID NO: 89615 - DNA, 25 bp, Homo sapien
gagggtgtgcactactctccaggag

SEQ ID NO: 89616 - DNA, 25 bp, Homo sapien
gcccaaatgggagggtgtgcactac

SEQ ID NO: 89617 - DNA, 25 bp, Homo sapien
gcagcgcgagcccaaatgggagggt

SEQ ID NO: 89618 - DNA, 25 bp, Homo sapien
tgtgcactactctccaggagtgtct

SEQ ID NO: 89619 - DNA, 25 bp, Homo sapien
cagtatccgggctcggcgcgagctc

SEQ ID NO: 89620 - DNA, 25 bp, Homo sapien
ttcgcgctggaatggagatcgcgcc

SEQ ID NO: 89621 - DNA, 25 bp, Homo sapien
ccggtagagacgagcctctgccgcg

SEQ ID NO: 89622 - DNA, 25 bp, Homo sapien
gatccgcgcgcacggtggttgatga

SEQ ID NO: 89623 - DNA, 25 bp, Homo sapien
aaattaccgaagatgcccgaagccg

SEQ ID NO: 89624 - DNA, 25 bp, Homo sapien
cagaagagtgccctggtcaagcggc

SEQ ID NO: 89625 - DNA, 25 bp, Homo sapien
tcatctcggtacgttcgaagggcgt

SEQ ID NO: 89626 - DNA, 25 bp, Homo sapien
aagggcacccgaagattgtcacgag

SEQ ID NO: 89627 - DNA, 25 bp, Homo sapien
ggtaatccgcaaacaccgagtctga

SEQ ID NO: 89628 - DNA, 25 bp, Homo sapien
tctgcggagcaaggaagaactttcc

SEQ ID NO: 89629 - DNA, 25 bp, Homo sapien
gatcagttcatagtctgggtccgaa

SEQ ID NO: 89630 - DNA, 25 bp, Homo sapien
ccaaaaaagttcagggcgcttgcat

SEQ ID NO: 89631 - DNA, 25 bp, Homo sapien
gtaacgcatgaaagaaccagaagcc

SEQ ID NO: 89632 - DNA, 25 bp, Homo sapien
taaaatctagtacgtgcagctggtc

SEQ ID NO: 89633 - DNA, 25 bp, Homo sapien
cagaagcccgggtgtttgagacgtt

SEQ ID NO: 89634 - DNA, 25 bp, Homo sapien
taatatttagtatgggccagacgcg

SEQ ID NO: 89635 - DNA, 25 bp, Homo sapien
tagtggcattgaagaggatgactcc

SEQ ID NO: 89636 - DNA, 25 bp, Homo sapien
gagatgggaaggatagtggcattga

SEQ ID NO: 89637 - DNA, 25 bp, Homo sapien
gaaggatagtggcattgaagaggat

SEQ ID NO: 89638 - DNA, 25 bp, Homo sapien
aagggttagtattgtgtggtactga

SEQ ID NO: 89639 - DNA, 25 bp, Homo sapien
tctgacaaattcattgcgctcctgc

SEQ ID NO: 89640 - DNA, 25 bp, Homo sapien
actgaactccagctgtctgacaaat

SEQ ID NO: 89641 - DNA, 25 bp, Homo sapien
agatagaaggtggtcggtctgcccc

SEQ ID NO: 89642 - DNA, 25 bp, Homo sapien
tgctccagactatccagcagtggtt

SEQ ID NO: 89643 - DNA, 25 bp, Homo sapien
tactggtcagtgagttcggtcagct

SEQ ID NO: 89644 - DNA, 25 bp, Homo sapien
cattgtagagagtcatggctccatc

SEQ ID NO: 89645 - DNA, 25 bp, Homo sapien
gaataccagttccagagctttaggc

SEQ ID NO: 89646 - DNA, 25 bp, Homo sapien
ctagtagactgatgagctggattgc

SEQ ID NO: 89647 - DNA, 25 bp, Homo sapien
atgagccagcagtggacttgagtta

SEQ ID NO: 89648 - DNA, 25 bp, Homo sapien
gaagaagccatcaaattcttgagga

SEQ ID NO: 89649 - DNA, 25 bp, Homo sapien
cctgtcttatttctcgggaaggagg

SEQ ID NO: 89650 - DNA, 25 bp, Homo sapien
ccagcagtggacttgagttacaatg

SEQ ID NO: 89651 - DNA, 25 bp, Homo sapien
gtaaaaccagccaatggaatccagg

SEQ ID NO: 89652 - DNA, 25 bp, Homo sapien
caattacactacaatctgataggag

SEQ ID NO: 89653 - DNA, 25 bp, Homo sapien
ggtttgcgtatcacacaattacact

SEQ ID NO: 89654 - DNA, 25 bp, Homo sapien
tgggaaaactaatggtttgcgtatc

SEQ ID NO: 89655 - DNA, 25 bp, Homo sapien
tagaaaacgtagcatgacccctgta

SEQ ID NO: 89656 - DNA, 25 bp, Homo sapien
cagaataggaacacctgctaccagt

SEQ ID NO: 89657 - DNA, 25 bp, Homo sapien
ccagatattgttgtgcgggcctgta

SEQ ID NO: 89658 - DNA, 25 bp, Homo sapien
gtcaccgcgagttcgattcaaacag

SEQ ID NO: 89659 - DNA, 25 bp, Homo sapien
ctaatgctgctaatcctggtgggtg

SEQ ID NO: 89660 - DNA, 25 bp, Homo sapien
cctagacagggttgcgtttcagaga

SEQ ID NO: 89661 - DNA, 25 bp, Homo sapien
tctctaggacatagggatcttagtc

SEQ ID NO: 89662 - DNA, 25 bp, Homo sapien
taatgggaaccacagcctaccagaa

SEQ ID NO: 89663 - DNA, 25 bp, Homo sapien
ctctttccctacctccttgctcctt

SEQ ID NO: 89664 - DNA, 25 bp, Homo sapien
tctttccctacctccttgctccttc

SEQ ID NO: 89665 - DNA, 25 bp, Homo sapien
ggatacgcacggcacacatatgtgt

SEQ ID NO: 89666 - DNA, 25 bp, Homo sapien
aaatgatcctgctgacccggcagag

SEQ ID NO: 89667 - DNA, 25 bp, Homo sapien
tttcagccagagacgaaccaggcat

SEQ ID NO: 89668 - DNA, 25 bp, Homo sapien
catatgtgtgcgcttcctggctcta

SEQ ID NO: 89669 - DNA, 25 bp, Homo sapien
tctccaactacgtgctgcagccgct

SEQ ID NO: 89670 - DNA, 25 bp, Homo sapien
ggattgctgtgctggtgatctaccc

SEQ ID NO: 89671 - DNA, 25 bp, Homo sapien
accaggctgtcatcgccctcacctt

SEQ ID NO: 89672 - DNA, 25 bp, Homo sapien
caccttctccaactacgtgctgcag

SEQ ID NO: 89673 - DNA, 25 bp, Homo sapien
tgacgggcttcatcacagttgtggg

SEQ ID NO: 89674 - DNA, 25 bp, Homo sapien
gaatgctggttctgtgggccttgct

SEQ ID NO: 89675 - DNA, 25 bp, Homo sapien
gaggtgactactcctatgtcaagga

SEQ ID NO: 89676 - DNA, 25 bp, Homo sapien
tgggagccctctgctatgctgaact

SEQ ID NO: 89677 - DNA, 25 bp, Homo sapien
ttattggaagataccagagtgcatc

SEQ ID NO: 89678 - DNA, 25 bp, Homo sapien
tgcactcctttaactcgaggagaga

SEQ ID NO: 89679 - DNA, 25 bp, Homo sapien
aaagcccttgcactcctttaactcg

SEQ ID NO: 89680 - DNA, 25 bp, Homo sapien
cagagtgcatcagtatgttgtagaa

SEQ ID NO: 89681 - DNA, 25 bp, Homo sapien
tgaggttgcaatcctactgagaagg

SEQ ID NO: 89682 - DNA, 25 bp, Homo sapien
aaagagatcggattggtcagtgcct

SEQ ID NO: 89683 - DNA, 25 bp, Homo sapien
cttgtttgtaaacgcgagtgaccag

SEQ ID NO: 89684 - DNA, 25 bp, Homo sapien
tacacgaatacgcatttagaaaggg

SEQ ID NO: 89685 - DNA, 25 bp, Homo sapien
tgaacaacaaggctacctggtgatt

SEQ ID NO: 89686 - DNA, 25 bp, Homo sapien
tatactgataattccccatgtgtgc

SEQ ID NO: 89687 - DNA, 25 bp, Homo sapien
agttgcaggatcagggtttgagtca

SEQ ID NO: 89688 - DNA, 25 bp, Homo sapien
gtttcagccagtcctaaataagagc

SEQ ID NO: 89689 - DNA, 25 bp, Homo sapien
tatatggtgatgttgaaatcggagc

SEQ ID NO: 89690 - DNA, 25 bp, Homo sapien
ggctagaggcaaattcgacattttt

SEQ ID NO: 89691 - DNA, 25 bp, Homo sapien
tgtcaggaaaggctagaggcaaatt

SEQ ID NO: 89692 - DNA, 25 bp, Homo sapien
gaaatcggagcagaagtcttcaaat

SEQ ID NO: 89693 - DNA, 25 bp, Homo sapien
gggtcagctgcatccaaattctcag

SEQ ID NO: 89694 - DNA, 25 bp, Homo sapien
ccatcataacaaagcagggtcagct

SEQ ID NO: 89695 - DNA, 25 bp, Homo sapien
tctttcccactagtgctgggctggc

SEQ ID NO: 89696 - DNA, 25 bp, Homo sapien
tggctccatggaatcccaccaagtg

SEQ ID NO: 89697 - DNA, 25 bp, Homo sapien
cttattcctgaactcagggtcttct

SEQ ID NO: 89698 - DNA, 25 bp, Homo sapien
ttattcctgaactcagggtcttctt

SEQ ID NO: 89699 - DNA, 25 bp, Homo sapien
caccactatctggacagttgggcat

SEQ ID NO: 89700 - DNA, 25 bp, Homo sapien
tcaccactatctggacagttgggca

SEQ ID NO: 89701 - DNA, 25 bp, Homo sapien
ctggtgacaaagaaatgggccccat

SEQ ID NO: 89702 - DNA, 25 bp, Homo sapien
ggccccatcttttcggaagcactgg

SEQ ID NO: 89703 - DNA, 25 bp, Homo sapien
aatgggccccatcttttcggaagca

SEQ ID NO: 89704 - DNA, 25 bp, Homo sapien
ggtgacaaagaaatgggccccatct

SEQ ID NO: 89705 - DNA, 25 bp, Homo sapien
agatgcttgcaggcagttccacaaa

SEQ ID NO: 89706 - DNA, 25 bp, Homo sapien
gagccagatgcttgcaggcagttcc

SEQ ID NO: 89707 - DNA, 25 bp, Homo sapien
cagatgcttgcaggcagttccacaa

SEQ ID NO: 89708 - DNA, 25 bp, Homo sapien
gccagatgcttgcaggcagttccac

SEQ ID NO: 89709 - DNA, 25 bp, Homo sapien
ctgtctccacaggacttttgaaaaa

SEQ ID NO: 89710 - DNA, 25 bp, Homo sapien
tgactaaaatactgcaaagctgtct

SEQ ID NO: 89711 - DNA, 25 bp, Homo sapien
agatgtgactaaaatactgcaaagc

SEQ ID NO: 89712 - DNA, 25 bp, Homo sapien
tctccacaggacttttgaaaaacat

SEQ ID NO: 89713 - DNA, 25 bp, Homo sapien
cttataaaaggcgatgaggagatct

SEQ ID NO: 89714 - DNA, 25 bp, Homo sapien
aaaggcgatgaggagatctgtttgt

SEQ ID NO: 89715 - DNA, 25 bp, Homo sapien
tctatgcttataaaaggcgatgagg

SEQ ID NO: 89716 - DNA, 25 bp, Homo sapien
tataaaaggcgatgaggagatctgt

SEQ ID NO: 89717 - DNA, 25 bp, Homo sapien
ttagaatggctagaaatttcttcag

SEQ ID NO: 89718 - DNA, 25 bp, Homo sapien
ctttagaatggctagaaatttcttc

SEQ ID NO: 89719 - DNA, 25 bp, Homo sapien
tttagaatggctagaaatttcttca

SEQ ID NO: 89720 - DNA, 25 bp, Homo sapien
ttccttggtaccgacttggagattc

SEQ ID NO: 89721 - DNA, 25 bp, Homo sapien
tgcttccttggtaccgacttggaga

SEQ ID NO: 89722 - DNA, 25 bp, Homo sapien
gcttccttggtaccgacttggagat

SEQ ID NO: 89723 - DNA, 25 bp, Homo sapien
ctgcttccttggtaccgacttggag

SEQ ID NO: 89724 - DNA, 25 bp, Homo sapien
gtgaaagctaaattcattaaccatt

SEQ ID NO: 89725 - DNA, 25 bp, Homo sapien
taagattttacttcggcactttcag

SEQ ID NO: 89726 - DNA, 25 bp, Homo sapien
cagtaactaactcttcctcggagaa

SEQ ID NO: 89727 - DNA, 25 bp, Homo sapien
gctgggctagtatgggagctgataa

SEQ ID NO: 89728 - DNA, 25 bp, Homo sapien
actgtgatggggaagtaatgcccac

SEQ ID NO: 89729 - DNA, 25 bp, Homo sapien
gactgtgatggggaagtaatgccca

SEQ ID NO: 89730 - DNA, 25 bp, Homo sapien
tgatggggaagtaatgcccactggt

SEQ ID NO: 89731 - DNA, 25 bp, Homo sapien
tgtgatggggaagtaatgcccactg

SEQ ID NO: 89732 - DNA, 25 bp, Homo sapien
tatgctggaaactgggtcgtggggt

SEQ ID NO: 89733 - DNA, 25 bp, Homo sapien
atgctggaaactgggtcgtggggta

SEQ ID NO: 89734 - DNA, 25 bp, Homo sapien
ctatgctggaaactgggtcgtgggg

SEQ ID NO: 89735 - DNA, 25 bp, Homo sapien
tgctggaaactgggtcgtggggtaa

SEQ ID NO: 89736 - DNA, 25 bp, Homo sapien
ctcaactttccctgttcggagcatg

SEQ ID NO: 89737 - DNA, 25 bp, Homo sapien
tcattccctgaaagtcagggttggc

SEQ ID NO: 89738 - DNA, 25 bp, Homo sapien
tcaactttccctgttcggagcatga

SEQ ID NO: 89739 - DNA, 25 bp, Homo sapien
ttccctgaaagtcagggttggcttg

SEQ ID NO: 89740 - DNA, 25 bp, Homo sapien
ttgtcccaagctaccaaagccagcc

SEQ ID NO: 89741 - DNA, 25 bp, Homo sapien
tctataaggaatagattccgctgag

SEQ ID NO: 89742 - DNA, 25 bp, Homo sapien
aatagattccgctgaggaggaccga

SEQ ID NO: 89743 - DNA, 25 bp, Homo sapien
gcctctctataaggaatagattccg

SEQ ID NO: 89744 - DNA, 25 bp, Homo sapien
attataagagtctctgggagttctc

SEQ ID NO: 89745 - DNA, 25 bp, Homo sapien
cattataagagtctctgggagttct

SEQ ID NO: 89746 - DNA, 25 bp, Homo sapien
tcaataatcgaaacttccaccttag

SEQ ID NO: 89747 - DNA, 25 bp, Homo sapien
aaacaaaacacagcatgccaaatgt

SEQ ID NO: 89748 - DNA, 25 bp, Homo sapien
tgccaaatgttataggatgcagtaa

SEQ ID NO: 89749 - DNA, 25 bp, Homo sapien
agtaatacagactctcaacaaaacg

SEQ ID NO: 89750 - DNA, 25 bp, Homo sapien
ctataagataggctatgagttgaag

SEQ ID NO: 89751 - DNA, 25 bp, Homo sapien
taagataggctatgagttgaagccg

SEQ ID NO: 89752 - DNA, 25 bp, Homo sapien
agataggctatgagttgaagccggt

SEQ ID NO: 89753 - DNA, 25 bp, Homo sapien
taggctatgagttgaagccggtgaa

SEQ ID NO: 89754 - DNA, 25 bp, Homo sapien
caagcccgggtaattaggtctcact

SEQ ID NO: 89755 - DNA, 25 bp, Homo sapien
gtaatttggatgtatattaaacaca

SEQ ID NO: 89756 - DNA, 25 bp, Homo sapien
tacagtaatttggatgtatattaaa

SEQ ID NO: 89757 - DNA, 25 bp, Homo sapien
gccactaccgggccaaaatacagta

SEQ ID NO: 89758 - DNA, 25 bp, Homo sapien
cttgtgtggcctgaatgcccatttg

SEQ ID NO: 89759 - DNA, 25 bp, Homo sapien
tcttgtgtggcctgaatgcccattt

SEQ ID NO: 89760 - DNA, 25 bp, Homo sapien
ctgcaggactggtagctggaaacta

SEQ ID NO: 89761 - DNA, 25 bp, Homo sapien
ggaagactctctagtgtagttgtgc

SEQ ID NO: 89762 - DNA, 25 bp, Homo sapien
tagctggaaactaggaagactctct

SEQ ID NO: 89763 - DNA, 25 bp, Homo sapien
ctagtgtagttgtgctctccctctg

SEQ ID NO: 89764 - DNA, 25 bp, Homo sapien
ccatatgcctccgttgttggtagag

SEQ ID NO: 89765 - DNA, 25 bp, Homo sapien
atcccatatgcctccgttgttggta

SEQ ID NO: 89766 - DNA, 25 bp, Homo sapien
gaagtggtccatgcttctctcccac

SEQ ID NO: 89767 - DNA, 25 bp, Homo sapien
tatgcctccgttgttggtagagagt

SEQ ID NO: 89768 - DNA, 25 bp, Homo sapien
cttcagcagcatgtatagatcagat

SEQ ID NO: 89769 - DNA, 25 bp, Homo sapien
cgtactggaagctacagtccatcct

SEQ ID NO: 89770 - DNA, 25 bp, Homo sapien
gggccatcacccctaatgcgtactg

SEQ ID NO: 89771 - DNA, 25 bp, Homo sapien
gcagcatgtatagatcagatcttga

SEQ ID NO: 89772 - DNA, 25 bp, Homo sapien
gctaccagtgtcttctggaagagat

SEQ ID NO: 89773 - DNA, 25 bp, Homo sapien
tagccttttgtaagacctgaccact

SEQ ID NO: 89774 - DNA, 25 bp, Homo sapien
aacattggcaatgggacagtatatc

SEQ ID NO: 89775 - DNA, 25 bp, Homo sapien
gagatattgctcgttaacattggca

SEQ ID NO: 89776 - DNA, 25 bp, Homo sapien
ctatctatatactaagctgaaaatc

SEQ ID NO: 89777 - DNA, 25 bp, Homo sapien
ttactatctatatactaagctgaaa

SEQ ID NO: 89778 - DNA, 25 bp, Homo sapien
caataaaagggcatcgtctttattt

SEQ ID NO: 89779 - DNA, 25 bp, Homo sapien
gcaataaaagggcatcgtctttatt

SEQ ID NO: 89780 - DNA, 25 bp, Homo sapien
cagccaggttgtttctcagccatca

SEQ ID NO: 89781 - DNA, 25 bp, Homo sapien
agttcagcatctatcgccagccagg

SEQ ID NO: 89782 - DNA, 25 bp, Homo sapien
cagttgggatcagctatatggcaaa

SEQ ID NO: 89783 - DNA, 25 bp, Homo sapien
taaaagagtggaagccctaaaatgc

SEQ ID NO: 89784 - DNA, 25 bp, Homo sapien
caagattctcaataagtcccagtct

SEQ ID NO: 89785 - DNA, 25 bp, Homo sapien
gtgcgtaatgcaactgactctctta

SEQ ID NO: 89786 - DNA, 25 bp, Homo sapien
caagtctgtgcgtaatgcaactgac

SEQ ID NO: 89787 - DNA, 25 bp, Homo sapien
catttcctagacaaccaagattctc

SEQ ID NO: 89788 - DNA, 25 bp, Homo sapien
cattcagtggtttggtgacacacgc

SEQ ID NO: 89789 - DNA, 25 bp, Homo sapien
tacaacccttggagaggtactgggc

SEQ ID NO: 89790 - DNA, 25 bp, Homo sapien
tcagtaccaggtagagttggcccca

SEQ ID NO: 89791 - DNA, 25 bp, Homo sapien
tggtttcgggacaacgcagtacctg

SEQ ID NO: 89792 - DNA, 25 bp, Homo sapien
tccagggaagtaccagctatacagc

SEQ ID NO: 89793 - DNA, 25 bp, Homo sapien
agctgatgccgagaatgtgaaggac

SEQ ID NO: 89794 - DNA, 25 bp, Homo sapien
tgaaggacatcaagccacctaaacg

SEQ ID NO: 89795 - DNA, 25 bp, Homo sapien
tacagctgtgccttgatttaagcca

SEQ ID NO: 89796 - DNA, 25 bp, Homo sapien
tacacagggagtctcaaacctggct

SEQ ID NO: 89797 - DNA, 25 bp, Homo sapien
taagactgctgttcagagttcccaa

SEQ ID NO: 89798 - DNA, 25 bp, Homo sapien
gactattgaacctgaatgggaagga

SEQ ID NO: 89799 - DNA, 25 bp, Homo sapien
gcctggaccccagtacagactattg

SEQ ID NO: 89800 - DNA, 25 bp, Homo sapien
gataattctaggttcgaagtggccc

SEQ ID NO: 89801 - DNA, 25 bp, Homo sapien
ggagccttctggactgcctgtgaaa

SEQ ID NO: 89802 - DNA, 25 bp, Homo sapien
tgttccctgacccagttcggagcct

SEQ ID NO: 89803 - DNA, 25 bp, Homo sapien
gctggactgcggtgagtgatcccca

SEQ ID NO: 89804 - DNA, 25 bp, Homo sapien
tctttccagagacgtcagagtcaga

SEQ ID NO: 89805 - DNA, 25 bp, Homo sapien
tcaggcaagagacatagaggactgt

SEQ ID NO: 89806 - DNA, 25 bp, Homo sapien
gcaagagacatagaggactgtgtgc

SEQ ID NO: 89807 - DNA, 25 bp, Homo sapien
acatagaggactgtgtgccctatcc

SEQ ID NO: 89808 - DNA, 25 bp, Homo sapien
attacattaacctaagtaggcaaga

SEQ ID NO: 89809 - DNA, 25 bp, Homo sapien
cctaagtaggcaagaagagactttt

SEQ ID NO: 89810 - DNA, 25 bp, Homo sapien
cctaagtaggcaagtatatatacgg

SEQ ID NO: 89811 - DNA, 25 bp, Homo sapien
tattacattacctaagtaggcaagt

SEQ ID NO: 89812 - DNA, 25 bp, Homo sapien
gataggctttgcttgcctcctgcaa

SEQ ID NO: 89813 - DNA, 25 bp, Homo sapien
taagcacattcttcacgcatgcggc

SEQ ID NO: 89814 - DNA, 25 bp, Homo sapien
tgtaatgacgaggtttcttcgccct

SEQ ID NO: 89815 - DNA, 25 bp, Homo sapien
tgtgtgagactgtgagagagacctc

SEQ ID NO: 89816 - DNA, 25 bp, Homo sapien
tccttgacagtcttctagaagagag

SEQ ID NO: 89817 - DNA, 25 bp, Homo sapien
aaagaagcagttcctgatgttacaa

SEQ ID NO: 89818 - DNA, 25 bp, Homo sapien
accatggttggtctgcttccctcac

SEQ ID NO: 89819 - DNA, 25 bp, Homo sapien
ccctcactcgggctccttgacagtc

SEQ ID NO: 89820 - DNA, 25 bp, Homo sapien
taacagtaacaactagctgggttcg

SEQ ID NO: 89821 - DNA, 25 bp, Homo sapien
tccctgcaggttgccagtgttaagc

SEQ ID NO: 89822 - DNA, 25 bp, Homo sapien
acaggcgtgaagcagtctgaccata

SEQ ID NO: 89823 - DNA, 25 bp, Homo sapien
gtatatttatacagggcaggtcaca

SEQ ID NO: 89824 - DNA, 25 bp, Homo sapien
gggtcaggccgctgccgggatccgg

SEQ ID NO: 89825 - DNA, 25 bp, Homo sapien
ctgccgggatccgggccgtttcctg

SEQ ID NO: 89826 - DNA, 25 bp, Homo sapien
gggatccgggccgtttcctggtgca

SEQ ID NO: 89827 - DNA, 25 bp, Homo sapien
atccgggccgtttcctggtgcagga

SEQ ID NO: 89828 - DNA, 25 bp, Homo sapien
agctgtgtggccgaatccatgttta

SEQ ID NO: 89829 - DNA, 25 bp, Homo sapien
tgtgtggccgaatccatgtttaatg

SEQ ID NO: 89830 - DNA, 25 bp, Homo sapien
gctgtgtggccgaatccatgtttaa

SEQ ID NO: 89831 - DNA, 25 bp, Homo sapien
ccagctgtgtggccgaatccatgtt

SEQ ID NO: 89832 - DNA, 25 bp, Homo sapien
gccgggatggcagctcttaagacac

SEQ ID NO: 89833 - DNA, 25 bp, Homo sapien
cagccgggatggcagctcttaagac

SEQ ID NO: 89834 - DNA, 25 bp, Homo sapien
ccgggatggcagctcttaagacaca

SEQ ID NO: 89835 - DNA, 25 bp, Homo sapien
gggatggcagctcttaagacacagc

SEQ ID NO: 89836 - DNA, 25 bp, Homo sapien
gagacgcaatgggttactccagaca

SEQ ID NO: 89837 - DNA, 25 bp, Homo sapien
ttaggacctccccaaatgcaagatg

SEQ ID NO: 89838 - DNA, 25 bp, Homo sapien
gaaatgctcaggactcactggacag

SEQ ID NO: 89839 - DNA, 25 bp, Homo sapien
gagcacttctggtttgaccaaccca

SEQ ID NO: 89840 - DNA, 25 bp, Homo sapien
gccggaagcgggtctcgaactcatc

SEQ ID NO: 89841 - DNA, 25 bp, Homo sapien
gctgagccgccagatcagagaaggt

SEQ ID NO: 89842 - DNA, 25 bp, Homo sapien
tgaaaaagttcatcggagacctggg

SEQ ID NO: 89843 - DNA, 25 bp, Homo sapien
gacaaagaaggctacaaggcggccc

SEQ ID NO: 89844 - DNA, 25 bp, Homo sapien
tgagagactggttcatctgcccact

SEQ ID NO: 89845 - DNA, 25 bp, Homo sapien
ggaccatgagcccatccagtgttga

SEQ ID NO: 89846 - DNA, 25 bp, Homo sapien
tgtgcagagcggcaattgagaagct

SEQ ID NO: 89847 - DNA, 25 bp, Homo sapien
gctcagaactagcatcctttgccaa

SEQ ID NO: 89848 - DNA, 25 bp, Homo sapien
ccccgtatagagctgtgaactccgc

SEQ ID NO: 89849 - DNA, 25 bp, Homo sapien
ccccgtccccgtatagagctgtgaa

SEQ ID NO: 89850 - DNA, 25 bp, Homo sapien
ccgtccccgtatagagctgtgaact

SEQ ID NO: 89851 - DNA, 25 bp, Homo sapien
ggccccgtccccgtatagagctgtg

SEQ ID NO: 89852 - DNA, 25 bp, Homo sapien
tcacttgctagcaaaaaaggcccct

SEQ ID NO: 89853 - DNA, 25 bp, Homo sapien
tgctagcaaaaaaggcccctacagt

SEQ ID NO: 89854 - DNA, 25 bp, Homo sapien
cttgctagcaaaaaaggcccctaca

SEQ ID NO: 89855 - DNA, 25 bp, Homo sapien
cacttgctagcaaaaaaggccccta

SEQ ID NO: 89856 - DNA, 25 bp, Homo sapien
ggtactctagaacccatatgcctgg

SEQ ID NO: 89857 - DNA, 25 bp, Homo sapien
caagttccaggtcgtttcatgtgcc

SEQ ID NO: 89858 - DNA, 25 bp, Homo sapien
caatttggagccgatggtctagtca

SEQ ID NO: 89859 - DNA, 25 bp, Homo sapien
taccatgaaaaagtgcagccctctc

SEQ ID NO: 89860 - DNA, 25 bp, Homo sapien
ccttcaagctaagaagggcaggaca

SEQ ID NO: 89861 - DNA, 25 bp, Homo sapien
ggccaagagctaatcccaaggaact

SEQ ID NO: 89862 - DNA, 25 bp, Homo sapien
cattttggtaacctggccatggtcc

SEQ ID NO: 89863 - DNA, 25 bp, Homo sapien
caggtcaaaattgcccactgtggtc

SEQ ID NO: 89864 - DNA, 25 bp, Homo sapien
gggctctggagagcaagaaacccct

SEQ ID NO: 89865 - DNA, 25 bp, Homo sapien
ctggagagcaagaaacccctctcct

SEQ ID NO: 89866 - DNA, 25 bp, Homo sapien
ggctctggagagcaagaaacccctc

SEQ ID NO: 89867 - DNA, 25 bp, Homo sapien
ctctggagagcaagaaacccctctc

SEQ ID NO: 89868 - DNA, 25 bp, Homo sapien
gagtgggattaataatcgcaggacc

SEQ ID NO: 89869 - DNA, 25 bp, Homo sapien
taaaatagtgtttgtgtgccctaga

SEQ ID NO: 89870 - DNA, 25 bp, Homo sapien
ccaaatctgttctgccgttttatga

SEQ ID NO: 89871 - DNA, 25 bp, Homo sapien
gcaggaccgagttgccctacttccg

SEQ ID NO: 89872 - DNA, 25 bp, Homo sapien
cactttctcaaatccctgttattct

SEQ ID NO: 89873 - DNA, 25 bp, Homo sapien
ggatcaaggaaatgtcctgacccca

SEQ ID NO: 89874 - DNA, 25 bp, Homo sapien
catgaagagatgattggatcaagga

SEQ ID NO: 89875 - DNA, 25 bp, Homo sapien
tgaccccaggctatacagtgtagaa

SEQ ID NO: 89876 - DNA, 25 bp, Homo sapien
taagtttgcctttgcatggaagtgg

SEQ ID NO: 89877 - DNA, 25 bp, Homo sapien
ttaaatgtgaaggaccctctgttgg

SEQ ID NO: 89878 - DNA, 25 bp, Homo sapien
cttggagcagacctcaataatcttc

SEQ ID NO: 89879 - DNA, 25 bp, Homo sapien
tcataaagcccactatccagagaca

SEQ ID NO: 89880 - DNA, 25 bp, Homo sapien
aaatggtgagattcttaaggccagg

SEQ ID NO: 89881 - DNA, 25 bp, Homo sapien
ggagcaagaaccagtacaatctttc

SEQ ID NO: 89882 - DNA, 25 bp, Homo sapien
tgaaccataattggtgctacgtgca

SEQ ID NO: 89883 - DNA, 25 bp, Homo sapien
ggttacatagtatgacaaacatgcg

SEQ ID NO: 89884 - DNA, 25 bp, Homo sapien
cagcagagtcacagtcgcttaaaat

SEQ ID NO: 89885 - DNA, 25 bp, Homo sapien
tcacagtcgcttaaaatttcactgc

SEQ ID NO: 89886 - DNA, 25 bp, Homo sapien
tctcagcttcagtgatctgggataa

SEQ ID NO: 89887 - DNA, 25 bp, Homo sapien
ttcactgcaaattacttcatcagcc

SEQ ID NO: 89888 - DNA, 25 bp, Homo sapien
tgtatctcgaccaggaagcaccagt

SEQ ID NO: 89889 - DNA, 25 bp, Homo sapien
gactgccgggcttcaaacttgggaa

SEQ ID NO: 89890 - DNA, 25 bp, Homo sapien
taataataccgccacgctgtgacga

SEQ ID NO: 89891 - DNA, 25 bp, Homo sapien
caccagaaagcagggaggattcctc

SEQ ID NO: 89892 - DNA, 25 bp, Homo sapien
ccccaccggccccgggcacaagatg

SEQ ID NO: 89893 - DNA, 25 bp, Homo sapien
ccggccccgggcacaagatggcgcc

SEQ ID NO: 89894 - DNA, 25 bp, Homo sapien
caccggccccgggcacaagatggcg

SEQ ID NO: 89895 - DNA, 25 bp, Homo sapien
gccccgggcacaagatggcgccgcc

SEQ ID NO: 89896 - DNA, 25 bp, Homo sapien
ccgcctgccacccgctcgcccgagc

SEQ ID NO: 89897 - DNA, 25 bp, Homo sapien
cgcctgccacccgctcgcccgagct

SEQ ID NO: 89898 - DNA, 25 bp, Homo sapien
tgacgcccgaatcaagccagtcggg

SEQ ID NO: 89899 - DNA, 25 bp, Homo sapien
catgcgagggtcgtgataaaagaaa

SEQ ID NO: 89900 - DNA, 25 bp, Homo sapien
tctagaacaacactaggcaaccgtg

SEQ ID NO: 89901 - DNA, 25 bp, Homo sapien
cagtcgggccccttgtagtgatcgc

SEQ ID NO: 89902 - DNA, 25 bp, Homo sapien
gaggtggactcatattcatctgctt

SEQ ID NO: 89903 - DNA, 25 bp, Homo sapien
gcttctctacctcgttctgtagctc

SEQ ID NO: 89904 - DNA, 25 bp, Homo sapien
cattgcctggaggtggactcatatt

SEQ ID NO: 89905 - DNA, 25 bp, Homo sapien
tctccctgactcgagctttgatagc

SEQ ID NO: 89906 - DNA, 25 bp, Homo sapien
gcaaaattaagtgggctgagactcc

SEQ ID NO: 89907 - DNA, 25 bp, Homo sapien
gcagctccagggtgccgagtatcta

SEQ ID NO: 89908 - DNA, 25 bp, Homo sapien
tcagaggaacacacaacggactatg

SEQ ID NO: 89909 - DNA, 25 bp, Homo sapien
tttgaaggtcaaatgcgagcacgca

SEQ ID NO: 89910 - DNA, 25 bp, Homo sapien
tctcctcaatggacatgatcaccgg

SEQ ID NO: 89911 - DNA, 25 bp, Homo sapien
agatggaacgggcatcagcctccat

SEQ ID NO: 89912 - DNA, 25 bp, Homo sapien
gccaacatagatggaacgggcatca

SEQ ID NO: 89913 - DNA, 25 bp, Homo sapien
tcaatggacatgatcaccgggccag

SEQ ID NO: 89914 - DNA, 25 bp, Homo sapien
ctcccgagcctttggtctgggccat

SEQ ID NO: 89915 - DNA, 25 bp, Homo sapien
cccgagcctttggtctgggccatca

SEQ ID NO: 89916 - DNA, 25 bp, Homo sapien
cctcccgagcctttggtctgggcca

SEQ ID NO: 89917 - DNA, 25 bp, Homo sapien
tcccgagcctttggtctgggccatc

SEQ ID NO: 89918 - DNA, 25 bp, Homo sapien
gtcacacagtatggtaacacggttg

SEQ ID NO: 89919 - DNA, 25 bp, Homo sapien
ttgggatggccactaaatttgtcac

SEQ ID NO: 89920 - DNA, 25 bp, Homo sapien
gatggccactaaatttgtcacacag

SEQ ID NO: 89921 - DNA, 25 bp, Homo sapien
cagtatggtaacacggttgactgaa

SEQ ID NO: 89922 - DNA, 25 bp, Homo sapien
ggtcaaattcaacctgcaggcatgc

SEQ ID NO: 89923 - DNA, 25 bp, Homo sapien
tctgaagacatttaggtgcaactcc

SEQ ID NO: 89924 - DNA, 25 bp, Homo sapien
cacagggcctgaatttccatatggc

SEQ ID NO: 89925 - DNA, 25 bp, Homo sapien
taataggccaagtagaagctgcccc

SEQ ID NO: 89926 - DNA, 25 bp, Homo sapien
gtctgagaactctatatacgcaaac

SEQ ID NO: 89927 - DNA, 25 bp, Homo sapien
tagggactcatctaaggccaaggaa

SEQ ID NO: 89928 - DNA, 25 bp, Homo sapien
ccttcctctaaatagggactcatct

SEQ ID NO: 89929 - DNA, 25 bp, Homo sapien
ggaagtcctcactgactctttgtct

SEQ ID NO: 89930 - DNA, 25 bp, Homo sapien
cttaaaggcaacctggagagtttat

SEQ ID NO: 89931 - DNA, 25 bp, Homo sapien
gatgaacaaatgatagccttaaagg

SEQ ID NO: 89932 - DNA, 25 bp, Homo sapien
atacacaactagaacagcaatggac

SEQ ID NO: 89933 - DNA, 25 bp, Homo sapien
agaacagcaatggacataggcttac

SEQ ID NO: 89934 - DNA, 25 bp, Homo sapien
tcgagagcgggagctgttgtagttg

SEQ ID NO: 89935 - DNA, 25 bp, Homo sapien
cactgtagaatcgagagcgggagct

SEQ ID NO: 89936 - DNA, 25 bp, Homo sapien
accactgtagaatcgagagcgggag

SEQ ID NO: 89937 - DNA, 25 bp, Homo sapien
gaatcgagagcgggagctgttgtag

SEQ ID NO: 89938 - DNA, 25 bp, Homo sapien
ggggaaagaggagcagcccatctat

SEQ ID NO: 89939 - DNA, 25 bp, Homo sapien
ggaaagaggagcagcccatctatcc

SEQ ID NO: 89940 - DNA, 25 bp, Homo sapien
cgggggaaagaggagcagcccatct

SEQ ID NO: 89941 - DNA, 25 bp, Homo sapien
gaaagaggagcagcccatctatcct

SEQ ID NO: 89942 - DNA, 25 bp, Homo sapien
tcttccaagggaggttcagtcttca

SEQ ID NO: 89943 - DNA, 25 bp, Homo sapien
tagatagttcagtacaagcccctcc

SEQ ID NO: 89944 - DNA, 25 bp, Homo sapien
aatagtaacgcacctggagaactgg

SEQ ID NO: 89945 - DNA, 25 bp, Homo sapien
taggcccagtgagaagttaaccttg

SEQ ID NO: 89946 - DNA, 25 bp, Homo sapien
gggaataccatgatgtcgctctagc

SEQ ID NO: 89947 - DNA, 25 bp, Homo sapien
gaataccatgatgtcgctctagccc

SEQ ID NO: 89948 - DNA, 25 bp, Homo sapien
ataccatgatgtcgctctagcccgg

SEQ ID NO: 89949 - DNA, 25 bp, Homo sapien
tagtaaggggaataccatgatgtcg

SEQ ID NO: 89950 - DNA, 25 bp, Homo sapien
cagcagcttgcgcagttgagacgtg

SEQ ID NO: 89951 - DNA, 25 bp, Homo sapien
aaggtaacaagcagaacagtttggt

SEQ ID NO: 89952 - DNA, 25 bp, Homo sapien
aatccccagagtgaataagcagccc

SEQ ID NO: 89953 - DNA, 25 bp, Homo sapien
agcagttagttatgggattctcccc

SEQ ID NO: 89954 - DNA, 25 bp, Homo sapien
ggggtgggtggtagacctggctgga

SEQ ID NO: 89955 - DNA, 25 bp, Homo sapien
gggtgggtggtagacctggctggac

SEQ ID NO: 89956 - DNA, 25 bp, Homo sapien
ggtgggtggtagacctggctggaca

SEQ ID NO: 89957 - DNA, 25 bp, Homo sapien
caaagaaagacactcaaaacagaaa

SEQ ID NO: 89958 - DNA, 25 bp, Homo sapien
ctgcaaagaaagacactcaaaacag

SEQ ID NO: 89959 - DNA, 25 bp, Homo sapien
caaaaggaaacaaaatagatcacca

SEQ ID NO: 89960 - DNA, 25 bp, Homo sapien
aaaaggaaacaaaatagatcaccag

SEQ ID NO: 89961 - DNA, 25 bp, Homo sapien
aacggagatcttccggctacagaaa

SEQ ID NO: 89962 - DNA, 25 bp, Homo sapien
aaaacaaggtagtgcatttccccag

SEQ ID NO: 89963 - DNA, 25 bp, Homo sapien
cgctgggagcggaacggagatcttc

SEQ ID NO: 89964 - DNA, 25 bp, Homo sapien
caactttattcatgacacatattaa

SEQ ID NO: 89965 - DNA, 25 bp, Homo sapien
tcagcaagcctgttttgtttattca

SEQ ID NO: 89966 - DNA, 25 bp, Homo sapien
ccactgtctttttagggagtgactt

SEQ ID NO: 89967 - DNA, 25 bp, Homo sapien
ttttcagcaagcctgttttgtttat

SEQ ID NO: 89968 - DNA, 25 bp, Homo sapien
tttattttcagcaagcctgttttgt

SEQ ID NO: 89969 - DNA, 25 bp, Homo sapien
acaggcctcgtggaagcaggctgac

SEQ ID NO: 89970 - DNA, 25 bp, Homo sapien
gcactgactgacaggcctcgtggaa

SEQ ID NO: 89971 - DNA, 25 bp, Homo sapien
cacactcagtcacaagtggggcact

SEQ ID NO: 89972 - DNA, 25 bp, Homo sapien
tgactgacaggcctcgtggaagcag

SEQ ID NO: 89973 - DNA, 25 bp, Homo sapien
tgggatcccagtttctcactccact

SEQ ID NO: 89974 - DNA, 25 bp, Homo sapien
cccagtttctcactccacttggccc

SEQ ID NO: 89975 - DNA, 25 bp, Homo sapien
gatcccagtttctcactccacttgg

SEQ ID NO: 89976 - DNA, 25 bp, Homo sapien
ccagtttctcactccacttggcccc

SEQ ID NO: 89977 - DNA, 25 bp, Homo sapien
tgtcctcacctaatctgggtcgctc

SEQ ID NO: 89978 - DNA, 25 bp, Homo sapien
ggaaaaggctaatgagagaactgtc

SEQ ID NO: 89979 - DNA, 25 bp, Homo sapien
gaactgtcctcacctaatctgggtc

SEQ ID NO: 89980 - DNA, 25 bp, Homo sapien
ggctaatgagagaactgtcctcacc

SEQ ID NO: 89981 - DNA, 25 bp, Homo sapien
tgtaggtgtgggttcccatgaccat

SEQ ID NO: 89982 - DNA, 25 bp, Homo sapien
tcagcagctcctcagaggtgtcctg

SEQ ID NO: 89983 - DNA, 25 bp, Homo sapien
ctgggccagtggctgtaggtgtggg

SEQ ID NO: 89984 - DNA, 25 bp, Homo sapien
tcctcagaggtgtcctgccctttgc

SEQ ID NO: 89985 - DNA, 25 bp, Homo sapien
tgctgttgaggggtccatcttcact

SEQ ID NO: 89986 - DNA, 25 bp, Homo sapien
tgggtggcggttgggcctagcaggc

SEQ ID NO: 89987 - DNA, 25 bp, Homo sapien
cactggccctacaggactctgggtg

SEQ ID NO: 89988 - DNA, 25 bp, Homo sapien
cggttgggcctagcaggctctaggg

SEQ ID NO: 89989 - DNA, 25 bp, Homo sapien
gggtgcccttctcgccatggcatgg

SEQ ID NO: 89990 - DNA, 25 bp, Homo sapien
aaacacggtacagcctgcgctccag

SEQ ID NO: 89991 - DNA, 25 bp, Homo sapien
cctgtctgtaggctgacgcagtgcg

SEQ ID NO: 89992 - DNA, 25 bp, Homo sapien
gccgccggtagaagacagtctggtt

SEQ ID NO: 89993 - DNA, 25 bp, Homo sapien
gaaatatctagaaagtgcctgtgct

SEQ ID NO: 89994 - DNA, 25 bp, Homo sapien
tagaatgcacccaaagtagatgctc

SEQ ID NO: 89995 - DNA, 25 bp, Homo sapien
ggtggcctccagaaatgggcagaac

SEQ ID NO: 89996 - DNA, 25 bp, Homo sapien
aagtggttgtacacctggctccagg

SEQ ID NO: 89997 - DNA, 25 bp, Homo sapien
catttccttttagggagggtgtgag

SEQ ID NO: 89998 - DNA, 25 bp, Homo sapien
gaaggcacttcgagaaacctgaaag

SEQ ID NO: 89999 - DNA, 25 bp, Homo sapien
gagctgggatgtgagtagaggaaca

SEQ ID NO: 90000 - DNA, 25 bp, Homo sapien
ctactgccaaaagcccagcaagaga

SEQ ID NO: 90001 - DNA, 25 bp, Homo sapien
gcccccagggacctaagcctgaaga

SEQ ID NO: 90002 - DNA, 25 bp, Homo sapien
cttcgtagggcccaccaacacagcc

SEQ ID NO: 90003 - DNA, 25 bp, Homo sapien
tcgtagggcccaccaacacagcccc

SEQ ID NO: 90004 - DNA, 25 bp, Homo sapien
ttcgtagggcccaccaacacagccc

SEQ ID NO: 90005 - DNA, 25 bp, Homo sapien
ctcagggtgccggtcccggcgatct

SEQ ID NO: 90006 - DNA, 25 bp, Homo sapien
ttgtccaccgcgaagccctggagct

SEQ ID NO: 90007 - DNA, 25 bp, Homo sapien
cagctcggtttccagcaggatgccc

SEQ ID NO: 90008 - DNA, 25 bp, Homo sapien
cccggcgatctcgagcactgagcat

SEQ ID NO: 90009 - DNA, 25 bp, Homo sapien
ctgctgtaaatgtctccgggtggag

SEQ ID NO: 90010 - DNA, 25 bp, Homo sapien
tcaagcttcctcaatgtcccaaaaa

SEQ ID NO: 90011 - DNA, 25 bp, Homo sapien
aaaaagtcaccctgtctaactgcag

SEQ ID NO: 90012 - DNA, 25 bp, Homo sapien
aggcagagtaggagacgaagaaggg

SEQ ID NO: 90013 - DNA, 25 bp, Homo sapien
gagcctttgattccatgccaagaga

SEQ ID NO: 90014 - DNA, 25 bp, Homo sapien
ctgcaggaccgagcatgtggaacat

SEQ ID NO: 90015 - DNA, 25 bp, Homo sapien
catttgccggtcaagggcagtctcc

SEQ ID NO: 90016 - DNA, 25 bp, Homo sapien
ggcacctactacctgtccttggagg

SEQ ID NO: 90017 - DNA, 25 bp, Homo sapien
tagcgccgcggccatgtaggcagag

SEQ ID NO: 90018 - DNA, 25 bp, Homo sapien
agtgtgatgaagaactccagtagcg

SEQ ID NO: 90019 - DNA, 25 bp, Homo sapien
atgaagaactccagtagcgccgcgg

SEQ ID NO: 90020 - DNA, 25 bp, Homo sapien
cgccgcggccatgtaggcagagatg

SEQ ID NO: 90021 - DNA, 25 bp, Homo sapien
ttaattcggtcgaagcgctggtagt

SEQ ID NO: 90022 - DNA, 25 bp, Homo sapien
ggccagttaattcggtcgaagcgct

SEQ ID NO: 90023 - DNA, 25 bp, Homo sapien
cagttaattcggtcgaagcgctggt

SEQ ID NO: 90024 - DNA, 25 bp, Homo sapien
acagggccagttaattcggtcgaag

SEQ ID NO: 90025 - DNA, 25 bp, Homo sapien
aatgcatcatttagaggagagggaa

SEQ ID NO: 90026 - DNA, 25 bp, Homo sapien
tagcatgggacaaagcccagctgtg

SEQ ID NO: 90027 - DNA, 25 bp, Homo sapien
gaaatcagtgtgagtcaaagcacac

SEQ ID NO: 90028 - DNA, 25 bp, Homo sapien
agtcaaagcacacctttgagtgcag

SEQ ID NO: 90029 - DNA, 25 bp, Homo sapien
ctgagtgggagagtagatctagcgg

SEQ ID NO: 90030 - DNA, 25 bp, Homo sapien
gtggtcctcctgattgcccgtggcc

SEQ ID NO: 90031 - DNA, 25 bp, Homo sapien
tagatctagcggatgtggtcctcct

SEQ ID NO: 90032 - DNA, 25 bp, Homo sapien
actgctacccagggagtggaagcag

SEQ ID NO: 90033 - DNA, 25 bp, Homo sapien
atatgaagcacattcaagagacaga

SEQ ID NO: 90034 - DNA, 25 bp, Homo sapien
ctgaagttttccaggctagccagca

SEQ ID NO: 90035 - DNA, 25 bp, Homo sapien
gatacccctcacacaatatgaagca

SEQ ID NO: 90036 - DNA, 25 bp, Homo sapien
acccctccataggatacccctcaca

SEQ ID NO: 90037 - DNA, 25 bp, Homo sapien
agcaatggcagctccgtcccgggag

SEQ ID NO: 90038 - DNA, 25 bp, Homo sapien
cagcaatggcagctccgtcccggga

SEQ ID NO: 90039 - DNA, 25 bp, Homo sapien
gcaatggcagctccgtcccgggagg

SEQ ID NO: 90040 - DNA, 25 bp, Homo sapien
taaggtatagggtgaggtgcaagcc

SEQ ID NO: 90041 - DNA, 25 bp, Homo sapien
tcttgaggggctaaggagtcctgca

SEQ ID NO: 90042 - DNA, 25 bp, Homo sapien
caagcaccagcctgagctcttgagg

SEQ ID NO: 90043 - DNA, 25 bp, Homo sapien
gctatagggccattgggttaaggta

SEQ ID NO: 90044 - DNA, 25 bp, Homo sapien
gatcttgaaggcatcataggcaaag

SEQ ID NO: 90045 - DNA, 25 bp, Homo sapien
ctcagtccggtagatcttgaaggca

SEQ ID NO: 90046 - DNA, 25 bp, Homo sapien
cccgggtgccatctcagtccggtag

SEQ ID NO: 90047 - DNA, 25 bp, Homo sapien
gaaggcatcataggcaaagatggaa

SEQ ID NO: 90048 - DNA, 25 bp, Homo sapien
tgaatcccaaggagacgtgtctggg

SEQ ID NO: 90049 - DNA, 25 bp, Homo sapien
ggctccacagataagtccccagtga

SEQ ID NO: 90050 - DNA, 25 bp, Homo sapien
tcaggccagactgctgtgtagggct

SEQ ID NO: 90051 - DNA, 25 bp, Homo sapien
taatttgggaatgacttagaggtcc

SEQ ID NO: 90052 - DNA, 25 bp, Homo sapien
ctgtggccgaagcctccatccctgt

SEQ ID NO: 90053 - DNA, 25 bp, Homo sapien
tccatccctgtccttatattccagg

SEQ ID NO: 90054 - DNA, 25 bp, Homo sapien
gaagcctccatccctgtccttatat

SEQ ID NO: 90055 - DNA, 25 bp, Homo sapien
gtccttatattccaggactcccagc

SEQ ID NO: 90056 - DNA, 25 bp, Homo sapien
gttccgcaaggtgcagcacgagctg

SEQ ID NO: 90057 - DNA, 25 bp, Homo sapien
ctgtccaagttccgcaaggtgcagc

SEQ ID NO: 90058 - DNA, 25 bp, Homo sapien
aagttccgcaaggtgcagcacgagc

SEQ ID NO: 90059 - DNA, 25 bp, Homo sapien
agcgggcggacatcgccgagtccca

SEQ ID NO: 90060 - DNA, 25 bp, Homo sapien
cagaagctggaagcgcgggtgcggg

SEQ ID NO: 90061 - DNA, 25 bp, Homo sapien
gatcgccctcaagggcggcaagaag

SEQ ID NO: 90062 - DNA, 25 bp, Homo sapien
tgcagcaccggctggacgaagccga

SEQ ID NO: 90063 - DNA, 25 bp, Homo sapien
tggaacagaccattaaggacctgca

SEQ ID NO: 90064 - DNA, 25 bp, Homo sapien
ggccatcacggatgtaagtccccca

SEQ ID NO: 90065 - DNA, 25 bp, Homo sapien
cagtgcaggagtgcaggaatgctga

SEQ ID NO: 90066 - DNA, 25 bp, Homo sapien
caagaaggccatcacggatgtaagt

SEQ ID NO: 90067 - DNA, 25 bp, Homo sapien
tgaggagaaggccaagaaggccatc

SEQ ID NO: 90068 - DNA, 25 bp, Homo sapien
actagtgagcgggtgcagctgctgc

SEQ ID NO: 90069 - DNA, 25 bp, Homo sapien
gagactagtgagcgggtgcagctgc

SEQ ID NO: 90070 - DNA, 25 bp, Homo sapien
gactagtgagcgggtgcagctgctg

SEQ ID NO: 90071 - DNA, 25 bp, Homo sapien
ttgagactagtgagcgggtgcagct

SEQ ID NO: 90072 - DNA, 25 bp, Homo sapien
gattcagctggacgatgcagtccgt

SEQ ID NO: 90073 - DNA, 25 bp, Homo sapien
cctcaggacacccagattcagctgg

SEQ ID NO: 90074 - DNA, 25 bp, Homo sapien
acgatgcagtccgtgccaacgacga

SEQ ID NO: 90075 - DNA, 25 bp, Homo sapien
aggacacccagattcagctggacga

SEQ ID NO: 90076 - DNA, 25 bp, Homo sapien
tgtcttcatagctggctctcccctg

SEQ ID NO: 90077 - DNA, 25 bp, Homo sapien
cgaggcccagaagcaagtcaagagc

SEQ ID NO: 90078 - DNA, 25 bp, Homo sapien
tatccatgattagtgagcaggcccc

SEQ ID NO: 90079 - DNA, 25 bp, Homo sapien
ggagttcaaccagatcaaggcagag

SEQ ID NO: 90080 - DNA, 25 bp, Homo sapien
ctgcagtcagccctggaggaggccg

SEQ ID NO: 90081 - DNA, 25 bp, Homo sapien
tgcagtcagccctggaggaggccga

SEQ ID NO: 90082 - DNA, 25 bp, Homo sapien
gagctgcagtcagccctggaggagg

SEQ ID NO: 90083 - DNA, 25 bp, Homo sapien
agatggagctgcagtcagccctgga

SEQ ID NO: 90084 - DNA, 25 bp, Homo sapien
gagaagccgagagccttttagagcc

SEQ ID NO: 90085 - DNA, 25 bp, Homo sapien
taaagagcatgtagactgtcaggcc

SEQ ID NO: 90086 - DNA, 25 bp, Homo sapien
agttccagaagatgcggcgggacct

SEQ ID NO: 90087 - DNA, 25 bp, Homo sapien
cagatcgagatgaacaagaagcgcg

SEQ ID NO: 90088 - DNA, 25 bp, Homo sapien
tggagggcgacctgaagctgaccca

SEQ ID NO: 90089 - DNA, 25 bp, Homo sapien
cgcatggacctggagcgagcgaagc

SEQ ID NO: 90090 - DNA, 25 bp, Homo sapien
cagctggaaggatccctggagcaag

SEQ ID NO: 90091 - DNA, 25 bp, Homo sapien
caagagaagaaggtgcgcatggacc

SEQ ID NO: 90092 - DNA, 25 bp, Homo sapien
caaggtcctgtaccgcagaaaggga

SEQ ID NO: 90093 - DNA, 25 bp, Homo sapien
tttggcaatgccaagaccgtccgga

SEQ ID NO: 90094 - DNA, 25 bp, Homo sapien
gtcaacaccaagagggtcatccagt

SEQ ID NO: 90095 - DNA, 25 bp, Homo sapien
taagcccctgtcttcacagcggaga

SEQ ID NO: 90096 - DNA, 25 bp, Homo sapien
gacctctgtgcatcagaagacagtt

SEQ ID NO: 90097 - DNA, 25 bp, Homo sapien
tcatcacgcgtttatccagaagctc

SEQ ID NO: 90098 - DNA, 25 bp, Homo sapien
tccagaagctcattatcgccatgtc

SEQ ID NO: 90099 - DNA, 25 bp, Homo sapien
cattatcgccatgtcttcacctctg

SEQ ID NO: 90100 - DNA, 25 bp, Homo sapien
tccaactcatcacgcgtttatccag

SEQ ID NO: 90101 - DNA, 25 bp, Homo sapien
gggccagaagtgccctgcgggagag

SEQ ID NO: 90102 - DNA, 25 bp, Homo sapien
ggccagaagtgccctgcgggagagc

SEQ ID NO: 90103 - DNA, 25 bp, Homo sapien
agggccagaagtgccctgcgggaga

SEQ ID NO: 90104 - DNA, 25 bp, Homo sapien
acactgtggaaatgcggccaggcca

SEQ ID NO: 90105 - DNA, 25 bp, Homo sapien
cactgtggaaatgcggccaggccat

SEQ ID NO: 90106 - DNA, 25 bp, Homo sapien
gacactgtggaaatgcggccaggcc

SEQ ID NO: 90107 - DNA, 25 bp, Homo sapien
cccagcttccagttggatacaggac

SEQ ID NO: 90108 - DNA, 25 bp, Homo sapien
tcccagcttccagttggatacagga

SEQ ID NO: 90109 - DNA, 25 bp, Homo sapien
ttgccagaacactagtcgcctccag

SEQ ID NO: 90110 - DNA, 25 bp, Homo sapien
aacactagtcgcctccagctctgga

SEQ ID NO: 90111 - DNA, 25 bp, Homo sapien
gtgggccagacaacagctgtcttag

SEQ ID NO: 90112 - DNA, 25 bp, Homo sapien
tattatctatagctctgagagggtc

SEQ ID NO: 90113 - DNA, 25 bp, Homo sapien
tgggccttgagccttctcccaaagc

SEQ ID NO: 90114 - DNA, 25 bp, Homo sapien
acaccttggggccactccgtgtctg

SEQ ID NO: 90115 - DNA, 25 bp, Homo sapien
ccttgagccttctcccaaagctgag

SEQ ID NO: 90116 - DNA, 25 bp, Homo sapien
tcactttcaggcatcaaatttgttt

SEQ ID NO: 90117 - DNA, 25 bp, Homo sapien
aagctcttccaagagtcatgccacc

SEQ ID NO: 90118 - DNA, 25 bp, Homo sapien
ggaccattcctcatccctttgcttt

SEQ ID NO: 90119 - DNA, 25 bp, Homo sapien
cacaggaatggcgtttgagagcctt

SEQ ID NO: 90120 - DNA, 25 bp, Homo sapien
attctggcctccgcgtgcacctatt

SEQ ID NO: 90121 - DNA, 25 bp, Homo sapien
gcaagagtgacgatgctgagactcc

SEQ ID NO: 90122 - DNA, 25 bp, Homo sapien
cagcagcaagagtgacgatgctgag

SEQ ID NO: 90123 - DNA, 25 bp, Homo sapien
ggccagagcccatgcaggtcctcct

SEQ ID NO: 90124 - DNA, 25 bp, Homo sapien
ggcacagcagcaagagtgacgatgc

SEQ ID NO: 90125 - DNA, 25 bp, Homo sapien
gattataggaaagtggaacgtctag

SEQ ID NO: 90126 - DNA, 25 bp, Homo sapien
ggttcacagactcgccttaaagcca

SEQ ID NO: 90127 - DNA, 25 bp, Homo sapien
cctccagccgctgaaggcaaaggac

SEQ ID NO: 90128 - DNA, 25 bp, Homo sapien
gggccttcacactcgggttcacaga

SEQ ID NO: 90129 - DNA, 25 bp, Homo sapien
tgtcacggcacttggcaggtcggac

SEQ ID NO: 90130 - DNA, 25 bp, Homo sapien
cacggcacttggcaggtcggactcc

SEQ ID NO: 90131 - DNA, 25 bp, Homo sapien
ttcagaagtgtcacggcacttggca

SEQ ID NO: 90132 - DNA, 25 bp, Homo sapien
gaagtgtcacggcacttggcaggtc

SEQ ID NO: 90133 - DNA, 25 bp, Homo sapien
agtgatttcacttgtgcagttacag

SEQ ID NO: 90134 - DNA, 25 bp, Homo sapien
tcagtgatttcacttgtgcagttac

SEQ ID NO: 90135 - DNA, 25 bp, Homo sapien
gtgatttcacttgtgcagttacagc

SEQ ID NO: 90136 - DNA, 25 bp, Homo sapien
cagtgatttcacttgtgcagttaca

SEQ ID NO: 90137 - DNA, 25 bp, Homo sapien
tttggctggagactcataactctgt

SEQ ID NO: 90138 - DNA, 25 bp, Homo sapien
tatgtttgaagctcgagcacttagg

SEQ ID NO: 90139 - DNA, 25 bp, Homo sapien
cagttggcctacagtaatcttcaga

SEQ ID NO: 90140 - DNA, 25 bp, Homo sapien
ttaattaatccctctctttggctgg

SEQ ID NO: 90141 - DNA, 25 bp, Homo sapien
tgggcattgtaggtttccagcagca

SEQ ID NO: 90142 - DNA, 25 bp, Homo sapien
cagatgaaagcctagggtaaacggg

SEQ ID NO: 90143 - DNA, 25 bp, Homo sapien
tcatccctggatgtctttaagccaa

SEQ ID NO: 90144 - DNA, 25 bp, Homo sapien
taactgctacccctagggtgagatg

SEQ ID NO: 90145 - DNA, 25 bp, Homo sapien
gagcagcagctggtctttcacttcc

SEQ ID NO: 90146 - DNA, 25 bp, Homo sapien
ctgaggctttgtccagaatgaggtg

SEQ ID NO: 90147 - DNA, 25 bp, Homo sapien
gaatgaggtgggtcaaatccataag

SEQ ID NO: 90148 - DNA, 25 bp, Homo sapien
gcgaatctccaccagtctcaaaact

SEQ ID NO: 90149 - DNA, 25 bp, Homo sapien
tgtacaaagtagagcaaatgaatag

SEQ ID NO: 90150 - DNA, 25 bp, Homo sapien
ccagagtccctatattaaggtgcca

SEQ ID NO: 90151 - DNA, 25 bp, Homo sapien
aaaatgaagcacacaccagagtccc

SEQ ID NO: 90152 - DNA, 25 bp, Homo sapien
tgagaagactcacttaaatgagagc

SEQ ID NO: 90153 - DNA, 25 bp, Homo sapien
tggtccaagggacgaagcttttcca

SEQ ID NO: 90154 - DNA, 25 bp, Homo sapien
gcttgtcaatttgatacttcagctt

SEQ ID NO: 90155 - DNA, 25 bp, Homo sapien
actgcagtcttgatcagcttgtcaa

SEQ ID NO: 90156 - DNA, 25 bp, Homo sapien
gatacttcagcttttggtccaaggg

SEQ ID NO: 90157 - DNA, 25 bp, Homo sapien
tggaactttctgatggtccccacaa

SEQ ID NO: 90158 - DNA, 25 bp, Homo sapien
atttggaactttctgatggtcccca

SEQ ID NO: 90159 - DNA, 25 bp, Homo sapien
ctttctgatggtccccacaacttca

SEQ ID NO: 90160 - DNA, 25 bp, Homo sapien
ccacaacttcatgatggtctcctca

SEQ ID NO: 90161 - DNA, 25 bp, Homo sapien
tgaggcttaaaacgaagtgggtcat

SEQ ID NO: 90162 - DNA, 25 bp, Homo sapien
ttaaaacgaagtgggtcattctcac

SEQ ID NO: 90163 - DNA, 25 bp, Homo sapien
gcttaaaacgaagtgggtcattctc

SEQ ID NO: 90164 - DNA, 25 bp, Homo sapien
gatgaggcttaaaacgaagtgggtc

SEQ ID NO: 90165 - DNA, 25 bp, Homo sapien
tgagataagtgagaagaaaacccaa

SEQ ID NO: 90166 - DNA, 25 bp, Homo sapien
gcaaatttaggaagcattcatgaga

SEQ ID NO: 90167 - DNA, 25 bp, Homo sapien
ctcagcattctaacacacaagttgg

SEQ ID NO: 90168 - DNA, 25 bp, Homo sapien
tctaggtatagctgcctcagaaaaa

SEQ ID NO: 90169 - DNA, 25 bp, Homo sapien
gaggaacatatttcttagacactcc

SEQ ID NO: 90170 - DNA, 25 bp, Homo sapien
cataatgtactggaaccaagcgtgg

SEQ ID NO: 90171 - DNA, 25 bp, Homo sapien
tactggaaccaagcgtggaggaaca

SEQ ID NO: 90172 - DNA, 25 bp, Homo sapien
ccaagcgtggaggaacatatttctt

SEQ ID NO: 90173 - DNA, 25 bp, Homo sapien
aaaagagaaacagttcatgctgagg

SEQ ID NO: 90174 - DNA, 25 bp, Homo sapien
agaaacagttcatgctgaggaggca

SEQ ID NO: 90175 - DNA, 25 bp, Homo sapien
agcagggttatccaagaacagagaa

SEQ ID NO: 90176 - DNA, 25 bp, Homo sapien
ataagcagggttatccaagaacaga

SEQ ID NO: 90177 - DNA, 25 bp, Homo sapien
tctcttggctcgttctagacgcttc

SEQ ID NO: 90178 - DNA, 25 bp, Homo sapien
ggatgccgagcatcacggatttcct

SEQ ID NO: 90179 - DNA, 25 bp, Homo sapien
tgagtactgctccttaagttcacga

SEQ ID NO: 90180 - DNA, 25 bp, Homo sapien
tgtgttggtcctcctgactctggcg

SEQ ID NO: 90181 - DNA, 25 bp, Homo sapien
gtatctactcatctcttgttcaggg

SEQ ID NO: 90182 - DNA, 25 bp, Homo sapien
taatttctaatgcaagggctcagac

SEQ ID NO: 90183 - DNA, 25 bp, Homo sapien
cctgagcaaagttgacgagtctgta

SEQ ID NO: 90184 - DNA, 25 bp, Homo sapien
caatgaaatgtgctctgtgctagaa

SEQ ID NO: 90185 - DNA, 25 bp, Homo sapien
gcttactgacgctcaaacgcaccat

SEQ ID NO: 90186 - DNA, 25 bp, Homo sapien
ggaatgaagttgtgagctcatgaca

SEQ ID NO: 90187 - DNA, 25 bp, Homo sapien
gctcatgacatttgctcgttttcgc

SEQ ID NO: 90188 - DNA, 25 bp, Homo sapien
ctgatgtcactgaagtgtgtaaggg

SEQ ID NO: 90189 - DNA, 25 bp, Homo sapien
tcacatcctactacaaccatatctc

SEQ ID NO: 90190 - DNA, 25 bp, Homo sapien
ggcactgtggttctgagagccagca

SEQ ID NO: 90191 - DNA, 25 bp, Homo sapien
acatcctactacaaccatatctcaa

SEQ ID NO: 90192 - DNA, 25 bp, Homo sapien
ctcatggtaataagccccacataca

SEQ ID NO: 90193 - DNA, 25 bp, Homo sapien
cttcttccgcttcttaataggattc

SEQ ID NO: 90194 - DNA, 25 bp, Homo sapien
ttcttccgacctttctgaggtatct

SEQ ID NO: 90195 - DNA, 25 bp, Homo sapien
ttcttccgcttcttaataggattct

SEQ ID NO: 90196 - DNA, 25 bp, Homo sapien
gcccagtatggaagagatactacag

SEQ ID NO: 90197 - DNA, 25 bp, Homo sapien
aagcccacctaaggagattattgcc

SEQ ID NO: 90198 - DNA, 25 bp, Homo sapien
caggacatctagagggaagggctca

SEQ ID NO: 90199 - DNA, 25 bp, Homo sapien
ggtctcctaggcagtaccctgaata

SEQ ID NO: 90200 - DNA, 25 bp, Homo sapien
tagaagtatctcaggatgacaaaaa

SEQ ID NO: 90201 - DNA, 25 bp, Homo sapien
tagtaaggctctttccacatgtcca

SEQ ID NO: 90202 - DNA, 25 bp, Homo sapien
ttattagtaaggctctttccacatg

SEQ ID NO: 90203 - DNA, 25 bp, Homo sapien
aatgaaattagaagtatctcaggat

SEQ ID NO: 90204 - DNA, 25 bp, Homo sapien
gactccagtcgtacaatacatgtgc

SEQ ID NO: 90205 - DNA, 25 bp, Homo sapien
cagctctttatagaagggttggcct

SEQ ID NO: 90206 - DNA, 25 bp, Homo sapien
tggccagcccagataacactaataa

SEQ ID NO: 90207 - DNA, 25 bp, Homo sapien
ttgactctggtaaaatgaccctcag

SEQ ID NO: 90208 - DNA, 25 bp, Homo sapien
ggagacgttggtggaataacaatca

SEQ ID NO: 90209 - DNA, 25 bp, Homo sapien
agacgttggtggaataacaatcagg

SEQ ID NO: 90210 - DNA, 25 bp, Homo sapien
gaagggaacagtagaggagacgttg

SEQ ID NO: 90211 - DNA, 25 bp, Homo sapien
gaggagacgttggtggaataacaat

SEQ ID NO: 90212 - DNA, 25 bp, Homo sapien
ccctgtaggaatgttaattagcatg

SEQ ID NO: 90213 - DNA, 25 bp, Homo sapien
ttccctgtaggaatgttaattagca

SEQ ID NO: 90214 - DNA, 25 bp, Homo sapien
tgttaattagcatgtgggatttaat

SEQ ID NO: 90215 - DNA, 25 bp, Homo sapien
ttcttccctgtaggaatgttaatta

SEQ ID NO: 90216 - DNA, 25 bp, Homo sapien
taagatagtacttgcccctgatgca

SEQ ID NO: 90217 - DNA, 25 bp, Homo sapien
taggtcacacctcacagtggagtcc

SEQ ID NO: 90218 - DNA, 25 bp, Homo sapien
gggccatcagaaggatctgctaact

SEQ ID NO: 90219 - DNA, 25 bp, Homo sapien
tctgtgccggccatactcttgtcaa

SEQ ID NO: 90220 - DNA, 25 bp, Homo sapien
tagagccatggttctccaacttgag

SEQ ID NO: 90221 - DNA, 25 bp, Homo sapien
ttccatcattaaggctgagcacagg

SEQ ID NO: 90222 - DNA, 25 bp, Homo sapien
tactggcaagatggctggtaaacac

SEQ ID NO: 90223 - DNA, 25 bp, Homo sapien
gaacatactagtcaggagaacctgg

SEQ ID NO: 90224 - DNA, 25 bp, Homo sapien
gaagccaatactcagtttgccaggg

SEQ ID NO: 90225 - DNA, 25 bp, Homo sapien
tgaaagcctatcaatgtcccagctg

SEQ ID NO: 90226 - DNA, 25 bp, Homo sapien
taaattatcccctcagtggtcagtg

SEQ ID NO: 90227 - DNA, 25 bp, Homo sapien
tatttccaggtgataaggtccctcc

SEQ ID NO: 90228 - DNA, 25 bp, Homo sapien
agatggataagccgtccccacccag

SEQ ID NO: 90229 - DNA, 25 bp, Homo sapien
tggcagatggataagccgtccccac

SEQ ID NO: 90230 - DNA, 25 bp, Homo sapien
gccgtccccacccaggtcagcagca

SEQ ID NO: 90231 - DNA, 25 bp, Homo sapien
atggataagccgtccccacccaggt

SEQ ID NO: 90232 - DNA, 25 bp, Homo sapien
cctagagaagtatattcctcaggca

SEQ ID NO: 90233 - DNA, 25 bp, Homo sapien
ccaaattaagactcagccagttcct

SEQ ID NO: 90234 - DNA, 25 bp, Homo sapien
agagaagtatattcctcaggcagct

SEQ ID NO: 90235 - DNA, 25 bp, Homo sapien
cccagcctagagaagtatattcctc

SEQ ID NO: 90236 - DNA, 25 bp, Homo sapien
cctggctcagtcaccttctttcact

SEQ ID NO: 90237 - DNA, 25 bp, Homo sapien
tggctcagtcaccttctttcactcg

SEQ ID NO: 90238 - DNA, 25 bp, Homo sapien
tcctcctggctcagtcaccttcttt

SEQ ID NO: 90239 - DNA, 25 bp, Homo sapien
ctcctggctcagtcaccttctttca

SEQ ID NO: 90240 - DNA, 25 bp, Homo sapien
gatccagcacccgtttgggattggg

SEQ ID NO: 90241 - DNA, 25 bp, Homo sapien
cacctgatccagcacccgtttggga

SEQ ID NO: 90242 - DNA, 25 bp, Homo sapien
cagacgatggccctaggttggcagc

SEQ ID NO: 90243 - DNA, 25 bp, Homo sapien
aggaggcagccggattcagcacctg

SEQ ID NO: 90244 - DNA, 25 bp, Homo sapien
tcaagctggaagagcactaatcacc

SEQ ID NO: 90245 - DNA, 25 bp, Homo sapien
caagttctccctgggtacggtggca

SEQ ID NO: 90246 - DNA, 25 bp, Homo sapien
caccggcctgacagatgtgatgcca

SEQ ID NO: 90247 - DNA, 25 bp, Homo sapien
caaccagattggcaagaggcactgt

SEQ ID NO: 90248 - DNA, 25 bp, Homo sapien
tcatgccactctccgtctgttgctc

SEQ ID NO: 90249 - DNA, 25 bp, Homo sapien
tcttcatgccactctccgtctgttg

SEQ ID NO: 90250 - DNA, 25 bp, Homo sapien
ttcatgccactctccgtctgttgct

SEQ ID NO: 90251 - DNA, 25 bp, Homo sapien
catgccactctccgtctgttgctcc

SEQ ID NO: 90252 - DNA, 25 bp, Homo sapien
tatccaactctaactgggtgccttg

SEQ ID NO: 90253 - DNA, 25 bp, Homo sapien
gactttactcctacctctgggcagg

SEQ ID NO: 90254 - DNA, 25 bp, Homo sapien
tatgtatggtccactagcctggagc

SEQ ID NO: 90255 - DNA, 25 bp, Homo sapien
tctgagggctagtctgtatcaccac

SEQ ID NO: 90256 - DNA, 25 bp, Homo sapien
agaaacccacgggcagccagccttc

SEQ ID NO: 90257 - DNA, 25 bp, Homo sapien
cctgctatgcgcagcctccaaggtg

SEQ ID NO: 90258 - DNA, 25 bp, Homo sapien
tgctatgggtctggtggtcctcgaa

SEQ ID NO: 90259 - DNA, 25 bp, Homo sapien
tcctcgaagggccgatgccggtgca

SEQ ID NO: 90260 - DNA, 25 bp, Homo sapien
agctggcgatacagggagaagagcc

SEQ ID NO: 90261 - DNA, 25 bp, Homo sapien
aatagctaacgatcctggcgcaggg

SEQ ID NO: 90262 - DNA, 25 bp, Homo sapien
cagtttgtcatgtcaccagaggttc

SEQ ID NO: 90263 - DNA, 25 bp, Homo sapien
agagaacctgttttgtgctgggcca

SEQ ID NO: 90264 - DNA, 25 bp, Homo sapien
tacagaatggcccaaccactgagga

SEQ ID NO: 90265 - DNA, 25 bp, Homo sapien
caaggtgtgcagctacgagacaaac

SEQ ID NO: 90266 - DNA, 25 bp, Homo sapien
agaatgtcctaatgctgcaccaggg

SEQ ID NO: 90267 - DNA, 25 bp, Homo sapien
cctggatgaagaagttatggccctc

SEQ ID NO: 90268 - DNA, 25 bp, Homo sapien
tcttccagtactttgggccccaggc

SEQ ID NO: 90269 - DNA, 25 bp, Homo sapien
gcagtgaactcctgttaccaaaggg

SEQ ID NO: 90270 - DNA, 25 bp, Homo sapien
tggcctcgtcccaccaaaggagatt

SEQ ID NO: 90271 - DNA, 25 bp, Homo sapien
ggctttgacccaatccaaggcttta

SEQ ID NO: 90272 - DNA, 25 bp, Homo sapien
cagggtactggctgtcacgctgaca

SEQ ID NO: 90273 - DNA, 25 bp, Homo sapien
taaatgttggtaccaactttggaga

SEQ ID NO: 90274 - DNA, 25 bp, Homo sapien
gattgacatgttttagaagttgctg

SEQ ID NO: 90275 - DNA, 25 bp, Homo sapien
ttgctgttgaagtggatatgtccag

SEQ ID NO: 90276 - DNA, 25 bp, Homo sapien
gtctaagccactggataaatgttgg

SEQ ID NO: 90277 - DNA, 25 bp, Homo sapien
tggcatctgttgtgttagtccagga

SEQ ID NO: 90278 - DNA, 25 bp, Homo sapien
agtagtggaagtgggaggccagtgt

SEQ ID NO: 90279 - DNA, 25 bp, Homo sapien
gggaggccagtgtggcatctgttgt

SEQ ID NO: 90280 - DNA, 25 bp, Homo sapien
agtgtggcatctgttgtgttagtcc

SEQ ID NO: 90281 - DNA, 25 bp, Homo sapien
gatcagagtctcacctacaagctag

SEQ ID NO: 90282 - DNA, 25 bp, Homo sapien
tacaagctagccgaaagctaagctc

SEQ ID NO: 90283 - DNA, 25 bp, Homo sapien
tgatgggagaagctccgagaagaaa

SEQ ID NO: 90284 - DNA, 25 bp, Homo sapien
aaaaaataatcgctgcagctaaagg

SEQ ID NO: 90285 - DNA, 25 bp, Homo sapien
taaggctcaatacgtaatttcccag

SEQ ID NO: 90286 - DNA, 25 bp, Homo sapien
tctggtcttcacaactgagtaagga

SEQ ID NO: 90287 - DNA, 25 bp, Homo sapien
tgcactttacacgttacctatctgg

SEQ ID NO: 90288 - DNA, 25 bp, Homo sapien
gattctgccctcagttgaaaagggc

SEQ ID NO: 90289 - DNA, 25 bp, Homo sapien
gagactttacgcaacttacctgagg

SEQ ID NO: 90290 - DNA, 25 bp, Homo sapien
tgcaaagtgcaagagacagcctcct

SEQ ID NO: 90291 - DNA, 25 bp, Homo sapien
cagtgtgaatgacgcaccctggagt

SEQ ID NO: 90292 - DNA, 25 bp, Homo sapien
tgatgtgatacttgccgagggccta

SEQ ID NO: 90293 - DNA, 25 bp, Homo sapien
gagggcggacgagtggttgtgtaag

SEQ ID NO: 90294 - DNA, 25 bp, Homo sapien
gacgagtggttgtgtaagaagtagg

SEQ ID NO: 90295 - DNA, 25 bp, Homo sapien
cggacgagtggttgtgtaagaagta

SEQ ID NO: 90296 - DNA, 25 bp, Homo sapien
ctgaggagggcggacgagtggttgt

SEQ ID NO: 90297 - DNA, 25 bp, Homo sapien
ccattgttgaaagactccagaggta

SEQ ID NO: 90298 - DNA, 25 bp, Homo sapien
gagggatggccttgacatctgactc

SEQ ID NO: 90299 - DNA, 25 bp, Homo sapien
taattattaatacaacgaaggcagc

SEQ ID NO: 90300 - DNA, 25 bp, Homo sapien
catgtgggccaaaaggccaaaggag

SEQ ID NO: 90301 - DNA, 25 bp, Homo sapien
ttccagctgaggtgtaagtgcatcg

SEQ ID NO: 90302 - DNA, 25 bp, Homo sapien
gaggtgtaagtgcatcgatttccga

SEQ ID NO: 90303 - DNA, 25 bp, Homo sapien
gtaagtgcatcgatttccgatgctg

SEQ ID NO: 90304 - DNA, 25 bp, Homo sapien
cgcggttcgactcccgtccctgctt

SEQ ID NO: 90305 - DNA, 25 bp, Homo sapien
tattacgcccgttgtggcggtgccg

SEQ ID NO: 90306 - DNA, 25 bp, Homo sapien
catacactcgcgaggaatgccggga

SEQ ID NO: 90307 - DNA, 25 bp, Homo sapien
gggctcgagacacgcgctatgtaat

SEQ ID NO: 90308 - DNA, 25 bp, Homo sapien
gctatgtaatgggaggccgcgaccc

SEQ ID NO: 90309 - DNA, 25 bp, Homo sapien
tctctacctcggtgacattaaggcc

SEQ ID NO: 90310 - DNA, 25 bp, Homo sapien
ccgtcggtgatattttaaggctctg

SEQ ID NO: 90311 - DNA, 25 bp, Homo sapien
gcaatagtctctagggctactgccc

SEQ ID NO: 90312 - DNA, 25 bp, Homo sapien
aaagagacccctagaaagcaggccg

SEQ ID NO: 90313 - DNA, 25 bp, Homo sapien
ggaaggaactttcgctccacctcaa

SEQ ID NO: 90314 - DNA, 25 bp, Homo sapien
gagttgggccacaattgtaggttcc

SEQ ID NO: 90315 - DNA, 25 bp, Homo sapien
ggtcctaagacacctgctgctccag

SEQ ID NO: 90316 - DNA, 25 bp, Homo sapien
tgtctcggaaggtgacccggtactc

SEQ ID NO: 90317 - DNA, 25 bp, Homo sapien
tagggcagttggtacttcagcctcc

SEQ ID NO: 90318 - DNA, 25 bp, Homo sapien
ccaaagtcggctgtatccaagtcca

SEQ ID NO: 90319 - DNA, 25 bp, Homo sapien
caggcactccgcttagtcacaaaac

SEQ ID NO: 90320 - DNA, 25 bp, Homo sapien
tcacccacagcgtagccaaagtcgg

SEQ ID NO: 90321 - DNA, 25 bp, Homo sapien
gagaactaaatgaggcaggttggct

SEQ ID NO: 90322 - DNA, 25 bp, Homo sapien
gaaaacgagatttcacagaactgta

SEQ ID NO: 90323 - DNA, 25 bp, Homo sapien
gctggaattagacacgtggaaggac

SEQ ID NO: 90324 - DNA, 25 bp, Homo sapien
gaaactgaaggagatctggctatag

SEQ ID NO: 90325 - DNA, 25 bp, Homo sapien
ttttactccttgtggaggagtggtg

SEQ ID NO: 90326 - DNA, 25 bp, Homo sapien
tttactccttgtggaggagtggtga

SEQ ID NO: 90327 - DNA, 25 bp, Homo sapien
tgatagtcttgaggccggaaacgct

SEQ ID NO: 90328 - DNA, 25 bp, Homo sapien
ggagctgttcacttctagcaggcgc

SEQ ID NO: 90329 - DNA, 25 bp, Homo sapien
tgtagatacacaatcagcttggctg

SEQ ID NO: 90330 - DNA, 25 bp, Homo sapien
tctagcaggcgctgatagtcttgag

SEQ ID NO: 90331 - DNA, 25 bp, Homo sapien
tcttctaactcagctgtaaggcggt

SEQ ID NO: 90332 - DNA, 25 bp, Homo sapien
gaatcaatggcatcgaccaagggag

SEQ ID NO: 90333 - DNA, 25 bp, Homo sapien
aatcaatggaggctgcttagcggcc

SEQ ID NO: 90334 - DNA, 25 bp, Homo sapien
tacataggaggtatgcatcttcccc

SEQ ID NO: 90335 - DNA, 25 bp, Homo sapien
gaacaacttgcctgtggaatcgtgg

SEQ ID NO: 90336 - DNA, 25 bp, Homo sapien
tagcctttcgagtagtgcagggcca

SEQ ID NO: 90337 - DNA, 25 bp, Homo sapien
caagacccagggatagaagaagccg

SEQ ID NO: 90338 - DNA, 25 bp, Homo sapien
gcttcgaacctacacctgagggcta

SEQ ID NO: 90339 - DNA, 25 bp, Homo sapien
gctgaggctcatggaccctgcttct

SEQ ID NO: 90340 - DNA, 25 bp, Homo sapien
gaagacgggctgagcttcataccca

SEQ ID NO: 90341 - DNA, 25 bp, Homo sapien
tgttcttccatatccacggtgagag

SEQ ID NO: 90342 - DNA, 25 bp, Homo sapien
ctcttgtggagcgagatggccctca

SEQ ID NO: 90343 - DNA, 25 bp, Homo sapien
tcttccggaaatacgaccacatgag

SEQ ID NO: 90344 - DNA, 25 bp, Homo sapien
gccgcatccgccaggtggtgtccat

SEQ ID NO: 90345 - DNA, 25 bp, Homo sapien
tagccacttacatactacactggcc

SEQ ID NO: 90346 - DNA, 25 bp, Homo sapien
tgtggagtatgacacactcttccgg

SEQ ID NO: 90347 - DNA, 25 bp, Homo sapien
tatcccatgtagcaaccactggtgc

SEQ ID NO: 90348 - DNA, 25 bp, Homo sapien
gggccactaactgtatccatgtctg

SEQ ID NO: 90349 - DNA, 25 bp, Homo sapien
ccccttgagagatggcctgtcactg

SEQ ID NO: 90350 - DNA, 25 bp, Homo sapien
aactgcgaggagattgagccccttc

SEQ ID NO: 90351 - DNA, 25 bp, Homo sapien
caggaggatcatcagagcctgggag

SEQ ID NO: 90352 - DNA, 25 bp, Homo sapien
tgcagtgagctttgggcgacagagt

SEQ ID NO: 90353 - DNA, 25 bp, Homo sapien
aggatcatcagagcctgggaggtca

SEQ ID NO: 90354 - DNA, 25 bp, Homo sapien
ggctgcagtgagctttgggcgacag

SEQ ID NO: 90355 - DNA, 25 bp, Homo sapien
gcatagcagtaagaccatgaccagt

SEQ ID NO: 90356 - DNA, 25 bp, Homo sapien
gctgtatccctggatcagagagggc

SEQ ID NO: 90357 - DNA, 25 bp, Homo sapien
aggattgctcgggtcatcccaggac

SEQ ID NO: 90358 - DNA, 25 bp, Homo sapien
ggtggggtgacctttcactgctgta

SEQ ID NO: 90359 - DNA, 25 bp, Homo sapien
ggtacacatcctccggactctggtg

SEQ ID NO: 90360 - DNA, 25 bp, Homo sapien
agctggtacacatcctccggactct

SEQ ID NO: 90361 - DNA, 25 bp, Homo sapien
atcctccggactctggtgacaatgg

SEQ ID NO: 90362 - DNA, 25 bp, Homo sapien
acacatcctccggactctggtgaca

SEQ ID NO: 90363 - DNA, 25 bp, Homo sapien
gaatgcccaaagttgtgccctccct

SEQ ID NO: 90364 - DNA, 25 bp, Homo sapien
attagaacgaatgcccaaagttgtg

SEQ ID NO: 90365 - DNA, 25 bp, Homo sapien
ggagaggattagaacgaatgcccaa

SEQ ID NO: 90366 - DNA, 25 bp, Homo sapien
gaacgaatgcccaaagttgtgccct

SEQ ID NO: 90367 - DNA, 25 bp, Homo sapien
tcacgctgatcacggagctctgcga

SEQ ID NO: 90368 - DNA, 25 bp, Homo sapien
tgggcaccatcacgctgatcacgga

SEQ ID NO: 90369 - DNA, 25 bp, Homo sapien
ctgatcacggagctctgcgaacgaa

SEQ ID NO: 90370 - DNA, 25 bp, Homo sapien
ccatcacgctgatcacggagctctg

SEQ ID NO: 90371 - DNA, 25 bp, Homo sapien
tcacaggagaagggtagtgcacaca

SEQ ID NO: 90372 - DNA, 25 bp, Homo sapien
ggcacacacgcaatagactctcttg

SEQ ID NO: 90373 - DNA, 25 bp, Homo sapien
acaggcacacacgcaatagactctc

SEQ ID NO: 90374 - DNA, 25 bp, Homo sapien
cacaggagaagggtagtgcacacac

SEQ ID NO: 90375 - DNA, 25 bp, Homo sapien
ttgaaaatcggatgggaaccccagc

SEQ ID NO: 90376 - DNA, 25 bp, Homo sapien
gactgcagtgcacatgatccggaag

SEQ ID NO: 90377 - DNA, 25 bp, Homo sapien
tgatccaaaaggagtgtgcccacat

SEQ ID NO: 90378 - DNA, 25 bp, Homo sapien
tctgctgagatgtgccgagacctgg

SEQ ID NO: 90379 - DNA, 25 bp, Homo sapien
atgcgtagtgggcttctcgggcggt

SEQ ID NO: 90380 - DNA, 25 bp, Homo sapien
gcgcggaatttggagacccacttcg

SEQ ID NO: 90381 - DNA, 25 bp, Homo sapien
aggaagctcgcggaagaaacagcgg

SEQ ID NO: 90382 - DNA, 25 bp, Homo sapien
aaataggtggggctcccgcgcatgc

SEQ ID NO: 90383 - DNA, 25 bp, Homo sapien
agtcctggggtaggcaggctgtcgc

SEQ ID NO: 90384 - DNA, 25 bp, Homo sapien
cagaggagcggagttgaggcagaag

SEQ ID NO: 90385 - DNA, 25 bp, Homo sapien
taggcaggctgtcgctgccgctgcc

SEQ ID NO: 90386 - DNA, 25 bp, Homo sapien
ggcagaggagcggagttgaggcaga

SEQ ID NO: 90387 - DNA, 25 bp, Homo sapien
tgaggcccgaggtcagaggattcag

SEQ ID NO: 90388 - DNA, 25 bp, Homo sapien
gcccgaggtcagaggattcaggaag

SEQ ID NO: 90389 - DNA, 25 bp, Homo sapien
ggagagggaaggaccgcacggagca

SEQ ID NO: 90390 - DNA, 25 bp, Homo sapien
ggaaggaccgcacggagcaccaacc

SEQ ID NO: 90391 - DNA, 25 bp, Homo sapien
gtgcgaggaggcctcttgaagaact

SEQ ID NO: 90392 - DNA, 25 bp, Homo sapien
gttaaactacaacagtgccgccaac

SEQ ID NO: 90393 - DNA, 25 bp, Homo sapien
tatcatgctgtctctccgctaaagc

SEQ ID NO: 90394 - DNA, 25 bp, Homo sapien
ctctccgggtggtaaggatgtgcga

SEQ ID NO: 90395 - DNA, 25 bp, Homo sapien
tctgaggcctagtgaaaaagctgca

SEQ ID NO: 90396 - DNA, 25 bp, Homo sapien
tagacctcaacttcgctgcgggtgg

SEQ ID NO: 90397 - DNA, 25 bp, Homo sapien
gttggtctggactcacttgtggcct

SEQ ID NO: 90398 - DNA, 25 bp, Homo sapien
cagagggttagaggcacttgagcaa

SEQ ID NO: 90399 - DNA, 25 bp, Homo sapien
agctgtgcaaccagccagcagtggc

SEQ ID NO: 90400 - DNA, 25 bp, Homo sapien
gacagaggaaatgcagtgtctggca

SEQ ID NO: 90401 - DNA, 25 bp, Homo sapien
cgaaggccagccatgaagaacattc

SEQ ID NO: 90402 - DNA, 25 bp, Homo sapien
gatctgataagcagaggggagctgt

SEQ ID NO: 90403 - DNA, 25 bp, Homo sapien
cagggtggtatctgtcaagcaggtt

SEQ ID NO: 90404 - DNA, 25 bp, Homo sapien
tccagggtggtatctgtcaagcagg

SEQ ID NO: 90405 - DNA, 25 bp, Homo sapien
tgtccagggtggtatctgtcaagca

SEQ ID NO: 90406 - DNA, 25 bp, Homo sapien
tatatgtccagggtggtatctgtca

SEQ ID NO: 90407 - DNA, 25 bp, Homo sapien
caagcacaggtgaattaccagggat

SEQ ID NO: 90408 - DNA, 25 bp, Homo sapien
cctgcagatattcttgtgggtaagc

SEQ ID NO: 90409 - DNA, 25 bp, Homo sapien
aagagctgtcttgtgagcacagagg

SEQ ID NO: 90410 - DNA, 25 bp, Homo sapien
gggatgcccctccaagagctgtctt

SEQ ID NO: 90411 - DNA, 25 bp, Homo sapien
taggttatttcctcacctactggaa

SEQ ID NO: 90412 - DNA, 25 bp, Homo sapien
tatcctgaaaagttgcactctgaac

SEQ ID NO: 90413 - DNA, 25 bp, Homo sapien
ttacgtagtccttattttgtgccag

SEQ ID NO: 90414 - DNA, 25 bp, Homo sapien
ggtatgagacagatcctcagcagcg

SEQ ID NO: 90415 - DNA, 25 bp, Homo sapien
gccgcgctctctcatctgaccactt

SEQ ID NO: 90416 - DNA, 25 bp, Homo sapien
ttccactcatacactctcacaagct

SEQ ID NO: 90417 - DNA, 25 bp, Homo sapien
gaccacttcattccactcatacact

SEQ ID NO: 90418 - DNA, 25 bp, Homo sapien
tttaatccatcagccaatcttgttg

SEQ ID NO: 90419 - DNA, 25 bp, Homo sapien
aaggctgacttcctacagcatgagg

SEQ ID NO: 90420 - DNA, 25 bp, Homo sapien
tgtctccgggaggagtcagttgacc

SEQ ID NO: 90421 - DNA, 25 bp, Homo sapien
cataagaattgagagccctggatcc

SEQ ID NO: 90422 - DNA, 25 bp, Homo sapien
caaccgcttacttctccagtggtga

SEQ ID NO: 90423 - DNA, 25 bp, Homo sapien
tgaataaacacatcaaaggaaaaga

SEQ ID NO: 90424 - DNA, 25 bp, Homo sapien
acatgaataaacacatcaaaggaaa

SEQ ID NO: 90425 - DNA, 25 bp, Homo sapien
cacatcaaaggaaaagaacggacgg

SEQ ID NO: 90426 - DNA, 25 bp, Homo sapien
acacatcaaaggaaaagaacggacg

SEQ ID NO: 90427 - DNA, 25 bp, Homo sapien
taagacaagccatgggtttgtgcca

SEQ ID NO: 90428 - DNA, 25 bp, Homo sapien
gaaactgttccatgaggaatcccag

SEQ ID NO: 90429 - DNA, 25 bp, Homo sapien
gataagactttaaagccttaagaca

SEQ ID NO: 90430 - DNA, 25 bp, Homo sapien
tctacttaccacaagtcaagaaccc

SEQ ID NO: 90431 - DNA, 25 bp, Homo sapien
tgagtggttggacattgtcatggaa

SEQ ID NO: 90432 - DNA, 25 bp, Homo sapien
tcttcaattcgtggagggaacgtag

SEQ ID NO: 90433 - DNA, 25 bp, Homo sapien
gccttttctgttgaccgatgcctgc

SEQ ID NO: 90434 - DNA, 25 bp, Homo sapien
ggtttggaatacagaatatgactaa

SEQ ID NO: 90435 - DNA, 25 bp, Homo sapien
tgtctggagtgcagtttggcagccc

SEQ ID NO: 90436 - DNA, 25 bp, Homo sapien
ctggagtgcagtttggcagcccttc

SEQ ID NO: 90437 - DNA, 25 bp, Homo sapien
ggagtgcagtttggcagcccttctg

SEQ ID NO: 90438 - DNA, 25 bp, Homo sapien
tgcagtttggcagcccttctgtcag

SEQ ID NO: 90439 - DNA, 25 bp, Homo sapien
gctgcagcagaattgaccacaggtc

SEQ ID NO: 90440 - DNA, 25 bp, Homo sapien
cagctgcagcagaattgaccacagg

SEQ ID NO: 90441 - DNA, 25 bp, Homo sapien
tccccaaaacagtcagctcggtcag

SEQ ID NO: 90442 - DNA, 25 bp, Homo sapien
caggtcctgggagcttagaatggtc

SEQ ID NO: 90443 - DNA, 25 bp, Homo sapien
tggtgataggtgacagtctcttcaa

SEQ ID NO: 90444 - DNA, 25 bp, Homo sapien
ccagattggctagacacagattgct

SEQ ID NO: 90445 - DNA, 25 bp, Homo sapien
gcttggcaatagtctcaccacttgg

SEQ ID NO: 90446 - DNA, 25 bp, Homo sapien
tcctctcggtgcattcgtggtcttg

SEQ ID NO: 90447 - DNA, 25 bp, Homo sapien
gtctgagatgcttcctgctgaatca

SEQ ID NO: 90448 - DNA, 25 bp, Homo sapien
gtgtctgagatgcttcctgctgaat

SEQ ID NO: 90449 - DNA, 25 bp, Homo sapien
ttggtgtctgagatgcttcctgctg

SEQ ID NO: 90450 - DNA, 25 bp, Homo sapien
tgagatgcttcctgctgaatcaggc

SEQ ID NO: 90451 - DNA, 25 bp, Homo sapien
tgtctatcccggtgctgctcatcct

SEQ ID NO: 90452 - DNA, 25 bp, Homo sapien
tcacagaaagcctagcacagggatg

SEQ ID NO: 90453 - DNA, 25 bp, Homo sapien
cagggatgaaaccagccctggtagc

SEQ ID NO: 90454 - DNA, 25 bp, Homo sapien
tgaccacggctacccggttagccag

SEQ ID NO: 90455 - DNA, 25 bp, Homo sapien
tccccacgtggcacacaatgcccgc

SEQ ID NO: 90456 - DNA, 25 bp, Homo sapien
gacgtcgggcgatggcaaagccgat

SEQ ID NO: 90457 - DNA, 25 bp, Homo sapien
gtggcacacaatgcccgccacactc

SEQ ID NO: 90458 - DNA, 25 bp, Homo sapien
cgtcccgggccagacgtcgggcgat

SEQ ID NO: 90459 - DNA, 25 bp, Homo sapien
agtgctccctaccagagggttgacc

SEQ ID NO: 90460 - DNA, 25 bp, Homo sapien
ccagagtgctccctaccagagggtt

SEQ ID NO: 90461 - DNA, 25 bp, Homo sapien
ctaccagagggttgacccctgcgct

SEQ ID NO: 90462 - DNA, 25 bp, Homo sapien
gagggttgacccctgcgctgcacac

SEQ ID NO: 90463 - DNA, 25 bp, Homo sapien
aggctgggatgtctaagcccccgga

SEQ ID NO: 90464 - DNA, 25 bp, Homo sapien
tcctgtcggcaagtttgtgtgggac

SEQ ID NO: 90465 - DNA, 25 bp, Homo sapien
gtgaggagcccccttctaggagaga

SEQ ID NO: 90466 - DNA, 25 bp, Homo sapien
tctaagcccccggaatgctgatggc

SEQ ID NO: 90467 - DNA, 25 bp, Homo sapien
tccatgagcctgaaagagggcgcac

SEQ ID NO: 90468 - DNA, 25 bp, Homo sapien
cagatgtcagaagtgggtaccaccc

SEQ ID NO: 90469 - DNA, 25 bp, Homo sapien
tagggaatgagaccacatctgcaac

SEQ ID NO: 90470 - DNA, 25 bp, Homo sapien
tctgggctaagtcacacatgtcctg

SEQ ID NO: 90471 - DNA, 25 bp, Homo sapien
ctgttctccatgtagggcagcaact

SEQ ID NO: 90472 - DNA, 25 bp, Homo sapien
tgttctccatgtagggcagcaactg

SEQ ID NO: 90473 - DNA, 25 bp, Homo sapien
ttctccatgtagggcagcaactggc

SEQ ID NO: 90474 - DNA, 25 bp, Homo sapien
gttctccatgtagggcagcaactgg

SEQ ID NO: 90475 - DNA, 25 bp, Homo sapien
tagtaccagccaatacacggcagag

SEQ ID NO: 90476 - DNA, 25 bp, Homo sapien
tcaatgagcaacctctaaggagcag

SEQ ID NO: 90477 - DNA, 25 bp, Homo sapien
ggtaaggtgacaatgaccagcccac

SEQ ID NO: 90478 - DNA, 25 bp, Homo sapien
caaacctgctgatgtcaaggccaag

SEQ ID NO: 90479 - DNA, 25 bp, Homo sapien
aatggaagagaccaggatgacagca

SEQ ID NO: 90480 - DNA, 25 bp, Homo sapien
aagagaccaggatgacagcacccct

SEQ ID NO: 90481 - DNA, 25 bp, Homo sapien
tggaagagaccaggatgacagcacc

SEQ ID NO: 90482 - DNA, 25 bp, Homo sapien
caatggaagagaccaggatgacagc

SEQ ID NO: 90483 - DNA, 25 bp, Homo sapien
tcccacccacatggagacaagctca

SEQ ID NO: 90484 - DNA, 25 bp, Homo sapien
agaacaaagttgcccctcaccctat

SEQ ID NO: 90485 - DNA, 25 bp, Homo sapien
cactttgtctgtaaggctctgagga

SEQ ID NO: 90486 - DNA, 25 bp, Homo sapien
ggatttctcacctacagggatctca

SEQ ID NO: 90487 - DNA, 25 bp, Homo sapien
gttctagtgagacccagcagcgctg

SEQ ID NO: 90488 - DNA, 25 bp, Homo sapien
ccaatgccagtgttctagtgagacc

SEQ ID NO: 90489 - DNA, 25 bp, Homo sapien
gtcttgctgacattgtagacaccca

SEQ ID NO: 90490 - DNA, 25 bp, Homo sapien
tgctgacattgtagacacccagcgc

SEQ ID NO: 90491 - DNA, 25 bp, Homo sapien
gataattcctggaaccacgcagttt

SEQ ID NO: 90492 - DNA, 25 bp, Homo sapien
ataattcctggaaccacgcagttta

SEQ ID NO: 90493 - DNA, 25 bp, Homo sapien
taattcctggaaccacgcagtttac

SEQ ID NO: 90494 - DNA, 25 bp, Homo sapien
tgaggacctcagtcataggcatgct

SEQ ID NO: 90495 - DNA, 25 bp, Homo sapien
taggcatgctgacctaaggattcag

SEQ ID NO: 90496 - DNA, 25 bp, Homo sapien
tcttttcaggatggatggactgcac

SEQ ID NO: 90497 - DNA, 25 bp, Homo sapien
gtcagtgctactaaaacaagatggg

SEQ ID NO: 90498 - DNA, 25 bp, Homo sapien
agctgatgatgttccttgaagttct

SEQ ID NO: 90499 - DNA, 25 bp, Homo sapien
cagctgatgatgttccttgaagttc

SEQ ID NO: 90500 - DNA, 25 bp, Homo sapien
cttccagagagactcattcccatga

SEQ ID NO: 90501 - DNA, 25 bp, Homo sapien
ttgaagttcttccagagagactcat

SEQ ID NO: 90502 - DNA, 25 bp, Homo sapien
cttgtactctgattctgctgctctg

SEQ ID NO: 90503 - DNA, 25 bp, Homo sapien
ggtctgctcttgcaatagactcaac

SEQ ID NO: 90504 - DNA, 25 bp, Homo sapien
gatgcagcagggctacttgcaccct

SEQ ID NO: 90505 - DNA, 25 bp, Homo sapien
gccatgtggactccagatttcagca

SEQ ID NO: 90506 - DNA, 25 bp, Homo sapien
cgcaatgttctccccgttgacgtag

SEQ ID NO: 90507 - DNA, 25 bp, Homo sapien
ttctccccgttgacgtagctggcat

SEQ ID NO: 90508 - DNA, 25 bp, Homo sapien
gaaggacacgattcctgcacagtcc

SEQ ID NO: 90509 - DNA, 25 bp, Homo sapien
cacaggaaggacacgattcctgcac

SEQ ID NO: 90510 - DNA, 25 bp, Homo sapien
agagccgagtggagtagcctgccac

SEQ ID NO: 90511 - DNA, 25 bp, Homo sapien
cagagccgagtggagtagcctgcca

SEQ ID NO: 90512 - DNA, 25 bp, Homo sapien
tcagagccgagtggagtagcctgcc

SEQ ID NO: 90513 - DNA, 25 bp, Homo sapien
gcctgggaccacagctacgcagccg

SEQ ID NO: 90514 - DNA, 25 bp, Homo sapien
cctgggaccacagctacgcagccgc

SEQ ID NO: 90515 - DNA, 25 bp, Homo sapien
tcctcaagcctagcatgagtaagcc

SEQ ID NO: 90516 - DNA, 25 bp, Homo sapien
tcctaaggagaatgccgaagcgttt

SEQ ID NO: 90517 - DNA, 25 bp, Homo sapien
caaattgctagtctggcagaatggc

SEQ ID NO: 90518 - DNA, 25 bp, Homo sapien
tggatcagccaaatctacaagcaga

SEQ ID NO: 90519 - DNA, 25 bp, Homo sapien
tccaggtcgtagaaccttccccaca

SEQ ID NO: 90520 - DNA, 25 bp, Homo sapien
agcctcagtgctgagaccttatgct

SEQ ID NO: 90521 - DNA, 25 bp, Homo sapien
gctgagaccttatgcttttgggtca

SEQ ID NO: 90522 - DNA, 25 bp, Homo sapien
gaccttatgcttttgggtcactgaa

SEQ ID NO: 90523 - DNA, 25 bp, Homo sapien
ggcagtcactcttaagcaagctggg

SEQ ID NO: 90524 - DNA, 25 bp, Homo sapien
aaggctttgccctggattggatcca

SEQ ID NO: 90525 - DNA, 25 bp, Homo sapien
ttttgatgaagcagcggcagtcact

SEQ ID NO: 90526 - DNA, 25 bp, Homo sapien
gatttgccacaataaggaagaacac

SEQ ID NO: 90527 - DNA, 25 bp, Homo sapien
cagagcagcagattgtctccatggt

SEQ ID NO: 90528 - DNA, 25 bp, Homo sapien
tctccatggtgatcaaaaagatctg

SEQ ID NO: 90529 - DNA, 25 bp, Homo sapien
tgactgccgctcaaactctccattg

SEQ ID NO: 90530 - DNA, 25 bp, Homo sapien
gccttggaaacgaactcatgggaaa

SEQ ID NO: 90531 - DNA, 25 bp, Homo sapien
acgtaagtaccatcctgtcctctga

SEQ ID NO: 90532 - DNA, 25 bp, Homo sapien
gtcaaagagcaagccacgtaagtac

SEQ ID NO: 90533 - DNA, 25 bp, Homo sapien
gcaagccacgtaagtaccatcctgt

SEQ ID NO: 90534 - DNA, 25 bp, Homo sapien
caaagagcaagccacgtaagtacca

SEQ ID NO: 90535 - DNA, 25 bp, Homo sapien
tggctcagcggactcacatccacaa

SEQ ID NO: 90536 - DNA, 25 bp, Homo sapien
gcagttaaccaaatgataggtcata

SEQ ID NO: 90537 - DNA, 25 bp, Homo sapien
cagttaaccaaatgataggtcatat

SEQ ID NO: 90538 - DNA, 25 bp, Homo sapien
tctgatttatggaagtgttgctttg

SEQ ID NO: 90539 - DNA, 25 bp, Homo sapien
ctgaggacagaacccaattgccttt

SEQ ID NO: 90540 - DNA, 25 bp, Homo sapien
gaggacagaacccaattgcctttgc

SEQ ID NO: 90541 - DNA, 25 bp, Homo sapien
gacagaacccaattgcctttgcctc

SEQ ID NO: 90542 - DNA, 25 bp, Homo sapien
aagaagctatttgcttccagaaaat

SEQ ID NO: 90543 - DNA, 25 bp, Homo sapien
ttcccctgttagaagcggacaggca

SEQ ID NO: 90544 - DNA, 25 bp, Homo sapien
aatgagcttccaagtgacgaggagg

SEQ ID NO: 90545 - DNA, 25 bp, Homo sapien
gcatgacaagtggaagatgtaccta

SEQ ID NO: 90546 - DNA, 25 bp, Homo sapien
ctggataccctttggtgccagctct

SEQ ID NO: 90547 - DNA, 25 bp, Homo sapien
gcagttttgctggtggtataggcct

SEQ ID NO: 90548 - DNA, 25 bp, Homo sapien
accctttggtgccagctctatagcc

SEQ ID NO: 90549 - DNA, 25 bp, Homo sapien
tgctggtggtataggcctccagcat

SEQ ID NO: 90550 - DNA, 25 bp, Homo sapien
atgattcctggcaacaggcggggca

SEQ ID NO: 90551 - DNA, 25 bp, Homo sapien
tgattcctggcaacaggcggggcac

SEQ ID NO: 90552 - DNA, 25 bp, Homo sapien
gctcttcccagtgacgtagctggca

SEQ ID NO: 90553 - DNA, 25 bp, Homo sapien
ctcttcccagtgacgtagctggcat

SEQ ID NO: 90554 - DNA, 25 bp, Homo sapien
gggatcttcttgaggacattgtcaa

SEQ ID NO: 90555 - DNA, 25 bp, Homo sapien
ctttccatttgtttgaatcatataa

SEQ ID NO: 90556 - DNA, 25 bp, Homo sapien
tctcttctatgacgcaccagcagat

SEQ ID NO: 90557 - DNA, 25 bp, Homo sapien
tgagagctatgaaaccagatgccat

SEQ ID NO: 90558 - DNA, 25 bp, Homo sapien
accagtgatctctgttgaacctagg

SEQ ID NO: 90559 - DNA, 25 bp, Homo sapien
gaagccctagatttagatcctggac

SEQ ID NO: 90560 - DNA, 25 bp, Homo sapien
atctctgttgaacctagggctggga

SEQ ID NO: 90561 - DNA, 25 bp, Homo sapien
gggaagccctagatttagatcctgg

SEQ ID NO: 90562 - DNA, 25 bp, Homo sapien
tacatactcctcgtacaggtgcttg

SEQ ID NO: 90563 - DNA, 25 bp, Homo sapien
tgccatgttccactaggtcccagtg

SEQ ID NO: 90564 - DNA, 25 bp, Homo sapien
ggtcctggccctgcaacactgcttt

SEQ ID NO: 90565 - DNA, 25 bp, Homo sapien
actgctttccgggccaggtgagcag

SEQ ID NO: 90566 - DNA, 25 bp, Homo sapien
tcggtgccagttgatattcattaaa

SEQ ID NO: 90567 - DNA, 25 bp, Homo sapien
ttaagaagcccaagcgtttggagac

SEQ ID NO: 90568 - DNA, 25 bp, Homo sapien
ctgcctcggtgccagttgatattca

SEQ ID NO: 90569 - DNA, 25 bp, Homo sapien
atattcattaaaataagcccgagtt

SEQ ID NO: 90570 - DNA, 25 bp, Homo sapien
ctcctctctgttttctcccctttct

SEQ ID NO: 90571 - DNA, 25 bp, Homo sapien
ctggaactcactttctttcatcctc

SEQ ID NO: 90572 - DNA, 25 bp, Homo sapien
gcctggaactcactttctttcatcc

SEQ ID NO: 90573 - DNA, 25 bp, Homo sapien
actgcctggaactcactttctttca

SEQ ID NO: 90574 - DNA, 25 bp, Homo sapien
tgcctggaactcactttctttcatc

SEQ ID NO: 90575 - DNA, 25 bp, Homo sapien
tcttgcttggcggaagagcttgtga

SEQ ID NO: 90576 - DNA, 25 bp, Homo sapien
cttctatgtgctggtagtcattgtt

SEQ ID NO: 90577 - DNA, 25 bp, Homo sapien
cagcttcttgcttggcggaagagct

SEQ ID NO: 90578 - DNA, 25 bp, Homo sapien
cttgaagaggtgtctgttcagcttc

SEQ ID NO: 90579 - DNA, 25 bp, Homo sapien
gggttcatagtgcaaatacaacacg

SEQ ID NO: 90580 - DNA, 25 bp, Homo sapien
tatggtgcacaagaactgtagggtt

SEQ ID NO: 90581 - DNA, 25 bp, Homo sapien
ttcctcagattccttaacgatgcgg

SEQ ID NO: 90582 - DNA, 25 bp, Homo sapien
caatcgcctgactcttacaatggga

SEQ ID NO: 90583 - DNA, 25 bp, Homo sapien
tgtgacaagtatcctagtacgacct

SEQ ID NO: 90584 - DNA, 25 bp, Homo sapien
tattggagtccaaacgcactgctgg

SEQ ID NO: 90585 - DNA, 25 bp, Homo sapien
tcagtgaactaacatatggatgatc

SEQ ID NO: 90586 - DNA, 25 bp, Homo sapien
ggcatgtggccaaaaccttaaggat

SEQ ID NO: 90587 - DNA, 25 bp, Homo sapien
caatttggtggtcttgtcaagtttc

SEQ ID NO: 90588 - DNA, 25 bp, Homo sapien
ctccttgaacaatttggtggtcttg

SEQ ID NO: 90589 - DNA, 25 bp, Homo sapien
cctggagctccttgaacaatttggt

SEQ ID NO: 90590 - DNA, 25 bp, Homo sapien
gagctccttgaacaatttggtggtc

SEQ ID NO: 90591 - DNA, 25 bp, Homo sapien
tcacgtggagttacatgctgtgcac

SEQ ID NO: 90592 - DNA, 25 bp, Homo sapien
gacgcatttctccatatgagggacc

SEQ ID NO: 90593 - DNA, 25 bp, Homo sapien
cgtggagttacatgctgtgcacatt

SEQ ID NO: 90594 - DNA, 25 bp, Homo sapien
cttgtttagaaagacgcatttctcc

SEQ ID NO: 90595 - DNA, 25 bp, Homo sapien
ggttggcttcaaatcccatcgaatc

SEQ ID NO: 90596 - DNA, 25 bp, Homo sapien
tataatcaaataccggttggcttca

SEQ ID NO: 90597 - DNA, 25 bp, Homo sapien
tacccaatacaagtcaaaactctgg

SEQ ID NO: 90598 - DNA, 25 bp, Homo sapien
tgtgtacacagtatataatcaaata

SEQ ID NO: 90599 - DNA, 25 bp, Homo sapien
tcacaaagaggacttgtctattctt

SEQ ID NO: 90600 - DNA, 25 bp, Homo sapien
taaggtgtatatcatccatttgcag

SEQ ID NO: 90601 - DNA, 25 bp, Homo sapien
ataaggtgtatatcatccatttgca

SEQ ID NO: 90602 - DNA, 25 bp, Homo sapien
gttcacaaagaggacttgtctattc

SEQ ID NO: 90603 - DNA, 25 bp, Homo sapien
gcaggttgctgacgcaggtgcatca

SEQ ID NO: 90604 - DNA, 25 bp, Homo sapien
gaaggctggccacgtaataactgct

SEQ ID NO: 90605 - DNA, 25 bp, Homo sapien
gcaagcacgctggattctagaggca

SEQ ID NO: 90606 - DNA, 25 bp, Homo sapien
aagtgataacccaggctgctccggg

SEQ ID NO: 90607 - DNA, 25 bp, Homo sapien
ggaacacacaaggagtgatagccag

SEQ ID NO: 90608 - DNA, 25 bp, Homo sapien
gaggaacacacaaggagtgatagcc

SEQ ID NO: 90609 - DNA, 25 bp, Homo sapien
ggaggaacacacaaggagtgatagc

SEQ ID NO: 90610 - DNA, 25 bp, Homo sapien
gggaggaacacacaaggagtgatag

SEQ ID NO: 90611 - DNA, 25 bp, Homo sapien
ggtagttctcagttatggtgagtct

SEQ ID NO: 90612 - DNA, 25 bp, Homo sapien
cagttatggtgagtcttttgcccac

SEQ ID NO: 90613 - DNA, 25 bp, Homo sapien
ttctcagttatggtgagtcttttgc

SEQ ID NO: 90614 - DNA, 25 bp, Homo sapien
aaggtagttctcagttatggtgagt

SEQ ID NO: 90615 - DNA, 25 bp, Homo sapien
gtaccagactgggtggatacacatc

SEQ ID NO: 90616 - DNA, 25 bp, Homo sapien
ctgggtggatacacatcagctgcat

SEQ ID NO: 90617 - DNA, 25 bp, Homo sapien
ccagactgggtggatacacatcagc

SEQ ID NO: 90618 - DNA, 25 bp, Homo sapien
gactgggtggatacacatcagctgc

SEQ ID NO: 90619 - DNA, 25 bp, Homo sapien
tcactggaatggcaataagttgtat

SEQ ID NO: 90620 - DNA, 25 bp, Homo sapien
gcttcactggaatggcaataagttg

SEQ ID NO: 90621 - DNA, 25 bp, Homo sapien
ggaatggcaataagttgtatcttgc

SEQ ID NO: 90622 - DNA, 25 bp, Homo sapien
ctggaatggcaataagttgtatctt

SEQ ID NO: 90623 - DNA, 25 bp, Homo sapien
tcctctttaggtagagaagttctag

SEQ ID NO: 90624 - DNA, 25 bp, Homo sapien
caggtcttgaacgtataactcagtg

SEQ ID NO: 90625 - DNA, 25 bp, Homo sapien
cagatgctgggtatgtaactttgtt

SEQ ID NO: 90626 - DNA, 25 bp, Homo sapien
tggcaactgtaaattgctatacaga

SEQ ID NO: 90627 - DNA, 25 bp, Homo sapien
agggacccgtctgaatctctatgga

SEQ ID NO: 90628 - DNA, 25 bp, Homo sapien
gacccgtctgaatctctatggactg

SEQ ID NO: 90629 - DNA, 25 bp, Homo sapien
gggacccgtctgaatctctatggac

SEQ ID NO: 90630 - DNA, 25 bp, Homo sapien
acccgtctgaatctctatggactgt

SEQ ID NO: 90631 - DNA, 25 bp, Homo sapien
tttatgatgagtcccagttgctttg

SEQ ID NO: 90632 - DNA, 25 bp, Homo sapien
ttatgatgagtcccagttgctttgt

SEQ ID NO: 90633 - DNA, 25 bp, Homo sapien
ctttatgatgagtcccagttgcttt

SEQ ID NO: 90634 - DNA, 25 bp, Homo sapien
cttgtacatgtagctaggagaactt

SEQ ID NO: 90635 - DNA, 25 bp, Homo sapien
caaaagtagtacatagagtccctga

SEQ ID NO: 90636 - DNA, 25 bp, Homo sapien
gcagtcctgtgtaatggtgtccatt

SEQ ID NO: 90637 - DNA, 25 bp, Homo sapien
gaaccttcctgaaaggcagtcctgt

SEQ ID NO: 90638 - DNA, 25 bp, Homo sapien
tctgaagaaggctctttgttgggcc

SEQ ID NO: 90639 - DNA, 25 bp, Homo sapien
tgttgggccagatcaaatccttgga

SEQ ID NO: 90640 - DNA, 25 bp, Homo sapien
tacaatacgaataaataaggcccat

SEQ ID NO: 90641 - DNA, 25 bp, Homo sapien
ggtgaccagactagcctcactggag

SEQ ID NO: 90642 - DNA, 25 bp, Homo sapien
cagaccagcaagtatgggttccact

SEQ ID NO: 90643 - DNA, 25 bp, Homo sapien
ccagcaagtatgggttccactcttc

SEQ ID NO: 90644 - DNA, 25 bp, Homo sapien
ggatcagaccagcaagtatgggttc

SEQ ID NO: 90645 - DNA, 25 bp, Homo sapien
gaccagcaagtatgggttccactct

SEQ ID NO: 90646 - DNA, 25 bp, Homo sapien
ggcctagcagccccgccttgtgcat

SEQ ID NO: 90647 - DNA, 25 bp, Homo sapien
acagaggcctagcagccccgccttg

SEQ ID NO: 90648 - DNA, 25 bp, Homo sapien
agaggcctagcagccccgccttgtg

SEQ ID NO: 90649 - DNA, 25 bp, Homo sapien
aggcctagcagccccgccttgtgca

SEQ ID NO: 90650 - DNA, 25 bp, Homo sapien
cagggccaccttatttgcgagcggg

SEQ ID NO: 90651 - DNA, 25 bp, Homo sapien
tcggtggaggccgttaccagggcca

SEQ ID NO: 90652 - DNA, 25 bp, Homo sapien
ccttatttgcgagcgggtcccggcg

SEQ ID NO: 90653 - DNA, 25 bp, Homo sapien
gccaccttatttgcgagcgggtccc

SEQ ID NO: 90654 - DNA, 25 bp, Homo sapien
caccgcctggtccacattctgctgc

SEQ ID NO: 90655 - DNA, 25 bp, Homo sapien
ccaaacgccgggcgatggcgaagcc

SEQ ID NO: 90656 - DNA, 25 bp, Homo sapien
gtgcccgtcacgctcagcccctccc

SEQ ID NO: 90657 - DNA, 25 bp, Homo sapien
gtcctgggccaaacgccgggcgatg

SEQ ID NO: 90658 - DNA, 25 bp, Homo sapien
actcaagggatgatgcagggttgaa

SEQ ID NO: 90659 - DNA, 25 bp, Homo sapien
gggatgattctctgacgttagtata

SEQ ID NO: 90660 - DNA, 25 bp, Homo sapien
tatatggacataatagaaaggcaca

SEQ ID NO: 90661 - DNA, 25 bp, Homo sapien
aaaatgtgctgctgtctaggaaagc

SEQ ID NO: 90662 - DNA, 25 bp, Homo sapien
taataagtgatgtgcgccgtgctca

SEQ ID NO: 90663 - DNA, 25 bp, Homo sapien
caccaatggacttgttactagggag

SEQ ID NO: 90664 - DNA, 25 bp, Homo sapien
tgtgatcactacaccaaagcggtta

SEQ ID NO: 90665 - DNA, 25 bp, Homo sapien
taatcaaggagataggcagctactc

SEQ ID NO: 90666 - DNA, 25 bp, Homo sapien
aagtaagggaggtgcatttacccat

SEQ ID NO: 90667 - DNA, 25 bp, Homo sapien
gcagtaagtaagggaggtgcattta

SEQ ID NO: 90668 - DNA, 25 bp, Homo sapien
gttgataaaaacttccttctgggca

SEQ ID NO: 90669 - DNA, 25 bp, Homo sapien
ggggtaagttctggaccagggctgc

SEQ ID NO: 90670 - DNA, 25 bp, Homo sapien
agcagcattggagactaggatatcg

SEQ ID NO: 90671 - DNA, 25 bp, Homo sapien
gagactaggatatcgatacctccat

SEQ ID NO: 90672 - DNA, 25 bp, Homo sapien
ctaggatatcgatacctccatgaag

SEQ ID NO: 90673 - DNA, 25 bp, Homo sapien
cattggagactaggatatcgatacc

SEQ ID NO: 90674 - DNA, 25 bp, Homo sapien
gaggcgtgcctgtacttagtttaaa

SEQ ID NO: 90675 - DNA, 25 bp, Homo sapien
gacgtggaagggttcaagactgcat

SEQ ID NO: 90676 - DNA, 25 bp, Homo sapien
ccctaagtcagccaccatcaatgtt

SEQ ID NO: 90677 - DNA, 25 bp, Homo sapien
tcaccgttgatagctactgctcaga

SEQ ID NO: 90678 - DNA, 25 bp, Homo sapien
caatggcttgtaagtgtttaagcaa

SEQ ID NO: 90679 - DNA, 25 bp, Homo sapien
cagaaaagaaggtcaacttaatcga

SEQ ID NO: 90680 - DNA, 25 bp, Homo sapien
atctgtgatgagtgatctttcatgg

SEQ ID NO: 90681 - DNA, 25 bp, Homo sapien
gcattaattcgagccatttttccaa

SEQ ID NO: 90682 - DNA, 25 bp, Homo sapien
tggcatgtgtttgtaatccaagcta

SEQ ID NO: 90683 - DNA, 25 bp, Homo sapien
agacgtggtggcatgtgtttgtaat

SEQ ID NO: 90684 - DNA, 25 bp, Homo sapien
aaaaaacaaactcagggctgggcat

SEQ ID NO: 90685 - DNA, 25 bp, Homo sapien
ctcaggaggatgagacagcagaata

SEQ ID NO: 90686 - DNA, 25 bp, Homo sapien
taatcagccaagtatgatttgggcc

SEQ ID NO: 90687 - DNA, 25 bp, Homo sapien
ggttcaggtgagcaaaaatggagcc

SEQ ID NO: 90688 - DNA, 25 bp, Homo sapien
tgtcagagctgacgaagatcttagg

SEQ ID NO: 90689 - DNA, 25 bp, Homo sapien
cagctgctcagctagatattgatac

SEQ ID NO: 90690 - DNA, 25 bp, Homo sapien
gggccttcacattaatgtccagagt

SEQ ID NO: 90691 - DNA, 25 bp, Homo sapien
tggggccttcacattaatgtccaga

SEQ ID NO: 90692 - DNA, 25 bp, Homo sapien
ctggggccttcacattaatgtccag

SEQ ID NO: 90693 - DNA, 25 bp, Homo sapien
ggggccttcacattaatgtccagag

SEQ ID NO: 90694 - DNA, 25 bp, Homo sapien
ggcaccactgcctttgtcatcaggg

SEQ ID NO: 90695 - DNA, 25 bp, Homo sapien
tcgtttctccatttctggcaccact

SEQ ID NO: 90696 - DNA, 25 bp, Homo sapien
tctggcaccactgcctttgtcatca

SEQ ID NO: 90697 - DNA, 25 bp, Homo sapien
cctcgtttctccatttctggcacca

SEQ ID NO: 90698 - DNA, 25 bp, Homo sapien
tcagcccgtgtggtgtcccctctca

SEQ ID NO: 90699 - DNA, 25 bp, Homo sapien
ttcccattgtggaccagtgccctca

SEQ ID NO: 90700 - DNA, 25 bp, Homo sapien
agtgccctcagcccgtgtggtgtcc

SEQ ID NO: 90701 - DNA, 25 bp, Homo sapien
aaagaagagagctgaccatcttccc

SEQ ID NO: 90702 - DNA, 25 bp, Homo sapien
aggctgctatggaagacacgatcac

SEQ ID NO: 90703 - DNA, 25 bp, Homo sapien
gaaggctgctatggaagacacgatc

SEQ ID NO: 90704 - DNA, 25 bp, Homo sapien
agatggactgaaggctgctatggaa

SEQ ID NO: 90705 - DNA, 25 bp, Homo sapien
gactgaaggctgctatggaagacac

SEQ ID NO: 90706 - DNA, 25 bp, Homo sapien
gaaagaagagaatgtgttagactca

SEQ ID NO: 90707 - DNA, 25 bp, Homo sapien
gagaatgtgttagactcatagtttc

SEQ ID NO: 90708 - DNA, 25 bp, Homo sapien
gtgggatggaagaggtagacaaaag

SEQ ID NO: 90709 - DNA, 25 bp, Homo sapien
tagggaactgtcttgtggctaaacc

SEQ ID NO: 90710 - DNA, 25 bp, Homo sapien
gcagttcaccctaatgttccttggg

SEQ ID NO: 90711 - DNA, 25 bp, Homo sapien
ggtgctaggcagttcaccctaatgt

SEQ ID NO: 90712 - DNA, 25 bp, Homo sapien
catcctgctgaagctagtcttgata

SEQ ID NO: 90713 - DNA, 25 bp, Homo sapien
tcttgataagtccaggtgctaggca

SEQ ID NO: 90714 - DNA, 25 bp, Homo sapien
agctcaggactcaggtagtgggctt

SEQ ID NO: 90715 - DNA, 25 bp, Homo sapien
tacagtctgaatacctcagtctcca

SEQ ID NO: 90716 - DNA, 25 bp, Homo sapien
gcttccctgtccaagaagatggatg

SEQ ID NO: 90717 - DNA, 25 bp, Homo sapien
tctccagcctatacctcagaaaagg

SEQ ID NO: 90718 - DNA, 25 bp, Homo sapien
tgatgcattttgctgcgtctctcca

SEQ ID NO: 90719 - DNA, 25 bp, Homo sapien
gccaccccacccagaaatctcttta

SEQ ID NO: 90720 - DNA, 25 bp, Homo sapien
ttgtttcaggttctagtgatgcatt

SEQ ID NO: 90721 - DNA, 25 bp, Homo sapien
tttgctgcgtctctccaattctcat

SEQ ID NO: 90722 - DNA, 25 bp, Homo sapien
ttcttatccgcagggtttctttcat

SEQ ID NO: 90723 - DNA, 25 bp, Homo sapien
tttctttcatgctttcctctttttc

SEQ ID NO: 90724 - DNA, 25 bp, Homo sapien
cctctttttccttgtccatccagag

SEQ ID NO: 90725 - DNA, 25 bp, Homo sapien
cttcttatccgcagggtttctttca

SEQ ID NO: 90726 - DNA, 25 bp, Homo sapien
tcatgtctcttagtgcccttgccct

SEQ ID NO: 90727 - DNA, 25 bp, Homo sapien
cttcatgtctcttagtgcccttgcc

SEQ ID NO: 90728 - DNA, 25 bp, Homo sapien
tagggaccagaccttcccatcttca

SEQ ID NO: 90729 - DNA, 25 bp, Homo sapien
ggctgctagggaccagaccttccca

SEQ ID NO: 90730 - DNA, 25 bp, Homo sapien
cagaagagagcctgcctgtgttatc

SEQ ID NO: 90731 - DNA, 25 bp, Homo sapien
gagagcctgcctgtgttatctgtgg

SEQ ID NO: 90732 - DNA, 25 bp, Homo sapien
aagagagcctgcctgtgttatctgt

SEQ ID NO: 90733 - DNA, 25 bp, Homo sapien
agcctgcctgtgttatctgtgggac

SEQ ID NO: 90734 - DNA, 25 bp, Homo sapien
ggaagctgacttcttgctcaggtca

SEQ ID NO: 90735 - DNA, 25 bp, Homo sapien
tgctcaggtcactgtagtgatagtg

SEQ ID NO: 90736 - DNA, 25 bp, Homo sapien
tcactgtagtgatagtgtttatgaa

SEQ ID NO: 90737 - DNA, 25 bp, Homo sapien
gacttcttgctcaggtcactgtagt

SEQ ID NO: 90738 - DNA, 25 bp, Homo sapien
ggattgtagatcatcaacctgagtt

SEQ ID NO: 90739 - DNA, 25 bp, Homo sapien
gatttgggatgtctggacgagtaca

SEQ ID NO: 90740 - DNA, 25 bp, Homo sapien
ggagcccgacaaaggtgcttgaaca

SEQ ID NO: 90741 - DNA, 25 bp, Homo sapien
tacagagttaggcattactggcatt

SEQ ID NO: 90742 - DNA, 25 bp, Homo sapien
gagcacaggaaagacacgatgccag

SEQ ID NO: 90743 - DNA, 25 bp, Homo sapien
gatgtagctggcatcttcagagcac

SEQ ID NO: 90744 - DNA, 25 bp, Homo sapien
gtttccccagtgatgtagctggcat

SEQ ID NO: 90745 - DNA, 25 bp, Homo sapien
ggaaagacacgatgccagcacaatc

SEQ ID NO: 90746 - DNA, 25 bp, Homo sapien
tcagaggcgggacggggttcctcca

SEQ ID NO: 90747 - DNA, 25 bp, Homo sapien
aggagctagagcccaactctggcct

SEQ ID NO: 90748 - DNA, 25 bp, Homo sapien
tgcacctcatttgcaagttgttaat

SEQ ID NO: 90749 - DNA, 25 bp, Homo sapien
gtaagacgccaccttgacggcaggg

SEQ ID NO: 90750 - DNA, 25 bp, Homo sapien
gatttgatgaggtgaacagtaaggt

SEQ ID NO: 90751 - DNA, 25 bp, Homo sapien
cctccacccgtgaacatcacgctca

SEQ ID NO: 90752 - DNA, 25 bp, Homo sapien
cacccgtgaacatcacgctcaagtt

SEQ ID NO: 90753 - DNA, 25 bp, Homo sapien
ccacccgtgaacatcacgctcaagt

SEQ ID NO: 90754 - DNA, 25 bp, Homo sapien
tccacccgtgaacatcacgctcaag

SEQ ID NO: 90755 - DNA, 25 bp, Homo sapien
ggcgtcctgggagttcccgtgccac

SEQ ID NO: 90756 - DNA, 25 bp, Homo sapien
gctcgcgctgcctcggggattcccg

SEQ ID NO: 90757 - DNA, 25 bp, Homo sapien
gattcccgtggcgtcctgggagttc

SEQ ID NO: 90758 - DNA, 25 bp, Homo sapien
tgcctcggggattcccgtggcgtcc

SEQ ID NO: 90759 - DNA, 25 bp, Homo sapien
gcacatgctagactccgcttcagta

SEQ ID NO: 90760 - DNA, 25 bp, Homo sapien
cgcttcagtaaagcccgggcggtga

SEQ ID NO: 90761 - DNA, 25 bp, Homo sapien
tttcttgccggctccggcgtgagag

SEQ ID NO: 90762 - DNA, 25 bp, Homo sapien
gggctggcgccgacctttcttgccg

SEQ ID NO: 90763 - DNA, 25 bp, Homo sapien
gggcgtcccaaagaccgaggcagtc

SEQ ID NO: 90764 - DNA, 25 bp, Homo sapien
ccgtaccttacaactctcagatgag

SEQ ID NO: 90765 - DNA, 25 bp, Homo sapien
gatgctccagggacagcgatgtcag

SEQ ID NO: 90766 - DNA, 25 bp, Homo sapien
cggaaggaacgtgctggatctggga

SEQ ID NO: 90767 - DNA, 25 bp, Homo sapien
taaccacatacgactcagatcacag

SEQ ID NO: 90768 - DNA, 25 bp, Homo sapien
gatcacagtcacgtctcaaggctta

SEQ ID NO: 90769 - DNA, 25 bp, Homo sapien
ttgtcattgagaatgctggctcagc

SEQ ID NO: 90770 - DNA, 25 bp, Homo sapien
ttaggtcgcagtggccaacttgcag

SEQ ID NO: 90771 - DNA, 25 bp, Homo sapien
tataatttcattatatacccaatag

SEQ ID NO: 90772 - DNA, 25 bp, Homo sapien
ggtgttggttttatatctttcctgc

SEQ ID NO: 90773 - DNA, 25 bp, Homo sapien
tcttctcctggcttttgaatatgtt

SEQ ID NO: 90774 - DNA, 25 bp, Homo sapien
gtacatagtgtctttgttctccctg

SEQ ID NO: 90775 - DNA, 25 bp, Homo sapien
aaatggtgtttcaggttataggtct

SEQ ID NO: 90776 - DNA, 25 bp, Homo sapien
tctatttggacttcgttgccattgc

SEQ ID NO: 90777 - DNA, 25 bp, Homo sapien
tccagaagtttcctatacatttaca

SEQ ID NO: 90778 - DNA, 25 bp, Homo sapien
gagattacactgcacatactgccct

SEQ ID NO: 90779 - DNA, 25 bp, Homo sapien
aaatgtgggcaaactcgcttctgca

SEQ ID NO: 90780 - DNA, 25 bp, Homo sapien
gcctgcggtccagaagagaattcat

SEQ ID NO: 90781 - DNA, 25 bp, Homo sapien
taacatctgcctatcttgagggaca

SEQ ID NO: 90782 - DNA, 25 bp, Homo sapien
catccttttcaagggctgcctgcgg

SEQ ID NO: 90783 - DNA, 25 bp, Homo sapien
aagttctagggtgcacgtgtacaac

SEQ ID NO: 90784 - DNA, 25 bp, Homo sapien
tttaagttctagggtgcacgtgtac

SEQ ID NO: 90785 - DNA, 25 bp, Homo sapien
taagttctagggtgcacgtgtacaa

SEQ ID NO: 90786 - DNA, 25 bp, Homo sapien
gttctagggtgcacgtgtacaacgt

SEQ ID NO: 90787 - DNA, 25 bp, Homo sapien
tggtgagtgatcaaagcgctctccg

SEQ ID NO: 90788 - DNA, 25 bp, Homo sapien
cgcaggaacccgcagactttggctg

SEQ ID NO: 90789 - DNA, 25 bp, Homo sapien
gaacccgcagactttggctgctgcc

SEQ ID NO: 90790 - DNA, 25 bp, Homo sapien
aagttgcctgtagggctcgcccctc

SEQ ID NO: 90791 - DNA, 25 bp, Homo sapien
ccgcaccgacttccgtgcccaggca

SEQ ID NO: 90792 - DNA, 25 bp, Homo sapien
cacagaggcctagcagcctggccat

SEQ ID NO: 90793 - DNA, 25 bp, Homo sapien
aggcacagaggcctagcagcctggc

SEQ ID NO: 90794 - DNA, 25 bp, Homo sapien
cccaggcacagaggcctagcagcct

SEQ ID NO: 90795 - DNA, 25 bp, Homo sapien
ccttatttgtgagcgggtcccggcg

SEQ ID NO: 90796 - DNA, 25 bp, Homo sapien
tcggtggaggccgttaccagggcca

SEQ ID NO: 90797 - DNA, 25 bp, Homo sapien
caccttatttgtgagcgggtcccgg

SEQ ID NO: 90798 - DNA, 25 bp, Homo sapien
gggccaccttatttgtgagcgggtc

SEQ ID NO: 90799 - DNA, 25 bp, Homo sapien
aaaaagtctcgacacatggctctgg

SEQ ID NO: 90800 - DNA, 25 bp, Homo sapien
ggtaggcccagatgtaccgacctaa

SEQ ID NO: 90801 - DNA, 25 bp, Homo sapien
tccgggacactttctggagcccaaa

SEQ ID NO: 90802 - DNA, 25 bp, Homo sapien
gagctggcatctagcaaagtcctgt

SEQ ID NO: 90803 - DNA, 25 bp, Homo sapien
caccgcctggtccacattctgctgc

SEQ ID NO: 90804 - DNA, 25 bp, Homo sapien
gtcctgggccaaacgccgggcgatg

SEQ ID NO: 90805 - DNA, 25 bp, Homo sapien
ccaaacgccgggcgatggcgaagcc

SEQ ID NO: 90806 - DNA, 25 bp, Homo sapien
gtgcccgtcacgctcagcccctccc

SEQ ID NO: 90807 - DNA, 25 bp, Homo sapien
actcaagggatgatgcagggttgaa

SEQ ID NO: 90808 - DNA, 25 bp, Homo sapien
gggatgattctctgacgttagtata

SEQ ID NO: 90809 - DNA, 25 bp, Homo sapien
aaaatgtgctgctgtctaggaaagc

SEQ ID NO: 90810 - DNA, 25 bp, Homo sapien
tatatggacataatagaaaggcaca

SEQ ID NO: 90811 - DNA, 25 bp, Homo sapien
agcagcattggagactaggatatcg

SEQ ID NO: 90812 - DNA, 25 bp, Homo sapien
gagactaggatatcgatacctccat

SEQ ID NO: 90813 - DNA, 25 bp, Homo sapien
ctaggatatcgatacctccatgaag

SEQ ID NO: 90814 - DNA, 25 bp, Homo sapien
cattggagactaggatatcgatacc

SEQ ID NO: 90815 - DNA, 25 bp, Homo sapien
ctatcaaacaggattgcatgctaca

SEQ ID NO: 90816 - DNA, 25 bp, Homo sapien
gaagttctactgtgggtaaatgcta

SEQ ID NO: 90817 - DNA, 25 bp, Homo sapien
caaacaggattgcatgctacagaga

SEQ ID NO: 90818 - DNA, 25 bp, Homo sapien
aatgctatcaaacaggattgcatgc

SEQ ID NO: 90819 - DNA, 25 bp, Homo sapien
tcacaacacgggattcagaatatta

SEQ ID NO: 90820 - DNA, 25 bp, Homo sapien
gttgaaatcacaacacgggattcag

SEQ ID NO: 90821 - DNA, 25 bp, Homo sapien
gaaatcacaacacgggattcagaat

SEQ ID NO: 90822 - DNA, 25 bp, Homo sapien
atattgttgaaatcacaacacggga

SEQ ID NO: 90823 - DNA, 25 bp, Homo sapien
gggccttcacattaatgtccagagt

SEQ ID NO: 90824 - DNA, 25 bp, Homo sapien
ggggccttcacattaatgtccagag

SEQ ID NO: 90825 - DNA, 25 bp, Homo sapien
tggggccttcacattaatgtccaga

SEQ ID NO: 90826 - DNA, 25 bp, Homo sapien
ctggggccttcacattaatgtccag

SEQ ID NO: 90827 - DNA, 25 bp, Homo sapien
tcgtttctccatttctggcaccact

SEQ ID NO: 90828 - DNA, 25 bp, Homo sapien
ggcaccactgcctttgtcatcaggg

SEQ ID NO: 90829 - DNA, 25 bp, Homo sapien
tctggcaccactgcctttgtcatca

SEQ ID NO: 90830 - DNA, 25 bp, Homo sapien
cctcgtttctccatttctggcacca

SEQ ID NO: 90831 - DNA, 25 bp, Homo sapien
aggctgctatggaagacacgatcac

SEQ ID NO: 90832 - DNA, 25 bp, Homo sapien
gactgaaggctgctatggaagacac

SEQ ID NO: 90833 - DNA, 25 bp, Homo sapien
gaaggctgctatggaagacacgatc

SEQ ID NO: 90834 - DNA, 25 bp, Homo sapien
agatggactgaaggctgctatggaa

SEQ ID NO: 90835 - DNA, 25 bp, Homo sapien
agtcttgataagtccaggtgcaggc

SEQ ID NO: 90836 - DNA, 25 bp, Homo sapien
gctagtcttgataagtccaggtgca

SEQ ID NO: 90837 - DNA, 25 bp, Homo sapien
atatatctaatgctagatgacacgt

SEQ ID NO: 90838 - DNA, 25 bp, Homo sapien
tatatctaatgctagatgacacgtt

SEQ ID NO: 90839 - DNA, 25 bp, Homo sapien
tatctaatgctagatgacacgttag

SEQ ID NO: 90840 - DNA, 25 bp, Homo sapien
tctaatgctagatgacacgttagtg

SEQ ID NO: 90841 - DNA, 25 bp, Homo sapien
gctttcctctttttccttgtccatc

SEQ ID NO: 90842 - DNA, 25 bp, Homo sapien
tcatgctttcctctttttccttgtc

SEQ ID NO: 90843 - DNA, 25 bp, Homo sapien
cctctttttccttgtccatccagag

SEQ ID NO: 90844 - DNA, 25 bp, Homo sapien
tttcctctttttccttgtccatcca

SEQ ID NO: 90845 - DNA, 25 bp, Homo sapien
gcactgctgaaaccccgatgtctct

SEQ ID NO: 90846 - DNA, 25 bp, Homo sapien
tcactgtagtgatagtgtttatgaa

SEQ ID NO: 90847 - DNA, 25 bp, Homo sapien
ctctgcactgctgaaaccccgatgt

SEQ ID NO: 90848 - DNA, 25 bp, Homo sapien
ggaagctgacttcttgctcaggtca

SEQ ID NO: 90849 - DNA, 25 bp, Homo sapien
tcaaatactatagaaacacaccggt

SEQ ID NO: 90850 - DNA, 25 bp, Homo sapien
acacaccggtttttagagagctcag

SEQ ID NO: 90851 - DNA, 25 bp, Homo sapien
ccatttgtacaggttcagcttagaa

SEQ ID NO: 90852 - DNA, 25 bp, Homo sapien
tccctgccatagaatgctctagagg

SEQ ID NO: 90853 - DNA, 25 bp, Homo sapien
tttgcttaatcaagaattatcagat

SEQ ID NO: 90854 - DNA, 25 bp, Homo sapien
ttgcttaatcaagaattatcagatg

SEQ ID NO: 90855 - DNA, 25 bp, Homo sapien
atttgcttaatcaagaattatcaga

SEQ ID NO: 90856 - DNA, 25 bp, Homo sapien
gagcacaggaaagacacgatgccag

SEQ ID NO: 90857 - DNA, 25 bp, Homo sapien
gatgtagctggcatcttcagagcac

SEQ ID NO: 90858 - DNA, 25 bp, Homo sapien
gtttccccagtgatgtagctggcat

SEQ ID NO: 90859 - DNA, 25 bp, Homo sapien
ggaaagacacgatgccagcacaatc

SEQ ID NO: 90860 - DNA, 25 bp, Homo sapien
tcagaggcgggacggggttcctcca

SEQ ID NO: 90861 - DNA, 25 bp, Homo sapien
tgcacctcatttgcaagttgttaat

SEQ ID NO: 90862 - DNA, 25 bp, Homo sapien
gatttgatgaggtgaacagtaaggt

SEQ ID NO: 90863 - DNA, 25 bp, Homo sapien
cgagtaagacgccaccttgacggca

SEQ ID NO: 90864 - DNA, 25 bp, Homo sapien
caacagcaggaatcccgagtaagac

SEQ ID NO: 90865 - DNA, 25 bp, Homo sapien
cctccacccgtgaacatcacgctca

SEQ ID NO: 90866 - DNA, 25 bp, Homo sapien
cacccgtgaacatcacgctcaagtt

SEQ ID NO: 90867 - DNA, 25 bp, Homo sapien
ccacccgtgaacatcacgctcaagt

SEQ ID NO: 90868 - DNA, 25 bp, Homo sapien
tccacccgtgaacatcacgctcaag

SEQ ID NO: 90869 - DNA, 25 bp, Homo sapien
gctcgcgctgcctcggggattcccg

SEQ ID NO: 90870 - DNA, 25 bp, Homo sapien
ggcgtcctgggagttcccgtgccac

SEQ ID NO: 90871 - DNA, 25 bp, Homo sapien
gattcccgtggcgtcctgggagttc

SEQ ID NO: 90872 - DNA, 25 bp, Homo sapien
tgcctcggggattcccgtggcgtcc

SEQ ID NO: 90873 - DNA, 25 bp, Homo sapien
ctgagcatgcgcgtcgcgctgccga

SEQ ID NO: 90874 - DNA, 25 bp, Homo sapien
tttcttgccggctccggcgtgagag

SEQ ID NO: 90875 - DNA, 25 bp, Homo sapien
gggctggcgccgacctttcttgccg

SEQ ID NO: 90876 - DNA, 25 bp, Homo sapien
gcccggagagctgcccgactgagca

SEQ ID NO: 90877 - DNA, 25 bp, Homo sapien
cgcttcagtaaagcccgggcggtga

SEQ ID NO: 90878 - DNA, 25 bp, Homo sapien
cagacagtggcggttgcgtgagcgc

SEQ ID NO: 90879 - DNA, 25 bp, Homo sapien
agaggcgagcccgctccagacagtg

SEQ ID NO: 90880 - DNA, 25 bp, Homo sapien
gtggagcagccgcacatgctagact

SEQ ID NO: 90881 - DNA, 25 bp, Homo sapien
agaggagccgccgccacccacaccg

SEQ ID NO: 90882 - DNA, 25 bp, Homo sapien
ctactgccgaggctgctgcagagga

SEQ ID NO: 90883 - DNA, 25 bp, Homo sapien
ctgcagaggagccgccgccacccac

SEQ ID NO: 90884 - DNA, 25 bp, Homo sapien
gcagaggagccgccgccacccacac

SEQ ID NO: 90885 - DNA, 25 bp, Homo sapien
cacggtgggcttggccaccgtgacc

SEQ ID NO: 90886 - DNA, 25 bp, Homo sapien
agatgagctccacggtgggcttggc

SEQ ID NO: 90887 - DNA, 25 bp, Homo sapien
tccacggtgggcttggccaccgtga

SEQ ID NO: 90888 - DNA, 25 bp, Homo sapien
agctccacggtgggcttggccaccg

SEQ ID NO: 90889 - DNA, 25 bp, Homo sapien
gggcgtcccaaagaccgaggcagtc

SEQ ID NO: 90890 - DNA, 25 bp, Homo sapien
cgaggcagtcccgtaccttacaact

SEQ ID NO: 90891 - DNA, 25 bp, Homo sapien
gatgctccagggacagcgatgtcag

SEQ ID NO: 90892 - DNA, 25 bp, Homo sapien
cggaaggaacgtgctggatctggga

SEQ ID NO: 90893 - DNA, 25 bp, Homo sapien
tcttctcctggcttttgaatatgtt

SEQ ID NO: 90894 - DNA, 25 bp, Homo sapien
ggtgttggttttatatctttcctgc

SEQ ID NO: 90895 - DNA, 25 bp, Homo sapien
gtacatagtgtctttgttctccctg

SEQ ID NO: 90896 - DNA, 25 bp, Homo sapien
tataatttcattatatacccaatag

SEQ ID NO: 90897 - DNA, 25 bp, Homo sapien
ggtctagatatctgtttggtactag

SEQ ID NO: 90898 - DNA, 25 bp, Homo sapien
tcaaaaatctgatggttgtaggtgt

SEQ ID NO: 90899 - DNA, 25 bp, Homo sapien
tagatatctgtttggtactagtacc

SEQ ID NO: 90900 - DNA, 25 bp, Homo sapien
gttccattccattggtctagatatc

SEQ ID NO: 90901 - DNA, 25 bp, Homo sapien
tttcgacattcaaacggtggcgtat

SEQ ID NO: 90902 - DNA, 25 bp, Homo sapien
tgtgggaacctttaccagggctctc

SEQ ID NO: 90903 - DNA, 25 bp, Homo sapien
tagtgagcaagtaataggacggcct

SEQ ID NO: 90904 - DNA, 25 bp, Homo sapien
tttggagctaatgcactgtgggaac

SEQ ID NO: 90905 - DNA, 25 bp, Homo sapien
gagtagggcgaaggggcaggacgaa

SEQ ID NO: 90906 - DNA, 25 bp, Homo sapien
gatcagaccagcaagtctgggttcc

SEQ ID NO: 90907 - DNA, 25 bp, Homo sapien
gaggtgacagagtagggcgaagggg

SEQ ID NO: 90908 - DNA, 25 bp, Homo sapien
ggatcagaccagcaagtctgggttc

SEQ ID NO: 90909 - DNA, 25 bp, Homo sapien
ccttatttgtgagcgggtcccggcg

SEQ ID NO: 90910 - DNA, 25 bp, Homo sapien
tcggtggaggccgttaccagggcca

SEQ ID NO: 90911 - DNA, 25 bp, Homo sapien
gggccaccttatttgtgagcgggtc

SEQ ID NO: 90912 - DNA, 25 bp, Homo sapien
caccttatttgtgagcgggtcccgg

SEQ ID NO: 90913 - DNA, 25 bp, Homo sapien
ggcggctgactaccacgtgggcccc

SEQ ID NO: 90914 - DNA, 25 bp, Homo sapien
gcggctgactaccacgtgggccccg

SEQ ID NO: 90915 - DNA, 25 bp, Homo sapien
ctcaggctggctcccttttccacct

SEQ ID NO: 90916 - DNA, 25 bp, Homo sapien
caatgctgtccaggaaagcagggaa

SEQ ID NO: 90917 - DNA, 25 bp, Homo sapien
ctgtgcccatttccctgcagctcac

SEQ ID NO: 90918 - DNA, 25 bp, Homo sapien
tggctctgtgcccatttccctgcag

SEQ ID NO: 90919 - DNA, 25 bp, Homo sapien
caataaaaacgtgctggtgggctgg

SEQ ID NO: 90920 - DNA, 25 bp, Homo sapien
gttaacatcactgcgttggatctca

SEQ ID NO: 90921 - DNA, 25 bp, Homo sapien
gcagaacacactgttatgttttagt

SEQ ID NO: 90922 - DNA, 25 bp, Homo sapien
ggctggttgggtatgcagaacacac

SEQ ID NO: 90923 - DNA, 25 bp, Homo sapien
gtggttgaaacatggtgggctgctt

SEQ ID NO: 90924 - DNA, 25 bp, Homo sapien
tggttgaaacatggtgggctgcttc

SEQ ID NO: 90925 - DNA, 25 bp, Homo sapien
ggttgaaacatggtgggctgcttcc

SEQ ID NO: 90926 - DNA, 25 bp, Homo sapien
taaaagcagacggagtttgttatcg

SEQ ID NO: 90927 - DNA, 25 bp, Homo sapien
cagacggagtttgttatcgatagtg

SEQ ID NO: 90928 - DNA, 25 bp, Homo sapien
gtgataggatatcaataactccatg

SEQ ID NO: 90929 - DNA, 25 bp, Homo sapien
tgttatcgatagtgataggatatca

SEQ ID NO: 90930 - DNA, 25 bp, Homo sapien
acatttacactgcacttgataaaca

SEQ ID NO: 90931 - DNA, 25 bp, Homo sapien
tcacatttacactgcacttgataaa

SEQ ID NO: 90932 - DNA, 25 bp, Homo sapien
cctcacatttacactgcacttgata

SEQ ID NO: 90933 - DNA, 25 bp, Homo sapien
tcctcacatttacactgcacttgat

SEQ ID NO: 90934 - DNA, 25 bp, Homo sapien
gatcagggggtaattctgacttgca

SEQ ID NO: 90935 - DNA, 25 bp, Homo sapien
gatgacgtggaagggttcaacactg

SEQ ID NO: 90936 - DNA, 25 bp, Homo sapien
gctggttcttacggataagcaaata

SEQ ID NO: 90937 - DNA, 25 bp, Homo sapien
gggggtaattctgacttgcaagact

SEQ ID NO: 90938 - DNA, 25 bp, Homo sapien
ccattattattacgtctgttacggt

SEQ ID NO: 90939 - DNA, 25 bp, Homo sapien
tggcaaccctgtgctaattggagcc

SEQ ID NO: 90940 - DNA, 25 bp, Homo sapien
cagaaaagaaggtcaacttaatgga

SEQ ID NO: 90941 - DNA, 25 bp, Homo sapien
tgcagatattgcgtcttttacaaat

SEQ ID NO: 90942 - DNA, 25 bp, Homo sapien
agggccttcccattaatgtccagat

SEQ ID NO: 90943 - DNA, 25 bp, Homo sapien
tagggccttcccattaatgtccaga

SEQ ID NO: 90944 - DNA, 25 bp, Homo sapien
gggccttcccattaatgtccagatt

SEQ ID NO: 90945 - DNA, 25 bp, Homo sapien
ctagggccttcccattaatgtccag

SEQ ID NO: 90946 - DNA, 25 bp, Homo sapien
ggcaccactgcctttatcattaggg

SEQ ID NO: 90947 - DNA, 25 bp, Homo sapien
atttctggcaccactgcctttatca

SEQ ID NO: 90948 - DNA, 25 bp, Homo sapien
tcgtttctccatttctggcaccact

SEQ ID NO: 90949 - DNA, 25 bp, Homo sapien
tctggcaccactgcctttatcatta

SEQ ID NO: 90950 - DNA, 25 bp, Homo sapien
gaagagagctgaccgtcttcccagt

SEQ ID NO: 90951 - DNA, 25 bp, Homo sapien
gaccgtcttcccagtgtggaccact

SEQ ID NO: 90952 - DNA, 25 bp, Homo sapien
aaaagaagagagctgaccgtcttcc

SEQ ID NO: 90953 - DNA, 25 bp, Homo sapien
gagctgaccgtcttcccagtgtgga

SEQ ID NO: 90954 - DNA, 25 bp, Homo sapien
cctgaaggctgctacagaggccagg

SEQ ID NO: 90955 - DNA, 25 bp, Homo sapien
ctgaaggctgctacagaggccagga

SEQ ID NO: 90956 - DNA, 25 bp, Homo sapien
tgaaggctgctacagaggccaggaa

SEQ ID NO: 90957 - DNA, 25 bp, Homo sapien
gggaactgtcttgtggctaaatctc

SEQ ID NO: 90958 - DNA, 25 bp, Homo sapien
gaactgtcttgtggctaaatctccc

SEQ ID NO: 90959 - DNA, 25 bp, Homo sapien
ttagggaactgtcttgtggctaaat

SEQ ID NO: 90960 - DNA, 25 bp, Homo sapien
tagggaactgtcttgtggctaaatc

SEQ ID NO: 90961 - DNA, 25 bp, Homo sapien
gcagttcaccctaatgttccttggg

SEQ ID NO: 90962 - DNA, 25 bp, Homo sapien
ggtgctaggcagttcaccctaatgt

SEQ ID NO: 90963 - DNA, 25 bp, Homo sapien
catcctgctgaagctagtcttgata

SEQ ID NO: 90964 - DNA, 25 bp, Homo sapien
tcttgataagtccaggtgctaggca

SEQ ID NO: 90965 - DNA, 25 bp, Homo sapien
ttcttatccgcagggtttctttcat

SEQ ID NO: 90966 - DNA, 25 bp, Homo sapien
tttctttcatgctttcctctttttc

SEQ ID NO: 90967 - DNA, 25 bp, Homo sapien
cctctttttccttgtccatccagag

SEQ ID NO: 90968 - DNA, 25 bp, Homo sapien
cttcttatccgcagggtttctttca

SEQ ID NO: 90969 - DNA, 25 bp, Homo sapien
aagacacgatgccaagagaatcctc

SEQ ID NO: 90970 - DNA, 25 bp, Homo sapien
cacaggaaagacacgatgccaagag

SEQ ID NO: 90971 - DNA, 25 bp, Homo sapien
caggaaagacacgatgccaagagaa

SEQ ID NO: 90972 - DNA, 25 bp, Homo sapien
gagcacaggaaagacacgatgccaa

SEQ ID NO: 90973 - DNA, 25 bp, Homo sapien
tcagaggcgggacggggttcctcca

SEQ ID NO: 90974 - DNA, 25 bp, Homo sapien
tcaaagccgcgcaatcatctgcatt

SEQ ID NO: 90975 - DNA, 25 bp, Homo sapien
tgcacctcatttgcaagttgttaat

SEQ ID NO: 90976 - DNA, 25 bp, Homo sapien
gatttgatgaggtgaacagtaaggt

SEQ ID NO: 90977 - DNA, 25 bp, Homo sapien
caacagcaggaatcccgagtaagac

SEQ ID NO: 90978 - DNA, 25 bp, Homo sapien
tctgcagacacctccacccctgaac

SEQ ID NO: 90979 - DNA, 25 bp, Homo sapien
cacccctgaacatcacgctcaggtc

SEQ ID NO: 90980 - DNA, 25 bp, Homo sapien
ctgcctcggggatccccgtggcgtc

SEQ ID NO: 90981 - DNA, 25 bp, Homo sapien
cccgtggcgtcctgggagttcctgt

SEQ ID NO: 90982 - DNA, 25 bp, Homo sapien
gatccccgtggcgtcctgggagttc

SEQ ID NO: 90983 - DNA, 25 bp, Homo sapien
cctcgcccgactcgccctgcctcgg

SEQ ID NO: 90984 - DNA, 25 bp, Homo sapien
tggccggtgtgcgtcgcccggtgtc

SEQ ID NO: 90985 - DNA, 25 bp, Homo sapien
gggcggctgcttgagcgctcctccc

SEQ ID NO: 90986 - DNA, 25 bp, Homo sapien
tggctcccgcgtgagctggccggtg

SEQ ID NO: 90987 - DNA, 25 bp, Homo sapien
gcacatgctagacccggcttcagca

SEQ ID NO: 90988 - DNA, 25 bp, Homo sapien
aactcgcgggtgagctccacgctgg

SEQ ID NO: 90989 - DNA, 25 bp, Homo sapien
tcgcgggtgagctccacgctgggct

SEQ ID NO: 90990 - DNA, 25 bp, Homo sapien
tgcaactcgcgggtgagctccacgc

SEQ ID NO: 90991 - DNA, 25 bp, Homo sapien
cgcgggtgagctccacgctgggctt

SEQ ID NO: 90992 - DNA, 25 bp, Homo sapien
ttgtctccaacttcacatgatgttg

SEQ ID NO: 90993 - DNA, 25 bp, Homo sapien
gatgttgttggagcacggccccttg

SEQ ID NO: 90994 - DNA, 25 bp, Homo sapien
gttgttggagcacggccccttggct

SEQ ID NO: 90995 - DNA, 25 bp, Homo sapien
gtctccaacttcacatgatgttgtt

SEQ ID NO: 90996 - DNA, 25 bp, Homo sapien
aggtggaggcgccaggaggtcaggg

SEQ ID NO: 90997 - DNA, 25 bp, Homo sapien
aggaagaggtggaggcgccaggagg

SEQ ID NO: 90998 - DNA, 25 bp, Homo sapien
gaagaggtggaggcgccaggaggtc

SEQ ID NO: 90999 - DNA, 25 bp, Homo sapien
agaggtggaggcgccaggaggtcag

SEQ ID NO: 91000 - DNA, 25 bp, Homo sapien
gttgaaggcacggatctccaggaca

SEQ ID NO: 91001 - DNA, 25 bp, Homo sapien
gagcgtgttgaaggcacggatctcc

SEQ ID NO: 91002 - DNA, 25 bp, Homo sapien
ctgattctgactgagcgtgttgaag

SEQ ID NO: 91003 - DNA, 25 bp, Homo sapien
ttctgactgagcgtgttgaaggcac

SEQ ID NO: 91004 - DNA, 25 bp, Homo sapien
cacctggtccacactttcagctgat

SEQ ID NO: 91005 - DNA, 25 bp, Homo sapien
ccatgccacgctccgtctccaccag

SEQ ID NO: 91006 - DNA, 25 bp, Homo sapien
tgctcaccatgccacgctccgtctc

SEQ ID NO: 91007 - DNA, 25 bp, Homo sapien
gtcgcatgctcaccatgccacgctc

SEQ ID NO: 91008 - DNA, 25 bp, Homo sapien
gggcagaccttggacagggcagagc

SEQ ID NO: 91009 - DNA, 25 bp, Homo sapien
agaccttggacagggcagagctcac

SEQ ID NO: 91010 - DNA, 25 bp, Homo sapien
gcagaccttggacagggcagagctc

SEQ ID NO: 91011 - DNA, 25 bp, Homo sapien
ggccagggcagaccttggacagggc

SEQ ID NO: 91012 - DNA, 25 bp, Homo sapien
tctgcgtttccacgccggatcaaac

SEQ ID NO: 91013 - DNA, 25 bp, Homo sapien
gggtgtctgcgtttccacgccggat

SEQ ID NO: 91014 - DNA, 25 bp, Homo sapien
tgtctgcgtttccacgccggatcaa

SEQ ID NO: 91015 - DNA, 25 bp, Homo sapien
gacactgtgggtggtagatgtggaa

SEQ ID NO: 91016 - DNA, 25 bp, Homo sapien
acacagagcagcgtaggtctcagag

SEQ ID NO: 91017 - DNA, 25 bp, Homo sapien
gcagcgtaggtctcagagaagccac

SEQ ID NO: 91018 - DNA, 25 bp, Homo sapien
tcctcacggcagtgtagcccattgt

SEQ ID NO: 91019 - DNA, 25 bp, Homo sapien
ccattgaacctcctcacggcagtgt

SEQ ID NO: 91020 - DNA, 25 bp, Homo sapien
agaggtggaactggctcacacctgc

SEQ ID NO: 91021 - DNA, 25 bp, Homo sapien
tccaggtcccacctgttccctatgg

SEQ ID NO: 91022 - DNA, 25 bp, Homo sapien
cttggagaggtggaactggctcaca

SEQ ID NO: 91023 - DNA, 25 bp, Homo sapien
ggagaggtggaactggctcacacct

SEQ ID NO: 91024 - DNA, 25 bp, Homo sapien
gattgaactcccggttatcttcagc

SEQ ID NO: 91025 - DNA, 25 bp, Homo sapien
tgaactcccggttatcttcagcatg

SEQ ID NO: 91026 - DNA, 25 bp, Homo sapien
caaaagattgaactcccggttatct

SEQ ID NO: 91027 - DNA, 25 bp, Homo sapien
gaactcccggttatcttcagcatgg

SEQ ID NO: 91028 - DNA, 25 bp, Homo sapien
cagccgcaagtccttgcagtagagt

SEQ ID NO: 91029 - DNA, 25 bp, Homo sapien
agccgcaagtccttgcagtagagtt

SEQ ID NO: 91030 - DNA, 25 bp, Homo sapien
gccgcaagtccttgcagtagagttt

SEQ ID NO: 91031 - DNA, 25 bp, Homo sapien
tggtgaaccactggttgtaggccag

SEQ ID NO: 91032 - DNA, 25 bp, Homo sapien
tatgtagcacctgttctagcacttc

SEQ ID NO: 91033 - DNA, 25 bp, Homo sapien
gtcttaagcccggcgttgtccagca

SEQ ID NO: 91034 - DNA, 25 bp, Homo sapien
tccagcaccagctcttcgaggctcc

SEQ ID NO: 91035 - DNA, 25 bp, Homo sapien
tcgaggctccccgacttgcttaggg

SEQ ID NO: 91036 - DNA, 25 bp, Homo sapien
tgtgggacagagtgagggcatgcag

SEQ ID NO: 91037 - DNA, 25 bp, Homo sapien
accccggccagcttctggacaaagt

SEQ ID NO: 91038 - DNA, 25 bp, Homo sapien
agagtgagggcatgcagcacacagc

SEQ ID NO: 91039 - DNA, 25 bp, Homo sapien
ccttgtcctcgatggggttgtggga

SEQ ID NO: 91040 - DNA, 25 bp, Homo sapien
ctcgaggggaaatggcagtcttggc

SEQ ID NO: 91041 - DNA, 25 bp, Homo sapien
tcgaggggaaatggcagtcttggcc

SEQ ID NO: 91042 - DNA, 25 bp, Homo sapien
tgctcaggtccaggtatcgaaggga

SEQ ID NO: 91043 - DNA, 25 bp, Homo sapien
ggcaaatgctgggtttgccccgaag

SEQ ID NO: 91044 - DNA, 25 bp, Homo sapien
tttgccccgaaggtctggccgagtg

SEQ ID NO: 91045 - DNA, 25 bp, Homo sapien
gtatcgaagggagctggcaaatgct

SEQ ID NO: 91046 - DNA, 25 bp, Homo sapien
cagttcctgacaggtccaggtgcac

SEQ ID NO: 91047 - DNA, 25 bp, Homo sapien
caagtcgatgacgcagtcagttcct

SEQ ID NO: 91048 - DNA, 25 bp, Homo sapien
gatgacgcagtcagttcctgacagg

SEQ ID NO: 91049 - DNA, 25 bp, Homo sapien
tgcaccagggcgttgggttgggcca

SEQ ID NO: 91050 - DNA, 25 bp, Homo sapien
tgttgcgagccaggttgaggtaggt

SEQ ID NO: 91051 - DNA, 25 bp, Homo sapien
gctgttgcgagccaggttgaggtag

SEQ ID NO: 91052 - DNA, 25 bp, Homo sapien
gttgcgagccaggttgaggtaggtg

SEQ ID NO: 91053 - DNA, 25 bp, Homo sapien
cagctgttgcgagccaggttgaggt

SEQ ID NO: 91054 - DNA, 25 bp, Homo sapien
ggctcagtgtgtaggcgctgctgaa

SEQ ID NO: 91055 - DNA, 25 bp, Homo sapien
acagattgacgtggctcagtgtgta

SEQ ID NO: 91056 - DNA, 25 bp, Homo sapien
tgtggccgacagattgacgtggctc

SEQ ID NO: 91057 - DNA, 25 bp, Homo sapien
agctttgtggccgacagattgacgt

SEQ ID NO: 91058 - DNA, 25 bp, Homo sapien
tggttcccttggatgcgcccccaac

SEQ ID NO: 91059 - DNA, 25 bp, Homo sapien
ctcgcagctgctgagatccaggtgc

SEQ ID NO: 91060 - DNA, 25 bp, Homo sapien
tgaggtgactgttgagggagaggcc

SEQ ID NO: 91061 - DNA, 25 bp, Homo sapien
tgctgagatccaggtgcaggtcact

SEQ ID NO: 91062 - DNA, 25 bp, Homo sapien
cagctgctgagatccaggtgcaggt

SEQ ID NO: 91063 - DNA, 25 bp, Homo sapien
ttgtctgacagatccaggctgccta

SEQ ID NO: 91064 - DNA, 25 bp, Homo sapien
attgtctgacagatccaggctgcct

SEQ ID NO: 91065 - DNA, 25 bp, Homo sapien
tccaggctgcctacacaggtgacag

SEQ ID NO: 91066 - DNA, 25 bp, Homo sapien
atccaggctgcctacacaggtgaca

SEQ ID NO: 91067 - DNA, 25 bp, Homo sapien
cagtgtcaggaggtccgagtcgaac

SEQ ID NO: 91068 - DNA, 25 bp, Homo sapien
tgcttgagggacttgttcttgccaa

SEQ ID NO: 91069 - DNA, 25 bp, Homo sapien
tgacattgaagttcttgcccaaaaa

SEQ ID NO: 91070 - DNA, 25 bp, Homo sapien
ccaaaaacaggtgcttgagggactt

SEQ ID NO: 91071 - DNA, 25 bp, Homo sapien
gccagaggtaatacggtgagccaag

SEQ ID NO: 91072 - DNA, 25 bp, Homo sapien
caagaggatgggtgaatgatgggat

SEQ ID NO: 91073 - DNA, 25 bp, Homo sapien
gatgagggtctgtgggcatggaaag

SEQ ID NO: 91074 - DNA, 25 bp, Homo sapien
agaggtggccagaggtaatacggtg

SEQ ID NO: 91075 - DNA, 25 bp, Homo sapien
ccagcttgtggaggatctcctccag

SEQ ID NO: 91076 - DNA, 25 bp, Homo sapien
ggatcagctgcaccagcttgtggag

SEQ ID NO: 91077 - DNA, 25 bp, Homo sapien
acagtcctcttcctggatcagctgc

SEQ ID NO: 91078 - DNA, 25 bp, Homo sapien
agtcctcttcctggatcagctgcac

SEQ ID NO: 91079 - DNA, 25 bp, Homo sapien
tctgccaccgacagtgactgcaggg

SEQ ID NO: 91080 - DNA, 25 bp, Homo sapien
tgcagggccttagacagcatcttgg

SEQ ID NO: 91081 - DNA, 25 bp, Homo sapien
gatgctggtgcgaagcttcagccgg

SEQ ID NO: 91082 - DNA, 25 bp, Homo sapien
cattgccgctcagatccaccttggc

SEQ ID NO: 91083 - DNA, 25 bp, Homo sapien
agcccagggcagatgtattgttccg

SEQ ID NO: 91084 - DNA, 25 bp, Homo sapien
gggcagatgtattgttccgatccca

SEQ ID NO: 91085 - DNA, 25 bp, Homo sapien
tccagggcccttgcgatgtccagga

SEQ ID NO: 91086 - DNA, 25 bp, Homo sapien
tattgttccgatcccataggatagt

SEQ ID NO: 91087 - DNA, 25 bp, Homo sapien
cgataggcttgggagatgtcgctca

SEQ ID NO: 91088 - DNA, 25 bp, Homo sapien
cgctcaggcgcgctgcgataggctt

SEQ ID NO: 91089 - DNA, 25 bp, Homo sapien
ataggcttgggagatgtcgctcacg

SEQ ID NO: 91090 - DNA, 25 bp, Homo sapien
ttctgccagacgtcctcggtgcgct

SEQ ID NO: 91091 - DNA, 25 bp, Homo sapien
tgccccttgctgtgccaccctgctt

SEQ ID NO: 91092 - DNA, 25 bp, Homo sapien
accctgcttaggacagcaccctgca

SEQ ID NO: 91093 - DNA, 25 bp, Homo sapien
gctgtgccaccctgcttaggacagc

SEQ ID NO: 91094 - DNA, 25 bp, Homo sapien
cttgctgtgccaccctgcttaggac

SEQ ID NO: 91095 - DNA, 25 bp, Homo sapien
gtctgggagtggttgttcctcacta

SEQ ID NO: 91096 - DNA, 25 bp, Homo sapien
cgtctgggagtggttgttcctcact

SEQ ID NO: 91097 - DNA, 25 bp, Homo sapien
acgtctgggagtggttgttcctcac

SEQ ID NO: 91098 - DNA, 25 bp, Homo sapien
tgcactcgtccacacagccgctgca

SEQ ID NO: 91099 - DNA, 25 bp, Homo sapien
tagagtagctcatcctgcacaggct

SEQ ID NO: 91100 - DNA, 25 bp, Homo sapien
atgaggtcccgagcgtagagtagct

SEQ ID NO: 91101 - DNA, 25 bp, Homo sapien
catctttgatgaggtcccgagcgta

SEQ ID NO: 91102 - DNA, 25 bp, Homo sapien
atggcttagcatggtcggccttctt

SEQ ID NO: 91103 - DNA, 25 bp, Homo sapien
gccttcttgggttctccagacttca

SEQ ID NO: 91104 - DNA, 25 bp, Homo sapien
caggacttgctaggtctctggggtc

SEQ ID NO: 91105 - DNA, 25 bp, Homo sapien
catggtcggccttcttgggttctcc

SEQ ID NO: 91106 - DNA, 25 bp, Homo sapien
ccatcattggccagcacgtggccca

SEQ ID NO: 91107 - DNA, 25 bp, Homo sapien
cccatcattggccagcacgtggccc

SEQ ID NO: 91108 - DNA, 25 bp, Homo sapien
ctcacttgctactgattccagcctc

SEQ ID NO: 91109 - DNA, 25 bp, Homo sapien
tcacttgctactgattccagcctct

SEQ ID NO: 91110 - DNA, 25 bp, Homo sapien
gcagctccttgtccacagctttgga

SEQ ID NO: 91111 - DNA, 25 bp, Homo sapien
ctgcagctccttgtccacagctttg

SEQ ID NO: 91112 - DNA, 25 bp, Homo sapien
gcctgcagctccttgtccacagctt

SEQ ID NO: 91113 - DNA, 25 bp, Homo sapien
ttgcctgcagctccttgtccacagc

SEQ ID NO: 91114 - DNA, 25 bp, Homo sapien
tgggtggtctcaactctgcatgtcc

SEQ ID NO: 91115 - DNA, 25 bp, Homo sapien
caatgccttggtacagtgggagcgt

SEQ ID NO: 91116 - DNA, 25 bp, Homo sapien
ggcttagggcctcagtcaacactag

SEQ ID NO: 91117 - DNA, 25 bp, Homo sapien
gggaccaacatcaaagctagcagaa

SEQ ID NO: 91118 - DNA, 25 bp, Homo sapien
cagggcataactcctgtgtcaggct

SEQ ID NO: 91119 - DNA, 25 bp, Homo sapien
tccgccacattgctcagcatcttgt

SEQ ID NO: 91120 - DNA, 25 bp, Homo sapien
tcaggctgaccatggactccaggat

SEQ ID NO: 91121 - DNA, 25 bp, Homo sapien
agttccggggcacagtgacacgctc

SEQ ID NO: 91122 - DNA, 25 bp, Homo sapien
taaaccctgctagttgctactgtga

SEQ ID NO: 91123 - DNA, 25 bp, Homo sapien
ggtctgtctgcccatggagcgcatg

SEQ ID NO: 91124 - DNA, 25 bp, Homo sapien
gaggccctgctatcccattcctggt

SEQ ID NO: 91125 - DNA, 25 bp, Homo sapien
gccccagtggaacagagctaggtaa

SEQ ID NO: 91126 - DNA, 25 bp, Homo sapien
ccactatggagctggttaggtaggt

SEQ ID NO: 91127 - DNA, 25 bp, Homo sapien
ggtgacgactgagagcttcacttca

SEQ ID NO: 91128 - DNA, 25 bp, Homo sapien
aggatctcatccactatggagctgg

SEQ ID NO: 91129 - DNA, 25 bp, Homo sapien
taggtaggtgacgactgagagcttc

SEQ ID NO: 91130 - DNA, 25 bp, Homo sapien
atcatctgtggtctcctcatggtca

SEQ ID NO: 91131 - DNA, 25 bp, Homo sapien
tgggcaccctggtggatctgacagc

SEQ ID NO: 91132 - DNA, 25 bp, Homo sapien
atctgtggtctcctcatggtcatgg

SEQ ID NO: 91133 - DNA, 25 bp, Homo sapien
tctgacagcgtccttagctgggtca

SEQ ID NO: 91134 - DNA, 25 bp, Homo sapien
gattgagattggaggcagaaggcca

SEQ ID NO: 91135 - DNA, 25 bp, Homo sapien
agggaagaggttgggctggattgag

SEQ ID NO: 91136 - DNA, 25 bp, Homo sapien
gcagggcccaggttattaaggagga

SEQ ID NO: 91137 - DNA, 25 bp, Homo sapien
acagtgttgtgcaggtttaagggca

SEQ ID NO: 91138 - DNA, 25 bp, Homo sapien
caccggccgaatcttgcggcagcgt

SEQ ID NO: 91139 - DNA, 25 bp, Homo sapien
cggccgaatcttgcggcagcgtttc

SEQ ID NO: 91140 - DNA, 25 bp, Homo sapien
cagacaccggccgaatcttgcggca

SEQ ID NO: 91141 - DNA, 25 bp, Homo sapien
gaatcttgcggcagcgtttctgctt

SEQ ID NO: 91142 - DNA, 25 bp, Homo sapien
cagcattagagggactagcagagga

SEQ ID NO: 91143 - DNA, 25 bp, Homo sapien
ggagtctggagtccatgagaacgga

SEQ ID NO: 91144 - DNA, 25 bp, Homo sapien
aatcaagggaaagaggggctacaga

SEQ ID NO: 91145 - DNA, 25 bp, Homo sapien
ggcgggagtctggagtccatgagaa

SEQ ID NO: 91146 - DNA, 25 bp, Homo sapien
gcggggcctcccttgtgtttgatgc

SEQ ID NO: 91147 - DNA, 25 bp, Homo sapien
cagattccccagttggctttccatg

SEQ ID NO: 91148 - DNA, 25 bp, Homo sapien
gcctcccttgtgtttgatgccttag

SEQ ID NO: 91149 - DNA, 25 bp, Homo sapien
tgagaaccagccaggggggatcccc

SEQ ID NO: 91150 - DNA, 25 bp, Homo sapien
tccagcccttcatccaggcgggtgg

SEQ ID NO: 91151 - DNA, 25 bp, Homo sapien
ccaggcgggtggccatcccattctc

SEQ ID NO: 91152 - DNA, 25 bp, Homo sapien
aggacccttcggctgaagaagtcct

SEQ ID NO: 91153 - DNA, 25 bp, Homo sapien
cctccaggacccttcggctgaagaa

SEQ ID NO: 91154 - DNA, 25 bp, Homo sapien
tggtggttcactctggccccattct

SEQ ID NO: 91155 - DNA, 25 bp, Homo sapien
ggtggttcactctggccccattctt

SEQ ID NO: 91156 - DNA, 25 bp, Homo sapien
tccaaccccactgtggtggttcact

SEQ ID NO: 91157 - DNA, 25 bp, Homo sapien
gctctccaaccccactgtggtggtt

SEQ ID NO: 91158 - DNA, 25 bp, Homo sapien
gagtcctggccgcacggtcctcaga

SEQ ID NO: 91159 - DNA, 25 bp, Homo sapien
tggccgcacggtcctcagagtccgg

SEQ ID NO: 91160 - DNA, 25 bp, Homo sapien
tgaagctccggggccggcgaaagtg

SEQ ID NO: 91161 - DNA, 25 bp, Homo sapien
ggtgcctccgagagtcctggccgca

SEQ ID NO: 91162 - DNA, 25 bp, Homo sapien
gagaggagttattgccgaggcttgg

SEQ ID NO: 91163 - DNA, 25 bp, Homo sapien
cgaggcttggggggtctgggctagg

SEQ ID NO: 91164 - DNA, 25 bp, Homo sapien
gggagaggagttattgccgaggctt

SEQ ID NO: 91165 - DNA, 25 bp, Homo sapien
cagggagaggagttattgccgaggc

SEQ ID NO: 91166 - DNA, 25 bp, Homo sapien
gcattcgcatatagcactcccagca

SEQ ID NO: 91167 - DNA, 25 bp, Homo sapien
tgggtcttagtccactctcaaggag

SEQ ID NO: 91168 - DNA, 25 bp, Homo sapien
gaaatgaccaatgttcccaagaacc

SEQ ID NO: 91169 - DNA, 25 bp, Homo sapien
tgaagagtccttccaacgcctgcat

SEQ ID NO: 91170 - DNA, 25 bp, Homo sapien
agggcaacaccgtgaacccttggct

SEQ ID NO: 91171 - DNA, 25 bp, Homo sapien
tcgaagctccaacccttggctcttt

SEQ ID NO: 91172 - DNA, 25 bp, Homo sapien
caacaccgtgaacccttggctgctg

SEQ ID NO: 91173 - DNA, 25 bp, Homo sapien
tctcgtttcccatcgaagctccaac

SEQ ID NO: 91174 - DNA, 25 bp, Homo sapien
agagcgccgtttctgccaggcctgg

SEQ ID NO: 91175 - DNA, 25 bp, Homo sapien
ctgcgtcgtctgaagagcgccgttt

SEQ ID NO: 91176 - DNA, 25 bp, Homo sapien
cgtcgtctgaagagcgccgtttctg

SEQ ID NO: 91177 - DNA, 25 bp, Homo sapien
ctgaagagcgccgtttctgccaggc

SEQ ID NO: 91178 - DNA, 25 bp, Homo sapien
aggtaaatttgacccctgagagagg

SEQ ID NO: 91179 - DNA, 25 bp, Homo sapien
atggcgctgaagcttggtttggtgc

SEQ ID NO: 91180 - DNA, 25 bp, Homo sapien
gcgctgaagcttggtttggtgcttt

SEQ ID NO: 91181 - DNA, 25 bp, Homo sapien
ctgcgcatggcgctgaagcttggtt

SEQ ID NO: 91182 - DNA, 25 bp, Homo sapien
tgcgcatggcgctgaagcttggttt

SEQ ID NO: 91183 - DNA, 25 bp, Homo sapien
ttggcattcctagctggaagtgtcc

SEQ ID NO: 91184 - DNA, 25 bp, Homo sapien
cttggcattcctagctggaagtgtc

SEQ ID NO: 91185 - DNA, 25 bp, Homo sapien
tcctctctgggaagagggtcccctc

SEQ ID NO: 91186 - DNA, 25 bp, Homo sapien
tggcattcctagctggaagtgtcct

SEQ ID NO: 91187 - DNA, 25 bp, Homo sapien
tgttgactcctggagctgcatctcc

SEQ ID NO: 91188 - DNA, 25 bp, Homo sapien
agctcagcctcagccggggtttgtt

SEQ ID NO: 91189 - DNA, 25 bp, Homo sapien
cttggacttcgggctcctcttggtc

SEQ ID NO: 91190 - DNA, 25 bp, Homo sapien
acttcgggctcctcttggtcttgct

SEQ ID NO: 91191 - DNA, 25 bp, Homo sapien
gaggccgtcttctatcaggttccag

SEQ ID NO: 91192 - DNA, 25 bp, Homo sapien
tgtcacaggactgtgcccgccgtgt

SEQ ID NO: 91193 - DNA, 25 bp, Homo sapien
ggtcaggaggccgtcttctatcagg

SEQ ID NO: 91194 - DNA, 25 bp, Homo sapien
ttctatcaggttccagcttgtcaca

SEQ ID NO: 91195 - DNA, 25 bp, Homo sapien
acaaatccagggagccctgtttcct

SEQ ID NO: 91196 - DNA, 25 bp, Homo sapien
acagccagccacctggtgttggggc

SEQ ID NO: 91197 - DNA, 25 bp, Homo sapien
ggacaaatccagggagccctgtttc

SEQ ID NO: 91198 - DNA, 25 bp, Homo sapien
ctggggacaaatccagggagccctg

SEQ ID NO: 91199 - DNA, 25 bp, Homo sapien
tcagtctgttcctggctcactggtt

SEQ ID NO: 91200 - DNA, 25 bp, Homo sapien
cagtctgttcctggctcactggttc

SEQ ID NO: 91201 - DNA, 25 bp, Homo sapien
agaggtatcgaggcaggcactgaca

SEQ ID NO: 91202 - DNA, 25 bp, Homo sapien
gggtctgagtccttgcgaggcacat

SEQ ID NO: 91203 - DNA, 25 bp, Homo sapien
gctccctctgttctagtccctgcct

SEQ ID NO: 91204 - DNA, 25 bp, Homo sapien
gtcctgccgtcttgcccctgtagga

SEQ ID NO: 91205 - DNA, 25 bp, Homo sapien
caaactaacccggaatacagcagga

SEQ ID NO: 91206 - DNA, 25 bp, Homo sapien
atgatgtccagttccctagccacca

SEQ ID NO: 91207 - DNA, 25 bp, Homo sapien
tacagcaggatgtgatcttcccgtg

SEQ ID NO: 91208 - DNA, 25 bp, Homo sapien
cacataccttgctgaacgtcatagc

SEQ ID NO: 91209 - DNA, 25 bp, Homo sapien
agtcacatatacaggaacactgggc

SEQ ID NO: 91210 - DNA, 25 bp, Homo sapien
tgtgacaccacgacagttacagccc

SEQ ID NO: 91211 - DNA, 25 bp, Homo sapien
cagagatgcgcacattgcagtggca

SEQ ID NO: 91212 - DNA, 25 bp, Homo sapien
ctagctaaggatatctgcagtcaca

SEQ ID NO: 91213 - DNA, 25 bp, Homo sapien
ctccggctctgctgctatttatggg

SEQ ID NO: 91214 - DNA, 25 bp, Homo sapien
gggctcctctctccggctctctggc

SEQ ID NO: 91215 - DNA, 25 bp, Homo sapien
agctccggctctgctgctatttatg

SEQ ID NO: 91216 - DNA, 25 bp, Homo sapien
tgggctctcggtcgggggctcctct

SEQ ID NO: 91217 - DNA, 25 bp, Homo sapien
catgtcgtgtgtccgtttccaggag

SEQ ID NO: 91218 - DNA, 25 bp, Homo sapien
tctgtacagatctcagggtgaggct

SEQ ID NO: 91219 - DNA, 25 bp, Homo sapien
tgggtatctacctccccacagtgtg

SEQ ID NO: 91220 - DNA, 25 bp, Homo sapien
tcatgcttccccgagtgagtgtgca

SEQ ID NO: 91221 - DNA, 25 bp, Homo sapien
agcactggcaccgtctcttagcgac

SEQ ID NO: 91222 - DNA, 25 bp, Homo sapien
gtctcttagcgacaggatttttggg

SEQ ID NO: 91223 - DNA, 25 bp, Homo sapien
tccatgctgcccgtgggatgcacgc

SEQ ID NO: 91224 - DNA, 25 bp, Homo sapien
gtgggatgcacgcatgccaccttcc

SEQ ID NO: 91225 - DNA, 25 bp, Homo sapien
tgttcctggcagtcttggctcctag

SEQ ID NO: 91226 - DNA, 25 bp, Homo sapien
ggctcctaggccatcgattgatcta

SEQ ID NO: 91227 - DNA, 25 bp, Homo sapien
ccccttctggctagctgatggaaaa

SEQ ID NO: 91228 - DNA, 25 bp, Homo sapien
cacgagggagctaaactagggcaag

SEQ ID NO: 91229 - DNA, 25 bp, Homo sapien
ggggacagagcaggtggcctggact

SEQ ID NO: 91230 - DNA, 25 bp, Homo sapien
ctgtggggacagagcaggtggcctg

SEQ ID NO: 91231 - DNA, 25 bp, Homo sapien
tgtggggacagagcaggtggcctgg

SEQ ID NO: 91232 - DNA, 25 bp, Homo sapien
tggggacagagcaggtggcctggac

SEQ ID NO: 91233 - DNA, 25 bp, Homo sapien
tggtgagtgtgtcccggtccaggag

SEQ ID NO: 91234 - DNA, 25 bp, Homo sapien
ggtttggtgagtgtgtcccggtcca

SEQ ID NO: 91235 - DNA, 25 bp, Homo sapien
cagagtagagcttgagcagcacgca

SEQ ID NO: 91236 - DNA, 25 bp, Homo sapien
ccccagcgtcatggttgggggctca

SEQ ID NO: 91237 - DNA, 25 bp, Homo sapien
aaggtgcactccgtagagccgagga

SEQ ID NO: 91238 - DNA, 25 bp, Homo sapien
aaaaatactcaagggccagcacccg

SEQ ID NO: 91239 - DNA, 25 bp, Homo sapien
cgtcctcggcatcgaacacgtggaa

SEQ ID NO: 91240 - DNA, 25 bp, Homo sapien
aacaggagcgaagcacctctgtgcg

SEQ ID NO: 91241 - DNA, 25 bp, Homo sapien
tggtggacttgcccgcagtcttccc

SEQ ID NO: 91242 - DNA, 25 bp, Homo sapien
gatggtggacttgcccgcagtcttc

SEQ ID NO: 91243 - DNA, 25 bp, Homo sapien
cagcaataatggcttagtgaccttg

SEQ ID NO: 91244 - DNA, 25 bp, Homo sapien
cttagtgaccttggtttgtgacaca

SEQ ID NO: 91245 - DNA, 25 bp, Homo sapien
ggcatgatgtcaccataggtgtcca

SEQ ID NO: 91246 - DNA, 25 bp, Homo sapien
ggcattgaatacctggaccaagggt

SEQ ID NO: 91247 - DNA, 25 bp, Homo sapien
tccatgcaggggcattgaatacctg

SEQ ID NO: 91248 - DNA, 25 bp, Homo sapien
gcaggactcccctaaccttaccaca

SEQ ID NO: 91249 - DNA, 25 bp, Homo sapien
tcgtttgtgcctgatacctcctcgg

SEQ ID NO: 91250 - DNA, 25 bp, Homo sapien
cttgttgtccagcttgtaggctctg

SEQ ID NO: 91251 - DNA, 25 bp, Homo sapien
gctctgaaggtgagttgcacatagt

SEQ ID NO: 91252 - DNA, 25 bp, Homo sapien
cacatagtcgtttgtgcctgatacc

SEQ ID NO: 91253 - DNA, 25 bp, Homo sapien
tcctgggatctgtcttgagtgggag

SEQ ID NO: 91254 - DNA, 25 bp, Homo sapien
ctgggatctgtcttgagtgggaggc

SEQ ID NO: 91255 - DNA, 25 bp, Homo sapien
gctcctgggatctgtcttgagtggg

SEQ ID NO: 91256 - DNA, 25 bp, Homo sapien
tgggatctgtcttgagtgggaggcc

SEQ ID NO: 91257 - DNA, 25 bp, Homo sapien
tgatcactttggtcctcgttggtct

SEQ ID NO: 91258 - DNA, 25 bp, Homo sapien
aagggtcagacttgctgaacagatc

SEQ ID NO: 91259 - DNA, 25 bp, Homo sapien
cgttggtcttatagatttccatgaa

SEQ ID NO: 91260 - DNA, 25 bp, Homo sapien
gaaagggtcagacttgctgaacaga

SEQ ID NO: 91261 - DNA, 25 bp, Homo sapien
catccccatagccccaggcaccaac

SEQ ID NO: 91262 - DNA, 25 bp, Homo sapien
tggctggtcagctcctgtctgtgtc

SEQ ID NO: 91263 - DNA, 25 bp, Homo sapien
ctggtcagctcctgtctgtgtcttc

SEQ ID NO: 91264 - DNA, 25 bp, Homo sapien
ttggagaggcaccaggtggctggtc

SEQ ID NO: 91265 - DNA, 25 bp, Homo sapien
cttggagaggcaccaggtggctggt

SEQ ID NO: 91266 - DNA, 25 bp, Homo sapien
aatgcagggacaggcggaacggctc

SEQ ID NO: 91267 - DNA, 25 bp, Homo sapien
cttgagaggtcggtgaacatcacag

SEQ ID NO: 91268 - DNA, 25 bp, Homo sapien
agaggtcggtgaacatcacagctgc

SEQ ID NO: 91269 - DNA, 25 bp, Homo sapien
cacagctgcatagggaatgcaggga

SEQ ID NO: 91270 - DNA, 25 bp, Homo sapien
gccgatgaagtcatgcttcccactg

SEQ ID NO: 91271 - DNA, 25 bp, Homo sapien
tggaaagtgctggtgaactcgccga

SEQ ID NO: 91272 - DNA, 25 bp, Homo sapien
agggtttgccgtcccttcctgcatc

SEQ ID NO: 91273 - DNA, 25 bp, Homo sapien
tcccactggagtcatagtcatacac

SEQ ID NO: 91274 - DNA, 25 bp, Homo sapien
ttctgggggtggggtatttgtggca

SEQ ID NO: 91275 - DNA, 25 bp, Homo sapien
ctcccagggatctgggtgggattct

SEQ ID NO: 91276 - DNA, 25 bp, Homo sapien
cctcaggattctcccagggatctgg

SEQ ID NO: 91277 - DNA, 25 bp, Homo sapien
gattctcccagggatctgggtggga

SEQ ID NO: 91278 - DNA, 25 bp, Homo sapien
tctccacttcctatcacctatggtg

SEQ ID NO: 91279 - DNA, 25 bp, Homo sapien
cacaagctcagggtcacaagtccat

SEQ ID NO: 91280 - DNA, 25 bp, Homo sapien
atcacctatggtggtctcttcagca

SEQ ID NO: 91281 - DNA, 25 bp, Homo sapien
ccatggttccgtccttcagctgagc

SEQ ID NO: 91282 - DNA, 25 bp, Homo sapien
ctgggccagcactaccgtccctgag

SEQ ID NO: 91283 - DNA, 25 bp, Homo sapien
tcttgtcccgatacttggggttgat

SEQ ID NO: 91284 - DNA, 25 bp, Homo sapien
cgtgcactgggccagcactaccgtc

SEQ ID NO: 91285 - DNA, 25 bp, Homo sapien
ctaccgtccctgagctcttgtaatt

SEQ ID NO: 91286 - DNA, 25 bp, Homo sapien
gggtagggcttctgtggggaacatg

SEQ ID NO: 91287 - DNA, 25 bp, Homo sapien
gatggggtggtcctttgaggaggga

SEQ ID NO: 91288 - DNA, 25 bp, Homo sapien
gccagagttttttgggttgcagttg

SEQ ID NO: 91289 - DNA, 25 bp, Homo sapien
gaacctgagagtgtggtaggggcag

SEQ ID NO: 91290 - DNA, 25 bp, Homo sapien
cacccatgatgtaatccaggaaggt

SEQ ID NO: 91291 - DNA, 25 bp, Homo sapien
cccatgatgtaatccaggaaggtgt

SEQ ID NO: 91292 - DNA, 25 bp, Homo sapien
ccacccatgatgtaatccaggaagg

SEQ ID NO: 91293 - DNA, 25 bp, Homo sapien
gccacccatgatgtaatccaggaag

SEQ ID NO: 91294 - DNA, 25 bp, Homo sapien
gctgcaaccatgagagccaccagat

SEQ ID NO: 91295 - DNA, 25 bp, Homo sapien
atctgtagggaggactaagatgagt

SEQ ID NO: 91296 - DNA, 25 bp, Homo sapien
gaggctacaggtagccacataatga

SEQ ID NO: 91297 - DNA, 25 bp, Homo sapien
caatgcgaaggctcatgagcagccc

SEQ ID NO: 91298 - DNA, 25 bp, Homo sapien
ctcctcgggtccccattggaggcgg

SEQ ID NO: 91299 - DNA, 25 bp, Homo sapien
tgtggaatccgttgggcaaggcctc

SEQ ID NO: 91300 - DNA, 25 bp, Homo sapien
gtggaatccgttgggcaaggcctcc

SEQ ID NO: 91301 - DNA, 25 bp, Homo sapien
gctgtggaatccgttgggcaaggcc

SEQ ID NO: 91302 - DNA, 25 bp, Homo sapien
aaagctgtggaatccgttgggcaag

SEQ ID NO: 91303 - DNA, 25 bp, Homo sapien
gccaaaagctgggaaccgcttatca

SEQ ID NO: 91304 - DNA, 25 bp, Homo sapien
tccttctttccctcgcatctagcct

SEQ ID NO: 91305 - DNA, 25 bp, Homo sapien
cttctttccctcgcatctagcctac

SEQ ID NO: 91306 - DNA, 25 bp, Homo sapien
tctccttctttccctcgcatctagc

SEQ ID NO: 91307 - DNA, 25 bp, Homo sapien
ccttctttccctcgcatctagccta

SEQ ID NO: 91308 - DNA, 25 bp, Homo sapien
gattttccgggtcaaagttgatagc

SEQ ID NO: 91309 - DNA, 25 bp, Homo sapien
tccgggtcaaagttgatagcaaagt

SEQ ID NO: 91310 - DNA, 25 bp, Homo sapien
aaagttgatagcaaagtcatgggac

SEQ ID NO: 91311 - DNA, 25 bp, Homo sapien
cattcaggattttccgggtcaaagt

SEQ ID NO: 91312 - DNA, 25 bp, Homo sapien
gaggcggggcaggtgaaaatctccc

SEQ ID NO: 91313 - DNA, 25 bp, Homo sapien
ctgtgtggagtgtgtctgcggggag

SEQ ID NO: 91314 - DNA, 25 bp, Homo sapien
cctcccctcgagttccttcattaag

SEQ ID NO: 91315 - DNA, 25 bp, Homo sapien
tgccctcccctcgagttccttcatt

SEQ ID NO: 91316 - DNA, 25 bp, Homo sapien
tcccctcgagttccttcattaagca

SEQ ID NO: 91317 - DNA, 25 bp, Homo sapien
gccctcccctcgagttccttcatta

SEQ ID NO: 91318 - DNA, 25 bp, Homo sapien
gggcaggcaacgacggtaggaggcg

SEQ ID NO: 91319 - DNA, 25 bp, Homo sapien
caacgacggtaggaggcgatgaccc

SEQ ID NO: 91320 - DNA, 25 bp, Homo sapien
caggcaacgacggtaggaggcgatg

SEQ ID NO: 91321 - DNA, 25 bp, Homo sapien
tctggggcaggcaacgacggtagga

SEQ ID NO: 91322 - DNA, 25 bp, Homo sapien
gtggcttggccggtgctctgctccc

SEQ ID NO: 91323 - DNA, 25 bp, Homo sapien
tggcttggccggtgctctgctcccg

SEQ ID NO: 91324 - DNA, 25 bp, Homo sapien
gctttgtgtgcaagggcgttgacac

SEQ ID NO: 91325 - DNA, 25 bp, Homo sapien
gcagagagggtggaagggttggctt

SEQ ID NO: 91326 - DNA, 25 bp, Homo sapien
gacaccgtttccaccaaggtgcaga

SEQ ID NO: 91327 - DNA, 25 bp, Homo sapien
agctcctgtttgcccgccatgtctt

SEQ ID NO: 91328 - DNA, 25 bp, Homo sapien
cgatagcagtgcgagtctcagccat

SEQ ID NO: 91329 - DNA, 25 bp, Homo sapien
aactggacaatgtctcgggctgcag

SEQ ID NO: 91330 - DNA, 25 bp, Homo sapien
atgtcgctcaccacaccgtcagtga

SEQ ID NO: 91331 - DNA, 25 bp, Homo sapien
cttgaagtctcggaagggcacgaac

SEQ ID NO: 91332 - DNA, 25 bp, Homo sapien
agcaggacatcaaatggtggaagac

SEQ ID NO: 91333 - DNA, 25 bp, Homo sapien
tccttagcaggacatcaaatggtgg

SEQ ID NO: 91334 - DNA, 25 bp, Homo sapien
cccgcgtccttagcaggacatcaaa

SEQ ID NO: 91335 - DNA, 25 bp, Homo sapien
ctgggctcccgcgtccttagcagga

SEQ ID NO: 91336 - DNA, 25 bp, Homo sapien
cacgggctagggctgggagtcgtag

SEQ ID NO: 91337 - DNA, 25 bp, Homo sapien
caggacacacttggcgagtgcagag

SEQ ID NO: 91338 - DNA, 25 bp, Homo sapien
gatgccctggctggcgtagtactcc

SEQ ID NO: 91339 - DNA, 25 bp, Homo sapien
gctgggagtcgtagccagtgtgcag

SEQ ID NO: 91340 - DNA, 25 bp, Homo sapien
gggagtgtcggtccggagggaggca

SEQ ID NO: 91341 - DNA, 25 bp, Homo sapien
agaggctgagggagtgtcggtccgg

SEQ ID NO: 91342 - DNA, 25 bp, Homo sapien
ctgagggagtgtcggtccggaggga

SEQ ID NO: 91343 - DNA, 25 bp, Homo sapien
aggctgagggagtgtcggtccggag

SEQ ID NO: 91344 - DNA, 25 bp, Homo sapien
acccagcctagttgggctctaccaa

SEQ ID NO: 91345 - DNA, 25 bp, Homo sapien
gtgggagagtcataagcactctctt

SEQ ID NO: 91346 - DNA, 25 bp, Homo sapien
ttgggctctaccaagccccactttg

SEQ ID NO: 91347 - DNA, 25 bp, Homo sapien
gcactctcttctacactacacccag

SEQ ID NO: 91348 - DNA, 25 bp, Homo sapien
gggccacagcattgaagggtatggg

SEQ ID NO: 91349 - DNA, 25 bp, Homo sapien
ttggagagataggagcaggacccac

SEQ ID NO: 91350 - DNA, 25 bp, Homo sapien
ggctagaaagtcaggatcacccaag

SEQ ID NO: 91351 - DNA, 25 bp, Homo sapien
cccaaggaagtcactgaggggccac

SEQ ID NO: 91352 - DNA, 25 bp, Homo sapien
ctcccattggaggactgggtccact

SEQ ID NO: 91353 - DNA, 25 bp, Homo sapien
ttggaggactgggtccactcttcgg

SEQ ID NO: 91354 - DNA, 25 bp, Homo sapien
cattggaggactgggtccactcttc

SEQ ID NO: 91355 - DNA, 25 bp, Homo sapien
gaggactgggtccactcttcggccc

SEQ ID NO: 91356 - DNA, 25 bp, Homo sapien
ggcactagctttcctccgccccgct

SEQ ID NO: 91357 - DNA, 25 bp, Homo sapien
gcactagctttcctccgccccgctg

SEQ ID NO: 91358 - DNA, 25 bp, Homo sapien
ctggtagggctggcactagctttcc

SEQ ID NO: 91359 - DNA, 25 bp, Homo sapien
gggtggccaggaaccgagcggagcc

SEQ ID NO: 91360 - DNA, 25 bp, Homo sapien
cggagccggggaggtatggaaggcg

SEQ ID NO: 91361 - DNA, 25 bp, Homo sapien
agggagcgcggcgaagcgagccaca

SEQ ID NO: 91362 - DNA, 25 bp, Homo sapien
gctggcgggaggcgcttaaaaagga

SEQ ID NO: 91363 - DNA, 25 bp, Homo sapien
aggccagggcggtacaatgcggcca

SEQ ID NO: 91364 - DNA, 25 bp, Homo sapien
ggccagggcggtacaatgcggccat

SEQ ID NO: 91365 - DNA, 25 bp, Homo sapien
cgcaggccagggcggtacaatgcgg

SEQ ID NO: 91366 - DNA, 25 bp, Homo sapien
caggccagggcggtacaatgcggcc

SEQ ID NO: 91367 - DNA, 25 bp, Homo sapien
agatcgcgcggtcagaggcgagcga

SEQ ID NO: 91368 - DNA, 25 bp, Homo sapien
tgagagtggcagatagagatcgcgc

SEQ ID NO: 91369 - DNA, 25 bp, Homo sapien
gaggtgcaggcggaaacgaggagca

SEQ ID NO: 91370 - DNA, 25 bp, Homo sapien
tccgcctaggatgggaaacctggcg

SEQ ID NO: 91371 - DNA, 25 bp, Homo sapien
gaaggaaaggaggatatgcggagac

SEQ ID NO: 91372 - DNA, 25 bp, Homo sapien
tgggaaggaaaggaggatatgcgga

SEQ ID NO: 91373 - DNA, 25 bp, Homo sapien
ctgggaaggaaaggaggatatgcgg

SEQ ID NO: 91374 - DNA, 25 bp, Homo sapien
ggaaggaaaggaggatatgcggaga

SEQ ID NO: 91375 - DNA, 25 bp, Homo sapien
tctcgaagtaccctggggcgctggc

SEQ ID NO: 91376 - DNA, 25 bp, Homo sapien
ctggctgagagcccgttagaggtcc

SEQ ID NO: 91377 - DNA, 25 bp, Homo sapien
agagcccgttagaggtccgagggag

SEQ ID NO: 91378 - DNA, 25 bp, Homo sapien
tgctgcctctcgaagtaccctgggg

SEQ ID NO: 91379 - DNA, 25 bp, Homo sapien
gctagttgctgtcatcgagagtgga

SEQ ID NO: 91380 - DNA, 25 bp, Homo sapien
tgctcagcgagggacagatatggcc

SEQ ID NO: 91381 - DNA, 25 bp, Homo sapien
catgtaggcatgctgatgttactgc

SEQ ID NO: 91382 - DNA, 25 bp, Homo sapien
tgttactgcctgtgtagcccatgcc

SEQ ID NO: 91383 - DNA, 25 bp, Homo sapien
atgatggccagcccaaggggctcag

SEQ ID NO: 91384 - DNA, 25 bp, Homo sapien
tgatggccagcccaaggggctcagc

SEQ ID NO: 91385 - DNA, 25 bp, Homo sapien
tacaaaatctcgaatgccagtggga

SEQ ID NO: 91386 - DNA, 25 bp, Homo sapien
gggtcagtgtggcagtattctcagc

SEQ ID NO: 91387 - DNA, 25 bp, Homo sapien
gcgggcactgtgctctacaaaatct

SEQ ID NO: 91388 - DNA, 25 bp, Homo sapien
agatctccactaagcactcgcaggg

SEQ ID NO: 91389 - DNA, 25 bp, Homo sapien
tctctactcgtgccacatccttggg

SEQ ID NO: 91390 - DNA, 25 bp, Homo sapien
acatccttggggtctgtgcgggcca

SEQ ID NO: 91391 - DNA, 25 bp, Homo sapien
gctctctactcgtgccacatccttg

SEQ ID NO: 91392 - DNA, 25 bp, Homo sapien
cgtcttgctctctactcgtgccaca

SEQ ID NO: 91393 - DNA, 25 bp, Homo sapien
tctcatccacagctcgctggaaatc

SEQ ID NO: 91394 - DNA, 25 bp, Homo sapien
cccaccaggcgggagttgtaccgtg

SEQ ID NO: 91395 - DNA, 25 bp, Homo sapien
ggagttgtaccgtgtcccgctgaga

SEQ ID NO: 91396 - DNA, 25 bp, Homo sapien
ccgtgtcccgctgagaaggagttac

SEQ ID NO: 91397 - DNA, 25 bp, Homo sapien
tcgggtcataatacgcatgcttgcc

SEQ ID NO: 91398 - DNA, 25 bp, Homo sapien
tgctgaatggaagcacatacatggt

SEQ ID NO: 91399 - DNA, 25 bp, Homo sapien
catgcttgccaccacataggctgag

SEQ ID NO: 91400 - DNA, 25 bp, Homo sapien
caggtgtccccagtcgggtcataat

SEQ ID NO: 91401 - DNA, 25 bp, Homo sapien
gtcaggggctggcccacggagtgca

SEQ ID NO: 91402 - DNA, 25 bp, Homo sapien
cccacggagtgcagacacttgacaa

SEQ ID NO: 91403 - DNA, 25 bp, Homo sapien
gacacttgacaaagtcaccatctcc

SEQ ID NO: 91404 - DNA, 25 bp, Homo sapien
tcctgtcaggggctggcccacggag

SEQ ID NO: 91405 - DNA, 25 bp, Homo sapien
ggtgtcggggccagagggatcaggg

SEQ ID NO: 91406 - DNA, 25 bp, Homo sapien
tcggggccagagggatcagggattg

SEQ ID NO: 91407 - DNA, 25 bp, Homo sapien
gggatcagggattggcaggagagac

SEQ ID NO: 91408 - DNA, 25 bp, Homo sapien
ggccagagggatcagggattggcag

SEQ ID NO: 91409 - DNA, 25 bp, Homo sapien
gggctgctggcagcagcatcaggaa

SEQ ID NO: 91410 - DNA, 25 bp, Homo sapien
ggggctgctggcagcagcatcagga

SEQ ID NO: 91411 - DNA, 25 bp, Homo sapien
ttttctctgggttgcacggccactg

SEQ ID NO: 91412 - DNA, 25 bp, Homo sapien
gcacgtggccaatcagggttttctc

SEQ ID NO: 91413 - DNA, 25 bp, Homo sapien
aaggagatgatctcccgctggtcgg

SEQ ID NO: 91414 - DNA, 25 bp, Homo sapien
aggcgatgcgtagggcaaagcactt

SEQ ID NO: 91415 - DNA, 25 bp, Homo sapien
ggccttcaagtagagtccccgccca

SEQ ID NO: 91416 - DNA, 25 bp, Homo sapien
agtgattgccctgccatcaggcctg

SEQ ID NO: 91417 - DNA, 25 bp, Homo sapien
ggggaaacctcaacattcagcagcc

SEQ ID NO: 91418 - DNA, 25 bp, Homo sapien
ttagtggcaggggaaacctcaacat

SEQ ID NO: 91419 - DNA, 25 bp, Homo sapien
taagaaagaggtcaccaaaagtcag

SEQ ID NO: 91420 - DNA, 25 bp, Homo sapien
accaaaagtcagggcatggtctgca

SEQ ID NO: 91421 - DNA, 25 bp, Homo sapien
aaaagtcagggcatggtctgcatgg

SEQ ID NO: 91422 - DNA, 25 bp, Homo sapien
ataagaaagaggtcaccaaaagtca

SEQ ID NO: 91423 - DNA, 25 bp, Homo sapien
aggccgcatcatagccaggttggtc

SEQ ID NO: 91424 - DNA, 25 bp, Homo sapien
ctgtcaaacctcatccaagcaatat

SEQ ID NO: 91425 - DNA, 25 bp, Homo sapien
cttgccacaggcactagggaaggcg

SEQ ID NO: 91426 - DNA, 25 bp, Homo sapien
gcggctgccacatagcgcttcttcc

SEQ ID NO: 91427 - DNA, 25 bp, Homo sapien
aggaatggagcagggttgggtgttc

SEQ ID NO: 91428 - DNA, 25 bp, Homo sapien
aatggagcagggttgggtgttcagg

SEQ ID NO: 91429 - DNA, 25 bp, Homo sapien
gaggaatggagcagggttgggtgtt

SEQ ID NO: 91430 - DNA, 25 bp, Homo sapien
gaatggagcagggttgggtgttcag

SEQ ID NO: 91431 - DNA, 25 bp, Homo sapien
aaaacttgagatgtaagaccaaaga

SEQ ID NO: 91432 - DNA, 25 bp, Homo sapien
gaaaacttgagatgtaagaccaaag

SEQ ID NO: 91433 - DNA, 25 bp, Homo sapien
ggaaaacttgagatgtaagaccaaa

SEQ ID NO: 91434 - DNA, 25 bp, Homo sapien
aacttgagatgtaagaccaaagaag

SEQ ID NO: 91435 - DNA, 25 bp, Homo sapien
gtttgcccagccaggaggtcacagt

SEQ ID NO: 91436 - DNA, 25 bp, Homo sapien
aatagtgttactctggattgtagcc

SEQ ID NO: 91437 - DNA, 25 bp, Homo sapien
ggcaaccccaaagaagccgttctca

SEQ ID NO: 91438 - DNA, 25 bp, Homo sapien
tggaagaggctggtcaatgccctcc

SEQ ID NO: 91439 - DNA, 25 bp, Homo sapien
tcctggcagtcctagaagatggttg

SEQ ID NO: 91440 - DNA, 25 bp, Homo sapien
tgggactggaaactgcaaacgttca

SEQ ID NO: 91441 - DNA, 25 bp, Homo sapien
aactgagattttgcctgggactgga

SEQ ID NO: 91442 - DNA, 25 bp, Homo sapien
actttatggatagtgcttggagccc

SEQ ID NO: 91443 - DNA, 25 bp, Homo sapien
tataggcttcagtgactacaaggcc

SEQ ID NO: 91444 - DNA, 25 bp, Homo sapien
cctggcaaacctgaatataggcttc

SEQ ID NO: 91445 - DNA, 25 bp, Homo sapien
tgactgctaggccagcctggcaaac

SEQ ID NO: 91446 - DNA, 25 bp, Homo sapien
taaagggtgattagatgaagcaagg

SEQ ID NO: 91447 - DNA, 25 bp, Homo sapien
gccattgcagataagagccatcctt

SEQ ID NO: 91448 - DNA, 25 bp, Homo sapien
gcttctgcccgccattgcagataag

SEQ ID NO: 91449 - DNA, 25 bp, Homo sapien
tggcccctgagtggacatggtgcct

SEQ ID NO: 91450 - DNA, 25 bp, Homo sapien
gactaagtcagtggcacatgtatga

SEQ ID NO: 91451 - DNA, 25 bp, Homo sapien
cacttggcactgaccagggctcaag

SEQ ID NO: 91452 - DNA, 25 bp, Homo sapien
aattgactttccgtcagcaaaccgg

SEQ ID NO: 91453 - DNA, 25 bp, Homo sapien
tgtttagccatgaaggtgcggccag

SEQ ID NO: 91454 - DNA, 25 bp, Homo sapien
cctagaaccttgtgtgataaggagc

SEQ ID NO: 91455 - DNA, 25 bp, Homo sapien
aaggtcatgtcgacccccaacacac

SEQ ID NO: 91456 - DNA, 25 bp, Homo sapien
tacaaacactattatttccaaggtc

SEQ ID NO: 91457 - DNA, 25 bp, Homo sapien
atttccaaggtcatgtcgaccccca

SEQ ID NO: 91458 - DNA, 25 bp, Homo sapien
ccaaggtcatgtcgacccccaacac

SEQ ID NO: 91459 - DNA, 25 bp, Homo sapien
gagccggggcacaaaatcgagagtt

SEQ ID NO: 91460 - DNA, 25 bp, Homo sapien
agttgggatgtgcacagggctcctt

SEQ ID NO: 91461 - DNA, 25 bp, Homo sapien
tttgggtctgcggccaccaaagatg

SEQ ID NO: 91462 - DNA, 25 bp, Homo sapien
tgatggggcactggcgagccggggc

SEQ ID NO: 91463 - DNA, 25 bp, Homo sapien
agagatagcccttttgccaagaaca

SEQ ID NO: 91464 - DNA, 25 bp, Homo sapien
gcagtggactcagagcgcatggcgc

SEQ ID NO: 91465 - DNA, 25 bp, Homo sapien
gagcgcatggcgctgcccacaaaca

SEQ ID NO: 91466 - DNA, 25 bp, Homo sapien
cagttgaaggcctcgtataccaggg

SEQ ID NO: 91467 - DNA, 25 bp, Homo sapien
gactcagagcgcatggcgctgccca

SEQ ID NO: 91468 - DNA, 25 bp, Homo sapien
ggggaagcaagatgggtaaggaatc

SEQ ID NO: 91469 - DNA, 25 bp, Homo sapien
gaagcaagatgggtaaggaatcttc

SEQ ID NO: 91470 - DNA, 25 bp, Homo sapien
ctgggggggaagcaagatgggtaag

SEQ ID NO: 91471 - DNA, 25 bp, Homo sapien
gggaagcaagatgggtaaggaatct

SEQ ID NO: 91472 - DNA, 25 bp, Homo sapien
aaagcctggccacaggaagtgccct

SEQ ID NO: 91473 - DNA, 25 bp, Homo sapien
tcctttggcaccagcccaatgggtg

SEQ ID NO: 91474 - DNA, 25 bp, Homo sapien
caggtagtgcccgaagttgtagcca

SEQ ID NO: 91475 - DNA, 25 bp, Homo sapien
caatgggtgtctctcgggcactgtc

SEQ ID NO: 91476 - DNA, 25 bp, Homo sapien
agctgagtggtgtctatagctctga

SEQ ID NO: 91477 - DNA, 25 bp, Homo sapien
gagaacagctgagtggtgtctatag

SEQ ID NO: 91478 - DNA, 25 bp, Homo sapien
ctctgaggccgctgagatccaaggc

SEQ ID NO: 91479 - DNA, 25 bp, Homo sapien
gtctatagctctgaggccgctgaga

SEQ ID NO: 91480 - DNA, 25 bp, Homo sapien
aggtagctccgaatgtcacgaacct

SEQ ID NO: 91481 - DNA, 25 bp, Homo sapien
ggtagctccgaatgtcacgaacctc

SEQ ID NO: 91482 - DNA, 25 bp, Homo sapien
gatcctggttgacctgctctgtcag

SEQ ID NO: 91483 - DNA, 25 bp, Homo sapien
tttgggcagatcctggttgacctgc

SEQ ID NO: 91484 - DNA, 25 bp, Homo sapien
attttgtgcacacgtctctccaggg

SEQ ID NO: 91485 - DNA, 25 bp, Homo sapien
ttttgtgcacacgtctctccagggc

SEQ ID NO: 91486 - DNA, 25 bp, Homo sapien
cttgtgtaaaatagataagcatctc

SEQ ID NO: 91487 - DNA, 25 bp, Homo sapien
tattcccagatgagggtgctatgtc

SEQ ID NO: 91488 - DNA, 25 bp, Homo sapien
cttattattggacagtctttgtggg

SEQ ID NO: 91489 - DNA, 25 bp, Homo sapien
tctttgtgggaaggtctatggcaca

SEQ ID NO: 91490 - DNA, 25 bp, Homo sapien
tgtaatagatgcaaaaacgatgtgg

SEQ ID NO: 91491 - DNA, 25 bp, Homo sapien
tcctggtataggtttgttgtagcct

SEQ ID NO: 91492 - DNA, 25 bp, Homo sapien
tcattagaaagtataataggcgtgg

SEQ ID NO: 91493 - DNA, 25 bp, Homo sapien
ggcagctcgcttgaccacaggaatt

SEQ ID NO: 91494 - DNA, 25 bp, Homo sapien
gttccctaatacacgcgtctttctg

SEQ ID NO: 91495 - DNA, 25 bp, Homo sapien
cgcggtctttgcagacgttccctaa

SEQ ID NO: 91496 - DNA, 25 bp, Homo sapien
gcttagcttttggaagccttgctct

SEQ ID NO: 91497 - DNA, 25 bp, Homo sapien
ttaagacaatccctggctttccgcc

SEQ ID NO: 91498 - DNA, 25 bp, Homo sapien
gcagcggcgcgaggccttgtttaca

SEQ ID NO: 91499 - DNA, 25 bp, Homo sapien
cagcggagcacgatgattgataggt

SEQ ID NO: 91500 - DNA, 25 bp, Homo sapien
ttgtttacaccgactgccgccactg

SEQ ID NO: 91501 - DNA, 25 bp, Homo sapien
cttggccagccaactggacagcgga

SEQ ID NO: 91502 - DNA, 25 bp, Homo sapien
gcgcttcactagcttatctcatcta

SEQ ID NO: 91503 - DNA, 25 bp, Homo sapien
agccgagaagcacctcccactgaag

SEQ ID NO: 91504 - DNA, 25 bp, Homo sapien
ttaggactcaaagaccctcgacgcc

SEQ ID NO: 91505 - DNA, 25 bp, Homo sapien
caccttatcgaccaatcagagcgcc

SEQ ID NO: 91506 - DNA, 25 bp, Homo sapien
ttccaggtaacctctctgaccgacc

SEQ ID NO: 91507 - DNA, 25 bp, Homo sapien
tgggcggtgttggatttccaggtaa

SEQ ID NO: 91508 - DNA, 25 bp, Homo sapien
ggtgttgggcggtgttggatttcca

SEQ ID NO: 91509 - DNA, 25 bp, Homo sapien
acctctctgaccgaccaatcgaaat

SEQ ID NO: 91510 - DNA, 25 bp, Homo sapien
gaaagcaagagtgaaccgtagtgcg

SEQ ID NO: 91511 - DNA, 25 bp, Homo sapien
caagagtgaaccgtagtgcgctacc

SEQ ID NO: 91512 - DNA, 25 bp, Homo sapien
aaccgtagtgcgctaccctagctca

SEQ ID NO: 91513 - DNA, 25 bp, Homo sapien
tgtgaagcaaagaaagcaagagtga

SEQ ID NO: 91514 - DNA, 25 bp, Homo sapien
gctatctctaggagggtgacccttc

SEQ ID NO: 91515 - DNA, 25 bp, Homo sapien
tcctgagacggggtagtagctatct

SEQ ID NO: 91516 - DNA, 25 bp, Homo sapien
tcggggctgagatcccttttcttta

SEQ ID NO: 91517 - DNA, 25 bp, Homo sapien
cctatgccaactaccaaggcgtcgg

SEQ ID NO: 91518 - DNA, 25 bp, Homo sapien
gggtttggtgaaagcaaagcgtgct

SEQ ID NO: 91519 - DNA, 25 bp, Homo sapien
ttgggtttggtgaaagcaaagcgtg

SEQ ID NO: 91520 - DNA, 25 bp, Homo sapien
tgggtttggtgaaagcaaagcgtgc

SEQ ID NO: 91521 - DNA, 25 bp, Homo sapien
cttgggtttggtgaaagcaaagcgt

SEQ ID NO: 91522 - DNA, 25 bp, Homo sapien
tggtcacagcattcttaggtcctgt

SEQ ID NO: 91523 - DNA, 25 bp, Homo sapien
ctggtcacagcattcttaggtcctg

SEQ ID NO: 91524 - DNA, 25 bp, Homo sapien
tctggtcacagcattcttaggtcct

SEQ ID NO: 91525 - DNA, 25 bp, Homo sapien
ttctggtcacagcattcttaggtcc

SEQ ID NO: 91526 - DNA, 25 bp, Homo sapien
gcaagccctcggaggggtctccgga

SEQ ID NO: 91527 - DNA, 25 bp, Homo sapien
cctcttcggggcaagccctcggagg

SEQ ID NO: 91528 - DNA, 25 bp, Homo sapien
cggacccggatcctgcactgctgct

SEQ ID NO: 91529 - DNA, 25 bp, Homo sapien
ctcttcctcactccgacgcaggcca

SEQ ID NO: 91530 - DNA, 25 bp, Homo sapien
caagaacaggttagagtcagggcaa

SEQ ID NO: 91531 - DNA, 25 bp, Homo sapien
gaatacaatattctgaagggacccc

SEQ ID NO: 91532 - DNA, 25 bp, Homo sapien
tagtcacagagacaggctcccttga

SEQ ID NO: 91533 - DNA, 25 bp, Homo sapien
tttcaagtaaatcgaagtggcctca

SEQ ID NO: 91534 - DNA, 25 bp, Homo sapien
aacacagtgagccctgtctatgtct

SEQ ID NO: 91535 - DNA, 25 bp, Homo sapien
cacctgtgaatagcccgttctccag

SEQ ID NO: 91536 - DNA, 25 bp, Homo sapien
tagcccgttctccagactggggaac

SEQ ID NO: 91537 - DNA, 25 bp, Homo sapien
tgaatagcccgttctccagactggg

SEQ ID NO: 91538 - DNA, 25 bp, Homo sapien
tgacctactaagttgacctcccagc

SEQ ID NO: 91539 - DNA, 25 bp, Homo sapien
ttacagcaagagcaagaccaacatg

SEQ ID NO: 91540 - DNA, 25 bp, Homo sapien
agaccaatacgctgtggacatgacc

SEQ ID NO: 91541 - DNA, 25 bp, Homo sapien
caacatgctgtggacgtgacctact

SEQ ID NO: 91542 - DNA, 25 bp, Homo sapien
tggagagacccccattataaaggag

SEQ ID NO: 91543 - DNA, 25 bp, Homo sapien
ctgtggagagacccccattataaag

SEQ ID NO: 91544 - DNA, 25 bp, Homo sapien
gtggagagacccccattataaagga

SEQ ID NO: 91545 - DNA, 25 bp, Homo sapien
tgtggagagacccccattataaagg

SEQ ID NO: 91546 - DNA, 25 bp, Homo sapien
atgaattgtaaatttgctgcacctc

SEQ ID NO: 91547 - DNA, 25 bp, Homo sapien
ctgaatgaattgtaaatttgctgca

SEQ ID NO: 91548 - DNA, 25 bp, Homo sapien
aattgtaaatttgctgcacctcctc

SEQ ID NO: 91549 - DNA, 25 bp, Homo sapien
cctccctgcaccaacctcacttggc

SEQ ID NO: 91550 - DNA, 25 bp, Homo sapien
tgggttgtatcgatccccaagacga

SEQ ID NO: 91551 - DNA, 25 bp, Homo sapien
caggtgggttgtatcgatccccaag

SEQ ID NO: 91552 - DNA, 25 bp, Homo sapien
ggttgtatcgatccccaagacgacc

SEQ ID NO: 91553 - DNA, 25 bp, Homo sapien
tgtatcgatccccaagacgaccatc

SEQ ID NO: 91554 - DNA, 25 bp, Homo sapien
tgaattccagctcccgggtgtcagg

SEQ ID NO: 91555 - DNA, 25 bp, Homo sapien
gccctgtggccagttccacttgtgt

SEQ ID NO: 91556 - DNA, 25 bp, Homo sapien
tcattgaattccagctcccgggtgt

SEQ ID NO: 91557 - DNA, 25 bp, Homo sapien
tccacttgtgtcttgatctcattga

SEQ ID NO: 91558 - DNA, 25 bp, Homo sapien
ctggtgcaacattcgaggaaagctg

SEQ ID NO: 91559 - DNA, 25 bp, Homo sapien
tggtgcaacattcgaggaaagctgt

SEQ ID NO: 91560 - DNA, 25 bp, Homo sapien
ggtgcaacattcgaggaaagctgtg

SEQ ID NO: 91561 - DNA, 25 bp, Homo sapien
aatggaagggattggggaatattgc

SEQ ID NO: 91562 - DNA, 25 bp, Homo sapien
ggccacttcagccatatcaagcccc

SEQ ID NO: 91563 - DNA, 25 bp, Homo sapien
gggccacttcagccatatcaagccc

SEQ ID NO: 91564 - DNA, 25 bp, Homo sapien
gggaatattgctagcagaaatagag

SEQ ID NO: 91565 - DNA, 25 bp, Homo sapien
cccgatggcagaggccccgttctct

SEQ ID NO: 91566 - DNA, 25 bp, Homo sapien
caagggagaagcttccccgatggca

SEQ ID NO: 91567 - DNA, 25 bp, Homo sapien
agggagaagcttccccgatggcaga

SEQ ID NO: 91568 - DNA, 25 bp, Homo sapien
ttccccgatggcagaggccccgttc

SEQ ID NO: 91569 - DNA, 25 bp, Homo sapien
taacctttaatatctctgaggctcc

SEQ ID NO: 91570 - DNA, 25 bp, Homo sapien
gataagacctatctggcccttagag

SEQ ID NO: 91571 - DNA, 25 bp, Homo sapien
tggctgtgagtgcaatcccgtcttt

SEQ ID NO: 91572 - DNA, 25 bp, Homo sapien
taaggagtgtcccaatcagcagaat

SEQ ID NO: 91573 - DNA, 25 bp, Homo sapien
agagtagctatcagtgaagcccaga

SEQ ID NO: 91574 - DNA, 25 bp, Homo sapien
tctgagagtagctatcagtgaagcc

SEQ ID NO: 91575 - DNA, 25 bp, Homo sapien
cttctgagagtagctatcagtgaag

SEQ ID NO: 91576 - DNA, 25 bp, Homo sapien
tgagagtagctatcagtgaagccca

SEQ ID NO: 91577 - DNA, 25 bp, Homo sapien
cagtcatagagtcggattgtctggt

SEQ ID NO: 91578 - DNA, 25 bp, Homo sapien
cttgaatttacggaaacggccatat

SEQ ID NO: 91579 - DNA, 25 bp, Homo sapien
ccatatcggcagtcatagagtcgga

SEQ ID NO: 91580 - DNA, 25 bp, Homo sapien
tccagcctacgtcgcgggccttgat

SEQ ID NO: 91581 - DNA, 25 bp, Homo sapien
gagcactttgggagtgattttccca

SEQ ID NO: 91582 - DNA, 25 bp, Homo sapien
caaagtgagggatcctggctcagag

SEQ ID NO: 91583 - DNA, 25 bp, Homo sapien
acaagggtactggagcactttggga

SEQ ID NO: 91584 - DNA, 25 bp, Homo sapien
gaagtgaagctagggaagagatcaa

SEQ ID NO: 91585 - DNA, 25 bp, Homo sapien
agatccagggcagtgtgtgtatctc

SEQ ID NO: 91586 - DNA, 25 bp, Homo sapien
tccagggcagtgtgtgtatctccct

SEQ ID NO: 91587 - DNA, 25 bp, Homo sapien
gatccagggcagtgtgtgtatctcc

SEQ ID NO: 91588 - DNA, 25 bp, Homo sapien
tgagatccagggcagtgtgtgtatc

SEQ ID NO: 91589 - DNA, 25 bp, Homo sapien
caactcaagaggtttgctcccaaag

SEQ ID NO: 91590 - DNA, 25 bp, Homo sapien
gaagtctggctaacatgcaccataa

SEQ ID NO: 91591 - DNA, 25 bp, Homo sapien
acaacggttgtaaggcacatcccca

SEQ ID NO: 91592 - DNA, 25 bp, Homo sapien
tctggctgacaagatggtgcttccc

SEQ ID NO: 91593 - DNA, 25 bp, Homo sapien
gacagcaatggagaagacagcaaag

SEQ ID NO: 91594 - DNA, 25 bp, Homo sapien
gaggagacagcaatggagaagacag

SEQ ID NO: 91595 - DNA, 25 bp, Homo sapien
ctgaggagacagcaatggagaagac

SEQ ID NO: 91596 - DNA, 25 bp, Homo sapien
ggagacagcaatggagaagacagca

SEQ ID NO: 91597 - DNA, 25 bp, Homo sapien
tgttattgagggaaacataccccac

SEQ ID NO: 91598 - DNA, 25 bp, Homo sapien
ttgacacctccaatctcgtgctggg

SEQ ID NO: 91599 - DNA, 25 bp, Homo sapien
gagccatgatcgagaggaccaacgt

SEQ ID NO: 91600 - DNA, 25 bp, Homo sapien
gaccaacgtggtatatgctctagag

SEQ ID NO: 91601 - DNA, 25 bp, Homo sapien
gttctgttctcggtcaaagacatac

SEQ ID NO: 91602 - DNA, 25 bp, Homo sapien
ggtgcgccggttctgttctcggtca

SEQ ID NO: 91603 - DNA, 25 bp, Homo sapien
ccggttctgttctcggtcaaagaca

SEQ ID NO: 91604 - DNA, 25 bp, Homo sapien
tgaagggtgcgccggttctgttctc

SEQ ID NO: 91605 - DNA, 25 bp, Homo sapien
ttgcagatggcatcatctcccccag

SEQ ID NO: 91606 - DNA, 25 bp, Homo sapien
gtgcgtcgatcccacactttgcaga

SEQ ID NO: 91607 - DNA, 25 bp, Homo sapien
catcctcccgcatggtgcgtcgatc

SEQ ID NO: 91608 - DNA, 25 bp, Homo sapien
caggatttgggagcttatatcagca

SEQ ID NO: 91609 - DNA, 25 bp, Homo sapien
tgctgtcaatgaaggtgatgccatc

SEQ ID NO: 91610 - DNA, 25 bp, Homo sapien
cttgctgtcaatgaaggtgatgcca

SEQ ID NO: 91611 - DNA, 25 bp, Homo sapien
ttgctgtcaatgaaggtgatgccat

SEQ ID NO: 91612 - DNA, 25 bp, Homo sapien
gccctcctgggcaactagaacctta

SEQ ID NO: 91613 - DNA, 25 bp, Homo sapien
aaccttagcggcctggctgtacagt

SEQ ID NO: 91614 - DNA, 25 bp, Homo sapien
ttgtcaaattcccacaccagtccgc

SEQ ID NO: 91615 - DNA, 25 bp, Homo sapien
cttggttaataaggagcttgtcaaa

SEQ ID NO: 91616 - DNA, 25 bp, Homo sapien
ctccttgaggactggtgagtacaga

SEQ ID NO: 91617 - DNA, 25 bp, Homo sapien
gatggaattcatgttccctggcttg

SEQ ID NO: 91618 - DNA, 25 bp, Homo sapien
ttcttgtacggaaagccctgccctg

SEQ ID NO: 91619 - DNA, 25 bp, Homo sapien
gaggtctcgctaggtttcacaggct

SEQ ID NO: 91620 - DNA, 25 bp, Homo sapien
tagagttggagatcagataccgggc

SEQ ID NO: 91621 - DNA, 25 bp, Homo sapien
tgatggtctggtctttagagttgga

SEQ ID NO: 91622 - DNA, 25 bp, Homo sapien
gccaccgatagtcccagttttgctg

SEQ ID NO: 91623 - DNA, 25 bp, Homo sapien
tgccttcccggctggaaaagcgtcg

SEQ ID NO: 91624 - DNA, 25 bp, Homo sapien
gaactgctggccagtgctatgaatg

SEQ ID NO: 91625 - DNA, 25 bp, Homo sapien
agggtgtgcagcactccgtggcccc

SEQ ID NO: 91626 - DNA, 25 bp, Homo sapien
tggagcagccactgtagatgaactg

SEQ ID NO: 91627 - DNA, 25 bp, Homo sapien
aaccggcagcggatgagggtgtgca

SEQ ID NO: 91628 - DNA, 25 bp, Homo sapien
cactgggctttttaaggtggtcact

SEQ ID NO: 91629 - DNA, 25 bp, Homo sapien
cactagtcgttataggtggaatggc

SEQ ID NO: 91630 - DNA, 25 bp, Homo sapien
tcttgactggctgaaaaacagaacc

SEQ ID NO: 91631 - DNA, 25 bp, Homo sapien
tctgctttagcgactgcatgtccct

SEQ ID NO: 91632 - DNA, 25 bp, Homo sapien
ggactgtgagtgtctctctagggac

SEQ ID NO: 91633 - DNA, 25 bp, Homo sapien
tatctggacagggtgcatctttctt

SEQ ID NO: 91634 - DNA, 25 bp, Homo sapien
ttcttttgtcatgggactgtgagtg

SEQ ID NO: 91635 - DNA, 25 bp, Homo sapien
cacctgctgcaccttatctggacag

SEQ ID NO: 91636 - DNA, 25 bp, Homo sapien
gggaccaccacaagacatctaaact

SEQ ID NO: 91637 - DNA, 25 bp, Homo sapien
atttctgcttctatccctgttcctt

SEQ ID NO: 91638 - DNA, 25 bp, Homo sapien
tgttcccatgggagcaaagcccaca

SEQ ID NO: 91639 - DNA, 25 bp, Homo sapien
tgcctctcaggcaacttcccatgtt

SEQ ID NO: 91640 - DNA, 25 bp, Homo sapien
ggtgccaactgacgtcacgcacaca

SEQ ID NO: 91641 - DNA, 25 bp, Homo sapien
tcaaaggggtgccaactgacgtcac

SEQ ID NO: 91642 - DNA, 25 bp, Homo sapien
gaactgctgacaatcttctcttcaa

SEQ ID NO: 91643 - DNA, 25 bp, Homo sapien
caatgtggccacttagaaggtcgta

SEQ ID NO: 91644 - DNA, 25 bp, Homo sapien
tgtgccagcaccctcaacccttgca

SEQ ID NO: 91645 - DNA, 25 bp, Homo sapien
acatgtgccagcaccctcaaccctt

SEQ ID NO: 91646 - DNA, 25 bp, Homo sapien
gtgccagcaccctcaacccttgcaa

SEQ ID NO: 91647 - DNA, 25 bp, Homo sapien
cagacatgtgccagcaccctcaacc

SEQ ID NO: 91648 - DNA, 25 bp, Homo sapien
tggcggtactgccacagacgcaggt

SEQ ID NO: 91649 - DNA, 25 bp, Homo sapien
cctggaagtactcagcctggcggta

SEQ ID NO: 91650 - DNA, 25 bp, Homo sapien
gcacattcctcagattctggcatgt

SEQ ID NO: 91651 - DNA, 25 bp, Homo sapien
tactgccacagacgcaggttcccgt

SEQ ID NO: 91652 - DNA, 25 bp, Homo sapien
gagagcttatcaagaggttcaccct

SEQ ID NO: 91653 - DNA, 25 bp, Homo sapien
tgtgagcacgtaaggagaccactct

SEQ ID NO: 91654 - DNA, 25 bp, Homo sapien
ttgaatcctcaacgtgaagacctgg

SEQ ID NO: 91655 - DNA, 25 bp, Homo sapien
tgtgcctccagcatgaagggacctt

SEQ ID NO: 91656 - DNA, 25 bp, Homo sapien
aagatctattccgagctgggtgtga

SEQ ID NO: 91657 - DNA, 25 bp, Homo sapien
gtaagggagcacctattgcaaggct

SEQ ID NO: 91658 - DNA, 25 bp, Homo sapien
tctcgatatctacttgcagggaagc

SEQ ID NO: 91659 - DNA, 25 bp, Homo sapien
tgtgaaagcctgtgaacacccctgg

SEQ ID NO: 91660 - DNA, 25 bp, Homo sapien
tcctctgatagctgtcgacaaagtc

SEQ ID NO: 91661 - DNA, 25 bp, Homo sapien
tgattcctctgatagctgtcgacaa

SEQ ID NO: 91662 - DNA, 25 bp, Homo sapien
tgatagctgtcgacaaagtcaactg

SEQ ID NO: 91663 - DNA, 25 bp, Homo sapien
tagctgtcgacaaagtcaactgaaa

SEQ ID NO: 91664 - DNA, 25 bp, Homo sapien
ttcataatgctcaaggaaagaagcc

SEQ ID NO: 91665 - DNA, 25 bp, Homo sapien
gaagatgccacatagaagtttcaca

SEQ ID NO: 91666 - DNA, 25 bp, Homo sapien
agaagtcaaggcctggctacagagc

SEQ ID NO: 91667 - DNA, 25 bp, Homo sapien
tatagaatctgcagaaagttatcca

SEQ ID NO: 91668 - DNA, 25 bp, Homo sapien
gattaggtttactcccaggtgacag

SEQ ID NO: 91669 - DNA, 25 bp, Homo sapien
cagggctgctgtataaactggcggt

SEQ ID NO: 91670 - DNA, 25 bp, Homo sapien
catctgttgatcacgttgaccctca

SEQ ID NO: 91671 - DNA, 25 bp, Homo sapien
tgaccctcagatccctaaagattag

SEQ ID NO: 91672 - DNA, 25 bp, Homo sapien
cataggccttgggaggcagatcagc

SEQ ID NO: 91673 - DNA, 25 bp, Homo sapien
taggccttgggaggcagatcagcat

SEQ ID NO: 91674 - DNA, 25 bp, Homo sapien
ataggccttgggaggcagatcagca

SEQ ID NO: 91675 - DNA, 25 bp, Homo sapien
gcagcaaggtggctgtgcacagcac

SEQ ID NO: 91676 - DNA, 25 bp, Homo sapien
caacagcaggatgcagcaaggtggc

SEQ ID NO: 91677 - DNA, 25 bp, Homo sapien
gatgcagcaaggtggctgtgcacag

SEQ ID NO: 91678 - DNA, 25 bp, Homo sapien
aacagcaggatgcagcaaggtggct

SEQ ID NO: 91679 - DNA, 25 bp, Homo sapien
agctgccagtcttatcagtgtgatc

SEQ ID NO: 91680 - DNA, 25 bp, Homo sapien
cagtcttatcagtgtgatctagccc

SEQ ID NO: 91681 - DNA, 25 bp, Homo sapien
tcttatcagtgtgatctagcccttc

SEQ ID NO: 91682 - DNA, 25 bp, Homo sapien
tatcagtgtgatctagcccttctcc

SEQ ID NO: 91683 - DNA, 25 bp, Homo sapien
ccctggacaaggataggcagtgaca

SEQ ID NO: 91684 - DNA, 25 bp, Homo sapien
tatgtgtcctgacagcagtctgtgt

SEQ ID NO: 91685 - DNA, 25 bp, Homo sapien
cagacacaaggcagagccctgttgg

SEQ ID NO: 91686 - DNA, 25 bp, Homo sapien
gaggtctgccacgtcagcagggtcc

SEQ ID NO: 91687 - DNA, 25 bp, Homo sapien
cctcccctccccactaactgcttgc

SEQ ID NO: 91688 - DNA, 25 bp, Homo sapien
ctcccctccccactaactgcttgct

SEQ ID NO: 91689 - DNA, 25 bp, Homo sapien
tccaaagtacagcaaggcagaggcc

SEQ ID NO: 91690 - DNA, 25 bp, Homo sapien
gcgggcggcctgttcgcttccaaag

SEQ ID NO: 91691 - DNA, 25 bp, Homo sapien
ggcctgttcgcttccaaagtacagc

SEQ ID NO: 91692 - DNA, 25 bp, Homo sapien
ccaaagtacagcaaggcagaggcca

SEQ ID NO: 91693 - DNA, 25 bp, Homo sapien
caggcatggtagaggcgccgtaagc

SEQ ID NO: 91694 - DNA, 25 bp, Homo sapien
aggcatggtagaggcgccgtaagca

SEQ ID NO: 91695 - DNA, 25 bp, Homo sapien
atggtagaggcgccgtaagcagggg

SEQ ID NO: 91696 - DNA, 25 bp, Homo sapien
gcatggtagaggcgccgtaagcagg

SEQ ID NO: 91697 - DNA, 25 bp, Homo sapien
gccgtggctggcgaagatagtccga

SEQ ID NO: 91698 - DNA, 25 bp, Homo sapien
tgttgaagaagttgccgtggctggc

SEQ ID NO: 91699 - DNA, 25 bp, Homo sapien
cgagggttgacatggaactgcagaa

SEQ ID NO: 91700 - DNA, 25 bp, Homo sapien
cgaagatagtccgagggttgacatg

SEQ ID NO: 91701 - DNA, 25 bp, Homo sapien
gagactattgagaccccaagctcca

SEQ ID NO: 91702 - DNA, 25 bp, Homo sapien
atcatcactcgttctctccttgccg

SEQ ID NO: 91703 - DNA, 25 bp, Homo sapien
cgttctctccttgccgtgcccttta

SEQ ID NO: 91704 - DNA, 25 bp, Homo sapien
ggcaaagaagggagactattgagac

SEQ ID NO: 91705 - DNA, 25 bp, Homo sapien
agtggctcgaagcaggagccagtca

SEQ ID NO: 91706 - DNA, 25 bp, Homo sapien
taccagtcggctcaggtgtctggca

SEQ ID NO: 91707 - DNA, 25 bp, Homo sapien
tcaggtcctcgatgagcaggaaggc

SEQ ID NO: 91708 - DNA, 25 bp, Homo sapien
acggtgtagcctcgccactggtggc

SEQ ID NO: 91709 - DNA, 25 bp, Homo sapien
tgaggtaccaggcaaaggtgcccac

SEQ ID NO: 91710 - DNA, 25 bp, Homo sapien
gcccaccaccttgtgagtgtactgg

SEQ ID NO: 91711 - DNA, 25 bp, Homo sapien
tagatgacggtacagagcagcaaga

SEQ ID NO: 91712 - DNA, 25 bp, Homo sapien
ggtacttggcgaacacagctgcttc

SEQ ID NO: 91713 - DNA, 25 bp, Homo sapien
cagttatgcttgcggctggagtggg

SEQ ID NO: 91714 - DNA, 25 bp, Homo sapien
tcagttatgcttgcggctggagtgg

SEQ ID NO: 91715 - DNA, 25 bp, Homo sapien
ctgtagcaacaccggcaccagagct

SEQ ID NO: 91716 - DNA, 25 bp, Homo sapien
tatccaagcccggaccaactctctc

SEQ ID NO: 91717 - DNA, 25 bp, Homo sapien
gtagcaacaccggcaccagagctgg

SEQ ID NO: 91718 - DNA, 25 bp, Homo sapien
gagctggcagcatccctatccaagc

SEQ ID NO: 91719 - DNA, 25 bp, Homo sapien
ggcctagcgccgcacaaggagtgga

SEQ ID NO: 91720 - DNA, 25 bp, Homo sapien
ggaaagcgaaagcggtagggcgctc

SEQ ID NO: 91721 - DNA, 25 bp, Homo sapien
cctagcgccgcacaaggagtggagt

SEQ ID NO: 91722 - DNA, 25 bp, Homo sapien
gcgctcgcacccagctccgccttcc

SEQ ID NO: 91723 - DNA, 25 bp, Homo sapien
cttggcttgggcctcgggctggacc

SEQ ID NO: 91724 - DNA, 25 bp, Homo sapien
ggcttgggcctcgggctggaccctg

SEQ ID NO: 91725 - DNA, 25 bp, Homo sapien
cctcgggctggaccctgagcatggc

SEQ ID NO: 91726 - DNA, 25 bp, Homo sapien
tgggcctcgggctggaccctgagca

SEQ ID NO: 91727 - DNA, 25 bp, Homo sapien
gcccccggccgctccagccacgcct

SEQ ID NO: 91728 - DNA, 25 bp, Homo sapien
ccccggccgctccagccacgcctcc

SEQ ID NO: 91729 - DNA, 25 bp, Homo sapien
cccccggccgctccagccacgcctc

SEQ ID NO: 91730 - DNA, 25 bp, Homo sapien
gactgcccccgactcgcgtgggagc

SEQ ID NO: 91731 - DNA, 25 bp, Homo sapien
cccgcaggcagcagtcgccgccctc

SEQ ID NO: 91732 - DNA, 25 bp, Homo sapien
gccagctcggccgactgcccccgac

SEQ ID NO: 91733 - DNA, 25 bp, Homo sapien
ccgcaggcagcagtcgccgccctcc

SEQ ID NO: 91734 - DNA, 25 bp, Homo sapien
tccacgccagctctccgcttcacct

SEQ ID NO: 91735 - DNA, 25 bp, Homo sapien
cacgccagctctccgcttcacctca

SEQ ID NO: 91736 - DNA, 25 bp, Homo sapien
ggccagcggagttcccctccacgcc

SEQ ID NO: 91737 - DNA, 25 bp, Homo sapien
agcggagttcccctccacgccagct

SEQ ID NO: 91738 - DNA, 25 bp, Homo sapien
tcctctgcaagtaggacagggatgg

SEQ ID NO: 91739 - DNA, 25 bp, Homo sapien
tgcagacctggatctacggaaagtg

SEQ ID NO: 91740 - DNA, 25 bp, Homo sapien
ggatgagaacattcctggcggtgaa

SEQ ID NO: 91741 - DNA, 25 bp, Homo sapien
gaagggccagtgttcacgtgagaac

SEQ ID NO: 91742 - DNA, 25 bp, Homo sapien
aaggccagttcatttgaggacagtt

SEQ ID NO: 91743 - DNA, 25 bp, Homo sapien
catttgaggacagttcccttagggt

SEQ ID NO: 91744 - DNA, 25 bp, Homo sapien
tcccttagggttatgtagggcctga

SEQ ID NO: 91745 - DNA, 25 bp, Homo sapien
acacgcatcccttcagaaacttggc

SEQ ID NO: 91746 - DNA, 25 bp, Homo sapien
agaggtcttcacgaaacacatccac

SEQ ID NO: 91747 - DNA, 25 bp, Homo sapien
acagaggtcttcacgaaacacatcc

SEQ ID NO: 91748 - DNA, 25 bp, Homo sapien
cagaggtcttcacgaaacacatcca

SEQ ID NO: 91749 - DNA, 25 bp, Homo sapien
agtcagcatcaaatgcccgtcctag

SEQ ID NO: 91750 - DNA, 25 bp, Homo sapien
cctaggtagtgaggcagggttgagc

SEQ ID NO: 91751 - DNA, 25 bp, Homo sapien
caaatgcccgtcctaggtagtgagg

SEQ ID NO: 91752 - DNA, 25 bp, Homo sapien
cagggttgagcagtaggagttgggc

SEQ ID NO: 91753 - DNA, 25 bp, Homo sapien
tcttggggaaatagctcccgagcag

SEQ ID NO: 91754 - DNA, 25 bp, Homo sapien
gctcagaaatcttcttggggaaata

SEQ ID NO: 91755 - DNA, 25 bp, Homo sapien
ggggaaatagctcccgagcaggttc

SEQ ID NO: 91756 - DNA, 25 bp, Homo sapien
cagctcagaaatcttcttggggaaa

SEQ ID NO: 91757 - DNA, 25 bp, Homo sapien
tggcctttactccctagctccctgc

SEQ ID NO: 91758 - DNA, 25 bp, Homo sapien
ccagactcttctcttggcctttact

SEQ ID NO: 91759 - DNA, 25 bp, Homo sapien
tcacagcctccagactcttctcttg

SEQ ID NO: 91760 - DNA, 25 bp, Homo sapien
cttctcttggcctttactccctagc

SEQ ID NO: 91761 - DNA, 25 bp, Homo sapien
tggaggtgagggagttcctctcacc

SEQ ID NO: 91762 - DNA, 25 bp, Homo sapien
ctggaggtgagggagttcctctcac

SEQ ID NO: 91763 - DNA, 25 bp, Homo sapien
ggaggtgagggagttcctctcacct

SEQ ID NO: 91764 - DNA, 25 bp, Homo sapien
aagttggcttcattgagagctggct

SEQ ID NO: 91765 - DNA, 25 bp, Homo sapien
agttggcttcattgagagctggctc

SEQ ID NO: 91766 - DNA, 25 bp, Homo sapien
caagttggcttcattgagagctggc

SEQ ID NO: 91767 - DNA, 25 bp, Homo sapien
cctgctgtttcttccgctcctcttt

SEQ ID NO: 91768 - DNA, 25 bp, Homo sapien
tgctgtttcttccgctcctctttct

SEQ ID NO: 91769 - DNA, 25 bp, Homo sapien
tcctgctgtttcttccgctcctctt

SEQ ID NO: 91770 - DNA, 25 bp, Homo sapien
ctcctgctgtttcttccgctcctct

SEQ ID NO: 91771 - DNA, 25 bp, Homo sapien
ccccatagttggatcccttctccca

SEQ ID NO: 91772 - DNA, 25 bp, Homo sapien
gaggagctcatgagagtcaggacta

SEQ ID NO: 91773 - DNA, 25 bp, Homo sapien
ctcatgagagtcaggactaaggttg

SEQ ID NO: 91774 - DNA, 25 bp, Homo sapien
tgcagaaagagaggagctcatgaga

SEQ ID NO: 91775 - DNA, 25 bp, Homo sapien
gagagtcaggactaaggttgattac

SEQ ID NO: 91776 - DNA, 25 bp, Homo sapien
tcatcctcccccttcttcttttcat

SEQ ID NO: 91777 - DNA, 25 bp, Homo sapien
tcttcttttcatccttgtcttcctt

SEQ ID NO: 91778 - DNA, 25 bp, Homo sapien
cttcttcttttcatccttgtcttcc

SEQ ID NO: 91779 - DNA, 25 bp, Homo sapien
tttgtcttcatcctcccccttcttc

SEQ ID NO: 91780 - DNA, 25 bp, Homo sapien
gggtcagtcacatgattgagcctgt

SEQ ID NO: 91781 - DNA, 25 bp, Homo sapien
aatgggtcagtcacatgattgagcc

SEQ ID NO: 91782 - DNA, 25 bp, Homo sapien
agtgggactcaagtctcttcccacc

SEQ ID NO: 91783 - DNA, 25 bp, Homo sapien
tgtgaggggcgaaggggagactgga

SEQ ID NO: 91784 - DNA, 25 bp, Homo sapien
ctgcagaaggaccacgatcttttca

SEQ ID NO: 91785 - DNA, 25 bp, Homo sapien
cattgcagttcactgggccacaggg

SEQ ID NO: 91786 - DNA, 25 bp, Homo sapien
tgcagaaggaccacgatcttttcat

SEQ ID NO: 91787 - DNA, 25 bp, Homo sapien
aggccctaaatggcagggaccaaga

SEQ ID NO: 91788 - DNA, 25 bp, Homo sapien
gtgccaggccctaaatggcagggac

SEQ ID NO: 91789 - DNA, 25 bp, Homo sapien
ccaggccctaaatggcagggaccaa

SEQ ID NO: 91790 - DNA, 25 bp, Homo sapien
gccaggccctaaatggcagggacca

SEQ ID NO: 91791 - DNA, 25 bp, Homo sapien
ttcatattctcccttgcttccctcc

SEQ ID NO: 91792 - DNA, 25 bp, Homo sapien
tacccaattcccagtttcatattct

SEQ ID NO: 91793 - DNA, 25 bp, Homo sapien
ctacccaattcccagtttcatattc

SEQ ID NO: 91794 - DNA, 25 bp, Homo sapien
agtttcatattctcccttgcttccc

SEQ ID NO: 91795 - DNA, 25 bp, Homo sapien
gggaagagggaatggcataatgcca

SEQ ID NO: 91796 - DNA, 25 bp, Homo sapien
gaagagggaatggcataatgccaca

SEQ ID NO: 91797 - DNA, 25 bp, Homo sapien
ggaagagggaatggcataatgccac

SEQ ID NO: 91798 - DNA, 25 bp, Homo sapien
tgggaagagggaatggcataatgcc

SEQ ID NO: 91799 - DNA, 25 bp, Homo sapien
tcaatccgaggtatctgcagctgca

SEQ ID NO: 91800 - DNA, 25 bp, Homo sapien
attgttaccatcctcaatccgaggt

SEQ ID NO: 91801 - DNA, 25 bp, Homo sapien
tccgaggtatctgcagctgcaacca

SEQ ID NO: 91802 - DNA, 25 bp, Homo sapien
catcctcaatccgaggtatctgcag

SEQ ID NO: 91803 - DNA, 25 bp, Homo sapien
aggaagcatggactagaaaagagca

SEQ ID NO: 91804 - DNA, 25 bp, Homo sapien
tggtcatcagctcaaacaccttctc

SEQ ID NO: 91805 - DNA, 25 bp, Homo sapien
ctggtcatcagctcaaacaccttct

SEQ ID NO: 91806 - DNA, 25 bp, Homo sapien
gagatttgagtgtggaagccttcta

SEQ ID NO: 91807 - DNA, 25 bp, Homo sapien
ttagagatttgagtgtggaagcctt

SEQ ID NO: 91808 - DNA, 25 bp, Homo sapien
tagagatttgagtgtggaagccttc

SEQ ID NO: 91809 - DNA, 25 bp, Homo sapien
agatttgagtgtggaagccttctag

SEQ ID NO: 91810 - DNA, 25 bp, Homo sapien
agtgtgcacatgggtggtcactcac

SEQ ID NO: 91811 - DNA, 25 bp, Homo sapien
aagtgtgtatggagtagaagaagga

SEQ ID NO: 91812 - DNA, 25 bp, Homo sapien
acagtgtgcacatgggtggtcactc

SEQ ID NO: 91813 - DNA, 25 bp, Homo sapien
gaagtgtgtatggagtagaagaagg

SEQ ID NO: 91814 - DNA, 25 bp, Homo sapien
gggctgcttggctgctttagtcact

SEQ ID NO: 91815 - DNA, 25 bp, Homo sapien
tgctttagtcactgcatcaccacgc

SEQ ID NO: 91816 - DNA, 25 bp, Homo sapien
ggctgcttggctgctttagtcactg

SEQ ID NO: 91817 - DNA, 25 bp, Homo sapien
tcactgcatcaccacgctcagagaa

SEQ ID NO: 91818 - DNA, 25 bp, Homo sapien
gaagctcgggtcaggcctgacctta

SEQ ID NO: 91819 - DNA, 25 bp, Homo sapien
ggcctgaccttacatgtgtccttcc

SEQ ID NO: 91820 - DNA, 25 bp, Homo sapien
ggtcaggcctgaccttacatgtgtc

SEQ ID NO: 91821 - DNA, 25 bp, Homo sapien
ggaagctcgggtcaggcctgacctt

SEQ ID NO: 91822 - DNA, 25 bp, Homo sapien
catcagccggatgtcccggtactct

SEQ ID NO: 91823 - DNA, 25 bp, Homo sapien
ggatgtcccggtactctgcctcatc

SEQ ID NO: 91824 - DNA, 25 bp, Homo sapien
agctcgtgcaccagctgccgataat

SEQ ID NO: 91825 - DNA, 25 bp, Homo sapien
gcattgcggatctccatgaccatca

SEQ ID NO: 91826 - DNA, 25 bp, Homo sapien
cagggagtgggtggcctgggaaagc

SEQ ID NO: 91827 - DNA, 25 bp, Homo sapien
ggagtgggtggcctgggaaagctgc

SEQ ID NO: 91828 - DNA, 25 bp, Homo sapien
agggtcagggagtgggtggcctggg

SEQ ID NO: 91829 - DNA, 25 bp, Homo sapien
gggtcagggagtgggtggcctggga

SEQ ID NO: 91830 - DNA, 25 bp, Homo sapien
ctgtgccccatttctagccttgtgg

SEQ ID NO: 91831 - DNA, 25 bp, Homo sapien
tacagggccagggagtagaggtcag

SEQ ID NO: 91832 - DNA, 25 bp, Homo sapien
gccccatttctagccttgtggagaa

SEQ ID NO: 91833 - DNA, 25 bp, Homo sapien
ccatttctagccttgtggagaagct

SEQ ID NO: 91834 - DNA, 25 bp, Homo sapien
tctcccctgggcttcttgagcttct

SEQ ID NO: 91835 - DNA, 25 bp, Homo sapien
caaggtgagggaaaaatctcaacag

SEQ ID NO: 91836 - DNA, 25 bp, Homo sapien
ggcaaggtgagggaaaaatctcaac

SEQ ID NO: 91837 - DNA, 25 bp, Homo sapien
tgtactcatcacagaatgggagaga

SEQ ID NO: 91838 - DNA, 25 bp, Homo sapien
taaaaagcaggaaggtctctgctgt

SEQ ID NO: 91839 - DNA, 25 bp, Homo sapien
gatcttgctttaactgaggtgtccc

SEQ ID NO: 91840 - DNA, 25 bp, Homo sapien
tcaccagcaatatctgagcacctgt

SEQ ID NO: 91841 - DNA, 25 bp, Homo sapien
cactcaagcatcaagcagtcgtgca

SEQ ID NO: 91842 - DNA, 25 bp, Homo sapien
agtcgtgcatcaagcatccagcagg

SEQ ID NO: 91843 - DNA, 25 bp, Homo sapien
tacctgcgagtcgagttagcgttgt

SEQ ID NO: 91844 - DNA, 25 bp, Homo sapien
gagatctcggccctggcctacgtga

SEQ ID NO: 91845 - DNA, 25 bp, Homo sapien
tactaatccggcttgctgcttcccg

SEQ ID NO: 91846 - DNA, 25 bp, Homo sapien
cgttgtcgccgaaccgaagtgagag

SEQ ID NO: 91847 - DNA, 25 bp, Homo sapien
ctacttgcggtcgagccttcttggg

SEQ ID NO: 91848 - DNA, 25 bp, Homo sapien
ctcctagtggcaactggctgggaat

SEQ ID NO: 91849 - DNA, 25 bp, Homo sapien
agttggccctagctataagccccgc

SEQ ID NO: 91850 - DNA, 25 bp, Homo sapien
taagagctgctagtccttctccacc

SEQ ID NO: 91851 - DNA, 25 bp, Homo sapien
tctggtgcccggctttgaggcccac

SEQ ID NO: 91852 - DNA, 25 bp, Homo sapien
cccagcgccagggttagccgagaac

SEQ ID NO: 91853 - DNA, 25 bp, Homo sapien
ctcccgtctggtgcccggctttgag

SEQ ID NO: 91854 - DNA, 25 bp, Homo sapien
tagccgagaacaggaagtactagga

SEQ ID NO: 91855 - DNA, 25 bp, Homo sapien
gcgtgcggcgtccagctgcaggtag

SEQ ID NO: 91856 - DNA, 25 bp, Homo sapien
tgctccagggaaaacgcctgcccgg

SEQ ID NO: 91857 - DNA, 25 bp, Homo sapien
ccatgagcgttgcagcggacaaggc

SEQ ID NO: 91858 - DNA, 25 bp, Homo sapien
gcggctagcggcagagagctggcta

SEQ ID NO: 91859 - DNA, 25 bp, Homo sapien
gttattaaacttgacaccacgccag

SEQ ID NO: 91860 - DNA, 25 bp, Homo sapien
cacgccagtaccgaggccgctgagg

SEQ ID NO: 91861 - DNA, 25 bp, Homo sapien
tctccaggatgttcagagccgtgga

SEQ ID NO: 91862 - DNA, 25 bp, Homo sapien
caccgtgctgcgaaagacagggtta

SEQ ID NO: 91863 - DNA, 25 bp, Homo sapien
tgtgactgtagcaacctggtgctca

SEQ ID NO: 91864 - DNA, 25 bp, Homo sapien
gtagccatataatcgcagcacatct

SEQ ID NO: 91865 - DNA, 25 bp, Homo sapien
tgtccgaagcagcagtacttccagt

SEQ ID NO: 91866 - DNA, 25 bp, Homo sapien
aggctgagctctgtccgaagcagca

SEQ ID NO: 91867 - DNA, 25 bp, Homo sapien
ccccagccctggtgcataagtccat

SEQ ID NO: 91868 - DNA, 25 bp, Homo sapien
agtgcctgctgtcttggatgagtat

SEQ ID NO: 91869 - DNA, 25 bp, Homo sapien
cagtgcctgctgtcttggatgagta

SEQ ID NO: 91870 - DNA, 25 bp, Homo sapien
gtgcctgctgtcttggatgagtatt

SEQ ID NO: 91871 - DNA, 25 bp, Homo sapien
cctttgtacaccagcccctttcctg

SEQ ID NO: 91872 - DNA, 25 bp, Homo sapien
caatagggggtcaaattctgaaagc

SEQ ID NO: 91873 - DNA, 25 bp, Homo sapien
gagcaatctctctcaatagggggtc

SEQ ID NO: 91874 - DNA, 25 bp, Homo sapien
tctctctcaatagggggtcaaattc

SEQ ID NO: 91875 - DNA, 25 bp, Homo sapien
tctcaatagggggtcaaattctgaa

SEQ ID NO: 91876 - DNA, 25 bp, Homo sapien
caggagagatggaacatctttccaa

SEQ ID NO: 91877 - DNA, 25 bp, Homo sapien
accacagaggaagcagggaccagga

SEQ ID NO: 91878 - DNA, 25 bp, Homo sapien
agaggaagcagggaccaggagtgga

SEQ ID NO: 91879 - DNA, 25 bp, Homo sapien
cagaaccacagaggaagcagggacc

SEQ ID NO: 91880 - DNA, 25 bp, Homo sapien
gaaccacagaggaagcagggaccag

SEQ ID NO: 91881 - DNA, 25 bp, Homo sapien
tgtttacaggatgggcagtgcagtg

SEQ ID NO: 91882 - DNA, 25 bp, Homo sapien
tttacaggatgggcagtgcagtgtg

SEQ ID NO: 91883 - DNA, 25 bp, Homo sapien
ctgtttacaggatgggcagtgcagt

SEQ ID NO: 91884 - DNA, 25 bp, Homo sapien
ttacaggatgggcagtgcagtgtgc

SEQ ID NO: 91885 - DNA, 25 bp, Homo sapien
cggaggtgatgagcacgggatgggt

SEQ ID NO: 91886 - DNA, 25 bp, Homo sapien
ggtctggcggaggtgatgagcacgg

SEQ ID NO: 91887 - DNA, 25 bp, Homo sapien
cacgggatgggtgtccatggaacag

SEQ ID NO: 91888 - DNA, 25 bp, Homo sapien
tgatgagcacgggatgggtgtccat

SEQ ID NO: 91889 - DNA, 25 bp, Homo sapien
gtcgactggggccgtggttgggctg

SEQ ID NO: 91890 - DNA, 25 bp, Homo sapien
cgactggggccgtggttgggctgag

SEQ ID NO: 91891 - DNA, 25 bp, Homo sapien
ctggggccgtggttgggctgaggca

SEQ ID NO: 91892 - DNA, 25 bp, Homo sapien
actggggccgtggttgggctgaggc

SEQ ID NO: 91893 - DNA, 25 bp, Homo sapien
ttacagcctcggggccgatcacagg

SEQ ID NO: 91894 - DNA, 25 bp, Homo sapien
acacagagcactgcccaaggctcat

SEQ ID NO: 91895 - DNA, 25 bp, Homo sapien
gcccaaggctcatttagcatggcac

SEQ ID NO: 91896 - DNA, 25 bp, Homo sapien
ggctcatttagcatggcacaggcag

SEQ ID NO: 91897 - DNA, 25 bp, Homo sapien
cacatatggaacatagcacagcagc

SEQ ID NO: 91898 - DNA, 25 bp, Homo sapien
caccgaccccgtgcaagatcaggtt

SEQ ID NO: 91899 - DNA, 25 bp, Homo sapien
gggccagccgaggtcgctcacatat

SEQ ID NO: 91900 - DNA, 25 bp, Homo sapien
aaatgccagcatctcgggaatccac

SEQ ID NO: 91901 - DNA, 25 bp, Homo sapien
tgaggtaacacacgataaagagctg

SEQ ID NO: 91902 - DNA, 25 bp, Homo sapien
ggaagagaatgcctgaggtaacaca

SEQ ID NO: 91903 - DNA, 25 bp, Homo sapien
aacacacgataaagagctgggaagg

SEQ ID NO: 91904 - DNA, 25 bp, Homo sapien
aatgcctgaggtaacacacgataaa

SEQ ID NO: 91905 - DNA, 25 bp, Homo sapien
ccagggctcgagttgcagaaggtac

SEQ ID NO: 91906 - DNA, 25 bp, Homo sapien
tacagtaccagacttgactctgggc

SEQ ID NO: 91907 - DNA, 25 bp, Homo sapien
ttgtgctggaatggggctactagtc

SEQ ID NO: 91908 - DNA, 25 bp, Homo sapien
gctactagtccggttgcacataaca

SEQ ID NO: 91909 - DNA, 25 bp, Homo sapien
caggggggcactaaggcgtcgtggg

SEQ ID NO: 91910 - DNA, 25 bp, Homo sapien
ttggcgctgcttctcaggatctcca

SEQ ID NO: 91911 - DNA, 25 bp, Homo sapien
cttggcgctgcttctcaggatctcc

SEQ ID NO: 91912 - DNA, 25 bp, Homo sapien
ctaaggcgtcgtgggggcccaggct

SEQ ID NO: 91913 - DNA, 25 bp, Homo sapien
cggatcatgctcactagctggaggc

SEQ ID NO: 91914 - DNA, 25 bp, Homo sapien
gatcatgctcactagctggaggcct

SEQ ID NO: 91915 - DNA, 25 bp, Homo sapien
catgctcactagctggaggccttct

SEQ ID NO: 91916 - DNA, 25 bp, Homo sapien
gctcactagctggaggccttcttcc

SEQ ID NO: 91917 - DNA, 25 bp, Homo sapien
gacagtggctcagctcagacatatg

SEQ ID NO: 91918 - DNA, 25 bp, Homo sapien
tcagcctgaactaagatggtgacag

SEQ ID NO: 91919 - DNA, 25 bp, Homo sapien
catgtcatcagtgtacagcaatggt

SEQ ID NO: 91920 - DNA, 25 bp, Homo sapien
catatggatcatgtcatcagtgtac

SEQ ID NO: 91921 - DNA, 25 bp, Homo sapien
ctgcagagccgagaagatctcctct

SEQ ID NO: 91922 - DNA, 25 bp, Homo sapien
gagccgagaagatctcctctggaca

SEQ ID NO: 91923 - DNA, 25 bp, Homo sapien
gaagatctcctctggacaggcacct

SEQ ID NO: 91924 - DNA, 25 bp, Homo sapien
atctcctctggacaggcacctgcgg

SEQ ID NO: 91925 - DNA, 25 bp, Homo sapien
ttctgagcgcaaccactgcagaggc

SEQ ID NO: 91926 - DNA, 25 bp, Homo sapien
tagggcagttctgagcgcaaccact

SEQ ID NO: 91927 - DNA, 25 bp, Homo sapien
gcagaggcacctcagtgcccgagta

SEQ ID NO: 91928 - DNA, 25 bp, Homo sapien
ctgcagaggcacctcagtgcccgag

SEQ ID NO: 91929 - DNA, 25 bp, Homo sapien
gcttcatcaaggttgccatgacgat

SEQ ID NO: 91930 - DNA, 25 bp, Homo sapien
agtcagggcccgtgacacatcacct

SEQ ID NO: 91931 - DNA, 25 bp, Homo sapien
ttggcgctgtagctcagtcagggcc

SEQ ID NO: 91932 - DNA, 25 bp, Homo sapien
cacctccgtgctggaacaatgcctg

SEQ ID NO: 91933 - DNA, 25 bp, Homo sapien
gcgctggcggaagggctctaggcgt

SEQ ID NO: 91934 - DNA, 25 bp, Homo sapien
ctgcttgtctggcccatcccaggaa

SEQ ID NO: 91935 - DNA, 25 bp, Homo sapien
cttgtctggcccatcccaggaaggg

SEQ ID NO: 91936 - DNA, 25 bp, Homo sapien
ctggcccatcccaggaaggggtggg

SEQ ID NO: 91937 - DNA, 25 bp, Homo sapien
tctggcccatcccaggaaggggtgg

SEQ ID NO: 91938 - DNA, 25 bp, Homo sapien
agactgccaaaagccgcctgaccag

SEQ ID NO: 91939 - DNA, 25 bp, Homo sapien
atcccccaactcatagttcctgggt

SEQ ID NO: 91940 - DNA, 25 bp, Homo sapien
acactcctgggcaagcaagcggcgc

SEQ ID NO: 91941 - DNA, 25 bp, Homo sapien
acagcttctaccacatcccccaact

SEQ ID NO: 91942 - DNA, 25 bp, Homo sapien
agtggccaggtgtccactaagaaat

SEQ ID NO: 91943 - DNA, 25 bp, Homo sapien
tcaggacagatggtgcactcacagg

SEQ ID NO: 91944 - DNA, 25 bp, Homo sapien
gcttctccttcaaggcgatggtgaa

SEQ ID NO: 91945 - DNA, 25 bp, Homo sapien
caactgtgtgtcatcggtgaggtcg

SEQ ID NO: 91946 - DNA, 25 bp, Homo sapien
cgatggtgaagtgctggcggaagca

SEQ ID NO: 91947 - DNA, 25 bp, Homo sapien
tcttatggaacaacgcataggcatc

SEQ ID NO: 91948 - DNA, 25 bp, Homo sapien
cagcttcttatggaacaacgcatag

SEQ ID NO: 91949 - DNA, 25 bp, Homo sapien
acaacgcataggcatctggctctag

SEQ ID NO: 91950 - DNA, 25 bp, Homo sapien
caagaacttggggtcccgcatcagc

SEQ ID NO: 91951 - DNA, 25 bp, Homo sapien
tccagctgctcacgctcatatatga

SEQ ID NO: 91952 - DNA, 25 bp, Homo sapien
cgcacacagaaggtctggtgacact

SEQ ID NO: 91953 - DNA, 25 bp, Homo sapien
ttgcagcgcacacagaaggtctggt

SEQ ID NO: 91954 - DNA, 25 bp, Homo sapien
tgctcacgctcatatatgaagccaa

SEQ ID NO: 91955 - DNA, 25 bp, Homo sapien
tgggcctggtattctgggtcgttca

SEQ ID NO: 91956 - DNA, 25 bp, Homo sapien
gccgttttcctgaagatacattgct

SEQ ID NO: 91957 - DNA, 25 bp, Homo sapien
tattctgggtcgttcatgcgtttcc

SEQ ID NO: 91958 - DNA, 25 bp, Homo sapien
caatgccgttttcctgaagatacat

SEQ ID NO: 91959 - DNA, 25 bp, Homo sapien
tacagtgaaagtgcatgcagcctcc

SEQ ID NO: 91960 - DNA, 25 bp, Homo sapien
tagcagccgctgcagaactggtggc

SEQ ID NO: 91961 - DNA, 25 bp, Homo sapien
ccagggcgtacgagaacttgcattt

SEQ ID NO: 91962 - DNA, 25 bp, Homo sapien
ttcttggcgtaaaaggcattgtagc

SEQ ID NO: 91963 - DNA, 25 bp, Homo sapien
tggcagaaacccagatgggagagag

SEQ ID NO: 91964 - DNA, 25 bp, Homo sapien
agagaggaagttggagactgttggg

SEQ ID NO: 91965 - DNA, 25 bp, Homo sapien
cagaaacccagatgggagagaggaa

SEQ ID NO: 91966 - DNA, 25 bp, Homo sapien
aaacccagatgggagagaggaagtt

SEQ ID NO: 91967 - DNA, 25 bp, Homo sapien
tttcaccctgcagttaggctctgga

SEQ ID NO: 91968 - DNA, 25 bp, Homo sapien
tggtggccgtgcagggactttttca

SEQ ID NO: 91969 - DNA, 25 bp, Homo sapien
gtccagtcccgcaggtagaagaggc

SEQ ID NO: 91970 - DNA, 25 bp, Homo sapien
tagaagaggcagtctcgagggtggt

SEQ ID NO: 91971 - DNA, 25 bp, Homo sapien
ctgtattaaacatgacgttattgtc

SEQ ID NO: 91972 - DNA, 25 bp, Homo sapien
tcatggaacctaaaacagtgccctg

SEQ ID NO: 91973 - DNA, 25 bp, Homo sapien
taaaatggcttagctgcaaggtgga

SEQ ID NO: 91974 - DNA, 25 bp, Homo sapien
taatgccttcttgggtaccaggttc

SEQ ID NO: 91975 - DNA, 25 bp, Homo sapien
caattaacttgccaaagggcatgca

SEQ ID NO: 91976 - DNA, 25 bp, Homo sapien
ctggaattcccagccaatctctcat

SEQ ID NO: 91977 - DNA, 25 bp, Homo sapien
cctggaattcccagccaatctctca

SEQ ID NO: 91978 - DNA, 25 bp, Homo sapien
agcacctggaattcccagccaatct

SEQ ID NO: 91979 - DNA, 25 bp, Homo sapien
tatagcacctggaattcccagccaa

SEQ ID NO: 91980 - DNA, 25 bp, Homo sapien
caatgtgcccggccggccacctcta

SEQ ID NO: 91981 - DNA, 25 bp, Homo sapien
tgtgcccggccggccacctctattt

SEQ ID NO: 91982 - DNA, 25 bp, Homo sapien
aatgtgcccggccggccacctctat

SEQ ID NO: 91983 - DNA, 25 bp, Homo sapien
atgtgcccggccggccacctctatt

SEQ ID NO: 91984 - DNA, 25 bp, Homo sapien
tattatcggaagatcttacctcttt

SEQ ID NO: 91985 - DNA, 25 bp, Homo sapien
ctagttaacttattatcggaagatc

SEQ ID NO: 91986 - DNA, 25 bp, Homo sapien
ctcctggctattggctacctctggt

SEQ ID NO: 91987 - DNA, 25 bp, Homo sapien
cactcctggctattggctacctctg

SEQ ID NO: 91988 - DNA, 25 bp, Homo sapien
aacggcagaccatctgatacagagg

SEQ ID NO: 91989 - DNA, 25 bp, Homo sapien
caagctggcttttggctcataaaca

SEQ ID NO: 91990 - DNA, 25 bp, Homo sapien
tgggtactcagaggtgccgtcaacg

SEQ ID NO: 91991 - DNA, 25 bp, Homo sapien
actgggatatccacaaggcagggaa

SEQ ID NO: 91992 - DNA, 25 bp, Homo sapien
ccattgggaacctccttctgctcta

SEQ ID NO: 91993 - DNA, 25 bp, Homo sapien
ttctgctctatcactcggcagccgc

SEQ ID NO: 91994 - DNA, 25 bp, Homo sapien
cacaggccggcatagccagctggag

SEQ ID NO: 91995 - DNA, 25 bp, Homo sapien
gccggcatagccagctggagtttcc

SEQ ID NO: 91996 - DNA, 25 bp, Homo sapien
tgagacacctggacgaacaagatta

SEQ ID NO: 91997 - DNA, 25 bp, Homo sapien
gagtgtgtctaacatagctggactc

SEQ ID NO: 91998 - DNA, 25 bp, Homo sapien
ttggctaatattaactgagtgtgtc

SEQ ID NO: 91999 - DNA, 25 bp, Homo sapien
gaaaagggagcagaatatttgttgt

SEQ ID NO: 92000 - DNA, 25 bp, Homo sapien
agctcttccacctcatacaaggtgg

SEQ ID NO: 92001 - DNA, 25 bp, Homo sapien
cgagtgggcattgatgaggctcaca

SEQ ID NO: 92002 - DNA, 25 bp, Homo sapien
tgcaggtagcgctcagtggccgtct

SEQ ID NO: 92003 - DNA, 25 bp, Homo sapien
gatgaggctcacaagatactctttg

SEQ ID NO: 92004 - DNA, 25 bp, Homo sapien
agggggatcctctccagccaaaggc

SEQ ID NO: 92005 - DNA, 25 bp, Homo sapien
gcagggggatcctctccagccaaag

SEQ ID NO: 92006 - DNA, 25 bp, Homo sapien
ctgtaacaagcgggcctggtaagca

SEQ ID NO: 92007 - DNA, 25 bp, Homo sapien
taacaagcgggcctggtaagcaggg

SEQ ID NO: 92008 - DNA, 25 bp, Homo sapien
ctgcgggggatactctgtcccaagg

SEQ ID NO: 92009 - DNA, 25 bp, Homo sapien
cccaagggtacctcttctgtcagct

SEQ ID NO: 92010 - DNA, 25 bp, Homo sapien
tactctgtcccaagggtacctcttc

SEQ ID NO: 92011 - DNA, 25 bp, Homo sapien
ggatactctgtcccaagggtacctc

SEQ ID NO: 92012 - DNA, 25 bp, Homo sapien
taagatgcctctttattggtgctgg

SEQ ID NO: 92013 - DNA, 25 bp, Homo sapien
ccctcatcgggacccttgccctcag

SEQ ID NO: 92014 - DNA, 25 bp, Homo sapien
ctctttattggtgctggagctgttc

SEQ ID NO: 92015 - DNA, 25 bp, Homo sapien
catgggaccctcatcgggacccttg

SEQ ID NO: 92016 - DNA, 25 bp, Homo sapien
agcaaagctctgttcaccccgctct

SEQ ID NO: 92017 - DNA, 25 bp, Homo sapien
gagggtcaggcactaggttgcaggg

SEQ ID NO: 92018 - DNA, 25 bp, Homo sapien
ggcctcccttgaccatccagggtgt

SEQ ID NO: 92019 - DNA, 25 bp, Homo sapien
tgttcaccccgctctttccctggtg

SEQ ID NO: 92020 - DNA, 25 bp, Homo sapien
ggactgctgtgtacacctgtgcatc

SEQ ID NO: 92021 - DNA, 25 bp, Homo sapien
tctggactgctgtgtacacctgtgc

SEQ ID NO: 92022 - DNA, 25 bp, Homo sapien
tggactgctgtgtacacctgtgcat

SEQ ID NO: 92023 - DNA, 25 bp, Homo sapien
actgctgtgtacacctgtgcatctg

SEQ ID NO: 92024 - DNA, 25 bp, Homo sapien
tcacgtggtctgagttgcagggaac

SEQ ID NO: 92025 - DNA, 25 bp, Homo sapien
gacgacctcagcttaactcctggct

SEQ ID NO: 92026 - DNA, 25 bp, Homo sapien
gcagcatctgagcatctcactatca

SEQ ID NO: 92027 - DNA, 25 bp, Homo sapien
tatcaggatgccactgtcgcagcag

SEQ ID NO: 92028 - DNA, 25 bp, Homo sapien
tgctccaccacccagttccggagtt

SEQ ID NO: 92029 - DNA, 25 bp, Homo sapien
ccggaacatggtcttagctgtatca

SEQ ID NO: 92030 - DNA, 25 bp, Homo sapien
tcgggtgcagcgtgccctgcctgat

SEQ ID NO: 92031 - DNA, 25 bp, Homo sapien
tcttagctgtatcatcccagcacac

SEQ ID NO: 92032 - DNA, 25 bp, Homo sapien
tggtcctcccggaagtcctgcttgc

SEQ ID NO: 92033 - DNA, 25 bp, Homo sapien
caggcagacgcaagtgctcgaggat

SEQ ID NO: 92034 - DNA, 25 bp, Homo sapien
ttgtactggactctgcaaatgatgc

SEQ ID NO: 92035 - DNA, 25 bp, Homo sapien
gaggatgagtgtaccagtgtgtata

SEQ ID NO: 92036 - DNA, 25 bp, Homo sapien
agtgtgtatacaccatcccacacac

SEQ ID NO: 92037 - DNA, 25 bp, Homo sapien
caccttgtagggctcagcaacatcc

SEQ ID NO: 92038 - DNA, 25 bp, Homo sapien
tcttgttgagtgcacagcgcaggcg

SEQ ID NO: 92039 - DNA, 25 bp, Homo sapien
gcgcaggcgagtcttccagacagct

SEQ ID NO: 92040 - DNA, 25 bp, Homo sapien
tggtggcagcaactgatacaccttg

SEQ ID NO: 92041 - DNA, 25 bp, Homo sapien
tgtgctgtcgctttgatggtacttt

SEQ ID NO: 92042 - DNA, 25 bp, Homo sapien
cagaactgtgctgtcgctttgatgg

SEQ ID NO: 92043 - DNA, 25 bp, Homo sapien
ggacacagaactgtgctgtcgcttt

SEQ ID NO: 92044 - DNA, 25 bp, Homo sapien
tcctggagcacagagggactgagtg

SEQ ID NO: 92045 - DNA, 25 bp, Homo sapien
tcggcctcccaagacacagtgtctt

SEQ ID NO: 92046 - DNA, 25 bp, Homo sapien
cacctctccctctggttactgtcct

SEQ ID NO: 92047 - DNA, 25 bp, Homo sapien
gtgtctttcattggcccacctctcc

SEQ ID NO: 92048 - DNA, 25 bp, Homo sapien
aggcagatgccacaacgcacagcta

SEQ ID NO: 92049 - DNA, 25 bp, Homo sapien
ctgctgctcccaatgtctgaatgga

SEQ ID NO: 92050 - DNA, 25 bp, Homo sapien
cccttgaaagggggcctcagttgtg

SEQ ID NO: 92051 - DNA, 25 bp, Homo sapien
ctgatccccttgaaagggggcctca

SEQ ID NO: 92052 - DNA, 25 bp, Homo sapien
ttgaaagggggcctcagttgtgtct

SEQ ID NO: 92053 - DNA, 25 bp, Homo sapien
ctctgatccccttgaaagggggcct

SEQ ID NO: 92054 - DNA, 25 bp, Homo sapien
gctctggaggaagcagaaactccag

SEQ ID NO: 92055 - DNA, 25 bp, Homo sapien
tctggaggaagcagaaactccaggg

SEQ ID NO: 92056 - DNA, 25 bp, Homo sapien
ggctctggaggaagcagaaactcca

SEQ ID NO: 92057 - DNA, 25 bp, Homo sapien
tggaggaagcagaaactccagggac

SEQ ID NO: 92058 - DNA, 25 bp, Homo sapien
taatgcatgcatagtcaaaggtgga

SEQ ID NO: 92059 - DNA, 25 bp, Homo sapien
taagccctgactgactagataatgc

SEQ ID NO: 92060 - DNA, 25 bp, Homo sapien
tctggccaggcatatggaattctcg

SEQ ID NO: 92061 - DNA, 25 bp, Homo sapien
atgtgattcaccatgaggcctcagg

SEQ ID NO: 92062 - DNA, 25 bp, Homo sapien
gcaaaggcgctgcacgaagaggcct

SEQ ID NO: 92063 - DNA, 25 bp, Homo sapien
ccacaaggcggcaatccaggctttg

SEQ ID NO: 92064 - DNA, 25 bp, Homo sapien
aagtaggcggttctgaagagctcca

SEQ ID NO: 92065 - DNA, 25 bp, Homo sapien
ccacgcgcccgttgtagatgaaggt

SEQ ID NO: 92066 - DNA, 25 bp, Homo sapien
tgggcatatggccacacaggatatg

SEQ ID NO: 92067 - DNA, 25 bp, Homo sapien
cacaagcgcaggagtgccatgcata

SEQ ID NO: 92068 - DNA, 25 bp, Homo sapien
gccatgcataggctacatggaggat

SEQ ID NO: 92069 - DNA, 25 bp, Homo sapien
caggatatgcaacacacaagcgcag

SEQ ID NO: 92070 - DNA, 25 bp, Homo sapien
gagtttagagtcctcccaggtagca

SEQ ID NO: 92071 - DNA, 25 bp, Homo sapien
tagaagtagcagatcacagcacagc

SEQ ID NO: 92072 - DNA, 25 bp, Homo sapien
tgctaactcagatgtgcccagacct

SEQ ID NO: 92073 - DNA, 25 bp, Homo sapien
tgtgtgtgatgtgtgccagctctcc

SEQ ID NO: 92074 - DNA, 25 bp, Homo sapien
ttctgtggagtatggctggagccat

SEQ ID NO: 92075 - DNA, 25 bp, Homo sapien
tgataagattctgtggagtatggct

SEQ ID NO: 92076 - DNA, 25 bp, Homo sapien
cagtgttacctggaacttcggtggg

SEQ ID NO: 92077 - DNA, 25 bp, Homo sapien
ttcagtgttacctggaacttcggtg

SEQ ID NO: 92078 - DNA, 25 bp, Homo sapien
gatgggtactctacccctgctccga

SEQ ID NO: 92079 - DNA, 25 bp, Homo sapien
tgtctctgctctcattagatgggta

SEQ ID NO: 92080 - DNA, 25 bp, Homo sapien
gctctcattagatgggtactctacc

SEQ ID NO: 92081 - DNA, 25 bp, Homo sapien
cattagatgggtactctacccctgc

SEQ ID NO: 92082 - DNA, 25 bp, Homo sapien
tccagcaagtatcgggcaaaggcct

SEQ ID NO: 92083 - DNA, 25 bp, Homo sapien
gagtctgctccagcaagtatcgggc

SEQ ID NO: 92084 - DNA, 25 bp, Homo sapien
gctctggagtctgctccagcaagta

SEQ ID NO: 92085 - DNA, 25 bp, Homo sapien
caagtatcgggcaaaggcctgctcc

SEQ ID NO: 92086 - DNA, 25 bp, Homo sapien
gaatttcctagtcccttacagatga

SEQ ID NO: 92087 - DNA, 25 bp, Homo sapien
cagccagtgtgtgcgaggattttca

SEQ ID NO: 92088 - DNA, 25 bp, Homo sapien
tatcacaaagaggacaggtcaatcg

SEQ ID NO: 92089 - DNA, 25 bp, Homo sapien
gattttcaggacacgattatcacgg

SEQ ID NO: 92090 - DNA, 25 bp, Homo sapien
ttttaagtccttagtgaatatctaa

SEQ ID NO: 92091 - DNA, 25 bp, Homo sapien
tttaagtccttagtgaatatctaag

SEQ ID NO: 92092 - DNA, 25 bp, Homo sapien
attttaagtccttagtgaatatcta

SEQ ID NO: 92093 - DNA, 25 bp, Homo sapien
tagcaagaactgtggagcccagact

SEQ ID NO: 92094 - DNA, 25 bp, Homo sapien
gaagaggtgccagtaacagcaggta

SEQ ID NO: 92095 - DNA, 25 bp, Homo sapien
cccagccggccagagtgtcttttat

SEQ ID NO: 92096 - DNA, 25 bp, Homo sapien
ggaatccagtttgggagtaccctgc

SEQ ID NO: 92097 - DNA, 25 bp, Homo sapien
gaaagctaagctggtgtcatatgca

SEQ ID NO: 92098 - DNA, 25 bp, Homo sapien
tgcatcacattgagggcacaacagg

SEQ ID NO: 92099 - DNA, 25 bp, Homo sapien
cactgaagcttgtcaaatgaggcag

SEQ ID NO: 92100 - DNA, 25 bp, Homo sapien
gcacaacagggtttgtacacctctg

SEQ ID NO: 92101 - DNA, 25 bp, Homo sapien
aaatacatgaagtggccgtaagtgc

SEQ ID NO: 92102 - DNA, 25 bp, Homo sapien
ccagcatgggcgattctgtcaaaaa

SEQ ID NO: 92103 - DNA, 25 bp, Homo sapien
taagtcatgtgcctacctgaaggaa

SEQ ID NO: 92104 - DNA, 25 bp, Homo sapien
taatgacggctgctatttagggagg

SEQ ID NO: 92105 - DNA, 25 bp, Homo sapien
ggcagccagcaaaccaatcataagg

SEQ ID NO: 92106 - DNA, 25 bp, Homo sapien
tgaggtgttccgaccaatgggctcc

SEQ ID NO: 92107 - DNA, 25 bp, Homo sapien
caagatgtaccttgcacggcgcctg

SEQ ID NO: 92108 - DNA, 25 bp, Homo sapien
tcataaggattttgcgcgccgctgg

SEQ ID NO: 92109 - DNA, 25 bp, Homo sapien
tttggacttctctggtggcaaggtg

SEQ ID NO: 92110 - DNA, 25 bp, Homo sapien
gaggcaacgaacaatgggcagatac

SEQ ID NO: 92111 - DNA, 25 bp, Homo sapien
agccaagttaatgaggcaacgaaca

SEQ ID NO: 92112 - DNA, 25 bp, Homo sapien
ggagagaagtcaggatttggacttc

SEQ ID NO: 92113 - DNA, 25 bp, Homo sapien
ctttagggcacagaattcccaacac

SEQ ID NO: 92114 - DNA, 25 bp, Homo sapien
gattccaccagatccccgttcggat

SEQ ID NO: 92115 - DNA, 25 bp, Homo sapien
ccccgttcggatctgagtcggaatt

SEQ ID NO: 92116 - DNA, 25 bp, Homo sapien
ggtctttcaccctcgattccaccag

SEQ ID NO: 92117 - DNA, 25 bp, Homo sapien
cagatccccgttcggatctgagtcg

SEQ ID NO: 92118 - DNA, 25 bp, Homo sapien
ccggtgtggcgctgaagcacgttgg

SEQ ID NO: 92119 - DNA, 25 bp, Homo sapien
cgctgaagcacgttgggatagtaga

SEQ ID NO: 92120 - DNA, 25 bp, Homo sapien
gaagcacgttgggatagtagaacat

SEQ ID NO: 92121 - DNA, 25 bp, Homo sapien
agcagccggtgtggcgctgaagcac

SEQ ID NO: 92122 - DNA, 25 bp, Homo sapien
caccctcaggtattcgcgcttcacc

SEQ ID NO: 92123 - DNA, 25 bp, Homo sapien
aggtattcgcgcttcaccaaccggc

SEQ ID NO: 92124 - DNA, 25 bp, Homo sapien
tcaccaaccggctgccgcgagtcgc

SEQ ID NO: 92125 - DNA, 25 bp, Homo sapien
accggctgccgcgagtcgccgccag

SEQ ID NO: 92126 - DNA, 25 bp, Homo sapien
caccaggccctccttcccttttctg

SEQ ID NO: 92127 - DNA, 25 bp, Homo sapien
gatcacaccgatctgaagttgggct

SEQ ID NO: 92128 - DNA, 25 bp, Homo sapien
tggcattgttgagaatagacgcgga

SEQ ID NO: 92129 - DNA, 25 bp, Homo sapien
gggttgcactcgtaccagcacgtaa

SEQ ID NO: 92130 - DNA, 25 bp, Homo sapien
cagcacgtaattgaggatttcctcg

SEQ ID NO: 92131 - DNA, 25 bp, Homo sapien
cagggaggacgaggtagacagccag

SEQ ID NO: 92132 - DNA, 25 bp, Homo sapien
ctcagcccgccccacctttgagggt

SEQ ID NO: 92133 - DNA, 25 bp, Homo sapien
gccagcttagcagacagctgctcag

SEQ ID NO: 92134 - DNA, 25 bp, Homo sapien
ggacgaggtagacagccagcttagc

SEQ ID NO: 92135 - DNA, 25 bp, Homo sapien
atctattcggatctgcagctgggca

SEQ ID NO: 92136 - DNA, 25 bp, Homo sapien
tctccatatctattcggatctgcag

SEQ ID NO: 92137 - DNA, 25 bp, Homo sapien
gctcagtctccatatctattcggat

SEQ ID NO: 92138 - DNA, 25 bp, Homo sapien
cgctccaagatgtgctggatgtcct

SEQ ID NO: 92139 - DNA, 25 bp, Homo sapien
gggatctggagcatcttctagggtc

SEQ ID NO: 92140 - DNA, 25 bp, Homo sapien
ggactaggaagtctgggatccacag

SEQ ID NO: 92141 - DNA, 25 bp, Homo sapien
tgggatccacagacatcatcccaaa

SEQ ID NO: 92142 - DNA, 25 bp, Homo sapien
ctgagggatatcgaaaggactagga

SEQ ID NO: 92143 - DNA, 25 bp, Homo sapien
cttggcagtccccctgcaccatctc

SEQ ID NO: 92144 - DNA, 25 bp, Homo sapien
tgggattgcagcctctaagaggtgt

SEQ ID NO: 92145 - DNA, 25 bp, Homo sapien
gggattgcagcctctaagaggtgtc

SEQ ID NO: 92146 - DNA, 25 bp, Homo sapien
ctgggattgcagcctctaagaggtg

SEQ ID NO: 92147 - DNA, 25 bp, Homo sapien
tctgcctccaggatcgtgatggcct

SEQ ID NO: 92148 - DNA, 25 bp, Homo sapien
caatctccagcatccgtatgggctc

SEQ ID NO: 92149 - DNA, 25 bp, Homo sapien
tccagcatccgtatgggctctgcct

SEQ ID NO: 92150 - DNA, 25 bp, Homo sapien
gtggcagcacagtgaccggaatcct

SEQ ID NO: 92151 - DNA, 25 bp, Homo sapien
caggtccagttctcggcggctgacc

SEQ ID NO: 92152 - DNA, 25 bp, Homo sapien
tgcgatcagcaggtccagttctcgg

SEQ ID NO: 92153 - DNA, 25 bp, Homo sapien
tagcttcttcctctgcgatcagcag

SEQ ID NO: 92154 - DNA, 25 bp, Homo sapien
tcctctgcgatcagcaggtccagtt

SEQ ID NO: 92155 - DNA, 25 bp, Homo sapien
tccaggcgggccctacgctgccgga

SEQ ID NO: 92156 - DNA, 25 bp, Homo sapien
ctccaggcgggccctacgctgccgg

SEQ ID NO: 92157 - DNA, 25 bp, Homo sapien
ccaggcgggccctacgctgccggag

SEQ ID NO: 92158 - DNA, 25 bp, Homo sapien
tgcaggagctggaggtgggagccgc

SEQ ID NO: 92159 - DNA, 25 bp, Homo sapien
caggagctggaggtgggagccgcgg

SEQ ID NO: 92160 - DNA, 25 bp, Homo sapien
ctgcaggagctggaggtgggagccg

SEQ ID NO: 92161 - DNA, 25 bp, Homo sapien
ggagctggaggtgggagccgcggga

SEQ ID NO: 92162 - DNA, 25 bp, Homo sapien
agaaatgaggagacccttcccagca

SEQ ID NO: 92163 - DNA, 25 bp, Homo sapien
agcactgacaccctacctggtctag

SEQ ID NO: 92164 - DNA, 25 bp, Homo sapien
gacaccctacctggtctaggagttc

SEQ ID NO: 92165 - DNA, 25 bp, Homo sapien
accctacctggtctaggagttcttg

SEQ ID NO: 92166 - DNA, 25 bp, Homo sapien
catgagtagggccccaggttcccag

SEQ ID NO: 92167 - DNA, 25 bp, Homo sapien
gcctcagctcctcaggacccagtgc

SEQ ID NO: 92168 - DNA, 25 bp, Homo sapien
gacccagtgcctctcctattccttc

SEQ ID NO: 92169 - DNA, 25 bp, Homo sapien
ggttcccagcctgtcagcctcagct

SEQ ID NO: 92170 - DNA, 25 bp, Homo sapien
agttgggatataaagcccttgtctg

SEQ ID NO: 92171 - DNA, 25 bp, Homo sapien
cccttaccccttgcagatgccaggg

SEQ ID NO: 92172 - DNA, 25 bp, Homo sapien
tatccaggtactcccagaaaagccc

SEQ ID NO: 92173 - DNA, 25 bp, Homo sapien
cagggtcctccctttagcaagttgg

SEQ ID NO: 92174 - DNA, 25 bp, Homo sapien
tggggctggcagacgcagctcctcc

SEQ ID NO: 92175 - DNA, 25 bp, Homo sapien
ggctggcagacgcagctcctccggg

SEQ ID NO: 92176 - DNA, 25 bp, Homo sapien
gtggggctggcagacgcagctcctc

SEQ ID NO: 92177 - DNA, 25 bp, Homo sapien
ctgggtggggctggcagacgcagct

SEQ ID NO: 92178 - DNA, 25 bp, Homo sapien
cctgtaagctagcagtggccctggg

SEQ ID NO: 92179 - DNA, 25 bp, Homo sapien
tatcatctgcattaaggacccctgt

SEQ ID NO: 92180 - DNA, 25 bp, Homo sapien
tacccatctgggaagcgtaggccag

SEQ ID NO: 92181 - DNA, 25 bp, Homo sapien
cattctggtggactgctaacaggac

SEQ ID NO: 92182 - DNA, 25 bp, Homo sapien
agcagtgggctctggtttgcagttg

SEQ ID NO: 92183 - DNA, 25 bp, Homo sapien
ccagaacagtaaccggcgacgacgg

SEQ ID NO: 92184 - DNA, 25 bp, Homo sapien
cttgtcccagaacagtaaccggcga

SEQ ID NO: 92185 - DNA, 25 bp, Homo sapien
tcctggaatttctccggggagatct

SEQ ID NO: 92186 - DNA, 25 bp, Homo sapien
aacaactccgcagggcctctgatgg

SEQ ID NO: 92187 - DNA, 25 bp, Homo sapien
actccgcagggcctctgatggtcct

SEQ ID NO: 92188 - DNA, 25 bp, Homo sapien
gggttctgaacaactccgcagggcc

SEQ ID NO: 92189 - DNA, 25 bp, Homo sapien
cctctgatggtcctctcgggcggct

SEQ ID NO: 92190 - DNA, 25 bp, Homo sapien
gagacccagtagttcagggggtagc

SEQ ID NO: 92191 - DNA, 25 bp, Homo sapien
acccagtagttcagggggtagccag

SEQ ID NO: 92192 - DNA, 25 bp, Homo sapien
tccagagacccagtagttcaggggg

SEQ ID NO: 92193 - DNA, 25 bp, Homo sapien
cagagacccagtagttcagggggta

SEQ ID NO: 92194 - DNA, 25 bp, Homo sapien
ctaaagacaccataaggggaacact

SEQ ID NO: 92195 - DNA, 25 bp, Homo sapien
agacaccataaggggaacactgggc

SEQ ID NO: 92196 - DNA, 25 bp, Homo sapien
taaagacaccataaggggaacactg

SEQ ID NO: 92197 - DNA, 25 bp, Homo sapien
aagacaccataaggggaacactggg

SEQ ID NO: 92198 - DNA, 25 bp, Homo sapien
accgttcttctggtgggatgaggct

SEQ ID NO: 92199 - DNA, 25 bp, Homo sapien
gggatgaggctgatgcgggacttct

SEQ ID NO: 92200 - DNA, 25 bp, Homo sapien
caccgttcttctggtgggatgaggc

SEQ ID NO: 92201 - DNA, 25 bp, Homo sapien
gatgaggctgatgcgggacttctcc

SEQ ID NO: 92202 - DNA, 25 bp, Homo sapien
aggacatgagagagtagggaaggtg

SEQ ID NO: 92203 - DNA, 25 bp, Homo sapien
gacatgagagagtagggaaggtggc

SEQ ID NO: 92204 - DNA, 25 bp, Homo sapien
taggaggacatgagagagtagggaa

SEQ ID NO: 92205 - DNA, 25 bp, Homo sapien
ggaggacatgagagagtagggaagg

SEQ ID NO: 92206 - DNA, 25 bp, Homo sapien
aggcaccacgggcaatgcaggagct

SEQ ID NO: 92207 - DNA, 25 bp, Homo sapien
cctcagggagttcaggcaccacggg

SEQ ID NO: 92208 - DNA, 25 bp, Homo sapien
cgggcaatgcaggagcttctggcgc

SEQ ID NO: 92209 - DNA, 25 bp, Homo sapien
gcaccacgggcaatgcaggagcttc

SEQ ID NO: 92210 - DNA, 25 bp, Homo sapien
gggtccaccccatcaaggtgccacc

SEQ ID NO: 92211 - DNA, 25 bp, Homo sapien
agcccgggtccaccccatcaaggtg

SEQ ID NO: 92212 - DNA, 25 bp, Homo sapien
agggatcaagaaccattagcagagg

SEQ ID NO: 92213 - DNA, 25 bp, Homo sapien
agaaccattagcagaggcttcagcc

SEQ ID NO: 92214 - DNA, 25 bp, Homo sapien
accaggctgctgaagtcgggctccc

SEQ ID NO: 92215 - DNA, 25 bp, Homo sapien
tcgggctccctgttagcctgcagct

SEQ ID NO: 92216 - DNA, 25 bp, Homo sapien
gctgaagtcgggctccctgttagcc

SEQ ID NO: 92217 - DNA, 25 bp, Homo sapien
aggctgctgaagtcgggctccctgt

SEQ ID NO: 92218 - DNA, 25 bp, Homo sapien
ccctgtacgggcctctggtctctgt

SEQ ID NO: 92219 - DNA, 25 bp, Homo sapien
ggagtccctgtacgggcctctggtc

SEQ ID NO: 92220 - DNA, 25 bp, Homo sapien
agtccctgtacgggcctctggtctc

SEQ ID NO: 92221 - DNA, 25 bp, Homo sapien
tccctgtacgggcctctggtctctg

SEQ ID NO: 92222 - DNA, 25 bp, Homo sapien
ggaggcgaccatatggcttttcttg

SEQ ID NO: 92223 - DNA, 25 bp, Homo sapien
ggcttttcttgtttcacgtgaagaa

SEQ ID NO: 92224 - DNA, 25 bp, Homo sapien
tgaagaatctgttgcgctgagagca

SEQ ID NO: 92225 - DNA, 25 bp, Homo sapien
cggctggatcaggaggcgaccatat

SEQ ID NO: 92226 - DNA, 25 bp, Homo sapien
gacccagtgaggcacgacgtggttt

SEQ ID NO: 92227 - DNA, 25 bp, Homo sapien
tgttttctgcttgaacaatagctct

SEQ ID NO: 92228 - DNA, 25 bp, Homo sapien
gcttgaacaatagctctgagagcaa

SEQ ID NO: 92229 - DNA, 25 bp, Homo sapien
tagaagtggccggtttcctggcagc

SEQ ID NO: 92230 - DNA, 25 bp, Homo sapien
caggttatagatgtggctcccgagc

SEQ ID NO: 92231 - DNA, 25 bp, Homo sapien
gctcccgagcttctgcgtatctgca

SEQ ID NO: 92232 - DNA, 25 bp, Homo sapien
tgaatcagtaccaggtgcaaccacc

SEQ ID NO: 92233 - DNA, 25 bp, Homo sapien
tgacaacaagatcccaccaggtgag

SEQ ID NO: 92234 - DNA, 25 bp, Homo sapien
tctggatataggaactcgagccctg

SEQ ID NO: 92235 - DNA, 25 bp, Homo sapien
tcagcctaacggaagtggaggagcc

SEQ ID NO: 92236 - DNA, 25 bp, Homo sapien
ccggacctctttgtgggaagcgaat

SEQ ID NO: 92237 - DNA, 25 bp, Homo sapien
aattgaatcaccttggcaacccgcg

SEQ ID NO: 92238 - DNA, 25 bp, Homo sapien
cgagcggcctagcagccactcctct

SEQ ID NO: 92239 - DNA, 25 bp, Homo sapien
ctttccaggagcaagcgagcggcct

SEQ ID NO: 92240 - DNA, 25 bp, Homo sapien
actcctctcccgaaggggtgtcagg

SEQ ID NO: 92241 - DNA, 25 bp, Homo sapien
ggggtgtcagggtcctcgctgccag

SEQ ID NO: 92242 - DNA, 25 bp, Homo sapien
cggcttgcttatcgtgggctctgaa

SEQ ID NO: 92243 - DNA, 25 bp, Homo sapien
aaacatagactaacggacctcgaga

SEQ ID NO: 92244 - DNA, 25 bp, Homo sapien
gctctgaacggtcactgtgcggcca

SEQ ID NO: 92245 - DNA, 25 bp, Homo sapien
gaagcccaaagacatacacagtgat

SEQ ID NO: 92246 - DNA, 25 bp, Homo sapien
gacagtctgaccttgctggcaggat

SEQ ID NO: 92247 - DNA, 25 bp, Homo sapien
ccggataggtaacttggtggcaact

SEQ ID NO: 92248 - DNA, 25 bp, Homo sapien
tatgctataaacaaacctgggagga

SEQ ID NO: 92249 - DNA, 25 bp, Homo sapien
agcagttttccagggcacaccatgg

SEQ ID NO: 92250 - DNA, 25 bp, Homo sapien
caccctcttgccgtgagttatgaga

SEQ ID NO: 92251 - DNA, 25 bp, Homo sapien
tctcatggtcagttgtaatctgcaa

SEQ ID NO: 92252 - DNA, 25 bp, Homo sapien
gatgaatgtgtagcaccaccctctt

SEQ ID NO: 92253 - DNA, 25 bp, Homo sapien
ttcccgcaacagaagattatatggt

SEQ ID NO: 92254 - DNA, 25 bp, Homo sapien
tagaatatcaaaggcaaagggaggc

SEQ ID NO: 92255 - DNA, 25 bp, Homo sapien
ccctacagtttcaaccatagaagac

SEQ ID NO: 92256 - DNA, 25 bp, Homo sapien
agattctgtaatgccccacaagccg

SEQ ID NO: 92257 - DNA, 25 bp, Homo sapien
atagaagacagccacacccaaaggg

SEQ ID NO: 92258 - DNA, 25 bp, Homo sapien
tgagcagcattgagggcccaactga

SEQ ID NO: 92259 - DNA, 25 bp, Homo sapien
actgaggttggagaacaacttgtcc

SEQ ID NO: 92260 - DNA, 25 bp, Homo sapien
aggcccaatactttgtctgtcacag

SEQ ID NO: 92261 - DNA, 25 bp, Homo sapien
ccactaagctatatagggaggtcaa

SEQ ID NO: 92262 - DNA, 25 bp, Homo sapien
ggactcagccctccactaggaactt

SEQ ID NO: 92263 - DNA, 25 bp, Homo sapien
gactcagccctccactaggaacttg

SEQ ID NO: 92264 - DNA, 25 bp, Homo sapien
actcagccctccactaggaacttgg

SEQ ID NO: 92265 - DNA, 25 bp, Homo sapien
tggactcagccctccactaggaact

SEQ ID NO: 92266 - DNA, 25 bp, Homo sapien
tatcaaagtgaagtaggtccccaaa

SEQ ID NO: 92267 - DNA, 25 bp, Homo sapien
gctgctgaaggctagggtatcaaag

SEQ ID NO: 92268 - DNA, 25 bp, Homo sapien
tacttggaagcctcctatccaaagg

SEQ ID NO: 92269 - DNA, 25 bp, Homo sapien
gagcagggagctttactacttggaa

SEQ ID NO: 92270 - DNA, 25 bp, Homo sapien
tataccgacccataggagccatggc

SEQ ID NO: 92271 - DNA, 25 bp, Homo sapien
gagccatggccaatggccttgccca

SEQ ID NO: 92272 - DNA, 25 bp, Homo sapien
ggttggtgctgcctctaagacatct

SEQ ID NO: 92273 - DNA, 25 bp, Homo sapien
tctttgagatgatcttgactgccac

SEQ ID NO: 92274 - DNA, 25 bp, Homo sapien
ctgaccccagaagaaggacccatca

SEQ ID NO: 92275 - DNA, 25 bp, Homo sapien
gaccccagaagaaggacccatcaaa

SEQ ID NO: 92276 - DNA, 25 bp, Homo sapien
tgaccccagaagaaggacccatcaa

SEQ ID NO: 92277 - DNA, 25 bp, Homo sapien
caatggcccgatagaagttgatgag

SEQ ID NO: 92278 - DNA, 25 bp, Homo sapien
cacgatgctcttgctgtgcaggtag

SEQ ID NO: 92279 - DNA, 25 bp, Homo sapien
gccccgtagcgctggatccattcaa

SEQ ID NO: 92280 - DNA, 25 bp, Homo sapien
aatgatgtatactcgagatgtgctc

SEQ ID NO: 92281 - DNA, 25 bp, Homo sapien
catgaataggctagatattgaggag

SEQ ID NO: 92282 - DNA, 25 bp, Homo sapien
ttaaaatagagtgcatgaataggct

SEQ ID NO: 92283 - DNA, 25 bp, Homo sapien
gaaatgggagatgtgcataaaaccc

SEQ ID NO: 92284 - DNA, 25 bp, Homo sapien
agtactttatcagtatccttgacca

SEQ ID NO: 92285 - DNA, 25 bp, Homo sapien
atctgaggaccaccgggagctcacc

SEQ ID NO: 92286 - DNA, 25 bp, Homo sapien
atggtatctgaggaccaccgggagc

SEQ ID NO: 92287 - DNA, 25 bp, Homo sapien
gtatctgaggaccaccgggagctca

SEQ ID NO: 92288 - DNA, 25 bp, Homo sapien
tggtatctgaggaccaccgggagct

SEQ ID NO: 92289 - DNA, 25 bp, Homo sapien
agagggcttagttttagactgggag

SEQ ID NO: 92290 - DNA, 25 bp, Homo sapien
gagagggcttagttttagactggga

SEQ ID NO: 92291 - DNA, 25 bp, Homo sapien
agcagcagaaaggctgggcatcagg

SEQ ID NO: 92292 - DNA, 25 bp, Homo sapien
taccagcagcagaaaggctgggcat

SEQ ID NO: 92293 - DNA, 25 bp, Homo sapien
ccagcagcagaaaggctgggcatca

SEQ ID NO: 92294 - DNA, 25 bp, Homo sapien
ctaccagcagcagaaaggctgggca

SEQ ID NO: 92295 - DNA, 25 bp, Homo sapien
cactagagtgtaaaggatgacgccc

SEQ ID NO: 92296 - DNA, 25 bp, Homo sapien
tagggcaagcctcgtaagatctctg

SEQ ID NO: 92297 - DNA, 25 bp, Homo sapien
taagaagggctacaacccacaggct

SEQ ID NO: 92298 - DNA, 25 bp, Homo sapien
tcatcaaagggcagatgggcgacca

SEQ ID NO: 92299 - DNA, 25 bp, Homo sapien
tgggagatggtatggttagctggga

SEQ ID NO: 92300 - DNA, 25 bp, Homo sapien
ggagatggtatggttagctgggaaa

SEQ ID NO: 92301 - DNA, 25 bp, Homo sapien
gatggtatggttagctgggaaagtg

SEQ ID NO: 92302 - DNA, 25 bp, Homo sapien
gagatggtatggttagctgggaaag

SEQ ID NO: 92303 - DNA, 25 bp, Homo sapien
ggatagcccatcataccactctggt

SEQ ID NO: 92304 - DNA, 25 bp, Homo sapien
tgattttatcttggagacccaggca

SEQ ID NO: 92305 - DNA, 25 bp, Homo sapien
gaaagaagcaggatagcccatcata

SEQ ID NO: 92306 - DNA, 25 bp, Homo sapien
gattttatcttggagacccaggcag

SEQ ID NO: 92307 - DNA, 25 bp, Homo sapien
gagaggtcttgcctgagtttttctc

SEQ ID NO: 92308 - DNA, 25 bp, Homo sapien
ccacacaggcaatgagcagttggac

SEQ ID NO: 92309 - DNA, 25 bp, Homo sapien
gtgccacacaggcaatgagcagttg

SEQ ID NO: 92310 - DNA, 25 bp, Homo sapien
agagagaggtcttgcctgagttttt

SEQ ID NO: 92311 - DNA, 25 bp, Homo sapien
cagaatggtggcacgcttagtggct

SEQ ID NO: 92312 - DNA, 25 bp, Homo sapien
cacgcttagtggcttggcgtagcat

SEQ ID NO: 92313 - DNA, 25 bp, Homo sapien
cctgatctcatgggtgggttgctca

SEQ ID NO: 92314 - DNA, 25 bp, Homo sapien
atgtccagaatggtggcacgcttag

SEQ ID NO: 92315 - DNA, 25 bp, Homo sapien
aggtcgtaatttgcaaggattggtg

SEQ ID NO: 92316 - DNA, 25 bp, Homo sapien
ggtcgtaatttgcaaggattggtgc

SEQ ID NO: 92317 - DNA, 25 bp, Homo sapien
caggtcgtaatttgcaaggattggt

SEQ ID NO: 92318 - DNA, 25 bp, Homo sapien
tcaggtcgtaatttgcaaggattgg

SEQ ID NO: 92319 - DNA, 25 bp, Homo sapien
ttagcccaagacctcctgctttgct

SEQ ID NO: 92320 - DNA, 25 bp, Homo sapien
gatttttagcccaagacctcctgct

SEQ ID NO: 92321 - DNA, 25 bp, Homo sapien
gaaactaaatcagacttagatttat

SEQ ID NO: 92322 - DNA, 25 bp, Homo sapien
ttttagcccaagacctcctgctttg

SEQ ID NO: 92323 - DNA, 25 bp, Homo sapien
taagattgccttgagaaaagaatgt

SEQ ID NO: 92324 - DNA, 25 bp, Homo sapien
cagcagtgttccctgctataagatt

SEQ ID NO: 92325 - DNA, 25 bp, Homo sapien
gaaatctatctcttactccagcagt

SEQ ID NO: 92326 - DNA, 25 bp, Homo sapien
ccctgctataagattgccttgagaa

SEQ ID NO: 92327 - DNA, 25 bp, Homo sapien
tttctaaaagaactaacagtgccat

SEQ ID NO: 92328 - DNA, 25 bp, Homo sapien
ctttggactatagacaggcagagcc

SEQ ID NO: 92329 - DNA, 25 bp, Homo sapien
tgagcatttaaacagcacaaagatg

SEQ ID NO: 92330 - DNA, 25 bp, Homo sapien
gggcttttaccccactacttgagca

SEQ ID NO: 92331 - DNA, 25 bp, Homo sapien
cagctttaagaggagcgcgtcggtc

SEQ ID NO: 92332 - DNA, 25 bp, Homo sapien
caaggctggtccctgtgtgatgaga

SEQ ID NO: 92333 - DNA, 25 bp, Homo sapien
tccttccggagaacaagcacgtact

SEQ ID NO: 92334 - DNA, 25 bp, Homo sapien
gaagagattttacccacagtgtggg

SEQ ID NO: 92335 - DNA, 25 bp, Homo sapien
ttgcagattactttggcaactgtct

SEQ ID NO: 92336 - DNA, 25 bp, Homo sapien
ccccagatccttcattgatttcctc

SEQ ID NO: 92337 - DNA, 25 bp, Homo sapien
tcattctggtctcgggtcttactca

SEQ ID NO: 92338 - DNA, 25 bp, Homo sapien
ccatcaatcattcaggtgtctggaa

SEQ ID NO: 92339 - DNA, 25 bp, Homo sapien
tgtaatacatccaaccaggttttcc

SEQ ID NO: 92340 - DNA, 25 bp, Homo sapien
cgtcatatcccctctaaagtgtagt

SEQ ID NO: 92341 - DNA, 25 bp, Homo sapien
aacaggttcctctagttgccggcga

SEQ ID NO: 92342 - DNA, 25 bp, Homo sapien
tcactgaaccgaaacgcgggagcaa

SEQ ID NO: 92343 - DNA, 25 bp, Homo sapien
gtgcaatcccgctaagccttctggg

SEQ ID NO: 92344 - DNA, 25 bp, Homo sapien
cactgaggttgctgttggatccgag

SEQ ID NO: 92345 - DNA, 25 bp, Homo sapien
tggtccaggcggcagttgaccaaag

SEQ ID NO: 92346 - DNA, 25 bp, Homo sapien
gtccaggcggcagttgaccaaagac

SEQ ID NO: 92347 - DNA, 25 bp, Homo sapien
ttgccttggtccaggcggcagttga

SEQ ID NO: 92348 - DNA, 25 bp, Homo sapien
aagaccaccttgcttagcaactaac

SEQ ID NO: 92349 - DNA, 25 bp, Homo sapien
ttcttctacccctgcaaagagcaat

SEQ ID NO: 92350 - DNA, 25 bp, Homo sapien
ttctacccctgcaaagagcaatggg

SEQ ID NO: 92351 - DNA, 25 bp, Homo sapien
gagcaatggggcaagaggctgattt

SEQ ID NO: 92352 - DNA, 25 bp, Homo sapien
agcaatggggcaagaggctgattta

SEQ ID NO: 92353 - DNA, 25 bp, Homo sapien
taacgccctgttacggctggtggcc

SEQ ID NO: 92354 - DNA, 25 bp, Homo sapien
gcaaaggccgaagtgtggtccctga

SEQ ID NO: 92355 - DNA, 25 bp, Homo sapien
ccgtggctgcgattaccctagggct

SEQ ID NO: 92356 - DNA, 25 bp, Homo sapien
tgagagaccctgacggtgcattcct

SEQ ID NO: 92357 - DNA, 25 bp, Homo sapien
cttagcctcggggtagcgatgaatc

SEQ ID NO: 92358 - DNA, 25 bp, Homo sapien
agcctcggggtagcgatgaatctga

SEQ ID NO: 92359 - DNA, 25 bp, Homo sapien
ggcgcttagcctcggggtagcgatg

SEQ ID NO: 92360 - DNA, 25 bp, Homo sapien
cgcttagcctcggggtagcgatgaa

SEQ ID NO: 92361 - DNA, 25 bp, Homo sapien
ttgggcctcaaaaggacatccttga

SEQ ID NO: 92362 - DNA, 25 bp, Homo sapien
tcacttcgagacttaagggtactgc

SEQ ID NO: 92363 - DNA, 25 bp, Homo sapien
gaagtccagtttcacatcgttgtca

SEQ ID NO: 92364 - DNA, 25 bp, Homo sapien
tcacatcgttgtcaatatgaggcat

SEQ ID NO: 92365 - DNA, 25 bp, Homo sapien
gggtcaagaaacagcaagtagagaa

SEQ ID NO: 92366 - DNA, 25 bp, Homo sapien
acagcaagtagagaagcttgctcac

SEQ ID NO: 92367 - DNA, 25 bp, Homo sapien
aacagcaagtagagaagcttgctca

SEQ ID NO: 92368 - DNA, 25 bp, Homo sapien
tgtctgctttgagttccgaaatgaa

SEQ ID NO: 92369 - DNA, 25 bp, Homo sapien
cacagtatccatattggcagcaatg

SEQ ID NO: 92370 - DNA, 25 bp, Homo sapien
tcaaaggtgcccacagtatccatat

SEQ ID NO: 92371 - DNA, 25 bp, Homo sapien
gagtatgtctgctttgagttccgaa

SEQ ID NO: 92372 - DNA, 25 bp, Homo sapien
ggctaactggacaccaatagggatg

SEQ ID NO: 92373 - DNA, 25 bp, Homo sapien
tgctaactgccagagaactgactgg

SEQ ID NO: 92374 - DNA, 25 bp, Homo sapien
cagaaatatcggagcagaacttagc

SEQ ID NO: 92375 - DNA, 25 bp, Homo sapien
tgtggacaatcgcataactgaaggg

SEQ ID NO: 92376 - DNA, 25 bp, Homo sapien
taaaaaaagaatggcagaagtattc

SEQ ID NO: 92377 - DNA, 25 bp, Homo sapien
gaggaagattaaaaaaagaatggca

SEQ ID NO: 92378 - DNA, 25 bp, Homo sapien
ggaagattaaaaaaagaatggcaga

SEQ ID NO: 92379 - DNA, 25 bp, Homo sapien
agattaaaaaaagaatggcagaagt

SEQ ID NO: 92380 - DNA, 25 bp, Homo sapien
gcaacaagtatagaggcaggtaata

SEQ ID NO: 92381 - DNA, 25 bp, Homo sapien
cttctcagcaacaagtatagaggca

SEQ ID NO: 92382 - DNA, 25 bp, Homo sapien
tcaaagtgaacaacttgtatataag

SEQ ID NO: 92383 - DNA, 25 bp, Homo sapien
gtaatagtactgacaggagcagcat

SEQ ID NO: 92384 - DNA, 25 bp, Homo sapien
ccagggctacatggatcaaccagca

SEQ ID NO: 92385 - DNA, 25 bp, Homo sapien
tgaactctactggtcagggcagatg

SEQ ID NO: 92386 - DNA, 25 bp, Homo sapien
ccagcagagtgcatatgttctcaaa

SEQ ID NO: 92387 - DNA, 25 bp, Homo sapien
ggttcatgtattacagcacgcctgt

SEQ ID NO: 92388 - DNA, 25 bp, Homo sapien
tttacctctcgtcagcaatactgaa

SEQ ID NO: 92389 - DNA, 25 bp, Homo sapien
gctcttatctctaaaacctgatttc

SEQ ID NO: 92390 - DNA, 25 bp, Homo sapien
tgatttctttacctctcgtcagcaa

SEQ ID NO: 92391 - DNA, 25 bp, Homo sapien
agacttggctcttatctctaaaacc

SEQ ID NO: 92392 - DNA, 25 bp, Homo sapien
caaagaactcaggttgagctgggat

SEQ ID NO: 92393 - DNA, 25 bp, Homo sapien
tgttctcgttcatttaccagcagta

SEQ ID NO: 92394 - DNA, 25 bp, Homo sapien
catctctagtggaaaaaaggacaaa

SEQ ID NO: 92395 - DNA, 25 bp, Homo sapien
ccaccaaagtactgagtgatctggg

SEQ ID NO: 92396 - DNA, 25 bp, Homo sapien
actgaacgaggctatagtgcttatg

SEQ ID NO: 92397 - DNA, 25 bp, Homo sapien
aacgaggctatagtgcttatggaca

SEQ ID NO: 92398 - DNA, 25 bp, Homo sapien
ggctatagtgcttatggacagcagt

SEQ ID NO: 92399 - DNA, 25 bp, Homo sapien
cgaggctatagtgcttatggacagc

SEQ ID NO: 92400 - DNA, 25 bp, Homo sapien
cattggtgagtgctggtccccagaa

SEQ ID NO: 92401 - DNA, 25 bp, Homo sapien
catatcagagatgatctggtgggca

SEQ ID NO: 92402 - DNA, 25 bp, Homo sapien
cagccagtgggtcattggtgagtgc

SEQ ID NO: 92403 - DNA, 25 bp, Homo sapien
aaacagagtcattggcatatcagag

SEQ ID NO: 92404 - DNA, 25 bp, Homo sapien
ctggggaatagcttccaggatctgt

SEQ ID NO: 92405 - DNA, 25 bp, Homo sapien
aaagtcagaagagcctgtgcctgag

SEQ ID NO: 92406 - DNA, 25 bp, Homo sapien
tctgttccagctgctcaaagtcaga

SEQ ID NO: 92407 - DNA, 25 bp, Homo sapien
ggaatagcttccaggatctgttcca

SEQ ID NO: 92408 - DNA, 25 bp, Homo sapien
gaagcgcttccgtacatcttttaca

SEQ ID NO: 92409 - DNA, 25 bp, Homo sapien
ccacatccaggcatatatacttcac

SEQ ID NO: 92410 - DNA, 25 bp, Homo sapien
cagagtagccatttgccacatccag

SEQ ID NO: 92411 - DNA, 25 bp, Homo sapien
tgggggaagcgcttccgtacatctt

SEQ ID NO: 92412 - DNA, 25 bp, Homo sapien
gacagagcaattgaaatacagcatc

SEQ ID NO: 92413 - DNA, 25 bp, Homo sapien
tgagacagagcaattgaaatacagc

SEQ ID NO: 92414 - DNA, 25 bp, Homo sapien
ctgagacagagcaattgaaatacag

SEQ ID NO: 92415 - DNA, 25 bp, Homo sapien
gagacagagcaattgaaatacagca

SEQ ID NO: 92416 - DNA, 25 bp, Homo sapien
tttgatgatgtcagccccagaaagg

SEQ ID NO: 92417 - DNA, 25 bp, Homo sapien
ctttgatgatgtcagccccagaaag

SEQ ID NO: 92418 - DNA, 25 bp, Homo sapien
ttgatgatgtcagccccagaaagga

SEQ ID NO: 92419 - DNA, 25 bp, Homo sapien
tccagttttcttccgagtagtacac

SEQ ID NO: 92420 - DNA, 25 bp, Homo sapien
tgtggataccccactccagttttct

SEQ ID NO: 92421 - DNA, 25 bp, Homo sapien
ctgcgctgagctgtggataccccac

SEQ ID NO: 92422 - DNA, 25 bp, Homo sapien
gagctgtggataccccactccagtt

SEQ ID NO: 92423 - DNA, 25 bp, Homo sapien
caaaagccttggccacatccccagg

SEQ ID NO: 92424 - DNA, 25 bp, Homo sapien
ccccaggacagctgcaacctccatc

SEQ ID NO: 92425 - DNA, 25 bp, Homo sapien
catccccaggacagctgcaacctcc

SEQ ID NO: 92426 - DNA, 25 bp, Homo sapien
aaaagccttggccacatccccagga

SEQ ID NO: 92427 - DNA, 25 bp, Homo sapien
taccatcatcgtctggtcatttgat

SEQ ID NO: 92428 - DNA, 25 bp, Homo sapien
tcatgtgtcccaagagcaaagatcc

SEQ ID NO: 92429 - DNA, 25 bp, Homo sapien
gcaaagatccccaactttaatggga

SEQ ID NO: 92430 - DNA, 25 bp, Homo sapien
tgcccagctaaataagactcatttc

SEQ ID NO: 92431 - DNA, 25 bp, Homo sapien
gtgctcacatggccaccctcaaaag

SEQ ID NO: 92432 - DNA, 25 bp, Homo sapien
ttctcagtcctgacaatgattccag

SEQ ID NO: 92433 - DNA, 25 bp, Homo sapien
tcaaaagcaactcacaccatattct

SEQ ID NO: 92434 - DNA, 25 bp, Homo sapien
gccctggcctctattcctcagtggg

SEQ ID NO: 92435 - DNA, 25 bp, Homo sapien
agcatgccacccagcatcacgaagt

SEQ ID NO: 92436 - DNA, 25 bp, Homo sapien
agaactcattccatagaagagcttg

SEQ ID NO: 92437 - DNA, 25 bp, Homo sapien
tcatggccatttcagaactcattcc

SEQ ID NO: 92438 - DNA, 25 bp, Homo sapien
gccatccctctcgatgagctcacca

SEQ ID NO: 92439 - DNA, 25 bp, Homo sapien
ccagggacttttccacagaccctag

SEQ ID NO: 92440 - DNA, 25 bp, Homo sapien
gttctgcctccatactattactaag

SEQ ID NO: 92441 - DNA, 25 bp, Homo sapien
agaccctagcattgagccccggttc

SEQ ID NO: 92442 - DNA, 25 bp, Homo sapien
ccggttcaccatgcttctctgagaa

SEQ ID NO: 92443 - DNA, 25 bp, Homo sapien
aactttattatcttctccttctgga

SEQ ID NO: 92444 - DNA, 25 bp, Homo sapien
actttattatcttctccttctggat

SEQ ID NO: 92445 - DNA, 25 bp, Homo sapien
tttattatcttctccttctggattc

SEQ ID NO: 92446 - DNA, 25 bp, Homo sapien
aaaactttattatcttctccttctg

SEQ ID NO: 92447 - DNA, 25 bp, Homo sapien
ttagctgctcccacataggtacacg

SEQ ID NO: 92448 - DNA, 25 bp, Homo sapien
tgactcggatgaaggtagttctcct

SEQ ID NO: 92449 - DNA, 25 bp, Homo sapien
gatgtctcggatggtatgttccaca

SEQ ID NO: 92450 - DNA, 25 bp, Homo sapien
tagagcggatccctcctaggatgtc

SEQ ID NO: 92451 - DNA, 25 bp, Homo sapien
gcacgcctcactgaagattggattc

SEQ ID NO: 92452 - DNA, 25 bp, Homo sapien
tagcacgcctcactgaagattggat

SEQ ID NO: 92453 - DNA, 25 bp, Homo sapien
acgcctcactgaagattggattcac

SEQ ID NO: 92454 - DNA, 25 bp, Homo sapien
ctagcacgcctcactgaagattgga

SEQ ID NO: 92455 - DNA, 25 bp, Homo sapien
cttgggagggtagaactgctcaggt

SEQ ID NO: 92456 - DNA, 25 bp, Homo sapien
caggaaatgacaaagtaatacagag

SEQ ID NO: 92457 - DNA, 25 bp, Homo sapien
tgggatgccccatggtagagtactg

SEQ ID NO: 92458 - DNA, 25 bp, Homo sapien
caaagtaatacagagctgcagtagc

SEQ ID NO: 92459 - DNA, 25 bp, Homo sapien
cagtagctgggatgggtgaggaccc

SEQ ID NO: 92460 - DNA, 25 bp, Homo sapien
agatagagaagtacagagttactgc

SEQ ID NO: 92461 - DNA, 25 bp, Homo sapien
agagaagtacagagttactgcagga

SEQ ID NO: 92462 - DNA, 25 bp, Homo sapien
cagatagagaagtacagagttactg

SEQ ID NO: 92463 - DNA, 25 bp, Homo sapien
ctagaccaaggccatgtaaaagatt

SEQ ID NO: 92464 - DNA, 25 bp, Homo sapien
tagtgaagcggattaacaaaacatg

SEQ ID NO: 92465 - DNA, 25 bp, Homo sapien
cttcaggatgttgtgttgggtcccc

SEQ ID NO: 92466 - DNA, 25 bp, Homo sapien
tgtgaaggtccaatttagtgaagcg

SEQ ID NO: 92467 - DNA, 25 bp, Homo sapien
gctgagcccatggaacagaatcctc

SEQ ID NO: 92468 - DNA, 25 bp, Homo sapien
ttgcttggattgctacatggacccc

SEQ ID NO: 92469 - DNA, 25 bp, Homo sapien
acgaagagttcagtcccaatgggcc

SEQ ID NO: 92470 - DNA, 25 bp, Homo sapien
tagctggccgacacttcaatctggc

SEQ ID NO: 92471 - DNA, 25 bp, Homo sapien
gaggcacaggaaactttttaccagc

SEQ ID NO: 92472 - DNA, 25 bp, Homo sapien
aatctggacctatagtgcgggatcc

SEQ ID NO: 92473 - DNA, 25 bp, Homo sapien
tggacctatagtgcgggatcccaag

SEQ ID NO: 92474 - DNA, 25 bp, Homo sapien
cagaatctggacctatagtgcggga

SEQ ID NO: 92475 - DNA, 25 bp, Homo sapien
tttccagaatctggacctatagtgc

SEQ ID NO: 92476 - DNA, 25 bp, Homo sapien
ggccggccttgggcccaagtcctga

SEQ ID NO: 92477 - DNA, 25 bp, Homo sapien
gccggccttgggcccaagtcctgaa

SEQ ID NO: 92478 - DNA, 25 bp, Homo sapien
cggccttgggcccaagtcctgaaag

SEQ ID NO: 92479 - DNA, 25 bp, Homo sapien
gccttgggcccaagtcctgaaagcc

SEQ ID NO: 92480 - DNA, 25 bp, Homo sapien
ccctaggagtgatcggaaagcctca

SEQ ID NO: 92481 - DNA, 25 bp, Homo sapien
cagtgccactggagacggtcagctt

SEQ ID NO: 92482 - DNA, 25 bp, Homo sapien
cacgaacgcctttgtatgggcctaa

SEQ ID NO: 92483 - DNA, 25 bp, Homo sapien
gcggacgctgcgtggaacattttcc

SEQ ID NO: 92484 - DNA, 25 bp, Homo sapien
agactaggaagtcgagcctcacggg

SEQ ID NO: 92485 - DNA, 25 bp, Homo sapien
caggctccgcgaagaaagcaaggct

SEQ ID NO: 92486 - DNA, 25 bp, Homo sapien
gccaactcatgtcagccggcagaga

SEQ ID NO: 92487 - DNA, 25 bp, Homo sapien
gaattcctactggaagcgacgcgcg

SEQ ID NO: 92488 - DNA, 25 bp, Homo sapien
tagcagatggcttgtactcagcttc

SEQ ID NO: 92489 - DNA, 25 bp, Homo sapien
gagggctggtctgagcttgaacaac

SEQ ID NO: 92490 - DNA, 25 bp, Homo sapien
cccaggcaatacgattgaacaagta

SEQ ID NO: 92491 - DNA, 25 bp, Homo sapien
caattggacaatgctcgtttcgacg

SEQ ID NO: 92492 - DNA, 25 bp, Homo sapien
ctcttgtggaacgtgcaaagcctgt

SEQ ID NO: 92493 - DNA, 25 bp, Homo sapien
cttgtggaacgtgcaaagcctgtcc

SEQ ID NO: 92494 - DNA, 25 bp, Homo sapien
tcttgtggaacgtgcaaagcctgtc

SEQ ID NO: 92495 - DNA, 25 bp, Homo sapien
ttttggcaagcagatcacagtcaat

SEQ ID NO: 92496 - DNA, 25 bp, Homo sapien
tcctcacagggtttgactctcacag

SEQ ID NO: 92497 - DNA, 25 bp, Homo sapien
catcccaaagtcatgttagtgcttt

SEQ ID NO: 92498 - DNA, 25 bp, Homo sapien
agagtcctcctgtcttcatacacta

SEQ ID NO: 92499 - DNA, 25 bp, Homo sapien
tttgctcctacagggactgtctccc

SEQ ID NO: 92500 - DNA, 25 bp, Homo sapien
ttcccaactagtctcaataccctgt

SEQ ID NO: 92501 - DNA, 25 bp, Homo sapien
ttaggtgtgtatttgctcctacagg

SEQ ID NO: 92502 - DNA, 25 bp, Homo sapien
ataatgtaagccctatgacagcagg

SEQ ID NO: 92503 - DNA, 25 bp, Homo sapien
cccttgagaatggaggagcccatga

SEQ ID NO: 92504 - DNA, 25 bp, Homo sapien
gggatcgccagccacctggacttaa

SEQ ID NO: 92505 - DNA, 25 bp, Homo sapien
gctgcttgtgcttgatagtggtgaa

SEQ ID NO: 92506 - DNA, 25 bp, Homo sapien
tctggaggacataaggacccttctg

SEQ ID NO: 92507 - DNA, 25 bp, Homo sapien
tacatatgtacaatggcaagccatt

SEQ ID NO: 92508 - DNA, 25 bp, Homo sapien
cctggccttgatgactagattttaa

SEQ ID NO: 92509 - DNA, 25 bp, Homo sapien
cagagttgtcatgtgctgagagttc

SEQ ID NO: 92510 - DNA, 25 bp, Homo sapien
catcctagggatacagccttgtgct

SEQ ID NO: 92511 - DNA, 25 bp, Homo sapien
ttttcagaggtaacacattcacatg

SEQ ID NO: 92512 - DNA, 25 bp, Homo sapien
aaggtattgaaggatgcacagtgaa

SEQ ID NO: 92513 - DNA, 25 bp, Homo sapien
cacgtaataaattaccgtgcccagc

SEQ ID NO: 92514 - DNA, 25 bp, Homo sapien
cagaatccaaaaggtattgaaggat

SEQ ID NO: 92515 - DNA, 25 bp, Homo sapien
cttctcatttggacttggtggttcg

SEQ ID NO: 92516 - DNA, 25 bp, Homo sapien
tggattattgccctctacactagca

SEQ ID NO: 92517 - DNA, 25 bp, Homo sapien
cctccgtgtgcccaagtggattatt

SEQ ID NO: 92518 - DNA, 25 bp, Homo sapien
tggtggttcgtcctgtctcagtgaa

SEQ ID NO: 92519 - DNA, 25 bp, Homo sapien
tactttgggtcctacaggccctgct

SEQ ID NO: 92520 - DNA, 25 bp, Homo sapien
aatcctgtaagggagataccagctc

SEQ ID NO: 92521 - DNA, 25 bp, Homo sapien
ccagctagcttagaaggtccaaaca

SEQ ID NO: 92522 - DNA, 25 bp, Homo sapien
tgtcctaagtggaaaggctgtctag

SEQ ID NO: 92523 - DNA, 25 bp, Homo sapien
aactgctgaaggagcatatggcaaa

SEQ ID NO: 92524 - DNA, 25 bp, Homo sapien
ccggggattgtgcagacagaactgc

SEQ ID NO: 92525 - DNA, 25 bp, Homo sapien
agcatatggcaaaggaggaggtcct

SEQ ID NO: 92526 - DNA, 25 bp, Homo sapien
gctgactgtgcccacgagctgcggc

SEQ ID NO: 92527 - DNA, 25 bp, Homo sapien
caggaggtacaatccccagtggtca

SEQ ID NO: 92528 - DNA, 25 bp, Homo sapien
ctttgcttgtgctcctcttggttgg

SEQ ID NO: 92529 - DNA, 25 bp, Homo sapien
gcctcatccatggacagttcctttg

SEQ ID NO: 92530 - DNA, 25 bp, Homo sapien
ttggctagagtaggcatcacactgg

SEQ ID NO: 92531 - DNA, 25 bp, Homo sapien
gaagaaggagcgaacaccaatgctg

SEQ ID NO: 92532 - DNA, 25 bp, Homo sapien
caagtcatgcctgatggatgtgatc

SEQ ID NO: 92533 - DNA, 25 bp, Homo sapien
ggtcacacagggtcatttagcccag

SEQ ID NO: 92534 - DNA, 25 bp, Homo sapien
tagaattcgcctagcataatgcaca

SEQ ID NO: 92535 - DNA, 25 bp, Homo sapien
tgctcttcaaagattcagtccatgg

SEQ ID NO: 92536 - DNA, 25 bp, Homo sapien
tttgctaggcattggtaaaccactg

SEQ ID NO: 92537 - DNA, 25 bp, Homo sapien
ccactgaagttaccaagactaataa

SEQ ID NO: 92538 - DNA, 25 bp, Homo sapien
tatttgagtatccatgatttgctag

SEQ ID NO: 92539 - DNA, 25 bp, Homo sapien
gatgtgaatatttattcaaagtgga

SEQ ID NO: 92540 - DNA, 25 bp, Homo sapien
aaactttgtgtttgagccaggcatg

SEQ ID NO: 92541 - DNA, 25 bp, Homo sapien
gccgccaagtgagttttatgaaaaa

SEQ ID NO: 92542 - DNA, 25 bp, Homo sapien
tcaggtaaggtagaattttgccgcc

SEQ ID NO: 92543 - DNA, 25 bp, Homo sapien
ttgcctgtgagtcatggcagctccc

SEQ ID NO: 92544 - DNA, 25 bp, Homo sapien
gctcccatgaatggccaagtgtgtg

SEQ ID NO: 92545 - DNA, 25 bp, Homo sapien
cacagtttacatcactggccgccat

SEQ ID NO: 92546 - DNA, 25 bp, Homo sapien
gctctgcaaagcaggcgccacagtt

SEQ ID NO: 92547 - DNA, 25 bp, Homo sapien
gtgtgcttcgcgacctgtccggctg

SEQ ID NO: 92548 - DNA, 25 bp, Homo sapien
ttcgacgtcgccaagcgtgcgcctt

SEQ ID NO: 92549 - DNA, 25 bp, Homo sapien
taactgcggacggaccttcgacgtc

SEQ ID NO: 92550 - DNA, 25 bp, Homo sapien
gcgtgcgccttatccagacaaagtt

SEQ ID NO: 92551 - DNA, 25 bp, Homo sapien
ggagcctctttcaatgctgacagcg

SEQ ID NO: 92552 - DNA, 25 bp, Homo sapien
aatatcccagagcttccgggctcag

SEQ ID NO: 92553 - DNA, 25 bp, Homo sapien
cccaccttgtgtggagagcgcggac

SEQ ID NO: 92554 - DNA, 25 bp, Homo sapien
cagggttgccgcttacggcctggta

SEQ ID NO: 92555 - DNA, 25 bp, Homo sapien
cagagttctgaccacgaagctgcca

SEQ ID NO: 92556 - DNA, 25 bp, Homo sapien
gtaatacatggaccccgcatcggtg

SEQ ID NO: 92557 - DNA, 25 bp, Homo sapien
cgacaaagcggtttcaagggactga

SEQ ID NO: 92558 - DNA, 25 bp, Homo sapien
tgttcgtggacaaagctagggcctg

SEQ ID NO: 92559 - DNA, 25 bp, Homo sapien
gctcaggtcctgaaggcgattcaaa

SEQ ID NO: 92560 - DNA, 25 bp, Homo sapien
aaaatcagctggcttacattcctga

SEQ ID NO: 92561 - DNA, 25 bp, Homo sapien
aggtcctgaaggcgattcaaaaagg

SEQ ID NO: 92562 - DNA, 25 bp, Homo sapien
ctgaaggcgattcaaaaaggtttca

SEQ ID NO: 92563 - DNA, 25 bp, Homo sapien
gaagctggagatcttatcagtgata

SEQ ID NO: 92564 - DNA, 25 bp, Homo sapien
ttgcagagatgagcgcaaaactggg

SEQ ID NO: 92565 - DNA, 25 bp, Homo sapien
ttgcggtgtaaaacctgtaaagcca

SEQ ID NO: 92566 - DNA, 25 bp, Homo sapien
tgccatctactgaggaaccgcgagt

SEQ ID NO: 92567 - DNA, 25 bp, Homo sapien
tagtgactgcatccagtaagcgctg

SEQ ID NO: 92568 - DNA, 25 bp, Homo sapien
cagtaagcgctgcaaagggaagttg

SEQ ID NO: 92569 - DNA, 25 bp, Homo sapien
tgcatccagtaagcgctgcaaaggg

SEQ ID NO: 92570 - DNA, 25 bp, Homo sapien
cgtctgatctcggagaaatagcagt

SEQ ID NO: 92571 - DNA, 25 bp, Homo sapien
caacaagagctgtaggaccttggct

SEQ ID NO: 92572 - DNA, 25 bp, Homo sapien
gccctgggccaatacagcttccaag

SEQ ID NO: 92573 - DNA, 25 bp, Homo sapien
agggcaatgactacccctgggtggc

SEQ ID NO: 92574 - DNA, 25 bp, Homo sapien
ttggtaggccccaactctgcgacag

SEQ ID NO: 92575 - DNA, 25 bp, Homo sapien
taagccatcaaagtggcaaagagag

SEQ ID NO: 92576 - DNA, 25 bp, Homo sapien
aggcacacaggccacttgccgggat

SEQ ID NO: 92577 - DNA, 25 bp, Homo sapien
tccgtcagtccatagtacacctcat

SEQ ID NO: 92578 - DNA, 25 bp, Homo sapien
acttgccgggatgagggctctgcac

SEQ ID NO: 92579 - DNA, 25 bp, Homo sapien
tacaagaccaggagtggagaagtgc

SEQ ID NO: 92580 - DNA, 25 bp, Homo sapien
gtcaaggcacccagacttcgaagta

SEQ ID NO: 92581 - DNA, 25 bp, Homo sapien
agaagctgtggtcccgtcaaggcac

SEQ ID NO: 92582 - DNA, 25 bp, Homo sapien
gacagaagctgtggtcccgtcaagg

SEQ ID NO: 92583 - DNA, 25 bp, Homo sapien
tggtcaggatggcatcgagcacatg

SEQ ID NO: 92584 - DNA, 25 bp, Homo sapien
ggcgcagcttgcgcgtcacagaggg

SEQ ID NO: 92585 - DNA, 25 bp, Homo sapien
tcaggatggcatcgagcacatgaga

SEQ ID NO: 92586 - DNA, 25 bp, Homo sapien
ggatggcatcgagcacatgagagcc

SEQ ID NO: 92587 - DNA, 25 bp, Homo sapien
cggctgccatggcgactacaggcca

SEQ ID NO: 92588 - DNA, 25 bp, Homo sapien
ggctgccatggcgactacaggccag

SEQ ID NO: 92589 - DNA, 25 bp, Homo sapien
gatggcatctagcacacggctgcca

SEQ ID NO: 92590 - DNA, 25 bp, Homo sapien
acggctgccatggcgactacaggcc

SEQ ID NO: 92591 - DNA, 25 bp, Homo sapien
gaaggtagtcaaggccacatttcga

SEQ ID NO: 92592 - DNA, 25 bp, Homo sapien
cacatggtggccgaaagggtctctt

SEQ ID NO: 92593 - DNA, 25 bp, Homo sapien
gttcccaagcctctcgccgctttag

SEQ ID NO: 92594 - DNA, 25 bp, Homo sapien
cacatttcgagccacatggtggccg

SEQ ID NO: 92595 - DNA, 25 bp, Homo sapien
tcagtcttcaagtatggagttcaat

SEQ ID NO: 92596 - DNA, 25 bp, Homo sapien
tcttcaagtatggagttcaatgccc

SEQ ID NO: 92597 - DNA, 25 bp, Homo sapien
atggagttcaatgcccgcctccgct

SEQ ID NO: 92598 - DNA, 25 bp, Homo sapien
caagtatggagttcaatgcccgcct

SEQ ID NO: 92599 - DNA, 25 bp, Homo sapien
cattcagggagctccttcgttggac

SEQ ID NO: 92600 - DNA, 25 bp, Homo sapien
tgctgaatggagtgctaaccctggt

SEQ ID NO: 92601 - DNA, 25 bp, Homo sapien
tatgaggatctactgcactgacaag

SEQ ID NO: 92602 - DNA, 25 bp, Homo sapien
gacgtgtacaagcaaaaccctcgag

SEQ ID NO: 92603 - DNA, 25 bp, Homo sapien
gaccaatgtctagagccaactgatg

SEQ ID NO: 92604 - DNA, 25 bp, Homo sapien
taaaagcagcggagtgggcctaatg

SEQ ID NO: 92605 - DNA, 25 bp, Homo sapien
tcaaagtgccggaaagtcaaagtgg

SEQ ID NO: 92606 - DNA, 25 bp, Homo sapien
taaagtcctcatacctggcacagag

SEQ ID NO: 92607 - DNA, 25 bp, Homo sapien
ggtcacagggcaatcaagttactct

SEQ ID NO: 92608 - DNA, 25 bp, Homo sapien
gggctacagcgtatcctcacaacag

SEQ ID NO: 92609 - DNA, 25 bp, Homo sapien
tcaaggtatttggttcagggccagg

SEQ ID NO: 92610 - DNA, 25 bp, Homo sapien
tgtcacgtccactaatcggcaaaag

SEQ ID NO: 92611 - DNA, 25 bp, Homo sapien
taagtcccttcagtaggccttggga

SEQ ID NO: 92612 - DNA, 25 bp, Homo sapien
tgacacacaaccatgaagaggcccc

SEQ ID NO: 92613 - DNA, 25 bp, Homo sapien
gaaaggcctctgctcaagtaacagc

SEQ ID NO: 92614 - DNA, 25 bp, Homo sapien
gacatactaagaagcagccctctcc

SEQ ID NO: 92615 - DNA, 25 bp, Homo sapien
tgtaaggcatggtgctaggttccag

SEQ ID NO: 92616 - DNA, 25 bp, Homo sapien
cagcttttccatgtaaggcatggtg

SEQ ID NO: 92617 - DNA, 25 bp, Homo sapien
ttccatgtaaggcatggtgctaggt

SEQ ID NO: 92618 - DNA, 25 bp, Homo sapien
tgacagcttttccatgtaaggcatg

SEQ ID NO: 92619 - DNA, 25 bp, Homo sapien
ttaagcagcagtaggcgaggtgcct

SEQ ID NO: 92620 - DNA, 25 bp, Homo sapien
gaaataggaggactctgctgaatcc

SEQ ID NO: 92621 - DNA, 25 bp, Homo sapien
gaggtgacccaaacaactcagtccc

SEQ ID NO: 92622 - DNA, 25 bp, Homo sapien
cacatttgcagagggtaagacaaga

SEQ ID NO: 92623 - DNA, 25 bp, Homo sapien
ggtgtaaagggacgtgcacagatct

SEQ ID NO: 92624 - DNA, 25 bp, Homo sapien
cagagctcagtggtaaacaggcata

SEQ ID NO: 92625 - DNA, 25 bp, Homo sapien
gcataaagtcatcaccccaggctgt

SEQ ID NO: 92626 - DNA, 25 bp, Homo sapien
tgggagtcctgacttccacgaggac

SEQ ID NO: 92627 - DNA, 25 bp, Homo sapien
tgtgatgcccgatgagaaggtgcca

SEQ ID NO: 92628 - DNA, 25 bp, Homo sapien
ctgtgatgcccgatgagaaggtgcc

SEQ ID NO: 92629 - DNA, 25 bp, Homo sapien
caggtgggtggaaggcgccacagag

SEQ ID NO: 92630 - DNA, 25 bp, Homo sapien
gaaggcgccacagagggcgttcagg

SEQ ID NO: 92631 - DNA, 25 bp, Homo sapien
aggtgggtggaaggcgccacagagg

SEQ ID NO: 92632 - DNA, 25 bp, Homo sapien
ggtggaaggcgccacagagggcgtt

SEQ ID NO: 92633 - DNA, 25 bp, Homo sapien
ctgggggacggtagcagaccgacat

SEQ ID NO: 92634 - DNA, 25 bp, Homo sapien
atgctgagcgcgcacacgtagtaca

SEQ ID NO: 92635 - DNA, 25 bp, Homo sapien
ctgtggcccgcgaagtcttccagct

SEQ ID NO: 92636 - DNA, 25 bp, Homo sapien
ttccagctcagcagtgtctcgttcc

SEQ ID NO: 92637 - DNA, 25 bp, Homo sapien
tgccgggtcaggaaggccacaaaga

SEQ ID NO: 92638 - DNA, 25 bp, Homo sapien
gaaagcggtcagagtctccaggctc

SEQ ID NO: 92639 - DNA, 25 bp, Homo sapien
agcatcagcccgaaaggaagcacga

SEQ ID NO: 92640 - DNA, 25 bp, Homo sapien
gctgtagcagccgagcatcagcccg

SEQ ID NO: 92641 - DNA, 25 bp, Homo sapien
tggcacagctggcatacgcggtccc

SEQ ID NO: 92642 - DNA, 25 bp, Homo sapien
ccgaaggcaagcacgatggcgctca

SEQ ID NO: 92643 - DNA, 25 bp, Homo sapien
gagcaagccgaaggcaagcacgatg

SEQ ID NO: 92644 - DNA, 25 bp, Homo sapien
ctgcagaaggttgactgcgtggtag

SEQ ID NO: 92645 - DNA, 25 bp, Homo sapien
ggcccagagcaagccgaaggcaagc

SEQ ID NO: 92646 - DNA, 25 bp, Homo sapien
aggccaaggccgtagttcccgctcg

SEQ ID NO: 92647 - DNA, 25 bp, Homo sapien
ttccggtggagccagcgctgcgacc

SEQ ID NO: 92648 - DNA, 25 bp, Homo sapien
gccaaggccccttccggtggagcca

SEQ ID NO: 92649 - DNA, 25 bp, Homo sapien
ctgaagaaggccaaggccgtagttc

SEQ ID NO: 92650 - DNA, 25 bp, Homo sapien
tccagcggtgaagacgtagagcacc

SEQ ID NO: 92651 - DNA, 25 bp, Homo sapien
tctccagcggtgaagacgtagagca

SEQ ID NO: 92652 - DNA, 25 bp, Homo sapien
gcagcagatctccagcggtgaagac

SEQ ID NO: 92653 - DNA, 25 bp, Homo sapien
agatctccagcggtgaagacgtaga

SEQ ID NO: 92654 - DNA, 25 bp, Homo sapien
tagttcggagctccatggtcccttc

SEQ ID NO: 92655 - DNA, 25 bp, Homo sapien
cccagagccttcgaagagccgcgtg

SEQ ID NO: 92656 - DNA, 25 bp, Homo sapien
gggtagttcggagctccatggtccc

SEQ ID NO: 92657 - DNA, 25 bp, Homo sapien
agccttcgaagagccgcgtgaggaa

SEQ ID NO: 92658 - DNA, 25 bp, Homo sapien
cccgggtctccattgccgcggccct

SEQ ID NO: 92659 - DNA, 25 bp, Homo sapien
ggtctccattgccgcggccctgccc

SEQ ID NO: 92660 - DNA, 25 bp, Homo sapien
cgggtctccattgccgcggccctgc

SEQ ID NO: 92661 - DNA, 25 bp, Homo sapien
caccccccgggtctccattgccgcg

SEQ ID NO: 92662 - DNA, 25 bp, Homo sapien
agggcagcaggttgtagggtctgct

SEQ ID NO: 92663 - DNA, 25 bp, Homo sapien
gaagggcagcaggttgtagggtctg

SEQ ID NO: 92664 - DNA, 25 bp, Homo sapien
aagggcagcaggttgtagggtctgc

SEQ ID NO: 92665 - DNA, 25 bp, Homo sapien
gcaatgctggcacatgggtacatgc

SEQ ID NO: 92666 - DNA, 25 bp, Homo sapien
gggtacatgccaacttgcaagcaca

SEQ ID NO: 92667 - DNA, 25 bp, Homo sapien
tccaaactctagtcaaagaagggtc

SEQ ID NO: 92668 - DNA, 25 bp, Homo sapien
gggcctgccccaagtgtatagtaat

SEQ ID NO: 92669 - DNA, 25 bp, Homo sapien
ctaggtggcttcagtacaactcagg

SEQ ID NO: 92670 - DNA, 25 bp, Homo sapien
tggttctatgggttggcctgtggaa

SEQ ID NO: 92671 - DNA, 25 bp, Homo sapien
gttctatgggttggcctgtggaacc

SEQ ID NO: 92672 - DNA, 25 bp, Homo sapien
ggaactaggtggcttcagtacaact

SEQ ID NO: 92673 - DNA, 25 bp, Homo sapien
tcagggtagccacttgagcggccaa

SEQ ID NO: 92674 - DNA, 25 bp, Homo sapien
ttggtagccctagcatgaccctggg

SEQ ID NO: 92675 - DNA, 25 bp, Homo sapien
gaaagaatcccgtgaggcctgtgtt

SEQ ID NO: 92676 - DNA, 25 bp, Homo sapien
gatgtgtacttgtggatgtcccctg

SEQ ID NO: 92677 - DNA, 25 bp, Homo sapien
gacacacaaagttgaggccgagctg

SEQ ID NO: 92678 - DNA, 25 bp, Homo sapien
gcagaggacagggaagacgcatctt

SEQ ID NO: 92679 - DNA, 25 bp, Homo sapien
gaaatgggctcagattggaggctac

SEQ ID NO: 92680 - DNA, 25 bp, Homo sapien
tggcctcaagatgcaggtctagact

SEQ ID NO: 92681 - DNA, 25 bp, Homo sapien
tttcctaactgggtcatgcggcccc

SEQ ID NO: 92682 - DNA, 25 bp, Homo sapien
tcccaactttttacgctggtcaggc

SEQ ID NO: 92683 - DNA, 25 bp, Homo sapien
tgagaactctagtctatctccaggg

SEQ ID NO: 92684 - DNA, 25 bp, Homo sapien
taccaatgctgcaccccttgaaagg

SEQ ID NO: 92685 - DNA, 25 bp, Homo sapien
acacgcatgagagtagaggaccaag

SEQ ID NO: 92686 - DNA, 25 bp, Homo sapien
ggcggacacacgcatgagagtagag

SEQ ID NO: 92687 - DNA, 25 bp, Homo sapien
gacacacgcatgagagtagaggacc

SEQ ID NO: 92688 - DNA, 25 bp, Homo sapien
atgagagtagaggaccaagggtttc

SEQ ID NO: 92689 - DNA, 25 bp, Homo sapien
cagagcgcttctgcatccttttcag

SEQ ID NO: 92690 - DNA, 25 bp, Homo sapien
gagatgaactctacacctagtgagg

SEQ ID NO: 92691 - DNA, 25 bp, Homo sapien
accacaaagctgttgccgggaagcc

SEQ ID NO: 92692 - DNA, 25 bp, Homo sapien
agcagtgagcaatacggccaggtcg

SEQ ID NO: 92693 - DNA, 25 bp, Homo sapien
gactcatggccgtgataagcaggac

SEQ ID NO: 92694 - DNA, 25 bp, Homo sapien
gactccgcagacatagtgacacagg

SEQ ID NO: 92695 - DNA, 25 bp, Homo sapien
aagattagatggaaggcccggtgcc

SEQ ID NO: 92696 - DNA, 25 bp, Homo sapien
cactactgtgcggtacgcgaggacg

SEQ ID NO: 92697 - DNA, 25 bp, Homo sapien
ctagttcagttcgtttaacttgaga

SEQ ID NO: 92698 - DNA, 25 bp, Homo sapien
gttcgtttaacttgagagggctgga

SEQ ID NO: 92699 - DNA, 25 bp, Homo sapien
gggccgctcctagcggtctggccca

SEQ ID NO: 92700 - DNA, 25 bp, Homo sapien
ttcagttcgtttaacttgagagggc

SEQ ID NO: 92701 - DNA, 25 bp, Homo sapien
ctcctccaggtactgaactggctca

SEQ ID NO: 92702 - DNA, 25 bp, Homo sapien
ggctggagcacgctctcactcggcc

SEQ ID NO: 92703 - DNA, 25 bp, Homo sapien
cagacttcagttttaatggttaaag

SEQ ID NO: 92704 - DNA, 25 bp, Homo sapien
aactggctcagagctagcattctgc

SEQ ID NO: 92705 - DNA, 25 bp, Homo sapien
agcacatgtaccccactcacaaggt

SEQ ID NO: 92706 - DNA, 25 bp, Homo sapien
acatgtaccccactcacaaggttga

SEQ ID NO: 92707 - DNA, 25 bp, Homo sapien
cacgagcaccccgatacccacagca

SEQ ID NO: 92708 - DNA, 25 bp, Homo sapien
gagcaccccgatacccacagcacat

SEQ ID NO: 92709 - DNA, 25 bp, Homo sapien
gaaagatccaaaaagtacactgctg

SEQ ID NO: 92710 - DNA, 25 bp, Homo sapien
cccacatgggtggtcttcctagaca

SEQ ID NO: 92711 - DNA, 25 bp, Homo sapien
taaaggacgtgactctcaactaccg

SEQ ID NO: 92712 - DNA, 25 bp, Homo sapien
tatgtgctcaccatacagaatgggc

SEQ ID NO: 92713 - DNA, 25 bp, Homo sapien
ctaggctatgattattgagtgagga

SEQ ID NO: 92714 - DNA, 25 bp, Homo sapien
ctatgattattgagtgaggattatc

SEQ ID NO: 92715 - DNA, 25 bp, Homo sapien
tttcctaggctatgattattgagtg

SEQ ID NO: 92716 - DNA, 25 bp, Homo sapien
tattgagtgaggattatcataatat

SEQ ID NO: 92717 - DNA, 25 bp, Homo sapien
taacctttgcacagacaggccatcc

SEQ ID NO: 92718 - DNA, 25 bp, Homo sapien
acctggacattctctcataaccttt

SEQ ID NO: 92719 - DNA, 25 bp, Homo sapien
cataacctttgcacagacaggccat

SEQ ID NO: 92720 - DNA, 25 bp, Homo sapien
ggacattctctcataacctttgcac

SEQ ID NO: 92721 - DNA, 25 bp, Homo sapien
cttgatggaatgtggaaggagtctc

SEQ ID NO: 92722 - DNA, 25 bp, Homo sapien
agtgttccataggaactgttacctg

SEQ ID NO: 92723 - DNA, 25 bp, Homo sapien
tggtccttcaggatctcatctagct

SEQ ID NO: 92724 - DNA, 25 bp, Homo sapien
ctttagctatccaatgccattggaa

SEQ ID NO: 92725 - DNA, 25 bp, Homo sapien
tgaccacgtaacattcatgttcatg

SEQ ID NO: 92726 - DNA, 25 bp, Homo sapien
cttctgggcatcattcctgtttatt

SEQ ID NO: 92727 - DNA, 25 bp, Homo sapien
tccagattttgccttagaaagttcc

SEQ ID NO: 92728 - DNA, 25 bp, Homo sapien
tcatgttcatggtcacatagaattc

SEQ ID NO: 92729 - DNA, 25 bp, Homo sapien
ttgtgtgagagggagttagatggga

SEQ ID NO: 92730 - DNA, 25 bp, Homo sapien
gttagatgggagattcgtgactcgg

SEQ ID NO: 92731 - DNA, 25 bp, Homo sapien
ggagattcgtgactcggtgggagat

SEQ ID NO: 92732 - DNA, 25 bp, Homo sapien
gggttgtgtgagagggagttagatg

SEQ ID NO: 92733 - DNA, 25 bp, Homo sapien
gaacgcttagccagcctggatgcct

SEQ ID NO: 92734 - DNA, 25 bp, Homo sapien
agatgaagaacgcttagccagcctg

SEQ ID NO: 92735 - DNA, 25 bp, Homo sapien
agtctttgcgctgccgaatcagcgc

SEQ ID NO: 92736 - DNA, 25 bp, Homo sapien
aagtctttgcgctgccgaatcagcg

SEQ ID NO: 92737 - DNA, 25 bp, Homo sapien
aggctgctgtatcttcacccgggtg

SEQ ID NO: 92738 - DNA, 25 bp, Homo sapien
gctgtatcttcacccgggtggctcc

SEQ ID NO: 92739 - DNA, 25 bp, Homo sapien
cagaagccccctcgttattatagaa

SEQ ID NO: 92740 - DNA, 25 bp, Homo sapien
agatgggaaaaccacgcgcccctcg

SEQ ID NO: 92741 - DNA, 25 bp, Homo sapien
ggatccggcaggagcccccaggtcc

SEQ ID NO: 92742 - DNA, 25 bp, Homo sapien
atccggcaggagcccccaggtcccg

SEQ ID NO: 92743 - DNA, 25 bp, Homo sapien
gatccggcaggagcccccaggtccc

SEQ ID NO: 92744 - DNA, 25 bp, Homo sapien
tccccgaacaccagcttaaattcca

SEQ ID NO: 92745 - DNA, 25 bp, Homo sapien
ccccgaacaccagcttaaattccag

SEQ ID NO: 92746 - DNA, 25 bp, Homo sapien
cccccaaacggcgctggcaggagcc

SEQ ID NO: 92747 - DNA, 25 bp, Homo sapien
ccaaacccccaaacggcgctggcag

SEQ ID NO: 92748 - DNA, 25 bp, Homo sapien
gaacccaattagcagcggttcccaa

SEQ ID NO: 92749 - DNA, 25 bp, Homo sapien
tgaacccaattagcagcggttccca

SEQ ID NO: 92750 - DNA, 25 bp, Homo sapien
ggtcgcggcggtggcgaatgcatgc

SEQ ID NO: 92751 - DNA, 25 bp, Homo sapien
gggaataccgataggtgcagcgcca

SEQ ID NO: 92752 - DNA, 25 bp, Homo sapien
tggcgaatgcatgccaggccgaggg

SEQ ID NO: 92753 - DNA, 25 bp, Homo sapien
accgataggtgcagcgccataggga

SEQ ID NO: 92754 - DNA, 25 bp, Homo sapien
ccagcaccccctcctggtcctccca

SEQ ID NO: 92755 - DNA, 25 bp, Homo sapien
cccctcctggtcctcccagcctcac

SEQ ID NO: 92756 - DNA, 25 bp, Homo sapien
ctcgagaacacggccacccccagca

SEQ ID NO: 92757 - DNA, 25 bp, Homo sapien
agcaccccctcctggtcctcccagc

SEQ ID NO: 92758 - DNA, 25 bp, Homo sapien
gtaatctctaggagagccgtccccc

SEQ ID NO: 92759 - DNA, 25 bp, Homo sapien
ctgctggcggctccggcgtgggaga

SEQ ID NO: 92760 - DNA, 25 bp, Homo sapien
cggctccggcgtgggagagatggag

SEQ ID NO: 92761 - DNA, 25 bp, Homo sapien
tccagcgctgctggcggctccggcg

SEQ ID NO: 92762 - DNA, 25 bp, Homo sapien
ttcccgagctggaatagcgccgctt

SEQ ID NO: 92763 - DNA, 25 bp, Homo sapien
gggaggccgcctcatttagctcaga

SEQ ID NO: 92764 - DNA, 25 bp, Homo sapien
cgtcagaggcatcggagaagaagct

SEQ ID NO: 92765 - DNA, 25 bp, Homo sapien
gaagtccgccgtgtcttctgaggga

SEQ ID NO: 92766 - DNA, 25 bp, Homo sapien
caaatccatcccttgaccctcctgc

SEQ ID NO: 92767 - DNA, 25 bp, Homo sapien
agctggttgcagatactcttttgaa

SEQ ID NO: 92768 - DNA, 25 bp, Homo sapien
gctcccctactggaatggctagaga

SEQ ID NO: 92769 - DNA, 25 bp, Homo sapien
tttgaaattcagagggcatgaaact

SEQ ID NO: 92770 - DNA, 25 bp, Homo sapien
gaaaggcttcacttggatacagagg

SEQ ID NO: 92771 - DNA, 25 bp, Homo sapien
gaagagcattgatcatgtgcagcct

SEQ ID NO: 92772 - DNA, 25 bp, Homo sapien
cccgtactggatctgtgagggagga

SEQ ID NO: 92773 - DNA, 25 bp, Homo sapien
taaagaagtacattaacacttgtga

SEQ ID NO: 92774 - DNA, 25 bp, Homo sapien
agctccagctgctcatattggctgg

SEQ ID NO: 92775 - DNA, 25 bp, Homo sapien
cagctgctcatattggctgggcaga

SEQ ID NO: 92776 - DNA, 25 bp, Homo sapien
atagtgggcccggtggtgggctcta

SEQ ID NO: 92777 - DNA, 25 bp, Homo sapien
taggctgtacctcgatcctcagctc

SEQ ID NO: 92778 - DNA, 25 bp, Homo sapien
gaaaacatggcctggagttcacagt

SEQ ID NO: 92779 - DNA, 25 bp, Homo sapien
gattttcagtctaccatgggatggg

SEQ ID NO: 92780 - DNA, 25 bp, Homo sapien
gaagagcctccaaagagactggccc

SEQ ID NO: 92781 - DNA, 25 bp, Homo sapien
tgggcacccgttgtggagaaaacat

SEQ ID NO: 92782 - DNA, 25 bp, Homo sapien
ccatcttgcctgtgatacggtgcac

SEQ ID NO: 92783 - DNA, 25 bp, Homo sapien
tgttctcaggcagcagagtcatctc

SEQ ID NO: 92784 - DNA, 25 bp, Homo sapien
tagaaggcatgaggccgcaggttcc

SEQ ID NO: 92785 - DNA, 25 bp, Homo sapien
actgactacggcttcatagctggcc

SEQ ID NO: 92786 - DNA, 25 bp, Homo sapien
tggaggcaaaggatggatggcaagc

SEQ ID NO: 92787 - DNA, 25 bp, Homo sapien
ggcaaaggatggatggcaagccctc

SEQ ID NO: 92788 - DNA, 25 bp, Homo sapien
gaggcaaaggatggatggcaagccc

SEQ ID NO: 92789 - DNA, 25 bp, Homo sapien
ctggaggcaaaggatggatggcaag

SEQ ID NO: 92790 - DNA, 25 bp, Homo sapien
gaagctcaatgtctgaattccgaag

SEQ ID NO: 92791 - DNA, 25 bp, Homo sapien
gtacacgtgtgtttttgcgcccgat

SEQ ID NO: 92792 - DNA, 25 bp, Homo sapien
cactcgatgggcaccgatgctgcct

SEQ ID NO: 92793 - DNA, 25 bp, Homo sapien
aattccgaagcttcaggattcccgc

SEQ ID NO: 92794 - DNA, 25 bp, Homo sapien
accagtaatatccatggagtcacat

SEQ ID NO: 92795 - DNA, 25 bp, Homo sapien
agtaatatccatggagtcacataca

SEQ ID NO: 92796 - DNA, 25 bp, Homo sapien
acatacaccatgtaaggggccgctc

SEQ ID NO: 92797 - DNA, 25 bp, Homo sapien
atacaccatgtaaggggccgctccc

SEQ ID NO: 92798 - DNA, 25 bp, Homo sapien
tgaacaccaccttggagtctggcag

SEQ ID NO: 92799 - DNA, 25 bp, Homo sapien
gaagttggagccagtcagtaccagt

SEQ ID NO: 92800 - DNA, 25 bp, Homo sapien
tcaatgaacaccaccttggagtctg

SEQ ID NO: 92801 - DNA, 25 bp, Homo sapien
gagccagtcagtaccagttcctcgc

SEQ ID NO: 92802 - DNA, 25 bp, Homo sapien
ctcgttgctctgcagtcggttcact

SEQ ID NO: 92803 - DNA, 25 bp, Homo sapien
gctctgcagtcggttcactgtggcc

SEQ ID NO: 92804 - DNA, 25 bp, Homo sapien
tgcagtcggttcactgtggcctcct

SEQ ID NO: 92805 - DNA, 25 bp, Homo sapien
gttgctctgcagtcggttcactgtg

SEQ ID NO: 92806 - DNA, 25 bp, Homo sapien
ctggccgggaaaccctcttgttgct

SEQ ID NO: 92807 - DNA, 25 bp, Homo sapien
ttcctccgcccattggagacataaa

SEQ ID NO: 92808 - DNA, 25 bp, Homo sapien
ctctgggtaggactgcgtttcctcc

SEQ ID NO: 92809 - DNA, 25 bp, Homo sapien
gggaaaccctcttgttgctgtactc

SEQ ID NO: 92810 - DNA, 25 bp, Homo sapien
ctgaagggaaaccccgcagagatga

SEQ ID NO: 92811 - DNA, 25 bp, Homo sapien
accccgcagagatgagtccggtagg

SEQ ID NO: 92812 - DNA, 25 bp, Homo sapien
agggaaaccccgcagagatgagtcc

SEQ ID NO: 92813 - DNA, 25 bp, Homo sapien
gaaaccccgcagagatgagtccggt

SEQ ID NO: 92814 - DNA, 25 bp, Homo sapien
taaggagtttcgcaagcagggtctt

SEQ ID NO: 92815 - DNA, 25 bp, Homo sapien
ggtgagaagtccatgtcagtgccaa

SEQ ID NO: 92816 - DNA, 25 bp, Homo sapien
ggaacatccgcaggcccggtctgta

SEQ ID NO: 92817 - DNA, 25 bp, Homo sapien
gggcatgccatagccgaagccttct

SEQ ID NO: 92818 - DNA, 25 bp, Homo sapien
aggaaactgcaggtggttgggcaca

SEQ ID NO: 92819 - DNA, 25 bp, Homo sapien
ggaaggaaactgcaggtggttgggc

SEQ ID NO: 92820 - DNA, 25 bp, Homo sapien
gaaggaaggaaactgcaggtggttg

SEQ ID NO: 92821 - DNA, 25 bp, Homo sapien
gaaactgcaggtggttgggcacaac

SEQ ID NO: 92822 - DNA, 25 bp, Homo sapien
cagccccagggagaaagaggagccc

SEQ ID NO: 92823 - DNA, 25 bp, Homo sapien
ctggcggagagaatggcagccccag

SEQ ID NO: 92824 - DNA, 25 bp, Homo sapien
cagggagaaagaggagccccgccct

SEQ ID NO: 92825 - DNA, 25 bp, Homo sapien
agaaagaggagccccgccctccata

SEQ ID NO: 92826 - DNA, 25 bp, Homo sapien
ttcaagcggtggggatgcaggaaga

SEQ ID NO: 92827 - DNA, 25 bp, Homo sapien
caggaagaggaggcggccgaaaggg

SEQ ID NO: 92828 - DNA, 25 bp, Homo sapien
atgcaggaagaggaggcggccgaaa

SEQ ID NO: 92829 - DNA, 25 bp, Homo sapien
cttcaagcggtggggatgcaggaag

SEQ ID NO: 92830 - DNA, 25 bp, Homo sapien
ttattgtatccctcagcaggtaggg

SEQ ID NO: 92831 - DNA, 25 bp, Homo sapien
cgtgataccctggatagggacactg

SEQ ID NO: 92832 - DNA, 25 bp, Homo sapien
agggacactgtctcggaagccgctg

SEQ ID NO: 92833 - DNA, 25 bp, Homo sapien
ctgtagccacccctggatttctcct

SEQ ID NO: 92834 - DNA, 25 bp, Homo sapien
tcacagcccccagtcccacacccac

SEQ ID NO: 92835 - DNA, 25 bp, Homo sapien
ctcacagcccccagtcccacaccca

SEQ ID NO: 92836 - DNA, 25 bp, Homo sapien
actcacagcccccagtcccacaccc

SEQ ID NO: 92837 - DNA, 25 bp, Homo sapien
ccaggcaggtcttaatctaggaggc

SEQ ID NO: 92838 - DNA, 25 bp, Homo sapien
taattggattcaggcagccacaggc

SEQ ID NO: 92839 - DNA, 25 bp, Homo sapien
gaaaggctgagacagttaccccatg

SEQ ID NO: 92840 - DNA, 25 bp, Homo sapien
tcaagaacatgcctcctgggaacct

SEQ ID NO: 92841 - DNA, 25 bp, Homo sapien
aaggaggggcagttgagagactggg

SEQ ID NO: 92842 - DNA, 25 bp, Homo sapien
taaaggaggggcagttgagagactg

SEQ ID NO: 92843 - DNA, 25 bp, Homo sapien
ctgtaaaggaggggcagttgagaga

SEQ ID NO: 92844 - DNA, 25 bp, Homo sapien
gtaaaggaggggcagttgagagact

SEQ ID NO: 92845 - DNA, 25 bp, Homo sapien
gggaagccactcaggtctcggccaa

SEQ ID NO: 92846 - DNA, 25 bp, Homo sapien
aagccactcaggtctcggccaatga

SEQ ID NO: 92847 - DNA, 25 bp, Homo sapien
aggtctcggccaatgatctcactca

SEQ ID NO: 92848 - DNA, 25 bp, Homo sapien
ccactcaggtctcggccaatgatct

SEQ ID NO: 92849 - DNA, 25 bp, Homo sapien
tagacacgccttcactccagtccat

SEQ ID NO: 92850 - DNA, 25 bp, Homo sapien
agcttctgtagccaccactccagga

SEQ ID NO: 92851 - DNA, 25 bp, Homo sapien
gcttctgtagccaccactccaggaa

SEQ ID NO: 92852 - DNA, 25 bp, Homo sapien
gtccattctggcacctagcctcagt

SEQ ID NO: 92853 - DNA, 25 bp, Homo sapien
taccatcaacctgtccccagctttc

SEQ ID NO: 92854 - DNA, 25 bp, Homo sapien
tttattaccatcaacctgtccccag

SEQ ID NO: 92855 - DNA, 25 bp, Homo sapien
ttaccatcaacctgtccccagcttt

SEQ ID NO: 92856 - DNA, 25 bp, Homo sapien
tattaccatcaacctgtccccagct

SEQ ID NO: 92857 - DNA, 25 bp, Homo sapien
gattatctacgtgacctcaggcaag

SEQ ID NO: 92858 - DNA, 25 bp, Homo sapien
tcatatagtgctgtaagccccaggg

SEQ ID NO: 92859 - DNA, 25 bp, Homo sapien
taaataggacacgaatgccctaggg

SEQ ID NO: 92860 - DNA, 25 bp, Homo sapien
tcattgcaaagcagcaacaggcgag

SEQ ID NO: 92861 - DNA, 25 bp, Homo sapien
tagttgtaagtaaatctacagtcgg

SEQ ID NO: 92862 - DNA, 25 bp, Homo sapien
tacagtcggccagcatcccaaataa

SEQ ID NO: 92863 - DNA, 25 bp, Homo sapien
gtaaatctacagtcggccagcatcc

SEQ ID NO: 92864 - DNA, 25 bp, Homo sapien
tgtaagtaaatctacagtcggccag

SEQ ID NO: 92865 - DNA, 25 bp, Homo sapien
tcgggtgattcatgaagagaaaaac

SEQ ID NO: 92866 - DNA, 25 bp, Homo sapien
aatgtttcagggctcgaagggtgtt

SEQ ID NO: 92867 - DNA, 25 bp, Homo sapien
ggcactgctgcacttcgggtgattc

SEQ ID NO: 92868 - DNA, 25 bp, Homo sapien
aacaggagcaacaatgtttcagggc

SEQ ID NO: 92869 - DNA, 25 bp, Homo sapien
tcaggaggatctactccttggctgc

SEQ ID NO: 92870 - DNA, 25 bp, Homo sapien
gcagaaggcctttgggctgaatctc

SEQ ID NO: 92871 - DNA, 25 bp, Homo sapien
cttgaagcagaaggcctttgggctg

SEQ ID NO: 92872 - DNA, 25 bp, Homo sapien
gaagcagaaggcctttgggctgaat

SEQ ID NO: 92873 - DNA, 25 bp, Homo sapien
cagaaggcctttgggctgaatctcc

SEQ ID NO: 92874 - DNA, 25 bp, Homo sapien
ccctcctggatcaactctgtctccg

SEQ ID NO: 92875 - DNA, 25 bp, Homo sapien
tctggagcttggtccccttcgaccg

SEQ ID NO: 92876 - DNA, 25 bp, Homo sapien
tctccgtctgctggatagcttaaag

SEQ ID NO: 92877 - DNA, 25 bp, Homo sapien
aactctgtctccgtctgctggatag

SEQ ID NO: 92878 - DNA, 25 bp, Homo sapien
ttttgtctgcaccatgaaccattcc

SEQ ID NO: 92879 - DNA, 25 bp, Homo sapien
agcttgaccctaaagatgcgctgca

SEQ ID NO: 92880 - DNA, 25 bp, Homo sapien
cgttcagcttgaccctaaagatgcg

SEQ ID NO: 92881 - DNA, 25 bp, Homo sapien
gccgctgcacccgaggcttcgattt

SEQ ID NO: 92882 - DNA, 25 bp, Homo sapien
gcccatgttctctcggggcccctcg

SEQ ID NO: 92883 - DNA, 25 bp, Homo sapien
cccatgttctctcggggcccctcga

SEQ ID NO: 92884 - DNA, 25 bp, Homo sapien
tgcccatgttctctcggggcccctc

SEQ ID NO: 92885 - DNA, 25 bp, Homo sapien
ccatgttctctcggggcccctcgag

SEQ ID NO: 92886 - DNA, 25 bp, Homo sapien
tactgctcacagttagtgtgcagca

SEQ ID NO: 92887 - DNA, 25 bp, Homo sapien
ttttaacagtgggtccataggagcc

SEQ ID NO: 92888 - DNA, 25 bp, Homo sapien
aaccaactctcagggtactgctcac

SEQ ID NO: 92889 - DNA, 25 bp, Homo sapien
tgtgcagcaaagatagttcaacttc

SEQ ID NO: 92890 - DNA, 25 bp, Homo sapien
gatcggtgggtagcgaacctctttc

SEQ ID NO: 92891 - DNA, 25 bp, Homo sapien
ttgggccccaaggaaggcacagtgc

SEQ ID NO: 92892 - DNA, 25 bp, Homo sapien
tcgatgatgtcttccttgcccgcag

SEQ ID NO: 92893 - DNA, 25 bp, Homo sapien
gcagattagaacctccggatcggag

SEQ ID NO: 92894 - DNA, 25 bp, Homo sapien
tgctggtggcttgcactgtcccttc

SEQ ID NO: 92895 - DNA, 25 bp, Homo sapien
ctcttgagcactgtccataccatct

SEQ ID NO: 92896 - DNA, 25 bp, Homo sapien
taccatcttggttgttggaaccgac

SEQ ID NO: 92897 - DNA, 25 bp, Homo sapien
tcaacaaggcttgtgtgtggttcgt

SEQ ID NO: 92898 - DNA, 25 bp, Homo sapien
tggaagaggagtttatcttctatct

SEQ ID NO: 92899 - DNA, 25 bp, Homo sapien
gaagaggagtttatcttctatcttc

SEQ ID NO: 92900 - DNA, 25 bp, Homo sapien
gaggagtttatcttctatcttctgg

SEQ ID NO: 92901 - DNA, 25 bp, Homo sapien
agaggagtttatcttctatcttctg

SEQ ID NO: 92902 - DNA, 25 bp, Homo sapien
cttccagggtgggcacacacccagg

SEQ ID NO: 92903 - DNA, 25 bp, Homo sapien
agggtgggcacacacccagggctga

SEQ ID NO: 92904 - DNA, 25 bp, Homo sapien
ggtgggcacacacccagggctgata

SEQ ID NO: 92905 - DNA, 25 bp, Homo sapien
ccagggtgggcacacacccagggct

SEQ ID NO: 92906 - DNA, 25 bp, Homo sapien
gctttctgcactaggcagaggagcc

SEQ ID NO: 92907 - DNA, 25 bp, Homo sapien
gccagatgtagagaatgcagctcat

SEQ ID NO: 92908 - DNA, 25 bp, Homo sapien
gatttaagggcaaaggattctgccc

SEQ ID NO: 92909 - DNA, 25 bp, Homo sapien
gggaaattgaagcacgcctgggaca

SEQ ID NO: 92910 - DNA, 25 bp, Homo sapien
cttcagtaaggagacactagccctt

SEQ ID NO: 92911 - DNA, 25 bp, Homo sapien
tgttggagccaaaggcacttcggga

SEQ ID NO: 92912 - DNA, 25 bp, Homo sapien
aaggttggccctgcatccgtgggca

SEQ ID NO: 92913 - DNA, 25 bp, Homo sapien
gtgggagatccgagctaactttgtc

SEQ ID NO: 92914 - DNA, 25 bp, Homo sapien
actgctgccatcgatgaccactcgc

SEQ ID NO: 92915 - DNA, 25 bp, Homo sapien
tattcagggcctcgtggtacctctg

SEQ ID NO: 92916 - DNA, 25 bp, Homo sapien
aggttcagctcgaagggtgtattca

SEQ ID NO: 92917 - DNA, 25 bp, Homo sapien
tggtcactgtgctgttcgcttgcag

SEQ ID NO: 92918 - DNA, 25 bp, Homo sapien
aattcctcggcaggagaagaagtgc

SEQ ID NO: 92919 - DNA, 25 bp, Homo sapien
gccatggcaattcctcggcaggaga

SEQ ID NO: 92920 - DNA, 25 bp, Homo sapien
caaacacagtgacctctcggtgtcc

SEQ ID NO: 92921 - DNA, 25 bp, Homo sapien
gctgccaggtgggtacaaacacagt

SEQ ID NO: 92922 - DNA, 25 bp, Homo sapien
tgtagcttcgtcagaaagtggctct

SEQ ID NO: 92923 - DNA, 25 bp, Homo sapien
ttcttgccattctcaagctgggagg

SEQ ID NO: 92924 - DNA, 25 bp, Homo sapien
tgccattctcaagctgggagggtgt

SEQ ID NO: 92925 - DNA, 25 bp, Homo sapien
gaaagcatcttgagcgagtgtagct

SEQ ID NO: 92926 - DNA, 25 bp, Homo sapien
cacaggtgtatttactgcttccgtt

SEQ ID NO: 92927 - DNA, 25 bp, Homo sapien
cacacaggtgtatttactgcttccg

SEQ ID NO: 92928 - DNA, 25 bp, Homo sapien
acacaggtgtatttactgcttccgt

SEQ ID NO: 92929 - DNA, 25 bp, Homo sapien
gaactattcatcaggatgtgaatct

SEQ ID NO: 92930 - DNA, 25 bp, Homo sapien
tgtgaatctgctcattggtgacaat

SEQ ID NO: 92931 - DNA, 25 bp, Homo sapien
ctcctctgccagctttaccatgaac

SEQ ID NO: 92932 - DNA, 25 bp, Homo sapien
gatgtgaatctgctcattggtgaca

SEQ ID NO: 92933 - DNA, 25 bp, Homo sapien
cagaaactcatccaaggtggggcca

SEQ ID NO: 92934 - DNA, 25 bp, Homo sapien
gcaccatgaagagattccccgcaaa

SEQ ID NO: 92935 - DNA, 25 bp, Homo sapien
ccatgaagagattccccgcaaaggt

SEQ ID NO: 92936 - DNA, 25 bp, Homo sapien
catgaagagattccccgcaaaggtg

SEQ ID NO: 92937 - DNA, 25 bp, Homo sapien
ggaccatcggatcaaccaagctttg

SEQ ID NO: 92938 - DNA, 25 bp, Homo sapien
catcctcacggtagaagcagtagcc

SEQ ID NO: 92939 - DNA, 25 bp, Homo sapien
tagcccgacatgtggatgcagacga

SEQ ID NO: 92940 - DNA, 25 bp, Homo sapien
gaagagtcaaggtcgtcctcctcag

SEQ ID NO: 92941 - DNA, 25 bp, Homo sapien
ccagttgcagtgagtgaggaaaacc

SEQ ID NO: 92942 - DNA, 25 bp, Homo sapien
taaaggcagaactaaacggtgagga

SEQ ID NO: 92943 - DNA, 25 bp, Homo sapien
cccaagggaatgtcatgcacagaga

SEQ ID NO: 92944 - DNA, 25 bp, Homo sapien
taagcaggccactctccttgtcgag

SEQ ID NO: 92945 - DNA, 25 bp, Homo sapien
tcagactgctgggatagatgcaccc

SEQ ID NO: 92946 - DNA, 25 bp, Homo sapien
ggctcagccggtccccgatatagaa

SEQ ID NO: 92947 - DNA, 25 bp, Homo sapien
caggaccttgaacggtgtggcatca

SEQ ID NO: 92948 - DNA, 25 bp, Homo sapien
tggcaaaggccttcatcagactgct

SEQ ID NO: 92949 - DNA, 25 bp, Homo sapien
gacactgagcctggtatagcctaga

SEQ ID NO: 92950 - DNA, 25 bp, Homo sapien
cacacctggcttgagaaagctgacc

SEQ ID NO: 92951 - DNA, 25 bp, Homo sapien
gatgctggtccctagttcaaggcaa

SEQ ID NO: 92952 - DNA, 25 bp, Homo sapien
tacaaaaggcacaactgagggcccc

SEQ ID NO: 92953 - DNA, 25 bp, Homo sapien
gatgccacacttggcatcaagatcc

SEQ ID NO: 92954 - DNA, 25 bp, Homo sapien
ttgattcctgtggggtcaacaccat

SEQ ID NO: 92955 - DNA, 25 bp, Homo sapien
aaagcaggggtcaggaattgtctcc

SEQ ID NO: 92956 - DNA, 25 bp, Homo sapien
tgccactcctgttgcagacgccctg

SEQ ID NO: 92957 - DNA, 25 bp, Homo sapien
gtgccactcctgttgcagacgccct

SEQ ID NO: 92958 - DNA, 25 bp, Homo sapien
actcctgttgcagacgccctgcccc

SEQ ID NO: 92959 - DNA, 25 bp, Homo sapien
ccactcctgttgcagacgccctgcc

SEQ ID NO: 92960 - DNA, 25 bp, Homo sapien
tgggaggggttgggaggtagagcca

SEQ ID NO: 92961 - DNA, 25 bp, Homo sapien
ggaggggttgggaggtagagccatg

SEQ ID NO: 92962 - DNA, 25 bp, Homo sapien
cagaaggcaggtccacaggactcgg

SEQ ID NO: 92963 - DNA, 25 bp, Homo sapien
tcagagggtgagtgtacgcgcacac

SEQ ID NO: 92964 - DNA, 25 bp, Homo sapien
cctggaaggaactcacactcactgc

SEQ ID NO: 92965 - DNA, 25 bp, Homo sapien
gatgaagcaatcacacaatctgtag

SEQ ID NO: 92966 - DNA, 25 bp, Homo sapien
tgaaactactaagaaggccagccag

SEQ ID NO: 92967 - DNA, 25 bp, Homo sapien
tgaaggattctccagcttgaacctg

SEQ ID NO: 92968 - DNA, 25 bp, Homo sapien
tctagcactctgcaatgccaagcgt

SEQ ID NO: 92969 - DNA, 25 bp, Homo sapien
cagcttccggagaaatgaaactact

SEQ ID NO: 92970 - DNA, 25 bp, Homo sapien
tcaatcatttttctggacagggtta

SEQ ID NO: 92971 - DNA, 25 bp, Homo sapien
cagggttaacagctagaaatggttt

SEQ ID NO: 92972 - DNA, 25 bp, Homo sapien
atggtttaagggcaacatccaggta

SEQ ID NO: 92973 - DNA, 25 bp, Homo sapien
gaaatggtttaagggcaacatccag

SEQ ID NO: 92974 - DNA, 25 bp, Homo sapien
cggaggaaagagagcacctgccaaa

SEQ ID NO: 92975 - DNA, 25 bp, Homo sapien
gaagagaaagaatggcgcggggggc

SEQ ID NO: 92976 - DNA, 25 bp, Homo sapien
gagaaagaatggcgcggggggcgga

SEQ ID NO: 92977 - DNA, 25 bp, Homo sapien
ggaggaaagagagcacctgccaaaa

SEQ ID NO: 92978 - DNA, 25 bp, Homo sapien
cagtttgattcgtttattgacaaat

SEQ ID NO: 92979 - DNA, 25 bp, Homo sapien
gtgatcacaaatgtagctaacaggg

SEQ ID NO: 92980 - DNA, 25 bp, Homo sapien
gaacgcatacagcaccagggaggga

SEQ ID NO: 92981 - DNA, 25 bp, Homo sapien
taaaagaagggtatgtgatcacaaa

SEQ ID NO: 92982 - DNA, 25 bp, Homo sapien
ggcttcttcctgtgaggaaagccag

SEQ ID NO: 92983 - DNA, 25 bp, Homo sapien
gaaccagcaccgtatgggctagggt

SEQ ID NO: 92984 - DNA, 25 bp, Homo sapien
gaaagccagcatcacggatctcagc

SEQ ID NO: 92985 - DNA, 25 bp, Homo sapien
cagaagctgaaccagcaccgtatgg

SEQ ID NO: 92986 - DNA, 25 bp, Homo sapien
aaagcccaactgctgtcactgcatg

SEQ ID NO: 92987 - DNA, 25 bp, Homo sapien
aagcccaactgctgtcactgcatgc

SEQ ID NO: 92988 - DNA, 25 bp, Homo sapien
agcccaactgctgtcactgcatgct

SEQ ID NO: 92989 - DNA, 25 bp, Homo sapien
gtccagtgggcaggcggcttcatcc

SEQ ID NO: 92990 - DNA, 25 bp, Homo sapien
ctcccgtccagtgggcaggcggctt

SEQ ID NO: 92991 - DNA, 25 bp, Homo sapien
cagccctcagtgctgtcccatccag

SEQ ID NO: 92992 - DNA, 25 bp, Homo sapien
ggctgcagccctcccgtccagtggg

SEQ ID NO: 92993 - DNA, 25 bp, Homo sapien
cagccctcccgtctgtctcccggcc

SEQ ID NO: 92994 - DNA, 25 bp, Homo sapien
cagcggggacctctcttgtccacat

SEQ ID NO: 92995 - DNA, 25 bp, Homo sapien
ggggacctctcttgtccacatcgca

SEQ ID NO: 92996 - DNA, 25 bp, Homo sapien
ggacctctcttgtccacatcgcacg

SEQ ID NO: 92997 - DNA, 25 bp, Homo sapien
tctcttgtccacatcgcacgcaaac

SEQ ID NO: 92998 - DNA, 25 bp, Homo sapien
gacaagggcagggggcccgaatctg

SEQ ID NO: 92999 - DNA, 25 bp, Homo sapien
gcagggggcccgaatctgggcgggc

SEQ ID NO: 93000 - DNA, 25 bp, Homo sapien
gcttcaggtcctctcagcgcccgcc

SEQ ID NO: 93001 - DNA, 25 bp, Homo sapien
cggcttcaggtcctctcagcgcccg

SEQ ID NO: 93002 - DNA, 25 bp, Homo sapien
tgctgttcccgaaccttgttctcag

SEQ ID NO: 93003 - DNA, 25 bp, Homo sapien
cacgctgaagatgcgctccacatgg

SEQ ID NO: 93004 - DNA, 25 bp, Homo sapien
ttgtccggacagtccttcggaagga

SEQ ID NO: 93005 - DNA, 25 bp, Homo sapien
cgcagacaccgcaaagcgatctggg

SEQ ID NO: 93006 - DNA, 25 bp, Homo sapien
ttgccagtgagacaaccaagaagtg

SEQ ID NO: 93007 - DNA, 25 bp, Homo sapien
tggtacatgattgagccatcctgga

SEQ ID NO: 93008 - DNA, 25 bp, Homo sapien
caagaagtggagatcctccccaggc

SEQ ID NO: 93009 - DNA, 25 bp, Homo sapien
tgagactcccatcacaaagctggta

SEQ ID NO: 93010 - DNA, 25 bp, Homo sapien
cagtgcagtttgggcgggtagtgga

SEQ ID NO: 93011 - DNA, 25 bp, Homo sapien
gtttgggcgggtagtggatttcatc

SEQ ID NO: 93012 - DNA, 25 bp, Homo sapien
gcagtttgggcgggtagtggatttc

SEQ ID NO: 93013 - DNA, 25 bp, Homo sapien
ttgggcgggtagtggatttcatcct

SEQ ID NO: 93014 - DNA, 25 bp, Homo sapien
tgacaaaggcttcagtcaggccact

SEQ ID NO: 93015 - DNA, 25 bp, Homo sapien
aaggcttcagtcaggccactgatca

SEQ ID NO: 93016 - DNA, 25 bp, Homo sapien
gagccatgacaaaggcttcagtcag

SEQ ID NO: 93017 - DNA, 25 bp, Homo sapien
gctctgagccatgacaaaggcttca

SEQ ID NO: 93018 - DNA, 25 bp, Homo sapien
tgagaggctccggaagatggtcctg

SEQ ID NO: 93019 - DNA, 25 bp, Homo sapien
ctgagaggctccggaagatggtcct

SEQ ID NO: 93020 - DNA, 25 bp, Homo sapien
actgagaggctccggaagatggtcc

SEQ ID NO: 93021 - DNA, 25 bp, Homo sapien
cactgagaggctccggaagatggtc

SEQ ID NO: 93022 - DNA, 25 bp, Homo sapien
cagcagggcagagaagtctctcagc

SEQ ID NO: 93023 - DNA, 25 bp, Homo sapien
tctctatgggcatcccccggggact

SEQ ID NO: 93024 - DNA, 25 bp, Homo sapien
caacagagcctctctatgggcatcc

SEQ ID NO: 93025 - DNA, 25 bp, Homo sapien
gccaggggcaactgcaacagagcct

SEQ ID NO: 93026 - DNA, 25 bp, Homo sapien
gagctctcactccttggcactgagc

SEQ ID NO: 93027 - DNA, 25 bp, Homo sapien
catgggcaccgggaggctcacggtg

SEQ ID NO: 93028 - DNA, 25 bp, Homo sapien
cgggtcccatagatccagtgtccag

SEQ ID NO: 93029 - DNA, 25 bp, Homo sapien
tccttctccacagcgtaagtgtctc

SEQ ID NO: 93030 - DNA, 25 bp, Homo sapien
gaggagggaggctcctcgggactga

SEQ ID NO: 93031 - DNA, 25 bp, Homo sapien
gagggaggctcctcgggactgagct

SEQ ID NO: 93032 - DNA, 25 bp, Homo sapien
aggagggaggctcctcgggactgag

SEQ ID NO: 93033 - DNA, 25 bp, Homo sapien
ggagggaggctcctcgggactgagc

SEQ ID NO: 93034 - DNA, 25 bp, Homo sapien
tgggcaccctcggaggagaggcatt

SEQ ID NO: 93035 - DNA, 25 bp, Homo sapien
ccggtctccgcagtcaccccggtct

SEQ ID NO: 93036 - DNA, 25 bp, Homo sapien
ctccccggtctccgcagtcaccccg

SEQ ID NO: 93037 - DNA, 25 bp, Homo sapien
ggtctccgcagtcaccccggtctcc

SEQ ID NO: 93038 - DNA, 25 bp, Homo sapien
cgcagtcaccccggtctccacagtg

SEQ ID NO: 93039 - DNA, 25 bp, Homo sapien
cgtcaatgacaatatggcggaggtc

SEQ ID NO: 93040 - DNA, 25 bp, Homo sapien
caggcacattggcaaggcacagggt

SEQ ID NO: 93041 - DNA, 25 bp, Homo sapien
catggccacgttgctgccgtcaatg

SEQ ID NO: 93042 - DNA, 25 bp, Homo sapien
tgaaacgctgtgtgccagtcaccaa

SEQ ID NO: 93043 - DNA, 25 bp, Homo sapien
ctgtagtgggagggggtcggccaga

SEQ ID NO: 93044 - DNA, 25 bp, Homo sapien
ggtcggccagaggaggggcttggca

SEQ ID NO: 93045 - DNA, 25 bp, Homo sapien
tagtgggagggggtcggccagagga

SEQ ID NO: 93046 - DNA, 25 bp, Homo sapien
tcggccagaggaggggcttggcacc

SEQ ID NO: 93047 - DNA, 25 bp, Homo sapien
tctgactttggcatccttactgaag

SEQ ID NO: 93048 - DNA, 25 bp, Homo sapien
ggtgaccacggtcccagaagtactg

SEQ ID NO: 93049 - DNA, 25 bp, Homo sapien
tactgaagcgccactgaggcacaaa

SEQ ID NO: 93050 - DNA, 25 bp, Homo sapien
aagacagttatgtcacggtgaccac

SEQ ID NO: 93051 - DNA, 25 bp, Homo sapien
catccatgactcgtgagggtgtgag

SEQ ID NO: 93052 - DNA, 25 bp, Homo sapien
ctgtcatcataggaggagatcctct

SEQ ID NO: 93053 - DNA, 25 bp, Homo sapien
taggaggagatcctcttgccatcca

SEQ ID NO: 93054 - DNA, 25 bp, Homo sapien
tgagggaatacagcttttgcaggaa

SEQ ID NO: 93055 - DNA, 25 bp, Homo sapien
gaaacagcgtaaaccaccaggagct

SEQ ID NO: 93056 - DNA, 25 bp, Homo sapien
ccatagggctccttcaatatcaagc

SEQ ID NO: 93057 - DNA, 25 bp, Homo sapien
ttagaaacagcgtaaaccaccagga

SEQ ID NO: 93058 - DNA, 25 bp, Homo sapien
tcttccatagggctccttcaatatc

SEQ ID NO: 93059 - DNA, 25 bp, Homo sapien
ttatctttttcgtatattcacaagg

SEQ ID NO: 93060 - DNA, 25 bp, Homo sapien
cgtatattcacaaggagggtaaatg

SEQ ID NO: 93061 - DNA, 25 bp, Homo sapien
gagggtaaatgaatggaggaggacc

SEQ ID NO: 93062 - DNA, 25 bp, Homo sapien
ttttcgtatattcacaaggagggta

SEQ ID NO: 93063 - DNA, 25 bp, Homo sapien
gacccagctacaggcaactgactag

SEQ ID NO: 93064 - DNA, 25 bp, Homo sapien
cttgacccagctacaggcaactgac

SEQ ID NO: 93065 - DNA, 25 bp, Homo sapien
gctacaggcaactgactagatgcaa

SEQ ID NO: 93066 - DNA, 25 bp, Homo sapien
gcaactgactagatgcaagtgccat

SEQ ID NO: 93067 - DNA, 25 bp, Homo sapien
ctctgatgattgccatccacttctc

SEQ ID NO: 93068 - DNA, 25 bp, Homo sapien
aattatcccatctgtctcttcagcc

SEQ ID NO: 93069 - DNA, 25 bp, Homo sapien
gatgattgccatccacttctcagac

SEQ ID NO: 93070 - DNA, 25 bp, Homo sapien
ccaggtcccggaactggtcattgga

SEQ ID NO: 93071 - DNA, 25 bp, Homo sapien
tttcccacaaaggtaaagggcagca

SEQ ID NO: 93072 - DNA, 25 bp, Homo sapien
ccctggaaggatgctgagccttaga

SEQ ID NO: 93073 - DNA, 25 bp, Homo sapien
cctggaaggatgctgagccttagaa

SEQ ID NO: 93074 - DNA, 25 bp, Homo sapien
cagttggttgatgtcccggcagtat

SEQ ID NO: 93075 - DNA, 25 bp, Homo sapien
tgtttcccgggtcttccgaatgcca

SEQ ID NO: 93076 - DNA, 25 bp, Homo sapien
cagggcctcagacagttggttgatg

SEQ ID NO: 93077 - DNA, 25 bp, Homo sapien
gaagtccactttgtgatcctgaccc

SEQ ID NO: 93078 - DNA, 25 bp, Homo sapien
cctaagtaggtcgtggcaagggcct

SEQ ID NO: 93079 - DNA, 25 bp, Homo sapien
caatctcttctcagggaccgctggg

SEQ ID NO: 93080 - DNA, 25 bp, Homo sapien
tagatgattcttccccaaagacggg

SEQ ID NO: 93081 - DNA, 25 bp, Homo sapien
gacttcaagcagatccagggcaatg

SEQ ID NO: 93082 - DNA, 25 bp, Homo sapien
gacatccaaaattctgaggtctggg

SEQ ID NO: 93083 - DNA, 25 bp, Homo sapien
tagacatccaaaattctgaggtctg

SEQ ID NO: 93084 - DNA, 25 bp, Homo sapien
aatagacatccaaaattctgaggtc

SEQ ID NO: 93085 - DNA, 25 bp, Homo sapien
taatagacatccaaaattctgaggt

SEQ ID NO: 93086 - DNA, 25 bp, Homo sapien
ggaagggttctcttgcattactgac

SEQ ID NO: 93087 - DNA, 25 bp, Homo sapien
tgtaaactgacccaactgagatgtc

SEQ ID NO: 93088 - DNA, 25 bp, Homo sapien
gagaggctcgtgcataatcctccca

SEQ ID NO: 93089 - DNA, 25 bp, Homo sapien
gacttcctccgcttgatagacattg

SEQ ID NO: 93090 - DNA, 25 bp, Homo sapien
tcacaattccgcatgtcccaggagg

SEQ ID NO: 93091 - DNA, 25 bp, Homo sapien
gacactttcgtaagaaatgacacca

SEQ ID NO: 93092 - DNA, 25 bp, Homo sapien
gaactgtctagtgaagctttctcag

SEQ ID NO: 93093 - DNA, 25 bp, Homo sapien
gcaaaagcattgtcacggtggagaa

SEQ ID NO: 93094 - DNA, 25 bp, Homo sapien
gccaaatcaggtggatgcctaaaga

SEQ ID NO: 93095 - DNA, 25 bp, Homo sapien
gaagattgtggaaccaggtccccag

SEQ ID NO: 93096 - DNA, 25 bp, Homo sapien
gcagaaattgcaggagagactcata

SEQ ID NO: 93097 - DNA, 25 bp, Homo sapien
tcagtatgagagctctaaggcaagc

SEQ ID NO: 93098 - DNA, 25 bp, Homo sapien
gaaagactagagcatccaggagtgg

SEQ ID NO: 93099 - DNA, 25 bp, Homo sapien
gagcagtgccatctcaaagactcag

SEQ ID NO: 93100 - DNA, 25 bp, Homo sapien
gaatatggttgacatccacaagcca

SEQ ID NO: 93101 - DNA, 25 bp, Homo sapien
tctgtaagccctcatatggtggtag

SEQ ID NO: 93102 - DNA, 25 bp, Homo sapien
catggcccattgttccagcagcgag

SEQ ID NO: 93103 - DNA, 25 bp, Homo sapien
gattttgtctttatgctggctccaa

SEQ ID NO: 93104 - DNA, 25 bp, Homo sapien
tattctaactattgaggacgcagca

SEQ ID NO: 93105 - DNA, 25 bp, Homo sapien
cagagaagctaagccctacaggttc

SEQ ID NO: 93106 - DNA, 25 bp, Homo sapien
tacaggttccctcaggttagtgagc

SEQ ID NO: 93107 - DNA, 25 bp, Homo sapien
cctgaaatacaggagctcaatattt

SEQ ID NO: 93108 - DNA, 25 bp, Homo sapien
taccagctatatgacttaaagatac

SEQ ID NO: 93109 - DNA, 25 bp, Homo sapien
taaagatactacttgatatgttcag

SEQ ID NO: 93110 - DNA, 25 bp, Homo sapien
cagctctggtttctagtttcaagtc

SEQ ID NO: 93111 - DNA, 25 bp, Homo sapien
tagttgagggtacatctgagaagcc

SEQ ID NO: 93112 - DNA, 25 bp, Homo sapien
tccagaaaagtcaccatagttgagg

SEQ ID NO: 93113 - DNA, 25 bp, Homo sapien
gaaaacgtgaccatgcagttcctgt

SEQ ID NO: 93114 - DNA, 25 bp, Homo sapien
gaaacagccaattcagagtgagaga

SEQ ID NO: 93115 - DNA, 25 bp, Homo sapien
aaaacttttgtacactactgatggg

SEQ ID NO: 93116 - DNA, 25 bp, Homo sapien
aaaccattaccgaacctccagagtg

SEQ ID NO: 93117 - DNA, 25 bp, Homo sapien
tactgatgggagtagtacaatcact

SEQ ID NO: 93118 - DNA, 25 bp, Homo sapien
tatgttgagcacgacaattcttttc

SEQ ID NO: 93119 - DNA, 25 bp, Homo sapien
attccggaggccccctgctgtgtaa

SEQ ID NO: 93120 - DNA, 25 bp, Homo sapien
ggattccggaggccccctgctgtgt

SEQ ID NO: 93121 - DNA, 25 bp, Homo sapien
cggaggccccctgctgtgtaacaat

SEQ ID NO: 93122 - DNA, 25 bp, Homo sapien
tccggaggccccctgctgtgtaaca

SEQ ID NO: 93123 - DNA, 25 bp, Homo sapien
cataagagctatttataacaaacct

SEQ ID NO: 93124 - DNA, 25 bp, Homo sapien
ctgtacaccaacagtagtcaagcca

SEQ ID NO: 93125 - DNA, 25 bp, Homo sapien
tgtacaccaacagtagtcaagccaa

SEQ ID NO: 93126 - DNA, 25 bp, Homo sapien
tatccaggtacatagagtctggagt

SEQ ID NO: 93127 - DNA, 25 bp, Homo sapien
gatatccaggtacatagagtctgga

SEQ ID NO: 93128 - DNA, 25 bp, Homo sapien
tgatatccaggtacatagagtctgg

SEQ ID NO: 93129 - DNA, 25 bp, Homo sapien
ggtgatatccaggtacatagagtct

SEQ ID NO: 93130 - DNA, 25 bp, Homo sapien
tctacaatacttgatttccctttgg

SEQ ID NO: 93131 - DNA, 25 bp, Homo sapien
ttgctggccggaatgatccagatct

SEQ ID NO: 93132 - DNA, 25 bp, Homo sapien
cctgccacagttctggtaaaatgct

SEQ ID NO: 93133 - DNA, 25 bp, Homo sapien
aaatgctctgagaggccccgtaggt

SEQ ID NO: 93134 - DNA, 25 bp, Homo sapien
ttggacaagactttcttcccctgtg

SEQ ID NO: 93135 - DNA, 25 bp, Homo sapien
acaagactttcttcccctgtgagga

SEQ ID NO: 93136 - DNA, 25 bp, Homo sapien
ctttggacaagactttcttcccctg

SEQ ID NO: 93137 - DNA, 25 bp, Homo sapien
ggacaagactttcttcccctgtgag

SEQ ID NO: 93138 - DNA, 25 bp, Homo sapien
agtcagctggaagtccattccacag

SEQ ID NO: 93139 - DNA, 25 bp, Homo sapien
gctggaagtccattccacagtaaag

SEQ ID NO: 93140 - DNA, 25 bp, Homo sapien
tctcctctgggatacacagtggagc

SEQ ID NO: 93141 - DNA, 25 bp, Homo sapien
ctctgggatacacagtggagcacag

SEQ ID NO: 93142 - DNA, 25 bp, Homo sapien
caccgcctgagctagttggctgact

SEQ ID NO: 93143 - DNA, 25 bp, Homo sapien
gacttctgcatggtcctctgtgagg

SEQ ID NO: 93144 - DNA, 25 bp, Homo sapien
ctcatggtgtaagctgcagtttgcc

SEQ ID NO: 93145 - DNA, 25 bp, Homo sapien
aaggtcttccccgtggcctggattg

SEQ ID NO: 93146 - DNA, 25 bp, Homo sapien
gcctgactggtgaggtagagccaca

SEQ ID NO: 93147 - DNA, 25 bp, Homo sapien
tgttagaccttcagacagacacgtc

SEQ ID NO: 93148 - DNA, 25 bp, Homo sapien
gagttcctttgtgagaaaccccagc

SEQ ID NO: 93149 - DNA, 25 bp, Homo sapien
tctgcaaagggtccagcgatgtgac

SEQ ID NO: 93150 - DNA, 25 bp, Homo sapien
taagttatcataacctaatttggct

SEQ ID NO: 93151 - DNA, 25 bp, Homo sapien
gactctttatgtgatggcttcctca

SEQ ID NO: 93152 - DNA, 25 bp, Homo sapien
gctagttacagtagcaatgtgcttg

SEQ ID NO: 93153 - DNA, 25 bp, Homo sapien
cttttgaagttgttgtagaatgctg

SEQ ID NO: 93154 - DNA, 25 bp, Homo sapien
aatatgagatggctgtgggtatgcc

SEQ ID NO: 93155 - DNA, 25 bp, Homo sapien
tctagacatgtacatagaggtgttc

SEQ ID NO: 93156 - DNA, 25 bp, Homo sapien
gaggtgttcatagcaatctcgaatg

SEQ ID NO: 93157 - DNA, 25 bp, Homo sapien
caactttttccggttcaatatgaga

SEQ ID NO: 93158 - DNA, 25 bp, Homo sapien
ggaaacttacaatggacacagagcc

SEQ ID NO: 93159 - DNA, 25 bp, Homo sapien
tggctttactctaccaatgggaagt

SEQ ID NO: 93160 - DNA, 25 bp, Homo sapien
tgaaattcctggtcagtctcccaga

SEQ ID NO: 93161 - DNA, 25 bp, Homo sapien
tctttataaggctgcaatgctggct

SEQ ID NO: 93162 - DNA, 25 bp, Homo sapien
cactgtctggttggataatcacata

SEQ ID NO: 93163 - DNA, 25 bp, Homo sapien
tcattgagcacgccatagtggacat

SEQ ID NO: 93164 - DNA, 25 bp, Homo sapien
actgtctggttggataatcacataa

SEQ ID NO: 93165 - DNA, 25 bp, Homo sapien
ttgagcacgccatagtggacattca

SEQ ID NO: 93166 - DNA, 25 bp, Homo sapien
tcagcactatctgtggtgacaccac

SEQ ID NO: 93167 - DNA, 25 bp, Homo sapien
tcgcaagttctcacacgcaagtcct

SEQ ID NO: 93168 - DNA, 25 bp, Homo sapien
tacagcccgcaaagctacatcaaag

SEQ ID NO: 93169 - DNA, 25 bp, Homo sapien
cctcaaaggagatgcatcgcaagtt

SEQ ID NO: 93170 - DNA, 25 bp, Homo sapien
cctgcccattccgccagtcagagct

SEQ ID NO: 93171 - DNA, 25 bp, Homo sapien
ctgcccattccgccagtcagagctg

SEQ ID NO: 93172 - DNA, 25 bp, Homo sapien
tgcccattccgccagtcagagctgg

SEQ ID NO: 93173 - DNA, 25 bp, Homo sapien
tcctcaacatcagccgacttgttcc

SEQ ID NO: 93174 - DNA, 25 bp, Homo sapien
acatcagccgacttgttcctttctc

SEQ ID NO: 93175 - DNA, 25 bp, Homo sapien
ctcaacatcagccgacttgttcctt

SEQ ID NO: 93176 - DNA, 25 bp, Homo sapien
caacatcagccgacttgttcctttc

SEQ ID NO: 93177 - DNA, 25 bp, Homo sapien
cagattttcttatggaccaaaaggc

SEQ ID NO: 93178 - DNA, 25 bp, Homo sapien
tgcacgcacataacctcagcatagt

SEQ ID NO: 93179 - DNA, 25 bp, Homo sapien
tcacttcgcttatctaaaacaacag

SEQ ID NO: 93180 - DNA, 25 bp, Homo sapien
tacacattaattaaatgcacgcaca

SEQ ID NO: 93181 - DNA, 25 bp, Homo sapien
gttttcaagatagtgaggacagcca

SEQ ID NO: 93182 - DNA, 25 bp, Homo sapien
taggatttgggctgatggtcgcatc

SEQ ID NO: 93183 - DNA, 25 bp, Homo sapien
ccgtgttgggtccacagttgaaaga

SEQ ID NO: 93184 - DNA, 25 bp, Homo sapien
taggtacagcaacagtttccccact

SEQ ID NO: 93185 - DNA, 25 bp, Homo sapien
tgtcccatacaggacagcttgggtg

SEQ ID NO: 93186 - DNA, 25 bp, Homo sapien
gggcagtgacaaaggttgtaaatgt

SEQ ID NO: 93187 - DNA, 25 bp, Homo sapien
tcctggggcagtgacaaaggttgta

SEQ ID NO: 93188 - DNA, 25 bp, Homo sapien
gtgacaaaggttgtaaatgtcccat

SEQ ID NO: 93189 - DNA, 25 bp, Homo sapien
ctaactggcccaatccatatgtgcc

SEQ ID NO: 93190 - DNA, 25 bp, Homo sapien
tccatatgtgccatagctccctgca

SEQ ID NO: 93191 - DNA, 25 bp, Homo sapien
ggcccaatccatatgtgccatagct

SEQ ID NO: 93192 - DNA, 25 bp, Homo sapien
caatccatatgtgccatagctccct

SEQ ID NO: 93193 - DNA, 25 bp, Homo sapien
gacttgccagcccagtatgttgtca

SEQ ID NO: 93194 - DNA, 25 bp, Homo sapien
ccagtatgttgtcactcttgcatct

SEQ ID NO: 93195 - DNA, 25 bp, Homo sapien
agttattacatgaaatggacttgcc

SEQ ID NO: 93196 - DNA, 25 bp, Homo sapien
ataatttaattctagcgccctctgc

SEQ ID NO: 93197 - DNA, 25 bp, Homo sapien
acttattagtgccagaaataattcc

SEQ ID NO: 93198 - DNA, 25 bp, Homo sapien
ccagaaataattcctccagggtcat

SEQ ID NO: 93199 - DNA, 25 bp, Homo sapien
cttcctacttattagtgccagaaat

SEQ ID NO: 93200 - DNA, 25 bp, Homo sapien
cctacttattagtgccagaaataat

SEQ ID NO: 93201 - DNA, 25 bp, Homo sapien
ctggatatcaggctcctcatgaggt

SEQ ID NO: 93202 - DNA, 25 bp, Homo sapien
cagaggctgcttcatggtcaatggt

SEQ ID NO: 93203 - DNA, 25 bp, Homo sapien
tgaggcaagactgaacagctcctgg

SEQ ID NO: 93204 - DNA, 25 bp, Homo sapien
tgaaggtagcccaacaacaactgga

SEQ ID NO: 93205 - DNA, 25 bp, Homo sapien
catacgtgctttcaggaacttttgc

SEQ ID NO: 93206 - DNA, 25 bp, Homo sapien
ggtgcctcctggaaagcacaagcca

SEQ ID NO: 93207 - DNA, 25 bp, Homo sapien
gcctcctggaaagcacaagccattc

SEQ ID NO: 93208 - DNA, 25 bp, Homo sapien
tgcaacgtcatacgtgctttcagga

SEQ ID NO: 93209 - DNA, 25 bp, Homo sapien
gatctcttccacgttgcttaggtga

SEQ ID NO: 93210 - DNA, 25 bp, Homo sapien
agccctgcttgtggcaggcagaatt

SEQ ID NO: 93211 - DNA, 25 bp, Homo sapien
gtaatcccgtacatagccctgcttg

SEQ ID NO: 93212 - DNA, 25 bp, Homo sapien
gcttaggtgagtaatcccgtacata

SEQ ID NO: 93213 - DNA, 25 bp, Homo sapien
tccttgtgcctttggtctatgcttg

SEQ ID NO: 93214 - DNA, 25 bp, Homo sapien
ctttggtctatgcttgtctcctcca

SEQ ID NO: 93215 - DNA, 25 bp, Homo sapien
cctttggtctatgcttgtctcctcc

SEQ ID NO: 93216 - DNA, 25 bp, Homo sapien
tgtgcctttggtctatgcttgtctc

SEQ ID NO: 93217 - DNA, 25 bp, Homo sapien
tcaacttctgcagccatacatcttc

SEQ ID NO: 93218 - DNA, 25 bp, Homo sapien
ttcttatctgttatcagcaggttct

SEQ ID NO: 93219 - DNA, 25 bp, Homo sapien
aacttctgcagccatacatcttccc

SEQ ID NO: 93220 - DNA, 25 bp, Homo sapien
gtttcttatctgttatcagcaggtt

SEQ ID NO: 93221 - DNA, 25 bp, Homo sapien
ctctcccgccgctaagtttctccag

SEQ ID NO: 93222 - DNA, 25 bp, Homo sapien
ctgactcagcccctttccgggtctg

SEQ ID NO: 93223 - DNA, 25 bp, Homo sapien
catttttcaggcttcgaattgcctg

SEQ ID NO: 93224 - DNA, 25 bp, Homo sapien
ggcaaaatatttgaagccatcacat

SEQ ID NO: 93225 - DNA, 25 bp, Homo sapien
atgctattgaatgggaggatgaatt

SEQ ID NO: 93226 - DNA, 25 bp, Homo sapien
aatgctattgaatgggaggatgaat

SEQ ID NO: 93227 - DNA, 25 bp, Homo sapien
cagtctaatgctgagctggtctaag

SEQ ID NO: 93228 - DNA, 25 bp, Homo sapien
agaaggcgtaactgtctcccctcag

SEQ ID NO: 93229 - DNA, 25 bp, Homo sapien
gaagaaggcgtaactgtctcccctc

SEQ ID NO: 93230 - DNA, 25 bp, Homo sapien
ggtctaagccgtctacttcatgttt

SEQ ID NO: 93231 - DNA, 25 bp, Homo sapien
catagttcgatgaggcaaagctgcc

SEQ ID NO: 93232 - DNA, 25 bp, Homo sapien
ctgatggacatagttcgatgaggca

SEQ ID NO: 93233 - DNA, 25 bp, Homo sapien
gacatagttcgatgaggcaaagctg

SEQ ID NO: 93234 - DNA, 25 bp, Homo sapien
tggacatagttcgatgaggcaaagc

SEQ ID NO: 93235 - DNA, 25 bp, Homo sapien
tgctcccgtggtccatctcactggc

SEQ ID NO: 93236 - DNA, 25 bp, Homo sapien
gtgtctgctcccgtggtccatctca

SEQ ID NO: 93237 - DNA, 25 bp, Homo sapien
ctgggcataacagtgtctgctcccg

SEQ ID NO: 93238 - DNA, 25 bp, Homo sapien
gcataacagtgtctgctcccgtggt

SEQ ID NO: 93239 - DNA, 25 bp, Homo sapien
gagcctcatctggaatcctcatcag

SEQ ID NO: 93240 - DNA, 25 bp, Homo sapien
cctcccctaaagttttctgctacat

SEQ ID NO: 93241 - DNA, 25 bp, Homo sapien
gcctcatctggaaccttccttgagc

SEQ ID NO: 93242 - DNA, 25 bp, Homo sapien
ggatttccagagttgtactttcact

SEQ ID NO: 93243 - DNA, 25 bp, Homo sapien
tactcttgctacttgtatccagggt

SEQ ID NO: 93244 - DNA, 25 bp, Homo sapien
cagtcatgcctattttagagacacc

SEQ ID NO: 93245 - DNA, 25 bp, Homo sapien
caccttcataatgtccttgggagag

SEQ ID NO: 93246 - DNA, 25 bp, Homo sapien
cactgtcatagtgatggtcgctggt

SEQ ID NO: 93247 - DNA, 25 bp, Homo sapien
tctctgatattaagcaggaaggcat

SEQ ID NO: 93248 - DNA, 25 bp, Homo sapien
taaactgcgctgagtctaaactggc

SEQ ID NO: 93249 - DNA, 25 bp, Homo sapien
gattagtttcactcactgtcctagc

SEQ ID NO: 93250 - DNA, 25 bp, Homo sapien
ggcattttaatgtggtgacatcaga

SEQ ID NO: 93251 - DNA, 25 bp, Homo sapien
tacgcccagtgatttcaacttgacg

SEQ ID NO: 93252 - DNA, 25 bp, Homo sapien
ggtgcatcctttacattgcttggcc

SEQ ID NO: 93253 - DNA, 25 bp, Homo sapien
cctgagtctagaggattgagttggc

SEQ ID NO: 93254 - DNA, 25 bp, Homo sapien
gggaacctcatgtttcacctcagta

SEQ ID NO: 93255 - DNA, 25 bp, Homo sapien
tcataaagtggttcctttttggcat

SEQ ID NO: 93256 - DNA, 25 bp, Homo sapien
ccaaactgctttacaaagcaagaca

SEQ ID NO: 93257 - DNA, 25 bp, Homo sapien
tggagaaatttcctagactttccat

SEQ ID NO: 93258 - DNA, 25 bp, Homo sapien
ttggcatcccttttggagaaatttc

SEQ ID NO: 93259 - DNA, 25 bp, Homo sapien
tctccttacaaaagagtcctcagga

SEQ ID NO: 93260 - DNA, 25 bp, Homo sapien
cactgttcctgcattcttgtcctac

SEQ ID NO: 93261 - DNA, 25 bp, Homo sapien
ttgttcccgtcattcagagaagagt

SEQ ID NO: 93262 - DNA, 25 bp, Homo sapien
ggagaaagttagtggttgttgtcca

SEQ ID NO: 93263 - DNA, 25 bp, Homo sapien
tgctaatggatagcgtatctcaagg

SEQ ID NO: 93264 - DNA, 25 bp, Homo sapien
gaattgctaatggatagcgtatctc

SEQ ID NO: 93265 - DNA, 25 bp, Homo sapien
tggatagcgtatctcaagggaagta

SEQ ID NO: 93266 - DNA, 25 bp, Homo sapien
cctgcagctgaattgctaatggata

SEQ ID NO: 93267 - DNA, 25 bp, Homo sapien
ccttcagaggatcttcctctctatg

SEQ ID NO: 93268 - DNA, 25 bp, Homo sapien
tgtacgtttcctggttatgaccctc

SEQ ID NO: 93269 - DNA, 25 bp, Homo sapien
tactgacttcctgtacgtttcctgg

SEQ ID NO: 93270 - DNA, 25 bp, Homo sapien
ctagagacgtggtccttttactgac

SEQ ID NO: 93271 - DNA, 25 bp, Homo sapien
ggcaaattggagatcttccccattc

SEQ ID NO: 93272 - DNA, 25 bp, Homo sapien
agggccctgccaatgtataggaagg

SEQ ID NO: 93273 - DNA, 25 bp, Homo sapien
tcacccagaggaagggtaggcattg

SEQ ID NO: 93274 - DNA, 25 bp, Homo sapien
taacttcctgatttgcacctcccag

SEQ ID NO: 93275 - DNA, 25 bp, Homo sapien
gttgagaacgtgcaaggtccactcg

SEQ ID NO: 93276 - DNA, 25 bp, Homo sapien
cagcctggctgttgagagtgccatt

SEQ ID NO: 93277 - DNA, 25 bp, Homo sapien
gagcacttcaaagcagcggaatgtg

SEQ ID NO: 93278 - DNA, 25 bp, Homo sapien
agagtgccattcctgggctctcctg

SEQ ID NO: 93279 - DNA, 25 bp, Homo sapien
tacaaagcctgggatagtgccacac

SEQ ID NO: 93280 - DNA, 25 bp, Homo sapien
acccagtaggtgctttgatgaggac

SEQ ID NO: 93281 - DNA, 25 bp, Homo sapien
catttccctgatgatgtttccccac

SEQ ID NO: 93282 - DNA, 25 bp, Homo sapien
cagagagttctgttggagtccgatg

SEQ ID NO: 93283 - DNA, 25 bp, Homo sapien
ccagcccttgagttgtgtgactgaa

SEQ ID NO: 93284 - DNA, 25 bp, Homo sapien
tgacaaggccactcacaagagcgat

SEQ ID NO: 93285 - DNA, 25 bp, Homo sapien
caagagcgatgttcctgatgccaaa

SEQ ID NO: 93286 - DNA, 25 bp, Homo sapien
tctcatatgagcgagtgacaaggcc

SEQ ID NO: 93287 - DNA, 25 bp, Homo sapien
aaggtaaagtcaaatgcagattcga

SEQ ID NO: 93288 - DNA, 25 bp, Homo sapien
tgcagattcgaacaaatttagaaat

SEQ ID NO: 93289 - DNA, 25 bp, Homo sapien
atacgtcagtgactctgtgtcttct

SEQ ID NO: 93290 - DNA, 25 bp, Homo sapien
agatgttcatattctgatctttcaa

SEQ ID NO: 93291 - DNA, 25 bp, Homo sapien
ggaaggaggaagtccggcaaggata

SEQ ID NO: 93292 - DNA, 25 bp, Homo sapien
agtccggcaaggatatgtgactgac

SEQ ID NO: 93293 - DNA, 25 bp, Homo sapien
gacataatgtcttaaaaagtcatcc

SEQ ID NO: 93294 - DNA, 25 bp, Homo sapien
ctgacataatgtcttaaaaagtcat

SEQ ID NO: 93295 - DNA, 25 bp, Homo sapien
catagtttgtgggtaaagacggtct

SEQ ID NO: 93296 - DNA, 25 bp, Homo sapien
aagacggtctccagttgtgcacagg

SEQ ID NO: 93297 - DNA, 25 bp, Homo sapien
gctactatcctgataactgagctgg

SEQ ID NO: 93298 - DNA, 25 bp, Homo sapien
tgcacaggagttgcttggcaaaccc

SEQ ID NO: 93299 - DNA, 25 bp, Homo sapien
aatgttctgatcctagcaactttgt

SEQ ID NO: 93300 - DNA, 25 bp, Homo sapien
tgttctgatcctagcaactttgtgt

SEQ ID NO: 93301 - DNA, 25 bp, Homo sapien
cttcacttgtaatgataggaaatgt

SEQ ID NO: 93302 - DNA, 25 bp, Homo sapien
gaaatgttctgatcctagcaacttt

SEQ ID NO: 93303 - DNA, 25 bp, Homo sapien
tatttctctcgtttgttttggattc

SEQ ID NO: 93304 - DNA, 25 bp, Homo sapien
ttgttttggattcttgggctagatc

SEQ ID NO: 93305 - DNA, 25 bp, Homo sapien
tcatatttctctcgtttgttttgga

SEQ ID NO: 93306 - DNA, 25 bp, Homo sapien
gttttggattcttgggctagatctc

SEQ ID NO: 93307 - DNA, 25 bp, Homo sapien
tctgtcacgataccttatactggga

SEQ ID NO: 93308 - DNA, 25 bp, Homo sapien
cacgataccttatactgggaatcat

SEQ ID NO: 93309 - DNA, 25 bp, Homo sapien
gattctgtcacgataccttatactg

SEQ ID NO: 93310 - DNA, 25 bp, Homo sapien
aaacaccagattctgtcacgatacc

SEQ ID NO: 93311 - DNA, 25 bp, Homo sapien
cacccccagtgccagaatcagggtt

SEQ ID NO: 93312 - DNA, 25 bp, Homo sapien
gccttcagttgcctgtagttgcaag

SEQ ID NO: 93313 - DNA, 25 bp, Homo sapien
cctgtagttgcaagaagtatgggcc

SEQ ID NO: 93314 - DNA, 25 bp, Homo sapien
tgcaagaagtatgggccacctgcag

SEQ ID NO: 93315 - DNA, 25 bp, Homo sapien
cagttgcctgtagttgcaagaagta

SEQ ID NO: 93316 - DNA, 25 bp, Homo sapien
tgcatagcctgagcctcttcttgtg

SEQ ID NO: 93317 - DNA, 25 bp, Homo sapien
tcgttggttccttgaagtgatagct

SEQ ID NO: 93318 - DNA, 25 bp, Homo sapien
caataggttcctccgagctttactg

SEQ ID NO: 93319 - DNA, 25 bp, Homo sapien
cttgtggaggatgctacattttgac

SEQ ID NO: 93320 - DNA, 25 bp, Homo sapien
gaaaatggatcttcacgaattgtag

SEQ ID NO: 93321 - DNA, 25 bp, Homo sapien
cacgaattgtagagctatttcaaag

SEQ ID NO: 93322 - DNA, 25 bp, Homo sapien
agagaagtgggattggcgccttttc

SEQ ID NO: 93323 - DNA, 25 bp, Homo sapien
tttcaaagtgcaagtccctttgaaa

SEQ ID NO: 93324 - DNA, 25 bp, Homo sapien
caagagcctgtctactaatgatcaa

SEQ ID NO: 93325 - DNA, 25 bp, Homo sapien
ggacccatgaagcagaacgtgccca

SEQ ID NO: 93326 - DNA, 25 bp, Homo sapien
aaagagatgtgattattggccaagc

SEQ ID NO: 93327 - DNA, 25 bp, Homo sapien
gaatatgggttcagctgtaaaggcc

SEQ ID NO: 93328 - DNA, 25 bp, Homo sapien
ggcttggtgggccgtctaccgctct

SEQ ID NO: 93329 - DNA, 25 bp, Homo sapien
gatgtaggggctgtgaggcttggtg

SEQ ID NO: 93330 - DNA, 25 bp, Homo sapien
tgtgaggcttggtgggccgtctacc

SEQ ID NO: 93331 - DNA, 25 bp, Homo sapien
ggctgtgaggcttggtgggccgtct

SEQ ID NO: 93332 - DNA, 25 bp, Homo sapien
tgagcaaaagagtggcacgtagccc

SEQ ID NO: 93333 - DNA, 25 bp, Homo sapien
aacagaccggtaagaagaatcttgc

SEQ ID NO: 93334 - DNA, 25 bp, Homo sapien
gcagttccctacaatgtgcttggca

SEQ ID NO: 93335 - DNA, 25 bp, Homo sapien
gctcagaatctggttggaaaaacag

SEQ ID NO: 93336 - DNA, 25 bp, Homo sapien
cattacagtttctttcatagcccat

SEQ ID NO: 93337 - DNA, 25 bp, Homo sapien
cccattacagtttctttcatagccc

SEQ ID NO: 93338 - DNA, 25 bp, Homo sapien
ccattacagtttctttcatagccca

SEQ ID NO: 93339 - DNA, 25 bp, Homo sapien
aacattgtattcatatctgctaatg

SEQ ID NO: 93340 - DNA, 25 bp, Homo sapien
tcacctcctgtgaccattctaccca

SEQ ID NO: 93341 - DNA, 25 bp, Homo sapien
attctacccacacatcagacctaat

SEQ ID NO: 93342 - DNA, 25 bp, Homo sapien
atccctttggattcccgtaacattg

SEQ ID NO: 93343 - DNA, 25 bp, Homo sapien
gtgggactcaggcaaatttgtttct

SEQ ID NO: 93344 - DNA, 25 bp, Homo sapien
tacttcccatgtgtagagctgggtc

SEQ ID NO: 93345 - DNA, 25 bp, Homo sapien
cttcatgccatgagtgccagtgcca

SEQ ID NO: 93346 - DNA, 25 bp, Homo sapien
tatcctcatttctggcttcatgcca

SEQ ID NO: 93347 - DNA, 25 bp, Homo sapien
gtcactaaggctccgcctttctgtg

SEQ ID NO: 93348 - DNA, 25 bp, Homo sapien
gggttctagtgtcactaaggctccg

SEQ ID NO: 93349 - DNA, 25 bp, Homo sapien
taaggaccttgaagtactaggagga

SEQ ID NO: 93350 - DNA, 25 bp, Homo sapien
tactaggaggaaaggtgctttgtgt

SEQ ID NO: 93351 - DNA, 25 bp, Homo sapien
cagctctgccaattctatccctatt

SEQ ID NO: 93352 - DNA, 25 bp, Homo sapien
tatgacatgggtggtctttcaccag

SEQ ID NO: 93353 - DNA, 25 bp, Homo sapien
tagtcccatcagataggctttagtg

SEQ ID NO: 93354 - DNA, 25 bp, Homo sapien
tagtgaacacttgaagagtcacagt

SEQ ID NO: 93355 - DNA, 25 bp, Homo sapien
ttataactgaattacctgctttgtt

SEQ ID NO: 93356 - DNA, 25 bp, Homo sapien
tataactgaattacctgctttgttc

SEQ ID NO: 93357 - DNA, 25 bp, Homo sapien
ttgagcttcaggcctttaaggattg

SEQ ID NO: 93358 - DNA, 25 bp, Homo sapien
gagcttcaggcctttaaggattgct

SEQ ID NO: 93359 - DNA, 25 bp, Homo sapien
tgagcttcaggcctttaaggattgc

SEQ ID NO: 93360 - DNA, 25 bp, Homo sapien
agtcctgagacttggattctcctac

SEQ ID NO: 93361 - DNA, 25 bp, Homo sapien
tattagagagtcctgagacttggat

SEQ ID NO: 93362 - DNA, 25 bp, Homo sapien
cctttagacccccagatattagaga

SEQ ID NO: 93363 - DNA, 25 bp, Homo sapien
ccccagatattagagagtcctgaga

SEQ ID NO: 93364 - DNA, 25 bp, Homo sapien
tcaaaaccttcaagaacaggccaag

SEQ ID NO: 93365 - DNA, 25 bp, Homo sapien
taactgaatcccttgtggctgtcac

SEQ ID NO: 93366 - DNA, 25 bp, Homo sapien
gaacaggccaagtttaactgaatcc

SEQ ID NO: 93367 - DNA, 25 bp, Homo sapien
atgagctttggagagtaagtaggaa

SEQ ID NO: 93368 - DNA, 25 bp, Homo sapien
cagtgatactattgtccatttcttc

SEQ ID NO: 93369 - DNA, 25 bp, Homo sapien
gtgatactattgtccatttcttcct

SEQ ID NO: 93370 - DNA, 25 bp, Homo sapien
tgatactattgtccatttcttcctt

SEQ ID NO: 93371 - DNA, 25 bp, Homo sapien
agtgatactattgtccatttcttcc

SEQ ID NO: 93372 - DNA, 25 bp, Homo sapien
cctctgtgtcgagcgatgtcggatg

SEQ ID NO: 93373 - DNA, 25 bp, Homo sapien
cgatgtcggatgatggaactcacca

SEQ ID NO: 93374 - DNA, 25 bp, Homo sapien
gatcttgatcctctgtgtcgagcga

SEQ ID NO: 93375 - DNA, 25 bp, Homo sapien
gaggacaaatgttgtcttgatcttg

SEQ ID NO: 93376 - DNA, 25 bp, Homo sapien
tcgagggactctgtgaaatctgttc

SEQ ID NO: 93377 - DNA, 25 bp, Homo sapien
tgctcctgcttaggtaaatgcctgt

SEQ ID NO: 93378 - DNA, 25 bp, Homo sapien
tcttggtaggtgaggcttccccgga

SEQ ID NO: 93379 - DNA, 25 bp, Homo sapien
ctgctgctcagagggcataggccct

SEQ ID NO: 93380 - DNA, 25 bp, Homo sapien
ctggttcctgcggtcctgctgatct

SEQ ID NO: 93381 - DNA, 25 bp, Homo sapien
tgctgatctttggagctcttcaggg

SEQ ID NO: 93382 - DNA, 25 bp, Homo sapien
tcttcagggcctttcagggtcctgc

SEQ ID NO: 93383 - DNA, 25 bp, Homo sapien
cctaggtggcctgtgtcaggcttca

SEQ ID NO: 93384 - DNA, 25 bp, Homo sapien
tgcctctcctctgacaagtgttgga

SEQ ID NO: 93385 - DNA, 25 bp, Homo sapien
cctatttcagagtcccaggagctct

SEQ ID NO: 93386 - DNA, 25 bp, Homo sapien
tggaggaattaacaaaactctgttg

SEQ ID NO: 93387 - DNA, 25 bp, Homo sapien
attttcctccagagacaaattccct

SEQ ID NO: 93388 - DNA, 25 bp, Homo sapien
gggttttgttccaagttgctcctga

SEQ ID NO: 93389 - DNA, 25 bp, Homo sapien
cagtgggatcgttttcatggcaagt

SEQ ID NO: 93390 - DNA, 25 bp, Homo sapien
ctgagtcagtgggatcgttttcatg

SEQ ID NO: 93391 - DNA, 25 bp, Homo sapien
gaagtacaccccacgacaaatgtcc

SEQ ID NO: 93392 - DNA, 25 bp, Homo sapien
ggccctggaaggagcatgaagtaca

SEQ ID NO: 93393 - DNA, 25 bp, Homo sapien
ggaaggagcatgaagtacaccccac

SEQ ID NO: 93394 - DNA, 25 bp, Homo sapien
gcatgaagtacaccccacgacaaat

SEQ ID NO: 93395 - DNA, 25 bp, Homo sapien
caagtggtttagttgcttgggcctt

SEQ ID NO: 93396 - DNA, 25 bp, Homo sapien
cctttggaagcatctgtttaccctt

SEQ ID NO: 93397 - DNA, 25 bp, Homo sapien
gctgtggaggatgccgacgaatttt

SEQ ID NO: 93398 - DNA, 25 bp, Homo sapien
gggttttgcctgcacactagtcaga

SEQ ID NO: 93399 - DNA, 25 bp, Homo sapien
cctggaactggcattgtgcggattg

SEQ ID NO: 93400 - DNA, 25 bp, Homo sapien
ggatgccgacgaatttttcctggct

SEQ ID NO: 93401 - DNA, 25 bp, Homo sapien
tgcaggtggagaatttggaaagaca

SEQ ID NO: 93402 - DNA, 25 bp, Homo sapien
tcacagaggacaggacctgcaggtg

SEQ ID NO: 93403 - DNA, 25 bp, Homo sapien
agtccccggggtgtatctgcccttg

SEQ ID NO: 93404 - DNA, 25 bp, Homo sapien
ttctggccccaggatttcataacga

SEQ ID NO: 93405 - DNA, 25 bp, Homo sapien
tcctcaggtttacaacaccccgcca

SEQ ID NO: 93406 - DNA, 25 bp, Homo sapien
tactgccaaaactgaggcgagcttt

SEQ ID NO: 93407 - DNA, 25 bp, Homo sapien
actgccaaaactgaggcgagctttt

SEQ ID NO: 93408 - DNA, 25 bp, Homo sapien
tcactccgatcttcgcgaactctgg

SEQ ID NO: 93409 - DNA, 25 bp, Homo sapien
atgggccccgagaatgctgccccga

SEQ ID NO: 93410 - DNA, 25 bp, Homo sapien
gcagaaatccgcgaatcactccgat

SEQ ID NO: 93411 - DNA, 25 bp, Homo sapien
gggtcgctgcgcctctagcttgagc

SEQ ID NO: 93412 - DNA, 25 bp, Homo sapien
ggcagtattgggcaagccgcagaac

SEQ ID NO: 93413 - DNA, 25 bp, Homo sapien
gagcgatttcctccgagaaagttga

SEQ ID NO: 93414 - DNA, 25 bp, Homo sapien
cctgggacccgttgtgcgggcagta

SEQ ID NO: 93415 - DNA, 25 bp, Homo sapien
tgaggatggagcctttttttccgca

SEQ ID NO: 93416 - DNA, 25 bp, Homo sapien
gtgaaagtcgcaccggctcttgcac

SEQ ID NO: 93417 - DNA, 25 bp, Homo sapien
ggctcttgcacccagatcggtttct

SEQ ID NO: 93418 - DNA, 25 bp, Homo sapien
cagatcggtttctcccgggtctttg

SEQ ID NO: 93419 - DNA, 25 bp, Homo sapien
acaaacttcccacaagccgtgaaag

SEQ ID NO: 93420 - DNA, 25 bp, Homo sapien
aattcagttcggattgtctcctccc

SEQ ID NO: 93421 - DNA, 25 bp, Homo sapien
tcacagaattcagttcggattgtct

SEQ ID NO: 93422 - DNA, 25 bp, Homo sapien
tctgctatctccacgtagtctacaa

SEQ ID NO: 93423 - DNA, 25 bp, Homo sapien
gatatcctaggtatccccgtttctc

SEQ ID NO: 93424 - DNA, 25 bp, Homo sapien
ccatatagcacaagagtggttttat

SEQ ID NO: 93425 - DNA, 25 bp, Homo sapien
cacaagagtggttttatgatgtaaa

SEQ ID NO: 93426 - DNA, 25 bp, Homo sapien
catttaaccatatagcacaagagtg

SEQ ID NO: 93427 - DNA, 25 bp, Homo sapien
tttcaatccatttaaccatatagca

SEQ ID NO: 93428 - DNA, 25 bp, Homo sapien
ctttggatggggttctggtctgctc

SEQ ID NO: 93429 - DNA, 25 bp, Homo sapien
ccggattcaggatggctgaacttgg

SEQ ID NO: 93430 - DNA, 25 bp, Homo sapien
tcatgcttccggattcaggatggct

SEQ ID NO: 93431 - DNA, 25 bp, Homo sapien
gcagcagctatctgggcatgctctt

SEQ ID NO: 93432 - DNA, 25 bp, Homo sapien
cattcgtgtggttctgctaggtgcc

SEQ ID NO: 93433 - DNA, 25 bp, Homo sapien
cgtgtattgtaatcttggttaatgc

SEQ ID NO: 93434 - DNA, 25 bp, Homo sapien
ggtgcccagcacatcgtgtattgta

SEQ ID NO: 93435 - DNA, 25 bp, Homo sapien
aatgcgtttggatgatatagtgccc

SEQ ID NO: 93436 - DNA, 25 bp, Homo sapien
ggtgctctagttggaaaccatagag

SEQ ID NO: 93437 - DNA, 25 bp, Homo sapien
tctctttcttattccaccattcacg

SEQ ID NO: 93438 - DNA, 25 bp, Homo sapien
tccaccattcacgaaggtgctctag

SEQ ID NO: 93439 - DNA, 25 bp, Homo sapien
cacgaaggtgctctagttggaaacc

SEQ ID NO: 93440 - DNA, 25 bp, Homo sapien
gcttgcattagggcttctttactca

SEQ ID NO: 93441 - DNA, 25 bp, Homo sapien
gcttctttactcacacccgtggact

SEQ ID NO: 93442 - DNA, 25 bp, Homo sapien
ttgtgcttgcattagggcttcttta

SEQ ID NO: 93443 - DNA, 25 bp, Homo sapien
ctgtctttgtgcttgcattagggct

SEQ ID NO: 93444 - DNA, 25 bp, Homo sapien
ttatttggcacctggccaaccccat

SEQ ID NO: 93445 - DNA, 25 bp, Homo sapien
tgtgttatttggcacctggccaacc

SEQ ID NO: 93446 - DNA, 25 bp, Homo sapien
tgttatttggcacctggccaacccc

SEQ ID NO: 93447 - DNA, 25 bp, Homo sapien
gtgtgttatttggcacctggccaac

SEQ ID NO: 93448 - DNA, 25 bp, Homo sapien
ggacttgtcgccttgggtgggaata

SEQ ID NO: 93449 - DNA, 25 bp, Homo sapien
tcagactcaatgtatgctcctttgt

SEQ ID NO: 93450 - DNA, 25 bp, Homo sapien
tgtttcagactcaatgtatgctcct

SEQ ID NO: 93451 - DNA, 25 bp, Homo sapien
tgctggacttgtcgccttgggtggg

SEQ ID NO: 93452 - DNA, 25 bp, Homo sapien
agtcttttccagatacggcctggga

SEQ ID NO: 93453 - DNA, 25 bp, Homo sapien
tccagatacggcctgggatttacat

SEQ ID NO: 93454 - DNA, 25 bp, Homo sapien
attcagcatgcctgcaactaaagca

SEQ ID NO: 93455 - DNA, 25 bp, Homo sapien
caactaaagcagactttgttgttac

SEQ ID NO: 93456 - DNA, 25 bp, Homo sapien
atgtttgagaaccagccgtacccag

SEQ ID NO: 93457 - DNA, 25 bp, Homo sapien
aaatcaagtgcatgtttgagaacca

SEQ ID NO: 93458 - DNA, 25 bp, Homo sapien
tggtctagacccaggtaaagatttc

SEQ ID NO: 93459 - DNA, 25 bp, Homo sapien
agaaccagccgtacccagtgatgtg

SEQ ID NO: 93460 - DNA, 25 bp, Homo sapien
cttttcaagtctagtccacggacat

SEQ ID NO: 93461 - DNA, 25 bp, Homo sapien
tccagcgtacaagccattttggcat

SEQ ID NO: 93462 - DNA, 25 bp, Homo sapien
tagtccacggacattaattgtaatt

SEQ ID NO: 93463 - DNA, 25 bp, Homo sapien
tttccagcgtacaagccattttggc

SEQ ID NO: 93464 - DNA, 25 bp, Homo sapien
ctgaatccctgtctgccgtaagaag

SEQ ID NO: 93465 - DNA, 25 bp, Homo sapien
tgtctgccgtaagaagagaatttca

SEQ ID NO: 93466 - DNA, 25 bp, Homo sapien
caagtttctctcaactagcagactt

SEQ ID NO: 93467 - DNA, 25 bp, Homo sapien
ttctctcaactagcagactttcctg

SEQ ID NO: 93468 - DNA, 25 bp, Homo sapien
tgagtttggcaagtaccccagcatg

SEQ ID NO: 93469 - DNA, 25 bp, Homo sapien
ttagtagattcatcacatgtgcagc

SEQ ID NO: 93470 - DNA, 25 bp, Homo sapien
tagaggcttcctcaatgtatcctgg

SEQ ID NO: 93471 - DNA, 25 bp, Homo sapien
gatgatgcaggagctactcactcgt

SEQ ID NO: 93472 - DNA, 25 bp, Homo sapien
tgactggaccacctctaacgtttga

SEQ ID NO: 93473 - DNA, 25 bp, Homo sapien
ccagtgctgtaggaaattgatccca

SEQ ID NO: 93474 - DNA, 25 bp, Homo sapien
tattgtcgcggtagagaaagactcc

SEQ ID NO: 93475 - DNA, 25 bp, Homo sapien
aagttatcattcgttggtcctccag

SEQ ID NO: 93476 - DNA, 25 bp, Homo sapien
ctgaacaccagcacaaagggaaggg

SEQ ID NO: 93477 - DNA, 25 bp, Homo sapien
caccagcacaaagggaagggtccag

SEQ ID NO: 93478 - DNA, 25 bp, Homo sapien
gcctgaacaccagcacaaagggaag

SEQ ID NO: 93479 - DNA, 25 bp, Homo sapien
gaacaccagcacaaagggaagggtc

SEQ ID NO: 93480 - DNA, 25 bp, Homo sapien
taagaacatccccataatagaagta

SEQ ID NO: 93481 - DNA, 25 bp, Homo sapien
catccccataatagaagtactcttt

SEQ ID NO: 93482 - DNA, 25 bp, Homo sapien
actctttctgatttgtgtcaatatg

SEQ ID NO: 93483 - DNA, 25 bp, Homo sapien
gtaaatgtaagaacatccccataat

SEQ ID NO: 93484 - DNA, 25 bp, Homo sapien
cttctgcactcttactgctgtgaac

SEQ ID NO: 93485 - DNA, 25 bp, Homo sapien
ttctgcactcttactgctgtgaact

SEQ ID NO: 93486 - DNA, 25 bp, Homo sapien
tactccctgttactgattttgttaa

SEQ ID NO: 93487 - DNA, 25 bp, Homo sapien
ttggcgtatgttactccctgttact

SEQ ID NO: 93488 - DNA, 25 bp, Homo sapien
cacccgtataagctccatccacctt

SEQ ID NO: 93489 - DNA, 25 bp, Homo sapien
caacacacatttggcgtatgttact

SEQ ID NO: 93490 - DNA, 25 bp, Homo sapien
gctgttaacgcttggtgctcaggca

SEQ ID NO: 93491 - DNA, 25 bp, Homo sapien
gtttaatttccatactgcaacagca

SEQ ID NO: 93492 - DNA, 25 bp, Homo sapien
aactcttattcgatttgtttccagt

SEQ ID NO: 93493 - DNA, 25 bp, Homo sapien
catgtctgcagtagagtgagatagc

SEQ ID NO: 93494 - DNA, 25 bp, Homo sapien
gacaccatcaaactgtacagctggg

SEQ ID NO: 93495 - DNA, 25 bp, Homo sapien
gaatggaccacagagatggcaccaa

SEQ ID NO: 93496 - DNA, 25 bp, Homo sapien
caagagatgacaggtcgccacaaat

SEQ ID NO: 93497 - DNA, 25 bp, Homo sapien
tttgcatgagagaacttgtgacacc

SEQ ID NO: 93498 - DNA, 25 bp, Homo sapien
tggagagaacctgaattgtgttctc

SEQ ID NO: 93499 - DNA, 25 bp, Homo sapien
gagaacctgaattgtgttctcctag

SEQ ID NO: 93500 - DNA, 25 bp, Homo sapien
ttctgttcggcattttctagttatc

SEQ ID NO: 93501 - DNA, 25 bp, Homo sapien
gaattgtgttctcctagcctagttt

SEQ ID NO: 93502 - DNA, 25 bp, Homo sapien
ataaaaggatgtcagcaccgaaatg

SEQ ID NO: 93503 - DNA, 25 bp, Homo sapien
ttaaaacagtcatataaaaggatgt

SEQ ID NO: 93504 - DNA, 25 bp, Homo sapien
tgtcagcaccgaaatgctcatccgg

SEQ ID NO: 93505 - DNA, 25 bp, Homo sapien
gtgctctaccatttccttaaaacag

SEQ ID NO: 93506 - DNA, 25 bp, Homo sapien
tgtgcatccggaagttctgctgagc

SEQ ID NO: 93507 - DNA, 25 bp, Homo sapien
tagcacagtagactggcctgcttct

SEQ ID NO: 93508 - DNA, 25 bp, Homo sapien
tgatggttccgtttgtgcatccgga

SEQ ID NO: 93509 - DNA, 25 bp, Homo sapien
ccaccgctgatggttccgtttgtgc

SEQ ID NO: 93510 - DNA, 25 bp, Homo sapien
tttatttgatcacctctcctggact

SEQ ID NO: 93511 - DNA, 25 bp, Homo sapien
tatttgatcacctctcctggacttc

SEQ ID NO: 93512 - DNA, 25 bp, Homo sapien
gaaaatctttatttgatcacctctc

SEQ ID NO: 93513 - DNA, 25 bp, Homo sapien
aatctttatttgatcacctctcctg

SEQ ID NO: 93514 - DNA, 25 bp, Homo sapien
gcatgattgctccatccctcaggaa

SEQ ID NO: 93515 - DNA, 25 bp, Homo sapien
caatggtgaatataagccagcatga

SEQ ID NO: 93516 - DNA, 25 bp, Homo sapien
gaaccgtgaatgtggctccctgtgc

SEQ ID NO: 93517 - DNA, 25 bp, Homo sapien
ccaataagtctcttcacaatggtga

SEQ ID NO: 93518 - DNA, 25 bp, Homo sapien
ggcatcgtacagagtcagtgaaagg

SEQ ID NO: 93519 - DNA, 25 bp, Homo sapien
tcaggacattggcatcgtacagagt

SEQ ID NO: 93520 - DNA, 25 bp, Homo sapien
aaaggagcaagtgttagagaatgtg

SEQ ID NO: 93521 - DNA, 25 bp, Homo sapien
ggagcaagtgttagagaatgtgtca

SEQ ID NO: 93522 - DNA, 25 bp, Homo sapien
aactttgtgaaattagaggatcaga

SEQ ID NO: 93523 - DNA, 25 bp, Homo sapien
gataagattagtgtcaggcttgtca

SEQ ID NO: 93524 - DNA, 25 bp, Homo sapien
catttttgtctacaacagcctgagg

SEQ ID NO: 93525 - DNA, 25 bp, Homo sapien
gaacacaatagctaaatcattactg

SEQ ID NO: 93526 - DNA, 25 bp, Homo sapien
gcatggcatgctactgtcctgaata

SEQ ID NO: 93527 - DNA, 25 bp, Homo sapien
tcatcattgaggcaacatcaaagag

SEQ ID NO: 93528 - DNA, 25 bp, Homo sapien
aatgcactgttaggtgacatcatca

SEQ ID NO: 93529 - DNA, 25 bp, Homo sapien
gcagaactcagctttggtcaagaag

SEQ ID NO: 93530 - DNA, 25 bp, Homo sapien
gtgccaaaagtacagtctctactca

SEQ ID NO: 93531 - DNA, 25 bp, Homo sapien
agtacagtctctactcacactattg

SEQ ID NO: 93532 - DNA, 25 bp, Homo sapien
cacactattgttctgagatccacac

SEQ ID NO: 93533 - DNA, 25 bp, Homo sapien
tgttctgagatccacacggatccat

SEQ ID NO: 93534 - DNA, 25 bp, Homo sapien
tgtttattacaaagcaggcccgtag

SEQ ID NO: 93535 - DNA, 25 bp, Homo sapien
tcaacaatgacatgatgaacaagag

SEQ ID NO: 93536 - DNA, 25 bp, Homo sapien
ttcatcaagcaaggagtaaacatgg

SEQ ID NO: 93537 - DNA, 25 bp, Homo sapien
gttccctgtagaggtgatggcctgc

SEQ ID NO: 93538 - DNA, 25 bp, Homo sapien
cgaggcagagcggtacaaatcttcc

SEQ ID NO: 93539 - DNA, 25 bp, Homo sapien
tatactgcagcagtagaggcgagcg

SEQ ID NO: 93540 - DNA, 25 bp, Homo sapien
gtttcagaaccgaggagcagcacgt

SEQ ID NO: 93541 - DNA, 25 bp, Homo sapien
ttggaggaaacgagctcagacagct

SEQ ID NO: 93542 - DNA, 25 bp, Homo sapien
tgtaatgcttctggcctacagcctg

SEQ ID NO: 93543 - DNA, 25 bp, Homo sapien
caccttgtaggtggactgtgatagg

SEQ ID NO: 93544 - DNA, 25 bp, Homo sapien
tcagagattcttaagcatacaacct

SEQ ID NO: 93545 - DNA, 25 bp, Homo sapien
gtaaattacattccttgccccagtg

SEQ ID NO: 93546 - DNA, 25 bp, Homo sapien
atgatgagaacacgaaaaatggcca

SEQ ID NO: 93547 - DNA, 25 bp, Homo sapien
tgatgagaacacgaaaaatggccat

SEQ ID NO: 93548 - DNA, 25 bp, Homo sapien
aatgatgagaacacgaaaaatggcc

SEQ ID NO: 93549 - DNA, 25 bp, Homo sapien
gaacctttataagctgcatcctgtg

SEQ ID NO: 93550 - DNA, 25 bp, Homo sapien
caaacaatgtcagaagatgggtgtg

SEQ ID NO: 93551 - DNA, 25 bp, Homo sapien
gaagctgttagggattacacagcaa

SEQ ID NO: 93552 - DNA, 25 bp, Homo sapien
tggttggagttctcaaagaagctgt

SEQ ID NO: 93553 - DNA, 25 bp, Homo sapien
tggggccgatttgacagctgaatta

SEQ ID NO: 93554 - DNA, 25 bp, Homo sapien
tgctgccatggaacacaaatagaat

SEQ ID NO: 93555 - DNA, 25 bp, Homo sapien
atctcaggtttaggtggggccgatt

SEQ ID NO: 93556 - DNA, 25 bp, Homo sapien
tatttcatgatggtagggtatcatc

SEQ ID NO: 93557 - DNA, 25 bp, Homo sapien
gggtgcagggtaatgaagggcagct

SEQ ID NO: 93558 - DNA, 25 bp, Homo sapien
aacatctggagagcaactcgagcag

SEQ ID NO: 93559 - DNA, 25 bp, Homo sapien
acatctggagagcaactcgagcagg

SEQ ID NO: 93560 - DNA, 25 bp, Homo sapien
gcaactcgagcagggtgcagggtaa

SEQ ID NO: 93561 - DNA, 25 bp, Homo sapien
ttatgctgtagcctcttgagttttt

SEQ ID NO: 93562 - DNA, 25 bp, Homo sapien
tatgctgtagcctcttgagtttttt

SEQ ID NO: 93563 - DNA, 25 bp, Homo sapien
cttcatgcccctcattagattattt

SEQ ID NO: 93564 - DNA, 25 bp, Homo sapien
cattagattatttaacgtgctcatc

SEQ ID NO: 93565 - DNA, 25 bp, Homo sapien
tatttaacgtgctcatctcattaca

SEQ ID NO: 93566 - DNA, 25 bp, Homo sapien
taacgtgctcatctcattacacctt

SEQ ID NO: 93567 - DNA, 25 bp, Homo sapien
ggaattttgaactcatgaataccaa

SEQ ID NO: 93568 - DNA, 25 bp, Homo sapien
catgaataccaagctggcaagcagg

SEQ ID NO: 93569 - DNA, 25 bp, Homo sapien
aagctggcaagcaggtttttgctga

SEQ ID NO: 93570 - DNA, 25 bp, Homo sapien
gaactcatgaataccaagctggcaa

SEQ ID NO: 93571 - DNA, 25 bp, Homo sapien
tcatccatgataataggaggaatag

SEQ ID NO: 93572 - DNA, 25 bp, Homo sapien
tccatgataataggaggaatagccc

SEQ ID NO: 93573 - DNA, 25 bp, Homo sapien
ggaggaatagcccttgtccaacaat

SEQ ID NO: 93574 - DNA, 25 bp, Homo sapien
gaatagcccttgtccaacaattttg

SEQ ID NO: 93575 - DNA, 25 bp, Homo sapien
tcacttcctttctcattgaatgaca

SEQ ID NO: 93576 - DNA, 25 bp, Homo sapien
ttcccccacaactgccccttgtctg

SEQ ID NO: 93577 - DNA, 25 bp, Homo sapien
ccacaactgccccttgtctgcattc

SEQ ID NO: 93578 - DNA, 25 bp, Homo sapien
acttcctttctcattgaatgacacc

SEQ ID NO: 93579 - DNA, 25 bp, Homo sapien
gcccaacagtatctctccctaaatg

SEQ ID NO: 93580 - DNA, 25 bp, Homo sapien
taaatgtcccacagaaacgtttcca

SEQ ID NO: 93581 - DNA, 25 bp, Homo sapien
ctctgtgtgcccaacagtatctctc

SEQ ID NO: 93582 - DNA, 25 bp, Homo sapien
ccacagaaacgtttccagtgaacac

SEQ ID NO: 93583 - DNA, 25 bp, Homo sapien
ggaacatgtcggtgtctgctgtcac

SEQ ID NO: 93584 - DNA, 25 bp, Homo sapien
cctggtgcgtaaaacttgccctctg

SEQ ID NO: 93585 - DNA, 25 bp, Homo sapien
tccctggtgcgtaaaacttgccctc

SEQ ID NO: 93586 - DNA, 25 bp, Homo sapien
cacatctggaacatgtcggtgtctg

SEQ ID NO: 93587 - DNA, 25 bp, Homo sapien
cagagaagcctgtcatcaaaatgat

SEQ ID NO: 93588 - DNA, 25 bp, Homo sapien
gtttatacagcacagaatccccatt

SEQ ID NO: 93589 - DNA, 25 bp, Homo sapien
ggtgactgctaccattaatgtgtgg

SEQ ID NO: 93590 - DNA, 25 bp, Homo sapien
aggaagcgctgaggcagtttataca

SEQ ID NO: 93591 - DNA, 25 bp, Homo sapien
tacagctaaataatgagtgccaagg

SEQ ID NO: 93592 - DNA, 25 bp, Homo sapien
tgttcctagcaaaaaaggcttacag

SEQ ID NO: 93593 - DNA, 25 bp, Homo sapien
taagaaagttgcttgaggatgccgt

SEQ ID NO: 93594 - DNA, 25 bp, Homo sapien
gaacgcatgctatttaactcactgg

SEQ ID NO: 93595 - DNA, 25 bp, Homo sapien
gcaggcctccaggtaacaaggtgag

SEQ ID NO: 93596 - DNA, 25 bp, Homo sapien
caaggtgaggtttagaagtgtagct

SEQ ID NO: 93597 - DNA, 25 bp, Homo sapien
ctgtgatctgcattcataggtcagc

SEQ ID NO: 93598 - DNA, 25 bp, Homo sapien
tgatctgcattcataggtcagcctt

SEQ ID NO: 93599 - DNA, 25 bp, Homo sapien
ttgctctgaacctttgcaatggcct

SEQ ID NO: 93600 - DNA, 25 bp, Homo sapien
ggcctgttactcttatacctgaatt

SEQ ID NO: 93601 - DNA, 25 bp, Homo sapien
tatttgcactgaaggcacttcccca

SEQ ID NO: 93602 - DNA, 25 bp, Homo sapien
gcctgcaaggcatactgtttttctt

SEQ ID NO: 93603 - DNA, 25 bp, Homo sapien
tctgtggagagatagatgtctttaa

SEQ ID NO: 93604 - DNA, 25 bp, Homo sapien
taattacttgtccagacgtgataac

SEQ ID NO: 93605 - DNA, 25 bp, Homo sapien
aatataagtcggtcttggatgtctg

SEQ ID NO: 93606 - DNA, 25 bp, Homo sapien
cagacgtgataacagactctggcag

SEQ ID NO: 93607 - DNA, 25 bp, Homo sapien
taagagagtgactgctttcagtctc

SEQ ID NO: 93608 - DNA, 25 bp, Homo sapien
aagccaccacataactcaccagtat

SEQ ID NO: 93609 - DNA, 25 bp, Homo sapien
gcagtaatagctgccaagccaccac

SEQ ID NO: 93610 - DNA, 25 bp, Homo sapien
caccagtatgcatgaactgtagcag

SEQ ID NO: 93611 - DNA, 25 bp, Homo sapien
agcagatcctgagtgacctataaag

SEQ ID NO: 93612 - DNA, 25 bp, Homo sapien
agaactctccattgcaaatcaacag

SEQ ID NO: 93613 - DNA, 25 bp, Homo sapien
taaagcagatcctgagtgacctata

SEQ ID NO: 93614 - DNA, 25 bp, Homo sapien
agatcctgagtgacctataaagaga

SEQ ID NO: 93615 - DNA, 25 bp, Homo sapien
ccagatcagtcagagtacttgagac

SEQ ID NO: 93616 - DNA, 25 bp, Homo sapien
aagtgaagttgcctcatcctgagaa

SEQ ID NO: 93617 - DNA, 25 bp, Homo sapien
ggcagggaatctatagtgaagcact

SEQ ID NO: 93618 - DNA, 25 bp, Homo sapien
tacttgagacacaatcagtgataca

SEQ ID NO: 93619 - DNA, 25 bp, Homo sapien
gatgtctccttctgagggtatccat

SEQ ID NO: 93620 - DNA, 25 bp, Homo sapien
agatgtctccttctgagggtatcca

SEQ ID NO: 93621 - DNA, 25 bp, Homo sapien
atgtctccttctgagggtatccata

SEQ ID NO: 93622 - DNA, 25 bp, Homo sapien
aatgagatgaactttgtcctcaaag

SEQ ID NO: 93623 - DNA, 25 bp, Homo sapien
gagatctgacaagtgtggctttgaa

SEQ ID NO: 93624 - DNA, 25 bp, Homo sapien
tgtgtaagttttcccttgtcagctt

SEQ ID NO: 93625 - DNA, 25 bp, Homo sapien
cagcacaatatcctttgtgtaagtt

SEQ ID NO: 93626 - DNA, 25 bp, Homo sapien
tactgaatcatactgggcatctgca

SEQ ID NO: 93627 - DNA, 25 bp, Homo sapien
aatgtactgaatcatactgggcatc

SEQ ID NO: 93628 - DNA, 25 bp, Homo sapien
ttgataatgtactgaatcatactgg

SEQ ID NO: 93629 - DNA, 25 bp, Homo sapien
ttcaatttgataatgtactgaatca

SEQ ID NO: 93630 - DNA, 25 bp, Homo sapien
cactcaagatgcttggctctctatg

SEQ ID NO: 93631 - DNA, 25 bp, Homo sapien
ttctagtaaggccttccagagaggg

SEQ ID NO: 93632 - DNA, 25 bp, Homo sapien
cagatgtggattcataagttgctgg

SEQ ID NO: 93633 - DNA, 25 bp, Homo sapien
actgagtattgccatggcagggaca

SEQ ID NO: 93634 - DNA, 25 bp, Homo sapien
gagcacaagcaaagacagatgtgga

SEQ ID NO: 93635 - DNA, 25 bp, Homo sapien
gtggcctgacagattatagacaact

SEQ ID NO: 93636 - DNA, 25 bp, Homo sapien
tagttccagaatgagtagggttatc

SEQ ID NO: 93637 - DNA, 25 bp, Homo sapien
gacaactgtcaaaactaggtgaaga

SEQ ID NO: 93638 - DNA, 25 bp, Homo sapien
gaaaacagggccctcgtcattgaga

SEQ ID NO: 93639 - DNA, 25 bp, Homo sapien
caatttagtctgctgtttgatttcc

SEQ ID NO: 93640 - DNA, 25 bp, Homo sapien
gaggcaagccatctattctagacat

SEQ ID NO: 93641 - DNA, 25 bp, Homo sapien
agtgttagtgttgtctctgtgaggc

SEQ ID NO: 93642 - DNA, 25 bp, Homo sapien
gctttgatcatcaaaccagtgttag

SEQ ID NO: 93643 - DNA, 25 bp, Homo sapien
acagtatctactgtagtcaggtaac

SEQ ID NO: 93644 - DNA, 25 bp, Homo sapien
tactgtagtcaggtaactcaaactc

SEQ ID NO: 93645 - DNA, 25 bp, Homo sapien
ccctcaacagtatctactgtagtca

SEQ ID NO: 93646 - DNA, 25 bp, Homo sapien
tatctactgtagtcaggtaactcaa

SEQ ID NO: 93647 - DNA, 25 bp, Homo sapien
gaacaccttcagctgggtattccat

SEQ ID NO: 93648 - DNA, 25 bp, Homo sapien
tcagttgtctgttgaacaccttcag

SEQ ID NO: 93649 - DNA, 25 bp, Homo sapien
gtctttgacaagctgagatcctgaa

SEQ ID NO: 93650 - DNA, 25 bp, Homo sapien
ccaaattagtatcttcagacctaat

SEQ ID NO: 93651 - DNA, 25 bp, Homo sapien
gcaaggaatcggtaattcagaaaca

SEQ ID NO: 93652 - DNA, 25 bp, Homo sapien
caacaaagccactgatgggtcatca

SEQ ID NO: 93653 - DNA, 25 bp, Homo sapien
caagctgtcaggctgatgcataggc

SEQ ID NO: 93654 - DNA, 25 bp, Homo sapien
cttatctggcagtaggcaaggaatc

SEQ ID NO: 93655 - DNA, 25 bp, Homo sapien
tgatgggacgaatacagagaaatca

SEQ ID NO: 93656 - DNA, 25 bp, Homo sapien
ctgatgggacgaatacagagaaatc

SEQ ID NO: 93657 - DNA, 25 bp, Homo sapien
tcctccaattaaaccataccatgta

SEQ ID NO: 93658 - DNA, 25 bp, Homo sapien
tgtcctccaattaaaccataccatg

SEQ ID NO: 93659 - DNA, 25 bp, Homo sapien
tccaattaaaccataccatgtaagg

SEQ ID NO: 93660 - DNA, 25 bp, Homo sapien
ctccagttcaaccacatgttgtcct

SEQ ID NO: 93661 - DNA, 25 bp, Homo sapien
gttcatgtctggtcagttttaattt

SEQ ID NO: 93662 - DNA, 25 bp, Homo sapien
ttcatgtctggtcagttttaatttc

SEQ ID NO: 93663 - DNA, 25 bp, Homo sapien
tcatgtctggtcagttttaatttct

SEQ ID NO: 93664 - DNA, 25 bp, Homo sapien
tttcctcaggcaaacgagtgatatt

SEQ ID NO: 93665 - DNA, 25 bp, Homo sapien
acttggagatttcctcaaagtaatt

SEQ ID NO: 93666 - DNA, 25 bp, Homo sapien
gataatgtcagtgcacttggagatt

SEQ ID NO: 93667 - DNA, 25 bp, Homo sapien
gaattttcctcaggcaaacgagtga

SEQ ID NO: 93668 - DNA, 25 bp, Homo sapien
tggataaatgtgtccaggtttcaca

SEQ ID NO: 93669 - DNA, 25 bp, Homo sapien
gcattgggcaaatttggataaatgt

SEQ ID NO: 93670 - DNA, 25 bp, Homo sapien
aggaccgccatgtcaaggccatgaa

SEQ ID NO: 93671 - DNA, 25 bp, Homo sapien
ttaaaggaccgccatgtcaaggcca

SEQ ID NO: 93672 - DNA, 25 bp, Homo sapien
taattatgggatcaacccagcatgc

SEQ ID NO: 93673 - DNA, 25 bp, Homo sapien
tgcttgactatgatcctggttcccc

SEQ ID NO: 93674 - DNA, 25 bp, Homo sapien
tatagtagcgcaagacatttggtct

SEQ ID NO: 93675 - DNA, 25 bp, Homo sapien
tagtatctggtgacccacaagcttc

SEQ ID NO: 93676 - DNA, 25 bp, Homo sapien
gctgcaactgtggtcaagttatcaa

SEQ ID NO: 93677 - DNA, 25 bp, Homo sapien
ctttcgatcataaagtttgtaggtt

SEQ ID NO: 93678 - DNA, 25 bp, Homo sapien
tatcaaattccaatcccagactctc

SEQ ID NO: 93679 - DNA, 25 bp, Homo sapien
tgtaggtttgtagagctgcaactgt

SEQ ID NO: 93680 - DNA, 25 bp, Homo sapien
ggaacaaatgagaaggaggataaat

SEQ ID NO: 93681 - DNA, 25 bp, Homo sapien
gaggaacaaatgagaaggaggataa

SEQ ID NO: 93682 - DNA, 25 bp, Homo sapien
gagttgggaggaacaaatgagaagg

SEQ ID NO: 93683 - DNA, 25 bp, Homo sapien
ctggagttgggaggaacaaatgaga

SEQ ID NO: 93684 - DNA, 25 bp, Homo sapien
cccagatgttcccagcgaatctgat

SEQ ID NO: 93685 - DNA, 25 bp, Homo sapien
gatgttcccagcgaatctgattttt

SEQ ID NO: 93686 - DNA, 25 bp, Homo sapien
agggtttctgtgagatcacgatgcc

SEQ ID NO: 93687 - DNA, 25 bp, Homo sapien
tgtgagatcacgatgcccttccttt

SEQ ID NO: 93688 - DNA, 25 bp, Homo sapien
tggtaaggcagagtgaccctgtact

SEQ ID NO: 93689 - DNA, 25 bp, Homo sapien
ggtaaggcagagtgaccctgtactt

SEQ ID NO: 93690 - DNA, 25 bp, Homo sapien
tagtaacgaaatactgtcatatttg

SEQ ID NO: 93691 - DNA, 25 bp, Homo sapien
cgaaatactgtcatatttggtaact

SEQ ID NO: 93692 - DNA, 25 bp, Homo sapien
tactgtcatatttggtaacttggca

SEQ ID NO: 93693 - DNA, 25 bp, Homo sapien
tgtcatatttggtaacttggcagga

SEQ ID NO: 93694 - DNA, 25 bp, Homo sapien
gcttcacacaaactaacggccattt

SEQ ID NO: 93695 - DNA, 25 bp, Homo sapien
ggcccattgaaacctcctgatggag

SEQ ID NO: 93696 - DNA, 25 bp, Homo sapien
gaaagcagggttgcttcccaatgtg

SEQ ID NO: 93697 - DNA, 25 bp, Homo sapien
tgttcgagtgatagcaggcccattg

SEQ ID NO: 93698 - DNA, 25 bp, Homo sapien
tcagagaagtagactaacaatcaaa

SEQ ID NO: 93699 - DNA, 25 bp, Homo sapien
caactccaccttttactgacatttc

SEQ ID NO: 93700 - DNA, 25 bp, Homo sapien
aactccaccttttactgacatttct

SEQ ID NO: 93701 - DNA, 25 bp, Homo sapien
ctccaccttttactgacatttcttg

SEQ ID NO: 93702 - DNA, 25 bp, Homo sapien
cattattaatagagggagacttaga

SEQ ID NO: 93703 - DNA, 25 bp, Homo sapien
actgataaacaggaagcaaagcagg

SEQ ID NO: 93704 - DNA, 25 bp, Homo sapien
gaccttgaagcactgataaacagga

SEQ ID NO: 93705 - DNA, 25 bp, Homo sapien
gaacactgcccatatcgaaaggtga

SEQ ID NO: 93706 - DNA, 25 bp, Homo sapien
tagcccctttctgagcaatctcggt

SEQ ID NO: 93707 - DNA, 25 bp, Homo sapien
taatttctcgcacatgaagagctgc

SEQ ID NO: 93708 - DNA, 25 bp, Homo sapien
tagtctctaagtttcttcaataaca

SEQ ID NO: 93709 - DNA, 25 bp, Homo sapien
tttttctagggcattgaagggccac

SEQ ID NO: 93710 - DNA, 25 bp, Homo sapien
cattggtgggagtgacggaacctac

SEQ ID NO: 93711 - DNA, 25 bp, Homo sapien
ggtcccaagctattggaaacattgg

SEQ ID NO: 93712 - DNA, 25 bp, Homo sapien
ctttttgcgtagactgctgaaggca

SEQ ID NO: 93713 - DNA, 25 bp, Homo sapien
tgaaggcagtgttcaaaagcacatg

SEQ ID NO: 93714 - DNA, 25 bp, Homo sapien
ccagcattggtaatggacaggcaat

SEQ ID NO: 93715 - DNA, 25 bp, Homo sapien
tcttctgacggtaagcaattctctt

SEQ ID NO: 93716 - DNA, 25 bp, Homo sapien
aatggacaggcaatagtcttctgac

SEQ ID NO: 93717 - DNA, 25 bp, Homo sapien
ttaagtgcccagcattggtaatgga

SEQ ID NO: 93718 - DNA, 25 bp, Homo sapien
gactcccatcctcagggatctgagc

SEQ ID NO: 93719 - DNA, 25 bp, Homo sapien
ctggactcccatcctcagggatctg

SEQ ID NO: 93720 - DNA, 25 bp, Homo sapien
tgagtgataagtcctggactcccat

SEQ ID NO: 93721 - DNA, 25 bp, Homo sapien
catcctcagggatctgagcattggt

SEQ ID NO: 93722 - DNA, 25 bp, Homo sapien
atgtaagcattttagctactttctc

SEQ ID NO: 93723 - DNA, 25 bp, Homo sapien
aatgtaagcattttagctactttct

SEQ ID NO: 93724 - DNA, 25 bp, Homo sapien
ggtcacccagtctttgtagcttcat

SEQ ID NO: 93725 - DNA, 25 bp, Homo sapien
tggatttcctacctaaacttgagaa

SEQ ID NO: 93726 - DNA, 25 bp, Homo sapien
gaaatccaacctagaagtcgactgg

SEQ ID NO: 93727 - DNA, 25 bp, Homo sapien
ccgttagggttatagtcctgaggat

SEQ ID NO: 93728 - DNA, 25 bp, Homo sapien
ttttgcactcttgagaaactaggaa

SEQ ID NO: 93729 - DNA, 25 bp, Homo sapien
gctggagagcagctttaaacttcac

SEQ ID NO: 93730 - DNA, 25 bp, Homo sapien
gagctggagagcagctttaaacttc

SEQ ID NO: 93731 - DNA, 25 bp, Homo sapien
gagagctggagagcagctttaaact

SEQ ID NO: 93732 - DNA, 25 bp, Homo sapien
tttaaacttcacattcataaatctt

SEQ ID NO: 93733 - DNA, 25 bp, Homo sapien
tggcagcctcgtatattctgtactg

SEQ ID NO: 93734 - DNA, 25 bp, Homo sapien
ctggcagcctcgtatattctgtact

SEQ ID NO: 93735 - DNA, 25 bp, Homo sapien
aatgcagcttgaatcaataacaagc

SEQ ID NO: 93736 - DNA, 25 bp, Homo sapien
cacgaaagcctcatcatttaccagg

SEQ ID NO: 93737 - DNA, 25 bp, Homo sapien
gaatttttcccagtgacgtgacatc

SEQ ID NO: 93738 - DNA, 25 bp, Homo sapien
ttcaaaggcttgatacctaaaggta

SEQ ID NO: 93739 - DNA, 25 bp, Homo sapien
caagaacgttgtatctcagtgggtt

SEQ ID NO: 93740 - DNA, 25 bp, Homo sapien
accaccagaacctcactgtaaacaa

SEQ ID NO: 93741 - DNA, 25 bp, Homo sapien
tgtggcttgggtaatgttcctcggt

SEQ ID NO: 93742 - DNA, 25 bp, Homo sapien
ccacaggtgcagtttattagagtta

SEQ ID NO: 93743 - DNA, 25 bp, Homo sapien
ttagttcacagagttaatttctata

SEQ ID NO: 93744 - DNA, 25 bp, Homo sapien
gaagtgttggcacattagttcacag

SEQ ID NO: 93745 - DNA, 25 bp, Homo sapien
acagaagtgttggcacattagttca

SEQ ID NO: 93746 - DNA, 25 bp, Homo sapien
tggcacggagattcgctcttgtcgc

SEQ ID NO: 93747 - DNA, 25 bp, Homo sapien
agtgggaaggccaccaaaaatgata

SEQ ID NO: 93748 - DNA, 25 bp, Homo sapien
attctgatgacatttgattaaaacc

SEQ ID NO: 93749 - DNA, 25 bp, Homo sapien
tgtaaggattccctcttcagaatgt

SEQ ID NO: 93750 - DNA, 25 bp, Homo sapien
tgattagtctggctgtcattgatct

SEQ ID NO: 93751 - DNA, 25 bp, Homo sapien
agcccatgtcaagaattacttcttt

SEQ ID NO: 93752 - DNA, 25 bp, Homo sapien
tgacctgccctttaaagcccatgtc

SEQ ID NO: 93753 - DNA, 25 bp, Homo sapien
tcctactgcccacaccagcaggctc

SEQ ID NO: 93754 - DNA, 25 bp, Homo sapien
tcctctaacatgtcatatcctactg

SEQ ID NO: 93755 - DNA, 25 bp, Homo sapien
ctctaacatgtcatatcctactgcc

SEQ ID NO: 93756 - DNA, 25 bp, Homo sapien
tctaacatgtcatatcctactgccc

SEQ ID NO: 93757 - DNA, 25 bp, Homo sapien
cagcatggtgtactgtctcctccct

SEQ ID NO: 93758 - DNA, 25 bp, Homo sapien
ggagtggcactctgtaggtctagca

SEQ ID NO: 93759 - DNA, 25 bp, Homo sapien
tgggcagacagcatggtgtactgtc

SEQ ID NO: 93760 - DNA, 25 bp, Homo sapien
accataatgtttgcgggttgaagga

SEQ ID NO: 93761 - DNA, 25 bp, Homo sapien
ggtaaccctgtcgttcacactgatc

SEQ ID NO: 93762 - DNA, 25 bp, Homo sapien
tgtcgttcacactgatcatctgtgt

SEQ ID NO: 93763 - DNA, 25 bp, Homo sapien
tacttggtaaccctgtcgttcacac

SEQ ID NO: 93764 - DNA, 25 bp, Homo sapien
tctctctacttggtaaccctgtcgt

SEQ ID NO: 93765 - DNA, 25 bp, Homo sapien
tcatgaagagatttcggtgcatgtt

SEQ ID NO: 93766 - DNA, 25 bp, Homo sapien
atgaagagatttcggtgcatgttgc

SEQ ID NO: 93767 - DNA, 25 bp, Homo sapien
agatttcggtgcatgttgccccatt

SEQ ID NO: 93768 - DNA, 25 bp, Homo sapien
gttgccccattcagacccatatctt

SEQ ID NO: 93769 - DNA, 25 bp, Homo sapien
ttgatttatgttttgtacagctgta

SEQ ID NO: 93770 - DNA, 25 bp, Homo sapien
tttgacattgatttatgttttgtac

SEQ ID NO: 93771 - DNA, 25 bp, Homo sapien
tttgtacagctgtacttttctatac

SEQ ID NO: 93772 - DNA, 25 bp, Homo sapien
attgatttatgttttgtacagctgt

SEQ ID NO: 93773 - DNA, 25 bp, Homo sapien
tctctaatgtttctccacggcccat

SEQ ID NO: 93774 - DNA, 25 bp, Homo sapien
ttaaggacaaaatctctaatgtttc

SEQ ID NO: 93775 - DNA, 25 bp, Homo sapien
aaatctctaatgtttctccacggcc

SEQ ID NO: 93776 - DNA, 25 bp, Homo sapien
aaggacaaaatctctaatgtttctc

SEQ ID NO: 93777 - DNA, 25 bp, Homo sapien
ctagtaaagttgaaatggccgtctg

SEQ ID NO: 93778 - DNA, 25 bp, Homo sapien
gttgaaatggccgtctgtcctcagc

SEQ ID NO: 93779 - DNA, 25 bp, Homo sapien
aatggccgtctgtcctcagcttctg

SEQ ID NO: 93780 - DNA, 25 bp, Homo sapien
gccgtctgtcctcagcttctgtgct

SEQ ID NO: 93781 - DNA, 25 bp, Homo sapien
cagtctttgtggctgacatgcattg

SEQ ID NO: 93782 - DNA, 25 bp, Homo sapien
tgcattgattatgcaggatgtcagg

SEQ ID NO: 93783 - DNA, 25 bp, Homo sapien
cttgcaaatgggcataagcataggc

SEQ ID NO: 93784 - DNA, 25 bp, Homo sapien
gccaacttgcaaatgggcataagca

SEQ ID NO: 93785 - DNA, 25 bp, Homo sapien
tgatcttttgttgacacttgtgccc

SEQ ID NO: 93786 - DNA, 25 bp, Homo sapien
gcaaaactgagcaggcttcttgtct

SEQ ID NO: 93787 - DNA, 25 bp, Homo sapien
aactggcatcccaatttgtgagtgg

SEQ ID NO: 93788 - DNA, 25 bp, Homo sapien
caggcttcttgtctgaagtgatctt

SEQ ID NO: 93789 - DNA, 25 bp, Homo sapien
ttacttttcccgatgcctgccttca

SEQ ID NO: 93790 - DNA, 25 bp, Homo sapien
tattacaggcctggattgaaggtcc

SEQ ID NO: 93791 - DNA, 25 bp, Homo sapien
ctgcagggtaagtaggtcactgcct

SEQ ID NO: 93792 - DNA, 25 bp, Homo sapien
ggtcactgcctattacaggcctgga

SEQ ID NO: 93793 - DNA, 25 bp, Homo sapien
tgatcgtcttttgtaccttacctaa

SEQ ID NO: 93794 - DNA, 25 bp, Homo sapien
tgaatctttgatcgtcttttgtacc

SEQ ID NO: 93795 - DNA, 25 bp, Homo sapien
cagggcctttgaatctttgatcgtc

SEQ ID NO: 93796 - DNA, 25 bp, Homo sapien
ctctcagggcctttgaatctttgat

SEQ ID NO: 93797 - DNA, 25 bp, Homo sapien
ggagggctccggcattaacatattt

SEQ ID NO: 93798 - DNA, 25 bp, Homo sapien
ccggcgtaatggatgcctcccagct

SEQ ID NO: 93799 - DNA, 25 bp, Homo sapien
gactggcaagggcaggttcgggccg

SEQ ID NO: 93800 - DNA, 25 bp, Homo sapien
tagacgctccatctccttggtccgg

SEQ ID NO: 93801 - DNA, 25 bp, Homo sapien
taggagtgacactctcccgaaatgt

SEQ ID NO: 93802 - DNA, 25 bp, Homo sapien
gagtgacactctcccgaaatgtcac

SEQ ID NO: 93803 - DNA, 25 bp, Homo sapien
ggagtgacactctcccgaaatgtca

SEQ ID NO: 93804 - DNA, 25 bp, Homo sapien
ctaggagtgacactctcccgaaatg

SEQ ID NO: 93805 - DNA, 25 bp, Homo sapien
taccttgtggtgcaagatcacccag

SEQ ID NO: 93806 - DNA, 25 bp, Homo sapien
gtgcttcttaatctctcccagggtg

SEQ ID NO: 93807 - DNA, 25 bp, Homo sapien
gctcatcaaaaaatctggtcacatc

SEQ ID NO: 93808 - DNA, 25 bp, Homo sapien
catctcagtatgaagcgagccaggt

SEQ ID NO: 93809 - DNA, 25 bp, Homo sapien
tagaggtgatatctcagggctacgg

SEQ ID NO: 93810 - DNA, 25 bp, Homo sapien
taaagttgacgagtaagaaggcaca

SEQ ID NO: 93811 - DNA, 25 bp, Homo sapien
tgatctgtcatctggataaagcccc

SEQ ID NO: 93812 - DNA, 25 bp, Homo sapien
ttcatgggcttctgagatatggcca

SEQ ID NO: 93813 - DNA, 25 bp, Homo sapien
gttgaccattgtcattattgacatg

SEQ ID NO: 93814 - DNA, 25 bp, Homo sapien
tattgacatggacaattggaatctc

SEQ ID NO: 93815 - DNA, 25 bp, Homo sapien
ggaatctcagtagaaatcctggcct

SEQ ID NO: 93816 - DNA, 25 bp, Homo sapien
gctttctggcaggaattaggcatct

SEQ ID NO: 93817 - DNA, 25 bp, Homo sapien
attgccagagtctatttcagatgca

SEQ ID NO: 93818 - DNA, 25 bp, Homo sapien
ccattgccagagtctatttcagatg

SEQ ID NO: 93819 - DNA, 25 bp, Homo sapien
accattgccagagtctatttcagat

SEQ ID NO: 93820 - DNA, 25 bp, Homo sapien
cattgccagagtctatttcagatgc

SEQ ID NO: 93821 - DNA, 25 bp, Homo sapien
tcttctagccacatttattgcctgt

SEQ ID NO: 93822 - DNA, 25 bp, Homo sapien
tggatgtctccatgtaattacaatt

SEQ ID NO: 93823 - DNA, 25 bp, Homo sapien
cttttcaaattggtaatctcgatta

SEQ ID NO: 93824 - DNA, 25 bp, Homo sapien
taactgaagacaaaatagcttgctt

SEQ ID NO: 93825 - DNA, 25 bp, Homo sapien
tagaggtgataaatggaaggccttc

SEQ ID NO: 93826 - DNA, 25 bp, Homo sapien
aacttggatttgctatggagggcaa

SEQ ID NO: 93827 - DNA, 25 bp, Homo sapien
agtaacttggatttgctatggaggg

SEQ ID NO: 93828 - DNA, 25 bp, Homo sapien
gtgataaatggaaggccttctggct

SEQ ID NO: 93829 - DNA, 25 bp, Homo sapien
tttctttgaccataacagaagagtt

SEQ ID NO: 93830 - DNA, 25 bp, Homo sapien
agttgggcttccatttcttgcaaca

SEQ ID NO: 93831 - DNA, 25 bp, Homo sapien
ttttgagttgggcttccatttcttg

SEQ ID NO: 93832 - DNA, 25 bp, Homo sapien
ttctttgaccataacagaagagttt

SEQ ID NO: 93833 - DNA, 25 bp, Homo sapien
tgatctcagttgagtgtcactgtcc

SEQ ID NO: 93834 - DNA, 25 bp, Homo sapien
tgtcctctttatgacagccactcat

SEQ ID NO: 93835 - DNA, 25 bp, Homo sapien
gatctcagttgagtgtcactgtcct

SEQ ID NO: 93836 - DNA, 25 bp, Homo sapien
gtcactgtcctctttatgacagcca

SEQ ID NO: 93837 - DNA, 25 bp, Homo sapien
tgatggtgatgtcccacgaagtctg

SEQ ID NO: 93838 - DNA, 25 bp, Homo sapien
taaagggctacaacaagttcacttc

SEQ ID NO: 93839 - DNA, 25 bp, Homo sapien
aaaagatcaaattggctgtcccctc

SEQ ID NO: 93840 - DNA, 25 bp, Homo sapien
cgaagtctgaaggtgcatgtggcac

SEQ ID NO: 93841 - DNA, 25 bp, Homo sapien
ccacgggaagatcaagtgaatctct

SEQ ID NO: 93842 - DNA, 25 bp, Homo sapien
tactcatcaaaaaggcgtggaggag

SEQ ID NO: 93843 - DNA, 25 bp, Homo sapien
cgggaagatcaagtgaatctctact

SEQ ID NO: 93844 - DNA, 25 bp, Homo sapien
actcatcaaaaaggcgtggaggaga

SEQ ID NO: 93845 - DNA, 25 bp, Homo sapien
attgtgttagaaatagaccaggtgc

SEQ ID NO: 93846 - DNA, 25 bp, Homo sapien
gcttctgtccctgtgtagctccttc

SEQ ID NO: 93847 - DNA, 25 bp, Homo sapien
tagcatccagcaaacatagaagttg

SEQ ID NO: 93848 - DNA, 25 bp, Homo sapien
gattaaggtagtaactgagatcagt

SEQ ID NO: 93849 - DNA, 25 bp, Homo sapien
ctcctagttagtaggattaaggtag

SEQ ID NO: 93850 - DNA, 25 bp, Homo sapien
ggcggagggcgacgtgggaaaggac

SEQ ID NO: 93851 - DNA, 25 bp, Homo sapien
gtcctttcccacgtcgccctccgcc

SEQ ID NO: 93852 - DNA, 25 bp, Homo sapien
gtttaataactgacacactcactga

SEQ ID NO: 93853 - DNA, 25 bp, Homo sapien
gctttgatgctgagaggcaatagtt

SEQ ID NO: 93854 - DNA, 25 bp, Homo sapien
gcatcccaatgttgaatatggccat

SEQ ID NO: 93855 - DNA, 25 bp, Homo sapien
cactcactgaaacctgatggagaga

SEQ ID NO: 93856 - DNA, 25 bp, Homo sapien
cagatctttaggagctttttcagga

SEQ ID NO: 93857 - DNA, 25 bp, Homo sapien
caatgttgttaacgtacccgttgtg

SEQ ID NO: 93858 - DNA, 25 bp, Homo sapien
tctttaggagctttttcaggagaac

SEQ ID NO: 93859 - DNA, 25 bp, Homo sapien
ctactcagtgcctagaggatgtggg

SEQ ID NO: 93860 - DNA, 25 bp, Homo sapien
aagcaggacctgctacattactggg

SEQ ID NO: 93861 - DNA, 25 bp, Homo sapien
aaagcaggacctgctacattactgg

SEQ ID NO: 93862 - DNA, 25 bp, Homo sapien
ctggaagtactctcttcctcaacag

SEQ ID NO: 93863 - DNA, 25 bp, Homo sapien
gcctccatctccaaacctggaagta

SEQ ID NO: 93864 - DNA, 25 bp, Homo sapien
tctatatatcgagggtctagaagca

SEQ ID NO: 93865 - DNA, 25 bp, Homo sapien
tcctggtgatttttgcctattggag

SEQ ID NO: 93866 - DNA, 25 bp, Homo sapien
tctctatatatcgagggtctagaag

SEQ ID NO: 93867 - DNA, 25 bp, Homo sapien
tccttatctgaccacctgcattctc

SEQ ID NO: 93868 - DNA, 25 bp, Homo sapien
tggtgctaggtgtgcagttgacaac

SEQ ID NO: 93869 - DNA, 25 bp, Homo sapien
caaaacttggatttcagggctgtca

SEQ ID NO: 93870 - DNA, 25 bp, Homo sapien
gaactttggcaacaatctggcgctg

SEQ ID NO: 93871 - DNA, 25 bp, Homo sapien
ggagagctccttctaaaagacaaag

SEQ ID NO: 93872 - DNA, 25 bp, Homo sapien
aaattaaattgtcccaagcctgtgg

SEQ ID NO: 93873 - DNA, 25 bp, Homo sapien
aagcctgtggtataagcctctgatc

SEQ ID NO: 93874 - DNA, 25 bp, Homo sapien
tcccagaacttggtgagctggaaat

SEQ ID NO: 93875 - DNA, 25 bp, Homo sapien
tgtggatgctactacctatactgcc

SEQ ID NO: 93876 - DNA, 25 bp, Homo sapien
ccttgtgtttggcatcaattctgag

SEQ ID NO: 93877 - DNA, 25 bp, Homo sapien
tgtcggaatcgatccatcagccagt

SEQ ID NO: 93878 - DNA, 25 bp, Homo sapien
tgcatctgcgggtcggtgacactga

SEQ ID NO: 93879 - DNA, 25 bp, Homo sapien
tgtttggcatcaattctgagatgca

SEQ ID NO: 93880 - DNA, 25 bp, Homo sapien
atcagtcagctctgtttgagcctgg

SEQ ID NO: 93881 - DNA, 25 bp, Homo sapien
tggatattcagacgcctctgcctgg

SEQ ID NO: 93882 - DNA, 25 bp, Homo sapien
tggttccaccttgaatgggcctgca

SEQ ID NO: 93883 - DNA, 25 bp, Homo sapien
acacataatgcacaaggctggccca

SEQ ID NO: 93884 - DNA, 25 bp, Homo sapien
aatgtgcttagaaggtgaaagtcgg

SEQ ID NO: 93885 - DNA, 25 bp, Homo sapien
tctttaaagctcacattgttcaaca

SEQ ID NO: 93886 - DNA, 25 bp, Homo sapien
cataggtagacacaaagcttgcata

SEQ ID NO: 93887 - DNA, 25 bp, Homo sapien
tgaaagtcggtgaggcaaagcattt

SEQ ID NO: 93888 - DNA, 25 bp, Homo sapien
tacaaggatgccaccaagtactgcc

SEQ ID NO: 93889 - DNA, 25 bp, Homo sapien
tcctgactccagttggttcaacagc

SEQ ID NO: 93890 - DNA, 25 bp, Homo sapien
tttgttcaaccaccccatgacctaa

SEQ ID NO: 93891 - DNA, 25 bp, Homo sapien
gtggatggatgagcatctgttctta

SEQ ID NO: 93892 - DNA, 25 bp, Homo sapien
tgtttccaaacagggtgaaagtgac

SEQ ID NO: 93893 - DNA, 25 bp, Homo sapien
acttgaataagtatgtgattagcac

SEQ ID NO: 93894 - DNA, 25 bp, Homo sapien
cactatttgttgtggttgggactgg

SEQ ID NO: 93895 - DNA, 25 bp, Homo sapien
tgggacaagaatggagtgattgcat

SEQ ID NO: 93896 - DNA, 25 bp, Homo sapien
aatatataccgaaggcagaaaccac

SEQ ID NO: 93897 - DNA, 25 bp, Homo sapien
gcgccttgccagcttccagatcaaa

SEQ ID NO: 93898 - DNA, 25 bp, Homo sapien
caaaggagtgcctaggtgctgaatc

SEQ ID NO: 93899 - DNA, 25 bp, Homo sapien
gtgctgatagcactctggcctcagg

SEQ ID NO: 93900 - DNA, 25 bp, Homo sapien
ctctgctggcgatcaaataaaaacg

SEQ ID NO: 93901 - DNA, 25 bp, Homo sapien
ggaattgaacaacaaagggcagctt

SEQ ID NO: 93902 - DNA, 25 bp, Homo sapien
ctctgaggactccgtatttttaaag

SEQ ID NO: 93903 - DNA, 25 bp, Homo sapien
gatgattgcttgacaggtctgtgcc

SEQ ID NO: 93904 - DNA, 25 bp, Homo sapien
gggacgtaactccaggtttatctga

SEQ ID NO: 93905 - DNA, 25 bp, Homo sapien
catcctgagctgtgaatgaggacaa

SEQ ID NO: 93906 - DNA, 25 bp, Homo sapien
tctgatggcttgtcagcaaatgctg

SEQ ID NO: 93907 - DNA, 25 bp, Homo sapien
ctgacaagttgtgccgaatcaggaa

SEQ ID NO: 93908 - DNA, 25 bp, Homo sapien
agatgtaccattcagaaccaccggg

SEQ ID NO: 93909 - DNA, 25 bp, Homo sapien
caccggggaagcactgtggcatcct

SEQ ID NO: 93910 - DNA, 25 bp, Homo sapien
tgttgaagatgtaccattcagaacc

SEQ ID NO: 93911 - DNA, 25 bp, Homo sapien
gcatgttgaagatgtaccattcaga

SEQ ID NO: 93912 - DNA, 25 bp, Homo sapien
ttgatttctccacttttgcacttca

SEQ ID NO: 93913 - DNA, 25 bp, Homo sapien
gcatgtatattctatccctgagatg

SEQ ID NO: 93914 - DNA, 25 bp, Homo sapien
aatatatcacttagcctcatcaaaa

SEQ ID NO: 93915 - DNA, 25 bp, Homo sapien
tcagaatatatcacttagcctcatc

SEQ ID NO: 93916 - DNA, 25 bp, Homo sapien
gaatatatcacttagcctcatcaaa

SEQ ID NO: 93917 - DNA, 25 bp, Homo sapien
cagaatatatcacttagcctcatca

SEQ ID NO: 93918 - DNA, 25 bp, Homo sapien
ttcatgttggaaagattaaggcagt

SEQ ID NO: 93919 - DNA, 25 bp, Homo sapien
gttcatgttggaaagattaaggcag

SEQ ID NO: 93920 - DNA, 25 bp, Homo sapien
gataaattctaacctgtaacggctc

SEQ ID NO: 93921 - DNA, 25 bp, Homo sapien
cattgcacctagactttttaaacgg

SEQ ID NO: 93922 - DNA, 25 bp, Homo sapien
taacggctcatttcgactcattgct

SEQ ID NO: 93923 - DNA, 25 bp, Homo sapien
gaccaatttcgtctgcacttccagt

SEQ ID NO: 93924 - DNA, 25 bp, Homo sapien
ggtaatgactatttatcgtcgatac

SEQ ID NO: 93925 - DNA, 25 bp, Homo sapien
ttttgacaaatagtgtatctcgtgg

SEQ ID NO: 93926 - DNA, 25 bp, Homo sapien
taaactgtgttaattggtaatgact

SEQ ID NO: 93927 - DNA, 25 bp, Homo sapien
ctgtagctgtgtaagttttgacaaa

SEQ ID NO: 93928 - DNA, 25 bp, Homo sapien
gacacaccatctgttaacctctgag

SEQ ID NO: 93929 - DNA, 25 bp, Homo sapien
ctgagtgccaactgtccaggccatt

SEQ ID NO: 93930 - DNA, 25 bp, Homo sapien
gagtctttgcagcatggcgctagca

SEQ ID NO: 93931 - DNA, 25 bp, Homo sapien
ggcgctagcagccaatgcagtttct

SEQ ID NO: 93932 - DNA, 25 bp, Homo sapien
tctccaaagatatttgatcccgcag

SEQ ID NO: 93933 - DNA, 25 bp, Homo sapien
caaagatatttgatcccgcaggcac

SEQ ID NO: 93934 - DNA, 25 bp, Homo sapien
tccaaagatatttgatcccgcaggc

SEQ ID NO: 93935 - DNA, 25 bp, Homo sapien
aagatatttgatcccgcaggcacca

SEQ ID NO: 93936 - DNA, 25 bp, Homo sapien
ttcggtttctgcagggacctcggcg

SEQ ID NO: 93937 - DNA, 25 bp, Homo sapien
cgccgaggtccctgcagaaaccgaa

SEQ ID NO: 93938 - DNA, 25 bp, Homo sapien
ttcctgcagtgtgacttacagtcat

SEQ ID NO: 93939 - DNA, 25 bp, Homo sapien
tttgcctgcatccacaaatacaagt

SEQ ID NO: 93940 - DNA, 25 bp, Homo sapien
catccacaaatacaagtaaaggtct

SEQ ID NO: 93941 - DNA, 25 bp, Homo sapien
tcttcctgcagtgtgacttacagtc

SEQ ID NO: 93942 - DNA, 25 bp, Homo sapien
gctccttgaaatgtaggccacattg

SEQ ID NO: 93943 - DNA, 25 bp, Homo sapien
agttgtgacctcatattcatcatca

SEQ ID NO: 93944 - DNA, 25 bp, Homo sapien
tatcatgattatccctaactgccta

SEQ ID NO: 93945 - DNA, 25 bp, Homo sapien
gccacattggagataccataggagt

SEQ ID NO: 93946 - DNA, 25 bp, Homo sapien
ttttctacatcaaccttgctcaaag

SEQ ID NO: 93947 - DNA, 25 bp, Homo sapien
tacatcaaccttgctcaaagagggt

SEQ ID NO: 93948 - DNA, 25 bp, Homo sapien
tcaaccttgctcaaagagggtttaa

SEQ ID NO: 93949 - DNA, 25 bp, Homo sapien
gtcttttctacatcaaccttgctca

SEQ ID NO: 93950 - DNA, 25 bp, Homo sapien
gtggaacgcagcaactgtttaacag

SEQ ID NO: 93951 - DNA, 25 bp, Homo sapien
tgtttaacagcgcactttcccctag

SEQ ID NO: 93952 - DNA, 25 bp, Homo sapien
taagtttcttgtgtacctgccctag

SEQ ID NO: 93953 - DNA, 25 bp, Homo sapien
ccatctgcagagtgaaactgactag

SEQ ID NO: 93954 - DNA, 25 bp, Homo sapien
aattggctgggcttgatggcgcgcg

SEQ ID NO: 93955 - DNA, 25 bp, Homo sapien
ggctgggcttgatggcgcgcgcctg

SEQ ID NO: 93956 - DNA, 25 bp, Homo sapien
ttggctgggcttgatggcgcgcgcc

SEQ ID NO: 93957 - DNA, 25 bp, Homo sapien
aaattggctgggcttgatggcgcgc

SEQ ID NO: 93958 - DNA, 25 bp, Homo sapien
tcatttaacagttgagaaaaccaag

SEQ ID NO: 93959 - DNA, 25 bp, Homo sapien
tttaggacaacacttaggaatagct

SEQ ID NO: 93960 - DNA, 25 bp, Homo sapien
aaccaaggtaccaagagattaagtg

SEQ ID NO: 93961 - DNA, 25 bp, Homo sapien
ttctctaatgccagtaattgtcctg

SEQ ID NO: 93962 - DNA, 25 bp, Homo sapien
tgaccatgtaaatatcctagacctg

SEQ ID NO: 93963 - DNA, 25 bp, Homo sapien
ctgggcaagaaggtccattcaggag

SEQ ID NO: 93964 - DNA, 25 bp, Homo sapien
cagtttttcggaatagacctatctt

SEQ ID NO: 93965 - DNA, 25 bp, Homo sapien
tctttccatttaatcggtccagagg

SEQ ID NO: 93966 - DNA, 25 bp, Homo sapien
cccttggtttctgcgacaagccgct

SEQ ID NO: 93967 - DNA, 25 bp, Homo sapien
gctgtcagtaatctctccttcccgc

SEQ ID NO: 93968 - DNA, 25 bp, Homo sapien
ctagcctagcgcgtttcgtggaccc

SEQ ID NO: 93969 - DNA, 25 bp, Homo sapien
aagccgcttacgtttgcctgagccg

SEQ ID NO: 93970 - DNA, 25 bp, Homo sapien
tgtcttgaaagccaatcattgttac

SEQ ID NO: 93971 - DNA, 25 bp, Homo sapien
taacaggatcgattgtaggaaaagc

SEQ ID NO: 93972 - DNA, 25 bp, Homo sapien
gaatctttaaatcagggtctgcttc

SEQ ID NO: 93973 - DNA, 25 bp, Homo sapien
gcgttcaagagacattcaagtagtg

SEQ ID NO: 93974 - DNA, 25 bp, Homo sapien
ggtcagttgatagttttgaatgtgg

SEQ ID NO: 93975 - DNA, 25 bp, Homo sapien
tatagtacccgggattcattatact

SEQ ID NO: 93976 - DNA, 25 bp, Homo sapien
taactttataagaccatcaaggaca

SEQ ID NO: 93977 - DNA, 25 bp, Homo sapien
gttacaaaggaaacctgattggtca

SEQ ID NO: 93978 - DNA, 25 bp, Homo sapien
agataaaagagaatcttatcatttc

SEQ ID NO: 93979 - DNA, 25 bp, Homo sapien
tcttggaccttatcatcaaaacagt

SEQ ID NO: 93980 - DNA, 25 bp, Homo sapien
atggcaagttcttggaccttatcat

SEQ ID NO: 93981 - DNA, 25 bp, Homo sapien
ttcttggaccttatcatcaaaacag

SEQ ID NO: 93982 - DNA, 25 bp, Homo sapien
gcaagttcttggaccttatcatcaa

SEQ ID NO: 93983 - DNA, 25 bp, Homo sapien
taatgcagttgtgggagtctagtag

SEQ ID NO: 93984 - DNA, 25 bp, Homo sapien
tcctgaacaaatctaatgcagttgt

SEQ ID NO: 93985 - DNA, 25 bp, Homo sapien
gaacaaatctaatgcagttgtggga

SEQ ID NO: 93986 - DNA, 25 bp, Homo sapien
aatctaatgcagttgtgggagtcta

SEQ ID NO: 93987 - DNA, 25 bp, Homo sapien
tggcctttcgctccactttccttga

SEQ ID NO: 93988 - DNA, 25 bp, Homo sapien
agagtcttggttttcctactggcct

SEQ ID NO: 93989 - DNA, 25 bp, Homo sapien
tggttttcctactggcctttcgctc

SEQ ID NO: 93990 - DNA, 25 bp, Homo sapien
cagagagtcttggttttcctactgg

SEQ ID NO: 93991 - DNA, 25 bp, Homo sapien
ggcaatgttcttcatcccaaataga

SEQ ID NO: 93992 - DNA, 25 bp, Homo sapien
cacaggtctctggagctcgttctcc

SEQ ID NO: 93993 - DNA, 25 bp, Homo sapien
ttctcgctttgcagcagctctcaca

SEQ ID NO: 93994 - DNA, 25 bp, Homo sapien
tctttccacaggtctctggagctcg

SEQ ID NO: 93995 - DNA, 25 bp, Homo sapien
taattctttccacaggtctctggag

SEQ ID NO: 93996 - DNA, 25 bp, Homo sapien
tatatggatagtcctgaatgcagtt

SEQ ID NO: 93997 - DNA, 25 bp, Homo sapien
tcctgaatgcagtttaggttctcag

SEQ ID NO: 93998 - DNA, 25 bp, Homo sapien
tgccagctctccagacgtatatgga

SEQ ID NO: 93999 - DNA, 25 bp, Homo sapien
ctctccagacgtatatggatagtcc

SEQ ID NO: 94000 - DNA, 25 bp, Homo sapien
agtttcaacctgaaggtcaatccag

SEQ ID NO: 94001 - DNA, 25 bp, Homo sapien
ggtcaatccagatgaacagcgtctt

SEQ ID NO: 94002 - DNA, 25 bp, Homo sapien
ttcaacactgtcaagccaggttttc

SEQ ID NO: 94003 - DNA, 25 bp, Homo sapien
cagcgtctttgagttccctctaaca

SEQ ID NO: 94004 - DNA, 25 bp, Homo sapien
gttctgggactgcattggtgggtca

SEQ ID NO: 94005 - DNA, 25 bp, Homo sapien
ctccttggggtaagaaatgaagagt

SEQ ID NO: 94006 - DNA, 25 bp, Homo sapien
tctggctagccatcaatgcacattg

SEQ ID NO: 94007 - DNA, 25 bp, Homo sapien
ggattcatgtttactactccttggg

SEQ ID NO: 94008 - DNA, 25 bp, Homo sapien
gcttcaaagactgtttaaaattcag

SEQ ID NO: 94009 - DNA, 25 bp, Homo sapien
aatgcatcctttgccatttaacatt

SEQ ID NO: 94010 - DNA, 25 bp, Homo sapien
aatcagttctttcttatagttaaag

SEQ ID NO: 94011 - DNA, 25 bp, Homo sapien
gttaaagctatttgagtactgctgc

SEQ ID NO: 94012 - DNA, 25 bp, Homo sapien
tctccaaaacaccagtaacatcaga

SEQ ID NO: 94013 - DNA, 25 bp, Homo sapien
agactctctccaaaacaccagtaac

SEQ ID NO: 94014 - DNA, 25 bp, Homo sapien
actctctccaaaacaccagtaacat

SEQ ID NO: 94015 - DNA, 25 bp, Homo sapien
tctctccaaaacaccagtaacatca

SEQ ID NO: 94016 - DNA, 25 bp, Homo sapien
tactctcagagcacataggctaaga

SEQ ID NO: 94017 - DNA, 25 bp, Homo sapien
tgctaggtgtcactactctcagagc

SEQ ID NO: 94018 - DNA, 25 bp, Homo sapien
tgtcactactctcagagcacatagg

SEQ ID NO: 94019 - DNA, 25 bp, Homo sapien
gagcacataggctaagaggcttcct

SEQ ID NO: 94020 - DNA, 25 bp, Homo sapien
cctcctaagactaggcctccatttt

SEQ ID NO: 94021 - DNA, 25 bp, Homo sapien
attactgctgctgaccctcctaaga

SEQ ID NO: 94022 - DNA, 25 bp, Homo sapien
ctgcgtgttttattatagtctggaa

SEQ ID NO: 94023 - DNA, 25 bp, Homo sapien
tcacagctgtcctcaagtgggggcc

SEQ ID NO: 94024 - DNA, 25 bp, Homo sapien
gcaaaatgctgctgttttctaaatt

SEQ ID NO: 94025 - DNA, 25 bp, Homo sapien
aaaatgctgctgttttctaaattct

SEQ ID NO: 94026 - DNA, 25 bp, Homo sapien
aatgctgctgttttctaaattcttg

SEQ ID NO: 94027 - DNA, 25 bp, Homo sapien
cagcaaaatgctgctgttttctaaa

SEQ ID NO: 94028 - DNA, 25 bp, Homo sapien
aagtaaactgttgtcagtataggga

SEQ ID NO: 94029 - DNA, 25 bp, Homo sapien
catgctcctcttgatcatcttttgc

SEQ ID NO: 94030 - DNA, 25 bp, Homo sapien
gattcaggggattttttcatgctcc

SEQ ID NO: 94031 - DNA, 25 bp, Homo sapien
gaagaaagccaatggattcagggga

SEQ ID NO: 94032 - DNA, 25 bp, Homo sapien
cctatggatggagaggagcagtgcc

SEQ ID NO: 94033 - DNA, 25 bp, Homo sapien
tatggatggagaggagcagtgccat

SEQ ID NO: 94034 - DNA, 25 bp, Homo sapien
ctatggatggagaggagcagtgcca

SEQ ID NO: 94035 - DNA, 25 bp, Homo sapien
cacttttcactagccatcccattgg

SEQ ID NO: 94036 - DNA, 25 bp, Homo sapien
cactagccatcccattggcttcttt

SEQ ID NO: 94037 - DNA, 25 bp, Homo sapien
ttccccacttttcactagccatccc

SEQ ID NO: 94038 - DNA, 25 bp, Homo sapien
caacatatattctagcacaatattc

SEQ ID NO: 94039 - DNA, 25 bp, Homo sapien
ctgcagaattaaggatgaatgattg

SEQ ID NO: 94040 - DNA, 25 bp, Homo sapien
agaattaaggatgaatgattgaaaa

SEQ ID NO: 94041 - DNA, 25 bp, Homo sapien
aattaaggatgaatgattgaaaaac

SEQ ID NO: 94042 - DNA, 25 bp, Homo sapien
gcagaattaaggatgaatgattgaa

SEQ ID NO: 94043 - DNA, 25 bp, Homo sapien
tagaagtgccctctaggagccatat

SEQ ID NO: 94044 - DNA, 25 bp, Homo sapien
cattactgtactttcaccgtgagga

SEQ ID NO: 94045 - DNA, 25 bp, Homo sapien
gctgaattaaggattgcgtgtctga

SEQ ID NO: 94046 - DNA, 25 bp, Homo sapien
ttatttaaaggccttatccacgaca

SEQ ID NO: 94047 - DNA, 25 bp, Homo sapien
taggagagagatagggtccaaaatg

SEQ ID NO: 94048 - DNA, 25 bp, Homo sapien
ccaatatagataggagagagatagg

SEQ ID NO: 94049 - DNA, 25 bp, Homo sapien
gccaccatagtccaatatagatagg

SEQ ID NO: 94050 - DNA, 25 bp, Homo sapien
cactctgtgtgccaccatagtccaa

SEQ ID NO: 94051 - DNA, 25 bp, Homo sapien
gtgtgctacatacacaccactgtac

SEQ ID NO: 94052 - DNA, 25 bp, Homo sapien
ctgcagtgtgctacatacacaccac

SEQ ID NO: 94053 - DNA, 25 bp, Homo sapien
gggcaaaaggatgagaccctcatct

SEQ ID NO: 94054 - DNA, 25 bp, Homo sapien
gaggttggaggatcaggagttgaag

SEQ ID NO: 94055 - DNA, 25 bp, Homo sapien
aaaagtgatttctctatggcccacc

SEQ ID NO: 94056 - DNA, 25 bp, Homo sapien
tatggcccaccagcaagtctacatc

SEQ ID NO: 94057 - DNA, 25 bp, Homo sapien
tgatttctctatggcccaccagcaa

SEQ ID NO: 94058 - DNA, 25 bp, Homo sapien
ttctctatggcccaccagcaagtct

SEQ ID NO: 94059 - DNA, 25 bp, Homo sapien
tgaggaacaaccagagaaatgaact

SEQ ID NO: 94060 - DNA, 25 bp, Homo sapien
tgttccataggcgaggcacatttcc

SEQ ID NO: 94061 - DNA, 25 bp, Homo sapien
gaactgcagctattgccaagtgtga

SEQ ID NO: 94062 - DNA, 25 bp, Homo sapien
gatgagacactccaaagtcactgag

SEQ ID NO: 94063 - DNA, 25 bp, Homo sapien
tcgcctttgcagatacacaccaact

SEQ ID NO: 94064 - DNA, 25 bp, Homo sapien
tttccatcgcctttgcagatacaca

SEQ ID NO: 94065 - DNA, 25 bp, Homo sapien
ggtaacatccttcttcagaatatgc

SEQ ID NO: 94066 - DNA, 25 bp, Homo sapien
tatgcatatgtaagaactcctttcc

SEQ ID NO: 94067 - DNA, 25 bp, Homo sapien
attcataaggatgtctctttatttt

SEQ ID NO: 94068 - DNA, 25 bp, Homo sapien
cattcataaggatgtctctttattt

SEQ ID NO: 94069 - DNA, 25 bp, Homo sapien
ttcataaggatgtctctttattttt

SEQ ID NO: 94070 - DNA, 25 bp, Homo sapien
cttcattcacatggggaattagaaa

SEQ ID NO: 94071 - DNA, 25 bp, Homo sapien
cactatatttagaataacacagctc

SEQ ID NO: 94072 - DNA, 25 bp, Homo sapien
aattgccttatgacaaacactatat

SEQ ID NO: 94073 - DNA, 25 bp, Homo sapien
tatttagaataacacagctcttcat

SEQ ID NO: 94074 - DNA, 25 bp, Homo sapien
acaggtttcacacacttgtgactct

SEQ ID NO: 94075 - DNA, 25 bp, Homo sapien
tgatcggcttgtgaataatgttgga

SEQ ID NO: 94076 - DNA, 25 bp, Homo sapien
gactctctcagtcttgatcggcttg

SEQ ID NO: 94077 - DNA, 25 bp, Homo sapien
aaatgaagtcagaaagaatacaggt

SEQ ID NO: 94078 - DNA, 25 bp, Homo sapien
tgtagcataagccagattggtgggc

SEQ ID NO: 94079 - DNA, 25 bp, Homo sapien
ggaagatgtgccaccctcttgatta

SEQ ID NO: 94080 - DNA, 25 bp, Homo sapien
catgtttagtgactgcatggccagt

SEQ ID NO: 94081 - DNA, 25 bp, Homo sapien
gcacagacaaaaacgttaaccataa

SEQ ID NO: 94082 - DNA, 25 bp, Homo sapien
ttgtctattctacaaaaatttcgac

SEQ ID NO: 94083 - DNA, 25 bp, Homo sapien
tcttgatttgtctattctacaaaaa

SEQ ID NO: 94084 - DNA, 25 bp, Homo sapien
gatttgtctattctacaaaaatttc

SEQ ID NO: 94085 - DNA, 25 bp, Homo sapien
attcttgatttgtctattctacaaa

SEQ ID NO: 94086 - DNA, 25 bp, Homo sapien
agataaacctcagaagcagatgacc

SEQ ID NO: 94087 - DNA, 25 bp, Homo sapien
cactggtgagataaacctcagaagc

SEQ ID NO: 94088 - DNA, 25 bp, Homo sapien
gaagcagatgacctacataaggtca

SEQ ID NO: 94089 - DNA, 25 bp, Homo sapien
tggtgagataaacctcagaagcaga

SEQ ID NO: 94090 - DNA, 25 bp, Homo sapien
tgcatcctagtttaatataagtaga

SEQ ID NO: 94091 - DNA, 25 bp, Homo sapien
ccctcttatgcatcctagtttaata

SEQ ID NO: 94092 - DNA, 25 bp, Homo sapien
ttttatcaaccctcttatgcatcct

SEQ ID NO: 94093 - DNA, 25 bp, Homo sapien
attccattttatcaaccctcttatg

SEQ ID NO: 94094 - DNA, 25 bp, Homo sapien
cagagcaatgataaataacatgcta

SEQ ID NO: 94095 - DNA, 25 bp, Homo sapien
tctttttaactcaattgcattattc

SEQ ID NO: 94096 - DNA, 25 bp, Homo sapien
catgctaacatgatagagatttgag

SEQ ID NO: 94097 - DNA, 25 bp, Homo sapien
cacacatcttcaatgatttgaacaa

SEQ ID NO: 94098 - DNA, 25 bp, Homo sapien
agtccaggtcagttccatatgcagc

SEQ ID NO: 94099 - DNA, 25 bp, Homo sapien
ttgcaggttagctgggggtatctat

SEQ ID NO: 94100 - DNA, 25 bp, Homo sapien
gggtatctatcttgtagattaagtc

SEQ ID NO: 94101 - DNA, 25 bp, Homo sapien
gtagattaagtccaggtcagttcca

SEQ ID NO: 94102 - DNA, 25 bp, Homo sapien
tccctcatctgtccaattgttctgc

SEQ ID NO: 94103 - DNA, 25 bp, Homo sapien
tgattccactggattgtcacagact

SEQ ID NO: 94104 - DNA, 25 bp, Homo sapien
gggagctttacttaaacacactgcg

SEQ ID NO: 94105 - DNA, 25 bp, Homo sapien
gcattcaggaaactctgctcgccat

SEQ ID NO: 94106 - DNA, 25 bp, Homo sapien
cccccgaacatatgtggactctgat

SEQ ID NO: 94107 - DNA, 25 bp, Homo sapien
tggaaacagtctgtagtataaaagc

SEQ ID NO: 94108 - DNA, 25 bp, Homo sapien
tggagttggaaacagtctgtagtat

SEQ ID NO: 94109 - DNA, 25 bp, Homo sapien
tccctgaagggatttctggctaaag

SEQ ID NO: 94110 - DNA, 25 bp, Homo sapien
cgtgtcactgagaaacaaactggcc

SEQ ID NO: 94111 - DNA, 25 bp, Homo sapien
cagtgcacaccccaggcaatgtttt

SEQ ID NO: 94112 - DNA, 25 bp, Homo sapien
gacagccttactaatcttgatgcct

SEQ ID NO: 94113 - DNA, 25 bp, Homo sapien
gaagcttgaagcctcactggagaag

SEQ ID NO: 94114 - DNA, 25 bp, Homo sapien
tagtgaatagttggaaaatccatca

SEQ ID NO: 94115 - DNA, 25 bp, Homo sapien
aaatcatatcttgactgacaagcct

SEQ ID NO: 94116 - DNA, 25 bp, Homo sapien
gtatctttaacttgtagtgaatagt

SEQ ID NO: 94117 - DNA, 25 bp, Homo sapien
aatcatatcttgactgacaagcctc

SEQ ID NO: 94118 - DNA, 25 bp, Homo sapien
ttattagggtggcagttgtccatag

SEQ ID NO: 94119 - DNA, 25 bp, Homo sapien
gcagttgtccatagaataatacagt

SEQ ID NO: 94120 - DNA, 25 bp, Homo sapien
gagaaatggagatgggcaatctagt

SEQ ID NO: 94121 - DNA, 25 bp, Homo sapien
gagatgggcaatctagttgttttca

SEQ ID NO: 94122 - DNA, 25 bp, Homo sapien
tatctcttaaatgttgcccagagca

SEQ ID NO: 94123 - DNA, 25 bp, Homo sapien
tgagaccctccaattgtcaacagac

SEQ ID NO: 94124 - DNA, 25 bp, Homo sapien
ttaatacgaaagttactgcctggag

SEQ ID NO: 94125 - DNA, 25 bp, Homo sapien
gacagaatggcatcaatcttatgag

SEQ ID NO: 94126 - DNA, 25 bp, Homo sapien
tcccttgcgtttatggctaaagagg

SEQ ID NO: 94127 - DNA, 25 bp, Homo sapien
catggtttagcctcgttagactttc

SEQ ID NO: 94128 - DNA, 25 bp, Homo sapien
ctttatctcccttgcgtttatggct

SEQ ID NO: 94129 - DNA, 25 bp, Homo sapien
gctccatggtttagcctcgttagac

SEQ ID NO: 94130 - DNA, 25 bp, Homo sapien
tttgagcatttccttgtgtatgtga

SEQ ID NO: 94131 - DNA, 25 bp, Homo sapien
gagcatttccttgtgtatgtgaacc

SEQ ID NO: 94132 - DNA, 25 bp, Homo sapien
atttccttgtgtatgtgaaccagtt

SEQ ID NO: 94133 - DNA, 25 bp, Homo sapien
ccttgtgtatgtgaaccagttttca

SEQ ID NO: 94134 - DNA, 25 bp, Homo sapien
tcatcttccatatgcctgatccaga

SEQ ID NO: 94135 - DNA, 25 bp, Homo sapien
ttgcagccatccatgcacttttctc

SEQ ID NO: 94136 - DNA, 25 bp, Homo sapien
cttccatatgcctgatccagatttg

SEQ ID NO: 94137 - DNA, 25 bp, Homo sapien
cagatttgcagccatccatgcactt

SEQ ID NO: 94138 - DNA, 25 bp, Homo sapien
tgttactttccattttagactggct

SEQ ID NO: 94139 - DNA, 25 bp, Homo sapien
taatttcttatagcacccatcctca

SEQ ID NO: 94140 - DNA, 25 bp, Homo sapien
agactggcttgttaaaatcatatcc

SEQ ID NO: 94141 - DNA, 25 bp, Homo sapien
cttagtggtgcacagcatttgtggc

SEQ ID NO: 94142 - DNA, 25 bp, Homo sapien
aatggctatttacagtctaacttac

SEQ ID NO: 94143 - DNA, 25 bp, Homo sapien
actattattacaatggctatttaca

SEQ ID NO: 94144 - DNA, 25 bp, Homo sapien
tacagtctaacttacctacatttaa

SEQ ID NO: 94145 - DNA, 25 bp, Homo sapien
aaatgcaatgtatgacattattaaa

SEQ ID NO: 94146 - DNA, 25 bp, Homo sapien
ttccttgagttccaatatcttctca

SEQ ID NO: 94147 - DNA, 25 bp, Homo sapien
cttctcaatataagttctataatac

SEQ ID NO: 94148 - DNA, 25 bp, Homo sapien
atcttctcaatataagttctataat

SEQ ID NO: 94149 - DNA, 25 bp, Homo sapien
tctcaatataagttctataatacat

SEQ ID NO: 94150 - DNA, 25 bp, Homo sapien
atttaacttagatatatttagccca

SEQ ID NO: 94151 - DNA, 25 bp, Homo sapien
tctgaggcctcacaagtaacaactg

SEQ ID NO: 94152 - DNA, 25 bp, Homo sapien
tggttccatactcatcatgtctttg

SEQ ID NO: 94153 - DNA, 25 bp, Homo sapien
tctgatagtgtgttcattatggact

SEQ ID NO: 94154 - DNA, 25 bp, Homo sapien
cttgctgtaaggcctctggactgct

SEQ ID NO: 94155 - DNA, 25 bp, Homo sapien
ctctctgtcagtcttgaatttatcc

SEQ ID NO: 94156 - DNA, 25 bp, Homo sapien
tctgtcagtcttgaatttatcctgg

SEQ ID NO: 94157 - DNA, 25 bp, Homo sapien
tgtcagtcttgaatttatcctggta

SEQ ID NO: 94158 - DNA, 25 bp, Homo sapien
tgtcctgatgtacccacatggccaa

SEQ ID NO: 94159 - DNA, 25 bp, Homo sapien
tgcctatgtgcatgcaattcctctg

SEQ ID NO: 94160 - DNA, 25 bp, Homo sapien
gacattattacccagttgatacaat

SEQ ID NO: 94161 - DNA, 25 bp, Homo sapien
catggccaaatcttacccttattct

SEQ ID NO: 94162 - DNA, 25 bp, Homo sapien
ggtgtagtcactggtgctccacttc

SEQ ID NO: 94163 - DNA, 25 bp, Homo sapien
taaactctgaacattgtaatttctg

SEQ ID NO: 94164 - DNA, 25 bp, Homo sapien
aactctgaacattgtaatttctgaa

SEQ ID NO: 94165 - DNA, 25 bp, Homo sapien
ttcctgggcttcaaattgaaagctt

SEQ ID NO: 94166 - DNA, 25 bp, Homo sapien
tgaatggtctacagattggcacgcc

SEQ ID NO: 94167 - DNA, 25 bp, Homo sapien
tcaaagttggacttaaacagccatg

SEQ ID NO: 94168 - DNA, 25 bp, Homo sapien
cacgccattggaagataagtttgcc

SEQ ID NO: 94169 - DNA, 25 bp, Homo sapien
tatgctgagcttacgtacaaggaaa

SEQ ID NO: 94170 - DNA, 25 bp, Homo sapien
gtgctcatatgatgccaccaggaca

SEQ ID NO: 94171 - DNA, 25 bp, Homo sapien
tagcctgtcctaactcaccgagata

SEQ ID NO: 94172 - DNA, 25 bp, Homo sapien
gagatacactgtcctaggccataag

SEQ ID NO: 94173 - DNA, 25 bp, Homo sapien
taacaggcattcttttagtggtgcc

SEQ ID NO: 94174 - DNA, 25 bp, Homo sapien
gggcaggtgcccactttggaagtct

SEQ ID NO: 94175 - DNA, 25 bp, Homo sapien
ggtgcccactttggaagtctatggc

SEQ ID NO: 94176 - DNA, 25 bp, Homo sapien
gcccactttggaagtctatggccat

SEQ ID NO: 94177 - DNA, 25 bp, Homo sapien
caggtgcccactttggaagtctatg

SEQ ID NO: 94178 - DNA, 25 bp, Homo sapien
aacctgtactttgcttctcacacaa

SEQ ID NO: 94179 - DNA, 25 bp, Homo sapien
ggattttttacctaacatgcatcat

SEQ ID NO: 94180 - DNA, 25 bp, Homo sapien
cagtggtatgtgtcatcaattttga

SEQ ID NO: 94181 - DNA, 25 bp, Homo sapien
tggtttctgttaagcagtggtatgt

SEQ ID NO: 94182 - DNA, 25 bp, Homo sapien
tttgtttacacagggatccagagac

SEQ ID NO: 94183 - DNA, 25 bp, Homo sapien
cttctcaaggtgtttaatctgtact

SEQ ID NO: 94184 - DNA, 25 bp, Homo sapien
tctttatgccacagtttagatctaa

SEQ ID NO: 94185 - DNA, 25 bp, Homo sapien
tcaccaactgaaacacccagtttct

SEQ ID NO: 94186 - DNA, 25 bp, Homo sapien
tataagttcgtgtaacctccagatt

SEQ ID NO: 94187 - DNA, 25 bp, Homo sapien
ggatgaagtataagttcgtgtaacc

SEQ ID NO: 94188 - DNA, 25 bp, Homo sapien
tgctcagggatgaagtataagttcg

SEQ ID NO: 94189 - DNA, 25 bp, Homo sapien
agtctcctgctcagggatgaagtat

SEQ ID NO: 94190 - DNA, 25 bp, Homo sapien
cagtcctggagaacagccaaaagct

SEQ ID NO: 94191 - DNA, 25 bp, Homo sapien
cagccaaaagctgcagttctacaac

SEQ ID NO: 94192 - DNA, 25 bp, Homo sapien
tggagaacagccaaaagctgcagtt

SEQ ID NO: 94193 - DNA, 25 bp, Homo sapien
aagctgcagttctacaactctttcc

SEQ ID NO: 94194 - DNA, 25 bp, Homo sapien
gagaaagcataaaactccactcttg

SEQ ID NO: 94195 - DNA, 25 bp, Homo sapien
cactcttggtcgtagatgtggattg

SEQ ID NO: 94196 - DNA, 25 bp, Homo sapien
actgtgttcttgacaatgccgctct

SEQ ID NO: 94197 - DNA, 25 bp, Homo sapien
tgacaatgccgctctgcagttttct

SEQ ID NO: 94198 - DNA, 25 bp, Homo sapien
gccatctttgtcttgaatgacctcg

SEQ ID NO: 94199 - DNA, 25 bp, Homo sapien
tttaaaatggagcatgtgcaaccta

SEQ ID NO: 94200 - DNA, 25 bp, Homo sapien
ggagcatgtgcaacctaatgccatc

SEQ ID NO: 94201 - DNA, 25 bp, Homo sapien
cttgactaggccagatgtggatagt

SEQ ID NO: 94202 - DNA, 25 bp, Homo sapien
agtgaagcatagtgttgaggaccct

SEQ ID NO: 94203 - DNA, 25 bp, Homo sapien
cactgatcctgcagactggtctttg

SEQ ID NO: 94204 - DNA, 25 bp, Homo sapien
gttgcatgccctgggaaacctcctg

SEQ ID NO: 94205 - DNA, 25 bp, Homo sapien
caacgggtaggcattgccactgatc

SEQ ID NO: 94206 - DNA, 25 bp, Homo sapien
ctgtcatatggagcaatagggccca

SEQ ID NO: 94207 - DNA, 25 bp, Homo sapien
ggcaacattttgtccacccagccag

SEQ ID NO: 94208 - DNA, 25 bp, Homo sapien
ccatttagcgatggctcatctatcc

SEQ ID NO: 94209 - DNA, 25 bp, Homo sapien
catctataagcctaatagcttgtgg

SEQ ID NO: 94210 - DNA, 25 bp, Homo sapien
ggctcagaatctagcagtgtgacag

SEQ ID NO: 94211 - DNA, 25 bp, Homo sapien
tcaggctcagaatctagcagtgtga

SEQ ID NO: 94212 - DNA, 25 bp, Homo sapien
caggctcagaatctagcagtgtgac

SEQ ID NO: 94213 - DNA, 25 bp, Homo sapien
tcagaatctagcagtgtgacaggag

SEQ ID NO: 94214 - DNA, 25 bp, Homo sapien
ggccatgtaggcagatctctcaaaa

SEQ ID NO: 94215 - DNA, 25 bp, Homo sapien
gaattcaacgtagaatgccccacaa

SEQ ID NO: 94216 - DNA, 25 bp, Homo sapien
gactagcaagactaaagtagggcca

SEQ ID NO: 94217 - DNA, 25 bp, Homo sapien
tataagcagacaccaatgctgagct

SEQ ID NO: 94218 - DNA, 25 bp, Homo sapien
catcatgtgacccaacactgactgt

SEQ ID NO: 94219 - DNA, 25 bp, Homo sapien
tattgaaacggttggattgtgtttc

SEQ ID NO: 94220 - DNA, 25 bp, Homo sapien
gactgtcaacttgtgagtgtctccc

SEQ ID NO: 94221 - DNA, 25 bp, Homo sapien
gaacacataacaccaagttcggtta

SEQ ID NO: 94222 - DNA, 25 bp, Homo sapien
ttcgcacctgaggtgctatgggaaa

SEQ ID NO: 94223 - DNA, 25 bp, Homo sapien
ctgcttctcttcgcacctgaggtgc

SEQ ID NO: 94224 - DNA, 25 bp, Homo sapien
tctcttcgcacctgaggtgctatgg

SEQ ID NO: 94225 - DNA, 25 bp, Homo sapien
gcttctcttcgcacctgaggtgcta

SEQ ID NO: 94226 - DNA, 25 bp, Homo sapien
tcggtttctgtaactatggaatagc

SEQ ID NO: 94227 - DNA, 25 bp, Homo sapien
aagtgagatgctcctatcattgctt

SEQ ID NO: 94228 - DNA, 25 bp, Homo sapien
gagatgctcctatcattgcttcggt

SEQ ID NO: 94229 - DNA, 25 bp, Homo sapien
attgcttcggtttctgtaactatgg

SEQ ID NO: 94230 - DNA, 25 bp, Homo sapien
atttaaagacaactgctcaacaagg

SEQ ID NO: 94231 - DNA, 25 bp, Homo sapien
cttctcaggattcagtgtgtcattc

SEQ ID NO: 94232 - DNA, 25 bp, Homo sapien
caactgctcaacaaggtgcagctgt

SEQ ID NO: 94233 - DNA, 25 bp, Homo sapien
aggattcagtgtgtcattccctcca

SEQ ID NO: 94234 - DNA, 25 bp, Homo sapien
gcttccctatagtcagttaccacaa

SEQ ID NO: 94235 - DNA, 25 bp, Homo sapien
taggctcagtgtaagatatggaagt

SEQ ID NO: 94236 - DNA, 25 bp, Homo sapien
taccacaatggccttacgtcaagct

SEQ ID NO: 94237 - DNA, 25 bp, Homo sapien
tatttccccgtatgtaattcatgcc

SEQ ID NO: 94238 - DNA, 25 bp, Homo sapien
cggaggtggatcaaaaagtaataat

SEQ ID NO: 94239 - DNA, 25 bp, Homo sapien
aaaagtaataatgatctccatgcca

SEQ ID NO: 94240 - DNA, 25 bp, Homo sapien
aaagtaataatgatctccatgccaa

SEQ ID NO: 94241 - DNA, 25 bp, Homo sapien
gatggaacttggtctaccagggaag

SEQ ID NO: 94242 - DNA, 25 bp, Homo sapien
aaaaaagctgatggaacttggtcta

SEQ ID NO: 94243 - DNA, 25 bp, Homo sapien
gctgatggaacttggtctaccaggg

SEQ ID NO: 94244 - DNA, 25 bp, Homo sapien
tggtctaccagggaaggtccatcag

SEQ ID NO: 94245 - DNA, 25 bp, Homo sapien
gttagtacaatagcattcaccaaga

SEQ ID NO: 94246 - DNA, 25 bp, Homo sapien
tcaccaagataaaatcatattcatc

SEQ ID NO: 94247 - DNA, 25 bp, Homo sapien
ttatgttagtacaatagcattcacc

SEQ ID NO: 94248 - DNA, 25 bp, Homo sapien
ccacttcctgaagcacttcacagtt

SEQ ID NO: 94249 - DNA, 25 bp, Homo sapien
tccttttccccattattcaatgtct

SEQ ID NO: 94250 - DNA, 25 bp, Homo sapien
ttcatttgtggtaagttcaccttgg

SEQ ID NO: 94251 - DNA, 25 bp, Homo sapien
tatgtactcaggattattgttttgt

SEQ ID NO: 94252 - DNA, 25 bp, Homo sapien
ggcaaggtgattgtcttcgtgttta

SEQ ID NO: 94253 - DNA, 25 bp, Homo sapien
ggatcaaatggtactataagactta

SEQ ID NO: 94254 - DNA, 25 bp, Homo sapien
gacttctaaggatttcctattggca

SEQ ID NO: 94255 - DNA, 25 bp, Homo sapien
cagaggcaaactctttcgactttta

SEQ ID NO: 94256 - DNA, 25 bp, Homo sapien
cttacatggaagatagggctctaga

SEQ ID NO: 94257 - DNA, 25 bp, Homo sapien
tgatttgttacaacttctaaaacca

SEQ ID NO: 94258 - DNA, 25 bp, Homo sapien
agcctgcatgcttcatctacagagg

SEQ ID NO: 94259 - DNA, 25 bp, Homo sapien
ctgcatgcttcatctacagaggacc

SEQ ID NO: 94260 - DNA, 25 bp, Homo sapien
ttttttctctacaatcaagcctgca

SEQ ID NO: 94261 - DNA, 25 bp, Homo sapien
cactgctatcaagcttttttctcta

SEQ ID NO: 94262 - DNA, 25 bp, Homo sapien
ctttccacagtattataccaaacat

SEQ ID NO: 94263 - DNA, 25 bp, Homo sapien
ttccacagtattataccaaacatcc

SEQ ID NO: 94264 - DNA, 25 bp, Homo sapien
cacagtattataccaaacatcctgc

SEQ ID NO: 94265 - DNA, 25 bp, Homo sapien
cagtattataccaaacatcctgcat

SEQ ID NO: 94266 - DNA, 25 bp, Homo sapien
cacacagacataaacgaagatccaa

SEQ ID NO: 94267 - DNA, 25 bp, Homo sapien
gcaatataagcttctcggttttact

SEQ ID NO: 94268 - DNA, 25 bp, Homo sapien
atgagatagcaatataagcttctcg

SEQ ID NO: 94269 - DNA, 25 bp, Homo sapien
tgtacacacagacataaacgaagat

SEQ ID NO: 94270 - DNA, 25 bp, Homo sapien
gagaactggcacatagatctgattt

SEQ ID NO: 94271 - DNA, 25 bp, Homo sapien
aggagaactggcacatagatctgat

SEQ ID NO: 94272 - DNA, 25 bp, Homo sapien
aactggcacatagatctgatttgcc

SEQ ID NO: 94273 - DNA, 25 bp, Homo sapien
gaactggcacatagatctgatttgc

SEQ ID NO: 94274 - DNA, 25 bp, Homo sapien
cattgggccacggaatcaagaaaga

SEQ ID NO: 94275 - DNA, 25 bp, Homo sapien
tacacttatttctccattgggccac

SEQ ID NO: 94276 - DNA, 25 bp, Homo sapien
tatttctccattgggccacggaatc

SEQ ID NO: 94277 - DNA, 25 bp, Homo sapien
aatcaagaaagagggcaccatcagg

SEQ ID NO: 94278 - DNA, 25 bp, Homo sapien
tccagggtcctgtaaagctagaaac

SEQ ID NO: 94279 - DNA, 25 bp, Homo sapien
gaactcacacaactcaatgggaaaa

SEQ ID NO: 94280 - DNA, 25 bp, Homo sapien
ggaagattataattacctcaaggag

SEQ ID NO: 94281 - DNA, 25 bp, Homo sapien
gaggactagtatatccccaatgtag

SEQ ID NO: 94282 - DNA, 25 bp, Homo sapien
gatgttgtttgatggactgtcctat

SEQ ID NO: 94283 - DNA, 25 bp, Homo sapien
tacttcatctgataatagcatagcc

SEQ ID NO: 94284 - DNA, 25 bp, Homo sapien
gcatagccatttccgctctcttttg

SEQ ID NO: 94285 - DNA, 25 bp, Homo sapien
gatactgtttcatgtgtacctgagg

SEQ ID NO: 94286 - DNA, 25 bp, Homo sapien
gtgctgtatcacatcttccagaaca

SEQ ID NO: 94287 - DNA, 25 bp, Homo sapien
tcacatcttccagaacagcacccat

SEQ ID NO: 94288 - DNA, 25 bp, Homo sapien
gctgtatcacatcttccagaacagc

SEQ ID NO: 94289 - DNA, 25 bp, Homo sapien
gtatcacatcttccagaacagcacc

SEQ ID NO: 94290 - DNA, 25 bp, Homo sapien
tttcctccattagtgtacaggacag

SEQ ID NO: 94291 - DNA, 25 bp, Homo sapien
agccctgccactggcggattgcctt

SEQ ID NO: 94292 - DNA, 25 bp, Homo sapien
tgaaaatcaggcaacattccatctg

SEQ ID NO: 94293 - DNA, 25 bp, Homo sapien
tagtgtacaggacagatgaaaatca

SEQ ID NO: 94294 - DNA, 25 bp, Homo sapien
tcattttcatgttaaccaggtaaca

SEQ ID NO: 94295 - DNA, 25 bp, Homo sapien
gaagacattcattttcatgttaacc

SEQ ID NO: 94296 - DNA, 25 bp, Homo sapien
ttttcatgttaaccaggtaacatat

SEQ ID NO: 94297 - DNA, 25 bp, Homo sapien
ctatgtgaagacattcattttcatg

SEQ ID NO: 94298 - DNA, 25 bp, Homo sapien
tttatacatatcagccttgtttgtc

SEQ ID NO: 94299 - DNA, 25 bp, Homo sapien
tttaacctcaagtaatgtccactga

SEQ ID NO: 94300 - DNA, 25 bp, Homo sapien
acctcaagtaatgtccactgaattg

SEQ ID NO: 94301 - DNA, 25 bp, Homo sapien
gattttaacctcaagtaatgtccac

SEQ ID NO: 94302 - DNA, 25 bp, Homo sapien
taacctcaagtaatgtccactgaat

SEQ ID NO: 94303 - DNA, 25 bp, Homo sapien
tggaaacaattaggtaccagggctg

SEQ ID NO: 94304 - DNA, 25 bp, Homo sapien
tgttctggcaagcagcaaacttcca

SEQ ID NO: 94305 - DNA, 25 bp, Homo sapien
taacgagctgaagatcctgattaac

SEQ ID NO: 94306 - DNA, 25 bp, Homo sapien
caaacttccattctctgtaacgagc

SEQ ID NO: 94307 - DNA, 25 bp, Homo sapien
tttcactactgaagacctcacagaa

SEQ ID NO: 94308 - DNA, 25 bp, Homo sapien
acaactgtcaaccacactgtagcct

SEQ ID NO: 94309 - DNA, 25 bp, Homo sapien
actgctacaactgtcaaccacactg

SEQ ID NO: 94310 - DNA, 25 bp, Homo sapien
ctttgctgagaacttcaacagctct

SEQ ID NO: 94311 - DNA, 25 bp, Homo sapien
agcatgaattttcacacctctgtgc

SEQ ID NO: 94312 - DNA, 25 bp, Homo sapien
caaagcatgaattttcacacctctg

SEQ ID NO: 94313 - DNA, 25 bp, Homo sapien
catgaattttcacacctctgtgctt

SEQ ID NO: 94314 - DNA, 25 bp, Homo sapien
gaattttcacacctctgtgcttttg

SEQ ID NO: 94315 - DNA, 25 bp, Homo sapien
atcaatagaagggtgaaatacttct

SEQ ID NO: 94316 - DNA, 25 bp, Homo sapien
caatagaagggtgaaatacttctca

SEQ ID NO: 94317 - DNA, 25 bp, Homo sapien
aaatcaatagaagggtgaaatactt

SEQ ID NO: 94318 - DNA, 25 bp, Homo sapien
tagaagggtgaaatacttctcatat

SEQ ID NO: 94319 - DNA, 25 bp, Homo sapien
tcttttttagatatgcattcagtgg

SEQ ID NO: 94320 - DNA, 25 bp, Homo sapien
tttctaatcctttcacaggcagctt

SEQ ID NO: 94321 - DNA, 25 bp, Homo sapien
catttctaatcctttcacaggcagc

SEQ ID NO: 94322 - DNA, 25 bp, Homo sapien
cattcagtggtaagttagtgtgaag

SEQ ID NO: 94323 - DNA, 25 bp, Homo sapien
gagtatgaatattgtaccccacagg

SEQ ID NO: 94324 - DNA, 25 bp, Homo sapien
caacccactggcaacttttgatgtc

SEQ ID NO: 94325 - DNA, 25 bp, Homo sapien
tgatgtaactatctcctgagtatga

SEQ ID NO: 94326 - DNA, 25 bp, Homo sapien
gatttacagaatatgagtgcagttt

SEQ ID NO: 94327 - DNA, 25 bp, Homo sapien
gcttcaatgcataaaaatgtcgttt

SEQ ID NO: 94328 - DNA, 25 bp, Homo sapien
tttcaagaatcatagtgcatacatg

SEQ ID NO: 94329 - DNA, 25 bp, Homo sapien
tcatagtgcatacatggatactgta

SEQ ID NO: 94330 - DNA, 25 bp, Homo sapien
tgcttctcctcaaccaatgcttcaa

SEQ ID NO: 94331 - DNA, 25 bp, Homo sapien
cttctgtttatatcgttgtccttca

SEQ ID NO: 94332 - DNA, 25 bp, Homo sapien
tctgtttatatcgttgtccttcatt

SEQ ID NO: 94333 - DNA, 25 bp, Homo sapien
tgcatctctgatttgtggcttcact

SEQ ID NO: 94334 - DNA, 25 bp, Homo sapien
gtgcatctctgatttgtggcttcac

SEQ ID NO: 94335 - DNA, 25 bp, Homo sapien
ctaagctactttataaagcttccaa

SEQ ID NO: 94336 - DNA, 25 bp, Homo sapien
cattttggaagttcagctattaaaa

SEQ ID NO: 94337 - DNA, 25 bp, Homo sapien
gaattttgtgttgcactaagctact

SEQ ID NO: 94338 - DNA, 25 bp, Homo sapien
tacacagaaattaggacattttgga

SEQ ID NO: 94339 - DNA, 25 bp, Homo sapien
aatgtgagatgctcatgtacaaatg

SEQ ID NO: 94340 - DNA, 25 bp, Homo sapien
tcagtggaggtgataataagcaaat

SEQ ID NO: 94341 - DNA, 25 bp, Homo sapien
ttattcaagttttggtgttcttcag

SEQ ID NO: 94342 - DNA, 25 bp, Homo sapien
gaagccagggttgtgttaatgtgat

SEQ ID NO: 94343 - DNA, 25 bp, Homo sapien
catacattaccagtgtgcatttttt

SEQ ID NO: 94344 - DNA, 25 bp, Homo sapien
aagagcatacattaccagtgtgcat

SEQ ID NO: 94345 - DNA, 25 bp, Homo sapien
gagcatacattaccagtgtgcattt

SEQ ID NO: 94346 - DNA, 25 bp, Homo sapien
taagagcatacattaccagtgtgca

SEQ ID NO: 94347 - DNA, 25 bp, Homo sapien
taggtaacgggaccatgaacgtcaa

SEQ ID NO: 94348 - DNA, 25 bp, Homo sapien
catgaacgtcaaagggaagaacaaa

SEQ ID NO: 94349 - DNA, 25 bp, Homo sapien
ctgggaacataggtaacgggaccat

SEQ ID NO: 94350 - DNA, 25 bp, Homo sapien
cgggaccatgaacgtcaaagggaag

SEQ ID NO: 94351 - DNA, 25 bp, Homo sapien
tgtttcttttccgactcttggtgat

SEQ ID NO: 94352 - DNA, 25 bp, Homo sapien
tgttcgtcatagtggaaattttctt

SEQ ID NO: 94353 - DNA, 25 bp, Homo sapien
cgactcttggtgatgttcgtcatag

SEQ ID NO: 94354 - DNA, 25 bp, Homo sapien
cttggtgatgttcgtcatagtggaa

SEQ ID NO: 94355 - DNA, 25 bp, Homo sapien
ttttatattctccaatctagtccct

SEQ ID NO: 94356 - DNA, 25 bp, Homo sapien
acttttatattctccaatctagtcc

SEQ ID NO: 94357 - DNA, 25 bp, Homo sapien
caaacttttatattctccaatctag

SEQ ID NO: 94358 - DNA, 25 bp, Homo sapien
ttatattctccaatctagtccctac

SEQ ID NO: 94359 - DNA, 25 bp, Homo sapien
aaattctgagtgaactgttcctccc

SEQ ID NO: 94360 - DNA, 25 bp, Homo sapien
ttaaaattctgagtgaactgttcct

SEQ ID NO: 94361 - DNA, 25 bp, Homo sapien
taaaattctgagtgaactgttcctc

SEQ ID NO: 94362 - DNA, 25 bp, Homo sapien
aaaattctgagtgaactgttcctcc

SEQ ID NO: 94363 - DNA, 25 bp, Homo sapien
tttacattggttgtatctgaaacgg

SEQ ID NO: 94364 - DNA, 25 bp, Homo sapien
tccatgtcataggtggatttaaaaa

SEQ ID NO: 94365 - DNA, 25 bp, Homo sapien
caaggttaaagatgtgcccatcaca

SEQ ID NO: 94366 - DNA, 25 bp, Homo sapien
ctgaaacggtggaacaaatagaaag

SEQ ID NO: 94367 - DNA, 25 bp, Homo sapien
cagctactcctctgtccacagacga

SEQ ID NO: 94368 - DNA, 25 bp, Homo sapien
agcctgggcttcagagtcagctact

SEQ ID NO: 94369 - DNA, 25 bp, Homo sapien
gagtcagctactcctctgtccacag

SEQ ID NO: 94370 - DNA, 25 bp, Homo sapien
aacagcctgggcttcagagtcagct

SEQ ID NO: 94371 - DNA, 25 bp, Homo sapien
cacaaaaatatacttcgtccaattg

SEQ ID NO: 94372 - DNA, 25 bp, Homo sapien
atatacttcgtccaattgctctaaa

SEQ ID NO: 94373 - DNA, 25 bp, Homo sapien
aaatatacttcgtccaattgctcta

SEQ ID NO: 94374 - DNA, 25 bp, Homo sapien
caaaaatatacttcgtccaattgct

SEQ ID NO: 94375 - DNA, 25 bp, Homo sapien
tttacattgtaactgctccctgcta

SEQ ID NO: 94376 - DNA, 25 bp, Homo sapien
gtttacattgtaactgctccctgct

SEQ ID NO: 94377 - DNA, 25 bp, Homo sapien
acattgtaactgctccctgctataa

SEQ ID NO: 94378 - DNA, 25 bp, Homo sapien
tacattgtaactgctccctgctata

SEQ ID NO: 94379 - DNA, 25 bp, Homo sapien
tcatccggaggaaatttattgcccc

SEQ ID NO: 94380 - DNA, 25 bp, Homo sapien
tacatcaactagacattttggcggc

SEQ ID NO: 94381 - DNA, 25 bp, Homo sapien
taagtggttgcagacatttcagcct

SEQ ID NO: 94382 - DNA, 25 bp, Homo sapien
gcctatgtatgctagaaggaacgtg

SEQ ID NO: 94383 - DNA, 25 bp, Homo sapien
taattataggagagaataggctgag

SEQ ID NO: 94384 - DNA, 25 bp, Homo sapien
tatagactgagcattagtttcaggg

SEQ ID NO: 94385 - DNA, 25 bp, Homo sapien
tcgggactgagacattaatatagac

SEQ ID NO: 94386 - DNA, 25 bp, Homo sapien
tttcaggggattcaacagacagctg

SEQ ID NO: 94387 - DNA, 25 bp, Homo sapien
gaattattattgatggctgaggcag

SEQ ID NO: 94388 - DNA, 25 bp, Homo sapien
tctgtggcccatgcgtaggcctcat

SEQ ID NO: 94389 - DNA, 25 bp, Homo sapien
taggcctcatcctgatgcgttgaat

SEQ ID NO: 94390 - DNA, 25 bp, Homo sapien
tgttggtgaaccaataatgtcaagg

SEQ ID NO: 94391 - DNA, 25 bp, Homo sapien
gaggaatgcaggagattctgcatat

SEQ ID NO: 94392 - DNA, 25 bp, Homo sapien
aggaatgcaggagattctgcatatt

SEQ ID NO: 94393 - DNA, 25 bp, Homo sapien
gacagattgtctatgctcctcacgt

SEQ ID NO: 94394 - DNA, 25 bp, Homo sapien
gagaaaaatgtctagagccagccat

SEQ ID NO: 94395 - DNA, 25 bp, Homo sapien
caagccgtggctacatttggataaa

SEQ ID NO: 94396 - DNA, 25 bp, Homo sapien
gatctgaaaagctcccaccatctgt

SEQ ID NO: 94397 - DNA, 25 bp, Homo sapien
tgtaagacagcaagacagcacattt

SEQ ID NO: 94398 - DNA, 25 bp, Homo sapien
gggatcaacgcaaacattctgctgg

SEQ ID NO: 94399 - DNA, 25 bp, Homo sapien
aagaaacaaatctcataattgcgga

SEQ ID NO: 94400 - DNA, 25 bp, Homo sapien
tgtgctgtagcctttaactgtgtaa

SEQ ID NO: 94401 - DNA, 25 bp, Homo sapien
cacaaggtgaattggagacatactc

SEQ ID NO: 94402 - DNA, 25 bp, Homo sapien
cacagttgtatgacaatagacctga

SEQ ID NO: 94403 - DNA, 25 bp, Homo sapien
tactttagatccattagctcccttg

SEQ ID NO: 94404 - DNA, 25 bp, Homo sapien
cacagcctagagctccaaatgaaaa

SEQ ID NO: 94405 - DNA, 25 bp, Homo sapien
aagcaaagtgtggagcaatgttacc

SEQ ID NO: 94406 - DNA, 25 bp, Homo sapien
aattccttgagccatggccagaaac

SEQ ID NO: 94407 - DNA, 25 bp, Homo sapien
gggctgaacttgtccataaaaacat

SEQ ID NO: 94408 - DNA, 25 bp, Homo sapien
caggctataggtgtccatacatttc

SEQ ID NO: 94409 - DNA, 25 bp, Homo sapien
tcagacctttatttcctttctctca

SEQ ID NO: 94410 - DNA, 25 bp, Homo sapien
cagacctttatttcctttctctcac

SEQ ID NO: 94411 - DNA, 25 bp, Homo sapien
aaagcaaggctatttccctggcggc

SEQ ID NO: 94412 - DNA, 25 bp, Homo sapien
tattctctacacactcaggctaggg

SEQ ID NO: 94413 - DNA, 25 bp, Homo sapien
cacaggaatgtggtaataacggagc

SEQ ID NO: 94414 - DNA, 25 bp, Homo sapien
ccttggtggctctgcgctgaattaa

SEQ ID NO: 94415 - DNA, 25 bp, Homo sapien
atctgaatagaatacgatgtagctt

SEQ ID NO: 94416 - DNA, 25 bp, Homo sapien
tgtttattaccttgatatttgtcaa

SEQ ID NO: 94417 - DNA, 25 bp, Homo sapien
aatagaatacgatgtagcttgagtg

SEQ ID NO: 94418 - DNA, 25 bp, Homo sapien
tagcttgagtgagtaaaaaagttac

SEQ ID NO: 94419 - DNA, 25 bp, Homo sapien
gatcacctttctccagtactgtcaa

SEQ ID NO: 94420 - DNA, 25 bp, Homo sapien
tctcttctgtctggccctgcatcaa

SEQ ID NO: 94421 - DNA, 25 bp, Homo sapien
aattcccagtgctagtgaatagcca

SEQ ID NO: 94422 - DNA, 25 bp, Homo sapien
tgaatagccatatcgtgaaactctg

SEQ ID NO: 94423 - DNA, 25 bp, Homo sapien
gtagatgaagagttatattccatac

SEQ ID NO: 94424 - DNA, 25 bp, Homo sapien
tctgtgatctcggaaaaaaccaagg

SEQ ID NO: 94425 - DNA, 25 bp, Homo sapien
ccatttagcacatctagttctaggt

SEQ ID NO: 94426 - DNA, 25 bp, Homo sapien
tcagacttttaaagcacagggcaag

SEQ ID NO: 94427 - DNA, 25 bp, Homo sapien
cacagcttccaacctaagaatctaa

SEQ ID NO: 94428 - DNA, 25 bp, Homo sapien
tccaacctaagaatctaattgctgc

SEQ ID NO: 94429 - DNA, 25 bp, Homo sapien
gcttccaacctaagaatctaattgc

SEQ ID NO: 94430 - DNA, 25 bp, Homo sapien
caacctaagaatctaattgctgcca

SEQ ID NO: 94431 - DNA, 25 bp, Homo sapien
tgaaggcattcaaacttgtaaccag

SEQ ID NO: 94432 - DNA, 25 bp, Homo sapien
gcatagtttattggtctgccaaggt

SEQ ID NO: 94433 - DNA, 25 bp, Homo sapien
gcacggctaaagtccagtcttgtgg

SEQ ID NO: 94434 - DNA, 25 bp, Homo sapien
gctgagctatatgttgttgaaggca

SEQ ID NO: 94435 - DNA, 25 bp, Homo sapien
agtttagtaccataagggttgtctg

SEQ ID NO: 94436 - DNA, 25 bp, Homo sapien
agtgtttttacagacctcattaagg

SEQ ID NO: 94437 - DNA, 25 bp, Homo sapien
aacattctggagtagtttagtacca

SEQ ID NO: 94438 - DNA, 25 bp, Homo sapien
tgtacttcctgtccaattttgatat

SEQ ID NO: 94439 - DNA, 25 bp, Homo sapien
ctatattagcaatagagcctttccc

SEQ ID NO: 94440 - DNA, 25 bp, Homo sapien
tctatattagcaatagagcctttcc

SEQ ID NO: 94441 - DNA, 25 bp, Homo sapien
ttctatattagcaatagagcctttc

SEQ ID NO: 94442 - DNA, 25 bp, Homo sapien
taaatctgcttttagcaggtcccac

SEQ ID NO: 94443 - DNA, 25 bp, Homo sapien
cacatggtatttgattttaaatctg

SEQ ID NO: 94444 - DNA, 25 bp, Homo sapien
tttaaatctgcttttagcaggtccc

SEQ ID NO: 94445 - DNA, 25 bp, Homo sapien
tttgattttaaatctgcttttagca

SEQ ID NO: 94446 - DNA, 25 bp, Homo sapien
gtgaacatattagccagtggtgcta

SEQ ID NO: 94447 - DNA, 25 bp, Homo sapien
catggctttgccgaagtgcttggtt

SEQ ID NO: 94448 - DNA, 25 bp, Homo sapien
gaatacttcaggatttcacatggct

SEQ ID NO: 94449 - DNA, 25 bp, Homo sapien
cacccttcaagcttttatattgtga

SEQ ID NO: 94450 - DNA, 25 bp, Homo sapien
ccgtttctcatcaggttctgccttt

SEQ ID NO: 94451 - DNA, 25 bp, Homo sapien
acttattcttatagctctcccgttt

SEQ ID NO: 94452 - DNA, 25 bp, Homo sapien
cccgtttctcatcaggttctgcctt

SEQ ID NO: 94453 - DNA, 25 bp, Homo sapien
cgtttctcatcaggttctgcctttg

SEQ ID NO: 94454 - DNA, 25 bp, Homo sapien
accccacattcacagttagaaattt

SEQ ID NO: 94455 - DNA, 25 bp, Homo sapien
gcttgaatgaaaaagcgttcaaagt

SEQ ID NO: 94456 - DNA, 25 bp, Homo sapien
ccacattcacagttagaaatttgct

SEQ ID NO: 94457 - DNA, 25 bp, Homo sapien
cttgaatgaaaaagcgttcaaagta

SEQ ID NO: 94458 - DNA, 25 bp, Homo sapien
tagtgcccatattatctactgggag

SEQ ID NO: 94459 - DNA, 25 bp, Homo sapien
gatatctggagtaaattgatctgag

SEQ ID NO: 94460 - DNA, 25 bp, Homo sapien
tatattaggttggatcttagtgccc

SEQ ID NO: 94461 - DNA, 25 bp, Homo sapien
aaagctttttatcctgatatctgga

SEQ ID NO: 94462 - DNA, 25 bp, Homo sapien
ctgataacggattctttcactgtta

SEQ ID NO: 94463 - DNA, 25 bp, Homo sapien
tcttctcttacaataagaagaccag

SEQ ID NO: 94464 - DNA, 25 bp, Homo sapien
cctatgttctgataacggattcttt

SEQ ID NO: 94465 - DNA, 25 bp, Homo sapien
ggatattctgcctcactatcagttt

SEQ ID NO: 94466 - DNA, 25 bp, Homo sapien
tgacccagagtgtaaaggtcttgag

SEQ ID NO: 94467 - DNA, 25 bp, Homo sapien
cttgaggattatcttcatcagtatt

SEQ ID NO: 94468 - DNA, 25 bp, Homo sapien
tcagtattacctgaatacaagcctt

SEQ ID NO: 94469 - DNA, 25 bp, Homo sapien
cagccatcttggaactgacccagag

SEQ ID NO: 94470 - DNA, 25 bp, Homo sapien
tttctggagctttaaaaggaatcat

SEQ ID NO: 94471 - DNA, 25 bp, Homo sapien
atttctggagctttaaaaggaatca

SEQ ID NO: 94472 - DNA, 25 bp, Homo sapien
catattaattgcagagtagggcttc

SEQ ID NO: 94473 - DNA, 25 bp, Homo sapien
gaaggatggattatgggtttttcaa

SEQ ID NO: 94474 - DNA, 25 bp, Homo sapien
gtttttcaatttgcatcaggcatat

SEQ ID NO: 94475 - DNA, 25 bp, Homo sapien
caacagagaaggatggattatgggt

SEQ ID NO: 94476 - DNA, 25 bp, Homo sapien
tgtcatgtcctatgtttactcctag

SEQ ID NO: 94477 - DNA, 25 bp, Homo sapien
gggatatgaatctacccatgtcatt

SEQ ID NO: 94478 - DNA, 25 bp, Homo sapien
tactcctagagcctttgtggtttta

SEQ ID NO: 94479 - DNA, 25 bp, Homo sapien
gaaaataatcttacacgcagtaggg

SEQ ID NO: 94480 - DNA, 25 bp, Homo sapien
tctaataggtgaaagagtattgata

SEQ ID NO: 94481 - DNA, 25 bp, Homo sapien
ttcacgccattctgggatcactgca

SEQ ID NO: 94482 - DNA, 25 bp, Homo sapien
tggaagtacctatttctctatatgt

SEQ ID NO: 94483 - DNA, 25 bp, Homo sapien
tattatggttgaacttgaatatgct

SEQ ID NO: 94484 - DNA, 25 bp, Homo sapien
acagaaagattgtaagaggtcagca

SEQ ID NO: 94485 - DNA, 25 bp, Homo sapien
cagaaagattgtaagaggtcagcaa

SEQ ID NO: 94486 - DNA, 25 bp, Homo sapien
aaatattactcacagaatcagtagc

SEQ ID NO: 94487 - DNA, 25 bp, Homo sapien
ttactcacagaatcagtagcattca

SEQ ID NO: 94488 - DNA, 25 bp, Homo sapien
tattactcacagaatcagtagcatt

SEQ ID NO: 94489 - DNA, 25 bp, Homo sapien
aatattactcacagaatcagtagca

SEQ ID NO: 94490 - DNA, 25 bp, Homo sapien
ttgccagatcgctaatcagttttgt

SEQ ID NO: 94491 - DNA, 25 bp, Homo sapien
gtttgccagatcgctaatcagtttt

SEQ ID NO: 94492 - DNA, 25 bp, Homo sapien
cagcacaatatttacacagatcatt

SEQ ID NO: 94493 - DNA, 25 bp, Homo sapien
agcacaatatttacacagatcatta

SEQ ID NO: 94494 - DNA, 25 bp, Homo sapien
ttgcattctgcggtttgttagcagc

SEQ ID NO: 94495 - DNA, 25 bp, Homo sapien
tctgtttgcattctgcggtttgtta

SEQ ID NO: 94496 - DNA, 25 bp, Homo sapien
tctgcggtttgttagcagcaatgac

SEQ ID NO: 94497 - DNA, 25 bp, Homo sapien
gcattctgcggtttgttagcagcaa

SEQ ID NO: 94498 - DNA, 25 bp, Homo sapien
tgtttccaagttcaacgtcctgcag

SEQ ID NO: 94499 - DNA, 25 bp, Homo sapien
cttctctggtcgctaagcaactgac

SEQ ID NO: 94500 - DNA, 25 bp, Homo sapien
ctctacttctctggtcgctaagcaa

SEQ ID NO: 94501 - DNA, 25 bp, Homo sapien
ttccaagttcaacgtcctgcagcaa

SEQ ID NO: 94502 - DNA, 25 bp, Homo sapien
ttgagtttgatatgaaatttagtgc

SEQ ID NO: 94503 - DNA, 25 bp, Homo sapien
gctatgtagtagttaattgagtttg

SEQ ID NO: 94504 - DNA, 25 bp, Homo sapien
tgactaatgcagctatttcacacag

SEQ ID NO: 94505 - DNA, 25 bp, Homo sapien
gtgctggaaagttaatgactaatgc

SEQ ID NO: 94506 - DNA, 25 bp, Homo sapien
gattattgctcgagatctgtaactt

SEQ ID NO: 94507 - DNA, 25 bp, Homo sapien
caagttgattattgctcgagatctg

SEQ ID NO: 94508 - DNA, 25 bp, Homo sapien
agcagcatgagttcaagttgattat

SEQ ID NO: 94509 - DNA, 25 bp, Homo sapien
gagttcaagttgattattgctcgag

SEQ ID NO: 94510 - DNA, 25 bp, Homo sapien
aaagcttccgttgtcttagtagcgc

SEQ ID NO: 94511 - DNA, 25 bp, Homo sapien
ttagtagcgcagatgcctccaagag

SEQ ID NO: 94512 - DNA, 25 bp, Homo sapien
gttgtcttagtagcgcagatgcctc

SEQ ID NO: 94513 - DNA, 25 bp, Homo sapien
tccgttgtcttagtagcgcagatgc

SEQ ID NO: 94514 - DNA, 25 bp, Homo sapien
gactaaactaatgtctgcagaacaa

SEQ ID NO: 94515 - DNA, 25 bp, Homo sapien
caggtgcaggactaaactaatgtct

SEQ ID NO: 94516 - DNA, 25 bp, Homo sapien
agggtccaggtgcaggactaaacta

SEQ ID NO: 94517 - DNA, 25 bp, Homo sapien
caggactaaactaatgtctgcagaa

SEQ ID NO: 94518 - DNA, 25 bp, Homo sapien
cctctgacggtgaagccaatggttt

SEQ ID NO: 94519 - DNA, 25 bp, Homo sapien
gttaagagaatcacctctgacggtg

SEQ ID NO: 94520 - DNA, 25 bp, Homo sapien
cggtgaagccaatggtttctgggtt

SEQ ID NO: 94521 - DNA, 25 bp, Homo sapien
ccttccactccaagttaagagaatc

SEQ ID NO: 94522 - DNA, 25 bp, Homo sapien
ctactgatattgctacttttactga

SEQ ID NO: 94523 - DNA, 25 bp, Homo sapien
agagctgctgatcttctccattcac

SEQ ID NO: 94524 - DNA, 25 bp, Homo sapien
caggcaatcagagctgctgatcttc

SEQ ID NO: 94525 - DNA, 25 bp, Homo sapien
ttcacttgctactgatattgctact

SEQ ID NO: 94526 - DNA, 25 bp, Homo sapien
tggagtgtgccttcaaacatccggc

SEQ ID NO: 94527 - DNA, 25 bp, Homo sapien
gatgtaccgggcttgtctctgggcc

SEQ ID NO: 94528 - DNA, 25 bp, Homo sapien
agactgtgcagaagcacgctggagt

SEQ ID NO: 94529 - DNA, 25 bp, Homo sapien
ttagtggtcgggcaacaactggtta

SEQ ID NO: 94530 - DNA, 25 bp, Homo sapien
ttttaaatcttgaatcttagaggtc

SEQ ID NO: 94531 - DNA, 25 bp, Homo sapien
ttaaatcttgaatcttagaggtcac

SEQ ID NO: 94532 - DNA, 25 bp, Homo sapien
tcatttttaaatcttgaatcttaga

SEQ ID NO: 94533 - DNA, 25 bp, Homo sapien
atttttaaatcttgaatcttagagg

SEQ ID NO: 94534 - DNA, 25 bp, Homo sapien
cactttccatttgcaaacttttctt

SEQ ID NO: 94535 - DNA, 25 bp, Homo sapien
tcaggcataccaagtttcacacttt

SEQ ID NO: 94536 - DNA, 25 bp, Homo sapien
cacactttccatttgcaaacttttc

SEQ ID NO: 94537 - DNA, 25 bp, Homo sapien
ttcacactttccatttgcaaacttt

SEQ ID NO: 94538 - DNA, 25 bp, Homo sapien
tcttctagtgcattacttcttagat

SEQ ID NO: 94539 - DNA, 25 bp, Homo sapien
tgtattctctactgggtgcttatca

SEQ ID NO: 94540 - DNA, 25 bp, Homo sapien
taattgtcagatgtcccgtgcttct

SEQ ID NO: 94541 - DNA, 25 bp, Homo sapien
cataataggtgagattaattgtcag

SEQ ID NO: 94542 - DNA, 25 bp, Homo sapien
ttaattcttctggtgcaagttcttt

SEQ ID NO: 94543 - DNA, 25 bp, Homo sapien
aattcttctggtgcaagttctttac

SEQ ID NO: 94544 - DNA, 25 bp, Homo sapien
taattcttctggtgcaagttcttta

SEQ ID NO: 94545 - DNA, 25 bp, Homo sapien
ttgctgttctagcagtgccaacttt

SEQ ID NO: 94546 - DNA, 25 bp, Homo sapien
ctcttgctgttctagcagtgccaac

SEQ ID NO: 94547 - DNA, 25 bp, Homo sapien
tctcttgctgttctagcagtgccaa

SEQ ID NO: 94548 - DNA, 25 bp, Homo sapien
gtggtgactaatcccaaatgaagct

SEQ ID NO: 94549 - DNA, 25 bp, Homo sapien
ggctgcaagccaaactctttacagt

SEQ ID NO: 94550 - DNA, 25 bp, Homo sapien
tggttgccctccaccgatttgctaa

SEQ ID NO: 94551 - DNA, 25 bp, Homo sapien
tatttgtggcccttacctccataga

SEQ ID NO: 94552 - DNA, 25 bp, Homo sapien
tgttgtttttatcatgtccctgttg

SEQ ID NO: 94553 - DNA, 25 bp, Homo sapien
ggcaaggtattttgtgctaggtgat

SEQ ID NO: 94554 - DNA, 25 bp, Homo sapien
cttgaagatgagtgtgggtttcgac

SEQ ID NO: 94555 - DNA, 25 bp, Homo sapien
tgtaagcaggaaccatattccctgg

SEQ ID NO: 94556 - DNA, 25 bp, Homo sapien
acccctctggaactccttagctctc

SEQ ID NO: 94557 - DNA, 25 bp, Homo sapien
cccctctggaactccttagctctca

SEQ ID NO: 94558 - DNA, 25 bp, Homo sapien
tgctaccccctttgcaggattgtaa

SEQ ID NO: 94559 - DNA, 25 bp, Homo sapien
ccagatttaggtatgtgtctatggc

SEQ ID NO: 94560 - DNA, 25 bp, Homo sapien
catgtaagacggtgcctgctacccc

SEQ ID NO: 94561 - DNA, 25 bp, Homo sapien
ccctttgcaggattgtaagtttcct

SEQ ID NO: 94562 - DNA, 25 bp, Homo sapien
cagtaaatgtgggatccaatacaac

SEQ ID NO: 94563 - DNA, 25 bp, Homo sapien
tccaatacaacgaaactcagagctt

SEQ ID NO: 94564 - DNA, 25 bp, Homo sapien
aatgtgacgagggccaggtgtccac

SEQ ID NO: 94565 - DNA, 25 bp, Homo sapien
catgattgtgcagaggggttgtacc

SEQ ID NO: 94566 - DNA, 25 bp, Homo sapien
tatgcatatacttactagcctgtcc

SEQ ID NO: 94567 - DNA, 25 bp, Homo sapien
attgattcgtgacctaaagatgaca

SEQ ID NO: 94568 - DNA, 25 bp, Homo sapien
agattataatcttcctgtgacccag

SEQ ID NO: 94569 - DNA, 25 bp, Homo sapien
tatgaatcagattgcctctaccttc

SEQ ID NO: 94570 - DNA, 25 bp, Homo sapien
aagacattcattgtgtatctaaaat

SEQ ID NO: 94571 - DNA, 25 bp, Homo sapien
gacattcattgtgtatctaaaatta

SEQ ID NO: 94572 - DNA, 25 bp, Homo sapien
agttaactagatgtcatggctttac

SEQ ID NO: 94573 - DNA, 25 bp, Homo sapien
aaaagttaactagatgtcatggctt

SEQ ID NO: 94574 - DNA, 25 bp, Homo sapien
cggccatggtggattttacagtagc

SEQ ID NO: 94575 - DNA, 25 bp, Homo sapien
cgcatgtataaaatacgtaagcagc

SEQ ID NO: 94576 - DNA, 25 bp, Homo sapien
tacagtagcttctctgaaaccagtg

SEQ ID NO: 94577 - DNA, 25 bp, Homo sapien
gctgatttgcatgtttcggccatgg

SEQ ID NO: 94578 - DNA, 25 bp, Homo sapien
taatgctaaaattgcaattgtgcac

SEQ ID NO: 94579 - DNA, 25 bp, Homo sapien
aagtgacaagcagtattaaagagaa

SEQ ID NO: 94580 - DNA, 25 bp, Homo sapien
tgctccattgacttggcacgtagct

SEQ ID NO: 94581 - DNA, 25 bp, Homo sapien
ggaaaaccagtacacctgcaaggtg

SEQ ID NO: 94582 - DNA, 25 bp, Homo sapien
agatgtcctacttctgctgtggcta

SEQ ID NO: 94583 - DNA, 25 bp, Homo sapien
aaaagaatcattagcaatctaaatg

SEQ ID NO: 94584 - DNA, 25 bp, Homo sapien
cagtagcagtgtaacagatgtttaa

SEQ ID NO: 94585 - DNA, 25 bp, Homo sapien
tccaagcagatgtcctacttctgct

SEQ ID NO: 94586 - DNA, 25 bp, Homo sapien
cagccaatgattccttttctatttt

SEQ ID NO: 94587 - DNA, 25 bp, Homo sapien
gccaatgattccttttctatttttc

SEQ ID NO: 94588 - DNA, 25 bp, Homo sapien
caatgattccttttctatttttcaa

SEQ ID NO: 94589 - DNA, 25 bp, Homo sapien
atgattccttttctatttttcaatc

SEQ ID NO: 94590 - DNA, 25 bp, Homo sapien
gtgcatactgacgaatttccccaga

SEQ ID NO: 94591 - DNA, 25 bp, Homo sapien
gaagactgcgttcctaccttcccat

SEQ ID NO: 94592 - DNA, 25 bp, Homo sapien
tgtcctcttgggagggattcggaac

SEQ ID NO: 94593 - DNA, 25 bp, Homo sapien
tactgacgaatttccccagaagact

SEQ ID NO: 94594 - DNA, 25 bp, Homo sapien
aaagttgccggtgagtgcatatcta

SEQ ID NO: 94595 - DNA, 25 bp, Homo sapien
tgagtgcatatctaaggtagacaca

SEQ ID NO: 94596 - DNA, 25 bp, Homo sapien
cggtgagtgcatatctaaggtagac

SEQ ID NO: 94597 - DNA, 25 bp, Homo sapien
ttgccggtgagtgcatatctaaggt

SEQ ID NO: 94598 - DNA, 25 bp, Homo sapien
actcagattgttgcaatgaagactg

SEQ ID NO: 94599 - DNA, 25 bp, Homo sapien
gaagactgtatgtttgattatctgg

SEQ ID NO: 94600 - DNA, 25 bp, Homo sapien
tgtttgattatctggatacctgtca

SEQ ID NO: 94601 - DNA, 25 bp, Homo sapien
ttctcctgacaataactcagattgt

SEQ ID NO: 94602 - DNA, 25 bp, Homo sapien
aatgtctgcttctgtcttaatctcc

SEQ ID NO: 94603 - DNA, 25 bp, Homo sapien
gcacatcctacaccatcttcataag

SEQ ID NO: 94604 - DNA, 25 bp, Homo sapien
gttgtttccattttacgcacatcct

SEQ ID NO: 94605 - DNA, 25 bp, Homo sapien
cataattggtgatgtcatctgtgca

SEQ ID NO: 94606 - DNA, 25 bp, Homo sapien
ctttcccattattgctaaagtgcaa

SEQ ID NO: 94607 - DNA, 25 bp, Homo sapien
tttcccattattgctaaagtgcaat

SEQ ID NO: 94608 - DNA, 25 bp, Homo sapien
tgttgcaagctcagaagtaatccac

SEQ ID NO: 94609 - DNA, 25 bp, Homo sapien
gtggccaccccaggatctaacagct

SEQ ID NO: 94610 - DNA, 25 bp, Homo sapien
tccactaacgaaccaagtcagactc

SEQ ID NO: 94611 - DNA, 25 bp, Homo sapien
ataaacacaagtgacgtggccaccc

SEQ ID NO: 94612 - DNA, 25 bp, Homo sapien
tacaatacaccatgactagtatatt

SEQ ID NO: 94613 - DNA, 25 bp, Homo sapien
aatacaatacaccatgactagtata

SEQ ID NO: 94614 - DNA, 25 bp, Homo sapien
aaaatacaatacaccatgactagta

SEQ ID NO: 94615 - DNA, 25 bp, Homo sapien
taaaatacaatacaccatgactagt

SEQ ID NO: 94616 - DNA, 25 bp, Homo sapien
tacaatagtgtgatatataaggcca

SEQ ID NO: 94617 - DNA, 25 bp, Homo sapien
ggtgatcacctaataatcggagact

SEQ ID NO: 94618 - DNA, 25 bp, Homo sapien
cggagacttaattccttataatgca

SEQ ID NO: 94619 - DNA, 25 bp, Homo sapien
aattcaccaatgcagagtgataaag

SEQ ID NO: 94620 - DNA, 25 bp, Homo sapien
agacactctcagcttgattgctata

SEQ ID NO: 94621 - DNA, 25 bp, Homo sapien
gcttgattgctatactctacggatg

SEQ ID NO: 94622 - DNA, 25 bp, Homo sapien
gacactctcagcttgattgctatac

SEQ ID NO: 94623 - DNA, 25 bp, Homo sapien
tctcagcttgattgctatactctac

SEQ ID NO: 94624 - DNA, 25 bp, Homo sapien
ccttcagtagagaccttacaacaac

SEQ ID NO: 94625 - DNA, 25 bp, Homo sapien
tacaacaaccttctgagcgtagacc

SEQ ID NO: 94626 - DNA, 25 bp, Homo sapien
aattggcttgccgatattttactcc

SEQ ID NO: 94627 - DNA, 25 bp, Homo sapien
gagcgtagaccttgcaacaacaatg

SEQ ID NO: 94628 - DNA, 25 bp, Homo sapien
ggactcttaagagtataaaatgcag

SEQ ID NO: 94629 - DNA, 25 bp, Homo sapien
gatagcactcatattgtggaaaaat

SEQ ID NO: 94630 - DNA, 25 bp, Homo sapien
acagttctgactgccctgacttgca

SEQ ID NO: 94631 - DNA, 25 bp, Homo sapien
gaacaaaccacatataagctgcctt

SEQ ID NO: 94632 - DNA, 25 bp, Homo sapien
tactgaagcccgtaattgaaacaac

SEQ ID NO: 94633 - DNA, 25 bp, Homo sapien
tccatgcaaatcatccattatcttg

SEQ ID NO: 94634 - DNA, 25 bp, Homo sapien
ccataaggctctctatcaactctaa

SEQ ID NO: 94635 - DNA, 25 bp, Homo sapien
caacactattttgggcactaaaagt

SEQ ID NO: 94636 - DNA, 25 bp, Homo sapien
tcctgcttgtgatatgaaagctgca

SEQ ID NO: 94637 - DNA, 25 bp, Homo sapien
gaaattatcatgagttcctgcttgt

SEQ ID NO: 94638 - DNA, 25 bp, Homo sapien
gaaagctgcagatggttaattacta

SEQ ID NO: 94639 - DNA, 25 bp, Homo sapien
catgccttagtgagcaggaaattat

SEQ ID NO: 94640 - DNA, 25 bp, Homo sapien
caaaagcttaggagaaagactggta

SEQ ID NO: 94641 - DNA, 25 bp, Homo sapien
gatgctgagtcagctaccaaggagt

SEQ ID NO: 94642 - DNA, 25 bp, Homo sapien
tggtccctgtaggatcagtttaaga

SEQ ID NO: 94643 - DNA, 25 bp, Homo sapien
ccttacttggaactctcttgatgct

SEQ ID NO: 94644 - DNA, 25 bp, Homo sapien
tggtacccccatactttacagtgag

SEQ ID NO: 94645 - DNA, 25 bp, Homo sapien
cccccatactttacagtgagccagg

SEQ ID NO: 94646 - DNA, 25 bp, Homo sapien
cacaccccttttgtaatcatggtac

SEQ ID NO: 94647 - DNA, 25 bp, Homo sapien
tgtaatcatggtacccccatacttt

SEQ ID NO: 94648 - DNA, 25 bp, Homo sapien
aattgaaagaatgttaaggccaggc

SEQ ID NO: 94649 - DNA, 25 bp, Homo sapien
aggctggatagctctcattctctga

SEQ ID NO: 94650 - DNA, 25 bp, Homo sapien
gatagctctcattctctgattggca

SEQ ID NO: 94651 - DNA, 25 bp, Homo sapien
gttaaggccaggctggatagctctc

SEQ ID NO: 94652 - DNA, 25 bp, Homo sapien
ccacatcctgccttcatgatagttt

SEQ ID NO: 94653 - DNA, 25 bp, Homo sapien
gataacctcaaggagaccggcgcca

SEQ ID NO: 94654 - DNA, 25 bp, Homo sapien
caccctcagcaaacctcctggtggc

SEQ ID NO: 94655 - DNA, 25 bp, Homo sapien
atcctgccttcatgatagtttactg

SEQ ID NO: 94656 - DNA, 25 bp, Homo sapien
atgcttttaaaccactatatctcat

SEQ ID NO: 94657 - DNA, 25 bp, Homo sapien
aaacttacaataatgttggaaagca

SEQ ID NO: 94658 - DNA, 25 bp, Homo sapien
cttacaataatgttggaaagcaaag

SEQ ID NO: 94659 - DNA, 25 bp, Homo sapien
tacaataatgttggaaagcaaaggg

SEQ ID NO: 94660 - DNA, 25 bp, Homo sapien
aacttacaataatgttggaaagcaa

SEQ ID NO: 94661 - DNA, 25 bp, Homo sapien
tatgatcatctgcttggtcctctgg

SEQ ID NO: 94662 - DNA, 25 bp, Homo sapien
tgctgtaagaattgagaactctgcc

SEQ ID NO: 94663 - DNA, 25 bp, Homo sapien
tggtctctagcttgtactgcagctc

SEQ ID NO: 94664 - DNA, 25 bp, Homo sapien
ggtcctctggtctctagcttgtact

SEQ ID NO: 94665 - DNA, 25 bp, Homo sapien
actttctcttactgttatttgatag

SEQ ID NO: 94666 - DNA, 25 bp, Homo sapien
ctgacttggctgatcggggttgctg

SEQ ID NO: 94667 - DNA, 25 bp, Homo sapien
gctgttgtcaactatactttctctt

SEQ ID NO: 94668 - DNA, 25 bp, Homo sapien
tctcttactgttatttgatagaagt

SEQ ID NO: 94669 - DNA, 25 bp, Homo sapien
tcaacttctgtctcagcactttgga

SEQ ID NO: 94670 - DNA, 25 bp, Homo sapien
gcagttcttgctttggtcagaagtc

SEQ ID NO: 94671 - DNA, 25 bp, Homo sapien
attgaaacatcttttgcagttcttg

SEQ ID NO: 94672 - DNA, 25 bp, Homo sapien
tgtgggaaggggcattgaaacatct

SEQ ID NO: 94673 - DNA, 25 bp, Homo sapien
tcaaggatccttttgccgtcttggc

SEQ ID NO: 94674 - DNA, 25 bp, Homo sapien
tgtaaatctagactgctttgctgac

SEQ ID NO: 94675 - DNA, 25 bp, Homo sapien
tgctgacctgttagtgtcctcacac

SEQ ID NO: 94676 - DNA, 25 bp, Homo sapien
aatgcccatatgagcagttgtgcca

SEQ ID NO: 94677 - DNA, 25 bp, Homo sapien
tctcacttaaagaacagaggctctt

SEQ ID NO: 94678 - DNA, 25 bp, Homo sapien
agctgagttgtgccactttacttca

SEQ ID NO: 94679 - DNA, 25 bp, Homo sapien
gaacagaggctcttagtggtggctc

SEQ ID NO: 94680 - DNA, 25 bp, Homo sapien
aattactctgtgtagctctcactta

SEQ ID NO: 94681 - DNA, 25 bp, Homo sapien
tccgtttcctctgcactagctaact

SEQ ID NO: 94682 - DNA, 25 bp, Homo sapien
tctgcactagctaactgctgcattg

SEQ ID NO: 94683 - DNA, 25 bp, Homo sapien
ctagctaactgctgcattgaagatt

SEQ ID NO: 94684 - DNA, 25 bp, Homo sapien
cccacacctaaatccgtttcctctg

SEQ ID NO: 94685 - DNA, 25 bp, Homo sapien
gatctggtgaactatattccttcac

SEQ ID NO: 94686 - DNA, 25 bp, Homo sapien
tcagtgatctggtgaactatattcc

SEQ ID NO: 94687 - DNA, 25 bp, Homo sapien
gtgatctggtgaactatattccttc

SEQ ID NO: 94688 - DNA, 25 bp, Homo sapien
cagtgatctggtgaactatattcct

SEQ ID NO: 94689 - DNA, 25 bp, Homo sapien
caatcttaaagtacggcactgctgc

SEQ ID NO: 94690 - DNA, 25 bp, Homo sapien
taaagtacggcactgctgcagcggt

SEQ ID NO: 94691 - DNA, 25 bp, Homo sapien
tctttggcaatcttaaagtacggca

SEQ ID NO: 94692 - DNA, 25 bp, Homo sapien
gcctggttctttggcaatcttaaag

SEQ ID NO: 94693 - DNA, 25 bp, Homo sapien
cgttgtagaaggtctcgatatcttg

SEQ ID NO: 94694 - DNA, 25 bp, Homo sapien
ggcgttgtagaaggtctcgatatct

SEQ ID NO: 94695 - DNA, 25 bp, Homo sapien
gaggcgttgtagaaggtctcgatat

SEQ ID NO: 94696 - DNA, 25 bp, Homo sapien
aggcgttgtagaaggtctcgatatc

SEQ ID NO: 94697 - DNA, 25 bp, Homo sapien
tgtacctcaacccaccccaagattc

SEQ ID NO: 94698 - DNA, 25 bp, Homo sapien
ttcactctggatgtggctaggtagc

SEQ ID NO: 94699 - DNA, 25 bp, Homo sapien
taagatgttcatcccttggcttcct

SEQ ID NO: 94700 - DNA, 25 bp, Homo sapien
cccctcatgctgtacctcaacccac

SEQ ID NO: 94701 - DNA, 25 bp, Homo sapien
tactgctagtaggacgttgctatgg

SEQ ID NO: 94702 - DNA, 25 bp, Homo sapien
catgatttactgaatctttgtaggc

SEQ ID NO: 94703 - DNA, 25 bp, Homo sapien
ttcatcggaagttgtataggctgcc

SEQ ID NO: 94704 - DNA, 25 bp, Homo sapien
gctatggattcgtggttctgctaaa

SEQ ID NO: 94705 - DNA, 25 bp, Homo sapien
gacaacgattgactagacatttaag

SEQ ID NO: 94706 - DNA, 25 bp, Homo sapien
gaagctgatttccaagtcgatctca

SEQ ID NO: 94707 - DNA, 25 bp, Homo sapien
gctctctgccagaagtcggtattat

SEQ ID NO: 94708 - DNA, 25 bp, Homo sapien
gacatagtgccaattccggattctg

SEQ ID NO: 94709 - DNA, 25 bp, Homo sapien
tgaaccggatgtcaatggctcctga

SEQ ID NO: 94710 - DNA, 25 bp, Homo sapien
tccaggtgggctactaagctcattc

SEQ ID NO: 94711 - DNA, 25 bp, Homo sapien
tggctcctgagtagtactccaggtg

SEQ ID NO: 94712 - DNA, 25 bp, Homo sapien
ttaagagaggactcgaggtgatgaa

SEQ ID NO: 94713 - DNA, 25 bp, Homo sapien
ctttctcatgtttatcatcttcctt

SEQ ID NO: 94714 - DNA, 25 bp, Homo sapien
tcatgtttatcatcttcctttgtgc

SEQ ID NO: 94715 - DNA, 25 bp, Homo sapien
atgtttatcatcttcctttgtgccc

SEQ ID NO: 94716 - DNA, 25 bp, Homo sapien
ccctttctcatgtttatcatcttcc

SEQ ID NO: 94717 - DNA, 25 bp, Homo sapien
atttatcttcagtgttaaagtgtaa

SEQ ID NO: 94718 - DNA, 25 bp, Homo sapien
ttatcttcagtgttaaagtgtaaag

SEQ ID NO: 94719 - DNA, 25 bp, Homo sapien
tcatttatcttcagtgttaaagtgt

SEQ ID NO: 94720 - DNA, 25 bp, Homo sapien
atcttcagtgttaaagtgtaaagtc

SEQ ID NO: 94721 - DNA, 25 bp, Homo sapien
gctctctaagtttggcaactctacg

SEQ ID NO: 94722 - DNA, 25 bp, Homo sapien
cattttaggctctctaagtttggca

SEQ ID NO: 94723 - DNA, 25 bp, Homo sapien
taagtttggcaactctacgttgtca

SEQ ID NO: 94724 - DNA, 25 bp, Homo sapien
gcaactctacgttgtcaaaaggaaa

SEQ ID NO: 94725 - DNA, 25 bp, Homo sapien
tttgtatcaacaaactcgcagttct

SEQ ID NO: 94726 - DNA, 25 bp, Homo sapien
gaagtttcacatcttgtggagaatt

SEQ ID NO: 94727 - DNA, 25 bp, Homo sapien
tgaagtttcacatcttgtggagaat

SEQ ID NO: 94728 - DNA, 25 bp, Homo sapien
tcacatcttgtggagaattttgatg

SEQ ID NO: 94729 - DNA, 25 bp, Homo sapien
gtttcacatcttgtggagaattttg

SEQ ID NO: 94730 - DNA, 25 bp, Homo sapien
tgctcgcagaaagaagaaggttcat

SEQ ID NO: 94731 - DNA, 25 bp, Homo sapien
ggttcatagaacagccacaacagat

SEQ ID NO: 94732 - DNA, 25 bp, Homo sapien
tcgccaaactgcaggcataagtgcg

SEQ ID NO: 94733 - DNA, 25 bp, Homo sapien
ctccgagaagatgaaagacgcaatt

SEQ ID NO: 94734 - DNA, 25 bp, Homo sapien
cctgttctgagttacacaagtatgt

SEQ ID NO: 94735 - DNA, 25 bp, Homo sapien
ttctatagctgtaaatgcattaatg

SEQ ID NO: 94736 - DNA, 25 bp, Homo sapien
aatgaagagttccaccaccattgaa

SEQ ID NO: 94737 - DNA, 25 bp, Homo sapien
catggaggataaatgaagagttcca

SEQ ID NO: 94738 - DNA, 25 bp, Homo sapien
gaagacatgaccttctgcaggtttc

SEQ ID NO: 94739 - DNA, 25 bp, Homo sapien
ctgtatctttagtggaattgaagac

SEQ ID NO: 94740 - DNA, 25 bp, Homo sapien
gggctatggatatcaccaattttct

SEQ ID NO: 94741 - DNA, 25 bp, Homo sapien
ttctacagagaagccagttttctag

SEQ ID NO: 94742 - DNA, 25 bp, Homo sapien
agtaaatttagcctgggaaaatcat

SEQ ID NO: 94743 - DNA, 25 bp, Homo sapien
tttagcctgggaaaatcatctgccc

SEQ ID NO: 94744 - DNA, 25 bp, Homo sapien
aatttagcctgggaaaatcatctgc

SEQ ID NO: 94745 - DNA, 25 bp, Homo sapien
gcctgggaaaatcatctgccctcat

SEQ ID NO: 94746 - DNA, 25 bp, Homo sapien
tgcagattctgctgcgatccccgct

SEQ ID NO: 94747 - DNA, 25 bp, Homo sapien
gattctgctgcgatccccgctctgg

SEQ ID NO: 94748 - DNA, 25 bp, Homo sapien
gcgatccccgctctggccctccagg

SEQ ID NO: 94749 - DNA, 25 bp, Homo sapien
ctgcgatccccgctctggccctcca

SEQ ID NO: 94750 - DNA, 25 bp, Homo sapien
gagcttgcccgacgctcctttgttg

SEQ ID NO: 94751 - DNA, 25 bp, Homo sapien
ccagaggccttgattctaggcgtca

SEQ ID NO: 94752 - DNA, 25 bp, Homo sapien
tcctttgttgcagacgcttgccgaa

SEQ ID NO: 94753 - DNA, 25 bp, Homo sapien
gcttgccgaacgcaatcgagccaga

SEQ ID NO: 94754 - DNA, 25 bp, Homo sapien
tgcgagcgatcaccctggaaatatt

SEQ ID NO: 94755 - DNA, 25 bp, Homo sapien
taatccgaattggaagcgggtagct

SEQ ID NO: 94756 - DNA, 25 bp, Homo sapien
ggaacgtggatctcacagtcccagc

SEQ ID NO: 94757 - DNA, 25 bp, Homo sapien
ccaaccctgagtgctgctggaaagc

SEQ ID NO: 94758 - DNA, 25 bp, Homo sapien
cggggccgctcagtagtgggcgcct

SEQ ID NO: 94759 - DNA, 25 bp, Homo sapien
gggccgctcagtagtgggcgcctct

SEQ ID NO: 94760 - DNA, 25 bp, Homo sapien
ccgctcagtagtgggcgcctctgat

SEQ ID NO: 94761 - DNA, 25 bp, Homo sapien
gccgctcagtagtgggcgcctctga

SEQ ID NO: 94762 - DNA, 25 bp, Homo sapien
agaggcgaggcactacttttccgag

SEQ ID NO: 94763 - DNA, 25 bp, Homo sapien
cctttgtaggtaatagtctagcgca

SEQ ID NO: 94764 - DNA, 25 bp, Homo sapien
taattttccgagctacaggcgcaca

SEQ ID NO: 94765 - DNA, 25 bp, Homo sapien
tagggccaatagctcacatttccgg

SEQ ID NO: 94766 - DNA, 25 bp, Homo sapien
agtcatgtagcaaaagcagcaacca

SEQ ID NO: 94767 - DNA, 25 bp, Homo sapien
ctggcaagtcatgtagcaaaagcag

SEQ ID NO: 94768 - DNA, 25 bp, Homo sapien
catgtagcaaaagcagcaaccaccc

SEQ ID NO: 94769 - DNA, 25 bp, Homo sapien
gcaagtcatgtagcaaaagcagcaa

SEQ ID NO: 94770 - DNA, 25 bp, Homo sapien
gcgcgggagcgggacagcggcgcgg

SEQ ID NO: 94771 - DNA, 25 bp, Homo sapien
agcagcgcagttggaccgcaggctc

SEQ ID NO: 94772 - DNA, 25 bp, Homo sapien
cgcgggagcgggacagcggcgcggc

SEQ ID NO: 94773 - DNA, 25 bp, Homo sapien
ccggcagcagcgcagttggaccgca

SEQ ID NO: 94774 - DNA, 25 bp, Homo sapien
ctctttcctatctcccatgtccagc

SEQ ID NO: 94775 - DNA, 25 bp, Homo sapien
ctttcctatctcccatgtccagcat

SEQ ID NO: 94776 - DNA, 25 bp, Homo sapien
tctttcctatctcccatgtccagca

SEQ ID NO: 94777 - DNA, 25 bp, Homo sapien
tggtggttgtcgttctggaccgcct

SEQ ID NO: 94778 - DNA, 25 bp, Homo sapien
cctcgggcaccaggctgttgatgct

SEQ ID NO: 94779 - DNA, 25 bp, Homo sapien
tgtggtggccgtggctcgcgtggtg

SEQ ID NO: 94780 - DNA, 25 bp, Homo sapien
ccaggctgttgatgctgaacgagga

SEQ ID NO: 94781 - DNA, 25 bp, Homo sapien
cgctttagccccgtccagggcggcg

SEQ ID NO: 94782 - DNA, 25 bp, Homo sapien
gcgccggcgcccttctccttctcgt

SEQ ID NO: 94783 - DNA, 25 bp, Homo sapien
gccgcccagcccgtccgctttagcc

SEQ ID NO: 94784 - DNA, 25 bp, Homo sapien
tcgtccggcccgacgggcgccagct

SEQ ID NO: 94785 - DNA, 25 bp, Homo sapien
gagcgcgttgtagctgaacggcggc

SEQ ID NO: 94786 - DNA, 25 bp, Homo sapien
gttgtagctgaacggcggcttctcg

SEQ ID NO: 94787 - DNA, 25 bp, Homo sapien
atgagcgcgttgtagctgaacggcg

SEQ ID NO: 94788 - DNA, 25 bp, Homo sapien
cgcgttgtagctgaacggcggcttc

SEQ ID NO: 94789 - DNA, 25 bp, Homo sapien
gccgttgtaactcaaagtgctgctg

SEQ ID NO: 94790 - DNA, 25 bp, Homo sapien
tcgacgggtccagcatccagtagtt

SEQ ID NO: 94791 - DNA, 25 bp, Homo sapien
cacttgttgagggacagattgtggc

SEQ ID NO: 94792 - DNA, 25 bp, Homo sapien
tcttcatgatgaactcgtagatgcc

SEQ ID NO: 94793 - DNA, 25 bp, Homo sapien
tgtagggcatggggtggctggggta

SEQ ID NO: 94794 - DNA, 25 bp, Homo sapien
gggcatggggtggctggggtaggcc

SEQ ID NO: 94795 - DNA, 25 bp, Homo sapien
ctgtagggcatggggtggctggggt

SEQ ID NO: 94796 - DNA, 25 bp, Homo sapien
catggggtggctggggtaggccgac

SEQ ID NO: 94797 - DNA, 25 bp, Homo sapien
tgctctgcgaagtcattgacgggtg

SEQ ID NO: 94798 - DNA, 25 bp, Homo sapien
tggcgtacgggatctccccgttgac

SEQ ID NO: 94799 - DNA, 25 bp, Homo sapien
tggcgctcatggacgtgctgctctg

SEQ ID NO: 94800 - DNA, 25 bp, Homo sapien
cagcgagttctgagtcaacacggag

SEQ ID NO: 94801 - DNA, 25 bp, Homo sapien
ggcaaagagggtcttaaagactcac

SEQ ID NO: 94802 - DNA, 25 bp, Homo sapien
ttggcaaagagggtcttaaagactc

SEQ ID NO: 94803 - DNA, 25 bp, Homo sapien
ggaagaagacccctgattttgatgt

SEQ ID NO: 94804 - DNA, 25 bp, Homo sapien
gaagacccctgattttgatgtgtga

SEQ ID NO: 94805 - DNA, 25 bp, Homo sapien
taaaagtgacctgttagtgaccaca

SEQ ID NO: 94806 - DNA, 25 bp, Homo sapien
cacatggaaatctggcggctcttag

SEQ ID NO: 94807 - DNA, 25 bp, Homo sapien
gacaaacacgggcatatgaccacag

SEQ ID NO: 94808 - DNA, 25 bp, Homo sapien
taggttgttctcaaggtctgcgtcc

SEQ ID NO: 94809 - DNA, 25 bp, Homo sapien
tgccaagctctattaacaatatacc

SEQ ID NO: 94810 - DNA, 25 bp, Homo sapien
ggcattctattaatggatttggaaa

SEQ ID NO: 94811 - DNA, 25 bp, Homo sapien
agcgcaaattgtacctgaactgaag

SEQ ID NO: 94812 - DNA, 25 bp, Homo sapien
tgtgtgcattatagtcacttctatc

SEQ ID NO: 94813 - DNA, 25 bp, Homo sapien
tatatccaccttcgtgtctagtaca

SEQ ID NO: 94814 - DNA, 25 bp, Homo sapien
tattatatgccatgccagactgtca

SEQ ID NO: 94815 - DNA, 25 bp, Homo sapien
tgagatgttcatattgggcttcagg

SEQ ID NO: 94816 - DNA, 25 bp, Homo sapien
tacaacccgttcgatgcaaaaatgt

SEQ ID NO: 94817 - DNA, 25 bp, Homo sapien
ggttatctggtgaagtaggaatgta

SEQ ID NO: 94818 - DNA, 25 bp, Homo sapien
aatgtacaggaaccccgccctctag

SEQ ID NO: 94819 - DNA, 25 bp, Homo sapien
tgaagtaggaatgtacaggaacccc

SEQ ID NO: 94820 - DNA, 25 bp, Homo sapien
tggtgaagtaggaatgtacaggaac

SEQ ID NO: 94821 - DNA, 25 bp, Homo sapien
cctgcttgttggaatggctgcgcag

SEQ ID NO: 94822 - DNA, 25 bp, Homo sapien
gcttgttggaatggctgcgcagatt

SEQ ID NO: 94823 - DNA, 25 bp, Homo sapien
tggctgcgcagattttcatgctgga

SEQ ID NO: 94824 - DNA, 25 bp, Homo sapien
ggaatggctgcgcagattttcatgc

SEQ ID NO: 94825 - DNA, 25 bp, Homo sapien
tccagtcctgatatccttttcctcg

SEQ ID NO: 94826 - DNA, 25 bp, Homo sapien
ggatcttgctgtaagagccattcca

SEQ ID NO: 94827 - DNA, 25 bp, Homo sapien
atccttcggacaacctcaggcagag

SEQ ID NO: 94828 - DNA, 25 bp, Homo sapien
tgatatccttttcctcggcatcctt

SEQ ID NO: 94829 - DNA, 25 bp, Homo sapien
tgttcctttgccgtgtctacatcct

SEQ ID NO: 94830 - DNA, 25 bp, Homo sapien
ctccatgttcctttgccgtgtctac

SEQ ID NO: 94831 - DNA, 25 bp, Homo sapien
ttgccgtgtctacatccttttgacc

SEQ ID NO: 94832 - DNA, 25 bp, Homo sapien
cctttgccgtgtctacatccttttg

SEQ ID NO: 94833 - DNA, 25 bp, Homo sapien
taccgacgtctcctaagtgtgcatt

SEQ ID NO: 94834 - DNA, 25 bp, Homo sapien
taattaataggacaccgcgacgaga

SEQ ID NO: 94835 - DNA, 25 bp, Homo sapien
gacgagagtcccaaattcgcttcgg

SEQ ID NO: 94836 - DNA, 25 bp, Homo sapien
ctgaggcgccgggaaaagctaatta

SEQ ID NO: 94837 - DNA, 25 bp, Homo sapien
aaaggtagggaagcgcgccagccaa

SEQ ID NO: 94838 - DNA, 25 bp, Homo sapien
ggaaaaggtagggaagcgcgccagc

SEQ ID NO: 94839 - DNA, 25 bp, Homo sapien
tagggaagcgcgccagccaaggttc

SEQ ID NO: 94840 - DNA, 25 bp, Homo sapien
agggaagcgcgccagccaaggttct

SEQ ID NO: 94841 - DNA, 25 bp, Homo sapien
ttttatctactagctgagaagtgct

SEQ ID NO: 94842 - DNA, 25 bp, Homo sapien
cctgtgagatccctgcaccttggac

SEQ ID NO: 94843 - DNA, 25 bp, Homo sapien
gaggagaagagatgtccattacaga

SEQ ID NO: 94844 - DNA, 25 bp, Homo sapien
tgagatctgaaaccgcaccgggtaa

SEQ ID NO: 94845 - DNA, 25 bp, Homo sapien
tgcaagatagggaagataggaccga

SEQ ID NO: 94846 - DNA, 25 bp, Homo sapien
tagtcttcgtgctcaatcaacggaa

SEQ ID NO: 94847 - DNA, 25 bp, Homo sapien
gaatcaaaaacgtctacgcaggaag

SEQ ID NO: 94848 - DNA, 25 bp, Homo sapien
gccagcggagtaggcaaattcaacc

SEQ ID NO: 94849 - DNA, 25 bp, Homo sapien
agcaagcaccagtatgtgatgagtt

SEQ ID NO: 94850 - DNA, 25 bp, Homo sapien
ttagcaagcaccagtatgtgatgag

SEQ ID NO: 94851 - DNA, 25 bp, Homo sapien
tagcaagcaccagtatgtgatgagt

SEQ ID NO: 94852 - DNA, 25 bp, Homo sapien
gcaagcaccagtatgtgatgagttt

SEQ ID NO: 94853 - DNA, 25 bp, Homo sapien
gagggtaacttcatcatgccaatgg

SEQ ID NO: 94854 - DNA, 25 bp, Homo sapien
aatggatctgtcaagtgtgtttcgc

SEQ ID NO: 94855 - DNA, 25 bp, Homo sapien
gggttgccataattcactatcaggt

SEQ ID NO: 94856 - DNA, 25 bp, Homo sapien
tcagtacactatggaagctctcaca

SEQ ID NO: 94857 - DNA, 25 bp, Homo sapien
gggactgagcggctccacctcttac

SEQ ID NO: 94858 - DNA, 25 bp, Homo sapien
tgtctgcagccacccgcgggactga

SEQ ID NO: 94859 - DNA, 25 bp, Homo sapien
tttcaggaaaactcgccagggtgag

SEQ ID NO: 94860 - DNA, 25 bp, Homo sapien
gctgacgctaaggataagtagtttc

SEQ ID NO: 94861 - DNA, 25 bp, Homo sapien
gtcctacaaggaccacgtcgtcgct

SEQ ID NO: 94862 - DNA, 25 bp, Homo sapien
gatgctctggaatctcaatctcgac

SEQ ID NO: 94863 - DNA, 25 bp, Homo sapien
cgtcgtcgctacgttaacttcaagg

SEQ ID NO: 94864 - DNA, 25 bp, Homo sapien
tataagtcccgttcatccgatgctc

SEQ ID NO: 94865 - DNA, 25 bp, Homo sapien
aaaggcttggaacgagggacagcaa

SEQ ID NO: 94866 - DNA, 25 bp, Homo sapien
ttcgggttcattcacaggaaaggct

SEQ ID NO: 94867 - DNA, 25 bp, Homo sapien
gctttgcacactcattaaaacgatt

SEQ ID NO: 94868 - DNA, 25 bp, Homo sapien
taaaacgattattcacgacctgtcg

SEQ ID NO: 94869 - DNA, 25 bp, Homo sapien
gaaaattggactcccgcgtgtcaga

SEQ ID NO: 94870 - DNA, 25 bp, Homo sapien
gaaatggtactgacatcactttgca

SEQ ID NO: 94871 - DNA, 25 bp, Homo sapien
caatcggatttggtcagggtacaag

SEQ ID NO: 94872 - DNA, 25 bp, Homo sapien
ttccgaaaggcaatggaaatggtac

SEQ ID NO: 94873 - DNA, 25 bp, Homo sapien
cttttattgtttctttttctgtcat

SEQ ID NO: 94874 - DNA, 25 bp, Homo sapien
tgcttttattgtttctttttctgtc

SEQ ID NO: 94875 - DNA, 25 bp, Homo sapien
tactttgaaataactgcttttattg

SEQ ID NO: 94876 - DNA, 25 bp, Homo sapien
ctttgaaataactgcttttattgtt

SEQ ID NO: 94877 - DNA, 25 bp, Homo sapien
gacgcgatcgcagaaagcggtcact

SEQ ID NO: 94878 - DNA, 25 bp, Homo sapien
tccgaagaggttcctaaatgtggct

SEQ ID NO: 94879 - DNA, 25 bp, Homo sapien
cagggttttcttaggcgaattggcg

SEQ ID NO: 94880 - DNA, 25 bp, Homo sapien
tgaactgccccgctaatgcggagcg

SEQ ID NO: 94881 - DNA, 25 bp, Homo sapien
tctggataaacttaggaacctgtct

SEQ ID NO: 94882 - DNA, 25 bp, Homo sapien
tctgattgacaacagcacactgatg

SEQ ID NO: 94883 - DNA, 25 bp, Homo sapien
ttagaccctggaagatactgtagag

SEQ ID NO: 94884 - DNA, 25 bp, Homo sapien
tctggagacacatcatgagcactgt

SEQ ID NO: 94885 - DNA, 25 bp, Homo sapien
taagcaaatgccaagaggagtgcct

SEQ ID NO: 94886 - DNA, 25 bp, Homo sapien
ggtaccaatggtaggcaacaactgc

SEQ ID NO: 94887 - DNA, 25 bp, Homo sapien
tgctgccacagtgccgtgaacttca

SEQ ID NO: 94888 - DNA, 25 bp, Homo sapien
taagactaattaatccactgggtgc

SEQ ID NO: 94889 - DNA, 25 bp, Homo sapien
tattaattcacaatagtagtggcct

SEQ ID NO: 94890 - DNA, 25 bp, Homo sapien
gagtagggaattcttacgctgtttc

SEQ ID NO: 94891 - DNA, 25 bp, Homo sapien
ggtcctaccatgttgacttagttgg

SEQ ID NO: 94892 - DNA, 25 bp, Homo sapien
gaacacagctactttgacagctaaa

SEQ ID NO: 94893 - DNA, 25 bp, Homo sapien
catactggatactttacaccctgac

SEQ ID NO: 94894 - DNA, 25 bp, Homo sapien
aagaaagtttttgactctatggcca

SEQ ID NO: 94895 - DNA, 25 bp, Homo sapien
gaaaaggctagcaagaaaacctgaa

SEQ ID NO: 94896 - DNA, 25 bp, Homo sapien
tcaagtcaagcctggacaccatggc

SEQ ID NO: 94897 - DNA, 25 bp, Homo sapien
tgctgttgtgtatccatcacttgag

SEQ ID NO: 94898 - DNA, 25 bp, Homo sapien
taatgcattcacttactaactggct

SEQ ID NO: 94899 - DNA, 25 bp, Homo sapien
gaatatttcgacatgcctttgccta

SEQ ID NO: 94900 - DNA, 25 bp, Homo sapien
tgtagagccctactaactcagggaa

SEQ ID NO: 94901 - DNA, 25 bp, Homo sapien
tctgcttcctctttaaccagtatcc

SEQ ID NO: 94902 - DNA, 25 bp, Homo sapien
gcttcctctttaaccagtatcctta

SEQ ID NO: 94903 - DNA, 25 bp, Homo sapien
tcctctttaaccagtatccttaaca

SEQ ID NO: 94904 - DNA, 25 bp, Homo sapien
ctcagtttctaagcagtcactcaac

SEQ ID NO: 94905 - DNA, 25 bp, Homo sapien
caggagttggagaaccgctaggcca

SEQ ID NO: 94906 - DNA, 25 bp, Homo sapien
gagtgttggcgggtcgcggtggctc

SEQ ID NO: 94907 - DNA, 25 bp, Homo sapien
catggacacaggaactggtgaactt

SEQ ID NO: 94908 - DNA, 25 bp, Homo sapien
ccaagttcttagcacagcactgttg

SEQ ID NO: 94909 - DNA, 25 bp, Homo sapien
tcaggacttctgtttctagtcaagg

SEQ ID NO: 94910 - DNA, 25 bp, Homo sapien
agtcaaggaaagatgtagaaaatct

SEQ ID NO: 94911 - DNA, 25 bp, Homo sapien
tcaaggaaagatgtagaaaatcttt

SEQ ID NO: 94912 - DNA, 25 bp, Homo sapien
ggacttctgtttctagtcaaggaaa

SEQ ID NO: 94913 - DNA, 25 bp, Homo sapien
tagatgcctcattaacttgattcag

SEQ ID NO: 94914 - DNA, 25 bp, Homo sapien
cctccctcttcagatttttgataga

SEQ ID NO: 94915 - DNA, 25 bp, Homo sapien
tatagacaacgttctttttgcaatg

SEQ ID NO: 94916 - DNA, 25 bp, Homo sapien
ctaatacatcccaatcagactgaat

SEQ ID NO: 94917 - DNA, 25 bp, Homo sapien
tcaggtgcttttattcagtgtggaa

SEQ ID NO: 94918 - DNA, 25 bp, Homo sapien
ggtgcttttattcagtgtggaaata

SEQ ID NO: 94919 - DNA, 25 bp, Homo sapien
gcctctggcctcctgacgttatatt

SEQ ID NO: 94920 - DNA, 25 bp, Homo sapien
caggtgcttttattcagtgtggaaa

SEQ ID NO: 94921 - DNA, 25 bp, Homo sapien
aaactatactttatggacacatggc

SEQ ID NO: 94922 - DNA, 25 bp, Homo sapien
tgcaatgtccatctagggtccttca

SEQ ID NO: 94923 - DNA, 25 bp, Homo sapien
gatgtcctcccacctacaatgctgg

SEQ ID NO: 94924 - DNA, 25 bp, Homo sapien
caatgctggtacaacctctaggtcc

SEQ ID NO: 94925 - DNA, 25 bp, Homo sapien
gcaggacaagtaatggcccaaggaa

SEQ ID NO: 94926 - DNA, 25 bp, Homo sapien
cacgttatgtaaatcacggatcaaa

SEQ ID NO: 94927 - DNA, 25 bp, Homo sapien
taagcacctattccaagtggcagga

SEQ ID NO: 94928 - DNA, 25 bp, Homo sapien
gcccaaggaagatatcatgccccaa

SEQ ID NO: 94929 - DNA, 25 bp, Homo sapien
tctcatatcaatctgactaccagtc

SEQ ID NO: 94930 - DNA, 25 bp, Homo sapien
tgttttgctggagtaaatcctcaag

SEQ ID NO: 94931 - DNA, 25 bp, Homo sapien
cattaagcttttagtctgttgcaaa

SEQ ID NO: 94932 - DNA, 25 bp, Homo sapien
acccaaagtctgtatagcattaagc

SEQ ID NO: 94933 - DNA, 25 bp, Homo sapien
cagtgacttcatcccttcaccacca

SEQ ID NO: 94934 - DNA, 25 bp, Homo sapien
tttcagtaaaggcatctgtgtcttc

SEQ ID NO: 94935 - DNA, 25 bp, Homo sapien
cacagggttgggcaagttctgaata

SEQ ID NO: 94936 - DNA, 25 bp, Homo sapien
agttctgaatatcgcctctgtgaca

SEQ ID NO: 94937 - DNA, 25 bp, Homo sapien
gaaaaacaagtttgacatagtaggc

SEQ ID NO: 94938 - DNA, 25 bp, Homo sapien
tctgttgccggagaggatttggtcc

SEQ ID NO: 94939 - DNA, 25 bp, Homo sapien
gatttggtccaacaaccagtaggcc

SEQ ID NO: 94940 - DNA, 25 bp, Homo sapien
gatgctggttctggagcctgtacca

SEQ ID NO: 94941 - DNA, 25 bp, Homo sapien
ggtcatattgccacacctagcaaat

SEQ ID NO: 94942 - DNA, 25 bp, Homo sapien
tatacctctttgaaccatactgtgc

SEQ ID NO: 94943 - DNA, 25 bp, Homo sapien
tgtgccaccgaactgcaggaaatgc

SEQ ID NO: 94944 - DNA, 25 bp, Homo sapien
tcactggtcatattgccacacctag

SEQ ID NO: 94945 - DNA, 25 bp, Homo sapien
gcccctcatgtacactactttctat

SEQ ID NO: 94946 - DNA, 25 bp, Homo sapien
gacacaatcccttgtgaatttgatc

SEQ ID NO: 94947 - DNA, 25 bp, Homo sapien
tctgaaaacagtgacaaggattaat

SEQ ID NO: 94948 - DNA, 25 bp, Homo sapien
cagtgacaaggattaatatgtttct

SEQ ID NO: 94949 - DNA, 25 bp, Homo sapien
acaggtttatttctgtcacagcgtt

SEQ ID NO: 94950 - DNA, 25 bp, Homo sapien
acaaatttagccagcagcaaacctc

SEQ ID NO: 94951 - DNA, 25 bp, Homo sapien
gtacaaatttagccagcagcaaacc

SEQ ID NO: 94952 - DNA, 25 bp, Homo sapien
caaatttagccagcagcaaacctca

SEQ ID NO: 94953 - DNA, 25 bp, Homo sapien
tacaaatttagccagcagcaaacct

SEQ ID NO: 94954 - DNA, 25 bp, Homo sapien
gtagataattggtctgtgaagttca

SEQ ID NO: 94955 - DNA, 25 bp, Homo sapien
cagcaggggctggtatttgtttgtt

SEQ ID NO: 94956 - DNA, 25 bp, Homo sapien
aaactcccatgattccaagtagata

SEQ ID NO: 94957 - DNA, 25 bp, Homo sapien
tgaagttcatggcagaatctgaatt

SEQ ID NO: 94958 - DNA, 25 bp, Homo sapien
tcattttagccccatagcaggcttc

SEQ ID NO: 94959 - DNA, 25 bp, Homo sapien
cattttagccccatagcaggcttct

SEQ ID NO: 94960 - DNA, 25 bp, Homo sapien
aagtgtaaccaaactgtgctaagtg

SEQ ID NO: 94961 - DNA, 25 bp, Homo sapien
gacaaagtgtaaccaaactgtgcta

SEQ ID NO: 94962 - DNA, 25 bp, Homo sapien
gttgtgtttgccactcatcatagaa

SEQ ID NO: 94963 - DNA, 25 bp, Homo sapien
ttgtgtttgccactcatcatagaag

SEQ ID NO: 94964 - DNA, 25 bp, Homo sapien
tgttgtgtttgccactcatcataga

SEQ ID NO: 94965 - DNA, 25 bp, Homo sapien
tgtgtttgccactcatcatagaaga

SEQ ID NO: 94966 - DNA, 25 bp, Homo sapien
aagacccatttcactgaaactgtca

SEQ ID NO: 94967 - DNA, 25 bp, Homo sapien
acagccgcttcaatgctattgtcta

SEQ ID NO: 94968 - DNA, 25 bp, Homo sapien
tgaacagccgcttcaatgctattgt

SEQ ID NO: 94969 - DNA, 25 bp, Homo sapien
gaacagccgcttcaatgctattgtc

SEQ ID NO: 94970 - DNA, 25 bp, Homo sapien
gaatcagcttgtccccatcaaccaa

SEQ ID NO: 94971 - DNA, 25 bp, Homo sapien
tgacataggtatcccactactgggt

SEQ ID NO: 94972 - DNA, 25 bp, Homo sapien
aaatatggctacaatatgacatagg

SEQ ID NO: 94973 - DNA, 25 bp, Homo sapien
tacttcacacgttagaatgtctatc

SEQ ID NO: 94974 - DNA, 25 bp, Homo sapien
tttgttaggtattgctagatgtaca

SEQ ID NO: 94975 - DNA, 25 bp, Homo sapien
ttgctagatgtacaacctttttaaa

SEQ ID NO: 94976 - DNA, 25 bp, Homo sapien
attttgttaggtattgctagatgta

SEQ ID NO: 94977 - DNA, 25 bp, Homo sapien
ctagatgtacaacctttttaaaatg

SEQ ID NO: 94978 - DNA, 25 bp, Homo sapien
tctagagcgtatggttgcagtgaca

SEQ ID NO: 94979 - DNA, 25 bp, Homo sapien
tatttctagagcgtatggttgcagt

SEQ ID NO: 94980 - DNA, 25 bp, Homo sapien
gcaatatatttctagagcgtatggt

SEQ ID NO: 94981 - DNA, 25 bp, Homo sapien
gttgcagtgacagtactacagattc

SEQ ID NO: 94982 - DNA, 25 bp, Homo sapien
tctttggtgggctgttaattactgc

SEQ ID NO: 94983 - DNA, 25 bp, Homo sapien
ttctttggtgggctgttaattactg

SEQ ID NO: 94984 - DNA, 25 bp, Homo sapien
tttggtgggctgttaattactgcct

SEQ ID NO: 94985 - DNA, 25 bp, Homo sapien
ctttggtgggctgttaattactgcc

SEQ ID NO: 94986 - DNA, 25 bp, Homo sapien
gtgatgtattggttctatttcagat

SEQ ID NO: 94987 - DNA, 25 bp, Homo sapien
cttctgtatcaatttatttggcctt

SEQ ID NO: 94988 - DNA, 25 bp, Homo sapien
gatgtattggttctatttcagatat

SEQ ID NO: 94989 - DNA, 25 bp, Homo sapien
tcttctgtatcaatttatttggcct

SEQ ID NO: 94990 - DNA, 25 bp, Homo sapien
gattgttttcaagcttatggctggg

SEQ ID NO: 94991 - DNA, 25 bp, Homo sapien
tgtgggttgttggactgacagcctc

SEQ ID NO: 94992 - DNA, 25 bp, Homo sapien
tcctgtgattgttggtcagattcag

SEQ ID NO: 94993 - DNA, 25 bp, Homo sapien
tactacatgcctgtggctcaaggtc

SEQ ID NO: 94994 - DNA, 25 bp, Homo sapien
ttacattttctgtggggcaggcagg

SEQ ID NO: 94995 - DNA, 25 bp, Homo sapien
tttacattttctgtggggcaggcag

SEQ ID NO: 94996 - DNA, 25 bp, Homo sapien
tacattttctgtggggcaggcagga

SEQ ID NO: 94997 - DNA, 25 bp, Homo sapien
tttttacattttctgtggggcaggc

SEQ ID NO: 94998 - DNA, 25 bp, Homo sapien
acagctgccaaattttcacctgatg

SEQ ID NO: 94999 - DNA, 25 bp, Homo sapien
agctgccaaattttcacctgatggg

SEQ ID NO: 95000 - DNA, 25 bp, Homo sapien
aaacagctgccaaattttcacctga

SEQ ID NO: 95001 - DNA, 25 bp, Homo sapien
caaacagctgccaaattttcacctg

SEQ ID NO: 95002 - DNA, 25 bp, Homo sapien
cagcgcatgctctgactcataagtg

SEQ ID NO: 95003 - DNA, 25 bp, Homo sapien
gaacagcgcatgctctgactcataa

SEQ ID NO: 95004 - DNA, 25 bp, Homo sapien
aactgaacagcgcatgctctgactc

SEQ ID NO: 95005 - DNA, 25 bp, Homo sapien
cagaaaactgaacagcgcatgctct

SEQ ID NO: 95006 - DNA, 25 bp, Homo sapien
ttgagatactttcaatgatagagca

SEQ ID NO: 95007 - DNA, 25 bp, Homo sapien
catgagggaactggattgagatact

SEQ ID NO: 95008 - DNA, 25 bp, Homo sapien
taagagagtgtaattaatggcagcc

SEQ ID NO: 95009 - DNA, 25 bp, Homo sapien
tcaatgatagagcataagagagtgt

SEQ ID NO: 95010 - DNA, 25 bp, Homo sapien
tggataacagccaaattcatctgtc

SEQ ID NO: 95011 - DNA, 25 bp, Homo sapien
tctatatgacatcgcttggctccat

SEQ ID NO: 95012 - DNA, 25 bp, Homo sapien
tctgtcttctatgtccaatcctagc

SEQ ID NO: 95013 - DNA, 25 bp, Homo sapien
ctttgtttagttcctcgactgagat

SEQ ID NO: 95014 - DNA, 25 bp, Homo sapien
gtagtttatactggcaactgaattc

SEQ ID NO: 95015 - DNA, 25 bp, Homo sapien
gcctgaaatttagaaggtaatgcca

SEQ ID NO: 95016 - DNA, 25 bp, Homo sapien
tgccaagacagaagaatagctagag

SEQ ID NO: 95017 - DNA, 25 bp, Homo sapien
gtcacactttagtacatggctaagg

SEQ ID NO: 95018 - DNA, 25 bp, Homo sapien
gaccctgcaatttaagtgccaattg

SEQ ID NO: 95019 - DNA, 25 bp, Homo sapien
aaaagatgaatccaatgtgccaggt

SEQ ID NO: 95020 - DNA, 25 bp, Homo sapien
gacctaaggatctgaggcaacacag

SEQ ID NO: 95021 - DNA, 25 bp, Homo sapien
gaatcatgacagtctcttggaccac

SEQ ID NO: 95022 - DNA, 25 bp, Homo sapien
gtgcattctgaatcccataaatttc

SEQ ID NO: 95023 - DNA, 25 bp, Homo sapien
gcgagcttctctgtttgttaaaaac

SEQ ID NO: 95024 - DNA, 25 bp, Homo sapien
ttaaaaactgtaccccacagcgagc

SEQ ID NO: 95025 - DNA, 25 bp, Homo sapien
cagtacagcagagccgaggtagaga

SEQ ID NO: 95026 - DNA, 25 bp, Homo sapien
ggaggagaagctttgctcaagttct

SEQ ID NO: 95027 - DNA, 25 bp, Homo sapien
tctatcacttgagaagctgtgttaa

SEQ ID NO: 95028 - DNA, 25 bp, Homo sapien
tggcaacagcaaaaattgttatggt

SEQ ID NO: 95029 - DNA, 25 bp, Homo sapien
ttttatgaaacaaagtgacgggatg

SEQ ID NO: 95030 - DNA, 25 bp, Homo sapien
taatttggctttccagatagttgtc

SEQ ID NO: 95031 - DNA, 25 bp, Homo sapien
caatgtcaatctcaagacttgggcc

SEQ ID NO: 95032 - DNA, 25 bp, Homo sapien
taattatgttgaactgaatactctg

SEQ ID NO: 95033 - DNA, 25 bp, Homo sapien
tgggctttgtgacagatgaaatttc

SEQ ID NO: 95034 - DNA, 25 bp, Homo sapien
tatagaaggctcagaaataggagac

SEQ ID NO: 95035 - DNA, 25 bp, Homo sapien
ctgtatagaaggctcagaaatagga

SEQ ID NO: 95036 - DNA, 25 bp, Homo sapien
catagcatgggttctgtatagaagg

SEQ ID NO: 95037 - DNA, 25 bp, Homo sapien
tgggttctgtatagaaggctcagaa

SEQ ID NO: 95038 - DNA, 25 bp, Homo sapien
ggtcctctcataataaggtgctgct

SEQ ID NO: 95039 - DNA, 25 bp, Homo sapien
tcctctcataataaggtgctgctcc

SEQ ID NO: 95040 - DNA, 25 bp, Homo sapien
cctctcataataaggtgctgctcct

SEQ ID NO: 95041 - DNA, 25 bp, Homo sapien
tcaggtcctctcataataaggtgct

SEQ ID NO: 95042 - DNA, 25 bp, Homo sapien
taatttcaacccagtaccacagtcc

SEQ ID NO: 95043 - DNA, 25 bp, Homo sapien
tggacctaagcctgactggcagtca

SEQ ID NO: 95044 - DNA, 25 bp, Homo sapien
tttgccatcctttgagtatggacct

SEQ ID NO: 95045 - DNA, 25 bp, Homo sapien
cagtcagtatatgctctgtcagttt

SEQ ID NO: 95046 - DNA, 25 bp, Homo sapien
gactttatgggtcattggctaaatg

SEQ ID NO: 95047 - DNA, 25 bp, Homo sapien
aaggtgttttagtcaatcttaagct

SEQ ID NO: 95048 - DNA, 25 bp, Homo sapien
ctttcaattgtaccaccatttgcca

SEQ ID NO: 95049 - DNA, 25 bp, Homo sapien
ttccattagagagggtacactttca

SEQ ID NO: 95050 - DNA, 25 bp, Homo sapien
gcctttagtgataatgcccagtgtc

SEQ ID NO: 95051 - DNA, 25 bp, Homo sapien
tcagtaagagacttaaaaacgaagc

SEQ ID NO: 95052 - DNA, 25 bp, Homo sapien
aaaacgaagcctttagtgataatgc

SEQ ID NO: 95053 - DNA, 25 bp, Homo sapien
tcaagcatcaactcagtaagagact

SEQ ID NO: 95054 - DNA, 25 bp, Homo sapien
cctggctgtgtgcattagatagtac

SEQ ID NO: 95055 - DNA, 25 bp, Homo sapien
tttcagctgatcaatgacgttgtgc

SEQ ID NO: 95056 - DNA, 25 bp, Homo sapien
tagatagtacctgcttttcagctga

SEQ ID NO: 95057 - DNA, 25 bp, Homo sapien
ttctctagacaaacatgacaagatg

SEQ ID NO: 95058 - DNA, 25 bp, Homo sapien
tctcttgctgtgcagtctgctccta

SEQ ID NO: 95059 - DNA, 25 bp, Homo sapien
tttggcagtctgaacacacagtcat

SEQ ID NO: 95060 - DNA, 25 bp, Homo sapien
tgagcaaaaggcaagagtatcaact

SEQ ID NO: 95061 - DNA, 25 bp, Homo sapien
ttgtcaaacaaacgcaattctcttg

SEQ ID NO: 95062 - DNA, 25 bp, Homo sapien
tgcccatacatccttagacaaatag

SEQ ID NO: 95063 - DNA, 25 bp, Homo sapien
aagttggaggtaactcgggtctgca

SEQ ID NO: 95064 - DNA, 25 bp, Homo sapien
ggtctgcatcgtaggagactgacat

SEQ ID NO: 95065 - DNA, 25 bp, Homo sapien
cctgtagcaccatttgcatggcgga

SEQ ID NO: 95066 - DNA, 25 bp, Homo sapien
cattttctctggtgctacaagtgga

SEQ ID NO: 95067 - DNA, 25 bp, Homo sapien
gctacaagtggaaattgttccttcc

SEQ ID NO: 95068 - DNA, 25 bp, Homo sapien
ccgtgtgtccaatctagctcaaata

SEQ ID NO: 95069 - DNA, 25 bp, Homo sapien
aagtacaacctggatccctgcacat

SEQ ID NO: 95070 - DNA, 25 bp, Homo sapien
aagtttgtcgttattaatgatctga

SEQ ID NO: 95071 - DNA, 25 bp, Homo sapien
cgttattaatgatctgaataatctc

SEQ ID NO: 95072 - DNA, 25 bp, Homo sapien
ttcataatgaagtttgtcgttatta

SEQ ID NO: 95073 - DNA, 25 bp, Homo sapien
taatgaagtttgtcgttattaatga

SEQ ID NO: 95074 - DNA, 25 bp, Homo sapien
tttcatagaaagctacattgatgtc

SEQ ID NO: 95075 - DNA, 25 bp, Homo sapien
taatggctatttcaagggatttagc

SEQ ID NO: 95076 - DNA, 25 bp, Homo sapien
ctttaaatgaaaattgccacgaatc

SEQ ID NO: 95077 - DNA, 25 bp, Homo sapien
tatgattcatatgggctgccctaag

SEQ ID NO: 95078 - DNA, 25 bp, Homo sapien
tactgtgctggtatgctgtaaccga

SEQ ID NO: 95079 - DNA, 25 bp, Homo sapien
gcacaatggctaaatgggaagagct

SEQ ID NO: 95080 - DNA, 25 bp, Homo sapien
aaagccccaacttgatactgtgctg

SEQ ID NO: 95081 - DNA, 25 bp, Homo sapien
agttctccgtgatgctcaatgtaga

SEQ ID NO: 95082 - DNA, 25 bp, Homo sapien
ttgctgttgcttcagatgtcactct

SEQ ID NO: 95083 - DNA, 25 bp, Homo sapien
tgttgcttcagatgtcactctctct

SEQ ID NO: 95084 - DNA, 25 bp, Homo sapien
tgcctgctgctgttattgctgttgc

SEQ ID NO: 95085 - DNA, 25 bp, Homo sapien
caaggatggcaatgggctgcctgct

SEQ ID NO: 95086 - DNA, 25 bp, Homo sapien
ggcttctcctgaagactttgcctcc

SEQ ID NO: 95087 - DNA, 25 bp, Homo sapien
gcttctcctgaagactttgcctcct

SEQ ID NO: 95088 - DNA, 25 bp, Homo sapien
taggtccctttaagtgaaccatgat

SEQ ID NO: 95089 - DNA, 25 bp, Homo sapien
tctacttctgtctatgttttctctc

SEQ ID NO: 95090 - DNA, 25 bp, Homo sapien
attaggtccctttaagtgaaccatg

SEQ ID NO: 95091 - DNA, 25 bp, Homo sapien
tttctacttctgtctatgttttctc

SEQ ID NO: 95092 - DNA, 25 bp, Homo sapien
gctcttagtaagtcaaaacttctgt

SEQ ID NO: 95093 - DNA, 25 bp, Homo sapien
catgagaaggcctcttaatgggtgt

SEQ ID NO: 95094 - DNA, 25 bp, Homo sapien
caatacagacactactgccatgaga

SEQ ID NO: 95095 - DNA, 25 bp, Homo sapien
ggttcttctgcactagccattcgag

SEQ ID NO: 95096 - DNA, 25 bp, Homo sapien
cccaggcaaagaaagcggtcacggt

SEQ ID NO: 95097 - DNA, 25 bp, Homo sapien
caagtaacatatgctgtcagcacca

SEQ ID NO: 95098 - DNA, 25 bp, Homo sapien
cggtcacggtattgttggagtaatt

SEQ ID NO: 95099 - DNA, 25 bp, Homo sapien
ggaatatctgttgaccccaggcaaa

SEQ ID NO: 95100 - DNA, 25 bp, Homo sapien
tctgttagagaccttacctgcggga

SEQ ID NO: 95101 - DNA, 25 bp, Homo sapien
tctatagcctcccatcacttggagg

SEQ ID NO: 95102 - DNA, 25 bp, Homo sapien
cgggaagtttcttgcaaagtaatgc

SEQ ID NO: 95103 - DNA, 25 bp, Homo sapien
gatgctcctgaaccattgaggatgg

SEQ ID NO: 95104 - DNA, 25 bp, Homo sapien
tcagtaagcttcagctcagccatag

SEQ ID NO: 95105 - DNA, 25 bp, Homo sapien
tgcaagggttcctgcccaaagagga

SEQ ID NO: 95106 - DNA, 25 bp, Homo sapien
tatgactggtaagtcaacgggaggg

SEQ ID NO: 95107 - DNA, 25 bp, Homo sapien
tcttcaaatatgaacaagtcagtaa

SEQ ID NO: 95108 - DNA, 25 bp, Homo sapien
tggacactgtttgtctaagtctagg

SEQ ID NO: 95109 - DNA, 25 bp, Homo sapien
taaattgacagctcgggagattttg

SEQ ID NO: 95110 - DNA, 25 bp, Homo sapien
cattccagtcaataatggcaattcc

SEQ ID NO: 95111 - DNA, 25 bp, Homo sapien
ggtctctttaacacctaaattgaca

SEQ ID NO: 95112 - DNA, 25 bp, Homo sapien
tgaaaccagatggatcaatagactg

SEQ ID NO: 95113 - DNA, 25 bp, Homo sapien
tgaggtaacgttaaccaaaatgcca

SEQ ID NO: 95114 - DNA, 25 bp, Homo sapien
tctagtcttgataattgaggtaacg

SEQ ID NO: 95115 - DNA, 25 bp, Homo sapien
cctttagactgatttgtaacatgga

SEQ ID NO: 95116 - DNA, 25 bp, Homo sapien
cttttgtgcaacaggctaagaaaat

SEQ ID NO: 95117 - DNA, 25 bp, Homo sapien
caagttttctaaagagacagctgaa

SEQ ID NO: 95118 - DNA, 25 bp, Homo sapien
catcttttgtgcaacaggctaagaa

SEQ ID NO: 95119 - DNA, 25 bp, Homo sapien
tgggttgacgctttctttagcagca

SEQ ID NO: 95120 - DNA, 25 bp, Homo sapien
ctcttctagtgtccgaatcagctca

SEQ ID NO: 95121 - DNA, 25 bp, Homo sapien
gaatcagctcaatttctctgttggt

SEQ ID NO: 95122 - DNA, 25 bp, Homo sapien
gctggctcttctagtgtccgaatca

SEQ ID NO: 95123 - DNA, 25 bp, Homo sapien
gaaggtagctggctcttctagtgtc

SEQ ID NO: 95124 - DNA, 25 bp, Homo sapien
cgatatgacgaagatgaaacaacaa

SEQ ID NO: 95125 - DNA, 25 bp, Homo sapien
caattttacttggatacgatatgac

SEQ ID NO: 95126 - DNA, 25 bp, Homo sapien
tttacttggatacgatatgacgaag

SEQ ID NO: 95127 - DNA, 25 bp, Homo sapien
ggatacgatatgacgaagatgaaac

SEQ ID NO: 95128 - DNA, 25 bp, Homo sapien
caaggtcgcagaagggagtgtgagc

SEQ ID NO: 95129 - DNA, 25 bp, Homo sapien
cttcaacaaggtcgcagaagggagt

SEQ ID NO: 95130 - DNA, 25 bp, Homo sapien
ttcttcaacaaggtcgcagaaggga

SEQ ID NO: 95131 - DNA, 25 bp, Homo sapien
tcaacaaggtcgcagaagggagtgt

SEQ ID NO: 95132 - DNA, 25 bp, Homo sapien
ctcggtgcattgctattcctggatg

SEQ ID NO: 95133 - DNA, 25 bp, Homo sapien
gctggctctgcgctcggtgcattgc

SEQ ID NO: 95134 - DNA, 25 bp, Homo sapien
cattgctattcctggatgatttacc

SEQ ID NO: 95135 - DNA, 25 bp, Homo sapien
ctggctctgcgctcggtgcattgct

SEQ ID NO: 95136 - DNA, 25 bp, Homo sapien
acagctgtgcaacagactgtctgaa

SEQ ID NO: 95137 - DNA, 25 bp, Homo sapien
ctgcagagtgataccactaacagac

SEQ ID NO: 95138 - DNA, 25 bp, Homo sapien
tttctgtatgcattgggctgatcat

SEQ ID NO: 95139 - DNA, 25 bp, Homo sapien
ttttcatgatgtaccagtattttgc

SEQ ID NO: 95140 - DNA, 25 bp, Homo sapien
tacatatctttttgacagctgtttt

SEQ ID NO: 95141 - DNA, 25 bp, Homo sapien
aacatttacaaatcgtataggtcta

SEQ ID NO: 95142 - DNA, 25 bp, Homo sapien
aatattatattagctgcgttgcctg

SEQ ID NO: 95143 - DNA, 25 bp, Homo sapien
gcatgtgggagttagcatgactcca

SEQ ID NO: 95144 - DNA, 25 bp, Homo sapien
tgtacattgtagagcaacaggtaag

SEQ ID NO: 95145 - DNA, 25 bp, Homo sapien
tcttcacggttagtctaaatattat

SEQ ID NO: 95146 - DNA, 25 bp, Homo sapien
tgttctgggatcatcttgcaaaagc

SEQ ID NO: 95147 - DNA, 25 bp, Homo sapien
tgccagtagttgaaacaaggagaac

SEQ ID NO: 95148 - DNA, 25 bp, Homo sapien
ggtgtaaagatactgaaagctgaca

SEQ ID NO: 95149 - DNA, 25 bp, Homo sapien
ctttcctaaatgcatggtccttcga

SEQ ID NO: 95150 - DNA, 25 bp, Homo sapien
tacagacactgaggaatgcaatatg

SEQ ID NO: 95151 - DNA, 25 bp, Homo sapien
cccttacagacactgaggaatgcaa

SEQ ID NO: 95152 - DNA, 25 bp, Homo sapien
gacactgaggaatgcaatatggaca

SEQ ID NO: 95153 - DNA, 25 bp, Homo sapien
cagacactgaggaatgcaatatgga

SEQ ID NO: 95154 - DNA, 25 bp, Homo sapien
gttgtattgtcaatctgtgattctc

SEQ ID NO: 95155 - DNA, 25 bp, Homo sapien
tattgtcaatctgtgattctcactt

SEQ ID NO: 95156 - DNA, 25 bp, Homo sapien
cacatgttgtattgtcaatctgtga

SEQ ID NO: 95157 - DNA, 25 bp, Homo sapien
catgttgtattgtcaatctgtgatt

SEQ ID NO: 95158 - DNA, 25 bp, Homo sapien
ttgataatgtcagccatggactcac

SEQ ID NO: 95159 - DNA, 25 bp, Homo sapien
cagggtgcttatgcaactgtcacca

SEQ ID NO: 95160 - DNA, 25 bp, Homo sapien
ggccagttcttagttccagggtgct

SEQ ID NO: 95161 - DNA, 25 bp, Homo sapien
taggattcctcaactgaccgctggc

SEQ ID NO: 95162 - DNA, 25 bp, Homo sapien
tctgaagtttgaatggaacgctgct

SEQ ID NO: 95163 - DNA, 25 bp, Homo sapien
atttctgccaagttctatgcacttc

SEQ ID NO: 95164 - DNA, 25 bp, Homo sapien
tgcacttcagtgttaagagtatggc

SEQ ID NO: 95165 - DNA, 25 bp, Homo sapien
ttcagtgttaagagtatggcccacg

SEQ ID NO: 95166 - DNA, 25 bp, Homo sapien
gtgttaagagtatggcccacgactc

SEQ ID NO: 95167 - DNA, 25 bp, Homo sapien
tctttggactgtatagtacaaatga

SEQ ID NO: 95168 - DNA, 25 bp, Homo sapien
tggactgtatagtacaaatgatgat

SEQ ID NO: 95169 - DNA, 25 bp, Homo sapien
tttggactgtatagtacaaatgatg

SEQ ID NO: 95170 - DNA, 25 bp, Homo sapien
actgtatagtacaaatgatgattca

SEQ ID NO: 95171 - DNA, 25 bp, Homo sapien
tttcactgatactctgtcagagctc

SEQ ID NO: 95172 - DNA, 25 bp, Homo sapien
ccacaggtctattacaggcccctga

SEQ ID NO: 95173 - DNA, 25 bp, Homo sapien
taataagcacactggtaattaaatc

SEQ ID NO: 95174 - DNA, 25 bp, Homo sapien
caggatcactgcagggaatctaaca

SEQ ID NO: 95175 - DNA, 25 bp, Homo sapien
tttcctctacagatggttgacctct

SEQ ID NO: 95176 - DNA, 25 bp, Homo sapien
tgtgtttcctctacagatggttgac

SEQ ID NO: 95177 - DNA, 25 bp, Homo sapien
ctacagatggttgacctctttcagt

SEQ ID NO: 95178 - DNA, 25 bp, Homo sapien
ggttgacctctttcagttggtgact

SEQ ID NO: 95179 - DNA, 25 bp, Homo sapien
aactccaagctaaattcaaatgtag

SEQ ID NO: 95180 - DNA, 25 bp, Homo sapien
ctcattagtaaactccaagctaaat

SEQ ID NO: 95181 - DNA, 25 bp, Homo sapien
ccaagctaaattcaaatgtagtcat

SEQ ID NO: 95182 - DNA, 25 bp, Homo sapien
cattagtaaactccaagctaaattc

SEQ ID NO: 95183 - DNA, 25 bp, Homo sapien
taatacaaccagctatccacctgcc

SEQ ID NO: 95184 - DNA, 25 bp, Homo sapien
ccagctatccacctgccaaaaaatt

SEQ ID NO: 95185 - DNA, 25 bp, Homo sapien
ttctgcactaagagcaatcaagttg

SEQ ID NO: 95186 - DNA, 25 bp, Homo sapien
aaattccttgatgtcaattctgcac

SEQ ID NO: 95187 - DNA, 25 bp, Homo sapien
ttgcagattctcctgtttatcatgc

SEQ ID NO: 95188 - DNA, 25 bp, Homo sapien
aggggaaatgtcacccttatacctg

SEQ ID NO: 95189 - DNA, 25 bp, Homo sapien
gcagattctcctgtttatcatgcca

SEQ ID NO: 95190 - DNA, 25 bp, Homo sapien
cctgctgacactttgcagattctcc

SEQ ID NO: 95191 - DNA, 25 bp, Homo sapien
cgctgggccatatgtaagaagcagc

SEQ ID NO: 95192 - DNA, 25 bp, Homo sapien
aaagacactggtgccggaagcatgc

SEQ ID NO: 95193 - DNA, 25 bp, Homo sapien
gaagcatgcgctgggccatatgtaa

SEQ ID NO: 95194 - DNA, 25 bp, Homo sapien
tgccggaagcatgcgctgggccata

SEQ ID NO: 95195 - DNA, 25 bp, Homo sapien
taaatgactcccaatgtgtcatctg

SEQ ID NO: 95196 - DNA, 25 bp, Homo sapien
ataaatgactcccaatgtgtcatct

SEQ ID NO: 95197 - DNA, 25 bp, Homo sapien
aaatgactcccaatgtgtcatctga

SEQ ID NO: 95198 - DNA, 25 bp, Homo sapien
tgcagcagggcgttaaatccagttg

SEQ ID NO: 95199 - DNA, 25 bp, Homo sapien
aagatgcaacgatgactccaagagt

SEQ ID NO: 95200 - DNA, 25 bp, Homo sapien
tagtcgctgagatgaactatcaaga

SEQ ID NO: 95201 - DNA, 25 bp, Homo sapien
tccagttgacccataggttaaggga

SEQ ID NO: 95202 - DNA, 25 bp, Homo sapien
cataggtgatggtgagcaggctcat

SEQ ID NO: 95203 - DNA, 25 bp, Homo sapien
agaaaggtgaggaatgtgcaccagg

SEQ ID NO: 95204 - DNA, 25 bp, Homo sapien
gtgtttctgttacaaaacagtgaca

SEQ ID NO: 95205 - DNA, 25 bp, Homo sapien
tagagttggtataatatcattaaaa

SEQ ID NO: 95206 - DNA, 25 bp, Homo sapien
caagtataatagtttaccacatcta

SEQ ID NO: 95207 - DNA, 25 bp, Homo sapien
aaaaaatagagttggtataatatca

SEQ ID NO: 95208 - DNA, 25 bp, Homo sapien
ttggagcaccatagcgctgtactct

SEQ ID NO: 95209 - DNA, 25 bp, Homo sapien
gtccctttggagcaccatagcgctg

SEQ ID NO: 95210 - DNA, 25 bp, Homo sapien
tggatgtccctttggagcaccatag

SEQ ID NO: 95211 - DNA, 25 bp, Homo sapien
gcaccatagcgctgtactctcaaac

SEQ ID NO: 95212 - DNA, 25 bp, Homo sapien
gtatcctcggatagctgccctgtgc

SEQ ID NO: 95213 - DNA, 25 bp, Homo sapien
gcctccagagtccaaagtgttaatc

SEQ ID NO: 95214 - DNA, 25 bp, Homo sapien
gatttctcgagtcctagtcatcaaa

SEQ ID NO: 95215 - DNA, 25 bp, Homo sapien
taacacttaggtagctaaggtgcca

SEQ ID NO: 95216 - DNA, 25 bp, Homo sapien
tacactccacagccagatttatctt

SEQ ID NO: 95217 - DNA, 25 bp, Homo sapien
ctacactccacagccagatttatct

SEQ ID NO: 95218 - DNA, 25 bp, Homo sapien
gaggaattcatagaatggcccaatt

SEQ ID NO: 95219 - DNA, 25 bp, Homo sapien
caattttgtatgtctcccacattgt

SEQ ID NO: 95220 - DNA, 25 bp, Homo sapien
ttgtatgtctcccacattgtccctc

SEQ ID NO: 95221 - DNA, 25 bp, Homo sapien
gaattcatagaatggcccaattttg

SEQ ID NO: 95222 - DNA, 25 bp, Homo sapien
gcattcctctacacttccccactgg

SEQ ID NO: 95223 - DNA, 25 bp, Homo sapien
cactggggcacgagcatcctaatct

SEQ ID NO: 95224 - DNA, 25 bp, Homo sapien
gaagtatctcttttgcacagggctc

SEQ ID NO: 95225 - DNA, 25 bp, Homo sapien
taaactggagtttcggcattcctct

SEQ ID NO: 95226 - DNA, 25 bp, Homo sapien
ggtatttggatatagtccttttgct

SEQ ID NO: 95227 - DNA, 25 bp, Homo sapien
ctaggtatttggatatagtcctttt

SEQ ID NO: 95228 - DNA, 25 bp, Homo sapien
aggtatttggatatagtccttttgc

SEQ ID NO: 95229 - DNA, 25 bp, Homo sapien
gtatttggatatagtccttttgctg

SEQ ID NO: 95230 - DNA, 25 bp, Homo sapien
aagcatttgttagcgtcatagtaca

SEQ ID NO: 95231 - DNA, 25 bp, Homo sapien
ggaaagcatttgttagcgtcatagt

SEQ ID NO: 95232 - DNA, 25 bp, Homo sapien
ctgtagcgacggattggaaagcatt

SEQ ID NO: 95233 - DNA, 25 bp, Homo sapien
tgtagcgacggattggaaagcattt

SEQ ID NO: 95234 - DNA, 25 bp, Homo sapien
gtgcaagtcgtttcactaggaaaat

SEQ ID NO: 95235 - DNA, 25 bp, Homo sapien
ttcagtgcaagtcgtttcactagga

SEQ ID NO: 95236 - DNA, 25 bp, Homo sapien
ggtgaagtgagatataatttgcttc

SEQ ID NO: 95237 - DNA, 25 bp, Homo sapien
atttgcttcagtgcaagtcgtttca

SEQ ID NO: 95238 - DNA, 25 bp, Homo sapien
cactgattggctatggttaactccc

SEQ ID NO: 95239 - DNA, 25 bp, Homo sapien
tccatagctgtagggtctctggaag

SEQ ID NO: 95240 - DNA, 25 bp, Homo sapien
taacacccagggaacaatcattcgg

SEQ ID NO: 95241 - DNA, 25 bp, Homo sapien
cagaatggaaaagggatcatctctc

SEQ ID NO: 95242 - DNA, 25 bp, Homo sapien
tgcccagatgaacatttgccaggat

SEQ ID NO: 95243 - DNA, 25 bp, Homo sapien
cccagatgaacatttgccaggatat

SEQ ID NO: 95244 - DNA, 25 bp, Homo sapien
gcccagatgaacatttgccaggata

SEQ ID NO: 95245 - DNA, 25 bp, Homo sapien
gctgcagattgcaaatgaggactga

SEQ ID NO: 95246 - DNA, 25 bp, Homo sapien
gcccggcctgtagcaggtaatactg

SEQ ID NO: 95247 - DNA, 25 bp, Homo sapien
gaacctcagtccaaatgctcatgac

SEQ ID NO: 95248 - DNA, 25 bp, Homo sapien
tactggataaccaatcagtcttggt

SEQ ID NO: 95249 - DNA, 25 bp, Homo sapien
ctctcctgctgttccttcttcccct

SEQ ID NO: 95250 - DNA, 25 bp, Homo sapien
tctcctgctgttccttcttcccctc

SEQ ID NO: 95251 - DNA, 25 bp, Homo sapien
cttcttcccctcctcctctgtagtt

SEQ ID NO: 95252 - DNA, 25 bp, Homo sapien
cctcctcctctgtagttttatccat

SEQ ID NO: 95253 - DNA, 25 bp, Homo sapien
taggatctggtatatcacatgcaat

SEQ ID NO: 95254 - DNA, 25 bp, Homo sapien
gatggttgccaaatgtaaagtactc

SEQ ID NO: 95255 - DNA, 25 bp, Homo sapien
cagtatctccaatatatggttgggc

SEQ ID NO: 95256 - DNA, 25 bp, Homo sapien
tatataatgttcagcaagtcacccc

SEQ ID NO: 95257 - DNA, 25 bp, Homo sapien
cttagcctttttaggccctgagtct

SEQ ID NO: 95258 - DNA, 25 bp, Homo sapien
attgtgatcaaatgcctgatgttcc

SEQ ID NO: 95259 - DNA, 25 bp, Homo sapien
tttttaggccctgagtctattgtga

SEQ ID NO: 95260 - DNA, 25 bp, Homo sapien
tattgtgatcaaatgcctgatgttc

SEQ ID NO: 95261 - DNA, 25 bp, Homo sapien
taagaggctaggtctccacgttcac

SEQ ID NO: 95262 - DNA, 25 bp, Homo sapien
tccacgttcacatgtgtgacctact

SEQ ID NO: 95263 - DNA, 25 bp, Homo sapien
taggtctccacgttcacatgtgtga

SEQ ID NO: 95264 - DNA, 25 bp, Homo sapien
tgacctacttcgtaggggtctacaa

SEQ ID NO: 95265 - DNA, 25 bp, Homo sapien
ctttaggcattataactacaacttc

SEQ ID NO: 95266 - DNA, 25 bp, Homo sapien
tcccctgatttgtccttcacagaca

SEQ ID NO: 95267 - DNA, 25 bp, Homo sapien
tctggttttccaacctctcccctga

SEQ ID NO: 95268 - DNA, 25 bp, Homo sapien
ctctttaggcattataactacaact

SEQ ID NO: 95269 - DNA, 25 bp, Homo sapien
gtcttggcacttaagacattttaga

SEQ ID NO: 95270 - DNA, 25 bp, Homo sapien
agaaattttcctgactgccgctgtc

SEQ ID NO: 95271 - DNA, 25 bp, Homo sapien
tggcacttaagacattttagaaatt

SEQ ID NO: 95272 - DNA, 25 bp, Homo sapien
aaattttcctgactgccgctgtcac

SEQ ID NO: 95273 - DNA, 25 bp, Homo sapien
ggtatttgtgagttgcaagtttcca

SEQ ID NO: 95274 - DNA, 25 bp, Homo sapien
ccatatagacaatgaaacttgtctt

SEQ ID NO: 95275 - DNA, 25 bp, Homo sapien
cacaagtattgctatgcccaggtat

SEQ ID NO: 95276 - DNA, 25 bp, Homo sapien
gacaatgaaacttgtctttttgcct

SEQ ID NO: 95277 - DNA, 25 bp, Homo sapien
gtgatcacatccctttgatccagca

SEQ ID NO: 95278 - DNA, 25 bp, Homo sapien
gcaatggcctcaaattggcagcact

SEQ ID NO: 95279 - DNA, 25 bp, Homo sapien
tggcagcactttaacactggttatt

SEQ ID NO: 95280 - DNA, 25 bp, Homo sapien
tagctatctctattttgccattaca

SEQ ID NO: 95281 - DNA, 25 bp, Homo sapien
tgatcagccccctttgataaaagtt

SEQ ID NO: 95282 - DNA, 25 bp, Homo sapien
ccttgtcactcggtgatggtttggt

SEQ ID NO: 95283 - DNA, 25 bp, Homo sapien
ggaaaaccttgtcactcggtgatgg

SEQ ID NO: 95284 - DNA, 25 bp, Homo sapien
ctgttatgatcagccccctttgata

SEQ ID NO: 95285 - DNA, 25 bp, Homo sapien
tatcgattaatgtcatgattaaaag

SEQ ID NO: 95286 - DNA, 25 bp, Homo sapien
aagtacggcttaggtctactgggag

SEQ ID NO: 95287 - DNA, 25 bp, Homo sapien
catgattaaaagtacggcttaggtc

SEQ ID NO: 95288 - DNA, 25 bp, Homo sapien
taggtctactgggagttttagctca

SEQ ID NO: 95289 - DNA, 25 bp, Homo sapien
tttcacaaagttgctagttagaagc

SEQ ID NO: 95290 - DNA, 25 bp, Homo sapien
ttcacaaagttgctagttagaagca

SEQ ID NO: 95291 - DNA, 25 bp, Homo sapien
ttagtacatgtgctaaagaagtggg

SEQ ID NO: 95292 - DNA, 25 bp, Homo sapien
gtacatgtgctaaagaagtgggcag

SEQ ID NO: 95293 - DNA, 25 bp, Homo sapien
cttgtgtaggtatgatgctaatctc

SEQ ID NO: 95294 - DNA, 25 bp, Homo sapien
gatgctaatctcactattgtccaat

SEQ ID NO: 95295 - DNA, 25 bp, Homo sapien
aatatcctggatgacagcttttaca

SEQ ID NO: 95296 - DNA, 25 bp, Homo sapien
ttacactattgaggacacaatatcc

SEQ ID NO: 95297 - DNA, 25 bp, Homo sapien
gatgacagcttttacaatccattga

SEQ ID NO: 95298 - DNA, 25 bp, Homo sapien
taaaactgtcagcaaagctaaagac

SEQ ID NO: 95299 - DNA, 25 bp, Homo sapien
gagctgtgtactctgagttaccacg

SEQ ID NO: 95300 - DNA, 25 bp, Homo sapien
gctgtgtactctgagttaccacgga

SEQ ID NO: 95301 - DNA, 25 bp, Homo sapien
tactctgagttaccacggaattctg

SEQ ID NO: 95302 - DNA, 25 bp, Homo sapien
tgtactctgagttaccacggaattc

SEQ ID NO: 95303 - DNA, 25 bp, Homo sapien
acagggccttcatgatgcccatgtg

SEQ ID NO: 95304 - DNA, 25 bp, Homo sapien
ccaacagggccttcatgatgcccat

SEQ ID NO: 95305 - DNA, 25 bp, Homo sapien
ttcatgatgcccatgtgctcccctt

SEQ ID NO: 95306 - DNA, 25 bp, Homo sapien
tcatgatgcccatgtgctccccttt

SEQ ID NO: 95307 - DNA, 25 bp, Homo sapien
cttagcattttcattggccctaagg

SEQ ID NO: 95308 - DNA, 25 bp, Homo sapien
tggccctaaggcattcaggtttcat

SEQ ID NO: 95309 - DNA, 25 bp, Homo sapien
tttcattggccctaaggcattcagg

SEQ ID NO: 95310 - DNA, 25 bp, Homo sapien
tgtggccttcccactcttagcattt

SEQ ID NO: 95311 - DNA, 25 bp, Homo sapien
tttcatgcttggtatgctcataatc

SEQ ID NO: 95312 - DNA, 25 bp, Homo sapien
tctctcttccctgctatacccgctc

SEQ ID NO: 95313 - DNA, 25 bp, Homo sapien
ctgctatacccgctccccacattta

SEQ ID NO: 95314 - DNA, 25 bp, Homo sapien
ccgctccccacatttaaccctctgc

SEQ ID NO: 95315 - DNA, 25 bp, Homo sapien
ctccccacatttaaccctctgcctg

SEQ ID NO: 95316 - DNA, 25 bp, Homo sapien
ttttgactccttttgtagattgatt

SEQ ID NO: 95317 - DNA, 25 bp, Homo sapien
gatatagaacttcggttttgcaaga

SEQ ID NO: 95318 - DNA, 25 bp, Homo sapien
aatacagtagccaaagggtcgaagc

SEQ ID NO: 95319 - DNA, 25 bp, Homo sapien
tctgatttaacttgtatgaggtgtc

SEQ ID NO: 95320 - DNA, 25 bp, Homo sapien
caagttccattgatggacgaatggc

SEQ ID NO: 95321 - DNA, 25 bp, Homo sapien
attctactgactgctttcttagaca

SEQ ID NO: 95322 - DNA, 25 bp, Homo sapien
ttctactgactgctttcttagacat

SEQ ID NO: 95323 - DNA, 25 bp, Homo sapien
cattctactgactgctttcttagac

SEQ ID NO: 95324 - DNA, 25 bp, Homo sapien
tgtagcatgcaaccgtttgcccaaa

SEQ ID NO: 95325 - DNA, 25 bp, Homo sapien
agtccagtaattcccgttgtggtgt

SEQ ID NO: 95326 - DNA, 25 bp, Homo sapien
tacattggtatgtatttggcagacc

SEQ ID NO: 95327 - DNA, 25 bp, Homo sapien
cacagtccagtaattcccgttgtgg

SEQ ID NO: 95328 - DNA, 25 bp, Homo sapien
cctcttgatgatgtagtgtgattcc

SEQ ID NO: 95329 - DNA, 25 bp, Homo sapien
acaatcccctcggttgagcgccaaa

SEQ ID NO: 95330 - DNA, 25 bp, Homo sapien
ctgagggagctggaaacaatcccct

SEQ ID NO: 95331 - DNA, 25 bp, Homo sapien
attggtccaggttccggccctcttg

SEQ ID NO: 95332 - DNA, 25 bp, Homo sapien
ttggcctcccaagagaaactctgct

SEQ ID NO: 95333 - DNA, 25 bp, Homo sapien
tgtgggatgtacagcaggcatgatg

SEQ ID NO: 95334 - DNA, 25 bp, Homo sapien
tgggatgtacagcaggcatgatgct

SEQ ID NO: 95335 - DNA, 25 bp, Homo sapien
gggatgtacagcaggcatgatgctg

SEQ ID NO: 95336 - DNA, 25 bp, Homo sapien
ctgtgggatgtacagcaggcatgat

SEQ ID NO: 95337 - DNA, 25 bp, Homo sapien
tcagttactttatgaagcttcaagc

SEQ ID NO: 95338 - DNA, 25 bp, Homo sapien
catctgggtaatgtccatttctcct

SEQ ID NO: 95339 - DNA, 25 bp, Homo sapien
actttatgaagcttcaagcctgaca

SEQ ID NO: 95340 - DNA, 25 bp, Homo sapien
agcttcaagcctgacatctgggtaa

SEQ ID NO: 95341 - DNA, 25 bp, Homo sapien
ttttctgcaatgtttttgctgcttc

SEQ ID NO: 95342 - DNA, 25 bp, Homo sapien
tctgcaatgtttttgctgcttctat

SEQ ID NO: 95343 - DNA, 25 bp, Homo sapien
tgccttttctgcaatgtttttgctg

SEQ ID NO: 95344 - DNA, 25 bp, Homo sapien
ccttttctgcaatgtttttgctgct

SEQ ID NO: 95345 - DNA, 25 bp, Homo sapien
tcttgagtcactagcaccccttctt

SEQ ID NO: 95346 - DNA, 25 bp, Homo sapien
tctgctcagtgcctattgtgtcttt

SEQ ID NO: 95347 - DNA, 25 bp, Homo sapien
cagtctttctatgcctcttgagtca

SEQ ID NO: 95348 - DNA, 25 bp, Homo sapien
tattgtgtcttttggactaaaagcc

SEQ ID NO: 95349 - DNA, 25 bp, Homo sapien
tcttgagtcaccgttcaaagacttc

SEQ ID NO: 95350 - DNA, 25 bp, Homo sapien
cttgagtcaccgttcaaagacttcc

SEQ ID NO: 95351 - DNA, 25 bp, Homo sapien
cagtgtactcacacagttcaacctg

SEQ ID NO: 95352 - DNA, 25 bp, Homo sapien
tcctggttgtccttatattgaatag

SEQ ID NO: 95353 - DNA, 25 bp, Homo sapien
gtgtactcacacagttcaacctgtg

SEQ ID NO: 95354 - DNA, 25 bp, Homo sapien
cttatattgaataggctgatgagga

SEQ ID NO: 95355 - DNA, 25 bp, Homo sapien
catgaggtgaacagttatgcctgaa

SEQ ID NO: 95356 - DNA, 25 bp, Homo sapien
cagttatgcctgaaacattaggaag

SEQ ID NO: 95357 - DNA, 25 bp, Homo sapien
ggtgaacagttatgcctgaaacatt

SEQ ID NO: 95358 - DNA, 25 bp, Homo sapien
cctgaaacattaggaagattccaag

SEQ ID NO: 95359 - DNA, 25 bp, Homo sapien
gattaggtcactagtgcagggcccc

SEQ ID NO: 95360 - DNA, 25 bp, Homo sapien
aattcgtatgctgaaaccttagccc

SEQ ID NO: 95361 - DNA, 25 bp, Homo sapien
ggtaattgtatactccccttgctaa

SEQ ID NO: 95362 - DNA, 25 bp, Homo sapien
ctgaagggcgggtttgactattgac

SEQ ID NO: 95363 - DNA, 25 bp, Homo sapien
tgtgacatctgtcagcaactctgcc

SEQ ID NO: 95364 - DNA, 25 bp, Homo sapien
cacgtgagagtctgatgtgacatct

SEQ ID NO: 95365 - DNA, 25 bp, Homo sapien
catgaaatctagtggtatgtggcca

SEQ ID NO: 95366 - DNA, 25 bp, Homo sapien
ccaggaagttagagtttgacacgag

SEQ ID NO: 95367 - DNA, 25 bp, Homo sapien
gaaagactagtgctcagaagacaac

SEQ ID NO: 95368 - DNA, 25 bp, Homo sapien
tgaatgggcctatgaacaaaggtcc

SEQ ID NO: 95369 - DNA, 25 bp, Homo sapien
aatagagggccatacagacttcaaa

SEQ ID NO: 95370 - DNA, 25 bp, Homo sapien
cacagggccttgcatgaactcaaca

SEQ ID NO: 95371 - DNA, 25 bp, Homo sapien
catgggggattgtatcccacagcca

SEQ ID NO: 95372 - DNA, 25 bp, Homo sapien
ccacagccatcattcagaactatgg

SEQ ID NO: 95373 - DNA, 25 bp, Homo sapien
caggtcatgggggattgtatcccac

SEQ ID NO: 95374 - DNA, 25 bp, Homo sapien
attgtatcccacagccatcattcag

SEQ ID NO: 95375 - DNA, 25 bp, Homo sapien
tagatgacccccagacaaattcact

SEQ ID NO: 95376 - DNA, 25 bp, Homo sapien
ttctaggcctccaaccaggtggcaa

SEQ ID NO: 95377 - DNA, 25 bp, Homo sapien
cacttgctgactacactcaccttta

SEQ ID NO: 95378 - DNA, 25 bp, Homo sapien
tgactacactcacctttaatagatg

SEQ ID NO: 95379 - DNA, 25 bp, Homo sapien
ttcatctctagtgatcttggatgag

SEQ ID NO: 95380 - DNA, 25 bp, Homo sapien
gatacagacaagagcagatgccaat

SEQ ID NO: 95381 - DNA, 25 bp, Homo sapien
taatggatgtcataatttgctgcct

SEQ ID NO: 95382 - DNA, 25 bp, Homo sapien
tatgcaaatggtatgccaagtgtag

SEQ ID NO: 95383 - DNA, 25 bp, Homo sapien
gcatataacagttccctttgcaact

SEQ ID NO: 95384 - DNA, 25 bp, Homo sapien
agccagcatgtgtgctacatgtgaa

SEQ ID NO: 95385 - DNA, 25 bp, Homo sapien
agcactttcgccagcaagccagcat

SEQ ID NO: 95386 - DNA, 25 bp, Homo sapien
gccagcatgtgtgctacatgtgaac

SEQ ID NO: 95387 - DNA, 25 bp, Homo sapien
tctaaaagcactttcgccagcaagc

SEQ ID NO: 95388 - DNA, 25 bp, Homo sapien
ttcatgaaatgataggagcttttca

SEQ ID NO: 95389 - DNA, 25 bp, Homo sapien
gaagcatgagaagattttataacga

SEQ ID NO: 95390 - DNA, 25 bp, Homo sapien
tgtcggcagcaaaagggccagcaac

SEQ ID NO: 95391 - DNA, 25 bp, Homo sapien
tataacgagagtaattgtaatagga

SEQ ID NO: 95392 - DNA, 25 bp, Homo sapien
taggatttaatcatggtgtcggcag

SEQ ID NO: 95393 - DNA, 25 bp, Homo sapien
tcagaatgacagtactcaactctga

SEQ ID NO: 95394 - DNA, 25 bp, Homo sapien
cagaatgacagtactcaactctgac

SEQ ID NO: 95395 - DNA, 25 bp, Homo sapien
agaatgacagtactcaactctgaca

SEQ ID NO: 95396 - DNA, 25 bp, Homo sapien
atcagaatgacagtactcaactctg

SEQ ID NO: 95397 - DNA, 25 bp, Homo sapien
tcttcttccactaagtcaaggttaa

SEQ ID NO: 95398 - DNA, 25 bp, Homo sapien
tcatgtaacctttcctgctcaaaga

SEQ ID NO: 95399 - DNA, 25 bp, Homo sapien
gaaatgcgcatgtggtcatgtaacc

SEQ ID NO: 95400 - DNA, 25 bp, Homo sapien
caaggttaacccctgaaatgcgcat

SEQ ID NO: 95401 - DNA, 25 bp, Homo sapien
gattcaaggtcagggtagaagctct

SEQ ID NO: 95402 - DNA, 25 bp, Homo sapien
tcctgggcagtctggtcctgagttc

SEQ ID NO: 95403 - DNA, 25 bp, Homo sapien
tacttagtagcagcaaacacagcca

SEQ ID NO: 95404 - DNA, 25 bp, Homo sapien
ttgccatgtgataggaacactcctt

SEQ ID NO: 95405 - DNA, 25 bp, Homo sapien
tttctgagtaatggaaaatatcctg

SEQ ID NO: 95406 - DNA, 25 bp, Homo sapien
aggtttctgagtaatggaaaatatc

SEQ ID NO: 95407 - DNA, 25 bp, Homo sapien
aaatatcctgaggtcatgatggttc

SEQ ID NO: 95408 - DNA, 25 bp, Homo sapien
ttctgagtaatggaaaatatcctga

SEQ ID NO: 95409 - DNA, 25 bp, Homo sapien
cagtcttaatatgagggaatggaag

SEQ ID NO: 95410 - DNA, 25 bp, Homo sapien
catctgaaaggccacgcatttctgt

SEQ ID NO: 95411 - DNA, 25 bp, Homo sapien
actttcatctgaaaggccacgcatt

SEQ ID NO: 95412 - DNA, 25 bp, Homo sapien
tacaaccttcagtcttaatatgagg

SEQ ID NO: 95413 - DNA, 25 bp, Homo sapien
attggtgctttgaagtccttttctg

SEQ ID NO: 95414 - DNA, 25 bp, Homo sapien
tggtgctttgaagtccttttctggt

SEQ ID NO: 95415 - DNA, 25 bp, Homo sapien
ttctggtttcaatttcaaaatattg

SEQ ID NO: 95416 - DNA, 25 bp, Homo sapien
tttcaaaatattgctcaaacgacat

SEQ ID NO: 95417 - DNA, 25 bp, Homo sapien
tggagctcagagctcggatggagac

SEQ ID NO: 95418 - DNA, 25 bp, Homo sapien
gtatgtgatgaatttattactgctc

SEQ ID NO: 95419 - DNA, 25 bp, Homo sapien
tactgctcaaatgactgttgctcac

SEQ ID NO: 95420 - DNA, 25 bp, Homo sapien
ttattactgctcaaatgactgttgc

SEQ ID NO: 95421 - DNA, 25 bp, Homo sapien
tgatgaatttattactgctcaaatg

SEQ ID NO: 95422 - DNA, 25 bp, Homo sapien
gattggaatccaaattagaatctgg

SEQ ID NO: 95423 - DNA, 25 bp, Homo sapien
tcagagatatcatggaacaccagtg

SEQ ID NO: 95424 - DNA, 25 bp, Homo sapien
tgctgagcggccatcactttcttca

SEQ ID NO: 95425 - DNA, 25 bp, Homo sapien
gaacaccagtgttaccttgattgga

SEQ ID NO: 95426 - DNA, 25 bp, Homo sapien
ctttatggctagaactgagagaatc

SEQ ID NO: 95427 - DNA, 25 bp, Homo sapien
tcttatctttatggctagaactgag

SEQ ID NO: 95428 - DNA, 25 bp, Homo sapien
ctcttatctttatggctagaactga

SEQ ID NO: 95429 - DNA, 25 bp, Homo sapien
tatctttatggctagaactgagaga

SEQ ID NO: 95430 - DNA, 25 bp, Homo sapien
tgagttgcaggcaccttctagcaca

SEQ ID NO: 95431 - DNA, 25 bp, Homo sapien
tcttcacatgagttgcaggcacctt

SEQ ID NO: 95432 - DNA, 25 bp, Homo sapien
cttcttccaatgatggaatcttcac

SEQ ID NO: 95433 - DNA, 25 bp, Homo sapien
gatggaatcttcacatgagttgcag

SEQ ID NO: 95434 - DNA, 25 bp, Homo sapien
cagttgcttgggcacacagaccatc

SEQ ID NO: 95435 - DNA, 25 bp, Homo sapien
gtgattgccactgggaggaataatt

SEQ ID NO: 95436 - DNA, 25 bp, Homo sapien
gccctttgttaataaagtgattgcc

SEQ ID NO: 95437 - DNA, 25 bp, Homo sapien
gagatgggggctcaacgtgcccttt

SEQ ID NO: 95438 - DNA, 25 bp, Homo sapien
aatgggactggccacaacgttgact

SEQ ID NO: 95439 - DNA, 25 bp, Homo sapien
gaagggttgaaggaaccatcacaat

SEQ ID NO: 95440 - DNA, 25 bp, Homo sapien
ccatcacaattcacagtactgtggt

SEQ ID NO: 95441 - DNA, 25 bp, Homo sapien
tgtggtacaaggacaaaatgggact

SEQ ID NO: 95442 - DNA, 25 bp, Homo sapien
ttcatcgtgcttgccatagagtgcg

SEQ ID NO: 95443 - DNA, 25 bp, Homo sapien
agcacccacagctttggcggcgagt

SEQ ID NO: 95444 - DNA, 25 bp, Homo sapien
tgtggtaggtaaaacgaaggatctc

SEQ ID NO: 95445 - DNA, 25 bp, Homo sapien
tgacaggcggctttaggttttctct

SEQ ID NO: 95446 - DNA, 25 bp, Homo sapien
tttggactatggctgcattagcttt

SEQ ID NO: 95447 - DNA, 25 bp, Homo sapien
agtaactattttggtgtgcaacgaa

SEQ ID NO: 95448 - DNA, 25 bp, Homo sapien
ggctaatacaatttttgcagtaact

SEQ ID NO: 95449 - DNA, 25 bp, Homo sapien
gaaaattcctccaggctaatacaat

SEQ ID NO: 95450 - DNA, 25 bp, Homo sapien
acgggcgcatttgggtttcgtagat

SEQ ID NO: 95451 - DNA, 25 bp, Homo sapien
tgtgttcttgtagtgtgaaaatgcc

SEQ ID NO: 95452 - DNA, 25 bp, Homo sapien
gggtttcgtagatgtttgtgtgttc

SEQ ID NO: 95453 - DNA, 25 bp, Homo sapien
caggcacgctggacgggcgcatttg

SEQ ID NO: 95454 - DNA, 25 bp, Homo sapien
ttatcacattccctgtctacagtcc

SEQ ID NO: 95455 - DNA, 25 bp, Homo sapien
tactttttccgctttaatagattca

SEQ ID NO: 95456 - DNA, 25 bp, Homo sapien
tttttatcacattccctgtctacag

SEQ ID NO: 95457 - DNA, 25 bp, Homo sapien
taatagattcaaggaatgagaattt

SEQ ID NO: 95458 - DNA, 25 bp, Homo sapien
tgtagaagcagcaacactgtacagc

SEQ ID NO: 95459 - DNA, 25 bp, Homo sapien
gcagcaacactgtacagccttaatt

SEQ ID NO: 95460 - DNA, 25 bp, Homo sapien
cttaattaaagcatcatctgacctg

SEQ ID NO: 95461 - DNA, 25 bp, Homo sapien
cactgtacagccttaattaaagcat

SEQ ID NO: 95462 - DNA, 25 bp, Homo sapien
gagttgcaaaatgtacacgctgggt

SEQ ID NO: 95463 - DNA, 25 bp, Homo sapien
ttagactgcatttttgtataccagg

SEQ ID NO: 95464 - DNA, 25 bp, Homo sapien
cattccatagaggtgaaaatttagg

SEQ ID NO: 95465 - DNA, 25 bp, Homo sapien
gacaagcctgggcattcaaacctga

SEQ ID NO: 95466 - DNA, 25 bp, Homo sapien
gagcctgtagataacgctgtgccaa

SEQ ID NO: 95467 - DNA, 25 bp, Homo sapien
tacatgagtcagaacccagatatcc

SEQ ID NO: 95468 - DNA, 25 bp, Homo sapien
gctgtgccaactgcaggtcaatgag

SEQ ID NO: 95469 - DNA, 25 bp, Homo sapien
caagtgaactgatctctctggacta

SEQ ID NO: 95470 - DNA, 25 bp, Homo sapien
ccccagtgtccaccagtgtccacca

SEQ ID NO: 95471 - DNA, 25 bp, Homo sapien
ctgtgcagcctccaagagccccagt

SEQ ID NO: 95472 - DNA, 25 bp, Homo sapien
agtctcttctggacacagctgtgca

SEQ ID NO: 95473 - DNA, 25 bp, Homo sapien
tccagtctcttctggacacagctgt

SEQ ID NO: 95474 - DNA, 25 bp, Homo sapien
tcttggagaatagcatcgatgaact

SEQ ID NO: 95475 - DNA, 25 bp, Homo sapien
gaatagcatcgatgaactattttca

SEQ ID NO: 95476 - DNA, 25 bp, Homo sapien
tatcgatcccaacattatctgaact

SEQ ID NO: 95477 - DNA, 25 bp, Homo sapien
ctgcttttgtgactttatcgatccc

SEQ ID NO: 95478 - DNA, 25 bp, Homo sapien
ttctcaggaagtggttctctctcag

SEQ ID NO: 95479 - DNA, 25 bp, Homo sapien
ctttagtggtttctcaggaagtggt

SEQ ID NO: 95480 - DNA, 25 bp, Homo sapien
ctctctcagtggtttcatcactcat

SEQ ID NO: 95481 - DNA, 25 bp, Homo sapien
tcaggaagtggttctctctcagtgg

SEQ ID NO: 95482 - DNA, 25 bp, Homo sapien
tcaaggtaattctggggaaatgtgg

SEQ ID NO: 95483 - DNA, 25 bp, Homo sapien
ttaattcgactcaaggtaattctgg

SEQ ID NO: 95484 - DNA, 25 bp, Homo sapien
attcgactcaaggtaattctgggga

SEQ ID NO: 95485 - DNA, 25 bp, Homo sapien
gacatctggactgtcatgcaaagca

SEQ ID NO: 95486 - DNA, 25 bp, Homo sapien
tcttcacatgagcaactgatctcgc

SEQ ID NO: 95487 - DNA, 25 bp, Homo sapien
tgcctgcccagatagaagctttaga

SEQ ID NO: 95488 - DNA, 25 bp, Homo sapien
ccttgacaagagacaaagcaactgc

SEQ ID NO: 95489 - DNA, 25 bp, Homo sapien
ttccaaagtgggtagcaaaaacagc

SEQ ID NO: 95490 - DNA, 25 bp, Homo sapien
gtgtccctctaacccgttgccttgc

SEQ ID NO: 95491 - DNA, 25 bp, Homo sapien
ttctcagtcgtgtccctctaacccg

SEQ ID NO: 95492 - DNA, 25 bp, Homo sapien
tcagtcgtgtccctctaacccgttg

SEQ ID NO: 95493 - DNA, 25 bp, Homo sapien
ctctaacccgttgccttgcctcagc

SEQ ID NO: 95494 - DNA, 25 bp, Homo sapien
aatgcagtgcaattggcttgagaag

SEQ ID NO: 95495 - DNA, 25 bp, Homo sapien
gtttgaagaacgacacggcgcctga

SEQ ID NO: 95496 - DNA, 25 bp, Homo sapien
ctgacatcgccgctgacgactgctg

SEQ ID NO: 95497 - DNA, 25 bp, Homo sapien
gatgtgaacgcttttgtgtgacagg

SEQ ID NO: 95498 - DNA, 25 bp, Homo sapien
taacagagatgctggccttcagcca

SEQ ID NO: 95499 - DNA, 25 bp, Homo sapien
agatgctggccttcagccacgaggg

SEQ ID NO: 95500 - DNA, 25 bp, Homo sapien
tcagttaagcctaacagagatgctg

SEQ ID NO: 95501 - DNA, 25 bp, Homo sapien
ccttcagccacgagggggagctcac

SEQ ID NO: 95502 - DNA, 25 bp, Homo sapien
tggacagcactgagcggcaagtgtc

SEQ ID NO: 95503 - DNA, 25 bp, Homo sapien
gctattttcatcatgctcctctgga

SEQ ID NO: 95504 - DNA, 25 bp, Homo sapien
aaatggagtcgctcagatttccagg

SEQ ID NO: 95505 - DNA, 25 bp, Homo sapien
atttccaggatagccaagacaccag

SEQ ID NO: 95506 - DNA, 25 bp, Homo sapien
gagaatgcctattatcagagtgagc

SEQ ID NO: 95507 - DNA, 25 bp, Homo sapien
cccggcctttcagtatcttaatgta

SEQ ID NO: 95508 - DNA, 25 bp, Homo sapien
gagtgagccatttgttcccggcctt

SEQ ID NO: 95509 - DNA, 25 bp, Homo sapien
tgtcacaccgtgtagagaatgccta

SEQ ID NO: 95510 - DNA, 25 bp, Homo sapien
ctacttcaaaatgtggttctctctg

SEQ ID NO: 95511 - DNA, 25 bp, Homo sapien
tgtaagcacaaccaagacaattgct

SEQ ID NO: 95512 - DNA, 25 bp, Homo sapien
tcttctggccctacttcaaaatgtg

SEQ ID NO: 95513 - DNA, 25 bp, Homo sapien
gagacaggagatctctgtaagcaca

SEQ ID NO: 95514 - DNA, 25 bp, Homo sapien
ttcctgtatacacttcgagaagggt

SEQ ID NO: 95515 - DNA, 25 bp, Homo sapien
ctccatttaggacctgctcttcctg

SEQ ID NO: 95516 - DNA, 25 bp, Homo sapien
tgctcttcctgtatacacttcgaga

SEQ ID NO: 95517 - DNA, 25 bp, Homo sapien
tatacacttcgagaagggttgccaa

SEQ ID NO: 95518 - DNA, 25 bp, Homo sapien
tacttctattgagggcaccccaagg

SEQ ID NO: 95519 - DNA, 25 bp, Homo sapien
taaaaatagaactgctggtggagac

SEQ ID NO: 95520 - DNA, 25 bp, Homo sapien
aaattaacaagacactcgaggttca

SEQ ID NO: 95521 - DNA, 25 bp, Homo sapien
gaattctgaatcagtggcctggaaa

SEQ ID NO: 95522 - DNA, 25 bp, Homo sapien
cctggtataagtcctagagcccaaa

SEQ ID NO: 95523 - DNA, 25 bp, Homo sapien
tgaggacagatcatcctacttagcc

SEQ ID NO: 95524 - DNA, 25 bp, Homo sapien
gatttctcagctcaaggatagagag

SEQ ID NO: 95525 - DNA, 25 bp, Homo sapien
tacttagcccactgtgtcaaaggtg

SEQ ID NO: 95526 - DNA, 25 bp, Homo sapien
tgtcctgaagtgatctctagacctg

SEQ ID NO: 95527 - DNA, 25 bp, Homo sapien
tgcatcaactacctctgtcctgaag

SEQ ID NO: 95528 - DNA, 25 bp, Homo sapien
ggcagcactttccagaggatgtctg

SEQ ID NO: 95529 - DNA, 25 bp, Homo sapien
gatatacagtctcaacgttgtcttg

SEQ ID NO: 95530 - DNA, 25 bp, Homo sapien
ttgctgcaaagcctgatgaccccaa

SEQ ID NO: 95531 - DNA, 25 bp, Homo sapien
ccatactagcctgcttgcgtgggac

SEQ ID NO: 95532 - DNA, 25 bp, Homo sapien
gccctgtaaaatgttgatccctgca

SEQ ID NO: 95533 - DNA, 25 bp, Homo sapien
gaaattgcttgggattgatgctcca

SEQ ID NO: 95534 - DNA, 25 bp, Homo sapien
tctgaggaggcattttggaacttat

SEQ ID NO: 95535 - DNA, 25 bp, Homo sapien
cttagagctctgaggaggcattttg

SEQ ID NO: 95536 - DNA, 25 bp, Homo sapien
ttagagctctgaggaggcattttgg

SEQ ID NO: 95537 - DNA, 25 bp, Homo sapien
agctctgaggaggcattttggaact

SEQ ID NO: 95538 - DNA, 25 bp, Homo sapien
gatacagaatacagctgctgctctc

SEQ ID NO: 95539 - DNA, 25 bp, Homo sapien
atacagaatacagctgctgctctca

SEQ ID NO: 95540 - DNA, 25 bp, Homo sapien
ctctcggcacccaggaagctgttca

SEQ ID NO: 95541 - DNA, 25 bp, Homo sapien
cagcgctggcaggataatgaaggac

SEQ ID NO: 95542 - DNA, 25 bp, Homo sapien
attttgtcccaaggactagtcagag

SEQ ID NO: 95543 - DNA, 25 bp, Homo sapien
tctaagtcccttgcatccggaagca

SEQ ID NO: 95544 - DNA, 25 bp, Homo sapien
gatgggtctgagttcgttggataaa

SEQ ID NO: 95545 - DNA, 25 bp, Homo sapien
cggaggggagcagctagatccttct

SEQ ID NO: 95546 - DNA, 25 bp, Homo sapien
agaatcactccggaggggagcagct

SEQ ID NO: 95547 - DNA, 25 bp, Homo sapien
cttctctgacagcaaggcttgattt

SEQ ID NO: 95548 - DNA, 25 bp, Homo sapien
cactccggaggggagcagctagatc

SEQ ID NO: 95549 - DNA, 25 bp, Homo sapien
tggactgtgtttaagtgctcattgc

SEQ ID NO: 95550 - DNA, 25 bp, Homo sapien
ggttttggactgtgtttaagtgctc

SEQ ID NO: 95551 - DNA, 25 bp, Homo sapien
gtttaagtgctcattgctggtgcct

SEQ ID NO: 95552 - DNA, 25 bp, Homo sapien
tgtgtttaagtgctcattgctggtg

SEQ ID NO: 95553 - DNA, 25 bp, Homo sapien
atcttatgtggtgctagacagcaaa

SEQ ID NO: 95554 - DNA, 25 bp, Homo sapien
tgaaagctaaatgcacgttgagtgt

SEQ ID NO: 95555 - DNA, 25 bp, Homo sapien
atgtggtgctagacagcaaaagagc

SEQ ID NO: 95556 - DNA, 25 bp, Homo sapien
gctaaatgcacgttgagtgttttta

SEQ ID NO: 95557 - DNA, 25 bp, Homo sapien
aaattgattagttctctgactcgca

SEQ ID NO: 95558 - DNA, 25 bp, Homo sapien
gactcgcacactgaaatcatccaac

SEQ ID NO: 95559 - DNA, 25 bp, Homo sapien
gattagttctctgactcgcacactg

SEQ ID NO: 95560 - DNA, 25 bp, Homo sapien
ctgtttcaaaattgattagttctct

SEQ ID NO: 95561 - DNA, 25 bp, Homo sapien
tgtaagcactagttttgattgtggc

SEQ ID NO: 95562 - DNA, 25 bp, Homo sapien
tgacaagagtccaaaacctaaatga

SEQ ID NO: 95563 - DNA, 25 bp, Homo sapien
tcacattacatttgacaagagtcca

SEQ ID NO: 95564 - DNA, 25 bp, Homo sapien
ccaacagtgggtgttgttgtaagca

SEQ ID NO: 95565 - DNA, 25 bp, Homo sapien
gtcatatgcagaaaactgaaattgg

SEQ ID NO: 95566 - DNA, 25 bp, Homo sapien
tagtcatatgcagaaaactgaaatt

SEQ ID NO: 95567 - DNA, 25 bp, Homo sapien
ctagtcatatgcagaaaactgaaat

SEQ ID NO: 95568 - DNA, 25 bp, Homo sapien
gctagtcatatgcagaaaactgaaa

SEQ ID NO: 95569 - DNA, 25 bp, Homo sapien
aaaatgtgagcttgtgtccaggtct

SEQ ID NO: 95570 - DNA, 25 bp, Homo sapien
gggaacttctagtgagacgtagcag

SEQ ID NO: 95571 - DNA, 25 bp, Homo sapien
aaaaaatgtgagcttgtgtccaggt

SEQ ID NO: 95572 - DNA, 25 bp, Homo sapien
ctcttccagggaacttctagtgaga

SEQ ID NO: 95573 - DNA, 25 bp, Homo sapien
actggtgatggatgaatcaagtgag

SEQ ID NO: 95574 - DNA, 25 bp, Homo sapien
tgaatcaagtgagaagttgtacagt

SEQ ID NO: 95575 - DNA, 25 bp, Homo sapien
atcaagtgagaagttgtacagttgc

SEQ ID NO: 95576 - DNA, 25 bp, Homo sapien
tcaagtgagaagttgtacagttgct

SEQ ID NO: 95577 - DNA, 25 bp, Homo sapien
gggcttggcttctgggtctccattg

SEQ ID NO: 95578 - DNA, 25 bp, Homo sapien
tgtcttttagttctgcatgctcctt

SEQ ID NO: 95579 - DNA, 25 bp, Homo sapien
ccttcacctgagtcttttagttttg

SEQ ID NO: 95580 - DNA, 25 bp, Homo sapien
tccattgcaaaatgagcagatggtt

SEQ ID NO: 95581 - DNA, 25 bp, Homo sapien
ggataccagcctacaccaggccatt

SEQ ID NO: 95582 - DNA, 25 bp, Homo sapien
tagtcacatcttctgaagtgatgac

SEQ ID NO: 95583 - DNA, 25 bp, Homo sapien
agggataccagcctacaccaggcca

SEQ ID NO: 95584 - DNA, 25 bp, Homo sapien
tcacatcttctgaagtgatgacttt

SEQ ID NO: 95585 - DNA, 25 bp, Homo sapien
gtcccctcttaaacagccttctgct

SEQ ID NO: 95586 - DNA, 25 bp, Homo sapien
tccatcatccagcatatttgaattg

SEQ ID NO: 95587 - DNA, 25 bp, Homo sapien
atatttgaattgtgcgattgtcccc

SEQ ID NO: 95588 - DNA, 25 bp, Homo sapien
gaattgtgcgattgtcccctcttaa

SEQ ID NO: 95589 - DNA, 25 bp, Homo sapien
ctcctccagacttcctgcctttaat

SEQ ID NO: 95590 - DNA, 25 bp, Homo sapien
tcctccagacttcctgcctttaatt

SEQ ID NO: 95591 - DNA, 25 bp, Homo sapien
gagtttcaacatgccactcttggac

SEQ ID NO: 95592 - DNA, 25 bp, Homo sapien
ggggagtttcaacatgccactcttg

SEQ ID NO: 95593 - DNA, 25 bp, Homo sapien
gggagtttcaacatgccactcttgg

SEQ ID NO: 95594 - DNA, 25 bp, Homo sapien
gtttcaacatgccactcttggacag

SEQ ID NO: 95595 - DNA, 25 bp, Homo sapien
tgtcattgtaactccagcgcaaagg

SEQ ID NO: 95596 - DNA, 25 bp, Homo sapien
tactatgagggaccggctcacacaa

SEQ ID NO: 95597 - DNA, 25 bp, Homo sapien
taagtctcagtctgcatctgaaggc

SEQ ID NO: 95598 - DNA, 25 bp, Homo sapien
ccaggagcgccaatgtctgagggca

SEQ ID NO: 95599 - DNA, 25 bp, Homo sapien
tttagctttgggtgctactgggtgg

SEQ ID NO: 95600 - DNA, 25 bp, Homo sapien
taagagttaatttagctttgggtgc

SEQ ID NO: 95601 - DNA, 25 bp, Homo sapien
gttctgcaggatgtttaattttaag

SEQ ID NO: 95602 - DNA, 25 bp, Homo sapien
taatttagctttgggtgctactggg

SEQ ID NO: 95603 - DNA, 25 bp, Homo sapien
catacaatgggaatttctttggcat

SEQ ID NO: 95604 - DNA, 25 bp, Homo sapien
ttgaatgtacaagaactccttctga

SEQ ID NO: 95605 - DNA, 25 bp, Homo sapien
ttcttgaatgtacaagaactccttc

SEQ ID NO: 95606 - DNA, 25 bp, Homo sapien
gcctgcattgtgagattcttgaatg

SEQ ID NO: 95607 - DNA, 25 bp, Homo sapien
atgtacaagaactccttctgatggc

SEQ ID NO: 95608 - DNA, 25 bp, Homo sapien
gcagtagtaccgtgtcccacattaa

SEQ ID NO: 95609 - DNA, 25 bp, Homo sapien
catcattggcatttctagcttttag

SEQ ID NO: 95610 - DNA, 25 bp, Homo sapien
agcaatcagttatggtgtcttggaa

SEQ ID NO: 95611 - DNA, 25 bp, Homo sapien
gaaatccagatttattagaattcca

SEQ ID NO: 95612 - DNA, 25 bp, Homo sapien
attcccattaggaatggcttcagtt

SEQ ID NO: 95613 - DNA, 25 bp, Homo sapien
taggaatggcttcagtttgagcata

SEQ ID NO: 95614 - DNA, 25 bp, Homo sapien
tggcttcagtttgagcatatattga

SEQ ID NO: 95615 - DNA, 25 bp, Homo sapien
gcatatattgaaatttctatggttt

SEQ ID NO: 95616 - DNA, 25 bp, Homo sapien
tgtttttggtgtcagacatctgtcg

SEQ ID NO: 95617 - DNA, 25 bp, Homo sapien
tgcagataatttccgtgcttaatac

SEQ ID NO: 95618 - DNA, 25 bp, Homo sapien
tgtgataggacttggaactgaactg

SEQ ID NO: 95619 - DNA, 25 bp, Homo sapien
ttcccttgagagctaacaaatacag

SEQ ID NO: 95620 - DNA, 25 bp, Homo sapien
ggcacgggtttgaatccaacacagg

SEQ ID NO: 95621 - DNA, 25 bp, Homo sapien
tgataccacttgacaactgctttgt

SEQ ID NO: 95622 - DNA, 25 bp, Homo sapien
tgctttgtgaaatgagctggtctca

SEQ ID NO: 95623 - DNA, 25 bp, Homo sapien
ccaacacaggttgtcacagaaagtt

SEQ ID NO: 95624 - DNA, 25 bp, Homo sapien
caaaaagcactctctggagaaatta

SEQ ID NO: 95625 - DNA, 25 bp, Homo sapien
tactggaataatgaggatcaagttt

SEQ ID NO: 95626 - DNA, 25 bp, Homo sapien
taataccataccatttatctctaat

SEQ ID NO: 95627 - DNA, 25 bp, Homo sapien
gctatccaagcaaatataataccat

SEQ ID NO: 95628 - DNA, 25 bp, Homo sapien
cgatttctgaagagtgtactgtcca

SEQ ID NO: 95629 - DNA, 25 bp, Homo sapien
cccaccaaatgcgaggcttaaacga

SEQ ID NO: 95630 - DNA, 25 bp, Homo sapien
tccctgttatggtcagagataccct

SEQ ID NO: 95631 - DNA, 25 bp, Homo sapien
ccttggggccatcatgaagagcctt

SEQ ID NO: 95632 - DNA, 25 bp, Homo sapien
ggattctcctatagaaataagcatg

SEQ ID NO: 95633 - DNA, 25 bp, Homo sapien
tcaactttgggattctcctatagaa

SEQ ID NO: 95634 - DNA, 25 bp, Homo sapien
tagaaataagcatgctagtgctttt

SEQ ID NO: 95635 - DNA, 25 bp, Homo sapien
taagcatgctagtgctttttgaagc

SEQ ID NO: 95636 - DNA, 25 bp, Homo sapien
agtgccacttttcccggcccgctgt

SEQ ID NO: 95637 - DNA, 25 bp, Homo sapien
ccgcgagcagccacattcaacggcc

SEQ ID NO: 95638 - DNA, 25 bp, Homo sapien
tgtacgtcggggcacgccgaccgcg

SEQ ID NO: 95639 - DNA, 25 bp, Homo sapien
cattcaacggcccacaggattcaaa

SEQ ID NO: 95640 - DNA, 25 bp, Homo sapien
cattggctccatatgtccattttca

SEQ ID NO: 95641 - DNA, 25 bp, Homo sapien
ttggctccatatgtccattttcatg

SEQ ID NO: 95642 - DNA, 25 bp, Homo sapien
ccattggctccatatgtccattttc

SEQ ID NO: 95643 - DNA, 25 bp, Homo sapien
attggctccatatgtccattttcat

SEQ ID NO: 95644 - DNA, 25 bp, Homo sapien
taataggagtccaagagggaccgga

SEQ ID NO: 95645 - DNA, 25 bp, Homo sapien
gagcccaagagactatgagacacca

SEQ ID NO: 95646 - DNA, 25 bp, Homo sapien
ggtttaacagcacgtttgagcaggc

SEQ ID NO: 95647 - DNA, 25 bp, Homo sapien
taggagatccacattgagacacagt

SEQ ID NO: 95648 - DNA, 25 bp, Homo sapien
tcatgataaaactgtaggacaaacc

SEQ ID NO: 95649 - DNA, 25 bp, Homo sapien
tatcatccctcaaactagaagctaa

SEQ ID NO: 95650 - DNA, 25 bp, Homo sapien
cagacgggaattttctcaacctaat

SEQ ID NO: 95651 - DNA, 25 bp, Homo sapien
gaattagaaacaacacataaacgcc

SEQ ID NO: 95652 - DNA, 25 bp, Homo sapien
agatgtgtggcctcatttctgggct

SEQ ID NO: 95653 - DNA, 25 bp, Homo sapien
tgtagatgtgtggcctcatttctgg

SEQ ID NO: 95654 - DNA, 25 bp, Homo sapien
atttgtgctcttttttcgttccaca

SEQ ID NO: 95655 - DNA, 25 bp, Homo sapien
ttgtgctcttttttcgttccacatg

SEQ ID NO: 95656 - DNA, 25 bp, Homo sapien
ggttcaacttagtctatgcattgca

SEQ ID NO: 95657 - DNA, 25 bp, Homo sapien
gcattattcgatgtactctaaattc

SEQ ID NO: 95658 - DNA, 25 bp, Homo sapien
tctaaagtgcctaatcttactgaaa

SEQ ID NO: 95659 - DNA, 25 bp, Homo sapien
tacagaaaacatgctggaatcaggc

SEQ ID NO: 95660 - DNA, 25 bp, Homo sapien
tacttgatcagtcagtgatacactt

SEQ ID NO: 95661 - DNA, 25 bp, Homo sapien
ctctacttgatcagtcagtgataca

SEQ ID NO: 95662 - DNA, 25 bp, Homo sapien
gatcagtcagtgatacactttcata

SEQ ID NO: 95663 - DNA, 25 bp, Homo sapien
cagtgatacactttcatacttcttc

SEQ ID NO: 95664 - DNA, 25 bp, Homo sapien
taaacatgctgatacatctaagacc

SEQ ID NO: 95665 - DNA, 25 bp, Homo sapien
ccaaagcaattcaacgagggaaaat

SEQ ID NO: 95666 - DNA, 25 bp, Homo sapien
tcaacctctggtgatgaattcaaca

SEQ ID NO: 95667 - DNA, 25 bp, Homo sapien
tctctacaggtatacgatggcgctt

SEQ ID NO: 95668 - DNA, 25 bp, Homo sapien
tagttctcaactggggtgttaagag

SEQ ID NO: 95669 - DNA, 25 bp, Homo sapien
aatacatctaagatcagtagttctc

SEQ ID NO: 95670 - DNA, 25 bp, Homo sapien
ctttaatacatctaagatcagtagt

SEQ ID NO: 95671 - DNA, 25 bp, Homo sapien
ttaatacatctaagatcagtagttc

SEQ ID NO: 95672 - DNA, 25 bp, Homo sapien
aggttctgtgagtcaccaggtttac

SEQ ID NO: 95673 - DNA, 25 bp, Homo sapien
caaggttctgtgagtcaccaggttt

SEQ ID NO: 95674 - DNA, 25 bp, Homo sapien
tgtgagtcaccaggtttactttcat

SEQ ID NO: 95675 - DNA, 25 bp, Homo sapien
tgagtcaccaggtttactttcattc

SEQ ID NO: 95676 - DNA, 25 bp, Homo sapien
ccgtatttattaggacagtcatcat

SEQ ID NO: 95677 - DNA, 25 bp, Homo sapien
tccgtatttattaggacagtcatca

SEQ ID NO: 95678 - DNA, 25 bp, Homo sapien
ctctgccaaattccacttgacatca

SEQ ID NO: 95679 - DNA, 25 bp, Homo sapien
tctgccaaattccacttgacatcaa

SEQ ID NO: 95680 - DNA, 25 bp, Homo sapien
ctattcacttccttcctgatatctt

SEQ ID NO: 95681 - DNA, 25 bp, Homo sapien
cagtttagaagctctattcacttcc

SEQ ID NO: 95682 - DNA, 25 bp, Homo sapien
gaagctctattcacttccttcctga

SEQ ID NO: 95683 - DNA, 25 bp, Homo sapien
agctctattcacttccttcctgata

SEQ ID NO: 95684 - DNA, 25 bp, Homo sapien
aaatgtttcttatgtgcttcccttg

SEQ ID NO: 95685 - DNA, 25 bp, Homo sapien
cttcccttgtagaccttcttgaata

SEQ ID NO: 95686 - DNA, 25 bp, Homo sapien
tgtttcttatgtgcttcccttgtag

SEQ ID NO: 95687 - DNA, 25 bp, Homo sapien
gtagaccttcttgaataaagctgct

SEQ ID NO: 95688 - DNA, 25 bp, Homo sapien
tggagaatacctgccaacccgaaac

SEQ ID NO: 95689 - DNA, 25 bp, Homo sapien
gagttactgctgacccctttgagca

SEQ ID NO: 95690 - DNA, 25 bp, Homo sapien
cacgtagtccttagattcatgctca

SEQ ID NO: 95691 - DNA, 25 bp, Homo sapien
gaaatgaatatactaccagtgccgc

SEQ ID NO: 95692 - DNA, 25 bp, Homo sapien
ttatttcatcatgtaacagctgtgg

SEQ ID NO: 95693 - DNA, 25 bp, Homo sapien
tgaaaaactgttctacccagaaaca

SEQ ID NO: 95694 - DNA, 25 bp, Homo sapien
gacaccaaagattcactcctataac

SEQ ID NO: 95695 - DNA, 25 bp, Homo sapien
taacagctgtggtaagggtatatta

SEQ ID NO: 95696 - DNA, 25 bp, Homo sapien
attgccagtaaactggaaaatacat

SEQ ID NO: 95697 - DNA, 25 bp, Homo sapien
aattgccagtaaactggaaaataca

SEQ ID NO: 95698 - DNA, 25 bp, Homo sapien
ctgtaaacagtctctatgaaaccaa

SEQ ID NO: 95699 - DNA, 25 bp, Homo sapien
cagtctctatgaaaccaagcgttct

SEQ ID NO: 95700 - DNA, 25 bp, Homo sapien
tctctatgaaaccaagcgttcttac

SEQ ID NO: 95701 - DNA, 25 bp, Homo sapien
taaacagtctctatgaaaccaagcg

SEQ ID NO: 95702 - DNA, 25 bp, Homo sapien
aagatgtcactattattgcatattg

SEQ ID NO: 95703 - DNA, 25 bp, Homo sapien
gaaagatgtcactattattgcatat

SEQ ID NO: 95704 - DNA, 25 bp, Homo sapien
ctgaaagatgtcactattattgcat

SEQ ID NO: 95705 - DNA, 25 bp, Homo sapien
agatgtcactattattgcatattgt

SEQ ID NO: 95706 - DNA, 25 bp, Homo sapien
ataaaagaagatataaaatatgctt

SEQ ID NO: 95707 - DNA, 25 bp, Homo sapien
ctataaaagaagatataaaatatgc

SEQ ID NO: 95708 - DNA, 25 bp, Homo sapien
aagaagatataaaatatgctttgac

SEQ ID NO: 95709 - DNA, 25 bp, Homo sapien
aaaagaagatataaaatatgctttg

SEQ ID NO: 95710 - DNA, 25 bp, Homo sapien
caacgacatcttcgaacatcacaac

SEQ ID NO: 95711 - DNA, 25 bp, Homo sapien
cgacatcttcgaacatcacaacgct

SEQ ID NO: 95712 - DNA, 25 bp, Homo sapien
aacgacatcttcgaacatcacaacg

SEQ ID NO: 95713 - DNA, 25 bp, Homo sapien
acgacatcttcgaacatcacaacgc

SEQ ID NO: 95714 - DNA, 25 bp, Homo sapien
tatggtggtccaaaaggaacagtgc

SEQ ID NO: 95715 - DNA, 25 bp, Homo sapien
tagaaaagagccgtatccactgaca

SEQ ID NO: 95716 - DNA, 25 bp, Homo sapien
taacaagcacaatgaagggaacccc

SEQ ID NO: 95717 - DNA, 25 bp, Homo sapien
cagagcaggctagacctcagctgaa

SEQ ID NO: 95718 - DNA, 25 bp, Homo sapien
ctcccatgaccgtaatgaggagcag

SEQ ID NO: 95719 - DNA, 25 bp, Homo sapien
tgaccgtaatgaggagcaggctaaa

SEQ ID NO: 95720 - DNA, 25 bp, Homo sapien
tttgctcccatgaccgtaatgagga

SEQ ID NO: 95721 - DNA, 25 bp, Homo sapien
gtaatgaggagcaggctaaatgtgt

SEQ ID NO: 95722 - DNA, 25 bp, Homo sapien
gactgtctgggtaatttaggtgatg

SEQ ID NO: 95723 - DNA, 25 bp, Homo sapien
ctgtctgggtaatttaggtgatgac

SEQ ID NO: 95724 - DNA, 25 bp, Homo sapien
ctgggtaatttaggtgatgactctt

SEQ ID NO: 95725 - DNA, 25 bp, Homo sapien
taatttaggtgatgactcttccaac

SEQ ID NO: 95726 - DNA, 25 bp, Homo sapien
tgttgatatacaatcttttagtttt

SEQ ID NO: 95727 - DNA, 25 bp, Homo sapien
ttaatttggaatcctaactctatta

SEQ ID NO: 95728 - DNA, 25 bp, Homo sapien
tttgttgatatacaatcttttagtt

SEQ ID NO: 95729 - DNA, 25 bp, Homo sapien
ctttgttgatatacaatcttttagt

SEQ ID NO: 95730 - DNA, 25 bp, Homo sapien
tctaaggcactattccagatattgg

SEQ ID NO: 95731 - DNA, 25 bp, Homo sapien
tttctgaatgcatctaaggcactat

SEQ ID NO: 95732 - DNA, 25 bp, Homo sapien
taaagtttcgatttctgaatgcatc

SEQ ID NO: 95733 - DNA, 25 bp, Homo sapien
gaatgcatctaaggcactattccag

SEQ ID NO: 95734 - DNA, 25 bp, Homo sapien
gcattttgccagcttcatagtaaag

SEQ ID NO: 95735 - DNA, 25 bp, Homo sapien
catatgggtgcagtaaaagtaaacc

SEQ ID NO: 95736 - DNA, 25 bp, Homo sapien
tatagcactaggtaagactagctac

SEQ ID NO: 95737 - DNA, 25 bp, Homo sapien
caagaaatccagagtataatgccac

SEQ ID NO: 95738 - DNA, 25 bp, Homo sapien
gcaagaaagatgacctgagaattca

SEQ ID NO: 95739 - DNA, 25 bp, Homo sapien
taagtcagctacagttgttgcagta

SEQ ID NO: 95740 - DNA, 25 bp, Homo sapien
gagacatccaattaactcaaggtag

SEQ ID NO: 95741 - DNA, 25 bp, Homo sapien
catggtagccaagtatgtcttttac

SEQ ID NO: 95742 - DNA, 25 bp, Homo sapien
tgtcgttataagtctgagacatcca

SEQ ID NO: 95743 - DNA, 25 bp, Homo sapien
ggtcaatatatgtattacccagcag

SEQ ID NO: 95744 - DNA, 25 bp, Homo sapien
catgcccgacctacacaatgcttat

SEQ ID NO: 95745 - DNA, 25 bp, Homo sapien
gacagcaggaatcatacataccttg

SEQ ID NO: 95746 - DNA, 25 bp, Homo sapien
ccagtgttctaaactaaaggacagc

SEQ ID NO: 95747 - DNA, 25 bp, Homo sapien
gagactattggttatgaaatgtgga

SEQ ID NO: 95748 - DNA, 25 bp, Homo sapien
tggtggacatagtaaggatgaaacc

SEQ ID NO: 95749 - DNA, 25 bp, Homo sapien
tgagctaagaacacacatgtttatc

SEQ ID NO: 95750 - DNA, 25 bp, Homo sapien
tgacttataagcacaacaatttgat

SEQ ID NO: 95751 - DNA, 25 bp, Homo sapien
aaagactctcaggtttatgacacag

SEQ ID NO: 95752 - DNA, 25 bp, Homo sapien
aagactctcaggtttatgacacagg

SEQ ID NO: 95753 - DNA, 25 bp, Homo sapien
tctcaggtttatgacacaggatgct

SEQ ID NO: 95754 - DNA, 25 bp, Homo sapien
gactctcaggtttatgacacaggat

SEQ ID NO: 95755 - DNA, 25 bp, Homo sapien
gcaaaaataagaatgtcttccattg

SEQ ID NO: 95756 - DNA, 25 bp, Homo sapien
ctggaggaatggaactgcaaccagt

SEQ ID NO: 95757 - DNA, 25 bp, Homo sapien
ggaatggaactgcaaccagttgcaa

SEQ ID NO: 95758 - DNA, 25 bp, Homo sapien
ggaactgcaaccagttgcaaaaata

SEQ ID NO: 95759 - DNA, 25 bp, Homo sapien
cagacactcaattgaaggagtgggt

SEQ ID NO: 95760 - DNA, 25 bp, Homo sapien
tagagtgtttcttatggtgaagtcc

SEQ ID NO: 95761 - DNA, 25 bp, Homo sapien
ggtgaagtccatattttcttgaaac

SEQ ID NO: 95762 - DNA, 25 bp, Homo sapien
ggtgatgggaattgctaaacagtta

SEQ ID NO: 95763 - DNA, 25 bp, Homo sapien
ccaattttgactagtatgctttaac

SEQ ID NO: 95764 - DNA, 25 bp, Homo sapien
gcctaagtggctataatattccttt

SEQ ID NO: 95765 - DNA, 25 bp, Homo sapien
taaaagagagttatcaatagcagct

SEQ ID NO: 95766 - DNA, 25 bp, Homo sapien
gaagctaactagtttgttcaaagtg

SEQ ID NO: 95767 - DNA, 25 bp, Homo sapien
acttttattaaccatgctaccatac

SEQ ID NO: 95768 - DNA, 25 bp, Homo sapien
tacttttattaaccatgctaccata

SEQ ID NO: 95769 - DNA, 25 bp, Homo sapien
caactaatttggtgacatcctagaa

SEQ ID NO: 95770 - DNA, 25 bp, Homo sapien
gcagtgtgggtcatcttaatataaa

SEQ ID NO: 95771 - DNA, 25 bp, Homo sapien
gaataaacctagagaaattgtggca

SEQ ID NO: 95772 - DNA, 25 bp, Homo sapien
caggctggctgagtatctcgattct

SEQ ID NO: 95773 - DNA, 25 bp, Homo sapien
aatgctatggcgtcaacttacctta

SEQ ID NO: 95774 - DNA, 25 bp, Homo sapien
taatggtcaaatggccaaacctacc

SEQ ID NO: 95775 - DNA, 25 bp, Homo sapien
gccaaggctttaaagaagacacact

SEQ ID NO: 95776 - DNA, 25 bp, Homo sapien
ttaccttagcatacaaccaacttga

SEQ ID NO: 95777 - DNA, 25 bp, Homo sapien
gactatgggactatatattttcaca

SEQ ID NO: 95778 - DNA, 25 bp, Homo sapien
tgagaatacaacagctgacacctgc

SEQ ID NO: 95779 - DNA, 25 bp, Homo sapien
tgacacctgctttgtgtattaagaa

SEQ ID NO: 95780 - DNA, 25 bp, Homo sapien
gaaatacggtacttatctctgagtg

SEQ ID NO: 95781 - DNA, 25 bp, Homo sapien
aataaaaactgtatggtgactttgg

SEQ ID NO: 95782 - DNA, 25 bp, Homo sapien
ataaaaactgtatggtgactttggg

SEQ ID NO: 95783 - DNA, 25 bp, Homo sapien
caattactattggtgagacaaaaaa

SEQ ID NO: 95784 - DNA, 25 bp, Homo sapien
attgatctttcaattactattggtg

SEQ ID NO: 95785 - DNA, 25 bp, Homo sapien
tcatgctggtaatcaatcaaaggct

SEQ ID NO: 95786 - DNA, 25 bp, Homo sapien
gaatgctaaaggcacagtcactgaa

SEQ ID NO: 95787 - DNA, 25 bp, Homo sapien
tgtagctaacccaagtacactgcct

SEQ ID NO: 95788 - DNA, 25 bp, Homo sapien
gaaaccaaggtgaattctcatgctg

SEQ ID NO: 95789 - DNA, 25 bp, Homo sapien
gcttataggatctctcaaatgtgga

SEQ ID NO: 95790 - DNA, 25 bp, Homo sapien
aacgatcacctagcataatacctgg

SEQ ID NO: 95791 - DNA, 25 bp, Homo sapien
gggtgtcagacactaactgcttgct

SEQ ID NO: 95792 - DNA, 25 bp, Homo sapien
aataggcagtttacctttagtggca

SEQ ID NO: 95793 - DNA, 25 bp, Homo sapien
gccacgtgaccgcaaaatatatggg

SEQ ID NO: 95794 - DNA, 25 bp, Homo sapien
ggtttaatgtacacttgaagccacg

SEQ ID NO: 95795 - DNA, 25 bp, Homo sapien
agcctcaaattctgacggtcaaacg

SEQ ID NO: 95796 - DNA, 25 bp, Homo sapien
cagactgcccactagttgggactat

SEQ ID NO: 95797 - DNA, 25 bp, Homo sapien
ctgaagtaaatgaagctcctgaaac

SEQ ID NO: 95798 - DNA, 25 bp, Homo sapien
aagtaaatgaagctcctgaaacaca

SEQ ID NO: 95799 - DNA, 25 bp, Homo sapien
tagctctcgtttctcagtgcagcag

SEQ ID NO: 95800 - DNA, 25 bp, Homo sapien
ttttaacgttagctctcgtttctca

SEQ ID NO: 95801 - DNA, 25 bp, Homo sapien
agagcacttaaagggtgataatgct

SEQ ID NO: 95802 - DNA, 25 bp, Homo sapien
aggaagacctccactctcggtagaa

SEQ ID NO: 95803 - DNA, 25 bp, Homo sapien
cccgtaatgttaggcgaatactaag

SEQ ID NO: 95804 - DNA, 25 bp, Homo sapien
cactctcggtagaactgggagaccc

SEQ ID NO: 95805 - DNA, 25 bp, Homo sapien
tgggagacccggtgcaggttaattc

SEQ ID NO: 95806 - DNA, 25 bp, Homo sapien
ctcccacgagccactgcccggctgg

SEQ ID NO: 95807 - DNA, 25 bp, Homo sapien
tggctcccacgagccactgcccggc

SEQ ID NO: 95808 - DNA, 25 bp, Homo sapien
gctcccacgagccactgcccggctg

SEQ ID NO: 95809 - DNA, 25 bp, Homo sapien
cttggctcccacgagccactgcccg

SEQ ID NO: 95810 - DNA, 25 bp, Homo sapien
tgcctttcccgaatactggctgctg

SEQ ID NO: 95811 - DNA, 25 bp, Homo sapien
tctgcctttcccgaatactggctgc

SEQ ID NO: 95812 - DNA, 25 bp, Homo sapien
tgtctgcctttcccgaatactggct

SEQ ID NO: 95813 - DNA, 25 bp, Homo sapien
ctgtctgcctttcccgaatactggc

SEQ ID NO: 95814 - DNA, 25 bp, Homo sapien
cttcaaggagaagagaataagtcag

SEQ ID NO: 95815 - DNA, 25 bp, Homo sapien
tcaaggagaagagaataagtcagta

SEQ ID NO: 95816 - DNA, 25 bp, Homo sapien
ttcaaggagaagagaataagtcagt

SEQ ID NO: 95817 - DNA, 25 bp, Homo sapien
caaggagaagagaataagtcagtac

SEQ ID NO: 95818 - DNA, 25 bp, Homo sapien
aaggatgtcgtcggggcagtcacga

SEQ ID NO: 95819 - DNA, 25 bp, Homo sapien
agaaggatgtcgtcggggcagtcac

SEQ ID NO: 95820 - DNA, 25 bp, Homo sapien
gagaaggatgtcgtcggggcagtca

SEQ ID NO: 95821 - DNA, 25 bp, Homo sapien
ggatgtcgtcggggcagtcacgaag

SEQ ID NO: 95822 - DNA, 25 bp, Homo sapien
atatgaggcacattgaaattcaaca

SEQ ID NO: 95823 - DNA, 25 bp, Homo sapien
ttccatactggttctcctgtgctgt

SEQ ID NO: 95824 - DNA, 25 bp, Homo sapien
tcctgtgctgtttttaatatgaggc

SEQ ID NO: 95825 - DNA, 25 bp, Homo sapien
ttaatatgaggcacattgaaattca

SEQ ID NO: 95826 - DNA, 25 bp, Homo sapien
aaagagatcctcaactggtaagcat

SEQ ID NO: 95827 - DNA, 25 bp, Homo sapien
ccctaaagagtatttgatagactta

SEQ ID NO: 95828 - DNA, 25 bp, Homo sapien
tgtggtaagaactccaaatgggctt

SEQ ID NO: 95829 - DNA, 25 bp, Homo sapien
cagacagctttgaggtgtggtaaga

SEQ ID NO: 95830 - DNA, 25 bp, Homo sapien
tctcttagctccttcacagatagca

SEQ ID NO: 95831 - DNA, 25 bp, Homo sapien
ccttcacagatagcagaggagagat

SEQ ID NO: 95832 - DNA, 25 bp, Homo sapien
cacagatagcagaggagagattata

SEQ ID NO: 95833 - DNA, 25 bp, Homo sapien
tagctccttcacagatagcagagga

SEQ ID NO: 95834 - DNA, 25 bp, Homo sapien
aagcccataaagtactgcatttgtt

SEQ ID NO: 95835 - DNA, 25 bp, Homo sapien
taatcacacaaacttaacagttaag

SEQ ID NO: 95836 - DNA, 25 bp, Homo sapien
gcccataaagtactgcatttgtttt

SEQ ID NO: 95837 - DNA, 25 bp, Homo sapien
tctccaaatgttctactaggcaagc

SEQ ID NO: 95838 - DNA, 25 bp, Homo sapien
aggatctcgatcagagtgtaaaagc

SEQ ID NO: 95839 - DNA, 25 bp, Homo sapien
catctggaataggatctcgatcaga

SEQ ID NO: 95840 - DNA, 25 bp, Homo sapien
aggaacatctggaataggatctcga

SEQ ID NO: 95841 - DNA, 25 bp, Homo sapien
gaataggatctcgatcagagtgtaa

SEQ ID NO: 95842 - DNA, 25 bp, Homo sapien
cttggctacttgtgttactgcacta

SEQ ID NO: 95843 - DNA, 25 bp, Homo sapien
tgctaacgctgcatttgcaatatct

SEQ ID NO: 95844 - DNA, 25 bp, Homo sapien
gattcatatagttgatttcgaagat

SEQ ID NO: 95845 - DNA, 25 bp, Homo sapien
tcttccagtttacttcttgaaatag

SEQ ID NO: 95846 - DNA, 25 bp, Homo sapien
tgcaacagaggcactttggatctca

SEQ ID NO: 95847 - DNA, 25 bp, Homo sapien
cactttggatctcaatatgcaacac

SEQ ID NO: 95848 - DNA, 25 bp, Homo sapien
gcaacacgggcactttggatcctct

SEQ ID NO: 95849 - DNA, 25 bp, Homo sapien
gatctcaatatgcaacacgggcact

SEQ ID NO: 95850 - DNA, 25 bp, Homo sapien
taatacaaacatatcatcttccaaa

SEQ ID NO: 95851 - DNA, 25 bp, Homo sapien
ccataacagtttccatttccgtgtc

SEQ ID NO: 95852 - DNA, 25 bp, Homo sapien
aagcagaagaggctgtcaactatag

SEQ ID NO: 95853 - DNA, 25 bp, Homo sapien
ggctgtcaactatagtgtccataac

SEQ ID NO: 95854 - DNA, 25 bp, Homo sapien
actatagtgtccataacagtttcca

SEQ ID NO: 95855 - DNA, 25 bp, Homo sapien
ctagctatacgcaggagattaaaac

SEQ ID NO: 95856 - DNA, 25 bp, Homo sapien
gataactggctagctatacgcagga

SEQ ID NO: 95857 - DNA, 25 bp, Homo sapien
aacaaaaggacatacgtggccagca

SEQ ID NO: 95858 - DNA, 25 bp, Homo sapien
aacctagacaacattctgaacacag

SEQ ID NO: 95859 - DNA, 25 bp, Homo sapien
cagtgaacactgtactcaaaaggta

SEQ ID NO: 95860 - DNA, 25 bp, Homo sapien
tattttgatcccctatgggcagttt

SEQ ID NO: 95861 - DNA, 25 bp, Homo sapien
gagctgaccaatcaatgtgactgca

SEQ ID NO: 95862 - DNA, 25 bp, Homo sapien
tgcagtcatggctagccttgacctg

SEQ ID NO: 95863 - DNA, 25 bp, Homo sapien
ttgaacatctgattataggaacagc

SEQ ID NO: 95864 - DNA, 25 bp, Homo sapien
gaacatctgattataggaacagcac

SEQ ID NO: 95865 - DNA, 25 bp, Homo sapien
cttgaacatctgattataggaacag

SEQ ID NO: 95866 - DNA, 25 bp, Homo sapien
tgaacatctgattataggaacagca

SEQ ID NO: 95867 - DNA, 25 bp, Homo sapien
aagtgtatcacctgtaaaaagactg

SEQ ID NO: 95868 - DNA, 25 bp, Homo sapien
gattttctcgaagtttcttgtctag

SEQ ID NO: 95869 - DNA, 25 bp, Homo sapien
tctcttagattttctcgaagtttct

SEQ ID NO: 95870 - DNA, 25 bp, Homo sapien
ctgaattggccagctccaagtgtat

SEQ ID NO: 95871 - DNA, 25 bp, Homo sapien
gacagtggatttcctaactgcattg

SEQ ID NO: 95872 - DNA, 25 bp, Homo sapien
caaaaggcatcactatctgtttaca

SEQ ID NO: 95873 - DNA, 25 bp, Homo sapien
cattacactcttctgggtataggac

SEQ ID NO: 95874 - DNA, 25 bp, Homo sapien
gataaaaagtcagagtggcaccctt

SEQ ID NO: 95875 - DNA, 25 bp, Homo sapien
aacaaggactaataagggcctctgg

SEQ ID NO: 95876 - DNA, 25 bp, Homo sapien
gatatgtccaagtatgatgtaaagg

SEQ ID NO: 95877 - DNA, 25 bp, Homo sapien
tgtaaaggagttgccaaatctatgt

SEQ ID NO: 95878 - DNA, 25 bp, Homo sapien
cagtacatcgtgcaccaatgcttga

SEQ ID NO: 95879 - DNA, 25 bp, Homo sapien
gatgtaaaggagttgccaaatctat

SEQ ID NO: 95880 - DNA, 25 bp, Homo sapien
taaattaaagggaacactgcatgtt

SEQ ID NO: 95881 - DNA, 25 bp, Homo sapien
ttgttcataggtctcagttccatcc

SEQ ID NO: 95882 - DNA, 25 bp, Homo sapien
ctatatttcagtaataagtgctgca

SEQ ID NO: 95883 - DNA, 25 bp, Homo sapien
gcatccacacccagtaataccaaat

SEQ ID NO: 95884 - DNA, 25 bp, Homo sapien
tgattccatgttctactacttaggg

SEQ ID NO: 95885 - DNA, 25 bp, Homo sapien
catcctagagtcatggcatagaaga

SEQ ID NO: 95886 - DNA, 25 bp, Homo sapien
tcttgccctgtctactgaattaaag

SEQ ID NO: 95887 - DNA, 25 bp, Homo sapien
tatttcttcgacactcatcctagag

SEQ ID NO: 95888 - DNA, 25 bp, Homo sapien
taaacaacaacgtcttgccatttgc

SEQ ID NO: 95889 - DNA, 25 bp, Homo sapien
actgtagtagccacaacctgttggg

SEQ ID NO: 95890 - DNA, 25 bp, Homo sapien
taactcccacatctaacttatcagc

SEQ ID NO: 95891 - DNA, 25 bp, Homo sapien
gcctggccggcatctcacatttaac

SEQ ID NO: 95892 - DNA, 25 bp, Homo sapien
gagtcaaggccaggaatgatgctaa

SEQ ID NO: 95893 - DNA, 25 bp, Homo sapien
ccactggcacctagagagtcaaggc

SEQ ID NO: 95894 - DNA, 25 bp, Homo sapien
ggtccaaaacgtcaataatgccaag

SEQ ID NO: 95895 - DNA, 25 bp, Homo sapien
cacaactgagggagttccactggca

SEQ ID NO: 95896 - DNA, 25 bp, Homo sapien
ttatcaatggtgcagattttcaggc

SEQ ID NO: 95897 - DNA, 25 bp, Homo sapien
tgtgtatttcccgtttaaaatgaga

SEQ ID NO: 95898 - DNA, 25 bp, Homo sapien
tcatagttgtttgtaagttctaata

SEQ ID NO: 95899 - DNA, 25 bp, Homo sapien
ccatcttgtggaggcaaagggtata

SEQ ID NO: 95900 - DNA, 25 bp, Homo sapien
tgtccatccctttgactgaagtcca

SEQ ID NO: 95901 - DNA, 25 bp, Homo sapien
tctgcagctgaacaatcaaatccac

SEQ ID NO: 95902 - DNA, 25 bp, Homo sapien
ctttaattaaagtccctatgtctat

SEQ ID NO: 95903 - DNA, 25 bp, Homo sapien
tataacttccgatttaatgtttcaa

SEQ ID NO: 95904 - DNA, 25 bp, Homo sapien
aaacttgttattatcgactttctga

SEQ ID NO: 95905 - DNA, 25 bp, Homo sapien
tagcttccttgtgaccggttcaaac

SEQ ID NO: 95906 - DNA, 25 bp, Homo sapien
agaaacttgttattatcgactttct

SEQ ID NO: 95907 - DNA, 25 bp, Homo sapien
gcttccttgtgaccggttcaaacat

SEQ ID NO: 95908 - DNA, 25 bp, Homo sapien
gcctcctgatgcttggtcatttcca

SEQ ID NO: 95909 - DNA, 25 bp, Homo sapien
actacacagtagtccaatgtttggc

SEQ ID NO: 95910 - DNA, 25 bp, Homo sapien
tggctaaatcaacttatgcaaccag

SEQ ID NO: 95911 - DNA, 25 bp, Homo sapien
tccttctagaaaaacattgatgcat

SEQ ID NO: 95912 - DNA, 25 bp, Homo sapien
atttatcaaccggagttaaatcata

SEQ ID NO: 95913 - DNA, 25 bp, Homo sapien
tatcaaccggagttaaatcataaga

SEQ ID NO: 95914 - DNA, 25 bp, Homo sapien
tcaaccggagttaaatcataagact

SEQ ID NO: 95915 - DNA, 25 bp, Homo sapien
ttatcaaccggagttaaatcataag

SEQ ID NO: 95916 - DNA, 25 bp, Homo sapien
cataatgcttttaagtcgtttgacc

SEQ ID NO: 95917 - DNA, 25 bp, Homo sapien
ctgtgctctgtaagattctagttct

SEQ ID NO: 95918 - DNA, 25 bp, Homo sapien
tgtaagattctagttcttgctgaac

SEQ ID NO: 95919 - DNA, 25 bp, Homo sapien
agtcgtttgacctcatcttcctgtg

SEQ ID NO: 95920 - DNA, 25 bp, Homo sapien
cagaaagcatacttatggctccttc

SEQ ID NO: 95921 - DNA, 25 bp, Homo sapien
ctaacagctgatgttagcttagcgg

SEQ ID NO: 95922 - DNA, 25 bp, Homo sapien
tagcggtattgtcagaaagcatact

SEQ ID NO: 95923 - DNA, 25 bp, Homo sapien
gttagcttagcggtattgtcagaaa

SEQ ID NO: 95924 - DNA, 25 bp, Homo sapien
tggcaacatttgtatggagatcaat

SEQ ID NO: 95925 - DNA, 25 bp, Homo sapien
tttctcaaggagttctggcaaagaa

SEQ ID NO: 95926 - DNA, 25 bp, Homo sapien
gcagtggcaacatttgtatggagat

SEQ ID NO: 95927 - DNA, 25 bp, Homo sapien
ttatatgttctaaaacagcagtggc

SEQ ID NO: 95928 - DNA, 25 bp, Homo sapien
gataatgaatactaaagcatcttac

SEQ ID NO: 95929 - DNA, 25 bp, Homo sapien
tagaaatatcatagattcccacttc

SEQ ID NO: 95930 - DNA, 25 bp, Homo sapien
tcatgttacagtggggactcaataa

SEQ ID NO: 95931 - DNA, 25 bp, Homo sapien
acttctatttactaaacatgtgacc

SEQ ID NO: 95932 - DNA, 25 bp, Homo sapien
gccatttcacagagacactacatat

SEQ ID NO: 95933 - DNA, 25 bp, Homo sapien
tgtatcacctccacaagagacaatg

SEQ ID NO: 95934 - DNA, 25 bp, Homo sapien
caggtaaacagatctgaacagcctt

SEQ ID NO: 95935 - DNA, 25 bp, Homo sapien
gaatcacctacagactgcagttctg

SEQ ID NO: 95936 - DNA, 25 bp, Homo sapien
acaccctgctactatcccagtgtgg

SEQ ID NO: 95937 - DNA, 25 bp, Homo sapien
tgctctccatccagaacactctcca

SEQ ID NO: 95938 - DNA, 25 bp, Homo sapien
ccctgctactatcccagtgtggaca

SEQ ID NO: 95939 - DNA, 25 bp, Homo sapien
gctactatcccagtgtggacaccca

SEQ ID NO: 95940 - DNA, 25 bp, Homo sapien
tggccagggcaatcaggcaggagaa

SEQ ID NO: 95941 - DNA, 25 bp, Homo sapien
ctattcaacatagtgttggaagttc

SEQ ID NO: 95942 - DNA, 25 bp, Homo sapien
aagacagggatgccctctctcacct

SEQ ID NO: 95943 - DNA, 25 bp, Homo sapien
acagggatgccctctctcacctctc

SEQ ID NO: 95944 - DNA, 25 bp, Homo sapien
gcacgcaaggccaaagttttataga

SEQ ID NO: 95945 - DNA, 25 bp, Homo sapien
gctactcccttgcagtggcacgcaa

SEQ ID NO: 95946 - DNA, 25 bp, Homo sapien
tacatcagcatgtagaggattccct

SEQ ID NO: 95947 - DNA, 25 bp, Homo sapien
tatgagattctaggaaaaaggccac

SEQ ID NO: 95948 - DNA, 25 bp, Homo sapien
ataaacattagatgagaatatatta

SEQ ID NO: 95949 - DNA, 25 bp, Homo sapien
tctagaagagatttatccagagtag

SEQ ID NO: 95950 - DNA, 25 bp, Homo sapien
tattatatctagaagagatttatcc

SEQ ID NO: 95951 - DNA, 25 bp, Homo sapien
tccagagtagttttgctcattattt

SEQ ID NO: 95952 - DNA, 25 bp, Homo sapien
tatccagagtagttttgctcattat

SEQ ID NO: 95953 - DNA, 25 bp, Homo sapien
gattggccatagagttcctttaaaa

SEQ ID NO: 95954 - DNA, 25 bp, Homo sapien
gcctggccagtctttaccattgtta

SEQ ID NO: 95955 - DNA, 25 bp, Homo sapien
ggcctctggtaactctatcatcata

SEQ ID NO: 95956 - DNA, 25 bp, Homo sapien
catcgtactcctaggctcaacggat

SEQ ID NO: 95957 - DNA, 25 bp, Homo sapien
tagccagtcccctgtatataacaaa

SEQ ID NO: 95958 - DNA, 25 bp, Homo sapien
gagcctattcaagctgacttctggg

SEQ ID NO: 95959 - DNA, 25 bp, Homo sapien
atctttactagttgggcattgctgc

SEQ ID NO: 95960 - DNA, 25 bp, Homo sapien
ggaatacatgagtatacaccgcccc

SEQ ID NO: 95961 - DNA, 25 bp, Homo sapien
tgcttgctgtgtgcttatataatag

SEQ ID NO: 95962 - DNA, 25 bp, Homo sapien
ggtgcttgctgtgtgcttatataat

SEQ ID NO: 95963 - DNA, 25 bp, Homo sapien
cttgctgtgtgcttatataatagat

SEQ ID NO: 95964 - DNA, 25 bp, Homo sapien
tgctgtgtgcttatataatagataa

SEQ ID NO: 95965 - DNA, 25 bp, Homo sapien
ttaattaggctattagaataccctg

SEQ ID NO: 95966 - DNA, 25 bp, Homo sapien
cctgagatatataggtaaacccctg

SEQ ID NO: 95967 - DNA, 25 bp, Homo sapien
taaaggagcctatcttaacgatcac

SEQ ID NO: 95968 - DNA, 25 bp, Homo sapien
tatataggtaaacccctgttgatga

SEQ ID NO: 95969 - DNA, 25 bp, Homo sapien
gcatcctgcatcagttaaagctttt

SEQ ID NO: 95970 - DNA, 25 bp, Homo sapien
taaggttgcatcctgcatcagttaa

SEQ ID NO: 95971 - DNA, 25 bp, Homo sapien
ccactgtttgatatattgtaaagga

SEQ ID NO: 95972 - DNA, 25 bp, Homo sapien
aaggattaaggttgcatcctgcatc

SEQ ID NO: 95973 - DNA, 25 bp, Homo sapien
tgcacaagtgaattttcctgtatcc

SEQ ID NO: 95974 - DNA, 25 bp, Homo sapien
tgggataaatccttaagagaagtac

SEQ ID NO: 95975 - DNA, 25 bp, Homo sapien
taacactactgctagacatttaggt

SEQ ID NO: 95976 - DNA, 25 bp, Homo sapien
caattgtgtctaaagtcttagctcc

SEQ ID NO: 95977 - DNA, 25 bp, Homo sapien
tgctcccttgtttccaggtacatgc

SEQ ID NO: 95978 - DNA, 25 bp, Homo sapien
actgatgtagagacttgatggctta

SEQ ID NO: 95979 - DNA, 25 bp, Homo sapien
caatacgattgatgaaggatgggca

SEQ ID NO: 95980 - DNA, 25 bp, Homo sapien
catgctgtcctttagggagtataaa

SEQ ID NO: 95981 - DNA, 25 bp, Homo sapien
cccattggtttagtggtagtgctgc

SEQ ID NO: 95982 - DNA, 25 bp, Homo sapien
tttagtggtagtgctgccatagctg

SEQ ID NO: 95983 - DNA, 25 bp, Homo sapien
tgctgccatagctggccggagctga

SEQ ID NO: 95984 - DNA, 25 bp, Homo sapien
gctgccatagctggccggagctgag

SEQ ID NO: 95985 - DNA, 25 bp, Homo sapien
gccaggcctagcttcaagtctatat

SEQ ID NO: 95986 - DNA, 25 bp, Homo sapien
tggagtaagatgtcatacctagccc

SEQ ID NO: 95987 - DNA, 25 bp, Homo sapien
tgaaaatcacacatactccactggg

SEQ ID NO: 95988 - DNA, 25 bp, Homo sapien
cattaaaaccagttactcagtgtgg

SEQ ID NO: 95989 - DNA, 25 bp, Homo sapien
ggacagctttcagatcacccaagag

SEQ ID NO: 95990 - DNA, 25 bp, Homo sapien
cagaacagacttagcgaattttgcc

SEQ ID NO: 95991 - DNA, 25 bp, Homo sapien
gaattttgcctcaactctgagaatg

SEQ ID NO: 95992 - DNA, 25 bp, Homo sapien
aaaatctcagaaggctagggacagc

SEQ ID NO: 95993 - DNA, 25 bp, Homo sapien
tcactaaacagaagggtcttgagaa

SEQ ID NO: 95994 - DNA, 25 bp, Homo sapien
cactaaacagaagggtcttgagaat

SEQ ID NO: 95995 - DNA, 25 bp, Homo sapien
actaaacagaagggtcttgagaatt

SEQ ID NO: 95996 - DNA, 25 bp, Homo sapien
tgtttcaaaaccaggttcttcactc

SEQ ID NO: 95997 - DNA, 25 bp, Homo sapien
gctgtttcaaaaccaggttcttcac

SEQ ID NO: 95998 - DNA, 25 bp, Homo sapien
ctgtttcaaaaccaggttcttcact

SEQ ID NO: 95999 - DNA, 25 bp, Homo sapien
ccttttcacatatagtctaagaggg

SEQ ID NO: 96000 - DNA, 25 bp, Homo sapien
gaagataagctgattctcgacagta

SEQ ID NO: 96001 - DNA, 25 bp, Homo sapien
gataaataagaaccgggcgcaggct

SEQ ID NO: 96002 - DNA, 25 bp, Homo sapien
ggcgcaggctaagccgtaaagtata

SEQ ID NO: 96003 - DNA, 25 bp, Homo sapien
catggctcttctggtagtggtggca

SEQ ID NO: 96004 - DNA, 25 bp, Homo sapien
cagtctatctagcaaaaggcagaca

SEQ ID NO: 96005 - DNA, 25 bp, Homo sapien
gagaaactgcctatgtcaaagtggt

SEQ ID NO: 96006 - DNA, 25 bp, Homo sapien
gggatttacttctaacagtgacatg

SEQ ID NO: 96007 - DNA, 25 bp, Homo sapien
catatcataatcttaagggccagac

SEQ ID NO: 96008 - DNA, 25 bp, Homo sapien
actgcacccgacatataaaatcatg

SEQ ID NO: 96009 - DNA, 25 bp, Homo sapien
tgtgatgcacaaaacttatgctgcc

SEQ ID NO: 96010 - DNA, 25 bp, Homo sapien
tctagagactctttactcgaggata

SEQ ID NO: 96011 - DNA, 25 bp, Homo sapien
cattctttgcctagataaaggcctg

SEQ ID NO: 96012 - DNA, 25 bp, Homo sapien
tgagagacagagtcctatacacagg

SEQ ID NO: 96013 - DNA, 25 bp, Homo sapien
gatctgtcaccagctaatgctctag

SEQ ID NO: 96014 - DNA, 25 bp, Homo sapien
caagtctgccaaataggtcattaag

SEQ ID NO: 96015 - DNA, 25 bp, Homo sapien
gattccactttgaacacgaaatgta

SEQ ID NO: 96016 - DNA, 25 bp, Homo sapien
tcaaagtgcattcctaatgaagtgt

SEQ ID NO: 96017 - DNA, 25 bp, Homo sapien
gctgtggcataagaagtactgttac

SEQ ID NO: 96018 - DNA, 25 bp, Homo sapien
tactgttacatttcagtctgacaag

SEQ ID NO: 96019 - DNA, 25 bp, Homo sapien
gtaaatactcttggcactactcaag

SEQ ID NO: 96020 - DNA, 25 bp, Homo sapien
taatactagtaactgcaagcttttg

SEQ ID NO: 96021 - DNA, 25 bp, Homo sapien
tattttgcctgggataagttccaag

SEQ ID NO: 96022 - DNA, 25 bp, Homo sapien
gtctgtgaatggtaaaggtgatgtc

SEQ ID NO: 96023 - DNA, 25 bp, Homo sapien
aagattgtccaaaatacgagtaaca

SEQ ID NO: 96024 - DNA, 25 bp, Homo sapien
catctccataagattgtccaaaata

SEQ ID NO: 96025 - DNA, 25 bp, Homo sapien
cataagattgtccaaaatacgagta

SEQ ID NO: 96026 - DNA, 25 bp, Homo sapien
tccataagattgtccaaaatacgag

SEQ ID NO: 96027 - DNA, 25 bp, Homo sapien
ggtgacactcatctgaagacactgt

SEQ ID NO: 96028 - DNA, 25 bp, Homo sapien
tcaaaccagggttttgatgtcggta

SEQ ID NO: 96029 - DNA, 25 bp, Homo sapien
tcatgaatgtatacctctcttaggc

SEQ ID NO: 96030 - DNA, 25 bp, Homo sapien
ggaatcctaagcctcactgccaaat

SEQ ID NO: 96031 - DNA, 25 bp, Homo sapien
ccacctcagcctcctgaatagctgg

SEQ ID NO: 96032 - DNA, 25 bp, Homo sapien
aacctcctgagctcaagtgatcctc

SEQ ID NO: 96033 - DNA, 25 bp, Homo sapien
acaatcttggctcaatgtagcctca

SEQ ID NO: 96034 - DNA, 25 bp, Homo sapien
ggacagtaacaaatatcacagaatt

SEQ ID NO: 96035 - DNA, 25 bp, Homo sapien
tcagtaaacccaaacatagtgtaag

SEQ ID NO: 96036 - DNA, 25 bp, Homo sapien
actatttagtcctgtacccaatggg

SEQ ID NO: 96037 - DNA, 25 bp, Homo sapien
ggtcagtttggcttagagtatccta

SEQ ID NO: 96038 - DNA, 25 bp, Homo sapien
caagttcttaattaccatgccagag

SEQ ID NO: 96039 - DNA, 25 bp, Homo sapien
tgctctgtatagattcaaccatccg

SEQ ID NO: 96040 - DNA, 25 bp, Homo sapien
tttatcacccctagaagaagtcctg

SEQ ID NO: 96041 - DNA, 25 bp, Homo sapien
ggaacccacgcatattgagggctaa

SEQ ID NO: 96042 - DNA, 25 bp, Homo sapien
caaagatacgaaagcttgggataca

SEQ ID NO: 96043 - DNA, 25 bp, Homo sapien
taaaataggtatgggaaatacacac

SEQ ID NO: 96044 - DNA, 25 bp, Homo sapien
tgaataaaataggtatgggaaatac

SEQ ID NO: 96045 - DNA, 25 bp, Homo sapien
cacacatgcactattaggtaagtat

SEQ ID NO: 96046 - DNA, 25 bp, Homo sapien
tattatgaataaaataggtatggga

SEQ ID NO: 96047 - DNA, 25 bp, Homo sapien
tggaatggatttttatttctgggaa

SEQ ID NO: 96048 - DNA, 25 bp, Homo sapien
ctcttggaatggatttttatttctg

SEQ ID NO: 96049 - DNA, 25 bp, Homo sapien
aatggatttttatttctgggaactg

SEQ ID NO: 96050 - DNA, 25 bp, Homo sapien
tggatttttatttctgggaactgag

SEQ ID NO: 96051 - DNA, 25 bp, Homo sapien
tgatattcaatgtagttgcctcctc

SEQ ID NO: 96052 - DNA, 25 bp, Homo sapien
attcaatgtagttgcctcctcccac

SEQ ID NO: 96053 - DNA, 25 bp, Homo sapien
atattcaatgtagttgcctcctccc

SEQ ID NO: 96054 - DNA, 25 bp, Homo sapien
gatattcaatgtagttgcctcctcc

SEQ ID NO: 96055 - DNA, 25 bp, Homo sapien
gaacacttatacacatccctttttg

SEQ ID NO: 96056 - DNA, 25 bp, Homo sapien
tacacatccctttttggaacacgat

SEQ ID NO: 96057 - DNA, 25 bp, Homo sapien
atgcacaggtatgttcacttgcagc

SEQ ID NO: 96058 - DNA, 25 bp, Homo sapien
tttggaacacgatgggagtataaat

SEQ ID NO: 96059 - DNA, 25 bp, Homo sapien
caacatcttgaggataaacacagaa

SEQ ID NO: 96060 - DNA, 25 bp, Homo sapien
gtcacagaccaccacgtaactatta

SEQ ID NO: 96061 - DNA, 25 bp, Homo sapien
ttgttgaacaacgaagtcacagacc

SEQ ID NO: 96062 - DNA, 25 bp, Homo sapien
tctgaaatgcacacaaacgattttg

SEQ ID NO: 96063 - DNA, 25 bp, Homo sapien
aaggaggaaaagtctttactctcag

SEQ ID NO: 96064 - DNA, 25 bp, Homo sapien
caacaggagaaaggaggaaaagtct

SEQ ID NO: 96065 - DNA, 25 bp, Homo sapien
agctccacaggtaagtcctcttgcc

SEQ ID NO: 96066 - DNA, 25 bp, Homo sapien
aatgtgatggtctcctaactcaggg

SEQ ID NO: 96067 - DNA, 25 bp, Homo sapien
cctcttgccgaatgtgatggtctcc

SEQ ID NO: 96068 - DNA, 25 bp, Homo sapien
ggtctcctaactcagggatcaaggt

SEQ ID NO: 96069 - DNA, 25 bp, Homo sapien
tgacatgaagataatacctctaaat

SEQ ID NO: 96070 - DNA, 25 bp, Homo sapien
cacctcaacatcatgtgactgggaa

SEQ ID NO: 96071 - DNA, 25 bp, Homo sapien
tctaaatataactgtctgaggaatg

SEQ ID NO: 96072 - DNA, 25 bp, Homo sapien
tttacaagctcaggaagacggatca

SEQ ID NO: 96073 - DNA, 25 bp, Homo sapien
acatactaaggaagccatgatgatc

SEQ ID NO: 96074 - DNA, 25 bp, Homo sapien
tcaacagatggcagtggaacaactg

SEQ ID NO: 96075 - DNA, 25 bp, Homo sapien
tgtaatactggtgcaagaaaagacc

SEQ ID NO: 96076 - DNA, 25 bp, Homo sapien
taaagtaggactcacatgtgtcctg

SEQ ID NO: 96077 - DNA, 25 bp, Homo sapien
caggagaactgattgattgaactcg

SEQ ID NO: 96078 - DNA, 25 bp, Homo sapien
agaactgattgattgaactcgggag

SEQ ID NO: 96079 - DNA, 25 bp, Homo sapien
ggagaactgattgattgaactcggg

SEQ ID NO: 96080 - DNA, 25 bp, Homo sapien
aaggcaggagaactgattgattgaa

SEQ ID NO: 96081 - DNA, 25 bp, Homo sapien
tgtatgtatcgtgaacctgaaggta

SEQ ID NO: 96082 - DNA, 25 bp, Homo sapien
tcacagttacaatgttggaacccaa

SEQ ID NO: 96083 - DNA, 25 bp, Homo sapien
gctgaatacatgtcctagatggcca

SEQ ID NO: 96084 - DNA, 25 bp, Homo sapien
cagaggaatgatggctttgtaacac

SEQ ID NO: 96085 - DNA, 25 bp, Homo sapien
ttttatgaactgtgtagcattaaaa

SEQ ID NO: 96086 - DNA, 25 bp, Homo sapien
gttttatgaactgtgtagcattaaa

SEQ ID NO: 96087 - DNA, 25 bp, Homo sapien
ttatccacattccaagtagattatc

SEQ ID NO: 96088 - DNA, 25 bp, Homo sapien
gattatcatagtaaggttcttctgt

SEQ ID NO: 96089 - DNA, 25 bp, Homo sapien
caagtagattatcatagtaaggttc

SEQ ID NO: 96090 - DNA, 25 bp, Homo sapien
ccacattccaagtagattatcatag

SEQ ID NO: 96091 - DNA, 25 bp, Homo sapien
ataactctgattttcactgttagga

SEQ ID NO: 96092 - DNA, 25 bp, Homo sapien
aactctgattttcactgttaggaca

SEQ ID NO: 96093 - DNA, 25 bp, Homo sapien
ctctgattttcactgttaggacact

SEQ ID NO: 96094 - DNA, 25 bp, Homo sapien
ctgattttcactgttaggacactgt

SEQ ID NO: 96095 - DNA, 25 bp, Homo sapien
gcccagtctggttgaccttcccatt

SEQ ID NO: 96096 - DNA, 25 bp, Homo sapien
tctgttgctaaactatccactgagt

SEQ ID NO: 96097 - DNA, 25 bp, Homo sapien
tcttagtcacatttcatctgttgct

SEQ ID NO: 96098 - DNA, 25 bp, Homo sapien
tctgtacgctcactaaatctttctc

SEQ ID NO: 96099 - DNA, 25 bp, Homo sapien
cctccctccttagaagtgaatctta

SEQ ID NO: 96100 - DNA, 25 bp, Homo sapien
gctaggaggtgtctattttgaaaaa

SEQ ID NO: 96101 - DNA, 25 bp, Homo sapien
tccagatgactgttagaccttccca

SEQ ID NO: 96102 - DNA, 25 bp, Homo sapien
atcatctcctcaagtgttatcactg

SEQ ID NO: 96103 - DNA, 25 bp, Homo sapien
ccacacaggacacggaagctccaca

SEQ ID NO: 96104 - DNA, 25 bp, Homo sapien
ccccacacaggacacggaagctcca

SEQ ID NO: 96105 - DNA, 25 bp, Homo sapien
cgtatacctcccatagcccgggagg

SEQ ID NO: 96106 - DNA, 25 bp, Homo sapien
cttcccgtatacctcccatagcccg

SEQ ID NO: 96107 - DNA, 25 bp, Homo sapien
tgggaacagttagcagctctgggtg

SEQ ID NO: 96108 - DNA, 25 bp, Homo sapien
gcagctctgggtgcatcacggagcc

SEQ ID NO: 96109 - DNA, 25 bp, Homo sapien
tctgggtgcatcacggagccctgcc

SEQ ID NO: 96110 - DNA, 25 bp, Homo sapien
agctctgggtgcatcacggagccct

SEQ ID NO: 96111 - DNA, 25 bp, Homo sapien
ggttgcactgtcaagagtctggtgc

SEQ ID NO: 96112 - DNA, 25 bp, Homo sapien
tgcactgtcaagagtctggtgcctg

SEQ ID NO: 96113 - DNA, 25 bp, Homo sapien
gattcttgtcggtaagaaccactcc

SEQ ID NO: 96114 - DNA, 25 bp, Homo sapien
ctggattcttgtcggtaagaaccac

SEQ ID NO: 96115 - DNA, 25 bp, Homo sapien
ccgtagcgggcttcttgagcaacaa

SEQ ID NO: 96116 - DNA, 25 bp, Homo sapien
tagagcttgcgtcatgaccgtagcg

SEQ ID NO: 96117 - DNA, 25 bp, Homo sapien
gaaaggtctaggcacatttctgata

SEQ ID NO: 96118 - DNA, 25 bp, Homo sapien
gcctctgaggcattagaaaggtcta

SEQ ID NO: 96119 - DNA, 25 bp, Homo sapien
gagaaaggtgacagctggcacgcat

SEQ ID NO: 96120 - DNA, 25 bp, Homo sapien
ggagaaaggtgacagctggcacgca

SEQ ID NO: 96121 - DNA, 25 bp, Homo sapien
gaggtgacatccactctgctatcag

SEQ ID NO: 96122 - DNA, 25 bp, Homo sapien
agcatcagggttgttggccaccaaa

SEQ ID NO: 96123 - DNA, 25 bp, Homo sapien
tgtttgttgagacctggagcagcct

SEQ ID NO: 96124 - DNA, 25 bp, Homo sapien
gatgtcatgtcaggcttcagagtct

SEQ ID NO: 96125 - DNA, 25 bp, Homo sapien
tcattacccgcgtctgaacagactg

SEQ ID NO: 96126 - DNA, 25 bp, Homo sapien
actcttgttcattacccgcgtctga

SEQ ID NO: 96127 - DNA, 25 bp, Homo sapien
cgtctgaacagactgtagacaggga

SEQ ID NO: 96128 - DNA, 25 bp, Homo sapien
cagactgtagacagggattctgttc

SEQ ID NO: 96129 - DNA, 25 bp, Homo sapien
tgctgagttttacccgatggtttac

SEQ ID NO: 96130 - DNA, 25 bp, Homo sapien
atcttgctgagttttacccgatggt

SEQ ID NO: 96131 - DNA, 25 bp, Homo sapien
ctcaaaacaaccagctctatcttgc

SEQ ID NO: 96132 - DNA, 25 bp, Homo sapien
ggaaatagtcgcctcaaaacaacca

SEQ ID NO: 96133 - DNA, 25 bp, Homo sapien
tcctgttgcgtgtacccgtttcaaa

SEQ ID NO: 96134 - DNA, 25 bp, Homo sapien
tgttgcgtgtacccgtttcaaacca

SEQ ID NO: 96135 - DNA, 25 bp, Homo sapien
ggacaaaggaagagaacattaatct

SEQ ID NO: 96136 - DNA, 25 bp, Homo sapien
ttccagcacggcatgtggaagggac

SEQ ID NO: 96137 - DNA, 25 bp, Homo sapien
tgttttggtccttatttcttccagc

SEQ ID NO: 96138 - DNA, 25 bp, Homo sapien
ttggtccttatttcttccagcacgg

SEQ ID NO: 96139 - DNA, 25 bp, Homo sapien
gaccgaatactgtctgtgaagcaga

SEQ ID NO: 96140 - DNA, 25 bp, Homo sapien
gagcttgatgccatgctggcgccat

SEQ ID NO: 96141 - DNA, 25 bp, Homo sapien
ttaccgggaagtgttgctggcccag

SEQ ID NO: 96142 - DNA, 25 bp, Homo sapien
ccatttagctctgcgttaccgggaa

SEQ ID NO: 96143 - DNA, 25 bp, Homo sapien
tgttttggtagctcctcacatagga

SEQ ID NO: 96144 - DNA, 25 bp, Homo sapien
gaagatcaccttacattggagcata

SEQ ID NO: 96145 - DNA, 25 bp, Homo sapien
aatattatcataggagtgcacccca

SEQ ID NO: 96146 - DNA, 25 bp, Homo sapien
ccccatgtatgtgaagggaacattc

SEQ ID NO: 96147 - DNA, 25 bp, Homo sapien
atgtacagagttgcacagccattaa

SEQ ID NO: 96148 - DNA, 25 bp, Homo sapien
tgactgttctggacatttatataaa

SEQ ID NO: 96149 - DNA, 25 bp, Homo sapien
taaattgtacgagtcaatggcttta

SEQ ID NO: 96150 - DNA, 25 bp, Homo sapien
gaagaaacttcatatccattaataa

SEQ ID NO: 96151 - DNA, 25 bp, Homo sapien
agacccttccagtcactagttgcct

SEQ ID NO: 96152 - DNA, 25 bp, Homo sapien
tcagacccttccagtcactagttgc

SEQ ID NO: 96153 - DNA, 25 bp, Homo sapien
tccagtcactagttgccttggtgat

SEQ ID NO: 96154 - DNA, 25 bp, Homo sapien
cttccagtcactagttgccttggtg

SEQ ID NO: 96155 - DNA, 25 bp, Homo sapien
gaggcctttgatggtcagtacagag

SEQ ID NO: 96156 - DNA, 25 bp, Homo sapien
aggcctttgatggtcagtacagagg

SEQ ID NO: 96157 - DNA, 25 bp, Homo sapien
ggcctttgatggtcagtacagaggc

SEQ ID NO: 96158 - DNA, 25 bp, Homo sapien
gtcagtgttgacagtctcatcaaaa

SEQ ID NO: 96159 - DNA, 25 bp, Homo sapien
ccactgtcccactgttgatgttatc

SEQ ID NO: 96160 - DNA, 25 bp, Homo sapien
ttctcaggctaaagatcgatgccat

SEQ ID NO: 96161 - DNA, 25 bp, Homo sapien
gtccccaggatctcgttaacatttc

SEQ ID NO: 96162 - DNA, 25 bp, Homo sapien
tgtctggagtagcatccagccagga

SEQ ID NO: 96163 - DNA, 25 bp, Homo sapien
agctttgtgtctggagtagcatcca

SEQ ID NO: 96164 - DNA, 25 bp, Homo sapien
tcttggtgatcttcttcttgcccat

SEQ ID NO: 96165 - DNA, 25 bp, Homo sapien
ctcttggtgatcttcttcttgccca

SEQ ID NO: 96166 - DNA, 25 bp, Homo sapien
tcttcttgcccatggcagctcttac

SEQ ID NO: 96167 - DNA, 25 bp, Homo sapien
tcttcttcttgcccatggcagctct

SEQ ID NO: 96168 - DNA, 25 bp, Homo sapien
ttgggtttaagagcagggtgtctgc

SEQ ID NO: 96169 - DNA, 25 bp, Homo sapien
tgtctgcagacatccttattaatga

SEQ ID NO: 96170 - DNA, 25 bp, Homo sapien
tcttggcttcttgtccagccttggg

SEQ ID NO: 96171 - DNA, 25 bp, Homo sapien
tgcccgtcttgtacctcttttcaaa

SEQ ID NO: 96172 - DNA, 25 bp, Homo sapien
tgtcaagcccatgtacatatttgga

SEQ ID NO: 96173 - DNA, 25 bp, Homo sapien
gatggagactctgtagctaggagga

SEQ ID NO: 96174 - DNA, 25 bp, Homo sapien
gtagctaggaggaggaatttttcta

SEQ ID NO: 96175 - DNA, 25 bp, Homo sapien
tctgcaaggatggttatatattttc

SEQ ID NO: 96176 - DNA, 25 bp, Homo sapien
ccattaccaatctgaatgtggcctt

SEQ ID NO: 96177 - DNA, 25 bp, Homo sapien
accaatctgaatgtggcctttgagg

SEQ ID NO: 96178 - DNA, 25 bp, Homo sapien
cctttccccattaccaatctgaatg

SEQ ID NO: 96179 - DNA, 25 bp, Homo sapien
agggctgagcatgggtgctttacgg

SEQ ID NO: 96180 - DNA, 25 bp, Homo sapien
acatgacttggtgattgtttatctc

SEQ ID NO: 96181 - DNA, 25 bp, Homo sapien
ggttccatgtgttaccagcacccaa

SEQ ID NO: 96182 - DNA, 25 bp, Homo sapien
cttctgtccagatctggacccagat

SEQ ID NO: 96183 - DNA, 25 bp, Homo sapien
aaccagagaactaaatggttccatg

SEQ ID NO: 96184 - DNA, 25 bp, Homo sapien
tggacccagattctggccagcttct

SEQ ID NO: 96185 - DNA, 25 bp, Homo sapien
ggagcatgaaaatgcccagttctac

SEQ ID NO: 96186 - DNA, 25 bp, Homo sapien
gagagcttaaggaagccactccata

SEQ ID NO: 96187 - DNA, 25 bp, Homo sapien
cacagagaatgcattactggcagcc

SEQ ID NO: 96188 - DNA, 25 bp, Homo sapien
gattgtgcttaaagcagaagggcat

SEQ ID NO: 96189 - DNA, 25 bp, Homo sapien
ccatgaccttctcatgtgtatcttg

SEQ ID NO: 96190 - DNA, 25 bp, Homo sapien
tgaccttctcatgtgtatcttgatt

SEQ ID NO: 96191 - DNA, 25 bp, Homo sapien
aatgctggtttcctagcagggtgag

SEQ ID NO: 96192 - DNA, 25 bp, Homo sapien
ttttccatgaccttctcatgtgtat

SEQ ID NO: 96193 - DNA, 25 bp, Homo sapien
gagatccacccggctgcgcccgagt

SEQ ID NO: 96194 - DNA, 25 bp, Homo sapien
gctcgagatccacccggctgcgccc

SEQ ID NO: 96195 - DNA, 25 bp, Homo sapien
ctgctcgagatccacccggctgcgc

SEQ ID NO: 96196 - DNA, 25 bp, Homo sapien
tcgagatccacccggctgcgcccga

SEQ ID NO: 96197 - DNA, 25 bp, Homo sapien
acagaggcgtcagggatccctcgca

SEQ ID NO: 96198 - DNA, 25 bp, Homo sapien
gggacagaggcgtcagggatccctc

SEQ ID NO: 96199 - DNA, 25 bp, Homo sapien
aaacagggacagaggcgtcagggat

SEQ ID NO: 96200 - DNA, 25 bp, Homo sapien
agaggcgtcagggatccctcgcacc

SEQ ID NO: 96201 - DNA, 25 bp, Homo sapien
cctcggcggcaaatcgagcgaagcc

SEQ ID NO: 96202 - DNA, 25 bp, Homo sapien
ccctctaggtctgggaggcgcctcg

SEQ ID NO: 96203 - DNA, 25 bp, Homo sapien
gcgaagcccaggatcggtgtgcaac

SEQ ID NO: 96204 - DNA, 25 bp, Homo sapien
gggcgccaaaacgacgacagacagg

SEQ ID NO: 96205 - DNA, 25 bp, Homo sapien
aggccgagagccgggatccaggctg

SEQ ID NO: 96206 - DNA, 25 bp, Homo sapien
gagccgggatccaggctgcggacat

SEQ ID NO: 96207 - DNA, 25 bp, Homo sapien
cgagagccgggatccaggctgcgga

SEQ ID NO: 96208 - DNA, 25 bp, Homo sapien
gccgagagccgggatccaggctgcg

SEQ ID NO: 96209 - DNA, 25 bp, Homo sapien
cggagcaaggggccggggtcgtgag

SEQ ID NO: 96210 - DNA, 25 bp, Homo sapien
gaagagagaagcgtgagggctggct

SEQ ID NO: 96211 - DNA, 25 bp, Homo sapien
agagagaagcgtgagggctggctcc

SEQ ID NO: 96212 - DNA, 25 bp, Homo sapien
agagaagcgtgagggctggctccag

SEQ ID NO: 96213 - DNA, 25 bp, Homo sapien
cccggcagcagcagcagacacacac

SEQ ID NO: 96214 - DNA, 25 bp, Homo sapien
gcgggccccggcagcagcagcagac

SEQ ID NO: 96215 - DNA, 25 bp, Homo sapien
cggctccctcgctgcccgcgggccc

SEQ ID NO: 96216 - DNA, 25 bp, Homo sapien
gctccctcgctgcccgcgggccccg

SEQ ID NO: 96217 - DNA, 25 bp, Homo sapien
cctcctcaggcggtagggctgaagc

SEQ ID NO: 96218 - DNA, 25 bp, Homo sapien
agtcccgcttgtacccgctggtgct

SEQ ID NO: 96219 - DNA, 25 bp, Homo sapien
aagcccaaggggctggatctgagtc

SEQ ID NO: 96220 - DNA, 25 bp, Homo sapien
ggcggctcaaccttcgcgccttcct

SEQ ID NO: 96221 - DNA, 25 bp, Homo sapien
ccaaacgcagcagagcccaggactg

SEQ ID NO: 96222 - DNA, 25 bp, Homo sapien
cccaggactggtgcgctcctcggtg

SEQ ID NO: 96223 - DNA, 25 bp, Homo sapien
cctagtgctcttggagaacgtcccc

SEQ ID NO: 96224 - DNA, 25 bp, Homo sapien
aagtcgggtctgggcggcttctcct

SEQ ID NO: 96225 - DNA, 25 bp, Homo sapien
aaaaggagataatattgtaagcatt

SEQ ID NO: 96226 - DNA, 25 bp, Homo sapien
tgtaagcattcttaggacttcttgg

SEQ ID NO: 96227 - DNA, 25 bp, Homo sapien
agaaaaaggagataatattgtaagc

SEQ ID NO: 96228 - DNA, 25 bp, Homo sapien
agcattcttaggacttcttggggca

SEQ ID NO: 96229 - DNA, 25 bp, Homo sapien
ggtaaaacatgtgatagcaatggga

SEQ ID NO: 96230 - DNA, 25 bp, Homo sapien
gtaaaacatgtgatagcaatgggag

SEQ ID NO: 96231 - DNA, 25 bp, Homo sapien
ctggtaaaacatgtgatagcaatgg

SEQ ID NO: 96232 - DNA, 25 bp, Homo sapien
tggtaaaacatgtgatagcaatggg

SEQ ID NO: 96233 - DNA, 25 bp, Homo sapien
atatactatgttcccatacacagag

SEQ ID NO: 96234 - DNA, 25 bp, Homo sapien
gcagccccacatatgctcgatacag

SEQ ID NO: 96235 - DNA, 25 bp, Homo sapien
tacacagagaattcctcaagagggc

SEQ ID NO: 96236 - DNA, 25 bp, Homo sapien
gctcgatacagaagcatatactatg

SEQ ID NO: 96237 - DNA, 25 bp, Homo sapien
gaaagcatttgagactggatgccat

SEQ ID NO: 96238 - DNA, 25 bp, Homo sapien
gaatagttttctcgaccaggtaggc

SEQ ID NO: 96239 - DNA, 25 bp, Homo sapien
gaaagaagcagaccatctagaaagc

SEQ ID NO: 96240 - DNA, 25 bp, Homo sapien
taggctatagactcgtacaggtccc

SEQ ID NO: 96241 - DNA, 25 bp, Homo sapien
ctgttggtggatgtgctgtggacac

SEQ ID NO: 96242 - DNA, 25 bp, Homo sapien
tgttggtggatgtgctgtggacact

SEQ ID NO: 96243 - DNA, 25 bp, Homo sapien
ctttattgccagttttcttctcggg

SEQ ID NO: 96244 - DNA, 25 bp, Homo sapien
ttattgccagttttcttctcgggtg

SEQ ID NO: 96245 - DNA, 25 bp, Homo sapien
attgccagttttcttctcgggtgtt

SEQ ID NO: 96246 - DNA, 25 bp, Homo sapien
tattgccagttttcttctcgggtgt

SEQ ID NO: 96247 - DNA, 25 bp, Homo sapien
tcttctgtaaattaaatcggcgctg

SEQ ID NO: 96248 - DNA, 25 bp, Homo sapien
gcgctgcccaatattaaagcttcca

SEQ ID NO: 96249 - DNA, 25 bp, Homo sapien
tctgttccaattcccaacattagag

SEQ ID NO: 96250 - DNA, 25 bp, Homo sapien
catcaatcagaaatgcaatgtctgc

SEQ ID NO: 96251 - DNA, 25 bp, Homo sapien
cttcctttatggcaaacaaaacatc

SEQ ID NO: 96252 - DNA, 25 bp, Homo sapien
caaaacatctttggctgatgtaaag

SEQ ID NO: 96253 - DNA, 25 bp, Homo sapien
tgtattggaattaccccctctgaaa

SEQ ID NO: 96254 - DNA, 25 bp, Homo sapien
aaacatctttggctgatgtaaagtt

SEQ ID NO: 96255 - DNA, 25 bp, Homo sapien
catcccaggtatcaaagtctactta

SEQ ID NO: 96256 - DNA, 25 bp, Homo sapien
tccaggaggatttcacatctgctca

SEQ ID NO: 96257 - DNA, 25 bp, Homo sapien
aatgcagacctagccaagatttcag

SEQ ID NO: 96258 - DNA, 25 bp, Homo sapien
tgatcactgataaccctctcctatg

SEQ ID NO: 96259 - DNA, 25 bp, Homo sapien
cggtagtgctactcattctttctgc

SEQ ID NO: 96260 - DNA, 25 bp, Homo sapien
tctctcttcagagtcaacggtagtg

SEQ ID NO: 96261 - DNA, 25 bp, Homo sapien
tacaaagagatacttctccaatgtt

SEQ ID NO: 96262 - DNA, 25 bp, Homo sapien
gagtcaacggtagtgctactcattc

SEQ ID NO: 96263 - DNA, 25 bp, Homo sapien
ccagttctgtaacagatgcatcagc

SEQ ID NO: 96264 - DNA, 25 bp, Homo sapien
tagaagcctcacatttgtttacccc

SEQ ID NO: 96265 - DNA, 25 bp, Homo sapien
cacatcaatcgccagttagaaacac

SEQ ID NO: 96266 - DNA, 25 bp, Homo sapien
tgcatgtgctctctatgtagccctt

SEQ ID NO: 96267 - DNA, 25 bp, Homo sapien
taccactgctcaaaccacatttctg

SEQ ID NO: 96268 - DNA, 25 bp, Homo sapien
aatagcctttaccactgctcaaacc

SEQ ID NO: 96269 - DNA, 25 bp, Homo sapien
acaaatagcctttaccactgctcaa

SEQ ID NO: 96270 - DNA, 25 bp, Homo sapien
ctttaccactgctcaaaccacattt

SEQ ID NO: 96271 - DNA, 25 bp, Homo sapien
gaaggccaaccatcaataaatacca

SEQ ID NO: 96272 - DNA, 25 bp, Homo sapien
tgtgacatcctgaaccatccccagt

SEQ ID NO: 96273 - DNA, 25 bp, Homo sapien
actccagcatctaccgtgaagaatt

SEQ ID NO: 96274 - DNA, 25 bp, Homo sapien
gcctgcttcctcgatgtcatcagaa

SEQ ID NO: 96275 - DNA, 25 bp, Homo sapien
gaaacaaattcaagcatgaggcgga

SEQ ID NO: 96276 - DNA, 25 bp, Homo sapien
gctgttccaccactcatatagcgga

SEQ ID NO: 96277 - DNA, 25 bp, Homo sapien
tccgtgcgctgatcataagtaaact

SEQ ID NO: 96278 - DNA, 25 bp, Homo sapien
tcagtgaaactgaactccgtgcgct

SEQ ID NO: 96279 - DNA, 25 bp, Homo sapien
tctgttcccttctcctataaagaac

SEQ ID NO: 96280 - DNA, 25 bp, Homo sapien
tgttcccttctcctataaagaacaa

SEQ ID NO: 96281 - DNA, 25 bp, Homo sapien
tcccttctcctataaagaacaagga

SEQ ID NO: 96282 - DNA, 25 bp, Homo sapien
ttctgttcccttctcctataaagaa

SEQ ID NO: 96283 - DNA, 25 bp, Homo sapien
ttcaggtcatccagaggtgcccaag

SEQ ID NO: 96284 - DNA, 25 bp, Homo sapien
atctttcaggtcatccagaggtgcc

SEQ ID NO: 96285 - DNA, 25 bp, Homo sapien
gaggtgcccaagccacaccaacaga

SEQ ID NO: 96286 - DNA, 25 bp, Homo sapien
ccacaccaacagagaagatagtgat

SEQ ID NO: 96287 - DNA, 25 bp, Homo sapien
gagactccttcggtttagaagccat

SEQ ID NO: 96288 - DNA, 25 bp, Homo sapien
tgcctctgatgacatcagaaacaat

SEQ ID NO: 96289 - DNA, 25 bp, Homo sapien
ggttctaatcctgtgaactctcttg

SEQ ID NO: 96290 - DNA, 25 bp, Homo sapien
ctcttgtgaagaaagcatgagactc

SEQ ID NO: 96291 - DNA, 25 bp, Homo sapien
cttatttgcctaaatggctgttgac

SEQ ID NO: 96292 - DNA, 25 bp, Homo sapien
catttagtaggcatggttagaactc

SEQ ID NO: 96293 - DNA, 25 bp, Homo sapien
ggcagcggctttaaaggagtgctta

SEQ ID NO: 96294 - DNA, 25 bp, Homo sapien
ttctaagagccatgattatgaagcc

SEQ ID NO: 96295 - DNA, 25 bp, Homo sapien
ggcaatcctgctctcttattcagtg

SEQ ID NO: 96296 - DNA, 25 bp, Homo sapien
caaaatatgtgtacctgaaccatgt

SEQ ID NO: 96297 - DNA, 25 bp, Homo sapien
tttatagtctgcagtaatagctagc

SEQ ID NO: 96298 - DNA, 25 bp, Homo sapien
caaaagcagtttgatacaggtctcc

SEQ ID NO: 96299 - DNA, 25 bp, Homo sapien
ttggaatgcataaacattgacgtat

SEQ ID NO: 96300 - DNA, 25 bp, Homo sapien
tggaatgtattaaaactgaaatgga

SEQ ID NO: 96301 - DNA, 25 bp, Homo sapien
gaatgtattaaaactgaaatggata

SEQ ID NO: 96302 - DNA, 25 bp, Homo sapien
gcataaacattgacgtattttggaa

SEQ ID NO: 96303 - DNA, 25 bp, Homo sapien
tctagtcttccgagaaacttttctg

SEQ ID NO: 96304 - DNA, 25 bp, Homo sapien
tgatcagtttgcgagttttgatgag

SEQ ID NO: 96305 - DNA, 25 bp, Homo sapien
taaattgtgtacctgtatgttactg

SEQ ID NO: 96306 - DNA, 25 bp, Homo sapien
tgttttacaaactatgaatcagcaa

SEQ ID NO: 96307 - DNA, 25 bp, Homo sapien
tacagctcagctaagtccttccata

SEQ ID NO: 96308 - DNA, 25 bp, Homo sapien
aatcttggcatcctatcactatgtg

SEQ ID NO: 96309 - DNA, 25 bp, Homo sapien
aaggattatccatcttgctaatggc

SEQ ID NO: 96310 - DNA, 25 bp, Homo sapien
agatctcactgacccgttgccctgt

SEQ ID NO: 96311 - DNA, 25 bp, Homo sapien
ttagtgatcttctgtttatcggttg

SEQ ID NO: 96312 - DNA, 25 bp, Homo sapien
gatcttctgtttatcggttgaatgc

SEQ ID NO: 96313 - DNA, 25 bp, Homo sapien
gtttatcggttgaatgccacagatt

SEQ ID NO: 96314 - DNA, 25 bp, Homo sapien
ctgtttatcggttgaatgccacaga

SEQ ID NO: 96315 - DNA, 25 bp, Homo sapien
ttttttggactctgtgtgctgcctt

SEQ ID NO: 96316 - DNA, 25 bp, Homo sapien
ttggactctgtgtgctgccttaggg

SEQ ID NO: 96317 - DNA, 25 bp, Homo sapien
actctgtgtgctgccttaggggtta

SEQ ID NO: 96318 - DNA, 25 bp, Homo sapien
tgtgtgctgccttaggggttaggaa

SEQ ID NO: 96319 - DNA, 25 bp, Homo sapien
catatatagctagtgcaggagctga

SEQ ID NO: 96320 - DNA, 25 bp, Homo sapien
cagaaagagggtctgcatcactgcc

SEQ ID NO: 96321 - DNA, 25 bp, Homo sapien
gatgttgctttccactcgtcaaaag

SEQ ID NO: 96322 - DNA, 25 bp, Homo sapien
cctgtactggatgtgaactgagcgt

SEQ ID NO: 96323 - DNA, 25 bp, Homo sapien
gcttgataaggcctacagatctctg

SEQ ID NO: 96324 - DNA, 25 bp, Homo sapien
gctgctcaggccattttagggtaaa

SEQ ID NO: 96325 - DNA, 25 bp, Homo sapien
tctagatagttaatagcttggctcc

SEQ ID NO: 96326 - DNA, 25 bp, Homo sapien
ttagggtaaagtactgcatcagctg

SEQ ID NO: 96327 - DNA, 25 bp, Homo sapien
ctaagaaactaaagaggcttgatgc

SEQ ID NO: 96328 - DNA, 25 bp, Homo sapien
caatataattgagatgcactttatc

SEQ ID NO: 96329 - DNA, 25 bp, Homo sapien
aaaattttgtgagaatagtacagag

SEQ ID NO: 96330 - DNA, 25 bp, Homo sapien
taagagtcagtaccttgaaactaag

SEQ ID NO: 96331 - DNA, 25 bp, Homo sapien
agttagttacaaatttatgctacag

SEQ ID NO: 96332 - DNA, 25 bp, Homo sapien
gatctgtagagatttatagaactac

SEQ ID NO: 96333 - DNA, 25 bp, Homo sapien
ttttctttcatggagactaggcatt

SEQ ID NO: 96334 - DNA, 25 bp, Homo sapien
caattagcacctgaatgtttgtact

SEQ ID NO: 96335 - DNA, 25 bp, Homo sapien
caatatttgacagtacctgtgtctc

SEQ ID NO: 96336 - DNA, 25 bp, Homo sapien
aggtcccttacttccagacgagacg

SEQ ID NO: 96337 - DNA, 25 bp, Homo sapien
tgaagacttttgatggtagagcaga

SEQ ID NO: 96338 - DNA, 25 bp, Homo sapien
cctgtgtaagtggaagtaatcgaaa

SEQ ID NO: 96339 - DNA, 25 bp, Homo sapien
tgttcagctatcaccgcaatctaag

SEQ ID NO: 96340 - DNA, 25 bp, Homo sapien
tgagttgctcagattccaggcatgc

SEQ ID NO: 96341 - DNA, 25 bp, Homo sapien
tagaccctagcgtgaaagaaacaaa

SEQ ID NO: 96342 - DNA, 25 bp, Homo sapien
tcgagttcagagttaaagacctagc

SEQ ID NO: 96343 - DNA, 25 bp, Homo sapien
caaccagtctactaggcaggcagaa

SEQ ID NO: 96344 - DNA, 25 bp, Homo sapien
tgccctgttgtgcactggctggagt

SEQ ID NO: 96345 - DNA, 25 bp, Homo sapien
ggagtacttctggattggcctgctg

SEQ ID NO: 96346 - DNA, 25 bp, Homo sapien
tagagcaagctcctgcaacaagaca

SEQ ID NO: 96347 - DNA, 25 bp, Homo sapien
ttcttttctgaagtgaacttcatgt

SEQ ID NO: 96348 - DNA, 25 bp, Homo sapien
ttttctgaagtgaacttcatgttgg

SEQ ID NO: 96349 - DNA, 25 bp, Homo sapien
gaagtgaacttcatgttggtggact

SEQ ID NO: 96350 - DNA, 25 bp, Homo sapien
tgaacttcatgttggtggactagac

SEQ ID NO: 96351 - DNA, 25 bp, Homo sapien
acaatggtgaacgtacacttggaca

SEQ ID NO: 96352 - DNA, 25 bp, Homo sapien
tgttgactagggttagacgcacagg

SEQ ID NO: 96353 - DNA, 25 bp, Homo sapien
tcccctgttgactagggttagacgc

SEQ ID NO: 96354 - DNA, 25 bp, Homo sapien
tggaacaatggtgaacgtacacttg

SEQ ID NO: 96355 - DNA, 25 bp, Homo sapien
ggctggtggatcagttgatcctaga

SEQ ID NO: 96356 - DNA, 25 bp, Homo sapien
caacagcaagacacttacttctttt

SEQ ID NO: 96357 - DNA, 25 bp, Homo sapien
aagcgattctcaggtctcccgagta

SEQ ID NO: 96358 - DNA, 25 bp, Homo sapien
gcactgtggcgctcactcttgtaat

SEQ ID NO: 96359 - DNA, 25 bp, Homo sapien
tctgttaatggagacttgagttgct

SEQ ID NO: 96360 - DNA, 25 bp, Homo sapien
cagataacagatccattcgtctgtt

SEQ ID NO: 96361 - DNA, 25 bp, Homo sapien
cattcgtctgttaatggagacttga

SEQ ID NO: 96362 - DNA, 25 bp, Homo sapien
tgttgctgtgaacataacgtgtaca

SEQ ID NO: 96363 - DNA, 25 bp, Homo sapien
tcacttgctagccacctccatagaa

SEQ ID NO: 96364 - DNA, 25 bp, Homo sapien
cacctccagcattggaaatcaaatt

SEQ ID NO: 96365 - DNA, 25 bp, Homo sapien
ggtctatgatccagcttgagttgtt

SEQ ID NO: 96366 - DNA, 25 bp, Homo sapien
cacctccatagaaggcattaatcta

SEQ ID NO: 96367 - DNA, 25 bp, Homo sapien
tatataatggaattttttgagcata

SEQ ID NO: 96368 - DNA, 25 bp, Homo sapien
atataatggaattttttgagcatag

SEQ ID NO: 96369 - DNA, 25 bp, Homo sapien
ttttttgagcatagtagagtttttg

SEQ ID NO: 96370 - DNA, 25 bp, Homo sapien
ttttgagcatagtagagtttttgtt

SEQ ID NO: 96371 - DNA, 25 bp, Homo sapien
cctgttgcaccaggctacattaaca

SEQ ID NO: 96372 - DNA, 25 bp, Homo sapien
ctttccacttctacctccagagtgg

SEQ ID NO: 96373 - DNA, 25 bp, Homo sapien
tccacttctacctccagagtggctg

SEQ ID NO: 96374 - DNA, 25 bp, Homo sapien
ttttgtatgtgtgatttgaatttct

SEQ ID NO: 96375 - DNA, 25 bp, Homo sapien
gctaatagagagcatccttactttt

SEQ ID NO: 96376 - DNA, 25 bp, Homo sapien
tcatttcacatgttgagagatcatt

SEQ ID NO: 96377 - DNA, 25 bp, Homo sapien
attccaaacctgctaatagagagca

SEQ ID NO: 96378 - DNA, 25 bp, Homo sapien
caaacctgctaatagagagcatcct

SEQ ID NO: 96379 - DNA, 25 bp, Homo sapien
agttgtttcgcatccaagttcccta

SEQ ID NO: 96380 - DNA, 25 bp, Homo sapien
gttgtttcgcatccaagttccctag

SEQ ID NO: 96381 - DNA, 25 bp, Homo sapien
ttgtttcgcatccaagttccctaga

SEQ ID NO: 96382 - DNA, 25 bp, Homo sapien
atcaaagtgcagtccctcttcagcc

SEQ ID NO: 96383 - DNA, 25 bp, Homo sapien
tgtccgcaaagttcttgcactcttc

SEQ ID NO: 96384 - DNA, 25 bp, Homo sapien
ccacagcttgttcaactcatcaaag

SEQ ID NO: 96385 - DNA, 25 bp, Homo sapien
tctgaaactggccagttttgtccgc

SEQ ID NO: 96386 - DNA, 25 bp, Homo sapien
tgatttgagcaagttcggagcacca

SEQ ID NO: 96387 - DNA, 25 bp, Homo sapien
ggccctcatcttcgcattttacgct

SEQ ID NO: 96388 - DNA, 25 bp, Homo sapien
aagttcggagcaccatggccctcat

SEQ ID NO: 96389 - DNA, 25 bp, Homo sapien
ccatggccctcatcttcgcatttta

SEQ ID NO: 96390 - DNA, 25 bp, Homo sapien
tctttttacagtactctccactaga

SEQ ID NO: 96391 - DNA, 25 bp, Homo sapien
aaaaaaccaaaccagacgatcgatg

SEQ ID NO: 96392 - DNA, 25 bp, Homo sapien
gactcatcaacgctttcagcactga

SEQ ID NO: 96393 - DNA, 25 bp, Homo sapien
cttacttagtgactcatcaacgctt

SEQ ID NO: 96394 - DNA, 25 bp, Homo sapien
tcttgagatgaagagcccgaagaga

SEQ ID NO: 96395 - DNA, 25 bp, Homo sapien
tccctcagacttggtacgcgcttgc

SEQ ID NO: 96396 - DNA, 25 bp, Homo sapien
gagggactaggataggcatcttacc

SEQ ID NO: 96397 - DNA, 25 bp, Homo sapien
gctcaggttgtgatggtcctctcaa

SEQ ID NO: 96398 - DNA, 25 bp, Homo sapien
aggaatcagtaaccacagccggagg

SEQ ID NO: 96399 - DNA, 25 bp, Homo sapien
tgggactgcctgaaacactcaaaga

SEQ ID NO: 96400 - DNA, 25 bp, Homo sapien
gaccgagcgcatagaaatgggacca

SEQ ID NO: 96401 - DNA, 25 bp, Homo sapien
ggacggcctgctaaaaggaaactga

SEQ ID NO: 96402 - DNA, 25 bp, Homo sapien
gctaagagcatctaatcagcatgtc

SEQ ID NO: 96403 - DNA, 25 bp, Homo sapien
tgccatgccatattgattcattcca

SEQ ID NO: 96404 - DNA, 25 bp, Homo sapien
tttcaaaatggatgtgctaagagca

SEQ ID NO: 96405 - DNA, 25 bp, Homo sapien
tatggaaatggcaactgcgagattc

SEQ ID NO: 96406 - DNA, 25 bp, Homo sapien
aaaaattaccagacatataatgtgt

SEQ ID NO: 96407 - DNA, 25 bp, Homo sapien
tatgccacaatactctagtttgggc

SEQ ID NO: 96408 - DNA, 25 bp, Homo sapien
attatgccacaatactctagtttgg

SEQ ID NO: 96409 - DNA, 25 bp, Homo sapien
tgcagtaatctacgattatgccaca

SEQ ID NO: 96410 - DNA, 25 bp, Homo sapien
gtatacgaaaattctctgtattatc

SEQ ID NO: 96411 - DNA, 25 bp, Homo sapien
ttattccaaatactcaaacctgtaa

SEQ ID NO: 96412 - DNA, 25 bp, Homo sapien
ttttttaaagcagagatcagagaga

SEQ ID NO: 96413 - DNA, 25 bp, Homo sapien
tcttcacaacctttgtaaatctaaa

SEQ ID NO: 96414 - DNA, 25 bp, Homo sapien
tggaatacagtcatgggccaccgag

SEQ ID NO: 96415 - DNA, 25 bp, Homo sapien
agtgctggaatacagtcatgggcca

SEQ ID NO: 96416 - DNA, 25 bp, Homo sapien
cttcctgtcgcagcctcctgtgtag

SEQ ID NO: 96417 - DNA, 25 bp, Homo sapien
tgaagtgctggaatacagtcatggg

SEQ ID NO: 96418 - DNA, 25 bp, Homo sapien
ggacttgacctttggtatctgccct

SEQ ID NO: 96419 - DNA, 25 bp, Homo sapien
cagctcaggctttcggttcccttca

SEQ ID NO: 96420 - DNA, 25 bp, Homo sapien
gcttgggcaatattccaggacttga

SEQ ID NO: 96421 - DNA, 25 bp, Homo sapien
ggcctctgttcttcgtgacttgctt

SEQ ID NO: 96422 - DNA, 25 bp, Homo sapien
gttatgacaagggatggctgtaact

SEQ ID NO: 96423 - DNA, 25 bp, Homo sapien
aagttatgacaagggatggctgtaa

SEQ ID NO: 96424 - DNA, 25 bp, Homo sapien
caaaagttatgacaagggatggctg

SEQ ID NO: 96425 - DNA, 25 bp, Homo sapien
aaagttatgacaagggatggctgta

SEQ ID NO: 96426 - DNA, 25 bp, Homo sapien
gcttattaatatccacatgttcata

SEQ ID NO: 96427 - DNA, 25 bp, Homo sapien
gagagacagctctttatgacttctg

SEQ ID NO: 96428 - DNA, 25 bp, Homo sapien
aatatccacatgttcatagtactta

SEQ ID NO: 96429 - DNA, 25 bp, Homo sapien
tattaatatccacatgttcatagta

SEQ ID NO: 96430 - DNA, 25 bp, Homo sapien
catactgccgatatatcagcttaaa

SEQ ID NO: 96431 - DNA, 25 bp, Homo sapien
tgcatactgccgatatatcagctta

SEQ ID NO: 96432 - DNA, 25 bp, Homo sapien
tgccgatatatcagcttaaaatcct

SEQ ID NO: 96433 - DNA, 25 bp, Homo sapien
tactgccgatatatcagcttaaaat

SEQ ID NO: 96434 - DNA, 25 bp, Homo sapien
gcttagtgaaccgataatgtgagga

SEQ ID NO: 96435 - DNA, 25 bp, Homo sapien
tcccagtcagtgtccaggttttaga

SEQ ID NO: 96436 - DNA, 25 bp, Homo sapien
agtgtcgcttcccatgtaaaccaga

SEQ ID NO: 96437 - DNA, 25 bp, Homo sapien
tgtgaggaaagtagcctcccactga

SEQ ID NO: 96438 - DNA, 25 bp, Homo sapien
tccacaaagttatgaatgaattcat

SEQ ID NO: 96439 - DNA, 25 bp, Homo sapien
cttccacaaagttatgaatgaattc

SEQ ID NO: 96440 - DNA, 25 bp, Homo sapien
ttccacaaagttatgaatgaattca

SEQ ID NO: 96441 - DNA, 25 bp, Homo sapien
gcatgtataggcttgtaacactttg

SEQ ID NO: 96442 - DNA, 25 bp, Homo sapien
cactttggataaaccagaaggaaag

SEQ ID NO: 96443 - DNA, 25 bp, Homo sapien
caggcatgtataggcttgtaacact

SEQ ID NO: 96444 - DNA, 25 bp, Homo sapien
ttaacacatgttcttgatatagatc

SEQ ID NO: 96445 - DNA, 25 bp, Homo sapien
gtcctgcataatcacctggctgaaa

SEQ ID NO: 96446 - DNA, 25 bp, Homo sapien
ttagtacctaccgtccaagtcctgc

SEQ ID NO: 96447 - DNA, 25 bp, Homo sapien
cagtaaacaccaacctcatgtggag

SEQ ID NO: 96448 - DNA, 25 bp, Homo sapien
caagagagtggtcatcacaaggtaa

SEQ ID NO: 96449 - DNA, 25 bp, Homo sapien
gagtgcatttgccaagtactgtgga

SEQ ID NO: 96450 - DNA, 25 bp, Homo sapien
gtgcatttgccaagtactgtggaaa

SEQ ID NO: 96451 - DNA, 25 bp, Homo sapien
gcatttgccaagtactgtggaaaac

SEQ ID NO: 96452 - DNA, 25 bp, Homo sapien
catttgccaagtactgtggaaaaca

SEQ ID NO: 96453 - DNA, 25 bp, Homo sapien
gaacactctggactctgctgaatag

SEQ ID NO: 96454 - DNA, 25 bp, Homo sapien
cttgtcatagttgttggtgatgaac

SEQ ID NO: 96455 - DNA, 25 bp, Homo sapien
tgttggtgatgaacactctggactc

SEQ ID NO: 96456 - DNA, 25 bp, Homo sapien
ctctggctgtcttgtcatagttgtt

SEQ ID NO: 96457 - DNA, 25 bp, Homo sapien
gcccaggagatccagggtgtagtga

SEQ ID NO: 96458 - DNA, 25 bp, Homo sapien
ccaggagatccagggtgtagtgagc

SEQ ID NO: 96459 - DNA, 25 bp, Homo sapien
caggagatccagggtgtagtgagcc

SEQ ID NO: 96460 - DNA, 25 bp, Homo sapien
gagcccaggagatccagggtgtagt

SEQ ID NO: 96461 - DNA, 25 bp, Homo sapien
gatcccctcatctttctgctgtgta

SEQ ID NO: 96462 - DNA, 25 bp, Homo sapien
tgcagctgagcttcgacaagatccc

SEQ ID NO: 96463 - DNA, 25 bp, Homo sapien
tgtgtaactagtctgcagaggtcct

SEQ ID NO: 96464 - DNA, 25 bp, Homo sapien
tacgcccctccacagatggagcagg

SEQ ID NO: 96465 - DNA, 25 bp, Homo sapien
cctgatttcttatgcttaggtcctt

SEQ ID NO: 96466 - DNA, 25 bp, Homo sapien
gatttcttatgcttaggtcctttct

SEQ ID NO: 96467 - DNA, 25 bp, Homo sapien
tgatgtcagtcttactagaagtaaa

SEQ ID NO: 96468 - DNA, 25 bp, Homo sapien
ttactagaagtaaaacaagtccata

SEQ ID NO: 96469 - DNA, 25 bp, Homo sapien
gaggcagctcctttgaatgatgaac

SEQ ID NO: 96470 - DNA, 25 bp, Homo sapien
ggcagctcctttgaatgatgaactg

SEQ ID NO: 96471 - DNA, 25 bp, Homo sapien
ctccagggctgagcatattttggga

SEQ ID NO: 96472 - DNA, 25 bp, Homo sapien
tccagggctgagcatattttgggaa

SEQ ID NO: 96473 - DNA, 25 bp, Homo sapien
catactgtgctgttcattggtgccc

SEQ ID NO: 96474 - DNA, 25 bp, Homo sapien
tagttggtgtgtctcccatactgtg

SEQ ID NO: 96475 - DNA, 25 bp, Homo sapien
tctcccatactgtgctgttcattgg

SEQ ID NO: 96476 - DNA, 25 bp, Homo sapien
tgctgttcattggtgccctcccctg

SEQ ID NO: 96477 - DNA, 25 bp, Homo sapien
ccttcacgcgtagagcaggtacgca

SEQ ID NO: 96478 - DNA, 25 bp, Homo sapien
taaaggcaccaaatactgaaaaggc

SEQ ID NO: 96479 - DNA, 25 bp, Homo sapien
ttttctgtaccttcacgcgtagagc

SEQ ID NO: 96480 - DNA, 25 bp, Homo sapien
ccaaatactgaaaaggccgtggagg

SEQ ID NO: 96481 - DNA, 25 bp, Homo sapien
tagaatgggccttctagagcacagg

SEQ ID NO: 96482 - DNA, 25 bp, Homo sapien
caggaagtcagaggatggtcaagca

SEQ ID NO: 96483 - DNA, 25 bp, Homo sapien
ctggcgaagcagacatagaatgggc

SEQ ID NO: 96484 - DNA, 25 bp, Homo sapien
gaatacaaagtagagactccagcct

SEQ ID NO: 96485 - DNA, 25 bp, Homo sapien
atgctggcggagtcacagagagtgc

SEQ ID NO: 96486 - DNA, 25 bp, Homo sapien
tggcggagtcacagagagtgcacac

SEQ ID NO: 96487 - DNA, 25 bp, Homo sapien
gcacacagcattgatgcccttccta

SEQ ID NO: 96488 - DNA, 25 bp, Homo sapien
agcattgatgcccttcctatgtccc

SEQ ID NO: 96489 - DNA, 25 bp, Homo sapien
gaactagaggtagatgcccacagtg

SEQ ID NO: 96490 - DNA, 25 bp, Homo sapien
catgctccatcatacctcggaagaa

SEQ ID NO: 96491 - DNA, 25 bp, Homo sapien
cccacttggagaaaccctattctgg

SEQ ID NO: 96492 - DNA, 25 bp, Homo sapien
cacagtgggcctgatcgaggcctgt

SEQ ID NO: 96493 - DNA, 25 bp, Homo sapien
tttagacgcagcttctctctgttgc

SEQ ID NO: 96494 - DNA, 25 bp, Homo sapien
ttttttagacgcagcttctctctgt

SEQ ID NO: 96495 - DNA, 25 bp, Homo sapien
atgtttatggtcccaacattggaat

SEQ ID NO: 96496 - DNA, 25 bp, Homo sapien
tgtttatggtcccaacattggaatt

SEQ ID NO: 96497 - DNA, 25 bp, Homo sapien
aattcttgccctgttagtttccaca

SEQ ID NO: 96498 - DNA, 25 bp, Homo sapien
tatcaagaattagtagaggggcaag

SEQ ID NO: 96499 - DNA, 25 bp, Homo sapien
cttatcaagaattagtagaggggca

SEQ ID NO: 96500 - DNA, 25 bp, Homo sapien
tcttgccctgttagtttccacaatg

SEQ ID NO: 96501 - DNA, 25 bp, Homo sapien
agattcttctgggttaacatgttga

SEQ ID NO: 96502 - DNA, 25 bp, Homo sapien
caacagaatttaaagtgcgacagat

SEQ ID NO: 96503 - DNA, 25 bp, Homo sapien
tcaatttgcaaaagaagcatagacc

SEQ ID NO: 96504 - DNA, 25 bp, Homo sapien
ctttattggctgacggaaaactgcc

SEQ ID NO: 96505 - DNA, 25 bp, Homo sapien
agccaccgcactcggacttttttat

SEQ ID NO: 96506 - DNA, 25 bp, Homo sapien
gcattgtaattactaagtgccctta

SEQ ID NO: 96507 - DNA, 25 bp, Homo sapien
agtgcccttaaaatgagtatcaaag

SEQ ID NO: 96508 - DNA, 25 bp, Homo sapien
gggctgtcttaatgtctgaccatcc

SEQ ID NO: 96509 - DNA, 25 bp, Homo sapien
caaaaaacgggataaaggatagctg

SEQ ID NO: 96510 - DNA, 25 bp, Homo sapien
gagggactactgtacatactttcgc

SEQ ID NO: 96511 - DNA, 25 bp, Homo sapien
tttgggacctcagttgaccatgagt

SEQ ID NO: 96512 - DNA, 25 bp, Homo sapien
tgagtaacacaaaccacagaatgcg

SEQ ID NO: 96513 - DNA, 25 bp, Homo sapien
tactttcgcctaagacagttctgta

SEQ ID NO: 96514 - DNA, 25 bp, Homo sapien
tataagtaaggatgtaagtgagatc

SEQ ID NO: 96515 - DNA, 25 bp, Homo sapien
ccagatccacaacttaactattgta

SEQ ID NO: 96516 - DNA, 25 bp, Homo sapien
gctagaactgaccagttacttgtgt

SEQ ID NO: 96517 - DNA, 25 bp, Homo sapien
taccatatctgtgcttataggtgaa

SEQ ID NO: 96518 - DNA, 25 bp, Homo sapien
tgcaaggcacacttacagcgagttt

SEQ ID NO: 96519 - DNA, 25 bp, Homo sapien
catactccatacactacagttgctg

SEQ ID NO: 96520 - DNA, 25 bp, Homo sapien
aaaacctggtctaagtgcaaggcac

SEQ ID NO: 96521 - DNA, 25 bp, Homo sapien
taagctacttggtcaaaaatcctgc

SEQ ID NO: 96522 - DNA, 25 bp, Homo sapien
caagggcttatgtgactggaataag

SEQ ID NO: 96523 - DNA, 25 bp, Homo sapien
aaggtggtcccacttgactgttcca

SEQ ID NO: 96524 - DNA, 25 bp, Homo sapien
gtaaatttctaacagtgtatttgtg

SEQ ID NO: 96525 - DNA, 25 bp, Homo sapien
cacttgactgttccaaagagcagct

SEQ ID NO: 96526 - DNA, 25 bp, Homo sapien
taggcatgttgtgataactggcatt

SEQ ID NO: 96527 - DNA, 25 bp, Homo sapien
tcttccctgatagttacatttttgt

SEQ ID NO: 96528 - DNA, 25 bp, Homo sapien
gaatgattgtttaccttaagtactc

SEQ ID NO: 96529 - DNA, 25 bp, Homo sapien
ggaaattgattctgcacgtacttag

SEQ ID NO: 96530 - DNA, 25 bp, Homo sapien
gagaaaggtacctgcatttagctga

SEQ ID NO: 96531 - DNA, 25 bp, Homo sapien
ctgcatttagctgaagtgccagcct

SEQ ID NO: 96532 - DNA, 25 bp, Homo sapien
agagaaaggtacctgcatttagctg

SEQ ID NO: 96533 - DNA, 25 bp, Homo sapien
gaatagtcagcattgccttttggcc

SEQ ID NO: 96534 - DNA, 25 bp, Homo sapien
catgtacagcatttggcgcctcaag

SEQ ID NO: 96535 - DNA, 25 bp, Homo sapien
tactgtcaagactgatagagggaat

SEQ ID NO: 96536 - DNA, 25 bp, Homo sapien
aaaggaggagagatacccgatagat

SEQ ID NO: 96537 - DNA, 25 bp, Homo sapien
tgatatgctgttaaggttcgtggcc

SEQ ID NO: 96538 - DNA, 25 bp, Homo sapien
tgggtgtcgtgacacaccttaatcc

SEQ ID NO: 96539 - DNA, 25 bp, Homo sapien
taatgctgcataacacttgatacag

SEQ ID NO: 96540 - DNA, 25 bp, Homo sapien
taacacatagcctacgtagatagta

SEQ ID NO: 96541 - DNA, 25 bp, Homo sapien
gaatgtcacatgatgttttaacagg

SEQ ID NO: 96542 - DNA, 25 bp, Homo sapien
cacacgtgtatgaacttagtgcagt

SEQ ID NO: 96543 - DNA, 25 bp, Homo sapien
tgggtatagggctcatgccctgtag

SEQ ID NO: 96544 - DNA, 25 bp, Homo sapien
cagtggctcgtgctgccatgagcta

SEQ ID NO: 96545 - DNA, 25 bp, Homo sapien
aaaaactcagtaatacgagagacta

SEQ ID NO: 96546 - DNA, 25 bp, Homo sapien
aaaactcagtaatacgagagactat

SEQ ID NO: 96547 - DNA, 25 bp, Homo sapien
actcagtaatacgagagactattaa

SEQ ID NO: 96548 - DNA, 25 bp, Homo sapien
aactcagtaatacgagagactatta

SEQ ID NO: 96549 - DNA, 25 bp, Homo sapien
gcatcttgcactgtgacattcctat

SEQ ID NO: 96550 - DNA, 25 bp, Homo sapien
agcatcttgcactgtgacattccta

SEQ ID NO: 96551 - DNA, 25 bp, Homo sapien
cagcatcttgcactgtgacattcct

SEQ ID NO: 96552 - DNA, 25 bp, Homo sapien
tgaatgcatctaggaacagtgtgac

SEQ ID NO: 96553 - DNA, 25 bp, Homo sapien
ttatttcttcgcagtcgaccagcag

SEQ ID NO: 96554 - DNA, 25 bp, Homo sapien
cataagtggcaaaaggtatcagtgg

SEQ ID NO: 96555 - DNA, 25 bp, Homo sapien
cgaccagcagttgcgttaattcgaa

SEQ ID NO: 96556 - DNA, 25 bp, Homo sapien
tttcagttttggtatatgtactgct

SEQ ID NO: 96557 - DNA, 25 bp, Homo sapien
tggtatatgtactgctgaaacgtgg

SEQ ID NO: 96558 - DNA, 25 bp, Homo sapien
ttggtatatgtactgctgaaacgtg

SEQ ID NO: 96559 - DNA, 25 bp, Homo sapien
tatatgtactgctgaaacgtggact

SEQ ID NO: 96560 - DNA, 25 bp, Homo sapien
caaacttagtgaaacccttgtaatg

SEQ ID NO: 96561 - DNA, 25 bp, Homo sapien
tacaggcgctatgcctggttctaag

SEQ ID NO: 96562 - DNA, 25 bp, Homo sapien
ggctggtctaaaatacctgagtgca

SEQ ID NO: 96563 - DNA, 25 bp, Homo sapien
aacagtctctctgtattgtccaggc

SEQ ID NO: 96564 - DNA, 25 bp, Homo sapien
gaactcatactctggaatcaactca

SEQ ID NO: 96565 - DNA, 25 bp, Homo sapien
tcccaggtagttattagcagacaca

SEQ ID NO: 96566 - DNA, 25 bp, Homo sapien
tatgctaccatgtaacagagttccc

SEQ ID NO: 96567 - DNA, 25 bp, Homo sapien
gaccatctgttatgccagtgcaaga

SEQ ID NO: 96568 - DNA, 25 bp, Homo sapien
tagagctaggaaggatgagtaagga

SEQ ID NO: 96569 - DNA, 25 bp, Homo sapien
cctagagctaggaaggatgagtaag

SEQ ID NO: 96570 - DNA, 25 bp, Homo sapien
gagctaggaaggatgagtaaggaga

SEQ ID NO: 96571 - DNA, 25 bp, Homo sapien
tcctagagctaggaaggatgagtaa

SEQ ID NO: 96572 - DNA, 25 bp, Homo sapien
attacctgcgacaacgggacatgcg

SEQ ID NO: 96573 - DNA, 25 bp, Homo sapien
gggacatgcgcggatagctatctga

SEQ ID NO: 96574 - DNA, 25 bp, Homo sapien
gatacctaaacggaccattacctgc

SEQ ID NO: 96575 - DNA, 25 bp, Homo sapien
ttcaaggtccagagggaatgccact

SEQ ID NO: 96576 - DNA, 25 bp, Homo sapien
gtaaatatcacccactgcctttaga

SEQ ID NO: 96577 - DNA, 25 bp, Homo sapien
cccactgcctttagaaagacgttga

SEQ ID NO: 96578 - DNA, 25 bp, Homo sapien
ctgcctttagaaagacgttgacagt

SEQ ID NO: 96579 - DNA, 25 bp, Homo sapien
atcacccactgcctttagaaagacg

SEQ ID NO: 96580 - DNA, 25 bp, Homo sapien
ggttgttatccattgttgtaaacac

SEQ ID NO: 96581 - DNA, 25 bp, Homo sapien
tggttgttatccattgttgtaaaca

SEQ ID NO: 96582 - DNA, 25 bp, Homo sapien
cactcccagagtccctggaactctg

SEQ ID NO: 96583 - DNA, 25 bp, Homo sapien
ggcagccactcccagagtccctgga

SEQ ID NO: 96584 - DNA, 25 bp, Homo sapien
gccactcccagagtccctggaactc

SEQ ID NO: 96585 - DNA, 25 bp, Homo sapien
ctggcagccactcccagagtccctg

SEQ ID NO: 96586 - DNA, 25 bp, Homo sapien
aagaggaaagatgtccccacttaag

SEQ ID NO: 96587 - DNA, 25 bp, Homo sapien
tttcacctacatgataaacaataaa

SEQ ID NO: 96588 - DNA, 25 bp, Homo sapien
gatgtccccacttaagcttccattg

SEQ ID NO: 96589 - DNA, 25 bp, Homo sapien
gcagcatagcattgcatttcaccta

SEQ ID NO: 96590 - DNA, 25 bp, Homo sapien
ttcatggacggagtcgaaagagctg

SEQ ID NO: 96591 - DNA, 25 bp, Homo sapien
ttaagcagctggatccaaaacacag

SEQ ID NO: 96592 - DNA, 25 bp, Homo sapien
aattttggcccaattgacttctcct

SEQ ID NO: 96593 - DNA, 25 bp, Homo sapien
tcctcagtcattccttcttaagcag

SEQ ID NO: 96594 - DNA, 25 bp, Homo sapien
catttcacatgccagggtcaaatcc

SEQ ID NO: 96595 - DNA, 25 bp, Homo sapien
ccatttcacatgccagggtcaaatc

SEQ ID NO: 96596 - DNA, 25 bp, Homo sapien
cttccttgttaaaagttgacaatag

SEQ ID NO: 96597 - DNA, 25 bp, Homo sapien
tccttgttaaaagttgacaatagct

SEQ ID NO: 96598 - DNA, 25 bp, Homo sapien
cttgttaaaagttgacaatagctca

SEQ ID NO: 96599 - DNA, 25 bp, Homo sapien
tatacttccttgttaaaagttgaca

SEQ ID NO: 96600 - DNA, 25 bp, Homo sapien
gagtatagcgctaagggagcccaga

SEQ ID NO: 96601 - DNA, 25 bp, Homo sapien
taggagactacagctggacatcgga

SEQ ID NO: 96602 - DNA, 25 bp, Homo sapien
tcccatgaggagtcgagagctatag

SEQ ID NO: 96603 - DNA, 25 bp, Homo sapien
tgttgccaatcccacgaagaggtca

SEQ ID NO: 96604 - DNA, 25 bp, Homo sapien
tacaacaaatttaggtcatcaggtg

SEQ ID NO: 96605 - DNA, 25 bp, Homo sapien
caaaccgaagtgatagaagcatgtc

SEQ ID NO: 96606 - DNA, 25 bp, Homo sapien
gtcaaaacagagcatttccctctta

SEQ ID NO: 96607 - DNA, 25 bp, Homo sapien
tatactgtgtgaatcaagcactgtg

SEQ ID NO: 96608 - DNA, 25 bp, Homo sapien
gggacattgtagacacaagtgccct

SEQ ID NO: 96609 - DNA, 25 bp, Homo sapien
cattgcctttggtgacaaaagggac

SEQ ID NO: 96610 - DNA, 25 bp, Homo sapien
tatgactctagtgtaaattatctgc

SEQ ID NO: 96611 - DNA, 25 bp, Homo sapien
gacaatggagctaacttgccaggaa

SEQ ID NO: 96612 - DNA, 25 bp, Homo sapien
ccgagagcagccttgcagcatggtg

SEQ ID NO: 96613 - DNA, 25 bp, Homo sapien
gagcagccttgcagcatggtgagaa

SEQ ID NO: 96614 - DNA, 25 bp, Homo sapien
cttgcagcatggtgagaatgcatcc

SEQ ID NO: 96615 - DNA, 25 bp, Homo sapien
gagtccgagagcagccttgcagcat

SEQ ID NO: 96616 - DNA, 25 bp, Homo sapien
gacagttgcagcttccctacaggct

SEQ ID NO: 96617 - DNA, 25 bp, Homo sapien
gggccagttatcttcgacagttgca

SEQ ID NO: 96618 - DNA, 25 bp, Homo sapien
cagaaaagagccgtactgcttggac

SEQ ID NO: 96619 - DNA, 25 bp, Homo sapien
aatattatcttctcccatggcccgg

SEQ ID NO: 96620 - DNA, 25 bp, Homo sapien
tcctgagtagctagggcatcaggca

SEQ ID NO: 96621 - DNA, 25 bp, Homo sapien
ttattagagacgggatgtggccatg

SEQ ID NO: 96622 - DNA, 25 bp, Homo sapien
gagtagctagggcatcaggcacatg

SEQ ID NO: 96623 - DNA, 25 bp, Homo sapien
atgccaccatgcctggctaattttt

SEQ ID NO: 96624 - DNA, 25 bp, Homo sapien
ttttgtgctctacacattgagagaa

SEQ ID NO: 96625 - DNA, 25 bp, Homo sapien
tttttgtgctctacacattgagaga

SEQ ID NO: 96626 - DNA, 25 bp, Homo sapien
gataggacttgggtatagaattgct

SEQ ID NO: 96627 - DNA, 25 bp, Homo sapien
taaaacatgtctaggcatggcctta

SEQ ID NO: 96628 - DNA, 25 bp, Homo sapien
tgccgagttgatcaaatagcatcat

SEQ ID NO: 96629 - DNA, 25 bp, Homo sapien
gaattgctgaatgttctacatcgag

SEQ ID NO: 96630 - DNA, 25 bp, Homo sapien
gctggcattggagcggtgtttggca

SEQ ID NO: 96631 - DNA, 25 bp, Homo sapien
gggctcttctgtttgatgatctcct

SEQ ID NO: 96632 - DNA, 25 bp, Homo sapien
tattgtctatgccaggaagctgtct

SEQ ID NO: 96633 - DNA, 25 bp, Homo sapien
gggacactgacacagccgccaagtt

SEQ ID NO: 96634 - DNA, 25 bp, Homo sapien
ccacgcctggctagtttttatattt

SEQ ID NO: 96635 - DNA, 25 bp, Homo sapien
agttctcctacctcagcctcccaag

SEQ ID NO: 96636 - DNA, 25 bp, Homo sapien
tagctgggagtacaggcacatgcca

SEQ ID NO: 96637 - DNA, 25 bp, Homo sapien
gcaacctccactcttggctcaagca

SEQ ID NO: 96638 - DNA, 25 bp, Homo sapien
aatcagttccacagtgttcattagg

SEQ ID NO: 96639 - DNA, 25 bp, Homo sapien
caggacttactatgaacttctggaa

SEQ ID NO: 96640 - DNA, 25 bp, Homo sapien
gaagaaacaaactctaggccaggta

SEQ ID NO: 96641 - DNA, 25 bp, Homo sapien
ggaggctaagacaaatggatcattt

SEQ ID NO: 96642 - DNA, 25 bp, Homo sapien
caccagggccgctgtatgagttgag

SEQ ID NO: 96643 - DNA, 25 bp, Homo sapien
gataaacagcgtggtccgttcttcc

SEQ ID NO: 96644 - DNA, 25 bp, Homo sapien
tgcacaacaggtaggcgtggactct

SEQ ID NO: 96645 - DNA, 25 bp, Homo sapien
caatgtgatcgcgaaagaagccggt

SEQ ID NO: 96646 - DNA, 25 bp, Homo sapien
tggaccgggacgcacgctcagctga

SEQ ID NO: 96647 - DNA, 25 bp, Homo sapien
aattccagactctgctagggttagc

SEQ ID NO: 96648 - DNA, 25 bp, Homo sapien
cgccggcaattccagactctgctag

SEQ ID NO: 96649 - DNA, 25 bp, Homo sapien
ggttagcagagcagccggtaacgtt

SEQ ID NO: 96650 - DNA, 25 bp, Homo sapien
gcgcagggcgcgctcccaatcgcta

SEQ ID NO: 96651 - DNA, 25 bp, Homo sapien
gcggtgctcgccgctgagagctttc

SEQ ID NO: 96652 - DNA, 25 bp, Homo sapien
caatcgctagctcccgcggtgctcg

SEQ ID NO: 96653 - DNA, 25 bp, Homo sapien
ccagagtgggcgctcgatggctcgg

SEQ ID NO: 96654 - DNA, 25 bp, Homo sapien
tctttcgacggtgaagcagtcacgc

SEQ ID NO: 96655 - DNA, 25 bp, Homo sapien
gaatctccggactgaaaaaccgctg

SEQ ID NO: 96656 - DNA, 25 bp, Homo sapien
gtcctaatcctaacttgggccgcag

SEQ ID NO: 96657 - DNA, 25 bp, Homo sapien
aacttgggccgcagtctccatcgct

SEQ ID NO: 96658 - DNA, 25 bp, Homo sapien
tcacagtcaaggctctctagggtcc

SEQ ID NO: 96659 - DNA, 25 bp, Homo sapien
cagtcaaggctctctagggtccctt

SEQ ID NO: 96660 - DNA, 25 bp, Homo sapien
cactggccccgcctgaatttctcca

SEQ ID NO: 96661 - DNA, 25 bp, Homo sapien
gggtcccttccacgtctaacatcta

SEQ ID NO: 96662 - DNA, 25 bp, Homo sapien
tgtgaccttgagcaagtcactttac

SEQ ID NO: 96663 - DNA, 25 bp, Homo sapien
cattgacttagtatgtgaccttgag

SEQ ID NO: 96664 - DNA, 25 bp, Homo sapien
ccattgacttagtatgtgaccttga

SEQ ID NO: 96665 - DNA, 25 bp, Homo sapien
gtatgtgaccttgagcaagtcactt

SEQ ID NO: 96666 - DNA, 25 bp, Homo sapien
caattggtaaaacgccgagttatgt

SEQ ID NO: 96667 - DNA, 25 bp, Homo sapien
caggaatctttaacagcgtcaagaa

SEQ ID NO: 96668 - DNA, 25 bp, Homo sapien
cgtcaagaatatgaaaggcaaggca

SEQ ID NO: 96669 - DNA, 25 bp, Homo sapien
aacgctgagtgtagtgggaaaacgc

SEQ ID NO: 96670 - DNA, 25 bp, Homo sapien
ttaaaatcgtgccacctgatagggt

SEQ ID NO: 96671 - DNA, 25 bp, Homo sapien
gagaagttaaaatcgtgccacctga

SEQ ID NO: 96672 - DNA, 25 bp, Homo sapien
aaacatctgtaatgagagaagttaa

SEQ ID NO: 96673 - DNA, 25 bp, Homo sapien
atgagagaagttaaaatcgtgccac

SEQ ID NO: 96674 - DNA, 25 bp, Homo sapien
caaatatcttgaaaggagagtttca

SEQ ID NO: 96675 - DNA, 25 bp, Homo sapien
acaaatatcttgaaaggagagtttc

SEQ ID NO: 96676 - DNA, 25 bp, Homo sapien
aaatatcttgaaaggagagtttcag

SEQ ID NO: 96677 - DNA, 25 bp, Homo sapien
tgcaccatgattgcattatcgacct

SEQ ID NO: 96678 - DNA, 25 bp, Homo sapien
accatgattgcattatcgacctgtg

SEQ ID NO: 96679 - DNA, 25 bp, Homo sapien
tgattgcattatcgacctgtgaata

SEQ ID NO: 96680 - DNA, 25 bp, Homo sapien
catgattgcattatcgacctgtgaa

SEQ ID NO: 96681 - DNA, 25 bp, Homo sapien
tggcttatgatagtgtttcctgtgg

SEQ ID NO: 96682 - DNA, 25 bp, Homo sapien
tctggcaggcaaacatggatgagca

SEQ ID NO: 96683 - DNA, 25 bp, Homo sapien
tggttcccatcagggactttctggc

SEQ ID NO: 96684 - DNA, 25 bp, Homo sapien
cacttcttaaagtctgctacagatt

SEQ ID NO: 96685 - DNA, 25 bp, Homo sapien
taaagcactggtaggcattataacc

SEQ ID NO: 96686 - DNA, 25 bp, Homo sapien
cttgtatgtgtaaagcactggtagg

SEQ ID NO: 96687 - DNA, 25 bp, Homo sapien
ggcattataaccaaacaggtaagta

SEQ ID NO: 96688 - DNA, 25 bp, Homo sapien
ggtaagtatactgcgcagtgaccat

SEQ ID NO: 96689 - DNA, 25 bp, Homo sapien
gattctagtgttcatagtctgccag

SEQ ID NO: 96690 - DNA, 25 bp, Homo sapien
aaagcgtcagggttttcacacagcc

SEQ ID NO: 96691 - DNA, 25 bp, Homo sapien
ttaaaggctgaaccaaaaagcgtca

SEQ ID NO: 96692 - DNA, 25 bp, Homo sapien
ttgtgagttgttcatcaaaataacc

SEQ ID NO: 96693 - DNA, 25 bp, Homo sapien
acagtatatgtatgatgaggatagc

SEQ ID NO: 96694 - DNA, 25 bp, Homo sapien
cagtatatgtatgatgaggatagcg

SEQ ID NO: 96695 - DNA, 25 bp, Homo sapien
ggcagtctgagctacgacagtgata

SEQ ID NO: 96696 - DNA, 25 bp, Homo sapien
caataactggcttggtaatgagctc

SEQ ID NO: 96697 - DNA, 25 bp, Homo sapien
tataagccagaaagaaagtagtctc

SEQ ID NO: 96698 - DNA, 25 bp, Homo sapien
gaatgttttggactagatgttcccg

SEQ ID NO: 96699 - DNA, 25 bp, Homo sapien
gaatttgcattagccatgtgtgcac

SEQ ID NO: 96700 - DNA, 25 bp, Homo sapien
gatgtgggtctcatcaaacctggac

SEQ ID NO: 96701 - DNA, 25 bp, Homo sapien
cagtgcacttcagccaaggatacag

SEQ ID NO: 96702 - DNA, 25 bp, Homo sapien
aatagatgtaaggttctcctgggtc

SEQ ID NO: 96703 - DNA, 25 bp, Homo sapien
agttagccatattcatcctacagtg

SEQ ID NO: 96704 - DNA, 25 bp, Homo sapien
tcctaagaagcacaatgttaaattg

SEQ ID NO: 96705 - DNA, 25 bp, Homo sapien
cctgcccatcctaagaagcacaatg

SEQ ID NO: 96706 - DNA, 25 bp, Homo sapien
tcttctagacttttgacagtataca

SEQ ID NO: 96707 - DNA, 25 bp, Homo sapien
taataaaagtatacactgagcgcct

SEQ ID NO: 96708 - DNA, 25 bp, Homo sapien
gacattcgagagtcagtccgaggcc

SEQ ID NO: 96709 - DNA, 25 bp, Homo sapien
aagaccgcacatccgggacattcga

SEQ ID NO: 96710 - DNA, 25 bp, Homo sapien
tgctgccgagaagcttagcgctacg

SEQ ID NO: 96711 - DNA, 25 bp, Homo sapien
tatatagcttttagttccatctccg

SEQ ID NO: 96712 - DNA, 25 bp, Homo sapien
tatggcattcccgatagaggaggca

SEQ ID NO: 96713 - DNA, 25 bp, Homo sapien
cagttggaacctaagctttctgagg

SEQ ID NO: 96714 - DNA, 25 bp, Homo sapien
taccaataccttttcacaactgtgg

SEQ ID NO: 96715 - DNA, 25 bp, Homo sapien
gcctgtttcatcagccgcttcttgc

SEQ ID NO: 96716 - DNA, 25 bp, Homo sapien
gagaggagcctgtttaaatccagca

SEQ ID NO: 96717 - DNA, 25 bp, Homo sapien
gaaagagtagccagcaaggtgaaag

SEQ ID NO: 96718 - DNA, 25 bp, Homo sapien
tctttgtgtgttggatgccctacca

SEQ ID NO: 96719 - DNA, 25 bp, Homo sapien
gtcatctgaaatacttatagaatgg

SEQ ID NO: 96720 - DNA, 25 bp, Homo sapien
tgggagttagatgaatttaactcct

SEQ ID NO: 96721 - DNA, 25 bp, Homo sapien
attatatgcatctatgagttactag

SEQ ID NO: 96722 - DNA, 25 bp, Homo sapien
cttatagaatgggagttagatgaat

SEQ ID NO: 96723 - DNA, 25 bp, Homo sapien
cagttctgggaatcctgtccagaca

SEQ ID NO: 96724 - DNA, 25 bp, Homo sapien
tctcctccaggtatatcctgcctgc

SEQ ID NO: 96725 - DNA, 25 bp, Homo sapien
tccaggtatatcctgcctgcagttc

SEQ ID NO: 96726 - DNA, 25 bp, Homo sapien
ctgcagttctgggaatcctgtccag

SEQ ID NO: 96727 - DNA, 25 bp, Homo sapien
gtaacttcatttagagattgatgat

SEQ ID NO: 96728 - DNA, 25 bp, Homo sapien
aagtaacttcatttagagattgatg

SEQ ID NO: 96729 - DNA, 25 bp, Homo sapien
caagaattgcttcaagtaacttcat

SEQ ID NO: 96730 - DNA, 25 bp, Homo sapien
caagtaacttcatttagagattgat

SEQ ID NO: 96731 - DNA, 25 bp, Homo sapien
ttggctagcttagcctcacgcagct

SEQ ID NO: 96732 - DNA, 25 bp, Homo sapien
ggttgctacaacataatctgactcc

SEQ ID NO: 96733 - DNA, 25 bp, Homo sapien
gatagaattaggtgaacaatctcca

SEQ ID NO: 96734 - DNA, 25 bp, Homo sapien
ctcacgcagctcattagacccatag

SEQ ID NO: 96735 - DNA, 25 bp, Homo sapien
tcacctttacctctattctcatcat

SEQ ID NO: 96736 - DNA, 25 bp, Homo sapien
tcttgggaatagtttcttgtctgcc

SEQ ID NO: 96737 - DNA, 25 bp, Homo sapien
ttccagggagtctgcaactctgacc

SEQ ID NO: 96738 - DNA, 25 bp, Homo sapien
ctgccttttgggaactagattattg

SEQ ID NO: 96739 - DNA, 25 bp, Homo sapien
tttggctgcaagtagcagataactc

SEQ ID NO: 96740 - DNA, 25 bp, Homo sapien
aaaagttcagaattatatcacagag

SEQ ID NO: 96741 - DNA, 25 bp, Homo sapien
gagatgtttgttgtaccttcaggca

SEQ ID NO: 96742 - DNA, 25 bp, Homo sapien
cacagaggtccaatacgatgaatcc

SEQ ID NO: 96743 - DNA, 25 bp, Homo sapien
acgcggaacgctgctgtgagccctg

SEQ ID NO: 96744 - DNA, 25 bp, Homo sapien
cggaacgctgctgtgagccctgctg

SEQ ID NO: 96745 - DNA, 25 bp, Homo sapien
gacgcggaacgctgctgtgagccct

SEQ ID NO: 96746 - DNA, 25 bp, Homo sapien
gcggaacgctgctgtgagccctgct

SEQ ID NO: 96747 - DNA, 25 bp, Homo sapien
ccaccagcccggagcgacaccccac

SEQ ID NO: 96748 - DNA, 25 bp, Homo sapien
aagcggggcagtggccccgccacca

SEQ ID NO: 96749 - DNA, 25 bp, Homo sapien
ctcggcttcccccaagcggggcagt

SEQ ID NO: 96750 - DNA, 25 bp, Homo sapien
ggagcgacaccccaccaaaaagcag

SEQ ID NO: 96751 - DNA, 25 bp, Homo sapien
tgctttggaagtcctcgggacatga

SEQ ID NO: 96752 - DNA, 25 bp, Homo sapien
ccttctatcggtttctgctttggaa

SEQ ID NO: 96753 - DNA, 25 bp, Homo sapien
ctttccagaagccacaactataact

SEQ ID NO: 96754 - DNA, 25 bp, Homo sapien
tgtagtagattttccgactccaccc

SEQ ID NO: 96755 - DNA, 25 bp, Homo sapien
ttcgctgctagtgcaagtgcaagat

SEQ ID NO: 96756 - DNA, 25 bp, Homo sapien
aatcgttcgctgctagtgcaagtgc

SEQ ID NO: 96757 - DNA, 25 bp, Homo sapien
cgaatcgttcgctgctagtgcaagt

SEQ ID NO: 96758 - DNA, 25 bp, Homo sapien
tcgttcgctgctagtgcaagtgcaa

SEQ ID NO: 96759 - DNA, 25 bp, Homo sapien
tttctctctgttctcgtattaatat

SEQ ID NO: 96760 - DNA, 25 bp, Homo sapien
atactatttatacccacaaactgct

SEQ ID NO: 96761 - DNA, 25 bp, Homo sapien
tatactatttatacccacaaactgc

SEQ ID NO: 96762 - DNA, 25 bp, Homo sapien
actatttatacccacaaactgctgc

SEQ ID NO: 96763 - DNA, 25 bp, Homo sapien
cattctaactcataagcaaattcag

SEQ ID NO: 96764 - DNA, 25 bp, Homo sapien
tcattctaactcataagcaaattca

SEQ ID NO: 96765 - DNA, 25 bp, Homo sapien
attctaactcataagcaaattcagc

SEQ ID NO: 96766 - DNA, 25 bp, Homo sapien
gcagaagatgcttacagacactgag

SEQ ID NO: 96767 - DNA, 25 bp, Homo sapien
cagagcacttgatccacccttcaga

SEQ ID NO: 96768 - DNA, 25 bp, Homo sapien
acactgctccgctgagaattaaagg

SEQ ID NO: 96769 - DNA, 25 bp, Homo sapien
tgaaacccacagttccatatgctct

SEQ ID NO: 96770 - DNA, 25 bp, Homo sapien
gaggttgcagtgagcagagattaca

SEQ ID NO: 96771 - DNA, 25 bp, Homo sapien
cagcctgggtgacagagtgataaag

SEQ ID NO: 96772 - DNA, 25 bp, Homo sapien
gagcagagattacaccattgcattc

SEQ ID NO: 96773 - DNA, 25 bp, Homo sapien
gagaattgcttaaaaccggaagaca

SEQ ID NO: 96774 - DNA, 25 bp, Homo sapien
aagggcaggaatatccccaagtatt

SEQ ID NO: 96775 - DNA, 25 bp, Homo sapien
tgatccccacagtctcttataagct

SEQ ID NO: 96776 - DNA, 25 bp, Homo sapien
tgcaaaccagcactaatccttaagc

SEQ ID NO: 96777 - DNA, 25 bp, Homo sapien
gcatgctcccacctattggcctttg

SEQ ID NO: 96778 - DNA, 25 bp, Homo sapien
ctacagacgccccccagcacacccg

SEQ ID NO: 96779 - DNA, 25 bp, Homo sapien
cgggactacagacgccccccagcac

SEQ ID NO: 96780 - DNA, 25 bp, Homo sapien
ggactacagacgccccccagcacac

SEQ ID NO: 96781 - DNA, 25 bp, Homo sapien
ccgggactacagacgccccccagca

SEQ ID NO: 96782 - DNA, 25 bp, Homo sapien
acatctagcaaaccaatggccttgg

SEQ ID NO: 96783 - DNA, 25 bp, Homo sapien
catccacatctagcaaaccaatggc

SEQ ID NO: 96784 - DNA, 25 bp, Homo sapien
ggtccatacacatccacatctagca

SEQ ID NO: 96785 - DNA, 25 bp, Homo sapien
ttggaactgaaggtccatacacatc

SEQ ID NO: 96786 - DNA, 25 bp, Homo sapien
acttctgtagtagcgaattatagaa

SEQ ID NO: 96787 - DNA, 25 bp, Homo sapien
tgtagtagcgaattatagaaatgat

SEQ ID NO: 96788 - DNA, 25 bp, Homo sapien
gaaacttctgtagtagcgaattata

SEQ ID NO: 96789 - DNA, 25 bp, Homo sapien
tctgtagtagcgaattatagaaatg

SEQ ID NO: 96790 - DNA, 25 bp, Homo sapien
cacttcgagtgtttatgttggcata

SEQ ID NO: 96791 - DNA, 25 bp, Homo sapien
tgttggcatataccaagcagactac

SEQ ID NO: 96792 - DNA, 25 bp, Homo sapien
gaaagcttgacaccttggctcatgt

SEQ ID NO: 96793 - DNA, 25 bp, Homo sapien
ccgaaagcctatttactggcagcca

SEQ ID NO: 96794 - DNA, 25 bp, Homo sapien
gcagcattagattctaagtctagat

SEQ ID NO: 96795 - DNA, 25 bp, Homo sapien
gcaattctatctgataacccagggg

SEQ ID NO: 96796 - DNA, 25 bp, Homo sapien
ccaggccgcaaaccagtaccagtct

SEQ ID NO: 96797 - DNA, 25 bp, Homo sapien
tctagatttctacttaggataagag

SEQ ID NO: 96798 - DNA, 25 bp, Homo sapien
ttttatctatttagccactccatct

SEQ ID NO: 96799 - DNA, 25 bp, Homo sapien
gagtttagtccattgttattactaa

SEQ ID NO: 96800 - DNA, 25 bp, Homo sapien
gttcttgtaggctacaaatcaatgg

SEQ ID NO: 96801 - DNA, 25 bp, Homo sapien
aagacttattcctgccatattgtta

SEQ ID NO: 96802 - DNA, 25 bp, Homo sapien
ccaatttattggcatgtacttactc

SEQ ID NO: 96803 - DNA, 25 bp, Homo sapien
gttgtacgtgtatatgaatttatcc

SEQ ID NO: 96804 - DNA, 25 bp, Homo sapien
ttggcatgtacttactcacagtagc

SEQ ID NO: 96805 - DNA, 25 bp, Homo sapien
tctgtttaagtttaggaagattgaa

SEQ ID NO: 96806 - DNA, 25 bp, Homo sapien
ctgattttgtcggagggcagccaag

SEQ ID NO: 96807 - DNA, 25 bp, Homo sapien
ggtggttaggtaagcataagattaa

SEQ ID NO: 96808 - DNA, 25 bp, Homo sapien
gaagtaaagtagtgtaaagaactga

SEQ ID NO: 96809 - DNA, 25 bp, Homo sapien
gccccaaagcgtttcttaagtctca

SEQ ID NO: 96810 - DNA, 25 bp, Homo sapien
gatactaaccacacaattgttgtgg

SEQ ID NO: 96811 - DNA, 25 bp, Homo sapien
agtttggtgttagtgctatagtagc

SEQ ID NO: 96812 - DNA, 25 bp, Homo sapien
gagatatacctgtatgtaccaagta

SEQ ID NO: 96813 - DNA, 25 bp, Homo sapien
gaacaagacctgcaacatctctgag

SEQ ID NO: 96814 - DNA, 25 bp, Homo sapien
tttcacacttcatggactacagtat

SEQ ID NO: 96815 - DNA, 25 bp, Homo sapien
ttaaggtacatacatatttttagac

SEQ ID NO: 96816 - DNA, 25 bp, Homo sapien
tgctatttcacacttcatggactac

SEQ ID NO: 96817 - DNA, 25 bp, Homo sapien
cataatgctatttcacacttcatgg

SEQ ID NO: 96818 - DNA, 25 bp, Homo sapien
agtagatctctctacagaaacccta

SEQ ID NO: 96819 - DNA, 25 bp, Homo sapien
acagtagatctctctacagaaaccc

SEQ ID NO: 96820 - DNA, 25 bp, Homo sapien
aaacctttagagacaagcaaaagct

SEQ ID NO: 96821 - DNA, 25 bp, Homo sapien
acctttagagacaagcaaaagctga

SEQ ID NO: 96822 - DNA, 25 bp, Homo sapien
ataccataattcaagagaggcctca

SEQ ID NO: 96823 - DNA, 25 bp, Homo sapien
gcaataccataattcaagagaggcc

SEQ ID NO: 96824 - DNA, 25 bp, Homo sapien
caataccataattcaagagaggcct

SEQ ID NO: 96825 - DNA, 25 bp, Homo sapien
aataccataattcaagagaggcctc

SEQ ID NO: 96826 - DNA, 25 bp, Homo sapien
tcaatggccgacattaccataaggc

SEQ ID NO: 96827 - DNA, 25 bp, Homo sapien
tcactttcttcaaccagaaagccca

SEQ ID NO: 96828 - DNA, 25 bp, Homo sapien
caatttctcaatggccgacattacc

SEQ ID NO: 96829 - DNA, 25 bp, Homo sapien
aggcctctccaaactactggttcac

SEQ ID NO: 96830 - DNA, 25 bp, Homo sapien
gtccatgcccttagctattgagcta

SEQ ID NO: 96831 - DNA, 25 bp, Homo sapien
tagtagcagttgaaggccagaggac

SEQ ID NO: 96832 - DNA, 25 bp, Homo sapien
tggaataaactcaggcagatgtgac

SEQ ID NO: 96833 - DNA, 25 bp, Homo sapien
catcaatatttaagggataggcaag

SEQ ID NO: 96834 - DNA, 25 bp, Homo sapien
taatataccactcctccttaagcta

SEQ ID NO: 96835 - DNA, 25 bp, Homo sapien
ccccaaattcttgaatggcctattt

SEQ ID NO: 96836 - DNA, 25 bp, Homo sapien
ccttgtaaaaggtatggctgtcctc

SEQ ID NO: 96837 - DNA, 25 bp, Homo sapien
tagaatacacctctacctacatagt

SEQ ID NO: 96838 - DNA, 25 bp, Homo sapien
caaatagcaagactactggtacatg

SEQ ID NO: 96839 - DNA, 25 bp, Homo sapien
tgtcgcacgtgttggtctcaaacgc

SEQ ID NO: 96840 - DNA, 25 bp, Homo sapien
gtcatttatgcctgaatatgagata

SEQ ID NO: 96841 - DNA, 25 bp, Homo sapien
agatagagtcttgcgatgtcgcacg

SEQ ID NO: 96842 - DNA, 25 bp, Homo sapien
gatttacttaatgatgtccacgaac

SEQ ID NO: 96843 - DNA, 25 bp, Homo sapien
tcttcagctatcttttgctttaagt

SEQ ID NO: 96844 - DNA, 25 bp, Homo sapien
tcctcggccttctaggttcgagcga

SEQ ID NO: 96845 - DNA, 25 bp, Homo sapien
gaaactgcctctcctgttacattga

SEQ ID NO: 96846 - DNA, 25 bp, Homo sapien
tcccttggacctggatagatactgc

SEQ ID NO: 96847 - DNA, 25 bp, Homo sapien
gatactgttctctcaatacccaaga

SEQ ID NO: 96848 - DNA, 25 bp, Homo sapien
gggacccctagaatgtccatcagtg

SEQ ID NO: 96849 - DNA, 25 bp, Homo sapien
tacccaagaggcaggcttctaaagg

SEQ ID NO: 96850 - DNA, 25 bp, Homo sapien
tgagttctcgctcggttagttcacg

SEQ ID NO: 96851 - DNA, 25 bp, Homo sapien
ctcggttagttcacgcaagatctgg

SEQ ID NO: 96852 - DNA, 25 bp, Homo sapien
aaagtctgaaagtagacaactctgg

SEQ ID NO: 96853 - DNA, 25 bp, Homo sapien
caactctgggactttttatttgtgg

SEQ ID NO: 96854 - DNA, 25 bp, Homo sapien
cgcaaggacaaaaaaccgaacactg

SEQ ID NO: 96855 - DNA, 25 bp, Homo sapien
tgaacaatgagaacgcatggacaca

SEQ ID NO: 96856 - DNA, 25 bp, Homo sapien
gaacatcacactgtggggactgttg

SEQ ID NO: 96857 - DNA, 25 bp, Homo sapien
catgttctcactcatagatgggaat

SEQ ID NO: 96858 - DNA, 25 bp, Homo sapien
tttgaaggccttgggttctatacta

SEQ ID NO: 96859 - DNA, 25 bp, Homo sapien
gaaggccttgggttctatactagaa

SEQ ID NO: 96860 - DNA, 25 bp, Homo sapien
ccttgggttctatactagaatatgc

SEQ ID NO: 96861 - DNA, 25 bp, Homo sapien
tggtttgaaggccttgggttctata

SEQ ID NO: 96862 - DNA, 25 bp, Homo sapien
agaccattaagtgagcagctgtttc

SEQ ID NO: 96863 - DNA, 25 bp, Homo sapien
tttcccgtgttaaatagacttgcca

SEQ ID NO: 96864 - DNA, 25 bp, Homo sapien
gcaggagcccttacctataacacaa

SEQ ID NO: 96865 - DNA, 25 bp, Homo sapien
catgtgcctagatgacttaagtgga

SEQ ID NO: 96866 - DNA, 25 bp, Homo sapien
cacctgtctcagtactgggggttta

SEQ ID NO: 96867 - DNA, 25 bp, Homo sapien
gcctttgcttccacctgtctcagta

SEQ ID NO: 96868 - DNA, 25 bp, Homo sapien
agattcaggtaaagagctctgcaga

SEQ ID NO: 96869 - DNA, 25 bp, Homo sapien
ggagattcaggtaaagagctctgca

SEQ ID NO: 96870 - DNA, 25 bp, Homo sapien
tttctctgaaagcaatgcttggtac

SEQ ID NO: 96871 - DNA, 25 bp, Homo sapien
tctctgaaagcaatgcttggtacca

SEQ ID NO: 96872 - DNA, 25 bp, Homo sapien
tctgaaagcaatgcttggtaccagg

SEQ ID NO: 96873 - DNA, 25 bp, Homo sapien
tgtttctctgaaagcaatgcttggt

SEQ ID NO: 96874 - DNA, 25 bp, Homo sapien
tgtaggcgtaaatgataagcagtca

SEQ ID NO: 96875 - DNA, 25 bp, Homo sapien
taagcagtcatcattctagaagtca

SEQ ID NO: 96876 - DNA, 25 bp, Homo sapien
tttaagtactgaaaccgccttggca

SEQ ID NO: 96877 - DNA, 25 bp, Homo sapien
tagaattcagctaagatgtaggcgt

SEQ ID NO: 96878 - DNA, 25 bp, Homo sapien
gactcagttagtctagaaattggag

SEQ ID NO: 96879 - DNA, 25 bp, Homo sapien
gttaccaaggtactccagagatgcc

SEQ ID NO: 96880 - DNA, 25 bp, Homo sapien
aattggagttaccaaggtactccag

SEQ ID NO: 96881 - DNA, 25 bp, Homo sapien
cagcagggtagactcagttagtcta

SEQ ID NO: 96882 - DNA, 25 bp, Homo sapien
cgcctgacccataaggttctctttc

SEQ ID NO: 96883 - DNA, 25 bp, Homo sapien
cacctggtgtaataacttgcccaat

SEQ ID NO: 96884 - DNA, 25 bp, Homo sapien
cacgcctgacccataaggttctctt

SEQ ID NO: 96885 - DNA, 25 bp, Homo sapien
tcttaccatcacctggtgtaataac

SEQ ID NO: 96886 - DNA, 25 bp, Homo sapien
tacaactaagtagtccagttgaccc

SEQ ID NO: 96887 - DNA, 25 bp, Homo sapien
actaagtagtccagttgaccccaat

SEQ ID NO: 96888 - DNA, 25 bp, Homo sapien
aagtagtccagttgaccccaatcta

SEQ ID NO: 96889 - DNA, 25 bp, Homo sapien
gtctacaactaagtagtccagttga

SEQ ID NO: 96890 - DNA, 25 bp, Homo sapien
tgtgagactgataactgcacatctc

SEQ ID NO: 96891 - DNA, 25 bp, Homo sapien
taactgcacatctccagttcctggt

SEQ ID NO: 96892 - DNA, 25 bp, Homo sapien
atattctgtgagactgataactgca

SEQ ID NO: 96893 - DNA, 25 bp, Homo sapien
ctgttataggaatattctgtgagac

SEQ ID NO: 96894 - DNA, 25 bp, Homo sapien
ggatcaactgtgctgtaaagacata

SEQ ID NO: 96895 - DNA, 25 bp, Homo sapien
agtgaggatcaactgtgctgtaaag

SEQ ID NO: 96896 - DNA, 25 bp, Homo sapien
ctaagtgaggatcaactgtgctgta

SEQ ID NO: 96897 - DNA, 25 bp, Homo sapien
tgaggatcaactgtgctgtaaagac

SEQ ID NO: 96898 - DNA, 25 bp, Homo sapien
tgacctgataaaggcttgaatgact

SEQ ID NO: 96899 - DNA, 25 bp, Homo sapien
aagagcatgacctgataaaggcttg

SEQ ID NO: 96900 - DNA, 25 bp, Homo sapien
taaaggcttgaatgactgttagcat

SEQ ID NO: 96901 - DNA, 25 bp, Homo sapien
ttaaagacataatgttgtatacact

SEQ ID NO: 96902 - DNA, 25 bp, Homo sapien
tgtgattgctgttagcatctttgtc

SEQ ID NO: 96903 - DNA, 25 bp, Homo sapien
tttgttgtgattgctgttagcatct

SEQ ID NO: 96904 - DNA, 25 bp, Homo sapien
gctggacagaagctcttaattttaa

SEQ ID NO: 96905 - DNA, 25 bp, Homo sapien
tgctggacagaagctcttaatttta

SEQ ID NO: 96906 - DNA, 25 bp, Homo sapien
gataacctgtgaatgcttcacgaag

SEQ ID NO: 96907 - DNA, 25 bp, Homo sapien
cacagctaaagtggtgtttagaggg

SEQ ID NO: 96908 - DNA, 25 bp, Homo sapien
gaatgttgagtattggctactactc

SEQ ID NO: 96909 - DNA, 25 bp, Homo sapien
tgatcaattaggatactgataacct

SEQ ID NO: 96910 - DNA, 25 bp, Homo sapien
taaattggtatcaagtggcagacac

SEQ ID NO: 96911 - DNA, 25 bp, Homo sapien
taactgattacaccaagtgaaggtc

SEQ ID NO: 96912 - DNA, 25 bp, Homo sapien
tcacaaagcacatggcagtatgggc

SEQ ID NO: 96913 - DNA, 25 bp, Homo sapien
tactagacagtattgcctgaaggga

SEQ ID NO: 96914 - DNA, 25 bp, Homo sapien
tggactctgcgaaacatctcagcac

SEQ ID NO: 96915 - DNA, 25 bp, Homo sapien
tcctggggcgtggagacaatcacag

SEQ ID NO: 96916 - DNA, 25 bp, Homo sapien
gcatccatcaatgcgatgtcctggg

SEQ ID NO: 96917 - DNA, 25 bp, Homo sapien
atctcagcacccttgtgtgcatcca

SEQ ID NO: 96918 - DNA, 25 bp, Homo sapien
tgacttcacttctaaccccatctaa

SEQ ID NO: 96919 - DNA, 25 bp, Homo sapien
ggctgctagaaaagtcacggtacac

SEQ ID NO: 96920 - DNA, 25 bp, Homo sapien
ggtacacccctagcatgtatttaag

SEQ ID NO: 96921 - DNA, 25 bp, Homo sapien
tttactgacttcacttctaacccca

SEQ ID NO: 96922 - DNA, 25 bp, Homo sapien
tttttgcgtgtgatttttgcagtat

SEQ ID NO: 96923 - DNA, 25 bp, Homo sapien
agaaagcaaatactacatgcctggc

SEQ ID NO: 96924 - DNA, 25 bp, Homo sapien
gccaccacaacctttttgcgtgtga

SEQ ID NO: 96925 - DNA, 25 bp, Homo sapien
cagctacttttactgaaagaaagca

SEQ ID NO: 96926 - DNA, 25 bp, Homo sapien
catggttcctggttaaagtttgcca

SEQ ID NO: 96927 - DNA, 25 bp, Homo sapien
tccataaagtgcctgctcgggtctc

SEQ ID NO: 96928 - DNA, 25 bp, Homo sapien
tcattgtgctggcttgttcaaccgt

SEQ ID NO: 96929 - DNA, 25 bp, Homo sapien
ggcttaggcattacacattactggt

SEQ ID NO: 96930 - DNA, 25 bp, Homo sapien
aagtcagaggttttgataactaagc

SEQ ID NO: 96931 - DNA, 25 bp, Homo sapien
taactgaaagtctggaggtagactg

SEQ ID NO: 96932 - DNA, 25 bp, Homo sapien
ctaagcttggctctattactgataa

SEQ ID NO: 96933 - DNA, 25 bp, Homo sapien
tatgtaacttctcctagttaaagga

SEQ ID NO: 96934 - DNA, 25 bp, Homo sapien
gatatatcccctgactgtatggctc

SEQ ID NO: 96935 - DNA, 25 bp, Homo sapien
tatataatacactcactgcttgggc

SEQ ID NO: 96936 - DNA, 25 bp, Homo sapien
ctgatgtcctagaagcaactgtggg

SEQ ID NO: 96937 - DNA, 25 bp, Homo sapien
caagtaccggaatggctgatgtcct

SEQ ID NO: 96938 - DNA, 25 bp, Homo sapien
tcaagaccaagggtctgtgctagtt

SEQ ID NO: 96939 - DNA, 25 bp, Homo sapien
ctagaacttcaagaccaagggtctg

SEQ ID NO: 96940 - DNA, 25 bp, Homo sapien
aagaccaagggtctgtgctagtttc

SEQ ID NO: 96941 - DNA, 25 bp, Homo sapien
gaacttcaagaccaagggtctgtgc

SEQ ID NO: 96942 - DNA, 25 bp, Homo sapien
gccacttcttctacaaaagaacatc

SEQ ID NO: 96943 - DNA, 25 bp, Homo sapien
tctacaaaagaacatcccacagtct

SEQ ID NO: 96944 - DNA, 25 bp, Homo sapien
tcttctgccacttcttctacaaaag

SEQ ID NO: 96945 - DNA, 25 bp, Homo sapien
tcttctacaaaagaacatcccacag

SEQ ID NO: 96946 - DNA, 25 bp, Homo sapien
ctaaaagagcccagcagacatccat

SEQ ID NO: 96947 - DNA, 25 bp, Homo sapien
aggctgtgaaaacacaattggctgg

SEQ ID NO: 96948 - DNA, 25 bp, Homo sapien
gaagcttcccttatattaaggtgta

SEQ ID NO: 96949 - DNA, 25 bp, Homo sapien
tggcctgtatctgaagcttccctta

SEQ ID NO: 96950 - DNA, 25 bp, Homo sapien
acacaattggctggcctgtatctga

SEQ ID NO: 96951 - DNA, 25 bp, Homo sapien
tccaactatgttggctaatgaaaca

SEQ ID NO: 96952 - DNA, 25 bp, Homo sapien
gaacagcagttatgtttggaaaaaa

SEQ ID NO: 96953 - DNA, 25 bp, Homo sapien
taccagtactgtaaagctataccca

SEQ ID NO: 96954 - DNA, 25 bp, Homo sapien
caacaaaggaacaacatctgaactg

SEQ ID NO: 96955 - DNA, 25 bp, Homo sapien
cgtcaaggacactaagtggactcag

SEQ ID NO: 96956 - DNA, 25 bp, Homo sapien
gactcagctctttagcaaagggaag

SEQ ID NO: 96957 - DNA, 25 bp, Homo sapien
tacttgataccacgtcaaggacact

SEQ ID NO: 96958 - DNA, 25 bp, Homo sapien
gaggagagacatttagtgtcatgac

SEQ ID NO: 96959 - DNA, 25 bp, Homo sapien
tttgggcactgttcccacctgagga

SEQ ID NO: 96960 - DNA, 25 bp, Homo sapien
tatctagctcaaagcattttcggag

SEQ ID NO: 96961 - DNA, 25 bp, Homo sapien
catatgaacatgtcctttgggcact

SEQ ID NO: 96962 - DNA, 25 bp, Homo sapien
tcagacagccatggtttagaatgtt

SEQ ID NO: 96963 - DNA, 25 bp, Homo sapien
cagcaatcctcaagtaagctttggc

SEQ ID NO: 96964 - DNA, 25 bp, Homo sapien
ttctgaaggtgatggcaatcttctt

SEQ ID NO: 96965 - DNA, 25 bp, Homo sapien
cattctgaaggtgatggcaatcttc

SEQ ID NO: 96966 - DNA, 25 bp, Homo sapien
tcattctgaaggtgatggcaatctt

SEQ ID NO: 96967 - DNA, 25 bp, Homo sapien
ctgaaggtgatggcaatcttcttac

SEQ ID NO: 96968 - DNA, 25 bp, Homo sapien
tagatacagtaaccctcagcaagac

SEQ ID NO: 96969 - DNA, 25 bp, Homo sapien
tctttgcaggtggtacacaccagct

SEQ ID NO: 96970 - DNA, 25 bp, Homo sapien
gcaaaaagtgtacagttctctccca

SEQ ID NO: 96971 - DNA, 25 bp, Homo sapien
gtaggttccatcaccacattgctga

SEQ ID NO: 96972 - DNA, 25 bp, Homo sapien
tgggatactgacatcgatagctgtg

SEQ ID NO: 96973 - DNA, 25 bp, Homo sapien
atgtttctcacagccacgcccaatt

SEQ ID NO: 96974 - DNA, 25 bp, Homo sapien
aataatacagagattccatgtgccc

SEQ ID NO: 96975 - DNA, 25 bp, Homo sapien
tctctggaattataagttgctgcct

SEQ ID NO: 96976 - DNA, 25 bp, Homo sapien
gagtgatatgattacagtgtgtcca

SEQ ID NO: 96977 - DNA, 25 bp, Homo sapien
tctgcagacaacagtcaaaagaagg

SEQ ID NO: 96978 - DNA, 25 bp, Homo sapien
ttatatgtggatcttctctcggtca

SEQ ID NO: 96979 - DNA, 25 bp, Homo sapien
tagacttccttgaagcatctgcaga

SEQ ID NO: 96980 - DNA, 25 bp, Homo sapien
ggtagattttgacagtaaaggcatc

SEQ ID NO: 96981 - DNA, 25 bp, Homo sapien
tctggtaaagtttgtgtagaactgg

SEQ ID NO: 96982 - DNA, 25 bp, Homo sapien
ccttcattcaatgttgggtagattt

SEQ ID NO: 96983 - DNA, 25 bp, Homo sapien
tatctattccataagtgagctttgg

SEQ ID NO: 96984 - DNA, 25 bp, Homo sapien
agggttacactagcttcactgaatg

SEQ ID NO: 96985 - DNA, 25 bp, Homo sapien
ttggtattagggttacactagcttc

SEQ ID NO: 96986 - DNA, 25 bp, Homo sapien
gcttgttattggtcggctaagggta

SEQ ID NO: 96987 - DNA, 25 bp, Homo sapien
ttggtcggctaagggtatctaattc

SEQ ID NO: 96988 - DNA, 25 bp, Homo sapien
ggcacttcaaatgtcctcccagttc

SEQ ID NO: 96989 - DNA, 25 bp, Homo sapien
cccagttcgtgattatatgatgtac

SEQ ID NO: 96990 - DNA, 25 bp, Homo sapien
tctttgatagttataggcacttcaa

SEQ ID NO: 96991 - DNA, 25 bp, Homo sapien
tgtaatgtagacgaatttatcaacc

SEQ ID NO: 96992 - DNA, 25 bp, Homo sapien
taacatccgtatgctctaccttgca

SEQ ID NO: 96993 - DNA, 25 bp, Homo sapien
ttgaagacattatgactacaccttg

SEQ ID NO: 96994 - DNA, 25 bp, Homo sapien
tgtaattgtgcagactgaactgttt

SEQ ID NO: 96995 - DNA, 25 bp, Homo sapien
ggagtaaatctggacgaatttcaga

SEQ ID NO: 96996 - DNA, 25 bp, Homo sapien
catgcaacttctgcacattccattc

SEQ ID NO: 96997 - DNA, 25 bp, Homo sapien
tgcaacttctgcacattccattctt

SEQ ID NO: 96998 - DNA, 25 bp, Homo sapien
acattccattcttcttgcctggcat

SEQ ID NO: 96999 - DNA, 25 bp, Homo sapien
caacttctgcacattccattcttct

SEQ ID NO: 97000 - DNA, 25 bp, Homo sapien
cagcgagtcatcagccacgctgacc

SEQ ID NO: 97001 - DNA, 25 bp, Homo sapien
cagaccagcgagtcatcagccacgc

SEQ ID NO: 97002 - DNA, 25 bp, Homo sapien
accagcgagtcatcagccacgctga

SEQ ID NO: 97003 - DNA, 25 bp, Homo sapien
gaccagcgagtcatcagccacgctg

SEQ ID NO: 97004 - DNA, 25 bp, Homo sapien
acgatgtacgtctggaggagatcca

SEQ ID NO: 97005 - DNA, 25 bp, Homo sapien
taattgctacgagcattggctggcg

SEQ ID NO: 97006 - DNA, 25 bp, Homo sapien
tagtagtgagctaagcatttctggc

SEQ ID NO: 97007 - DNA, 25 bp, Homo sapien
catttctggcctatatgggtggacg

SEQ ID NO: 97008 - DNA, 25 bp, Homo sapien
caatggcatcaatgaaacataatcc

SEQ ID NO: 97009 - DNA, 25 bp, Homo sapien
gaacagaaagtggacgtgaaattga

SEQ ID NO: 97010 - DNA, 25 bp, Homo sapien
tagatgagctaccatatttcttcca

SEQ ID NO: 97011 - DNA, 25 bp, Homo sapien
tgtcccaaccatccccggtagatga

SEQ ID NO: 97012 - DNA, 25 bp, Homo sapien
gcaaaaatatgaataaccagattaa

SEQ ID NO: 97013 - DNA, 25 bp, Homo sapien
aaccagattaaaatataggcaaagg

SEQ ID NO: 97014 - DNA, 25 bp, Homo sapien
atataaggaacacacacaactcaaa

SEQ ID NO: 97015 - DNA, 25 bp, Homo sapien
taaggggctaatatctaaaacatat

SEQ ID NO: 97016 - DNA, 25 bp, Homo sapien
aaaagcacgaaatcttctgtcccag

SEQ ID NO: 97017 - DNA, 25 bp, Homo sapien
tgcagtcggtcccagcagcatatgc

SEQ ID NO: 97018 - DNA, 25 bp, Homo sapien
tcatgactgcatgtgagattgtgct

SEQ ID NO: 97019 - DNA, 25 bp, Homo sapien
gagacgtgcagactaacgggaccac

SEQ ID NO: 97020 - DNA, 25 bp, Homo sapien
atgctgctggaagagcacaatgact

SEQ ID NO: 97021 - DNA, 25 bp, Homo sapien
tgtcacaaacctcacactgctctgg

SEQ ID NO: 97022 - DNA, 25 bp, Homo sapien
tgaatttaattggagagaggtcagc

SEQ ID NO: 97023 - DNA, 25 bp, Homo sapien
ggtaggcaccagaagtatcagcgtc

SEQ ID NO: 97024 - DNA, 25 bp, Homo sapien
aatcaatgtagagatcagatcagcc

SEQ ID NO: 97025 - DNA, 25 bp, Homo sapien
cactgagctgggtgacaaatccact

SEQ ID NO: 97026 - DNA, 25 bp, Homo sapien
ttcagggagtatgctcttaatgaca

SEQ ID NO: 97027 - DNA, 25 bp, Homo sapien
gaatgaaaacttggcaggtcagtga

SEQ ID NO: 97028 - DNA, 25 bp, Homo sapien
ctgagtaggacagctcaaaaagaaa

SEQ ID NO: 97029 - DNA, 25 bp, Homo sapien
tgagtaggacagctcaaaaagaaac

SEQ ID NO: 97030 - DNA, 25 bp, Homo sapien
gtcctggtttcgcccttcctgaagc

SEQ ID NO: 97031 - DNA, 25 bp, Homo sapien
tgcagccgggctctagtattgtcct

SEQ ID NO: 97032 - DNA, 25 bp, Homo sapien
gcacatccttcaataagcgtccctt

SEQ ID NO: 97033 - DNA, 25 bp, Homo sapien
ctgggttccacacgtgcacatcctt

SEQ ID NO: 97034 - DNA, 25 bp, Homo sapien
ccctgttctcctgttaaagcaccac

SEQ ID NO: 97035 - DNA, 25 bp, Homo sapien
agctttggttgtgctttccctccca

SEQ ID NO: 97036 - DNA, 25 bp, Homo sapien
tgttctcctgttaaagcaccacctt

SEQ ID NO: 97037 - DNA, 25 bp, Homo sapien
cctcccaacaggcagcccctgttct

SEQ ID NO: 97038 - DNA, 25 bp, Homo sapien
cctcacatatccctggtgcagctct

SEQ ID NO: 97039 - DNA, 25 bp, Homo sapien
tcctcacatatccctggtgcagctc

SEQ ID NO: 97040 - DNA, 25 bp, Homo sapien
tcacatatccctggtgcagctctct

SEQ ID NO: 97041 - DNA, 25 bp, Homo sapien
cagtatgtacacaagcagttccagt

SEQ ID NO: 97042 - DNA, 25 bp, Homo sapien
gcagttccagtacagactggcatga

SEQ ID NO: 97043 - DNA, 25 bp, Homo sapien
ttccagtacagactggcatgaggat

SEQ ID NO: 97044 - DNA, 25 bp, Homo sapien
tttgagcaccagtatgtacacaagc

SEQ ID NO: 97045 - DNA, 25 bp, Homo sapien
gaagttgccacgacactgggcacag

SEQ ID NO: 97046 - DNA, 25 bp, Homo sapien
gtctatgatgaatacagaagttgcc

SEQ ID NO: 97047 - DNA, 25 bp, Homo sapien
tggtccagaggatgtctatgatgaa

SEQ ID NO: 97048 - DNA, 25 bp, Homo sapien
gaggatgtctatgatgaatacagaa

SEQ ID NO: 97049 - DNA, 25 bp, Homo sapien
agcgtcatcacagccgagagtctct

SEQ ID NO: 97050 - DNA, 25 bp, Homo sapien
ccagcgtcatcacagccgagagtct

SEQ ID NO: 97051 - DNA, 25 bp, Homo sapien
agccagcgtcatcacagccgagagt

SEQ ID NO: 97052 - DNA, 25 bp, Homo sapien
ctaagccagcgtcatcacagccgag

SEQ ID NO: 97053 - DNA, 25 bp, Homo sapien
tcgatgtcaaggttgttaagaccac

SEQ ID NO: 97054 - DNA, 25 bp, Homo sapien
tgcccaggaaatggttagtctccct

SEQ ID NO: 97055 - DNA, 25 bp, Homo sapien
catgaaaccttagagtaggcggtca

SEQ ID NO: 97056 - DNA, 25 bp, Homo sapien
gcaaccactggtacagtctgctgta

SEQ ID NO: 97057 - DNA, 25 bp, Homo sapien
ggactccttgtcaatgctgtatttc

SEQ ID NO: 97058 - DNA, 25 bp, Homo sapien
tggactccttgtcaatgctgtattt

SEQ ID NO: 97059 - DNA, 25 bp, Homo sapien
ttggactccttgtcaatgctgtatt

SEQ ID NO: 97060 - DNA, 25 bp, Homo sapien
cttggactccttgtcaatgctgtat

SEQ ID NO: 97061 - DNA, 25 bp, Homo sapien
tcccaacaaataggaaagcattcgt

SEQ ID NO: 97062 - DNA, 25 bp, Homo sapien
gaaagcattcgttaagaacagagct

SEQ ID NO: 97063 - DNA, 25 bp, Homo sapien
caccatttatcccaacaaataggaa

SEQ ID NO: 97064 - DNA, 25 bp, Homo sapien
caaataggaaagcattcgttaagaa

SEQ ID NO: 97065 - DNA, 25 bp, Homo sapien
gacatttttggtagtagcggagcat

SEQ ID NO: 97066 - DNA, 25 bp, Homo sapien
ttgtgcaagactggccaagtgtcag

SEQ ID NO: 97067 - DNA, 25 bp, Homo sapien
caagtgtcagtcttttctggcacgg

SEQ ID NO: 97068 - DNA, 25 bp, Homo sapien
ccgatgaaaagaggaggcacacgca

SEQ ID NO: 97069 - DNA, 25 bp, Homo sapien
gataagagcctttgcaggaaatgct

SEQ ID NO: 97070 - DNA, 25 bp, Homo sapien
gctccagccattgaattggttcata

SEQ ID NO: 97071 - DNA, 25 bp, Homo sapien
ccagataagagcctttgcaggaaat

SEQ ID NO: 97072 - DNA, 25 bp, Homo sapien
ggttcataacgacaactttctcaaa

SEQ ID NO: 97073 - DNA, 25 bp, Homo sapien
agggtttgcccataggaaacgactg

SEQ ID NO: 97074 - DNA, 25 bp, Homo sapien
gactgattacaattatctagaaacc

SEQ ID NO: 97075 - DNA, 25 bp, Homo sapien
ctgatgggatgatgagctcattatt

SEQ ID NO: 97076 - DNA, 25 bp, Homo sapien
agaaaccaattgctcagaaagaatt

SEQ ID NO: 97077 - DNA, 25 bp, Homo sapien
aaccttattgatctctgggaacacg

SEQ ID NO: 97078 - DNA, 25 bp, Homo sapien
tccactattctactagactggctgc

SEQ ID NO: 97079 - DNA, 25 bp, Homo sapien
ggaacacgtgcttctaagcctggaa

SEQ ID NO: 97080 - DNA, 25 bp, Homo sapien
ttgcatgcccaaaggagagtgctcc

SEQ ID NO: 97081 - DNA, 25 bp, Homo sapien
ggaagtgtattgaactggctaccac

SEQ ID NO: 97082 - DNA, 25 bp, Homo sapien
ggctaccactaaggacaacggattg

SEQ ID NO: 97083 - DNA, 25 bp, Homo sapien
tagggagcatacattaaggatcggg

SEQ ID NO: 97084 - DNA, 25 bp, Homo sapien
tggtcaaaggctcattctaatgggt

SEQ ID NO: 97085 - DNA, 25 bp, Homo sapien
tggtcaccttcttgctagagaaaca

SEQ ID NO: 97086 - DNA, 25 bp, Homo sapien
tttgtctcgatttctaaagtagtga

SEQ ID NO: 97087 - DNA, 25 bp, Homo sapien
ctttgtctcgatttctaaagtagtg

SEQ ID NO: 97088 - DNA, 25 bp, Homo sapien
aacatttatagctttggtcaccttc

SEQ ID NO: 97089 - DNA, 25 bp, Homo sapien
ccctcctagagcttagattctggga

SEQ ID NO: 97090 - DNA, 25 bp, Homo sapien
taagtagagttatgccaggtggcca

SEQ ID NO: 97091 - DNA, 25 bp, Homo sapien
gagaccactgggactgaacttgtca

SEQ ID NO: 97092 - DNA, 25 bp, Homo sapien
tatacacaagggatatccatgtggg

SEQ ID NO: 97093 - DNA, 25 bp, Homo sapien
aagcccattgctacttttgtaacca

SEQ ID NO: 97094 - DNA, 25 bp, Homo sapien
tttcccctgtaacaaagcccattgc

SEQ ID NO: 97095 - DNA, 25 bp, Homo sapien
caaagcccattgctacttttgtaac

SEQ ID NO: 97096 - DNA, 25 bp, Homo sapien
gtaacaaagcccattgctacttttg

SEQ ID NO: 97097 - DNA, 25 bp, Homo sapien
ctgtgaaaggatttgttagacagac

SEQ ID NO: 97098 - DNA, 25 bp, Homo sapien
ctctgttgatgtcttatgctcagac

SEQ ID NO: 97099 - DNA, 25 bp, Homo sapien
tctgttgatgtcttatgctcagaca

SEQ ID NO: 97100 - DNA, 25 bp, Homo sapien
ctgtccagaggacattggctgcccc

SEQ ID NO: 97101 - DNA, 25 bp, Homo sapien
gtccagaggacattggctgccccac

SEQ ID NO: 97102 - DNA, 25 bp, Homo sapien
tgtccagaggacattggctgcccca

SEQ ID NO: 97103 - DNA, 25 bp, Homo sapien
taaatcggactagaatggaggaggc

SEQ ID NO: 97104 - DNA, 25 bp, Homo sapien
taacagatgagaggtgctacgacgc

SEQ ID NO: 97105 - DNA, 25 bp, Homo sapien
agctgtgtcatctcttgtgcgccca

SEQ ID NO: 97106 - DNA, 25 bp, Homo sapien
tgacataggccacaactgagcaacg

SEQ ID NO: 97107 - DNA, 25 bp, Homo sapien
gattgtccaccctgtgtatggttga

SEQ ID NO: 97108 - DNA, 25 bp, Homo sapien
cataatttacaagacattatgcagt

SEQ ID NO: 97109 - DNA, 25 bp, Homo sapien
gcagtactttgcaactccatcacct

SEQ ID NO: 97110 - DNA, 25 bp, Homo sapien
aatcatttgagttccgattgtccac

SEQ ID NO: 97111 - DNA, 25 bp, Homo sapien
cctcttcagtgaagcggtagataga

SEQ ID NO: 97112 - DNA, 25 bp, Homo sapien
gatagagatattgtaggatcaactg

SEQ ID NO: 97113 - DNA, 25 bp, Homo sapien
tattgtaggatcaactgattctggg

SEQ ID NO: 97114 - DNA, 25 bp, Homo sapien
ggttgacgatatgaagcaagggttt

SEQ ID NO: 97115 - DNA, 25 bp, Homo sapien
ctatgcgaggagagtataaaacagg

SEQ ID NO: 97116 - DNA, 25 bp, Homo sapien
tatgcgaggagagtataaaacaggg

SEQ ID NO: 97117 - DNA, 25 bp, Homo sapien
caacatgacaataccactttgcact

SEQ ID NO: 97118 - DNA, 25 bp, Homo sapien
tgccgaaagcgccttttctctaaaa

SEQ ID NO: 97119 - DNA, 25 bp, Homo sapien
tttgcacttgccgaaagcgcctttt

SEQ ID NO: 97120 - DNA, 25 bp, Homo sapien
tgtcacagacagctccagtagcaac

SEQ ID NO: 97121 - DNA, 25 bp, Homo sapien
gttgattggccactgcacgatgaag

SEQ ID NO: 97122 - DNA, 25 bp, Homo sapien
tgattggccactgcacgatgaagag

SEQ ID NO: 97123 - DNA, 25 bp, Homo sapien
ttgattggccactgcacgatgaaga

SEQ ID NO: 97124 - DNA, 25 bp, Homo sapien
cgttgattggccactgcacgatgaa

SEQ ID NO: 97125 - DNA, 25 bp, Homo sapien
gagtagggaatggttgagatacaaa

SEQ ID NO: 97126 - DNA, 25 bp, Homo sapien
tgagtagggaatggttgagatacaa

SEQ ID NO: 97127 - DNA, 25 bp, Homo sapien
ctgagtagggaatggttgagataca

SEQ ID NO: 97128 - DNA, 25 bp, Homo sapien
ccagaggagcaagctttgcatactg

SEQ ID NO: 97129 - DNA, 25 bp, Homo sapien
ggctgctgagcagtctcttcgagaa

SEQ ID NO: 97130 - DNA, 25 bp, Homo sapien
ttcccaggattgcttggtggaatca

SEQ ID NO: 97131 - DNA, 25 bp, Homo sapien
gattaagcacttgcagatttaaggc

SEQ ID NO: 97132 - DNA, 25 bp, Homo sapien
tccatttcctaacaaccatccctcc

SEQ ID NO: 97133 - DNA, 25 bp, Homo sapien
atccctccttcatatactgtttcca

SEQ ID NO: 97134 - DNA, 25 bp, Homo sapien
gaatttgaaagtctgcaactcatcc

SEQ ID NO: 97135 - DNA, 25 bp, Homo sapien
ggccattctgagactgagcgaaata

SEQ ID NO: 97136 - DNA, 25 bp, Homo sapien
cccagcagtacaatcgagagcatcc

SEQ ID NO: 97137 - DNA, 25 bp, Homo sapien
cagcagtacaatcgagagcatccaa

SEQ ID NO: 97138 - DNA, 25 bp, Homo sapien
gccccagcagtacaatcgagagcat

SEQ ID NO: 97139 - DNA, 25 bp, Homo sapien
cgccccagcagtacaatcgagagca

SEQ ID NO: 97140 - DNA, 25 bp, Homo sapien
gtccatttctccgtcggctcggcac

SEQ ID NO: 97141 - DNA, 25 bp, Homo sapien
atgcaggcccctgattcagtacgtt

SEQ ID NO: 97142 - DNA, 25 bp, Homo sapien
gatgcaggcccctgattcagtacgt

SEQ ID NO: 97143 - DNA, 25 bp, Homo sapien
gctcggcacggcacggggatgcagg

SEQ ID NO: 97144 - DNA, 25 bp, Homo sapien
caccgtactgcaaaggaaccagata

SEQ ID NO: 97145 - DNA, 25 bp, Homo sapien
ccagatattgtgctcgcggttccaa

SEQ ID NO: 97146 - DNA, 25 bp, Homo sapien
ggcatgggcaccgaatgcttctcga

SEQ ID NO: 97147 - DNA, 25 bp, Homo sapien
cggtttctggtcgtaactcaagagc

SEQ ID NO: 97148 - DNA, 25 bp, Homo sapien
cagccacacacccgaccgggggcgg

SEQ ID NO: 97149 - DNA, 25 bp, Homo sapien
gcgcagccacacacccgaccggggg

SEQ ID NO: 97150 - DNA, 25 bp, Homo sapien
cgcagccacacacccgaccgggggc

SEQ ID NO: 97151 - DNA, 25 bp, Homo sapien
cgcgcagccacacacccgaccgggg

SEQ ID NO: 97152 - DNA, 25 bp, Homo sapien
agcggcgcgtcccttcagccacctc

SEQ ID NO: 97153 - DNA, 25 bp, Homo sapien
ggctccctcgcgctgacggatttct

SEQ ID NO: 97154 - DNA, 25 bp, Homo sapien
cgccgcgccgggctcagtaatggcg

SEQ ID NO: 97155 - DNA, 25 bp, Homo sapien
agtaatggcggccactcgggctccc

SEQ ID NO: 97156 - DNA, 25 bp, Homo sapien
ctccactctccgctcgcctctcttc

SEQ ID NO: 97157 - DNA, 25 bp, Homo sapien
taacaacgtcggtctcctccgtctc

SEQ ID NO: 97158 - DNA, 25 bp, Homo sapien
gacattcctggggaccgctcccgcc

SEQ ID NO: 97159 - DNA, 25 bp, Homo sapien
agcgacattcctggggaccgctccc

SEQ ID NO: 97160 - DNA, 25 bp, Homo sapien
acctcagctacaccccgagcctcca

SEQ ID NO: 97161 - DNA, 25 bp, Homo sapien
ctcagctacaccccgagcctccagc

SEQ ID NO: 97162 - DNA, 25 bp, Homo sapien
cgtgcacctttcaacctcagctaca

SEQ ID NO: 97163 - DNA, 25 bp, Homo sapien
ttccgtgcacctttcaacctcagct

SEQ ID NO: 97164 - DNA, 25 bp, Homo sapien
ctcttcatgatgaaaagcttgagac

SEQ ID NO: 97165 - DNA, 25 bp, Homo sapien
gcttgagactctaagcaagtaacat

SEQ ID NO: 97166 - DNA, 25 bp, Homo sapien
acaaggttatgctctttttcccaag

SEQ ID NO: 97167 - DNA, 25 bp, Homo sapien
ttggtatttccagggctaggcacat

SEQ ID NO: 97168 - DNA, 25 bp, Homo sapien
gataggtctcctaatctgtcatcta

SEQ ID NO: 97169 - DNA, 25 bp, Homo sapien
gaacaaagcccaaagattatcatat

SEQ ID NO: 97170 - DNA, 25 bp, Homo sapien
gatgaacagagtgtagtactgatgc

SEQ ID NO: 97171 - DNA, 25 bp, Homo sapien
ttccaagacctaatcacacagaggg

SEQ ID NO: 97172 - DNA, 25 bp, Homo sapien
tactcattaagactcacttctgctc

SEQ ID NO: 97173 - DNA, 25 bp, Homo sapien
tccagtcatatatgcttacccaaat

SEQ ID NO: 97174 - DNA, 25 bp, Homo sapien
tcagaaacaaaagggtcttaaatga

SEQ ID NO: 97175 - DNA, 25 bp, Homo sapien
aagtagaaatgaaaacactctatca

SEQ ID NO: 97176 - DNA, 25 bp, Homo sapien
aaccagatatgcttctcattctgaa

SEQ ID NO: 97177 - DNA, 25 bp, Homo sapien
ctacattcataaaggtaaccagata

SEQ ID NO: 97178 - DNA, 25 bp, Homo sapien
tcataaaggtaaccagatatgcttc

SEQ ID NO: 97179 - DNA, 25 bp, Homo sapien
taaaggtaaccagatatgcttctca

SEQ ID NO: 97180 - DNA, 25 bp, Homo sapien
ggacgaggctctttgttttttgcca

SEQ ID NO: 97181 - DNA, 25 bp, Homo sapien
tataggatgggggacgaggctcttt

SEQ ID NO: 97182 - DNA, 25 bp, Homo sapien
aggatgggggacgaggctctttgtt

SEQ ID NO: 97183 - DNA, 25 bp, Homo sapien
ctgatggtataggatgggggacgag

SEQ ID NO: 97184 - DNA, 25 bp, Homo sapien
gtgcaaatgtacattagtttttctg

SEQ ID NO: 97185 - DNA, 25 bp, Homo sapien
cacagaagtatgctctggataatat

SEQ ID NO: 97186 - DNA, 25 bp, Homo sapien
aaatgtacattagtttttctgctga

SEQ ID NO: 97187 - DNA, 25 bp, Homo sapien
agcacagaagtatgctctggataat

SEQ ID NO: 97188 - DNA, 25 bp, Homo sapien
tcttctcggatatcagatgctgtac

SEQ ID NO: 97189 - DNA, 25 bp, Homo sapien
tctcacagtctgcacaagtttttca

SEQ ID NO: 97190 - DNA, 25 bp, Homo sapien
gcgatttggcatcaaccggccgaag

SEQ ID NO: 97191 - DNA, 25 bp, Homo sapien
tattggcaggaattgggctcaccac

SEQ ID NO: 97192 - DNA, 25 bp, Homo sapien
gagtaaagacctcagtttgccgatg

SEQ ID NO: 97193 - DNA, 25 bp, Homo sapien
aggtttggatcgagttttttcacat

SEQ ID NO: 97194 - DNA, 25 bp, Homo sapien
caaatgagtttcgaattttaatacg

SEQ ID NO: 97195 - DNA, 25 bp, Homo sapien
gcctccgttccccatgactttttga

SEQ ID NO: 97196 - DNA, 25 bp, Homo sapien
tttaacaaccttagcaaactgagtg

SEQ ID NO: 97197 - DNA, 25 bp, Homo sapien
aagtcaggttttgccatcaatgaga

SEQ ID NO: 97198 - DNA, 25 bp, Homo sapien
taagactttggcacgtatactcata

SEQ ID NO: 97199 - DNA, 25 bp, Homo sapien
tctagtcactagtaataatgcatgg

SEQ ID NO: 97200 - DNA, 25 bp, Homo sapien
tcagaagtcaatgctaaacctaaga

SEQ ID NO: 97201 - DNA, 25 bp, Homo sapien
tctcagatgtgaacactgtcaacct

SEQ ID NO: 97202 - DNA, 25 bp, Homo sapien
tgtcaacctaatgactgtcaagagg

SEQ ID NO: 97203 - DNA, 25 bp, Homo sapien
ccccattacagtggctaaagcagca

SEQ ID NO: 97204 - DNA, 25 bp, Homo sapien
catcacagatctagttaaccaggta

SEQ ID NO: 97205 - DNA, 25 bp, Homo sapien
gatcacactatgacacagagtactg

SEQ ID NO: 97206 - DNA, 25 bp, Homo sapien
gatcaatttagccagttacccagga

SEQ ID NO: 97207 - DNA, 25 bp, Homo sapien
tggtgtagccagcaccaaaaatgct

SEQ ID NO: 97208 - DNA, 25 bp, Homo sapien
cctgtattcgaatgttcatgacaac

SEQ ID NO: 97209 - DNA, 25 bp, Homo sapien
gaacgacctgatgtccttcaacagg

SEQ ID NO: 97210 - DNA, 25 bp, Homo sapien
aagtcaatcccagaaagttatatgc

SEQ ID NO: 97211 - DNA, 25 bp, Homo sapien
gttgatgcacgcaacaacttggctg

SEQ ID NO: 97212 - DNA, 25 bp, Homo sapien
aaaggtcagcaaaggccatactgca

SEQ ID NO: 97213 - DNA, 25 bp, Homo sapien
tttgtacggacagggatcaggcact

SEQ ID NO: 97214 - DNA, 25 bp, Homo sapien
taatgaaaaaacacctcgctaccag

SEQ ID NO: 97215 - DNA, 25 bp, Homo sapien
tagatgcctaactcacgtatttgga

SEQ ID NO: 97216 - DNA, 25 bp, Homo sapien
caaaaagattctcgggcttagtgta

SEQ ID NO: 97217 - DNA, 25 bp, Homo sapien
taacattggagttgctaaggcaaaa

SEQ ID NO: 97218 - DNA, 25 bp, Homo sapien
tcaggtcaagtatgcccaaattaag

SEQ ID NO: 97219 - DNA, 25 bp, Homo sapien
gcaaactcacttgacaatgatctag

SEQ ID NO: 97220 - DNA, 25 bp, Homo sapien
gaatcttaaaagcatccaggcagaa

SEQ ID NO: 97221 - DNA, 25 bp, Homo sapien
ggtccagaaagagatacttgaggtc

SEQ ID NO: 97222 - DNA, 25 bp, Homo sapien
tatcatgctgaacttggtaagctac

SEQ ID NO: 97223 - DNA, 25 bp, Homo sapien
gagttctccggaaaactggaagcca

SEQ ID NO: 97224 - DNA, 25 bp, Homo sapien
gaaggaagggatcttaacagtctgt

SEQ ID NO: 97225 - DNA, 25 bp, Homo sapien
atgcctagactatggtgggaacaac

SEQ ID NO: 97226 - DNA, 25 bp, Homo sapien
cgcctggcctacacttaggtagatt

SEQ ID NO: 97227 - DNA, 25 bp, Homo sapien
aacagtctgtaataccatctgagga

SEQ ID NO: 97228 - DNA, 25 bp, Homo sapien
gagcagggtatagcaacgattccta

SEQ ID NO: 97229 - DNA, 25 bp, Homo sapien
gctcccggccagatgcttacttaaa

SEQ ID NO: 97230 - DNA, 25 bp, Homo sapien
ttttgggaatcaaactactgaggag

SEQ ID NO: 97231 - DNA, 25 bp, Homo sapien
gactctactgtgcacatcccattga

SEQ ID NO: 97232 - DNA, 25 bp, Homo sapien
gctactgcgcccagtagcttttttt

SEQ ID NO: 97233 - DNA, 25 bp, Homo sapien
cgtgttggtggattgaagttcttag

SEQ ID NO: 97234 - DNA, 25 bp, Homo sapien
ttcccaatttctacgtgttggtgga

SEQ ID NO: 97235 - DNA, 25 bp, Homo sapien
tctacgtgttggtggattgaagttc

SEQ ID NO: 97236 - DNA, 25 bp, Homo sapien
aatttctacgtgttggtggattgaa

SEQ ID NO: 97237 - DNA, 25 bp, Homo sapien
cacatttctcaacaaatagtggtat

SEQ ID NO: 97238 - DNA, 25 bp, Homo sapien
tcagctgtaaccagatcctggaggg

SEQ ID NO: 97239 - DNA, 25 bp, Homo sapien
caaatagtggtatgggcttctcagc

SEQ ID NO: 97240 - DNA, 25 bp, Homo sapien
tctcaacaaatagtggtatgggctt

SEQ ID NO: 97241 - DNA, 25 bp, Homo sapien
tctcttgcaatgattcttctatcct

SEQ ID NO: 97242 - DNA, 25 bp, Homo sapien
tcttgcaatgattcttctatcctac

SEQ ID NO: 97243 - DNA, 25 bp, Homo sapien
aatctcttgcaatgattcttctatc

SEQ ID NO: 97244 - DNA, 25 bp, Homo sapien
tcaaatctcttgcaatgattcttct

SEQ ID NO: 97245 - DNA, 25 bp, Homo sapien
taaaccatgtcaagctagaactgaa

SEQ ID NO: 97246 - DNA, 25 bp, Homo sapien
cattcagtcactaaggtttcatggt

SEQ ID NO: 97247 - DNA, 25 bp, Homo sapien
tagtagcatcacaaatagaacaagc

SEQ ID NO: 97248 - DNA, 25 bp, Homo sapien
ggcaaagtaaacataagagcaggct

SEQ ID NO: 97249 - DNA, 25 bp, Homo sapien
actgaaagtgtcaacattccttacc

SEQ ID NO: 97250 - DNA, 25 bp, Homo sapien
tccttaccaaatagataactcaata

SEQ ID NO: 97251 - DNA, 25 bp, Homo sapien
taccctctcattaagactgaaagtg

SEQ ID NO: 97252 - DNA, 25 bp, Homo sapien
ctgcacattctaccctctcattaag

SEQ ID NO: 97253 - DNA, 25 bp, Homo sapien
tatataaatcgcctgagagttgacc

SEQ ID NO: 97254 - DNA, 25 bp, Homo sapien
aaagacacaaacaatctcgtaggca

SEQ ID NO: 97255 - DNA, 25 bp, Homo sapien
ctcgtaggcaattaggaatttctgc

SEQ ID NO: 97256 - DNA, 25 bp, Homo sapien
aaaccgaatcactcaactactaaga

SEQ ID NO: 97257 - DNA, 25 bp, Homo sapien
agaacaaacatatgtgggaagattg

SEQ ID NO: 97258 - DNA, 25 bp, Homo sapien
aaaggacatggacagacactgctca

SEQ ID NO: 97259 - DNA, 25 bp, Homo sapien
aacacatgtaaaaatgctcactatc

SEQ ID NO: 97260 - DNA, 25 bp, Homo sapien
aaaacacatgtaaaaatgctcacta

SEQ ID NO: 97261 - DNA, 25 bp, Homo sapien
gcaaaggacatggacagacactgct

SEQ ID NO: 97262 - DNA, 25 bp, Homo sapien
ttcacattcaattgcaggaaactct

SEQ ID NO: 97263 - DNA, 25 bp, Homo sapien
taatgagaaaaggatactcttcgca

SEQ ID NO: 97264 - DNA, 25 bp, Homo sapien
aactctgtagctaaaggaatcttga

SEQ ID NO: 97265 - DNA, 25 bp, Homo sapien
cagagacaggcgaatatccacatgc

SEQ ID NO: 97266 - DNA, 25 bp, Homo sapien
tcagtggaggccaactgggaagcct

SEQ ID NO: 97267 - DNA, 25 bp, Homo sapien
gccaatggaagccaacaggagtctg

SEQ ID NO: 97268 - DNA, 25 bp, Homo sapien
gctgagtcgagagcctaaacttcca

SEQ ID NO: 97269 - DNA, 25 bp, Homo sapien
ggattagaagaggtacagcctagca

SEQ ID NO: 97270 - DNA, 25 bp, Homo sapien
tattcccgctgacacggtagagtcc

SEQ ID NO: 97271 - DNA, 25 bp, Homo sapien
tggtcagttttattcccgctgacac

SEQ ID NO: 97272 - DNA, 25 bp, Homo sapien
gtcagttttattcccgctgacacgg

SEQ ID NO: 97273 - DNA, 25 bp, Homo sapien
gttttattcccgctgacacggtaga

SEQ ID NO: 97274 - DNA, 25 bp, Homo sapien
gcaaagaaagctttaagggctccag

SEQ ID NO: 97275 - DNA, 25 bp, Homo sapien
tgcaaagaaagctttaagggctcca

SEQ ID NO: 97276 - DNA, 25 bp, Homo sapien
caaagaaagctttaagggctccagc

SEQ ID NO: 97277 - DNA, 25 bp, Homo sapien
gaatacatcatagtttacaggatga

SEQ ID NO: 97278 - DNA, 25 bp, Homo sapien
tctgaatacatcatagtttacagga

SEQ ID NO: 97279 - DNA, 25 bp, Homo sapien
tacatcatagtttacaggatgaaat

SEQ ID NO: 97280 - DNA, 25 bp, Homo sapien
gtatctgaatacatcatagtttaca

SEQ ID NO: 97281 - DNA, 25 bp, Homo sapien
cattacaaaactaatcatatatctt

SEQ ID NO: 97282 - DNA, 25 bp, Homo sapien
tgtagtgcattttatttgccaaaaa

SEQ ID NO: 97283 - DNA, 25 bp, Homo sapien
gaaaatatacttaccacacttacta

SEQ ID NO: 97284 - DNA, 25 bp, Homo sapien
gtttgaaatgtgtagtgcattttat

SEQ ID NO: 97285 - DNA, 25 bp, Homo sapien
tacaatcacagaattccagagctag

SEQ ID NO: 97286 - DNA, 25 bp, Homo sapien
gatgaaaaaccagagtatgctctct

SEQ ID NO: 97287 - DNA, 25 bp, Homo sapien
tatgctctctcaactagctttggaa

SEQ ID NO: 97288 - DNA, 25 bp, Homo sapien
tttcagaaaacctggttgcagcagg

SEQ ID NO: 97289 - DNA, 25 bp, Homo sapien
ttgatgaatcttagtagtagacaga

SEQ ID NO: 97290 - DNA, 25 bp, Homo sapien
tgtctgctgtcattaggttgatttt

SEQ ID NO: 97291 - DNA, 25 bp, Homo sapien
cagattgatgaatcttagtagtaga

SEQ ID NO: 97292 - DNA, 25 bp, Homo sapien
taagttgtctgctgtcattaggttg

SEQ ID NO: 97293 - DNA, 25 bp, Homo sapien
taattgtggttgtatcagctgaggt

SEQ ID NO: 97294 - DNA, 25 bp, Homo sapien
tatcagctgaggttgcaatggtggc

SEQ ID NO: 97295 - DNA, 25 bp, Homo sapien
ttgcaatggtggcggcaactgaagt

SEQ ID NO: 97296 - DNA, 25 bp, Homo sapien
ggttgtatcagctgaggttgcaatg

SEQ ID NO: 97297 - DNA, 25 bp, Homo sapien
gaatgtgaattatctgtatgaaaca

SEQ ID NO: 97298 - DNA, 25 bp, Homo sapien
tgaattatctgtatgaaacatgaag

SEQ ID NO: 97299 - DNA, 25 bp, Homo sapien
aacatgaagtatactactgaaccct

SEQ ID NO: 97300 - DNA, 25 bp, Homo sapien
tactgaaccctgaaacatgcatgtc

SEQ ID NO: 97301 - DNA, 25 bp, Homo sapien
tgccagaatgtaaattaagttgccc

SEQ ID NO: 97302 - DNA, 25 bp, Homo sapien
tagttatctacaccgactgccagaa

SEQ ID NO: 97303 - DNA, 25 bp, Homo sapien
tcaaatcatccacgggtttacttgg

SEQ ID NO: 97304 - DNA, 25 bp, Homo sapien
caagcatggcctcagtagcctgaaa

SEQ ID NO: 97305 - DNA, 25 bp, Homo sapien
tactaaatgtgttccccaagaggga

SEQ ID NO: 97306 - DNA, 25 bp, Homo sapien
gctatattagcaatgggttttttgg

SEQ ID NO: 97307 - DNA, 25 bp, Homo sapien
aattgaagtcctagatttaaatgtt

SEQ ID NO: 97308 - DNA, 25 bp, Homo sapien
taagattacaagaccatcatagatc

SEQ ID NO: 97309 - DNA, 25 bp, Homo sapien
gcaaatcaaactcttaggagccttg

SEQ ID NO: 97310 - DNA, 25 bp, Homo sapien
cattttggattttagtacaacacat

SEQ ID NO: 97311 - DNA, 25 bp, Homo sapien
cacttatagtaattctggtaccaac

SEQ ID NO: 97312 - DNA, 25 bp, Homo sapien
taacctagtgaaatttacctgtgcc

SEQ ID NO: 97313 - DNA, 25 bp, Homo sapien
tacttccaaatagaaatagtcaggc

SEQ ID NO: 97314 - DNA, 25 bp, Homo sapien
tggtactaaacgcagatgaacatta

SEQ ID NO: 97315 - DNA, 25 bp, Homo sapien
agcctggttcatgccaacatcttgg

SEQ ID NO: 97316 - DNA, 25 bp, Homo sapien
cctgtgtgctttgcaataggaataa

SEQ ID NO: 97317 - DNA, 25 bp, Homo sapien
acacaatcaattcagtgtaacagac

SEQ ID NO: 97318 - DNA, 25 bp, Homo sapien
gaagtctcatatgataggtccctaa

SEQ ID NO: 97319 - DNA, 25 bp, Homo sapien
ttactcacaattatgagactatcct

SEQ ID NO: 97320 - DNA, 25 bp, Homo sapien
tataatgccttgatgtttactcaca

SEQ ID NO: 97321 - DNA, 25 bp, Homo sapien
gatcctgttaggtccaatattgtag

SEQ ID NO: 97322 - DNA, 25 bp, Homo sapien
ctaacttagattgcggttacctgca

SEQ ID NO: 97323 - DNA, 25 bp, Homo sapien
aaaaatcaccatggaagctaaggcc

SEQ ID NO: 97324 - DNA, 25 bp, Homo sapien
gcagcatcctgtaggtgaagcacaa

SEQ ID NO: 97325 - DNA, 25 bp, Homo sapien
tggtaaaaatagaggcaactataac

SEQ ID NO: 97326 - DNA, 25 bp, Homo sapien
atagaggcaactataacttaaaatt

SEQ ID NO: 97327 - DNA, 25 bp, Homo sapien
attagctaatttttaccaatgaaat

SEQ ID NO: 97328 - DNA, 25 bp, Homo sapien
tagctaatttttaccaatgaaatgg

SEQ ID NO: 97329 - DNA, 25 bp, Homo sapien
ctaagagccccaaagttaaagctgg

SEQ ID NO: 97330 - DNA, 25 bp, Homo sapien
gcaaactagaacaggagggccgtta

SEQ ID NO: 97331 - DNA, 25 bp, Homo sapien
gaccagggtacttggatcacatcaa

SEQ ID NO: 97332 - DNA, 25 bp, Homo sapien
gttgaacagacctcaccagatccag

SEQ ID NO: 97333 - DNA, 25 bp, Homo sapien
tccagatatctgctaaattcttcat

SEQ ID NO: 97334 - DNA, 25 bp, Homo sapien
tcagctgtgagtaagctgtcacaag

SEQ ID NO: 97335 - DNA, 25 bp, Homo sapien
tcagttcacgaattctatcttcagc

SEQ ID NO: 97336 - DNA, 25 bp, Homo sapien
tatctccttggactgagtaagcata

SEQ ID NO: 97337 - DNA, 25 bp, Homo sapien
taattcagtatttcattgtaggaga

SEQ ID NO: 97338 - DNA, 25 bp, Homo sapien
tcctgcggtgttaaatttgataaac

SEQ ID NO: 97339 - DNA, 25 bp, Homo sapien
ttcttatgtatcaacattccacctg

SEQ ID NO: 97340 - DNA, 25 bp, Homo sapien
caaatcagttgcttatcttgacagc

SEQ ID NO: 97341 - DNA, 25 bp, Homo sapien
tcttacaatgcattggtgctgggcc

SEQ ID NO: 97342 - DNA, 25 bp, Homo sapien
ggcctgcctatctttatgaattgat

SEQ ID NO: 97343 - DNA, 25 bp, Homo sapien
tcgtgctgggtagtccgatttccat

SEQ ID NO: 97344 - DNA, 25 bp, Homo sapien
tgaattgatgggtctaacaaaaccc

SEQ ID NO: 97345 - DNA, 25 bp, Homo sapien
tcacgtgactgtttcgggagaaaca

SEQ ID NO: 97346 - DNA, 25 bp, Homo sapien
cttcctgatgcagtaagaatgcata

SEQ ID NO: 97347 - DNA, 25 bp, Homo sapien
tgcggacgttatcacgtgactgttt

SEQ ID NO: 97348 - DNA, 25 bp, Homo sapien
taagaatgcatagcgttgcggacgt

SEQ ID NO: 97349 - DNA, 25 bp, Homo sapien
gagagtccttgcaacgattcggcca

SEQ ID NO: 97350 - DNA, 25 bp, Homo sapien
tacattctaagttgcggtggactcc

SEQ ID NO: 97351 - DNA, 25 bp, Homo sapien
tggcatctgcgtgactatctccggc

SEQ ID NO: 97352 - DNA, 25 bp, Homo sapien
tatctccggccggtgtgcataggcg

SEQ ID NO: 97353 - DNA, 25 bp, Homo sapien
ggcgtctccccgaagtctctctgag

SEQ ID NO: 97354 - DNA, 25 bp, Homo sapien
gcggacttcagtccgcagagcatgc

SEQ ID NO: 97355 - DNA, 25 bp, Homo sapien
gctttgatttctcgtgccgcggact

SEQ ID NO: 97356 - DNA, 25 bp, Homo sapien
gcatgccgggagtctggcagtccgt

SEQ ID NO: 97357 - DNA, 25 bp, Homo sapien
tgggacatgcaaatgagcgcccggg

SEQ ID NO: 97358 - DNA, 25 bp, Homo sapien
ctgttgggtgggacatgcaaatgag

SEQ ID NO: 97359 - DNA, 25 bp, Homo sapien
tgggtgggacatgcaaatgagcgcc

SEQ ID NO: 97360 - DNA, 25 bp, Homo sapien
gacatgcaaatgagcgcccggggca

SEQ ID NO: 97361 - DNA, 25 bp, Homo sapien
gccgcgaccgatctgtcaggtttac

SEQ ID NO: 97362 - DNA, 25 bp, Homo sapien
aggccgtatctggccgcgaccgatc

SEQ ID NO: 97363 - DNA, 25 bp, Homo sapien
gtatctggccgcgaccgatctgtca

SEQ ID NO: 97364 - DNA, 25 bp, Homo sapien
tggccgcgaccgatctgtcaggttt

SEQ ID NO: 97365 - DNA, 25 bp, Homo sapien
aggcacaagcgtttctcacagatct

SEQ ID NO: 97366 - DNA, 25 bp, Homo sapien
gctttgcaatgtaaaggcacaagcg

SEQ ID NO: 97367 - DNA, 25 bp, Homo sapien
tgtaaaggcacaagcgtttctcaca

SEQ ID NO: 97368 - DNA, 25 bp, Homo sapien
caatgtaaaggcacaagcgtttctc

SEQ ID NO: 97369 - DNA, 25 bp, Homo sapien
tccaacacgagcttctccatagcta

SEQ ID NO: 97370 - DNA, 25 bp, Homo sapien
ctccatagctaccagggatataaaa

SEQ ID NO: 97371 - DNA, 25 bp, Homo sapien
ccatagctaccagggatataaaagg

SEQ ID NO: 97372 - DNA, 25 bp, Homo sapien
ttaaatcgtttccaacacgagcttc

SEQ ID NO: 97373 - DNA, 25 bp, Homo sapien
ctggggcatcagtccgtgccatgtg

SEQ ID NO: 97374 - DNA, 25 bp, Homo sapien
tggggcatcagtccgtgccatgtga

SEQ ID NO: 97375 - DNA, 25 bp, Homo sapien
tctggggcatcagtccgtgccatgt

SEQ ID NO: 97376 - DNA, 25 bp, Homo sapien
ggggcatcagtccgtgccatgtgag

SEQ ID NO: 97377 - DNA, 25 bp, Homo sapien
cattcagtgggactagattatccaa

SEQ ID NO: 97378 - DNA, 25 bp, Homo sapien
tagtttatctcaatgctgctggatg

SEQ ID NO: 97379 - DNA, 25 bp, Homo sapien
tggaatctaccacagccaacattag

SEQ ID NO: 97380 - DNA, 25 bp, Homo sapien
tctgaggcactatctcatggaatct

SEQ ID NO: 97381 - DNA, 25 bp, Homo sapien
ttcccaacctctatgtcagataaag

SEQ ID NO: 97382 - DNA, 25 bp, Homo sapien
acctctatgtcagataaagaatcac

SEQ ID NO: 97383 - DNA, 25 bp, Homo sapien
aagaatcacccaggccagacacaat

SEQ ID NO: 97384 - DNA, 25 bp, Homo sapien
cactcttgaacttcaggaagcctaa

SEQ ID NO: 97385 - DNA, 25 bp, Homo sapien
tcctgctctacttcatattcatctt

SEQ ID NO: 97386 - DNA, 25 bp, Homo sapien
ctgagaaagtaaccggtttcaattg

SEQ ID NO: 97387 - DNA, 25 bp, Homo sapien
cttaaagtgtatttcaaggctataa

SEQ ID NO: 97388 - DNA, 25 bp, Homo sapien
tattaactttatacagacaaatgcc

SEQ ID NO: 97389 - DNA, 25 bp, Homo sapien
ctcctagattggctttgctagaaca

SEQ ID NO: 97390 - DNA, 25 bp, Homo sapien
gccttgtttgacctgctgcatgatg

SEQ ID NO: 97391 - DNA, 25 bp, Homo sapien
cctgatcccaccgtcttcttttgat

SEQ ID NO: 97392 - DNA, 25 bp, Homo sapien
aatactaggagatgccttgtttgac

SEQ ID NO: 97393 - DNA, 25 bp, Homo sapien
cacatctgtaggatgcaatactagg

SEQ ID NO: 97394 - DNA, 25 bp, Homo sapien
ctttttcctgtgcagcaagtgccat

SEQ ID NO: 97395 - DNA, 25 bp, Homo sapien
cctactagccaagcctgaagaaatg

SEQ ID NO: 97396 - DNA, 25 bp, Homo sapien
gtgttcctctacagtgttctagaag

SEQ ID NO: 97397 - DNA, 25 bp, Homo sapien
gcaggtgttcctctacagtgttcta

SEQ ID NO: 97398 - DNA, 25 bp, Homo sapien
tgtgtgctcctactagccaagcctg

SEQ ID NO: 97399 - DNA, 25 bp, Homo sapien
gtctggaattggaacagaaactctc

SEQ ID NO: 97400 - DNA, 25 bp, Homo sapien
caccgatatgccacaggtctggaat

SEQ ID NO: 97401 - DNA, 25 bp, Homo sapien
ttgaccaccgatatgccacaggtct

SEQ ID NO: 97402 - DNA, 25 bp, Homo sapien
tatgccacaggtctggaattggaac

SEQ ID NO: 97403 - DNA, 25 bp, Homo sapien
gcaatgcctgatggcaggctccaga

SEQ ID NO: 97404 - DNA, 25 bp, Homo sapien
tgggacatggccttgggcaatgcct

SEQ ID NO: 97405 - DNA, 25 bp, Homo sapien
atgacaacactgtatggatggatca

SEQ ID NO: 97406 - DNA, 25 bp, Homo sapien
atgcctgatggcaggctccagaaag

SEQ ID NO: 97407 - DNA, 25 bp, Homo sapien
gttatattcaggacactgcaagaat

SEQ ID NO: 97408 - DNA, 25 bp, Homo sapien
gaatctcttggtcttataatcacta

SEQ ID NO: 97409 - DNA, 25 bp, Homo sapien
caatgcatgttggattggtgttata

SEQ ID NO: 97410 - DNA, 25 bp, Homo sapien
ctatgtaggcattagatcaatgcat

SEQ ID NO: 97411 - DNA, 25 bp, Homo sapien
gagttacccctgtgtctgcttacac

SEQ ID NO: 97412 - DNA, 25 bp, Homo sapien
gagagttacccctgtgtctgcttac

SEQ ID NO: 97413 - DNA, 25 bp, Homo sapien
ccttgagagttacccctgtgtctgc

SEQ ID NO: 97414 - DNA, 25 bp, Homo sapien
ttgttccttgagagttacccctgtg

SEQ ID NO: 97415 - DNA, 25 bp, Homo sapien
ctacacaaaagcagtgcccacagct

SEQ ID NO: 97416 - DNA, 25 bp, Homo sapien
tcagggctatccagcaggcatggga

SEQ ID NO: 97417 - DNA, 25 bp, Homo sapien
tctacatcagggctatccagcaggc

SEQ ID NO: 97418 - DNA, 25 bp, Homo sapien
aactctctatagcttctacatcagg

SEQ ID NO: 97419 - DNA, 25 bp, Homo sapien
caaacgcaggtgtagacgtgtagag

SEQ ID NO: 97420 - DNA, 25 bp, Homo sapien
ctgaagggaacaatactggaagtta

SEQ ID NO: 97421 - DNA, 25 bp, Homo sapien
cagtattaagggagtactgaaggga

SEQ ID NO: 97422 - DNA, 25 bp, Homo sapien
gaagaggtataagaagcaaacgcag

SEQ ID NO: 97423 - DNA, 25 bp, Homo sapien
gctctgctctgatgcagcgttttac

SEQ ID NO: 97424 - DNA, 25 bp, Homo sapien
cgttttaccagagctctaaggccaa

SEQ ID NO: 97425 - DNA, 25 bp, Homo sapien
gtccaacaatgattgaaatctctac

SEQ ID NO: 97426 - DNA, 25 bp, Homo sapien
ctaaggccaatcagtccaacaatga

SEQ ID NO: 97427 - DNA, 25 bp, Homo sapien
atcataactgcaggtagaaatatcc

SEQ ID NO: 97428 - DNA, 25 bp, Homo sapien
aatcataactgcaggtagaaatatc

SEQ ID NO: 97429 - DNA, 25 bp, Homo sapien
ctaatcataactgcaggtagaaata

SEQ ID NO: 97430 - DNA, 25 bp, Homo sapien
tcataactgcaggtagaaatatccc

SEQ ID NO: 97431 - DNA, 25 bp, Homo sapien
aaaggccccagtgcatacctcactg

SEQ ID NO: 97432 - DNA, 25 bp, Homo sapien
cccagtgcatacctcactgagctgg

SEQ ID NO: 97433 - DNA, 25 bp, Homo sapien
tgcatacctcactgagctggctggg

SEQ ID NO: 97434 - DNA, 25 bp, Homo sapien
aaggccccagtgcatacctcactga

SEQ ID NO: 97435 - DNA, 25 bp, Homo sapien
atttgataactagcaaaaccccagg

SEQ ID NO: 97436 - DNA, 25 bp, Homo sapien
tcacctctagacctttgcgtatgtt

SEQ ID NO: 97437 - DNA, 25 bp, Homo sapien
tgcgtatgttggtacctgttcctcc

SEQ ID NO: 97438 - DNA, 25 bp, Homo sapien
gcccataacagcacctagtacatag

SEQ ID NO: 97439 - DNA, 25 bp, Homo sapien
cacccagtcgtcaaagctagaaaac

SEQ ID NO: 97440 - DNA, 25 bp, Homo sapien
ccacatttgggtgatcaactgatcc

SEQ ID NO: 97441 - DNA, 25 bp, Homo sapien
tgtcccattatcaaacacccagtcg

SEQ ID NO: 97442 - DNA, 25 bp, Homo sapien
tcctacaggtactttgagcttatca

SEQ ID NO: 97443 - DNA, 25 bp, Homo sapien
acatggtagccccaagagccaggaa

SEQ ID NO: 97444 - DNA, 25 bp, Homo sapien
aacaggatttctaaattaagccaga

SEQ ID NO: 97445 - DNA, 25 bp, Homo sapien
gaagaaagcaagagtcagtcaagat

SEQ ID NO: 97446 - DNA, 25 bp, Homo sapien
cactgtgatattgactactctcccc

SEQ ID NO: 97447 - DNA, 25 bp, Homo sapien
gaagtctaaacctcacttctttcca

SEQ ID NO: 97448 - DNA, 25 bp, Homo sapien
gagaagtctaaacctcacttctttc

SEQ ID NO: 97449 - DNA, 25 bp, Homo sapien
aggggggaaagtgtcacgctcatgg

SEQ ID NO: 97450 - DNA, 25 bp, Homo sapien
gaaagtgtcacgctcatggttaaca

SEQ ID NO: 97451 - DNA, 25 bp, Homo sapien
ggggaaagtgtcacgctcatggtta

SEQ ID NO: 97452 - DNA, 25 bp, Homo sapien
aaagtgtcacgctcatggttaacat

SEQ ID NO: 97453 - DNA, 25 bp, Homo sapien
tgcttgctgtccgaatcctgctgga

SEQ ID NO: 97454 - DNA, 25 bp, Homo sapien
cacagtgggtgtcatgttgatggcc

SEQ ID NO: 97455 - DNA, 25 bp, Homo sapien
ctgaataggttaggtctcggaccct

SEQ ID NO: 97456 - DNA, 25 bp, Homo sapien
gggtggcttttcatactgctggtca

SEQ ID NO: 97457 - DNA, 25 bp, Homo sapien
tggttttcctgtacagcacagcttc

SEQ ID NO: 97458 - DNA, 25 bp, Homo sapien
cattcacccaaaccagaggtctcag

SEQ ID NO: 97459 - DNA, 25 bp, Homo sapien
tctgaatccaaagaaggcggagaga

SEQ ID NO: 97460 - DNA, 25 bp, Homo sapien
taaatttggttcagctggtttctca

SEQ ID NO: 97461 - DNA, 25 bp, Homo sapien
tcatttagcctatgctagctagcct

SEQ ID NO: 97462 - DNA, 25 bp, Homo sapien
tagctagcctacaccttgcctcttt

SEQ ID NO: 97463 - DNA, 25 bp, Homo sapien
ctgctatcacgtttccaggaaaaca

SEQ ID NO: 97464 - DNA, 25 bp, Homo sapien
tgttatccagccatatcatttagcc

SEQ ID NO: 97465 - DNA, 25 bp, Homo sapien
gactccttgtcccatggtgacagag

SEQ ID NO: 97466 - DNA, 25 bp, Homo sapien
ccttgtcccatggtgacagagaatc

SEQ ID NO: 97467 - DNA, 25 bp, Homo sapien
ccttggacttccaacatcttctgtc

SEQ ID NO: 97468 - DNA, 25 bp, Homo sapien
cccattatccttggacttccaacat

SEQ ID NO: 97469 - DNA, 25 bp, Homo sapien
tacctctggtggatgcccctaaaaa

SEQ ID NO: 97470 - DNA, 25 bp, Homo sapien
tacaatctgttagactgagccacct

SEQ ID NO: 97471 - DNA, 25 bp, Homo sapien
aaatatctaatcctgtgagaccaca

SEQ ID NO: 97472 - DNA, 25 bp, Homo sapien
cagtgagagctcatggtgacattat

SEQ ID NO: 97473 - DNA, 25 bp, Homo sapien
caagggtatgaagccagtgcaccaa

SEQ ID NO: 97474 - DNA, 25 bp, Homo sapien
tatgaagccagtgcaccaaaataga

SEQ ID NO: 97475 - DNA, 25 bp, Homo sapien
gtacaagggtatgaagccagtgcac

SEQ ID NO: 97476 - DNA, 25 bp, Homo sapien
gggtatgaagccagtgcaccaaaat

SEQ ID NO: 97477 - DNA, 25 bp, Homo sapien
gcagagagcactactgcccaggact

SEQ ID NO: 97478 - DNA, 25 bp, Homo sapien
ttggcagagagcactactgcccagg

SEQ ID NO: 97479 - DNA, 25 bp, Homo sapien
gagagcactactgcccaggactcct

SEQ ID NO: 97480 - DNA, 25 bp, Homo sapien
agattggcagagagcactactgccc

SEQ ID NO: 97481 - DNA, 25 bp, Homo sapien
acaaatcatgtggaagccctcgctc

SEQ ID NO: 97482 - DNA, 25 bp, Homo sapien
agaagttcaaacaaatcatgtggaa

SEQ ID NO: 97483 - DNA, 25 bp, Homo sapien
actgaagaagttcaaacaaatcatg

SEQ ID NO: 97484 - DNA, 25 bp, Homo sapien
ttacttgaaaaactgaagaagttca

SEQ ID NO: 97485 - DNA, 25 bp, Homo sapien
gggtcctcacccagatgcagaaaga

SEQ ID NO: 97486 - DNA, 25 bp, Homo sapien
tagaaggtactctgtagttccctcc

SEQ ID NO: 97487 - DNA, 25 bp, Homo sapien
tcaggtcccacactagagggccaga

SEQ ID NO: 97488 - DNA, 25 bp, Homo sapien
ttacagtgatgaagctgagacccag

SEQ ID NO: 97489 - DNA, 25 bp, Homo sapien
caggcagtggattaatatgcagcgt

SEQ ID NO: 97490 - DNA, 25 bp, Homo sapien
cagaagcaacctatatatccatgaa

SEQ ID NO: 97491 - DNA, 25 bp, Homo sapien
ccatgaataggagactaggaaaata

SEQ ID NO: 97492 - DNA, 25 bp, Homo sapien
aatcaccacactttttataataggg

SEQ ID NO: 97493 - DNA, 25 bp, Homo sapien
gatgttaatattggttctattccac

SEQ ID NO: 97494 - DNA, 25 bp, Homo sapien
tctattatgtatgtgttgaatactc

SEQ ID NO: 97495 - DNA, 25 bp, Homo sapien
tactcttagcaatctgtctgtatct

SEQ ID NO: 97496 - DNA, 25 bp, Homo sapien
tgtgttgaatactcttagcaatctg

SEQ ID NO: 97497 - DNA, 25 bp, Homo sapien
cactgccagcagtccttacatggat

SEQ ID NO: 97498 - DNA, 25 bp, Homo sapien
gttttttgagcagccaatcactgcc

SEQ ID NO: 97499 - DNA, 25 bp, Homo sapien
gaagttctatgtggctaaaccctta

SEQ ID NO: 97500 - DNA, 25 bp, Homo sapien
gattgcagccccatgatattattta

SEQ ID NO: 97501 - DNA, 25 bp, Homo sapien
aaaacaacataaggatatggagtac

SEQ ID NO: 97502 - DNA, 25 bp, Homo sapien
tcagggctttgatgagacgaaaaca

SEQ ID NO: 97503 - DNA, 25 bp, Homo sapien
ctttgatgagacgaaaacaacataa

SEQ ID NO: 97504 - DNA, 25 bp, Homo sapien
gagacgaaaacaacataaggatatg

SEQ ID NO: 97505 - DNA, 25 bp, Homo sapien
gaagaaaacagtggtgtcctgccca

SEQ ID NO: 97506 - DNA, 25 bp, Homo sapien
tgtgtcacaaaacgaaacacgtgtt

SEQ ID NO: 97507 - DNA, 25 bp, Homo sapien
taagaatggtactcgcagtcactca

SEQ ID NO: 97508 - DNA, 25 bp, Homo sapien
gcagatccatgacccagctgtatga

SEQ ID NO: 97509 - DNA, 25 bp, Homo sapien
cccactgatgttcgccgaccgttga

SEQ ID NO: 97510 - DNA, 25 bp, Homo sapien
ctgatgttcgccgaccgttgattgt

SEQ ID NO: 97511 - DNA, 25 bp, Homo sapien
tatcccactgatgttcgccgaccgt

SEQ ID NO: 97512 - DNA, 25 bp, Homo sapien
gatgttcgccgaccgttgattgttc

SEQ ID NO: 97513 - DNA, 25 bp, Homo sapien
gaggcttagcccctgtctttagatt

SEQ ID NO: 97514 - DNA, 25 bp, Homo sapien
ggcttagcccctgtctttagattta

SEQ ID NO: 97515 - DNA, 25 bp, Homo sapien
tttacagtccaatgcttcactcagc

SEQ ID NO: 97516 - DNA, 25 bp, Homo sapien
aaagaggcttagcccctgtctttag

SEQ ID NO: 97517 - DNA, 25 bp, Homo sapien
aattcaatatgaaaatcacctcaga

SEQ ID NO: 97518 - DNA, 25 bp, Homo sapien
tgcttcttcgaatttgcaattcaat

SEQ ID NO: 97519 - DNA, 25 bp, Homo sapien
aagccccgccaggtttgaagctgct

SEQ ID NO: 97520 - DNA, 25 bp, Homo sapien
ttcaatatgaaaatcacctcagagc

SEQ ID NO: 97521 - DNA, 25 bp, Homo sapien
tcaattggacttaaacccataaaca

SEQ ID NO: 97522 - DNA, 25 bp, Homo sapien
tgcatcaactgaacgcaaatcagcc

SEQ ID NO: 97523 - DNA, 25 bp, Homo sapien
tcaactgaacgcaaatcagccactt

SEQ ID NO: 97524 - DNA, 25 bp, Homo sapien
cactctgcatcaactgaacgcaaat

SEQ ID NO: 97525 - DNA, 25 bp, Homo sapien
taaggactgcaaaaccccactctgc

SEQ ID NO: 97526 - DNA, 25 bp, Homo sapien
tggtgggatacatatgaagcaatta

SEQ ID NO: 97527 - DNA, 25 bp, Homo sapien
tcagaattaatctgagattggtggg

SEQ ID NO: 97528 - DNA, 25 bp, Homo sapien
gaagcatctggtgggatacatatga

SEQ ID NO: 97529 - DNA, 25 bp, Homo sapien
tgcccagcttttgagatgatcagaa

SEQ ID NO: 97530 - DNA, 25 bp, Homo sapien
gaaagcccagatcttgtaactcaag

SEQ ID NO: 97531 - DNA, 25 bp, Homo sapien
gtgtggtcctaaacaggctgctgtc

SEQ ID NO: 97532 - DNA, 25 bp, Homo sapien
caaccaacaggttgaaagcagagca

SEQ ID NO: 97533 - DNA, 25 bp, Homo sapien
agaggtccaaaatgtggtgtggtcc

SEQ ID NO: 97534 - DNA, 25 bp, Homo sapien
tacagacaatatgtgtataactgac

SEQ ID NO: 97535 - DNA, 25 bp, Homo sapien
taacaagcaattgttggatagatac

SEQ ID NO: 97536 - DNA, 25 bp, Homo sapien
gttggatagatacagacaatatgtg

SEQ ID NO: 97537 - DNA, 25 bp, Homo sapien
gacaatatgtgtataactgactaag

SEQ ID NO: 97538 - DNA, 25 bp, Homo sapien
aatttccatcgtgctgtcagaggcc

SEQ ID NO: 97539 - DNA, 25 bp, Homo sapien
gatggtgtcagctaaaagggctcag

SEQ ID NO: 97540 - DNA, 25 bp, Homo sapien
cagaggccagcagcatgaaatgagt

SEQ ID NO: 97541 - DNA, 25 bp, Homo sapien
gagccctaccatcagtgtcaaaacg

SEQ ID NO: 97542 - DNA, 25 bp, Homo sapien
ctattaggtaggaagatttggtatc

SEQ ID NO: 97543 - DNA, 25 bp, Homo sapien
agtctccttgacacatactattagg

SEQ ID NO: 97544 - DNA, 25 bp, Homo sapien
ttgtttcgtttcatgcagacatttt

SEQ ID NO: 97545 - DNA, 25 bp, Homo sapien
tggtatctgacatgtcacttgttct

SEQ ID NO: 97546 - DNA, 25 bp, Homo sapien
acaggcggctgccacacgccccgct

SEQ ID NO: 97547 - DNA, 25 bp, Homo sapien
ggcggctgccacacgccccgctaat

SEQ ID NO: 97548 - DNA, 25 bp, Homo sapien
agattacaggcggctgccacacgcc

SEQ ID NO: 97549 - DNA, 25 bp, Homo sapien
attacaggcggctgccacacgcccc

SEQ ID NO: 97550 - DNA, 25 bp, Homo sapien
ttcctgtgcactgggccttcggtca

SEQ ID NO: 97551 - DNA, 25 bp, Homo sapien
tattcctgtgcactgggccttcggt

SEQ ID NO: 97552 - DNA, 25 bp, Homo sapien
ttttagttcagatacccagttgcag

SEQ ID NO: 97553 - DNA, 25 bp, Homo sapien
tacccagttgcaggccatattcctg

SEQ ID NO: 97554 - DNA, 25 bp, Homo sapien
gaatgtccgtctgcctagtgtagtt

SEQ ID NO: 97555 - DNA, 25 bp, Homo sapien
taagacagcagctttagggagaact

SEQ ID NO: 97556 - DNA, 25 bp, Homo sapien
gatgtccactatcacgttgacagag

SEQ ID NO: 97557 - DNA, 25 bp, Homo sapien
gcactgagactcgaagctggtgcca

SEQ ID NO: 97558 - DNA, 25 bp, Homo sapien
cagacagttcgaatgcagtaatgcc

SEQ ID NO: 97559 - DNA, 25 bp, Homo sapien
tagctccaagagtcaaagggtttgg

SEQ ID NO: 97560 - DNA, 25 bp, Homo sapien
gacttggctagaggtcatgtcacct

SEQ ID NO: 97561 - DNA, 25 bp, Homo sapien
ccaacacttcggataagctcaggaa

SEQ ID NO: 97562 - DNA, 25 bp, Homo sapien
taactgcttcactgccattggtaga

SEQ ID NO: 97563 - DNA, 25 bp, Homo sapien
cacctttgtcgtctactgagagaga

SEQ ID NO: 97564 - DNA, 25 bp, Homo sapien
tggttgctcttcgactgcagaagca

SEQ ID NO: 97565 - DNA, 25 bp, Homo sapien
gagagatacttgagatacctcctca

SEQ ID NO: 97566 - DNA, 25 bp, Homo sapien
aacactcataagactggctggcagc

SEQ ID NO: 97567 - DNA, 25 bp, Homo sapien
tctgtcaggaggatctactagcgaa

SEQ ID NO: 97568 - DNA, 25 bp, Homo sapien
gactgcaataccaggcaaagtttgg

SEQ ID NO: 97569 - DNA, 25 bp, Homo sapien
tatagcagtcgttaagccttcccag

SEQ ID NO: 97570 - DNA, 25 bp, Homo sapien
ttctctgattacaaggctcaagtga

SEQ ID NO: 97571 - DNA, 25 bp, Homo sapien
cctctatggccttggaagtataaga

SEQ ID NO: 97572 - DNA, 25 bp, Homo sapien
ccccgtttaggtgttcggcatggag

SEQ ID NO: 97573 - DNA, 25 bp, Homo sapien
gcagaatttgtttgtggcccctcta

SEQ ID NO: 97574 - DNA, 25 bp, Homo sapien
gaaagaagtggcaccggagacatga

SEQ ID NO: 97575 - DNA, 25 bp, Homo sapien
tctcccctagtgaagaggctatgtc

SEQ ID NO: 97576 - DNA, 25 bp, Homo sapien
tctgtctgcttaaggtgagagggca

SEQ ID NO: 97577 - DNA, 25 bp, Homo sapien
cactagatgagcttggagacaccct

SEQ ID NO: 97578 - DNA, 25 bp, Homo sapien
gtaatcatagtgaatctctttgccc

SEQ ID NO: 97579 - DNA, 25 bp, Homo sapien
tcagctggatctacttccaatggcc

SEQ ID NO: 97580 - DNA, 25 bp, Homo sapien
ctcctgaggaaacggccattaccac

SEQ ID NO: 97581 - DNA, 25 bp, Homo sapien
tatatgtagacaagcatggccattg

SEQ ID NO: 97582 - DNA, 25 bp, Homo sapien
gatgacttggtcttagccttgtagc

SEQ ID NO: 97583 - DNA, 25 bp, Homo sapien
ggagacttgacgtgagctatcatca

SEQ ID NO: 97584 - DNA, 25 bp, Homo sapien
agtgaattctcggttatggcaccaa

SEQ ID NO: 97585 - DNA, 25 bp, Homo sapien
gaagatcaactaagctccaggaggt

SEQ ID NO: 97586 - DNA, 25 bp, Homo sapien
ttccaaggaacacaaagtcagccat

SEQ ID NO: 97587 - DNA, 25 bp, Homo sapien
gttccaaggaacacaaagtcagcca

SEQ ID NO: 97588 - DNA, 25 bp, Homo sapien
tgtgggtgagagttgtatgggaggc

SEQ ID NO: 97589 - DNA, 25 bp, Homo sapien
cacgaagggcgaagagcacccttaa

SEQ ID NO: 97590 - DNA, 25 bp, Homo sapien
cacccttaaccactgtgggtgagag

SEQ ID NO: 97591 - DNA, 25 bp, Homo sapien
gaagagcacccttaaccactgtggg

SEQ ID NO: 97592 - DNA, 25 bp, Homo sapien
agtgctacactctcccaacaagtta

SEQ ID NO: 97593 - DNA, 25 bp, Homo sapien
gcaaagtgctacactctcccaacaa

SEQ ID NO: 97594 - DNA, 25 bp, Homo sapien
tacactctcccaacaagttaagaat

SEQ ID NO: 97595 - DNA, 25 bp, Homo sapien
ctctcccaacaagttaagaatactc

SEQ ID NO: 97596 - DNA, 25 bp, Homo sapien
cacacataactaggaatgggttgag

SEQ ID NO: 97597 - DNA, 25 bp, Homo sapien
cagatgtgcctttcaaataatcttg

SEQ ID NO: 97598 - DNA, 25 bp, Homo sapien
aatgcttaactgaggatgtcctgac

SEQ ID NO: 97599 - DNA, 25 bp, Homo sapien
tgagatgccgtttccctattaaact

SEQ ID NO: 97600 - DNA, 25 bp, Homo sapien
ggcttcatttaaccattgaatgaat

SEQ ID NO: 97601 - DNA, 25 bp, Homo sapien
gaatgaattcatccagtttgtttac

SEQ ID NO: 97602 - DNA, 25 bp, Homo sapien
gaattcatccagtttgtttacaaac

SEQ ID NO: 97603 - DNA, 25 bp, Homo sapien
ttgaatgaattcatccagtttgttt

SEQ ID NO: 97604 - DNA, 25 bp, Homo sapien
ccagatacagtttaaggtcatccat

SEQ ID NO: 97605 - DNA, 25 bp, Homo sapien
tctccagatacagtttaaggtcatc

SEQ ID NO: 97606 - DNA, 25 bp, Homo sapien
catctctgctttagggggagtccaa

SEQ ID NO: 97607 - DNA, 25 bp, Homo sapien
tgtctccagatacagtttaaggtca

SEQ ID NO: 97608 - DNA, 25 bp, Homo sapien
cacagggatgagtgtaatgacagtt

SEQ ID NO: 97609 - DNA, 25 bp, Homo sapien
agtgttttccacttcccctccatgg

SEQ ID NO: 97610 - DNA, 25 bp, Homo sapien
tccatggttttctctatgcacaggg

SEQ ID NO: 97611 - DNA, 25 bp, Homo sapien
aatgtcccccagtctataattcttg

SEQ ID NO: 97612 - DNA, 25 bp, Homo sapien
ggatgaagtcattctatatttattg

SEQ ID NO: 97613 - DNA, 25 bp, Homo sapien
atatttattgacttcgaattattac

SEQ ID NO: 97614 - DNA, 25 bp, Homo sapien
aggatgaagtcattctatatttatt

SEQ ID NO: 97615 - DNA, 25 bp, Homo sapien
attgacttcgaattattactaatag

SEQ ID NO: 97616 - DNA, 25 bp, Homo sapien
ggtaatcacattcacttcccagcat

SEQ ID NO: 97617 - DNA, 25 bp, Homo sapien
aggtaatcacattcacttcccagca

SEQ ID NO: 97618 - DNA, 25 bp, Homo sapien
aattccataaatatgagtaatctgg

SEQ ID NO: 97619 - DNA, 25 bp, Homo sapien
gtcctatggcactgattatatgaaa

SEQ ID NO: 97620 - DNA, 25 bp, Homo sapien
tttaaagcagcacgtagatgaatga

SEQ ID NO: 97621 - DNA, 25 bp, Homo sapien
aaatatgagtaatctggttcctgga

SEQ ID NO: 97622 - DNA, 25 bp, Homo sapien
taagctcaagaagttggtgtccttc

SEQ ID NO: 97623 - DNA, 25 bp, Homo sapien
tgctttgtgagatgcaataagctca

SEQ ID NO: 97624 - DNA, 25 bp, Homo sapien
agcacaatgactgtctacattcaac

SEQ ID NO: 97625 - DNA, 25 bp, Homo sapien
tgactgtctacattcaacttaaaac

SEQ ID NO: 97626 - DNA, 25 bp, Homo sapien
tagctgtgctaagctcaaacctaga

SEQ ID NO: 97627 - DNA, 25 bp, Homo sapien
gaagcggcagggaaataatttagac

SEQ ID NO: 97628 - DNA, 25 bp, Homo sapien
caaacctagagccaaactgtaagta

SEQ ID NO: 97629 - DNA, 25 bp, Homo sapien
cagaccatttggaggcagtatttca

SEQ ID NO: 97630 - DNA, 25 bp, Homo sapien
ctccaaaaggaggggaaagcagaag

SEQ ID NO: 97631 - DNA, 25 bp, Homo sapien
aaaggaggggaaagcagaagttgtg

SEQ ID NO: 97632 - DNA, 25 bp, Homo sapien
caaaaggaggggaaagcagaagttg

SEQ ID NO: 97633 - DNA, 25 bp, Homo sapien
ggaggggaaagcagaagttgtgggc

SEQ ID NO: 97634 - DNA, 25 bp, Homo sapien
acatcagtagccagtatctcggctt

SEQ ID NO: 97635 - DNA, 25 bp, Homo sapien
tgacttgcaatcatccgcagcatgt

SEQ ID NO: 97636 - DNA, 25 bp, Homo sapien
ctttgatggtatccagagccctgag

SEQ ID NO: 97637 - DNA, 25 bp, Homo sapien
tgtgctgccgtttgatttgcctctg

SEQ ID NO: 97638 - DNA, 25 bp, Homo sapien
catgggtctcaacattgcagggctg

SEQ ID NO: 97639 - DNA, 25 bp, Homo sapien
tgaaatgcaaccttcttcatggagg

SEQ ID NO: 97640 - DNA, 25 bp, Homo sapien
taaaggcgttgtttgagattcaaaa

SEQ ID NO: 97641 - DNA, 25 bp, Homo sapien
aattgtctgagcttttcactggctg

SEQ ID NO: 97642 - DNA, 25 bp, Homo sapien
tgataagaccactaagcagaaaagc

SEQ ID NO: 97643 - DNA, 25 bp, Homo sapien
cagtatatgtgggactgacgacaca

SEQ ID NO: 97644 - DNA, 25 bp, Homo sapien
acagcaaagtgtctcaagcagttcc

SEQ ID NO: 97645 - DNA, 25 bp, Homo sapien
tgcagagttctctgtcagcactcaa

SEQ ID NO: 97646 - DNA, 25 bp, Homo sapien
tgctatttgccaaaggtctgaagca

SEQ ID NO: 97647 - DNA, 25 bp, Homo sapien
aaaagatgctatttgccaaaggtct

SEQ ID NO: 97648 - DNA, 25 bp, Homo sapien
gatgctatttgccaaaggtctgaag

SEQ ID NO: 97649 - DNA, 25 bp, Homo sapien
atgataaaagatgctatttgccaaa

SEQ ID NO: 97650 - DNA, 25 bp, Homo sapien
catagtcattaagctttttgtgtac

SEQ ID NO: 97651 - DNA, 25 bp, Homo sapien
cattaagctttttgtgtacaactga

SEQ ID NO: 97652 - DNA, 25 bp, Homo sapien
ccaatggagcatagtcattaagctt

SEQ ID NO: 97653 - DNA, 25 bp, Homo sapien
ttttgtgtattagccaatggagcat

SEQ ID NO: 97654 - DNA, 25 bp, Homo sapien
taactgtgattcactggctgggctg

SEQ ID NO: 97655 - DNA, 25 bp, Homo sapien
tggctattggttaggcagtccacaa

SEQ ID NO: 97656 - DNA, 25 bp, Homo sapien
ggttgcctcatggactaactgtgat

SEQ ID NO: 97657 - DNA, 25 bp, Homo sapien
tcaattagctgtgcaaagggagccc

SEQ ID NO: 97658 - DNA, 25 bp, Homo sapien
ctccattcttcaacaactgttgcat

SEQ ID NO: 97659 - DNA, 25 bp, Homo sapien
tcacagatactgctaccttaataga

SEQ ID NO: 97660 - DNA, 25 bp, Homo sapien
tgcgtgcaaatctagccatataaac

SEQ ID NO: 97661 - DNA, 25 bp, Homo sapien
taaaggcctggcaaatgcgtgcaaa

SEQ ID NO: 97662 - DNA, 25 bp, Homo sapien
taaatcacgaatggtaaagttctgg

SEQ ID NO: 97663 - DNA, 25 bp, Homo sapien
ttgtccaaagctcataccagccaag

SEQ ID NO: 97664 - DNA, 25 bp, Homo sapien
cattgtccaaagctcataccagcca

SEQ ID NO: 97665 - DNA, 25 bp, Homo sapien
attgtccaaagctcataccagccaa

SEQ ID NO: 97666 - DNA, 25 bp, Homo sapien
gatgtagaggctgctcggtcttcct

SEQ ID NO: 97667 - DNA, 25 bp, Homo sapien
ctccactcaccataatatgcacaag

SEQ ID NO: 97668 - DNA, 25 bp, Homo sapien
cctttccttagatgtagaggctgct

SEQ ID NO: 97669 - DNA, 25 bp, Homo sapien
acccaagtagtgctcccagctcata

SEQ ID NO: 97670 - DNA, 25 bp, Homo sapien
aacaacgcagatacttctgaatcat

SEQ ID NO: 97671 - DNA, 25 bp, Homo sapien
gaatcatctataactcctttaatca

SEQ ID NO: 97672 - DNA, 25 bp, Homo sapien
gaattcaacacagccctggtttgag

SEQ ID NO: 97673 - DNA, 25 bp, Homo sapien
attcaacacagccctggtttgaggc

SEQ ID NO: 97674 - DNA, 25 bp, Homo sapien
aattcaacacagccctggtttgagg

SEQ ID NO: 97675 - DNA, 25 bp, Homo sapien
tgaattcaacacagccctggtttga

SEQ ID NO: 97676 - DNA, 25 bp, Homo sapien
gtatgccatgaatcactgtactcct

SEQ ID NO: 97677 - DNA, 25 bp, Homo sapien
tttgctagatttcaatgaagatgga

SEQ ID NO: 97678 - DNA, 25 bp, Homo sapien
catgaatcactgtactccttttccc

SEQ ID NO: 97679 - DNA, 25 bp, Homo sapien
ttgccactaccttaccttcagcagt

SEQ ID NO: 97680 - DNA, 25 bp, Homo sapien
tagaaatattgattacccctctcat

SEQ ID NO: 97681 - DNA, 25 bp, Homo sapien
aatgctagaaatattgattacccct

SEQ ID NO: 97682 - DNA, 25 bp, Homo sapien
agttcctgtcaggtaaatgaccttg

SEQ ID NO: 97683 - DNA, 25 bp, Homo sapien
cctcaaagttcctgtcaggtaaatg

SEQ ID NO: 97684 - DNA, 25 bp, Homo sapien
tggtacagtcaattgtttcctaatc

SEQ ID NO: 97685 - DNA, 25 bp, Homo sapien
agtcattctttggtacagtcaattg

SEQ ID NO: 97686 - DNA, 25 bp, Homo sapien
tctttggtacagtcaattgtttcct

SEQ ID NO: 97687 - DNA, 25 bp, Homo sapien
cagtcaattgtttcctaatctgctg

SEQ ID NO: 97688 - DNA, 25 bp, Homo sapien
tgatggctctcttagatggacagct

SEQ ID NO: 97689 - DNA, 25 bp, Homo sapien
tgactccatgtcttatcttccgaaa

SEQ ID NO: 97690 - DNA, 25 bp, Homo sapien
gaaataacaccaacccttgatggct

SEQ ID NO: 97691 - DNA, 25 bp, Homo sapien
gtgcttatggtcacaaggcagatct

SEQ ID NO: 97692 - DNA, 25 bp, Homo sapien
cagataggcctcacaaactccttta

SEQ ID NO: 97693 - DNA, 25 bp, Homo sapien
tcatgaatcgaatatctacctaaag

SEQ ID NO: 97694 - DNA, 25 bp, Homo sapien
tctacctaaagtagattccaggtcc

SEQ ID NO: 97695 - DNA, 25 bp, Homo sapien
cagaatctcacgttttaaatagtat

SEQ ID NO: 97696 - DNA, 25 bp, Homo sapien
tccttgggtatctgagtcttccagg

SEQ ID NO: 97697 - DNA, 25 bp, Homo sapien
gacttgccttctttggcctttgctg

SEQ ID NO: 97698 - DNA, 25 bp, Homo sapien
tcttccaggacttgccttctttggc

SEQ ID NO: 97699 - DNA, 25 bp, Homo sapien
tctgagtcttccaggacttgccttc

SEQ ID NO: 97700 - DNA, 25 bp, Homo sapien
ttggtcctcaacctagtctagcctg

SEQ ID NO: 97701 - DNA, 25 bp, Homo sapien
tgaacacaccccaatcagattttgg

SEQ ID NO: 97702 - DNA, 25 bp, Homo sapien
gcttgtgtttgcacgacagctcagt

SEQ ID NO: 97703 - DNA, 25 bp, Homo sapien
gctgagataacctcttgcatccaag

SEQ ID NO: 97704 - DNA, 25 bp, Homo sapien
gctgctgctggtatactgctcgctg

SEQ ID NO: 97705 - DNA, 25 bp, Homo sapien
tgcttccaggtagcatagttgaacc

SEQ ID NO: 97706 - DNA, 25 bp, Homo sapien
tgcttcccactgaatgaacttttga

SEQ ID NO: 97707 - DNA, 25 bp, Homo sapien
caaactcttcctttcgcttgctgct

SEQ ID NO: 97708 - DNA, 25 bp, Homo sapien
gagctcctgatattctgaatcaaag

SEQ ID NO: 97709 - DNA, 25 bp, Homo sapien
ctcctgatattctgaatcaaagtcc

SEQ ID NO: 97710 - DNA, 25 bp, Homo sapien
ccagagctcctgatattctgaatca

SEQ ID NO: 97711 - DNA, 25 bp, Homo sapien
atcccagagctcctgatattctgaa

SEQ ID NO: 97712 - DNA, 25 bp, Homo sapien
ggtcgtggctgtccatcacaaggga

SEQ ID NO: 97713 - DNA, 25 bp, Homo sapien
tcaggtcgtggctgtccatcacaag

SEQ ID NO: 97714 - DNA, 25 bp, Homo sapien
atcatcaggtcgtggctgtccatca

SEQ ID NO: 97715 - DNA, 25 bp, Homo sapien
tcgtggctgtccatcacaagggact

SEQ ID NO: 97716 - DNA, 25 bp, Homo sapien
tcacagaatgggtctttagtaccac

SEQ ID NO: 97717 - DNA, 25 bp, Homo sapien
gggaaaaatcatacagacaggaatg

SEQ ID NO: 97718 - DNA, 25 bp, Homo sapien
ttacttcacagaatgggtctttagt

SEQ ID NO: 97719 - DNA, 25 bp, Homo sapien
gggtctttagtaccaccaggcagat

SEQ ID NO: 97720 - DNA, 25 bp, Homo sapien
caaacggcattgtatggtacagaga

SEQ ID NO: 97721 - DNA, 25 bp, Homo sapien
ccttattatggtggtatggacctga

SEQ ID NO: 97722 - DNA, 25 bp, Homo sapien
tgtgaaagagccaattaatgtggca

SEQ ID NO: 97723 - DNA, 25 bp, Homo sapien
gattagtcggtagccatcaacactg

SEQ ID NO: 97724 - DNA, 25 bp, Homo sapien
taagggcaccttttatgaggcagtg

SEQ ID NO: 97725 - DNA, 25 bp, Homo sapien
tgatcagaatgcgaaaggctaagtc

SEQ ID NO: 97726 - DNA, 25 bp, Homo sapien
tatcatggccatgaacggttaacac

SEQ ID NO: 97727 - DNA, 25 bp, Homo sapien
tgtaggaggtcagagaccacatgtc

SEQ ID NO: 97728 - DNA, 25 bp, Homo sapien
cattttaatccttgctaccagcagc

SEQ ID NO: 97729 - DNA, 25 bp, Homo sapien
tcggtagatatcgaagatgtgcatt

SEQ ID NO: 97730 - DNA, 25 bp, Homo sapien
tacagactttcttcggtagatatcg

SEQ ID NO: 97731 - DNA, 25 bp, Homo sapien
taatccttgctaccagcagcatggg

SEQ ID NO: 97732 - DNA, 25 bp, Homo sapien
taaggaagaaatatcccgtgtgctc

SEQ ID NO: 97733 - DNA, 25 bp, Homo sapien
tgaacaagccccacggatctattgg

SEQ ID NO: 97734 - DNA, 25 bp, Homo sapien
tattggtttaggacagtaattcagc

SEQ ID NO: 97735 - DNA, 25 bp, Homo sapien
caaagtctgttgtggcttttagctg

SEQ ID NO: 97736 - DNA, 25 bp, Homo sapien
tgctctctgcaagatacatcctaat

SEQ ID NO: 97737 - DNA, 25 bp, Homo sapien
cttgacatgacctcgggaaaaatat

SEQ ID NO: 97738 - DNA, 25 bp, Homo sapien
aaaagtaaaatgaatgctctctgca

SEQ ID NO: 97739 - DNA, 25 bp, Homo sapien
ttgtggtagagctggttagttttac

SEQ ID NO: 97740 - DNA, 25 bp, Homo sapien
gcataggcattgtagtgctttcaca

SEQ ID NO: 97741 - DNA, 25 bp, Homo sapien
gataaatggtgcaccactaggcaag

SEQ ID NO: 97742 - DNA, 25 bp, Homo sapien
tgggtgtcaaggtcaatgtaaaact

SEQ ID NO: 97743 - DNA, 25 bp, Homo sapien
tgtaacctaaatggtagacaatctt

SEQ ID NO: 97744 - DNA, 25 bp, Homo sapien
ggacatagattgcattatctttaat

SEQ ID NO: 97745 - DNA, 25 bp, Homo sapien
cactggccatgtactgttaattgga

SEQ ID NO: 97746 - DNA, 25 bp, Homo sapien
cctcttctagcttattccatttgca

SEQ ID NO: 97747 - DNA, 25 bp, Homo sapien
ccatttgcatgatctggaaatcaca

SEQ ID NO: 97748 - DNA, 25 bp, Homo sapien
tttatgtgtgctctcagtctttgtc

SEQ ID NO: 97749 - DNA, 25 bp, Homo sapien
tgtgtgctctcagtctttgtcacca

SEQ ID NO: 97750 - DNA, 25 bp, Homo sapien
tctttatgtgtgctctcagtctttg

SEQ ID NO: 97751 - DNA, 25 bp, Homo sapien
cttgtctttatgtgtgctctcagtc

SEQ ID NO: 97752 - DNA, 25 bp, Homo sapien
caagggttgctttagagcgctttta

SEQ ID NO: 97753 - DNA, 25 bp, Homo sapien
gatcatttggtagtaaaacgccacc

SEQ ID NO: 97754 - DNA, 25 bp, Homo sapien
gcttcaaccttactaagcagctccg

SEQ ID NO: 97755 - DNA, 25 bp, Homo sapien
tcaggtgtctgatggacatttccac

SEQ ID NO: 97756 - DNA, 25 bp, Homo sapien
gcagctccgtctttttcaggtgtct

SEQ ID NO: 97757 - DNA, 25 bp, Homo sapien
caaattagaaatcggacagagtact

SEQ ID NO: 97758 - DNA, 25 bp, Homo sapien
cttcactacgcaaaaaatgtacaca

SEQ ID NO: 97759 - DNA, 25 bp, Homo sapien
tcggacagagtacttcactacgcaa

SEQ ID NO: 97760 - DNA, 25 bp, Homo sapien
tgtacacataacctacaaacagtaa

SEQ ID NO: 97761 - DNA, 25 bp, Homo sapien
gcatgaatagcttgtttgaaacgta

SEQ ID NO: 97762 - DNA, 25 bp, Homo sapien
aacacaggctgattcaattctgcaa

SEQ ID NO: 97763 - DNA, 25 bp, Homo sapien
ttgaaagctgtagtgacaactccac

SEQ ID NO: 97764 - DNA, 25 bp, Homo sapien
gacttggtgcatacccataatacat

SEQ ID NO: 97765 - DNA, 25 bp, Homo sapien
caattgagacagagtaatatgcagc

SEQ ID NO: 97766 - DNA, 25 bp, Homo sapien
caattaaaacagtatgcctggtggt

SEQ ID NO: 97767 - DNA, 25 bp, Homo sapien
gattaaactgtacgcaccactgaca

SEQ ID NO: 97768 - DNA, 25 bp, Homo sapien
cacactgttcaccttagatgaaagt

SEQ ID NO: 97769 - DNA, 25 bp, Homo sapien
tatacgacagaggacatcaatttca

SEQ ID NO: 97770 - DNA, 25 bp, Homo sapien
aatggtccgtcttcataaatatacg

SEQ ID NO: 97771 - DNA, 25 bp, Homo sapien
tttgttctggaacagtttgcaatca

SEQ ID NO: 97772 - DNA, 25 bp, Homo sapien
tctggaacagtttgcaatcataaat

SEQ ID NO: 97773 - DNA, 25 bp, Homo sapien
gtcctggatcttctctcctagggtt

SEQ ID NO: 97774 - DNA, 25 bp, Homo sapien
tgtgtcctggatcttctctcctagg

SEQ ID NO: 97775 - DNA, 25 bp, Homo sapien
gtgtcctggatcttctctcctaggg

SEQ ID NO: 97776 - DNA, 25 bp, Homo sapien
cctggatcttctctcctagggtttt

SEQ ID NO: 97777 - DNA, 25 bp, Homo sapien
gcaggtcacgtggactcgacccact

SEQ ID NO: 97778 - DNA, 25 bp, Homo sapien
aggagagagcaggtcacgtggactc

SEQ ID NO: 97779 - DNA, 25 bp, Homo sapien
ggtcacgtggactcgacccactgtg

SEQ ID NO: 97780 - DNA, 25 bp, Homo sapien
agagagcaggtcacgtggactcgac

SEQ ID NO: 97781 - DNA, 25 bp, Homo sapien
gatgaaaagctctgtatctcttagc

SEQ ID NO: 97782 - DNA, 25 bp, Homo sapien
gaaaagctctgtatctcttagccat

SEQ ID NO: 97783 - DNA, 25 bp, Homo sapien
tgaaaagctctgtatctcttagcca

SEQ ID NO: 97784 - DNA, 25 bp, Homo sapien
agatgaaaagctctgtatctcttag

SEQ ID NO: 97785 - DNA, 25 bp, Homo sapien
atttcatccctaccataaaaagagc

SEQ ID NO: 97786 - DNA, 25 bp, Homo sapien
atgggtataatacttcatgtacttg

SEQ ID NO: 97787 - DNA, 25 bp, Homo sapien
catttaggtgcacagtgatacacag

SEQ ID NO: 97788 - DNA, 25 bp, Homo sapien
aaatgtggaggttgtctataaattc

SEQ ID NO: 97789 - DNA, 25 bp, Homo sapien
gtttctatgcatcaaatgatacagg

SEQ ID NO: 97790 - DNA, 25 bp, Homo sapien
agaaaccaatggttcaacgttactg

SEQ ID NO: 97791 - DNA, 25 bp, Homo sapien
actatggcctggattggtattctga

SEQ ID NO: 97792 - DNA, 25 bp, Homo sapien
gccatcaaggataacccacaagaaa

SEQ ID NO: 97793 - DNA, 25 bp, Homo sapien
tatcagtgcaaaaatgagagacctg

SEQ ID NO: 97794 - DNA, 25 bp, Homo sapien
caagattcacttgaagccgggtgcg

SEQ ID NO: 97795 - DNA, 25 bp, Homo sapien
tagctgtcctactcctagaaatagc

SEQ ID NO: 97796 - DNA, 25 bp, Homo sapien
gagtcgactatatgcatctgaacca

SEQ ID NO: 97797 - DNA, 25 bp, Homo sapien
tgtagacgtgtttgccactggacgg

SEQ ID NO: 97798 - DNA, 25 bp, Homo sapien
tggaggcaactcctcgacgtcgttg

SEQ ID NO: 97799 - DNA, 25 bp, Homo sapien
gcattcagattgcaagtctcccggt

SEQ ID NO: 97800 - DNA, 25 bp, Homo sapien
cactggacggcttgcatgacaatgg

SEQ ID NO: 97801 - DNA, 25 bp, Homo sapien
caccgtttccaagcctgaaagaatt

SEQ ID NO: 97802 - DNA, 25 bp, Homo sapien
cgtttccaagcctgaaagaattatt

SEQ ID NO: 97803 - DNA, 25 bp, Homo sapien
gaacaccgtttccaagcctgaaaga

SEQ ID NO: 97804 - DNA, 25 bp, Homo sapien
aagatgaacaccgtttccaagcctg

SEQ ID NO: 97805 - DNA, 25 bp, Homo sapien
atatcttatggccactaccacgatt

SEQ ID NO: 97806 - DNA, 25 bp, Homo sapien
caaaaatttcacaactttgcctgct

SEQ ID NO: 97807 - DNA, 25 bp, Homo sapien
ttatggccactaccacgattacagg

SEQ ID NO: 97808 - DNA, 25 bp, Homo sapien
gcttcaaaaatttcacaactttgcc

SEQ ID NO: 97809 - DNA, 25 bp, Homo sapien
catttttccagtctacacattcagc

SEQ ID NO: 97810 - DNA, 25 bp, Homo sapien
cttcatttttccagtctacacattc

SEQ ID NO: 97811 - DNA, 25 bp, Homo sapien
ttccagtctacacattcagcagtca

SEQ ID NO: 97812 - DNA, 25 bp, Homo sapien
tttttccagtctacacattcagcag

SEQ ID NO: 97813 - DNA, 25 bp, Homo sapien
ccttagactccacttagagactgac

SEQ ID NO: 97814 - DNA, 25 bp, Homo sapien
ctctgtatatctccggtgcgccctg

SEQ ID NO: 97815 - DNA, 25 bp, Homo sapien
ggcactctgccctgtagcaatgtta

SEQ ID NO: 97816 - DNA, 25 bp, Homo sapien
tgcgccctgtctgtgtagccctttc

SEQ ID NO: 97817 - DNA, 25 bp, Homo sapien
tataatgtgatttcaggtagatatt

SEQ ID NO: 97818 - DNA, 25 bp, Homo sapien
ttaatgtctctacttaatatgatca

SEQ ID NO: 97819 - DNA, 25 bp, Homo sapien
ttttccagctgcttgaacatatgga

SEQ ID NO: 97820 - DNA, 25 bp, Homo sapien
ttcatctcagtaatgatagttttcc

SEQ ID NO: 97821 - DNA, 25 bp, Homo sapien
aacatgtaactcagtagagctttat

SEQ ID NO: 97822 - DNA, 25 bp, Homo sapien
taaacctaatccgatcattgttcct

SEQ ID NO: 97823 - DNA, 25 bp, Homo sapien
taaattgggtttctcataggcaaca

SEQ ID NO: 97824 - DNA, 25 bp, Homo sapien
caaacactgttcatggtagcctcaa

SEQ ID NO: 97825 - DNA, 25 bp, Homo sapien
tgttttcaatgctggagttctggag

SEQ ID NO: 97826 - DNA, 25 bp, Homo sapien
catggacattgatgcaaagtgacac

SEQ ID NO: 97827 - DNA, 25 bp, Homo sapien
taaggtttctctagacacgatgttc

SEQ ID NO: 97828 - DNA, 25 bp, Homo sapien
gttacctcaattaccatgatgcatg

SEQ ID NO: 97829 - DNA, 25 bp, Homo sapien
gctgaggtcacaatctagagaattt

SEQ ID NO: 97830 - DNA, 25 bp, Homo sapien
tgaatccccaagttacaatggcgag

SEQ ID NO: 97831 - DNA, 25 bp, Homo sapien
tgttcagcaaccaaacccagataaa

SEQ ID NO: 97832 - DNA, 25 bp, Homo sapien
caatggcgaggtacacctagatggg

SEQ ID NO: 97833 - DNA, 25 bp, Homo sapien
cgcagaaggcaaatagcctatagtt

SEQ ID NO: 97834 - DNA, 25 bp, Homo sapien
aaggcaaatagcctatagttctccc

SEQ ID NO: 97835 - DNA, 25 bp, Homo sapien
tagcctatagttctcccaggtctcc

SEQ ID NO: 97836 - DNA, 25 bp, Homo sapien
gcaaatagcctatagttctcccagg

SEQ ID NO: 97837 - DNA, 25 bp, Homo sapien
ttagagctacggtgatgacacaaat

SEQ ID NO: 97838 - DNA, 25 bp, Homo sapien
gatgacacaaatgtcatatagataa

SEQ ID NO: 97839 - DNA, 25 bp, Homo sapien
cctgaatatggattagagctacggt

SEQ ID NO: 97840 - DNA, 25 bp, Homo sapien
aaaattcaacacatcgttgtttatt

SEQ ID NO: 97841 - DNA, 25 bp, Homo sapien
ttcctcctagagcattagtgctccc

SEQ ID NO: 97842 - DNA, 25 bp, Homo sapien
gatgtgcgtttcctttcaaaacttc

SEQ ID NO: 97843 - DNA, 25 bp, Homo sapien
agagcattagtgctccctgaagcag

SEQ ID NO: 97844 - DNA, 25 bp, Homo sapien
tatgatgtgcgtttcctttcaaaac

SEQ ID NO: 97845 - DNA, 25 bp, Homo sapien
agaaagacagaggtatcacacagca

SEQ ID NO: 97846 - DNA, 25 bp, Homo sapien
gaaagacagaggtatcacacagcat

SEQ ID NO: 97847 - DNA, 25 bp, Homo sapien
gggattcacgacttggcagaaagac

SEQ ID NO: 97848 - DNA, 25 bp, Homo sapien
aaccacaagggattcacgacttggc

SEQ ID NO: 97849 - DNA, 25 bp, Homo sapien
caggatgaagtagcccagattccct

SEQ ID NO: 97850 - DNA, 25 bp, Homo sapien
agtagcccagattcccttatgctgc

SEQ ID NO: 97851 - DNA, 25 bp, Homo sapien
caccccaggatgaagtagcccagat

SEQ ID NO: 97852 - DNA, 25 bp, Homo sapien
tgcccacttgggacccttgatgttt

SEQ ID NO: 97853 - DNA, 25 bp, Homo sapien
catctgttgcaatactggagtcgtc

SEQ ID NO: 97854 - DNA, 25 bp, Homo sapien
catgacatgcgcagggctttaccaa

SEQ ID NO: 97855 - DNA, 25 bp, Homo sapien
cattgtggaggctgtacacctggta

SEQ ID NO: 97856 - DNA, 25 bp, Homo sapien
gacgcttcctgaacgatgcattcga

SEQ ID NO: 97857 - DNA, 25 bp, Homo sapien
gatgtctaacatcttgggaaacaaa

SEQ ID NO: 97858 - DNA, 25 bp, Homo sapien
gccagcagtatttgaatcatctaaa

SEQ ID NO: 97859 - DNA, 25 bp, Homo sapien
gaaagacttctcagtgggagtagag

SEQ ID NO: 97860 - DNA, 25 bp, Homo sapien
cacttacaatgctcactctctgaaa

SEQ ID NO: 97861 - DNA, 25 bp, Homo sapien
taggagcagccacctcgttttcagg

SEQ ID NO: 97862 - DNA, 25 bp, Homo sapien
cagccatactcggtgcatcatcaga

SEQ ID NO: 97863 - DNA, 25 bp, Homo sapien
gatgggccggtgagaatgctccaac

SEQ ID NO: 97864 - DNA, 25 bp, Homo sapien
tcatctaagcccgagtcagtggtgt

SEQ ID NO: 97865 - DNA, 25 bp, Homo sapien
tttggaggagcactagagaaacaag

SEQ ID NO: 97866 - DNA, 25 bp, Homo sapien
tgcaatgcggccttgtctgttggct

SEQ ID NO: 97867 - DNA, 25 bp, Homo sapien
gaaagagccactgtatctgcatcat

SEQ ID NO: 97868 - DNA, 25 bp, Homo sapien
tggcattgcagcttcgctgggaact

SEQ ID NO: 97869 - DNA, 25 bp, Homo sapien
gtgagatgattttcatgcttgggga

SEQ ID NO: 97870 - DNA, 25 bp, Homo sapien
cactgatgccaagtgatgcggcaaa

SEQ ID NO: 97871 - DNA, 25 bp, Homo sapien
tacatacagcattgtggaaacgaga

SEQ ID NO: 97872 - DNA, 25 bp, Homo sapien
tatgcatgatatcgaacaattccac

SEQ ID NO: 97873 - DNA, 25 bp, Homo sapien
tgtacaatgattccacagactggga

SEQ ID NO: 97874 - DNA, 25 bp, Homo sapien
tgtaataaacggcagtgacaaacgt

SEQ ID NO: 97875 - DNA, 25 bp, Homo sapien
agtcaatgtaataaacggcagtgac

SEQ ID NO: 97876 - DNA, 25 bp, Homo sapien
tgacaaacgtgatggaaccagaggc

SEQ ID NO: 97877 - DNA, 25 bp, Homo sapien
cggcagtgacaaacgtgatggaacc

SEQ ID NO: 97878 - DNA, 25 bp, Homo sapien
taatggactaccagttggtgaactg

SEQ ID NO: 97879 - DNA, 25 bp, Homo sapien
gacgatcacctaaagagaaccagcg

SEQ ID NO: 97880 - DNA, 25 bp, Homo sapien
acaggaatccatgggagaacaagca

SEQ ID NO: 97881 - DNA, 25 bp, Homo sapien
ttgctgaacttcaaagacgatcacc

SEQ ID NO: 97882 - DNA, 25 bp, Homo sapien
tctagtttaggtaatgttaagcctc

SEQ ID NO: 97883 - DNA, 25 bp, Homo sapien
tatgaatatgtttggaagctgctac

SEQ ID NO: 97884 - DNA, 25 bp, Homo sapien
gctgttccaagatctttatagtgac

SEQ ID NO: 97885 - DNA, 25 bp, Homo sapien
actgtgtcaggcacttaagtaggtg

SEQ ID NO: 97886 - DNA, 25 bp, Homo sapien
caactagatgtctggctaaaaccgc

SEQ ID NO: 97887 - DNA, 25 bp, Homo sapien
tccataagacagaacagggtagcgg

SEQ ID NO: 97888 - DNA, 25 bp, Homo sapien
tctaaatgatcttggcgtggcacta

SEQ ID NO: 97889 - DNA, 25 bp, Homo sapien
caatactgcacggtcttccatgagc

SEQ ID NO: 97890 - DNA, 25 bp, Homo sapien
agatgacttaggcactggactgggc

SEQ ID NO: 97891 - DNA, 25 bp, Homo sapien
tatagtgcctcacataggtagccat

SEQ ID NO: 97892 - DNA, 25 bp, Homo sapien
taaacctttggagacagataccatg

SEQ ID NO: 97893 - DNA, 25 bp, Homo sapien
aataaataagcggagggagtgccct

SEQ ID NO: 97894 - DNA, 25 bp, Homo sapien
caagtatctttgttctactctcaac

SEQ ID NO: 97895 - DNA, 25 bp, Homo sapien
aaatgaacctgagggatgagtacca

SEQ ID NO: 97896 - DNA, 25 bp, Homo sapien
atattaacaataaatgaacctgagg

SEQ ID NO: 97897 - DNA, 25 bp, Homo sapien
ggatgagtaccaagtatctttgttc

SEQ ID NO: 97898 - DNA, 25 bp, Homo sapien
cagaatggtcttacggcattggcca

SEQ ID NO: 97899 - DNA, 25 bp, Homo sapien
tgtggcaactctcaaactaaagggc

SEQ ID NO: 97900 - DNA, 25 bp, Homo sapien
aacacagtccaagcagtctgggcag

SEQ ID NO: 97901 - DNA, 25 bp, Homo sapien
gaaaccatactattgtgggcctgac

SEQ ID NO: 97902 - DNA, 25 bp, Homo sapien
tcatttcaagcaagagagtgcaagc

SEQ ID NO: 97903 - DNA, 25 bp, Homo sapien
gctcttaaatatggtgtcacaaggg

SEQ ID NO: 97904 - DNA, 25 bp, Homo sapien
ccaggtttgggagcacctcatttca

SEQ ID NO: 97905 - DNA, 25 bp, Homo sapien
tgcaagcctcaatagcagtggctct

SEQ ID NO: 97906 - DNA, 25 bp, Homo sapien
ctggggcagcacataaatgcacgat

SEQ ID NO: 97907 - DNA, 25 bp, Homo sapien
tgcacgatggggttgattctcttgt

SEQ ID NO: 97908 - DNA, 25 bp, Homo sapien
gggcagcacataaatgcacgatggg

SEQ ID NO: 97909 - DNA, 25 bp, Homo sapien
atgcacgatggggttgattctcttg

SEQ ID NO: 97910 - DNA, 25 bp, Homo sapien
gaagctcaagttctttgtgcctgtg

SEQ ID NO: 97911 - DNA, 25 bp, Homo sapien
caccaggaagctcaagttctttgtg

SEQ ID NO: 97912 - DNA, 25 bp, Homo sapien
caggaagctcaagttctttgtgcct

SEQ ID NO: 97913 - DNA, 25 bp, Homo sapien
caagttctttgtgcctgtggattac

SEQ ID NO: 97914 - DNA, 25 bp, Homo sapien
aggactggctatttttccaacatca

SEQ ID NO: 97915 - DNA, 25 bp, Homo sapien
aagtcatcaggactggctatttttc

SEQ ID NO: 97916 - DNA, 25 bp, Homo sapien
catcaggactggctatttttccaac

SEQ ID NO: 97917 - DNA, 25 bp, Homo sapien
gtcatcaggactggctatttttcca

SEQ ID NO: 97918 - DNA, 25 bp, Homo sapien
tggtgatcctagtcaaacgtcccca

SEQ ID NO: 97919 - DNA, 25 bp, Homo sapien
gacaggttacaaggtatagacacaa

SEQ ID NO: 97920 - DNA, 25 bp, Homo sapien
aacgttgatgaacatgacaggttac

SEQ ID NO: 97921 - DNA, 25 bp, Homo sapien
ggctctgtagttaacagtgggcaaa

SEQ ID NO: 97922 - DNA, 25 bp, Homo sapien
caaactaattctataaaccttagag

SEQ ID NO: 97923 - DNA, 25 bp, Homo sapien
ttttacgtctgtaatggcccatttg

SEQ ID NO: 97924 - DNA, 25 bp, Homo sapien
cagtggttagggaatattgggattt

SEQ ID NO: 97925 - DNA, 25 bp, Homo sapien
gtaacttgatcaactaacggaacca

SEQ ID NO: 97926 - DNA, 25 bp, Homo sapien
tttctctcaacagtgcgtgcacact

SEQ ID NO: 97927 - DNA, 25 bp, Homo sapien
gccatccaaaactttctctcaacag

SEQ ID NO: 97928 - DNA, 25 bp, Homo sapien
aacagtgcgtgcacactgcactggc

SEQ ID NO: 97929 - DNA, 25 bp, Homo sapien
gctgccatccaaaactttctctcaa

SEQ ID NO: 97930 - DNA, 25 bp, Homo sapien
taaatgacccctatcaatgcaaaca

SEQ ID NO: 97931 - DNA, 25 bp, Homo sapien
agccatttcaatggtcaactgaggg

SEQ ID NO: 97932 - DNA, 25 bp, Homo sapien
aacagctgaagaaacgttgtcggcg

SEQ ID NO: 97933 - DNA, 25 bp, Homo sapien
agcatctgtgattgaggcgagtgtt

SEQ ID NO: 97934 - DNA, 25 bp, Homo sapien
gataggaacgtagtaacataggagg

SEQ ID NO: 97935 - DNA, 25 bp, Homo sapien
taacatgcagactggcatcccggtg

SEQ ID NO: 97936 - DNA, 25 bp, Homo sapien
cataggaggtatggaccaggaaggg

SEQ ID NO: 97937 - DNA, 25 bp, Homo sapien
gaagggttgaagtagacgacgataa

SEQ ID NO: 97938 - DNA, 25 bp, Homo sapien
gggaaactcttctcctggggtggca

SEQ ID NO: 97939 - DNA, 25 bp, Homo sapien
tttgctttgtcttatgttgcttgtt

SEQ ID NO: 97940 - DNA, 25 bp, Homo sapien
gctttgtcttatgttgcttgttggc

SEQ ID NO: 97941 - DNA, 25 bp, Homo sapien
ggaaactcttctcctggggtggcag

SEQ ID NO: 97942 - DNA, 25 bp, Homo sapien
tctgttatcaagctgtcctcgtgtt

SEQ ID NO: 97943 - DNA, 25 bp, Homo sapien
tgctggccgcgggtcttcctctcga

SEQ ID NO: 97944 - DNA, 25 bp, Homo sapien
cgcgggtcttcctctcgaatgcgta

SEQ ID NO: 97945 - DNA, 25 bp, Homo sapien
ttcctctcgaatgcgtatcatacac

SEQ ID NO: 97946 - DNA, 25 bp, Homo sapien
tgcaactgatattcacttcccttct

SEQ ID NO: 97947 - DNA, 25 bp, Homo sapien
gttgttcttccgaaggcagtccttc

SEQ ID NO: 97948 - DNA, 25 bp, Homo sapien
gaaggcagtccttcttgcaactgat

SEQ ID NO: 97949 - DNA, 25 bp, Homo sapien
cagtccttcttgcaactgatattca

SEQ ID NO: 97950 - DNA, 25 bp, Homo sapien
tctgaactcccctaacccaagtcag

SEQ ID NO: 97951 - DNA, 25 bp, Homo sapien
cccaagtcagtttccggaggcgcct

SEQ ID NO: 97952 - DNA, 25 bp, Homo sapien
cctgatggctctcgggaaacagcca

SEQ ID NO: 97953 - DNA, 25 bp, Homo sapien
gcacaaagacgagccttcgccctgg

SEQ ID NO: 97954 - DNA, 25 bp, Homo sapien
cccctttgctggtgcggctggtgct

SEQ ID NO: 97955 - DNA, 25 bp, Homo sapien
acccaagttgggatcggcgaagcgt

SEQ ID NO: 97956 - DNA, 25 bp, Homo sapien
agcctccttcgggatgcagggcttc

SEQ ID NO: 97957 - DNA, 25 bp, Homo sapien
tctttcttccggctggcgagcctgg

SEQ ID NO: 97958 - DNA, 25 bp, Homo sapien
ggcagtgggagttgatcgtttcccc

SEQ ID NO: 97959 - DNA, 25 bp, Homo sapien
cattccaactcgactagtgggtggg

SEQ ID NO: 97960 - DNA, 25 bp, Homo sapien
gggtgaggaggtatgcctgcggttt

SEQ ID NO: 97961 - DNA, 25 bp, Homo sapien
tgagcctttttaagtgacgacttgc

SEQ ID NO: 97962 - DNA, 25 bp, Homo sapien
tgcatttatttcctcgcgtctctca

SEQ ID NO: 97963 - DNA, 25 bp, Homo sapien
ttcctcgcgtctctcagttacttct

SEQ ID NO: 97964 - DNA, 25 bp, Homo sapien
catttatttcctcgcgtctctcagt

SEQ ID NO: 97965 - DNA, 25 bp, Homo sapien
tatttcctcgcgtctctcagttact

SEQ ID NO: 97966 - DNA, 25 bp, Homo sapien
tatacgcccctttcgaccgatgaaa

SEQ ID NO: 97967 - DNA, 25 bp, Homo sapien
tctatacgcccctttcgaccgatga

SEQ ID NO: 97968 - DNA, 25 bp, Homo sapien
cgaccgatgaaacgaataaattagc

SEQ ID NO: 97969 - DNA, 25 bp, Homo sapien
cgaataaattagcagccaccactga

SEQ ID NO: 97970 - DNA, 25 bp, Homo sapien
tctcactggctgctccggctgcgcc

SEQ ID NO: 97971 - DNA, 25 bp, Homo sapien
tcactggctgctccggctgcgccgc

SEQ ID NO: 97972 - DNA, 25 bp, Homo sapien
tccaggatgttgctctcactggctg

SEQ ID NO: 97973 - DNA, 25 bp, Homo sapien
ctttccaggatgttgctctcactgg

SEQ ID NO: 97974 - DNA, 25 bp, Homo sapien
cgggcgcggcggctctgggctctgg

SEQ ID NO: 97975 - DNA, 25 bp, Homo sapien
ctgggctctggctggcgggggctcg

SEQ ID NO: 97976 - DNA, 25 bp, Homo sapien
cggcccccgggcgcggcggctctgg

SEQ ID NO: 97977 - DNA, 25 bp, Homo sapien
tgggctctggctggcgggggctcgg

SEQ ID NO: 97978 - DNA, 25 bp, Homo sapien
cgctgaaatccggaaagattcggat

SEQ ID NO: 97979 - DNA, 25 bp, Homo sapien
gcacgctgaaatccggaaagattcg

SEQ ID NO: 97980 - DNA, 25 bp, Homo sapien
tgaaatccggaaagattcggatcat

SEQ ID NO: 97981 - DNA, 25 bp, Homo sapien
ctgcacgctgaaatccggaaagatt

SEQ ID NO: 97982 - DNA, 25 bp, Homo sapien
taggaggtgatgccctggacgttct

SEQ ID NO: 97983 - DNA, 25 bp, Homo sapien
ggtgatgccctggacgttctgcggg

SEQ ID NO: 97984 - DNA, 25 bp, Homo sapien
ggaggtgatgccctggacgttctgc

SEQ ID NO: 97985 - DNA, 25 bp, Homo sapien
gcggcgccggccctccccatgcccg

SEQ ID NO: 97986 - DNA, 25 bp, Homo sapien
ggatgatttcacttcgccagcgcac

SEQ ID NO: 97987 - DNA, 25 bp, Homo sapien
ttaacagcgccgaagagactcggat

SEQ ID NO: 97988 - DNA, 25 bp, Homo sapien
tgcaaaagcaccttgtgcggcgtct

SEQ ID NO: 97989 - DNA, 25 bp, Homo sapien
tccggctgaggcattgagaaaattc

SEQ ID NO: 97990 - DNA, 25 bp, Homo sapien
tctcttactttttgcctctctcccc

SEQ ID NO: 97991 - DNA, 25 bp, Homo sapien
ctctcttactttttgcctctctccc

SEQ ID NO: 97992 - DNA, 25 bp, Homo sapien
tttcctctcttactttttgcctctc

SEQ ID NO: 97993 - DNA, 25 bp, Homo sapien
tcctctcttactttttgcctctctc

SEQ ID NO: 97994 - DNA, 25 bp, Homo sapien
tctcgcctggaaggatcctgctgaa

SEQ ID NO: 97995 - DNA, 25 bp, Homo sapien
cgttctcgcctggaaggatcctgct

SEQ ID NO: 97996 - DNA, 25 bp, Homo sapien
ctggaaggatcctgctgaaagctgg

SEQ ID NO: 97997 - DNA, 25 bp, Homo sapien
cgcctggaaggatcctgctgaaagc

SEQ ID NO: 97998 - DNA, 25 bp, Homo sapien
cagaccaagtgttatttagttcagc

SEQ ID NO: 97999 - DNA, 25 bp, Homo sapien
ttcagctctcaagtggagcagaata

SEQ ID NO: 98000 - DNA, 25 bp, Homo sapien
gcagaataacaaatcgcacactttg

SEQ ID NO: 98001 - DNA, 25 bp, Homo sapien
gacagcatccaagctgaacaagaag

SEQ ID NO: 98002 - DNA, 25 bp, Homo sapien
gacccttggccttgtgatatgaagg

SEQ ID NO: 98003 - DNA, 25 bp, Homo sapien
cttggccttgtgatatgaaggccat

SEQ ID NO: 98004 - DNA, 25 bp, Homo sapien
cccttggccttgtgatatgaaggcc

SEQ ID NO: 98005 - DNA, 25 bp, Homo sapien
acccttggccttgtgatatgaaggc

SEQ ID NO: 98006 - DNA, 25 bp, Homo sapien
catttatgtatttattgtggcccat

SEQ ID NO: 98007 - DNA, 25 bp, Homo sapien
gctagcatccttttccgcagtgtta

SEQ ID NO: 98008 - DNA, 25 bp, Homo sapien
gctaaagtgcttctgaatgaagttt

SEQ ID NO: 98009 - DNA, 25 bp, Homo sapien
gccaccattgaaatactgccatctt

SEQ ID NO: 98010 - DNA, 25 bp, Homo sapien
gaatgaagtttagagctagcatcct

SEQ ID NO: 98011 - DNA, 25 bp, Homo sapien
tctgcaggttatagtagcagctgga

SEQ ID NO: 98012 - DNA, 25 bp, Homo sapien
gtttctaatgtcttgctgtgcattc

SEQ ID NO: 98013 - DNA, 25 bp, Homo sapien
ctggaagaggtcatatatctcttgt

SEQ ID NO: 98014 - DNA, 25 bp, Homo sapien
tcttgtgagcatcccaaaaaggctc

SEQ ID NO: 98015 - DNA, 25 bp, Homo sapien
taggatgcaatatatctactctaca

SEQ ID NO: 98016 - DNA, 25 bp, Homo sapien
taaactgtaaagttcttagattcaa

SEQ ID NO: 98017 - DNA, 25 bp, Homo sapien
gattcaaacaggattaaaccaacca

SEQ ID NO: 98018 - DNA, 25 bp, Homo sapien
gctacatactacataatatggagtg

SEQ ID NO: 98019 - DNA, 25 bp, Homo sapien
tggtttatctgtccagaggcttgag

SEQ ID NO: 98020 - DNA, 25 bp, Homo sapien
acaattaaccctcccttcacagtga

SEQ ID NO: 98021 - DNA, 25 bp, Homo sapien
ttatctgtccagaggcttgagaagc

SEQ ID NO: 98022 - DNA, 25 bp, Homo sapien
aagtatttcattactggtttatctg

SEQ ID NO: 98023 - DNA, 25 bp, Homo sapien
tcatataaagcatagggctggactt

SEQ ID NO: 98024 - DNA, 25 bp, Homo sapien
cctaacctgccagtaaaagatgggt

SEQ ID NO: 98025 - DNA, 25 bp, Homo sapien
gatatatgatactgccctaacctgc

SEQ ID NO: 98026 - DNA, 25 bp, Homo sapien
aagagagttaatgcagtacacagtt

SEQ ID NO: 98027 - DNA, 25 bp, Homo sapien
tgagatgttcttaacaagagtctta

SEQ ID NO: 98028 - DNA, 25 bp, Homo sapien
tttgggcaaactctggaacagtctt

SEQ ID NO: 98029 - DNA, 25 bp, Homo sapien
cagaactacccactgtgttgagatg

SEQ ID NO: 98030 - DNA, 25 bp, Homo sapien
ggaacagtctttacagtattatcat

SEQ ID NO: 98031 - DNA, 25 bp, Homo sapien
taggtactatatacacaaggccatg

SEQ ID NO: 98032 - DNA, 25 bp, Homo sapien
ttgtgccaacagaggagaaatccct

SEQ ID NO: 98033 - DNA, 25 bp, Homo sapien
gagaaagtaagctatgtccagagta

SEQ ID NO: 98034 - DNA, 25 bp, Homo sapien
tccctggagctgttaatgatttcat

SEQ ID NO: 98035 - DNA, 25 bp, Homo sapien
tccctgcctcagcctttcgaacagc

SEQ ID NO: 98036 - DNA, 25 bp, Homo sapien
tcagcctttcgaacagctgggacta

SEQ ID NO: 98037 - DNA, 25 bp, Homo sapien
caattccctgcctcagcctttcgaa

SEQ ID NO: 98038 - DNA, 25 bp, Homo sapien
aattccctgcctcagcctttcgaac

SEQ ID NO: 98039 - DNA, 25 bp, Homo sapien
taacttcaaagtcgatcatggcact

SEQ ID NO: 98040 - DNA, 25 bp, Homo sapien
gtgtctcagacctcccaaatcatgg

SEQ ID NO: 98041 - DNA, 25 bp, Homo sapien
tgtggaccaccacgtcagtaagtac

SEQ ID NO: 98042 - DNA, 25 bp, Homo sapien
tacgtgcagggattgcgatctaccc

SEQ ID NO: 98043 - DNA, 25 bp, Homo sapien
tataaagtggctataacacctaccc

SEQ ID NO: 98044 - DNA, 25 bp, Homo sapien
gggctgcctatttacaacagatgta

SEQ ID NO: 98045 - DNA, 25 bp, Homo sapien
taatcaggaggttgagagttccgca

SEQ ID NO: 98046 - DNA, 25 bp, Homo sapien
gagacatagactgcaatcctggcta

SEQ ID NO: 98047 - DNA, 25 bp, Homo sapien
ccagaaatactgactagaagaacct

SEQ ID NO: 98048 - DNA, 25 bp, Homo sapien
ggtaataacggccttatgtccagaa

SEQ ID NO: 98049 - DNA, 25 bp, Homo sapien
catggcatctttggatcctatagac

SEQ ID NO: 98050 - DNA, 25 bp, Homo sapien
tgtgtgcgtgtcagagacaaaactc

SEQ ID NO: 98051 - DNA, 25 bp, Homo sapien
tagctatagtttcatgaaagacgtt

SEQ ID NO: 98052 - DNA, 25 bp, Homo sapien
gaaagacgttttcatccctgactgg

SEQ ID NO: 98053 - DNA, 25 bp, Homo sapien
tgtgtcacagggaagttagctatag

SEQ ID NO: 98054 - DNA, 25 bp, Homo sapien
aatactctctgctctatggtaatgt

SEQ ID NO: 98055 - DNA, 25 bp, Homo sapien
ccaggtatcccttgagaatcttcat

SEQ ID NO: 98056 - DNA, 25 bp, Homo sapien
tagtcttaggggacattacccttca

SEQ ID NO: 98057 - DNA, 25 bp, Homo sapien
cattacccttcatgtccagattaca

SEQ ID NO: 98058 - DNA, 25 bp, Homo sapien
agggccaggtatcccttgagaatct

SEQ ID NO: 98059 - DNA, 25 bp, Homo sapien
cccaaagggaggtgcaatcatattt

SEQ ID NO: 98060 - DNA, 25 bp, Homo sapien
gaatgccttactgtgaggcccaaag

SEQ ID NO: 98061 - DNA, 25 bp, Homo sapien
tcaaattaccaaggcaacgaatgcc

SEQ ID NO: 98062 - DNA, 25 bp, Homo sapien
ttcacccgagagagacggatctgcc

SEQ ID NO: 98063 - DNA, 25 bp, Homo sapien
catcaggccatcacagtttgattcc

SEQ ID NO: 98064 - DNA, 25 bp, Homo sapien
tggcagcatcaggccatcacagttt

SEQ ID NO: 98065 - DNA, 25 bp, Homo sapien
cagcatcaggccatcacagtttgat

SEQ ID NO: 98066 - DNA, 25 bp, Homo sapien
gcagcatcaggccatcacagtttga

SEQ ID NO: 98067 - DNA, 25 bp, Homo sapien
tctagacactacctgtacctgggtg

SEQ ID NO: 98068 - DNA, 25 bp, Homo sapien
caggctctaggacaagtgtggtttc

SEQ ID NO: 98069 - DNA, 25 bp, Homo sapien
gaatcagccttagttgctcatgccc

SEQ ID NO: 98070 - DNA, 25 bp, Homo sapien
gaaaatatggtcactatactccctg

SEQ ID NO: 98071 - DNA, 25 bp, Homo sapien
ggcatcctgaaggaacactgctaac

SEQ ID NO: 98072 - DNA, 25 bp, Homo sapien
ggagataaggtcactatcaagagtg

SEQ ID NO: 98073 - DNA, 25 bp, Homo sapien
atcattaggagataaggtcactatc

SEQ ID NO: 98074 - DNA, 25 bp, Homo sapien
gaagaggcatcctgaaggaacactg

SEQ ID NO: 98075 - DNA, 25 bp, Homo sapien
ttttctttgagagtcctgattagga

SEQ ID NO: 98076 - DNA, 25 bp, Homo sapien
ctttgagagtcctgattaggaatgt

SEQ ID NO: 98077 - DNA, 25 bp, Homo sapien
tctttgagagtcctgattaggaatg

SEQ ID NO: 98078 - DNA, 25 bp, Homo sapien
tcttttctttgagagtcctgattag

SEQ ID NO: 98079 - DNA, 25 bp, Homo sapien
atgttggtttataatttcccgctgg

SEQ ID NO: 98080 - DNA, 25 bp, Homo sapien
gatgttggtttataatttcccgctg

SEQ ID NO: 98081 - DNA, 25 bp, Homo sapien
catgtggaatcaagttcctatgttc

SEQ ID NO: 98082 - DNA, 25 bp, Homo sapien
tgcagctctggtgaggcagaggtac

SEQ ID NO: 98083 - DNA, 25 bp, Homo sapien
gctgtgcagctctggtgaggcagag

SEQ ID NO: 98084 - DNA, 25 bp, Homo sapien
tgtgcagctctggtgaggcagaggt

SEQ ID NO: 98085 - DNA, 25 bp, Homo sapien
ctgctgtgcagctctggtgaggcag

SEQ ID NO: 98086 - DNA, 25 bp, Homo sapien
taaatacattgatcagcagaactgg

SEQ ID NO: 98087 - DNA, 25 bp, Homo sapien
tgtgaatactccttactgctgggca

SEQ ID NO: 98088 - DNA, 25 bp, Homo sapien
tggtcctaacaacaagccacccatg

SEQ ID NO: 98089 - DNA, 25 bp, Homo sapien
tgccagtatctggagtgtaccgagt

SEQ ID NO: 98090 - DNA, 25 bp, Homo sapien
tatgaaacgcctggaatgtgcaaat

SEQ ID NO: 98091 - DNA, 25 bp, Homo sapien
ccaattaagcaatgggttaggtcgt

SEQ ID NO: 98092 - DNA, 25 bp, Homo sapien
tagaatctctacacttacttgaggt

SEQ ID NO: 98093 - DNA, 25 bp, Homo sapien
gatgaatttgtagcgattgaaggca

SEQ ID NO: 98094 - DNA, 25 bp, Homo sapien
cagtaatttgctcacggtcactcag

SEQ ID NO: 98095 - DNA, 25 bp, Homo sapien
tcctggctggcatctaatgactact

SEQ ID NO: 98096 - DNA, 25 bp, Homo sapien
tcactcagctaatgacagggccagg

SEQ ID NO: 98097 - DNA, 25 bp, Homo sapien
aatgaggttagcctggcatcctggc

SEQ ID NO: 98098 - DNA, 25 bp, Homo sapien
tgcatacaaacgtcaaagaaatgtc

SEQ ID NO: 98099 - DNA, 25 bp, Homo sapien
tactgtagccagtaatcttaagaga

SEQ ID NO: 98100 - DNA, 25 bp, Homo sapien
tgctctttaaacacgatgatttccc

SEQ ID NO: 98101 - DNA, 25 bp, Homo sapien
tgaataaccttatgaagtccaagag

SEQ ID NO: 98102 - DNA, 25 bp, Homo sapien
catactatgaacatctaagggccac

SEQ ID NO: 98103 - DNA, 25 bp, Homo sapien
taaggccaggctacggatgatggat

SEQ ID NO: 98104 - DNA, 25 bp, Homo sapien
tgtatgcctatgtgagacccactgg

SEQ ID NO: 98105 - DNA, 25 bp, Homo sapien
ccctacattagtggtcgacatacag

SEQ ID NO: 98106 - DNA, 25 bp, Homo sapien
tatctgagagcagctattagtgcca

SEQ ID NO: 98107 - DNA, 25 bp, Homo sapien
aggcatgaggcactaagtttacccc

SEQ ID NO: 98108 - DNA, 25 bp, Homo sapien
tatttcacacgtggaggcaaagacc

SEQ ID NO: 98109 - DNA, 25 bp, Homo sapien
agtgtaacctacatgatggcccaag

SEQ ID NO: 98110 - DNA, 25 bp, Homo sapien
tctataaaatttaagactgaattca

SEQ ID NO: 98111 - DNA, 25 bp, Homo sapien
tataaaatttaagactgaattcaat

SEQ ID NO: 98112 - DNA, 25 bp, Homo sapien
aaaatttaagactgaattcaatcat

SEQ ID NO: 98113 - DNA, 25 bp, Homo sapien
agttctataaaatttaagactgaat

SEQ ID NO: 98114 - DNA, 25 bp, Homo sapien
taagcagctgcttgcatatgagtat

SEQ ID NO: 98115 - DNA, 25 bp, Homo sapien
tattttcgcctgttttgacattgag

SEQ ID NO: 98116 - DNA, 25 bp, Homo sapien
tacaacactgaatgactgccagaat

SEQ ID NO: 98117 - DNA, 25 bp, Homo sapien
gtctgatctgggtgaatagctcata

SEQ ID NO: 98118 - DNA, 25 bp, Homo sapien
tatacagtaggattcatttctccaa

SEQ ID NO: 98119 - DNA, 25 bp, Homo sapien
taatttcgagaagtttggcaaagtc

SEQ ID NO: 98120 - DNA, 25 bp, Homo sapien
tggcaaagtcccaaccacctatctt

SEQ ID NO: 98121 - DNA, 25 bp, Homo sapien
tgctcagccaagaatctttaatata

SEQ ID NO: 98122 - DNA, 25 bp, Homo sapien
ggcagacccagactgttcaaagcaa

SEQ ID NO: 98123 - DNA, 25 bp, Homo sapien
gagggcccactgttgctgcatgtga

SEQ ID NO: 98124 - DNA, 25 bp, Homo sapien
tgcaatggaggtcacgaaacaggtc

SEQ ID NO: 98125 - DNA, 25 bp, Homo sapien
gatagtgtatcgatttcacaccagg

SEQ ID NO: 98126 - DNA, 25 bp, Homo sapien
caaggtatccgttctctgttttctg

SEQ ID NO: 98127 - DNA, 25 bp, Homo sapien
ccctgaatgacagtgactagtattt

SEQ ID NO: 98128 - DNA, 25 bp, Homo sapien
tccctgaatgacagtgactagtatt

SEQ ID NO: 98129 - DNA, 25 bp, Homo sapien
tttcttcaccaaggtatccgttctc

SEQ ID NO: 98130 - DNA, 25 bp, Homo sapien
gatggactcatcatacagcttgagg

SEQ ID NO: 98131 - DNA, 25 bp, Homo sapien
tataatgtctaatccctaagccagt

SEQ ID NO: 98132 - DNA, 25 bp, Homo sapien
tgtgtaccatagaggaaactgtcag

SEQ ID NO: 98133 - DNA, 25 bp, Homo sapien
gagcatgtgatagccccagtgacag

SEQ ID NO: 98134 - DNA, 25 bp, Homo sapien
acagtagattccgtcatatctgtag

SEQ ID NO: 98135 - DNA, 25 bp, Homo sapien
gtagattccgtcatatctgtagatt

SEQ ID NO: 98136 - DNA, 25 bp, Homo sapien
ttctgattggttgggcagaggatgc

SEQ ID NO: 98137 - DNA, 25 bp, Homo sapien
ttcacagtagattccgtcatatctg

SEQ ID NO: 98138 - DNA, 25 bp, Homo sapien
aaagaaggtttcaatacaaggatat

SEQ ID NO: 98139 - DNA, 25 bp, Homo sapien
cactgatgtacgagccagaaggaag

SEQ ID NO: 98140 - DNA, 25 bp, Homo sapien
tttttgaatagctggcaaccacaag

SEQ ID NO: 98141 - DNA, 25 bp, Homo sapien
tggcaaccacaagcactgatgtacg

SEQ ID NO: 98142 - DNA, 25 bp, Homo sapien
caagcccttgagatgattcctacag

SEQ ID NO: 98143 - DNA, 25 bp, Homo sapien
tcctacagctagcagggaagcctta

SEQ ID NO: 98144 - DNA, 25 bp, Homo sapien
tactatgcgccaaattcctggtggc

SEQ ID NO: 98145 - DNA, 25 bp, Homo sapien
cccatccgggctcctaattgacaaa

SEQ ID NO: 98146 - DNA, 25 bp, Homo sapien
gcacgttccctccttcttcactcat

SEQ ID NO: 98147 - DNA, 25 bp, Homo sapien
tggcacgttccctccttcttcactc

SEQ ID NO: 98148 - DNA, 25 bp, Homo sapien
tctcttccctggaacttgttaattc

SEQ ID NO: 98149 - DNA, 25 bp, Homo sapien
actggcacgttccctccttcttcac

SEQ ID NO: 98150 - DNA, 25 bp, Homo sapien
agcagaatccctgacaaggcgcctg

SEQ ID NO: 98151 - DNA, 25 bp, Homo sapien
gataacacatgaaagtggttagcac

SEQ ID NO: 98152 - DNA, 25 bp, Homo sapien
ttcgccttaattgggataacacatg

SEQ ID NO: 98153 - DNA, 25 bp, Homo sapien
ttcagcataggtgaccatcctcccc

SEQ ID NO: 98154 - DNA, 25 bp, Homo sapien
tttactgatcctaacacaactggca

SEQ ID NO: 98155 - DNA, 25 bp, Homo sapien
gaagcagttcttgctacaaagttca

SEQ ID NO: 98156 - DNA, 25 bp, Homo sapien
tataatagcaatcagtcaatcaggt

SEQ ID NO: 98157 - DNA, 25 bp, Homo sapien
taagttgttctattgtgcaggtgag

SEQ ID NO: 98158 - DNA, 25 bp, Homo sapien
gggttccctcccaagctcagatagc

SEQ ID NO: 98159 - DNA, 25 bp, Homo sapien
gggctccctgcactattaaaaatgg

SEQ ID NO: 98160 - DNA, 25 bp, Homo sapien
gaagctatggaacactcccacagca

SEQ ID NO: 98161 - DNA, 25 bp, Homo sapien
cacctccagggtaattcttctcgaa

SEQ ID NO: 98162 - DNA, 25 bp, Homo sapien
caaaaggctcgttgtggtgctacac

SEQ ID NO: 98163 - DNA, 25 bp, Homo sapien
tttctagaggtcacatgcacactgc

SEQ ID NO: 98164 - DNA, 25 bp, Homo sapien
gagatttaaccaccgctagcaatga

SEQ ID NO: 98165 - DNA, 25 bp, Homo sapien
tgttcaacagcgtgcctacaaaagg

SEQ ID NO: 98166 - DNA, 25 bp, Homo sapien
tgatctgtgggtaggacaattacaa

SEQ ID NO: 98167 - DNA, 25 bp, Homo sapien
caaggatagccaccaaattgttaac

SEQ ID NO: 98168 - DNA, 25 bp, Homo sapien
caggtgtgtatggattcacaagaaa

SEQ ID NO: 98169 - DNA, 25 bp, Homo sapien
caaaaagagcttttgcaagggaaga

SEQ ID NO: 98170 - DNA, 25 bp, Homo sapien
cactaatgagtatatcactagttct

SEQ ID NO: 98171 - DNA, 25 bp, Homo sapien
cctgaatttcaacaccaggaaaaat

SEQ ID NO: 98172 - DNA, 25 bp, Homo sapien
tatggaaactgaccatgtagcttcc

SEQ ID NO: 98173 - DNA, 25 bp, Homo sapien
cactagttctcgcttgaatttaaat

SEQ ID NO: 98174 - DNA, 25 bp, Homo sapien
tcatcaatttcacggccacaagacc

SEQ ID NO: 98175 - DNA, 25 bp, Homo sapien
atcaatttcacggccacaagaccac

SEQ ID NO: 98176 - DNA, 25 bp, Homo sapien
catcatcaatttcacggccacaaga

SEQ ID NO: 98177 - DNA, 25 bp, Homo sapien
atcatcaatttcacggccacaagac

SEQ ID NO: 98178 - DNA, 25 bp, Homo sapien
ccacctgaataattaacaagtacat

SEQ ID NO: 98179 - DNA, 25 bp, Homo sapien
tgcatttgtcatccacctgaataat

SEQ ID NO: 98180 - DNA, 25 bp, Homo sapien
catacaaactttgtctttgcgagaa

SEQ ID NO: 98181 - DNA, 25 bp, Homo sapien
tctttgcgagaacctctgctctgca

SEQ ID NO: 98182 - DNA, 25 bp, Homo sapien
tataaaccaggtaaaggtgtggcca

SEQ ID NO: 98183 - DNA, 25 bp, Homo sapien
ctgagaatataaaccaggtaaaggt

SEQ ID NO: 98184 - DNA, 25 bp, Homo sapien
ggtgtggccactgctagtcctttct

SEQ ID NO: 98185 - DNA, 25 bp, Homo sapien
aaccaggtaaaggtgtggccactgc

SEQ ID NO: 98186 - DNA, 25 bp, Homo sapien
tattgtttcaatttggacaccagtg

SEQ ID NO: 98187 - DNA, 25 bp, Homo sapien
tgtttcaatttggacaccagtgttt

SEQ ID NO: 98188 - DNA, 25 bp, Homo sapien
tcaatttggacaccagtgttttcaa

SEQ ID NO: 98189 - DNA, 25 bp, Homo sapien
tttggacaccagtgttttcaaatac

SEQ ID NO: 98190 - DNA, 25 bp, Homo sapien
cgctataaatggtacttaggacctt

SEQ ID NO: 98191 - DNA, 25 bp, Homo sapien
caattgctctttggcaatatcttca

SEQ ID NO: 98192 - DNA, 25 bp, Homo sapien
caaggacaccaaagcttgtaaaagc

SEQ ID NO: 98193 - DNA, 25 bp, Homo sapien
tattttctacaactggatcatcgct

SEQ ID NO: 98194 - DNA, 25 bp, Homo sapien
gacaaaactcacagcatctatttca

SEQ ID NO: 98195 - DNA, 25 bp, Homo sapien
tattgatttgtcacagcagattcta

SEQ ID NO: 98196 - DNA, 25 bp, Homo sapien
gcatttgcttcttaagacaaaactc

SEQ ID NO: 98197 - DNA, 25 bp, Homo sapien
tagttcatttggatatgatacagtc

SEQ ID NO: 98198 - DNA, 25 bp, Homo sapien
ccagcagtcagtttcaggtaagtct

SEQ ID NO: 98199 - DNA, 25 bp, Homo sapien
gaggcagagtcctcaggtatgcttc

SEQ ID NO: 98200 - DNA, 25 bp, Homo sapien
tcaggtaagtctataagtacagcca

SEQ ID NO: 98201 - DNA, 25 bp, Homo sapien
agtcctcaggtatgcttcccagcag

SEQ ID NO: 98202 - DNA, 25 bp, Homo sapien
ttgttgcaacagcaagcaccgtttt

SEQ ID NO: 98203 - DNA, 25 bp, Homo sapien
gcaagcaccgttttcctatcttgtt

SEQ ID NO: 98204 - DNA, 25 bp, Homo sapien
gcaacagcaagcaccgttttcctat

SEQ ID NO: 98205 - DNA, 25 bp, Homo sapien
atgtcccttgattgttgcaacagca

SEQ ID NO: 98206 - DNA, 25 bp, Homo sapien
tccaaatcaggacctagccctgagc

SEQ ID NO: 98207 - DNA, 25 bp, Homo sapien
aatcaggacctagccctgagctgga

SEQ ID NO: 98208 - DNA, 25 bp, Homo sapien
caggacctagccctgagctggagaa

SEQ ID NO: 98209 - DNA, 25 bp, Homo sapien
ggacctagccctgagctggagaaac

SEQ ID NO: 98210 - DNA, 25 bp, Homo sapien
ggtgtaggatatttgagacctacca

SEQ ID NO: 98211 - DNA, 25 bp, Homo sapien
tcctgctgaccccttaaccatctca

SEQ ID NO: 98212 - DNA, 25 bp, Homo sapien
gagacctaccaagctttgtgttaag

SEQ ID NO: 98213 - DNA, 25 bp, Homo sapien
tcttcttataaggtgtaggatattt

SEQ ID NO: 98214 - DNA, 25 bp, Homo sapien
attcactagaaacatcaactgccat

SEQ ID NO: 98215 - DNA, 25 bp, Homo sapien
tcttcattaccttacaccatccaaa

SEQ ID NO: 98216 - DNA, 25 bp, Homo sapien
caagtagaacaagggcatgagctgc

SEQ ID NO: 98217 - DNA, 25 bp, Homo sapien
tgagctgccacagtctttccacttg

SEQ ID NO: 98218 - DNA, 25 bp, Homo sapien
tccctctgtctagaacagtctgcca

SEQ ID NO: 98219 - DNA, 25 bp, Homo sapien
tctaggacagtaagacccaagtccg

SEQ ID NO: 98220 - DNA, 25 bp, Homo sapien
cagtaagacccaagtccgtaaaatg

SEQ ID NO: 98221 - DNA, 25 bp, Homo sapien
aagtccgtaaaatgcaggatctgaa

SEQ ID NO: 98222 - DNA, 25 bp, Homo sapien
ctgccagctttctaggacagtaaga

SEQ ID NO: 98223 - DNA, 25 bp, Homo sapien
catctccacttccattgcctaatcc

SEQ ID NO: 98224 - DNA, 25 bp, Homo sapien
tggaccaccaaggtaacctccatat

SEQ ID NO: 98225 - DNA, 25 bp, Homo sapien
catgcaagttacctggaccaccaag

SEQ ID NO: 98226 - DNA, 25 bp, Homo sapien
aaggtcttcatgcaagttacctgga

SEQ ID NO: 98227 - DNA, 25 bp, Homo sapien
tgatagcgccgttgacagtgtcaaa

SEQ ID NO: 98228 - DNA, 25 bp, Homo sapien
ttgagtgtttaaggatgaaaattcc

SEQ ID NO: 98229 - DNA, 25 bp, Homo sapien
agtatttgcctacaaaactgtgctt

SEQ ID NO: 98230 - DNA, 25 bp, Homo sapien
gcactctgaaatgatagcgccgttg

SEQ ID NO: 98231 - DNA, 25 bp, Homo sapien
caaatgcagccagtcctgatagctt

SEQ ID NO: 98232 - DNA, 25 bp, Homo sapien
tctcatcttttgctataccttttgc

SEQ ID NO: 98233 - DNA, 25 bp, Homo sapien
ttccaaatgcagccagtcctgatag

SEQ ID NO: 98234 - DNA, 25 bp, Homo sapien
catcttttgctataccttttgctat

SEQ ID NO: 98235 - DNA, 25 bp, Homo sapien
ctgttaacccaatgcaaacttcaga

SEQ ID NO: 98236 - DNA, 25 bp, Homo sapien
ttcagagctcacaaagcaattctgg

SEQ ID NO: 98237 - DNA, 25 bp, Homo sapien
tatgacagttagctttaggtagtgg

SEQ ID NO: 98238 - DNA, 25 bp, Homo sapien
gatgcctcacgacttactgttaacc

SEQ ID NO: 98239 - DNA, 25 bp, Homo sapien
ttgaagctgtccaaagtatgctcag

SEQ ID NO: 98240 - DNA, 25 bp, Homo sapien
gaagctgtccaaagtatgctcagta

SEQ ID NO: 98241 - DNA, 25 bp, Homo sapien
aagtatgctcagtaccatatttctc

SEQ ID NO: 98242 - DNA, 25 bp, Homo sapien
gtccaaagtatgctcagtaccatat

SEQ ID NO: 98243 - DNA, 25 bp, Homo sapien
agacagaaccaacatccgatgatgt

SEQ ID NO: 98244 - DNA, 25 bp, Homo sapien
tccacttgcaatttatgaagacaga

SEQ ID NO: 98245 - DNA, 25 bp, Homo sapien
atgaagacagaaccaacatccgatg

SEQ ID NO: 98246 - DNA, 25 bp, Homo sapien
attccacttgcaatttatgaagaca

SEQ ID NO: 98247 - DNA, 25 bp, Homo sapien
gaacatgatataagaccgattacat

SEQ ID NO: 98248 - DNA, 25 bp, Homo sapien
tcttacacagaagatcttatttaag

SEQ ID NO: 98249 - DNA, 25 bp, Homo sapien
taagaccgattacataaaacaaaca

SEQ ID NO: 98250 - DNA, 25 bp, Homo sapien
actgggaatatttgtgactggtaag

SEQ ID NO: 98251 - DNA, 25 bp, Homo sapien
aaacaagctctgtctgccaaaaatg

SEQ ID NO: 98252 - DNA, 25 bp, Homo sapien
gatagggcagaacacaatatccttt

SEQ ID NO: 98253 - DNA, 25 bp, Homo sapien
ttttggcaccgatagggcagaacac

SEQ ID NO: 98254 - DNA, 25 bp, Homo sapien
gtgaacttttggcaccgatagggca

SEQ ID NO: 98255 - DNA, 25 bp, Homo sapien
taagtataaagctcagcttcttgca

SEQ ID NO: 98256 - DNA, 25 bp, Homo sapien
tctgcagctagcaaaaagttagagg

SEQ ID NO: 98257 - DNA, 25 bp, Homo sapien
tgagaaccctatttgtgccaagaaa

SEQ ID NO: 98258 - DNA, 25 bp, Homo sapien
tgcatccactccatagccagatgaa

SEQ ID NO: 98259 - DNA, 25 bp, Homo sapien
ttcgctcaaagttccaaaaggccca

SEQ ID NO: 98260 - DNA, 25 bp, Homo sapien
taatgaattcacagtctgaaccctg

SEQ ID NO: 98261 - DNA, 25 bp, Homo sapien
gataggctccatacaagacagttga

SEQ ID NO: 98262 - DNA, 25 bp, Homo sapien
tcatatgtctggttaacttacagga

SEQ ID NO: 98263 - DNA, 25 bp, Homo sapien
ctatccgagacaggtccatctttgc

SEQ ID NO: 98264 - DNA, 25 bp, Homo sapien
atccttgtcacgagggagctaactg

SEQ ID NO: 98265 - DNA, 25 bp, Homo sapien
gagggagctaactgaactatccgag

SEQ ID NO: 98266 - DNA, 25 bp, Homo sapien
taactgaactatccgagacaggtcc

SEQ ID NO: 98267 - DNA, 25 bp, Homo sapien
gagacaacgtcttgcatatagagta

SEQ ID NO: 98268 - DNA, 25 bp, Homo sapien
ttgcatatagagtatgtcttcgata

SEQ ID NO: 98269 - DNA, 25 bp, Homo sapien
gctgctgatctgaatgtccttaaaa

SEQ ID NO: 98270 - DNA, 25 bp, Homo sapien
tcgataagtacgtgttgaaagatga

SEQ ID NO: 98271 - DNA, 25 bp, Homo sapien
tgcccgacatgggataaaggctttc

SEQ ID NO: 98272 - DNA, 25 bp, Homo sapien
gattcaggatcacgggtctttgccc

SEQ ID NO: 98273 - DNA, 25 bp, Homo sapien
taacagcaacaagagtcgtgagcac

SEQ ID NO: 98274 - DNA, 25 bp, Homo sapien
gcacacattgagaggaaagtccaca

SEQ ID NO: 98275 - DNA, 25 bp, Homo sapien
cagctgatataagactaaatgccaa

SEQ ID NO: 98276 - DNA, 25 bp, Homo sapien
cacagctgatataagactaaatgcc

SEQ ID NO: 98277 - DNA, 25 bp, Homo sapien
acacagctgatataagactaaatgc

SEQ ID NO: 98278 - DNA, 25 bp, Homo sapien
atataagactaaatgccaagaccaa

SEQ ID NO: 98279 - DNA, 25 bp, Homo sapien
gatctctggtcgtagttaactgtga

SEQ ID NO: 98280 - DNA, 25 bp, Homo sapien
tagttactccagtacctacacttgc

SEQ ID NO: 98281 - DNA, 25 bp, Homo sapien
acatgagccgaatgaggagccttcc

SEQ ID NO: 98282 - DNA, 25 bp, Homo sapien
aaagtacagtaaagattctataagc

SEQ ID NO: 98283 - DNA, 25 bp, Homo sapien
taacagaaggtttacaggcgtagct

SEQ ID NO: 98284 - DNA, 25 bp, Homo sapien
gaggcaacaggtgggatccagcatt

SEQ ID NO: 98285 - DNA, 25 bp, Homo sapien
attggttcagcagcaaggctccgtt

SEQ ID NO: 98286 - DNA, 25 bp, Homo sapien
ggcagaatctggcacaactgaagtt

SEQ ID NO: 98287 - DNA, 25 bp, Homo sapien
tgcaggaagaggcaacaacttggcc

SEQ ID NO: 98288 - DNA, 25 bp, Homo sapien
caacttggccaattcatagaactca

SEQ ID NO: 98289 - DNA, 25 bp, Homo sapien
cagatagctaattgtaagtcgaatg

SEQ ID NO: 98290 - DNA, 25 bp, Homo sapien
gatgccttgtcgagctggctggtaa

SEQ ID NO: 98291 - DNA, 25 bp, Homo sapien
ccccctggttagcaaagtccctcat

SEQ ID NO: 98292 - DNA, 25 bp, Homo sapien
ttactgatgtgttaggtggagggcc

SEQ ID NO: 98293 - DNA, 25 bp, Homo sapien
gagggccttccattcgcaagttcca

SEQ ID NO: 98294 - DNA, 25 bp, Homo sapien
tgtgttaggtggagggccttccatt

SEQ ID NO: 98295 - DNA, 25 bp, Homo sapien
ggtgtctttctcatgcagagttcag

SEQ ID NO: 98296 - DNA, 25 bp, Homo sapien
gtctttctcatgcagagttcagatt

SEQ ID NO: 98297 - DNA, 25 bp, Homo sapien
cagagttcagatttccacatttgta

SEQ ID NO: 98298 - DNA, 25 bp, Homo sapien
ctcatgcagagttcagatttccaca

SEQ ID NO: 98299 - DNA, 25 bp, Homo sapien
ggacaactcgaatgtgccttgcttt

SEQ ID NO: 98300 - DNA, 25 bp, Homo sapien
tgggctacctttgactgacatcctg

SEQ ID NO: 98301 - DNA, 25 bp, Homo sapien
tgatatctacatgctcaagggcaga

SEQ ID NO: 98302 - DNA, 25 bp, Homo sapien
ggtcttcaaactatagcctatggga

SEQ ID NO: 98303 - DNA, 25 bp, Homo sapien
tataagcttgtttatccgtatgaac

SEQ ID NO: 98304 - DNA, 25 bp, Homo sapien
tcttcaagggcacaacatagaagac

SEQ ID NO: 98305 - DNA, 25 bp, Homo sapien
tatccgtatgaacgtcttcaagggc

SEQ ID NO: 98306 - DNA, 25 bp, Homo sapien
gatgctgcaggctatttatataagc

SEQ ID NO: 98307 - DNA, 25 bp, Homo sapien
cctgccttacctcgtttcagggctg

SEQ ID NO: 98308 - DNA, 25 bp, Homo sapien
gaatgatcaacttacaattcgtatg

SEQ ID NO: 98309 - DNA, 25 bp, Homo sapien
tacaaattattagagtcgttgacaa

SEQ ID NO: 98310 - DNA, 25 bp, Homo sapien
gctggctgtgttttcgttccacaga

SEQ ID NO: 98311 - DNA, 25 bp, Homo sapien
ttcaaagccagccacaagtctcagg

SEQ ID NO: 98312 - DNA, 25 bp, Homo sapien
gcacctgatattcgatgctctcaca

SEQ ID NO: 98313 - DNA, 25 bp, Homo sapien
taataagcaactcacactgcacctg

SEQ ID NO: 98314 - DNA, 25 bp, Homo sapien
gaaaatgcactaacatcctccaggc

SEQ ID NO: 98315 - DNA, 25 bp, Homo sapien
tctttagcttactctgactaagaca

SEQ ID NO: 98316 - DNA, 25 bp, Homo sapien
aatgattcactaagctcatttctgt

SEQ ID NO: 98317 - DNA, 25 bp, Homo sapien
gacatttgaaaaggctatgaatgaa

SEQ ID NO: 98318 - DNA, 25 bp, Homo sapien
tctgactaagacatttgaaaaggct

SEQ ID NO: 98319 - DNA, 25 bp, Homo sapien
gacacccaacatgtataggaaatca

SEQ ID NO: 98320 - DNA, 25 bp, Homo sapien
taggaaatcaaacaaagctatgtgc

SEQ ID NO: 98321 - DNA, 25 bp, Homo sapien
taatgatgtttcagactaatactga

SEQ ID NO: 98322 - DNA, 25 bp, Homo sapien
tagtaggcctagtgcaaaagacacc

SEQ ID NO: 98323 - DNA, 25 bp, Homo sapien
aacatcactaggttttcttagcaat

SEQ ID NO: 98324 - DNA, 25 bp, Homo sapien
caacatcactaggttttcttagcaa

SEQ ID NO: 98325 - DNA, 25 bp, Homo sapien
acatcactaggttttcttagcaatt

SEQ ID NO: 98326 - DNA, 25 bp, Homo sapien
ccttaactcattcacagacaaagtg

SEQ ID NO: 98327 - DNA, 25 bp, Homo sapien
ccccttaactcattcacagacaaag

SEQ ID NO: 98328 - DNA, 25 bp, Homo sapien
tgaccccttaactcattcacagaca

SEQ ID NO: 98329 - DNA, 25 bp, Homo sapien
cttaactcattcacagacaaagtga

SEQ ID NO: 98330 - DNA, 25 bp, Homo sapien
cagacatgcaagcaggaagccaatg

SEQ ID NO: 98331 - DNA, 25 bp, Homo sapien
acagacatgcaagcaggaagccaat

SEQ ID NO: 98332 - DNA, 25 bp, Homo sapien
gaatacaggtatttcaccagcatct

SEQ ID NO: 98333 - DNA, 25 bp, Homo sapien
tgaatacaggtatttcaccagcatc

SEQ ID NO: 98334 - DNA, 25 bp, Homo sapien
tctgtttcaaggactaaagagcttt

SEQ ID NO: 98335 - DNA, 25 bp, Homo sapien
catctccatattttaggtctgtttc

SEQ ID NO: 98336 - DNA, 25 bp, Homo sapien
tctgttcagggcaactcccctgtga

SEQ ID NO: 98337 - DNA, 25 bp, Homo sapien
gttgccagggccaacaaaatgccgg

SEQ ID NO: 98338 - DNA, 25 bp, Homo sapien
aaaatgccggctgcatgcaataggc

SEQ ID NO: 98339 - DNA, 25 bp, Homo sapien
gcaataggcttttgggtgtccgacc

SEQ ID NO: 98340 - DNA, 25 bp, Homo sapien
aaaaatgtacgggtgcatgatgagc

SEQ ID NO: 98341 - DNA, 25 bp, Homo sapien
caggagcgaaagtgaactgtggcca

SEQ ID NO: 98342 - DNA, 25 bp, Homo sapien
tgaatggctattgtagaatgacagg

SEQ ID NO: 98343 - DNA, 25 bp, Homo sapien
gcataactccagtgtaagacttggt

SEQ ID NO: 98344 - DNA, 25 bp, Homo sapien
aatctacaaaggactcaaatttaca

SEQ ID NO: 98345 - DNA, 25 bp, Homo sapien
cttcattttggttttcttggaatat

SEQ ID NO: 98346 - DNA, 25 bp, Homo sapien
taaaccactcttattttcattaaga

SEQ ID NO: 98347 - DNA, 25 bp, Homo sapien
tacaaaggactcaaatttacaagaa

SEQ ID NO: 98348 - DNA, 25 bp, Homo sapien
gacatcgtccattctaggatggcct

SEQ ID NO: 98349 - DNA, 25 bp, Homo sapien
cgtccattctaggatggcctgtcaa

SEQ ID NO: 98350 - DNA, 25 bp, Homo sapien
taggatggcctgtcaaataactcat

SEQ ID NO: 98351 - DNA, 25 bp, Homo sapien
gacaggacatcgtccattctaggat

SEQ ID NO: 98352 - DNA, 25 bp, Homo sapien
tagcactgttaaaattgggctggat

SEQ ID NO: 98353 - DNA, 25 bp, Homo sapien
cactgttaaaattgggctggatttt

SEQ ID NO: 98354 - DNA, 25 bp, Homo sapien
agcactgttaaaattgggctggatt

SEQ ID NO: 98355 - DNA, 25 bp, Homo sapien
gcactgttaaaattgggctggattt

SEQ ID NO: 98356 - DNA, 25 bp, Homo sapien
taaatattggcaggtctagagatcc

SEQ ID NO: 98357 - DNA, 25 bp, Homo sapien
tatctctaggtgacatcacgtagcc

SEQ ID NO: 98358 - DNA, 25 bp, Homo sapien
tcaagtcattggctggatcttccca

SEQ ID NO: 98359 - DNA, 25 bp, Homo sapien
gaaatgtatacttccacagccccaa

SEQ ID NO: 98360 - DNA, 25 bp, Homo sapien
cagggagcgatactcacttagagcc

SEQ ID NO: 98361 - DNA, 25 bp, Homo sapien
catcagcttgaacagaaaagaccct

SEQ ID NO: 98362 - DNA, 25 bp, Homo sapien
tatgctttacctaggcaagtgagcc

SEQ ID NO: 98363 - DNA, 25 bp, Homo sapien
tatagtggtggttaccagctgcacc

SEQ ID NO: 98364 - DNA, 25 bp, Homo sapien
catgctgggtggtttgatgcattcc

SEQ ID NO: 98365 - DNA, 25 bp, Homo sapien
tttagtaaaactacctgtgcaatac

SEQ ID NO: 98366 - DNA, 25 bp, Homo sapien
cacatctccaccaaattgcattttc

SEQ ID NO: 98367 - DNA, 25 bp, Homo sapien
tacaaattaatgaactccaaatgat

SEQ ID NO: 98368 - DNA, 25 bp, Homo sapien
aaggcaggcaaatgtgattgcgtac

SEQ ID NO: 98369 - DNA, 25 bp, Homo sapien
tgaaatgttgcagcgggacccaagt

SEQ ID NO: 98370 - DNA, 25 bp, Homo sapien
gaactggcagcagtccaatcagtca

SEQ ID NO: 98371 - DNA, 25 bp, Homo sapien
cagtccaatcagtcagggagaaggc

SEQ ID NO: 98372 - DNA, 25 bp, Homo sapien
cttacccccatagcttttcccactg

SEQ ID NO: 98373 - DNA, 25 bp, Homo sapien
cccactgatgaatcttcctctaaca

SEQ ID NO: 98374 - DNA, 25 bp, Homo sapien
acccccatagcttttcccactgatg

SEQ ID NO: 98375 - DNA, 25 bp, Homo sapien
tgatgaatcttcctctaacatccat

SEQ ID NO: 98376 - DNA, 25 bp, Homo sapien
gagtctgcaggatgccacgtaactt

SEQ ID NO: 98377 - DNA, 25 bp, Homo sapien
ggtacaatctgaactcatgataaat

SEQ ID NO: 98378 - DNA, 25 bp, Homo sapien
tcaagaggtacaatctgaactcatg

SEQ ID NO: 98379 - DNA, 25 bp, Homo sapien
taacttctccagtactgtgatcttc

SEQ ID NO: 98380 - DNA, 25 bp, Homo sapien
tatttaagtaatacaagctctgagg

SEQ ID NO: 98381 - DNA, 25 bp, Homo sapien
agtttcctgcaccatatcccagagg

SEQ ID NO: 98382 - DNA, 25 bp, Homo sapien
cagtttcctcgtatagaatgctgga

SEQ ID NO: 98383 - DNA, 25 bp, Homo sapien
aatccttctagactgcctgtgcctc

SEQ ID NO: 98384 - DNA, 25 bp, Homo sapien
tatgtatcccatagtctttccatag

SEQ ID NO: 98385 - DNA, 25 bp, Homo sapien
caggcaactaagagtggctagtgaa

SEQ ID NO: 98386 - DNA, 25 bp, Homo sapien
tgataatgatcaatttcaggcaact

SEQ ID NO: 98387 - DNA, 25 bp, Homo sapien
ttcccagaaccaatatcatttgaga

SEQ ID NO: 98388 - DNA, 25 bp, Homo sapien
tgcatttataaagaggcagaagcgg

SEQ ID NO: 98389 - DNA, 25 bp, Homo sapien
caaaagcctgagtgcagacagccag

SEQ ID NO: 98390 - DNA, 25 bp, Homo sapien
agagggtggataaagcggcagccat

SEQ ID NO: 98391 - DNA, 25 bp, Homo sapien
aggcagaagcggggaaccagcaaaa

SEQ ID NO: 98392 - DNA, 25 bp, Homo sapien
gtggaattatacactgctcctcccc

SEQ ID NO: 98393 - DNA, 25 bp, Homo sapien
tggtttattcacaaaactgccttgt

SEQ ID NO: 98394 - DNA, 25 bp, Homo sapien
caaatgaagtgggtacaactgtgca

SEQ ID NO: 98395 - DNA, 25 bp, Homo sapien
agcagcagccagttagttggtttat

SEQ ID NO: 98396 - DNA, 25 bp, Homo sapien
gagtgtcagcaactgcccactgaat

SEQ ID NO: 98397 - DNA, 25 bp, Homo sapien
actgagtgtcagcaactgcccactg

SEQ ID NO: 98398 - DNA, 25 bp, Homo sapien
aagagccagcaattcactgagtgtc

SEQ ID NO: 98399 - DNA, 25 bp, Homo sapien
caaagagccagcaattcactgagtg

SEQ ID NO: 98400 - DNA, 25 bp, Homo sapien
gatcccaaagcttcgtgttatgaca

SEQ ID NO: 98401 - DNA, 25 bp, Homo sapien
taaaaggaagacgtccacatctggt

SEQ ID NO: 98402 - DNA, 25 bp, Homo sapien
aatgagtgccgctttactgttgtca

SEQ ID NO: 98403 - DNA, 25 bp, Homo sapien
gatttggtacactctctcaagaggg

SEQ ID NO: 98404 - DNA, 25 bp, Homo sapien
gaagctgacgaggatccagtccact

SEQ ID NO: 98405 - DNA, 25 bp, Homo sapien
tgataacggctctcaaagggaggga

SEQ ID NO: 98406 - DNA, 25 bp, Homo sapien
cactcagagtgggtagcacagatcc

SEQ ID NO: 98407 - DNA, 25 bp, Homo sapien
gcagggatatcatgtgtcgctcacg

SEQ ID NO: 98408 - DNA, 25 bp, Homo sapien
tagttttgcccctccacaatgtcag

SEQ ID NO: 98409 - DNA, 25 bp, Homo sapien
ctattcagccgaaaggtcagcttgc

SEQ ID NO: 98410 - DNA, 25 bp, Homo sapien
cagtgggagtttgacctattcagcc

SEQ ID NO: 98411 - DNA, 25 bp, Homo sapien
ttcagcataacctcacacggtggtc

SEQ ID NO: 98412 - DNA, 25 bp, Homo sapien
ccattatgtccctggtaggagccca

SEQ ID NO: 98413 - DNA, 25 bp, Homo sapien
cactgagagtgagacgtaagagcta

SEQ ID NO: 98414 - DNA, 25 bp, Homo sapien
tatacttactattgccgaacgggtc

SEQ ID NO: 98415 - DNA, 25 bp, Homo sapien
gaacgggtcacagtttcatctgatc

SEQ ID NO: 98416 - DNA, 25 bp, Homo sapien
attcaagtctggctactgatggcct

SEQ ID NO: 98417 - DNA, 25 bp, Homo sapien
gaggcccaagatgcaagctccagta

SEQ ID NO: 98418 - DNA, 25 bp, Homo sapien
taatagccaccaggttataaggaac

SEQ ID NO: 98419 - DNA, 25 bp, Homo sapien
gtttctccactagggttcaggctgt

SEQ ID NO: 98420 - DNA, 25 bp, Homo sapien
caatggctagtgcactggggcttct

SEQ ID NO: 98421 - DNA, 25 bp, Homo sapien
actggggcttctccttcgctgtgca

SEQ ID NO: 98422 - DNA, 25 bp, Homo sapien
aatgtgcttcaaatacttcaatggc

SEQ ID NO: 98423 - DNA, 25 bp, Homo sapien
tgcaaaatgtggcttcccaaatgtg

SEQ ID NO: 98424 - DNA, 25 bp, Homo sapien
aggaaagcaccataaaggccctgtt

SEQ ID NO: 98425 - DNA, 25 bp, Homo sapien
ctctgaatgaacagggatctggagt

SEQ ID NO: 98426 - DNA, 25 bp, Homo sapien
cacaattatctatggttgaaggcag

SEQ ID NO: 98427 - DNA, 25 bp, Homo sapien
cagtaagcggcctacatatcccaaa

SEQ ID NO: 98428 - DNA, 25 bp, Homo sapien
tactgcaattactgagacaccttac

SEQ ID NO: 98429 - DNA, 25 bp, Homo sapien
catccagctgtctaggtcggtgtga

SEQ ID NO: 98430 - DNA, 25 bp, Homo sapien
cagctgatgcaaccatagtgtggtg

SEQ ID NO: 98431 - DNA, 25 bp, Homo sapien
tgtggtgtctgaatgtgacccatcc

SEQ ID NO: 98432 - DNA, 25 bp, Homo sapien
ttaacatccaaaggcagtacaatat

SEQ ID NO: 98433 - DNA, 25 bp, Homo sapien
tagccctaatgtgcccatcagtttt

SEQ ID NO: 98434 - DNA, 25 bp, Homo sapien
tttttcagattgtgacaaagtaata

SEQ ID NO: 98435 - DNA, 25 bp, Homo sapien
aaagcatatactgaatttagtagaa

SEQ ID NO: 98436 - DNA, 25 bp, Homo sapien
ttgtatttatgtagaacttgcagac

SEQ ID NO: 98437 - DNA, 25 bp, Homo sapien
ttatgtagaacttgcagacttccca

SEQ ID NO: 98438 - DNA, 25 bp, Homo sapien
tatttatgtagaacttgcagacttc

SEQ ID NO: 98439 - DNA, 25 bp, Homo sapien
tttatgtagaacttgcagacttccc

SEQ ID NO: 98440 - DNA, 25 bp, Homo sapien
gaaggatctccaaagatcatggaaa

SEQ ID NO: 98441 - DNA, 25 bp, Homo sapien
taatgttgtgagttaaaggtctcaa

SEQ ID NO: 98442 - DNA, 25 bp, Homo sapien
taatgtgtagcaatctcagtgaaaa

SEQ ID NO: 98443 - DNA, 25 bp, Homo sapien
tctcaaggttaacgggaggtgtcag

SEQ ID NO: 98444 - DNA, 25 bp, Homo sapien
tactgggttgaagtgaattgtggca

SEQ ID NO: 98445 - DNA, 25 bp, Homo sapien
gaattgtggcaggtactttttgctc

SEQ ID NO: 98446 - DNA, 25 bp, Homo sapien
agggaaagcgaatgtttgctactgg

SEQ ID NO: 98447 - DNA, 25 bp, Homo sapien
ttatatctcacagagacgcccaatg

SEQ ID NO: 98448 - DNA, 25 bp, Homo sapien
cataaatggcttttgggttatatta

SEQ ID NO: 98449 - DNA, 25 bp, Homo sapien
taaatatatgcgtgcatgtgatatc

SEQ ID NO: 98450 - DNA, 25 bp, Homo sapien
tcaatttgcaacgatagagtttcaa

SEQ ID NO: 98451 - DNA, 25 bp, Homo sapien
tttagacaactgcttgttcattaaa

SEQ ID NO: 98452 - DNA, 25 bp, Homo sapien
caaatataaaagatgtgcttgtaag

SEQ ID NO: 98453 - DNA, 25 bp, Homo sapien
gagtaagaaaagaatcacgtctttc

SEQ ID NO: 98454 - DNA, 25 bp, Homo sapien
cgtggcacactaggaaaacattctt

SEQ ID NO: 98455 - DNA, 25 bp, Homo sapien
gctgtttgtgctcttcatacagtct

SEQ ID NO: 98456 - DNA, 25 bp, Homo sapien
tttagcagcatattcgatagacttg

SEQ ID NO: 98457 - DNA, 25 bp, Homo sapien
gctggtcaatctgtaaagggctctc

SEQ ID NO: 98458 - DNA, 25 bp, Homo sapien
gcagcagaactaaatgtcaagtctt

SEQ ID NO: 98459 - DNA, 25 bp, Homo sapien
gaactcaggtaagggtaaattatca

SEQ ID NO: 98460 - DNA, 25 bp, Homo sapien
taattctgagtagccttaaggagac

SEQ ID NO: 98461 - DNA, 25 bp, Homo sapien
ccaggttctgggataagagggcatc

SEQ ID NO: 98462 - DNA, 25 bp, Homo sapien
gcctgggtggtctaagtagctttca

SEQ ID NO: 98463 - DNA, 25 bp, Homo sapien
tgtgcaaagataacaggcccaagat

SEQ ID NO: 98464 - DNA, 25 bp, Homo sapien
tcccatccaaagctctctgaatgag

SEQ ID NO: 98465 - DNA, 25 bp, Homo sapien
cattccagatggaagccatatctca

SEQ ID NO: 98466 - DNA, 25 bp, Homo sapien
ggaacattatgcacaggcactctga

SEQ ID NO: 98467 - DNA, 25 bp, Homo sapien
aatcttcgtagctaatgcattccag

SEQ ID NO: 98468 - DNA, 25 bp, Homo sapien
gctcccagctcctcgccaaacagag

SEQ ID NO: 98469 - DNA, 25 bp, Homo sapien
atcatacaggaaggtacaaacagct

SEQ ID NO: 98470 - DNA, 25 bp, Homo sapien
ggagcccaagcctttccatcaggac

SEQ ID NO: 98471 - DNA, 25 bp, Homo sapien
gcatcatacaggaaggtacaaacag

SEQ ID NO: 98472 - DNA, 25 bp, Homo sapien
gtttcacaccctcaggttgggccat

SEQ ID NO: 98473 - DNA, 25 bp, Homo sapien
ggtttcacaccctcaggttgggcca

SEQ ID NO: 98474 - DNA, 25 bp, Homo sapien
caggtttcacaccctcaggttgggc

SEQ ID NO: 98475 - DNA, 25 bp, Homo sapien
caaatcctaggtaacacccctgtag

SEQ ID NO: 98476 - DNA, 25 bp, Homo sapien
tacaagaactgtaggagataccgag

SEQ ID NO: 98477 - DNA, 25 bp, Homo sapien
gctgaatcacctttatcctgtatgg

SEQ ID NO: 98478 - DNA, 25 bp, Homo sapien
tagattcggtcttttggattccaac

SEQ ID NO: 98479 - DNA, 25 bp, Homo sapien
ccgcatcagcttgtgagtttctcaa

SEQ ID NO: 98480 - DNA, 25 bp, Homo sapien
attttgttctcaggccggatgctca

SEQ ID NO: 98481 - DNA, 25 bp, Homo sapien
tacatatgtttagggaattcccacc

SEQ ID NO: 98482 - DNA, 25 bp, Homo sapien
tgatcagcctaaatgaaccacctta

SEQ ID NO: 98483 - DNA, 25 bp, Homo sapien
tcattgccctggagaaagcgaacgt

SEQ ID NO: 98484 - DNA, 25 bp, Homo sapien
tctagaatgcaggtgttgaccaact

SEQ ID NO: 98485 - DNA, 25 bp, Homo sapien
gatctcagtgatctagactctgcca

SEQ ID NO: 98486 - DNA, 25 bp, Homo sapien
tataccccatgaagcaaacagacta

SEQ ID NO: 98487 - DNA, 25 bp, Homo sapien
taaagtaggcaagactgtggcatcg

SEQ ID NO: 98488 - DNA, 25 bp, Homo sapien
gagtgcatgtcagcttcggaatcaa

SEQ ID NO: 98489 - DNA, 25 bp, Homo sapien
caagtatccaaacacaacaaaaggg

SEQ ID NO: 98490 - DNA, 25 bp, Homo sapien
gatgactcgatatgtcctgaactga

SEQ ID NO: 98491 - DNA, 25 bp, Homo sapien
actctggtccatgccccctctggtg

SEQ ID NO: 98492 - DNA, 25 bp, Homo sapien
aatgccagggtgaagtaacacaatg

SEQ ID NO: 98493 - DNA, 25 bp, Homo sapien
cacaatgagaaattgcttccctctc

SEQ ID NO: 98494 - DNA, 25 bp, Homo sapien
tccctctcagtgggaggtgcattgt

SEQ ID NO: 98495 - DNA, 25 bp, Homo sapien
cgcagccatggcttactagtaaatc

SEQ ID NO: 98496 - DNA, 25 bp, Homo sapien
tcccatctcaaagtgaggatagcta

SEQ ID NO: 98497 - DNA, 25 bp, Homo sapien
tattcttcaccagggaaagcgcagc

SEQ ID NO: 98498 - DNA, 25 bp, Homo sapien
tactagtaaatcacgtagtttctca

SEQ ID NO: 98499 - DNA, 25 bp, Homo sapien
gggagcactctacttggaccagact

SEQ ID NO: 98500 - DNA, 25 bp, Homo sapien
aacaggagagcttggctcagctgca

SEQ ID NO: 98501 - DNA, 25 bp, Homo sapien
cagatcaatcactagggcttccaca

SEQ ID NO: 98502 - DNA, 25 bp, Homo sapien
ccaagataatgaccacagaagaagc

SEQ ID NO: 98503 - DNA, 25 bp, Homo sapien
tccctcttttagagcacatttggca

SEQ ID NO: 98504 - DNA, 25 bp, Homo sapien
gcattttatgtgtttccagtgtaac

SEQ ID NO: 98505 - DNA, 25 bp, Homo sapien
tgtgacctctgcattgtagcatttt

SEQ ID NO: 98506 - DNA, 25 bp, Homo sapien
agtggtgcaaaatccatgaatatac

SEQ ID NO: 98507 - DNA, 25 bp, Homo sapien
tttacaactatcatcatttgtgagg

SEQ ID NO: 98508 - DNA, 25 bp, Homo sapien
aataatttacaactatcatcatttg

SEQ ID NO: 98509 - DNA, 25 bp, Homo sapien
taatttacaactatcatcatttgtg

SEQ ID NO: 98510 - DNA, 25 bp, Homo sapien
atcatttgtgaggttgcacgggtat

SEQ ID NO: 98511 - DNA, 25 bp, Homo sapien
tgtgctgtgcatgaaccattctgac

SEQ ID NO: 98512 - DNA, 25 bp, Homo sapien
catttcgtggttctcttgctccgga

SEQ ID NO: 98513 - DNA, 25 bp, Homo sapien
taccattaggtaactgtctgctgtg

SEQ ID NO: 98514 - DNA, 25 bp, Homo sapien
tagagctgaatgaaaacccaggtcc

SEQ ID NO: 98515 - DNA, 25 bp, Homo sapien
tgtgaggaaccactatgcctgtgtt

SEQ ID NO: 98516 - DNA, 25 bp, Homo sapien
tggccgatcagtagagatctctggc

SEQ ID NO: 98517 - DNA, 25 bp, Homo sapien
acttgaatgtgatctgtgtgactac

SEQ ID NO: 98518 - DNA, 25 bp, Homo sapien
gatctctggcacgagaatcttttcc

SEQ ID NO: 98519 - DNA, 25 bp, Homo sapien
tggactttatttctctcagtgacat

SEQ ID NO: 98520 - DNA, 25 bp, Homo sapien
agtccctggactttatttctctcag

SEQ ID NO: 98521 - DNA, 25 bp, Homo sapien
ccctggactttatttctctcagtga

SEQ ID NO: 98522 - DNA, 25 bp, Homo sapien
aagtccctggactttatttctctca

SEQ ID NO: 98523 - DNA, 25 bp, Homo sapien
cttgatttgtgtcttgccccacagc

SEQ ID NO: 98524 - DNA, 25 bp, Homo sapien
ttgatttgtgtcttgccccacagct

SEQ ID NO: 98525 - DNA, 25 bp, Homo sapien
gcagcggcatctgaggctctctagg

SEQ ID NO: 98526 - DNA, 25 bp, Homo sapien
gggtcagctctaactggtctctcag

SEQ ID NO: 98527 - DNA, 25 bp, Homo sapien
gaataaatgcgctttagggctgcca

SEQ ID NO: 98528 - DNA, 25 bp, Homo sapien
gagcttgctcctggacatgaattca

SEQ ID NO: 98529 - DNA, 25 bp, Homo sapien
aatagatgtaagcaatcctctggga

SEQ ID NO: 98530 - DNA, 25 bp, Homo sapien
ccaatcgatgtgtgtgagtaataga

SEQ ID NO: 98531 - DNA, 25 bp, Homo sapien
cattgccatggtgaaaggtcagaca

SEQ ID NO: 98532 - DNA, 25 bp, Homo sapien
aatgaagagcctgccatcattgcca

SEQ ID NO: 98533 - DNA, 25 bp, Homo sapien
ttggagatggcgcagcagcagtaaa

SEQ ID NO: 98534 - DNA, 25 bp, Homo sapien
taagaagctagatgtaaatgccagg

SEQ ID NO: 98535 - DNA, 25 bp, Homo sapien
cacaggagctcatctttggctaaca

SEQ ID NO: 98536 - DNA, 25 bp, Homo sapien
tgccagggcgctagcagcatagaag

SEQ ID NO: 98537 - DNA, 25 bp, Homo sapien
cagctgtcattagcagagaacaaac

SEQ ID NO: 98538 - DNA, 25 bp, Homo sapien
tcatttcagtatccacagctgtcat

SEQ ID NO: 98539 - DNA, 25 bp, Homo sapien
caagaccgttatggaggagcatgtc

SEQ ID NO: 98540 - DNA, 25 bp, Homo sapien
tcgcactggaaattgcaagaccgtt

SEQ ID NO: 98541 - DNA, 25 bp, Homo sapien
tctggaagtagctgtctaaagtaaa

SEQ ID NO: 98542 - DNA, 25 bp, Homo sapien
aaaatacgtgactaatgtcagcttc

SEQ ID NO: 98543 - DNA, 25 bp, Homo sapien
caaaacttttctcgggtgttgaatg

SEQ ID NO: 98544 - DNA, 25 bp, Homo sapien
tattttgatctgacaaatctggaag

SEQ ID NO: 98545 - DNA, 25 bp, Homo sapien
tatgaagtgagtgtggaagtagcca

SEQ ID NO: 98546 - DNA, 25 bp, Homo sapien
cccttggtctaagagaagtctcatt

SEQ ID NO: 98547 - DNA, 25 bp, Homo sapien
gaagttgtaactggaatgctgggaa

SEQ ID NO: 98548 - DNA, 25 bp, Homo sapien
tggtgggagttacaggtcataaacc

SEQ ID NO: 98549 - DNA, 25 bp, Homo sapien
cacaccaaggtagggtgagattctg

SEQ ID NO: 98550 - DNA, 25 bp, Homo sapien
caactgctctagaacccctctgggt

SEQ ID NO: 98551 - DNA, 25 bp, Homo sapien
tctgggttcagcagatcaatccaac

SEQ ID NO: 98552 - DNA, 25 bp, Homo sapien
catattctccccgacagtctggaca

SEQ ID NO: 98553 - DNA, 25 bp, Homo sapien
taagtgccctgcagatctccctaga

SEQ ID NO: 98554 - DNA, 25 bp, Homo sapien
caagctgttaaaggagacatcagtc

SEQ ID NO: 98555 - DNA, 25 bp, Homo sapien
gccctcagggcaaagataagtcttc

SEQ ID NO: 98556 - DNA, 25 bp, Homo sapien
tccctagaatagaaaagcaccttga

SEQ ID NO: 98557 - DNA, 25 bp, Homo sapien
tgacagcttccttcggattctcttc

SEQ ID NO: 98558 - DNA, 25 bp, Homo sapien
atgacagcttccttcggattctctt

SEQ ID NO: 98559 - DNA, 25 bp, Homo sapien
gatgacagcttccttcggattctct

SEQ ID NO: 98560 - DNA, 25 bp, Homo sapien
tctccccctgagagtcaacgagctt

SEQ ID NO: 98561 - DNA, 25 bp, Homo sapien
gagtcaacgagcttcattgattccc

SEQ ID NO: 98562 - DNA, 25 bp, Homo sapien
ctccgcaggatacacaaagaataag

SEQ ID NO: 98563 - DNA, 25 bp, Homo sapien
ctccctccgcaggatacacaaagaa

SEQ ID NO: 98564 - DNA, 25 bp, Homo sapien
tgctcttgccaatatgacagcttta

SEQ ID NO: 98565 - DNA, 25 bp, Homo sapien
ttgccaatatgacagctttaagcgg

SEQ ID NO: 98566 - DNA, 25 bp, Homo sapien
agaaccaggtctctatccaacccca

SEQ ID NO: 98567 - DNA, 25 bp, Homo sapien
ccaatatgacagctttaagcggcat

SEQ ID NO: 98568 - DNA, 25 bp, Homo sapien
tgtctctgctataaggtagctgcat

SEQ ID NO: 98569 - DNA, 25 bp, Homo sapien
ttgtctctgctataaggtagctgca

SEQ ID NO: 98570 - DNA, 25 bp, Homo sapien
gattgtctctgctataaggtagctg

SEQ ID NO: 98571 - DNA, 25 bp, Homo sapien
aggattgtctctgctataaggtagc

SEQ ID NO: 98572 - DNA, 25 bp, Homo sapien
tcaaacaagatgtctcctgaggatg

SEQ ID NO: 98573 - DNA, 25 bp, Homo sapien
gactcatgaaaattaggaccctccc

SEQ ID NO: 98574 - DNA, 25 bp, Homo sapien
gattttccattcgacctgatagcca

SEQ ID NO: 98575 - DNA, 25 bp, Homo sapien
tcccctttgtgactattcccttgaa

SEQ ID NO: 98576 - DNA, 25 bp, Homo sapien
ttgaagcagtgcaaggggagagata

SEQ ID NO: 98577 - DNA, 25 bp, Homo sapien
agcagtgcaaggggagagatatttc

SEQ ID NO: 98578 - DNA, 25 bp, Homo sapien
gtgcaaggggagagatatttccttc

SEQ ID NO: 98579 - DNA, 25 bp, Homo sapien
cagtgcaaggggagagatatttcct

SEQ ID NO: 98580 - DNA, 25 bp, Homo sapien
gcctttcaagcgcagggatgtagta

SEQ ID NO: 98581 - DNA, 25 bp, Homo sapien
cagtcttttctgatagagcctttca

SEQ ID NO: 98582 - DNA, 25 bp, Homo sapien
cagggatgtagtatagcggaacctc

SEQ ID NO: 98583 - DNA, 25 bp, Homo sapien
actgccaaaccctctgcagtctttt

SEQ ID NO: 98584 - DNA, 25 bp, Homo sapien
aatactgtctaagggaactgggctc

SEQ ID NO: 98585 - DNA, 25 bp, Homo sapien
gccacctttgctgcgaaatatttcc

SEQ ID NO: 98586 - DNA, 25 bp, Homo sapien
gctgcgaaatatttcccatggaacc

SEQ ID NO: 98587 - DNA, 25 bp, Homo sapien
tgtctaagggaactgggctccttac

SEQ ID NO: 98588 - DNA, 25 bp, Homo sapien
cgcccggccacgctgaatttaagac

SEQ ID NO: 98589 - DNA, 25 bp, Homo sapien
cccggccacgctgaatttaagaccg

SEQ ID NO: 98590 - DNA, 25 bp, Homo sapien
gcgcccggccacgctgaatttaaga

SEQ ID NO: 98591 - DNA, 25 bp, Homo sapien
gcccggccacgctgaatttaagacc

SEQ ID NO: 98592 - DNA, 25 bp, Homo sapien
gatggagactgtttcggaaatgtac

SEQ ID NO: 98593 - DNA, 25 bp, Homo sapien
aggcctaggtagatggagactgttt

SEQ ID NO: 98594 - DNA, 25 bp, Homo sapien
ttgtgagaggcctaggtagatggag

SEQ ID NO: 98595 - DNA, 25 bp, Homo sapien
tggagactgtttcggaaatgtacaa

SEQ ID NO: 98596 - DNA, 25 bp, Homo sapien
tgaagaaggcttcataatcgctgcc

SEQ ID NO: 98597 - DNA, 25 bp, Homo sapien
ctcactgactttgagagaacagtca

SEQ ID NO: 98598 - DNA, 25 bp, Homo sapien
gaacagtcaggtaaagccattaaat

SEQ ID NO: 98599 - DNA, 25 bp, Homo sapien
aatgttcaacactgacacacaggtt

SEQ ID NO: 98600 - DNA, 25 bp, Homo sapien
ccagcatagggttaaagccaaattt

SEQ ID NO: 98601 - DNA, 25 bp, Homo sapien
ttttcttgaacagatgatatttcag

SEQ ID NO: 98602 - DNA, 25 bp, Homo sapien
tggccgcactattccagatgcatca

SEQ ID NO: 98603 - DNA, 25 bp, Homo sapien
tgaaaatccgatccatatatgtgca

SEQ ID NO: 98604 - DNA, 25 bp, Homo sapien
tattggccctcggccaagttatcag

SEQ ID NO: 98605 - DNA, 25 bp, Homo sapien
ttattggccctcggccaagttatca

SEQ ID NO: 98606 - DNA, 25 bp, Homo sapien
gccctcggccaagttatcaggggaa

SEQ ID NO: 98607 - DNA, 25 bp, Homo sapien
ttggccctcggccaagttatcaggg

SEQ ID NO: 98608 - DNA, 25 bp, Homo sapien
tctttactcatattgagacaggtaa

SEQ ID NO: 98609 - DNA, 25 bp, Homo sapien
ttgtctttactcatattgagacagg

SEQ ID NO: 98610 - DNA, 25 bp, Homo sapien
catcagctacattgtctttactcat

SEQ ID NO: 98611 - DNA, 25 bp, Homo sapien
gtttcatcagctacattgtctttac

SEQ ID NO: 98612 - DNA, 25 bp, Homo sapien
tagatacaataaggcctttacttcc

SEQ ID NO: 98613 - DNA, 25 bp, Homo sapien
ccagatgctttcaaacatctgtatt

SEQ ID NO: 98614 - DNA, 25 bp, Homo sapien
tcattgatgtttggcttcgtgtaga

SEQ ID NO: 98615 - DNA, 25 bp, Homo sapien
ggcttcgtgtagatacaataaggcc

SEQ ID NO: 98616 - DNA, 25 bp, Homo sapien
cccagaatatgactgccgaaggata

SEQ ID NO: 98617 - DNA, 25 bp, Homo sapien
agcatccatagttgagtttctgcaa

SEQ ID NO: 98618 - DNA, 25 bp, Homo sapien
ggagctttgaaagatcgatcaagca

SEQ ID NO: 98619 - DNA, 25 bp, Homo sapien
gaaggatatttggatctgccctgca

SEQ ID NO: 98620 - DNA, 25 bp, Homo sapien
ttaccaatttgagtaaacggcaagc

SEQ ID NO: 98621 - DNA, 25 bp, Homo sapien
atctgtctccattagttccccacta

SEQ ID NO: 98622 - DNA, 25 bp, Homo sapien
gttccccactatttctcaatttatg

SEQ ID NO: 98623 - DNA, 25 bp, Homo sapien
gagtaaacggcaagccatattccca

SEQ ID NO: 98624 - DNA, 25 bp, Homo sapien
ggtcccactacattggtctgcaaca

SEQ ID NO: 98625 - DNA, 25 bp, Homo sapien
gatagctctcactcttaagcctgaa

SEQ ID NO: 98626 - DNA, 25 bp, Homo sapien
caacatgaattgtgctgtagttctg

SEQ ID NO: 98627 - DNA, 25 bp, Homo sapien
tgaacataggtggaaactgggtccc

SEQ ID NO: 98628 - DNA, 25 bp, Homo sapien
taacgatgtaggaaggaaagagtcc

SEQ ID NO: 98629 - DNA, 25 bp, Homo sapien
aagagtccagtgtatgaagatggca

SEQ ID NO: 98630 - DNA, 25 bp, Homo sapien
gaagatggcacaatgcagcagttat

SEQ ID NO: 98631 - DNA, 25 bp, Homo sapien
gaacgttaggagacatgcatgcttt

SEQ ID NO: 98632 - DNA, 25 bp, Homo sapien
gacataaatgctttgtaactttgcc

SEQ ID NO: 98633 - DNA, 25 bp, Homo sapien
tctgcttggacgtcgatgtgactgg

SEQ ID NO: 98634 - DNA, 25 bp, Homo sapien
ccttccaagggagaatttgattaat

SEQ ID NO: 98635 - DNA, 25 bp, Homo sapien
cagaggaactaaactccttccaagg

SEQ ID NO: 98636 - DNA, 25 bp, Homo sapien
gatacacatgtttctatgggataaa

SEQ ID NO: 98637 - DNA, 25 bp, Homo sapien
cccggtactttctctagtgattcca

SEQ ID NO: 98638 - DNA, 25 bp, Homo sapien
gatttcccatcctaggatacacatg

SEQ ID NO: 98639 - DNA, 25 bp, Homo sapien
caaatcaccagtttacgggagggag

SEQ ID NO: 98640 - DNA, 25 bp, Homo sapien
gaccaaccagctcaataaaaagaca

SEQ ID NO: 98641 - DNA, 25 bp, Homo sapien
tgggcttaaacacgtgaaacagtgg

SEQ ID NO: 98642 - DNA, 25 bp, Homo sapien
gatatgcaactaatggacggagcat

SEQ ID NO: 98643 - DNA, 25 bp, Homo sapien
gacataatctttgggcttaaacacg

SEQ ID NO: 98644 - DNA, 25 bp, Homo sapien
tacttgggtaatagctgatttgcca

SEQ ID NO: 98645 - DNA, 25 bp, Homo sapien
taaggaatactaagaactgaaactg

SEQ ID NO: 98646 - DNA, 25 bp, Homo sapien
tcttggccaatacaatccattgaga

SEQ ID NO: 98647 - DNA, 25 bp, Homo sapien
tccctgcagaattgtcaaacatatg

SEQ ID NO: 98648 - DNA, 25 bp, Homo sapien
catccaatagcaaacattagtaaat

SEQ ID NO: 98649 - DNA, 25 bp, Homo sapien
ctgcctgtgtcttacaatccaggtg

SEQ ID NO: 98650 - DNA, 25 bp, Homo sapien
ttctgcctgtgtcttacaatccagg

SEQ ID NO: 98651 - DNA, 25 bp, Homo sapien
tagtaaattcatcccattgctgtat

SEQ ID NO: 98652 - DNA, 25 bp, Homo sapien
gctagttaactctttaatgtgggag

SEQ ID NO: 98653 - DNA, 25 bp, Homo sapien
agctggttggctgctagttaactct

SEQ ID NO: 98654 - DNA, 25 bp, Homo sapien
cccagctgtacttgacctgtcaata

SEQ ID NO: 98655 - DNA, 25 bp, Homo sapien
ttagctcccacttcgagctggttgg

SEQ ID NO: 98656 - DNA, 25 bp, Homo sapien
caaggatggcaagtggaacccagct

SEQ ID NO: 98657 - DNA, 25 bp, Homo sapien
tacttaggtcatctcttgagggcag

SEQ ID NO: 98658 - DNA, 25 bp, Homo sapien
gaaaaggcccaaaccatagactctg

SEQ ID NO: 98659 - DNA, 25 bp, Homo sapien
cacctcttgtgcattacgaactgga

SEQ ID NO: 98660 - DNA, 25 bp, Homo sapien
tgagttcccatggtgatcaaataga

SEQ ID NO: 98661 - DNA, 25 bp, Homo sapien
gatgccgctgtaccattagcacaaa

SEQ ID NO: 98662 - DNA, 25 bp, Homo sapien
caccgagaaaattaggagcatcact

SEQ ID NO: 98663 - DNA, 25 bp, Homo sapien
aaggaagtgtcaggagaccatagac

SEQ ID NO: 98664 - DNA, 25 bp, Homo sapien
tattgcgagaggagatgacaaggct

SEQ ID NO: 98665 - DNA, 25 bp, Homo sapien
tggtatgctgctacaaactgacaag

SEQ ID NO: 98666 - DNA, 25 bp, Homo sapien
gaaaatagttcctagtcacgagggc

SEQ ID NO: 98667 - DNA, 25 bp, Homo sapien
tttttccgaacacatcagaactggg

SEQ ID NO: 98668 - DNA, 25 bp, Homo sapien
gaacaaagatgctttttgacacatc

SEQ ID NO: 98669 - DNA, 25 bp, Homo sapien
tttttgacacatccgaataacttct

SEQ ID NO: 98670 - DNA, 25 bp, Homo sapien
gatgctttttgacacatccgaataa

SEQ ID NO: 98671 - DNA, 25 bp, Homo sapien
cctaatattttagcagtgctgctaa

SEQ ID NO: 98672 - DNA, 25 bp, Homo sapien
tcccttctctgctttacagagttct

SEQ ID NO: 98673 - DNA, 25 bp, Homo sapien
acagagttctaagcctttcttgtaa

SEQ ID NO: 98674 - DNA, 25 bp, Homo sapien
tctgctttacagagttctaagcctt

SEQ ID NO: 98675 - DNA, 25 bp, Homo sapien
ctagtctcgatctgttcccttctct

SEQ ID NO: 98676 - DNA, 25 bp, Homo sapien
atggattccttcctcggactgacca

SEQ ID NO: 98677 - DNA, 25 bp, Homo sapien
tatttggtacaaatgttgccagcat

SEQ ID NO: 98678 - DNA, 25 bp, Homo sapien
agagacatgtacacacaagtaacag

SEQ ID NO: 98679 - DNA, 25 bp, Homo sapien
tatgccaagggcaagtgctccatta

SEQ ID NO: 98680 - DNA, 25 bp, Homo sapien
tatacacaggataaagacgcaccat

SEQ ID NO: 98681 - DNA, 25 bp, Homo sapien
tgaaaatgaagtcggcaaagcttgc

SEQ ID NO: 98682 - DNA, 25 bp, Homo sapien
tgactatctgccttatgataaaaac

SEQ ID NO: 98683 - DNA, 25 bp, Homo sapien
gcttgctctatttgtctaacaacca

SEQ ID NO: 98684 - DNA, 25 bp, Homo sapien
gcttcttctattagctgttctggtc

SEQ ID NO: 98685 - DNA, 25 bp, Homo sapien
cataatccctactgtcaaatttcat

SEQ ID NO: 98686 - DNA, 25 bp, Homo sapien
tagctgttctggtccatcaaagcca

SEQ ID NO: 98687 - DNA, 25 bp, Homo sapien
aagccataatccctactgtcaaatt

SEQ ID NO: 98688 - DNA, 25 bp, Homo sapien
caattctggacattacaggagacac

SEQ ID NO: 98689 - DNA, 25 bp, Homo sapien
gggttagagcccttagcaacatgct

SEQ ID NO: 98690 - DNA, 25 bp, Homo sapien
tgtgattgcgcagagaatacttgga

SEQ ID NO: 98691 - DNA, 25 bp, Homo sapien
tgtagaaggtcactcaataataact

SEQ ID NO: 98692 - DNA, 25 bp, Homo sapien
tgtttgaaacaactggctctccttc

SEQ ID NO: 98693 - DNA, 25 bp, Homo sapien
catgtcaatgctattgcagctgtgt

SEQ ID NO: 98694 - DNA, 25 bp, Homo sapien
ctattgcagctgtgtttgaaacaac

SEQ ID NO: 98695 - DNA, 25 bp, Homo sapien
tggctctccttctccgtgtcaccat

SEQ ID NO: 98696 - DNA, 25 bp, Homo sapien
tactgttgcgcgaaaaaacaatagc

SEQ ID NO: 98697 - DNA, 25 bp, Homo sapien
gaggatcttgttcggattggagcat

SEQ ID NO: 98698 - DNA, 25 bp, Homo sapien
gtttgtagacctcaagaaatcttta

SEQ ID NO: 98699 - DNA, 25 bp, Homo sapien
ggagttgagtcacaatgtttaagag

SEQ ID NO: 98700 - DNA, 25 bp, Homo sapien
tcccctgtgcttcagccttgcttta

SEQ ID NO: 98701 - DNA, 25 bp, Homo sapien
cccctgtgcttcagccttgctttat

SEQ ID NO: 98702 - DNA, 25 bp, Homo sapien
ccctgtgcttcagccttgctttatt

SEQ ID NO: 98703 - DNA, 25 bp, Homo sapien
cctgtgcttcagccttgctttattc

SEQ ID NO: 98704 - DNA, 25 bp, Homo sapien
cagaactccaagtcccggtaatatg

SEQ ID NO: 98705 - DNA, 25 bp, Homo sapien
cggtggaaaaactgtcacagagact

SEQ ID NO: 98706 - DNA, 25 bp, Homo sapien
ttcatgtcaagagggaagactggcg

SEQ ID NO: 98707 - DNA, 25 bp, Homo sapien
gtaatatgatcacatctactcccag

SEQ ID NO: 98708 - DNA, 25 bp, Homo sapien
tacttgcgtgtttggtgtcaaccac

SEQ ID NO: 98709 - DNA, 25 bp, Homo sapien
tgtgaaatgtggacgagtctgcctt

SEQ ID NO: 98710 - DNA, 25 bp, Homo sapien
cagctgttttatccacgcatcatca

SEQ ID NO: 98711 - DNA, 25 bp, Homo sapien
gacgagtctgccttgtattcagctg

SEQ ID NO: 98712 - DNA, 25 bp, Homo sapien
tgatctccggggtggacatagtcaa

SEQ ID NO: 98713 - DNA, 25 bp, Homo sapien
tcagccatctccacgtgatctccgg

SEQ ID NO: 98714 - DNA, 25 bp, Homo sapien
ccaggggggagcttcatgcccagct

SEQ ID NO: 98715 - DNA, 25 bp, Homo sapien
gtggacatagtcaaagacactgctg

SEQ ID NO: 98716 - DNA, 25 bp, Homo sapien
caagatttctacaagtccctgatac

SEQ ID NO: 98717 - DNA, 25 bp, Homo sapien
gcctctgccatagattttgctgaat

SEQ ID NO: 98718 - DNA, 25 bp, Homo sapien
taaatactgagggtagaaaggcagt

SEQ ID NO: 98719 - DNA, 25 bp, Homo sapien
gctactatttggaatgcctctgcca

SEQ ID NO: 98720 - DNA, 25 bp, Homo sapien
agtcctggaaggaatcccaatgagg

SEQ ID NO: 98721 - DNA, 25 bp, Homo sapien
taagagtcctggaaggaatcccaat

SEQ ID NO: 98722 - DNA, 25 bp, Homo sapien
tctataagagtcctggaaggaatcc

SEQ ID NO: 98723 - DNA, 25 bp, Homo sapien
aagtctataagagtcctggaaggaa

SEQ ID NO: 98724 - DNA, 25 bp, Homo sapien
tcccctaatacttaaattatcatca

SEQ ID NO: 98725 - DNA, 25 bp, Homo sapien
ctaggggactgatggatatcaagtc

SEQ ID NO: 98726 - DNA, 25 bp, Homo sapien
ccctaatacttaaattatcatcagt

SEQ ID NO: 98727 - DNA, 25 bp, Homo sapien
cccctaatacttaaattatcatcag

SEQ ID NO: 98728 - DNA, 25 bp, Homo sapien
caattaatttaaagccccaatcagc

SEQ ID NO: 98729 - DNA, 25 bp, Homo sapien
gaccagccaatcttccccgtgtttg

SEQ ID NO: 98730 - DNA, 25 bp, Homo sapien
taattaccagcgctctcggaagacc

SEQ ID NO: 98731 - DNA, 25 bp, Homo sapien
tcagcaaagaataaatccttcgcag

SEQ ID NO: 98732 - DNA, 25 bp, Homo sapien
tttgcacttcaaatcaggccttgat

SEQ ID NO: 98733 - DNA, 25 bp, Homo sapien
gcacttcaaatcaggccttgattca

SEQ ID NO: 98734 - DNA, 25 bp, Homo sapien
agcaaatacaactttgcacttcaaa

SEQ ID NO: 98735 - DNA, 25 bp, Homo sapien
caaatacaactttgcacttcaaatc

SEQ ID NO: 98736 - DNA, 25 bp, Homo sapien
tcccagagggcagaccttggatcag

SEQ ID NO: 98737 - DNA, 25 bp, Homo sapien
tatagtagcctaccctgagaaaggt

SEQ ID NO: 98738 - DNA, 25 bp, Homo sapien
ttaggaacacgccattgaataaggg

SEQ ID NO: 98739 - DNA, 25 bp, Homo sapien
gaagaccaaatttaacctcaggctg

SEQ ID NO: 98740 - DNA, 25 bp, Homo sapien
tacagaagaaactgatcactcgctg

SEQ ID NO: 98741 - DNA, 25 bp, Homo sapien
gaaactgatcactcgctggtgggaa

SEQ ID NO: 98742 - DNA, 25 bp, Homo sapien
gaagaaactgatcactcgctggtgg

SEQ ID NO: 98743 - DNA, 25 bp, Homo sapien
cagaagaaactgatcactcgctggt

SEQ ID NO: 98744 - DNA, 25 bp, Homo sapien
tctctgaagtaggatccaggcatgt

SEQ ID NO: 98745 - DNA, 25 bp, Homo sapien
cacaaccaatgggttagccatgcag

SEQ ID NO: 98746 - DNA, 25 bp, Homo sapien
tgccctggctgagttctctctgaag

SEQ ID NO: 98747 - DNA, 25 bp, Homo sapien
cttaaaaacattcgggacatagcgt

SEQ ID NO: 98748 - DNA, 25 bp, Homo sapien
gacattattaacagctccctcaaca

SEQ ID NO: 98749 - DNA, 25 bp, Homo sapien
tctgtttgacatttgcagtacagca

SEQ ID NO: 98750 - DNA, 25 bp, Homo sapien
ccttggccagcgctaatattaaatc

SEQ ID NO: 98751 - DNA, 25 bp, Homo sapien
aaaggcttcagatcaataactggag

SEQ ID NO: 98752 - DNA, 25 bp, Homo sapien
gaggcctgtgcttctattattcaac

SEQ ID NO: 98753 - DNA, 25 bp, Homo sapien
gaggccgcccttctgtagctagttg

SEQ ID NO: 98754 - DNA, 25 bp, Homo sapien
gcaaagctcagtcaatgctaggtaa

SEQ ID NO: 98755 - DNA, 25 bp, Homo sapien
gcgtcatcaacgtgtgggtcaagga

SEQ ID NO: 98756 - DNA, 25 bp, Homo sapien
ctatacttgggaataactgttggca

SEQ ID NO: 98757 - DNA, 25 bp, Homo sapien
tggcctgggtaagcgttgttgctaa

SEQ ID NO: 98758 - DNA, 25 bp, Homo sapien
ttccagtattttccccaagcaatca

SEQ ID NO: 98759 - DNA, 25 bp, Homo sapien
caagcaatcatgagtaaattgctca

SEQ ID NO: 98760 - DNA, 25 bp, Homo sapien
cctttgcaaggcctcccaaaaatgt

SEQ ID NO: 98761 - DNA, 25 bp, Homo sapien
gtcttctctgttcaacccatcctgt

SEQ ID NO: 98762 - DNA, 25 bp, Homo sapien
ggctacagactgaccacaggcatat

SEQ ID NO: 98763 - DNA, 25 bp, Homo sapien
tcttctcaaggtctattcactcact

SEQ ID NO: 98764 - DNA, 25 bp, Homo sapien
ttagcctctgaatagaatggcccat

SEQ ID NO: 98765 - DNA, 25 bp, Homo sapien
tgggaaagcttgaagtacaccctga

SEQ ID NO: 98766 - DNA, 25 bp, Homo sapien
ggaaagcttgaagtacaccctgagg

SEQ ID NO: 98767 - DNA, 25 bp, Homo sapien
tggcccatctgtgactctgcttgca

SEQ ID NO: 98768 - DNA, 25 bp, Homo sapien
tccaccagatctacactcattttag

SEQ ID NO: 98769 - DNA, 25 bp, Homo sapien
atgcattccaccagatctacactca

SEQ ID NO: 98770 - DNA, 25 bp, Homo sapien
ttctcaagattagtgatgaactgga

SEQ ID NO: 98771 - DNA, 25 bp, Homo sapien
cattttagttctcaagattagtgat

SEQ ID NO: 98772 - DNA, 25 bp, Homo sapien
tgaattttgtccaggttggcagtga

SEQ ID NO: 98773 - DNA, 25 bp, Homo sapien
aatgggatatatagagcctttcacc

SEQ ID NO: 98774 - DNA, 25 bp, Homo sapien
aaataccttgtcaggagcgactgga

SEQ ID NO: 98775 - DNA, 25 bp, Homo sapien
cacctgtaggtcattggcttgaatt

SEQ ID NO: 98776 - DNA, 25 bp, Homo sapien
tttcatcagctttgtaataaaaatg

SEQ ID NO: 98777 - DNA, 25 bp, Homo sapien
gaattaatatgcaaatttcatcagc

SEQ ID NO: 98778 - DNA, 25 bp, Homo sapien
taatatgcaaatttcatcagctttg

SEQ ID NO: 98779 - DNA, 25 bp, Homo sapien
aatgaattaatatgcaaatttcatc

SEQ ID NO: 98780 - DNA, 25 bp, Homo sapien
cagcactgtcagagccttgcactga

SEQ ID NO: 98781 - DNA, 25 bp, Homo sapien
tttcatcagcactgtcagagccttg

SEQ ID NO: 98782 - DNA, 25 bp, Homo sapien
cactgtcagagccttgcactgatac

SEQ ID NO: 98783 - DNA, 25 bp, Homo sapien
ctgtcagagccttgcactgatacat

SEQ ID NO: 98784 - DNA, 25 bp, Homo sapien
ggaatgaatttcatcggataatcta

SEQ ID NO: 98785 - DNA, 25 bp, Homo sapien
catcggataatctaacttggatgtt

SEQ ID NO: 98786 - DNA, 25 bp, Homo sapien
gcagctgctatggatatggtattag

SEQ ID NO: 98787 - DNA, 25 bp, Homo sapien
gctatggatatggtattagagtata

SEQ ID NO: 98788 - DNA, 25 bp, Homo sapien
ctttgcagaccatcggatgcatgag

SEQ ID NO: 98789 - DNA, 25 bp, Homo sapien
gaccatcggatgcatgagctgcaag

SEQ ID NO: 98790 - DNA, 25 bp, Homo sapien
catcggatgcatgagctgcaagggt

SEQ ID NO: 98791 - DNA, 25 bp, Homo sapien
tgcagaccatcggatgcatgagctg

SEQ ID NO: 98792 - DNA, 25 bp, Homo sapien
tacatgtctcttgacacctgtagtt

SEQ ID NO: 98793 - DNA, 25 bp, Homo sapien
atttactgtcagtgcctcaccagaa

SEQ ID NO: 98794 - DNA, 25 bp, Homo sapien
cctgtagttatctttcctagccctg

SEQ ID NO: 98795 - DNA, 25 bp, Homo sapien
accagaacccttgctccttgagggc

SEQ ID NO: 98796 - DNA, 25 bp, Homo sapien
cacttgtcagagaggtgactccagt

SEQ ID NO: 98797 - DNA, 25 bp, Homo sapien
aacagggatataaaacacagtcgca

SEQ ID NO: 98798 - DNA, 25 bp, Homo sapien
tcaagataaatgctgacacggcagc

SEQ ID NO: 98799 - DNA, 25 bp, Homo sapien
gcagcgaggtagacagagcattatc

SEQ ID NO: 98800 - DNA, 25 bp, Homo sapien
tgtgctcggatgcagtttgccctgt

SEQ ID NO: 98801 - DNA, 25 bp, Homo sapien
gtgctcggatgcagtttgccctgtc

SEQ ID NO: 98802 - DNA, 25 bp, Homo sapien
tgctcggatgcagtttgccctgtca

SEQ ID NO: 98803 - DNA, 25 bp, Homo sapien
cttcctgtagacagactgaattata

SEQ ID NO: 98804 - DNA, 25 bp, Homo sapien
tagacagactgaattataacttttt

SEQ ID NO: 98805 - DNA, 25 bp, Homo sapien
ccagaacttcttcctgtagacagac

SEQ ID NO: 98806 - DNA, 25 bp, Homo sapien
cctgtagacagactgaattataact

SEQ ID NO: 98807 - DNA, 25 bp, Homo sapien
tgttaggattatttgcatctgcact

SEQ ID NO: 98808 - DNA, 25 bp, Homo sapien
tggagagatccatcaaaagcactga

SEQ ID NO: 98809 - DNA, 25 bp, Homo sapien
catctgcactgaaattggttttgag

SEQ ID NO: 98810 - DNA, 25 bp, Homo sapien
gccactctcccaccaattgcatttt

SEQ ID NO: 98811 - DNA, 25 bp, Homo sapien
gacaccctgacctatggggctgcct

SEQ ID NO: 98812 - DNA, 25 bp, Homo sapien
ctgtgtgccacgcatgcaggcaaag

SEQ ID NO: 98813 - DNA, 25 bp, Homo sapien
gcgataatttagctgtgctctgcag

SEQ ID NO: 98814 - DNA, 25 bp, Homo sapien
catgcaggcaaagcgataatttagc

SEQ ID NO: 98815 - DNA, 25 bp, Homo sapien
ttttcatcaataagttttgccatct

SEQ ID NO: 98816 - DNA, 25 bp, Homo sapien
tcatcaataagttttgccatcttgc

SEQ ID NO: 98817 - DNA, 25 bp, Homo sapien
tcaataagttttgccatcttgcttt

SEQ ID NO: 98818 - DNA, 25 bp, Homo sapien
tttttcatcaataagttttgccatc

SEQ ID NO: 98819 - DNA, 25 bp, Homo sapien
cgcgcagggtatgctttggtgccat

SEQ ID NO: 98820 - DNA, 25 bp, Homo sapien
gcgcgcagggtatgctttggtgcca

SEQ ID NO: 98821 - DNA, 25 bp, Homo sapien
tcctggggccagtccttcacttggg

SEQ ID NO: 98822 - DNA, 25 bp, Homo sapien
gtcctggggccagtccttcacttgg

SEQ ID NO: 98823 - DNA, 25 bp, Homo sapien
ccggggacccactgtctggatgtgt

SEQ ID NO: 98824 - DNA, 25 bp, Homo sapien
agaatgcttctccaacttttcacca

SEQ ID NO: 98825 - DNA, 25 bp, Homo sapien
agtgcttatttgcatgtcaatttgc

SEQ ID NO: 98826 - DNA, 25 bp, Homo sapien
tgcttatttgcatgtcaatttgcag

SEQ ID NO: 98827 - DNA, 25 bp, Homo sapien
gtgcttatttgcatgtcaatttgca

SEQ ID NO: 98828 - DNA, 25 bp, Homo sapien
tcttgcccccaaggagttcatggtc

SEQ ID NO: 98829 - DNA, 25 bp, Homo sapien
accaatgggatagtggtcttgcccc

SEQ ID NO: 98830 - DNA, 25 bp, Homo sapien
tacagaagtgaattgtatggatact

SEQ ID NO: 98831 - DNA, 25 bp, Homo sapien
tctaaccagtagtatctgtgtggag

SEQ ID NO: 98832 - DNA, 25 bp, Homo sapien
ccaagaatgcttaggttattcaaca

SEQ ID NO: 98833 - DNA, 25 bp, Homo sapien
tgtcaatcgtacagtggttttcaag

SEQ ID NO: 98834 - DNA, 25 bp, Homo sapien
ggcaaaaccccttctaacaacatca

SEQ ID NO: 98835 - DNA, 25 bp, Homo sapien
ctgtcattttaggagctagcccttt

SEQ ID NO: 98836 - DNA, 25 bp, Homo sapien
tgaatcaacatgtattgggtactca

SEQ ID NO: 98837 - DNA, 25 bp, Homo sapien
catgaatcaacatgtattgggtact

SEQ ID NO: 98838 - DNA, 25 bp, Homo sapien
atgaatcaacatgtattgggtactc

SEQ ID NO: 98839 - DNA, 25 bp, Homo sapien
ggcgttgcgtgtgccaaagacctgt

SEQ ID NO: 98840 - DNA, 25 bp, Homo sapien
ttataaccacatcgtagcttgagtt

SEQ ID NO: 98841 - DNA, 25 bp, Homo sapien
cagctgctggtttggcgttgcgtgt

SEQ ID NO: 98842 - DNA, 25 bp, Homo sapien
ataaccacatcgtagcttgagtttg

SEQ ID NO: 98843 - DNA, 25 bp, Homo sapien
ggagttgccataggttgttaagaca

SEQ ID NO: 98844 - DNA, 25 bp, Homo sapien
caccaaatcctgatgtgtgagggag

SEQ ID NO: 98845 - DNA, 25 bp, Homo sapien
tcatttttaggtgttctgtgcacac

SEQ ID NO: 98846 - DNA, 25 bp, Homo sapien
cacacaggacgaactaaagagcaat

SEQ ID NO: 98847 - DNA, 25 bp, Homo sapien
gatttcattcggatgaaaaaggaac

SEQ ID NO: 98848 - DNA, 25 bp, Homo sapien
tatatcctgatgatttgatgtgcac

SEQ ID NO: 98849 - DNA, 25 bp, Homo sapien
gcacaccgcgtttggtcagagtaga

SEQ ID NO: 98850 - DNA, 25 bp, Homo sapien
gaacgctcaagagtgttgtcagtgg

SEQ ID NO: 98851 - DNA, 25 bp, Homo sapien
caacccagatcagtcttttgaatga

SEQ ID NO: 98852 - DNA, 25 bp, Homo sapien
aacttgaaagcatatggctcttgaa

SEQ ID NO: 98853 - DNA, 25 bp, Homo sapien
gaatgaagtgaaattctacagaaac

SEQ ID NO: 98854 - DNA, 25 bp, Homo sapien
tgaagtaatcagtgccctgctcata

SEQ ID NO: 98855 - DNA, 25 bp, Homo sapien
ttcctgtttgatggcaaggacctcc

SEQ ID NO: 98856 - DNA, 25 bp, Homo sapien
ttccctggcatagttggacaacatg

SEQ ID NO: 98857 - DNA, 25 bp, Homo sapien
taaaaatgatcaattcccaagaggc

SEQ ID NO: 98858 - DNA, 25 bp, Homo sapien
ctgactacactgcatctgaggccac

SEQ ID NO: 98859 - DNA, 25 bp, Homo sapien
gcatgtcagattgacctggcctctg

SEQ ID NO: 98860 - DNA, 25 bp, Homo sapien
tcagattgacctggcctctgatctc

SEQ ID NO: 98861 - DNA, 25 bp, Homo sapien
gacctggcctctgatctccagcttt

SEQ ID NO: 98862 - DNA, 25 bp, Homo sapien
gattgacctggcctctgatctccag

SEQ ID NO: 98863 - DNA, 25 bp, Homo sapien
cacgtcggcgcccacagctgtggat

SEQ ID NO: 98864 - DNA, 25 bp, Homo sapien
tcacccttcacgtcggcgcccacag

SEQ ID NO: 98865 - DNA, 25 bp, Homo sapien
ttcacgtcggcgcccacagctgtgg

SEQ ID NO: 98866 - DNA, 25 bp, Homo sapien
tgtcacccttcacgtcggcgcccac

SEQ ID NO: 98867 - DNA, 25 bp, Homo sapien
accacgagacccatgatttggctgg

SEQ ID NO: 98868 - DNA, 25 bp, Homo sapien
gtgggacagcgacactctcaggcgt

SEQ ID NO: 98869 - DNA, 25 bp, Homo sapien
gggaggcaaggcatgcgcaacaacc

SEQ ID NO: 98870 - DNA, 25 bp, Homo sapien
tactcgagtgacgaacatatggcag

SEQ ID NO: 98871 - DNA, 25 bp, Homo sapien
tgataaggggctgctgacttctagg

SEQ ID NO: 98872 - DNA, 25 bp, Homo sapien
tctgaaggggcaatgtcccatttcc

SEQ ID NO: 98873 - DNA, 25 bp, Homo sapien
aggggctgctgacttctaggtgaaa

SEQ ID NO: 98874 - DNA, 25 bp, Homo sapien
cctcttccaatcagtctgataaggg

SEQ ID NO: 98875 - DNA, 25 bp, Homo sapien
gggaaggatagtatcgccagagctt

SEQ ID NO: 98876 - DNA, 25 bp, Homo sapien
gaaggatagtatcgccagagcttcc

SEQ ID NO: 98877 - DNA, 25 bp, Homo sapien
ggatagtatcgccagagcttccttc

SEQ ID NO: 98878 - DNA, 25 bp, Homo sapien
ccggggaaggatagtatcgccagag

SEQ ID NO: 98879 - DNA, 25 bp, Homo sapien
ggtgtttctgaaatttgccagctcc

SEQ ID NO: 98880 - DNA, 25 bp, Homo sapien
tcctctgaaagcattagatgtcggc

SEQ ID NO: 98881 - DNA, 25 bp, Homo sapien
attagatgtcggctttgcctgaggc

SEQ ID NO: 98882 - DNA, 25 bp, Homo sapien
gaaagcattagatgtcggctttgcc

SEQ ID NO: 98883 - DNA, 25 bp, Homo sapien
ggaatccgcctggtttacacaaaca

SEQ ID NO: 98884 - DNA, 25 bp, Homo sapien
gacagtacgtgtgtgtaaaagcctc

SEQ ID NO: 98885 - DNA, 25 bp, Homo sapien
tccaggcttgtgctcgacagtacgt

SEQ ID NO: 98886 - DNA, 25 bp, Homo sapien
ccagacgtcgatgtcctcaggcaga

SEQ ID NO: 98887 - DNA, 25 bp, Homo sapien
tatactactgtacccgtgaggaggt

SEQ ID NO: 98888 - DNA, 25 bp, Homo sapien
tagatcaagcgattgtgtttcaaca

SEQ ID NO: 98889 - DNA, 25 bp, Homo sapien
caatgcaagatcctcattacaggcc

SEQ ID NO: 98890 - DNA, 25 bp, Homo sapien
caaaagtaggaaatgcgttagatca

SEQ ID NO: 98891 - DNA, 25 bp, Homo sapien
gatgaagtggtagcatctcttccct

SEQ ID NO: 98892 - DNA, 25 bp, Homo sapien
tcagcatggatgaagtggtagcatc

SEQ ID NO: 98893 - DNA, 25 bp, Homo sapien
tctcttccctacgatatctacaggg

SEQ ID NO: 98894 - DNA, 25 bp, Homo sapien
gaagtggtagcatctcttccctacg

SEQ ID NO: 98895 - DNA, 25 bp, Homo sapien
ttctgggtgagtgcctaaagatcca

SEQ ID NO: 98896 - DNA, 25 bp, Homo sapien
tataggagagacagcaaaagacacc

SEQ ID NO: 98897 - DNA, 25 bp, Homo sapien
ttccatggacagtgcgaacagccag

SEQ ID NO: 98898 - DNA, 25 bp, Homo sapien
tctctaaagaacgtgctctgcccca

SEQ ID NO: 98899 - DNA, 25 bp, Homo sapien
tagaatctgctgtcttgcaggcagg

SEQ ID NO: 98900 - DNA, 25 bp, Homo sapien
ctctgagcaacaaagaacctgatgt

SEQ ID NO: 98901 - DNA, 25 bp, Homo sapien
caagtgtgttccctaaatccctggt

SEQ ID NO: 98902 - DNA, 25 bp, Homo sapien
tccatgtcagtgttgctaacgcagg

SEQ ID NO: 98903 - DNA, 25 bp, Homo sapien
ggagaaatgaactgccctcgctcac

SEQ ID NO: 98904 - DNA, 25 bp, Homo sapien
caaatcccagagagatagcatgatg

SEQ ID NO: 98905 - DNA, 25 bp, Homo sapien
cctgaggaattgtgtttcttcaagc

SEQ ID NO: 98906 - DNA, 25 bp, Homo sapien
cacatggtctatgacagtgtcctca

SEQ ID NO: 98907 - DNA, 25 bp, Homo sapien
tgacctgattctatgtcgccatgac

SEQ ID NO: 98908 - DNA, 25 bp, Homo sapien
ccaagaaggcacagttgaggcatcc

SEQ ID NO: 98909 - DNA, 25 bp, Homo sapien
gaattgtgccaatagctctaggaag

SEQ ID NO: 98910 - DNA, 25 bp, Homo sapien
tcaggacagaaccaggaattgtgcc

SEQ ID NO: 98911 - DNA, 25 bp, Homo sapien
tccttttctctgaaatcccacagct

SEQ ID NO: 98912 - DNA, 25 bp, Homo sapien
tttctctgaaatcccacagctccag

SEQ ID NO: 98913 - DNA, 25 bp, Homo sapien
tctctgaaatcccacagctccagag

SEQ ID NO: 98914 - DNA, 25 bp, Homo sapien
cttttctctgaaatcccacagctcc

SEQ ID NO: 98915 - DNA, 25 bp, Homo sapien
ggaattacaatggagggcctgcaga

SEQ ID NO: 98916 - DNA, 25 bp, Homo sapien
ctgcttgcatttggcgatgagacgc

SEQ ID NO: 98917 - DNA, 25 bp, Homo sapien
aattagtcccgcattaagcagtctg

SEQ ID NO: 98918 - DNA, 25 bp, Homo sapien
tgcatggaggacatcttgtgttgcc

SEQ ID NO: 98919 - DNA, 25 bp, Homo sapien
ttatcttgcctccttgtgacggttt

SEQ ID NO: 98920 - DNA, 25 bp, Homo sapien
ggcacacgatgaaggctgacttggc

SEQ ID NO: 98921 - DNA, 25 bp, Homo sapien
tatcttgcctccttgtgacggtttt

SEQ ID NO: 98922 - DNA, 25 bp, Homo sapien
tggccaggcacacgatgaaggctga

SEQ ID NO: 98923 - DNA, 25 bp, Homo sapien
tgaaagcgcaaagggcgtctgactt

SEQ ID NO: 98924 - DNA, 25 bp, Homo sapien
ctaataagtttacaacagtgacaac

SEQ ID NO: 98925 - DNA, 25 bp, Homo sapien
acagtgacaactgtatggcaggtgg

SEQ ID NO: 98926 - DNA, 25 bp, Homo sapien
gcaggtggtatgtaggtctatgaaa

SEQ ID NO: 98927 - DNA, 25 bp, Homo sapien
atttttgaattcactagagtgtgta

SEQ ID NO: 98928 - DNA, 25 bp, Homo sapien
cggagaacggagagcaggtgccttc

SEQ ID NO: 98929 - DNA, 25 bp, Homo sapien
ttctgctacagactcaaaaattatt

SEQ ID NO: 98930 - DNA, 25 bp, Homo sapien
tcagtggccgcggagaacggagagc

SEQ ID NO: 98931 - DNA, 25 bp, Homo sapien
gcgccagtgggaatctagataacta

SEQ ID NO: 98932 - DNA, 25 bp, Homo sapien
tagataactacagatacggtgcaga

SEQ ID NO: 98933 - DNA, 25 bp, Homo sapien
cttggtctctcctagggattggtgt

SEQ ID NO: 98934 - DNA, 25 bp, Homo sapien
ctaaagggtaggcaatctcacttgg

SEQ ID NO: 98935 - DNA, 25 bp, Homo sapien
tgacctgtggttttaccctgggcca

SEQ ID NO: 98936 - DNA, 25 bp, Homo sapien
gctgaagaggacgagtttgactgac

SEQ ID NO: 98937 - DNA, 25 bp, Homo sapien
ggagccacgtgatagcccttgactt

SEQ ID NO: 98938 - DNA, 25 bp, Homo sapien
accacaaagcaggttcgggagccca

SEQ ID NO: 98939 - DNA, 25 bp, Homo sapien
actgaaggggaagggaatggctcac

SEQ ID NO: 98940 - DNA, 25 bp, Homo sapien
aagactgaaggggaagggaatggct

SEQ ID NO: 98941 - DNA, 25 bp, Homo sapien
atctgtaaaaagactgaaggggaag

SEQ ID NO: 98942 - DNA, 25 bp, Homo sapien
gactgaaggggaagggaatggctca

SEQ ID NO: 98943 - DNA, 25 bp, Homo sapien
tttctcacagcacactaacgggacc

SEQ ID NO: 98944 - DNA, 25 bp, Homo sapien
ccaggctacaaaactgcgtggtgaa

SEQ ID NO: 98945 - DNA, 25 bp, Homo sapien
caattgtaagttctgccattctgca

SEQ ID NO: 98946 - DNA, 25 bp, Homo sapien
gcgtggctccacaggttgcattgta

SEQ ID NO: 98947 - DNA, 25 bp, Homo sapien
agtgtgcactcatctacgtcgccca

SEQ ID NO: 98948 - DNA, 25 bp, Homo sapien
gtgcactcatctacgtcgcccactt

SEQ ID NO: 98949 - DNA, 25 bp, Homo sapien
gcactcatctacgtcgcccactttt

SEQ ID NO: 98950 - DNA, 25 bp, Homo sapien
actcatctacgtcgcccacttttgg

SEQ ID NO: 98951 - DNA, 25 bp, Homo sapien
catccagcgatagtactttgtcaca

SEQ ID NO: 98952 - DNA, 25 bp, Homo sapien
gcattcttggcattaatagctatgg

SEQ ID NO: 98953 - DNA, 25 bp, Homo sapien
ggcactggactgtatccaaatatat

SEQ ID NO: 98954 - DNA, 25 bp, Homo sapien
aatatatcctccgttcttctgcatc

SEQ ID NO: 98955 - DNA, 25 bp, Homo sapien
ttctggaaatgccactccaaggcca

SEQ ID NO: 98956 - DNA, 25 bp, Homo sapien
gatgaggagagtaggctcctgtaat

SEQ ID NO: 98957 - DNA, 25 bp, Homo sapien
caaggccacctgatggatgaggaga

SEQ ID NO: 98958 - DNA, 25 bp, Homo sapien
gagagcatgttgagtcagtttgacc

SEQ ID NO: 98959 - DNA, 25 bp, Homo sapien
gggcagcagagcctttggtgcctat

SEQ ID NO: 98960 - DNA, 25 bp, Homo sapien
cgctcagatggctcccacgctattg

SEQ ID NO: 98961 - DNA, 25 bp, Homo sapien
cccacgctattggtggggcagcaga

SEQ ID NO: 98962 - DNA, 25 bp, Homo sapien
ttgatgtagcttctcagccgctcag

SEQ ID NO: 98963 - DNA, 25 bp, Homo sapien
actgggggtcaggaaactgtgctgc

SEQ ID NO: 98964 - DNA, 25 bp, Homo sapien
gaaactgtgctgcttgacagtacac

SEQ ID NO: 98965 - DNA, 25 bp, Homo sapien
caggaaactgtgctgcttgacagta

SEQ ID NO: 98966 - DNA, 25 bp, Homo sapien
cactgggggtcaggaaactgtgctg

SEQ ID NO: 98967 - DNA, 25 bp, Homo sapien
tcggatgtctccgaggattcggaag

SEQ ID NO: 98968 - DNA, 25 bp, Homo sapien
tccatgggtgtgtccttgtactcag

SEQ ID NO: 98969 - DNA, 25 bp, Homo sapien
gtctttagagtctgactcagagtcg

SEQ ID NO: 98970 - DNA, 25 bp, Homo sapien
ggattcggaagttttctccggcaga

SEQ ID NO: 98971 - DNA, 25 bp, Homo sapien
cgctgtcggacgtgagtgactcgca

SEQ ID NO: 98972 - DNA, 25 bp, Homo sapien
tcttgagcaccgaggcactgttggg

SEQ ID NO: 98973 - DNA, 25 bp, Homo sapien
gggttctcaaagtccgagtgctcga

SEQ ID NO: 98974 - DNA, 25 bp, Homo sapien
tgtcgttgtcacacgcgttgcccga

SEQ ID NO: 98975 - DNA, 25 bp, Homo sapien
ggggcttggtcatgctgtaggggga

SEQ ID NO: 98976 - DNA, 25 bp, Homo sapien
gggcttggtcatgctgtagggggac

SEQ ID NO: 98977 - DNA, 25 bp, Homo sapien
gaactgagtcttgcgggcggccgcg

SEQ ID NO: 98978 - DNA, 25 bp, Homo sapien
gtgacagcgggtcggaggcgacggg

SEQ ID NO: 98979 - DNA, 25 bp, Homo sapien
accgagtcgggaatggccacgtgca

SEQ ID NO: 98980 - DNA, 25 bp, Homo sapien
tggccgaggcgccgaactgagtctt

SEQ ID NO: 98981 - DNA, 25 bp, Homo sapien
caggtccccagtgtacagcaaggag

SEQ ID NO: 98982 - DNA, 25 bp, Homo sapien
agcgggagcacgacgttgcccgcct

SEQ ID NO: 98983 - DNA, 25 bp, Homo sapien
ggagcacgacgttgcccgcctgcaa

SEQ ID NO: 98984 - DNA, 25 bp, Homo sapien
cagtgtacagcaaggagttggacgc

SEQ ID NO: 98985 - DNA, 25 bp, Homo sapien
ctggtggcggccagggtcccggtca

SEQ ID NO: 98986 - DNA, 25 bp, Homo sapien
tggtggcggccagggtcccggtcac

SEQ ID NO: 98987 - DNA, 25 bp, Homo sapien
gcatctgcgtcaggctagctgcgct

SEQ ID NO: 98988 - DNA, 25 bp, Homo sapien
tccacgaagttaacagcgtgcgcgt

SEQ ID NO: 98989 - DNA, 25 bp, Homo sapien
gatggtgcccgtggtgtagaccctc

SEQ ID NO: 98990 - DNA, 25 bp, Homo sapien
ggtcctgacatgttgagccggtgca

SEQ ID NO: 98991 - DNA, 25 bp, Homo sapien
tctaaacgaaaatgccgacgatgcc

SEQ ID NO: 98992 - DNA, 25 bp, Homo sapien
gaatgggactgtaccactccggact

SEQ ID NO: 98993 - DNA, 25 bp, Homo sapien
caaaacggcaggcaactggtcgtct

SEQ ID NO: 98994 - DNA, 25 bp, Homo sapien
gacctgctcgaattcaaagtgctag

SEQ ID NO: 98995 - DNA, 25 bp, Homo sapien
gctctgtcctgctttgagtgatgtg

SEQ ID NO: 98996 - DNA, 25 bp, Homo sapien
gaggcaaccagaaaatgtgcttgat

SEQ ID NO: 98997 - DNA, 25 bp, Homo sapien
agctctcgtaaacactgggttggcc

SEQ ID NO: 98998 - DNA, 25 bp, Homo sapien
aatgtgcttgataataacatggcca

SEQ ID NO: 98999 - DNA, 25 bp, Homo sapien
cagagaccggtgagagagctcgctt

SEQ ID NO: 99000 - DNA, 25 bp, Homo sapien
agagagctcgcttgtgtaaggagtt

SEQ ID NO: 99001 - DNA, 25 bp, Homo sapien
aaacagagaccggtgagagagctcg

SEQ ID NO: 99002 - DNA, 25 bp, Homo sapien
gagctcgcttgtgtaaggagttcat

SEQ ID NO: 99003 - DNA, 25 bp, Homo sapien
tcgcagcagttttctggttccagtg

SEQ ID NO: 99004 - DNA, 25 bp, Homo sapien
ctgactccccttttgctgattctgt

SEQ ID NO: 99005 - DNA, 25 bp, Homo sapien
tcctcgcagcagttttctggttcca

SEQ ID NO: 99006 - DNA, 25 bp, Homo sapien
tgactccccttttgctgattctgtg

SEQ ID NO: 99007 - DNA, 25 bp, Homo sapien
gtttttccattcaaatgtgacggat

SEQ ID NO: 99008 - DNA, 25 bp, Homo sapien
ttgtttttccattcaaatgtgacgg

SEQ ID NO: 99009 - DNA, 25 bp, Homo sapien
tacttattagaagtgacaaagtatt

SEQ ID NO: 99010 - DNA, 25 bp, Homo sapien
tgtcaggctctctgtacttattaga

SEQ ID NO: 99011 - DNA, 25 bp, Homo sapien
ggtcaagaagcttgctgctttggcc

SEQ ID NO: 99012 - DNA, 25 bp, Homo sapien
ggaagagataagcagttggtttttc

SEQ ID NO: 99013 - DNA, 25 bp, Homo sapien
tgcaggcacttggttaagccacaga

SEQ ID NO: 99014 - DNA, 25 bp, Homo sapien
gggaaaggtcaagaagcttgctgct

SEQ ID NO: 99015 - DNA, 25 bp, Homo sapien
atatctggtgacttttgacctcagc

SEQ ID NO: 99016 - DNA, 25 bp, Homo sapien
catatctggtgacttttgacctcag

SEQ ID NO: 99017 - DNA, 25 bp, Homo sapien
aatctgagttaaaatcccagggctg

SEQ ID NO: 99018 - DNA, 25 bp, Homo sapien
tatatggcatgctcagggaaatctg

SEQ ID NO: 99019 - DNA, 25 bp, Homo sapien
cacagaattatgactaggctacggg

SEQ ID NO: 99020 - DNA, 25 bp, Homo sapien
gatgaagctcccctacccgagtttc

SEQ ID NO: 99021 - DNA, 25 bp, Homo sapien
aatgttgtaccacggcatgtgctcc

SEQ ID NO: 99022 - DNA, 25 bp, Homo sapien
ctttccgaatgttgtaccacggcat

SEQ ID NO: 99023 - DNA, 25 bp, Homo sapien
tccgaatgttgtaccacggcatgtg

SEQ ID NO: 99024 - DNA, 25 bp, Homo sapien
tccttgctggcctagtcctgtcctc

SEQ ID NO: 99025 - DNA, 25 bp, Homo sapien
tagctttggctcgatagaaagtcaa

SEQ ID NO: 99026 - DNA, 25 bp, Homo sapien
gaaagtcaatgctggtgttgatgct

SEQ ID NO: 99027 - DNA, 25 bp, Homo sapien
ggcgagcagtctctggtccaaccag

SEQ ID NO: 99028 - DNA, 25 bp, Homo sapien
ccaaaacatatggtcggcgagcagt

SEQ ID NO: 99029 - DNA, 25 bp, Homo sapien
gagcaatgactccagtccaagctct

SEQ ID NO: 99030 - DNA, 25 bp, Homo sapien
tgtgtggctgaattcctgaatccca

SEQ ID NO: 99031 - DNA, 25 bp, Homo sapien
ctgaatcccatgtctgaaggtgtcc

SEQ ID NO: 99032 - DNA, 25 bp, Homo sapien
ctaaggcttgtttgtataatagaaa

SEQ ID NO: 99033 - DNA, 25 bp, Homo sapien
tattgtgattgtcagcaccaggtgt

SEQ ID NO: 99034 - DNA, 25 bp, Homo sapien
tcaggggtagggtgtaggactcaac

SEQ ID NO: 99035 - DNA, 25 bp, Homo sapien
ttttccataaacagagtggtaagta

SEQ ID NO: 99036 - DNA, 25 bp, Homo sapien
agtggtaagtattgtgattgtcagc

SEQ ID NO: 99037 - DNA, 25 bp, Homo sapien
ctcccatctcttcccaaacgctgaa

SEQ ID NO: 99038 - DNA, 25 bp, Homo sapien
tctcccatctcttcccaaacgctga

SEQ ID NO: 99039 - DNA, 25 bp, Homo sapien
tggactccatgccttcgtgggcttc

SEQ ID NO: 99040 - DNA, 25 bp, Homo sapien
tcctggactccatgccttcgtgggc

SEQ ID NO: 99041 - DNA, 25 bp, Homo sapien
cttcctggactccatgccttcgtgg

SEQ ID NO: 99042 - DNA, 25 bp, Homo sapien
gactccatgccttcgtgggcttcct

SEQ ID NO: 99043 - DNA, 25 bp, Homo sapien
aagaactctccagagcttcagtgcc

SEQ ID NO: 99044 - DNA, 25 bp, Homo sapien
ggtgggaagaactctccagagcttc

SEQ ID NO: 99045 - DNA, 25 bp, Homo sapien
ttcagtgccccaggtaggctgcagg

SEQ ID NO: 99046 - DNA, 25 bp, Homo sapien
ggaagaactctccagagcttcagtg

SEQ ID NO: 99047 - DNA, 25 bp, Homo sapien
tggaagagtccagacaagagcctta

SEQ ID NO: 99048 - DNA, 25 bp, Homo sapien
gtccagacaagagccttaggcactg

SEQ ID NO: 99049 - DNA, 25 bp, Homo sapien
gagcatgcatggctggaagagtcca

SEQ ID NO: 99050 - DNA, 25 bp, Homo sapien
acaagagccttaggcactggctcca

SEQ ID NO: 99051 - DNA, 25 bp, Homo sapien
gcttctgatcttttactagtgaata

SEQ ID NO: 99052 - DNA, 25 bp, Homo sapien
tatggacactttgacaacagtaagt

SEQ ID NO: 99053 - DNA, 25 bp, Homo sapien
gctgtggtcttttcataagtggccc

SEQ ID NO: 99054 - DNA, 25 bp, Homo sapien
ccatgagcacagatgtctctttatg

SEQ ID NO: 99055 - DNA, 25 bp, Homo sapien
gtcgctgtctgatgtggtagaaacc

SEQ ID NO: 99056 - DNA, 25 bp, Homo sapien
tagaaaccaatactatgacactggg

SEQ ID NO: 99057 - DNA, 25 bp, Homo sapien
aaattgtctcccgatgatggttgca

SEQ ID NO: 99058 - DNA, 25 bp, Homo sapien
tagcaaaggttcttcgggtagattc

SEQ ID NO: 99059 - DNA, 25 bp, Homo sapien
cagtgccaagcagagccgaataaga

SEQ ID NO: 99060 - DNA, 25 bp, Homo sapien
agaccttggcttagggagcttggat

SEQ ID NO: 99061 - DNA, 25 bp, Homo sapien
cagtttcgccatttgacacctggac

SEQ ID NO: 99062 - DNA, 25 bp, Homo sapien
aataggggtttcagacagtgccaag

SEQ ID NO: 99063 - DNA, 25 bp, Homo sapien
tttgcctccttgtatgcgcactgac

SEQ ID NO: 99064 - DNA, 25 bp, Homo sapien
atttgcctccttgtatgcgcactga

SEQ ID NO: 99065 - DNA, 25 bp, Homo sapien
aaggagccggggactggggctctga

SEQ ID NO: 99066 - DNA, 25 bp, Homo sapien
tgcagaacacacggaggaaaggagc

SEQ ID NO: 99067 - DNA, 25 bp, Homo sapien
cagaacacacggaggaaaggagccg

SEQ ID NO: 99068 - DNA, 25 bp, Homo sapien
aaaggagccggggactggggctctg

SEQ ID NO: 99069 - DNA, 25 bp, Homo sapien
gcctccacagctgcctggactgtgg

SEQ ID NO: 99070 - DNA, 25 bp, Homo sapien
tgcctccacagctgcctggactgtg

SEQ ID NO: 99071 - DNA, 25 bp, Homo sapien
tgctgcctccacagctgcctggact

SEQ ID NO: 99072 - DNA, 25 bp, Homo sapien
ctctgctgcctccacagctgcctgg

SEQ ID NO: 99073 - DNA, 25 bp, Homo sapien
gcagaacgtctggtatggtatcttg

SEQ ID NO: 99074 - DNA, 25 bp, Homo sapien
acgtctggtatggtatcttgtgcca

SEQ ID NO: 99075 - DNA, 25 bp, Homo sapien
gaggcatgtgcagaacgtctggtat

SEQ ID NO: 99076 - DNA, 25 bp, Homo sapien
cagctggtcagggtactgggaacct

SEQ ID NO: 99077 - DNA, 25 bp, Homo sapien
tagtgccgggaacatagtaagggct

SEQ ID NO: 99078 - DNA, 25 bp, Homo sapien
tccactgtggttggcagtatgacca

SEQ ID NO: 99079 - DNA, 25 bp, Homo sapien
tggaagcttctactcctgcagtaag

SEQ ID NO: 99080 - DNA, 25 bp, Homo sapien
agatcgcactgcctcaataacttgg

SEQ ID NO: 99081 - DNA, 25 bp, Homo sapien
tcaactggcccactgatgctcgaaa

SEQ ID NO: 99082 - DNA, 25 bp, Homo sapien
ggagtttgttactgccccgtgcaca

SEQ ID NO: 99083 - DNA, 25 bp, Homo sapien
gaagtcaggcttgcttctcggtgca

SEQ ID NO: 99084 - DNA, 25 bp, Homo sapien
cttccccggcttgatgaggtttaga

SEQ ID NO: 99085 - DNA, 25 bp, Homo sapien
tgacactaggatggacacttcagat

SEQ ID NO: 99086 - DNA, 25 bp, Homo sapien
agagagcagactcgcaccgacattc

SEQ ID NO: 99087 - DNA, 25 bp, Homo sapien
ggatcctggcagctcatacctacag

SEQ ID NO: 99088 - DNA, 25 bp, Homo sapien
tagaaatacccgagtcacacctgga

SEQ ID NO: 99089 - DNA, 25 bp, Homo sapien
gattggcagaaaaacgggaacatgt

SEQ ID NO: 99090 - DNA, 25 bp, Homo sapien
aacagcgaagcagagtataccggca

SEQ ID NO: 99091 - DNA, 25 bp, Homo sapien
gctcacgagagagtagtcaagcacc

SEQ ID NO: 99092 - DNA, 25 bp, Homo sapien
aaacaaccagttaagtgctcacgag

SEQ ID NO: 99093 - DNA, 25 bp, Homo sapien
gggagtgagccctctactgagaaga

SEQ ID NO: 99094 - DNA, 25 bp, Homo sapien
tataggtgacaaccaattgcttgca

SEQ ID NO: 99095 - DNA, 25 bp, Homo sapien
gagcttccgggtcactgaacatgca

SEQ ID NO: 99096 - DNA, 25 bp, Homo sapien
agcacttgggagctcggtagcacct

SEQ ID NO: 99097 - DNA, 25 bp, Homo sapien
ggcaaggagtagtctcagcaccagt

SEQ ID NO: 99098 - DNA, 25 bp, Homo sapien
tccttgtggctctgagggcttacag

SEQ ID NO: 99099 - DNA, 25 bp, Homo sapien
taagagggctaatcaatgggaagac

SEQ ID NO: 99100 - DNA, 25 bp, Homo sapien
tgtgccctgccatgaggaccttgga

SEQ ID NO: 99101 - DNA, 25 bp, Homo sapien
ctttcactacgggaattatcctagc

SEQ ID NO: 99102 - DNA, 25 bp, Homo sapien
gaattatcctagccttgccattcat

SEQ ID NO: 99103 - DNA, 25 bp, Homo sapien
ggaattatcctagccttgccattca

SEQ ID NO: 99104 - DNA, 25 bp, Homo sapien
tgaagatagtagtcacggcactgtt

SEQ ID NO: 99105 - DNA, 25 bp, Homo sapien
catcagaaccaacgtgaaagtaggc

SEQ ID NO: 99106 - DNA, 25 bp, Homo sapien
gaaagtaggcagttctgcaaccaga

SEQ ID NO: 99107 - DNA, 25 bp, Homo sapien
caaccagagttcctgtgtacaagag

SEQ ID NO: 99108 - DNA, 25 bp, Homo sapien
ttgacctcctagttcttgccgctgt

SEQ ID NO: 99109 - DNA, 25 bp, Homo sapien
tatccctatcctcacatctagccag

SEQ ID NO: 99110 - DNA, 25 bp, Homo sapien
ttcttttgacctcctagttcttgcc

SEQ ID NO: 99111 - DNA, 25 bp, Homo sapien
tcctcacatctagccagacaccaag

SEQ ID NO: 99112 - DNA, 25 bp, Homo sapien
caaactgagcccacgtattccatct

SEQ ID NO: 99113 - DNA, 25 bp, Homo sapien
agtgaggcctggcaagttccacagg

SEQ ID NO: 99114 - DNA, 25 bp, Homo sapien
tctgggtttcgtcccataactgtga

SEQ ID NO: 99115 - DNA, 25 bp, Homo sapien
tgcaggatgcaacaaccagtgaggc

SEQ ID NO: 99116 - DNA, 25 bp, Homo sapien
cactggttcggaatgttggctgctc

SEQ ID NO: 99117 - DNA, 25 bp, Homo sapien
gggtctccataagtctgcatagtca

SEQ ID NO: 99118 - DNA, 25 bp, Homo sapien
ggacaagctgagatgacccaactct

SEQ ID NO: 99119 - DNA, 25 bp, Homo sapien
ccaggtgaatatcgtagggtctcca

SEQ ID NO: 99120 - DNA, 25 bp, Homo sapien
taaagaccaagatccttaatatcgc

SEQ ID NO: 99121 - DNA, 25 bp, Homo sapien
cggtatttgtgcttgacataaagac

SEQ ID NO: 99122 - DNA, 25 bp, Homo sapien
tgcttgacataaagaccaagatcct

SEQ ID NO: 99123 - DNA, 25 bp, Homo sapien
ccttaatatcgcctacagggttcat

SEQ ID NO: 99124 - DNA, 25 bp, Homo sapien
ctaaggtggcactggatagggactt

SEQ ID NO: 99125 - DNA, 25 bp, Homo sapien
ttctgaaccagtcaaagccactctt

SEQ ID NO: 99126 - DNA, 25 bp, Homo sapien
gatagggactttctgaaccagtcaa

SEQ ID NO: 99127 - DNA, 25 bp, Homo sapien
gcactggatagggactttctgaacc

SEQ ID NO: 99128 - DNA, 25 bp, Homo sapien
ctccccggagtaatcgctgttgatc

SEQ ID NO: 99129 - DNA, 25 bp, Homo sapien
gtgtgttcttccagccacgtttact

SEQ ID NO: 99130 - DNA, 25 bp, Homo sapien
tttacatgtttggtaaggcagagtc

SEQ ID NO: 99131 - DNA, 25 bp, Homo sapien
gtaaggcagagtctgtgagggctcc

SEQ ID NO: 99132 - DNA, 25 bp, Homo sapien
ctgaagccaagaaggtaagtgtccc

SEQ ID NO: 99133 - DNA, 25 bp, Homo sapien
agtgtccctggcaacccgaagcctg

SEQ ID NO: 99134 - DNA, 25 bp, Homo sapien
ccttgttttccaacgcgttggctct

SEQ ID NO: 99135 - DNA, 25 bp, Homo sapien
ttctgccgtctgagactgtgtgatg

SEQ ID NO: 99136 - DNA, 25 bp, Homo sapien
ttctgggtcagcatgatttcacttt

SEQ ID NO: 99137 - DNA, 25 bp, Homo sapien
tttctgggtcagcatgatttcactt

SEQ ID NO: 99138 - DNA, 25 bp, Homo sapien
caaatgcaattagattctgccgctg

SEQ ID NO: 99139 - DNA, 25 bp, Homo sapien
aatcgctgaagcctctcttgggaca

SEQ ID NO: 99140 - DNA, 25 bp, Homo sapien
gcatcactgttctcgaaatcgctga

SEQ ID NO: 99141 - DNA, 25 bp, Homo sapien
gcgtctctccacattgcatcactgt

SEQ ID NO: 99142 - DNA, 25 bp, Homo sapien
tgttcgtcgccttgaccagtagggc

SEQ ID NO: 99143 - DNA, 25 bp, Homo sapien
caaggggaaatagcaaggcaaggtc

SEQ ID NO: 99144 - DNA, 25 bp, Homo sapien
ccttgaccagtagggccagagccaa

SEQ ID NO: 99145 - DNA, 25 bp, Homo sapien
tagagttgttcgtcgccttgaccag

SEQ ID NO: 99146 - DNA, 25 bp, Homo sapien
catcaatgtgcttgttgactgggag

SEQ ID NO: 99147 - DNA, 25 bp, Homo sapien
tgctctttacttcgggaaatgaagg

SEQ ID NO: 99148 - DNA, 25 bp, Homo sapien
taaagggtgacttctgcatcgtaaa

SEQ ID NO: 99149 - DNA, 25 bp, Homo sapien
ttgacttgggtaatgatgcacacat

SEQ ID NO: 99150 - DNA, 25 bp, Homo sapien
tttcagtaaatcgtagtgtgaagta

SEQ ID NO: 99151 - DNA, 25 bp, Homo sapien
cagtaaatcgtagtgtgaagtaatg

SEQ ID NO: 99152 - DNA, 25 bp, Homo sapien
taaatcgtagtgtgaagtaatgttc

SEQ ID NO: 99153 - DNA, 25 bp, Homo sapien
ttgtttcagtaaatcgtagtgtgaa

SEQ ID NO: 99154 - DNA, 25 bp, Homo sapien
cactatgtttaagacgctcgtataa

SEQ ID NO: 99155 - DNA, 25 bp, Homo sapien
ggaattgtgagttccactatgttta

SEQ ID NO: 99156 - DNA, 25 bp, Homo sapien
tagtttggaatgaagctggaattgt

SEQ ID NO: 99157 - DNA, 25 bp, Homo sapien
tgtgagttccactatgtttaagacg

SEQ ID NO: 99158 - DNA, 25 bp, Homo sapien
ctggagaagcactccaccaatagca

SEQ ID NO: 99159 - DNA, 25 bp, Homo sapien
ccaccaatagcaagcagagttgaga

SEQ ID NO: 99160 - DNA, 25 bp, Homo sapien
ccctggagaagcactccaccaatag

SEQ ID NO: 99161 - DNA, 25 bp, Homo sapien
ctccaccaatagcaagcagagttga

SEQ ID NO: 99162 - DNA, 25 bp, Homo sapien
ggaggaggatgtccccttcatctct

SEQ ID NO: 99163 - DNA, 25 bp, Homo sapien
ccttccaatggagatgatgggtgaa

SEQ ID NO: 99164 - DNA, 25 bp, Homo sapien
ccaatggagatgatgggtgaactgt

SEQ ID NO: 99165 - DNA, 25 bp, Homo sapien
ctgtggagagatggagacagtgcca

SEQ ID NO: 99166 - DNA, 25 bp, Homo sapien
cagggcggttctgggtgccttcctt

SEQ ID NO: 99167 - DNA, 25 bp, Homo sapien
tctgcagggcggttctgggtgcctt

SEQ ID NO: 99168 - DNA, 25 bp, Homo sapien
tgcagggcggttctgggtgccttcc

SEQ ID NO: 99169 - DNA, 25 bp, Homo sapien
gtctctgcagggcggttctgggtgc

SEQ ID NO: 99170 - DNA, 25 bp, Homo sapien
tggtttctggtttctcaagcctctt

SEQ ID NO: 99171 - DNA, 25 bp, Homo sapien
gatggtttctggtttctcaagcctc

SEQ ID NO: 99172 - DNA, 25 bp, Homo sapien
ttggatgcaaatgatggtttctggt

SEQ ID NO: 99173 - DNA, 25 bp, Homo sapien
ttctctctcctcacagcccacagtc

SEQ ID NO: 99174 - DNA, 25 bp, Homo sapien
gcaaaatcccaaaaatgctagcttg

SEQ ID NO: 99175 - DNA, 25 bp, Homo sapien
caaaaatgctagcttggtaggtgac

SEQ ID NO: 99176 - DNA, 25 bp, Homo sapien
aatgctagcttggtaggtgactgta

SEQ ID NO: 99177 - DNA, 25 bp, Homo sapien
tagcttggtaggtgactgtagttga

SEQ ID NO: 99178 - DNA, 25 bp, Homo sapien
tgagaggcgactgtgatgaccccat

SEQ ID NO: 99179 - DNA, 25 bp, Homo sapien
gatgagaggcgactgtgatgacccc

SEQ ID NO: 99180 - DNA, 25 bp, Homo sapien
atgagaggcgactgtgatgacccca

SEQ ID NO: 99181 - DNA, 25 bp, Homo sapien
cctggcccctggtaaagtcttcagg

SEQ ID NO: 99182 - DNA, 25 bp, Homo sapien
tggcccctggtaaagtcttcaggac

SEQ ID NO: 99183 - DNA, 25 bp, Homo sapien
taaactgtttcttgggttgcctggc

SEQ ID NO: 99184 - DNA, 25 bp, Homo sapien
gcctggcccctggtaaagtcttcag

SEQ ID NO: 99185 - DNA, 25 bp, Homo sapien
ggacatggatgaggggggcctccag

SEQ ID NO: 99186 - DNA, 25 bp, Homo sapien
catggatgaggggggcctccagccc

SEQ ID NO: 99187 - DNA, 25 bp, Homo sapien
cttgtggggacatggatgagggggg

SEQ ID NO: 99188 - DNA, 25 bp, Homo sapien
gtggggacatggatgaggggggcct

SEQ ID NO: 99189 - DNA, 25 bp, Homo sapien
gagtgggtccttgggtgccatggac

SEQ ID NO: 99190 - DNA, 25 bp, Homo sapien
gtccttgggtgccatggacagaaat

SEQ ID NO: 99191 - DNA, 25 bp, Homo sapien
ttgagtgggtccttgggtgccatgg

SEQ ID NO: 99192 - DNA, 25 bp, Homo sapien
gggtccttgggtgccatggacagaa

SEQ ID NO: 99193 - DNA, 25 bp, Homo sapien
gcttataaaaccaataactcgccag

SEQ ID NO: 99194 - DNA, 25 bp, Homo sapien
cttctggtagatgtaaacggacaca

SEQ ID NO: 99195 - DNA, 25 bp, Homo sapien
cggacacaactgtgcttataaaacc

SEQ ID NO: 99196 - DNA, 25 bp, Homo sapien
caataactcgccagtcttcctcagg

SEQ ID NO: 99197 - DNA, 25 bp, Homo sapien
ctctggctctgcacttgatggcctc

SEQ ID NO: 99198 - DNA, 25 bp, Homo sapien
gatcttgcatccgaagcgagggcac

SEQ ID NO: 99199 - DNA, 25 bp, Homo sapien
ggcaccagccggtatctgctaggca

SEQ ID NO: 99200 - DNA, 25 bp, Homo sapien
tcatttcgattgtccctccggctcg

SEQ ID NO: 99201 - DNA, 25 bp, Homo sapien
cagggcgcttcggtttggcctctct

SEQ ID NO: 99202 - DNA, 25 bp, Homo sapien
tggcacatgaatagagcaatgaaat

SEQ ID NO: 99203 - DNA, 25 bp, Homo sapien
aaaatttggcggtgagctatgcaag

SEQ ID NO: 99204 - DNA, 25 bp, Homo sapien
gaccctaccactccgatagtacagg

SEQ ID NO: 99205 - DNA, 25 bp, Homo sapien
ggaaatcaagaagtagacccaaata

SEQ ID NO: 99206 - DNA, 25 bp, Homo sapien
catgaggcctcgtgctcaccaagag

SEQ ID NO: 99207 - DNA, 25 bp, Homo sapien
tgctcaccaagagtctgccactttt

SEQ ID NO: 99208 - DNA, 25 bp, Homo sapien
gaggcctcgtgctcaccaagagtct

SEQ ID NO: 99209 - DNA, 25 bp, Homo sapien
ggcctcgtgctcaccaagagtctgc

SEQ ID NO: 99210 - DNA, 25 bp, Homo sapien
gagagtgggtactgtttggggaatc

SEQ ID NO: 99211 - DNA, 25 bp, Homo sapien
gatggagagagtgggtactgtttgg

SEQ ID NO: 99212 - DNA, 25 bp, Homo sapien
tgggtactgtttggggaatcagcca

SEQ ID NO: 99213 - DNA, 25 bp, Homo sapien
agtgggtactgtttggggaatcagc

SEQ ID NO: 99214 - DNA, 25 bp, Homo sapien
gtatgtctgccaatttatgtctgtg

SEQ ID NO: 99215 - DNA, 25 bp, Homo sapien
cccctcctgtgggatggatgtgcac

SEQ ID NO: 99216 - DNA, 25 bp, Homo sapien
gaacagtagcatacactcggaaacc

SEQ ID NO: 99217 - DNA, 25 bp, Homo sapien
caatatcaggatcaatagccaggca

SEQ ID NO: 99218 - DNA, 25 bp, Homo sapien
tgttatcaaatttcacccaggcttg

SEQ ID NO: 99219 - DNA, 25 bp, Homo sapien
ggcactgttatcaaatttcacccag

SEQ ID NO: 99220 - DNA, 25 bp, Homo sapien
tatcaaatttcacccaggcttgacc

SEQ ID NO: 99221 - DNA, 25 bp, Homo sapien
cccaggcttgacccctacattttct

SEQ ID NO: 99222 - DNA, 25 bp, Homo sapien
caccttgcaggaaggtcttgaatcc

SEQ ID NO: 99223 - DNA, 25 bp, Homo sapien
gaatccattccaatagcctttattg

SEQ ID NO: 99224 - DNA, 25 bp, Homo sapien
caatagcctttattggatgagtggt

SEQ ID NO: 99225 - DNA, 25 bp, Homo sapien
tattggatgagtggtttctggtgtt

SEQ ID NO: 99226 - DNA, 25 bp, Homo sapien
taataacgatcaaccgaagtcatgt

SEQ ID NO: 99227 - DNA, 25 bp, Homo sapien
cattataataacgatcaaccgaagt

SEQ ID NO: 99228 - DNA, 25 bp, Homo sapien
taacgatcaaccgaagtcatgtatt

SEQ ID NO: 99229 - DNA, 25 bp, Homo sapien
tcaaccgaagtcatgtattttaaag

SEQ ID NO: 99230 - DNA, 25 bp, Homo sapien
cgcagagattgttccaggcatcggg

SEQ ID NO: 99231 - DNA, 25 bp, Homo sapien
gaaataggctctggtagccaaggaa

SEQ ID NO: 99232 - DNA, 25 bp, Homo sapien
gagctgagggcctctaccatgtggg

SEQ ID NO: 99233 - DNA, 25 bp, Homo sapien
cttggcacgcaaatgtgggcgcaga

SEQ ID NO: 99234 - DNA, 25 bp, Homo sapien
aaaactaccattgtggctccttcca

SEQ ID NO: 99235 - DNA, 25 bp, Homo sapien
taaaactaccattgtggctccttcc

SEQ ID NO: 99236 - DNA, 25 bp, Homo sapien
gtccctccatcacactgtacttcag

SEQ ID NO: 99237 - DNA, 25 bp, Homo sapien
aatctgtatatgctttgggagcctg

SEQ ID NO: 99238 - DNA, 25 bp, Homo sapien
cctgtccctccatcacactgtactt

SEQ ID NO: 99239 - DNA, 25 bp, Homo sapien
tctgtatatgctttgggagcctggg

SEQ ID NO: 99240 - DNA, 25 bp, Homo sapien
tcatcttttatagcccttttccgtg

SEQ ID NO: 99241 - DNA, 25 bp, Homo sapien
cttgcatctctgttcccctgaagtg

SEQ ID NO: 99242 - DNA, 25 bp, Homo sapien
tggcacgaccacctggaaggacctg

SEQ ID NO: 99243 - DNA, 25 bp, Homo sapien
tgaagtgaccggcactggcacgacc

SEQ ID NO: 99244 - DNA, 25 bp, Homo sapien
tcctcttttccgtcctccagcctct

SEQ ID NO: 99245 - DNA, 25 bp, Homo sapien
cctcttttccgtcctccagcctctg

SEQ ID NO: 99246 - DNA, 25 bp, Homo sapien
aagccacagtgaaccatctaggtca

SEQ ID NO: 99247 - DNA, 25 bp, Homo sapien
catctaggtcacttatcaacccaca

SEQ ID NO: 99248 - DNA, 25 bp, Homo sapien
aactgtgcatcaaaaccccttcctg

SEQ ID NO: 99249 - DNA, 25 bp, Homo sapien
gtcctccaggaactaccttctccac

SEQ ID NO: 99250 - DNA, 25 bp, Homo sapien
cctgtcctccaggaactaccttctc

SEQ ID NO: 99251 - DNA, 25 bp, Homo sapien
caggaactaccttctccacttttag

SEQ ID NO: 99252 - DNA, 25 bp, Homo sapien
gaatgttgcacaatcagagcgaggc

SEQ ID NO: 99253 - DNA, 25 bp, Homo sapien
tagtgaggtcacaggaactggttct

SEQ ID NO: 99254 - DNA, 25 bp, Homo sapien
tgagtaagacgtgcaattgccttca

SEQ ID NO: 99255 - DNA, 25 bp, Homo sapien
cctgggaagcacataggaaccaaga

SEQ ID NO: 99256 - DNA, 25 bp, Homo sapien
ttggctttggactaggtgcaggaaa

SEQ ID NO: 99257 - DNA, 25 bp, Homo sapien
acctttggctttggactaggtgcag

SEQ ID NO: 99258 - DNA, 25 bp, Homo sapien
ttccaagatgccctccatgtaggtc

SEQ ID NO: 99259 - DNA, 25 bp, Homo sapien
tcagggataagctccatgacctcct

SEQ ID NO: 99260 - DNA, 25 bp, Homo sapien
ttagcagcaggatgggtaaaaggca

SEQ ID NO: 99261 - DNA, 25 bp, Homo sapien
catcttctatggagttatgaaaccc

SEQ ID NO: 99262 - DNA, 25 bp, Homo sapien
ttctgtattttaggtctggctggcc

SEQ ID NO: 99263 - DNA, 25 bp, Homo sapien
tggctggccattctaattgtgtgaa

SEQ ID NO: 99264 - DNA, 25 bp, Homo sapien
gctctccccacttgtacaaggcttg

SEQ ID NO: 99265 - DNA, 25 bp, Homo sapien
tccccacttgtacaaggcttgtgca

SEQ ID NO: 99266 - DNA, 25 bp, Homo sapien
ctgggtctggatttgagcaagttgc

SEQ ID NO: 99267 - DNA, 25 bp, Homo sapien
tggatttgagcaagttgctctcccc

SEQ ID NO: 99268 - DNA, 25 bp, Homo sapien
tgtagcaggttccagccttgttagg

SEQ ID NO: 99269 - DNA, 25 bp, Homo sapien
ggttccagccttgttaggatgccag

SEQ ID NO: 99270 - DNA, 25 bp, Homo sapien
gaaaagcaggcactctggtgtagca

SEQ ID NO: 99271 - DNA, 25 bp, Homo sapien
ttgttaggatgccagggtctattcc

SEQ ID NO: 99272 - DNA, 25 bp, Homo sapien
ccatgcttggatgatttcctctgca

SEQ ID NO: 99273 - DNA, 25 bp, Homo sapien
aatttattcgggctttcacacagtc

SEQ ID NO: 99274 - DNA, 25 bp, Homo sapien
tcagccacgggtttagcttcctcac

SEQ ID NO: 99275 - DNA, 25 bp, Homo sapien
gaagtttccaaaataagccagtggc

SEQ ID NO: 99276 - DNA, 25 bp, Homo sapien
gcacactgagtggaaacaaagccat

SEQ ID NO: 99277 - DNA, 25 bp, Homo sapien
tggattacttgcttaacaacccaga

SEQ ID NO: 99278 - DNA, 25 bp, Homo sapien
gagtccttctaagtggctggcacac

SEQ ID NO: 99279 - DNA, 25 bp, Homo sapien
gcctctggcgacagagcatgcagat

SEQ ID NO: 99280 - DNA, 25 bp, Homo sapien
tacttctggagtatttgctgctggg

SEQ ID NO: 99281 - DNA, 25 bp, Homo sapien
tgtaccaagcagagcatatgcctct

SEQ ID NO: 99282 - DNA, 25 bp, Homo sapien
tttgcatttcttcgctcttctgctt

SEQ ID NO: 99283 - DNA, 25 bp, Homo sapien
tctgcttcgtcctccatttgattta

SEQ ID NO: 99284 - DNA, 25 bp, Homo sapien
ctccaaagcctgatactcggttcat

SEQ ID NO: 99285 - DNA, 25 bp, Homo sapien
tgaacgactgggcaatctcttcagt

SEQ ID NO: 99286 - DNA, 25 bp, Homo sapien
ctttgaacgactgggcaatctcttc

SEQ ID NO: 99287 - DNA, 25 bp, Homo sapien
tgatactcggttcatcccacactgc

SEQ ID NO: 99288 - DNA, 25 bp, Homo sapien
tgttgtgcataaaagcccttccttg

SEQ ID NO: 99289 - DNA, 25 bp, Homo sapien
tagcaccgaagcctgattatcatgt

SEQ ID NO: 99290 - DNA, 25 bp, Homo sapien
gacatctctctccatgtacatttga

SEQ ID NO: 99291 - DNA, 25 bp, Homo sapien
tgtgataatcgctccattagcttgt

SEQ ID NO: 99292 - DNA, 25 bp, Homo sapien
caatcctgaggtttcttagcattct

SEQ ID NO: 99293 - DNA, 25 bp, Homo sapien
gagcaagcagcatgtaactgcatgc

SEQ ID NO: 99294 - DNA, 25 bp, Homo sapien
gctgagctttagaaactgggaaggc

SEQ ID NO: 99295 - DNA, 25 bp, Homo sapien
attctctgttcctggaggagcaagc

SEQ ID NO: 99296 - DNA, 25 bp, Homo sapien
gaatgtgtacctggcgatggtttgc

SEQ ID NO: 99297 - DNA, 25 bp, Homo sapien
tttcatgtgtgtgggaaataagaag

SEQ ID NO: 99298 - DNA, 25 bp, Homo sapien
tgcaaaatcttgacgttaaaaatca

SEQ ID NO: 99299 - DNA, 25 bp, Homo sapien
atcttgacgttaaaaatcaccactg

SEQ ID NO: 99300 - DNA, 25 bp, Homo sapien
caccacttagaagttgctgtagaag

SEQ ID NO: 99301 - DNA, 25 bp, Homo sapien
ccacttagaagttgctgtagaagcc

SEQ ID NO: 99302 - DNA, 25 bp, Homo sapien
gggaaaggagcacaaaaatcaccac

SEQ ID NO: 99303 - DNA, 25 bp, Homo sapien
tagaagttgctgtagaagccttggg

SEQ ID NO: 99304 - DNA, 25 bp, Homo sapien
aacgcaactttggtgcaccgcagcg

SEQ ID NO: 99305 - DNA, 25 bp, Homo sapien
cagtttcttatagaggcagagtcca

SEQ ID NO: 99306 - DNA, 25 bp, Homo sapien
tgtaggtggcactgcaacgcaactt

SEQ ID NO: 99307 - DNA, 25 bp, Homo sapien
tttagtgctccgagaaattcaagcc

SEQ ID NO: 99308 - DNA, 25 bp, Homo sapien
gattgtttcgggcttagtggagtac

SEQ ID NO: 99309 - DNA, 25 bp, Homo sapien
tctgggtagagttttatgtagttta

SEQ ID NO: 99310 - DNA, 25 bp, Homo sapien
cttagtggagtacaaggaatcctga

SEQ ID NO: 99311 - DNA, 25 bp, Homo sapien
ggtcaagttgattgtttcgggctta

SEQ ID NO: 99312 - DNA, 25 bp, Homo sapien
aataactgaaaccattgataagtta

SEQ ID NO: 99313 - DNA, 25 bp, Homo sapien
taactgaaaccattgataagttatc

SEQ ID NO: 99314 - DNA, 25 bp, Homo sapien
actgaaaccattgataagttatccg

SEQ ID NO: 99315 - DNA, 25 bp, Homo sapien
tgataagttatccgttcccaagatc

SEQ ID NO: 99316 - DNA, 25 bp, Homo sapien
gttgagtgcttctatagagcaacag

SEQ ID NO: 99317 - DNA, 25 bp, Homo sapien
tctatagagcaacagaacagtttca

SEQ ID NO: 99318 - DNA, 25 bp, Homo sapien
gcttctatagagcaacagaacagtt

SEQ ID NO: 99319 - DNA, 25 bp, Homo sapien
ttcttgttgagtgcttctatagagc

SEQ ID NO: 99320 - DNA, 25 bp, Homo sapien
acacctgttttctcgctggttattt

SEQ ID NO: 99321 - DNA, 25 bp, Homo sapien
caaagcttgggtctctgctggtcct

SEQ ID NO: 99322 - DNA, 25 bp, Homo sapien
ttttcaaagcttgggtctctgctgg

SEQ ID NO: 99323 - DNA, 25 bp, Homo sapien
tgctggtcctgaatggttgtgagtg

SEQ ID NO: 99324 - DNA, 25 bp, Homo sapien
aggaatagaagcttgctgaattttc

SEQ ID NO: 99325 - DNA, 25 bp, Homo sapien
ctatcccagctgtctttaggcctag

SEQ ID NO: 99326 - DNA, 25 bp, Homo sapien
atcccagctgtctttaggcctaggc

SEQ ID NO: 99327 - DNA, 25 bp, Homo sapien
cttaactggccctcaggacttccct

SEQ ID NO: 99328 - DNA, 25 bp, Homo sapien
ttaggggttgcatgcccgcttcttc

SEQ ID NO: 99329 - DNA, 25 bp, Homo sapien
cacatttcagaggagttaaagaaac

SEQ ID NO: 99330 - DNA, 25 bp, Homo sapien
ttcttcacatttcagaggagttaaa

SEQ ID NO: 99331 - DNA, 25 bp, Homo sapien
ttcacatttcagaggagttaaagaa

SEQ ID NO: 99332 - DNA, 25 bp, Homo sapien
tcttcacatttcagaggagttaaag

SEQ ID NO: 99333 - DNA, 25 bp, Homo sapien
tcactaagggcctcataagcatttt

SEQ ID NO: 99334 - DNA, 25 bp, Homo sapien
ctagaggtcactaagggcctcataa

SEQ ID NO: 99335 - DNA, 25 bp, Homo sapien
ggtcactaagggcctcataagcatt

SEQ ID NO: 99336 - DNA, 25 bp, Homo sapien
agaggtcactaagggcctcataagc

SEQ ID NO: 99337 - DNA, 25 bp, Homo sapien
gcttgtcaaaattgagcttgctccc

SEQ ID NO: 99338 - DNA, 25 bp, Homo sapien
tgtcaaaattgagcttgctcccttc

SEQ ID NO: 99339 - DNA, 25 bp, Homo sapien
tgctgcttgtcaaaattgagcttgc

SEQ ID NO: 99340 - DNA, 25 bp, Homo sapien
tcaaaattgagcttgctcccttcac

SEQ ID NO: 99341 - DNA, 25 bp, Homo sapien
gatggatgggcacgaagaaaacagt

SEQ ID NO: 99342 - DNA, 25 bp, Homo sapien
tattttttgggccagcgtcgcctag

SEQ ID NO: 99343 - DNA, 25 bp, Homo sapien
cagcgtcgcctagaaaaggctcttg

SEQ ID NO: 99344 - DNA, 25 bp, Homo sapien
gagttcccatagaaagatggatggg

SEQ ID NO: 99345 - DNA, 25 bp, Homo sapien
cagacttggatcctggcgggctttc

SEQ ID NO: 99346 - DNA, 25 bp, Homo sapien
gcaaggattgctggtctgaggaaca

SEQ ID NO: 99347 - DNA, 25 bp, Homo sapien
tggaaagaggaatcccagacttgga

SEQ ID NO: 99348 - DNA, 25 bp, Homo sapien
aaacagcgggactgatgggaacact

SEQ ID NO: 99349 - DNA, 25 bp, Homo sapien
tactgtgtgttggccgctttttctg

SEQ ID NO: 99350 - DNA, 25 bp, Homo sapien
catggcacggccatgatactgtgtg

SEQ ID NO: 99351 - DNA, 25 bp, Homo sapien
actgtgtgttggccgctttttctgt

SEQ ID NO: 99352 - DNA, 25 bp, Homo sapien
ggcacggccatgatactgtgtgttg

SEQ ID NO: 99353 - DNA, 25 bp, Homo sapien
gaaccaatttgtgttacgaagccca

SEQ ID NO: 99354 - DNA, 25 bp, Homo sapien
ttgtgttacgaagcccaaatggctc

SEQ ID NO: 99355 - DNA, 25 bp, Homo sapien
gaataccttgagaaccaatttgtgt

SEQ ID NO: 99356 - DNA, 25 bp, Homo sapien
gcccgccgaataccttgagaaccaa

SEQ ID NO: 99357 - DNA, 25 bp, Homo sapien
gaacctcagcaaacagcaccgctaa

SEQ ID NO: 99358 - DNA, 25 bp, Homo sapien
cagcaaacagcaccgctaagggtag

SEQ ID NO: 99359 - DNA, 25 bp, Homo sapien
aaacagcaccgctaagggtaggagg

SEQ ID NO: 99360 - DNA, 25 bp, Homo sapien
ctcagcaaacagcaccgctaagggt

SEQ ID NO: 99361 - DNA, 25 bp, Homo sapien
cactgttagtctcttggtgttccag

SEQ ID NO: 99362 - DNA, 25 bp, Homo sapien
tccctgagatgtggtgttaagagta

SEQ ID NO: 99363 - DNA, 25 bp, Homo sapien
ggacttgcacacttccttttcgtca

SEQ ID NO: 99364 - DNA, 25 bp, Homo sapien
cgtcatctttcagcagagttgtaca

SEQ ID NO: 99365 - DNA, 25 bp, Homo sapien
tttgacactggttgtgccttgcctg

SEQ ID NO: 99366 - DNA, 25 bp, Homo sapien
attttgacactggttgtgccttgcc

SEQ ID NO: 99367 - DNA, 25 bp, Homo sapien
tgacactggttgtgccttgcctgaa

SEQ ID NO: 99368 - DNA, 25 bp, Homo sapien
ttgacactggttgtgccttgcctga

SEQ ID NO: 99369 - DNA, 25 bp, Homo sapien
tctggactctcctacagtgctcgtc

SEQ ID NO: 99370 - DNA, 25 bp, Homo sapien
cacctccttggaaccatatccgata

SEQ ID NO: 99371 - DNA, 25 bp, Homo sapien
ccctcttcatccttaagcctttggg

SEQ ID NO: 99372 - DNA, 25 bp, Homo sapien
tatccgatactcatctaaccatacc

SEQ ID NO: 99373 - DNA, 25 bp, Homo sapien
ctaatcctgaagctgtcaaagggct

SEQ ID NO: 99374 - DNA, 25 bp, Homo sapien
ttaagtcttatcttctgccacagca

SEQ ID NO: 99375 - DNA, 25 bp, Homo sapien
ctgtcaaagggcttttaggattaag

SEQ ID NO: 99376 - DNA, 25 bp, Homo sapien
tcaaggattaatccctaatcctgaa

SEQ ID NO: 99377 - DNA, 25 bp, Homo sapien
aacatgtttgaaatgcagtgtgctc

SEQ ID NO: 99378 - DNA, 25 bp, Homo sapien
aaattacatgtctaacatgtttgaa

SEQ ID NO: 99379 - DNA, 25 bp, Homo sapien
gaagaatcagaaagcgggacctatg

SEQ ID NO: 99380 - DNA, 25 bp, Homo sapien
aagaatcagaaagcgggacctatga

SEQ ID NO: 99381 - DNA, 25 bp, Homo sapien
agaatcagaaagcgggacctatgag

SEQ ID NO: 99382 - DNA, 25 bp, Homo sapien
ggaagaatcagaaagcgggacctat

SEQ ID NO: 99383 - DNA, 25 bp, Homo sapien
ttacagttcctgtcaacgctctcat

SEQ ID NO: 99384 - DNA, 25 bp, Homo sapien
tcctgggctaggagcagcttagtgt

SEQ ID NO: 99385 - DNA, 25 bp, Homo sapien
tgatttggaaccagggtgtcctcct

SEQ ID NO: 99386 - DNA, 25 bp, Homo sapien
gaaaaggctctctatgactctcaca

SEQ ID NO: 99387 - DNA, 25 bp, Homo sapien
tgtccactgtggttgaccatgagct

SEQ ID NO: 99388 - DNA, 25 bp, Homo sapien
gactggcagtattttatccgctttg

SEQ ID NO: 99389 - DNA, 25 bp, Homo sapien
tatccgctttgtagtcttaacaggt

SEQ ID NO: 99390 - DNA, 25 bp, Homo sapien
tgtggttgaccatgagctcctggca

SEQ ID NO: 99391 - DNA, 25 bp, Homo sapien
ggtgctttcacatactggtgcattt

SEQ ID NO: 99392 - DNA, 25 bp, Homo sapien
cacactgggtgctttcacatactgg

SEQ ID NO: 99393 - DNA, 25 bp, Homo sapien
tggtgccacttcctgaacacactgg

SEQ ID NO: 99394 - DNA, 25 bp, Homo sapien
caaattggtgccacttcctgaacac

SEQ ID NO: 99395 - DNA, 25 bp, Homo sapien
tggagaacgtgacctccttgttcat

SEQ ID NO: 99396 - DNA, 25 bp, Homo sapien
tctgtgatattgtgtcggatgaggc

SEQ ID NO: 99397 - DNA, 25 bp, Homo sapien
atattgtgtcggatgaggccaccct

SEQ ID NO: 99398 - DNA, 25 bp, Homo sapien
gatattgtgtcggatgaggccaccc

SEQ ID NO: 99399 - DNA, 25 bp, Homo sapien
tgtgatattgtgtcggatgaggcca

SEQ ID NO: 99400 - DNA, 25 bp, Homo sapien
gattctggacttgacaaaacccagc

SEQ ID NO: 99401 - DNA, 25 bp, Homo sapien
aaaacccagcattgccctgttgtcc

SEQ ID NO: 99402 - DNA, 25 bp, Homo sapien
ctggacttgacaaaacccagcattg

SEQ ID NO: 99403 - DNA, 25 bp, Homo sapien
cagattctggacttgacaaaaccca

SEQ ID NO: 99404 - DNA, 25 bp, Homo sapien
tcatcagcagatgggaggtctccct

SEQ ID NO: 99405 - DNA, 25 bp, Homo sapien
caaaggatttctcaatgccgcctga

SEQ ID NO: 99406 - DNA, 25 bp, Homo sapien
tgtgtttcccagagcaaggtattcc

SEQ ID NO: 99407 - DNA, 25 bp, Homo sapien
tgccgcctgaatcaaagcctgtgtt

SEQ ID NO: 99408 - DNA, 25 bp, Homo sapien
cagtgagtattcttatcttaaacct

SEQ ID NO: 99409 - DNA, 25 bp, Homo sapien
ccgatttcagtgagtattcttatct

SEQ ID NO: 99410 - DNA, 25 bp, Homo sapien
tctagtcattgtgtggtctaggcac

SEQ ID NO: 99411 - DNA, 25 bp, Homo sapien
gagctgccgtaatattttagtgttc

SEQ ID NO: 99412 - DNA, 25 bp, Homo sapien
acaggtgttccgtggaacagagttt

SEQ ID NO: 99413 - DNA, 25 bp, Homo sapien
tccgtggaacagagtttagagtagg

SEQ ID NO: 99414 - DNA, 25 bp, Homo sapien
tgttccgtggaacagagtttagagt

SEQ ID NO: 99415 - DNA, 25 bp, Homo sapien
ggtgttccgtggaacagagtttaga

SEQ ID NO: 99416 - DNA, 25 bp, Homo sapien
gttggactcagctagagggttcaca

SEQ ID NO: 99417 - DNA, 25 bp, Homo sapien
tgtgcaagcataccaggagagctct

SEQ ID NO: 99418 - DNA, 25 bp, Homo sapien
gagtcttgcatcctgacattgcccc

SEQ ID NO: 99419 - DNA, 25 bp, Homo sapien
accttggagcttggtgttggactca

SEQ ID NO: 99420 - DNA, 25 bp, Homo sapien
gaaatcgtacaatgaccaagatgcg

SEQ ID NO: 99421 - DNA, 25 bp, Homo sapien
caccctacgaagttggaatgagacc

SEQ ID NO: 99422 - DNA, 25 bp, Homo sapien
ccaagatgcgaccaggatcagaggt

SEQ ID NO: 99423 - DNA, 25 bp, Homo sapien
tatacacaggatacgtcttcatgcc

SEQ ID NO: 99424 - DNA, 25 bp, Homo sapien
gctttcctcatggaggtaaagtgac

SEQ ID NO: 99425 - DNA, 25 bp, Homo sapien
gtaggagagagcatctatgttcctg

SEQ ID NO: 99426 - DNA, 25 bp, Homo sapien
ccaccttcttgagtcagctttgttc

SEQ ID NO: 99427 - DNA, 25 bp, Homo sapien
aaatccagtggtagggtgggattca

SEQ ID NO: 99428 - DNA, 25 bp, Homo sapien
agaaagcttagagaatggattttgc

SEQ ID NO: 99429 - DNA, 25 bp, Homo sapien
cacactatagaaagcttagagaatg

SEQ ID NO: 99430 - DNA, 25 bp, Homo sapien
tcagcacactatagaaagcttagag

SEQ ID NO: 99431 - DNA, 25 bp, Homo sapien
ctatagaaagcttagagaatggatt

SEQ ID NO: 99432 - DNA, 25 bp, Homo sapien
ctgtgtgtcgcctgcacttcggccg

SEQ ID NO: 99433 - DNA, 25 bp, Homo sapien
cctggaggaaatctccgaaggtgat

SEQ ID NO: 99434 - DNA, 25 bp, Homo sapien
tcggccgcaactgcctttggttcag

SEQ ID NO: 99435 - DNA, 25 bp, Homo sapien
tctccgaaggtgatgtgtaaccctg

SEQ ID NO: 99436 - DNA, 25 bp, Homo sapien
cctggttctactaccagtacctgct

SEQ ID NO: 99437 - DNA, 25 bp, Homo sapien
tggtcacggcgctctacatgctgga

SEQ ID NO: 99438 - DNA, 25 bp, Homo sapien
ggagccctgggagcggacggtgttc

SEQ ID NO: 99439 - DNA, 25 bp, Homo sapien
gaagcagatgtcctggttctactac

SEQ ID NO: 99440 - DNA, 25 bp, Homo sapien
tcttggggaaagagctaccagttcc

SEQ ID NO: 99441 - DNA, 25 bp, Homo sapien
ttggggaaagagctaccagttcctg

SEQ ID NO: 99442 - DNA, 25 bp, Homo sapien
ctcctcttggggaaagagctaccag

SEQ ID NO: 99443 - DNA, 25 bp, Homo sapien
tattaaggctttggatctggtcccc

SEQ ID NO: 99444 - DNA, 25 bp, Homo sapien
gaaaatcacctaaagtactggcatc

SEQ ID NO: 99445 - DNA, 25 bp, Homo sapien
catctagactgtcagctgacatcag

SEQ ID NO: 99446 - DNA, 25 bp, Homo sapien
tgctgacagtaaagcccctgtgtgg

SEQ ID NO: 99447 - DNA, 25 bp, Homo sapien
gacatcagggttcctcgtctaccag

SEQ ID NO: 99448 - DNA, 25 bp, Homo sapien
aggggcaagcgcttccttctttgct

SEQ ID NO: 99449 - DNA, 25 bp, Homo sapien
ttcggctttaggaggggcaagcgct

SEQ ID NO: 99450 - DNA, 25 bp, Homo sapien
aggaggggcaagcgcttccttcttt

SEQ ID NO: 99451 - DNA, 25 bp, Homo sapien
tcggctttaggaggggcaagcgctt

SEQ ID NO: 99452 - DNA, 25 bp, Homo sapien
gtcttctttttttgtggatgtggac

SEQ ID NO: 99453 - DNA, 25 bp, Homo sapien
ctcgagtcgcagtgtcctgggcctc

SEQ ID NO: 99454 - DNA, 25 bp, Homo sapien
tcgagtcgcagtgtcctgggcctct

SEQ ID NO: 99455 - DNA, 25 bp, Homo sapien
tgtggatgtggacatctttcatcac

SEQ ID NO: 99456 - DNA, 25 bp, Homo sapien
cttggccgcatcattgtcagggagc

SEQ ID NO: 99457 - DNA, 25 bp, Homo sapien
caccctgaacacatatgtggtgttg

SEQ ID NO: 99458 - DNA, 25 bp, Homo sapien
catccaccctgaacacatatgtggt

SEQ ID NO: 99459 - DNA, 25 bp, Homo sapien
tgaccttggccgcatcattgtcagg

SEQ ID NO: 99460 - DNA, 25 bp, Homo sapien
tacacatatttagaattagccagct

SEQ ID NO: 99461 - DNA, 25 bp, Homo sapien
gatacacatatttagaattagccag

SEQ ID NO: 99462 - DNA, 25 bp, Homo sapien
ttagatgatcccatttttttttggc

SEQ ID NO: 99463 - DNA, 25 bp, Homo sapien
aaagatacacatatttagaattagc

SEQ ID NO: 99464 - DNA, 25 bp, Homo sapien
ctcccgacctaaggcaatccatccg

SEQ ID NO: 99465 - DNA, 25 bp, Homo sapien
aacaagcatacaccaagcatgatgg

SEQ ID NO: 99466 - DNA, 25 bp, Homo sapien
tctcccagcctaagctcagttttta

SEQ ID NO: 99467 - DNA, 25 bp, Homo sapien
tttaatatgatgaccaggcacggtg

SEQ ID NO: 99468 - DNA, 25 bp, Homo sapien
tttcccccttattgatgggactgat

SEQ ID NO: 99469 - DNA, 25 bp, Homo sapien
gatgaacatttggaaactgtcgggc

SEQ ID NO: 99470 - DNA, 25 bp, Homo sapien
cttattgatgggactgatattcatt

SEQ ID NO: 99471 - DNA, 25 bp, Homo sapien
ttcattcatctcttacatctctcac

SEQ ID NO: 99472 - DNA, 25 bp, Homo sapien
ctaggtacactgcttatggagtagc

SEQ ID NO: 99473 - DNA, 25 bp, Homo sapien
atcccaaaaggaaacgctgtactgt

SEQ ID NO: 99474 - DNA, 25 bp, Homo sapien
caatgttgcacagccaccactttta

SEQ ID NO: 99475 - DNA, 25 bp, Homo sapien
tgagatgaggctactctaggtacac

SEQ ID NO: 99476 - DNA, 25 bp, Homo sapien
taaagagacgaaacgctgaccagct

SEQ ID NO: 99477 - DNA, 25 bp, Homo sapien
tgaatgaggcaagacaacatgcggc

SEQ ID NO: 99478 - DNA, 25 bp, Homo sapien
ggattagaccaagaacgggcgctca

SEQ ID NO: 99479 - DNA, 25 bp, Homo sapien
gatgaagggcctagacctggatcca

SEQ ID NO: 99480 - DNA, 25 bp, Homo sapien
accactggacggctgctttcattct

SEQ ID NO: 99481 - DNA, 25 bp, Homo sapien
gaccaccttggtaaatacagaatgg

SEQ ID NO: 99482 - DNA, 25 bp, Homo sapien
gaaacactgtatagcttctggccct

SEQ ID NO: 99483 - DNA, 25 bp, Homo sapien
tggcaaacggttaagtgaaacactg

SEQ ID NO: 99484 - DNA, 25 bp, Homo sapien
caccgttgccgctaggggaagacac

SEQ ID NO: 99485 - DNA, 25 bp, Homo sapien
gcactcggatatcgcgcgcgggaca

SEQ ID NO: 99486 - DNA, 25 bp, Homo sapien
tcgctccaccgttgccgctagggga

SEQ ID NO: 99487 - DNA, 25 bp, Homo sapien
aagacaccccgacagcactcggata

SEQ ID NO: 99488 - DNA, 25 bp, Homo sapien
catccggagtgcaatggataagcct

SEQ ID NO: 99489 - DNA, 25 bp, Homo sapien
caggggaaagcgcgaacgcagtccc

SEQ ID NO: 99490 - DNA, 25 bp, Homo sapien
agtgcaatggataagcctcgccctg

SEQ ID NO: 99491 - DNA, 25 bp, Homo sapien
gggaaagcgcgaacgcagtccccca

SEQ ID NO: 99492 - DNA, 25 bp, Homo sapien
cgtgaaaacgaaagcgaactgccca

SEQ ID NO: 99493 - DNA, 25 bp, Homo sapien
tggcctggagaaagcacgagatcgt

SEQ ID NO: 99494 - DNA, 25 bp, Homo sapien
taattggcgcgttactaaaggatcc

SEQ ID NO: 99495 - DNA, 25 bp, Homo sapien
cgttttcacgacaataccctggaga

SEQ ID NO: 99496 - DNA, 25 bp, Homo sapien
ctggagcaggtggaattacaggcac

SEQ ID NO: 99497 - DNA, 25 bp, Homo sapien
acaggcacgcgccacgccgcctggc

SEQ ID NO: 99498 - DNA, 25 bp, Homo sapien
cagcctctggagcaggtggaattac

SEQ ID NO: 99499 - DNA, 25 bp, Homo sapien
gcctctggagcaggtggaattacag

SEQ ID NO: 99500 - DNA, 25 bp, Homo sapien
tgggcgaaaactcgcagcctcagtt

SEQ ID NO: 99501 - DNA, 25 bp, Homo sapien
gagttttccttccagcgtcactaca

SEQ ID NO: 99502 - DNA, 25 bp, Homo sapien
ctgccactgaagaggacccggcttc

SEQ ID NO: 99503 - DNA, 25 bp, Homo sapien
tactgaggtggtttcgcacttaacg

SEQ ID NO: 99504 - DNA, 25 bp, Homo sapien
tacaaggccctcaagaacaggagac

SEQ ID NO: 99505 - DNA, 25 bp, Homo sapien
gcatgacagtgaaggccggactaca

SEQ ID NO: 99506 - DNA, 25 bp, Homo sapien
ttctggaaggactagaacggagtca

SEQ ID NO: 99507 - DNA, 25 bp, Homo sapien
aagcaggcgtgtcatgcatgacagt

SEQ ID NO: 99508 - DNA, 25 bp, Homo sapien
gcggtggggccgcaaactctctttc

SEQ ID NO: 99509 - DNA, 25 bp, Homo sapien
cggcccagacgctagatcccttggg

SEQ ID NO: 99510 - DNA, 25 bp, Homo sapien
aaggtgagcccaaacccgagccctg

SEQ ID NO: 99511 - DNA, 25 bp, Homo sapien
ggggccgcaaactctctttcgctcg

SEQ ID NO: 99512 - DNA, 25 bp, Homo sapien
agaagagaaggggccgaaacttgct

SEQ ID NO: 99513 - DNA, 25 bp, Homo sapien
ttctgttgggctggcgagaagagaa

SEQ ID NO: 99514 - DNA, 25 bp, Homo sapien
gagaagagaaggggccgaaacttgc

SEQ ID NO: 99515 - DNA, 25 bp, Homo sapien
cgagaagagaaggggccgaaacttg

SEQ ID NO: 99516 - DNA, 25 bp, Homo sapien
acgatgttctgtcaagctgcttggg

SEQ ID NO: 99517 - DNA, 25 bp, Homo sapien
ggaaaacgatgttctgtcaagctgc

SEQ ID NO: 99518 - DNA, 25 bp, Homo sapien
gaagatgctcaaggaaaacgatgtt

SEQ ID NO: 99519 - DNA, 25 bp, Homo sapien
cagggaagatgctcaaggaaaacga

SEQ ID NO: 99520 - DNA, 25 bp, Homo sapien
catttgtatcccaagtccgcagttt

SEQ ID NO: 99521 - DNA, 25 bp, Homo sapien
tgccacatgccgttgtgcaaggtag

SEQ ID NO: 99522 - DNA, 25 bp, Homo sapien
gacgattccggtagacccagatggg

SEQ ID NO: 99523 - DNA, 25 bp, Homo sapien
gcgtagtcagccttcttccatggcg

SEQ ID NO: 99524 - DNA, 25 bp, Homo sapien
ctttcttcaaaaagtggcttggcct

SEQ ID NO: 99525 - DNA, 25 bp, Homo sapien
gcctttttattctcctggagatgcc

SEQ ID NO: 99526 - DNA, 25 bp, Homo sapien
tccaggtaccaaggcggccgctaca

SEQ ID NO: 99527 - DNA, 25 bp, Homo sapien
ggtctcccggccatgattgttgctt

SEQ ID NO: 99528 - DNA, 25 bp, Homo sapien
ccaggctattcaccaggcggcccct

SEQ ID NO: 99529 - DNA, 25 bp, Homo sapien
ggctattcaccaggcggcccctcct

SEQ ID NO: 99530 - DNA, 25 bp, Homo sapien
caggctattcaccaggcggcccctc

SEQ ID NO: 99531 - DNA, 25 bp, Homo sapien
ggccaggctattcaccaggcggccc

SEQ ID NO: 99532 - DNA, 25 bp, Homo sapien
cagatcacaagaagattgaggttgg

SEQ ID NO: 99533 - DNA, 25 bp, Homo sapien
catgctgtatacactgtccacccat

SEQ ID NO: 99534 - DNA, 25 bp, Homo sapien
agctgtcttggttgtcaacataaca

SEQ ID NO: 99535 - DNA, 25 bp, Homo sapien
aacattgagtcatgcctctgtccag

SEQ ID NO: 99536 - DNA, 25 bp, Homo sapien
taggaatgcactctaaaaagtgggc

SEQ ID NO: 99537 - DNA, 25 bp, Homo sapien
cattattagggtgcttattgtagga

SEQ ID NO: 99538 - DNA, 25 bp, Homo sapien
cttggcccctggtttacattattag

SEQ ID NO: 99539 - DNA, 25 bp, Homo sapien
ggcgtagaatgaaagcagccgtcca

SEQ ID NO: 99540 - DNA, 25 bp, Homo sapien
taagcccatgtgatgtccaccagtg

SEQ ID NO: 99541 - DNA, 25 bp, Homo sapien
ccagtggatgaatgctggaccgaga

SEQ ID NO: 99542 - DNA, 25 bp, Homo sapien
ttctggatccaggtctaggcccttc

SEQ ID NO: 99543 - DNA, 25 bp, Homo sapien
tctgcctcagttctcgactctaaag

SEQ ID NO: 99544 - DNA, 25 bp, Homo sapien
cccagtgctgtttgaactgttgagt

SEQ ID NO: 99545 - DNA, 25 bp, Homo sapien
cagcgtttcgtctctttaactgaca

SEQ ID NO: 99546 - DNA, 25 bp, Homo sapien
tgagtttccgttgctggctgagtgc

SEQ ID NO: 99547 - DNA, 25 bp, Homo sapien
gagtgcgttttgtccttcacgtaac

SEQ ID NO: 99548 - DNA, 25 bp, Homo sapien
tttgggcctgtcaccccttggatgg

SEQ ID NO: 99549 - DNA, 25 bp, Homo sapien
tgatgattccacacttcctcagccg

SEQ ID NO: 99550 - DNA, 25 bp, Homo sapien
tcctgagcgcccgttcttggtctaa

SEQ ID NO: 99551 - DNA, 25 bp, Homo sapien
tggtctaatccccagtcgtgatgat

SEQ ID NO: 99552 - DNA, 25 bp, Homo sapien
ttttctgagaaacatggagcagcgc

SEQ ID NO: 99553 - DNA, 25 bp, Homo sapien
tgatgccgcactgtgttccccatga

SEQ ID NO: 99554 - DNA, 25 bp, Homo sapien
tgccagtctgtgtgccgtgatgccg

SEQ ID NO: 99555 - DNA, 25 bp, Homo sapien
catcgtgcactcgtcatactcagaa

SEQ ID NO: 99556 - DNA, 25 bp, Homo sapien
gaagctgaaagtccccgaatgggtg

SEQ ID NO: 99557 - DNA, 25 bp, Homo sapien
tgtgcccagccttttactaagtaat

SEQ ID NO: 99558 - DNA, 25 bp, Homo sapien
gcccacggcagcctcagtcccctga

SEQ ID NO: 99559 - DNA, 25 bp, Homo sapien
cacagcccacggcagcctcagtccc

SEQ ID NO: 99560 - DNA, 25 bp, Homo sapien
cagccttttactaagtaattatatg

SEQ ID NO: 99561 - DNA, 25 bp, Homo sapien
tgcaggtagcccatggtatctttac

SEQ ID NO: 99562 - DNA, 25 bp, Homo sapien
tcacccggtgtggacatctcgaact

SEQ ID NO: 99563 - DNA, 25 bp, Homo sapien
tctctctcaaatagtacaggtgtag

SEQ ID NO: 99564 - DNA, 25 bp, Homo sapien
tatagtagccgaatcaactcctgtc

SEQ ID NO: 99565 - DNA, 25 bp, Homo sapien
atcaagatccttgcgtctgtcattc

SEQ ID NO: 99566 - DNA, 25 bp, Homo sapien
aaacctaaagaaatcaagatccttg

SEQ ID NO: 99567 - DNA, 25 bp, Homo sapien
aatcaagatccttgcgtctgtcatt

SEQ ID NO: 99568 - DNA, 25 bp, Homo sapien
tcaagatccttgcgtctgtcattcc

SEQ ID NO: 99569 - DNA, 25 bp, Homo sapien
cattcatcactcagaagaaatcttg

SEQ ID NO: 99570 - DNA, 25 bp, Homo sapien
ctgtcaaatgctagtttgttatact

SEQ ID NO: 99571 - DNA, 25 bp, Homo sapien
tgctagtttgttatacttcttcaaa

SEQ ID NO: 99572 - DNA, 25 bp, Homo sapien
ccattcatcactcagaagaaatctt

SEQ ID NO: 99573 - DNA, 25 bp, Homo sapien
gaacttgctggcttgctgccataca

SEQ ID NO: 99574 - DNA, 25 bp, Homo sapien
ggaacttgctggcttgctgccatac

SEQ ID NO: 99575 - DNA, 25 bp, Homo sapien
tttaatacacatgctgttgaagtga

SEQ ID NO: 99576 - DNA, 25 bp, Homo sapien
ttttaatacacatgctgttgaagtg

SEQ ID NO: 99577 - DNA, 25 bp, Homo sapien
cctgggcagggtcagtgctaatctc

SEQ ID NO: 99578 - DNA, 25 bp, Homo sapien
tttttaatacacatgctgttgaagt

SEQ ID NO: 99579 - DNA, 25 bp, Homo sapien
ttacggcagtgagagtcacggccaa

SEQ ID NO: 99580 - DNA, 25 bp, Homo sapien
cagtgagagtcacggccaacttcct

SEQ ID NO: 99581 - DNA, 25 bp, Homo sapien
gagcagttacggcagtgagagtcac

SEQ ID NO: 99582 - DNA, 25 bp, Homo sapien
gagagtcacggccaacttcctctgt

SEQ ID NO: 99583 - DNA, 25 bp, Homo sapien
tcaaaattggtaacggatttgcctc

SEQ ID NO: 99584 - DNA, 25 bp, Homo sapien
aaattggtaacggatttgcctctgg

SEQ ID NO: 99585 - DNA, 25 bp, Homo sapien
attggtaacggatttgcctctgggt

SEQ ID NO: 99586 - DNA, 25 bp, Homo sapien
ctttgctcaataggaactgtacttt

SEQ ID NO: 99587 - DNA, 25 bp, Homo sapien
gcgcttcctttttcgcttttggcgc

SEQ ID NO: 99588 - DNA, 25 bp, Homo sapien
cgtcttcgcctttaaagcctttgct

SEQ ID NO: 99589 - DNA, 25 bp, Homo sapien
agcctttgctttggcttcggcttcg

SEQ ID NO: 99590 - DNA, 25 bp, Homo sapien
taaagcctttgctttggcttcggct

SEQ ID NO: 99591 - DNA, 25 bp, Homo sapien
gcctttgctttggcttcggcttcgg

SEQ ID NO: 99592 - DNA, 25 bp, Homo sapien
ctcgagtcgcagtgtcctgggcctc

SEQ ID NO: 99593 - DNA, 25 bp, Homo sapien
tcgagtcgcagtgtcctgggcctcc

SEQ ID NO: 99594 - DNA, 25 bp, Homo sapien
ttgtgtggatgtggacatctttcaa

SEQ ID NO: 99595 - DNA, 25 bp, Homo sapien
ctttttttgtgtggatgtggacatc

SEQ ID NO: 99596 - DNA, 25 bp, Homo sapien
atgatggcataacggtcaagcttgt

SEQ ID NO: 99597 - DNA, 25 bp, Homo sapien
tccaccgtgaacacaagtgtggtgt

SEQ ID NO: 99598 - DNA, 25 bp, Homo sapien
catccaccgtgaacacaagtgtggt

SEQ ID NO: 99599 - DNA, 25 bp, Homo sapien
ccaccgtgaacacaagtgtggtgtt

SEQ ID NO: 99600 - DNA, 25 bp, Homo sapien
accgtgaacacaagtgtggtgttgt

SEQ ID NO: 99601 - DNA, 25 bp, Homo sapien
ttttttggcaacatccaaaacatcg

SEQ ID NO: 99602 - DNA, 25 bp, Homo sapien
ttttggcaacatccaaaacatcgta

SEQ ID NO: 99603 - DNA, 25 bp, Homo sapien
aaacatcgtaatcaggagccagtca

SEQ ID NO: 99604 - DNA, 25 bp, Homo sapien
acatcgtaatcaggagccagtcaaa

SEQ ID NO: 99605 - DNA, 25 bp, Homo sapien
gaggaatcatccctccacttaaatt

SEQ ID NO: 99606 - DNA, 25 bp, Homo sapien
tgctctggaacatccaactaattgc

SEQ ID NO: 99607 - DNA, 25 bp, Homo sapien
ttttgaagacagcatgagtttatgg

SEQ ID NO: 99608 - DNA, 25 bp, Homo sapien
cccatagtatgggaacggtaatatc

SEQ ID NO: 99609 - DNA, 25 bp, Homo sapien
tgtaactgatacttggcaccatgga

SEQ ID NO: 99610 - DNA, 25 bp, Homo sapien
taagcagtcagtcgtggctcagaac

SEQ ID NO: 99611 - DNA, 25 bp, Homo sapien
agaacttaaccccatagctcagagg

SEQ ID NO: 99612 - DNA, 25 bp, Homo sapien
aatacatctttgtgcgtagagccaa

SEQ ID NO: 99613 - DNA, 25 bp, Homo sapien
cattgttttgagatcaaactcccca

SEQ ID NO: 99614 - DNA, 25 bp, Homo sapien
aatggccacgttgcaataaaaattg

SEQ ID NO: 99615 - DNA, 25 bp, Homo sapien
ttaccatgtgagtcctgcaacacta

SEQ ID NO: 99616 - DNA, 25 bp, Homo sapien
taaaagagccttaaatggaacattg

SEQ ID NO: 99617 - DNA, 25 bp, Homo sapien
tttaagcagcctatcagtgattgcc

SEQ ID NO: 99618 - DNA, 25 bp, Homo sapien
gaaagtattatccactggtcagatg

SEQ ID NO: 99619 - DNA, 25 bp, Homo sapien
tggttatatgcctcccttgcagcaa

SEQ ID NO: 99620 - DNA, 25 bp, Homo sapien
tatggcagcacggatataacactat

SEQ ID NO: 99621 - DNA, 25 bp, Homo sapien
ttaagatgattaaatcacacctgta

SEQ ID NO: 99622 - DNA, 25 bp, Homo sapien
taagatgattaaatcacacctgtaa

SEQ ID NO: 99623 - DNA, 25 bp, Homo sapien
tttaagatgattaaatcacacctgt

SEQ ID NO: 99624 - DNA, 25 bp, Homo sapien
tccgctatagcacagtttagaaaag

SEQ ID NO: 99625 - DNA, 25 bp, Homo sapien
tgaagtgctgtaccagtgctggctg

SEQ ID NO: 99626 - DNA, 25 bp, Homo sapien
tacatggatgagtcttccgctatag

SEQ ID NO: 99627 - DNA, 25 bp, Homo sapien
cattcatgtgtccagagatcttgga

SEQ ID NO: 99628 - DNA, 25 bp, Homo sapien
ttaggacttaattttcataatgatg

SEQ ID NO: 99629 - DNA, 25 bp, Homo sapien
aggacttaattttcataatgatgtc

SEQ ID NO: 99630 - DNA, 25 bp, Homo sapien
taggacttaattttcataatgatgt

SEQ ID NO: 99631 - DNA, 25 bp, Homo sapien
aagcaaacctaatatgatcagagct

SEQ ID NO: 99632 - DNA, 25 bp, Homo sapien
gggtcaaaagagaaaccataatgga

SEQ ID NO: 99633 - DNA, 25 bp, Homo sapien
taacatgtgttaaatacagcccctc

SEQ ID NO: 99634 - DNA, 25 bp, Homo sapien
tactctaagtagatagaaaatttcc

SEQ ID NO: 99635 - DNA, 25 bp, Homo sapien
cactccagccaacggtgtaaaagca

SEQ ID NO: 99636 - DNA, 25 bp, Homo sapien
acactccagccaacggtgtaaaagc

SEQ ID NO: 99637 - DNA, 25 bp, Homo sapien
tgtcctttagcatgtctgacagtag

SEQ ID NO: 99638 - DNA, 25 bp, Homo sapien
aattactgtattacttgtccatgtc

SEQ ID NO: 99639 - DNA, 25 bp, Homo sapien
caaagattgtaacctttaaatggag

SEQ ID NO: 99640 - DNA, 25 bp, Homo sapien
ccattaaatatagggtttgggatgc

SEQ ID NO: 99641 - DNA, 25 bp, Homo sapien
taataatgtagttctcccaggctct

SEQ ID NO: 99642 - DNA, 25 bp, Homo sapien
gctgctacaccgaaagccgtttgtg

SEQ ID NO: 99643 - DNA, 25 bp, Homo sapien
gagatcttccgccactacgagtaag

SEQ ID NO: 99644 - DNA, 25 bp, Homo sapien
ccttcagagccgaaagtagatcaga

SEQ ID NO: 99645 - DNA, 25 bp, Homo sapien
tgatagcttttgatggaatagaata

SEQ ID NO: 99646 - DNA, 25 bp, Homo sapien
tgagtatgatcgtgagaaaactgag

SEQ ID NO: 99647 - DNA, 25 bp, Homo sapien
taacgacttttgatcatgatttgaa

SEQ ID NO: 99648 - DNA, 25 bp, Homo sapien
caatgaacaactgtataacattcat

SEQ ID NO: 99649 - DNA, 25 bp, Homo sapien
ctcttgtttcctgataaccacctct

SEQ ID NO: 99650 - DNA, 25 bp, Homo sapien
ttgtttcctgataaccacctcttct

SEQ ID NO: 99651 - DNA, 25 bp, Homo sapien
tcttgtttcctgataaccacctctt

SEQ ID NO: 99652 - DNA, 25 bp, Homo sapien
tgtttcctgataaccacctcttctt

SEQ ID NO: 99653 - DNA, 25 bp, Homo sapien
tgtaggaactctttaatattagaaa

SEQ ID NO: 99654 - DNA, 25 bp, Homo sapien
tttgtaggaactctttaatattaga

SEQ ID NO: 99655 - DNA, 25 bp, Homo sapien
attctttgtcttaggctatgagtaa

SEQ ID NO: 99656 - DNA, 25 bp, Homo sapien
tcttaggctatgagtaagacatgtt

SEQ ID NO: 99657 - DNA, 25 bp, Homo sapien
ctggagattcattgaaggaagaaaa

SEQ ID NO: 99658 - DNA, 25 bp, Homo sapien
aaaaggtgactgtcagagtccctgc

SEQ ID NO: 99659 - DNA, 25 bp, Homo sapien
agaaaaaaggtgactgtcagagtcc

SEQ ID NO: 99660 - DNA, 25 bp, Homo sapien
aaggtgactgtcagagtccctgctg

SEQ ID NO: 99661 - DNA, 25 bp, Homo sapien
cttcttccaactgattcgccagaag

SEQ ID NO: 99662 - DNA, 25 bp, Homo sapien
ttccaactgattcgccagaagcatc

SEQ ID NO: 99663 - DNA, 25 bp, Homo sapien
tgattcgccagaagcatcaggcctc

SEQ ID NO: 99664 - DNA, 25 bp, Homo sapien
caactgattcgccagaagcatcagg

SEQ ID NO: 99665 - DNA, 25 bp, Homo sapien
ctagcactgactgaccaccccacca

SEQ ID NO: 99666 - DNA, 25 bp, Homo sapien
tcctagcactgactgaccaccccac

SEQ ID NO: 99667 - DNA, 25 bp, Homo sapien
cttcctagcactgactgaccacccc

SEQ ID NO: 99668 - DNA, 25 bp, Homo sapien
tagcactgactgaccaccccaccat

SEQ ID NO: 99669 - DNA, 25 bp, Homo sapien
tgcgtgcacgtccaagtacagttct

SEQ ID NO: 99670 - DNA, 25 bp, Homo sapien
ctgaacgaacacagtgcagcaccag

SEQ ID NO: 99671 - DNA, 25 bp, Homo sapien
tgttgagggcatacaacatatgctc

SEQ ID NO: 99672 - DNA, 25 bp, Homo sapien
cacagtgcagcaccaggagtgacag

SEQ ID NO: 99673 - DNA, 25 bp, Homo sapien
atgccagagtcttctcagctgccgc

SEQ ID NO: 99674 - DNA, 25 bp, Homo sapien
aatgccagagtcttctcagctgccg

SEQ ID NO: 99675 - DNA, 25 bp, Homo sapien
ttggctgactgtcaaatcggaatct

SEQ ID NO: 99676 - DNA, 25 bp, Homo sapien
tgatctgccccattgacaatgcctt

SEQ ID NO: 99677 - DNA, 25 bp, Homo sapien
ggaacacatcaattatatctatatc

SEQ ID NO: 99678 - DNA, 25 bp, Homo sapien
caatgccttgggcttttcctcggcc

SEQ ID NO: 99679 - DNA, 25 bp, Homo sapien
taagagcaaaataacttactggaat

SEQ ID NO: 99680 - DNA, 25 bp, Homo sapien
ttgttttgttaaaatagtaagagca

SEQ ID NO: 99681 - DNA, 25 bp, Homo sapien
taaaattctccaactgaacaaggta

SEQ ID NO: 99682 - DNA, 25 bp, Homo sapien
gcaaggatttttatcttgttgttgt

SEQ ID NO: 99683 - DNA, 25 bp, Homo sapien
ctccctttgtacatcagcatcattc

SEQ ID NO: 99684 - DNA, 25 bp, Homo sapien
cacaaggtggaaaatagctgctggc

SEQ ID NO: 99685 - DNA, 25 bp, Homo sapien
tgcttccctgaaccacaaggtggaa

SEQ ID NO: 99686 - DNA, 25 bp, Homo sapien
tcctccctttgtacatcagcatcat

SEQ ID NO: 99687 - DNA, 25 bp, Homo sapien
acctggctggagtttagtgacacga

SEQ ID NO: 99688 - DNA, 25 bp, Homo sapien
gtttagtgacacgatcttagctccc

SEQ ID NO: 99689 - DNA, 25 bp, Homo sapien
tttagtgacacgatcttagctccct

SEQ ID NO: 99690 - DNA, 25 bp, Homo sapien
agtttagtgacacgatcttagctcc

SEQ ID NO: 99691 - DNA, 25 bp, Homo sapien
gtggcagcagtaatttgtcttcagc

SEQ ID NO: 99692 - DNA, 25 bp, Homo sapien
tgtggcagcagtaatttgtcttcag

SEQ ID NO: 99693 - DNA, 25 bp, Homo sapien
ggttcagtcactacttctacatcat

SEQ ID NO: 99694 - DNA, 25 bp, Homo sapien
gttcagtcactacttctacatcatc

SEQ ID NO: 99695 - DNA, 25 bp, Homo sapien
aggttcagtcactacttctacatca

SEQ ID NO: 99696 - DNA, 25 bp, Homo sapien
ctcaaggaggtccaggcccttgaac

SEQ ID NO: 99697 - DNA, 25 bp, Homo sapien
ttcggcagccttctcaaggaggtcc

SEQ ID NO: 99698 - DNA, 25 bp, Homo sapien
caaggaggtccaggcccttgaacac

SEQ ID NO: 99699 - DNA, 25 bp, Homo sapien
atttcggcagccttctcaaggaggt

SEQ ID NO: 99700 - DNA, 25 bp, Homo sapien
ggtcggtggaagcaatcacttccaa

SEQ ID NO: 99701 - DNA, 25 bp, Homo sapien
tcaggtcggtggaagcaatcacttc

SEQ ID NO: 99702 - DNA, 25 bp, Homo sapien
tcatggtgaaggctccttgaaacac

SEQ ID NO: 99703 - DNA, 25 bp, Homo sapien
ccttgaaacactggcaccaacaggt

SEQ ID NO: 99704 - DNA, 25 bp, Homo sapien
cacagttaattagtttatagtgctc

SEQ ID NO: 99705 - DNA, 25 bp, Homo sapien
ctcttgagcccactgcaaatgatct

SEQ ID NO: 99706 - DNA, 25 bp, Homo sapien
gcaatggcacagttaattagtttat

SEQ ID NO: 99707 - DNA, 25 bp, Homo sapien
tgatagcaatggcacagttaattag

SEQ ID NO: 99708 - DNA, 25 bp, Homo sapien
gagttcttggttttcggcagctcaa

SEQ ID NO: 99709 - DNA, 25 bp, Homo sapien
taagccatggagaaattagcagtgt

SEQ ID NO: 99710 - DNA, 25 bp, Homo sapien
ttcttggttttcggcagctcaagct

SEQ ID NO: 99711 - DNA, 25 bp, Homo sapien
cagctgagttcttggttttcggcag

SEQ ID NO: 99712 - DNA, 25 bp, Homo sapien
cagatttgattgcagacaacctgtg

SEQ ID NO: 99713 - DNA, 25 bp, Homo sapien
tctctctcttttagcctgtctttga

SEQ ID NO: 99714 - DNA, 25 bp, Homo sapien
gatttgattgcagacaacctgtgct

SEQ ID NO: 99715 - DNA, 25 bp, Homo sapien
tttgattgcagacaacctgtgctcc

SEQ ID NO: 99716 - DNA, 25 bp, Homo sapien
tccaaatactttgacttgggccatg

SEQ ID NO: 99717 - DNA, 25 bp, Homo sapien
gttgatgcctctcttgaagagtctc

SEQ ID NO: 99718 - DNA, 25 bp, Homo sapien
tttgacttgggccatgttccgagtg

SEQ ID NO: 99719 - DNA, 25 bp, Homo sapien
ccagctccaaatactttgacttggg

SEQ ID NO: 99720 - DNA, 25 bp, Homo sapien
gatctggtaatgctccatatttcca

SEQ ID NO: 99721 - DNA, 25 bp, Homo sapien
tccatatttccaatgttgcttatac

SEQ ID NO: 99722 - DNA, 25 bp, Homo sapien
ttcttgaccttcctgttgctgagct

SEQ ID NO: 99723 - DNA, 25 bp, Homo sapien
ttggctattccctgatctggtaatg

SEQ ID NO: 99724 - DNA, 25 bp, Homo sapien
gctctgttggctgccatagtcccta

SEQ ID NO: 99725 - DNA, 25 bp, Homo sapien
ggctgccatagtccctaggatggat

SEQ ID NO: 99726 - DNA, 25 bp, Homo sapien
gtccctaggatggatgcccttccag

SEQ ID NO: 99727 - DNA, 25 bp, Homo sapien
catagtccctaggatggatgccctt

SEQ ID NO: 99728 - DNA, 25 bp, Homo sapien
ttttaatcactggacactttattga

SEQ ID NO: 99729 - DNA, 25 bp, Homo sapien
ccttcagtcctctcatttgtgggaa

SEQ ID NO: 99730 - DNA, 25 bp, Homo sapien
aggtgtgcacccttcagtcctctca

SEQ ID NO: 99731 - DNA, 25 bp, Homo sapien
cactggacactttattgaaagcaaa

SEQ ID NO: 99732 - DNA, 25 bp, Homo sapien
gctgaataacaagctgcatactggg

SEQ ID NO: 99733 - DNA, 25 bp, Homo sapien
ctgggaacagagtggtagagcaaaa

SEQ ID NO: 99734 - DNA, 25 bp, Homo sapien
gggaaatagggatctgactgcgtct

SEQ ID NO: 99735 - DNA, 25 bp, Homo sapien
gactgcgtcttaatctgactttcag

SEQ ID NO: 99736 - DNA, 25 bp, Homo sapien
cataggttaggctacaacagaggtt

SEQ ID NO: 99737 - DNA, 25 bp, Homo sapien
gatggcaatgcagagaaataccgag

SEQ ID NO: 99738 - DNA, 25 bp, Homo sapien
gattaaggatgtagtcttccaccac

SEQ ID NO: 99739 - DNA, 25 bp, Homo sapien
tctaatgtggaaagatgtacctcag

SEQ ID NO: 99740 - DNA, 25 bp, Homo sapien
caaaagacaccgctaaagccgtggc

SEQ ID NO: 99741 - DNA, 25 bp, Homo sapien
taggagaatctacttccgcttccgg

SEQ ID NO: 99742 - DNA, 25 bp, Homo sapien
taagaaaagtgactaggcggagcac

SEQ ID NO: 99743 - DNA, 25 bp, Homo sapien
gcagacagacaggtatgaccccaca

SEQ ID NO: 99744 - DNA, 25 bp, Homo sapien
caagcgagaagcctcgaggagagcc

SEQ ID NO: 99745 - DNA, 25 bp, Homo sapien
gggttatagcaatgactgagggcca

SEQ ID NO: 99746 - DNA, 25 bp, Homo sapien
ctgagggccaactaaaaggacggcg

SEQ ID NO: 99747 - DNA, 25 bp, Homo sapien
tagggacaatgccatggaagcaagc

SEQ ID NO: 99748 - DNA, 25 bp, Homo sapien
gctttaagatgtacttacgaagaac

SEQ ID NO: 99749 - DNA, 25 bp, Homo sapien
ctttaagatgtacttacgaagaact

SEQ ID NO: 99750 - DNA, 25 bp, Homo sapien
taatggtggcattgctcaacgagcg

SEQ ID NO: 99751 - DNA, 25 bp, Homo sapien
tgctcaacgagcgtaatgctgatgt

SEQ ID NO: 99752 - DNA, 25 bp, Homo sapien
cgtaatgctgatgttatttttcttc

SEQ ID NO: 99753 - DNA, 25 bp, Homo sapien
tcttcattgataatggtggcattgc

SEQ ID NO: 99754 - DNA, 25 bp, Homo sapien
taaatacagggattatgaataagcc

SEQ ID NO: 99755 - DNA, 25 bp, Homo sapien
gaagttgtagttaatttctcaataa

SEQ ID NO: 99756 - DNA, 25 bp, Homo sapien
gccatcttcccaatgctagtgacaa

SEQ ID NO: 99757 - DNA, 25 bp, Homo sapien
aaaacactacttactgtatccactt

SEQ ID NO: 99758 - DNA, 25 bp, Homo sapien
ttctcttagttgcttcactagttta

SEQ ID NO: 99759 - DNA, 25 bp, Homo sapien
tcttagttgcttcactagtttaata

SEQ ID NO: 99760 - DNA, 25 bp, Homo sapien
tctgcttccaacaaagcggtacaga

SEQ ID NO: 99761 - DNA, 25 bp, Homo sapien
aaagcggtacagacttcttttagca

SEQ ID NO: 99762 - DNA, 25 bp, Homo sapien
ccagttagcacctctttccagtaaa

SEQ ID NO: 99763 - DNA, 25 bp, Homo sapien
gcacttttccagtggtgcagagcag

SEQ ID NO: 99764 - DNA, 25 bp, Homo sapien
tggaaacgtactacacatgctctcg

SEQ ID NO: 99765 - DNA, 25 bp, Homo sapien
gattcctgatacagcaaacacttcc

SEQ ID NO: 99766 - DNA, 25 bp, Homo sapien
aagaccagatgccatctcttcaaga

SEQ ID NO: 99767 - DNA, 25 bp, Homo sapien
taagaccagatgccatctcttcaag

SEQ ID NO: 99768 - DNA, 25 bp, Homo sapien
catctcttcaagatcaatagcagac

SEQ ID NO: 99769 - DNA, 25 bp, Homo sapien
ttaagaccagatgccatctcttcaa

SEQ ID NO: 99770 - DNA, 25 bp, Homo sapien
gggatacatggtctttgcaaaggga

SEQ ID NO: 99771 - DNA, 25 bp, Homo sapien
gaaatttcactcatcgcatcttggc

SEQ ID NO: 99772 - DNA, 25 bp, Homo sapien
gcatgatcagcaataaggtgaggca

SEQ ID NO: 99773 - DNA, 25 bp, Homo sapien
tacaaaagcaggaccatcactaggc

SEQ ID NO: 99774 - DNA, 25 bp, Homo sapien
ggtgtccatgccttaactccagggt

SEQ ID NO: 99775 - DNA, 25 bp, Homo sapien
cttgcaatccaacaaacataatcac

SEQ ID NO: 99776 - DNA, 25 bp, Homo sapien
tgttttcctttagtgggtgtccatg

SEQ ID NO: 99777 - DNA, 25 bp, Homo sapien
actcccttgcaatccaacaaacata

SEQ ID NO: 99778 - DNA, 25 bp, Homo sapien
tgtctgcacatattaaacaggtctt

SEQ ID NO: 99779 - DNA, 25 bp, Homo sapien
tgtgtctgcacatattaaacaggtc

SEQ ID NO: 99780 - DNA, 25 bp, Homo sapien
tctgcacatattaaacaggtcttcc

SEQ ID NO: 99781 - DNA, 25 bp, Homo sapien
gtgtctgcacatattaaacaggtct

SEQ ID NO: 99782 - DNA, 25 bp, Homo sapien
gcattctgttttagttggtcaaaag

SEQ ID NO: 99783 - DNA, 25 bp, Homo sapien
ttgctttggtagcattctgttttag

SEQ ID NO: 99784 - DNA, 25 bp, Homo sapien
gaattcttgctttggtagcattctg

SEQ ID NO: 99785 - DNA, 25 bp, Homo sapien
aaatggaattcttgctttggtagca

SEQ ID NO: 99786 - DNA, 25 bp, Homo sapien
agagtcttcttgtttgtggcggcca

SEQ ID NO: 99787 - DNA, 25 bp, Homo sapien
tttgtggcggccacttgtatcaaca

SEQ ID NO: 99788 - DNA, 25 bp, Homo sapien
tgtggcggccacttgtatcaacaat

SEQ ID NO: 99789 - DNA, 25 bp, Homo sapien
tcttcttgtttgtggcggccacttg

SEQ ID NO: 99790 - DNA, 25 bp, Homo sapien
catcacataaacaatgttatcaggt

SEQ ID NO: 99791 - DNA, 25 bp, Homo sapien
atcacataaacaatgttatcaggtt

SEQ ID NO: 99792 - DNA, 25 bp, Homo sapien
ccatcacataaacaatgttatcagg

SEQ ID NO: 99793 - DNA, 25 bp, Homo sapien
tccatcacataaacaatgttatcag

SEQ ID NO: 99794 - DNA, 25 bp, Homo sapien
caagttttgtcactattactgaggc

SEQ ID NO: 99795 - DNA, 25 bp, Homo sapien
ttactgaggctacatctactttatc

SEQ ID NO: 99796 - DNA, 25 bp, Homo sapien
cacctccttttgcatggccatcaag

SEQ ID NO: 99797 - DNA, 25 bp, Homo sapien
gcactgagtgcaccacctccttttg

SEQ ID NO: 99798 - DNA, 25 bp, Homo sapien
ccaatgaaaataatcggactttttg

SEQ ID NO: 99799 - DNA, 25 bp, Homo sapien
tatgttcccctgtaccaatgaaaat

SEQ ID NO: 99800 - DNA, 25 bp, Homo sapien
taatcggactttttgtggcagcgac

SEQ ID NO: 99801 - DNA, 25 bp, Homo sapien
agtcatctatatgttcccctgtacc

SEQ ID NO: 99802 - DNA, 25 bp, Homo sapien
tatcagtccttcaatgtcgcccata

SEQ ID NO: 99803 - DNA, 25 bp, Homo sapien
tcaactcgttgactttatctatcag

SEQ ID NO: 99804 - DNA, 25 bp, Homo sapien
caacttctctataagtgcttcattg

SEQ ID NO: 99805 - DNA, 25 bp, Homo sapien
gtcatccaacttcaactcgttgact

SEQ ID NO: 99806 - DNA, 25 bp, Homo sapien
tacaatgtaaataattcggatatat

SEQ ID NO: 99807 - DNA, 25 bp, Homo sapien
caatgtaaataattcggatatatta

SEQ ID NO: 99808 - DNA, 25 bp, Homo sapien
ataattcggatatattaaagtatgt

SEQ ID NO: 99809 - DNA, 25 bp, Homo sapien
aaataattcggatatattaaagtat

SEQ ID NO: 99810 - DNA, 25 bp, Homo sapien
caagatctgactgaaggggcccatt

SEQ ID NO: 99811 - DNA, 25 bp, Homo sapien
agatctgactgaaggggcccatttt

SEQ ID NO: 99812 - DNA, 25 bp, Homo sapien
aagatctgactgaaggggcccattt

SEQ ID NO: 99813 - DNA, 25 bp, Homo sapien
atttctttagccttgccattgactc

SEQ ID NO: 99814 - DNA, 25 bp, Homo sapien
tcatactatccattattgtcattaa

SEQ ID NO: 99815 - DNA, 25 bp, Homo sapien
cttgatcattcatactatccattat

SEQ ID NO: 99816 - DNA, 25 bp, Homo sapien
ttctttagccttgccattgactcct

SEQ ID NO: 99817 - DNA, 25 bp, Homo sapien
tcttgtccacaagaatacagtgaaa

SEQ ID NO: 99818 - DNA, 25 bp, Homo sapien
cataaccctttgagtaagagctttc

SEQ ID NO: 99819 - DNA, 25 bp, Homo sapien
tttgcctgaggaaaataatctgcca

SEQ ID NO: 99820 - DNA, 25 bp, Homo sapien
tctctcaacgatgaaggcaatccaa

SEQ ID NO: 99821 - DNA, 25 bp, Homo sapien
cattgttttttagatataatgctct

SEQ ID NO: 99822 - DNA, 25 bp, Homo sapien
tttagatataatgctcttgcacact

SEQ ID NO: 99823 - DNA, 25 bp, Homo sapien
tgcgcccggccaacaatcaactatt

SEQ ID NO: 99824 - DNA, 25 bp, Homo sapien
atagactacagtatatgtatttgta

SEQ ID NO: 99825 - DNA, 25 bp, Homo sapien
tgggctactatgaaaacctggagct

SEQ ID NO: 99826 - DNA, 25 bp, Homo sapien
taaactaatagcagcacatcgtggc

SEQ ID NO: 99827 - DNA, 25 bp, Homo sapien
tgcataagagctaccatgtctcctg

SEQ ID NO: 99828 - DNA, 25 bp, Homo sapien
caggaaaggttctatactgggcaaa

SEQ ID NO: 99829 - DNA, 25 bp, Homo sapien
accacctccagggttcaagcgattc

SEQ ID NO: 99830 - DNA, 25 bp, Homo sapien
tcccacctcaggctcctgagtagct

SEQ ID NO: 99831 - DNA, 25 bp, Homo sapien
ggaactataggcacacgccaccaca

SEQ ID NO: 99832 - DNA, 25 bp, Homo sapien
gtgcaagcttcgctcactgcaacca

SEQ ID NO: 99833 - DNA, 25 bp, Homo sapien
tggtcttaatatccccaggagagat

SEQ ID NO: 99834 - DNA, 25 bp, Homo sapien
gatgacctgctatctaatgtaaggc

SEQ ID NO: 99835 - DNA, 25 bp, Homo sapien
atgcaatctcaggaatgggatggac

SEQ ID NO: 99836 - DNA, 25 bp, Homo sapien
gaaatccatttacgtggcacttcca

SEQ ID NO: 99837 - DNA, 25 bp, Homo sapien
tagtcaaactaccacccagatttaa

SEQ ID NO: 99838 - DNA, 25 bp, Homo sapien
caaggtcagttactctcacacacaa

SEQ ID NO: 99839 - DNA, 25 bp, Homo sapien
gttatgtgcaaatgggcaatatata

SEQ ID NO: 99840 - DNA, 25 bp, Homo sapien
aaatgttaacattcgctatgtttgc

SEQ ID NO: 99841 - DNA, 25 bp, Homo sapien
acccgatcctcttgctactctttgg

SEQ ID NO: 99842 - DNA, 25 bp, Homo sapien
catctcttgttgatacacccgatcc

SEQ ID NO: 99843 - DNA, 25 bp, Homo sapien
aaaactttggcaccatccgtactgt

SEQ ID NO: 99844 - DNA, 25 bp, Homo sapien
aaaagtcctttgatacctcccatct

SEQ ID NO: 99845 - DNA, 25 bp, Homo sapien
aattttccaatactggcagcactct

SEQ ID NO: 99846 - DNA, 25 bp, Homo sapien
catttacccacactacacagatgta

SEQ ID NO: 99847 - DNA, 25 bp, Homo sapien
aaatcacaggtcacataaatcctgg

SEQ ID NO: 99848 - DNA, 25 bp, Homo sapien
tccgtctgttaactaataacaagct

SEQ ID NO: 99849 - DNA, 25 bp, Homo sapien
catggagaaggttaacttgattacc

SEQ ID NO: 99850 - DNA, 25 bp, Homo sapien
gaagaactggacagggaacatgaag

SEQ ID NO: 99851 - DNA, 25 bp, Homo sapien
taggctggctacattaaaaagggca

SEQ ID NO: 99852 - DNA, 25 bp, Homo sapien
gaacatgaagaggtgattcacaaag

SEQ ID NO: 99853 - DNA, 25 bp, Homo sapien
gtgtgtatacccactgccaacttca

SEQ ID NO: 99854 - DNA, 25 bp, Homo sapien
caagaacagtcaggactacatggga

SEQ ID NO: 99855 - DNA, 25 bp, Homo sapien
ggcattaactatggtacttctcaga

SEQ ID NO: 99856 - DNA, 25 bp, Homo sapien
tatgggactcaaagctcctcctgat

SEQ ID NO: 99857 - DNA, 25 bp, Homo sapien
agtcagcgtaggaggtaatataatc

SEQ ID NO: 99858 - DNA, 25 bp, Homo sapien
tattagcaaaattgtacccagtgtt

SEQ ID NO: 99859 - DNA, 25 bp, Homo sapien
tataatcagtataatcagggtataa

SEQ ID NO: 99860 - DNA, 25 bp, Homo sapien
taaggctacgatttatgctaatact

SEQ ID NO: 99861 - DNA, 25 bp, Homo sapien
ggccatttgttggttcaattttgcc

SEQ ID NO: 99862 - DNA, 25 bp, Homo sapien
cattttggccatttgttggttcaat

SEQ ID NO: 99863 - DNA, 25 bp, Homo sapien
catgtgatgaagaaccctaggatcc

SEQ ID NO: 99864 - DNA, 25 bp, Homo sapien
ccatgtgatgaagaaccctaggatc

SEQ ID NO: 99865 - DNA, 25 bp, Homo sapien
ttagcaactgccaacaacttggtat

SEQ ID NO: 99866 - DNA, 25 bp, Homo sapien
gcaactgccaacaacttggtattta

SEQ ID NO: 99867 - DNA, 25 bp, Homo sapien
caactgccaacaacttggtatttac

SEQ ID NO: 99868 - DNA, 25 bp, Homo sapien
tagcaactgccaacaacttggtatt

SEQ ID NO: 99869 - DNA, 25 bp, Homo sapien
cccatcatgcctttcatgttgccag

SEQ ID NO: 99870 - DNA, 25 bp, Homo sapien
ttattgaatcccatcatgcctttca

SEQ ID NO: 99871 - DNA, 25 bp, Homo sapien
ccatcatgcctttcatgttgccagc

SEQ ID NO: 99872 - DNA, 25 bp, Homo sapien
tattattgaatcccatcatgccttt

SEQ ID NO: 99873 - DNA, 25 bp, Homo sapien
gaagggaaacgctgaggtctcagca

SEQ ID NO: 99874 - DNA, 25 bp, Homo sapien
caaattaggtattcaactgagtcag

SEQ ID NO: 99875 - DNA, 25 bp, Homo sapien
caaatgcaatgcttggccttcgaga

SEQ ID NO: 99876 - DNA, 25 bp, Homo sapien
gaccaggactgtttacaaatgcaat

SEQ ID NO: 99877 - DNA, 25 bp, Homo sapien
taacaagaatatctcaattgcattc

SEQ ID NO: 99878 - DNA, 25 bp, Homo sapien
ttctgcagaacacaagatacatcat

SEQ ID NO: 99879 - DNA, 25 bp, Homo sapien
cctttgcccaagttaacaagaatat

SEQ ID NO: 99880 - DNA, 25 bp, Homo sapien
ggttattctagtctttagctagcag

SEQ ID NO: 99881 - DNA, 25 bp, Homo sapien
gaacttaggacttactctcacattg

SEQ ID NO: 99882 - DNA, 25 bp, Homo sapien
tatgtaccagagctacctgtaaaat

SEQ ID NO: 99883 - DNA, 25 bp, Homo sapien
atgatttgctgtttagatttcctaa

SEQ ID NO: 99884 - DNA, 25 bp, Homo sapien
ttctccagaaaattgtgacgcactg

SEQ ID NO: 99885 - DNA, 25 bp, Homo sapien
acggggtggctgccgggcggagagg

SEQ ID NO: 99886 - DNA, 25 bp, Homo sapien
gacggggtggctgccgggcggagag

SEQ ID NO: 99887 - DNA, 25 bp, Homo sapien
agacggggtggctgccgggcggaga

SEQ ID NO: 99888 - DNA, 25 bp, Homo sapien
ggggtggctgccgggcggagaggct

SEQ ID NO: 99889 - DNA, 25 bp, Homo sapien
ccttcttactggcaagcagggcaat

SEQ ID NO: 99890 - DNA, 25 bp, Homo sapien
gcagggcaatcaacaatctttatta

SEQ ID NO: 99891 - DNA, 25 bp, Homo sapien
gatctgactctgtatggtggcatca

SEQ ID NO: 99892 - DNA, 25 bp, Homo sapien
cagcaaaaccaaactcggccataaa

SEQ ID NO: 99893 - DNA, 25 bp, Homo sapien
gacagctgtgtcgttgtacttcaaa

SEQ ID NO: 99894 - DNA, 25 bp, Homo sapien
tgaagacagctgtgtcgttgtactt

SEQ ID NO: 99895 - DNA, 25 bp, Homo sapien
cagctgtgtcgttgtacttcaaagg

SEQ ID NO: 99896 - DNA, 25 bp, Homo sapien
agacagctgtgtcgttgtacttcaa

SEQ ID NO: 99897 - DNA, 25 bp, Homo sapien
gcgcagcccgtcaccagcggcgtct

SEQ ID NO: 99898 - DNA, 25 bp, Homo sapien
ctggggcagtcaccccgcaggacct

SEQ ID NO: 99899 - DNA, 25 bp, Homo sapien
ccaagcaagcatccagagctcgtgg

SEQ ID NO: 99900 - DNA, 25 bp, Homo sapien
cgagagctggccaactgcagtctgg

SEQ ID NO: 99901 - DNA, 25 bp, Homo sapien
tgcagtctgggaggcgcaactaccg

SEQ ID NO: 99902 - DNA, 25 bp, Homo sapien
gcaccgcctgtgacgtcatttctgg

SEQ ID NO: 99903 - DNA, 25 bp, Homo sapien
ggtctccccgcccagtcgctggccg

SEQ ID NO: 99904 - DNA, 25 bp, Homo sapien
ccttggtctccccgcccagtcgctg

SEQ ID NO: 99905 - DNA, 25 bp, Homo sapien
ttggtctccccgcccagtcgctggc

SEQ ID NO: 99906 - DNA, 25 bp, Homo sapien
cttggtctccccgcccagtcgctgg

SEQ ID NO: 99907 - DNA, 25 bp, Homo sapien
gtaatggccggtaagcccacttcca

SEQ ID NO: 99908 - DNA, 25 bp, Homo sapien
tggtgagaaagagggtaatggccgg

SEQ ID NO: 99909 - DNA, 25 bp, Homo sapien
tgagaaagagggtaatggccggtaa

SEQ ID NO: 99910 - DNA, 25 bp, Homo sapien
taatggccggtaagcccacttccat

SEQ ID NO: 99911 - DNA, 25 bp, Homo sapien
cgtcgtcgccaccacagggctgctg

SEQ ID NO: 99912 - DNA, 25 bp, Homo sapien
gtcgtcgccaccacagggctgctgg

SEQ ID NO: 99913 - DNA, 25 bp, Homo sapien
aggctgcgacggcttctcctcgttc

SEQ ID NO: 99914 - DNA, 25 bp, Homo sapien
ccgaggctgcgacggcttctcctcg

SEQ ID NO: 99915 - DNA, 25 bp, Homo sapien
tgcgacggcttctcctcgttccaca

SEQ ID NO: 99916 - DNA, 25 bp, Homo sapien
ctgcgacggcttctcctcgttccac

SEQ ID NO: 99917 - DNA, 25 bp, Homo sapien
cagtgaggaggaactccaaagctgg

SEQ ID NO: 99918 - DNA, 25 bp, Homo sapien
aggacggccgcgcaggctaaaagag

SEQ ID NO: 99919 - DNA, 25 bp, Homo sapien
tggcttccagctactgcaaggacag

SEQ ID NO: 99920 - DNA, 25 bp, Homo sapien
cgaggccgccccagagtctgctgtg

SEQ ID NO: 99921 - DNA, 25 bp, Homo sapien
gactgagaagtggttgaagccgccc

SEQ ID NO: 99922 - DNA, 25 bp, Homo sapien
ctcgagcggttactgtaaggatcca

SEQ ID NO: 99923 - DNA, 25 bp, Homo sapien
aggcgctcgcaccagaagagactga

SEQ ID NO: 99924 - DNA, 25 bp, Homo sapien
taaggatccagtgaattaaagctgg

SEQ ID NO: 99925 - DNA, 25 bp, Homo sapien
aacttgaggtcaagggtgtgagacc

SEQ ID NO: 99926 - DNA, 25 bp, Homo sapien
catcaacttgaaccagaaatccaat

SEQ ID NO: 99927 - DNA, 25 bp, Homo sapien
taaaatttacactgtggctgggcat

SEQ ID NO: 99928 - DNA, 25 bp, Homo sapien
ttcaaacatcaacttgaaccagaaa

SEQ ID NO: 99929 - DNA, 25 bp, Homo sapien
gaagctgaggaatgagaatcactta

SEQ ID NO: 99930 - DNA, 25 bp, Homo sapien
cccgggaggtggcggttgcagtgag

SEQ ID NO: 99931 - DNA, 25 bp, Homo sapien
cagtctgggtcacacagcgagactc

SEQ ID NO: 99932 - DNA, 25 bp, Homo sapien
agctgaggaatgagaatcacttaaa

SEQ ID NO: 99933 - DNA, 25 bp, Homo sapien
ctatatcaacgatattttaagaaaa

SEQ ID NO: 99934 - DNA, 25 bp, Homo sapien
gtttcaccactaacaaagtggatga

SEQ ID NO: 99935 - DNA, 25 bp, Homo sapien
tgtttcaccactaacaaagtggatg

SEQ ID NO: 99936 - DNA, 25 bp, Homo sapien
tttcaccactaacaaagtggatgac

SEQ ID NO: 99937 - DNA, 25 bp, Homo sapien
cggatcaacagtaggcaaaacatct

SEQ ID NO: 99938 - DNA, 25 bp, Homo sapien
tttttagtggagatcaaagtgccct

SEQ ID NO: 99939 - DNA, 25 bp, Homo sapien
caggattcaaggcagaaagggatag

SEQ ID NO: 99940 - DNA, 25 bp, Homo sapien
tgtcaaggcctagacaacaagaacc

SEQ ID NO: 99941 - DNA, 25 bp, Homo sapien
tgttattggacaatgctcctggcca

SEQ ID NO: 99942 - DNA, 25 bp, Homo sapien
gttgatgtagcagcccgaagcatgt

SEQ ID NO: 99943 - DNA, 25 bp, Homo sapien
ctgagagagttgatgtagcagcccg

SEQ ID NO: 99944 - DNA, 25 bp, Homo sapien
gcatgtaaaaccataagtagggacc

SEQ ID NO: 99945 - DNA, 25 bp, Homo sapien
tagcagcccgaagcatgtaaaacca

SEQ ID NO: 99946 - DNA, 25 bp, Homo sapien
catcaatggcatattggtactttgg

SEQ ID NO: 99947 - DNA, 25 bp, Homo sapien
ggtactttggggtgctgatacccaa

SEQ ID NO: 99948 - DNA, 25 bp, Homo sapien
ccaaaacagatgcaatcttctctcc

SEQ ID NO: 99949 - DNA, 25 bp, Homo sapien
ctccttcttcatccgataatattca

SEQ ID NO: 99950 - DNA, 25 bp, Homo sapien
tcaagaaaatgtaaaaaggaggcat

SEQ ID NO: 99951 - DNA, 25 bp, Homo sapien
caagaaaatgtaaaaaggaggcata

SEQ ID NO: 99952 - DNA, 25 bp, Homo sapien
tattctgttgatattgtttttctgc

SEQ ID NO: 99953 - DNA, 25 bp, Homo sapien
attctgttgatattgtttttctgct

SEQ ID NO: 99954 - DNA, 25 bp, Homo sapien
tttcaaaattgacattcacaaatga

SEQ ID NO: 99955 - DNA, 25 bp, Homo sapien
cacaaatgagctggatatcactgtc

SEQ ID NO: 99956 - DNA, 25 bp, Homo sapien
gatatcactgtctctggttgatctg

SEQ ID NO: 99957 - DNA, 25 bp, Homo sapien
gacattcacaaatgagctggatatc

SEQ ID NO: 99958 - DNA, 25 bp, Homo sapien
tttgaagcttgatagtcatttcatt

SEQ ID NO: 99959 - DNA, 25 bp, Homo sapien
agagtttgaagcttgatagtcattt

SEQ ID NO: 99960 - DNA, 25 bp, Homo sapien
gagtttgaagcttgatagtcatttc

SEQ ID NO: 99961 - DNA, 25 bp, Homo sapien
gtttgaagcttgatagtcatttcat

SEQ ID NO: 99962 - DNA, 25 bp, Homo sapien
aaagcaaatgcacaaataggcttga

SEQ ID NO: 99963 - DNA, 25 bp, Homo sapien
taactattaaggctctaggatgtcc

SEQ ID NO: 99964 - DNA, 25 bp, Homo sapien
caaataggcttgataatttaactct

SEQ ID NO: 99965 - DNA, 25 bp, Homo sapien
tggcttttgctagatagatcctaaa

SEQ ID NO: 99966 - DNA, 25 bp, Homo sapien
cttttattatatggtgaagcatcct

SEQ ID NO: 99967 - DNA, 25 bp, Homo sapien
tctaagactatggaattatcaattc

SEQ ID NO: 99968 - DNA, 25 bp, Homo sapien
ccttagtgtgaaattaatggttaga

SEQ ID NO: 99969 - DNA, 25 bp, Homo sapien
tgcatggcataacatgagaaaatct

SEQ ID NO: 99970 - DNA, 25 bp, Homo sapien
taaaacagttattctcaatgaaaga

SEQ ID NO: 99971 - DNA, 25 bp, Homo sapien
agcctatcttaatatctggtgttat

SEQ ID NO: 99972 - DNA, 25 bp, Homo sapien
gcattaaaaaatggaagcctatctt

SEQ ID NO: 99973 - DNA, 25 bp, Homo sapien
gattaagtaagtggcttgcattaaa

SEQ ID NO: 99974 - DNA, 25 bp, Homo sapien
gatgccacatggatattcactaggt

SEQ ID NO: 99975 - DNA, 25 bp, Homo sapien
tgaatccatgtagctgaacactcct

SEQ ID NO: 99976 - DNA, 25 bp, Homo sapien
gatactagtacctctagggagacag

SEQ ID NO: 99977 - DNA, 25 bp, Homo sapien
tagaggagtggccaaccagattcaa

SEQ ID NO: 99978 - DNA, 25 bp, Homo sapien
tacaatggtgcaaactccattcact

SEQ ID NO: 99979 - DNA, 25 bp, Homo sapien
cagtacagtctatatcctacggcag

SEQ ID NO: 99980 - DNA, 25 bp, Homo sapien
tgtagctagattaggcactgagcct

SEQ ID NO: 99981 - DNA, 25 bp, Homo sapien
taagaaactagttaacgtgcagtcc

SEQ ID NO: 99982 - DNA, 25 bp, Homo sapien
tagtatgctacctcaaacagcctgt

SEQ ID NO: 99983 - DNA, 25 bp, Homo sapien
agaagttgataatacaagttactta

SEQ ID NO: 99984 - DNA, 25 bp, Homo sapien
tgggaagctgcatcagaagttgata

SEQ ID NO: 99985 - DNA, 25 bp, Homo sapien
gaagctgcatcagaagttgataata

SEQ ID NO: 99986 - DNA, 25 bp, Homo sapien
tttgggaagctgcatcagaagttga

SEQ ID NO: 99987 - DNA, 25 bp, Homo sapien
taaatgtcccaatagagaggcctag

SEQ ID NO: 99988 - DNA, 25 bp, Homo sapien
taaacctgggaattagactggacac

SEQ ID NO: 99989 - DNA, 25 bp, Homo sapien
gaaaatgtgaactaccttgagcacg

SEQ ID NO: 99990 - DNA, 25 bp, Homo sapien
ttggagatgacaagagagccccatt

SEQ ID NO: 99991 - DNA, 25 bp, Homo sapien
gatgatgggcccataactagggtaa

SEQ ID NO: 99992 - DNA, 25 bp, Homo sapien
atgatgggcccataactagggtaat

SEQ ID NO: 99993 - DNA, 25 bp, Homo sapien
tgtaaggaactcaaagtacggccag

SEQ ID NO: 99994 - DNA, 25 bp, Homo sapien
ctgtatggaggatgtaaggaactca

SEQ ID NO: 99995 - DNA, 25 bp, Homo sapien
ggaactcaaagtacggccaggcacg

SEQ ID NO: 99996 - DNA, 25 bp, Homo sapien
atgctgtatggaggatgtaaggaac

SEQ ID NO: 99997 - DNA, 25 bp, Homo sapien
ctgggaggcagaggttgcagtgagc

SEQ ID NO: 99998 - DNA, 25 bp, Homo sapien
gagaatcgcttgaatctgggaggca

SEQ ID NO: 99999 - DNA, 25 bp, Homo sapien
ccagctattcaaggggctgaggtgg

SEQ ID NO: 100000 - DNA, 25 bp, Homo sapien
cgagattgcaccactgcactccagc

SEQ ID NO: 100001 - DNA, 25 bp, Homo sapien
cttatggtttttgctggacaaacac

SEQ ID NO: 100002 - DNA, 25 bp, Homo sapien
tctcttaagaacttatggtttttgc

SEQ ID NO: 100003 - DNA, 25 bp, Homo sapien
tatggtttttgctggacaaacacca

SEQ ID NO: 100004 - DNA, 25 bp, Homo sapien
atggtttttgctggacaaacaccag

SEQ ID NO: 100005 - DNA, 25 bp, Homo sapien
gagtggtactacataggctctgaag

SEQ ID NO: 100006 - DNA, 25 bp, Homo sapien
taatggagtccgtactacagagtgg

SEQ ID NO: 100007 - DNA, 25 bp, Homo sapien
aagcagccgctgagtttgcatgggt

SEQ ID NO: 100008 - DNA, 25 bp, Homo sapien
gcatgggtcatgtaccccaaacata

SEQ ID NO: 100009 - DNA, 25 bp, Homo sapien
ttaagagaggaatcaagagctgtct

SEQ ID NO: 100010 - DNA, 25 bp, Homo sapien
gatgaagtcttactacagaaattaa

SEQ ID NO: 100011 - DNA, 25 bp, Homo sapien
cagctgcctgctgaagatgaagtct

SEQ ID NO: 100012 - DNA, 25 bp, Homo sapien
aattaagagaggaatcaagagctgt

SEQ ID NO: 100013 - DNA, 25 bp, Homo sapien
acattttataggatccagtagtcta

SEQ ID NO: 100014 - DNA, 25 bp, Homo sapien
cattttataggatccagtagtctaa

SEQ ID NO: 100015 - DNA, 25 bp, Homo sapien
tttataggatccagtagtctaaaat

SEQ ID NO: 100016 - DNA, 25 bp, Homo sapien
taggatccagtagtctaaaatttac

SEQ ID NO: 100017 - DNA, 25 bp, Homo sapien
aatgttttctggttgacacttggct

SEQ ID NO: 100018 - DNA, 25 bp, Homo sapien
tgttttctggttgacacttggctga

SEQ ID NO: 100019 - DNA, 25 bp, Homo sapien
tgtaccaaaggtggtttgggtgcag

SEQ ID NO: 100020 - DNA, 25 bp, Homo sapien
accaaaggtggtttgggtgcagctt

SEQ ID NO: 100021 - DNA, 25 bp, Homo sapien
tttgagacggagtctcttgctctgt

SEQ ID NO: 100022 - DNA, 25 bp, Homo sapien
cttggtgagttgtctcacttttttt

SEQ ID NO: 100023 - DNA, 25 bp, Homo sapien
gcgccaaaggcacacgataaaggaa

SEQ ID NO: 100024 - DNA, 25 bp, Homo sapien
tgggtcgcctctgaaggagaaccat

SEQ ID NO: 100025 - DNA, 25 bp, Homo sapien
tggcctttaaaatccggcttggtga

SEQ ID NO: 100026 - DNA, 25 bp, Homo sapien
cacacgataaaggaaaacgcgggct

SEQ ID NO: 100027 - DNA, 25 bp, Homo sapien
acttaacgcggccataaacgcggcg

SEQ ID NO: 100028 - DNA, 25 bp, Homo sapien
ttcaacaactcaaagcggcactcag

SEQ ID NO: 100029 - DNA, 25 bp, Homo sapien
gagactgacccggacttaggcgttc

SEQ ID NO: 100030 - DNA, 25 bp, Homo sapien
cggaaactacagtgcccacgatgca

SEQ ID NO: 100031 - DNA, 25 bp, Homo sapien
gaagggcgctgcctagactgcgtac

SEQ ID NO: 100032 - DNA, 25 bp, Homo sapien
ctgcgccaacgactcaggaaaggaa

SEQ ID NO: 100033 - DNA, 25 bp, Homo sapien
cagaccgcaaaactcctccggtggg

SEQ ID NO: 100034 - DNA, 25 bp, Homo sapien
tgcatagctctctacagaccgcaaa

SEQ ID NO: 100035 - DNA, 25 bp, Homo sapien
caacagcggcgaaagccgaagtcta

SEQ ID NO: 100036 - DNA, 25 bp, Homo sapien
acagcggcgaaagccgaagtctagg

SEQ ID NO: 100037 - DNA, 25 bp, Homo sapien
gaaagccgaagtctaggggccctca

SEQ ID NO: 100038 - DNA, 25 bp, Homo sapien
accaacagcggcgaaagccgaagtc

SEQ ID NO: 100039 - DNA, 25 bp, Homo sapien
aaggaacagattcccacgggaagct

SEQ ID NO: 100040 - DNA, 25 bp, Homo sapien
tcccacgggaagcttgctggaaagg

SEQ ID NO: 100041 - DNA, 25 bp, Homo sapien
cgtatccagggacccccaactccag

SEQ ID NO: 100042 - DNA, 25 bp, Homo sapien
tggatcacagctgtcctgaaaagga

SEQ ID NO: 100043 - DNA, 25 bp, Homo sapien
gaaaaagcacaagacggaacgccca

SEQ ID NO: 100044 - DNA, 25 bp, Homo sapien
aaaagcacaagacggaacgcccagt

SEQ ID NO: 100045 - DNA, 25 bp, Homo sapien
aagcacaagacggaacgcccagttt

SEQ ID NO: 100046 - DNA, 25 bp, Homo sapien
gcacaagacggaacgcccagtttta

SEQ ID NO: 100047 - DNA, 25 bp, Homo sapien
gatgtccaacgtcgcaagccgcaaa

SEQ ID NO: 100048 - DNA, 25 bp, Homo sapien
gagatcagcaccagatagtgagaga

SEQ ID NO: 100049 - DNA, 25 bp, Homo sapien
ccttacagacaaatcaaggttctgc

SEQ ID NO: 100050 - DNA, 25 bp, Homo sapien
cggtgcagagtcgaagtggaacttt

SEQ ID NO: 100051 - DNA, 25 bp, Homo sapien
agcgagacataagagtgccctgggc

SEQ ID NO: 100052 - DNA, 25 bp, Homo sapien
ctgggcctagcccaaggtatgggct

SEQ ID NO: 100053 - DNA, 25 bp, Homo sapien
cagcggtctgccagaaacagcgaga

SEQ ID NO: 100054 - DNA, 25 bp, Homo sapien
gcttcggaaagcttcgaataccaaa

SEQ ID NO: 100055 - DNA, 25 bp, Homo sapien
cttggcaatcagattcgttgctttg

SEQ ID NO: 100056 - DNA, 25 bp, Homo sapien
tctccttagctgctccagctaaaaa

SEQ ID NO: 100057 - DNA, 25 bp, Homo sapien
gagatatctggccttggcaatcaga

SEQ ID NO: 100058 - DNA, 25 bp, Homo sapien
aaatgaggaacagaataaacttgct

SEQ ID NO: 100059 - DNA, 25 bp, Homo sapien
tccccggatgagaagactgtaacct

SEQ ID NO: 100060 - DNA, 25 bp, Homo sapien
tagagctatgacagccagccatctg

SEQ ID NO: 100061 - DNA, 25 bp, Homo sapien
gctacccatgccagcagagatttag

SEQ ID NO: 100062 - DNA, 25 bp, Homo sapien
gtctgaatggatcaatccccggatg

SEQ ID NO: 100063 - DNA, 25 bp, Homo sapien
gctgattatttcttagatatgaaag

SEQ ID NO: 100064 - DNA, 25 bp, Homo sapien
ttccaacataggaacaatatcatga

SEQ ID NO: 100065 - DNA, 25 bp, Homo sapien
cctagcaattcctgatataaattcc

SEQ ID NO: 100066 - DNA, 25 bp, Homo sapien
tatactgtgtgcaaatgactcccct

SEQ ID NO: 100067 - DNA, 25 bp, Homo sapien
ttttcggactgtggtgaattgtcct

SEQ ID NO: 100068 - DNA, 25 bp, Homo sapien
ctttttcggactgtggtgaattgtc

SEQ ID NO: 100069 - DNA, 25 bp, Homo sapien
tcggactgtggtgaattgtcctttc

SEQ ID NO: 100070 - DNA, 25 bp, Homo sapien
gactgtggtgaattgtcctttccat

SEQ ID NO: 100071 - DNA, 25 bp, Homo sapien
ttctgtactggtcacctccatctat

SEQ ID NO: 100072 - DNA, 25 bp, Homo sapien
tccatctatcacatccctcatgatt

SEQ ID NO: 100073 - DNA, 25 bp, Homo sapien
tctggactcagctgaatagactcta

SEQ ID NO: 100074 - DNA, 25 bp, Homo sapien
ctgaggtgttgtctttctgtactgg

SEQ ID NO: 100075 - DNA, 25 bp, Homo sapien
cagggaccgatgacctacaaagcct

SEQ ID NO: 100076 - DNA, 25 bp, Homo sapien
taaagcaatctctccgaaaggttgg

SEQ ID NO: 100077 - DNA, 25 bp, Homo sapien
tccctgagacgtaaggatggttcaa

SEQ ID NO: 100078 - DNA, 25 bp, Homo sapien
ggatgtcttaactacaacagcagag

SEQ ID NO: 100079 - DNA, 25 bp, Homo sapien
agacaataccacatctgtgttcact

SEQ ID NO: 100080 - DNA, 25 bp, Homo sapien
gacaataccacatctgtgttcactg

SEQ ID NO: 100081 - DNA, 25 bp, Homo sapien
acaggctatatgaaggtctgtgaca

SEQ ID NO: 100082 - DNA, 25 bp, Homo sapien
agatcaaacaggctatatgaaggtc

SEQ ID NO: 100083 - DNA, 25 bp, Homo sapien
tcaagttccccttgaccactgagct

SEQ ID NO: 100084 - DNA, 25 bp, Homo sapien
tgccatcaagttccccttgaccact

SEQ ID NO: 100085 - DNA, 25 bp, Homo sapien
ttatgccatcaagttccccttgacc

SEQ ID NO: 100086 - DNA, 25 bp, Homo sapien
agttccccttgaccactgagctgac

SEQ ID NO: 100087 - DNA, 25 bp, Homo sapien
gaaaggtagactaaagagcttcaca

SEQ ID NO: 100088 - DNA, 25 bp, Homo sapien
gggttgtcttgcagtttcccacaga

SEQ ID NO: 100089 - DNA, 25 bp, Homo sapien
taaggaggtgtcatgtgctctgctc

SEQ ID NO: 100090 - DNA, 25 bp, Homo sapien
caacaacgatttgatgctgccttcc

SEQ ID NO: 100091 - DNA, 25 bp, Homo sapien
taatagtaattgctggcagctcgtc

SEQ ID NO: 100092 - DNA, 25 bp, Homo sapien
cattgatagtaaatctgtggactac

SEQ ID NO: 100093 - DNA, 25 bp, Homo sapien
aatagttgataccaaataggatttg

SEQ ID NO: 100094 - DNA, 25 bp, Homo sapien
taggatttggagatgcagtagataa

SEQ ID NO: 100095 - DNA, 25 bp, Homo sapien
cattttggcaacattgagaccatca

SEQ ID NO: 100096 - DNA, 25 bp, Homo sapien
catcaaaaggaggacgagattttat

SEQ ID NO: 100097 - DNA, 25 bp, Homo sapien
gaggacgagattttatgaagttctc

SEQ ID NO: 100098 - DNA, 25 bp, Homo sapien
gagattcacgaactttaggaaacat

SEQ ID NO: 100099 - DNA, 25 bp, Homo sapien
gaggagcttatgaacactgaaaatc

SEQ ID NO: 100100 - DNA, 25 bp, Homo sapien
ggagcttatgaacactgaaaatcca

SEQ ID NO: 100101 - DNA, 25 bp, Homo sapien
tagaggagcttatgaacactgaaaa

SEQ ID NO: 100102 - DNA, 25 bp, Homo sapien
ttagaggagcttatgaacactgaaa

SEQ ID NO: 100103 - DNA, 25 bp, Homo sapien
tgggacataagggacaagacattct

SEQ ID NO: 100104 - DNA, 25 bp, Homo sapien
tgtgaataagacacccaagttttgg

SEQ ID NO: 100105 - DNA, 25 bp, Homo sapien
cttcaaagaaggacacccaagtgtg

SEQ ID NO: 100106 - DNA, 25 bp, Homo sapien
taatgtaagcatacctgcctctagt

SEQ ID NO: 100107 - DNA, 25 bp, Homo sapien
gtgtcagtaacatcaggaattggtt

SEQ ID NO: 100108 - DNA, 25 bp, Homo sapien
tcagtaacatcaggaattggtttat

SEQ ID NO: 100109 - DNA, 25 bp, Homo sapien
gtcagtaacatcaggaattggttta

SEQ ID NO: 100110 - DNA, 25 bp, Homo sapien
tgtcagtaacatcaggaattggttt

SEQ ID NO: 100111 - DNA, 25 bp, Homo sapien
tttggagaggtgaatataatattaa

SEQ ID NO: 100112 - DNA, 25 bp, Homo sapien
gtttggagaggtgaatataatatta

SEQ ID NO: 100113 - DNA, 25 bp, Homo sapien
agggagatgtcatggctaccaaaaa

SEQ ID NO: 100114 - DNA, 25 bp, Homo sapien
gagatgtcatggctaccaaaaaaga

SEQ ID NO: 100115 - DNA, 25 bp, Homo sapien
tgtcatggctaccaaaaaagaaagc

SEQ ID NO: 100116 - DNA, 25 bp, Homo sapien
tataatttatagattagacaggttg

SEQ ID NO: 100117 - DNA, 25 bp, Homo sapien
atgatacagagagatcgtgtctcaa

SEQ ID NO: 100118 - DNA, 25 bp, Homo sapien
tgtctctaggcccagttacttggga

SEQ ID NO: 100119 - DNA, 25 bp, Homo sapien
aaatctcgtcacagtaaagttgcca

SEQ ID NO: 100120 - DNA, 25 bp, Homo sapien
caggtgtgttagtgcatgtctctag

SEQ ID NO: 100121 - DNA, 25 bp, Homo sapien
ttaacttagaatggctatgtgcact

SEQ ID NO: 100122 - DNA, 25 bp, Homo sapien
tagccttgtgatgccttaaaaaagc

SEQ ID NO: 100123 - DNA, 25 bp, Homo sapien
taagctgtaaaagactacgtgttgt

SEQ ID NO: 100124 - DNA, 25 bp, Homo sapien
gacattgccaggttaactttcctac

SEQ ID NO: 100125 - DNA, 25 bp, Homo sapien
tggtagaagagctgttttaagcctc

SEQ ID NO: 100126 - DNA, 25 bp, Homo sapien
gatggtctgagttcgttcttggtag

SEQ ID NO: 100127 - DNA, 25 bp, Homo sapien
aagttacaggccagtaagtagcaga

SEQ ID NO: 100128 - DNA, 25 bp, Homo sapien
tagacacccttatgaatttggtacc

SEQ ID NO: 100129 - DNA, 25 bp, Homo sapien
gttttgacctactcctgaaagctgg

SEQ ID NO: 100130 - DNA, 25 bp, Homo sapien
gatgccgtaatcagtgaagacttgc

SEQ ID NO: 100131 - DNA, 25 bp, Homo sapien
cacagaatgcctgagtgagcctgta

SEQ ID NO: 100132 - DNA, 25 bp, Homo sapien
tggccaccatccttttaactggagc

SEQ ID NO: 100133 - DNA, 25 bp, Homo sapien
tgtgctcgccacaaaatgtacagtg

SEQ ID NO: 100134 - DNA, 25 bp, Homo sapien
gacgagaatccctgtcccagacata

SEQ ID NO: 100135 - DNA, 25 bp, Homo sapien
cataacttacactagtccagtgcgg

SEQ ID NO: 100136 - DNA, 25 bp, Homo sapien
gagagaacgcaagaccactttaggg

SEQ ID NO: 100137 - DNA, 25 bp, Homo sapien
gcaaagaaagttattctatgtattt

SEQ ID NO: 100138 - DNA, 25 bp, Homo sapien
caaagaaagttattctatgtatttt

SEQ ID NO: 100139 - DNA, 25 bp, Homo sapien
ggcaaagaaagttattctatgtatt

SEQ ID NO: 100140 - DNA, 25 bp, Homo sapien
atggtcttcgttctctcagtagaca

SEQ ID NO: 100141 - DNA, 25 bp, Homo sapien
aatggtcttcgttctctcagtagac

SEQ ID NO: 100142 - DNA, 25 bp, Homo sapien
aaatagtctgaacggcagccagttc

SEQ ID NO: 100143 - DNA, 25 bp, Homo sapien
acaaatagtctgaacggcagccagt

SEQ ID NO: 100144 - DNA, 25 bp, Homo sapien
atgactacaaatagtctgaacggca

SEQ ID NO: 100145 - DNA, 25 bp, Homo sapien
actacaaatagtctgaacggcagcc

SEQ ID NO: 100146 - DNA, 25 bp, Homo sapien
agacctcatcctgtaatggaagccc

SEQ ID NO: 100147 - DNA, 25 bp, Homo sapien
acccattctcctggataacgacatt

SEQ ID NO: 100148 - DNA, 25 bp, Homo sapien
gataacgacattgatggggaagtga

SEQ ID NO: 100149 - DNA, 25 bp, Homo sapien
cctcatcctgtaatggaagcccagt

SEQ ID NO: 100150 - DNA, 25 bp, Homo sapien
ctgaggatgtatttttcacccaaga

SEQ ID NO: 100151 - DNA, 25 bp, Homo sapien
cacccaagaaatttcagatttcaac

SEQ ID NO: 100152 - DNA, 25 bp, Homo sapien
gaggatgtatttttcacccaagaaa

SEQ ID NO: 100153 - DNA, 25 bp, Homo sapien
tatttttcacccaagaaatttcaga

SEQ ID NO: 100154 - DNA, 25 bp, Homo sapien
agcaacacctgttctcatccgaacc

SEQ ID NO: 100155 - DNA, 25 bp, Homo sapien
gaacaagcaacacctgttctcatcc

SEQ ID NO: 100156 - DNA, 25 bp, Homo sapien
aacaagcaacacctgttctcatccg

SEQ ID NO: 100157 - DNA, 25 bp, Homo sapien
caagcaacacctgttctcatccgaa

SEQ ID NO: 100158 - DNA, 25 bp, Homo sapien
cattaccttcaaggattaattcatc

SEQ ID NO: 100159 - DNA, 25 bp, Homo sapien
attggaaacaagctcaatgtcatta

SEQ ID NO: 100160 - DNA, 25 bp, Homo sapien
ctaaattggaaacaagctcaatgtc

SEQ ID NO: 100161 - DNA, 25 bp, Homo sapien
ggaaacaagctcaatgtcattacct

SEQ ID NO: 100162 - DNA, 25 bp, Homo sapien
gatatccttgtttttaactgtcgtg

SEQ ID NO: 100163 - DNA, 25 bp, Homo sapien
atccttgtttttaactgtcgtggct

SEQ ID NO: 100164 - DNA, 25 bp, Homo sapien
atagataccatccaaaaatttcctg

SEQ ID NO: 100165 - DNA, 25 bp, Homo sapien
tgtcgtggcttgctgaatcaaagcc

SEQ ID NO: 100166 - DNA, 25 bp, Homo sapien
cttttgcatcatttaaacatcacaa

SEQ ID NO: 100167 - DNA, 25 bp, Homo sapien
gtcttaggaatcatccggcatcttg

SEQ ID NO: 100168 - DNA, 25 bp, Homo sapien
tcttgtttcagaagctggacaactc

SEQ ID NO: 100169 - DNA, 25 bp, Homo sapien
ccggcatcttgtttcagaagctgga

SEQ ID NO: 100170 - DNA, 25 bp, Homo sapien
ttccagtcagttactttatccccat

SEQ ID NO: 100171 - DNA, 25 bp, Homo sapien
tcagttactttatccccattctctc

SEQ ID NO: 100172 - DNA, 25 bp, Homo sapien
tttccagtcagttactttatcccca

SEQ ID NO: 100173 - DNA, 25 bp, Homo sapien
cagtcagttactttatccccattct

SEQ ID NO: 100174 - DNA, 25 bp, Homo sapien
ctagttgagagacgacattcaagag

SEQ ID NO: 100175 - DNA, 25 bp, Homo sapien
gaccagcagtcgcagattccgtttg

SEQ ID NO: 100176 - DNA, 25 bp, Homo sapien
aaaacagctggcttgcttttgcacc

SEQ ID NO: 100177 - DNA, 25 bp, Homo sapien
gtgcttccggcctaggaccagcagt

SEQ ID NO: 100178 - DNA, 25 bp, Homo sapien
tgggaactccgtcttagcatgtgct

SEQ ID NO: 100179 - DNA, 25 bp, Homo sapien
cagaaggaatggatcatcctccgag

SEQ ID NO: 100180 - DNA, 25 bp, Homo sapien
ctgcagtgattcccggagtgcagtg

SEQ ID NO: 100181 - DNA, 25 bp, Homo sapien
gtgtggcatacagaaggaatggatc

SEQ ID NO: 100182 - DNA, 25 bp, Homo sapien
agtgattcccggagtgcagtgtggc

SEQ ID NO: 100183 - DNA, 25 bp, Homo sapien
cccgcatcaggtctcttgtgataaa

SEQ ID NO: 100184 - DNA, 25 bp, Homo sapien
aacaggcgttgggtcttggcatcag

SEQ ID NO: 100185 - DNA, 25 bp, Homo sapien
tggtcccgcatcaggtctcttgtga

SEQ ID NO: 100186 - DNA, 25 bp, Homo sapien
aaaaacaggcgttgggtcttggcat

SEQ ID NO: 100187 - DNA, 25 bp, Homo sapien
tggcctatgaaaactctagcagact

SEQ ID NO: 100188 - DNA, 25 bp, Homo sapien
gttgtgacactctttttctatgcca

SEQ ID NO: 100189 - DNA, 25 bp, Homo sapien
tccaaatactaacctaaaactgaga

SEQ ID NO: 100190 - DNA, 25 bp, Homo sapien
tagcagactctttctaggacctggc

SEQ ID NO: 100191 - DNA, 25 bp, Homo sapien
caaaggagaattcaattgagactgt

SEQ ID NO: 100192 - DNA, 25 bp, Homo sapien
agttataatttatggccgggtatgg

SEQ ID NO: 100193 - DNA, 25 bp, Homo sapien
tatcttaactagaatcaaaggagaa

SEQ ID NO: 100194 - DNA, 25 bp, Homo sapien
tattatagatatcttaactagaatc

SEQ ID NO: 100195 - DNA, 25 bp, Homo sapien
tatggtatgtgccacgagtctccag

SEQ ID NO: 100196 - DNA, 25 bp, Homo sapien
gagtctccagttgtttgcaccactg

SEQ ID NO: 100197 - DNA, 25 bp, Homo sapien
ggttggtacttcacaggaacatctt

SEQ ID NO: 100198 - DNA, 25 bp, Homo sapien
ccactgtgtcatagctgagaatacg

SEQ ID NO: 100199 - DNA, 25 bp, Homo sapien
acacaaacttagcatagaggtaaga

SEQ ID NO: 100200 - DNA, 25 bp, Homo sapien
tgattctgctattggtaggcctgga

SEQ ID NO: 100201 - DNA, 25 bp, Homo sapien
gaatgagactatgccagaaatggga

SEQ ID NO: 100202 - DNA, 25 bp, Homo sapien
gctaagtggaatagctggcccagta

SEQ ID NO: 100203 - DNA, 25 bp, Homo sapien
tggcccagtaggagaaatgcaggtt

SEQ ID NO: 100204 - DNA, 25 bp, Homo sapien
ccaatccaaataattggatgataag

SEQ ID NO: 100205 - DNA, 25 bp, Homo sapien
aaaagaggagtgaatgccccctctt

SEQ ID NO: 100206 - DNA, 25 bp, Homo sapien
ttctccaatccaaataattggatga

SEQ ID NO: 100207 - DNA, 25 bp, Homo sapien
agaggagtgaatgccccctcttctc

SEQ ID NO: 100208 - DNA, 25 bp, Homo sapien
agtcccaattactcaggagggctga

SEQ ID NO: 100209 - DNA, 25 bp, Homo sapien
agtgaactgtgatcacgtcactgca

SEQ ID NO: 100210 - DNA, 25 bp, Homo sapien
ggagggctgaggtaggaagattgct

SEQ ID NO: 100211 - DNA, 25 bp, Homo sapien
gtcactgcactccagccctggcgac

SEQ ID NO: 100212 - DNA, 25 bp, Homo sapien
tgatcagaacacaaatgggcagcct

SEQ ID NO: 100213 - DNA, 25 bp, Homo sapien
cacaatgttctatactgctgagcca

SEQ ID NO: 100214 - DNA, 25 bp, Homo sapien
gaaatgtctgcactaactagccgtg

SEQ ID NO: 100215 - DNA, 25 bp, Homo sapien
tgagccattcaggatacttgggccc

SEQ ID NO: 100216 - DNA, 25 bp, Homo sapien
tccttgagattttctttccactggg

SEQ ID NO: 100217 - DNA, 25 bp, Homo sapien
tcttccttgagattttctttccact

SEQ ID NO: 100218 - DNA, 25 bp, Homo sapien
cagccttcttccttgagattttctt

SEQ ID NO: 100219 - DNA, 25 bp, Homo sapien
tcagccttcttccttgagattttct

SEQ ID NO: 100220 - DNA, 25 bp, Homo sapien
gaagaataagccacctcagatgagg

SEQ ID NO: 100221 - DNA, 25 bp, Homo sapien
gaaatctgctagaggaccaaggaag

SEQ ID NO: 100222 - DNA, 25 bp, Homo sapien
tgtagagctctaaatggaacttcct

SEQ ID NO: 100223 - DNA, 25 bp, Homo sapien
aatttctatggcttcccctctgtag

SEQ ID NO: 100224 - DNA, 25 bp, Homo sapien
gtcatagaaagcacaagaaacctta

SEQ ID NO: 100225 - DNA, 25 bp, Homo sapien
catagaaagcacaagaaaccttatt

SEQ ID NO: 100226 - DNA, 25 bp, Homo sapien
tagaaagcacaagaaaccttattta

SEQ ID NO: 100227 - DNA, 25 bp, Homo sapien
tttatttatttttgagatggaatct

SEQ ID NO: 100228 - DNA, 25 bp, Homo sapien
aaggaagctacttcatgaggtggag

SEQ ID NO: 100229 - DNA, 25 bp, Homo sapien
cctccaaaggaagctacttcatgag

SEQ ID NO: 100230 - DNA, 25 bp, Homo sapien
catggatggaatcgtcagggaattc

SEQ ID NO: 100231 - DNA, 25 bp, Homo sapien
tgctccagcagagccgcatggatgg

SEQ ID NO: 100232 - DNA, 25 bp, Homo sapien
cactgagaattctcatgggtctccc

SEQ ID NO: 100233 - DNA, 25 bp, Homo sapien
gaattctcatgggtctccccacaat

SEQ ID NO: 100234 - DNA, 25 bp, Homo sapien
tctggaagccaaggactttgaaaaa

SEQ ID NO: 100235 - DNA, 25 bp, Homo sapien
tttctggaagccaaggactttgaaa

SEQ ID NO: 100236 - DNA, 25 bp, Homo sapien
ctgcgccaagcaggcctcttgagtg

SEQ ID NO: 100237 - DNA, 25 bp, Homo sapien
aaacttgggtcgtggcgctttcagg

SEQ ID NO: 100238 - DNA, 25 bp, Homo sapien
cctcttgagtggatagacgtgaaac

SEQ ID NO: 100239 - DNA, 25 bp, Homo sapien
cctttgaaggtatgcgcctgcgcca

SEQ ID NO: 100240 - DNA, 25 bp, Homo sapien
tgcatgccgaactcacggctctgga

SEQ ID NO: 100241 - DNA, 25 bp, Homo sapien
ctcccggaagttgcagcgactgctt

SEQ ID NO: 100242 - DNA, 25 bp, Homo sapien
tctggagccagttcgagcactgagc

SEQ ID NO: 100243 - DNA, 25 bp, Homo sapien
gccgcgtttcttccgctcttgcatg

SEQ ID NO: 100244 - DNA, 25 bp, Homo sapien
gaagcactactttaaacacaatccc

SEQ ID NO: 100245 - DNA, 25 bp, Homo sapien
aacacaatccctgggccccgtagct

SEQ ID NO: 100246 - DNA, 25 bp, Homo sapien
gctcccgcaccaggcacacaagcac

SEQ ID NO: 100247 - DNA, 25 bp, Homo sapien
gttggtagaagcactactttaaaca

SEQ ID NO: 100248 - DNA, 25 bp, Homo sapien
gtgaaaaaatggtaatgtggcggtc

SEQ ID NO: 100249 - DNA, 25 bp, Homo sapien
gaaaaaatggtaatgtggcggtcaa

SEQ ID NO: 100250 - DNA, 25 bp, Homo sapien
tgaaaaaatggtaatgtggcggtca

SEQ ID NO: 100251 - DNA, 25 bp, Homo sapien
ctacttggtagagccgaccctcggg

SEQ ID NO: 100252 - DNA, 25 bp, Homo sapien
caagtgcccagatcaggtagtatgg

SEQ ID NO: 100253 - DNA, 25 bp, Homo sapien
tttgaatccatgtatgactccaggg

SEQ ID NO: 100254 - DNA, 25 bp, Homo sapien
ctggcaagtgcccagatcaggtagt

SEQ ID NO: 100255 - DNA, 25 bp, Homo sapien
tgcccagatcaggtagtatggagca

SEQ ID NO: 100256 - DNA, 25 bp, Homo sapien
tggcttactacaacctccgcttccc

SEQ ID NO: 100257 - DNA, 25 bp, Homo sapien
ttcccaggttcaagtgattctcctg

SEQ ID NO: 100258 - DNA, 25 bp, Homo sapien
ttggagtgaggtggcacgatcttgg

SEQ ID NO: 100259 - DNA, 25 bp, Homo sapien
aggttggagtgaggtggcacgatct

SEQ ID NO: 100260 - DNA, 25 bp, Homo sapien
gacagctactgatgtaaggccaccc

SEQ ID NO: 100261 - DNA, 25 bp, Homo sapien
agctactgatgtaaggccaccctgg

SEQ ID NO: 100262 - DNA, 25 bp, Homo sapien
tctgacagctactgatgtaaggcca

SEQ ID NO: 100263 - DNA, 25 bp, Homo sapien
ctactgatgtaaggccaccctggtt

SEQ ID NO: 100264 - DNA, 25 bp, Homo sapien
aattattaactatttgggcagtatt

SEQ ID NO: 100265 - DNA, 25 bp, Homo sapien
ttatattctgcaattattaactatt

SEQ ID NO: 100266 - DNA, 25 bp, Homo sapien
tacaggtttctgtgtagttataaaa

SEQ ID NO: 100267 - DNA, 25 bp, Homo sapien
aaacatacaggtttctgtgtagtta

SEQ ID NO: 100268 - DNA, 25 bp, Homo sapien
catacaggtttctgtgtagttataa

SEQ ID NO: 100269 - DNA, 25 bp, Homo sapien
aaaaacatacaggtttctgtgtagt

SEQ ID NO: 100270 - DNA, 25 bp, Homo sapien
attccggtcatcacacaaccaatgt

SEQ ID NO: 100271 - DNA, 25 bp, Homo sapien
tgtcattccggtcatcacacaacca

SEQ ID NO: 100272 - DNA, 25 bp, Homo sapien
agtgagtcactgtgctggaatccaa

SEQ ID NO: 100273 - DNA, 25 bp, Homo sapien
cagttatcttgaataagtgagtcac

SEQ ID NO: 100274 - DNA, 25 bp, Homo sapien
cctgagaaatatcggcaattctttt

SEQ ID NO: 100275 - DNA, 25 bp, Homo sapien
aatatcggcaattcttttacacagc

SEQ ID NO: 100276 - DNA, 25 bp, Homo sapien
agacctgagaaatatcggcaattct

SEQ ID NO: 100277 - DNA, 25 bp, Homo sapien
tgccctctgtacctgggatctgctg

SEQ ID NO: 100278 - DNA, 25 bp, Homo sapien
tttccaaaccacatgttcagaactc

SEQ ID NO: 100279 - DNA, 25 bp, Homo sapien
tgtgaaacctatcctttagttctga

SEQ ID NO: 100280 - DNA, 25 bp, Homo sapien
gataatgcccgacatactgttgtga

SEQ ID NO: 100281 - DNA, 25 bp, Homo sapien
tatacatgttctgtaaaaagtttca

SEQ ID NO: 100282 - DNA, 25 bp, Homo sapien
ccagggaacagtgtatgggacacac

SEQ ID NO: 100283 - DNA, 25 bp, Homo sapien
gaaatacacttacaggctacctgct

SEQ ID NO: 100284 - DNA, 25 bp, Homo sapien
gaatgctggcacaaactgaaataca

SEQ ID NO: 100285 - DNA, 25 bp, Homo sapien
tctagtaagtcacacaaaccaagct

SEQ ID NO: 100286 - DNA, 25 bp, Homo sapien
gagggccttgctcttcatctatacc

SEQ ID NO: 100287 - DNA, 25 bp, Homo sapien
gggccttgctcttcatctataccaa

SEQ ID NO: 100288 - DNA, 25 bp, Homo sapien
ttgctcttcatctataccaattaaa

SEQ ID NO: 100289 - DNA, 25 bp, Homo sapien
gccttgctcttcatctataccaatt

SEQ ID NO: 100290 - DNA, 25 bp, Homo sapien
ccactgtctgttcaaatgtccaatc

SEQ ID NO: 100291 - DNA, 25 bp, Homo sapien
gactcagtttgtttaactcccgctg

SEQ ID NO: 100292 - DNA, 25 bp, Homo sapien
taaacccacagtagtaacctgcagg

SEQ ID NO: 100293 - DNA, 25 bp, Homo sapien
ttttcaaggaagctggttgactcag

SEQ ID NO: 100294 - DNA, 25 bp, Homo sapien
tattatatgcgttttgttgaaagcc

SEQ ID NO: 100295 - DNA, 25 bp, Homo sapien
ggctttaattccagacttacaccca

SEQ ID NO: 100296 - DNA, 25 bp, Homo sapien
taggactggcctcgaacacctagac

SEQ ID NO: 100297 - DNA, 25 bp, Homo sapien
gttgacaacttgaatcctgggatgt

SEQ ID NO: 100298 - DNA, 25 bp, Homo sapien
ttaggattttcaactgtcactactc

SEQ ID NO: 100299 - DNA, 25 bp, Homo sapien
taggattttcaactgtcactactcc

SEQ ID NO: 100300 - DNA, 25 bp, Homo sapien
aggattttcaactgtcactactcca

SEQ ID NO: 100301 - DNA, 25 bp, Homo sapien
taaaatgcctcccagtagttccttg

SEQ ID NO: 100302 - DNA, 25 bp, Homo sapien
cctcttcaaggtctagttaagctta

SEQ ID NO: 100303 - DNA, 25 bp, Homo sapien
tatgacttatctgtgggcaaccaaa

SEQ ID NO: 100304 - DNA, 25 bp, Homo sapien
tggtccatggtatatcaactgcctc

SEQ ID NO: 100305 - DNA, 25 bp, Homo sapien
cctcgaaaggaagcaattgtttggc

SEQ ID NO: 100306 - DNA, 25 bp, Homo sapien
cattttttagtgcaactgaaggcaa

SEQ ID NO: 100307 - DNA, 25 bp, Homo sapien
tctaaatgatgtttgcctcgaaagg

SEQ ID NO: 100308 - DNA, 25 bp, Homo sapien
gtttggcaaccttgttaatgtgacc

SEQ ID NO: 100309 - DNA, 25 bp, Homo sapien
ttcccagatattataccaccttcac

SEQ ID NO: 100310 - DNA, 25 bp, Homo sapien
ccaccttcacctatacacaaaaatg

SEQ ID NO: 100311 - DNA, 25 bp, Homo sapien
tcaaacacacgtaaaagtgggatag

SEQ ID NO: 100312 - DNA, 25 bp, Homo sapien
taaaattctttagttgcagctaaga

SEQ ID NO: 100313 - DNA, 25 bp, Homo sapien
tctctgctagagcaacaaggtgagc

SEQ ID NO: 100314 - DNA, 25 bp, Homo sapien
tagtctctctctgctagagcaacaa

SEQ ID NO: 100315 - DNA, 25 bp, Homo sapien
tgctagagcaacaaggtgagcatca

SEQ ID NO: 100316 - DNA, 25 bp, Homo sapien
tagagcaacaaggtgagcatcaatc

SEQ ID NO: 100317 - DNA, 25 bp, Homo sapien
ggcatcacggatctggtaaactaac

SEQ ID NO: 100318 - DNA, 25 bp, Homo sapien
agtggcatcacggatctggtaaact

SEQ ID NO: 100319 - DNA, 25 bp, Homo sapien
cacaggtaagtggcatcacggatct

SEQ ID NO: 100320 - DNA, 25 bp, Homo sapien
acaggtaagtggcatcacggatctg

SEQ ID NO: 100321 - DNA, 25 bp, Homo sapien
tttatatagagtcctaaccacttcg

SEQ ID NO: 100322 - DNA, 25 bp, Homo sapien
agagtcctaaccacttcggtggtag

SEQ ID NO: 100323 - DNA, 25 bp, Homo sapien
tatatagagtcctaaccacttcggt

SEQ ID NO: 100324 - DNA, 25 bp, Homo sapien
tatagagtcctaaccacttcggtgg

SEQ ID NO: 100325 - DNA, 25 bp, Homo sapien
atgtacattaggtgtcaaaaataaa

SEQ ID NO: 100326 - DNA, 25 bp, Homo sapien
aatatgtacattaggtgtcaaaaat

SEQ ID NO: 100327 - DNA, 25 bp, Homo sapien
atatgtacattaggtgtcaaaaata

SEQ ID NO: 100328 - DNA, 25 bp, Homo sapien
gaaggatcgcttaatgctagccagg

SEQ ID NO: 100329 - DNA, 25 bp, Homo sapien
cagtaaggtactgtggacccaggca

SEQ ID NO: 100330 - DNA, 25 bp, Homo sapien
cctgggtgagatcaagtacctgtct

SEQ ID NO: 100331 - DNA, 25 bp, Homo sapien
gatttggtatcctattgcacagcag

SEQ ID NO: 100332 - DNA, 25 bp, Homo sapien
tagggagacccctatgtcaatattt

SEQ ID NO: 100333 - DNA, 25 bp, Homo sapien
tacatgccaagtctaaaaacgttga

SEQ ID NO: 100334 - DNA, 25 bp, Homo sapien
tagtgaatagtacatagaacagtgg

SEQ ID NO: 100335 - DNA, 25 bp, Homo sapien
cctgagataggactgttcgaggcca

SEQ ID NO: 100336 - DNA, 25 bp, Homo sapien
gctatgaaatgtcttaagccaagta

SEQ ID NO: 100337 - DNA, 25 bp, Homo sapien
tatttgtctgcatataccaaaggct

SEQ ID NO: 100338 - DNA, 25 bp, Homo sapien
gactaaagctacaatgtgaagatgg

SEQ ID NO: 100339 - DNA, 25 bp, Homo sapien
agcacgcctggtgctggctatgaaa

SEQ ID NO: 100340 - DNA, 25 bp, Homo sapien
tgtaaaagtcttagtaatttgatag

SEQ ID NO: 100341 - DNA, 25 bp, Homo sapien
gaaaattttcgtgacttgtctgttg

SEQ ID NO: 100342 - DNA, 25 bp, Homo sapien
tatgtgctattaatgtaaaagtctt

SEQ ID NO: 100343 - DNA, 25 bp, Homo sapien
tacaggtgtccaccataaggcctgg

SEQ ID NO: 100344 - DNA, 25 bp, Homo sapien
tattgtgcttcgagtgactgacccc

SEQ ID NO: 100345 - DNA, 25 bp, Homo sapien
cgtcttattgtggtaggatcagccc

SEQ ID NO: 100346 - DNA, 25 bp, Homo sapien
cagccaggagtgttaagcgttcagt

SEQ ID NO: 100347 - DNA, 25 bp, Homo sapien
cgtctgacgttatgagcgcaaaggg

SEQ ID NO: 100348 - DNA, 25 bp, Homo sapien
tgatcctgagctccgagactttcga

SEQ ID NO: 100349 - DNA, 25 bp, Homo sapien
ccttgggtgctgatgtcaatgctca

SEQ ID NO: 100350 - DNA, 25 bp, Homo sapien
tacaatggtatgtctgcctccctgc

SEQ ID NO: 100351 - DNA, 25 bp, Homo sapien
caacttaaggagtccaggcaagagc

SEQ ID NO: 100352 - DNA, 25 bp, Homo sapien
tgaccatggaagtgatccgccaggt

SEQ ID NO: 100353 - DNA, 25 bp, Homo sapien
catggaagtgatccgccaggtgaag

SEQ ID NO: 100354 - DNA, 25 bp, Homo sapien
tcaacttccagaacaacctgcagca

SEQ ID NO: 100355 - DNA, 25 bp, Homo sapien
ttcctcaacttccagaacaacctgc

SEQ ID NO: 100356 - DNA, 25 bp, Homo sapien
tcacccttacaaaggagagttaggc

SEQ ID NO: 100357 - DNA, 25 bp, Homo sapien
tttccaagagccatggtcaccctta

SEQ ID NO: 100358 - DNA, 25 bp, Homo sapien
caatgtggtacataaggcgctggaa

SEQ ID NO: 100359 - DNA, 25 bp, Homo sapien
gagttaggcatgcatttgtagacaa

SEQ ID NO: 100360 - DNA, 25 bp, Homo sapien
gagtcgcaggaaaacaataggtacc

SEQ ID NO: 100361 - DNA, 25 bp, Homo sapien
tatgacaaatcaaggaacgcctgtg

SEQ ID NO: 100362 - DNA, 25 bp, Homo sapien
tagggacaagtcatcaaggctcagc

SEQ ID NO: 100363 - DNA, 25 bp, Homo sapien
taggtgtcacacaaaacaatcagga

SEQ ID NO: 100364 - DNA, 25 bp, Homo sapien
aatccttgttcttagatttctctgt

SEQ ID NO: 100365 - DNA, 25 bp, Homo sapien
ctcaaaatccttgttcttagatttc

SEQ ID NO: 100366 - DNA, 25 bp, Homo sapien
ccttgttcttagatttctctgtagc

SEQ ID NO: 100367 - DNA, 25 bp, Homo sapien
aaaatccttgttcttagatttctct

SEQ ID NO: 100368 - DNA, 25 bp, Homo sapien
ataaatgcttcctctgtgccgcctc

SEQ ID NO: 100369 - DNA, 25 bp, Homo sapien
cgcctccgccgcccaaagtcccgct

SEQ ID NO: 100370 - DNA, 25 bp, Homo sapien
aaagtcccgctctctcctgaagccg

SEQ ID NO: 100371 - DNA, 25 bp, Homo sapien
tgtaggaggtcataaatgcttcctc

SEQ ID NO: 100372 - DNA, 25 bp, Homo sapien
gaatatgaggtatgctgtatgccat

SEQ ID NO: 100373 - DNA, 25 bp, Homo sapien
agtctttcaatgtggtttttggatg

SEQ ID NO: 100374 - DNA, 25 bp, Homo sapien
cagtctttcaatgtggtttttggat

SEQ ID NO: 100375 - DNA, 25 bp, Homo sapien
tcagtctttcaatgtggtttttgga

SEQ ID NO: 100376 - DNA, 25 bp, Homo sapien
tcacagtgtgttccacgtattcttt

SEQ ID NO: 100377 - DNA, 25 bp, Homo sapien
tttcacagtgtgttccacgtattct

SEQ ID NO: 100378 - DNA, 25 bp, Homo sapien
ctttcacagtgtgttccacgtattc

SEQ ID NO: 100379 - DNA, 25 bp, Homo sapien
acagtgtgttccacgtattcttttc

SEQ ID NO: 100380 - DNA, 25 bp, Homo sapien
tacagcttgtttgaacagctcagga

SEQ ID NO: 100381 - DNA, 25 bp, Homo sapien
ctcctctacaatcgtaggttttcct

SEQ ID NO: 100382 - DNA, 25 bp, Homo sapien
gtttatatacagcttgtttgaacag

SEQ ID NO: 100383 - DNA, 25 bp, Homo sapien
ggatcatcctcctctacaatcgtag

SEQ ID NO: 100384 - DNA, 25 bp, Homo sapien
tcggtggtctcaggaaggtccgatt

SEQ ID NO: 100385 - DNA, 25 bp, Homo sapien
ctttcggtggtctcaggaaggtccg

SEQ ID NO: 100386 - DNA, 25 bp, Homo sapien
tactttcggtggtctcaggaaggtc

SEQ ID NO: 100387 - DNA, 25 bp, Homo sapien
tttcggtggtctcaggaaggtccga

SEQ ID NO: 100388 - DNA, 25 bp, Homo sapien
ggtgccaccttccaatcctggttgt

SEQ ID NO: 100389 - DNA, 25 bp, Homo sapien
aatggtgccaccttccaatcctggt

SEQ ID NO: 100390 - DNA, 25 bp, Homo sapien
tgtattcaaaacgaaacagactaaa

SEQ ID NO: 100391 - DNA, 25 bp, Homo sapien
taaattgtattcaaaacgaaacaga

SEQ ID NO: 100392 - DNA, 25 bp, Homo sapien
tccatcgtctcctagatctggcgag

SEQ ID NO: 100393 - DNA, 25 bp, Homo sapien
gaaatccatgccacggaagtcagtc

SEQ ID NO: 100394 - DNA, 25 bp, Homo sapien
tatgtccagtagctttctcagaacc

SEQ ID NO: 100395 - DNA, 25 bp, Homo sapien
taaggtacttgtgcttgccatctgc

SEQ ID NO: 100396 - DNA, 25 bp, Homo sapien
taaattactggcactgtttctgttg

SEQ ID NO: 100397 - DNA, 25 bp, Homo sapien
taatcaaaacacttgctgtgtcgca

SEQ ID NO: 100398 - DNA, 25 bp, Homo sapien
tacctgatctttcattaaagtaatc

SEQ ID NO: 100399 - DNA, 25 bp, Homo sapien
gctgatgcactttacctgatctttc

SEQ ID NO: 100400 - DNA, 25 bp, Homo sapien
agcacgtccgcccgccggtatcgat

SEQ ID NO: 100401 - DNA, 25 bp, Homo sapien
ccgccggtatcgatcgggcccgcgc

SEQ ID NO: 100402 - DNA, 25 bp, Homo sapien
gtccgcccgccggtatcgatcgggc

SEQ ID NO: 100403 - DNA, 25 bp, Homo sapien
gtcggcggcgggagcacgtccgccc

SEQ ID NO: 100404 - DNA, 25 bp, Homo sapien
accgagcggccggacagctgactgc

SEQ ID NO: 100405 - DNA, 25 bp, Homo sapien
tgcacgtcctctgcgggtattgagc

SEQ ID NO: 100406 - DNA, 25 bp, Homo sapien
tattgagctgatgagaagtgcgacc

SEQ ID NO: 100407 - DNA, 25 bp, Homo sapien
gtctggctgaaaagctcccgctctg

SEQ ID NO: 100408 - DNA, 25 bp, Homo sapien
ctagaagagcttcgccgcggctgtc

SEQ ID NO: 100409 - DNA, 25 bp, Homo sapien
cgcggctgtcatgccggggctatct

SEQ ID NO: 100410 - DNA, 25 bp, Homo sapien
tatctttatagctgagacgcgggcc

SEQ ID NO: 100411 - DNA, 25 bp, Homo sapien
ccggccagcagatgaactagaagag

SEQ ID NO: 100412 - DNA, 25 bp, Homo sapien
tccgcaaggcgaactcggtacaagc

SEQ ID NO: 100413 - DNA, 25 bp, Homo sapien
tgtccgtttagttcgcttcaccagg

SEQ ID NO: 100414 - DNA, 25 bp, Homo sapien
agcagagggaagacacgctccgcaa

SEQ ID NO: 100415 - DNA, 25 bp, Homo sapien
aactcggtacaagccgcctgtccgt

SEQ ID NO: 100416 - DNA, 25 bp, Homo sapien
tgccggcttcgctggactggggctg

SEQ ID NO: 100417 - DNA, 25 bp, Homo sapien
agacgggcgagctgaggcagcgctc

SEQ ID NO: 100418 - DNA, 25 bp, Homo sapien
gaacgcccgacgcagctctgcgcct

SEQ ID NO: 100419 - DNA, 25 bp, Homo sapien
gctgggcccgggaccttccctgcca

SEQ ID NO: 100420 - DNA, 25 bp, Homo sapien
ctgaagcgcgggctctgggaacggc

SEQ ID NO: 100421 - DNA, 25 bp, Homo sapien
cccggggtcggtgcggctgctggcg

SEQ ID NO: 100422 - DNA, 25 bp, Homo sapien
cttcagactctgaagggcggccgag

SEQ ID NO: 100423 - DNA, 25 bp, Homo sapien
gggcgcagggtccggctgaagcgcg

SEQ ID NO: 100424 - DNA, 25 bp, Homo sapien
tactctacgcgcacgatgcgggagc

SEQ ID NO: 100425 - DNA, 25 bp, Homo sapien
aggccaggttcgcaggacagctgaa

SEQ ID NO: 100426 - DNA, 25 bp, Homo sapien
tgtggtcacctcatcggcaaagctc

SEQ ID NO: 100427 - DNA, 25 bp, Homo sapien
tcgcactcagggcagcggtactcta

SEQ ID NO: 100428 - DNA, 25 bp, Homo sapien
agaaaagatgcaatggccccggagt

SEQ ID NO: 100429 - DNA, 25 bp, Homo sapien
gcggcttcccgtcggcggaggagac

SEQ ID NO: 100430 - DNA, 25 bp, Homo sapien
tgtggcggcgtttgcagccgcagga

SEQ ID NO: 100431 - DNA, 25 bp, Homo sapien
acgaagacgacgaagaaggcggctt

SEQ ID NO: 100432 - DNA, 25 bp, Homo sapien
gcagataggcttggcgacgaaactt

SEQ ID NO: 100433 - DNA, 25 bp, Homo sapien
gcacaatgggcaagcgaaggcaagt

SEQ ID NO: 100434 - DNA, 25 bp, Homo sapien
tctgctgtagggaagtgcgctccgc

SEQ ID NO: 100435 - DNA, 25 bp, Homo sapien
cacttattgatgtgccgggtcagcc

SEQ ID NO: 100436 - DNA, 25 bp, Homo sapien
agccaggccgcagtggcatctgcag

SEQ ID NO: 100437 - DNA, 25 bp, Homo sapien
cagccaggccgcagtggcatctgca

SEQ ID NO: 100438 - DNA, 25 bp, Homo sapien
gaatactgcccacaaaatagctgag

SEQ ID NO: 100439 - DNA, 25 bp, Homo sapien
gcattcaccgcgactttccatagga

SEQ ID NO: 100440 - DNA, 25 bp, Homo sapien
tataggcgcctgtgatgacaagaca

SEQ ID NO: 100441 - DNA, 25 bp, Homo sapien
catataggattcgttagggtctcca

SEQ ID NO: 100442 - DNA, 25 bp, Homo sapien
caggtccaggttggtatacattcca

SEQ ID NO: 100443 - DNA, 25 bp, Homo sapien
ttaatactgaacttgcaggtccagg

SEQ ID NO: 100444 - DNA, 25 bp, Homo sapien
tattattggctgctagatcctggtg

SEQ ID NO: 100445 - DNA, 25 bp, Homo sapien
taaatacatcatactggcaaaccgt

SEQ ID NO: 100446 - DNA, 25 bp, Homo sapien
gaactagcaaaagccgcatgtccat

SEQ ID NO: 100447 - DNA, 25 bp, Homo sapien
aagctgcgtcgttcctctggctcag

SEQ ID NO: 100448 - DNA, 25 bp, Homo sapien
tccaatgtctcctcgaactagcaaa

SEQ ID NO: 100449 - DNA, 25 bp, Homo sapien
catgtccatgaagctgcgtcgttcc

SEQ ID NO: 100450 - DNA, 25 bp, Homo sapien
gtattaaaaccctatgatgttgcag

SEQ ID NO: 100451 - DNA, 25 bp, Homo sapien
gaaatttcacaagggacatgatgga

SEQ ID NO: 100452 - DNA, 25 bp, Homo sapien
atgatatgaaggcttgggttccctg

SEQ ID NO: 100453 - DNA, 25 bp, Homo sapien
tggcgtgaagctgataaaacctggc

SEQ ID NO: 100454 - DNA, 25 bp, Homo sapien
tatttgtacttctgctttctgccat

SEQ ID NO: 100455 - DNA, 25 bp, Homo sapien
ctatttgtacttctgctttctgcca

SEQ ID NO: 100456 - DNA, 25 bp, Homo sapien
tctatttgtacttctgctttctgcc

SEQ ID NO: 100457 - DNA, 25 bp, Homo sapien
tttttctatttgtacttctgctttc

SEQ ID NO: 100458 - DNA, 25 bp, Homo sapien
tacacatctggtaaatcacctgggc

SEQ ID NO: 100459 - DNA, 25 bp, Homo sapien
ggtggtcctgctatgctaacaagtc

SEQ ID NO: 100460 - DNA, 25 bp, Homo sapien
cattatccaatgagcggtggtcctg

SEQ ID NO: 100461 - DNA, 25 bp, Homo sapien
ggattaatctctatagcagcccgca

SEQ ID NO: 100462 - DNA, 25 bp, Homo sapien
gcagcacgggaggacagtaaaagaa

SEQ ID NO: 100463 - DNA, 25 bp, Homo sapien
gattgtaggcaagtcgtaaaggcct

SEQ ID NO: 100464 - DNA, 25 bp, Homo sapien
taaaggccttgtgtgagttgtgtga

SEQ ID NO: 100465 - DNA, 25 bp, Homo sapien
gacttcagggaaccaagtctgtcca

SEQ ID NO: 100466 - DNA, 25 bp, Homo sapien
cagagcaagttccagtctaagaaaa

SEQ ID NO: 100467 - DNA, 25 bp, Homo sapien
tacttaccaccaacactggaaaaga

SEQ ID NO: 100468 - DNA, 25 bp, Homo sapien
gaaagtgatagaggtcagaaactac

SEQ ID NO: 100469 - DNA, 25 bp, Homo sapien
tggaaagaatctgttgccagtatac

SEQ ID NO: 100470 - DNA, 25 bp, Homo sapien
gatagctccttaaggtcactactta

SEQ ID NO: 100471 - DNA, 25 bp, Homo sapien
tacttaatttgtggttgcggagacg

SEQ ID NO: 100472 - DNA, 25 bp, Homo sapien
tgcggagacgggagcattctccaca

SEQ ID NO: 100473 - DNA, 25 bp, Homo sapien
tccatctgggtagaactatattgtg

SEQ ID NO: 100474 - DNA, 25 bp, Homo sapien
tgactgttccacgtatcgctatgcc

SEQ ID NO: 100475 - DNA, 25 bp, Homo sapien
tagatctaggatctgttgccgcccc

SEQ ID NO: 100476 - DNA, 25 bp, Homo sapien
tcgctatgcctggaatggacttgca

SEQ ID NO: 100477 - DNA, 25 bp, Homo sapien
agcataaggttacaaatgtggcacc

SEQ ID NO: 100478 - DNA, 25 bp, Homo sapien
agactagagtttactcacagcaggg

SEQ ID NO: 100479 - DNA, 25 bp, Homo sapien
tacccagcataagctacagtgtttg

SEQ ID NO: 100480 - DNA, 25 bp, Homo sapien
taactatttaggagtggctacccag

SEQ ID NO: 100481 - DNA, 25 bp, Homo sapien
cagtaccgtatagcaaagccctgtg

SEQ ID NO: 100482 - DNA, 25 bp, Homo sapien
cagacattgaaatagttcgcagagt

SEQ ID NO: 100483 - DNA, 25 bp, Homo sapien
tacaagcactctcacggagcgagaa

SEQ ID NO: 100484 - DNA, 25 bp, Homo sapien
ctttagttgtagttgttcaggaggc

SEQ ID NO: 100485 - DNA, 25 bp, Homo sapien
ggagcgagaacctagctcatctagt

SEQ ID NO: 100486 - DNA, 25 bp, Homo sapien
tccttggctgccacaataaaaaaga

SEQ ID NO: 100487 - DNA, 25 bp, Homo sapien
ctctattcatccttggctgccacaa

SEQ ID NO: 100488 - DNA, 25 bp, Homo sapien
ttcatccttggctgccacaataaaa

SEQ ID NO: 100489 - DNA, 25 bp, Homo sapien
tctattcatccttggctgccacaat

SEQ ID NO: 100490 - DNA, 25 bp, Homo sapien
tacacccgaccagatttttctaaca

SEQ ID NO: 100491 - DNA, 25 bp, Homo sapien
ctcaagtgattggtccgcctcggac

SEQ ID NO: 100492 - DNA, 25 bp, Homo sapien
tcgtgtacgaatcctgttatttaaa

SEQ ID NO: 100493 - DNA, 25 bp, Homo sapien
ctcatcttcgtgtacgaatcctgtt

SEQ ID NO: 100494 - DNA, 25 bp, Homo sapien
aactggtccaaatacgccttctgca

SEQ ID NO: 100495 - DNA, 25 bp, Homo sapien
aatccgtagggtcatgttcagccag

SEQ ID NO: 100496 - DNA, 25 bp, Homo sapien
cctaaagccgcatagcatgtgaatg

SEQ ID NO: 100497 - DNA, 25 bp, Homo sapien
tcctgtgctgtggtagaatccgtag

SEQ ID NO: 100498 - DNA, 25 bp, Homo sapien
aacagggttactcactgctgacagt

SEQ ID NO: 100499 - DNA, 25 bp, Homo sapien
gccctgtgggcaacgcttggtttga

SEQ ID NO: 100500 - DNA, 25 bp, Homo sapien
tggtgggagttagcatactccagag

SEQ ID NO: 100501 - DNA, 25 bp, Homo sapien
cacaaaatgcatgtccagtaaacgg

SEQ ID NO: 100502 - DNA, 25 bp, Homo sapien
tttacttgtttttcaagccatctgg

SEQ ID NO: 100503 - DNA, 25 bp, Homo sapien
gaatctattgatcttaaacagtttt

SEQ ID NO: 100504 - DNA, 25 bp, Homo sapien
tgcagaatctattgatcttaaacag

SEQ ID NO: 100505 - DNA, 25 bp, Homo sapien
cagaatctattgatcttaaacagtt

SEQ ID NO: 100506 - DNA, 25 bp, Homo sapien
gcagaatctattgatcttaaacagt

SEQ ID NO: 100507 - DNA, 25 bp, Homo sapien
ccagaaatatgtgtgggcctatttc

SEQ ID NO: 100508 - DNA, 25 bp, Homo sapien
tgttccagtgatctgtttatctttg

SEQ ID NO: 100509 - DNA, 25 bp, Homo sapien
tatgaggtggctagaagtttacgtt

SEQ ID NO: 100510 - DNA, 25 bp, Homo sapien
tgattcatctgagttttaactatgg

SEQ ID NO: 100511 - DNA, 25 bp, Homo sapien
gggagctaatgagcctctctggcta

SEQ ID NO: 100512 - DNA, 25 bp, Homo sapien
agagggatccgccatattggagctg

SEQ ID NO: 100513 - DNA, 25 bp, Homo sapien
gggacgtgaagaagtccacccagaa

SEQ ID NO: 100514 - DNA, 25 bp, Homo sapien
aggacgcactgactcgcctcaagca

SEQ ID NO: 100515 - DNA, 25 bp, Homo sapien
cgacggcagagtcgtgaaaccccat

SEQ ID NO: 100516 - DNA, 25 bp, Homo sapien
acaccgttcgccaccgacggcagag

SEQ ID NO: 100517 - DNA, 25 bp, Homo sapien
aggcggttgccacggacaccgttcg

SEQ ID NO: 100518 - DNA, 25 bp, Homo sapien
tcaagaactcttgacgtcagaaggc

SEQ ID NO: 100519 - DNA, 25 bp, Homo sapien
gctggcacgatggctgcagcggcgg

SEQ ID NO: 100520 - DNA, 25 bp, Homo sapien
ccgaggggctggcacgatggctgca

SEQ ID NO: 100521 - DNA, 25 bp, Homo sapien
cggcggcggcaacccagcacggtct

SEQ ID NO: 100522 - DNA, 25 bp, Homo sapien
ggaccgtcagccggcctcgcggaga

SEQ ID NO: 100523 - DNA, 25 bp, Homo sapien
atgcagctatgcggcgtgagctgat

SEQ ID NO: 100524 - DNA, 25 bp, Homo sapien
cagctatgcggcgtgagctgatggt

SEQ ID NO: 100525 - DNA, 25 bp, Homo sapien
gatgcagctatgcggcgtgagctga

SEQ ID NO: 100526 - DNA, 25 bp, Homo sapien
ctatgcggcgtgagctgatggtcct

SEQ ID NO: 100527 - DNA, 25 bp, Homo sapien
tcagccaaagttgtgcagggcgagc

SEQ ID NO: 100528 - DNA, 25 bp, Homo sapien
cagccaaagttgtgcagggcgagcc

SEQ ID NO: 100529 - DNA, 25 bp, Homo sapien
caaacttctcccgtcagatgcaact

SEQ ID NO: 100530 - DNA, 25 bp, Homo sapien
tcccgtcagatgcaactagtctagc

SEQ ID NO: 100531 - DNA, 25 bp, Homo sapien
attggttgcccgcaattacgacgcg

SEQ ID NO: 100532 - DNA, 25 bp, Homo sapien
cttccgatgcttgccgggagttgta

SEQ ID NO: 100533 - DNA, 25 bp, Homo sapien
ttacgacgcggccttccgatgcttg

SEQ ID NO: 100534 - DNA, 25 bp, Homo sapien
ggagttgtagttcgtaggtctcaga

SEQ ID NO: 100535 - DNA, 25 bp, Homo sapien
aacctaacccgcaggctctgcgatg

SEQ ID NO: 100536 - DNA, 25 bp, Homo sapien
cccgcaggctctgcgatgggagctc

SEQ ID NO: 100537 - DNA, 25 bp, Homo sapien
cggaggccttccaccgagccagagg

SEQ ID NO: 100538 - DNA, 25 bp, Homo sapien
gagctctgccattggcggaggcctt

SEQ ID NO: 100539 - DNA, 25 bp, Homo sapien
tccagccgcgccgtcgctttccact

SEQ ID NO: 100540 - DNA, 25 bp, Homo sapien
cgcttcaatgaagggcgcgcggaac

SEQ ID NO: 100541 - DNA, 25 bp, Homo sapien
caccgccgcttcaatgaagggcgcg

SEQ ID NO: 100542 - DNA, 25 bp, Homo sapien
gtcgctttccactaccggcgcccag

SEQ ID NO: 100543 - DNA, 25 bp, Homo sapien
tcattttcggcgtagtccacctcca

SEQ ID NO: 100544 - DNA, 25 bp, Homo sapien
catctcatcgtgatggttggtctcc

SEQ ID NO: 100545 - DNA, 25 bp, Homo sapien
tatcccctcgggaatggactggcat

SEQ ID NO: 100546 - DNA, 25 bp, Homo sapien
gagaccgacgagctctcagtgtcct

SEQ ID NO: 100547 - DNA, 25 bp, Homo sapien
gagatcggtaaactgtttttcaaga

SEQ ID NO: 100548 - DNA, 25 bp, Homo sapien
tgatctttgagatcggtaaactgtt

SEQ ID NO: 100549 - DNA, 25 bp, Homo sapien
tttttcaagattggacatttcatcc

SEQ ID NO: 100550 - DNA, 25 bp, Homo sapien
ctgtttttcaagattggacatttca

SEQ ID NO: 100551 - DNA, 25 bp, Homo sapien
tggagaccaggtcttccgatgttgc

SEQ ID NO: 100552 - DNA, 25 bp, Homo sapien
tagttgctcaatgaacaaggaactc

SEQ ID NO: 100553 - DNA, 25 bp, Homo sapien
caaattggtctgtcgcataaaatac

SEQ ID NO: 100554 - DNA, 25 bp, Homo sapien
tgccagctgtcaccaatacctttag

SEQ ID NO: 100555 - DNA, 25 bp, Homo sapien
tttgcatccacctgacttaatcgtt

SEQ ID NO: 100556 - DNA, 25 bp, Homo sapien
aagttgccagcggttccaagtattc

SEQ ID NO: 100557 - DNA, 25 bp, Homo sapien
tcttgtagttttgcatccacctgac

SEQ ID NO: 100558 - DNA, 25 bp, Homo sapien
gttccaagtattctggtgcttttcc

SEQ ID NO: 100559 - DNA, 25 bp, Homo sapien
ttctttacagattctaagcagagct

SEQ ID NO: 100560 - DNA, 25 bp, Homo sapien
tctaagcagagctctctatagattc

SEQ ID NO: 100561 - DNA, 25 bp, Homo sapien
tgctggcgagaagcttgaatttcac

SEQ ID NO: 100562 - DNA, 25 bp, Homo sapien
cagattctaagcagagctctctata

SEQ ID NO: 100563 - DNA, 25 bp, Homo sapien
aacatagcgagactgtgcctgtaca

SEQ ID NO: 100564 - DNA, 25 bp, Homo sapien
ctaacagaaatagaggatataactt

SEQ ID NO: 100565 - DNA, 25 bp, Homo sapien
tcaaaatacgttagcattaaatatc

SEQ ID NO: 100566 - DNA, 25 bp, Homo sapien
agatatgcatgctgaaaatttaagg

SEQ ID NO: 100567 - DNA, 25 bp, Homo sapien
tcaagccctgtggtgaggcttaact

SEQ ID NO: 100568 - DNA, 25 bp, Homo sapien
aaagcatctccacctgtcttagtgt

SEQ ID NO: 100569 - DNA, 25 bp, Homo sapien
acctgccgtcagatcttaatagtca

SEQ ID NO: 100570 - DNA, 25 bp, Homo sapien
tccatatgagtctaacgtaagaaca

SEQ ID NO: 100571 - DNA, 25 bp, Homo sapien
gttcactctggactgtatcatatag

SEQ ID NO: 100572 - DNA, 25 bp, Homo sapien
gctgtgcctatcctcttcaagcctt

SEQ ID NO: 100573 - DNA, 25 bp, Homo sapien
tgaggtaatatcaatgctgtgccta

SEQ ID NO: 100574 - DNA, 25 bp, Homo sapien
taatatcaatgctgtgcctatcctc

SEQ ID NO: 100575 - DNA, 25 bp, Homo sapien
cttgactgaagctcatcattccaca

SEQ ID NO: 100576 - DNA, 25 bp, Homo sapien
ttttcttgactgaagctcatcattc

SEQ ID NO: 100577 - DNA, 25 bp, Homo sapien
ttgtcaggactgaaaggatccttcc

SEQ ID NO: 100578 - DNA, 25 bp, Homo sapien
aacaactggcttctttttgtcagga

SEQ ID NO: 100579 - DNA, 25 bp, Homo sapien
tgttgtccagtcttcaagaatatca

SEQ ID NO: 100580 - DNA, 25 bp, Homo sapien
atatcaagatcttgtagcatataaa

SEQ ID NO: 100581 - DNA, 25 bp, Homo sapien
cttcctaattgttgtccagtcttca

SEQ ID NO: 100582 - DNA, 25 bp, Homo sapien
tccagtcttcaagaatatcaagatc

SEQ ID NO: 100583 - DNA, 25 bp, Homo sapien
ctctgtgtggccccaatgtagccat

SEQ ID NO: 100584 - DNA, 25 bp, Homo sapien
actctgtgtggccccaatgtagcca

SEQ ID NO: 100585 - DNA, 25 bp, Homo sapien
ccgttttcactctgtgtggccccaa

SEQ ID NO: 100586 - DNA, 25 bp, Homo sapien
gttccgttttcactctgtgtggccc

SEQ ID NO: 100587 - DNA, 25 bp, Homo sapien
tctagcttcattgtccttagaagga

SEQ ID NO: 100588 - DNA, 25 bp, Homo sapien
taagctgtttaaatgtgactagaaa

SEQ ID NO: 100589 - DNA, 25 bp, Homo sapien
tctttttagtctagcttcattgtcc

SEQ ID NO: 100590 - DNA, 25 bp, Homo sapien
cagaaattggtctcttatcgattac

SEQ ID NO: 100591 - DNA, 25 bp, Homo sapien
cagtgtcaaaagcataccatgaagt

SEQ ID NO: 100592 - DNA, 25 bp, Homo sapien
tccatgcatatgtaaaaaaggccta

SEQ ID NO: 100593 - DNA, 25 bp, Homo sapien
cctgcgggcatctgatataccgaaa

SEQ ID NO: 100594 - DNA, 25 bp, Homo sapien
tataccgaaagaagcagagtttaat

SEQ ID NO: 100595 - DNA, 25 bp, Homo sapien
aagggatcagttcaaaaactgttat

SEQ ID NO: 100596 - DNA, 25 bp, Homo sapien
ctaaagggatcagttcaaaaactgt

SEQ ID NO: 100597 - DNA, 25 bp, Homo sapien
ggatcagttcaaaaactgttatatt

SEQ ID NO: 100598 - DNA, 25 bp, Homo sapien
agggatcagttcaaaaactgttata

SEQ ID NO: 100599 - DNA, 25 bp, Homo sapien
catattgtttgtccacgtatatacc

SEQ ID NO: 100600 - DNA, 25 bp, Homo sapien
tatcaatacatattgtttgtccacg

SEQ ID NO: 100601 - DNA, 25 bp, Homo sapien
tcagatctagcactgtgcagatgtt

SEQ ID NO: 100602 - DNA, 25 bp, Homo sapien
tgtccacgtatataccattcaccat

SEQ ID NO: 100603 - DNA, 25 bp, Homo sapien
gaaatgtaaagcttagatttgcttc

SEQ ID NO: 100604 - DNA, 25 bp, Homo sapien
gtaaagcttagatttgcttccatca

SEQ ID NO: 100605 - DNA, 25 bp, Homo sapien
tgtgaaatgtaaagcttagatttgc

SEQ ID NO: 100606 - DNA, 25 bp, Homo sapien
ctgtagctgtgaaatgtaaagctta

SEQ ID NO: 100607 - DNA, 25 bp, Homo sapien
ttttttactctcatggcacttacat

SEQ ID NO: 100608 - DNA, 25 bp, Homo sapien
ttagagtactacctacaaatacaca

SEQ ID NO: 100609 - DNA, 25 bp, Homo sapien
gcacttacatttggtaacactaata

SEQ ID NO: 100610 - DNA, 25 bp, Homo sapien
cacattctctcatgattcagtgaga

SEQ ID NO: 100611 - DNA, 25 bp, Homo sapien
tattggtcatcggacctaagaggca

SEQ ID NO: 100612 - DNA, 25 bp, Homo sapien
taattttgaatgtggctagcggaag

SEQ ID NO: 100613 - DNA, 25 bp, Homo sapien
tacctgccgctaaagggtcactaga

SEQ ID NO: 100614 - DNA, 25 bp, Homo sapien
taaatatacactacagccggctgtg

SEQ ID NO: 100615 - DNA, 25 bp, Homo sapien
taatttcctcatctttagcaactaa

SEQ ID NO: 100616 - DNA, 25 bp, Homo sapien
ctcatctttagcaactaaaatcgtt

SEQ ID NO: 100617 - DNA, 25 bp, Homo sapien
catctttagcaactaaaatcgtttg

SEQ ID NO: 100618 - DNA, 25 bp, Homo sapien
ttcctcatctttagcaactaaaatc

SEQ ID NO: 100619 - DNA, 25 bp, Homo sapien
gacacttggtgtacactttaatccg

SEQ ID NO: 100620 - DNA, 25 bp, Homo sapien
aaataatcccaatgtaatcccaatg

SEQ ID NO: 100621 - DNA, 25 bp, Homo sapien
tcagaaagagtagcaacataacagt

SEQ ID NO: 100622 - DNA, 25 bp, Homo sapien
ctttaatccgctgtaaattgaccag

SEQ ID NO: 100623 - DNA, 25 bp, Homo sapien
cttggcagccttgcacagagtgggc

SEQ ID NO: 100624 - DNA, 25 bp, Homo sapien
cttcttgagtctcaccccttggcag

SEQ ID NO: 100625 - DNA, 25 bp, Homo sapien
ccttgcacagagtgggcatgagcca

SEQ ID NO: 100626 - DNA, 25 bp, Homo sapien
tcttgagtctcaccccttggcagcc

SEQ ID NO: 100627 - DNA, 25 bp, Homo sapien
gttctctcaacatccgtctccttct

SEQ ID NO: 100628 - DNA, 25 bp, Homo sapien
tcctcgttctctcaacatccgtctc

SEQ ID NO: 100629 - DNA, 25 bp, Homo sapien
ttcctcctcgttctctcaacatccg

SEQ ID NO: 100630 - DNA, 25 bp, Homo sapien
tcaacatccgtctccttctcgctcc

SEQ ID NO: 100631 - DNA, 25 bp, Homo sapien
ctatagatactgtaatccgttgacg

SEQ ID NO: 100632 - DNA, 25 bp, Homo sapien
ggctatagatactgtaatccgttga

SEQ ID NO: 100633 - DNA, 25 bp, Homo sapien
gctatagatactgtaatccgttgac

SEQ ID NO: 100634 - DNA, 25 bp, Homo sapien
ttggctatagatactgtaatccgtt

SEQ ID NO: 100635 - DNA, 25 bp, Homo sapien
aagaagttgcatagcccataggttg

SEQ ID NO: 100636 - DNA, 25 bp, Homo sapien
agaagttgcatagcccataggttgc

SEQ ID NO: 100637 - DNA, 25 bp, Homo sapien
aagttgcatagcccataggttgcag

SEQ ID NO: 100638 - DNA, 25 bp, Homo sapien
taagaagttgcatagcccataggtt

SEQ ID NO: 100639 - DNA, 25 bp, Homo sapien
gtgactgtagcagtggtggtatcat

SEQ ID NO: 100640 - DNA, 25 bp, Homo sapien
ggtggtatcataagcaccagtgcca

SEQ ID NO: 100641 - DNA, 25 bp, Homo sapien
agtggtggtatcataagcaccagtg

SEQ ID NO: 100642 - DNA, 25 bp, Homo sapien
tgggtggtggtgactgtagcagtgg

SEQ ID NO: 100643 - DNA, 25 bp, Homo sapien
tactctgtccatatcttaggccagg

SEQ ID NO: 100644 - DNA, 25 bp, Homo sapien
ctgctctgatcatagctggtaggag

SEQ ID NO: 100645 - DNA, 25 bp, Homo sapien
actgctctgatcatagctggtagga

SEQ ID NO: 100646 - DNA, 25 bp, Homo sapien
tggctactggtgttttgggccccac

SEQ ID NO: 100647 - DNA, 25 bp, Homo sapien
ctttccggtgaatacttgttggcta

SEQ ID NO: 100648 - DNA, 25 bp, Homo sapien
ccacccattcgtagtttggagtttg

SEQ ID NO: 100649 - DNA, 25 bp, Homo sapien
tgttggctactttagggttctgctc

SEQ ID NO: 100650 - DNA, 25 bp, Homo sapien
tgctgaagaaagcaaaacccctccc

SEQ ID NO: 100651 - DNA, 25 bp, Homo sapien
cccctccctccaggtttcagctgct

SEQ ID NO: 100652 - DNA, 25 bp, Homo sapien
acccctccctccaggtttcagctgc

SEQ ID NO: 100653 - DNA, 25 bp, Homo sapien
ttggtgctgaagaaagcaaaacccc

SEQ ID NO: 100654 - DNA, 25 bp, Homo sapien
ttctggacacctagaataagcaggg

SEQ ID NO: 100655 - DNA, 25 bp, Homo sapien
aatctgaaccgtctctttccttcca

SEQ ID NO: 100656 - DNA, 25 bp, Homo sapien
cccaataagatggtagcttgctttc

SEQ ID NO: 100657 - DNA, 25 bp, Homo sapien
gggtacaggaaacctctatcatcac

SEQ ID NO: 100658 - DNA, 25 bp, Homo sapien
caaccaggagccgaggtggataatc

SEQ ID NO: 100659 - DNA, 25 bp, Homo sapien
gcaaccaggagccgaggtggataat

SEQ ID NO: 100660 - DNA, 25 bp, Homo sapien
gctgagagaagtgaccccaccccca

SEQ ID NO: 100661 - DNA, 25 bp, Homo sapien
accaggagccgaggtggataatcct

SEQ ID NO: 100662 - DNA, 25 bp, Homo sapien
gaagtctcagcaagcgcctgaggca

SEQ ID NO: 100663 - DNA, 25 bp, Homo sapien
aaggaagcgagtggccagctcagtc

SEQ ID NO: 100664 - DNA, 25 bp, Homo sapien
gaacatccaggagagagcactagag

SEQ ID NO: 100665 - DNA, 25 bp, Homo sapien
agcacacctcgaatagaacatccag

SEQ ID NO: 100666 - DNA, 25 bp, Homo sapien
caaaaactatccaggggtggtggcg

SEQ ID NO: 100667 - DNA, 25 bp, Homo sapien
ttgaaccagagaagcggaggttgcg

SEQ ID NO: 100668 - DNA, 25 bp, Homo sapien
aactatccaggggtggtggcgcgtg

SEQ ID NO: 100669 - DNA, 25 bp, Homo sapien
aaccagagaagcggaggttgcggtg

SEQ ID NO: 100670 - DNA, 25 bp, Homo sapien
gctatggtacacagctgtaatacaa

SEQ ID NO: 100671 - DNA, 25 bp, Homo sapien
tgttttgtgcattagttgcccttca

SEQ ID NO: 100672 - DNA, 25 bp, Homo sapien
tacaaaaccgaaactgctatggtac

SEQ ID NO: 100673 - DNA, 25 bp, Homo sapien
tgacattcagtaaacaaagcatggc

SEQ ID NO: 100674 - DNA, 25 bp, Homo sapien
taataagggctgtacaatgttaact

SEQ ID NO: 100675 - DNA, 25 bp, Homo sapien
taacttttccatctatgagaatgcc

SEQ ID NO: 100676 - DNA, 25 bp, Homo sapien
tatgagaatgccagccaggcccagt

SEQ ID NO: 100677 - DNA, 25 bp, Homo sapien
cccaccatattggaactacattaaa

SEQ ID NO: 100678 - DNA, 25 bp, Homo sapien
gaggatagactacttctaagacgaa

SEQ ID NO: 100679 - DNA, 25 bp, Homo sapien
tgctcccaaacccaagagactttat

SEQ ID NO: 100680 - DNA, 25 bp, Homo sapien
gcatcggtacaagctcaaagacttt

SEQ ID NO: 100681 - DNA, 25 bp, Homo sapien
gactttcttagccttcagtgtcacc

SEQ ID NO: 100682 - DNA, 25 bp, Homo sapien
tccggcctgtgattactctccatat

SEQ ID NO: 100683 - DNA, 25 bp, Homo sapien
tgtgattaccctccgtgtcctccgg

SEQ ID NO: 100684 - DNA, 25 bp, Homo sapien
tgtgattaccctccatatcctccgg

SEQ ID NO: 100685 - DNA, 25 bp, Homo sapien
tgtgattactctccgtgtcctccgg

SEQ ID NO: 100686 - DNA, 25 bp, Homo sapien
tccggcctgtgattactctccatat

SEQ ID NO: 100687 - DNA, 25 bp, Homo sapien
tctccatatcctccagcctgtgatt

SEQ ID NO: 100688 - DNA, 25 bp, Homo sapien
gcatatcctccagcctgtgattact

SEQ ID NO: 100689 - DNA, 25 bp, Homo sapien
tccagcctgtgattactctccatat

SEQ ID NO: 100690 - DNA, 25 bp, Homo sapien
ctgttttcacagttgctcttaataa

SEQ ID NO: 100691 - DNA, 25 bp, Homo sapien
tcctggaccgcttttgaagttgtaa

SEQ ID NO: 100692 - DNA, 25 bp, Homo sapien
tatttggctacacttccagcacttg

SEQ ID NO: 100693 - DNA, 25 bp, Homo sapien
ataagctgcagacgccatcttcctg

SEQ ID NO: 100694 - DNA, 25 bp, Homo sapien
tagtgacatgatgcatatttggcta

SEQ ID NO: 100695 - DNA, 25 bp, Homo sapien
aatgtacaccattgccgaagcaaag

SEQ ID NO: 100696 - DNA, 25 bp, Homo sapien
gggcaccaatgtacaccattgccga

SEQ ID NO: 100697 - DNA, 25 bp, Homo sapien
cattgccgaagcaaagtgactgcgg

SEQ ID NO: 100698 - DNA, 25 bp, Homo sapien
tgactgcggcttccaacaaagcttc

SEQ ID NO: 100699 - DNA, 25 bp, Homo sapien
gaaaccccggttgcatgttctcgct

SEQ ID NO: 100700 - DNA, 25 bp, Homo sapien
cacccagaaaccccggttgcatgtt

SEQ ID NO: 100701 - DNA, 25 bp, Homo sapien
tgcatgttctcgctgaatggcttca

SEQ ID NO: 100702 - DNA, 25 bp, Homo sapien
attaatgagaattctcagctcagct

SEQ ID NO: 100703 - DNA, 25 bp, Homo sapien
cttccacatgaaggccgctgtgacc

SEQ ID NO: 100704 - DNA, 25 bp, Homo sapien
cagctgccaatgttggcaaacaagt

SEQ ID NO: 100705 - DNA, 25 bp, Homo sapien
gggctgaaagttgagcacgctcctc

SEQ ID NO: 100706 - DNA, 25 bp, Homo sapien
taatatgaatgtacccaggcactgg

SEQ ID NO: 100707 - DNA, 25 bp, Homo sapien
gaaacacaaacgaagagttggaggc

SEQ ID NO: 100708 - DNA, 25 bp, Homo sapien
gggatgcactgagaaacacaaacga

SEQ ID NO: 100709 - DNA, 25 bp, Homo sapien
cgaagagttggaggcaccacagatt

SEQ ID NO: 100710 - DNA, 25 bp, Homo sapien
gttggaggcaccacagattcatttc

SEQ ID NO: 100711 - DNA, 25 bp, Homo sapien
gacatcagtaaatgtccaatgatgg

SEQ ID NO: 100712 - DNA, 25 bp, Homo sapien
gtaaatgtccaatgatggtagtaat

SEQ ID NO: 100713 - DNA, 25 bp, Homo sapien
catcagtaaatgtccaatgatggta

SEQ ID NO: 100714 - DNA, 25 bp, Homo sapien
cagtaaatgtccaatgatggtagta

SEQ ID NO: 100715 - DNA, 25 bp, Homo sapien
gagccccagaagctaagggggcaaa

SEQ ID NO: 100716 - DNA, 25 bp, Homo sapien
gtgactgttttatcagggagcccca

SEQ ID NO: 100717 - DNA, 25 bp, Homo sapien
caggaattaagaagaggagacttgt

SEQ ID NO: 100718 - DNA, 25 bp, Homo sapien
agaagctaagggggcaaactttctg

SEQ ID NO: 100719 - DNA, 25 bp, Homo sapien
cagtaacacacagaagctgtcttag

SEQ ID NO: 100720 - DNA, 25 bp, Homo sapien
tttcacattcctctcccagtgattg

SEQ ID NO: 100721 - DNA, 25 bp, Homo sapien
acagaagctgtcttagcaacagggc

SEQ ID NO: 100722 - DNA, 25 bp, Homo sapien
cattcctctcccagtgattgggagg

SEQ ID NO: 100723 - DNA, 25 bp, Homo sapien
ctggaagtgaccgtgactggagtct

SEQ ID NO: 100724 - DNA, 25 bp, Homo sapien
cttctgccctggaagtgaccgtgac

SEQ ID NO: 100725 - DNA, 25 bp, Homo sapien
gtgaccgtgactggagtctttccca

SEQ ID NO: 100726 - DNA, 25 bp, Homo sapien
tgccctggaagtgaccgtgactgga

SEQ ID NO: 100727 - DNA, 25 bp, Homo sapien
tggaccccgcatgttatggaaagag

SEQ ID NO: 100728 - DNA, 25 bp, Homo sapien
ctgtggaccccgcatgttatggaaa

SEQ ID NO: 100729 - DNA, 25 bp, Homo sapien
ccccgcatgttatggaaagaggtcg

SEQ ID NO: 100730 - DNA, 25 bp, Homo sapien
ctgccagctgtggaccccgcatgtt

SEQ ID NO: 100731 - DNA, 25 bp, Homo sapien
gcttgggtcacctttgatttgcact

SEQ ID NO: 100732 - DNA, 25 bp, Homo sapien
cacttcactatgaaccaccaggtca

SEQ ID NO: 100733 - DNA, 25 bp, Homo sapien
acctgagcttgggtcacctttgatt

SEQ ID NO: 100734 - DNA, 25 bp, Homo sapien
cagctctggaagttgaagttcccca

SEQ ID NO: 100735 - DNA, 25 bp, Homo sapien
ctttgtgccaagatagctcctaatc

SEQ ID NO: 100736 - DNA, 25 bp, Homo sapien
tatttgactcggtcattagcaatct

SEQ ID NO: 100737 - DNA, 25 bp, Homo sapien
tagctcctaatcaaattctggcaga

SEQ ID NO: 100738 - DNA, 25 bp, Homo sapien
gcaatgttatgcaacaaatgcttcc

SEQ ID NO: 100739 - DNA, 25 bp, Homo sapien
cagtccatcttgattgttactttct

SEQ ID NO: 100740 - DNA, 25 bp, Homo sapien
gtccatcttgattgttactttcttt

SEQ ID NO: 100741 - DNA, 25 bp, Homo sapien
acaatgtcctctggtaatagatgcc

SEQ ID NO: 100742 - DNA, 25 bp, Homo sapien
ctcagtccatcttgattgttacttt

SEQ ID NO: 100743 - DNA, 25 bp, Homo sapien
tgtgggctgtataaacactgttgat

SEQ ID NO: 100744 - DNA, 25 bp, Homo sapien
tctggacacagaaggtacccaatta

SEQ ID NO: 100745 - DNA, 25 bp, Homo sapien
cactgttgattaccattcctctgta

SEQ ID NO: 100746 - DNA, 25 bp, Homo sapien
cagaattcacggtcctgattgtgta

SEQ ID NO: 100747 - DNA, 25 bp, Homo sapien
tgtgctactgttaatttgccctttg

SEQ ID NO: 100748 - DNA, 25 bp, Homo sapien
gctgatgctgtctatgggaggtgaa

SEQ ID NO: 100749 - DNA, 25 bp, Homo sapien
agaggtcccttgaattgtgctactg

SEQ ID NO: 100750 - DNA, 25 bp, Homo sapien
tgcagctgatgctgtctatgggagg

SEQ ID NO: 100751 - DNA, 25 bp, Homo sapien
acaaatgctgtcacaccttgctccc

SEQ ID NO: 100752 - DNA, 25 bp, Homo sapien
ttttcctccacaaatgctgtcacac

SEQ ID NO: 100753 - DNA, 25 bp, Homo sapien
cttgctcccacctcaccaaaattca

SEQ ID NO: 100754 - DNA, 25 bp, Homo sapien
ttgctcccacctcaccaaaattcat

SEQ ID NO: 100755 - DNA, 25 bp, Homo sapien
agtacgtattcctaggcatgggaga

SEQ ID NO: 100756 - DNA, 25 bp, Homo sapien
tttttggagtacgtattcctaggca

SEQ ID NO: 100757 - DNA, 25 bp, Homo sapien
atatttttggagtacgtattcctag

SEQ ID NO: 100758 - DNA, 25 bp, Homo sapien
tggagtacgtattcctaggcatggg

SEQ ID NO: 100759 - DNA, 25 bp, Homo sapien
cttttatgaaaatccccagttactg

SEQ ID NO: 100760 - DNA, 25 bp, Homo sapien
aaattcatcaacagttttttatgac

SEQ ID NO: 100761 - DNA, 25 bp, Homo sapien
cagctatcttaacagcagatcttct

SEQ ID NO: 100762 - DNA, 25 bp, Homo sapien
tagcatggacagttaatagtcaaaa

SEQ ID NO: 100763 - DNA, 25 bp, Homo sapien
cagggcagagatgcttgtccaatgc

SEQ ID NO: 100764 - DNA, 25 bp, Homo sapien
gcagagatgcttgtccaatgcggcc

SEQ ID NO: 100765 - DNA, 25 bp, Homo sapien
atgcttgtccaatgcggccggcaca

SEQ ID NO: 100766 - DNA, 25 bp, Homo sapien
caatgcggccggcacaggagctcct

SEQ ID NO: 100767 - DNA, 25 bp, Homo sapien
aattatttggactagttctgctgtg

SEQ ID NO: 100768 - DNA, 25 bp, Homo sapien
caccaaggtgtatagtctgaattat

SEQ ID NO: 100769 - DNA, 25 bp, Homo sapien
tctgctgtgatcttagccaattgac

SEQ ID NO: 100770 - DNA, 25 bp, Homo sapien
gccaattgaccctctgccctaattt

SEQ ID NO: 100771 - DNA, 25 bp, Homo sapien
tgggatccttttcttcaggcctctc

SEQ ID NO: 100772 - DNA, 25 bp, Homo sapien
ctgctctctccctgggatccttttc

SEQ ID NO: 100773 - DNA, 25 bp, Homo sapien
gatccttttcttcaggcctctccat

SEQ ID NO: 100774 - DNA, 25 bp, Homo sapien
tgctctctccctgggatccttttct

SEQ ID NO: 100775 - DNA, 25 bp, Homo sapien
accagtgagcctccagtaagtcttg

SEQ ID NO: 100776 - DNA, 25 bp, Homo sapien
gctgagttcctcttgctaacatgac

SEQ ID NO: 100777 - DNA, 25 bp, Homo sapien
tttgtttcataggatgagcggtacc

SEQ ID NO: 100778 - DNA, 25 bp, Homo sapien
tgagcggtacctttctcaagatccc

SEQ ID NO: 100779 - DNA, 25 bp, Homo sapien
tatgcctacaaaaccctccatgaca

SEQ ID NO: 100780 - DNA, 25 bp, Homo sapien
tacaaaaccctccatgacatcacag

SEQ ID NO: 100781 - DNA, 25 bp, Homo sapien
gttcatcaagggctatgcctacaaa

SEQ ID NO: 100782 - DNA, 25 bp, Homo sapien
caagggctatgcctacaaaaccctc

SEQ ID NO: 100783 - DNA, 25 bp, Homo sapien
taaggtgtaatatcatatctgggta

SEQ ID NO: 100784 - DNA, 25 bp, Homo sapien
gggtataactcgcacacaaacatac

SEQ ID NO: 100785 - DNA, 25 bp, Homo sapien
tgggtataactcgcacacaaacata

SEQ ID NO: 100786 - DNA, 25 bp, Homo sapien
ctgggtataactcgcacacaaacat

SEQ ID NO: 100787 - DNA, 25 bp, Homo sapien
gtttagatgctaatgattgtatttc

SEQ ID NO: 100788 - DNA, 25 bp, Homo sapien
tagtggccctctcatccagaatcat

SEQ ID NO: 100789 - DNA, 25 bp, Homo sapien
aatgattgtatttcattagtggccc

SEQ ID NO: 100790 - DNA, 25 bp, Homo sapien
tcattagtggccctctcatccagaa

SEQ ID NO: 100791 - DNA, 25 bp, Homo sapien
cacatgcggccaaaattgggttact

SEQ ID NO: 100792 - DNA, 25 bp, Homo sapien
tatgttcaataaacgatgccctgcc

SEQ ID NO: 100793 - DNA, 25 bp, Homo sapien
taaatcctttgtactgtaatgagca

SEQ ID NO: 100794 - DNA, 25 bp, Homo sapien
cattagagaaatggactgtacttct

SEQ ID NO: 100795 - DNA, 25 bp, Homo sapien
aatcttctcctgacaccgtctgttg

SEQ ID NO: 100796 - DNA, 25 bp, Homo sapien
cacaaacgcatttgcattattgagg

SEQ ID NO: 100797 - DNA, 25 bp, Homo sapien
gtcttcccagctattcacaaacgca

SEQ ID NO: 100798 - DNA, 25 bp, Homo sapien
cagtgaaattctccaaatgttgtaa

SEQ ID NO: 100799 - DNA, 25 bp, Homo sapien
gccagcctttgccagagctttgcta

SEQ ID NO: 100800 - DNA, 25 bp, Homo sapien
cctttgccagagctttgctattgct

SEQ ID NO: 100801 - DNA, 25 bp, Homo sapien
ctgattagaggtttgattagaagtt

SEQ ID NO: 100802 - DNA, 25 bp, Homo sapien
ctagttgtcatctttctgattagag

SEQ ID NO: 100803 - DNA, 25 bp, Homo sapien
tgagatttagggagccatcactcac

SEQ ID NO: 100804 - DNA, 25 bp, Homo sapien
ggagccatcactcacaattgccttg

SEQ ID NO: 100805 - DNA, 25 bp, Homo sapien
tttagggagccatcactcacaattg

SEQ ID NO: 100806 - DNA, 25 bp, Homo sapien
gccatcactcacaattgccttggag

SEQ ID NO: 100807 - DNA, 25 bp, Homo sapien
tctatagatagcacgctttgttggc

SEQ ID NO: 100808 - DNA, 25 bp, Homo sapien
tggcttatgtcttttgttacatgat

SEQ ID NO: 100809 - DNA, 25 bp, Homo sapien
aacagttacaagtattttctataga

SEQ ID NO: 100810 - DNA, 25 bp, Homo sapien
tagagtcaaacgtacaaatgctggg

SEQ ID NO: 100811 - DNA, 25 bp, Homo sapien
gaagagcgtgacacactcatcagcc

SEQ ID NO: 100812 - DNA, 25 bp, Homo sapien
aacataactgcagaggggattccat

SEQ ID NO: 100813 - DNA, 25 bp, Homo sapien
cagaggggattccatgcttgcagag

SEQ ID NO: 100814 - DNA, 25 bp, Homo sapien
tgccggagatgcacaggcaaacata

SEQ ID NO: 100815 - DNA, 25 bp, Homo sapien
aaaaggtagcactgttaatctactg

SEQ ID NO: 100816 - DNA, 25 bp, Homo sapien
ataaaaggtagcactgttaatctac

SEQ ID NO: 100817 - DNA, 25 bp, Homo sapien
taggaactaatcagccttataaaag

SEQ ID NO: 100818 - DNA, 25 bp, Homo sapien
ttcagcatattttaggaactaatca

SEQ ID NO: 100819 - DNA, 25 bp, Homo sapien
tatttcatcggaaggtcaatatctg

SEQ ID NO: 100820 - DNA, 25 bp, Homo sapien
agaaaatatttcatcggaaggtcaa

SEQ ID NO: 100821 - DNA, 25 bp, Homo sapien
ttcatcggaaggtcaatatctgcaa

SEQ ID NO: 100822 - DNA, 25 bp, Homo sapien
caggcacctgcctaataaatgctac

SEQ ID NO: 100823 - DNA, 25 bp, Homo sapien
gaaccatcatcaaatgttttccaaa

SEQ ID NO: 100824 - DNA, 25 bp, Homo sapien
gttttccaaattcatccctggtaca

SEQ ID NO: 100825 - DNA, 25 bp, Homo sapien
aaggggtggcagatgaaccatcatc

SEQ ID NO: 100826 - DNA, 25 bp, Homo sapien
aaattcatccctggtacaactctcc

SEQ ID NO: 100827 - DNA, 25 bp, Homo sapien
tcgtttggatatagctgaggtgtct

SEQ ID NO: 100828 - DNA, 25 bp, Homo sapien
gctctgccaaaccataatgcttagg

SEQ ID NO: 100829 - DNA, 25 bp, Homo sapien
gatactgtcaaccactcgatagccc

SEQ ID NO: 100830 - DNA, 25 bp, Homo sapien
tcctcttaatgattccggatggaac

SEQ ID NO: 100831 - DNA, 25 bp, Homo sapien
ataatctcatagaaaacccttattt

SEQ ID NO: 100832 - DNA, 25 bp, Homo sapien
ttcattcgcatttgacacaatctcc

SEQ ID NO: 100833 - DNA, 25 bp, Homo sapien
tcgcatttgacacaatctcctggca

SEQ ID NO: 100834 - DNA, 25 bp, Homo sapien
aacccttatttttcattcgcatttg

SEQ ID NO: 100835 - DNA, 25 bp, Homo sapien
ttcctagaacgtaaagacccttgca

SEQ ID NO: 100836 - DNA, 25 bp, Homo sapien
tgcattgatgcacgtgcacggcgcc

SEQ ID NO: 100837 - DNA, 25 bp, Homo sapien
gcgccaccagttcccgaaagcattt

SEQ ID NO: 100838 - DNA, 25 bp, Homo sapien
gcatgcccgtattgttctcctgagg

SEQ ID NO: 100839 - DNA, 25 bp, Homo sapien
gaacttgcactaggagacatagttg

SEQ ID NO: 100840 - DNA, 25 bp, Homo sapien
cattgaacttgcactaggagacata

SEQ ID NO: 100841 - DNA, 25 bp, Homo sapien
cagccattgaacttgcactaggaga

SEQ ID NO: 100842 - DNA, 25 bp, Homo sapien
gcactaggagacatagttgtcctcc

SEQ ID NO: 100843 - DNA, 25 bp, Homo sapien
tcaactcagtgtatggagcacatag

SEQ ID NO: 100844 - DNA, 25 bp, Homo sapien
gacacatggattacttgtacactct

SEQ ID NO: 100845 - DNA, 25 bp, Homo sapien
tctgtcctaacccaatcaactcagt

SEQ ID NO: 100846 - DNA, 25 bp, Homo sapien
aggtgtctctcttgggtggtacaag

SEQ ID NO: 100847 - DNA, 25 bp, Homo sapien
catgatcttggttggctccctggtt

SEQ ID NO: 100848 - DNA, 25 bp, Homo sapien
aactaaagcattggagggcatggac

SEQ ID NO: 100849 - DNA, 25 bp, Homo sapien
tgagcaggacccatgactgacttct

SEQ ID NO: 100850 - DNA, 25 bp, Homo sapien
tgcctgtcgagtatgagatgcctgt

SEQ ID NO: 100851 - DNA, 25 bp, Homo sapien
gctataaagaagtacacggtgttat

SEQ ID NO: 100852 - DNA, 25 bp, Homo sapien
tacacggtgttatgtaagcctgaag

SEQ ID NO: 100853 - DNA, 25 bp, Homo sapien
agaagtacacggtgttatgtaagcc

SEQ ID NO: 100854 - DNA, 25 bp, Homo sapien
cggtgttatgtaagcctgaagaata

SEQ ID NO: 100855 - DNA, 25 bp, Homo sapien
agttttgagcttccacaatgtttca

SEQ ID NO: 100856 - DNA, 25 bp, Homo sapien
ttttctcttgctagattctgggcca

SEQ ID NO: 100857 - DNA, 25 bp, Homo sapien
ctggatctgggtgaatcccagggcc

SEQ ID NO: 100858 - DNA, 25 bp, Homo sapien
gggccacagagtgaatggttgcttt

SEQ ID NO: 100859 - DNA, 25 bp, Homo sapien
tacggtttagcacgcatgattcagg

SEQ ID NO: 100860 - DNA, 25 bp, Homo sapien
tcggggtcggcatagaattagataa

SEQ ID NO: 100861 - DNA, 25 bp, Homo sapien
ctcggggtcggcatagaattagata

SEQ ID NO: 100862 - DNA, 25 bp, Homo sapien
ctctacagagcgtgtctcggggtcg

SEQ ID NO: 100863 - DNA, 25 bp, Homo sapien
ctccctctacagagcgtgtctcggg

SEQ ID NO: 100864 - DNA, 25 bp, Homo sapien
caaaaccactggtggtcacacattc

SEQ ID NO: 100865 - DNA, 25 bp, Homo sapien
ctggtggtcacacattctaggcctg

SEQ ID NO: 100866 - DNA, 25 bp, Homo sapien
tccaccaaaaccactggtggtcaca

SEQ ID NO: 100867 - DNA, 25 bp, Homo sapien
aaccactggtggtcacacattctag

SEQ ID NO: 100868 - DNA, 25 bp, Homo sapien
cttcttcaccctccagatctggttt

SEQ ID NO: 100869 - DNA, 25 bp, Homo sapien
cctccagatctggttttcccttcat

SEQ ID NO: 100870 - DNA, 25 bp, Homo sapien
ttcaccctccagatctggttttccc

SEQ ID NO: 100871 - DNA, 25 bp, Homo sapien
caccctccagatctggttttccctt

SEQ ID NO: 100872 - DNA, 25 bp, Homo sapien
gccagaattcgtcaagaggcctgca

SEQ ID NO: 100873 - DNA, 25 bp, Homo sapien
gacatgttgaactgcaagattccac

SEQ ID NO: 100874 - DNA, 25 bp, Homo sapien
gattccactcgcgacgccagaattc

SEQ ID NO: 100875 - DNA, 25 bp, Homo sapien
tgtttcgcactgaggcataggaccg

SEQ ID NO: 100876 - DNA, 25 bp, Homo sapien
tagagactcagagtgctgtgcctca

SEQ ID NO: 100877 - DNA, 25 bp, Homo sapien
tcagctctcaaacctttgattgccc

SEQ ID NO: 100878 - DNA, 25 bp, Homo sapien
gattgcccttagtttgaatgccacc

SEQ ID NO: 100879 - DNA, 25 bp, Homo sapien
taatcctagcaccattcacccttag

SEQ ID NO: 100880 - DNA, 25 bp, Homo sapien
ctcccagatcccttcctcttctaaa

SEQ ID NO: 100881 - DNA, 25 bp, Homo sapien
tcccagatcccttcctcttctaaac

SEQ ID NO: 100882 - DNA, 25 bp, Homo sapien
tctttcctcccagatcccttcctct

SEQ ID NO: 100883 - DNA, 25 bp, Homo sapien
cagatcccttcctcttctaaacttt

SEQ ID NO: 100884 - DNA, 25 bp, Homo sapien
tgcacagtgtttaccgcttccctcg

SEQ ID NO: 100885 - DNA, 25 bp, Homo sapien
ttcaaaaggctcattgcacagtgtt

SEQ ID NO: 100886 - DNA, 25 bp, Homo sapien
cgcttccctcggacccacttttgat

SEQ ID NO: 100887 - DNA, 25 bp, Homo sapien
cttccgcgggagtcgggagtcctgg

SEQ ID NO: 100888 - DNA, 25 bp, Homo sapien
acaggcaaatatgattccttgtttt

SEQ ID NO: 100889 - DNA, 25 bp, Homo sapien
ggcaaatatgattccttgttttcaa

SEQ ID NO: 100890 - DNA, 25 bp, Homo sapien
ttccatatccacaggcaaatatgat

SEQ ID NO: 100891 - DNA, 25 bp, Homo sapien
ccacaggcaaatatgattccttgtt

SEQ ID NO: 100892 - DNA, 25 bp, Homo sapien
tagttggagagtcagcctcggtcag

SEQ ID NO: 100893 - DNA, 25 bp, Homo sapien
tcgcctgtgacaaaacagctagttg

SEQ ID NO: 100894 - DNA, 25 bp, Homo sapien
aacccagactttgccggatttgcag

SEQ ID NO: 100895 - DNA, 25 bp, Homo sapien
caaaactggttcgttccttagccat

SEQ ID NO: 100896 - DNA, 25 bp, Homo sapien
gcaaagggggcaacttctatagtaa

SEQ ID NO: 100897 - DNA, 25 bp, Homo sapien
acatctagacaagggtaaagtacca

SEQ ID NO: 100898 - DNA, 25 bp, Homo sapien
gagcctgttcctgaatgtaggcaaa

SEQ ID NO: 100899 - DNA, 25 bp, Homo sapien
caggtctgaaactgagcctgttcct

SEQ ID NO: 100900 - DNA, 25 bp, Homo sapien
ccattcacaactttattattgtacc

SEQ ID NO: 100901 - DNA, 25 bp, Homo sapien
cacaactttattattgtacctgatt

SEQ ID NO: 100902 - DNA, 25 bp, Homo sapien
ttccaagaaccattcacaactttat

SEQ ID NO: 100903 - DNA, 25 bp, Homo sapien
caagaaccattcacaactttattat

SEQ ID NO: 100904 - DNA, 25 bp, Homo sapien
tcttcgtttcaagagttgagatcag

SEQ ID NO: 100905 - DNA, 25 bp, Homo sapien
tttcaagagttgagatcagtaatgc

SEQ ID NO: 100906 - DNA, 25 bp, Homo sapien
attctctctttcttcgtttcaagag

SEQ ID NO: 100907 - DNA, 25 bp, Homo sapien
tctttcttcgtttcaagagttgaga

SEQ ID NO: 100908 - DNA, 25 bp, Homo sapien
caaaagcgtttactttgtcacttga

SEQ ID NO: 100909 - DNA, 25 bp, Homo sapien
gtccaactgagtcacaaaagcgttt

SEQ ID NO: 100910 - DNA, 25 bp, Homo sapien
tccaactgagtcacaaaagcgttta

SEQ ID NO: 100911 - DNA, 25 bp, Homo sapien
cacaaaagcgtttactttgtcactt

SEQ ID NO: 100912 - DNA, 25 bp, Homo sapien
agcatgttaacacataatcaggcat

SEQ ID NO: 100913 - DNA, 25 bp, Homo sapien
aagcatgttaacacataatcaggca

SEQ ID NO: 100914 - DNA, 25 bp, Homo sapien
catttctataaatgggtagccaggc

SEQ ID NO: 100915 - DNA, 25 bp, Homo sapien
tcctcacagtttgatggacaacatt

SEQ ID NO: 100916 - DNA, 25 bp, Homo sapien
cagcaacgtgaaaacccatagggtt

SEQ ID NO: 100917 - DNA, 25 bp, Homo sapien
tcagagcaagctacaaaaattgcct

SEQ ID NO: 100918 - DNA, 25 bp, Homo sapien
cttcttaactggctacattcttttt

SEQ ID NO: 100919 - DNA, 25 bp, Homo sapien
ttaactggctacattctttttgaac

SEQ ID NO: 100920 - DNA, 25 bp, Homo sapien
ggctacattctttttgaacaggcat

SEQ ID NO: 100921 - DNA, 25 bp, Homo sapien
actggctacattctttttgaacagg

SEQ ID NO: 100922 - DNA, 25 bp, Homo sapien
gacgttatagaagagtaagcagaca

SEQ ID NO: 100923 - DNA, 25 bp, Homo sapien
aagacgttatagaagagtaagcaga

SEQ ID NO: 100924 - DNA, 25 bp, Homo sapien
acgttatagaagagtaagcagacat

SEQ ID NO: 100925 - DNA, 25 bp, Homo sapien
aaaagacgttatagaagagtaagca

SEQ ID NO: 100926 - DNA, 25 bp, Homo sapien
tacggtactgcctatatgaagcaaa

SEQ ID NO: 100927 - DNA, 25 bp, Homo sapien
ttaagcataagtcttttagctctgg

SEQ ID NO: 100928 - DNA, 25 bp, Homo sapien
tttaagcataagtcttttagctctg

SEQ ID NO: 100929 - DNA, 25 bp, Homo sapien
tctggatacggtactgcctatatga

SEQ ID NO: 100930 - DNA, 25 bp, Homo sapien
caaggtagcccggaaagcaaagact

SEQ ID NO: 100931 - DNA, 25 bp, Homo sapien
tggctactggaggttttcggtgaat

SEQ ID NO: 100932 - DNA, 25 bp, Homo sapien
gagcaggtggctactggaggttttc

SEQ ID NO: 100933 - DNA, 25 bp, Homo sapien
ctgtattatagtgtggaaggcttgg

SEQ ID NO: 100934 - DNA, 25 bp, Homo sapien
cagactctcgacggagtaaagcttc

SEQ ID NO: 100935 - DNA, 25 bp, Homo sapien
agactctcgacggagtaaagcttcc

SEQ ID NO: 100936 - DNA, 25 bp, Homo sapien
acagactctcgacggagtaaagctt

SEQ ID NO: 100937 - DNA, 25 bp, Homo sapien
tgggcttctaagacacatgggaata

SEQ ID NO: 100938 - DNA, 25 bp, Homo sapien
catagagtagctttctcaacctgct

SEQ ID NO: 100939 - DNA, 25 bp, Homo sapien
ttgggtcaaatcaaacagtagagct

SEQ ID NO: 100940 - DNA, 25 bp, Homo sapien
tacattcagattacacagatccctt

SEQ ID NO: 100941 - DNA, 25 bp, Homo sapien
tgattgtgcatgctgttgaaccaga

SEQ ID NO: 100942 - DNA, 25 bp, Homo sapien
attgtgcatgctgttgaaccagatc

SEQ ID NO: 100943 - DNA, 25 bp, Homo sapien
gtgattgtgcatgctgttgaaccag

SEQ ID NO: 100944 - DNA, 25 bp, Homo sapien
tgtgcatgctgttgaaccagatcat

SEQ ID NO: 100945 - DNA, 25 bp, Homo sapien
taatgaaaggcagactggaaaccgg

SEQ ID NO: 100946 - DNA, 25 bp, Homo sapien
tctgacaagtgccactgggacgcca

SEQ ID NO: 100947 - DNA, 25 bp, Homo sapien
cagagaggctttgggcttcacactt

SEQ ID NO: 100948 - DNA, 25 bp, Homo sapien
cagagggcagcataaatctgttgcc

SEQ ID NO: 100949 - DNA, 25 bp, Homo sapien
aggtagtttgtttgtgcatttcagc

SEQ ID NO: 100950 - DNA, 25 bp, Homo sapien
gtgcatagctcacacgcaggactct

SEQ ID NO: 100951 - DNA, 25 bp, Homo sapien
gaagtaggtttgttagctgctgaca

SEQ ID NO: 100952 - DNA, 25 bp, Homo sapien
tccaactgcctggttgagaagtagg

SEQ ID NO: 100953 - DNA, 25 bp, Homo sapien
tatggacaggggagataatttgacc

SEQ ID NO: 100954 - DNA, 25 bp, Homo sapien
acaagtgcagttgtttatggacagg

SEQ ID NO: 100955 - DNA, 25 bp, Homo sapien
caggggagataatttgacccactgt

SEQ ID NO: 100956 - DNA, 25 bp, Homo sapien
tttctacttcacaagtgcagttgtt

SEQ ID NO: 100957 - DNA, 25 bp, Homo sapien
cagtgaggccatacacttgggtgat

SEQ ID NO: 100958 - DNA, 25 bp, Homo sapien
cttatgctgttaaagttgaagagat

SEQ ID NO: 100959 - DNA, 25 bp, Homo sapien
cacttgggtgatttcacttatgctg

SEQ ID NO: 100960 - DNA, 25 bp, Homo sapien
gagatgctttacagcaggagtataa

SEQ ID NO: 100961 - DNA, 25 bp, Homo sapien
actaaggacctctttcgctcacttc

SEQ ID NO: 100962 - DNA, 25 bp, Homo sapien
tccactaaggacctctttcgctcac

SEQ ID NO: 100963 - DNA, 25 bp, Homo sapien
tttcgctcacttccctggacaacat

SEQ ID NO: 100964 - DNA, 25 bp, Homo sapien
ctctttcgctcacttccctggacaa

SEQ ID NO: 100965 - DNA, 25 bp, Homo sapien
ctagatcgggtttcataaattggat

SEQ ID NO: 100966 - DNA, 25 bp, Homo sapien
atcgggtttcataaattggatttct

SEQ ID NO: 100967 - DNA, 25 bp, Homo sapien
tagatcgggtttcataaattggatt

SEQ ID NO: 100968 - DNA, 25 bp, Homo sapien
gatcgggtttcataaattggatttc

SEQ ID NO: 100969 - DNA, 25 bp, Homo sapien
tccccactgcaatgtatttaatcag

SEQ ID NO: 100970 - DNA, 25 bp, Homo sapien
tgtatttaatcagtcttgttgcaag

SEQ ID NO: 100971 - DNA, 25 bp, Homo sapien
gataaccgtgatttgcaattttgaa

SEQ ID NO: 100972 - DNA, 25 bp, Homo sapien
tgttgcaaggcgttttctagaaggc

SEQ ID NO: 100973 - DNA, 25 bp, Homo sapien
actgtggaaggtttaggacaaggct

SEQ ID NO: 100974 - DNA, 25 bp, Homo sapien
tttaggacaaggcttacccgcatat

SEQ ID NO: 100975 - DNA, 25 bp, Homo sapien
ggacaaggcttacccgcatatgcca

SEQ ID NO: 100976 - DNA, 25 bp, Homo sapien
tgtggaaggtttaggacaaggctta

SEQ ID NO: 100977 - DNA, 25 bp, Homo sapien
gatgaacgtgacttgtgttgaaaat

SEQ ID NO: 100978 - DNA, 25 bp, Homo sapien
acgtgacttgtgttgaaaatgctat

SEQ ID NO: 100979 - DNA, 25 bp, Homo sapien
gtgacttgtgttgaaaatgctatgc

SEQ ID NO: 100980 - DNA, 25 bp, Homo sapien
cttgtgatgaacgtgacttgtgttg

SEQ ID NO: 100981 - DNA, 25 bp, Homo sapien
tgtcaatataaacataacacatata

SEQ ID NO: 100982 - DNA, 25 bp, Homo sapien
gtcaatataaacataacacatatac

SEQ ID NO: 100983 - DNA, 25 bp, Homo sapien
ctgtcaatataaacataacacatat

SEQ ID NO: 100984 - DNA, 25 bp, Homo sapien
caaattccaatttgtcatatccagc

SEQ ID NO: 100985 - DNA, 25 bp, Homo sapien
atatccagctccaaccttcttctga

SEQ ID NO: 100986 - DNA, 25 bp, Homo sapien
gtcagccagacaattccacttgtag

SEQ ID NO: 100987 - DNA, 25 bp, Homo sapien
ccacttgtaggtaaccaggaattga

SEQ ID NO: 100988 - DNA, 25 bp, Homo sapien
aaatggacattgaaacctggtattc

SEQ ID NO: 100989 - DNA, 25 bp, Homo sapien
gtattcatgactcattttggcaatg

SEQ ID NO: 100990 - DNA, 25 bp, Homo sapien
ataataaatggacattgaaacctgg

SEQ ID NO: 100991 - DNA, 25 bp, Homo sapien
aacctggtattcatgactcattttg

SEQ ID NO: 100992 - DNA, 25 bp, Homo sapien
ggatacagatgagcataaccctgaa

SEQ ID NO: 100993 - DNA, 25 bp, Homo sapien
gaaaaaagctcaaaggaggtctgcg

SEQ ID NO: 100994 - DNA, 25 bp, Homo sapien
gaggtctgcggcaaactgtatcaaa

SEQ ID NO: 100995 - DNA, 25 bp, Homo sapien
ctttctttaactggcagcctgcggg

SEQ ID NO: 100996 - DNA, 25 bp, Homo sapien
agcttcagttgctatagcattttca

SEQ ID NO: 100997 - DNA, 25 bp, Homo sapien
aagaacctctctgttcttgtcataa

SEQ ID NO: 100998 - DNA, 25 bp, Homo sapien
agaacctctctgttcttgtcataaa

SEQ ID NO: 100999 - DNA, 25 bp, Homo sapien
gctatagcattttcaagaacctctc

SEQ ID NO: 101000 - DNA, 25 bp, Homo sapien
cagaggaggcttatcaaatggtctt

SEQ ID NO: 101001 - DNA, 25 bp, Homo sapien
tgcagaggaggcttatcaaatggtc

SEQ ID NO: 101002 - DNA, 25 bp, Homo sapien
aggaggcttatcaaatggtcttccc

SEQ ID NO: 101003 - DNA, 25 bp, Homo sapien
gtgtgcagaggaggcttatcaaatg

SEQ ID NO: 101004 - DNA, 25 bp, Homo sapien
aacaagtttttggtgcatatttcag

SEQ ID NO: 101005 - DNA, 25 bp, Homo sapien
cagaacaagtttttggtgcatattt

SEQ ID NO: 101006 - DNA, 25 bp, Homo sapien
gaacaagtttttggtgcatatttca

SEQ ID NO: 101007 - DNA, 25 bp, Homo sapien
agaacaagtttttggtgcatatttc

SEQ ID NO: 101008 - DNA, 25 bp, Homo sapien
ctgggctgctaatgcctgctggtct

SEQ ID NO: 101009 - DNA, 25 bp, Homo sapien
tgggctgctaatgcctgctggtctt

SEQ ID NO: 101010 - DNA, 25 bp, Homo sapien
ggctgctaatgcctgctggtcttcc

SEQ ID NO: 101011 - DNA, 25 bp, Homo sapien
ctgctaatgcctgctggtcttccag

SEQ ID NO: 101012 - DNA, 25 bp, Homo sapien
tcacttcagctctgtttctttgttg

SEQ ID NO: 101013 - DNA, 25 bp, Homo sapien
cacttcagctctgtttctttgttgg

SEQ ID NO: 101014 - DNA, 25 bp, Homo sapien
acttcagctctgtttctttgttgga

SEQ ID NO: 101015 - DNA, 25 bp, Homo sapien
atgtggttgactagaggctgaaaat

SEQ ID NO: 101016 - DNA, 25 bp, Homo sapien
aatgtggttgactagaggctgaaaa

SEQ ID NO: 101017 - DNA, 25 bp, Homo sapien
tgtggttgactagaggctgaaaatg

SEQ ID NO: 101018 - DNA, 25 bp, Homo sapien
gtggttgactagaggctgaaaatgg

SEQ ID NO: 101019 - DNA, 25 bp, Homo sapien
ttcggggaaggctgtacagaataat

SEQ ID NO: 101020 - DNA, 25 bp, Homo sapien
tgtttgcctagttttcctgttcttc

SEQ ID NO: 101021 - DNA, 25 bp, Homo sapien
tttgcgtgccaagtccaggaacagt

SEQ ID NO: 101022 - DNA, 25 bp, Homo sapien
gcaggagttcatccgaggccaaggt

SEQ ID NO: 101023 - DNA, 25 bp, Homo sapien
tattcgttaaagtagggacgctgac

SEQ ID NO: 101024 - DNA, 25 bp, Homo sapien
gacgctgactttgttcttgggcaga

SEQ ID NO: 101025 - DNA, 25 bp, Homo sapien
tctcagaaaggtactgtgaccacca

SEQ ID NO: 101026 - DNA, 25 bp, Homo sapien
ccctctgaaggtctctgttacgtat

SEQ ID NO: 101027 - DNA, 25 bp, Homo sapien
tgcgatctgctcgttccctctgaag

SEQ ID NO: 101028 - DNA, 25 bp, Homo sapien
taataaccaatgactgctctcagaa

SEQ ID NO: 101029 - DNA, 25 bp, Homo sapien
tttgccccaggtgcagatttcaatg

SEQ ID NO: 101030 - DNA, 25 bp, Homo sapien
gcattctacactgattttagtctta

SEQ ID NO: 101031 - DNA, 25 bp, Homo sapien
tctgcagtgacattactggattgca

SEQ ID NO: 101032 - DNA, 25 bp, Homo sapien
cactgtggcgtttctttgtccatta

SEQ ID NO: 101033 - DNA, 25 bp, Homo sapien
gcaagaatcactgcaaatgagtgga

SEQ ID NO: 101034 - DNA, 25 bp, Homo sapien
gcaggttatcctgtaacttgtgttc

SEQ ID NO: 101035 - DNA, 25 bp, Homo sapien
tcttaatgggttgcaggttatcctg

SEQ ID NO: 101036 - DNA, 25 bp, Homo sapien
tacagtcttaatgggttgcaggtta

SEQ ID NO: 101037 - DNA, 25 bp, Homo sapien
tgcatttacagtcttaatgggttgc

SEQ ID NO: 101038 - DNA, 25 bp, Homo sapien
ttggcataaaaattctgataccact

SEQ ID NO: 101039 - DNA, 25 bp, Homo sapien
gcataaaaattctgataccacttca

SEQ ID NO: 101040 - DNA, 25 bp, Homo sapien
ggcataaaaattctgataccacttc

SEQ ID NO: 101041 - DNA, 25 bp, Homo sapien
cataaaaattctgataccacttcat

SEQ ID NO: 101042 - DNA, 25 bp, Homo sapien
gagggtatcattgcaagtggaaagt

SEQ ID NO: 101043 - DNA, 25 bp, Homo sapien
gtttttgtatcaagggcatccctgg

SEQ ID NO: 101044 - DNA, 25 bp, Homo sapien
cattgcaagtggaaagtgtgttttt

SEQ ID NO: 101045 - DNA, 25 bp, Homo sapien
tgtttttgtatcaagggcatccctg

SEQ ID NO: 101046 - DNA, 25 bp, Homo sapien
tctggcagctctccaatattcccat

SEQ ID NO: 101047 - DNA, 25 bp, Homo sapien
ccctctggcagctctccaatattcc

SEQ ID NO: 101048 - DNA, 25 bp, Homo sapien
gcagctctccaatattcccatttag

SEQ ID NO: 101049 - DNA, 25 bp, Homo sapien
tggcagctctccaatattcccattt

SEQ ID NO: 101050 - DNA, 25 bp, Homo sapien
aagcccaggattctgggcgcagcct

SEQ ID NO: 101051 - DNA, 25 bp, Homo sapien
gcccaaagcccaggattctgggcgc

SEQ ID NO: 101052 - DNA, 25 bp, Homo sapien
tcgccgggccccagaggcccaaagc

SEQ ID NO: 101053 - DNA, 25 bp, Homo sapien
caaagcccaggattctgggcgcagc

SEQ ID NO: 101054 - DNA, 25 bp, Homo sapien
cggcggccatcgaacctccggagag

SEQ ID NO: 101055 - DNA, 25 bp, Homo sapien
gaacctccggagagctcgaggcttg

SEQ ID NO: 101056 - DNA, 25 bp, Homo sapien
gagagctcgaggcttgacttcttca

SEQ ID NO: 101057 - DNA, 25 bp, Homo sapien
gccatcgaacctccggagagctcga

SEQ ID NO: 101058 - DNA, 25 bp, Homo sapien
ttttttgcagggtcttcctctgagc

SEQ ID NO: 101059 - DNA, 25 bp, Homo sapien
gcgcagggtcggctccaggggtggg

SEQ ID NO: 101060 - DNA, 25 bp, Homo sapien
tgcagggtcttcctctgagcccgca

SEQ ID NO: 101061 - DNA, 25 bp, Homo sapien
ggggcgagcgctcttttttgcaggg

SEQ ID NO: 101062 - DNA, 25 bp, Homo sapien
gcgtctttcttcctgcggcggagca

SEQ ID NO: 101063 - DNA, 25 bp, Homo sapien
ccaatgcccaaagcgtcttcacagg

SEQ ID NO: 101064 - DNA, 25 bp, Homo sapien
actgtgtggagatgacgcccagctg

SEQ ID NO: 101065 - DNA, 25 bp, Homo sapien
aattcgcggcgcaagggaagaactg

SEQ ID NO: 101066 - DNA, 25 bp, Homo sapien
ttccaatgccgatgttttctttgct

SEQ ID NO: 101067 - DNA, 25 bp, Homo sapien
ttattccaatgccgatgttttcttt

SEQ ID NO: 101068 - DNA, 25 bp, Homo sapien
tctttattccaatgccgatgttttc

SEQ ID NO: 101069 - DNA, 25 bp, Homo sapien
attccaatgccgatgttttctttgc

SEQ ID NO: 101070 - DNA, 25 bp, Homo sapien
caaatgggttttccacgctagggcg

SEQ ID NO: 101071 - DNA, 25 bp, Homo sapien
taaagaccaaacttcactctgggca

SEQ ID NO: 101072 - DNA, 25 bp, Homo sapien
cagtttggtatttgcggcgtcagtc

SEQ ID NO: 101073 - DNA, 25 bp, Homo sapien
aagaggactcgcttgtaaataccag

SEQ ID NO: 101074 - DNA, 25 bp, Homo sapien
gagtccaaagcacacgactccgttc

SEQ ID NO: 101075 - DNA, 25 bp, Homo sapien
agccgccgccgaatcatgtcgatga

SEQ ID NO: 101076 - DNA, 25 bp, Homo sapien
tcatgtcgatgagtccaaagcacac

SEQ ID NO: 101077 - DNA, 25 bp, Homo sapien
cgccgaatcatgtcgatgagtccaa

SEQ ID NO: 101078 - DNA, 25 bp, Homo sapien
caagccaattaaggaggactcggtc

SEQ ID NO: 101079 - DNA, 25 bp, Homo sapien
ccgggctaaaacaaacgcgaggcag

SEQ ID NO: 101080 - DNA, 25 bp, Homo sapien
tacgtgtacatccaacaagatcggc

SEQ ID NO: 101081 - DNA, 25 bp, Homo sapien
caagatcggcgttaaggtaacacca

SEQ ID NO: 101082 - DNA, 25 bp, Homo sapien
aattatctcgggcaagatgtaggct

SEQ ID NO: 101083 - DNA, 25 bp, Homo sapien
taagctaattatctcgggcaagatg

SEQ ID NO: 101084 - DNA, 25 bp, Homo sapien
gcatgtaagctaattatctcgggca

SEQ ID NO: 101085 - DNA, 25 bp, Homo sapien
atcagcatgtaagctaattatctcg

SEQ ID NO: 101086 - DNA, 25 bp, Homo sapien
tcttgctcgtcggatgagaggcgcc

SEQ ID NO: 101087 - DNA, 25 bp, Homo sapien
gagtcggtctcaaaatccgcgccgt

SEQ ID NO: 101088 - DNA, 25 bp, Homo sapien
gcgcgcagaggagactaaaacagct

SEQ ID NO: 101089 - DNA, 25 bp, Homo sapien
catctactaatatccagcgtggcca

SEQ ID NO: 101090 - DNA, 25 bp, Homo sapien
taactaccgcaatctccagtgctgg

SEQ ID NO: 101091 - DNA, 25 bp, Homo sapien
aattagaccccattcgggactcagg

SEQ ID NO: 101092 - DNA, 25 bp, Homo sapien
tggtctttcgcaacaccagcggcga

SEQ ID NO: 101093 - DNA, 25 bp, Homo sapien
ttcctggtccagaacgagacgtggg

SEQ ID NO: 101094 - DNA, 25 bp, Homo sapien
aagaaaggacgctcttcggtcagag

SEQ ID NO: 101095 - DNA, 25 bp, Homo sapien
aaatcactggtttagcccgggtctg

SEQ ID NO: 101096 - DNA, 25 bp, Homo sapien
gttgaagcgccgtcccagttgtgtc

SEQ ID NO: 101097 - DNA, 25 bp, Homo sapien
tacaaggtgcgttagtctccgggct

SEQ ID NO: 101098 - DNA, 25 bp, Homo sapien
caaggagctgccaataaacctttgg

SEQ ID NO: 101099 - DNA, 25 bp, Homo sapien
gagctggcccaaaatagggcttcca

SEQ ID NO: 101100 - DNA, 25 bp, Homo sapien
tgttttaggaaagacatccaggaag

SEQ ID NO: 101101 - DNA, 25 bp, Homo sapien
cttccaaggccagcggagccagagt

SEQ ID NO: 101102 - DNA, 25 bp, Homo sapien
ttgcttggcttcaatcctgcttcca

SEQ ID NO: 101103 - DNA, 25 bp, Homo sapien
tctggcacgagaaatggaatgtccc

SEQ ID NO: 101104 - DNA, 25 bp, Homo sapien
tgtagcttggcggaagtctgcacca

SEQ ID NO: 101105 - DNA, 25 bp, Homo sapien
catacggttgcctccataaagctaa

SEQ ID NO: 101106 - DNA, 25 bp, Homo sapien
gtctcaagctgtatcaattaagagg

SEQ ID NO: 101107 - DNA, 25 bp, Homo sapien
caattctgtgactttagagcacgtc

SEQ ID NO: 101108 - DNA, 25 bp, Homo sapien
taaagaatggaattggtactatccc

SEQ ID NO: 101109 - DNA, 25 bp, Homo sapien
catactggaacctcttggatgggtc

SEQ ID NO: 101110 - DNA, 25 bp, Homo sapien
gagcacgtcttgacatgaggcagaa

SEQ ID NO: 101111 - DNA, 25 bp, Homo sapien
taggacatattaggttagacagcag

SEQ ID NO: 101112 - DNA, 25 bp, Homo sapien
ggaggtgctgaatagctctagtaca

SEQ ID NO: 101113 - DNA, 25 bp, Homo sapien
ggaaaggaagttactcacacatcta

SEQ ID NO: 101114 - DNA, 25 bp, Homo sapien
cagaggtgacaaatattacgtgtcc

SEQ ID NO: 101115 - DNA, 25 bp, Homo sapien
caagaccattgagtactgtttagca

SEQ ID NO: 101116 - DNA, 25 bp, Homo sapien
gagacagttgccactgaaaaggtag

SEQ ID NO: 101117 - DNA, 25 bp, Homo sapien
aaagtttcatagacagcgtggagct

SEQ ID NO: 101118 - DNA, 25 bp, Homo sapien
tgaggccaacacatgaggagacagt

SEQ ID NO: 101119 - DNA, 25 bp, Homo sapien
caagagatctcatgcagaggaagca

SEQ ID NO: 101120 - DNA, 25 bp, Homo sapien
caaattgggtcatgaggagaagcat

SEQ ID NO: 101121 - DNA, 25 bp, Homo sapien
tatacactgagcttcaagattccca

SEQ ID NO: 101122 - DNA, 25 bp, Homo sapien
cactagctacaaccacaaattgggt

SEQ ID NO: 101123 - DNA, 25 bp, Homo sapien
gagaagaaaatgggtagaaaataga

SEQ ID NO: 101124 - DNA, 25 bp, Homo sapien
aaatgggtagaaaatagaagaaatg

SEQ ID NO: 101125 - DNA, 25 bp, Homo sapien
aataaatagaaggagcttttgagaa

SEQ ID NO: 101126 - DNA, 25 bp, Homo sapien
aatgaattaataacaagaaatccat

SEQ ID NO: 101127 - DNA, 25 bp, Homo sapien
caagaatgtggtgtccctaggaaac

SEQ ID NO: 101128 - DNA, 25 bp, Homo sapien
cagattatgctggtggtcctagcca

SEQ ID NO: 101129 - DNA, 25 bp, Homo sapien
tgaggaagcgtaaaagagcaccacc

SEQ ID NO: 101130 - DNA, 25 bp, Homo sapien
caaatgatggtggagctatgctcac

SEQ ID NO: 101131 - DNA, 25 bp, Homo sapien
gcaatgcttgttggttctttactaa

SEQ ID NO: 101132 - DNA, 25 bp, Homo sapien
gattacctttggactgcaatgcttg

SEQ ID NO: 101133 - DNA, 25 bp, Homo sapien
ggtccactgcaattgtaaagtctgc

SEQ ID NO: 101134 - DNA, 25 bp, Homo sapien
gctttcaccatcaggagtgggttta

SEQ ID NO: 101135 - DNA, 25 bp, Homo sapien
tgtccaaggaacaacactcttcatg

SEQ ID NO: 101136 - DNA, 25 bp, Homo sapien
cttcaggcagaatgatccctctggc

SEQ ID NO: 101137 - DNA, 25 bp, Homo sapien
cgtgggacaggccattgaggatgga

SEQ ID NO: 101138 - DNA, 25 bp, Homo sapien
aggcagaatgatccctctggccact

SEQ ID NO: 101139 - DNA, 25 bp, Homo sapien
ggtcggcattcgtcttccccaagtg

SEQ ID NO: 101140 - DNA, 25 bp, Homo sapien
taataacgccgcgaaatgcctccag

SEQ ID NO: 101141 - DNA, 25 bp, Homo sapien
catgtcctacaggtcactagccgag

SEQ ID NO: 101142 - DNA, 25 bp, Homo sapien
tccgtatgcgcggaaagccgtaaac

SEQ ID NO: 101143 - DNA, 25 bp, Homo sapien
tcacttgagggcttcgcgagagctg

SEQ ID NO: 101144 - DNA, 25 bp, Homo sapien
cgctaagtccgcagcaggcgggaaa

SEQ ID NO: 101145 - DNA, 25 bp, Homo sapien
gaccctgcaacttggctgcggagag

SEQ ID NO: 101146 - DNA, 25 bp, Homo sapien
cactagagccctagatccgggatct

SEQ ID NO: 101147 - DNA, 25 bp, Homo sapien
tccagggttagaaggccctagctcc

SEQ ID NO: 101148 - DNA, 25 bp, Homo sapien
attccgcaggcgagggttgtgaccc

SEQ ID NO: 101149 - DNA, 25 bp, Homo sapien
gttggaaaatcatcccatctcggga

SEQ ID NO: 101150 - DNA, 25 bp, Homo sapien
tgaaacgaagcttctactgacgcgc

SEQ ID NO: 101151 - DNA, 25 bp, Homo sapien
tggaaatgaagccgagaataatgtc

SEQ ID NO: 101152 - DNA, 25 bp, Homo sapien
tatgtggaaatgaagccgagaataa

SEQ ID NO: 101153 - DNA, 25 bp, Homo sapien
ctatgtggaaatgaagccgagaata

SEQ ID NO: 101154 - DNA, 25 bp, Homo sapien
tgtggaaatgaagccgagaataatg

SEQ ID NO: 101155 - DNA, 25 bp, Homo sapien
cgggtccgcctactccttgtccact

SEQ ID NO: 101156 - DNA, 25 bp, Homo sapien
caggttcgggtccgcctactccttg

SEQ ID NO: 101157 - DNA, 25 bp, Homo sapien
ttcgggtccgcctactccttgtcca

SEQ ID NO: 101158 - DNA, 25 bp, Homo sapien
gggtccgcctactccttgtccactg

SEQ ID NO: 101159 - DNA, 25 bp, Homo sapien
ggatcctcaataatgggccgctgta

SEQ ID NO: 101160 - DNA, 25 bp, Homo sapien
cagtctacccgatatacccagaggg

SEQ ID NO: 101161 - DNA, 25 bp, Homo sapien
ggttgaaaagtcctcgggtctgctc

SEQ ID NO: 101162 - DNA, 25 bp, Homo sapien
tctttgagctgacccgaggatctta

SEQ ID NO: 101163 - DNA, 25 bp, Homo sapien
ttagaagacagaatgccgcccaagg

SEQ ID NO: 101164 - DNA, 25 bp, Homo sapien
ggaagaaccgtgctcttggctgcaa

SEQ ID NO: 101165 - DNA, 25 bp, Homo sapien
ccagaacccgcagcaaagaggatct

SEQ ID NO: 101166 - DNA, 25 bp, Homo sapien
tgcacaacatgttccaggagtcccg

SEQ ID NO: 101167 - DNA, 25 bp, Homo sapien
ctataggagccagattagatcgcgc

SEQ ID NO: 101168 - DNA, 25 bp, Homo sapien
ttagatcgcgcacccactgtagttt

SEQ ID NO: 101169 - DNA, 25 bp, Homo sapien
tgacaaggttgggaaccgcctttga

SEQ ID NO: 101170 - DNA, 25 bp, Homo sapien
aaatccacagaatttcaaagcccga

SEQ ID NO: 101171 - DNA, 25 bp, Homo sapien
cgtcggagtcgcagaaaatttcccg

SEQ ID NO: 101172 - DNA, 25 bp, Homo sapien
caaagtcgaggagctgcgtttccag

SEQ ID NO: 101173 - DNA, 25 bp, Homo sapien
ctaatccctcgaaaacaggaagcgg

SEQ ID NO: 101174 - DNA, 25 bp, Homo sapien
tggtgttgcacagtcctagctaatc

SEQ ID NO: 101175 - DNA, 25 bp, Homo sapien
ccccagtcctgtggcgtctggcgaa

SEQ ID NO: 101176 - DNA, 25 bp, Homo sapien
tggcatgatgcccttgcgagtcgcc

SEQ ID NO: 101177 - DNA, 25 bp, Homo sapien
cctgtggcgtctggcgaatcctcgc

SEQ ID NO: 101178 - DNA, 25 bp, Homo sapien
agtcctgtggcgtctggcgaatcct

SEQ ID NO: 101179 - DNA, 25 bp, Homo sapien
ctcgaacgttctcccattttcagtg

SEQ ID NO: 101180 - DNA, 25 bp, Homo sapien
cgactcgaacgttctcccattttca

SEQ ID NO: 101181 - DNA, 25 bp, Homo sapien
ccattttcagtgacccagggctcac

SEQ ID NO: 101182 - DNA, 25 bp, Homo sapien
ttgaccgactcgaacgttctcccat

SEQ ID NO: 101183 - DNA, 25 bp, Homo sapien
tctgaatcaactcgcaggccggagt

SEQ ID NO: 101184 - DNA, 25 bp, Homo sapien
gaatcaactcgcaggccggagtcat

SEQ ID NO: 101185 - DNA, 25 bp, Homo sapien
agtctgaatcaactcgcaggccgga

SEQ ID NO: 101186 - DNA, 25 bp, Homo sapien
ggagtctgaatcaactcgcaggccg

SEQ ID NO: 101187 - DNA, 25 bp, Homo sapien
cccgaactgctgacggagggaccaa

SEQ ID NO: 101188 - DNA, 25 bp, Homo sapien
ccagcccgctgtactctgatcagag

SEQ ID NO: 101189 - DNA, 25 bp, Homo sapien
aatgcagctttattgcaaggtccag

SEQ ID NO: 101190 - DNA, 25 bp, Homo sapien
tctaggccccaagcttcggctgggc

SEQ ID NO: 101191 - DNA, 25 bp, Homo sapien
caagagcgaacaaggatcggatccc

SEQ ID NO: 101192 - DNA, 25 bp, Homo sapien
tctggtttcgggactcacatgaagc

SEQ ID NO: 101193 - DNA, 25 bp, Homo sapien
caagattgccggttcttcaagcaca

SEQ ID NO: 101194 - DNA, 25 bp, Homo sapien
cagcttcgtgaggaggacgcagtcc

SEQ ID NO: 101195 - DNA, 25 bp, Homo sapien
gctctacttccgtgcacccagggaa

SEQ ID NO: 101196 - DNA, 25 bp, Homo sapien
tacgaacaggcaagacctcatgtcc

SEQ ID NO: 101197 - DNA, 25 bp, Homo sapien
ggtacaaggatgttcgcatacgaac

SEQ ID NO: 101198 - DNA, 25 bp, Homo sapien
gtgagtatcgacctctgcgccaaat

SEQ ID NO: 101199 - DNA, 25 bp, Homo sapien
gggaactgaaccacaggcggctaac

SEQ ID NO: 101200 - DNA, 25 bp, Homo sapien
tagccacacaggctcgaggcacggg

SEQ ID NO: 101201 - DNA, 25 bp, Homo sapien
gggcactcactacggagcccaaggc

SEQ ID NO: 101202 - DNA, 25 bp, Homo sapien
agtcgaccaattgccagtgcgtggg

SEQ ID NO: 101203 - DNA, 25 bp, Homo sapien
tttcaatctaagcagcaacgtgggc

SEQ ID NO: 101204 - DNA, 25 bp, Homo sapien
aaaggaagtctgtgccccgatgaaa

SEQ ID NO: 101205 - DNA, 25 bp, Homo sapien
gcggctccgtctatcactcactggg

SEQ ID NO: 101206 - DNA, 25 bp, Homo sapien
tgagcgacagcgcagtccaggaaac

SEQ ID NO: 101207 - DNA, 25 bp, Homo sapien
ctccgagcagtacaccaacccggcc

SEQ ID NO: 101208 - DNA, 25 bp, Homo sapien
tcccagacagaaactttccgcaccg

SEQ ID NO: 101209 - DNA, 25 bp, Homo sapien
gagcagtacaccaacccggccccag

SEQ ID NO: 101210 - DNA, 25 bp, Homo sapien
cagttccgcactcccagacagaaac

SEQ ID NO: 101211 - DNA, 25 bp, Homo sapien
tgtgcgcgcgtgtgaaacaaaactt

SEQ ID NO: 101212 - DNA, 25 bp, Homo sapien
aaacttggtttgctactcgggctga

SEQ ID NO: 101213 - DNA, 25 bp, Homo sapien
acattgaactgctgtgcgccgctga

SEQ ID NO: 101214 - DNA, 25 bp, Homo sapien
tcaatagagaatgtgagcgcctagt

SEQ ID NO: 101215 - DNA, 25 bp, Homo sapien
ctgaacatagccgaacggccccaaa

SEQ ID NO: 101216 - DNA, 25 bp, Homo sapien
taaagtggtgagatgccgggcctct

SEQ ID NO: 101217 - DNA, 25 bp, Homo sapien
gcgttcaaaagtctcccgaagcagg

SEQ ID NO: 101218 - DNA, 25 bp, Homo sapien
gagaaatcggtcttgacgcctgaac

SEQ ID NO: 101219 - DNA, 25 bp, Homo sapien
catccggggactgggcgaacgcacc

SEQ ID NO: 101220 - DNA, 25 bp, Homo sapien
aaaatgaacacacagcgcgcaggga

SEQ ID NO: 101221 - DNA, 25 bp, Homo sapien
gcaaaatgaacacacagcgcgcagg

SEQ ID NO: 101222 - DNA, 25 bp, Homo sapien
gcagggacgcgcacccgctgcttgg

SEQ ID NO: 101223 - DNA, 25 bp, Homo sapien
aatgaacacacagcgcgcagggacg

SEQ ID NO: 101224 - DNA, 25 bp, Homo sapien
cagttgggccagttccacgatgcga

SEQ ID NO: 101225 - DNA, 25 bp, Homo sapien
tatgagtcgtaatgaccctgctggg

SEQ ID NO: 101226 - DNA, 25 bp, Homo sapien
tagctggcggctgatgtcacacggt

SEQ ID NO: 101227 - DNA, 25 bp, Homo sapien
taggtccggatgtgtttcaccacgg

SEQ ID NO: 101228 - DNA, 25 bp, Homo sapien
ttaaggctgcacgtgccgttctcca

SEQ ID NO: 101229 - DNA, 25 bp, Homo sapien
tctggtacttatgtcaatagagaac

SEQ ID NO: 101230 - DNA, 25 bp, Homo sapien
tcattcttaacccaaggccgactgg

SEQ ID NO: 101231 - DNA, 25 bp, Homo sapien
tctgacctaagggtgcctgcactgg

SEQ ID NO: 101232 - DNA, 25 bp, Homo sapien
caacccgttcaccgcgtgcggggcg

SEQ ID NO: 101233 - DNA, 25 bp, Homo sapien
ttctccaacccgttcaccgcgtgcg

SEQ ID NO: 101234 - DNA, 25 bp, Homo sapien
ccttctccaacccgttcaccgcgtg

SEQ ID NO: 101235 - DNA, 25 bp, Homo sapien
ctccaacccgttcaccgcgtgcggg

SEQ ID NO: 101236 - DNA, 25 bp, Homo sapien
ccatgtttgtccaacttctcatact

SEQ ID NO: 101237 - DNA, 25 bp, Homo sapien
gtatcattttagtgatgcaatccct

SEQ ID NO: 101238 - DNA, 25 bp, Homo sapien
caaacttgctttatgtcattattct

SEQ ID NO: 101239 - DNA, 25 bp, Homo sapien
tccctttgtactgcagaaagacagg

SEQ ID NO: 101240 - DNA, 25 bp, Homo sapien
tgcattcccttgaacgccagcgatg

SEQ ID NO: 101241 - DNA, 25 bp, Homo sapien
gtcatgtaaggcgacacttgggctg

SEQ ID NO: 101242 - DNA, 25 bp, Homo sapien
cagcgatgccggaatgtcacagttg

SEQ ID NO: 101243 - DNA, 25 bp, Homo sapien
tcatgtaaggcgacacttgggctgg

SEQ ID NO: 101244 - DNA, 25 bp, Homo sapien
gcggaagccgtgacagaatgactac

SEQ ID NO: 101245 - DNA, 25 bp, Homo sapien
gagcgcggaagccgtgacagaatga

SEQ ID NO: 101246 - DNA, 25 bp, Homo sapien
gcgcggaagccgtgacagaatgact

SEQ ID NO: 101247 - DNA, 25 bp, Homo sapien
tcagagcgcggaagccgtgacagaa

SEQ ID NO: 101248 - DNA, 25 bp, Homo sapien
cagtatgtgggcaacacaaatgtct

SEQ ID NO: 101249 - DNA, 25 bp, Homo sapien
gcaaaatctcaacaattgcacattt

SEQ ID NO: 101250 - DNA, 25 bp, Homo sapien
cattcaatgcttattgttgctcttg

SEQ ID NO: 101251 - DNA, 25 bp, Homo sapien
tcattagcacaaaggatgtgagtcc

SEQ ID NO: 101252 - DNA, 25 bp, Homo sapien
gcaccatccagagtccgtatttaca

SEQ ID NO: 101253 - DNA, 25 bp, Homo sapien
acaccagggagagctagattcagat

SEQ ID NO: 101254 - DNA, 25 bp, Homo sapien
taggtcatgtcttaaacaaaggatc

SEQ ID NO: 101255 - DNA, 25 bp, Homo sapien
tggaaccaagtcaaaacaccaggga

SEQ ID NO: 101256 - DNA, 25 bp, Homo sapien
cctctgctgtagaaataaagtgtcc

SEQ ID NO: 101257 - DNA, 25 bp, Homo sapien
tgattaggtacaaaatgggagactg

SEQ ID NO: 101258 - DNA, 25 bp, Homo sapien
tgttgaagccttcactgcatacaca

SEQ ID NO: 101259 - DNA, 25 bp, Homo sapien
caccaccagtttacctacatgcgaa

SEQ ID NO: 101260 - DNA, 25 bp, Homo sapien
tagttattgcacagaattagtacca

SEQ ID NO: 101261 - DNA, 25 bp, Homo sapien
ccatgtagactgtgcacagcacaga

SEQ ID NO: 101262 - DNA, 25 bp, Homo sapien
cacagcacagaccggaagaaattaa

SEQ ID NO: 101263 - DNA, 25 bp, Homo sapien
gctgaattgtaccaatgtcctaaaa

SEQ ID NO: 101264 - DNA, 25 bp, Homo sapien
caggagagtccctgtatggtatggt

SEQ ID NO: 101265 - DNA, 25 bp, Homo sapien
tattttctcaccagactgggaactc

SEQ ID NO: 101266 - DNA, 25 bp, Homo sapien
gggaactccagatgtcaatggaagt

SEQ ID NO: 101267 - DNA, 25 bp, Homo sapien
tcaaaggaagactatggccctgaga

SEQ ID NO: 101268 - DNA, 25 bp, Homo sapien
tattcttacatccaatgagagcgct

SEQ ID NO: 101269 - DNA, 25 bp, Homo sapien
gcaacacttttaccatctatgagat

SEQ ID NO: 101270 - DNA, 25 bp, Homo sapien
tgaacctttaacctctccatgtgga

SEQ ID NO: 101271 - DNA, 25 bp, Homo sapien
tgagagcgctgcctgcatagaggtc

SEQ ID NO: 101272 - DNA, 25 bp, Homo sapien
gggtaacatttttcacgagcaggca

SEQ ID NO: 101273 - DNA, 25 bp, Homo sapien
cagttggggtaacatttttcacgag

SEQ ID NO: 101274 - DNA, 25 bp, Homo sapien
ttcccttagaggtccagttcttcat

SEQ ID NO: 101275 - DNA, 25 bp, Homo sapien
taacatttttcacgagcaggcagtt

SEQ ID NO: 101276 - DNA, 25 bp, Homo sapien
catcaaattgcttgcttgcagttaa

SEQ ID NO: 101277 - DNA, 25 bp, Homo sapien
tgcagttaaaactgcagtcctggat

SEQ ID NO: 101278 - DNA, 25 bp, Homo sapien
tgcttgcagttaaaactgcagtcct

SEQ ID NO: 101279 - DNA, 25 bp, Homo sapien
gttaaaactgcagtcctggatgtac

SEQ ID NO: 101280 - DNA, 25 bp, Homo sapien
tggaacaagatctctaccccaagca

SEQ ID NO: 101281 - DNA, 25 bp, Homo sapien
tggtggactttatcacaaaggtctg

SEQ ID NO: 101282 - DNA, 25 bp, Homo sapien
gactttatcacaaaggtctgggact

SEQ ID NO: 101283 - DNA, 25 bp, Homo sapien
gaggaagcagacctgttatcttgca

SEQ ID NO: 101284 - DNA, 25 bp, Homo sapien
gcagagatcttagccagggtactca

SEQ ID NO: 101285 - DNA, 25 bp, Homo sapien
tatacaaatgtgttttctaggctgg

SEQ ID NO: 101286 - DNA, 25 bp, Homo sapien
gcccacagacttgccatatgcagag

SEQ ID NO: 101287 - DNA, 25 bp, Homo sapien
tcccgtatggccttacttctacagc

SEQ ID NO: 101288 - DNA, 25 bp, Homo sapien
ggcaaggcacagcatgagcgtctca

SEQ ID NO: 101289 - DNA, 25 bp, Homo sapien
gagtcgtaacccatgtggccacagc

SEQ ID NO: 101290 - DNA, 25 bp, Homo sapien
tctgccattggtgcaagggcaaggc

SEQ ID NO: 101291 - DNA, 25 bp, Homo sapien
cactcaccggttgtttgcaaataga

SEQ ID NO: 101292 - DNA, 25 bp, Homo sapien
gtgtttatgagaccatgaagaagca

SEQ ID NO: 101293 - DNA, 25 bp, Homo sapien
aagtgtttatgagaccatgaagaag

SEQ ID NO: 101294 - DNA, 25 bp, Homo sapien
aagaaagtgtttatgagaccatgaa

SEQ ID NO: 101295 - DNA, 25 bp, Homo sapien
gaaagtgtttatgagaccatgaaga

SEQ ID NO: 101296 - DNA, 25 bp, Homo sapien
tcctgcattactgtgtaaaacactg

SEQ ID NO: 101297 - DNA, 25 bp, Homo sapien
ttcctgcattactgtgtaaaacact

SEQ ID NO: 101298 - DNA, 25 bp, Homo sapien
cctgcattactgtgtaaaacactgt

SEQ ID NO: 101299 - DNA, 25 bp, Homo sapien
gttttttttcacatacattactcat

SEQ ID NO: 101300 - DNA, 25 bp, Homo sapien
cataaggttttttttcacatacatt

SEQ ID NO: 101301 - DNA, 25 bp, Homo sapien
ggttttttttcacatacattactca

SEQ ID NO: 101302 - DNA, 25 bp, Homo sapien
agcaacataaggttttttttcacat

SEQ ID NO: 101303 - DNA, 25 bp, Homo sapien
ggcaaattttaactgagagtgaagc

SEQ ID NO: 101304 - DNA, 25 bp, Homo sapien
tgctcaagggcaaattttaactgag

SEQ ID NO: 101305 - DNA, 25 bp, Homo sapien
ctcttctggtctgctcaagggcaaa

SEQ ID NO: 101306 - DNA, 25 bp, Homo sapien
tgactcttctggtctgctcaagggc

SEQ ID NO: 101307 - DNA, 25 bp, Homo sapien
agaatcccacgatccattcatccag

SEQ ID NO: 101308 - DNA, 25 bp, Homo sapien
gtgtcaccaatctcttaacttcctg

SEQ ID NO: 101309 - DNA, 25 bp, Homo sapien
attatggtcctggtaagctgtaggc

SEQ ID NO: 101310 - DNA, 25 bp, Homo sapien
ttggctgctcgtgacataagcggga

SEQ ID NO: 101311 - DNA, 25 bp, Homo sapien
tagccaggcaatcccctggtggcca

SEQ ID NO: 101312 - DNA, 25 bp, Homo sapien
tgtgaagccgcgtacatagccaggc

SEQ ID NO: 101313 - DNA, 25 bp, Homo sapien
tatgcatctttgatttagctgacag

SEQ ID NO: 101314 - DNA, 25 bp, Homo sapien
ggcggccgaacatcgtcttccagct

SEQ ID NO: 101315 - DNA, 25 bp, Homo sapien
agtattggtctatgagaattggaat

SEQ ID NO: 101316 - DNA, 25 bp, Homo sapien
tctatgagaattggaatcaagaaag

SEQ ID NO: 101317 - DNA, 25 bp, Homo sapien
ttctacagcagagaatgtttgggaa

SEQ ID NO: 101318 - DNA, 25 bp, Homo sapien
ttggtctatgagaattggaatcaag

SEQ ID NO: 101319 - DNA, 25 bp, Homo sapien
caaaggggaatcattgctgcttcct

SEQ ID NO: 101320 - DNA, 25 bp, Homo sapien
aaatgcaaaggggaatcattgctgc

SEQ ID NO: 101321 - DNA, 25 bp, Homo sapien
aggggaatcattgctgcttcctccc

SEQ ID NO: 101322 - DNA, 25 bp, Homo sapien
ctgaaaatgcaaaggggaatcattg

SEQ ID NO: 101323 - DNA, 25 bp, Homo sapien
aaatcatcccttgccgaaatgcatc

SEQ ID NO: 101324 - DNA, 25 bp, Homo sapien
tttcaggtccctatcagtctttggg

SEQ ID NO: 101325 - DNA, 25 bp, Homo sapien
caggagtttttgcttgaagttttat

SEQ ID NO: 101326 - DNA, 25 bp, Homo sapien
ccaaagaattcggttccctcaggat

SEQ ID NO: 101327 - DNA, 25 bp, Homo sapien
gggttgttgctcaaacccctctgca

SEQ ID NO: 101328 - DNA, 25 bp, Homo sapien
gaataacgaaaatgcccatgtgtct

SEQ ID NO: 101329 - DNA, 25 bp, Homo sapien
cagaatgaacatgagctgaataacg

SEQ ID NO: 101330 - DNA, 25 bp, Homo sapien
ccatgtgtctctgggttgttgctca

SEQ ID NO: 101331 - DNA, 25 bp, Homo sapien
ggacacagacacagtttctactggg

SEQ ID NO: 101332 - DNA, 25 bp, Homo sapien
acacagacacagtttctactggggg

SEQ ID NO: 101333 - DNA, 25 bp, Homo sapien
aggacacagacacagtttctactgg

SEQ ID NO: 101334 - DNA, 25 bp, Homo sapien
cccaggacacagacacagtttctac

SEQ ID NO: 101335 - DNA, 25 bp, Homo sapien
cgttcttcacgcgtggcagcttgtg

SEQ ID NO: 101336 - DNA, 25 bp, Homo sapien
cagcttgtgcttcaatctcatggag

SEQ ID NO: 101337 - DNA, 25 bp, Homo sapien
catggagcctatataagaaaaccac

SEQ ID NO: 101338 - DNA, 25 bp, Homo sapien
gcttcaatctcatggagcctatata

SEQ ID NO: 101339 - DNA, 25 bp, Homo sapien
gtggctgccgctctcaaagatacca

SEQ ID NO: 101340 - DNA, 25 bp, Homo sapien
cgctctcaaagataccaaagtctct

SEQ ID NO: 101341 - DNA, 25 bp, Homo sapien
gctgccgctctcaaagataccaaag

SEQ ID NO: 101342 - DNA, 25 bp, Homo sapien
ctgtgccttcttcacacaaggatcc

SEQ ID NO: 101343 - DNA, 25 bp, Homo sapien
ggcacagcttagagtactgatatgg

SEQ ID NO: 101344 - DNA, 25 bp, Homo sapien
tctccaattcgtactatgggtttgg

SEQ ID NO: 101345 - DNA, 25 bp, Homo sapien
gcctgttacttttcaggcacagctt

SEQ ID NO: 101346 - DNA, 25 bp, Homo sapien
tgcaagctagtctgcatgagctgcc

SEQ ID NO: 101347 - DNA, 25 bp, Homo sapien
cattacatgcctcttatgttccagc

SEQ ID NO: 101348 - DNA, 25 bp, Homo sapien
gcctcttatgttccagcccttctgg

SEQ ID NO: 101349 - DNA, 25 bp, Homo sapien
tacatgcctcttatgttccagccct

SEQ ID NO: 101350 - DNA, 25 bp, Homo sapien
atgcctcttatgttccagcccttct

SEQ ID NO: 101351 - DNA, 25 bp, Homo sapien
agctgtactgggttgtaaagtaaca

SEQ ID NO: 101352 - DNA, 25 bp, Homo sapien
tccccagtcttcacaatcagggagc

SEQ ID NO: 101353 - DNA, 25 bp, Homo sapien
gctgtactgggttgtaaagtaacag

SEQ ID NO: 101354 - DNA, 25 bp, Homo sapien
cagtcttcacaatcagggagcagat

SEQ ID NO: 101355 - DNA, 25 bp, Homo sapien
tgatgttgcagcaagtttcctcttt

SEQ ID NO: 101356 - DNA, 25 bp, Homo sapien
aagaggcccttcctggtacccactg

SEQ ID NO: 101357 - DNA, 25 bp, Homo sapien
tgacttctgtgatgagttccgtgag

SEQ ID NO: 101358 - DNA, 25 bp, Homo sapien
tgagtggtgccttgactgccttcac

SEQ ID NO: 101359 - DNA, 25 bp, Homo sapien
gacaaggaaagcagagagtcccagc

SEQ ID NO: 101360 - DNA, 25 bp, Homo sapien
tgtagctatatcagcatcatactgt

SEQ ID NO: 101361 - DNA, 25 bp, Homo sapien
tagctatatcagcatcatactgttt

SEQ ID NO: 101362 - DNA, 25 bp, Homo sapien
tctgtagctatatcagcatcatact

SEQ ID NO: 101363 - DNA, 25 bp, Homo sapien
catattaaacttctacacatatacc

SEQ ID NO: 101364 - DNA, 25 bp, Homo sapien
tatctagacataggacgtgcttgcc

SEQ ID NO: 101365 - DNA, 25 bp, Homo sapien
tgtgcaatggccatcctgaggtagc

SEQ ID NO: 101366 - DNA, 25 bp, Homo sapien
gaaccagggccatgcaattgtgcaa

SEQ ID NO: 101367 - DNA, 25 bp, Homo sapien
catcataggcaaagctgaggtctct

SEQ ID NO: 101368 - DNA, 25 bp, Homo sapien
gaattataaccggtggctcccagtc

SEQ ID NO: 101369 - DNA, 25 bp, Homo sapien
gctttggtggtaaggatcccctgca

SEQ ID NO: 101370 - DNA, 25 bp, Homo sapien
ggacacattttgacggatggcacat

SEQ ID NO: 101371 - DNA, 25 bp, Homo sapien
ttatacagcctagtgcattgtggca

SEQ ID NO: 101372 - DNA, 25 bp, Homo sapien
agttgtgattagatcttgtttggct

SEQ ID NO: 101373 - DNA, 25 bp, Homo sapien
ttgtgattagatcttgtttggcttc

SEQ ID NO: 101374 - DNA, 25 bp, Homo sapien
gttgtgattagatcttgtttggctt

SEQ ID NO: 101375 - DNA, 25 bp, Homo sapien
tttctaccgagagtagatgagaccc

SEQ ID NO: 101376 - DNA, 25 bp, Homo sapien
cagctgaggcaattcacctccaaag

SEQ ID NO: 101377 - DNA, 25 bp, Homo sapien
gagttccgtggagaatctgcgtcct

SEQ ID NO: 101378 - DNA, 25 bp, Homo sapien
cctaaatgctgcgaagagttccgtg

SEQ ID NO: 101379 - DNA, 25 bp, Homo sapien
tagccacttgaccacacctaaacaa

SEQ ID NO: 101380 - DNA, 25 bp, Homo sapien
gaccacacgtgtccttttcacccaa

SEQ ID NO: 101381 - DNA, 25 bp, Homo sapien
cctggtggttagagctctgaccaca

SEQ ID NO: 101382 - DNA, 25 bp, Homo sapien
cccaacctatcattaggaactagcc

SEQ ID NO: 101383 - DNA, 25 bp, Homo sapien
tcgacgggatcaaggaaataagaac

SEQ ID NO: 101384 - DNA, 25 bp, Homo sapien
catatccgaagtcccaagttcttta

SEQ ID NO: 101385 - DNA, 25 bp, Homo sapien
tttatctgaaccctcacactcgaga

SEQ ID NO: 101386 - DNA, 25 bp, Homo sapien
gaaccagtgtttacataagtgttta

SEQ ID NO: 101387 - DNA, 25 bp, Homo sapien
tagtctctggaaagcttctcaaggt

SEQ ID NO: 101388 - DNA, 25 bp, Homo sapien
tctggtataagactgtgactggcaa

SEQ ID NO: 101389 - DNA, 25 bp, Homo sapien
tcaaggttgtctgaggaatccagta

SEQ ID NO: 101390 - DNA, 25 bp, Homo sapien
cactgggatggctggactctggtat

SEQ ID NO: 101391 - DNA, 25 bp, Homo sapien
agcagtattcgtggaaaatattgac

SEQ ID NO: 101392 - DNA, 25 bp, Homo sapien
gacagtttgtcctcaattgcctgag

SEQ ID NO: 101393 - DNA, 25 bp, Homo sapien
agaggatgctctttcaaaggacaag

SEQ ID NO: 101394 - DNA, 25 bp, Homo sapien
aaaggacaagaattcagtcatagga

SEQ ID NO: 101395 - DNA, 25 bp, Homo sapien
tggagggtctcatccccttgcaagg

SEQ ID NO: 101396 - DNA, 25 bp, Homo sapien
gggtctcatccccttgcaaggctgc

SEQ ID NO: 101397 - DNA, 25 bp, Homo sapien
ggagggtctcatccccttgcaaggc

SEQ ID NO: 101398 - DNA, 25 bp, Homo sapien
cctggagggtctcatccccttgcaa

SEQ ID NO: 101399 - DNA, 25 bp, Homo sapien
gccaatggcaggttgaaggacagct

SEQ ID NO: 101400 - DNA, 25 bp, Homo sapien
ccaatggcaggttgaaggacagctc

SEQ ID NO: 101401 - DNA, 25 bp, Homo sapien
gaaggacagctctagtgagtggttg

SEQ ID NO: 101402 - DNA, 25 bp, Homo sapien
cactcttggctttgctatttggcat

SEQ ID NO: 101403 - DNA, 25 bp, Homo sapien
tgcactcttggctttgctatttggc

SEQ ID NO: 101404 - DNA, 25 bp, Homo sapien
gcactcttggctttgctatttggca

SEQ ID NO: 101405 - DNA, 25 bp, Homo sapien
ctgcactcttggctttgctatttgg

SEQ ID NO: 101406 - DNA, 25 bp, Homo sapien
tggagacctggtagcatagccttca

SEQ ID NO: 101407 - DNA, 25 bp, Homo sapien
ctctcaaggttaacaaatggctctg

SEQ ID NO: 101408 - DNA, 25 bp, Homo sapien
tgcatgatccccaccaagtaggagt

SEQ ID NO: 101409 - DNA, 25 bp, Homo sapien
tgaagccggcatgcatcaaatatcc

SEQ ID NO: 101410 - DNA, 25 bp, Homo sapien
caactatggtcctcaggtttcctac

SEQ ID NO: 101411 - DNA, 25 bp, Homo sapien
cacctcactgatgtcaactatggtc

SEQ ID NO: 101412 - DNA, 25 bp, Homo sapien
tcactgatgtcaactatggtcctca

SEQ ID NO: 101413 - DNA, 25 bp, Homo sapien
tgatgtcaactatggtcctcaggtt

SEQ ID NO: 101414 - DNA, 25 bp, Homo sapien
tacttctgcagggtgtcttaaactt

SEQ ID NO: 101415 - DNA, 25 bp, Homo sapien
cttctgcagggtgtcttaaactttg

SEQ ID NO: 101416 - DNA, 25 bp, Homo sapien
tctgcagggtgtcttaaactttgat

SEQ ID NO: 101417 - DNA, 25 bp, Homo sapien
gcagggtgtcttaaactttgattct

SEQ ID NO: 101418 - DNA, 25 bp, Homo sapien
ccatgtctgaggtgttggtttacat

SEQ ID NO: 101419 - DNA, 25 bp, Homo sapien
gcctcccgcaacagtagcactgctt

SEQ ID NO: 101420 - DNA, 25 bp, Homo sapien
tctgaagcaaaaattcccatgtctg

SEQ ID NO: 101421 - DNA, 25 bp, Homo sapien
tgcctggcaagcgactgcctgagag

SEQ ID NO: 101422 - DNA, 25 bp, Homo sapien
gaaaattagttgagtggatgaactg

SEQ ID NO: 101423 - DNA, 25 bp, Homo sapien
tacacctgtgttcgggctgagaaaa

SEQ ID NO: 101424 - DNA, 25 bp, Homo sapien
gcatttgctcctgagtacacctgtg

SEQ ID NO: 101425 - DNA, 25 bp, Homo sapien
tgttcgggctgagaaaattagttga

SEQ ID NO: 101426 - DNA, 25 bp, Homo sapien
ccataaaactcgtggctttgaaacg

SEQ ID NO: 101427 - DNA, 25 bp, Homo sapien
tcgacactgggttgtagcttgcagt

SEQ ID NO: 101428 - DNA, 25 bp, Homo sapien
gacagggacacactcgacactgggt

SEQ ID NO: 101429 - DNA, 25 bp, Homo sapien
ttctccaatgacaccactcatgtag

SEQ ID NO: 101430 - DNA, 25 bp, Homo sapien
ctagttttaatgatatatgtctcca

SEQ ID NO: 101431 - DNA, 25 bp, Homo sapien
atacctaaaaagtgtggaccacctg

SEQ ID NO: 101432 - DNA, 25 bp, Homo sapien
tgagacctgagggatttgtatcaag

SEQ ID NO: 101433 - DNA, 25 bp, Homo sapien
aaacccagacatgcaggatacatgt

SEQ ID NO: 101434 - DNA, 25 bp, Homo sapien
cgaagggaataaacaaacagaagag

SEQ ID NO: 101435 - DNA, 25 bp, Homo sapien
gaagagaatcctgaatcttaggacc

SEQ ID NO: 101436 - DNA, 25 bp, Homo sapien
aaacagaagagaatcctgaatctta

SEQ ID NO: 101437 - DNA, 25 bp, Homo sapien
gaatcctgaatcttaggaccatctt

SEQ ID NO: 101438 - DNA, 25 bp, Homo sapien
tcagctctgaggcaataattaggct

SEQ ID NO: 101439 - DNA, 25 bp, Homo sapien
taaataatggctcactccccttgtg

SEQ ID NO: 101440 - DNA, 25 bp, Homo sapien
tcattcaagggtaagaagacagaca

SEQ ID NO: 101441 - DNA, 25 bp, Homo sapien
tgtgagccttcaagcaatctgcttc

SEQ ID NO: 101442 - DNA, 25 bp, Homo sapien
tttcacatcctctattgcaatggct

SEQ ID NO: 101443 - DNA, 25 bp, Homo sapien
ctgcaggactatgtgagctttggat

SEQ ID NO: 101444 - DNA, 25 bp, Homo sapien
tccagttgctgcaggactatgtgag

SEQ ID NO: 101445 - DNA, 25 bp, Homo sapien
tcacatcctctattgcaatggctgg

SEQ ID NO: 101446 - DNA, 25 bp, Homo sapien
tgggaccccggattcctctcaaata

SEQ ID NO: 101447 - DNA, 25 bp, Homo sapien
ctgggaccccggattcctctcaaat

SEQ ID NO: 101448 - DNA, 25 bp, Homo sapien
tgctgccagtttagcaccagcctgc

SEQ ID NO: 101449 - DNA, 25 bp, Homo sapien
cagcctgctgtttagtggcagttac

SEQ ID NO: 101450 - DNA, 25 bp, Homo sapien
taagcctgaatccaagtcacacttc

SEQ ID NO: 101451 - DNA, 25 bp, Homo sapien
tagtggcagttacacccaggagtgt

SEQ ID NO: 101452 - DNA, 25 bp, Homo sapien
ctcatgttaggtctgccctttttca

SEQ ID NO: 101453 - DNA, 25 bp, Homo sapien
aatgcatataccacaggatacagcc

SEQ ID NO: 101454 - DNA, 25 bp, Homo sapien
aaatgcatataccacaggatacagc

SEQ ID NO: 101455 - DNA, 25 bp, Homo sapien
ttgtctgcaagacaaacatactgat

SEQ ID NO: 101456 - DNA, 25 bp, Homo sapien
gagacattacatagcagagttgtaa

SEQ ID NO: 101457 - DNA, 25 bp, Homo sapien
catctgtaatgggattctttgctcc

SEQ ID NO: 101458 - DNA, 25 bp, Homo sapien
tctgtaatgggattctttgctccca

SEQ ID NO: 101459 - DNA, 25 bp, Homo sapien
tgctcccaagagagacattacatag

SEQ ID NO: 101460 - DNA, 25 bp, Homo sapien
atagcacaataagcgctgaactgag

SEQ ID NO: 101461 - DNA, 25 bp, Homo sapien
ctaccctacatcaaagggcatggca

SEQ ID NO: 101462 - DNA, 25 bp, Homo sapien
ccctacatcaaagggcatggcagcc

SEQ ID NO: 101463 - DNA, 25 bp, Homo sapien
gatccttctcctcatagcacaataa

SEQ ID NO: 101464 - DNA, 25 bp, Homo sapien
agaagaagttgcctgcaggtgtgcc

SEQ ID NO: 101465 - DNA, 25 bp, Homo sapien
cattatagaagaagttgcctgcagg

SEQ ID NO: 101466 - DNA, 25 bp, Homo sapien
tgtttatccttgtcaactctgtgaa

SEQ ID NO: 101467 - DNA, 25 bp, Homo sapien
attgtcaccagaccctgtttatcct

SEQ ID NO: 101468 - DNA, 25 bp, Homo sapien
cagggactgttaccataagaatctc

SEQ ID NO: 101469 - DNA, 25 bp, Homo sapien
ggactgttaccataagaatctccct

SEQ ID NO: 101470 - DNA, 25 bp, Homo sapien
agggactgttaccataagaatctcc

SEQ ID NO: 101471 - DNA, 25 bp, Homo sapien
tcagggactgttaccataagaatct

SEQ ID NO: 101472 - DNA, 25 bp, Homo sapien
gagcttctgtgaaagagtgtaactt

SEQ ID NO: 101473 - DNA, 25 bp, Homo sapien
gtgcactaggaacatctgatctttg

SEQ ID NO: 101474 - DNA, 25 bp, Homo sapien
aataactgcctgtgaattctagggc

SEQ ID NO: 101475 - DNA, 25 bp, Homo sapien
tccaaaaggagacacatgaatgaaa

SEQ ID NO: 101476 - DNA, 25 bp, Homo sapien
taggctcaaaactgcatccctgtgg

SEQ ID NO: 101477 - DNA, 25 bp, Homo sapien
catccctgtggaggatattttcagg

SEQ ID NO: 101478 - DNA, 25 bp, Homo sapien
gtaagccaattctggaaatgacggg

SEQ ID NO: 101479 - DNA, 25 bp, Homo sapien
tccagctgttaatgaatgtcctagg

SEQ ID NO: 101480 - DNA, 25 bp, Homo sapien
tcttaaataggtccaccatgtggtg

SEQ ID NO: 101481 - DNA, 25 bp, Homo sapien
ggtggacctattccttatcctgacg

SEQ ID NO: 101482 - DNA, 25 bp, Homo sapien
tgaggtcagctcaactagggaagtg

SEQ ID NO: 101483 - DNA, 25 bp, Homo sapien
ttcggtgtgattgcagtggaactct

SEQ ID NO: 101484 - DNA, 25 bp, Homo sapien
gagtagatgcgttcgtcacatcatc

SEQ ID NO: 101485 - DNA, 25 bp, Homo sapien
tgcgttcgtcacatcatcccaatat

SEQ ID NO: 101486 - DNA, 25 bp, Homo sapien
gatagcttggtgagtagatgcgttc

SEQ ID NO: 101487 - DNA, 25 bp, Homo sapien
ttaccaaagatgatagcttggtgag

SEQ ID NO: 101488 - DNA, 25 bp, Homo sapien
ctgccttgacactcagataaaaaca

SEQ ID NO: 101489 - DNA, 25 bp, Homo sapien
aaacacttgtttatactggaggact

SEQ ID NO: 101490 - DNA, 25 bp, Homo sapien
cttgtttatactggaggactaaggt

SEQ ID NO: 101491 - DNA, 25 bp, Homo sapien
cttgacactcagataaaaacacttg

SEQ ID NO: 101492 - DNA, 25 bp, Homo sapien
caaaaggatgattcatgtacctttt

SEQ ID NO: 101493 - DNA, 25 bp, Homo sapien
aaggatgattcatgtaccttttagc

SEQ ID NO: 101494 - DNA, 25 bp, Homo sapien
aggatgattcatgtaccttttagct

SEQ ID NO: 101495 - DNA, 25 bp, Homo sapien
aaaggatgattcatgtaccttttag

SEQ ID NO: 101496 - DNA, 25 bp, Homo sapien
tatgcttcatgggtagtctctccca

SEQ ID NO: 101497 - DNA, 25 bp, Homo sapien
catcctctgcattgtggagtttggc

SEQ ID NO: 101498 - DNA, 25 bp, Homo sapien
gatctggtgctccttatgcttcatg

SEQ ID NO: 101499 - DNA, 25 bp, Homo sapien
cccatcctctgcattgtggagtttg

SEQ ID NO: 101500 - DNA, 25 bp, Homo sapien
gccactgtgcataaaaaagtgccaa

SEQ ID NO: 101501 - DNA, 25 bp, Homo sapien
tctttaaacggaagtgatagttctc

SEQ ID NO: 101502 - DNA, 25 bp, Homo sapien
tatgagtcagtgttggatgagaagc

SEQ ID NO: 101503 - DNA, 25 bp, Homo sapien
tgagaagccaggagtttctttaaac

SEQ ID NO: 101504 - DNA, 25 bp, Homo sapien
tgaaagcttattgtccactcataga

SEQ ID NO: 101505 - DNA, 25 bp, Homo sapien
acaacaggtttagcatgattgatgt

SEQ ID NO: 101506 - DNA, 25 bp, Homo sapien
gtccactcatagagggacaacaggt

SEQ ID NO: 101507 - DNA, 25 bp, Homo sapien
tgtagtggaacggaagcatgaaagc

SEQ ID NO: 101508 - DNA, 25 bp, Homo sapien
gcaaaaacattgactgtattgagtt

SEQ ID NO: 101509 - DNA, 25 bp, Homo sapien
tataagttgggtcctgcacctgcag

SEQ ID NO: 101510 - DNA, 25 bp, Homo sapien
gcaggagcctcccagtactgtgaga

SEQ ID NO: 101511 - DNA, 25 bp, Homo sapien
gactgtattgagttttttccagttg

SEQ ID NO: 101512 - DNA, 25 bp, Homo sapien
aataccagcattcaaaagtcagtgc

SEQ ID NO: 101513 - DNA, 25 bp, Homo sapien
tatttaataccagcattcaaaagtc

SEQ ID NO: 101514 - DNA, 25 bp, Homo sapien
tttaataccagcattcaaaagtcag

SEQ ID NO: 101515 - DNA, 25 bp, Homo sapien
taataccagcattcaaaagtcagtg

SEQ ID NO: 101516 - DNA, 25 bp, Homo sapien
gaataaactggccctgtctgctcca

SEQ ID NO: 101517 - DNA, 25 bp, Homo sapien
aataaactggccctgtctgctccat

SEQ ID NO: 101518 - DNA, 25 bp, Homo sapien
agaataaactggccctgtctgctcc

SEQ ID NO: 101519 - DNA, 25 bp, Homo sapien
caaacctggatttcattaacataat

SEQ ID NO: 101520 - DNA, 25 bp, Homo sapien
tcaaacctggatttcattaacataa

SEQ ID NO: 101521 - DNA, 25 bp, Homo sapien
cagtgggtccacaggagtggttctt

SEQ ID NO: 101522 - DNA, 25 bp, Homo sapien
agtgggtccacaggagtggttctta

SEQ ID NO: 101523 - DNA, 25 bp, Homo sapien
ggtgtataccttgtattttgagctc

SEQ ID NO: 101524 - DNA, 25 bp, Homo sapien
ctttcatgtgttcatggacatctgc

SEQ ID NO: 101525 - DNA, 25 bp, Homo sapien
tgtataccttgtattttgagctcat

SEQ ID NO: 101526 - DNA, 25 bp, Homo sapien
tggtgtataccttgtattttgagct

SEQ ID NO: 101527 - DNA, 25 bp, Homo sapien
tttgacaaactaccggaggctcctg

SEQ ID NO: 101528 - DNA, 25 bp, Homo sapien
tgattgcgagtagtgggtgccccaa

SEQ ID NO: 101529 - DNA, 25 bp, Homo sapien
gcgtgggcgccaatctaggagacaa

SEQ ID NO: 101530 - DNA, 25 bp, Homo sapien
aagtaaagttgcctcggcgtccgcg

SEQ ID NO: 101531 - DNA, 25 bp, Homo sapien
tgatcacataagcagcaagtctccc

SEQ ID NO: 101532 - DNA, 25 bp, Homo sapien
gagaactcgtttctgggccctatcc

SEQ ID NO: 101533 - DNA, 25 bp, Homo sapien
tcatgacaatcaacagagaactcgt

SEQ ID NO: 101534 - DNA, 25 bp, Homo sapien
tgctgatgctgtgggtactaaaacc

SEQ ID NO: 101535 - DNA, 25 bp, Homo sapien
ctgaaaactatttcttggtaaacat

SEQ ID NO: 101536 - DNA, 25 bp, Homo sapien
tactggcatctattggactgaggtc

SEQ ID NO: 101537 - DNA, 25 bp, Homo sapien
ggtcagggacgctgctaaatatcca

SEQ ID NO: 101538 - DNA, 25 bp, Homo sapien
gcaacttggcgaaatgccctcacta

SEQ ID NO: 101539 - DNA, 25 bp, Homo sapien
gacctctggaacacttggcgatgtc

SEQ ID NO: 101540 - DNA, 25 bp, Homo sapien
agaacagaccacctatcaacagcag

SEQ ID NO: 101541 - DNA, 25 bp, Homo sapien
taaggaactgcgcaacacaaaaagt

SEQ ID NO: 101542 - DNA, 25 bp, Homo sapien
tttgaccagagttcagtaaactaga

SEQ ID NO: 101543 - DNA, 25 bp, Homo sapien
gacagaccataatcaaggccataaa

SEQ ID NO: 101544 - DNA, 25 bp, Homo sapien
tgtgaaatggctaaagctagctaat

SEQ ID NO: 101545 - DNA, 25 bp, Homo sapien
taaaatctactctctaaggccgggc

SEQ ID NO: 101546 - DNA, 25 bp, Homo sapien
cgtgttacctcacaaagttatctct

SEQ ID NO: 101547 - DNA, 25 bp, Homo sapien
taaagctagctaattaacacgtgtt

SEQ ID NO: 101548 - DNA, 25 bp, Homo sapien
tcatgcttgtgcaggggcctaatct

SEQ ID NO: 101549 - DNA, 25 bp, Homo sapien
gtgtcatgcttgtgcaggggcctaa

SEQ ID NO: 101550 - DNA, 25 bp, Homo sapien
tcacaaatttgtgtcatgcttgtgc

SEQ ID NO: 101551 - DNA, 25 bp, Homo sapien
ttcacaaatttgtgtcatgcttgtg

SEQ ID NO: 101552 - DNA, 25 bp, Homo sapien
cgcgccgcaggggagagcgcaagcg

SEQ ID NO: 101553 - DNA, 25 bp, Homo sapien
gggagagcgcaagcggcgagcaccg

SEQ ID NO: 101554 - DNA, 25 bp, Homo sapien
ccgcaggggagagcgcaagcggcga

SEQ ID NO: 101555 - DNA, 25 bp, Homo sapien
agcgcaagcggcgagcaccgggcat

SEQ ID NO: 101556 - DNA, 25 bp, Homo sapien
gtttctcaggccgagtgcgcagcca

SEQ ID NO: 101557 - DNA, 25 bp, Homo sapien
tcagccaatcgccactggctcagag

SEQ ID NO: 101558 - DNA, 25 bp, Homo sapien
ggagtcgacactgcgcgcttgccga

SEQ ID NO: 101559 - DNA, 25 bp, Homo sapien
ctgagatgcgcctggcatagaccgg

SEQ ID NO: 101560 - DNA, 25 bp, Homo sapien
aagtctgcggccgaaaactccaggg

SEQ ID NO: 101561 - DNA, 25 bp, Homo sapien
ccttctccaaggaaaagtctgcggc

SEQ ID NO: 101562 - DNA, 25 bp, Homo sapien
gtctgcggccgaaaactccagggct

SEQ ID NO: 101563 - DNA, 25 bp, Homo sapien
tccaaggaaaagtctgcggccgaaa

SEQ ID NO: 101564 - DNA, 25 bp, Homo sapien
ataatgcggctgtcttgttccctcc

SEQ ID NO: 101565 - DNA, 25 bp, Homo sapien
gcttaaaatgcttcccaaacgttgc

SEQ ID NO: 101566 - DNA, 25 bp, Homo sapien
caaaggagcttttccaaacgcgtgt

SEQ ID NO: 101567 - DNA, 25 bp, Homo sapien
taccatccttgtctaataatgcggc

SEQ ID NO: 101568 - DNA, 25 bp, Homo sapien
catctctagatggtacgtgaagttg

SEQ ID NO: 101569 - DNA, 25 bp, Homo sapien
atggtacgtgaagttgcaagtggaa

SEQ ID NO: 101570 - DNA, 25 bp, Homo sapien
ttttctctcatcaaccctaaagcca

SEQ ID NO: 101571 - DNA, 25 bp, Homo sapien
tagatggtacgtgaagttgcaagtg

SEQ ID NO: 101572 - DNA, 25 bp, Homo sapien
tttccaaaacttgttactcagcagt

SEQ ID NO: 101573 - DNA, 25 bp, Homo sapien
tcattcattaaactgtccatgtatg

SEQ ID NO: 101574 - DNA, 25 bp, Homo sapien
cattaattgatctatgttttctaaa

SEQ ID NO: 101575 - DNA, 25 bp, Homo sapien
gttaattgatctatactatctacat

SEQ ID NO: 101576 - DNA, 25 bp, Homo sapien
gttctggaatcagggactccaagag

SEQ ID NO: 101577 - DNA, 25 bp, Homo sapien
agagcccacttagtgttctacccac

SEQ ID NO: 101578 - DNA, 25 bp, Homo sapien
ttctacccaccggtggcaatgctgg

SEQ ID NO: 101579 - DNA, 25 bp, Homo sapien
aatgtcatccaagagtcaagttctg

SEQ ID NO: 101580 - DNA, 25 bp, Homo sapien
gccatagtcagatgcagtgattcac

SEQ ID NO: 101581 - DNA, 25 bp, Homo sapien
ttgccatagtcagatgcagtgattc

SEQ ID NO: 101582 - DNA, 25 bp, Homo sapien
ccttgccatagtcagatgcagtgat

SEQ ID NO: 101583 - DNA, 25 bp, Homo sapien
gaggccaacgcagggggactgtttg

SEQ ID NO: 101584 - DNA, 25 bp, Homo sapien
ccctccaagaatgtaacgtaataat

SEQ ID NO: 101585 - DNA, 25 bp, Homo sapien
ttctaattatgtgacgaacacttat

SEQ ID NO: 101586 - DNA, 25 bp, Homo sapien
tccctccaagaatgtaacgtaataa

SEQ ID NO: 101587 - DNA, 25 bp, Homo sapien
gtgacgaacacttatatcctcatac

SEQ ID NO: 101588 - DNA, 25 bp, Homo sapien
tggcatcacaagatagaaggagctt

SEQ ID NO: 101589 - DNA, 25 bp, Homo sapien
tagaaggagctttaatctctaagcc

SEQ ID NO: 101590 - DNA, 25 bp, Homo sapien
aggcattctatgagctcctttagcc

SEQ ID NO: 101591 - DNA, 25 bp, Homo sapien
ccttgagaaccttgcgatggtggca

SEQ ID NO: 101592 - DNA, 25 bp, Homo sapien
caagttctgacgcactgatacactc

SEQ ID NO: 101593 - DNA, 25 bp, Homo sapien
cttcatacaaaggtttacatttcca

SEQ ID NO: 101594 - DNA, 25 bp, Homo sapien
tccatacagccacctgaagttcctg

SEQ ID NO: 101595 - DNA, 25 bp, Homo sapien
tgatacactccttcatacaaaggtt

SEQ ID NO: 101596 - DNA, 25 bp, Homo sapien
caagctccagataactcaagttcct

SEQ ID NO: 101597 - DNA, 25 bp, Homo sapien
aagctccagataactcaagttcctc

SEQ ID NO: 101598 - DNA, 25 bp, Homo sapien
gctccagataactcaagttcctcag

SEQ ID NO: 101599 - DNA, 25 bp, Homo sapien
tccagataactcaagttcctcagag

SEQ ID NO: 101600 - DNA, 25 bp, Homo sapien
aaagctgtagtaagcttctcctttt

SEQ ID NO: 101601 - DNA, 25 bp, Homo sapien
ctaaatatgttgatttggaattggc

SEQ ID NO: 101602 - DNA, 25 bp, Homo sapien
aaagtcctcaaataaagctgtagta

SEQ ID NO: 101603 - DNA, 25 bp, Homo sapien
tggaattggcaatctttttctaagt

SEQ ID NO: 101604 - DNA, 25 bp, Homo sapien
gctgatttgggtagagaaccattta

SEQ ID NO: 101605 - DNA, 25 bp, Homo sapien
taaacatgataaaacactatgcaag

SEQ ID NO: 101606 - DNA, 25 bp, Homo sapien
tctaaaacatttacaatgggacaat

SEQ ID NO: 101607 - DNA, 25 bp, Homo sapien
cataaagaccaccactaacttgtgg

SEQ ID NO: 101608 - DNA, 25 bp, Homo sapien
aaataaagccaactctagataaata

SEQ ID NO: 101609 - DNA, 25 bp, Homo sapien
gctctggcaatgtctctggtttttg

SEQ ID NO: 101610 - DNA, 25 bp, Homo sapien
gaaacacaatgttagttctaatgga

SEQ ID NO: 101611 - DNA, 25 bp, Homo sapien
gttagttctaatggatggatgattg

SEQ ID NO: 101612 - DNA, 25 bp, Homo sapien
cagtcagatactaagcgggaatcac

SEQ ID NO: 101613 - DNA, 25 bp, Homo sapien
tactaagcgggaatcactgaaacac

SEQ ID NO: 101614 - DNA, 25 bp, Homo sapien
caagtagggatatgcgaagtagcaa

SEQ ID NO: 101615 - DNA, 25 bp, Homo sapien
gtcaagtagggatatgcgaagtagc

SEQ ID NO: 101616 - DNA, 25 bp, Homo sapien
gaagacttcacaaaggcatttgctc

SEQ ID NO: 101617 - DNA, 25 bp, Homo sapien
tcacaaaggcatttgctccaaaaaa

SEQ ID NO: 101618 - DNA, 25 bp, Homo sapien
tatccccgtagtttcttgttcaaga

SEQ ID NO: 101619 - DNA, 25 bp, Homo sapien
gctcatctggctgcgtacttttatt

SEQ ID NO: 101620 - DNA, 25 bp, Homo sapien
tggctgcgtacttttatttatcccc

SEQ ID NO: 101621 - DNA, 25 bp, Homo sapien
gtcagttgctcatctggctgcgtac

SEQ ID NO: 101622 - DNA, 25 bp, Homo sapien
tgaaaattcgttgatctctgccctg

SEQ ID NO: 101623 - DNA, 25 bp, Homo sapien
cagtagtgcagtaaacagactcatc

SEQ ID NO: 101624 - DNA, 25 bp, Homo sapien
actaattcagtggatttccgatgca

SEQ ID NO: 101625 - DNA, 25 bp, Homo sapien
gccctggccattctgtgttctcaca

SEQ ID NO: 101626 - DNA, 25 bp, Homo sapien
caaggagtcatacattcataatgca

SEQ ID NO: 101627 - DNA, 25 bp, Homo sapien
atcattatgtctatgttccataacg

SEQ ID NO: 101628 - DNA, 25 bp, Homo sapien
taacttgacaaggagtcatacattc

SEQ ID NO: 101629 - DNA, 25 bp, Homo sapien
tctgaagtaacttgacaaggagtca

SEQ ID NO: 101630 - DNA, 25 bp, Homo sapien
tctcttggagttccagcttaaactt

SEQ ID NO: 101631 - DNA, 25 bp, Homo sapien
ttctcttggagttccagcttaaact

SEQ ID NO: 101632 - DNA, 25 bp, Homo sapien
gctagtattcaccaagatacatcat

SEQ ID NO: 101633 - DNA, 25 bp, Homo sapien
ttaaagccacctattttctaagcag

SEQ ID NO: 101634 - DNA, 25 bp, Homo sapien
ggcaaataagccagtatgctagtat

SEQ ID NO: 101635 - DNA, 25 bp, Homo sapien
tcttcaagccatgtgttaatactcc

SEQ ID NO: 101636 - DNA, 25 bp, Homo sapien
gaagtatttcctctcaacgagctaa

SEQ ID NO: 101637 - DNA, 25 bp, Homo sapien
cagtatgaatacaggtaaagctctc

SEQ ID NO: 101638 - DNA, 25 bp, Homo sapien
tgcttgcaaagacctgtgagtaaac

SEQ ID NO: 101639 - DNA, 25 bp, Homo sapien
actgctggttgaaaggtagaggcac

SEQ ID NO: 101640 - DNA, 25 bp, Homo sapien
aacatcccctagtatttgaaggtca

SEQ ID NO: 101641 - DNA, 25 bp, Homo sapien
caaattaatggatgcaaatcaggcc

SEQ ID NO: 101642 - DNA, 25 bp, Homo sapien
taaaaagtcttaaacagctacagtg

SEQ ID NO: 101643 - DNA, 25 bp, Homo sapien
taaggagtgagatggtcatttcagc

SEQ ID NO: 101644 - DNA, 25 bp, Homo sapien
cgagtgagacagtaccttggataac

SEQ ID NO: 101645 - DNA, 25 bp, Homo sapien
ggagctaccttttccaatgtgaaag

SEQ ID NO: 101646 - DNA, 25 bp, Homo sapien
tattatttgacctggcactcgtcag

SEQ ID NO: 101647 - DNA, 25 bp, Homo sapien
taaaatagatggtagatgccccaca

SEQ ID NO: 101648 - DNA, 25 bp, Homo sapien
agcttcatcacgttccttctgcgca

SEQ ID NO: 101649 - DNA, 25 bp, Homo sapien
gcgcaaaatacacttcttcaaccag

SEQ ID NO: 101650 - DNA, 25 bp, Homo sapien
tccttctgcgcaaaatacacttctt

SEQ ID NO: 101651 - DNA, 25 bp, Homo sapien
gcttcatcacgttccttctgcgcaa

SEQ ID NO: 101652 - DNA, 25 bp, Homo sapien
tttccatatgcttggctcgtgcaat

SEQ ID NO: 101653 - DNA, 25 bp, Homo sapien
tctcctcaatggctaattgcagtct

SEQ ID NO: 101654 - DNA, 25 bp, Homo sapien
gcttggctcgtgcaattgcttcatc

SEQ ID NO: 101655 - DNA, 25 bp, Homo sapien
tcatctctctcctcaatggctaatt

SEQ ID NO: 101656 - DNA, 25 bp, Homo sapien
tgggaagatagtgagctaataaaac

SEQ ID NO: 101657 - DNA, 25 bp, Homo sapien
gattacctatgaaacaggtgttggg

SEQ ID NO: 101658 - DNA, 25 bp, Homo sapien
tacctcacagcttagaagtaatctg

SEQ ID NO: 101659 - DNA, 25 bp, Homo sapien
aaaagccttattacgtaagaatctg

SEQ ID NO: 101660 - DNA, 25 bp, Homo sapien
ctctctcaattcgtcaagtcattct

SEQ ID NO: 101661 - DNA, 25 bp, Homo sapien
tcctctctcaattcgtcaagtcatt

SEQ ID NO: 101662 - DNA, 25 bp, Homo sapien
cttcctctctcaattcgtcaagtca

SEQ ID NO: 101663 - DNA, 25 bp, Homo sapien
gccttcctctctcaattcgtcaagt

SEQ ID NO: 101664 - DNA, 25 bp, Homo sapien
cattttgccgataagtgaatttcaa

SEQ ID NO: 101665 - DNA, 25 bp, Homo sapien
tgtcattttcttcagggttaatatt

SEQ ID NO: 101666 - DNA, 25 bp, Homo sapien
atgtcattttcttcagggttaatat

SEQ ID NO: 101667 - DNA, 25 bp, Homo sapien
catgtcattttcttcagggttaata

SEQ ID NO: 101668 - DNA, 25 bp, Homo sapien
ttcttcagggttaatattttctagc

SEQ ID NO: 101669 - DNA, 25 bp, Homo sapien
tcccgttcttctattagtgcactca

SEQ ID NO: 101670 - DNA, 25 bp, Homo sapien
acaattatagctccattcttctgaa

SEQ ID NO: 101671 - DNA, 25 bp, Homo sapien
ccttggtcttgtagattctatccac

SEQ ID NO: 101672 - DNA, 25 bp, Homo sapien
tctattagtgcactcatttcttctg

SEQ ID NO: 101673 - DNA, 25 bp, Homo sapien
tttggccttaacaggcaagaagaaa

SEQ ID NO: 101674 - DNA, 25 bp, Homo sapien
tgctctttcacatgatgaagctcct

SEQ ID NO: 101675 - DNA, 25 bp, Homo sapien
gaagctcctgctctaaccgtttgca

SEQ ID NO: 101676 - DNA, 25 bp, Homo sapien
attgttttcagcagtcagatgtctc

SEQ ID NO: 101677 - DNA, 25 bp, Homo sapien
cagagcacgttcttgattgttttca

SEQ ID NO: 101678 - DNA, 25 bp, Homo sapien
tttgcctgcaagaaggaacggagat

SEQ ID NO: 101679 - DNA, 25 bp, Homo sapien
aatttgcctgcaagaaggaacggag

SEQ ID NO: 101680 - DNA, 25 bp, Homo sapien
ttaatttgcctgcaagaaggaacgg

SEQ ID NO: 101681 - DNA, 25 bp, Homo sapien
ttgcctgcaagaaggaacggagatt

SEQ ID NO: 101682 - DNA, 25 bp, Homo sapien
aactgatatatgcagcacagaaagc

SEQ ID NO: 101683 - DNA, 25 bp, Homo sapien
tgtgttgttttcacgtacacatacg

SEQ ID NO: 101684 - DNA, 25 bp, Homo sapien
taccataacaaaagggtgctgtatc

SEQ ID NO: 101685 - DNA, 25 bp, Homo sapien
taatataccaccactcaaaattcag

SEQ ID NO: 101686 - DNA, 25 bp, Homo sapien
cattcttaggccactttcaggcaga

SEQ ID NO: 101687 - DNA, 25 bp, Homo sapien
taaaactagagctgctgtcacggac

SEQ ID NO: 101688 - DNA, 25 bp, Homo sapien
tgttaggccactttggttcatgcaa

SEQ ID NO: 101689 - DNA, 25 bp, Homo sapien
tctgatgtggcaacgcctctttccc

SEQ ID NO: 101690 - DNA, 25 bp, Homo sapien
cagcaatggatccaaaccaagaaga

SEQ ID NO: 101691 - DNA, 25 bp, Homo sapien
atggatccaaaccaagaagaaatcc

SEQ ID NO: 101692 - DNA, 25 bp, Homo sapien
gatccaaaccaagaagaaatccctc

SEQ ID NO: 101693 - DNA, 25 bp, Homo sapien
tccaaaccaagaagaaatccctcat

SEQ ID NO: 101694 - DNA, 25 bp, Homo sapien
aaatgtacaaatccatatggtggta

SEQ ID NO: 101695 - DNA, 25 bp, Homo sapien
aaatagagctaaaaccaatactggt

SEQ ID NO: 101696 - DNA, 25 bp, Homo sapien
tacaaatccatatggtggtacaaaa

SEQ ID NO: 101697 - DNA, 25 bp, Homo sapien
agtctttggcaataggtgaccaggt

SEQ ID NO: 101698 - DNA, 25 bp, Homo sapien
tacaatattagagttttccagtggg

SEQ ID NO: 101699 - DNA, 25 bp, Homo sapien
tagagttttccagtgggtgatcaat

SEQ ID NO: 101700 - DNA, 25 bp, Homo sapien
aagagcccactgtacaatattagag

SEQ ID NO: 101701 - DNA, 25 bp, Homo sapien
ctttcaagagcccactgtacaatat

SEQ ID NO: 101702 - DNA, 25 bp, Homo sapien
taaaacgtgtgagattactgtcctc

SEQ ID NO: 101703 - DNA, 25 bp, Homo sapien
cccatatccagtgagcgagtcaata

SEQ ID NO: 101704 - DNA, 25 bp, Homo sapien
cagaatggtcaactaggctttgtac

SEQ ID NO: 101705 - DNA, 25 bp, Homo sapien
tatgcctgccctaattaatgccact

SEQ ID NO: 101706 - DNA, 25 bp, Homo sapien
tatgggttccctgagcacatttcaa

SEQ ID NO: 101707 - DNA, 25 bp, Homo sapien
cattaggtagattggcaactttctg

SEQ ID NO: 101708 - DNA, 25 bp, Homo sapien
cacatttcaaaaccggcatatttag

SEQ ID NO: 101709 - DNA, 25 bp, Homo sapien
aagtgagtagtaagcagtttcttca

SEQ ID NO: 101710 - DNA, 25 bp, Homo sapien
gaattacatatggttcctcaaggct

SEQ ID NO: 101711 - DNA, 25 bp, Homo sapien
caggaattctatgctgctgtgatgc

SEQ ID NO: 101712 - DNA, 25 bp, Homo sapien
taattggagccaactatgtggtaga

SEQ ID NO: 101713 - DNA, 25 bp, Homo sapien
catagttgcactgtcttgttttcca

SEQ ID NO: 101714 - DNA, 25 bp, Homo sapien
caggaaaccattctgtcagggagac

SEQ ID NO: 101715 - DNA, 25 bp, Homo sapien
gcagtttagcaacaggagggtccct

SEQ ID NO: 101716 - DNA, 25 bp, Homo sapien
tacgcttgtcctgtctagaatgaac

SEQ ID NO: 101717 - DNA, 25 bp, Homo sapien
tatctgcctgccacacggtaggaag

SEQ ID NO: 101718 - DNA, 25 bp, Homo sapien
tttataagcttttggttagttgcca

SEQ ID NO: 101719 - DNA, 25 bp, Homo sapien
tctttataagcttttggttagttgc

SEQ ID NO: 101720 - DNA, 25 bp, Homo sapien
aagcttttggttagttgccagatac

SEQ ID NO: 101721 - DNA, 25 bp, Homo sapien
tataagcttttggttagttgccaga

SEQ ID NO: 101722 - DNA, 25 bp, Homo sapien
ttaccaaccatagagaactagagtg

SEQ ID NO: 101723 - DNA, 25 bp, Homo sapien
catagtttaccaaccatagagaact

SEQ ID NO: 101724 - DNA, 25 bp, Homo sapien
tagtttaccaaccatagagaactag

SEQ ID NO: 101725 - DNA, 25 bp, Homo sapien
gtttaccaaccatagagaactagag

SEQ ID NO: 101726 - DNA, 25 bp, Homo sapien
aagcaagcttgggttaggctaccag

SEQ ID NO: 101727 - DNA, 25 bp, Homo sapien
ttgtgggccacgcagtctctaggac

SEQ ID NO: 101728 - DNA, 25 bp, Homo sapien
caagccatgtggtagtctagactag

SEQ ID NO: 101729 - DNA, 25 bp, Homo sapien
catacatacgtgtcaaggtagggac

SEQ ID NO: 101730 - DNA, 25 bp, Homo sapien
gctgattccttagaggttgttctat

SEQ ID NO: 101731 - DNA, 25 bp, Homo sapien
tatattgttccctacagctgattcc

SEQ ID NO: 101732 - DNA, 25 bp, Homo sapien
tacagctgattccttagaggttgtt

SEQ ID NO: 101733 - DNA, 25 bp, Homo sapien
tttccatagtatattgttccctaca

SEQ ID NO: 101734 - DNA, 25 bp, Homo sapien
cactggagcttaatctagtaactca

SEQ ID NO: 101735 - DNA, 25 bp, Homo sapien
tgaactacattgtttcactggagct

SEQ ID NO: 101736 - DNA, 25 bp, Homo sapien
tgatatcagtcttgaccaatgccat

SEQ ID NO: 101737 - DNA, 25 bp, Homo sapien
catttgtgttgggactgtatcagaa

SEQ ID NO: 101738 - DNA, 25 bp, Homo sapien
tggcttgttgcatagataacaactt

SEQ ID NO: 101739 - DNA, 25 bp, Homo sapien
ctgtagtaaactcgaagggtctgga

SEQ ID NO: 101740 - DNA, 25 bp, Homo sapien
cttgttgcatagataacaactttgc

SEQ ID NO: 101741 - DNA, 25 bp, Homo sapien
tttgtactgttgaactgcagtttct

SEQ ID NO: 101742 - DNA, 25 bp, Homo sapien
gttttctaccatgatccactgtaag

SEQ ID NO: 101743 - DNA, 25 bp, Homo sapien
gaatatacatggcattgtgcatcgg

SEQ ID NO: 101744 - DNA, 25 bp, Homo sapien
gaattcctacatttcagacttgagg

SEQ ID NO: 101745 - DNA, 25 bp, Homo sapien
caaaaacttaacagcacccttagtg

SEQ ID NO: 101746 - DNA, 25 bp, Homo sapien
tagatacatggcagtcttctccctg

SEQ ID NO: 101747 - DNA, 25 bp, Homo sapien
tctgacaactgtaaaggagagtcct

SEQ ID NO: 101748 - DNA, 25 bp, Homo sapien
ccactagtagtggattagagcccac

SEQ ID NO: 101749 - DNA, 25 bp, Homo sapien
taacaatagccaactactgcagatg

SEQ ID NO: 101750 - DNA, 25 bp, Homo sapien
gaagagtgagttcagggtcgggtgc

SEQ ID NO: 101751 - DNA, 25 bp, Homo sapien
gagtgagttcagggtcgggtgcggt

SEQ ID NO: 101752 - DNA, 25 bp, Homo sapien
aagaagagtgagttcagggtcgggt

SEQ ID NO: 101753 - DNA, 25 bp, Homo sapien
aagagtgagttcagggtcgggtgcg

SEQ ID NO: 101754 - DNA, 25 bp, Homo sapien
gagtagaccttatccaatcagtgga

SEQ ID NO: 101755 - DNA, 25 bp, Homo sapien
gactcaaggccacaacatctgctaa

SEQ ID NO: 101756 - DNA, 25 bp, Homo sapien
caacactgggaagtcgaggcgacag

SEQ ID NO: 101757 - DNA, 25 bp, Homo sapien
tagactttgagcacaacagacggcc

SEQ ID NO: 101758 - DNA, 25 bp, Homo sapien
cctgggatgggagcacacctagaat

SEQ ID NO: 101759 - DNA, 25 bp, Homo sapien
gagacatgccaagcactgattcagg

SEQ ID NO: 101760 - DNA, 25 bp, Homo sapien
gattcaggtataagattcagcggtt

SEQ ID NO: 101761 - DNA, 25 bp, Homo sapien
acacttattgagcatcagagacatg

SEQ ID NO: 101762 - DNA, 25 bp, Homo sapien
gaaattatttgtaggccaggtgtag

SEQ ID NO: 101763 - DNA, 25 bp, Homo sapien
tatctgatcctcacttaatttgcgc

SEQ ID NO: 101764 - DNA, 25 bp, Homo sapien
tatataagtcaattgcaatgtgtgg

SEQ ID NO: 101765 - DNA, 25 bp, Homo sapien
tgtaatgaaactgtacttgtgccac

SEQ ID NO: 101766 - DNA, 25 bp, Homo sapien
ctaacagacggctctggcattattc

SEQ ID NO: 101767 - DNA, 25 bp, Homo sapien
taacagacggctctggcattattcc

SEQ ID NO: 101768 - DNA, 25 bp, Homo sapien
cagacggctctggcattattcctaa

SEQ ID NO: 101769 - DNA, 25 bp, Homo sapien
acagacggctctggcattattccta

SEQ ID NO: 101770 - DNA, 25 bp, Homo sapien
tggataggcaaaggactgaaaactg

SEQ ID NO: 101771 - DNA, 25 bp, Homo sapien
gaccaaggattctacaataacgctg

SEQ ID NO: 101772 - DNA, 25 bp, Homo sapien
tataagtatgaacagggtcccaggc

SEQ ID NO: 101773 - DNA, 25 bp, Homo sapien
tatggacaggtatcatttagcaaca

SEQ ID NO: 101774 - DNA, 25 bp, Homo sapien
cctctgagtaggatagctttggaat

SEQ ID NO: 101775 - DNA, 25 bp, Homo sapien
tcctctgagtaggatagctttggaa

SEQ ID NO: 101776 - DNA, 25 bp, Homo sapien
cctagaaatagggaggagctatctc

SEQ ID NO: 101777 - DNA, 25 bp, Homo sapien
agaaaggtaagaagtgccctctcac

SEQ ID NO: 101778 - DNA, 25 bp, Homo sapien
caacatcgcactagaagtcctagct

SEQ ID NO: 101779 - DNA, 25 bp, Homo sapien
tacccctacgatcaagagaaaggta

SEQ ID NO: 101780 - DNA, 25 bp, Homo sapien
tttgatgctacttttcctgacttcc

SEQ ID NO: 101781 - DNA, 25 bp, Homo sapien
gttttgatgctacttttcctgactt

SEQ ID NO: 101782 - DNA, 25 bp, Homo sapien
caagttttgatgctacttttcctga

SEQ ID NO: 101783 - DNA, 25 bp, Homo sapien
aagttttgatgctacttttcctgac

SEQ ID NO: 101784 - DNA, 25 bp, Homo sapien
cagttgagtagccagttcctcattt

SEQ ID NO: 101785 - DNA, 25 bp, Homo sapien
tactaagggtatagttaaactgatc

SEQ ID NO: 101786 - DNA, 25 bp, Homo sapien
gttgagtgatggaaacaatgttctc

SEQ ID NO: 101787 - DNA, 25 bp, Homo sapien
tttgctcgctctgtcagagcttgtt

SEQ ID NO: 101788 - DNA, 25 bp, Homo sapien
ggccacttgggaggcctctctggca

SEQ ID NO: 101789 - DNA, 25 bp, Homo sapien
tttgaactttttcattggccacttg

SEQ ID NO: 101790 - DNA, 25 bp, Homo sapien
tctctggcatgttgaagttgtaatt

SEQ ID NO: 101791 - DNA, 25 bp, Homo sapien
ctctggcatgttgaagttgtaattc

SEQ ID NO: 101792 - DNA, 25 bp, Homo sapien
attattacaagatcatttaacttac

SEQ ID NO: 101793 - DNA, 25 bp, Homo sapien
gtattattacaagatcatttaactt

SEQ ID NO: 101794 - DNA, 25 bp, Homo sapien
tattattacaagatcatttaactta

SEQ ID NO: 101795 - DNA, 25 bp, Homo sapien
agtattattacaagatcatttaact

SEQ ID NO: 101796 - DNA, 25 bp, Homo sapien
ttctgtgtcgatcaacactgggagc

SEQ ID NO: 101797 - DNA, 25 bp, Homo sapien
ctgatctccctgcaaagtacatgaa

SEQ ID NO: 101798 - DNA, 25 bp, Homo sapien
tgccatgctgagataaccacttccc

SEQ ID NO: 101799 - DNA, 25 bp, Homo sapien
gcacttgattgcatcgcctattgaa

SEQ ID NO: 101800 - DNA, 25 bp, Homo sapien
tgtccaaaaccaagcacattcagta

SEQ ID NO: 101801 - DNA, 25 bp, Homo sapien
ctgtccaaaaccaagcacattcagt

SEQ ID NO: 101802 - DNA, 25 bp, Homo sapien
caagtctaatgagattgagcaatgt

SEQ ID NO: 101803 - DNA, 25 bp, Homo sapien
gatatgttacatcaagtctaatgag

SEQ ID NO: 101804 - DNA, 25 bp, Homo sapien
tacatcaagtctaatgagattgagc

SEQ ID NO: 101805 - DNA, 25 bp, Homo sapien
tcaagttaaacgatatgttacatca

SEQ ID NO: 101806 - DNA, 25 bp, Homo sapien
agtctgcgtttgaattgatgaaaag

SEQ ID NO: 101807 - DNA, 25 bp, Homo sapien
catctgcagctttagagtctgcgtt

SEQ ID NO: 101808 - DNA, 25 bp, Homo sapien
ttagagtctgcgtttgaattgatga

SEQ ID NO: 101809 - DNA, 25 bp, Homo sapien
gagtctgcgtttgaattgatgaaaa

SEQ ID NO: 101810 - DNA, 25 bp, Homo sapien
ctatgaaattcaaacgttttcagag

SEQ ID NO: 101811 - DNA, 25 bp, Homo sapien
gtacaaacaatttatactacacgat

SEQ ID NO: 101812 - DNA, 25 bp, Homo sapien
tactattcactggattcattattca

SEQ ID NO: 101813 - DNA, 25 bp, Homo sapien
gatgggagtttacacattacaatga

SEQ ID NO: 101814 - DNA, 25 bp, Homo sapien
gttttgaatgtgcaacaatctttct

SEQ ID NO: 101815 - DNA, 25 bp, Homo sapien
tgttttgaatgtgcaacaatctttc

SEQ ID NO: 101816 - DNA, 25 bp, Homo sapien
ctgttttgaatgtgcaacaatcttt

SEQ ID NO: 101817 - DNA, 25 bp, Homo sapien
tacatgcagctgtgttgctacagag

SEQ ID NO: 101818 - DNA, 25 bp, Homo sapien
tacagttaagactatctcagaggct

SEQ ID NO: 101819 - DNA, 25 bp, Homo sapien
tatgagcctgacagagaattaagct

SEQ ID NO: 101820 - DNA, 25 bp, Homo sapien
tctaacatcataagtcaaggcccta

SEQ ID NO: 101821 - DNA, 25 bp, Homo sapien
ttaaggctttgtaagttagatatct

SEQ ID NO: 101822 - DNA, 25 bp, Homo sapien
tagatatctagattgtcccctggat

SEQ ID NO: 101823 - DNA, 25 bp, Homo sapien
taattaaggctttgtaagttagata

SEQ ID NO: 101824 - DNA, 25 bp, Homo sapien
tgtaagttagatatctagattgtcc

SEQ ID NO: 101825 - DNA, 25 bp, Homo sapien
tactaccaacctaacaatgctgtgt

SEQ ID NO: 101826 - DNA, 25 bp, Homo sapien
tattatgccttgtatggctcacagc

SEQ ID NO: 101827 - DNA, 25 bp, Homo sapien
gcaaatatggtgtgtttgcagacca

SEQ ID NO: 101828 - DNA, 25 bp, Homo sapien
ggaccagctacagggtatcatccag

SEQ ID NO: 101829 - DNA, 25 bp, Homo sapien
cagagctagacactgaaggaatgag

SEQ ID NO: 101830 - DNA, 25 bp, Homo sapien
catgagggtcctctgcaaataaaca

SEQ ID NO: 101831 - DNA, 25 bp, Homo sapien
tacggtaagcggcacagtctagtct

SEQ ID NO: 101832 - DNA, 25 bp, Homo sapien
agtctagtctgcttcacagtttgcc

SEQ ID NO: 101833 - DNA, 25 bp, Homo sapien
ctcagtacatccaccagcctttcca

SEQ ID NO: 101834 - DNA, 25 bp, Homo sapien
tcagatcactgtcctcatggtcccg

SEQ ID NO: 101835 - DNA, 25 bp, Homo sapien
ccaaccttcttcctcagtacatcca

SEQ ID NO: 101836 - DNA, 25 bp, Homo sapien
ctcatggtcccggttccaaccttct

SEQ ID NO: 101837 - DNA, 25 bp, Homo sapien
tgttgaatgaagcagcctggtcacc

SEQ ID NO: 101838 - DNA, 25 bp, Homo sapien
agatgtgatcgcttccccagactgt

SEQ ID NO: 101839 - DNA, 25 bp, Homo sapien
tactttgccgcactttgattcagaa

SEQ ID NO: 101840 - DNA, 25 bp, Homo sapien
tacacgcattgaaggaagactacac

SEQ ID NO: 101841 - DNA, 25 bp, Homo sapien
tacacgtttcaaatagagcccagag

SEQ ID NO: 101842 - DNA, 25 bp, Homo sapien
tcttcacatagggagctgttacacg

SEQ ID NO: 101843 - DNA, 25 bp, Homo sapien
ggcaaattccaaggcttactgagtc

SEQ ID NO: 101844 - DNA, 25 bp, Homo sapien
gctcttctggaacgtatgctgctgg

SEQ ID NO: 101845 - DNA, 25 bp, Homo sapien
taaattctaagttcactccaggtga

SEQ ID NO: 101846 - DNA, 25 bp, Homo sapien
tattccaaaatgagtagaggtgctt

SEQ ID NO: 101847 - DNA, 25 bp, Homo sapien
tccaggtgatagagtgctacacagt

SEQ ID NO: 101848 - DNA, 25 bp, Homo sapien
tgacaaatcacaaaggtcatacgtg

SEQ ID NO: 101849 - DNA, 25 bp, Homo sapien
ggtaacaggtggatacacggatgta

SEQ ID NO: 101850 - DNA, 25 bp, Homo sapien
gaaacatgcagaaatcgacactaca

SEQ ID NO: 101851 - DNA, 25 bp, Homo sapien
aatctttaaagcagctagaggacac

SEQ ID NO: 101852 - DNA, 25 bp, Homo sapien
gactgcaaattcatggatccaagaa

SEQ ID NO: 101853 - DNA, 25 bp, Homo sapien
caaacatgaacgttaaaacagttat

SEQ ID NO: 101854 - DNA, 25 bp, Homo sapien
aacagttattacagcaatctcttct

SEQ ID NO: 101855 - DNA, 25 bp, Homo sapien
caggccaggaagttgcacagatgac

SEQ ID NO: 101856 - DNA, 25 bp, Homo sapien
tgtgggggacacattccaagaccct

SEQ ID NO: 101857 - DNA, 25 bp, Homo sapien
tcaccttaaggacatggaagcagct

SEQ ID NO: 101858 - DNA, 25 bp, Homo sapien
aaagtcctcatatgctttgtcacct

SEQ ID NO: 101859 - DNA, 25 bp, Homo sapien
aacagtccagggctatttgcacata

SEQ ID NO: 101860 - DNA, 25 bp, Homo sapien
tgttaatgtgaaaagttggatggct

SEQ ID NO: 101861 - DNA, 25 bp, Homo sapien
taacgcaaaactctggactgaaatg

SEQ ID NO: 101862 - DNA, 25 bp, Homo sapien
gatcaaactttctgttgtaccatga

SEQ ID NO: 101863 - DNA, 25 bp, Homo sapien
tactttaacgaaggctatttctctc

SEQ ID NO: 101864 - DNA, 25 bp, Homo sapien
caggttttagaatgtgggactccaa

SEQ ID NO: 101865 - DNA, 25 bp, Homo sapien
tcacttctcccattatcttgttcat

SEQ ID NO: 101866 - DNA, 25 bp, Homo sapien
cacttctcccattatcttgttcatc

SEQ ID NO: 101867 - DNA, 25 bp, Homo sapien
acttctcccattatcttgttcatct

SEQ ID NO: 101868 - DNA, 25 bp, Homo sapien
catgttgtgatttcattgggtaagg

SEQ ID NO: 101869 - DNA, 25 bp, Homo sapien
caaggacttccaaatagaactagaa

SEQ ID NO: 101870 - DNA, 25 bp, Homo sapien
ttctcatgactctatcatgttgtga

SEQ ID NO: 101871 - DNA, 25 bp, Homo sapien
cagtttattatccatacttctcatg

SEQ ID NO: 101872 - DNA, 25 bp, Homo sapien
gtagccatggttattttcagtgtgc

SEQ ID NO: 101873 - DNA, 25 bp, Homo sapien
cttgaaatccctccggtggtgggct

SEQ ID NO: 101874 - DNA, 25 bp, Homo sapien
tccttccatcaagctattagcatgg

SEQ ID NO: 101875 - DNA, 25 bp, Homo sapien
gggctattagtcaatttagtcagca

SEQ ID NO: 101876 - DNA, 25 bp, Homo sapien
tccataaggtcgtggatgagaagga

SEQ ID NO: 101877 - DNA, 25 bp, Homo sapien
gaacatttctactcctataccagtg

SEQ ID NO: 101878 - DNA, 25 bp, Homo sapien
gaagcaaacatacccaccaaacgat

SEQ ID NO: 101879 - DNA, 25 bp, Homo sapien
tataccagtgtatcctccataaggt

SEQ ID NO: 101880 - DNA, 25 bp, Homo sapien
caatgaatatttaccctaggatggg

SEQ ID NO: 101881 - DNA, 25 bp, Homo sapien
tcaaataagaggtttgtaccactcc

SEQ ID NO: 101882 - DNA, 25 bp, Homo sapien
gttgattcacttaacagcctcttag

SEQ ID NO: 101883 - DNA, 25 bp, Homo sapien
tacagcaacagttgcatttaactct

SEQ ID NO: 101884 - DNA, 25 bp, Homo sapien
agtagtgtagtagccaacgttcaac

SEQ ID NO: 101885 - DNA, 25 bp, Homo sapien
gaaagagtagtgtagtagccaacgt

SEQ ID NO: 101886 - DNA, 25 bp, Homo sapien
aagagtagtgtagtagccaacgttc

SEQ ID NO: 101887 - DNA, 25 bp, Homo sapien
acagaaagagtagtgtagtagccaa

SEQ ID NO: 101888 - DNA, 25 bp, Homo sapien
atatattaatggggcggataacccg

SEQ ID NO: 101889 - DNA, 25 bp, Homo sapien
tgagccgtattgtagcgcagggcct

SEQ ID NO: 101890 - DNA, 25 bp, Homo sapien
ggagtcacaccgccttctgctgaca

SEQ ID NO: 101891 - DNA, 25 bp, Homo sapien
gcctcgtccaggtttcctcgcctct

SEQ ID NO: 101892 - DNA, 25 bp, Homo sapien
tcatgagctcaagccgcaatgagcc

SEQ ID NO: 101893 - DNA, 25 bp, Homo sapien
cctgggcgccaactaccgctgcgtc

SEQ ID NO: 101894 - DNA, 25 bp, Homo sapien
taccgctgcgtcctccgccgctttt

SEQ ID NO: 101895 - DNA, 25 bp, Homo sapien
gtcctccgccgcttttcgcaggtgg

SEQ ID NO: 101896 - DNA, 25 bp, Homo sapien
aactaccgctgcgtcctccgccgct

SEQ ID NO: 101897 - DNA, 25 bp, Homo sapien
tgcttgcctgctcatatcccgggtc

SEQ ID NO: 101898 - DNA, 25 bp, Homo sapien
aaaagactttaaggagctctgcggc

SEQ ID NO: 101899 - DNA, 25 bp, Homo sapien
tagtcccgtgctcctggaaagcgga

SEQ ID NO: 101900 - DNA, 25 bp, Homo sapien
tattggaacgttcccctagctctgg

SEQ ID NO: 101901 - DNA, 25 bp, Homo sapien
tgcagtcccgggaaataaggagccc

SEQ ID NO: 101902 - DNA, 25 bp, Homo sapien
gtgctcgaatacatcagaatccagg

SEQ ID NO: 101903 - DNA, 25 bp, Homo sapien
ggtcaagtcactggcgaaatcaaga

SEQ ID NO: 101904 - DNA, 25 bp, Homo sapien
tccaggtggaatgcgggtcaagtca

SEQ ID NO: 101905 - DNA, 25 bp, Homo sapien
tttcatgcacgatgttagtgtatcc

SEQ ID NO: 101906 - DNA, 25 bp, Homo sapien
cccagcatggttctttgaactttgg

SEQ ID NO: 101907 - DNA, 25 bp, Homo sapien
tctggggctggaaaatacccatgcc

SEQ ID NO: 101908 - DNA, 25 bp, Homo sapien
tgaactttggccagctaggactgca

SEQ ID NO: 101909 - DNA, 25 bp, Homo sapien
caaacaagatcctagtaaagctccc

SEQ ID NO: 101910 - DNA, 25 bp, Homo sapien
tgaacgagccataacagaaaagaag

SEQ ID NO: 101911 - DNA, 25 bp, Homo sapien
tcaccttgcatttaggaagggcagg

SEQ ID NO: 101912 - DNA, 25 bp, Homo sapien
cacaggtgttcggaagtagaaggca

SEQ ID NO: 101913 - DNA, 25 bp, Homo sapien
tgggcttctcgcagttctcagaccg

SEQ ID NO: 101914 - DNA, 25 bp, Homo sapien
ggcactttggagacctgcctcggga

SEQ ID NO: 101915 - DNA, 25 bp, Homo sapien
ggacagcaagcgtctcgaggtgaca

SEQ ID NO: 101916 - DNA, 25 bp, Homo sapien
taagttggccttagctctcgctctg

SEQ ID NO: 101917 - DNA, 25 bp, Homo sapien
gacaggacattttagggtagccgct

SEQ ID NO: 101918 - DNA, 25 bp, Homo sapien
gagaaacgaaacttagccatcaggg

SEQ ID NO: 101919 - DNA, 25 bp, Homo sapien
gggaagcgttgtaccgacaggacat

SEQ ID NO: 101920 - DNA, 25 bp, Homo sapien
tgtccaacggagactcatgaactct

SEQ ID NO: 101921 - DNA, 25 bp, Homo sapien
tcttgctttgcagagtgccatggtc

SEQ ID NO: 101922 - DNA, 25 bp, Homo sapien
gaaacaagtatacactagaggctct

SEQ ID NO: 101923 - DNA, 25 bp, Homo sapien
catggtgttagtatagccagacggg

SEQ ID NO: 101924 - DNA, 25 bp, Homo sapien
caagagttgcttgaccgaaagttac

SEQ ID NO: 101925 - DNA, 25 bp, Homo sapien
cctgcgaagtttaatgatccacaag

SEQ ID NO: 101926 - DNA, 25 bp, Homo sapien
gagccggcgtactaccaaggtgtgt

SEQ ID NO: 101927 - DNA, 25 bp, Homo sapien
gcactgcaatactcgccttacggct

SEQ ID NO: 101928 - DNA, 25 bp, Homo sapien
gacttcaaggcatacgaacaggcac

SEQ ID NO: 101929 - DNA, 25 bp, Homo sapien
cggactccggcaacatgttcgagaa

SEQ ID NO: 101930 - DNA, 25 bp, Homo sapien
gactgcttcgtcaaggtggcacgct

SEQ ID NO: 101931 - DNA, 25 bp, Homo sapien
ttcgagaacggctgctacttgcgcc

SEQ ID NO: 101932 - DNA, 25 bp, Homo sapien
cgctgagcgagatctaccagtggat

SEQ ID NO: 101933 - DNA, 25 bp, Homo sapien
cgggtcggcctaacgtcacttggct

SEQ ID NO: 101934 - DNA, 25 bp, Homo sapien
tcttagccgcaggtacgagtttcgt

SEQ ID NO: 101935 - DNA, 25 bp, Homo sapien
ggctgactcagatgacccggtttct

SEQ ID NO: 101936 - DNA, 25 bp, Homo sapien
gacccggtttctagtgacgaagcaa

SEQ ID NO: 101937 - DNA, 25 bp, Homo sapien
ctgaaagaccgtgggaaagctcctg

SEQ ID NO: 101938 - DNA, 25 bp, Homo sapien
tagccaaagctaaaccaccagggac

SEQ ID NO: 101939 - DNA, 25 bp, Homo sapien
caagtctgtggcacgcagtaggacc

SEQ ID NO: 101940 - DNA, 25 bp, Homo sapien
gcctgggacggagaagctaaacact

SEQ ID NO: 101941 - DNA, 25 bp, Homo sapien
agatggcatacaggaaagggttttc

SEQ ID NO: 101942 - DNA, 25 bp, Homo sapien
ctcacttccatgaatccttgttcct

SEQ ID NO: 101943 - DNA, 25 bp, Homo sapien
ttccatgaatccttgttcctctcct

SEQ ID NO: 101944 - DNA, 25 bp, Homo sapien
cttccatgaatccttgttcctctcc

SEQ ID NO: 101945 - DNA, 25 bp, Homo sapien
catgaatccttgttcctctcctcat

SEQ ID NO: 101946 - DNA, 25 bp, Homo sapien
gctcggcgagtgtccaacaggcctt

SEQ ID NO: 101947 - DNA, 25 bp, Homo sapien
atcgagggcgcctccgctccaattc

SEQ ID NO: 101948 - DNA, 25 bp, Homo sapien
cgccgctcggcgagtgtccaacagg

SEQ ID NO: 101949 - DNA, 25 bp, Homo sapien
tggcggtgagcttggccccgccgct

SEQ ID NO: 101950 - DNA, 25 bp, Homo sapien
ctttcatctacagccggcttggagg

SEQ ID NO: 101951 - DNA, 25 bp, Homo sapien
tcgggattgtggacatcttgacaaa

SEQ ID NO: 101952 - DNA, 25 bp, Homo sapien
cttctgcttgaatcggagaaaatcc

SEQ ID NO: 101953 - DNA, 25 bp, Homo sapien
tttcaggccaaagtgtctcgggatt

SEQ ID NO: 101954 - DNA, 25 bp, Homo sapien
ttaagcgaagggtatcttctcgacg

SEQ ID NO: 101955 - DNA, 25 bp, Homo sapien
cctttaagcgaagggtatcttctcg

SEQ ID NO: 101956 - DNA, 25 bp, Homo sapien
cgcagggcctttaagcgaagggtat

SEQ ID NO: 101957 - DNA, 25 bp, Homo sapien
cgaagggtatcttctcgacgtccgg

SEQ ID NO: 101958 - DNA, 25 bp, Homo sapien
tcacgaagttgctgcggatcctcac

SEQ ID NO: 101959 - DNA, 25 bp, Homo sapien
gaaacgaccgggtcttgcctggagc

SEQ ID NO: 101960 - DNA, 25 bp, Homo sapien
tccatgtagccgtcctctgcggaga

SEQ ID NO: 101961 - DNA, 25 bp, Homo sapien
cggagctccgcaagtaaaagtcccg

SEQ ID NO: 101962 - DNA, 25 bp, Homo sapien
tctggccaaggacgctccgtatgag

SEQ ID NO: 101963 - DNA, 25 bp, Homo sapien
cattgtaatgtcgtagttctggcca

SEQ ID NO: 101964 - DNA, 25 bp, Homo sapien
tctttgatggtctggtcggaggcca

SEQ ID NO: 101965 - DNA, 25 bp, Homo sapien
ggacgctccgtatgagctctttgat

SEQ ID NO: 101966 - DNA, 25 bp, Homo sapien
catgtaaagtgtgtcccatagagtt

SEQ ID NO: 101967 - DNA, 25 bp, Homo sapien
tatctattgacctgatagggttgtc

SEQ ID NO: 101968 - DNA, 25 bp, Homo sapien
aatctctatgattgggaagacatag

SEQ ID NO: 101969 - DNA, 25 bp, Homo sapien
gtttggcacacaagaagcacttaca

SEQ ID NO: 101970 - DNA, 25 bp, Homo sapien
cttaactatgtcgtagagcatggag

SEQ ID NO: 101971 - DNA, 25 bp, Homo sapien
ctttgctaaggctcttcattgggca

SEQ ID NO: 101972 - DNA, 25 bp, Homo sapien
taaggctcttcattgggcatccctg

SEQ ID NO: 101973 - DNA, 25 bp, Homo sapien
catggagcctatgtcagaagtaggg

SEQ ID NO: 101974 - DNA, 25 bp, Homo sapien
tatattagaaatacaggctccccat

SEQ ID NO: 101975 - DNA, 25 bp, Homo sapien
tccccgaggcaaacataagcttaag

SEQ ID NO: 101976 - DNA, 25 bp, Homo sapien
gagtggcgccataggtttttccgca

SEQ ID NO: 101977 - DNA, 25 bp, Homo sapien
tcccaaagtccctagatgagctgtc

SEQ ID NO: 101978 - DNA, 25 bp, Homo sapien
gatcatagcaatcctgtagccctcc

SEQ ID NO: 101979 - DNA, 25 bp, Homo sapien
tgatgatgagtatgctgattaacag

SEQ ID NO: 101980 - DNA, 25 bp, Homo sapien
tgctgattaacagctggccatgtga

SEQ ID NO: 101981 - DNA, 25 bp, Homo sapien
acatccaaagcattggctcttcctc

SEQ ID NO: 101982 - DNA, 25 bp, Homo sapien
gcataaagttacagacaagagcctc

SEQ ID NO: 101983 - DNA, 25 bp, Homo sapien
tacccacatagaccactgagggccc

SEQ ID NO: 101984 - DNA, 25 bp, Homo sapien
caggtaaaaggcactaccgcagagc

SEQ ID NO: 101985 - DNA, 25 bp, Homo sapien
gcctctttccggctttcgggcttca

SEQ ID NO: 101986 - DNA, 25 bp, Homo sapien
ttattcttgtgaccgactattataa

SEQ ID NO: 101987 - DNA, 25 bp, Homo sapien
tataatgcatgtagtatgttgccag

SEQ ID NO: 101988 - DNA, 25 bp, Homo sapien
tgcatgtagtatgttgccagtgtat

SEQ ID NO: 101989 - DNA, 25 bp, Homo sapien
tgtgaccgactattataatgcatgt

SEQ ID NO: 101990 - DNA, 25 bp, Homo sapien
atttggcatttaggttgttatacat

SEQ ID NO: 101991 - DNA, 25 bp, Homo sapien
taggttgttatacatttaggctact

SEQ ID NO: 101992 - DNA, 25 bp, Homo sapien
tacaactgcgcaatcgcgactcact

SEQ ID NO: 101993 - DNA, 25 bp, Homo sapien
gggctaccggtatgcgccactacgc

SEQ ID NO: 101994 - DNA, 25 bp, Homo sapien
aatagagttacatgggctatgctga

SEQ ID NO: 101995 - DNA, 25 bp, Homo sapien
gtttggcctataagctaagaacagt

SEQ ID NO: 101996 - DNA, 25 bp, Homo sapien
ttaggcctaagaattaagcaaccac

SEQ ID NO: 101997 - DNA, 25 bp, Homo sapien
tcctgcaaggtcagacaaaaatgtt

SEQ ID NO: 101998 - DNA, 25 bp, Homo sapien
catttgcgattcctcagcacccatc

SEQ ID NO: 101999 - DNA, 25 bp, Homo sapien
aggtgatgttttgaggtacattttt

SEQ ID NO: 102000 - DNA, 25 bp, Homo sapien
gtgatgttttgaggtacatttttcc

SEQ ID NO: 102001 - DNA, 25 bp, Homo sapien
gatgttttgaggtacatttttccca

SEQ ID NO: 102002 - DNA, 25 bp, Homo sapien
ggtttcagaaagttccttatgcacg

SEQ ID NO: 102003 - DNA, 25 bp, Homo sapien
tttcagaaagttccttatgcacgct

SEQ ID NO: 102004 - DNA, 25 bp, Homo sapien
gtttcagaaagttccttatgcacgc

SEQ ID NO: 102005 - DNA, 25 bp, Homo sapien
tgaatcacttgtgggctgtccatct

SEQ ID NO: 102006 - DNA, 25 bp, Homo sapien
tctgagggtccccattctatatcct

SEQ ID NO: 102007 - DNA, 25 bp, Homo sapien
ctatatcctcttgttcaatctggag

SEQ ID NO: 102008 - DNA, 25 bp, Homo sapien
tcctctgctggctgaacttgcgaaa

SEQ ID NO: 102009 - DNA, 25 bp, Homo sapien
gcttgagtagaattggtgttagtgc

SEQ ID NO: 102010 - DNA, 25 bp, Homo sapien
gtagaattggtgttagtgctttcaa

SEQ ID NO: 102011 - DNA, 25 bp, Homo sapien
aattggtgttagtgctttcaattca

SEQ ID NO: 102012 - DNA, 25 bp, Homo sapien
gatttgatcttgttacctgttatgg

SEQ ID NO: 102013 - DNA, 25 bp, Homo sapien
tccgcattcgcttaatttcttttcc

SEQ ID NO: 102014 - DNA, 25 bp, Homo sapien
tggtctcagtgatttacgtttccgc

SEQ ID NO: 102015 - DNA, 25 bp, Homo sapien
tttccttcgatttgcaagaattctg

SEQ ID NO: 102016 - DNA, 25 bp, Homo sapien
tcttttccttcgatttgcaagaatt

SEQ ID NO: 102017 - DNA, 25 bp, Homo sapien
tccaaattttccaagcagggtatcg

SEQ ID NO: 102018 - DNA, 25 bp, Homo sapien
aagccaggcgcaagtcaacaggcag

SEQ ID NO: 102019 - DNA, 25 bp, Homo sapien
gtgtgatacactcgagaagccaggc

SEQ ID NO: 102020 - DNA, 25 bp, Homo sapien
cacagatcatgaaggtgcggcatgg

SEQ ID NO: 102021 - DNA, 25 bp, Homo sapien
gtgaagacagtctccaaactacaaa

SEQ ID NO: 102022 - DNA, 25 bp, Homo sapien
caatatttttaacgatcacagagag

SEQ ID NO: 102023 - DNA, 25 bp, Homo sapien
taccatatagaaaacccgataggaa

SEQ ID NO: 102024 - DNA, 25 bp, Homo sapien
tttgggtagccagaaataacttgtc

SEQ ID NO: 102025 - DNA, 25 bp, Homo sapien
tcccttgcggtgtcggaggaatatg

SEQ ID NO: 102026 - DNA, 25 bp, Homo sapien
gttccttgtgccaattcaggtggta

SEQ ID NO: 102027 - DNA, 25 bp, Homo sapien
ggttgtcatccataacaggaattcc

SEQ ID NO: 102028 - DNA, 25 bp, Homo sapien
tgagcacgctctctagttccttgtg

SEQ ID NO: 102029 - DNA, 25 bp, Homo sapien
gaaatctcacctccctttatgtctc

SEQ ID NO: 102030 - DNA, 25 bp, Homo sapien
ctgagggtattattttactagttca

SEQ ID NO: 102031 - DNA, 25 bp, Homo sapien
tatagcttaccacaattgactgagg

SEQ ID NO: 102032 - DNA, 25 bp, Homo sapien
tactagttcaagtgatacgtagaaa

SEQ ID NO: 102033 - DNA, 25 bp, Homo sapien
aaattctgcttagctatgtcccaca

SEQ ID NO: 102034 - DNA, 25 bp, Homo sapien
gattatttatagctgtactgtttag

SEQ ID NO: 102035 - DNA, 25 bp, Homo sapien
caactggaacctactggttgatgag

SEQ ID NO: 102036 - DNA, 25 bp, Homo sapien
ggtatatgtttcatggcatctgaaa

SEQ ID NO: 102037 - DNA, 25 bp, Homo sapien
ggttgtatgcatgcctggacagaca

SEQ ID NO: 102038 - DNA, 25 bp, Homo sapien
aggtaagcgcccaggcatgcaattg

SEQ ID NO: 102039 - DNA, 25 bp, Homo sapien
caaaatattttctccgagtcggtgg

SEQ ID NO: 102040 - DNA, 25 bp, Homo sapien
tattaattctttgccggatacgtgt

SEQ ID NO: 102041 - DNA, 25 bp, Homo sapien
tgcttcagtgttcatagctcatggg

SEQ ID NO: 102042 - DNA, 25 bp, Homo sapien
ttcatagctcatgggtaaggaggct

SEQ ID NO: 102043 - DNA, 25 bp, Homo sapien
aggctgcagtttactctggcaatgg

SEQ ID NO: 102044 - DNA, 25 bp, Homo sapien
ggcaatgggtacactgtgagaagcc

SEQ ID NO: 102045 - DNA, 25 bp, Homo sapien
tccaaaacaacttcgtgaattctgg

SEQ ID NO: 102046 - DNA, 25 bp, Homo sapien
tcgtgaattctggataagcatacat

SEQ ID NO: 102047 - DNA, 25 bp, Homo sapien
ttaggtgcagctgtattccaaaaca

SEQ ID NO: 102048 - DNA, 25 bp, Homo sapien
ttctggaacagagaatttaggtgca

SEQ ID NO: 102049 - DNA, 25 bp, Homo sapien
gagcaatgcaccatatagtctctca

SEQ ID NO: 102050 - DNA, 25 bp, Homo sapien
catgcccggctaacacatggaaaaa

SEQ ID NO: 102051 - DNA, 25 bp, Homo sapien
tgagcacctactacttatcgagcaa

SEQ ID NO: 102052 - DNA, 25 bp, Homo sapien
taaagtctttatgagatcaaatgaa

SEQ ID NO: 102053 - DNA, 25 bp, Homo sapien
tgaagtaattgtaatagcccttgcc

SEQ ID NO: 102054 - DNA, 25 bp, Homo sapien
ttctgaagtaattgtaatagccctt

SEQ ID NO: 102055 - DNA, 25 bp, Homo sapien
cactagtgtgatttctgaagtaatt

SEQ ID NO: 102056 - DNA, 25 bp, Homo sapien
agtaattgtaatagcccttgccact

SEQ ID NO: 102057 - DNA, 25 bp, Homo sapien
atgacataaatgacaatgaaaatgt

SEQ ID NO: 102058 - DNA, 25 bp, Homo sapien
ctgcatgacataaatgacaatgaaa

SEQ ID NO: 102059 - DNA, 25 bp, Homo sapien
gcatgacataaatgacaatgaaaat

SEQ ID NO: 102060 - DNA, 25 bp, Homo sapien
tgcatgacataaatgacaatgaaaa

SEQ ID NO: 102061 - DNA, 25 bp, Homo sapien
cttcaactccctacattcacacttt

SEQ ID NO: 102062 - DNA, 25 bp, Homo sapien
ttcaactccctacattcacactttc

SEQ ID NO: 102063 - DNA, 25 bp, Homo sapien
atttatcagttaaaagtctgcttgc

SEQ ID NO: 102064 - DNA, 25 bp, Homo sapien
ttaaaagtctgcttgcttgaacact

SEQ ID NO: 102065 - DNA, 25 bp, Homo sapien
aatttgttctgctatgttgatgtaa

SEQ ID NO: 102066 - DNA, 25 bp, Homo sapien
taatgacactgcttttatatgacaa

SEQ ID NO: 102067 - DNA, 25 bp, Homo sapien
gtttctccatttagtcaaagactca

SEQ ID NO: 102068 - DNA, 25 bp, Homo sapien
gtcaaagactcataaacatgttcct

SEQ ID NO: 102069 - DNA, 25 bp, Homo sapien
ctgcttcatggccacagtttctcca

SEQ ID NO: 102070 - DNA, 25 bp, Homo sapien
aacatgttcctttgatattgaagac

SEQ ID NO: 102071 - DNA, 25 bp, Homo sapien
tgtgtaggttgtgcactaaaccatt

SEQ ID NO: 102072 - DNA, 25 bp, Homo sapien
taggttgtgcactaaaccatttttg

SEQ ID NO: 102073 - DNA, 25 bp, Homo sapien
ccttagttgtgtaggttgtgcacta

SEQ ID NO: 102074 - DNA, 25 bp, Homo sapien
tgtgcactaaaccatttttggatac

SEQ ID NO: 102075 - DNA, 25 bp, Homo sapien
ttctttcacatagttgggctcctca

SEQ ID NO: 102076 - DNA, 25 bp, Homo sapien
gaaacataacctcttttatactgct

SEQ ID NO: 102077 - DNA, 25 bp, Homo sapien
gcatatcattcttgatttccaaagg

SEQ ID NO: 102078 - DNA, 25 bp, Homo sapien
tatcaaagatgtcatctatactttc

SEQ ID NO: 102079 - DNA, 25 bp, Homo sapien
tggaggcttggataactcttcatgc

SEQ ID NO: 102080 - DNA, 25 bp, Homo sapien
taatgccagcttttttagacgcttc

SEQ ID NO: 102081 - DNA, 25 bp, Homo sapien
cttcatgcacgaatataagtttttg

SEQ ID NO: 102082 - DNA, 25 bp, Homo sapien
tgggataaacaatgtaactaatgcc

SEQ ID NO: 102083 - DNA, 25 bp, Homo sapien
tgcaccgggcccaaaattatctaga

SEQ ID NO: 102084 - DNA, 25 bp, Homo sapien
ctgcaccgggcccaaaattatctag

SEQ ID NO: 102085 - DNA, 25 bp, Homo sapien
gcaccgggcccaaaattatctagat

SEQ ID NO: 102086 - DNA, 25 bp, Homo sapien
caccgggcccaaaattatctagatt

SEQ ID NO: 102087 - DNA, 25 bp, Homo sapien
gcagaccgtggatgaacttttatga

SEQ ID NO: 102088 - DNA, 25 bp, Homo sapien
tgtgacttatttctcaatggtagca

SEQ ID NO: 102089 - DNA, 25 bp, Homo sapien
gactggctgtttacatctaccccaa

SEQ ID NO: 102090 - DNA, 25 bp, Homo sapien
gaattatagtcccagatcactgaaa

SEQ ID NO: 102091 - DNA, 25 bp, Homo sapien
ccggaagtattccatgagatgctga

SEQ ID NO: 102092 - DNA, 25 bp, Homo sapien
tatcaagagcccatgtccgaggatc

SEQ ID NO: 102093 - DNA, 25 bp, Homo sapien
tcccttagcttggacgaatttttca

SEQ ID NO: 102094 - DNA, 25 bp, Homo sapien
actgggacaccgtatttgacgttca

SEQ ID NO: 102095 - DNA, 25 bp, Homo sapien
aatatttaatgacctcttgtggaag

SEQ ID NO: 102096 - DNA, 25 bp, Homo sapien
ttcagtcaaaatcttcacttcagat

SEQ ID NO: 102097 - DNA, 25 bp, Homo sapien
ggtatgctcgcatctttgtactcaa

SEQ ID NO: 102098 - DNA, 25 bp, Homo sapien
tctttctcttttacaggtatgctcg

SEQ ID NO: 102099 - DNA, 25 bp, Homo sapien
ggcactctgcaactttcccagtttc

SEQ ID NO: 102100 - DNA, 25 bp, Homo sapien
cactctgcaactttcccagtttcct

SEQ ID NO: 102101 - DNA, 25 bp, Homo sapien
cagtttcctataaatagctccacgc

SEQ ID NO: 102102 - DNA, 25 bp, Homo sapien
ctgcagatcattcatggcactctgc

SEQ ID NO: 102103 - DNA, 25 bp, Homo sapien
gtatagtttagaattgccaaagtta

SEQ ID NO: 102104 - DNA, 25 bp, Homo sapien
ctgggtatagtttagaattgccaaa

SEQ ID NO: 102105 - DNA, 25 bp, Homo sapien
tgggtatagtttagaattgccaaag

SEQ ID NO: 102106 - DNA, 25 bp, Homo sapien
tagtttagaattgccaaagttatgt

SEQ ID NO: 102107 - DNA, 25 bp, Homo sapien
ccagtactttgtttgttatttcata

SEQ ID NO: 102108 - DNA, 25 bp, Homo sapien
catctgtgggcgtggatttaattgc

SEQ ID NO: 102109 - DNA, 25 bp, Homo sapien
tcacccctcctgaaatagatatcag

SEQ ID NO: 102110 - DNA, 25 bp, Homo sapien
tttcgaaaagtcatcaatggccagt

SEQ ID NO: 102111 - DNA, 25 bp, Homo sapien
tgcagtaaggaataacaatttggag

SEQ ID NO: 102112 - DNA, 25 bp, Homo sapien
tattttgccttgactacggttcagt

SEQ ID NO: 102113 - DNA, 25 bp, Homo sapien
tgactacggttcagttaaaagttca

SEQ ID NO: 102114 - DNA, 25 bp, Homo sapien
agttagaattgtactgcaatcaggg

SEQ ID NO: 102115 - DNA, 25 bp, Homo sapien
aaaatcctctatggctgcaaaccag

SEQ ID NO: 102116 - DNA, 25 bp, Homo sapien
gcttgagaattttggtgatctatat

SEQ ID NO: 102117 - DNA, 25 bp, Homo sapien
acagcccacgtttcaataatgcatc

SEQ ID NO: 102118 - DNA, 25 bp, Homo sapien
tatatttaacaaggctgtaaaatcc

SEQ ID NO: 102119 - DNA, 25 bp, Homo sapien
cggcacactacgaggttatatccca

SEQ ID NO: 102120 - DNA, 25 bp, Homo sapien
tacgaggttatatcccacacgtggc

SEQ ID NO: 102121 - DNA, 25 bp, Homo sapien
tggaaaatccgttcgctcccacctg

SEQ ID NO: 102122 - DNA, 25 bp, Homo sapien
acactacgaggttatatcccacacg

SEQ ID NO: 102123 - DNA, 25 bp, Homo sapien
tttacacacgtgcaaatcaataaat

SEQ ID NO: 102124 - DNA, 25 bp, Homo sapien
atgtcaaaacctgtgagagacaaac

SEQ ID NO: 102125 - DNA, 25 bp, Homo sapien
cctgagatgcaaggttgtttacaca

SEQ ID NO: 102126 - DNA, 25 bp, Homo sapien
tcaaaacctgtgagagacaaacaca

SEQ ID NO: 102127 - DNA, 25 bp, Homo sapien
tctgaataagcaacctcgataatac

SEQ ID NO: 102128 - DNA, 25 bp, Homo sapien
tgtagcgctctaaaagggttactct

SEQ ID NO: 102129 - DNA, 25 bp, Homo sapien
tgaaacactataatcctgtagcgct

SEQ ID NO: 102130 - DNA, 25 bp, Homo sapien
aacatatgcaatccctcggtatgtc

SEQ ID NO: 102131 - DNA, 25 bp, Homo sapien
taacaggtttgtgttgatgttacac

SEQ ID NO: 102132 - DNA, 25 bp, Homo sapien
tcagtaacagattagtagacataac

SEQ ID NO: 102133 - DNA, 25 bp, Homo sapien
tgatgttacactggggaatgaagga

SEQ ID NO: 102134 - DNA, 25 bp, Homo sapien
gattagtagacataacaggtttgtg

SEQ ID NO: 102135 - DNA, 25 bp, Homo sapien
ccgatgtagaaaacaaccaagattc

SEQ ID NO: 102136 - DNA, 25 bp, Homo sapien
gtgcatagactattccccgatgtag

SEQ ID NO: 102137 - DNA, 25 bp, Homo sapien
gccaaagttttagatgtgcatagac

SEQ ID NO: 102138 - DNA, 25 bp, Homo sapien
caaattgccagcagccaaagtttta

SEQ ID NO: 102139 - DNA, 25 bp, Homo sapien
aaaggatcaattctaatagcctcag

SEQ ID NO: 102140 - DNA, 25 bp, Homo sapien
aggtttccgcccgacaaagatagct

SEQ ID NO: 102141 - DNA, 25 bp, Homo sapien
aatagcttccgtgtagttatccagg

SEQ ID NO: 102142 - DNA, 25 bp, Homo sapien
gttatccaggtgtagcagatgtatg

SEQ ID NO: 102143 - DNA, 25 bp, Homo sapien
gctgaaggtggatagcacgagacaa

SEQ ID NO: 102144 - DNA, 25 bp, Homo sapien
agcacgagacaattcatttactgcc

SEQ ID NO: 102145 - DNA, 25 bp, Homo sapien
ggtggatagcacgagacaattcatt

SEQ ID NO: 102146 - DNA, 25 bp, Homo sapien
ttcttatgtataattggattccatc

SEQ ID NO: 102147 - DNA, 25 bp, Homo sapien
atagtaaactttgcaagatcataat

SEQ ID NO: 102148 - DNA, 25 bp, Homo sapien
aatagtaaactttgcaagatcataa

SEQ ID NO: 102149 - DNA, 25 bp, Homo sapien
tagtaaactttgcaagatcataata

SEQ ID NO: 102150 - DNA, 25 bp, Homo sapien
gctaatagagcacacatggtcatct

SEQ ID NO: 102151 - DNA, 25 bp, Homo sapien
tgctgcataggactcaactcactga

SEQ ID NO: 102152 - DNA, 25 bp, Homo sapien
cttggttctcttggccttcatttga

SEQ ID NO: 102153 - DNA, 25 bp, Homo sapien
gattccgtccaagacctcaatggcc

SEQ ID NO: 102154 - DNA, 25 bp, Homo sapien
tcattactttttatgctgcataata

SEQ ID NO: 102155 - DNA, 25 bp, Homo sapien
ctcattactttttatgctgcataat

SEQ ID NO: 102156 - DNA, 25 bp, Homo sapien
gctctgtctccccgcaccctttttc

SEQ ID NO: 102157 - DNA, 25 bp, Homo sapien
ttataacatgcagggcttggttttc

SEQ ID NO: 102158 - DNA, 25 bp, Homo sapien
tgctctgtctccccgcacccttttt

SEQ ID NO: 102159 - DNA, 25 bp, Homo sapien
atgctctgtctccccgcaccctttt

SEQ ID NO: 102160 - DNA, 25 bp, Homo sapien
cttcctccatgtaacaaagacccaa

SEQ ID NO: 102161 - DNA, 25 bp, Homo sapien
atccaaagccttcttaagcacttcc

SEQ ID NO: 102162 - DNA, 25 bp, Homo sapien
aaagccttcttaagcacttccacag

SEQ ID NO: 102163 - DNA, 25 bp, Homo sapien
cccaagttatacagacagtctgctg

SEQ ID NO: 102164 - DNA, 25 bp, Homo sapien
gggtaattgcacgattaaaatccag

SEQ ID NO: 102165 - DNA, 25 bp, Homo sapien
tgtggagtttcactttacaaagccc

SEQ ID NO: 102166 - DNA, 25 bp, Homo sapien
cagaatcgagctatccttgtggagt

SEQ ID NO: 102167 - DNA, 25 bp, Homo sapien
aatgttttggattgagggtaattgc

SEQ ID NO: 102168 - DNA, 25 bp, Homo sapien
tttaaaccatagaatgctactcggc

SEQ ID NO: 102169 - DNA, 25 bp, Homo sapien
cagaactcctctgtagagataggca

SEQ ID NO: 102170 - DNA, 25 bp, Homo sapien
tttaatagccttgttacaattcaag

SEQ ID NO: 102171 - DNA, 25 bp, Homo sapien
taggcacgtacgctttcagggtaaa

SEQ ID NO: 102172 - DNA, 25 bp, Homo sapien
aatctgtaattgctagcttataagt

SEQ ID NO: 102173 - DNA, 25 bp, Homo sapien
gctgatagctgtagttaaatctgta

SEQ ID NO: 102174 - DNA, 25 bp, Homo sapien
aaatctgtaattgctagcttataag

SEQ ID NO: 102175 - DNA, 25 bp, Homo sapien
tcttggtgtaacataatgctctgtt

SEQ ID NO: 102176 - DNA, 25 bp, Homo sapien
atttgaagttcccttatcttggtgt

SEQ ID NO: 102177 - DNA, 25 bp, Homo sapien
taaaatgctgtataactatttttgt

SEQ ID NO: 102178 - DNA, 25 bp, Homo sapien
cccttatcttggtgtaacataatgc

SEQ ID NO: 102179 - DNA, 25 bp, Homo sapien
ctctagtgcaaagccatactggcct

SEQ ID NO: 102180 - DNA, 25 bp, Homo sapien
tgagtccacgattaaggaaggtatt

SEQ ID NO: 102181 - DNA, 25 bp, Homo sapien
gccatactggcctagttctacgtag

SEQ ID NO: 102182 - DNA, 25 bp, Homo sapien
tagcatcaagaagcagcacaattcc

SEQ ID NO: 102183 - DNA, 25 bp, Homo sapien
taatgttacgttgcagttcctcaga

SEQ ID NO: 102184 - DNA, 25 bp, Homo sapien
gaaagttaccactaaacagcagagt

SEQ ID NO: 102185 - DNA, 25 bp, Homo sapien
gaacaggatgcactccactccataa

SEQ ID NO: 102186 - DNA, 25 bp, Homo sapien
tgtctgtactcccttaagagaagtg

SEQ ID NO: 102187 - DNA, 25 bp, Homo sapien
catggcagtggcgtgacaaaggctc

SEQ ID NO: 102188 - DNA, 25 bp, Homo sapien
tggcgtgacaaaggctcccgttagt

SEQ ID NO: 102189 - DNA, 25 bp, Homo sapien
ggcttatcagtgcagcttgtttaaa

SEQ ID NO: 102190 - DNA, 25 bp, Homo sapien
aggctcccgttagtccggcttatca

SEQ ID NO: 102191 - DNA, 25 bp, Homo sapien
tctgatggtcctgcttgattccact

SEQ ID NO: 102192 - DNA, 25 bp, Homo sapien
ttagataagtctgatggtcctgctt

SEQ ID NO: 102193 - DNA, 25 bp, Homo sapien
ctttgacatcaattgcactccatac

SEQ ID NO: 102194 - DNA, 25 bp, Homo sapien
taagtctgatggtcctgcttgattc

SEQ ID NO: 102195 - DNA, 25 bp, Homo sapien
gcatctgtggtataaggttgttata

SEQ ID NO: 102196 - DNA, 25 bp, Homo sapien
ccatgcatctgtggtataaggttgt

SEQ ID NO: 102197 - DNA, 25 bp, Homo sapien
gtggtataaggttgttatagctcac

SEQ ID NO: 102198 - DNA, 25 bp, Homo sapien
ctgtggtataaggttgttatagctc

SEQ ID NO: 102199 - DNA, 25 bp, Homo sapien
gaatttccccgtccaacataagcat

SEQ ID NO: 102200 - DNA, 25 bp, Homo sapien
gctggattaatatgcagtgctttca

SEQ ID NO: 102201 - DNA, 25 bp, Homo sapien
gcttcatcatgaccgtattccatgt

SEQ ID NO: 102202 - DNA, 25 bp, Homo sapien
gagcccaagtaaagaaattgacagc

SEQ ID NO: 102203 - DNA, 25 bp, Homo sapien
gaagacagaccacagctcttccttc

SEQ ID NO: 102204 - DNA, 25 bp, Homo sapien
gcattaatatcctgcattgcagcaa

SEQ ID NO: 102205 - DNA, 25 bp, Homo sapien
cataggctaggtagttctttggatc

SEQ ID NO: 102206 - DNA, 25 bp, Homo sapien
gcaaaattattacccatctgaagac

SEQ ID NO: 102207 - DNA, 25 bp, Homo sapien
ttgcattctgtttgtggcccataaa

SEQ ID NO: 102208 - DNA, 25 bp, Homo sapien
taaagtaagccagcgagtacttggg

SEQ ID NO: 102209 - DNA, 25 bp, Homo sapien
gttaagaattctgctgtagtactga

SEQ ID NO: 102210 - DNA, 25 bp, Homo sapien
tgaatcaccccacgatttgttaaga

SEQ ID NO: 102211 - DNA, 25 bp, Homo sapien
taaagcttttgagaagtagtcactg

SEQ ID NO: 102212 - DNA, 25 bp, Homo sapien
tatttgtaatagctcgattcatgag

SEQ ID NO: 102213 - DNA, 25 bp, Homo sapien
aagggacagctttcaattacatttg

SEQ ID NO: 102214 - DNA, 25 bp, Homo sapien
taaggtcttcctcagctagttcata

SEQ ID NO: 102215 - DNA, 25 bp, Homo sapien
gccatagcttcctcaatcagaccta

SEQ ID NO: 102216 - DNA, 25 bp, Homo sapien
tattttaccacgaacttttgctcta

SEQ ID NO: 102217 - DNA, 25 bp, Homo sapien
tcaagtgcttggttatagtcagcca

SEQ ID NO: 102218 - DNA, 25 bp, Homo sapien
tatactagagcatcattaggcttca

SEQ ID NO: 102219 - DNA, 25 bp, Homo sapien
ggaagactaagcataacgaatacaa

SEQ ID NO: 102220 - DNA, 25 bp, Homo sapien
ttaaaatgcatagaaggttatatgg

SEQ ID NO: 102221 - DNA, 25 bp, Homo sapien
acaaatatgtttccgtttcagagag

SEQ ID NO: 102222 - DNA, 25 bp, Homo sapien
tagaaccttttagacaacaaatatg

SEQ ID NO: 102223 - DNA, 25 bp, Homo sapien
tgtttaatacattgtcagcaaggat

SEQ ID NO: 102224 - DNA, 25 bp, Homo sapien
tcaaggtattccaaatatgcagcaa

SEQ ID NO: 102225 - DNA, 25 bp, Homo sapien
gcaaccttggaaaaattcagttctc

SEQ ID NO: 102226 - DNA, 25 bp, Homo sapien
tttccttgagattctgcaaccttgg

SEQ ID NO: 102227 - DNA, 25 bp, Homo sapien
tccatatcctggctgttagcattga

SEQ ID NO: 102228 - DNA, 25 bp, Homo sapien
cctggctgttagcattgactttttg

SEQ ID NO: 102229 - DNA, 25 bp, Homo sapien
ctttttgttgcgatttgctgaaacc

SEQ ID NO: 102230 - DNA, 25 bp, Homo sapien
actttttgttgcgatttgctgaaac

SEQ ID NO: 102231 - DNA, 25 bp, Homo sapien
tgggggttcctatagcatgtatatt

SEQ ID NO: 102232 - DNA, 25 bp, Homo sapien
ctttgggggttcctatagcatgtat

SEQ ID NO: 102233 - DNA, 25 bp, Homo sapien
gggggttcctatagcatgtatattg

SEQ ID NO: 102234 - DNA, 25 bp, Homo sapien
tttgggggttcctatagcatgtata

SEQ ID NO: 102235 - DNA, 25 bp, Homo sapien
catcagtcaaacaaagggtggtcgc

SEQ ID NO: 102236 - DNA, 25 bp, Homo sapien
cacgttctgcgtcagtggttcttgt

SEQ ID NO: 102237 - DNA, 25 bp, Homo sapien
tggttcttgttcagacctcgaggaa

SEQ ID NO: 102238 - DNA, 25 bp, Homo sapien
gggtggtcgctaatgaacgcttcta

SEQ ID NO: 102239 - DNA, 25 bp, Homo sapien
tctaggctttgtggtcattacatca

SEQ ID NO: 102240 - DNA, 25 bp, Homo sapien
cactgttctaggctttgtggtcatt

SEQ ID NO: 102241 - DNA, 25 bp, Homo sapien
gtggtcattacatcataatcattca

SEQ ID NO: 102242 - DNA, 25 bp, Homo sapien
gctttgtggtcattacatcataatc

SEQ ID NO: 102243 - DNA, 25 bp, Homo sapien
atttccttgttggtaatacgtagat

SEQ ID NO: 102244 - DNA, 25 bp, Homo sapien
ccttgttggtaatacgtagatcaag

SEQ ID NO: 102245 - DNA, 25 bp, Homo sapien
ttccttgttggtaatacgtagatca

SEQ ID NO: 102246 - DNA, 25 bp, Homo sapien
ttgttggtaatacgtagatcaaggt

SEQ ID NO: 102247 - DNA, 25 bp, Homo sapien
attctccttacatctatgttgtctg

SEQ ID NO: 102248 - DNA, 25 bp, Homo sapien
tgcggcttgttagccacgttgtgtg

SEQ ID NO: 102249 - DNA, 25 bp, Homo sapien
gcccactgaaactgcggcttgttag

SEQ ID NO: 102250 - DNA, 25 bp, Homo sapien
tcaaattctccttacatctatgttg

SEQ ID NO: 102251 - DNA, 25 bp, Homo sapien
taaatgagatttgtgtggagtcagt

SEQ ID NO: 102252 - DNA, 25 bp, Homo sapien
tgtgtggagtcagttgcacaatcag

SEQ ID NO: 102253 - DNA, 25 bp, Homo sapien
ttaaatgagatttgtgtggagtcag

SEQ ID NO: 102254 - DNA, 25 bp, Homo sapien
gtggagtcagttgcacaatcagttt

SEQ ID NO: 102255 - DNA, 25 bp, Homo sapien
acagcctttcctagggctgacccta

SEQ ID NO: 102256 - DNA, 25 bp, Homo sapien
gggctgaccctaagaattggcacat

SEQ ID NO: 102257 - DNA, 25 bp, Homo sapien
tcctagggctgaccctaagaattgg

SEQ ID NO: 102258 - DNA, 25 bp, Homo sapien
ctttcctagggctgaccctaagaat

SEQ ID NO: 102259 - DNA, 25 bp, Homo sapien
ggtagtgtcttctatcgccaatcaa

SEQ ID NO: 102260 - DNA, 25 bp, Homo sapien
tgatcaagaaatagataggtagata

SEQ ID NO: 102261 - DNA, 25 bp, Homo sapien
cgccaatcaattttgcggatgatca

SEQ ID NO: 102262 - DNA, 25 bp, Homo sapien
caattcaagtcagtactacagatag

SEQ ID NO: 102263 - DNA, 25 bp, Homo sapien
aaatatattacttccaaagaaggct

SEQ ID NO: 102264 - DNA, 25 bp, Homo sapien
ctatcttcaaactgctgcactacat

SEQ ID NO: 102265 - DNA, 25 bp, Homo sapien
tgctgcactacatcaaatcatcttt

SEQ ID NO: 102266 - DNA, 25 bp, Homo sapien
agaaggcttaaagtgaaaattccat

SEQ ID NO: 102267 - DNA, 25 bp, Homo sapien
aatttggtcgctccgacgaacagag

SEQ ID NO: 102268 - DNA, 25 bp, Homo sapien
cttagctgaatttggtcgctccgac

SEQ ID NO: 102269 - DNA, 25 bp, Homo sapien
tgaatttggtcgctccgacgaacag

SEQ ID NO: 102270 - DNA, 25 bp, Homo sapien
tagctgaatttggtcgctccgacga

SEQ ID NO: 102271 - DNA, 25 bp, Homo sapien
tcgaagaactcagtgatccaaatgt

SEQ ID NO: 102272 - DNA, 25 bp, Homo sapien
aaatgttgaaggatttaccaccaca

SEQ ID NO: 102273 - DNA, 25 bp, Homo sapien
ttagtgttattcaaatgcatccagg

SEQ ID NO: 102274 - DNA, 25 bp, Homo sapien
ggtcctctggttagtgttattcaaa

SEQ ID NO: 102275 - DNA, 25 bp, Homo sapien
agggcaagcacgtcttctgagggcc

SEQ ID NO: 102276 - DNA, 25 bp, Homo sapien
gaatactttgttaggcttgagggca

SEQ ID NO: 102277 - DNA, 25 bp, Homo sapien
cacggcagatgtggtatgaaacaca

SEQ ID NO: 102278 - DNA, 25 bp, Homo sapien
tatcatagggatctctgcttgagcc

SEQ ID NO: 102279 - DNA, 25 bp, Homo sapien
actgtgtgcatattggatccatgac

SEQ ID NO: 102280 - DNA, 25 bp, Homo sapien
gatccatgactccaagtgaccatcg

SEQ ID NO: 102281 - DNA, 25 bp, Homo sapien
gaccatcgctttgtgttgtgactag

SEQ ID NO: 102282 - DNA, 25 bp, Homo sapien
tttgagagtagaagaggacctgcag

SEQ ID NO: 102283 - DNA, 25 bp, Homo sapien
tggacccattccaaccagcagctgt

SEQ ID NO: 102284 - DNA, 25 bp, Homo sapien
caaagatacaggtgtctttggttta

SEQ ID NO: 102285 - DNA, 25 bp, Homo sapien
cccaaagatacaggtgtctttggtt

SEQ ID NO: 102286 - DNA, 25 bp, Homo sapien
gaacccaaagatacaggtgtctttg

SEQ ID NO: 102287 - DNA, 25 bp, Homo sapien
gtgcatcaggctttaatactgtgct

SEQ ID NO: 102288 - DNA, 25 bp, Homo sapien
ggtgcatcaggctttaatactgtgc

SEQ ID NO: 102289 - DNA, 25 bp, Homo sapien
tgcatcaggctttaatactgtgctg

SEQ ID NO: 102290 - DNA, 25 bp, Homo sapien
aggtgcatcaggctttaatactgtg

SEQ ID NO: 102291 - DNA, 25 bp, Homo sapien
tggacggcggccttcctatccagta

SEQ ID NO: 102292 - DNA, 25 bp, Homo sapien
tcattgatgagtgaaacgaagatgt

SEQ ID NO: 102293 - DNA, 25 bp, Homo sapien
cttactggtcaacttgcagtagaac

SEQ ID NO: 102294 - DNA, 25 bp, Homo sapien
aaacctatggctggagatggacggc

SEQ ID NO: 102295 - DNA, 25 bp, Homo sapien
gcactgggagtagattcatatagaa

SEQ ID NO: 102296 - DNA, 25 bp, Homo sapien
catgccaaaaattgactagtgttcc

SEQ ID NO: 102297 - DNA, 25 bp, Homo sapien
cacactgctcatgaaggaaacatgg

SEQ ID NO: 102298 - DNA, 25 bp, Homo sapien
tcatatagaatacacactgctcatg

SEQ ID NO: 102299 - DNA, 25 bp, Homo sapien
ctttcacagaagtcataacccaagg

SEQ ID NO: 102300 - DNA, 25 bp, Homo sapien
caattgaagcagatgtttggcttct

SEQ ID NO: 102301 - DNA, 25 bp, Homo sapien
taacccaagggctgagtaatccctc

SEQ ID NO: 102302 - DNA, 25 bp, Homo sapien
tggcttctaaagaacgactttcaca

SEQ ID NO: 102303 - DNA, 25 bp, Homo sapien
cctgagactaatccttccagacaga

SEQ ID NO: 102304 - DNA, 25 bp, Homo sapien
ttcagtatgagcttgcctgagacta

SEQ ID NO: 102305 - DNA, 25 bp, Homo sapien
cttccttccatctacgtatttctct

SEQ ID NO: 102306 - DNA, 25 bp, Homo sapien
gagcttgcctgagactaatccttcc

SEQ ID NO: 102307 - DNA, 25 bp, Homo sapien
ctgaagggcagagactggaactgct

SEQ ID NO: 102308 - DNA, 25 bp, Homo sapien
cctcaattttcaatgcagtagcttg

SEQ ID NO: 102309 - DNA, 25 bp, Homo sapien
gactctgggaatcaattcctcaatt

SEQ ID NO: 102310 - DNA, 25 bp, Homo sapien
gcttcagggctttgtgagactctgg

SEQ ID NO: 102311 - DNA, 25 bp, Homo sapien
tgccttggtagcaagatggctgcag

SEQ ID NO: 102312 - DNA, 25 bp, Homo sapien
tattgcctcataacaagaaattcag

SEQ ID NO: 102313 - DNA, 25 bp, Homo sapien
tcagaggtagaagatttcagggaca

SEQ ID NO: 102314 - DNA, 25 bp, Homo sapien
ggacagagcaatgtcaacaggaacc

SEQ ID NO: 102315 - DNA, 25 bp, Homo sapien
tagaaggctatcaaggactcccagg

SEQ ID NO: 102316 - DNA, 25 bp, Homo sapien
cataggcaggattcgtgtcccacca

SEQ ID NO: 102317 - DNA, 25 bp, Homo sapien
tcttctgtgaccgatctgacgccaa

SEQ ID NO: 102318 - DNA, 25 bp, Homo sapien
aaacgggtcagtaggctgcacagca

SEQ ID NO: 102319 - DNA, 25 bp, Homo sapien
caacttgagcaatctcttgaaggag

SEQ ID NO: 102320 - DNA, 25 bp, Homo sapien
gaggaactacctatgagctaccaga

SEQ ID NO: 102321 - DNA, 25 bp, Homo sapien
gaaagagacccaactgtcattttat

SEQ ID NO: 102322 - DNA, 25 bp, Homo sapien
cataggatttattgaggatgttcaa

SEQ ID NO: 102323 - DNA, 25 bp, Homo sapien
agtgatggcagcatcaacatttggc

SEQ ID NO: 102324 - DNA, 25 bp, Homo sapien
gatggcagcatcaacatttggcaga

SEQ ID NO: 102325 - DNA, 25 bp, Homo sapien
gagactgcagtgtgatgatattggt

SEQ ID NO: 102326 - DNA, 25 bp, Homo sapien
agagactgcagtgtgatgatattgg

SEQ ID NO: 102327 - DNA, 25 bp, Homo sapien
gagcacaggattgctctctctcaga

SEQ ID NO: 102328 - DNA, 25 bp, Homo sapien
tccaagagcacaggattgctctctc

SEQ ID NO: 102329 - DNA, 25 bp, Homo sapien
caagagcacaggattgctctctctc

SEQ ID NO: 102330 - DNA, 25 bp, Homo sapien
ccatccaagagcacaggattgctct

SEQ ID NO: 102331 - DNA, 25 bp, Homo sapien
ctgagatgaactctgtatatgacat

SEQ ID NO: 102332 - DNA, 25 bp, Homo sapien
gctgatgactatggcccagaatggt

SEQ ID NO: 102333 - DNA, 25 bp, Homo sapien
gaactctgtatatgacatgccaaag

SEQ ID NO: 102334 - DNA, 25 bp, Homo sapien
ccaaagtcacatatccagagcagga

SEQ ID NO: 102335 - DNA, 25 bp, Homo sapien
ggtagctgctgtcgaaagagatttg

SEQ ID NO: 102336 - DNA, 25 bp, Homo sapien
gtggtagctgctgtcgaaagagatt

SEQ ID NO: 102337 - DNA, 25 bp, Homo sapien
tggtagctgctgtcgaaagagattt

SEQ ID NO: 102338 - DNA, 25 bp, Homo sapien
gtagctgctgtcgaaagagatttgc

SEQ ID NO: 102339 - DNA, 25 bp, Homo sapien
gttcttggtgctgtcagtagatccg

SEQ ID NO: 102340 - DNA, 25 bp, Homo sapien
tcttggtgctgtcagtagatccggt

SEQ ID NO: 102341 - DNA, 25 bp, Homo sapien
cttggtgctgtcagtagatccggtc

SEQ ID NO: 102342 - DNA, 25 bp, Homo sapien
ttggtgctgtcagtagatccggtca

SEQ ID NO: 102343 - DNA, 25 bp, Homo sapien
ctggcgccatgaagctgcagtaccc

SEQ ID NO: 102344 - DNA, 25 bp, Homo sapien
gaagctgcagtacccggaagcagga

SEQ ID NO: 102345 - DNA, 25 bp, Homo sapien
ggctggcgccatgaagctgcagtac

SEQ ID NO: 102346 - DNA, 25 bp, Homo sapien
gccatgaagctgcagtacccggaag

SEQ ID NO: 102347 - DNA, 25 bp, Homo sapien
aagccaggggaaatgtttcttgttg

SEQ ID NO: 102348 - DNA, 25 bp, Homo sapien
gccaggggaaatgtttcttgttgtg

SEQ ID NO: 102349 - DNA, 25 bp, Homo sapien
tgttgtgaaaatttactaaagggca

SEQ ID NO: 102350 - DNA, 25 bp, Homo sapien
caggggaaatgtttcttgttgtgaa

SEQ ID NO: 102351 - DNA, 25 bp, Homo sapien
tgtataagttctatgccagccagaa

SEQ ID NO: 102352 - DNA, 25 bp, Homo sapien
tatgtatagccctcagtaccttgga

SEQ ID NO: 102353 - DNA, 25 bp, Homo sapien
ggacgaatactacgtaagtggcaga

SEQ ID NO: 102354 - DNA, 25 bp, Homo sapien
cagaacctagtggatccaatgaggc

SEQ ID NO: 102355 - DNA, 25 bp, Homo sapien
aggtgtttcactgacttggaacagg

SEQ ID NO: 102356 - DNA, 25 bp, Homo sapien
ggtgtttcactgacttggaacaggt

SEQ ID NO: 102357 - DNA, 25 bp, Homo sapien
caggtgtttcactgacttggaacag

SEQ ID NO: 102358 - DNA, 25 bp, Homo sapien
acagcagtgctttcgctgttaattt

SEQ ID NO: 102359 - DNA, 25 bp, Homo sapien
cagacagcagtgctttcgctgttaa

SEQ ID NO: 102360 - DNA, 25 bp, Homo sapien
gacagcagtgctttcgctgttaatt

SEQ ID NO: 102361 - DNA, 25 bp, Homo sapien
ccagacagcagtgctttcgctgtta

SEQ ID NO: 102362 - DNA, 25 bp, Homo sapien
tgagctggcatggagaagtcaaacc

SEQ ID NO: 102363 - DNA, 25 bp, Homo sapien
atgtgggcctgagctggcatggaga

SEQ ID NO: 102364 - DNA, 25 bp, Homo sapien
ggcctgagctggcatggagaagtca

SEQ ID NO: 102365 - DNA, 25 bp, Homo sapien
ttagggatgaatgtgggcctgagct

SEQ ID NO: 102366 - DNA, 25 bp, Homo sapien
tgtgtgcatctcctacagtgatggt

SEQ ID NO: 102367 - DNA, 25 bp, Homo sapien
gcacaatatagtagcttcaaaagcc

SEQ ID NO: 102368 - DNA, 25 bp, Homo sapien
cagtgatggtgagatccttgaggtc

SEQ ID NO: 102369 - DNA, 25 bp, Homo sapien
gagtccatgcaacatgcaatgtctg

SEQ ID NO: 102370 - DNA, 25 bp, Homo sapien
accgcaccaaatttcatgcgcatcc

SEQ ID NO: 102371 - DNA, 25 bp, Homo sapien
accaaatttcatgcgcatccatgtg

SEQ ID NO: 102372 - DNA, 25 bp, Homo sapien
aaatttcatgcgcatccatgtgaag

SEQ ID NO: 102373 - DNA, 25 bp, Homo sapien
caccaaatttcatgcgcatccatgt

SEQ ID NO: 102374 - DNA, 25 bp, Homo sapien
cctaaacgctatccgatttgggata

SEQ ID NO: 102375 - DNA, 25 bp, Homo sapien
gccaaacaagtcatgaactgggctg

SEQ ID NO: 102376 - DNA, 25 bp, Homo sapien
aactagctcggcctggcgaggagca

SEQ ID NO: 102377 - DNA, 25 bp, Homo sapien
aattgggaactagctcggcctggcg

SEQ ID NO: 102378 - DNA, 25 bp, Homo sapien
tctagggggcttccaaggtgattga

SEQ ID NO: 102379 - DNA, 25 bp, Homo sapien
tagggggcttccaaggtgattgagc

SEQ ID NO: 102380 - DNA, 25 bp, Homo sapien
ccaaggtgattgagcagtgtcagtc

SEQ ID NO: 102381 - DNA, 25 bp, Homo sapien
cttccaaggtgattgagcagtgtca

SEQ ID NO: 102382 - DNA, 25 bp, Homo sapien
aacacttttatttagacgatgaagc

SEQ ID NO: 102383 - DNA, 25 bp, Homo sapien
gtcattactggttctaggttgacag

SEQ ID NO: 102384 - DNA, 25 bp, Homo sapien
cctttctgtaattaagttggaactg

SEQ ID NO: 102385 - DNA, 25 bp, Homo sapien
tatttagacgatgaagcaacttaaa

SEQ ID NO: 102386 - DNA, 25 bp, Homo sapien
tggcccactgattttcctattgcct

SEQ ID NO: 102387 - DNA, 25 bp, Homo sapien
cctggcccactgattttcctattgc

SEQ ID NO: 102388 - DNA, 25 bp, Homo sapien
ctggcccactgattttcctattgcc

SEQ ID NO: 102389 - DNA, 25 bp, Homo sapien
ggcccactgattttcctattgcctc

SEQ ID NO: 102390 - DNA, 25 bp, Homo sapien
gaatcagtgtcaggtttacaaacac

SEQ ID NO: 102391 - DNA, 25 bp, Homo sapien
acacttcctggaacattgtctgcag

SEQ ID NO: 102392 - DNA, 25 bp, Homo sapien
agggtacacttcctggaacattgtc

SEQ ID NO: 102393 - DNA, 25 bp, Homo sapien
agcagaatcagtgtcaggtttacaa

SEQ ID NO: 102394 - DNA, 25 bp, Homo sapien
ctggcagacgagagtttaaaggctt

SEQ ID NO: 102395 - DNA, 25 bp, Homo sapien
cagctcttctaaatccaggtgagga

SEQ ID NO: 102396 - DNA, 25 bp, Homo sapien
gacgccagctcttctaaatccaggt

SEQ ID NO: 102397 - DNA, 25 bp, Homo sapien
gagagttggcgggttctggcagacg

SEQ ID NO: 102398 - DNA, 25 bp, Homo sapien
tgttagcaggttgacgatcttcgcg

SEQ ID NO: 102399 - DNA, 25 bp, Homo sapien
cgtagatggtcggtgcaaagtgcat

SEQ ID NO: 102400 - DNA, 25 bp, Homo sapien
aaagtgcgcaacctccagactgaga

SEQ ID NO: 102401 - DNA, 25 bp, Homo sapien
tactcttagaatcgcggaaactggc

SEQ ID NO: 102402 - DNA, 25 bp, Homo sapien
ttcccaccctcgcttgccttgcagc

SEQ ID NO: 102403 - DNA, 25 bp, Homo sapien
ctcagacccgccagggaagttccgg

SEQ ID NO: 102404 - DNA, 25 bp, Homo sapien
cttgcagctcagacccgccagggaa

SEQ ID NO: 102405 - DNA, 25 bp, Homo sapien
accctcgcttgccttgcagctcaga

SEQ ID NO: 102406 - DNA, 25 bp, Homo sapien
gcggctctggactggtaaatgatta

SEQ ID NO: 102407 - DNA, 25 bp, Homo sapien
aaatgattaataggcaccaccagcg

SEQ ID NO: 102408 - DNA, 25 bp, Homo sapien
gggagcaccgcacggcacagccatt

SEQ ID NO: 102409 - DNA, 25 bp, Homo sapien
cagccattaactggcgcggctctgg

SEQ ID NO: 102410 - DNA, 25 bp, Homo sapien
gggctttctcctcgcgcacccgccg

SEQ ID NO: 102411 - DNA, 25 bp, Homo sapien
gcctccgggtagagcgcaaccgctg

SEQ ID NO: 102412 - DNA, 25 bp, Homo sapien
gccgcccagcgcctccgggtagagc

SEQ ID NO: 102413 - DNA, 25 bp, Homo sapien
cccacccgaccgcttgcctgcagcc

SEQ ID NO: 102414 - DNA, 25 bp, Homo sapien
aggaggcggtgccattggggaacat

SEQ ID NO: 102415 - DNA, 25 bp, Homo sapien
tgcaggtgccattacggaagacgcc

SEQ ID NO: 102416 - DNA, 25 bp, Homo sapien
ccattaaggtgatcttgcgctccga

SEQ ID NO: 102417 - DNA, 25 bp, Homo sapien
gatgaccatagagttcccacacagc

SEQ ID NO: 102418 - DNA, 25 bp, Homo sapien
gaagtcttccacactgtaggcacgg

SEQ ID NO: 102419 - DNA, 25 bp, Homo sapien
ggcggtatccgtggctcagcttaaa

SEQ ID NO: 102420 - DNA, 25 bp, Homo sapien
tcttaggcaccgcttgaaaggcagc

SEQ ID NO: 102421 - DNA, 25 bp, Homo sapien
tcaatgagtgaacctgagaacccca

SEQ ID NO: 102422 - DNA, 25 bp, Homo sapien
gaaagatgcaccttcacccaagagt

SEQ ID NO: 102423 - DNA, 25 bp, Homo sapien
caagtctgcttagattagaaggaat

SEQ ID NO: 102424 - DNA, 25 bp, Homo sapien
tgtgcttggacagttaaagtcttct

SEQ ID NO: 102425 - DNA, 25 bp, Homo sapien
gccttggtatctgaggcccctaaaa

SEQ ID NO: 102426 - DNA, 25 bp, Homo sapien
gggcaaattagaccaaattggcagt

SEQ ID NO: 102427 - DNA, 25 bp, Homo sapien
tccagataatctggcatcttcctct

SEQ ID NO: 102428 - DNA, 25 bp, Homo sapien
gccaggaactccaccaataagggga

SEQ ID NO: 102429 - DNA, 25 bp, Homo sapien
cttccctggcatgtacatatgggcc

SEQ ID NO: 102430 - DNA, 25 bp, Homo sapien
tccatgagagggcaaggcaattgac

SEQ ID NO: 102431 - DNA, 25 bp, Homo sapien
cattctccctctctccagccatcat

SEQ ID NO: 102432 - DNA, 25 bp, Homo sapien
ctccctctctccagccatcatccac

SEQ ID NO: 102433 - DNA, 25 bp, Homo sapien
cctctctccagccatcatccactct

SEQ ID NO: 102434 - DNA, 25 bp, Homo sapien
tctctccagccatcatccactctac

SEQ ID NO: 102435 - DNA, 25 bp, Homo sapien
ctgtgcttcctaggcatgacatttt

SEQ ID NO: 102436 - DNA, 25 bp, Homo sapien
gctctgtgcttcctaggcatgacat

SEQ ID NO: 102437 - DNA, 25 bp, Homo sapien
gggctctgtgcttcctaggcatgac

SEQ ID NO: 102438 - DNA, 25 bp, Homo sapien
ttttttctgggatgcattccttcta

SEQ ID NO: 102439 - DNA, 25 bp, Homo sapien
ccctctgaagaccagtgtcagatgt

SEQ ID NO: 102440 - DNA, 25 bp, Homo sapien
tgaagaccagtgtcagatgtcctga

SEQ ID NO: 102441 - DNA, 25 bp, Homo sapien
gaccagtgtcagatgtcctgatggc

SEQ ID NO: 102442 - DNA, 25 bp, Homo sapien
tctgaagaccagtgtcagatgtcct

SEQ ID NO: 102443 - DNA, 25 bp, Homo sapien
ccttctatctacattttggtaccca

SEQ ID NO: 102444 - DNA, 25 bp, Homo sapien
cattgatagacacctatcatcattt

SEQ ID NO: 102445 - DNA, 25 bp, Homo sapien
cattgcattctttctatgcctgaat

SEQ ID NO: 102446 - DNA, 25 bp, Homo sapien
tagaactcattccttctatctacat

SEQ ID NO: 102447 - DNA, 25 bp, Homo sapien
tacagtggcaaggaaagctaacaac

SEQ ID NO: 102448 - DNA, 25 bp, Homo sapien
caatggtctatagagagctggccca

SEQ ID NO: 102449 - DNA, 25 bp, Homo sapien
gatatgcggttaaatagtgctgcct

SEQ ID NO: 102450 - DNA, 25 bp, Homo sapien
cagaaacacaatagacgggcgtggt

SEQ ID NO: 102451 - DNA, 25 bp, Homo sapien
tgatgcatctatgtatcaagataat

SEQ ID NO: 102452 - DNA, 25 bp, Homo sapien
tggtgtcaccatgcagtacaataga

SEQ ID NO: 102453 - DNA, 25 bp, Homo sapien
ttgaaatatgcatcattaactggtg

SEQ ID NO: 102454 - DNA, 25 bp, Homo sapien
atatccatcacttcaccaagttacc

SEQ ID NO: 102455 - DNA, 25 bp, Homo sapien
caatacctgaaaaggactgcatcca

SEQ ID NO: 102456 - DNA, 25 bp, Homo sapien
tgggaaataggtaggaccagcccac

SEQ ID NO: 102457 - DNA, 25 bp, Homo sapien
aatgattgtgcctctccctactggc

SEQ ID NO: 102458 - DNA, 25 bp, Homo sapien
tggcactgacccaaaaatagagtta

SEQ ID NO: 102459 - DNA, 25 bp, Homo sapien
tgatttctccccctgaatcagttat

SEQ ID NO: 102460 - DNA, 25 bp, Homo sapien
tggccatttgcagaaggtatcagag

SEQ ID NO: 102461 - DNA, 25 bp, Homo sapien
gttactaacatcagtgtgatctgca

SEQ ID NO: 102462 - DNA, 25 bp, Homo sapien
cagattccaagataatggactcaaa

SEQ ID NO: 102463 - DNA, 25 bp, Homo sapien
tgctcttttaagaggtgtctgcatt

SEQ ID NO: 102464 - DNA, 25 bp, Homo sapien
ctcttttaagaggtgtctgcattct

SEQ ID NO: 102465 - DNA, 25 bp, Homo sapien
gctcttttaagaggtgtctgcattc

SEQ ID NO: 102466 - DNA, 25 bp, Homo sapien
gaagttgccatatgaatgctacctc

SEQ ID NO: 102467 - DNA, 25 bp, Homo sapien
tatgtttcttacacgagggatcagg

SEQ ID NO: 102468 - DNA, 25 bp, Homo sapien
cacatcaagtcatatgaagttgcca

SEQ ID NO: 102469 - DNA, 25 bp, Homo sapien
ttagcttttgtctcatgcagaccac

SEQ ID NO: 102470 - DNA, 25 bp, Homo sapien
tgtactgtgtagaaggaactctggt

SEQ ID NO: 102471 - DNA, 25 bp, Homo sapien
tatcgtcacatcctcgagctcagag

SEQ ID NO: 102472 - DNA, 25 bp, Homo sapien
tcgttctgatgctcgcaatgactgc

SEQ ID NO: 102473 - DNA, 25 bp, Homo sapien
cctgctgtatctgggtctcgttctg

SEQ ID NO: 102474 - DNA, 25 bp, Homo sapien
ttcagagatttatttcatggggtct

SEQ ID NO: 102475 - DNA, 25 bp, Homo sapien
agtgggtttacacagtgtttgggag

SEQ ID NO: 102476 - DNA, 25 bp, Homo sapien
ttcatggggtctggaattgcagaga

SEQ ID NO: 102477 - DNA, 25 bp, Homo sapien
gtgtttgggagacaagcaagcttca

SEQ ID NO: 102478 - DNA, 25 bp, Homo sapien
ttccactgattcatcccaaatcctt

SEQ ID NO: 102479 - DNA, 25 bp, Homo sapien
tgagaagctcaaataccaatactcc

SEQ ID NO: 102480 - DNA, 25 bp, Homo sapien
gaagctcaaataccaatactccttc

SEQ ID NO: 102481 - DNA, 25 bp, Homo sapien
tgtgagaagctcaaataccaatact

SEQ ID NO: 102482 - DNA, 25 bp, Homo sapien
actgtgagaagctcaaataccaata

SEQ ID NO: 102483 - DNA, 25 bp, Homo sapien
cagctctcaccaaatttaaggctag

SEQ ID NO: 102484 - DNA, 25 bp, Homo sapien
aaaatcttttctgggctcaaatcta

SEQ ID NO: 102485 - DNA, 25 bp, Homo sapien
ctggatattccatgaccacctcaca

SEQ ID NO: 102486 - DNA, 25 bp, Homo sapien
acactgtgcatgtctataagtccaa

SEQ ID NO: 102487 - DNA, 25 bp, Homo sapien
tatccctaagaggagtccaaggccc

SEQ ID NO: 102488 - DNA, 25 bp, Homo sapien
tctcaggggaactgaaggaatcttc

SEQ ID NO: 102489 - DNA, 25 bp, Homo sapien
ctaattgtgcttcactacagcaggt

SEQ ID NO: 102490 - DNA, 25 bp, Homo sapien
gctccagcccctttgatatccctaa

SEQ ID NO: 102491 - DNA, 25 bp, Homo sapien
gagcattgattcgattaacttatac

SEQ ID NO: 102492 - DNA, 25 bp, Homo sapien
cctttctgatgactaacttgtattg

SEQ ID NO: 102493 - DNA, 25 bp, Homo sapien
tgatgactaacttgtattgtgagca

SEQ ID NO: 102494 - DNA, 25 bp, Homo sapien
tgtattgtgagcattgattcgatta

SEQ ID NO: 102495 - DNA, 25 bp, Homo sapien
gaaatggtactttaacagtgacaga

SEQ ID NO: 102496 - DNA, 25 bp, Homo sapien
attttgtgagataaatgaattgtca

SEQ ID NO: 102497 - DNA, 25 bp, Homo sapien
atggtactttaacagtgacagattc

SEQ ID NO: 102498 - DNA, 25 bp, Homo sapien
aggaaatggtactttaacagtgaca

SEQ ID NO: 102499 - DNA, 25 bp, Homo sapien
catactcttccaagccagtgaggag

SEQ ID NO: 102500 - DNA, 25 bp, Homo sapien
taagggaaggttcaaatactgtcat

SEQ ID NO: 102501 - DNA, 25 bp, Homo sapien
tactgtcatttgcttggaagatcac

SEQ ID NO: 102502 - DNA, 25 bp, Homo sapien
tctcagtaatagaagacagtcacat

SEQ ID NO: 102503 - DNA, 25 bp, Homo sapien
tcttttactacagctgttgtttatc

SEQ ID NO: 102504 - DNA, 25 bp, Homo sapien
ttcttttactacagctgttgtttat

SEQ ID NO: 102505 - DNA, 25 bp, Homo sapien
ccactgtcctctggtgttagtgtca

SEQ ID NO: 102506 - DNA, 25 bp, Homo sapien
tgtcaccaggcattcttgaacctgg

SEQ ID NO: 102507 - DNA, 25 bp, Homo sapien
aggtcacagacccattgtagccctg

SEQ ID NO: 102508 - DNA, 25 bp, Homo sapien
tgttagtgtcaccaggcattcttga

SEQ ID NO: 102509 - DNA, 25 bp, Homo sapien
cctatagatcctacccagtggcttg

SEQ ID NO: 102510 - DNA, 25 bp, Homo sapien
gcacctgctggatgtcctgtaacag

SEQ ID NO: 102511 - DNA, 25 bp, Homo sapien
tgtgaaatttcatccgcacctgctg

SEQ ID NO: 102512 - DNA, 25 bp, Homo sapien
agtggcttgtataccacaggtagcc

SEQ ID NO: 102513 - DNA, 25 bp, Homo sapien
gcctgtagcaggactgacactcttg

SEQ ID NO: 102514 - DNA, 25 bp, Homo sapien
tcagtgtttgcctgagatctggtcc

SEQ ID NO: 102515 - DNA, 25 bp, Homo sapien
gaatataataagatcctgggccata

SEQ ID NO: 102516 - DNA, 25 bp, Homo sapien
ggccataagtcacccacaataagat

SEQ ID NO: 102517 - DNA, 25 bp, Homo sapien
tcttgcttccgatgggcctcagggt

SEQ ID NO: 102518 - DNA, 25 bp, Homo sapien
gcctcagggtcatgggattggcctt

SEQ ID NO: 102519 - DNA, 25 bp, Homo sapien
cctcagggtcatgggattggccttc

SEQ ID NO: 102520 - DNA, 25 bp, Homo sapien
atgaatcttgcttccgatgggcctc

SEQ ID NO: 102521 - DNA, 25 bp, Homo sapien
gatacccctccaaaaatacacatga

SEQ ID NO: 102522 - DNA, 25 bp, Homo sapien
gcatggtcatttgctgactattttt

SEQ ID NO: 102523 - DNA, 25 bp, Homo sapien
aatacacatgaatcagtcatttgca

SEQ ID NO: 102524 - DNA, 25 bp, Homo sapien
ccttcttaataccaggactctcttt

SEQ ID NO: 102525 - DNA, 25 bp, Homo sapien
acaatcctggacaaccaaccatttg

SEQ ID NO: 102526 - DNA, 25 bp, Homo sapien
caatcctggacaaccaaccatttgg

SEQ ID NO: 102527 - DNA, 25 bp, Homo sapien
tcacaatcctggacaaccaaccatt

SEQ ID NO: 102528 - DNA, 25 bp, Homo sapien
cctgctgcctctgagtgggtagaat

SEQ ID NO: 102529 - DNA, 25 bp, Homo sapien
cagacttgtctatatccttgaagga

SEQ ID NO: 102530 - DNA, 25 bp, Homo sapien
tccccttgctctgcagacttgtcta

SEQ ID NO: 102531 - DNA, 25 bp, Homo sapien
taaggctcagtcctattccccttgc

SEQ ID NO: 102532 - DNA, 25 bp, Homo sapien
tccagaaaggcaaaccttcttccat

SEQ ID NO: 102533 - DNA, 25 bp, Homo sapien
tcttcataggatgcaagcacgtgta

SEQ ID NO: 102534 - DNA, 25 bp, Homo sapien
tttttaagcctctacctggaggatc

SEQ ID NO: 102535 - DNA, 25 bp, Homo sapien
tagtgttccaacgacagtgtcagag

SEQ ID NO: 102536 - DNA, 25 bp, Homo sapien
taactggcctcttatgatgggctga

SEQ ID NO: 102537 - DNA, 25 bp, Homo sapien
attttcaagactcaccagggagtcc

SEQ ID NO: 102538 - DNA, 25 bp, Homo sapien
tcattttcaagactcaccagggagt

SEQ ID NO: 102539 - DNA, 25 bp, Homo sapien
atcattttcaagactcaccagggag

SEQ ID NO: 102540 - DNA, 25 bp, Homo sapien
cattttcaagactcaccagggagtc

SEQ ID NO: 102541 - DNA, 25 bp, Homo sapien
aaatccttgagcaaagggaatcagt

SEQ ID NO: 102542 - DNA, 25 bp, Homo sapien
tccttgagcaaagggaatcagtaat

SEQ ID NO: 102543 - DNA, 25 bp, Homo sapien
cttcatgaaatccttgagcaaaggg

SEQ ID NO: 102544 - DNA, 25 bp, Homo sapien
tgaaatccttgagcaaagggaatca

SEQ ID NO: 102545 - DNA, 25 bp, Homo sapien
cagtcagtgaacagaggtcccaaaa

SEQ ID NO: 102546 - DNA, 25 bp, Homo sapien
gaacagaggtcccaaaagcccttga

SEQ ID NO: 102547 - DNA, 25 bp, Homo sapien
ccttgaaaaagggtcactcttgagt

SEQ ID NO: 102548 - DNA, 25 bp, Homo sapien
cttctcccagtcagtgaacagaggt

SEQ ID NO: 102549 - DNA, 25 bp, Homo sapien
gagggaatagcttgcacatgtgttc

SEQ ID NO: 102550 - DNA, 25 bp, Homo sapien
aactctgtcctagttggggctgagg

SEQ ID NO: 102551 - DNA, 25 bp, Homo sapien
cattccccaagcaggatgtcgtagt

SEQ ID NO: 102552 - DNA, 25 bp, Homo sapien
tgaggttttaatcaccaaagccctg

SEQ ID NO: 102553 - DNA, 25 bp, Homo sapien
tcctgttgctgtagcacaagggggc

SEQ ID NO: 102554 - DNA, 25 bp, Homo sapien
aactgtccattaagggctgccagga

SEQ ID NO: 102555 - DNA, 25 bp, Homo sapien
ctgtgtgcaggccaactgtccatta

SEQ ID NO: 102556 - DNA, 25 bp, Homo sapien
agagaaaagatagggtcctgttgct

SEQ ID NO: 102557 - DNA, 25 bp, Homo sapien
gatggcttaggaagaggcaatgacc

SEQ ID NO: 102558 - DNA, 25 bp, Homo sapien
ggcaatgaccgagtcacctcagagt

SEQ ID NO: 102559 - DNA, 25 bp, Homo sapien
ctttaaggagtacaggtgcctctac

SEQ ID NO: 102560 - DNA, 25 bp, Homo sapien
cagcaaatctggtaagggatggctt

SEQ ID NO: 102561 - DNA, 25 bp, Homo sapien
catgtattgttagaactcccttttc

SEQ ID NO: 102562 - DNA, 25 bp, Homo sapien
tttcctccgtattcaatcttatctc

SEQ ID NO: 102563 - DNA, 25 bp, Homo sapien
taagtcccatgtattgttagaactc

SEQ ID NO: 102564 - DNA, 25 bp, Homo sapien
aaatgtaagtcccatgtattgttag

SEQ ID NO: 102565 - DNA, 25 bp, Homo sapien
tgttggctttaacagaataagacaa

SEQ ID NO: 102566 - DNA, 25 bp, Homo sapien
attaatacaagcaattaccaggtac

SEQ ID NO: 102567 - DNA, 25 bp, Homo sapien
tccttggcaatctgtatgaatcccc

SEQ ID NO: 102568 - DNA, 25 bp, Homo sapien
tagctaaaggccactgcctagtgag

SEQ ID NO: 102569 - DNA, 25 bp, Homo sapien
ttgctcagtagtatcctccctcccc

SEQ ID NO: 102570 - DNA, 25 bp, Homo sapien
tgctcagtagtatcctccctccccc

SEQ ID NO: 102571 - DNA, 25 bp, Homo sapien
gctcagtagtatcctccctccccca

SEQ ID NO: 102572 - DNA, 25 bp, Homo sapien
cacatttgaatctgattctgatgtt

SEQ ID NO: 102573 - DNA, 25 bp, Homo sapien
ttgaatctgattctgatgtttgctt

SEQ ID NO: 102574 - DNA, 25 bp, Homo sapien
catttgaatctgattctgatgtttg

SEQ ID NO: 102575 - DNA, 25 bp, Homo sapien
tttgaatctgattctgatgtttgct

SEQ ID NO: 102576 - DNA, 25 bp, Homo sapien
tcattttgaattgctactgggtttt

SEQ ID NO: 102577 - DNA, 25 bp, Homo sapien
gtgcgtggctagagcaatcattttg

SEQ ID NO: 102578 - DNA, 25 bp, Homo sapien
atagagaaaagtgcgtggctagagc

SEQ ID NO: 102579 - DNA, 25 bp, Homo sapien
tctttgaacatagtggccaactggg

SEQ ID NO: 102580 - DNA, 25 bp, Homo sapien
ggaaaaactgcaccagtgtagttta

SEQ ID NO: 102581 - DNA, 25 bp, Homo sapien
gccattgggccattgcggggaaaaa

SEQ ID NO: 102582 - DNA, 25 bp, Homo sapien
gtttagcagcaatggttgggtaatg

SEQ ID NO: 102583 - DNA, 25 bp, Homo sapien
cagtgtagtttagcagcaatggttg

SEQ ID NO: 102584 - DNA, 25 bp, Homo sapien
tcttctccttgaaaatgttaagtat

SEQ ID NO: 102585 - DNA, 25 bp, Homo sapien
tgttcttgcccatggtatcttgcca

SEQ ID NO: 102586 - DNA, 25 bp, Homo sapien
tactgtgtctaactatgcctgtggc

SEQ ID NO: 102587 - DNA, 25 bp, Homo sapien
gcctgtggctatattggatattttt

SEQ ID NO: 102588 - DNA, 25 bp, Homo sapien
cttttgcatatcgtaacctgttggg

SEQ ID NO: 102589 - DNA, 25 bp, Homo sapien
gcatatcgtaacctgttgggagatg

SEQ ID NO: 102590 - DNA, 25 bp, Homo sapien
tttgcatatcgtaacctgttgggag

SEQ ID NO: 102591 - DNA, 25 bp, Homo sapien
cattcttttgcatatcgtaacctgt

SEQ ID NO: 102592 - DNA, 25 bp, Homo sapien
tgcgtgtaggtcctctctccatgga

SEQ ID NO: 102593 - DNA, 25 bp, Homo sapien
taaccgcacgaagtcaattgtagag

SEQ ID NO: 102594 - DNA, 25 bp, Homo sapien
tagtgcagttacaagcaggagggat

SEQ ID NO: 102595 - DNA, 25 bp, Homo sapien
catggtaccccatattgagattgca

SEQ ID NO: 102596 - DNA, 25 bp, Homo sapien
cttcccactcgactgactcaaatgt

SEQ ID NO: 102597 - DNA, 25 bp, Homo sapien
cctgttgtgttggagtttcaatgct

SEQ ID NO: 102598 - DNA, 25 bp, Homo sapien
ggcaagtatcatcctttagttttca

SEQ ID NO: 102599 - DNA, 25 bp, Homo sapien
tataaaattcttagctaggcatagt

SEQ ID NO: 102600 - DNA, 25 bp, Homo sapien
cttctattctgtaccatttccttcg

SEQ ID NO: 102601 - DNA, 25 bp, Homo sapien
ttctgtaccatttccttcgtggcat

SEQ ID NO: 102602 - DNA, 25 bp, Homo sapien
tattctgtaccatttccttcgtggc

SEQ ID NO: 102603 - DNA, 25 bp, Homo sapien
tctattctgtaccatttccttcgtg

SEQ ID NO: 102604 - DNA, 25 bp, Homo sapien
ccagtataagctttccaaataggag

SEQ ID NO: 102605 - DNA, 25 bp, Homo sapien
gaacagttgtataaaaaggtcagct

SEQ ID NO: 102606 - DNA, 25 bp, Homo sapien
aagaagccagtataagctttccaaa

SEQ ID NO: 102607 - DNA, 25 bp, Homo sapien
cctgaacagttgtataaaaaggtca

SEQ ID NO: 102608 - DNA, 25 bp, Homo sapien
tacttctttaccgatcttcaaattg

SEQ ID NO: 102609 - DNA, 25 bp, Homo sapien
ctgctctccccttagtgccactgct

SEQ ID NO: 102610 - DNA, 25 bp, Homo sapien
tgctccaagagactgttccaccaag

SEQ ID NO: 102611 - DNA, 25 bp, Homo sapien
gaagctgggagtagataatatttac

SEQ ID NO: 102612 - DNA, 25 bp, Homo sapien
tctgggccttcctcgaatcttccat

SEQ ID NO: 102613 - DNA, 25 bp, Homo sapien
ttctgggccttcctcgaatcttcca

SEQ ID NO: 102614 - DNA, 25 bp, Homo sapien
cttctgggccttcctcgaatcttcc

SEQ ID NO: 102615 - DNA, 25 bp, Homo sapien
gtgggctgaaccaggcagagattcc

SEQ ID NO: 102616 - DNA, 25 bp, Homo sapien
gcagagattccagaaggggtggaga

SEQ ID NO: 102617 - DNA, 25 bp, Homo sapien
accaggcagagattccagaaggggt

SEQ ID NO: 102618 - DNA, 25 bp, Homo sapien
agagattccagaaggggtggagaag

SEQ ID NO: 102619 - DNA, 25 bp, Homo sapien
aggtgacacctggtaggacttctgg

SEQ ID NO: 102620 - DNA, 25 bp, Homo sapien
ggtgacacctggtaggacttctggg

SEQ ID NO: 102621 - DNA, 25 bp, Homo sapien
tgggcccactcgtgtagaagtggct

SEQ ID NO: 102622 - DNA, 25 bp, Homo sapien
ttgaggagctgatgagggcactggg

SEQ ID NO: 102623 - DNA, 25 bp, Homo sapien
gcactgggcccactcgtgtagaagt

SEQ ID NO: 102624 - DNA, 25 bp, Homo sapien
tgaggagctgatgagggcactgggc

SEQ ID NO: 102625 - DNA, 25 bp, Homo sapien
caccctggaagctgctgctgccgcc

SEQ ID NO: 102626 - DNA, 25 bp, Homo sapien
ccctggaagctgctgctgccgccca

SEQ ID NO: 102627 - DNA, 25 bp, Homo sapien
catagcctccacccaggccaccctg

SEQ ID NO: 102628 - DNA, 25 bp, Homo sapien
agcctccacccaggccaccctggaa

SEQ ID NO: 102629 - DNA, 25 bp, Homo sapien
cggtgatgcttcctatgctgctggc

SEQ ID NO: 102630 - DNA, 25 bp, Homo sapien
gtgaaggcggtgatgcttcctatgc

SEQ ID NO: 102631 - DNA, 25 bp, Homo sapien
tgtgaaggcggtgatgcttcctatg

SEQ ID NO: 102632 - DNA, 25 bp, Homo sapien
ggcggtgatgcttcctatgctgctg

SEQ ID NO: 102633 - DNA, 25 bp, Homo sapien
aagggggctcagtaggctctggttg

SEQ ID NO: 102634 - DNA, 25 bp, Homo sapien
gggggctcagtaggctctggttgac

SEQ ID NO: 102635 - DNA, 25 bp, Homo sapien
tcaggttaagggggctcagtaggct

SEQ ID NO: 102636 - DNA, 25 bp, Homo sapien
cttcaggttaagggggctcagtagg

SEQ ID NO: 102637 - DNA, 25 bp, Homo sapien
ttgagtatcttgttccgctccttct

SEQ ID NO: 102638 - DNA, 25 bp, Homo sapien
gagtatcttgttccgctccttctcc

SEQ ID NO: 102639 - DNA, 25 bp, Homo sapien
aacttgttgttgagtatcttgttcc

SEQ ID NO: 102640 - DNA, 25 bp, Homo sapien
gttgttgagtatcttgttccgctcc

SEQ ID NO: 102641 - DNA, 25 bp, Homo sapien
ggaggctccagttggactccagcat

SEQ ID NO: 102642 - DNA, 25 bp, Homo sapien
gttgctccaagccatcttctgctgc

SEQ ID NO: 102643 - DNA, 25 bp, Homo sapien
tgcaggaggctccagttggactcca

SEQ ID NO: 102644 - DNA, 25 bp, Homo sapien
aggaggctccagttggactccagca

SEQ ID NO: 102645 - DNA, 25 bp, Homo sapien
ctaccgcctaaggtttttgatatag

SEQ ID NO: 102646 - DNA, 25 bp, Homo sapien
accgcctaaggtttttgatatagct

SEQ ID NO: 102647 - DNA, 25 bp, Homo sapien
ctaaggtttttgatatagctctgga

SEQ ID NO: 102648 - DNA, 25 bp, Homo sapien
aaggtttttgatatagctctggaac

SEQ ID NO: 102649 - DNA, 25 bp, Homo sapien
ttgaagtcttctaccagcccctgca

SEQ ID NO: 102650 - DNA, 25 bp, Homo sapien
ttcttgaagtcttctaccagcccct

SEQ ID NO: 102651 - DNA, 25 bp, Homo sapien
gaagtcttctaccagcccctgcatg

SEQ ID NO: 102652 - DNA, 25 bp, Homo sapien
cttgttcttgaagtcttctaccagc

SEQ ID NO: 102653 - DNA, 25 bp, Homo sapien
ctccagctctaacttgttcaggtaa

SEQ ID NO: 102654 - DNA, 25 bp, Homo sapien
tctaacttgttcaggtaagcttcat

SEQ ID NO: 102655 - DNA, 25 bp, Homo sapien
atcagtcagaccttccaggcgagac

SEQ ID NO: 102656 - DNA, 25 bp, Homo sapien
tctcatcagtcagaccttccaggcg

SEQ ID NO: 102657 - DNA, 25 bp, Homo sapien
ggactgcagctcccagatctcttca

SEQ ID NO: 102658 - DNA, 25 bp, Homo sapien
tgggactgcagctcccagatctctt

SEQ ID NO: 102659 - DNA, 25 bp, Homo sapien
ctgcagctcccagatctcttcatac

SEQ ID NO: 102660 - DNA, 25 bp, Homo sapien
ctgggactgcagctcccagatctct

SEQ ID NO: 102661 - DNA, 25 bp, Homo sapien
cgatggctgtccatgtccggggaac

SEQ ID NO: 102662 - DNA, 25 bp, Homo sapien
agcgatggctgtccatgtccgggga

SEQ ID NO: 102663 - DNA, 25 bp, Homo sapien
ggctgtccatgtccggggaacagct

SEQ ID NO: 102664 - DNA, 25 bp, Homo sapien
atggctgtccatgtccggggaacag

SEQ ID NO: 102665 - DNA, 25 bp, Homo sapien
catctgggagatctgcttttgtgtg

SEQ ID NO: 102666 - DNA, 25 bp, Homo sapien
ttttgtgtgccgcagttcatccccg

SEQ ID NO: 102667 - DNA, 25 bp, Homo sapien
tgctgcgcttggctagctcctcgta

SEQ ID NO: 102668 - DNA, 25 bp, Homo sapien
gctagctcctcgtactaagccttga

SEQ ID NO: 102669 - DNA, 25 bp, Homo sapien
tccccagctgctcggcaactgtgat

SEQ ID NO: 102670 - DNA, 25 bp, Homo sapien
cccagctgctcggcaactgtgatgg

SEQ ID NO: 102671 - DNA, 25 bp, Homo sapien
gctccccagctgctcggcaactgtg

SEQ ID NO: 102672 - DNA, 25 bp, Homo sapien
cagctgctcggcaactgtgatggcg

SEQ ID NO: 102673 - DNA, 25 bp, Homo sapien
gtactcacgcagctgacgctccaag

SEQ ID NO: 102674 - DNA, 25 bp, Homo sapien
atagccgctggtggtcttcatgtgg

SEQ ID NO: 102675 - DNA, 25 bp, Homo sapien
ctgcatagccgctggtggtcttcat

SEQ ID NO: 102676 - DNA, 25 bp, Homo sapien
catagccgctggtggtcttcatgtg

SEQ ID NO: 102677 - DNA, 25 bp, Homo sapien
ccgctggtggtcttcatgtggatac

SEQ ID NO: 102678 - DNA, 25 bp, Homo sapien
ccgcgacagaaccaaaactggagcc

SEQ ID NO: 102679 - DNA, 25 bp, Homo sapien
aaggagctacagcccgcgacagaac

SEQ ID NO: 102680 - DNA, 25 bp, Homo sapien
gttgtgaggtccccctaggccgagc

SEQ ID NO: 102681 - DNA, 25 bp, Homo sapien
gctacagcccgcgacagaaccaaaa

SEQ ID NO: 102682 - DNA, 25 bp, Homo sapien
taactcttctgacatccatggtaac

SEQ ID NO: 102683 - DNA, 25 bp, Homo sapien
ctctaactcttctgacatccatggt

SEQ ID NO: 102684 - DNA, 25 bp, Homo sapien
actcttctgacatccatggtaactg

SEQ ID NO: 102685 - DNA, 25 bp, Homo sapien
tctaactcttctgacatccatggta

SEQ ID NO: 102686 - DNA, 25 bp, Homo sapien
ctgaatgggaacattcactgaagaa

SEQ ID NO: 102687 - DNA, 25 bp, Homo sapien
gaatgggaacattcactgaagaagg

SEQ ID NO: 102688 - DNA, 25 bp, Homo sapien
ggaacattcactgaagaaggtgttc

SEQ ID NO: 102689 - DNA, 25 bp, Homo sapien
atgggaacattcactgaagaaggtg

SEQ ID NO: 102690 - DNA, 25 bp, Homo sapien
tatgtctgtcagtgagagtcaccag

SEQ ID NO: 102691 - DNA, 25 bp, Homo sapien
gaggcactgtgcatactttacgcgc

SEQ ID NO: 102692 - DNA, 25 bp, Homo sapien
tccaatatggtcaccgaagaggcac

SEQ ID NO: 102693 - DNA, 25 bp, Homo sapien
tttcaattccatagacatcatcagt

SEQ ID NO: 102694 - DNA, 25 bp, Homo sapien
ctgccgctcatagcgtagatttggg

SEQ ID NO: 102695 - DNA, 25 bp, Homo sapien
gcgtagatttgggttgtgataagca

SEQ ID NO: 102696 - DNA, 25 bp, Homo sapien
gataagcagtactttagtgctggca

SEQ ID NO: 102697 - DNA, 25 bp, Homo sapien
tactttagtgctggcagttagcctc

SEQ ID NO: 102698 - DNA, 25 bp, Homo sapien
cccatggagatgaaagtcgctgatg

SEQ ID NO: 102699 - DNA, 25 bp, Homo sapien
atggagatgaaagtcgctgatggca

SEQ ID NO: 102700 - DNA, 25 bp, Homo sapien
catggagatgaaagtcgctgatggc

SEQ ID NO: 102701 - DNA, 25 bp, Homo sapien
gtcccatggagatgaaagtcgctga

SEQ ID NO: 102702 - DNA, 25 bp, Homo sapien
aatggctaccctcatttatgtagtc

SEQ ID NO: 102703 - DNA, 25 bp, Homo sapien
taatggctaccctcatttatgtagt

SEQ ID NO: 102704 - DNA, 25 bp, Homo sapien
ctaatggctaccctcatttatgtag

SEQ ID NO: 102705 - DNA, 25 bp, Homo sapien
atggctaccctcatttatgtagtca

SEQ ID NO: 102706 - DNA, 25 bp, Homo sapien
atgcacgaggccctgaagatgtctc

SEQ ID NO: 102707 - DNA, 25 bp, Homo sapien
tgcaaacagttctttccacaaggca

SEQ ID NO: 102708 - DNA, 25 bp, Homo sapien
tcatctgaccaggaatatccatctt

SEQ ID NO: 102709 - DNA, 25 bp, Homo sapien
taaggccatgtataatgcaaacagt

SEQ ID NO: 102710 - DNA, 25 bp, Homo sapien
ggctgctcttctttcgtcgcgtcat

SEQ ID NO: 102711 - DNA, 25 bp, Homo sapien
tggagtctttgagacaccattctct

SEQ ID NO: 102712 - DNA, 25 bp, Homo sapien
tgttgtccaacgtacaggctgctct

SEQ ID NO: 102713 - DNA, 25 bp, Homo sapien
ccttttctttgagtccacactcttc

SEQ ID NO: 102714 - DNA, 25 bp, Homo sapien
ttatcggagactctagggcttcagt

SEQ ID NO: 102715 - DNA, 25 bp, Homo sapien
ccatgaacatcaattatcggagact

SEQ ID NO: 102716 - DNA, 25 bp, Homo sapien
ctatttcctgaagagtgtaaatcct

SEQ ID NO: 102717 - DNA, 25 bp, Homo sapien
gaagagtgtaaatcctaaatgtcca

SEQ ID NO: 102718 - DNA, 25 bp, Homo sapien
cctaagagtgcaggctaataaaggg

SEQ ID NO: 102719 - DNA, 25 bp, Homo sapien
ttcattaccaagcatagcaaacaga

SEQ ID NO: 102720 - DNA, 25 bp, Homo sapien
acttggatagtagcctcagttgtac

SEQ ID NO: 102721 - DNA, 25 bp, Homo sapien
cataagtctgtctatctatacatgg

SEQ ID NO: 102722 - DNA, 25 bp, Homo sapien
agtaagttccactttctccagtaag

SEQ ID NO: 102723 - DNA, 25 bp, Homo sapien
tcctctcagtaagttccactttctc

SEQ ID NO: 102724 - DNA, 25 bp, Homo sapien
cctctcagtaagttccactttctcc

SEQ ID NO: 102725 - DNA, 25 bp, Homo sapien
cagtaagttccactttctccagtaa

SEQ ID NO: 102726 - DNA, 25 bp, Homo sapien
gctgcttggacataatcagaacttg

SEQ ID NO: 102727 - DNA, 25 bp, Homo sapien
cagaacttgtgaaatagcagtgtcc

SEQ ID NO: 102728 - DNA, 25 bp, Homo sapien
gcttcataagggaggccacgtcata

SEQ ID NO: 102729 - DNA, 25 bp, Homo sapien
cgtctttgccagaggcggcttcata

SEQ ID NO: 102730 - DNA, 25 bp, Homo sapien
cttcaggccccttagcattatgtgg

SEQ ID NO: 102731 - DNA, 25 bp, Homo sapien
caggccccttagcattatgtggggg

SEQ ID NO: 102732 - DNA, 25 bp, Homo sapien
gccccttagcattatgtgggggcat

SEQ ID NO: 102733 - DNA, 25 bp, Homo sapien
ttcaggccccttagcattatgtggg

SEQ ID NO: 102734 - DNA, 25 bp, Homo sapien
agactgtttttcagaatggtccata

SEQ ID NO: 102735 - DNA, 25 bp, Homo sapien
gaatggtccatatttggtccacagg

SEQ ID NO: 102736 - DNA, 25 bp, Homo sapien
ttcagaatggtccatatttggtcca

SEQ ID NO: 102737 - DNA, 25 bp, Homo sapien
ccatatttggtccacaggaaatcct

SEQ ID NO: 102738 - DNA, 25 bp, Homo sapien
taacgaagtgaagttctgagcatgt

SEQ ID NO: 102739 - DNA, 25 bp, Homo sapien
tcttggagtacattagcacaagctg

SEQ ID NO: 102740 - DNA, 25 bp, Homo sapien
ttgaggtgctggatgataacgaagt

SEQ ID NO: 102741 - DNA, 25 bp, Homo sapien
taaggaaaatagtccacacagggca

SEQ ID NO: 102742 - DNA, 25 bp, Homo sapien
tgtagtttggtcaggaccaatccct

SEQ ID NO: 102743 - DNA, 25 bp, Homo sapien
tttggtcaggaccaatccctctcat

SEQ ID NO: 102744 - DNA, 25 bp, Homo sapien
tagtttggtcaggaccaatccctct

SEQ ID NO: 102745 - DNA, 25 bp, Homo sapien
cttgtagtttggtcaggaccaatcc

SEQ ID NO: 102746 - DNA, 25 bp, Homo sapien
accatcgtcttgctggtaccgtaaa

SEQ ID NO: 102747 - DNA, 25 bp, Homo sapien
ccatcgtcttgctggtaccgtaaaa

SEQ ID NO: 102748 - DNA, 25 bp, Homo sapien
catcgtcttgctggtaccgtaaaaa

SEQ ID NO: 102749 - DNA, 25 bp, Homo sapien
ctccacgctcccagtgcgggactga

SEQ ID NO: 102750 - DNA, 25 bp, Homo sapien
tctccacgctcccagtgcgggactg

SEQ ID NO: 102751 - DNA, 25 bp, Homo sapien
ctctccacgctcccagtgcgggact

SEQ ID NO: 102752 - DNA, 25 bp, Homo sapien
tccacgctcccagtgcgggactgac

SEQ ID NO: 102753 - DNA, 25 bp, Homo sapien
tctctgggcacgctcttctgcgcat

SEQ ID NO: 102754 - DNA, 25 bp, Homo sapien
tctccctctgggtcagcgtcttctt

SEQ ID NO: 102755 - DNA, 25 bp, Homo sapien
ggcacgctcttctgcgcatcggctt

SEQ ID NO: 102756 - DNA, 25 bp, Homo sapien
ttggccccacttcaagaaaggcttg

SEQ ID NO: 102757 - DNA, 25 bp, Homo sapien
ggcatcaaagatgtgctcttcttca

SEQ ID NO: 102758 - DNA, 25 bp, Homo sapien
gatgaaggccaacagcgtcagtcct

SEQ ID NO: 102759 - DNA, 25 bp, Homo sapien
ccccaggcaacacgtctgatgaagg

SEQ ID NO: 102760 - DNA, 25 bp, Homo sapien
cctcactgctaacacttgaagggct

SEQ ID NO: 102761 - DNA, 25 bp, Homo sapien
tcttatgcttaaagatccacctcca

SEQ ID NO: 102762 - DNA, 25 bp, Homo sapien
gtgaggctgaggccgcccccactcg

SEQ ID NO: 102763 - DNA, 25 bp, Homo sapien
agggacagtctgtctaggtgaggct

SEQ ID NO: 102764 - DNA, 25 bp, Homo sapien
caacaccggctgtggtctgccggcg

SEQ ID NO: 102765 - DNA, 25 bp, Homo sapien
gggcaacaccggctgtggtctgccg

SEQ ID NO: 102766 - DNA, 25 bp, Homo sapien
ggacacacagggaacggctgcataa

SEQ ID NO: 102767 - DNA, 25 bp, Homo sapien
cagggaacggctgcataaggagatc

SEQ ID NO: 102768 - DNA, 25 bp, Homo sapien
ctgagatgtccatttttgggagtgt

SEQ ID NO: 102769 - DNA, 25 bp, Homo sapien
tttgggagtgtgagccctcctctcc

SEQ ID NO: 102770 - DNA, 25 bp, Homo sapien
gatgtcagtgaggactgtcctgtcg

SEQ ID NO: 102771 - DNA, 25 bp, Homo sapien
tgtcagtgaggactgtcctgtcgct

SEQ ID NO: 102772 - DNA, 25 bp, Homo sapien
cagtgaggactgtcctgtcgctgct

SEQ ID NO: 102773 - DNA, 25 bp, Homo sapien
ggatgtcagtgaggactgtcctgtc

SEQ ID NO: 102774 - DNA, 25 bp, Homo sapien
ctgttggcacgaactgcagatgtca

SEQ ID NO: 102775 - DNA, 25 bp, Homo sapien
cactgttggcacgaactgcagatgt

SEQ ID NO: 102776 - DNA, 25 bp, Homo sapien
tacacactgttggcacgaactgcag

SEQ ID NO: 102777 - DNA, 25 bp, Homo sapien
cacactgttggcacgaactgcagat

SEQ ID NO: 102778 - DNA, 25 bp, Homo sapien
tttgaccgttgatgggaaccaagtg

SEQ ID NO: 102779 - DNA, 25 bp, Homo sapien
actggtcactggtgcaaagttgccc

SEQ ID NO: 102780 - DNA, 25 bp, Homo sapien
tgacacttggccaaagggtcctcac

SEQ ID NO: 102781 - DNA, 25 bp, Homo sapien
caggagcccgctacacagtaggaga

SEQ ID NO: 102782 - DNA, 25 bp, Homo sapien
cagggcagccgaacaaagctggaaa

SEQ ID NO: 102783 - DNA, 25 bp, Homo sapien
gtcagggcagccgaacaaagctgga

SEQ ID NO: 102784 - DNA, 25 bp, Homo sapien
tcagggcagccgaacaaagctggaa

SEQ ID NO: 102785 - DNA, 25 bp, Homo sapien
cggtcagggcagccgaacaaagctg

SEQ ID NO: 102786 - DNA, 25 bp, Homo sapien
agagcctggccgaccaagcgaggct

SEQ ID NO: 102787 - DNA, 25 bp, Homo sapien
caaagtcacaacattcagagattcc

SEQ ID NO: 102788 - DNA, 25 bp, Homo sapien
agagattccctgcactctgaggccc

SEQ ID NO: 102789 - DNA, 25 bp, Homo sapien
agccctctgatcagggcggccgagt

SEQ ID NO: 102790 - DNA, 25 bp, Homo sapien
cacaagggacactccatggcaggtc

SEQ ID NO: 102791 - DNA, 25 bp, Homo sapien
acaagggacactccatggcaggtcc

SEQ ID NO: 102792 - DNA, 25 bp, Homo sapien
gcacaagggacactccatggcaggt

SEQ ID NO: 102793 - DNA, 25 bp, Homo sapien
gactagtagggctctgccgtggtgg

SEQ ID NO: 102794 - DNA, 25 bp, Homo sapien
cccagactagtagggctctgccgtg

SEQ ID NO: 102795 - DNA, 25 bp, Homo sapien
actagtagggctctgccgtggtggc

SEQ ID NO: 102796 - DNA, 25 bp, Homo sapien
cagactagtagggctctgccgtggt

SEQ ID NO: 102797 - DNA, 25 bp, Homo sapien
ttttgatgtcagctcattcacagga

SEQ ID NO: 102798 - DNA, 25 bp, Homo sapien
gaggtcactgggaataaagcccaca

SEQ ID NO: 102799 - DNA, 25 bp, Homo sapien
gaaacaatcacatctcagtgcccag

SEQ ID NO: 102800 - DNA, 25 bp, Homo sapien
ggtggcctccgccagagccaacaag

SEQ ID NO: 102801 - DNA, 25 bp, Homo sapien
tcacagtacacgcatggcggcggtt

SEQ ID NO: 102802 - DNA, 25 bp, Homo sapien
gaaaactctcgctgaatccactcgg

SEQ ID NO: 102803 - DNA, 25 bp, Homo sapien
gatggtccgtcaaagtaaagctcaa

SEQ ID NO: 102804 - DNA, 25 bp, Homo sapien
taacagtgggaaatgggacaacatc

SEQ ID NO: 102805 - DNA, 25 bp, Homo sapien
gcctcattcacttgcagaagttttt

SEQ ID NO: 102806 - DNA, 25 bp, Homo sapien
aacaggttatgcaaagactgcagcc

SEQ ID NO: 102807 - DNA, 25 bp, Homo sapien
tgcaaagactgcagcctttcctttg

SEQ ID NO: 102808 - DNA, 25 bp, Homo sapien
aaggaaacaggttatgcaaagactg

SEQ ID NO: 102809 - DNA, 25 bp, Homo sapien
ggccttcaaactctcgtacagtagt

SEQ ID NO: 102810 - DNA, 25 bp, Homo sapien
aactctcgtacagtagtctttgatg

SEQ ID NO: 102811 - DNA, 25 bp, Homo sapien
cttgtggccttcaaactctcgtaca

SEQ ID NO: 102812 - DNA, 25 bp, Homo sapien
cgtacagtagtctttgatgtcctca

SEQ ID NO: 102813 - DNA, 25 bp, Homo sapien
gagatggttgctcagaagagtggga

SEQ ID NO: 102814 - DNA, 25 bp, Homo sapien
gaagagtgggaagaatttgttcact

SEQ ID NO: 102815 - DNA, 25 bp, Homo sapien
ttttgagatggttgctcagaagagt

SEQ ID NO: 102816 - DNA, 25 bp, Homo sapien
gatggttgctcagaagagtgggaag

SEQ ID NO: 102817 - DNA, 25 bp, Homo sapien
taggtcccatactcagtatttctcc

SEQ ID NO: 102818 - DNA, 25 bp, Homo sapien
tactcagtatttctccatctgcgct

SEQ ID NO: 102819 - DNA, 25 bp, Homo sapien
aatagctccctttaggtcccatact

SEQ ID NO: 102820 - DNA, 25 bp, Homo sapien
gctccctttaggtcccatactcagt

SEQ ID NO: 102821 - DNA, 25 bp, Homo sapien
caagtgcctttgtaataaactgatg

SEQ ID NO: 102822 - DNA, 25 bp, Homo sapien
tcccaagtgcctttgtaataaactg

SEQ ID NO: 102823 - DNA, 25 bp, Homo sapien
agagctacctgatgaacatctctac

SEQ ID NO: 102824 - DNA, 25 bp, Homo sapien
aagagtccataaatagagctacctg

SEQ ID NO: 102825 - DNA, 25 bp, Homo sapien
cagacacattaggtgagcagtgccc

SEQ ID NO: 102826 - DNA, 25 bp, Homo sapien
ggcagttgaatccaagagcagcaat

SEQ ID NO: 102827 - DNA, 25 bp, Homo sapien
gttcaggttctctaacactggcaga

SEQ ID NO: 102828 - DNA, 25 bp, Homo sapien
tgtaaatcagatctctgcctggcca

SEQ ID NO: 102829 - DNA, 25 bp, Homo sapien
cattgacttgtttaggcttgggttc

SEQ ID NO: 102830 - DNA, 25 bp, Homo sapien
gccaagagagtgttatatactgcat

SEQ ID NO: 102831 - DNA, 25 bp, Homo sapien
gattgacttagatagcatgccaaga

SEQ ID NO: 102832 - DNA, 25 bp, Homo sapien
tgaatcaataactgtggcagagctt

SEQ ID NO: 102833 - DNA, 25 bp, Homo sapien
gaagtctttaactctattaacatca

SEQ ID NO: 102834 - DNA, 25 bp, Homo sapien
ttaacaatatgaagtctttaactct

SEQ ID NO: 102835 - DNA, 25 bp, Homo sapien
attaacatcaaacgtctttccattt

SEQ ID NO: 102836 - DNA, 25 bp, Homo sapien
ttaacatcaaacgtctttccatttg

SEQ ID NO: 102837 - DNA, 25 bp, Homo sapien
cctactgctttctcccgtttggaga

SEQ ID NO: 102838 - DNA, 25 bp, Homo sapien
tgagcctcagtcttgcctactgctt

SEQ ID NO: 102839 - DNA, 25 bp, Homo sapien
tgatgagggccatgagcctcagtct

SEQ ID NO: 102840 - DNA, 25 bp, Homo sapien
gccatgagcctcagtcttgcctact

SEQ ID NO: 102841 - DNA, 25 bp, Homo sapien
acttcatttcttggcagcatcttta

SEQ ID NO: 102842 - DNA, 25 bp, Homo sapien
ctttttgtggcacttcatttcttgg

SEQ ID NO: 102843 - DNA, 25 bp, Homo sapien
cagtatcttcttatgtcttttcttc

SEQ ID NO: 102844 - DNA, 25 bp, Homo sapien
tttgtggcacttcatttcttggcag

SEQ ID NO: 102845 - DNA, 25 bp, Homo sapien
aatctcttcagtagtgacattttca

SEQ ID NO: 102846 - DNA, 25 bp, Homo sapien
tcttcagtagtgacattttcactga

SEQ ID NO: 102847 - DNA, 25 bp, Homo sapien
actgatgacattaagaatacattga

SEQ ID NO: 102848 - DNA, 25 bp, Homo sapien
ctgatgacattaagaatacattgaa

SEQ ID NO: 102849 - DNA, 25 bp, Homo sapien
tttgtgtctttttctgttcccagtg

SEQ ID NO: 102850 - DNA, 25 bp, Homo sapien
caatctatttactttgtgtcttttt

SEQ ID NO: 102851 - DNA, 25 bp, Homo sapien
actttgtgtctttttctgttcccag

SEQ ID NO: 102852 - DNA, 25 bp, Homo sapien
tgtgtctttttctgttcccagtgtt

SEQ ID NO: 102853 - DNA, 25 bp, Homo sapien
agcacatgccagactgcatctccag

SEQ ID NO: 102854 - DNA, 25 bp, Homo sapien
tgcaatgcattttcgaataacgcaa

SEQ ID NO: 102855 - DNA, 25 bp, Homo sapien
gaggcgacgggcagactaatcaagt

SEQ ID NO: 102856 - DNA, 25 bp, Homo sapien
aacgcaatgtggctgacaatggctg

SEQ ID NO: 102857 - DNA, 25 bp, Homo sapien
taatagcagatagaacttgtagtgg

SEQ ID NO: 102858 - DNA, 25 bp, Homo sapien
gttattcagctttgtaatagcagat

SEQ ID NO: 102859 - DNA, 25 bp, Homo sapien
tcagctttgtaatagcagatagaac

SEQ ID NO: 102860 - DNA, 25 bp, Homo sapien
tagaacttgtagtggccgttctggg

SEQ ID NO: 102861 - DNA, 25 bp, Homo sapien
tttgactctgtgagatctttggaca

SEQ ID NO: 102862 - DNA, 25 bp, Homo sapien
gaccactgcttgtgttggttggaat

SEQ ID NO: 102863 - DNA, 25 bp, Homo sapien
ccagaccactgcttgtgttggttgg

SEQ ID NO: 102864 - DNA, 25 bp, Homo sapien
ctatgtttgactctgtgagatcttt

SEQ ID NO: 102865 - DNA, 25 bp, Homo sapien
ggtgttaaggatggtcgctggtggt

SEQ ID NO: 102866 - DNA, 25 bp, Homo sapien
aggatggtcgctggtggtctgtcca

SEQ ID NO: 102867 - DNA, 25 bp, Homo sapien
taaggatggtcgctggtggtctgtc

SEQ ID NO: 102868 - DNA, 25 bp, Homo sapien
ggatggaggaagaaggtgttaagga

SEQ ID NO: 102869 - DNA, 25 bp, Homo sapien
cagatggatctcaacagcatgctgg

SEQ ID NO: 102870 - DNA, 25 bp, Homo sapien
gattgtaccaacttaaatcttgtgt

SEQ ID NO: 102871 - DNA, 25 bp, Homo sapien
tttgttcacatccagttgcagaggg

SEQ ID NO: 102872 - DNA, 25 bp, Homo sapien
cttaaatcttgtgttcacctctgga

SEQ ID NO: 102873 - DNA, 25 bp, Homo sapien
gcatagtctagtacgagagacagat

SEQ ID NO: 102874 - DNA, 25 bp, Homo sapien
agtctagtacgagagacagattgcc

SEQ ID NO: 102875 - DNA, 25 bp, Homo sapien
cttccaggggtgcatagtctagtac

SEQ ID NO: 102876 - DNA, 25 bp, Homo sapien
gggtgcatagtctagtacgagagac

SEQ ID NO: 102877 - DNA, 25 bp, Homo sapien
cttcgtcatagtaatgctcagacct

SEQ ID NO: 102878 - DNA, 25 bp, Homo sapien
cagacctggagaacccgtgcctttc

SEQ ID NO: 102879 - DNA, 25 bp, Homo sapien
ctcagacctggagaacccgtgcctt

SEQ ID NO: 102880 - DNA, 25 bp, Homo sapien
tggagaacccgtgcctttcctccat

SEQ ID NO: 102881 - DNA, 25 bp, Homo sapien
ttcctgctccggctcatgggcactg

SEQ ID NO: 102882 - DNA, 25 bp, Homo sapien
ctctcttcctgctccggctcatggg

SEQ ID NO: 102883 - DNA, 25 bp, Homo sapien
tcctgctccggctcatgggcactga

SEQ ID NO: 102884 - DNA, 25 bp, Homo sapien
tcttcctgctccggctcatgggcac

SEQ ID NO: 102885 - DNA, 25 bp, Homo sapien
aaggagttccatctgtaactatgaa

SEQ ID NO: 102886 - DNA, 25 bp, Homo sapien
tccatctgtaactatgaacaatcaa

SEQ ID NO: 102887 - DNA, 25 bp, Homo sapien
gagttccatctgtaactatgaacaa

SEQ ID NO: 102888 - DNA, 25 bp, Homo sapien
acaaggagttccatctgtaactatg

SEQ ID NO: 102889 - DNA, 25 bp, Homo sapien
tagaagacgagaggtttacacagtt

SEQ ID NO: 102890 - DNA, 25 bp, Homo sapien
gctctgggaaacaaggaaccctctc

SEQ ID NO: 102891 - DNA, 25 bp, Homo sapien
actcaaggaagctggcaacttcaac

SEQ ID NO: 102892 - DNA, 25 bp, Homo sapien
cattggaagcactattggccatgag

SEQ ID NO: 102893 - DNA, 25 bp, Homo sapien
gctttatcttgaggcttgagttttg

SEQ ID NO: 102894 - DNA, 25 bp, Homo sapien
tgctttatcttgaggcttgagtttt

SEQ ID NO: 102895 - DNA, 25 bp, Homo sapien
tttatcttgaggcttgagttttgac

SEQ ID NO: 102896 - DNA, 25 bp, Homo sapien
atgctttatcttgaggcttgagttt

SEQ ID NO: 102897 - DNA, 25 bp, Homo sapien
cctggacttggtggagactggccca

SEQ ID NO: 102898 - DNA, 25 bp, Homo sapien
aggagggctttcataaggctgccgt

SEQ ID NO: 102899 - DNA, 25 bp, Homo sapien
tcttatggtctcagaggagattcta

SEQ ID NO: 102900 - DNA, 25 bp, Homo sapien
gtgggctccgctggacacaagcaca

SEQ ID NO: 102901 - DNA, 25 bp, Homo sapien
tctgctctggacactcggcagactt

SEQ ID NO: 102902 - DNA, 25 bp, Homo sapien
gatgccaggacttgggctgcctaca

SEQ ID NO: 102903 - DNA, 25 bp, Homo sapien
gattccctgcttcgctgtctgctct

SEQ ID NO: 102904 - DNA, 25 bp, Homo sapien
taggcccatccttcgcttgtgtgag

SEQ ID NO: 102905 - DNA, 25 bp, Homo sapien
gtcagttgcttccagagtgaggatt

SEQ ID NO: 102906 - DNA, 25 bp, Homo sapien
tcagtcagttgcttccagagtgagg

SEQ ID NO: 102907 - DNA, 25 bp, Homo sapien
agtcagttgcttccagagtgaggat

SEQ ID NO: 102908 - DNA, 25 bp, Homo sapien
cagtcagttgcttccagagtgagga

SEQ ID NO: 102909 - DNA, 25 bp, Homo sapien
gctggaaggcaattccatttggctt

SEQ ID NO: 102910 - DNA, 25 bp, Homo sapien
caaggaagaggcgtttggtcatcac

SEQ ID NO: 102911 - DNA, 25 bp, Homo sapien
catttggcttttggccatcagcctt

SEQ ID NO: 102912 - DNA, 25 bp, Homo sapien
ggtcatcactggcttttggctggaa

SEQ ID NO: 102913 - DNA, 25 bp, Homo sapien
taaaaggtggtgctatgatatatgc

SEQ ID NO: 102914 - DNA, 25 bp, Homo sapien
aattagcttaaataagttgctttgt

SEQ ID NO: 102915 - DNA, 25 bp, Homo sapien
catatgatggtaaagcagaaactta

SEQ ID NO: 102916 - DNA, 25 bp, Homo sapien
ttgtacttgcatgaacacaatcata

SEQ ID NO: 102917 - DNA, 25 bp, Homo sapien
gttttttgagaaggctgataccagc

SEQ ID NO: 102918 - DNA, 25 bp, Homo sapien
aattttctctagtatgtggtaggcc

SEQ ID NO: 102919 - DNA, 25 bp, Homo sapien
gtggtaggccctctttatatgtatt

SEQ ID NO: 102920 - DNA, 25 bp, Homo sapien
tttcttgcccttgtaaattatttga

SEQ ID NO: 102921 - DNA, 25 bp, Homo sapien
tggtgctgcctgacatggtgctagt

SEQ ID NO: 102922 - DNA, 25 bp, Homo sapien
cagaagaacttgagatggaggccat

SEQ ID NO: 102923 - DNA, 25 bp, Homo sapien
gaaccgagaaccttggtggcagctg

SEQ ID NO: 102924 - DNA, 25 bp, Homo sapien
taacaagggcattgatctaatccac

SEQ ID NO: 102925 - DNA, 25 bp, Homo sapien
gtcatcatcatactcctcaggttct

SEQ ID NO: 102926 - DNA, 25 bp, Homo sapien
aggtgcagcaccaactgttggagca

SEQ ID NO: 102927 - DNA, 25 bp, Homo sapien
tttcttttcctcagctggggcagca

SEQ ID NO: 102928 - DNA, 25 bp, Homo sapien
tgcaggtgcagcaccaactgttgga

SEQ ID NO: 102929 - DNA, 25 bp, Homo sapien
agcttttttattgaacatgttataa

SEQ ID NO: 102930 - DNA, 25 bp, Homo sapien
ttattgaacatgttataaaagaggt

SEQ ID NO: 102931 - DNA, 25 bp, Homo sapien
ttttattgaacatgttataaaagag

SEQ ID NO: 102932 - DNA, 25 bp, Homo sapien
agagttcagcttttttattgaacat

SEQ ID NO: 102933 - DNA, 25 bp, Homo sapien
gttggccgggcggaggtcttcgctg

SEQ ID NO: 102934 - DNA, 25 bp, Homo sapien
gtggcgccacccctgattgcggtgc

SEQ ID NO: 102935 - DNA, 25 bp, Homo sapien
ggcggaggtcttcgctgaggcccgg

SEQ ID NO: 102936 - DNA, 25 bp, Homo sapien
cccctgattgcggtgccacggactg

SEQ ID NO: 102937 - DNA, 25 bp, Homo sapien
aatcctccggttattaagcaagctc

SEQ ID NO: 102938 - DNA, 25 bp, Homo sapien
ttctcaaatcctccggttattaagc

SEQ ID NO: 102939 - DNA, 25 bp, Homo sapien
ccgccgcgcgcctttctcaaatcct

SEQ ID NO: 102940 - DNA, 25 bp, Homo sapien
ctccggttattaagcaagctcaggg

SEQ ID NO: 102941 - DNA, 25 bp, Homo sapien
gattctcggaatcaaccagggtcct

SEQ ID NO: 102942 - DNA, 25 bp, Homo sapien
tacgtgaattctttcgggccaggga

SEQ ID NO: 102943 - DNA, 25 bp, Homo sapien
gggatctgggcctactttgcctgca

SEQ ID NO: 102944 - DNA, 25 bp, Homo sapien
gagctaaggtgtccgagtggcacca

SEQ ID NO: 102945 - DNA, 25 bp, Homo sapien
gctcgccgtcaaccacgatgttgaa

SEQ ID NO: 102946 - DNA, 25 bp, Homo sapien
caagggctcgccgtcaaccacgatg

SEQ ID NO: 102947 - DNA, 25 bp, Homo sapien
cgtcaaccacgatgttgaagaacac

SEQ ID NO: 102948 - DNA, 25 bp, Homo sapien
gggctcgccgtcaaccacgatgttg

SEQ ID NO: 102949 - DNA, 25 bp, Homo sapien
tgaaggcgtgctctattgagctaca

SEQ ID NO: 102950 - DNA, 25 bp, Homo sapien
ctattgagctacagacagaatggtc

SEQ ID NO: 102951 - DNA, 25 bp, Homo sapien
gaagggaacacttataatccaatcc

SEQ ID NO: 102952 - DNA, 25 bp, Homo sapien
ttataggatactgcgaaaaaatggg

SEQ ID NO: 102953 - DNA, 25 bp, Homo sapien
cgcccattctaggtcacagcgcagg

SEQ ID NO: 102954 - DNA, 25 bp, Homo sapien
cacagcgcaggcgtactaatagaca

SEQ ID NO: 102955 - DNA, 25 bp, Homo sapien
atagacaccttaggcgcggagctga

SEQ ID NO: 102956 - DNA, 25 bp, Homo sapien
actaatagacaccttaggcgcggag

SEQ ID NO: 102957 - DNA, 25 bp, Homo sapien
tcaaaccagccagttccgctcggcg

SEQ ID NO: 102958 - DNA, 25 bp, Homo sapien
aaaccagccagttccgctcggcgca

SEQ ID NO: 102959 - DNA, 25 bp, Homo sapien
aaccagccagttccgctcggcgcat

SEQ ID NO: 102960 - DNA, 25 bp, Homo sapien
tttcaaaccagccagttccgctcgg

SEQ ID NO: 102961 - DNA, 25 bp, Homo sapien
ccactgcggactccgctggtaccca

SEQ ID NO: 102962 - DNA, 25 bp, Homo sapien
cttccactgcggactccgctggtac

SEQ ID NO: 102963 - DNA, 25 bp, Homo sapien
cggactccgctggtacccacgccat

SEQ ID NO: 102964 - DNA, 25 bp, Homo sapien
ctgcggactccgctggtacccacgc

SEQ ID NO: 102965 - DNA, 25 bp, Homo sapien
ctcaggtattcctgaggcgtcctcg

SEQ ID NO: 102966 - DNA, 25 bp, Homo sapien
caggtattcctgaggcgtcctcggg

SEQ ID NO: 102967 - DNA, 25 bp, Homo sapien
cttccgtcaagtcgcaaggctctac

SEQ ID NO: 102968 - DNA, 25 bp, Homo sapien
cgagggatcgaaaccttccgtcaag

SEQ ID NO: 102969 - DNA, 25 bp, Homo sapien
cacaacatctggacattgagctgct

SEQ ID NO: 102970 - DNA, 25 bp, Homo sapien
caatttgagctaccacaacatctgg

SEQ ID NO: 102971 - DNA, 25 bp, Homo sapien
taccacaacatctggacattgagct

SEQ ID NO: 102972 - DNA, 25 bp, Homo sapien
ttgagctaccacaacatctggacat

SEQ ID NO: 102973 - DNA, 25 bp, Homo sapien
tcacactttgcttccttttcaactt

SEQ ID NO: 102974 - DNA, 25 bp, Homo sapien
attcacactttgcttccttttcaac

SEQ ID NO: 102975 - DNA, 25 bp, Homo sapien
cacactttgcttccttttcaacttc

SEQ ID NO: 102976 - DNA, 25 bp, Homo sapien
atattcacactttgcttccttttca

SEQ ID NO: 102977 - DNA, 25 bp, Homo sapien
aaaactgtgccacttgttgctgttg

SEQ ID NO: 102978 - DNA, 25 bp, Homo sapien
accttcaggggcgggttggcatcct

SEQ ID NO: 102979 - DNA, 25 bp, Homo sapien
ttgctgttgccattgaagtgttggg

SEQ ID NO: 102980 - DNA, 25 bp, Homo sapien
ctgtcgaacagttgaaaactgtgcc

SEQ ID NO: 102981 - DNA, 25 bp, Homo sapien
ttactatccaactgttgtgatttcc

SEQ ID NO: 102982 - DNA, 25 bp, Homo sapien
gatttccagtgacttctatgtttgt

SEQ ID NO: 102983 - DNA, 25 bp, Homo sapien
tttccagtgacttctatgtttgttc

SEQ ID NO: 102984 - DNA, 25 bp, Homo sapien
ccagtgacttctatgtttgttcaca

SEQ ID NO: 102985 - DNA, 25 bp, Homo sapien
tggccaacatggcaaaaccccacct

SEQ ID NO: 102986 - DNA, 25 bp, Homo sapien
ggccgaggcaggcgatcacatgaag

SEQ ID NO: 102987 - DNA, 25 bp, Homo sapien
cgaggcaggcgatcacatgaagtca

SEQ ID NO: 102988 - DNA, 25 bp, Homo sapien
ggagttcaagaccagcctggccaac

SEQ ID NO: 102989 - DNA, 25 bp, Homo sapien
tccaacagccccgtcagcacataac

SEQ ID NO: 102990 - DNA, 25 bp, Homo sapien
caacagccccgtcagcacataactt

SEQ ID NO: 102991 - DNA, 25 bp, Homo sapien
acagccccgtcagcacataactttt

SEQ ID NO: 102992 - DNA, 25 bp, Homo sapien
aacagccccgtcagcacataacttt

SEQ ID NO: 102993 - DNA, 25 bp, Homo sapien
ttttccctggctactcataacactg

SEQ ID NO: 102994 - DNA, 25 bp, Homo sapien
ttaccaagccaaacataagggatat

SEQ ID NO: 102995 - DNA, 25 bp, Homo sapien
tacaggcccatgaagtgatagatgt

SEQ ID NO: 102996 - DNA, 25 bp, Homo sapien
acattttctatcaagagtcagacag

SEQ ID NO: 102997 - DNA, 25 bp, Homo sapien
aggaacacctgcaaacttgggggca

SEQ ID NO: 102998 - DNA, 25 bp, Homo sapien
cacctgcaaacttgggggcaggtaa

SEQ ID NO: 102999 - DNA, 25 bp, Homo sapien
tcaaggaacacctgcaaacttgggg

SEQ ID NO: 103000 - DNA, 25 bp, Homo sapien
aacacctgcaaacttgggggcaggt

SEQ ID NO: 103001 - DNA, 25 bp, Homo sapien
ttctgctaacaatactaagcaaggg

SEQ ID NO: 103002 - DNA, 25 bp, Homo sapien
attcattctgctaacaatactaagc

SEQ ID NO: 103003 - DNA, 25 bp, Homo sapien
taacaatactaagcaagggaggaaa

SEQ ID NO: 103004 - DNA, 25 bp, Homo sapien
tgctaacaatactaagcaagggagg

SEQ ID NO: 103005 - DNA, 25 bp, Homo sapien
cagatattccaagacactagttact

SEQ ID NO: 103006 - DNA, 25 bp, Homo sapien
ttactcagatattccaagacactag

SEQ ID NO: 103007 - DNA, 25 bp, Homo sapien
aaccaattactcagatattccaaga

SEQ ID NO: 103008 - DNA, 25 bp, Homo sapien
caattctggagtaaagtctctttct

SEQ ID NO: 103009 - DNA, 25 bp, Homo sapien
tgaaaagaaaaacatgcaatactac

SEQ ID NO: 103010 - DNA, 25 bp, Homo sapien
ctacattatgaaaagaaaaacatgc

SEQ ID NO: 103011 - DNA, 25 bp, Homo sapien
tatgaaaagaaaaacatgcaatact

SEQ ID NO: 103012 - DNA, 25 bp, Homo sapien
attatgaaaagaaaaacatgcaata

SEQ ID NO: 103013 - DNA, 25 bp, Homo sapien
ttatgtttgggtatagacaagaaag

SEQ ID NO: 103014 - DNA, 25 bp, Homo sapien
caatgttatgcctgattatctgcta

SEQ ID NO: 103015 - DNA, 25 bp, Homo sapien
aagcctcatttggagagccaggtgt

SEQ ID NO: 103016 - DNA, 25 bp, Homo sapien
tagacaaatactgaaccagaagttt

SEQ ID NO: 103017 - DNA, 25 bp, Homo sapien
actaagagcctcacttcagagcacc

SEQ ID NO: 103018 - DNA, 25 bp, Homo sapien
ttcttgcaagctgccgaatcagtga

SEQ ID NO: 103019 - DNA, 25 bp, Homo sapien
aatgagcctcaggtaacaaaggctt

SEQ ID NO: 103020 - DNA, 25 bp, Homo sapien
tcaggtaacaaaggcttttcaagac

SEQ ID NO: 103021 - DNA, 25 bp, Homo sapien
ctgctaaccaagcagattaataaat

SEQ ID NO: 103022 - DNA, 25 bp, Homo sapien
tcaaagcaggaaccctctcatcatc

SEQ ID NO: 103023 - DNA, 25 bp, Homo sapien
taaattcaaagcaggaaccctctca

SEQ ID NO: 103024 - DNA, 25 bp, Homo sapien
gattaataaattcaaagcaggaacc

SEQ ID NO: 103025 - DNA, 25 bp, Homo sapien
ctcactgataaataataaagaagcc

SEQ ID NO: 103026 - DNA, 25 bp, Homo sapien
ctgataaataataaagaagccaagg

SEQ ID NO: 103027 - DNA, 25 bp, Homo sapien
taaagaagccaaggattaactatac

SEQ ID NO: 103028 - DNA, 25 bp, Homo sapien
ataaagaagccaaggattaactata

SEQ ID NO: 103029 - DNA, 25 bp, Homo sapien
aaaccaaatgtaataaatacgatct

SEQ ID NO: 103030 - DNA, 25 bp, Homo sapien
ataaatacgatctaacctcactgac

SEQ ID NO: 103031 - DNA, 25 bp, Homo sapien
caaatgtaataaatacgatctaacc

SEQ ID NO: 103032 - DNA, 25 bp, Homo sapien
tgtaataaatacgatctaacctcac

SEQ ID NO: 103033 - DNA, 25 bp, Homo sapien
tgcaccctaactatagcaacagagt

SEQ ID NO: 103034 - DNA, 25 bp, Homo sapien
aaaaatatgccacaactgaaaatga

SEQ ID NO: 103035 - DNA, 25 bp, Homo sapien
tgaaaatgaacgcaggacacaggca

SEQ ID NO: 103036 - DNA, 25 bp, Homo sapien
taaattccaagaagaatttctatgt

SEQ ID NO: 103037 - DNA, 25 bp, Homo sapien
tggctcatcagctaaatcacgttgg

SEQ ID NO: 103038 - DNA, 25 bp, Homo sapien
aagatggctcatcagctaaatcacg

SEQ ID NO: 103039 - DNA, 25 bp, Homo sapien
gatggctcatcagctaaatcacgtt

SEQ ID NO: 103040 - DNA, 25 bp, Homo sapien
tcaagatggctcatcagctaaatca

SEQ ID NO: 103041 - DNA, 25 bp, Homo sapien
ttaattctgatgctaaggccatcca

SEQ ID NO: 103042 - DNA, 25 bp, Homo sapien
tcttctatccctgagagatcagcta

SEQ ID NO: 103043 - DNA, 25 bp, Homo sapien
tgcaagctgcttgattacagaaaac

SEQ ID NO: 103044 - DNA, 25 bp, Homo sapien
tattgctgactatgaacacattgcc

SEQ ID NO: 103045 - DNA, 25 bp, Homo sapien
tggcaaaactgttggttgtctgatc

SEQ ID NO: 103046 - DNA, 25 bp, Homo sapien
ctgttggttgtctgatccatggtaa

SEQ ID NO: 103047 - DNA, 25 bp, Homo sapien
ataactggtggcaaaactgttggtt

SEQ ID NO: 103048 - DNA, 25 bp, Homo sapien
aaactgttggttgtctgatccatgg

SEQ ID NO: 103049 - DNA, 25 bp, Homo sapien
gcaggaagagattctttatagtcat

SEQ ID NO: 103050 - DNA, 25 bp, Homo sapien
tggcaggaagagattctttatagtc

SEQ ID NO: 103051 - DNA, 25 bp, Homo sapien
cttgggtggcaggaagagattcttt

SEQ ID NO: 103052 - DNA, 25 bp, Homo sapien
gggtggcaggaagagattctttata

SEQ ID NO: 103053 - DNA, 25 bp, Homo sapien
gacaccaagggccagagccacctcc

SEQ ID NO: 103054 - DNA, 25 bp, Homo sapien
tcttcatgacaccaagggccagagc

SEQ ID NO: 103055 - DNA, 25 bp, Homo sapien
tcatgacaccaagggccagagccac

SEQ ID NO: 103056 - DNA, 25 bp, Homo sapien
gtttcttcatgacaccaagggccag

SEQ ID NO: 103057 - DNA, 25 bp, Homo sapien
tgaggtccatattgggtggatgtcc

SEQ ID NO: 103058 - DNA, 25 bp, Homo sapien
ctaagtagctatttggcggtgcagg

SEQ ID NO: 103059 - DNA, 25 bp, Homo sapien
cagaggatggctttgtgccactgca

SEQ ID NO: 103060 - DNA, 25 bp, Homo sapien
tacagaggatggctttgtgccactg

SEQ ID NO: 103061 - DNA, 25 bp, Homo sapien
gggtcttcttgtggattagacatcc

SEQ ID NO: 103062 - DNA, 25 bp, Homo sapien
tttcttttcagcccgggccaatagc

SEQ ID NO: 103063 - DNA, 25 bp, Homo sapien
tcttttcagcccgggccaatagcct

SEQ ID NO: 103064 - DNA, 25 bp, Homo sapien
tgcgggtcttcttgtggattagaca

SEQ ID NO: 103065 - DNA, 25 bp, Homo sapien
attgtcctctgagttaatctgtgta

SEQ ID NO: 103066 - DNA, 25 bp, Homo sapien
cctgcttgacaattcaagccacaga

SEQ ID NO: 103067 - DNA, 25 bp, Homo sapien
tcgttttgtctgtcgtaattggttc

SEQ ID NO: 103068 - DNA, 25 bp, Homo sapien
cttttcctgcttgacaattcaagcc

SEQ ID NO: 103069 - DNA, 25 bp, Homo sapien
ccagtgacagtggatttcgttttgt

SEQ ID NO: 103070 - DNA, 25 bp, Homo sapien
tgtgtgccatctacggtaagagagt

SEQ ID NO: 103071 - DNA, 25 bp, Homo sapien
tagaggttggtgagagagatcaccc

SEQ ID NO: 103072 - DNA, 25 bp, Homo sapien
gaaattgacctagcttctcatctgg

SEQ ID NO: 103073 - DNA, 25 bp, Homo sapien
tgtggcacttctagagattctcgtt

SEQ ID NO: 103074 - DNA, 25 bp, Homo sapien
gagtgctgccacacaaccttgaggt

SEQ ID NO: 103075 - DNA, 25 bp, Homo sapien
tgcttctccataacgagatggtgtc

SEQ ID NO: 103076 - DNA, 25 bp, Homo sapien
tctggagtgtacaagtccgcggagc

SEQ ID NO: 103077 - DNA, 25 bp, Homo sapien
tgaggtccttttgcggtgacacacc

SEQ ID NO: 103078 - DNA, 25 bp, Homo sapien
gccgaggcgcgaaaggactgacagc

SEQ ID NO: 103079 - DNA, 25 bp, Homo sapien
cgccgaggcgcgaaaggactgacag

SEQ ID NO: 103080 - DNA, 25 bp, Homo sapien
ccgaggcgcgaaaggactgacagcc

SEQ ID NO: 103081 - DNA, 25 bp, Homo sapien
ctgcggcaggcttgagactgcttta

SEQ ID NO: 103082 - DNA, 25 bp, Homo sapien
tgagactgctttacaggccgagccg

SEQ ID NO: 103083 - DNA, 25 bp, Homo sapien
tttacaggccgagccgggctatgcc

SEQ ID NO: 103084 - DNA, 25 bp, Homo sapien
caggcttgagactgctttacaggcc

SEQ ID NO: 103085 - DNA, 25 bp, Homo sapien
gaatgttctcatccacgttcttaag

SEQ ID NO: 103086 - DNA, 25 bp, Homo sapien
gctgttcctgcaaagttctcacggc

SEQ ID NO: 103087 - DNA, 25 bp, Homo sapien
acgtcattcggatcccgcccggtga

SEQ ID NO: 103088 - DNA, 25 bp, Homo sapien
cgcccggtgagcttgcgaatgttct

SEQ ID NO: 103089 - DNA, 25 bp, Homo sapien
cttgttgcgtcccggcagggtctcg

SEQ ID NO: 103090 - DNA, 25 bp, Homo sapien
ggatcaggtccccatcccgccatcc

SEQ ID NO: 103091 - DNA, 25 bp, Homo sapien
aagctggggtaaggcggcttgttgc

SEQ ID NO: 103092 - DNA, 25 bp, Homo sapien
ggccagcaacgggccgggtgtccgc

SEQ ID NO: 103093 - DNA, 25 bp, Homo sapien
tacctccaccaggaccagaaagggc

SEQ ID NO: 103094 - DNA, 25 bp, Homo sapien
ccagaaagggccagcaatctggctt

SEQ ID NO: 103095 - DNA, 25 bp, Homo sapien
taaactaccacgtcctctacctcca

SEQ ID NO: 103096 - DNA, 25 bp, Homo sapien
tctacctccaccaggaccagaaagg

SEQ ID NO: 103097 - DNA, 25 bp, Homo sapien
ctcctccactatctgagaatccacg

SEQ ID NO: 103098 - DNA, 25 bp, Homo sapien
tcctccactatctgagaatccacgc

SEQ ID NO: 103099 - DNA, 25 bp, Homo sapien
gattctcttctggtccgacgctccc

SEQ ID NO: 103100 - DNA, 25 bp, Homo sapien
cgctttcctggcgtgattctcttct

SEQ ID NO: 103101 - DNA, 25 bp, Homo sapien
tttcctggcgtgattctcttctggt

SEQ ID NO: 103102 - DNA, 25 bp, Homo sapien
ggtcgctttcctggcgtgattctct

SEQ ID NO: 103103 - DNA, 25 bp, Homo sapien
gaaggtactacattcatttaagttc

SEQ ID NO: 103104 - DNA, 25 bp, Homo sapien
tagtaaagtgaaggtactacattca

SEQ ID NO: 103105 - DNA, 25 bp, Homo sapien
aatttaactagcatatgagtggtgt

SEQ ID NO: 103106 - DNA, 25 bp, Homo sapien
tatgagtggtgtgcttttaaatgta

SEQ ID NO: 103107 - DNA, 25 bp, Homo sapien
tacgtgtgcgctctttggaggtagc

SEQ ID NO: 103108 - DNA, 25 bp, Homo sapien
ccatattttgatcctggataaggtc

SEQ ID NO: 103109 - DNA, 25 bp, Homo sapien
tctttggaggtagctacaactgaag

SEQ ID NO: 103110 - DNA, 25 bp, Homo sapien
gataaggtctctacgtgtgcgctct

SEQ ID NO: 103111 - DNA, 25 bp, Homo sapien
catttaaacccatcattttctaaga

SEQ ID NO: 103112 - DNA, 25 bp, Homo sapien
tacaggatgcttgaacaatcccttg

SEQ ID NO: 103113 - DNA, 25 bp, Homo sapien
aatactacaggatgcttgaacaatc

SEQ ID NO: 103114 - DNA, 25 bp, Homo sapien
gaaaatttactgtcaacaggatcca

SEQ ID NO: 103115 - DNA, 25 bp, Homo sapien
tagcaacagtggattcttgtttaaa

SEQ ID NO: 103116 - DNA, 25 bp, Homo sapien
gcaacagtggattcttgtttaaatt

SEQ ID NO: 103117 - DNA, 25 bp, Homo sapien
ctttcagtagcaacagtggattctt

SEQ ID NO: 103118 - DNA, 25 bp, Homo sapien
cagtagcaacagtggattcttgttt

SEQ ID NO: 103119 - DNA, 25 bp, Homo sapien
aacttagcacttggtactgactgta

SEQ ID NO: 103120 - DNA, 25 bp, Homo sapien
tcaattcaggataccaactaactag

SEQ ID NO: 103121 - DNA, 25 bp, Homo sapien
ttcacatatctaaatttcaaggcta

SEQ ID NO: 103122 - DNA, 25 bp, Homo sapien
caaggctattagctatgatatcaac

SEQ ID NO: 103123 - DNA, 25 bp, Homo sapien
tgtaaaggtatctgcaggccgggca

SEQ ID NO: 103124 - DNA, 25 bp, Homo sapien
gtaaaggtatctgcaggccgggcac

SEQ ID NO: 103125 - DNA, 25 bp, Homo sapien
atgtaaaggtatctgcaggccgggc

SEQ ID NO: 103126 - DNA, 25 bp, Homo sapien
tgtctgtttagcacgcctctcttca

SEQ ID NO: 103127 - DNA, 25 bp, Homo sapien
tctgttccaaaagccgcagttctgt

SEQ ID NO: 103128 - DNA, 25 bp, Homo sapien
cagctgcgcaagctcaactttctgt

SEQ ID NO: 103129 - DNA, 25 bp, Homo sapien
tagcacgcctctcttcaaacagttc

SEQ ID NO: 103130 - DNA, 25 bp, Homo sapien
caaatggggctttgtcttagttctt

SEQ ID NO: 103131 - DNA, 25 bp, Homo sapien
tggcattatgttcattccattcttc

SEQ ID NO: 103132 - DNA, 25 bp, Homo sapien
ctattagtttttgggtagctggaca

SEQ ID NO: 103133 - DNA, 25 bp, Homo sapien
tattttggcattatgttcattccat

SEQ ID NO: 103134 - DNA, 25 bp, Homo sapien
tcgatgcgtctaccttcaaataaag

SEQ ID NO: 103135 - DNA, 25 bp, Homo sapien
gccttctgttcttcattacgcacca

SEQ ID NO: 103136 - DNA, 25 bp, Homo sapien
taccctcttcttgttccgccttctg

SEQ ID NO: 103137 - DNA, 25 bp, Homo sapien
gtcttctaggcctagcctccatttt

SEQ ID NO: 103138 - DNA, 25 bp, Homo sapien
tcttcaggctgactatcctgctgct

SEQ ID NO: 103139 - DNA, 25 bp, Homo sapien
ttctctgcatcactatgaacaatcg

SEQ ID NO: 103140 - DNA, 25 bp, Homo sapien
atttctacatcattgtgctgattac

SEQ ID NO: 103141 - DNA, 25 bp, Homo sapien
tcctgcttcctctatttctacatca

SEQ ID NO: 103142 - DNA, 25 bp, Homo sapien
ggttccaattctttgctagcttcat

SEQ ID NO: 103143 - DNA, 25 bp, Homo sapien
cattctttatctggctcaatttcaa

SEQ ID NO: 103144 - DNA, 25 bp, Homo sapien
gaaggttctacactttcaactcgat

SEQ ID NO: 103145 - DNA, 25 bp, Homo sapien
tacactttcaactcgattagtttcc

SEQ ID NO: 103146 - DNA, 25 bp, Homo sapien
caggttggggctcagattctttttc

SEQ ID NO: 103147 - DNA, 25 bp, Homo sapien
tcaggttggggctcagattcttttt

SEQ ID NO: 103148 - DNA, 25 bp, Homo sapien
agctggggctgagactgaggctgag

SEQ ID NO: 103149 - DNA, 25 bp, Homo sapien
tgagactgaggctgaggttgagcca

SEQ ID NO: 103150 - DNA, 25 bp, Homo sapien
gagactgaggctgaggttgagccac

SEQ ID NO: 103151 - DNA, 25 bp, Homo sapien
ctgaagctggggctgagactgaggc

SEQ ID NO: 103152 - DNA, 25 bp, Homo sapien
gagtactggttgggactgggattga

SEQ ID NO: 103153 - DNA, 25 bp, Homo sapien
ggagtactggttgggactgggattg

SEQ ID NO: 103154 - DNA, 25 bp, Homo sapien
ctggagtactggttgggactgggat

SEQ ID NO: 103155 - DNA, 25 bp, Homo sapien
tggagtactggttgggactgggatt

SEQ ID NO: 103156 - DNA, 25 bp, Homo sapien
gtaaatgcccttgctcctgagtaac

SEQ ID NO: 103157 - DNA, 25 bp, Homo sapien
ggggtgttggctgtaaaacagctaa

SEQ ID NO: 103158 - DNA, 25 bp, Homo sapien
tggggtgttggctgtaaaacagcta

SEQ ID NO: 103159 - DNA, 25 bp, Homo sapien
gggtgttggctgtaaaacagctaat

SEQ ID NO: 103160 - DNA, 25 bp, Homo sapien
tggaactactgcgactgctactact

SEQ ID NO: 103161 - DNA, 25 bp, Homo sapien
tctggatgtactgtcaagactggct

SEQ ID NO: 103162 - DNA, 25 bp, Homo sapien
gctgccacttgtactggagctgcta

SEQ ID NO: 103163 - DNA, 25 bp, Homo sapien
cactgctgctactggttgaactgct

SEQ ID NO: 103164 - DNA, 25 bp, Homo sapien
ctgtcggaccgggaattcttatcct

SEQ ID NO: 103165 - DNA, 25 bp, Homo sapien
cctgtctgattttcggtctctttca

SEQ ID NO: 103166 - DNA, 25 bp, Homo sapien
gatcgactactctctgatatagacc

SEQ ID NO: 103167 - DNA, 25 bp, Homo sapien
gatcttttgcctgatcgactactct

SEQ ID NO: 103168 - DNA, 25 bp, Homo sapien
attcttaaggcagcatcctctttac

SEQ ID NO: 103169 - DNA, 25 bp, Homo sapien
catattttggaacctcacataattt

SEQ ID NO: 103170 - DNA, 25 bp, Homo sapien
gaatgtctggtaaacaaacagtctg

SEQ ID NO: 103171 - DNA, 25 bp, Homo sapien
tttacatattttggaacctcacata

SEQ ID NO: 103172 - DNA, 25 bp, Homo sapien
gtataggatatttaaaaaagatgac

SEQ ID NO: 103173 - DNA, 25 bp, Homo sapien
aaagcaatgtatgatacagaattag

SEQ ID NO: 103174 - DNA, 25 bp, Homo sapien
gattcttactgaagagtataggata

SEQ ID NO: 103175 - DNA, 25 bp, Homo sapien
aaagatttgcctattaaaatataca

SEQ ID NO: 103176 - DNA, 25 bp, Homo sapien
tatacaagtgtcaacgaggacatcc

SEQ ID NO: 103177 - DNA, 25 bp, Homo sapien
agtgtcaacgaggacatcccaaaaa

SEQ ID NO: 103178 - DNA, 25 bp, Homo sapien
tacaagtgtcaacgaggacatccca

SEQ ID NO: 103179 - DNA, 25 bp, Homo sapien
ttattatacaagtgtcaacgaggac

SEQ ID NO: 103180 - DNA, 25 bp, Homo sapien
gcacatgtatagtaatggccaacag

SEQ ID NO: 103181 - DNA, 25 bp, Homo sapien
tcaaagctgcaaagctctgactctg

SEQ ID NO: 103182 - DNA, 25 bp, Homo sapien
tatcagcatgtttaagttagagcca

SEQ ID NO: 103183 - DNA, 25 bp, Homo sapien
aaagaatgacgctcccatcatcagg

SEQ ID NO: 103184 - DNA, 25 bp, Homo sapien
ggatacagattgctgtgcaaagctc

SEQ ID NO: 103185 - DNA, 25 bp, Homo sapien
taagccacagatgaaggtactagtg

SEQ ID NO: 103186 - DNA, 25 bp, Homo sapien
tactagtggtggaactggctcatgg

SEQ ID NO: 103187 - DNA, 25 bp, Homo sapien
tattcaaagtcaaggctaaagctac

SEQ ID NO: 103188 - DNA, 25 bp, Homo sapien
tccttatagttaacgtgctggctgt

SEQ ID NO: 103189 - DNA, 25 bp, Homo sapien
tcattccttatagttaacgtgctgg

SEQ ID NO: 103190 - DNA, 25 bp, Homo sapien
gtagagtccagaacatcacaaatgg

SEQ ID NO: 103191 - DNA, 25 bp, Homo sapien
ttttggaaaggtcaggattgtttga

SEQ ID NO: 103192 - DNA, 25 bp, Homo sapien
tgcatctggcctaaacgtcttgctg

SEQ ID NO: 103193 - DNA, 25 bp, Homo sapien
cacacactgctgaaatctatactgg

SEQ ID NO: 103194 - DNA, 25 bp, Homo sapien
tgaatcttctaaggattgagcctgg

SEQ ID NO: 103195 - DNA, 25 bp, Homo sapien
tcttgctgtctggtagagaaagtct

SEQ ID NO: 103196 - DNA, 25 bp, Homo sapien
gaccacatttagctgcaacattttg

SEQ ID NO: 103197 - DNA, 25 bp, Homo sapien
ctttggggcaggcgaaggagagacc

SEQ ID NO: 103198 - DNA, 25 bp, Homo sapien
ggagagaccacatttagctgcaaca

SEQ ID NO: 103199 - DNA, 25 bp, Homo sapien
gagaccacatttagctgcaacattt

SEQ ID NO: 103200 - DNA, 25 bp, Homo sapien
ggcaatccttcagggcgtctgggtc

SEQ ID NO: 103201 - DNA, 25 bp, Homo sapien
tccttcagggcgtctgggtccaggt

SEQ ID NO: 103202 - DNA, 25 bp, Homo sapien
aatccttcagggcgtctgggtccag

SEQ ID NO: 103203 - DNA, 25 bp, Homo sapien
ctggcaatccttcagggcgtctggg

SEQ ID NO: 103204 - DNA, 25 bp, Homo sapien
ggtgggggagtagagagggatgctc

SEQ ID NO: 103205 - DNA, 25 bp, Homo sapien
ggggagtagagagggatgctctgac

SEQ ID NO: 103206 - DNA, 25 bp, Homo sapien
ggggtgggggagtagagagggatgc

SEQ ID NO: 103207 - DNA, 25 bp, Homo sapien
tgggggagtagagagggatgctctg

SEQ ID NO: 103208 - DNA, 25 bp, Homo sapien
tgggactctggccccgagtaggctt

SEQ ID NO: 103209 - DNA, 25 bp, Homo sapien
ctctggccccgagtaggcttcagaa

SEQ ID NO: 103210 - DNA, 25 bp, Homo sapien
tgtgggactctggccccgagtaggc

SEQ ID NO: 103211 - DNA, 25 bp, Homo sapien
gactctggccccgagtaggcttcag

SEQ ID NO: 103212 - DNA, 25 bp, Homo sapien
tggccctctgatccccagtatattt

SEQ ID NO: 103213 - DNA, 25 bp, Homo sapien
tgtcaatggccctctgatccccagt

SEQ ID NO: 103214 - DNA, 25 bp, Homo sapien
caatggccctctgatccccagtata

SEQ ID NO: 103215 - DNA, 25 bp, Homo sapien
tcagaaggctgggctgtcaatggcc

SEQ ID NO: 103216 - DNA, 25 bp, Homo sapien
ggctccacctaaggagctaggtgca

SEQ ID NO: 103217 - DNA, 25 bp, Homo sapien
tgctacccaacttcagtgctgccat

SEQ ID NO: 103218 - DNA, 25 bp, Homo sapien
cagtgctgccatcccttggtctata

SEQ ID NO: 103219 - DNA, 25 bp, Homo sapien
aacttttggaacattgcttgcaact

SEQ ID NO: 103220 - DNA, 25 bp, Homo sapien
tgcttgcaacttctgtgctacccaa

SEQ ID NO: 103221 - DNA, 25 bp, Homo sapien
catgttatgctttatcgggggtggc

SEQ ID NO: 103222 - DNA, 25 bp, Homo sapien
ttgctagcaatatcagcccaagatg

SEQ ID NO: 103223 - DNA, 25 bp, Homo sapien
tggctggaggcaaactattggaagc

SEQ ID NO: 103224 - DNA, 25 bp, Homo sapien
ttttgcaggcttgctagcaatatca

SEQ ID NO: 103225 - DNA, 25 bp, Homo sapien
ctgtaagggggcttttgcaatggac

SEQ ID NO: 103226 - DNA, 25 bp, Homo sapien
tgtaagggggcttttgcaatggacc

SEQ ID NO: 103227 - DNA, 25 bp, Homo sapien
gacccctgggttggctgacctatat

SEQ ID NO: 103228 - DNA, 25 bp, Homo sapien
gagacccctgggttggctgacctat

SEQ ID NO: 103229 - DNA, 25 bp, Homo sapien
ctgaggagacccctgggttggctga

SEQ ID NO: 103230 - DNA, 25 bp, Homo sapien
gaggagacccctgggttggctgacc

SEQ ID NO: 103231 - DNA, 25 bp, Homo sapien
agccactggtgggctattgttagcc

SEQ ID NO: 103232 - DNA, 25 bp, Homo sapien
gccactggtgggctattgttagcct

SEQ ID NO: 103233 - DNA, 25 bp, Homo sapien
ggtggaggcaatggctgtgtctgtt

SEQ ID NO: 103234 - DNA, 25 bp, Homo sapien
tggtggaggtggaggcaatggctgt

SEQ ID NO: 103235 - DNA, 25 bp, Homo sapien
gaggtggaggcaatggctgtgtctg

SEQ ID NO: 103236 - DNA, 25 bp, Homo sapien
tgtggtggaggtggaggcaatggct

SEQ ID NO: 103237 - DNA, 25 bp, Homo sapien
ttccgaggtgctacccagcgggttg

SEQ ID NO: 103238 - DNA, 25 bp, Homo sapien
gaggtgctacccagcgggttggctg

SEQ ID NO: 103239 - DNA, 25 bp, Homo sapien
ctacccagcgggttggctgagctgc

SEQ ID NO: 103240 - DNA, 25 bp, Homo sapien
tgctacccagcgggttggctgagct

SEQ ID NO: 103241 - DNA, 25 bp, Homo sapien
tcctgagtgtccctagagttggtca

SEQ ID NO: 103242 - DNA, 25 bp, Homo sapien
gttcatggaacgataagcagcatcc

SEQ ID NO: 103243 - DNA, 25 bp, Homo sapien
tcttaatgatgaaaacccggccatg

SEQ ID NO: 103244 - DNA, 25 bp, Homo sapien
tgttctctaggcgaatgtgtcgcag

SEQ ID NO: 103245 - DNA, 25 bp, Homo sapien
gggtggatgcccaaaaccttcacaa

SEQ ID NO: 103246 - DNA, 25 bp, Homo sapien
gaaaactgtatgcacttacggactt

SEQ ID NO: 103247 - DNA, 25 bp, Homo sapien
aactcaagtgttctccaagtgcaaa

SEQ ID NO: 103248 - DNA, 25 bp, Homo sapien
cctcttaggatatgcagatgcaacc

SEQ ID NO: 103249 - DNA, 25 bp, Homo sapien
gccaaaactggagatattctactct

SEQ ID NO: 103250 - DNA, 25 bp, Homo sapien
tatcggcttgttggtttaacttgag

SEQ ID NO: 103251 - DNA, 25 bp, Homo sapien
tgttcaggttgtagagatgtcagcc

SEQ ID NO: 103252 - DNA, 25 bp, Homo sapien
ataactacctttttctatcggcttg

SEQ ID NO: 103253 - DNA, 25 bp, Homo sapien
ttctgtgaacgccaaattttgccat

SEQ ID NO: 103254 - DNA, 25 bp, Homo sapien
tactctccagacactttgtcagaga

SEQ ID NO: 103255 - DNA, 25 bp, Homo sapien
gccagaagaaggattctgtgaacgc

SEQ ID NO: 103256 - DNA, 25 bp, Homo sapien
agcagttttgtactctccagacact

SEQ ID NO: 103257 - DNA, 25 bp, Homo sapien
tcaggtcctctataatctctcatgg

SEQ ID NO: 103258 - DNA, 25 bp, Homo sapien
ctcttctcccttagtgaagttcagg

SEQ ID NO: 103259 - DNA, 25 bp, Homo sapien
tcggcagtcaggtcctctataatct

SEQ ID NO: 103260 - DNA, 25 bp, Homo sapien
caggtatcggcagtcaggtcctcta

SEQ ID NO: 103261 - DNA, 25 bp, Homo sapien
gaacacctcttcaatctggactgca

SEQ ID NO: 103262 - DNA, 25 bp, Homo sapien
gatatgaacacctcttcaatctgga

SEQ ID NO: 103263 - DNA, 25 bp, Homo sapien
tcctcagatatgaacacctcttcaa

SEQ ID NO: 103264 - DNA, 25 bp, Homo sapien
tctctgggaaaatatccaaactcct

SEQ ID NO: 103265 - DNA, 25 bp, Homo sapien
ggtacttccgatatcttcaggagcc

SEQ ID NO: 103266 - DNA, 25 bp, Homo sapien
cattgtcaaatgtgtaacttactcc

SEQ ID NO: 103267 - DNA, 25 bp, Homo sapien
ctctaatgctggaacttggtcttca

SEQ ID NO: 103268 - DNA, 25 bp, Homo sapien
taagttgcataaaatccaggttcta

SEQ ID NO: 103269 - DNA, 25 bp, Homo sapien
gacatgcacttctggaatacgatcc

SEQ ID NO: 103270 - DNA, 25 bp, Homo sapien
tctttgactccagacacagctgaag

SEQ ID NO: 103271 - DNA, 25 bp, Homo sapien
cagctgaagatggtgggacatgcac

SEQ ID NO: 103272 - DNA, 25 bp, Homo sapien
tgatgttctgtttgaggctcaccat

SEQ ID NO: 103273 - DNA, 25 bp, Homo sapien
taaattctaatgtaaatattttcat

SEQ ID NO: 103274 - DNA, 25 bp, Homo sapien
tctaatgtaaatattttcataccaa

SEQ ID NO: 103275 - DNA, 25 bp, Homo sapien
attctaatgtaaatattttcatacc

SEQ ID NO: 103276 - DNA, 25 bp, Homo sapien
ctaatgtaaatattttcataccaac

SEQ ID NO: 103277 - DNA, 25 bp, Homo sapien
tcaaaatatacttcttcgtgaattc

SEQ ID NO: 103278 - DNA, 25 bp, Homo sapien
tgagggttcaaaatatacttcttcg

SEQ ID NO: 103279 - DNA, 25 bp, Homo sapien
tcttcgtgaattctcgtaggtaact

SEQ ID NO: 103280 - DNA, 25 bp, Homo sapien
gaagatgagggttcaaaatatactt

SEQ ID NO: 103281 - DNA, 25 bp, Homo sapien
caggcccttcggtgtctactgatgg

SEQ ID NO: 103282 - DNA, 25 bp, Homo sapien
cttcggtgtctactgatggtttcga

SEQ ID NO: 103283 - DNA, 25 bp, Homo sapien
ggcccttcggtgtctactgatggtt

SEQ ID NO: 103284 - DNA, 25 bp, Homo sapien
cggtgtctactgatggtttcgaatt

SEQ ID NO: 103285 - DNA, 25 bp, Homo sapien
agacaaagagttatcagttgaaacc

SEQ ID NO: 103286 - DNA, 25 bp, Homo sapien
ctgactatttagcagggtattttcc

SEQ ID NO: 103287 - DNA, 25 bp, Homo sapien
aagacaaagagttatcagttgaaac

SEQ ID NO: 103288 - DNA, 25 bp, Homo sapien
gaagacaaagagttatcagttgaaa

SEQ ID NO: 103289 - DNA, 25 bp, Homo sapien
tcaatttggaataagtatttcagaa

SEQ ID NO: 103290 - DNA, 25 bp, Homo sapien
caatttggaataagtatttcagaat

SEQ ID NO: 103291 - DNA, 25 bp, Homo sapien
ttgtagccactcttatatttagcaa

SEQ ID NO: 103292 - DNA, 25 bp, Homo sapien
tgtagccactcttatatttagcaaa

SEQ ID NO: 103293 - DNA, 25 bp, Homo sapien
gtagccactcttatatttagcaaaa

SEQ ID NO: 103294 - DNA, 25 bp, Homo sapien
agctctagttcctattattcctgag

SEQ ID NO: 103295 - DNA, 25 bp, Homo sapien
acattcagtaaaaggatcctcctgc

SEQ ID NO: 103296 - DNA, 25 bp, Homo sapien
taaacattaaacagggaggattcat

SEQ ID NO: 103297 - DNA, 25 bp, Homo sapien
gagtaaaaagcaaacaccgctcaag

SEQ ID NO: 103298 - DNA, 25 bp, Homo sapien
tcagattctaatatatcctgcactc

SEQ ID NO: 103299 - DNA, 25 bp, Homo sapien
cagattctaatatatcctgcactct

SEQ ID NO: 103300 - DNA, 25 bp, Homo sapien
tctaccaggcacctcatatccttga

SEQ ID NO: 103301 - DNA, 25 bp, Homo sapien
ctcatatccttgagaaagatttcag

SEQ ID NO: 103302 - DNA, 25 bp, Homo sapien
tcagttccattagcggccagttacc

SEQ ID NO: 103303 - DNA, 25 bp, Homo sapien
ttttcaggaccaaaatgcggcctag

SEQ ID NO: 103304 - DNA, 25 bp, Homo sapien
ggtgcgtgctgttttcctccgagaa

SEQ ID NO: 103305 - DNA, 25 bp, Homo sapien
taggaccgtcgaataaagtgccaag

SEQ ID NO: 103306 - DNA, 25 bp, Homo sapien
tgccaaccacgtccggactttggac

SEQ ID NO: 103307 - DNA, 25 bp, Homo sapien
ccggctcagctgtggtttggtcaga

SEQ ID NO: 103308 - DNA, 25 bp, Homo sapien
cagagtttaacctgtcccacgcaag

SEQ ID NO: 103309 - DNA, 25 bp, Homo sapien
ctttagacaggaaggcgtcccggct

SEQ ID NO: 103310 - DNA, 25 bp, Homo sapien
tgcagaagtcctgacggcggcgtac

SEQ ID NO: 103311 - DNA, 25 bp, Homo sapien
cgccgccgtcattccagtcagaaaa

SEQ ID NO: 103312 - DNA, 25 bp, Homo sapien
ggagcctgctgtctgcgccctgcag

SEQ ID NO: 103313 - DNA, 25 bp, Homo sapien
ccgtcattccagtcagaaaaatggc

SEQ ID NO: 103314 - DNA, 25 bp, Homo sapien
tccgcgctgtcgtgtgagccgcaca

SEQ ID NO: 103315 - DNA, 25 bp, Homo sapien
gtgtgagccgcacaaccccaaagac

SEQ ID NO: 103316 - DNA, 25 bp, Homo sapien
gacttctcctagaggcgtctcggcg

SEQ ID NO: 103317 - DNA, 25 bp, Homo sapien
agattcggcctcatactccgcgctg

SEQ ID NO: 103318 - DNA, 25 bp, Homo sapien
aaaggggccggcgctctacctggcg

SEQ ID NO: 103319 - DNA, 25 bp, Homo sapien
cttaaaggggccggcgctctacctg

SEQ ID NO: 103320 - DNA, 25 bp, Homo sapien
taaaggggccggcgctctacctggc

SEQ ID NO: 103321 - DNA, 25 bp, Homo sapien
aaggggccggcgctctacctggcga

SEQ ID NO: 103322 - DNA, 25 bp, Homo sapien
tcgcagacgtgtccgggtcgtttgc

SEQ ID NO: 103323 - DNA, 25 bp, Homo sapien
gaggcgcggacagccgcaaacttcc

SEQ ID NO: 103324 - DNA, 25 bp, Homo sapien
cttcttcgcgcaagcttcgcagacg

SEQ ID NO: 103325 - DNA, 25 bp, Homo sapien
gcaaacttccccttcttcgcgcaag

SEQ ID NO: 103326 - DNA, 25 bp, Homo sapien
cgacccgcacaagcctgcgacgtac

SEQ ID NO: 103327 - DNA, 25 bp, Homo sapien
tcttgttatactttacatcccgagg

SEQ ID NO: 103328 - DNA, 25 bp, Homo sapien
catcccgaccctcttgttatacttt

SEQ ID NO: 103329 - DNA, 25 bp, Homo sapien
actttacatcccgaggcagcgcagg

SEQ ID NO: 103330 - DNA, 25 bp, Homo sapien
tcggggccacaataaacggcggaga

SEQ ID NO: 103331 - DNA, 25 bp, Homo sapien
ggcaaccggagtggaccactgcgga

SEQ ID NO: 103332 - DNA, 25 bp, Homo sapien
agaacacacagccttcggtccggaa

SEQ ID NO: 103333 - DNA, 25 bp, Homo sapien
caataaacggcggagaacacacagc

SEQ ID NO: 103334 - DNA, 25 bp, Homo sapien
tgctctcgtggtcgccacagtaacc

SEQ ID NO: 103335 - DNA, 25 bp, Homo sapien
aagctgctctcgtggtcgccacagt

SEQ ID NO: 103336 - DNA, 25 bp, Homo sapien
gccaaagctgctctcgtggtcgcca

SEQ ID NO: 103337 - DNA, 25 bp, Homo sapien
gctgctctcgtggtcgccacagtaa

SEQ ID NO: 103338 - DNA, 25 bp, Homo sapien
gagcagccccaaatacggttgaggg

SEQ ID NO: 103339 - DNA, 25 bp, Homo sapien
ccaggagcagccccaaatacggttg

SEQ ID NO: 103340 - DNA, 25 bp, Homo sapien
tcctccaggagcagccccaaatacg

SEQ ID NO: 103341 - DNA, 25 bp, Homo sapien
aggagcagccccaaatacggttgag

SEQ ID NO: 103342 - DNA, 25 bp, Homo sapien
gacgaggactggcttcgggacctct

SEQ ID NO: 103343 - DNA, 25 bp, Homo sapien
ttagaccccaaagccggtctactgc

SEQ ID NO: 103344 - DNA, 25 bp, Homo sapien
aagcgccctacgagcctaactactg

SEQ ID NO: 103345 - DNA, 25 bp, Homo sapien
ctaactactgcctcgaacacgggcg

SEQ ID NO: 103346 - DNA, 25 bp, Homo sapien
aaataaacaacatagcggaaaggct

SEQ ID NO: 103347 - DNA, 25 bp, Homo sapien
taggaatcgggaaacatttacatct

SEQ ID NO: 103348 - DNA, 25 bp, Homo sapien
tcacagtcgaaggaaccacgtgtct

SEQ ID NO: 103349 - DNA, 25 bp, Homo sapien
caacatagcggaaaggctaattagt

SEQ ID NO: 103350 - DNA, 25 bp, Homo sapien
gccaataaatatccacatgccaagg

SEQ ID NO: 103351 - DNA, 25 bp, Homo sapien
caaacaaatcatactagaataagcc

SEQ ID NO: 103352 - DNA, 25 bp, Homo sapien
gaatctagacccattcttcataaca

SEQ ID NO: 103353 - DNA, 25 bp, Homo sapien
caaaatcactcaaagtggatcgaag

SEQ ID NO: 103354 - DNA, 25 bp, Homo sapien
tctaagtggtgtctttgctttaacc

SEQ ID NO: 103355 - DNA, 25 bp, Homo sapien
gttgtctacattgtcacgcccacct

SEQ ID NO: 103356 - DNA, 25 bp, Homo sapien
cgcacccggcctcctaattagttgt

SEQ ID NO: 103357 - DNA, 25 bp, Homo sapien
cctctaagtggtgtctttgctttaa

SEQ ID NO: 103358 - DNA, 25 bp, Homo sapien
ccataaagattagaatctggtctca

SEQ ID NO: 103359 - DNA, 25 bp, Homo sapien
gaaaaccataaagattagaatctgg

SEQ ID NO: 103360 - DNA, 25 bp, Homo sapien
aaaccataaagattagaatctggtc

SEQ ID NO: 103361 - DNA, 25 bp, Homo sapien
ggaaaaccataaagattagaatctg

SEQ ID NO: 103362 - DNA, 25 bp, Homo sapien
tacattaaaagattccagttgagca

SEQ ID NO: 103363 - DNA, 25 bp, Homo sapien
cattaaaagattccagttgagcatg

SEQ ID NO: 103364 - DNA, 25 bp, Homo sapien
tataaaagatcttacattaaaagat

SEQ ID NO: 103365 - DNA, 25 bp, Homo sapien
ttaaaagattccagttgagcatggt

SEQ ID NO: 103366 - DNA, 25 bp, Homo sapien
tgtaggcgcactataattgcatctg

SEQ ID NO: 103367 - DNA, 25 bp, Homo sapien
taggcgcactataattgcatctgtg

SEQ ID NO: 103368 - DNA, 25 bp, Homo sapien
tagcaactgcactacaacctaggca

SEQ ID NO: 103369 - DNA, 25 bp, Homo sapien
ctgtgaatagcaactgcactacaac

SEQ ID NO: 103370 - DNA, 25 bp, Homo sapien
tacttttttcttcaattagtccaga

SEQ ID NO: 103371 - DNA, 25 bp, Homo sapien
tttcttcaattagtccagaaagcat

SEQ ID NO: 103372 - DNA, 25 bp, Homo sapien
tgaacaaggctaaatttttcaagta

SEQ ID NO: 103373 - DNA, 25 bp, Homo sapien
tttttcttcaattagtccagaaagc

SEQ ID NO: 103374 - DNA, 25 bp, Homo sapien
tatgcattgggatcaagtggtattt

SEQ ID NO: 103375 - DNA, 25 bp, Homo sapien
ccttgatacctaagccagaccaaga

SEQ ID NO: 103376 - DNA, 25 bp, Homo sapien
caaacctacaggtcaatatctctga

SEQ ID NO: 103377 - DNA, 25 bp, Homo sapien
cctggcatgcaaagccggtttaata

SEQ ID NO: 103378 - DNA, 25 bp, Homo sapien
tgtgcttctgttgcctccttctcaa

SEQ ID NO: 103379 - DNA, 25 bp, Homo sapien
ttaaagatgactctacttcatagcc

SEQ ID NO: 103380 - DNA, 25 bp, Homo sapien
tggcatcctttaaagatgactctac

SEQ ID NO: 103381 - DNA, 25 bp, Homo sapien
ccaaactttgtgcttctgttgcctc

SEQ ID NO: 103382 - DNA, 25 bp, Homo sapien
ctctgatatttgtgatccttcaaca

SEQ ID NO: 103383 - DNA, 25 bp, Homo sapien
ctgatatttgtgatccttcaacaaa

SEQ ID NO: 103384 - DNA, 25 bp, Homo sapien
tctgatatttgtgatccttcaacaa

SEQ ID NO: 103385 - DNA, 25 bp, Homo sapien
tcttgttcagaatgtttggatttct

SEQ ID NO: 103386 - DNA, 25 bp, Homo sapien
tcctcaagttcagaattggacctgt

SEQ ID NO: 103387 - DNA, 25 bp, Homo sapien
ttctagacagagtatttcatcctca

SEQ ID NO: 103388 - DNA, 25 bp, Homo sapien
caattcatcttgttcagaatgtttg

SEQ ID NO: 103389 - DNA, 25 bp, Homo sapien
tcagctacttgtgatttgagggatt

SEQ ID NO: 103390 - DNA, 25 bp, Homo sapien
ggattttgactcatcttctagagac

SEQ ID NO: 103391 - DNA, 25 bp, Homo sapien
gtatcctttttgaaatatccgccat

SEQ ID NO: 103392 - DNA, 25 bp, Homo sapien
tctagagactgtatcctttttgaaa

SEQ ID NO: 103393 - DNA, 25 bp, Homo sapien
tcttttattgctatcttcagtcgtt

SEQ ID NO: 103394 - DNA, 25 bp, Homo sapien
ttattgctatcttcagtcgttcttc

SEQ ID NO: 103395 - DNA, 25 bp, Homo sapien
attgctatcttcagtcgttcttcat

SEQ ID NO: 103396 - DNA, 25 bp, Homo sapien
gctatcttcagtcgttcttcattca

SEQ ID NO: 103397 - DNA, 25 bp, Homo sapien
caagctggaccacaatctcaaacta

SEQ ID NO: 103398 - DNA, 25 bp, Homo sapien
aaagaagactgagcaggcaattcac

SEQ ID NO: 103399 - DNA, 25 bp, Homo sapien
ccaagcaactagactacaagcacat

SEQ ID NO: 103400 - DNA, 25 bp, Homo sapien
ccaccaagaaaggaattctcataat

SEQ ID NO: 103401 - DNA, 25 bp, Homo sapien
gttctgcatgtactttggagtcttc

SEQ ID NO: 103402 - DNA, 25 bp, Homo sapien
atcatttagaacttgttctgcatgt

SEQ ID NO: 103403 - DNA, 25 bp, Homo sapien
caaatgttactttctgtttattaag

SEQ ID NO: 103404 - DNA, 25 bp, Homo sapien
gatgtgactttctttatcatttaga

SEQ ID NO: 103405 - DNA, 25 bp, Homo sapien
tccaagcatagcagcccaatctttc

SEQ ID NO: 103406 - DNA, 25 bp, Homo sapien
ccaagcatagcagcccaatctttca

SEQ ID NO: 103407 - DNA, 25 bp, Homo sapien
tccgttatgtcttctccaagcatag

SEQ ID NO: 103408 - DNA, 25 bp, Homo sapien
tcatccgttatgtcttctccaagca

SEQ ID NO: 103409 - DNA, 25 bp, Homo sapien
cattttagcaaaaggagatgagtca

SEQ ID NO: 103410 - DNA, 25 bp, Homo sapien
tagcaaaaggagatgagtcatgact

SEQ ID NO: 103411 - DNA, 25 bp, Homo sapien
aaggagatgagtcatgacttaatac

SEQ ID NO: 103412 - DNA, 25 bp, Homo sapien
caaaaggagatgagtcatgacttaa

SEQ ID NO: 103413 - DNA, 25 bp, Homo sapien
tcttcaaagctccttttggaggatt

SEQ ID NO: 103414 - DNA, 25 bp, Homo sapien
tcagtttcttcaaagctccttttgg

SEQ ID NO: 103415 - DNA, 25 bp, Homo sapien
ttcaaagctccttttggaggattat

SEQ ID NO: 103416 - DNA, 25 bp, Homo sapien
cttagcagcatgaatcagtttcttc

SEQ ID NO: 103417 - DNA, 25 bp, Homo sapien
cagacaactgaatataaatttggtt

SEQ ID NO: 103418 - DNA, 25 bp, Homo sapien
gttttatcaacttcagacaactgaa

SEQ ID NO: 103419 - DNA, 25 bp, Homo sapien
tcagacaactgaatataaatttggt

SEQ ID NO: 103420 - DNA, 25 bp, Homo sapien
cctttgttttatcaacttcagacaa

SEQ ID NO: 103421 - DNA, 25 bp, Homo sapien
gatataattcagtcattactttaag

SEQ ID NO: 103422 - DNA, 25 bp, Homo sapien
ctcattttcaaaatgtgtgttttct

SEQ ID NO: 103423 - DNA, 25 bp, Homo sapien
ttctgttgaagcttctgattctcat

SEQ ID NO: 103424 - DNA, 25 bp, Homo sapien
gtgtgttttctgactgcaaagatgc

SEQ ID NO: 103425 - DNA, 25 bp, Homo sapien
ctaaccgataattttcctctactgt

SEQ ID NO: 103426 - DNA, 25 bp, Homo sapien
tgcccttgataagaatgaatagttc

SEQ ID NO: 103427 - DNA, 25 bp, Homo sapien
ttcttcaagatctttggctcgcttt

SEQ ID NO: 103428 - DNA, 25 bp, Homo sapien
ctgcccttgataagaatgaatagtt

SEQ ID NO: 103429 - DNA, 25 bp, Homo sapien
gaatagttctctccaattcttcttc

SEQ ID NO: 103430 - DNA, 25 bp, Homo sapien
gaggtatacaactggtcaagtaatt

SEQ ID NO: 103431 - DNA, 25 bp, Homo sapien
caagtaattatattcctgcatcaat

SEQ ID NO: 103432 - DNA, 25 bp, Homo sapien
agaatctttggctcctgggaaatgt

SEQ ID NO: 103433 - DNA, 25 bp, Homo sapien
tgcaacacctcaaaagaggtataca

SEQ ID NO: 103434 - DNA, 25 bp, Homo sapien
atgtgcttttttctcatgggaaata

SEQ ID NO: 103435 - DNA, 25 bp, Homo sapien
ccaattatcatgtgcttttttctca

SEQ ID NO: 103436 - DNA, 25 bp, Homo sapien
aattatcatgtgcttttttctcatg

SEQ ID NO: 103437 - DNA, 25 bp, Homo sapien
gtgcttttttctcatgggaaataat

SEQ ID NO: 103438 - DNA, 25 bp, Homo sapien
ttctttcagcattccgagctgccaa

SEQ ID NO: 103439 - DNA, 25 bp, Homo sapien
aatcattgaggtttctttcagcatt

SEQ ID NO: 103440 - DNA, 25 bp, Homo sapien
aggtttctttcagcattccgagctg

SEQ ID NO: 103441 - DNA, 25 bp, Homo sapien
gtttctttcagcattccgagctgcc

SEQ ID NO: 103442 - DNA, 25 bp, Homo sapien
ggaacatcgagtgcataaggatctt

SEQ ID NO: 103443 - DNA, 25 bp, Homo sapien
ctgtatttggaacatcgagtgcata

SEQ ID NO: 103444 - DNA, 25 bp, Homo sapien
tctaaaagttcaaatttaagctctg

SEQ ID NO: 103445 - DNA, 25 bp, Homo sapien
gttcaaatttaagctctgtttcagt

SEQ ID NO: 103446 - DNA, 25 bp, Homo sapien
tgtttcagatgaaggccaacccaat

SEQ ID NO: 103447 - DNA, 25 bp, Homo sapien
tgagtggaccctccaacaaagttgg

SEQ ID NO: 103448 - DNA, 25 bp, Homo sapien
gctcttgtttcagatgaaggccaac

SEQ ID NO: 103449 - DNA, 25 bp, Homo sapien
cctccaacaaagttggaggagagag

SEQ ID NO: 103450 - DNA, 25 bp, Homo sapien
aaacccatatacagggctggacgca

SEQ ID NO: 103451 - DNA, 25 bp, Homo sapien
cttacgaccacagaaaagatagtac

SEQ ID NO: 103452 - DNA, 25 bp, Homo sapien
cagataaactggcactagatggctt

SEQ ID NO: 103453 - DNA, 25 bp, Homo sapien
aatgagcatgattcctttaaaacag

SEQ ID NO: 103454 - DNA, 25 bp, Homo sapien
atggaggtgacagagacccagtgtc

SEQ ID NO: 103455 - DNA, 25 bp, Homo sapien
agagggagccctatgaggatcggtt

SEQ ID NO: 103456 - DNA, 25 bp, Homo sapien
gtgacagagacccagtgtcagaggg

SEQ ID NO: 103457 - DNA, 25 bp, Homo sapien
gggagccctatgaggatcggttaac

SEQ ID NO: 103458 - DNA, 25 bp, Homo sapien
gacagtctaccagaattagaacaaa

SEQ ID NO: 103459 - DNA, 25 bp, Homo sapien
ccagacagtctaccagaattagaac

SEQ ID NO: 103460 - DNA, 25 bp, Homo sapien
tctgctggtccagacagtctaccag

SEQ ID NO: 103461 - DNA, 25 bp, Homo sapien
gctggtccagacagtctaccagaat

SEQ ID NO: 103462 - DNA, 25 bp, Homo sapien
caatatcctatattgcggccacaag

SEQ ID NO: 103463 - DNA, 25 bp, Homo sapien
ggcacataagccagctggacaccaa

SEQ ID NO: 103464 - DNA, 25 bp, Homo sapien
cactttattcctagagtatctccag

SEQ ID NO: 103465 - DNA, 25 bp, Homo sapien
aaagttaaaccatgaaaagtacatg

SEQ ID NO: 103466 - DNA, 25 bp, Homo sapien
accaagatcatctttggtatcattt

SEQ ID NO: 103467 - DNA, 25 bp, Homo sapien
gtatcatttctactggattccattt

SEQ ID NO: 103468 - DNA, 25 bp, Homo sapien
tggtatcatttctactggattccat

SEQ ID NO: 103469 - DNA, 25 bp, Homo sapien
caagatcatctttggtatcatttct

SEQ ID NO: 103470 - DNA, 25 bp, Homo sapien
tcccgaaaatctcaggcttagaaga

SEQ ID NO: 103471 - DNA, 25 bp, Homo sapien
tcatctagacagaaagcattccatg

SEQ ID NO: 103472 - DNA, 25 bp, Homo sapien
catatggcagtcactaaaacagtaa

SEQ ID NO: 103473 - DNA, 25 bp, Homo sapien
tagtcttagaaagctctagagaaag

SEQ ID NO: 103474 - DNA, 25 bp, Homo sapien
cttctcaagaatgggcctcttgcat

SEQ ID NO: 103475 - DNA, 25 bp, Homo sapien
tcttctcaagaatgggcctcttgca

SEQ ID NO: 103476 - DNA, 25 bp, Homo sapien
ctcttctcaagaatgggcctcttgc

SEQ ID NO: 103477 - DNA, 25 bp, Homo sapien
tctcaagaatgggcctcttgcatcc

SEQ ID NO: 103478 - DNA, 25 bp, Homo sapien
tatcgtaagacctgcaaaaagtcca

SEQ ID NO: 103479 - DNA, 25 bp, Homo sapien
taaataagtaggactgcatcagaac

SEQ ID NO: 103480 - DNA, 25 bp, Homo sapien
gctgccttcccaattcggaaaagta

SEQ ID NO: 103481 - DNA, 25 bp, Homo sapien
tcaagctgaaacctcattgcagtcc

SEQ ID NO: 103482 - DNA, 25 bp, Homo sapien
tttccagtaatatcaaaggccacct

SEQ ID NO: 103483 - DNA, 25 bp, Homo sapien
taaaattcgtattagtgattcccaa

SEQ ID NO: 103484 - DNA, 25 bp, Homo sapien
aaggaaagactatatgagacattca

SEQ ID NO: 103485 - DNA, 25 bp, Homo sapien
caaagcctagtatttggtaaccaca

SEQ ID NO: 103486 - DNA, 25 bp, Homo sapien
caaagagattggtaaaagacatttt

SEQ ID NO: 103487 - DNA, 25 bp, Homo sapien
ctttaagaacctgtactgtgcccta

SEQ ID NO: 103488 - DNA, 25 bp, Homo sapien
aagaacctgtactgtgccctaataa

SEQ ID NO: 103489 - DNA, 25 bp, Homo sapien
ttaactttaagaacctgtactgtgc

SEQ ID NO: 103490 - DNA, 25 bp, Homo sapien
gctcatttgaaggtggaatcaaacc

SEQ ID NO: 103491 - DNA, 25 bp, Homo sapien
ttgaaggtggaatcaaacctgaggg

SEQ ID NO: 103492 - DNA, 25 bp, Homo sapien
catttgaaggtggaatcaaacctga

SEQ ID NO: 103493 - DNA, 25 bp, Homo sapien
aggctcatttgaaggtggaatcaaa

SEQ ID NO: 103494 - DNA, 25 bp, Homo sapien
ttaagcttcaatttgagcaaaagtg

SEQ ID NO: 103495 - DNA, 25 bp, Homo sapien
ccattaagcttcaatttgagcaaaa

SEQ ID NO: 103496 - DNA, 25 bp, Homo sapien
ttataattccattaagcttcaattt

SEQ ID NO: 103497 - DNA, 25 bp, Homo sapien
attataattccattaagcttcaatt

SEQ ID NO: 103498 - DNA, 25 bp, Homo sapien
tgaaatagttataccgtctaaaata

SEQ ID NO: 103499 - DNA, 25 bp, Homo sapien
caaattgaaatagttataccgtcta

SEQ ID NO: 103500 - DNA, 25 bp, Homo sapien
tcaaattgaaatagttataccgtct

SEQ ID NO: 103501 - DNA, 25 bp, Homo sapien
gattttattattatcaatgccaaac

SEQ ID NO: 103502 - DNA, 25 bp, Homo sapien
ttttattattatcaatgccaaacaa

SEQ ID NO: 103503 - DNA, 25 bp, Homo sapien
aaaactactgattttattattatca

SEQ ID NO: 103504 - DNA, 25 bp, Homo sapien
ttattattatcaatgccaaacaaat

SEQ ID NO: 103505 - DNA, 25 bp, Homo sapien
gaaaccgtgcaagaaactcagtgaa

SEQ ID NO: 103506 - DNA, 25 bp, Homo sapien
ccaactgggcaacgttaagtattat

SEQ ID NO: 103507 - DNA, 25 bp, Homo sapien
tgcaagaagcttaacatgacctaca

SEQ ID NO: 103508 - DNA, 25 bp, Homo sapien
gggccactcatgtctatttacaaga

SEQ ID NO: 103509 - DNA, 25 bp, Homo sapien
cacttcggtttgtaagcagtcgggt

SEQ ID NO: 103510 - DNA, 25 bp, Homo sapien
gtctgattcaggagctaaactaggg

SEQ ID NO: 103511 - DNA, 25 bp, Homo sapien
caagattcaaagtgtggctgcccag

SEQ ID NO: 103512 - DNA, 25 bp, Homo sapien
cagagatggagcgttcatgtcagag

SEQ ID NO: 103513 - DNA, 25 bp, Homo sapien
aagactgtaagatcaaagcaacggg

SEQ ID NO: 103514 - DNA, 25 bp, Homo sapien
tcaaaataatgctcgagggcctggg

SEQ ID NO: 103515 - DNA, 25 bp, Homo sapien
gaatccagaagtagtctttcttgaa

SEQ ID NO: 103516 - DNA, 25 bp, Homo sapien
ccaacttttcttcaaggaccacgtg

SEQ ID NO: 103517 - DNA, 25 bp, Homo sapien
cacaataaatgtacgtatttagggt

SEQ ID NO: 103518 - DNA, 25 bp, Homo sapien
agtgatatcctaaaaccataattaa

SEQ ID NO: 103519 - DNA, 25 bp, Homo sapien
tttaatatgttcatgtagttcaaga

SEQ ID NO: 103520 - DNA, 25 bp, Homo sapien
gaaacacaataaatgtacgtattta

SEQ ID NO: 103521 - DNA, 25 bp, Homo sapien
catcctaatggattcttatcaacga

SEQ ID NO: 103522 - DNA, 25 bp, Homo sapien
cagcctgtttcataatgctctgctc

SEQ ID NO: 103523 - DNA, 25 bp, Homo sapien
gaccaactcttgctctatcatgcag

SEQ ID NO: 103524 - DNA, 25 bp, Homo sapien
ttaattcaattaggtaggttgctaa

SEQ ID NO: 103525 - DNA, 25 bp, Homo sapien
acaagatctcttgggatgaacacac

SEQ ID NO: 103526 - DNA, 25 bp, Homo sapien
cactggccctggttaagcaaaatat

SEQ ID NO: 103527 - DNA, 25 bp, Homo sapien
catgtgaacacataccttgatagga

SEQ ID NO: 103528 - DNA, 25 bp, Homo sapien
tgcaagtaatcgcagaggctactgg

SEQ ID NO: 103529 - DNA, 25 bp, Homo sapien
gctttaaaaagctcatgaaactata

SEQ ID NO: 103530 - DNA, 25 bp, Homo sapien
aaacactaaatcaacccacagcatg

SEQ ID NO: 103531 - DNA, 25 bp, Homo sapien
caagagcttatgaaagattaacttc

SEQ ID NO: 103532 - DNA, 25 bp, Homo sapien
agaaatcaacttgtctaattccctc

SEQ ID NO: 103533 - DNA, 25 bp, Homo sapien
tgtgtacagcacagatttactgagc

SEQ ID NO: 103534 - DNA, 25 bp, Homo sapien
tcgggactccaattcactaggccaa

SEQ ID NO: 103535 - DNA, 25 bp, Homo sapien
gaataaactgtcctagccacaaaag

SEQ ID NO: 103536 - DNA, 25 bp, Homo sapien
ttagcttcctaacaacatgagacct

SEQ ID NO: 103537 - DNA, 25 bp, Homo sapien
tcatttctggggccctcctaggccc

SEQ ID NO: 103538 - DNA, 25 bp, Homo sapien
cctacctgaagccggggctcctgcc

SEQ ID NO: 103539 - DNA, 25 bp, Homo sapien
cccctacctgaagccggggctcctg

SEQ ID NO: 103540 - DNA, 25 bp, Homo sapien
gaaagtcggcttccgttgagcacca

SEQ ID NO: 103541 - DNA, 25 bp, Homo sapien
tccgagacagttaggccaaggcttc

SEQ ID NO: 103542 - DNA, 25 bp, Homo sapien
gaactcggcattatggtacagccct

SEQ ID NO: 103543 - DNA, 25 bp, Homo sapien
gcttcaatttgattacccgccgcca

SEQ ID NO: 103544 - DNA, 25 bp, Homo sapien
gttaagcagcttccatacgtacttg

SEQ ID NO: 103545 - DNA, 25 bp, Homo sapien
tccactggcatggttacctgtaagc

SEQ ID NO: 103546 - DNA, 25 bp, Homo sapien
tacgtacttgatgtaaactgtgaga

SEQ ID NO: 103547 - DNA, 25 bp, Homo sapien
ggatgactaaatgggcctctccaac

SEQ ID NO: 103548 - DNA, 25 bp, Homo sapien
taatcagtcttaggccattttggag

SEQ ID NO: 103549 - DNA, 25 bp, Homo sapien
ggtgactgtgaaaggcatgcaagct

SEQ ID NO: 103550 - DNA, 25 bp, Homo sapien
taagtataaaagactcgtggagctg

SEQ ID NO: 103551 - DNA, 25 bp, Homo sapien
ggtgtcacactcagaagagccattt

SEQ ID NO: 103552 - DNA, 25 bp, Homo sapien
gtaagtagccaacctgggtgcccag

SEQ ID NO: 103553 - DNA, 25 bp, Homo sapien
actgtttcagggcaaccgcggtaca

SEQ ID NO: 103554 - DNA, 25 bp, Homo sapien
gagacctggctgctctattgtaagc

SEQ ID NO: 103555 - DNA, 25 bp, Homo sapien
gaaagcttgttctatcacaggtatg

SEQ ID NO: 103556 - DNA, 25 bp, Homo sapien
cacgcgtgtcagctgccaaagaata

SEQ ID NO: 103557 - DNA, 25 bp, Homo sapien
taatgaagaagtgcccacatgctgg

SEQ ID NO: 103558 - DNA, 25 bp, Homo sapien
tatagggctttcacggttaatggac

SEQ ID NO: 103559 - DNA, 25 bp, Homo sapien
cattagtcgtgaaatccctagcaac

SEQ ID NO: 103560 - DNA, 25 bp, Homo sapien
caggttacacggtgtgggcacacaa

SEQ ID NO: 103561 - DNA, 25 bp, Homo sapien
ccttattgagcaggtatccctgggc

SEQ ID NO: 103562 - DNA, 25 bp, Homo sapien
gatctgaaagtgcttgaagtcaccg

SEQ ID NO: 103563 - DNA, 25 bp, Homo sapien
tttgaccaaggtgaactggccgacc

SEQ ID NO: 103564 - DNA, 25 bp, Homo sapien
ggagagttcaccaaacttgaccaat

SEQ ID NO: 103565 - DNA, 25 bp, Homo sapien
ctcacggagtcattctagaggagga

SEQ ID NO: 103566 - DNA, 25 bp, Homo sapien
ttaatttgttagttctgaggcagcc

SEQ ID NO: 103567 - DNA, 25 bp, Homo sapien
cctccaattattgagagcgtactat

SEQ ID NO: 103568 - DNA, 25 bp, Homo sapien
tattaatgatctccaagatggtagc

SEQ ID NO: 103569 - DNA, 25 bp, Homo sapien
tggtagcttgttgctagcaaaatgc

SEQ ID NO: 103570 - DNA, 25 bp, Homo sapien
gggcaagattcacagctaattcttt

SEQ ID NO: 103571 - DNA, 25 bp, Homo sapien
tatacatagaactaccctacgaccc

SEQ ID NO: 103572 - DNA, 25 bp, Homo sapien
acctcttgatgcagggaagtggcaa

SEQ ID NO: 103573 - DNA, 25 bp, Homo sapien
tccaacaagtcatgaagtcacagag

SEQ ID NO: 103574 - DNA, 25 bp, Homo sapien
catatacctggtggttgagtctggc

SEQ ID NO: 103575 - DNA, 25 bp, Homo sapien
tgaaggctggagactagaatcatct

SEQ ID NO: 103576 - DNA, 25 bp, Homo sapien
gacatttacaattagtcattcacaa

SEQ ID NO: 103577 - DNA, 25 bp, Homo sapien
tggtacaaccactatctctatctag

SEQ ID NO: 103578 - DNA, 25 bp, Homo sapien
cgcactacctgaattctatcattaa

SEQ ID NO: 103579 - DNA, 25 bp, Homo sapien
ttgaaagatttcagtgaacacctgt

SEQ ID NO: 103580 - DNA, 25 bp, Homo sapien
ccactaacatgtagttgatgttgtc

SEQ ID NO: 103581 - DNA, 25 bp, Homo sapien
ttttgctggagccagaacacctaca

SEQ ID NO: 103582 - DNA, 25 bp, Homo sapien
tgatgttgtcagataagacttttgc

SEQ ID NO: 103583 - DNA, 25 bp, Homo sapien
cctacacatggcttctgtaactgtc

SEQ ID NO: 103584 - DNA, 25 bp, Homo sapien
aaaagaccaggactagatagattca

SEQ ID NO: 103585 - DNA, 25 bp, Homo sapien
gagagaagagtcaaataggcacaag

SEQ ID NO: 103586 - DNA, 25 bp, Homo sapien
actgctagctagattaatgaagaaa

SEQ ID NO: 103587 - DNA, 25 bp, Homo sapien
tcgaatccttgagtagaccaatatc

SEQ ID NO: 103588 - DNA, 25 bp, Homo sapien
gagcctcctggtctatttcagttcg

SEQ ID NO: 103589 - DNA, 25 bp, Homo sapien
tattgactacgtaaacactattggt

SEQ ID NO: 103590 - DNA, 25 bp, Homo sapien
tgatgatgcacaagctccagcaatt

SEQ ID NO: 103591 - DNA, 25 bp, Homo sapien
tacaggctgtggcttttcaccaaca

SEQ ID NO: 103592 - DNA, 25 bp, Homo sapien
tgagcacatgaccatggtacccact

SEQ ID NO: 103593 - DNA, 25 bp, Homo sapien
taccgcaaaggagatgtgagcacat

SEQ ID NO: 103594 - DNA, 25 bp, Homo sapien
taccatctgacgatagggtgccctg

SEQ ID NO: 103595 - DNA, 25 bp, Homo sapien
ggtaattctaaaggcatggctgaga

SEQ ID NO: 103596 - DNA, 25 bp, Homo sapien
cttgtgttagctgttgtttatctgt

SEQ ID NO: 103597 - DNA, 25 bp, Homo sapien
ttcttgtgttagctgttgtttatct

SEQ ID NO: 103598 - DNA, 25 bp, Homo sapien
tgtgttagctgttgtttatctgttt

SEQ ID NO: 103599 - DNA, 25 bp, Homo sapien
gtgttagctgttgtttatctgtttg

SEQ ID NO: 103600 - DNA, 25 bp, Homo sapien
agcaaacaaaggacatcgccatggc

SEQ ID NO: 103601 - DNA, 25 bp, Homo sapien
catggcaaccagaggagccttggga

SEQ ID NO: 103602 - DNA, 25 bp, Homo sapien
caaactgtgggagaagcaatccaaa

SEQ ID NO: 103603 - DNA, 25 bp, Homo sapien
gagccttgggataatatgcaaatct

SEQ ID NO: 103604 - DNA, 25 bp, Homo sapien
aaccagcagcatcactaggctctga

SEQ ID NO: 103605 - DNA, 25 bp, Homo sapien
tcaaccagcagcatcactaggctct

SEQ ID NO: 103606 - DNA, 25 bp, Homo sapien
caaccagcagcatcactaggctctg

SEQ ID NO: 103607 - DNA, 25 bp, Homo sapien
accagcagcatcactaggctctgac

SEQ ID NO: 103608 - DNA, 25 bp, Homo sapien
taattaccatgagataatctaaaac

SEQ ID NO: 103609 - DNA, 25 bp, Homo sapien
taccttgcccaatattacattttac

SEQ ID NO: 103610 - DNA, 25 bp, Homo sapien
caaaattcgtatagatgaaatcaga

SEQ ID NO: 103611 - DNA, 25 bp, Homo sapien
aattccttgtctatggagtggcttt

SEQ ID NO: 103612 - DNA, 25 bp, Homo sapien
tatgcagtgcactctctttccacgt

SEQ ID NO: 103613 - DNA, 25 bp, Homo sapien
gacctcaatctatgcagccccttga

SEQ ID NO: 103614 - DNA, 25 bp, Homo sapien
tcaggagtaggctcatgataaaaga

SEQ ID NO: 103615 - DNA, 25 bp, Homo sapien
cgttatgagtcagcaaaaaggacct

SEQ ID NO: 103616 - DNA, 25 bp, Homo sapien
tccctcggacctggaaaagtctaga

SEQ ID NO: 103617 - DNA, 25 bp, Homo sapien
cgcaatttgctgaaccacaccgagt

SEQ ID NO: 103618 - DNA, 25 bp, Homo sapien
gggaaagtccgctatagcagaccaa

SEQ ID NO: 103619 - DNA, 25 bp, Homo sapien
catgtgttgacagcttaatccctaa

SEQ ID NO: 103620 - DNA, 25 bp, Homo sapien
aaaaaatagacctagatcctgctct

SEQ ID NO: 103621 - DNA, 25 bp, Homo sapien
gacctagatcctgctcttaactcac

SEQ ID NO: 103622 - DNA, 25 bp, Homo sapien
ggcactggccatttcatgtctgagt

SEQ ID NO: 103623 - DNA, 25 bp, Homo sapien
tctgcttgcttgtaatgtcactgag

SEQ ID NO: 103624 - DNA, 25 bp, Homo sapien
tgtgactgcatgtacccagcctgac

SEQ ID NO: 103625 - DNA, 25 bp, Homo sapien
cctaggtcactgaagcaatcacaga

SEQ ID NO: 103626 - DNA, 25 bp, Homo sapien
cagatagcctgtcagccctctgtga

SEQ ID NO: 103627 - DNA, 25 bp, Homo sapien
gatgtgcagatatcaacaaagggac

SEQ ID NO: 103628 - DNA, 25 bp, Homo sapien
caaaatcagtaagactccatgcatc

SEQ ID NO: 103629 - DNA, 25 bp, Homo sapien
tttgaatccatgtaaccagagaagg

SEQ ID NO: 103630 - DNA, 25 bp, Homo sapien
gactgatgctcacaggaacagacag

SEQ ID NO: 103631 - DNA, 25 bp, Homo sapien
gaaaacatgctttcactcacctttg

SEQ ID NO: 103632 - DNA, 25 bp, Homo sapien
tctcctcactgagagaacaaccagg

SEQ ID NO: 103633 - DNA, 25 bp, Homo sapien
gattccggatattaggtcaccaggg

SEQ ID NO: 103634 - DNA, 25 bp, Homo sapien
caacagcatcgagtttatatccagg

SEQ ID NO: 103635 - DNA, 25 bp, Homo sapien
aaccctgagattctgccctggaaaa

SEQ ID NO: 103636 - DNA, 25 bp, Homo sapien
tgaagaaactgtagccaattctggt

SEQ ID NO: 103637 - DNA, 25 bp, Homo sapien
gaaactgtagccaattctggttagt

SEQ ID NO: 103638 - DNA, 25 bp, Homo sapien
gaagaaactgtagccaattctggtt

SEQ ID NO: 103639 - DNA, 25 bp, Homo sapien
agaaactgtagccaattctggttag

SEQ ID NO: 103640 - DNA, 25 bp, Homo sapien
taaagacacatgcacacgtatgttt

SEQ ID NO: 103641 - DNA, 25 bp, Homo sapien
acccaaaggactacaaatcatgctg

SEQ ID NO: 103642 - DNA, 25 bp, Homo sapien
caaaggactacaaatcatgctgcta

SEQ ID NO: 103643 - DNA, 25 bp, Homo sapien
attgcggcactattcacaatagcaa

SEQ ID NO: 103644 - DNA, 25 bp, Homo sapien
ttcacaagcatgcttacataagctc

SEQ ID NO: 103645 - DNA, 25 bp, Homo sapien
tgcaaccaccacatcaggtgacttg

SEQ ID NO: 103646 - DNA, 25 bp, Homo sapien
agttgcagtcttgtacaactctgca

SEQ ID NO: 103647 - DNA, 25 bp, Homo sapien
catgcttacataagctctagtctcc

SEQ ID NO: 103648 - DNA, 25 bp, Homo sapien
tttcctcatcaaattctctgcaata

SEQ ID NO: 103649 - DNA, 25 bp, Homo sapien
aatttcctcatcaaattctctgcaa

SEQ ID NO: 103650 - DNA, 25 bp, Homo sapien
atttcctcatcaaattctctgcaat

SEQ ID NO: 103651 - DNA, 25 bp, Homo sapien
ctgtataggaaagatccatccagga

SEQ ID NO: 103652 - DNA, 25 bp, Homo sapien
cagggaagattttcacaattcctgt

SEQ ID NO: 103653 - DNA, 25 bp, Homo sapien
gtataggaaagatccatccaggaga

SEQ ID NO: 103654 - DNA, 25 bp, Homo sapien
ctgtctcagggaagattttcacaat

SEQ ID NO: 103655 - DNA, 25 bp, Homo sapien
atctggtaagggctatcagaaccac

SEQ ID NO: 103656 - DNA, 25 bp, Homo sapien
tatgtgttctttttccctgactggt

SEQ ID NO: 103657 - DNA, 25 bp, Homo sapien
agaaaaagctttcgggttccagcag

SEQ ID NO: 103658 - DNA, 25 bp, Homo sapien
ccagcaggaaatccttatgtgttct

SEQ ID NO: 103659 - DNA, 25 bp, Homo sapien
gagcttttccataaggcagaatcct

SEQ ID NO: 103660 - DNA, 25 bp, Homo sapien
aaacgtccttctccaattaccatga

SEQ ID NO: 103661 - DNA, 25 bp, Homo sapien
tgctgtctctgtgttagtgagcttt

SEQ ID NO: 103662 - DNA, 25 bp, Homo sapien
tctttacttttagctgcctgggaaa

SEQ ID NO: 103663 - DNA, 25 bp, Homo sapien
tcacactccctaatgaacaattatc

SEQ ID NO: 103664 - DNA, 25 bp, Homo sapien
ctccacagaagagtgcatttgtttt

SEQ ID NO: 103665 - DNA, 25 bp, Homo sapien
ctagcttgtgctagacaagagcccc

SEQ ID NO: 103666 - DNA, 25 bp, Homo sapien
ttacgatagacttcacactccctaa

SEQ ID NO: 103667 - DNA, 25 bp, Homo sapien
acttaaatataacagatgaatttca

SEQ ID NO: 103668 - DNA, 25 bp, Homo sapien
tataacagatgaatttcactgtatt

SEQ ID NO: 103669 - DNA, 25 bp, Homo sapien
ccagggcaacctgttacttaaatat

SEQ ID NO: 103670 - DNA, 25 bp, Homo sapien
tgaacagtcaaaatccccgttccat

SEQ ID NO: 103671 - DNA, 25 bp, Homo sapien
taaattaggctctgaccagcaactt

SEQ ID NO: 103672 - DNA, 25 bp, Homo sapien
aaattaggctctgaccagcaacttc

SEQ ID NO: 103673 - DNA, 25 bp, Homo sapien
aatgcagcaacgtggggtagccctt

SEQ ID NO: 103674 - DNA, 25 bp, Homo sapien
caaatgcagcaacgtggggtagccc

SEQ ID NO: 103675 - DNA, 25 bp, Homo sapien
ctgtgcccaaatgcagcaacgtggg

SEQ ID NO: 103676 - DNA, 25 bp, Homo sapien
agcaacgtggggtagcccttcacta

SEQ ID NO: 103677 - DNA, 25 bp, Homo sapien
acaataatccaaactgctaccccat

SEQ ID NO: 103678 - DNA, 25 bp, Homo sapien
taatccaaactgctaccccatctat

SEQ ID NO: 103679 - DNA, 25 bp, Homo sapien
ccgggataagagtcctcatgtgaca

SEQ ID NO: 103680 - DNA, 25 bp, Homo sapien
caacccccgggataagagtcctcat

SEQ ID NO: 103681 - DNA, 25 bp, Homo sapien
cataaaatcagccagtccttttgct

SEQ ID NO: 103682 - DNA, 25 bp, Homo sapien
ctagtagtgccatgggtgatttgaa

SEQ ID NO: 103683 - DNA, 25 bp, Homo sapien
tgccatgggtgatttgaaaatagtc

SEQ ID NO: 103684 - DNA, 25 bp, Homo sapien
gaaatacatttctagtagtgccatg

SEQ ID NO: 103685 - DNA, 25 bp, Homo sapien
gagtgactcgatttcccaggtgtcg

SEQ ID NO: 103686 - DNA, 25 bp, Homo sapien
acttaatttagttcgcctacatcac

SEQ ID NO: 103687 - DNA, 25 bp, Homo sapien
ggagctgtatcatttctaatcgtat

SEQ ID NO: 103688 - DNA, 25 bp, Homo sapien
cttccagagggaggctatgcctcgc

SEQ ID NO: 103689 - DNA, 25 bp, Homo sapien
cagccgggacaccagcgccatgtcc

SEQ ID NO: 103690 - DNA, 25 bp, Homo sapien
gccgggacaccagcgccatgtcctt

SEQ ID NO: 103691 - DNA, 25 bp, Homo sapien
aacaaagagttaccggagagcccat

SEQ ID NO: 103692 - DNA, 25 bp, Homo sapien
cagaacaaagagttaccggagagcc

SEQ ID NO: 103693 - DNA, 25 bp, Homo sapien
ttttaatagcttccctagcaaacca

SEQ ID NO: 103694 - DNA, 25 bp, Homo sapien
ctgtagatttcgacaaaatccataa

SEQ ID NO: 103695 - DNA, 25 bp, Homo sapien
tcactgtagatttcgacaaaatcca

SEQ ID NO: 103696 - DNA, 25 bp, Homo sapien
gtagatttcgacaaaatccataaaa

SEQ ID NO: 103697 - DNA, 25 bp, Homo sapien
tgagtgtctgttaagcgtcaggctc

SEQ ID NO: 103698 - DNA, 25 bp, Homo sapien
gaataagaacatcccttgttgagtg

SEQ ID NO: 103699 - DNA, 25 bp, Homo sapien
aacaacaatcttttaatgcagggca

SEQ ID NO: 103700 - DNA, 25 bp, Homo sapien
gccccattttgacttgcccaacaga

SEQ ID NO: 103701 - DNA, 25 bp, Homo sapien
ccaaaattgccatttgcatgaaggt

SEQ ID NO: 103702 - DNA, 25 bp, Homo sapien
ttcatccaaaattgccatttgcatg

SEQ ID NO: 103703 - DNA, 25 bp, Homo sapien
tatattcatctcttttcaggatcct

SEQ ID NO: 103704 - DNA, 25 bp, Homo sapien
ccatttgcatgaaggtgactttgta

SEQ ID NO: 103705 - DNA, 25 bp, Homo sapien
ctaaaaaatgagcggcagttctttc

SEQ ID NO: 103706 - DNA, 25 bp, Homo sapien
aaaatgagcggcagttctttctcag

SEQ ID NO: 103707 - DNA, 25 bp, Homo sapien
agttctgcactgtcattctctatca

SEQ ID NO: 103708 - DNA, 25 bp, Homo sapien
cgaggaagtagtcttaagtgggcat

SEQ ID NO: 103709 - DNA, 25 bp, Homo sapien
gaagatcagtggatatcgaggaagt

SEQ ID NO: 103710 - DNA, 25 bp, Homo sapien
gccaagttggcatcaagttctgcac

SEQ ID NO: 103711 - DNA, 25 bp, Homo sapien
caaaagatcctacgcattgtagcct

SEQ ID NO: 103712 - DNA, 25 bp, Homo sapien
catctaaacacaagtctccagcggc

SEQ ID NO: 103713 - DNA, 25 bp, Homo sapien
gaagatccaccatcctatgacactg

SEQ ID NO: 103714 - DNA, 25 bp, Homo sapien
ttgtgctgtagcaacaaagaacccc

SEQ ID NO: 103715 - DNA, 25 bp, Homo sapien
tgttccgattcacatcaaatttcaa

SEQ ID NO: 103716 - DNA, 25 bp, Homo sapien
tccgattcacatcaaatttcaactg

SEQ ID NO: 103717 - DNA, 25 bp, Homo sapien
ggtgttccgattcacatcaaatttc

SEQ ID NO: 103718 - DNA, 25 bp, Homo sapien
tcatggtgttccgattcacatcaaa

SEQ ID NO: 103719 - DNA, 25 bp, Homo sapien
cctcaacacaacctcggcctccagg

SEQ ID NO: 103720 - DNA, 25 bp, Homo sapien
caatcttgcctcaacacaacctcgg

SEQ ID NO: 103721 - DNA, 25 bp, Homo sapien
ttgcctcaacacaacctcggcctcc

SEQ ID NO: 103722 - DNA, 25 bp, Homo sapien
gcaatcttgcctcaacacaacctcg

SEQ ID NO: 103723 - DNA, 25 bp, Homo sapien
agtccatcccaccacttgaaagtac

SEQ ID NO: 103724 - DNA, 25 bp, Homo sapien
ggcacagttagatgccagcgcaata

SEQ ID NO: 103725 - DNA, 25 bp, Homo sapien
gatgccagcgcaataatgaaaaaca

SEQ ID NO: 103726 - DNA, 25 bp, Homo sapien
agacaagatggagtgcacagtccat

SEQ ID NO: 103727 - DNA, 25 bp, Homo sapien
gtagcaggtgacacaagccgtacag

SEQ ID NO: 103728 - DNA, 25 bp, Homo sapien
agataatacaacacacacttccacc

SEQ ID NO: 103729 - DNA, 25 bp, Homo sapien
tcatctctcatggtagcaggtgaca

SEQ ID NO: 103730 - DNA, 25 bp, Homo sapien
cacaagccgtacagataatacaaca

SEQ ID NO: 103731 - DNA, 25 bp, Homo sapien
aaagtctttcagcagtccgtcaagg

SEQ ID NO: 103732 - DNA, 25 bp, Homo sapien
aatgcaaagtctttcagcagtccgt

SEQ ID NO: 103733 - DNA, 25 bp, Homo sapien
tctttcagcagtccgtcaaggtggc

SEQ ID NO: 103734 - DNA, 25 bp, Homo sapien
gcagtccgtcaaggtggctgaaaaa

SEQ ID NO: 103735 - DNA, 25 bp, Homo sapien
cttctttcttgatgccttcttcctt

SEQ ID NO: 103736 - DNA, 25 bp, Homo sapien
ttccttcttgtagcagccggttgca

SEQ ID NO: 103737 - DNA, 25 bp, Homo sapien
ggtataaggcttggaaaatgtcttc

SEQ ID NO: 103738 - DNA, 25 bp, Homo sapien
ctaaaggtataaggcttggaaaatg

SEQ ID NO: 103739 - DNA, 25 bp, Homo sapien
aaaatctcactgtcccaatgtcctt

SEQ ID NO: 103740 - DNA, 25 bp, Homo sapien
aaaaatctcactgtcccaatgtcct

SEQ ID NO: 103741 - DNA, 25 bp, Homo sapien
aaaaaatctcactgtcccaatgtcc

SEQ ID NO: 103742 - DNA, 25 bp, Homo sapien
atccagatccaatccaccacgacag

SEQ ID NO: 103743 - DNA, 25 bp, Homo sapien
accagctgtaaagcctgcacataca

SEQ ID NO: 103744 - DNA, 25 bp, Homo sapien
ccatatccagatccaatccaccacg

SEQ ID NO: 103745 - DNA, 25 bp, Homo sapien
ctttctcccatatccagatccaatc

SEQ ID NO: 103746 - DNA, 25 bp, Homo sapien
ctccggcaggcacacatcaacctga

SEQ ID NO: 103747 - DNA, 25 bp, Homo sapien
tccggcaggcacacatcaacctgat

SEQ ID NO: 103748 - DNA, 25 bp, Homo sapien
ggttttatgttctttcatcccacaa

SEQ ID NO: 103749 - DNA, 25 bp, Homo sapien
tatgttctttcatcccacaatgcaa

SEQ ID NO: 103750 - DNA, 25 bp, Homo sapien
ttctctgaacacgatggttttatgt

SEQ ID NO: 103751 - DNA, 25 bp, Homo sapien
caaggtttcggttgacattctctga

SEQ ID NO: 103752 - DNA, 25 bp, Homo sapien
tgtcaccttcctcaatcccaaatca

SEQ ID NO: 103753 - DNA, 25 bp, Homo sapien
gacctgaggcccttccagagatcag

SEQ ID NO: 103754 - DNA, 25 bp, Homo sapien
gcagtctcccaatacatccttgtca

SEQ ID NO: 103755 - DNA, 25 bp, Homo sapien
cagagatcagcagtctcccaataca

SEQ ID NO: 103756 - DNA, 25 bp, Homo sapien
tagatctcagagttggcatcagata

SEQ ID NO: 103757 - DNA, 25 bp, Homo sapien
ccccatgtccactgttgaccctttt

SEQ ID NO: 103758 - DNA, 25 bp, Homo sapien
gatctcagagttggcatcagatatg

SEQ ID NO: 103759 - DNA, 25 bp, Homo sapien
gccagatacaatacttcgttgcaat

SEQ ID NO: 103760 - DNA, 25 bp, Homo sapien
tattccaggatatgcctctgaatca

SEQ ID NO: 103761 - DNA, 25 bp, Homo sapien
ttaacaggcaatgtgccacacagta

SEQ ID NO: 103762 - DNA, 25 bp, Homo sapien
aggcaatgtgccacacagtattcca

SEQ ID NO: 103763 - DNA, 25 bp, Homo sapien
gtattccaggatatgcctctgaatc

SEQ ID NO: 103764 - DNA, 25 bp, Homo sapien
ttcacattcatggggattcatctct

SEQ ID NO: 103765 - DNA, 25 bp, Homo sapien
cttcacattcatggggattcatctc

SEQ ID NO: 103766 - DNA, 25 bp, Homo sapien
tatcatgcctggaattgatgcatgg

SEQ ID NO: 103767 - DNA, 25 bp, Homo sapien
aactatagcaggcatcttgtgatct

SEQ ID NO: 103768 - DNA, 25 bp, Homo sapien
gataccagaacggaaacatgaaagg

SEQ ID NO: 103769 - DNA, 25 bp, Homo sapien
gataaagtcaatgttgaggatacca

SEQ ID NO: 103770 - DNA, 25 bp, Homo sapien
gtatggtactggtgccaaaacagat

SEQ ID NO: 103771 - DNA, 25 bp, Homo sapien
cccacattgccaagacattcctaag

SEQ ID NO: 103772 - DNA, 25 bp, Homo sapien
aagagcccacattgccaagacattc

SEQ ID NO: 103773 - DNA, 25 bp, Homo sapien
agcccacattgccaagacattccta

SEQ ID NO: 103774 - DNA, 25 bp, Homo sapien
tatggaggtgtcatcatgtagtcag

SEQ ID NO: 103775 - DNA, 25 bp, Homo sapien
ggtgtcatcatgtagtcaggatcgg

SEQ ID NO: 103776 - DNA, 25 bp, Homo sapien
ggttattaacacaatctgcagcttt

SEQ ID NO: 103777 - DNA, 25 bp, Homo sapien
tagtcaggatcggttattaacacaa

SEQ ID NO: 103778 - DNA, 25 bp, Homo sapien
ggaacagtcaatctcactgtacctg

SEQ ID NO: 103779 - DNA, 25 bp, Homo sapien
tggtcaggtctgtcaactcatgtct

SEQ ID NO: 103780 - DNA, 25 bp, Homo sapien
tcatgtctagcagaactacaccgaa

SEQ ID NO: 103781 - DNA, 25 bp, Homo sapien
ttaatcttcaatgccatatacaagg

SEQ ID NO: 103782 - DNA, 25 bp, Homo sapien
gtcctccaggcaagtcatagccttg

SEQ ID NO: 103783 - DNA, 25 bp, Homo sapien
cactgagcagcaagatacgttatca

SEQ ID NO: 103784 - DNA, 25 bp, Homo sapien
tagccttggtacatttactccactg

SEQ ID NO: 103785 - DNA, 25 bp, Homo sapien
gtcttgtcctccaggcaagtcatag

SEQ ID NO: 103786 - DNA, 25 bp, Homo sapien
agccaggtgaatgagtctgtatccc

SEQ ID NO: 103787 - DNA, 25 bp, Homo sapien
aggagttttagcctcaggttctgga

SEQ ID NO: 103788 - DNA, 25 bp, Homo sapien
ccaggtgaatgagtctgtatcccag

SEQ ID NO: 103789 - DNA, 25 bp, Homo sapien
ccaggagttttagcctcaggttctg

SEQ ID NO: 103790 - DNA, 25 bp, Homo sapien
tctttacaaccgtggaaattgaatg

SEQ ID NO: 103791 - DNA, 25 bp, Homo sapien
tgctcaaatgtgaccctcaagctaa

SEQ ID NO: 103792 - DNA, 25 bp, Homo sapien
caagctaatggtgtccacaattcca

SEQ ID NO: 103793 - DNA, 25 bp, Homo sapien
agcaaaaccgtcttaactggcaaat

SEQ ID NO: 103794 - DNA, 25 bp, Homo sapien
tgtagttccagcacataaaacgcaa

SEQ ID NO: 103795 - DNA, 25 bp, Homo sapien
caagcttttcattgtctctccaaag

SEQ ID NO: 103796 - DNA, 25 bp, Homo sapien
tagctcactcaacgcttcatcaatg

SEQ ID NO: 103797 - DNA, 25 bp, Homo sapien
taaggccactctggtcgtaggcaga

SEQ ID NO: 103798 - DNA, 25 bp, Homo sapien
taagaaggataggaccagagtatga

SEQ ID NO: 103799 - DNA, 25 bp, Homo sapien
tctattcaatagaaagcaactgtgg

SEQ ID NO: 103800 - DNA, 25 bp, Homo sapien
tgctgaaaattcagtcccagagaga

SEQ ID NO: 103801 - DNA, 25 bp, Homo sapien
gaagaatgcttccactgtcactgct

SEQ ID NO: 103802 - DNA, 25 bp, Homo sapien
ggcatcaatccacgaagaacagtac

SEQ ID NO: 103803 - DNA, 25 bp, Homo sapien
cttcgcatagcacttggcatcaatc

SEQ ID NO: 103804 - DNA, 25 bp, Homo sapien
tagcacttggcatcaatccacgaag

SEQ ID NO: 103805 - DNA, 25 bp, Homo sapien
cgaagaacagtacctacagccagag

SEQ ID NO: 103806 - DNA, 25 bp, Homo sapien
ccactggtgaccttactgaatgatg

SEQ ID NO: 103807 - DNA, 25 bp, Homo sapien
tcaattgtcagctccatgtaggtgg

SEQ ID NO: 103808 - DNA, 25 bp, Homo sapien
taaatagcctgcaggataagcagca

SEQ ID NO: 103809 - DNA, 25 bp, Homo sapien
aaacacagactgcaatggcttgagg

SEQ ID NO: 103810 - DNA, 25 bp, Homo sapien
taaaaatattatctacagagtgata

SEQ ID NO: 103811 - DNA, 25 bp, Homo sapien
ccacaaggaagtagcatttcatact

SEQ ID NO: 103812 - DNA, 25 bp, Homo sapien
atttccaaatggattgttgtcaaag

SEQ ID NO: 103813 - DNA, 25 bp, Homo sapien
tccaaatggattgttgtcaaaggat

SEQ ID NO: 103814 - DNA, 25 bp, Homo sapien
tgagaattggaaaagaccgactgaa

SEQ ID NO: 103815 - DNA, 25 bp, Homo sapien
aaaaatcgtacagtggtggagagca

SEQ ID NO: 103816 - DNA, 25 bp, Homo sapien
caagtctcccaatagcatgcagcgt

SEQ ID NO: 103817 - DNA, 25 bp, Homo sapien
cagcgtctcttatccaaatgcaggg

SEQ ID NO: 103818 - DNA, 25 bp, Homo sapien
caagcaagttgcctcgatggacata

SEQ ID NO: 103819 - DNA, 25 bp, Homo sapien
tattcaggtcatgatgtcaagcaag

SEQ ID NO: 103820 - DNA, 25 bp, Homo sapien
gaggtgatcataactctcaagcagt

SEQ ID NO: 103821 - DNA, 25 bp, Homo sapien
aaaagcagatgcctctctaccagca

SEQ ID NO: 103822 - DNA, 25 bp, Homo sapien
tgcagaatacatcagggttataggg

SEQ ID NO: 103823 - DNA, 25 bp, Homo sapien
catgggatagttgtgccatcaaggg

SEQ ID NO: 103824 - DNA, 25 bp, Homo sapien
ggatcacctccagaaatactggctg

SEQ ID NO: 103825 - DNA, 25 bp, Homo sapien
caatgtctctaaagtctcagcctga

SEQ ID NO: 103826 - DNA, 25 bp, Homo sapien
catttttagtacttaacagatgtat

SEQ ID NO: 103827 - DNA, 25 bp, Homo sapien
ggagcaagtcacatcccacgtggtg

SEQ ID NO: 103828 - DNA, 25 bp, Homo sapien
caggtccctcagacagcacatgaga

SEQ ID NO: 103829 - DNA, 25 bp, Homo sapien
gaagagagaacttgtacagaggaac

SEQ ID NO: 103830 - DNA, 25 bp, Homo sapien
tgactgccgcagcaccagctttgtc

SEQ ID NO: 103831 - DNA, 25 bp, Homo sapien
ttcagaagtagaacagtctccaaaa

SEQ ID NO: 103832 - DNA, 25 bp, Homo sapien
aaaagcacagcaatcagtggcatca

SEQ ID NO: 103833 - DNA, 25 bp, Homo sapien
gctttgtcccaaggcttcagaatct

SEQ ID NO: 103834 - DNA, 25 bp, Homo sapien
caacaaataaccttatggacaggac

SEQ ID NO: 103835 - DNA, 25 bp, Homo sapien
gaaactgcagttggtaataaaggta

SEQ ID NO: 103836 - DNA, 25 bp, Homo sapien
tgctgtgcacagtagagagaccctg

SEQ ID NO: 103837 - DNA, 25 bp, Homo sapien
aggtaaacatatgggcagttgcctc

SEQ ID NO: 103838 - DNA, 25 bp, Homo sapien
tactcagccagttcaacaaaaagag

SEQ ID NO: 103839 - DNA, 25 bp, Homo sapien
gaaatacagtgagatgctaacctga

SEQ ID NO: 103840 - DNA, 25 bp, Homo sapien
aaatcatttgctcaataggtaggag

SEQ ID NO: 103841 - DNA, 25 bp, Homo sapien
tgtctgcttgagatcttgcaccaat

SEQ ID NO: 103842 - DNA, 25 bp, Homo sapien
ttgcagacacaggtttgtgcgtctg

SEQ ID NO: 103843 - DNA, 25 bp, Homo sapien
cagacacaggtttgtgcgtctgcat

SEQ ID NO: 103844 - DNA, 25 bp, Homo sapien
gcagacacaggtttgtgcgtctgca

SEQ ID NO: 103845 - DNA, 25 bp, Homo sapien
ctttgcagacacaggtttgtgcgtc

SEQ ID NO: 103846 - DNA, 25 bp, Homo sapien
ttagcttccttgaacgtttgtttca

SEQ ID NO: 103847 - DNA, 25 bp, Homo sapien
cagtcttcatggtaatattggaggc

SEQ ID NO: 103848 - DNA, 25 bp, Homo sapien
ccttgaacgtttgtttcatgcagtc

SEQ ID NO: 103849 - DNA, 25 bp, Homo sapien
tcaatggagcaactggattttttct

SEQ ID NO: 103850 - DNA, 25 bp, Homo sapien
ctttagtgtttgttccacttcatag

SEQ ID NO: 103851 - DNA, 25 bp, Homo sapien
tttagtgtttgttccacttcataga

SEQ ID NO: 103852 - DNA, 25 bp, Homo sapien
ctaacatatgtacgagaaatcttca

SEQ ID NO: 103853 - DNA, 25 bp, Homo sapien
gaacgactaacatatgtacgagaaa

SEQ ID NO: 103854 - DNA, 25 bp, Homo sapien
ctctggattttgaacgactaacata

SEQ ID NO: 103855 - DNA, 25 bp, Homo sapien
gattttgaacgactaacatatgtac

SEQ ID NO: 103856 - DNA, 25 bp, Homo sapien
ccagaacactgaggggtagaacacc

SEQ ID NO: 103857 - DNA, 25 bp, Homo sapien
cacatgcctgcagccattggggtgg

SEQ ID NO: 103858 - DNA, 25 bp, Homo sapien
acaaaagataggtgccatcacagtc

SEQ ID NO: 103859 - DNA, 25 bp, Homo sapien
cactgaggggtagaacacctctaat

SEQ ID NO: 103860 - DNA, 25 bp, Homo sapien
cagtaggtgtattgtaggtggtcaa

SEQ ID NO: 103861 - DNA, 25 bp, Homo sapien
ctatcagtaggtgtattgtaggtgg

SEQ ID NO: 103862 - DNA, 25 bp, Homo sapien
tcagtaggtgtattgtaggtggtca

SEQ ID NO: 103863 - DNA, 25 bp, Homo sapien
atcagtaggtgtattgtaggtggtc

SEQ ID NO: 103864 - DNA, 25 bp, Homo sapien
cttttatgagttctactgctaagtc

SEQ ID NO: 103865 - DNA, 25 bp, Homo sapien
acacagtcaatagctggtacttcag

SEQ ID NO: 103866 - DNA, 25 bp, Homo sapien
gctaagtcaattctaatctctgcat

SEQ ID NO: 103867 - DNA, 25 bp, Homo sapien
cactaccagatcaattatagtcaca

SEQ ID NO: 103868 - DNA, 25 bp, Homo sapien
cattgtagcgttctcacattttcta

SEQ ID NO: 103869 - DNA, 25 bp, Homo sapien
gcgttctcacattttctaacaatca

SEQ ID NO: 103870 - DNA, 25 bp, Homo sapien
gcttgcattgtagcgttctcacatt

SEQ ID NO: 103871 - DNA, 25 bp, Homo sapien
aatgcctgcttgcattgtagcgttc

SEQ ID NO: 103872 - DNA, 25 bp, Homo sapien
tttctttgccatttcttgaaatttc

SEQ ID NO: 103873 - DNA, 25 bp, Homo sapien
ctttgccatttcttgaaatttcctt

SEQ ID NO: 103874 - DNA, 25 bp, Homo sapien
ctagtcattttctttgccatttctt

SEQ ID NO: 103875 - DNA, 25 bp, Homo sapien
attttctttgccatttcttgaaatt

SEQ ID NO: 103876 - DNA, 25 bp, Homo sapien
ggtgtgtggccatgtctctcatttt

SEQ ID NO: 103877 - DNA, 25 bp, Homo sapien
aagctggaagaatgaggccattcag

SEQ ID NO: 103878 - DNA, 25 bp, Homo sapien
aggtgtgtggccatgtctctcattt

SEQ ID NO: 103879 - DNA, 25 bp, Homo sapien
ttcagggatattatccccttttcaa

SEQ ID NO: 103880 - DNA, 25 bp, Homo sapien
ctccatctgagatagttgttctggg

SEQ ID NO: 103881 - DNA, 25 bp, Homo sapien
agcccgattgcggtcatatggagtg

SEQ ID NO: 103882 - DNA, 25 bp, Homo sapien
tcatatggagtgtctccatctgaga

SEQ ID NO: 103883 - DNA, 25 bp, Homo sapien
gattgcggtcatatggagtgtctcc

SEQ ID NO: 103884 - DNA, 25 bp, Homo sapien
ccttaatagagcattacagtcaatt

SEQ ID NO: 103885 - DNA, 25 bp, Homo sapien
tgagtttctgctgtaatgagcctta

SEQ ID NO: 103886 - DNA, 25 bp, Homo sapien
tgtaatgagccttaatagagcatta

SEQ ID NO: 103887 - DNA, 25 bp, Homo sapien
tttatatgttcggtggattctgtgg

SEQ ID NO: 103888 - DNA, 25 bp, Homo sapien
tttcgatggctgcaattctctttga

SEQ ID NO: 103889 - DNA, 25 bp, Homo sapien
ggctgcaattctctttgaccttggg

SEQ ID NO: 103890 - DNA, 25 bp, Homo sapien
tgatttcgatggctgcaattctctt

SEQ ID NO: 103891 - DNA, 25 bp, Homo sapien
gatggctgcaattctctttgacctt

SEQ ID NO: 103892 - DNA, 25 bp, Homo sapien
gtgaaaattccatagacagtttcca

SEQ ID NO: 103893 - DNA, 25 bp, Homo sapien
agtgatggtctcagaagcaatgaaa

SEQ ID NO: 103894 - DNA, 25 bp, Homo sapien
tgatcctcaggagtgaatgtctctt

SEQ ID NO: 103895 - DNA, 25 bp, Homo sapien
gcacaggaatagtatgaagtcttat

SEQ ID NO: 103896 - DNA, 25 bp, Homo sapien
gattttcctcttgtcaaatccgatg

SEQ ID NO: 103897 - DNA, 25 bp, Homo sapien
tgtcaaatccgatgtagtggctgta

SEQ ID NO: 103898 - DNA, 25 bp, Homo sapien
gcatttctcctgaagtcagccacca

SEQ ID NO: 103899 - DNA, 25 bp, Homo sapien
tggctgtagcttgtatttgcatttc

SEQ ID NO: 103900 - DNA, 25 bp, Homo sapien
tgtttctgtatgctagtttctgctc

SEQ ID NO: 103901 - DNA, 25 bp, Homo sapien
catgaagcaagatagtcacagccat

SEQ ID NO: 103902 - DNA, 25 bp, Homo sapien
aagttcatgaagcaagatagtcaca

SEQ ID NO: 103903 - DNA, 25 bp, Homo sapien
tttctgctctagtggatcaagttca

SEQ ID NO: 103904 - DNA, 25 bp, Homo sapien
ctgccactctgaggaggtgctagac

SEQ ID NO: 103905 - DNA, 25 bp, Homo sapien
cgtactttaggcaagcaggccagcc

SEQ ID NO: 103906 - DNA, 25 bp, Homo sapien
tgctagacagttgagttgtcgtact

SEQ ID NO: 103907 - DNA, 25 bp, Homo sapien
cagttgagttgtcgtactttaggca

SEQ ID NO: 103908 - DNA, 25 bp, Homo sapien
gtatccaacactaggctgaacgacc

SEQ ID NO: 103909 - DNA, 25 bp, Homo sapien
tccaacactaggctgaacgaccagg

SEQ ID NO: 103910 - DNA, 25 bp, Homo sapien
agtctgactcccgtatccaacacta

SEQ ID NO: 103911 - DNA, 25 bp, Homo sapien
gactcccgtatccaacactaggctg

SEQ ID NO: 103912 - DNA, 25 bp, Homo sapien
gctttaaattgggtttatatacagc

SEQ ID NO: 103913 - DNA, 25 bp, Homo sapien
ttaaattgggtttatatacagcttc

SEQ ID NO: 103914 - DNA, 25 bp, Homo sapien
ctttaaattgggtttatatacagct

SEQ ID NO: 103915 - DNA, 25 bp, Homo sapien
ttgctttaaattgggtttatataca

SEQ ID NO: 103916 - DNA, 25 bp, Homo sapien
gacaggtcaatttgcatccgggtga

SEQ ID NO: 103917 - DNA, 25 bp, Homo sapien
agagtcagagaaagctttgcaaaga

SEQ ID NO: 103918 - DNA, 25 bp, Homo sapien
catccgggtgaccattatggattcc

SEQ ID NO: 103919 - DNA, 25 bp, Homo sapien
ctagaacgacaggtcaatttgcatc

SEQ ID NO: 103920 - DNA, 25 bp, Homo sapien
tgcgaggcacatgtgtcactatgac

SEQ ID NO: 103921 - DNA, 25 bp, Homo sapien
caatggaacccagatcataatgagt

SEQ ID NO: 103922 - DNA, 25 bp, Homo sapien
cttgtgatgtcctgttgcgaggcac

SEQ ID NO: 103923 - DNA, 25 bp, Homo sapien
cactatgacttggtgggaccaatgg

SEQ ID NO: 103924 - DNA, 25 bp, Homo sapien
aatcagctatttccgttaagtgtgc

SEQ ID NO: 103925 - DNA, 25 bp, Homo sapien
tagattagtcttccctactgtgagc

SEQ ID NO: 103926 - DNA, 25 bp, Homo sapien
tactgtgagccacctgtctagagtg

SEQ ID NO: 103927 - DNA, 25 bp, Homo sapien
cagtctcttgctgaagccttcgtag

SEQ ID NO: 103928 - DNA, 25 bp, Homo sapien
atgaatcttcattgatgtctgcagt

SEQ ID NO: 103929 - DNA, 25 bp, Homo sapien
tgatgaatcttcattgatgtctgca

SEQ ID NO: 103930 - DNA, 25 bp, Homo sapien
tatgatgaatcttcattgatgtctg

SEQ ID NO: 103931 - DNA, 25 bp, Homo sapien
ttatgatgaatcttcattgatgtct

SEQ ID NO: 103932 - DNA, 25 bp, Homo sapien
agggccctgcgagaaagcttttgtt

SEQ ID NO: 103933 - DNA, 25 bp, Homo sapien
tcagggccctgcgagaaagcttttg

SEQ ID NO: 103934 - DNA, 25 bp, Homo sapien
tttcagggccctgcgagaaagcttt

SEQ ID NO: 103935 - DNA, 25 bp, Homo sapien
ttttcagggccctgcgagaaagctt

SEQ ID NO: 103936 - DNA, 25 bp, Homo sapien
tgcaatttcaatactccgcagtaca

SEQ ID NO: 103937 - DNA, 25 bp, Homo sapien
tcctttgatgataacttgcaatttc

SEQ ID NO: 103938 - DNA, 25 bp, Homo sapien
gataacttgcaatttcaatactccg

SEQ ID NO: 103939 - DNA, 25 bp, Homo sapien
tactccgcagtacattcttgataat

SEQ ID NO: 103940 - DNA, 25 bp, Homo sapien
tgatgccctctataaaaaggtaact

SEQ ID NO: 103941 - DNA, 25 bp, Homo sapien
ttctgattatggatgccaagaggca

SEQ ID NO: 103942 - DNA, 25 bp, Homo sapien
cagtagttgctctaacgtatggcaa

SEQ ID NO: 103943 - DNA, 25 bp, Homo sapien
gagccaaaaggtgttattatgcatg

SEQ ID NO: 103944 - DNA, 25 bp, Homo sapien
cgaggcactgcctcactcagaaagc

SEQ ID NO: 103945 - DNA, 25 bp, Homo sapien
gaggcactgcctcactcagaaagcg

SEQ ID NO: 103946 - DNA, 25 bp, Homo sapien
aggcactgcctcactcagaaagcgc

SEQ ID NO: 103947 - DNA, 25 bp, Homo sapien
atctaatgttgctgaagcatgtgag

SEQ ID NO: 103948 - DNA, 25 bp, Homo sapien
catctaatgttgctgaagcatgtga

SEQ ID NO: 103949 - DNA, 25 bp, Homo sapien
cagggtacgtctagggaatgaataa

SEQ ID NO: 103950 - DNA, 25 bp, Homo sapien
catacttgggctctgttgctagaac

SEQ ID NO: 103951 - DNA, 25 bp, Homo sapien
tctgccatggtcaggactacatact

SEQ ID NO: 103952 - DNA, 25 bp, Homo sapien
taattacctaacacagtcgctggca

SEQ ID NO: 103953 - DNA, 25 bp, Homo sapien
gacactgaatcctcaggcaccatga

SEQ ID NO: 103954 - DNA, 25 bp, Homo sapien
actgaatcctcaggcaccatgatct

SEQ ID NO: 103955 - DNA, 25 bp, Homo sapien
cagacactgaatcctcaggcaccat

SEQ ID NO: 103956 - DNA, 25 bp, Homo sapien
tgaatcctcaggcaccatgatcttg

SEQ ID NO: 103957 - DNA, 25 bp, Homo sapien
gaaataagggaattacaacaggcat

SEQ ID NO: 103958 - DNA, 25 bp, Homo sapien
caacaggcattagttctgaaaggct

SEQ ID NO: 103959 - DNA, 25 bp, Homo sapien
tcttgttgcgttagacagcttccaa

SEQ ID NO: 103960 - DNA, 25 bp, Homo sapien
gaaaacgtgctgagtctgataacca

SEQ ID NO: 103961 - DNA, 25 bp, Homo sapien
tatggtgttaatctgctggccagga

SEQ ID NO: 103962 - DNA, 25 bp, Homo sapien
catactggaagaatgttgggtagcc

SEQ ID NO: 103963 - DNA, 25 bp, Homo sapien
tagatttgcctgaccagaaccaaga

SEQ ID NO: 103964 - DNA, 25 bp, Homo sapien
taaaatgcgagggatggaaactgac

SEQ ID NO: 103965 - DNA, 25 bp, Homo sapien
gaaagatgctgccattaacaaagtg

SEQ ID NO: 103966 - DNA, 25 bp, Homo sapien
gatttatctgagatggtgtcggaca

SEQ ID NO: 103967 - DNA, 25 bp, Homo sapien
gaaagcagcatagcctaacagttgg

SEQ ID NO: 103968 - DNA, 25 bp, Homo sapien
aaactgccttctagatagttaccga

SEQ ID NO: 103969 - DNA, 25 bp, Homo sapien
caatgctagataatggtgactcaga

SEQ ID NO: 103970 - DNA, 25 bp, Homo sapien
gatggagtggagcataagacattac

SEQ ID NO: 103971 - DNA, 25 bp, Homo sapien
gatatggataccctaaaaaccctga

SEQ ID NO: 103972 - DNA, 25 bp, Homo sapien
caatcccatgactgagtgactacac

SEQ ID NO: 103973 - DNA, 25 bp, Homo sapien
agagaaaccccagtatccgctacag

SEQ ID NO: 103974 - DNA, 25 bp, Homo sapien
aggatacctaaagcgttttcaggcg

SEQ ID NO: 103975 - DNA, 25 bp, Homo sapien
tggcagaaagcataggataatcccg

SEQ ID NO: 103976 - DNA, 25 bp, Homo sapien
ttgaagctgagggactaggcatgcc

SEQ ID NO: 103977 - DNA, 25 bp, Homo sapien
gtaacaaatacatcactcaggtggg

SEQ ID NO: 103978 - DNA, 25 bp, Homo sapien
gataagacattctagccctgtgtga

SEQ ID NO: 103979 - DNA, 25 bp, Homo sapien
tacaatgcacgtggttttactaaga

SEQ ID NO: 103980 - DNA, 25 bp, Homo sapien
ggagtatacggaaaagatctgcaca

SEQ ID NO: 103981 - DNA, 25 bp, Homo sapien
ccaaaatcaaagtgccggcaggttt

SEQ ID NO: 103982 - DNA, 25 bp, Homo sapien
cttaggtcactttgtgatgctgtga

SEQ ID NO: 103983 - DNA, 25 bp, Homo sapien
ttgtactccttagaagtgatttcca

SEQ ID NO: 103984 - DNA, 25 bp, Homo sapien
ataaatgttatttgatcaggcccca

SEQ ID NO: 103985 - DNA, 25 bp, Homo sapien
actgtgccggtcaaatgcaatgtga

SEQ ID NO: 103986 - DNA, 25 bp, Homo sapien
gctttctagactggacttaggctct

SEQ ID NO: 103987 - DNA, 25 bp, Homo sapien
tttggtggcacctctagatagctac

SEQ ID NO: 103988 - DNA, 25 bp, Homo sapien
tatattaaccagtacactgtgccgg

SEQ ID NO: 103989 - DNA, 25 bp, Homo sapien
tcatcaaaatcatccttccttgatg

SEQ ID NO: 103990 - DNA, 25 bp, Homo sapien
tcatccttccttgatgacattcgca

SEQ ID NO: 103991 - DNA, 25 bp, Homo sapien
aaatcatccttccttgatgacattc

SEQ ID NO: 103992 - DNA, 25 bp, Homo sapien
atcatcaaaatcatccttccttgat

SEQ ID NO: 103993 - DNA, 25 bp, Homo sapien
agagacctctgtgtgaaagcaatgc

SEQ ID NO: 103994 - DNA, 25 bp, Homo sapien
tatgcttctacagtacatctcagag

SEQ ID NO: 103995 - DNA, 25 bp, Homo sapien
cctctgtgtgaaagcaatgctctgg

SEQ ID NO: 103996 - DNA, 25 bp, Homo sapien
tgctctggatgatactgacagctga

SEQ ID NO: 103997 - DNA, 25 bp, Homo sapien
tacatatggagatcatgtaaatccg

SEQ ID NO: 103998 - DNA, 25 bp, Homo sapien
catatacacgatctttcagaactgt

SEQ ID NO: 103999 - DNA, 25 bp, Homo sapien
ttggttactattacagagagacact

SEQ ID NO: 104000 - DNA, 25 bp, Homo sapien
tgtaaatccgtgctcacaatcagtc

SEQ ID NO: 104001 - DNA, 25 bp, Homo sapien
gtaaaagggactggacttctgccat

SEQ ID NO: 104002 - DNA, 25 bp, Homo sapien
gattcaaactaggagcatgcacaag

SEQ ID NO: 104003 - DNA, 25 bp, Homo sapien
taagaggattcaaactaggagcatg

SEQ ID NO: 104004 - DNA, 25 bp, Homo sapien
tcaaactaggagcatgcacaagtaa

SEQ ID NO: 104005 - DNA, 25 bp, Homo sapien
catagaagctatgtgtaccacccat

SEQ ID NO: 104006 - DNA, 25 bp, Homo sapien
cttgctcacggccaatccattttta

SEQ ID NO: 104007 - DNA, 25 bp, Homo sapien
ccataggttcctgattcatagaagc

SEQ ID NO: 104008 - DNA, 25 bp, Homo sapien
taatatgacctctatttttgtgata

SEQ ID NO: 104009 - DNA, 25 bp, Homo sapien
ctcagggatttcaggaacaatcaaa

SEQ ID NO: 104010 - DNA, 25 bp, Homo sapien
ggaacaatcaaatgaatggtgcttt

SEQ ID NO: 104011 - DNA, 25 bp, Homo sapien
caaatgaatggtgctttctttattc

SEQ ID NO: 104012 - DNA, 25 bp, Homo sapien
tttcaggaacaatcaaatgaatggt

SEQ ID NO: 104013 - DNA, 25 bp, Homo sapien
tcctacttaggatagctagataaag

SEQ ID NO: 104014 - DNA, 25 bp, Homo sapien
gtcacagtcttcttcaaatcaccag

SEQ ID NO: 104015 - DNA, 25 bp, Homo sapien
gccctcagagtttttgccaatttgt

SEQ ID NO: 104016 - DNA, 25 bp, Homo sapien
ctagataaagttcaaaagccacctg

SEQ ID NO: 104017 - DNA, 25 bp, Homo sapien
tctcctaagacagaatagatgttat

SEQ ID NO: 104018 - DNA, 25 bp, Homo sapien
gaacagattttaaccaagtgaagag

SEQ ID NO: 104019 - DNA, 25 bp, Homo sapien
gcccattccttgttctgagtaagct

SEQ ID NO: 104020 - DNA, 25 bp, Homo sapien
gtgttgtacaaaagaagcccattcc

SEQ ID NO: 104021 - DNA, 25 bp, Homo sapien
tttgcttgtgaactattcttgtaca

SEQ ID NO: 104022 - DNA, 25 bp, Homo sapien
gcagattacttacataagaaggata

SEQ ID NO: 104023 - DNA, 25 bp, Homo sapien
gagaataatatagccactgaaatct

SEQ ID NO: 104024 - DNA, 25 bp, Homo sapien
gattacactcatgcgccacaaacac

SEQ ID NO: 104025 - DNA, 25 bp, Homo sapien
cgcagtaatgttctaacattatatt

SEQ ID NO: 104026 - DNA, 25 bp, Homo sapien
tagagttagagttaaattcaacaaa

SEQ ID NO: 104027 - DNA, 25 bp, Homo sapien
gaaacattagtattcatacatacaa

SEQ ID NO: 104028 - DNA, 25 bp, Homo sapien
agtgatccatttacacagaacattt

SEQ ID NO: 104029 - DNA, 25 bp, Homo sapien
ccacatagtccgttaggagagcata

SEQ ID NO: 104030 - DNA, 25 bp, Homo sapien
tagtccgttaggagagcataattga

SEQ ID NO: 104031 - DNA, 25 bp, Homo sapien
tccgttaggagagcataattgacac

SEQ ID NO: 104032 - DNA, 25 bp, Homo sapien
ggagagcataattgacactgagcat

SEQ ID NO: 104033 - DNA, 25 bp, Homo sapien
gaagctggcacttagcaagtttgga

SEQ ID NO: 104034 - DNA, 25 bp, Homo sapien
caagatcccaatactctgcccaagg

SEQ ID NO: 104035 - DNA, 25 bp, Homo sapien
tgagtgatcaaaggtaaaagagcac

SEQ ID NO: 104036 - DNA, 25 bp, Homo sapien
ctcattgtgattagaacagcaccca

SEQ ID NO: 104037 - DNA, 25 bp, Homo sapien
tgaggctacacagccacgtggaact

SEQ ID NO: 104038 - DNA, 25 bp, Homo sapien
tgacttgttcctcctcgacttctgc

SEQ ID NO: 104039 - DNA, 25 bp, Homo sapien
tagtaatatggttggaatgtgcccc

SEQ ID NO: 104040 - DNA, 25 bp, Homo sapien
ggctttgaccaaaagtatgatagca

SEQ ID NO: 104041 - DNA, 25 bp, Homo sapien
gcctcttcagaacgcatagctttaa

SEQ ID NO: 104042 - DNA, 25 bp, Homo sapien
ctcagcctcttcagaacgcatagct

SEQ ID NO: 104043 - DNA, 25 bp, Homo sapien
agaacgcatagctttaaatgtcacc

SEQ ID NO: 104044 - DNA, 25 bp, Homo sapien
tcttcagaacgcatagctttaaatg

SEQ ID NO: 104045 - DNA, 25 bp, Homo sapien
gggctatggatgaaacactgaactt

SEQ ID NO: 104046 - DNA, 25 bp, Homo sapien
ttaatgggctatggatgaaacactg

SEQ ID NO: 104047 - DNA, 25 bp, Homo sapien
taatgggctatggatgaaacactga

SEQ ID NO: 104048 - DNA, 25 bp, Homo sapien
atgggctatggatgaaacactgaac

SEQ ID NO: 104049 - DNA, 25 bp, Homo sapien
atactttacctatcttttggcatgt

SEQ ID NO: 104050 - DNA, 25 bp, Homo sapien
gactgatgcctgtgaaaatgagatt

SEQ ID NO: 104051 - DNA, 25 bp, Homo sapien
tctcccttgaacttgctttaattaa

SEQ ID NO: 104052 - DNA, 25 bp, Homo sapien
gaatttgcattcagcaaaagctagg

SEQ ID NO: 104053 - DNA, 25 bp, Homo sapien
tttttgtgtcgtaataaggcatcat

SEQ ID NO: 104054 - DNA, 25 bp, Homo sapien
attccacccacactggtctggttac

SEQ ID NO: 104055 - DNA, 25 bp, Homo sapien
agtatccttttcaccctgtttatgt

SEQ ID NO: 104056 - DNA, 25 bp, Homo sapien
tcaccctgtttatgttgtacactaa

SEQ ID NO: 104057 - DNA, 25 bp, Homo sapien
ttatgttgtacactaacagttgcag

SEQ ID NO: 104058 - DNA, 25 bp, Homo sapien
tccttttcaccctgtttatgttgta

SEQ ID NO: 104059 - DNA, 25 bp, Homo sapien
tgctgaggcactgttacttccattc

SEQ ID NO: 104060 - DNA, 25 bp, Homo sapien
tgcacagaacatcatctcaatattc

SEQ ID NO: 104061 - DNA, 25 bp, Homo sapien
attctgctccctgctaccacgaaga

SEQ ID NO: 104062 - DNA, 25 bp, Homo sapien
catcttgcactacatttgctgaggc

SEQ ID NO: 104063 - DNA, 25 bp, Homo sapien
aatcgacgctttaggtatataaacg

SEQ ID NO: 104064 - DNA, 25 bp, Homo sapien
aagaagtaacattaaaatcgacgct

SEQ ID NO: 104065 - DNA, 25 bp, Homo sapien
tcttcagttgcccacagctcatgtt

SEQ ID NO: 104066 - DNA, 25 bp, Homo sapien
gcagatctaatttacttaccctaag

SEQ ID NO: 104067 - DNA, 25 bp, Homo sapien
tattcgactgaatggagaagaagca

SEQ ID NO: 104068 - DNA, 25 bp, Homo sapien
ttcaaacagtcgatggcctccctgc

SEQ ID NO: 104069 - DNA, 25 bp, Homo sapien
ctccctgcaagttgaggcaatctca

SEQ ID NO: 104070 - DNA, 25 bp, Homo sapien
tattgaggtattgcaacattaactc

SEQ ID NO: 104071 - DNA, 25 bp, Homo sapien
agtggaagtgctggatgccccaaat

SEQ ID NO: 104072 - DNA, 25 bp, Homo sapien
ttatcctccttttttgctgtcaatt

SEQ ID NO: 104073 - DNA, 25 bp, Homo sapien
aagtgccaataaaagttatcctcct

SEQ ID NO: 104074 - DNA, 25 bp, Homo sapien
agtgccaataaaagttatcctcctt

SEQ ID NO: 104075 - DNA, 25 bp, Homo sapien
aagttatcctccttttttgctgtca

SEQ ID NO: 104076 - DNA, 25 bp, Homo sapien
caacataccttaatagaacatccgg

SEQ ID NO: 104077 - DNA, 25 bp, Homo sapien
caactttatattttcgaagcgtgtc

SEQ ID NO: 104078 - DNA, 25 bp, Homo sapien
acatccggatatcttttctgcttgg

SEQ ID NO: 104079 - DNA, 25 bp, Homo sapien
ctgcttggtgattgcatacagaaac

SEQ ID NO: 104080 - DNA, 25 bp, Homo sapien
actgtgttatgaatgctctttatgg

SEQ ID NO: 104081 - DNA, 25 bp, Homo sapien
cttaagttaactgtgttatgaatgc

SEQ ID NO: 104082 - DNA, 25 bp, Homo sapien
catggtcatatcttaagttaactgt

SEQ ID NO: 104083 - DNA, 25 bp, Homo sapien
ggtcatatcttaagttaactgtgtt

SEQ ID NO: 104084 - DNA, 25 bp, Homo sapien
tctccgtcagtttatgtgctccttc

SEQ ID NO: 104085 - DNA, 25 bp, Homo sapien
ttcttctccgtcagtttatgtgctc

SEQ ID NO: 104086 - DNA, 25 bp, Homo sapien
tcttcttctccgtcagtttatgtgc

SEQ ID NO: 104087 - DNA, 25 bp, Homo sapien
cttctccgtcagtttatgtgctcct

SEQ ID NO: 104088 - DNA, 25 bp, Homo sapien
ctccctgatcataacagcaggcttc

SEQ ID NO: 104089 - DNA, 25 bp, Homo sapien
ccctgatcataacagcaggcttcgc

SEQ ID NO: 104090 - DNA, 25 bp, Homo sapien
aggtagacttaatctccctgatcat

SEQ ID NO: 104091 - DNA, 25 bp, Homo sapien
ctaggtagacttaatctccctgatc

SEQ ID NO: 104092 - DNA, 25 bp, Homo sapien
cataagtgtaggaactggtgtccct

SEQ ID NO: 104093 - DNA, 25 bp, Homo sapien
ccatcataagtgtaggaactggtgt

SEQ ID NO: 104094 - DNA, 25 bp, Homo sapien
ctctcaccatcataagtgtaggaac

SEQ ID NO: 104095 - DNA, 25 bp, Homo sapien
tctcaccatcataagtgtaggaact

SEQ ID NO: 104096 - DNA, 25 bp, Homo sapien
cacttgttcctttcatggcagtaag

SEQ ID NO: 104097 - DNA, 25 bp, Homo sapien
tgttcctttcatggcagtaagttca

SEQ ID NO: 104098 - DNA, 25 bp, Homo sapien
cctttcatggcagtaagttcagcca

SEQ ID NO: 104099 - DNA, 25 bp, Homo sapien
agcctcacttgttcctttcatggca

SEQ ID NO: 104100 - DNA, 25 bp, Homo sapien
tcctagttccatccccaatctgttt

SEQ ID NO: 104101 - DNA, 25 bp, Homo sapien
acagtgtatgtcagagcaggtgtga

SEQ ID NO: 104102 - DNA, 25 bp, Homo sapien
ccttccgtgctgcttgaataattga

SEQ ID NO: 104103 - DNA, 25 bp, Homo sapien
gagcaggtgtgagagtagacaatcc

SEQ ID NO: 104104 - DNA, 25 bp, Homo sapien
ctcaggaattccacttcgaagcaca

SEQ ID NO: 104105 - DNA, 25 bp, Homo sapien
tcaggaattccacttcgaagcacat

SEQ ID NO: 104106 - DNA, 25 bp, Homo sapien
ctccatatgcaggtgcagttctcag

SEQ ID NO: 104107 - DNA, 25 bp, Homo sapien
ctttgtgcttcttgagtcgtttcgt

SEQ ID NO: 104108 - DNA, 25 bp, Homo sapien
gagtcgtttcgtagcttgtgtatca

SEQ ID NO: 104109 - DNA, 25 bp, Homo sapien
gtgtatcatgattccttaagagttt

SEQ ID NO: 104110 - DNA, 25 bp, Homo sapien
gtgtagagtcccacatctttgtgct

SEQ ID NO: 104111 - DNA, 25 bp, Homo sapien
taaatggcgggaacaggcgaaaatg

SEQ ID NO: 104112 - DNA, 25 bp, Homo sapien
gtagccaagatggttgccggtcgcc

SEQ ID NO: 104113 - DNA, 25 bp, Homo sapien
ccttagtgacgtgctttagtgggca

SEQ ID NO: 104114 - DNA, 25 bp, Homo sapien
cggcgaatccgggaatgctgagtca

SEQ ID NO: 104115 - DNA, 25 bp, Homo sapien
gctgggctgaataacttgttttctt

SEQ ID NO: 104116 - DNA, 25 bp, Homo sapien
cgctgggctgaataacttgttttct

SEQ ID NO: 104117 - DNA, 25 bp, Homo sapien
tgttttcttttttatggtgtccaga

SEQ ID NO: 104118 - DNA, 25 bp, Homo sapien
ctgggctgaataacttgttttcttt

SEQ ID NO: 104119 - DNA, 25 bp, Homo sapien
taaacttgatcgcttctgggacttc

SEQ ID NO: 104120 - DNA, 25 bp, Homo sapien
tgtagctttctgtccctcgaagtgg

SEQ ID NO: 104121 - DNA, 25 bp, Homo sapien
ttgaatgagaaacccgaagaccttg

SEQ ID NO: 104122 - DNA, 25 bp, Homo sapien
aagtctaggcgatgaggattttccg

SEQ ID NO: 104123 - DNA, 25 bp, Homo sapien
gagctggaaggccaaactccgagcc

SEQ ID NO: 104124 - DNA, 25 bp, Homo sapien
aaccaaagggacaccgcggacagat

SEQ ID NO: 104125 - DNA, 25 bp, Homo sapien
gagccgctgagggactgcgcaggaa

SEQ ID NO: 104126 - DNA, 25 bp, Homo sapien
tgagggactgcgcaggaagaccaca

SEQ ID NO: 104127 - DNA, 25 bp, Homo sapien
gctccgagactgcacttcagcggtg

SEQ ID NO: 104128 - DNA, 25 bp, Homo sapien
taggaatccactcaagccacgtctg

SEQ ID NO: 104129 - DNA, 25 bp, Homo sapien
acttcagggtctccgcgggagctta

SEQ ID NO: 104130 - DNA, 25 bp, Homo sapien
tggtactccggatccaatccttggc

SEQ ID NO: 104131 - DNA, 25 bp, Homo sapien
ccagcacgtggtcttcggacactga

SEQ ID NO: 104132 - DNA, 25 bp, Homo sapien
cgtatactcgagcacaaccatgggc

SEQ ID NO: 104133 - DNA, 25 bp, Homo sapien
gacaccagtctgtacccaaaggaag

SEQ ID NO: 104134 - DNA, 25 bp, Homo sapien
tgttccaaaaagagctctgccaggc

SEQ ID NO: 104135 - DNA, 25 bp, Homo sapien
tcaaggatcctaagggagcagccag

SEQ ID NO: 104136 - DNA, 25 bp, Homo sapien
gaaagcggcttacaaaacactagag

SEQ ID NO: 104137 - DNA, 25 bp, Homo sapien
aaatgcatcagataggcgcgcgcgt

SEQ ID NO: 104138 - DNA, 25 bp, Homo sapien
catacatagtcctccgttcgggcag

SEQ ID NO: 104139 - DNA, 25 bp, Homo sapien
catgaaggggcatcgccgagttaac

SEQ ID NO: 104140 - DNA, 25 bp, Homo sapien
ggcatcgccgagttaacacatttgc

SEQ ID NO: 104141 - DNA, 25 bp, Homo sapien
caagaacccgggcatgaaggggcat

SEQ ID NO: 104142 - DNA, 25 bp, Homo sapien
aacccgggcatgaaggggcatcgcc

SEQ ID NO: 104143 - DNA, 25 bp, Homo sapien
ctttccaagcttctgggtaaagcga

SEQ ID NO: 104144 - DNA, 25 bp, Homo sapien
ctggaagcaggttaatattggcgct

SEQ ID NO: 104145 - DNA, 25 bp, Homo sapien
caagcttctgggtaaagcgatccac

SEQ ID NO: 104146 - DNA, 25 bp, Homo sapien
gaaaatgggtctgggcgtcctcaga

SEQ ID NO: 104147 - DNA, 25 bp, Homo sapien
ccgcgggcagcaaagagagcgttct

SEQ ID NO: 104148 - DNA, 25 bp, Homo sapien
cgaatccacgtaattcaagagctgg

SEQ ID NO: 104149 - DNA, 25 bp, Homo sapien
ggaaccggtccttctcacgattggc

SEQ ID NO: 104150 - DNA, 25 bp, Homo sapien
gtagatacacggaaacaagagggct

SEQ ID NO: 104151 - DNA, 25 bp, Homo sapien
gggaatcggaaaggcggctcctgcc

SEQ ID NO: 104152 - DNA, 25 bp, Homo sapien
tagggaatcggaaaggcggctcctg

SEQ ID NO: 104153 - DNA, 25 bp, Homo sapien
agggaatcggaaaggcggctcctgc

SEQ ID NO: 104154 - DNA, 25 bp, Homo sapien
gaatcggaaaggcggctcctgccac

SEQ ID NO: 104155 - DNA, 25 bp, Homo sapien
ttcgctgccctttgccatagctcag

SEQ ID NO: 104156 - DNA, 25 bp, Homo sapien
caaggtggctccaggtggctttcac

SEQ ID NO: 104157 - DNA, 25 bp, Homo sapien
tgcaggtacaatcccggcaaggtgg

SEQ ID NO: 104158 - DNA, 25 bp, Homo sapien
tggctttcacagtcgtacgcgggtc

SEQ ID NO: 104159 - DNA, 25 bp, Homo sapien
tgggccaaatcctccgctgaatgta

SEQ ID NO: 104160 - DNA, 25 bp, Homo sapien
caaaggcgggagacaaacgaacact

SEQ ID NO: 104161 - DNA, 25 bp, Homo sapien
agaaagtgtcaaagccgtcctgcca

SEQ ID NO: 104162 - DNA, 25 bp, Homo sapien
gctatcggccagctagaagtctgca

SEQ ID NO: 104163 - DNA, 25 bp, Homo sapien
caagacatttttgtagccagctttc

SEQ ID NO: 104164 - DNA, 25 bp, Homo sapien
caatattcattgtcgcggggaggga

SEQ ID NO: 104165 - DNA, 25 bp, Homo sapien
gccacgatgcgcttgctgtctgcca

SEQ ID NO: 104166 - DNA, 25 bp, Homo sapien
gaaaggttttgcaggcaaagacagg

SEQ ID NO: 104167 - DNA, 25 bp, Homo sapien
cctttatactttccctcttggtgct

SEQ ID NO: 104168 - DNA, 25 bp, Homo sapien
ttggtgctcatgctagctaatgatg

SEQ ID NO: 104169 - DNA, 25 bp, Homo sapien
ctcctttatactttccctcttggtg

SEQ ID NO: 104170 - DNA, 25 bp, Homo sapien
catgctagctaatgatgagatgatc

SEQ ID NO: 104171 - DNA, 25 bp, Homo sapien
gaggtaacaggagtaacacctgaag

SEQ ID NO: 104172 - DNA, 25 bp, Homo sapien
ggagtaacacctgaagcactcatta

SEQ ID NO: 104173 - DNA, 25 bp, Homo sapien
caccctctgccaaacggaagaggta

SEQ ID NO: 104174 - DNA, 25 bp, Homo sapien
tctgccaaacggaagaggtaacagg

SEQ ID NO: 104175 - DNA, 25 bp, Homo sapien
tatcacagtccccacacgtgcaaat

SEQ ID NO: 104176 - DNA, 25 bp, Homo sapien
tgccagggcacacgaagtttcctgt

SEQ ID NO: 104177 - DNA, 25 bp, Homo sapien
tgctactatccatatcagacatcat

SEQ ID NO: 104178 - DNA, 25 bp, Homo sapien
gcaaatccactctatatcttcaatg

SEQ ID NO: 104179 - DNA, 25 bp, Homo sapien
agcaagtccaacatgcaccatctct

SEQ ID NO: 104180 - DNA, 25 bp, Homo sapien
gagagtcagaaaggtagattcgaca

SEQ ID NO: 104181 - DNA, 25 bp, Homo sapien
gaaaggtagattcgacataaacagc

SEQ ID NO: 104182 - DNA, 25 bp, Homo sapien
tagattcgacataaacagcaagtcc

SEQ ID NO: 104183 - DNA, 25 bp, Homo sapien
ttatatgtactagccaacacagagg

SEQ ID NO: 104184 - DNA, 25 bp, Homo sapien
gaaggctgtatctaggtcaatagtc

SEQ ID NO: 104185 - DNA, 25 bp, Homo sapien
cacgagtgaggttgttgtagttctc

SEQ ID NO: 104186 - DNA, 25 bp, Homo sapien
cacagaggcctgtgaatacataatc

SEQ ID NO: 104187 - DNA, 25 bp, Homo sapien
taaggactccctcgaaattatgaag

SEQ ID NO: 104188 - DNA, 25 bp, Homo sapien
tccaaataaggtgtacagagctcag

SEQ ID NO: 104189 - DNA, 25 bp, Homo sapien
aagaatgcggtcatatccctggtgc

SEQ ID NO: 104190 - DNA, 25 bp, Homo sapien
gaataacacggatccacccaatgag

SEQ ID NO: 104191 - DNA, 25 bp, Homo sapien
ccaagaggatctggtgttgctgcaa

SEQ ID NO: 104192 - DNA, 25 bp, Homo sapien
acaaaaggtgataaccaagaggatc

SEQ ID NO: 104193 - DNA, 25 bp, Homo sapien
tcacaaaaggtgataaccaagagga

SEQ ID NO: 104194 - DNA, 25 bp, Homo sapien
tgttgctgcaataggcaaaatgggc

SEQ ID NO: 104195 - DNA, 25 bp, Homo sapien
cacagctgtcttgtggttagtgttg

SEQ ID NO: 104196 - DNA, 25 bp, Homo sapien
ctatagcatgcatttaggatatcac

SEQ ID NO: 104197 - DNA, 25 bp, Homo sapien
tatggataggttactgtcatactat

SEQ ID NO: 104198 - DNA, 25 bp, Homo sapien
ttaggatatcacagctgtcttgtgg

SEQ ID NO: 104199 - DNA, 25 bp, Homo sapien
gctggcagtcttcatttgatccagg

SEQ ID NO: 104200 - DNA, 25 bp, Homo sapien
tcaatccatgctggcagtcttcatt

SEQ ID NO: 104201 - DNA, 25 bp, Homo sapien
aatccatgctggcagtcttcatttg

SEQ ID NO: 104202 - DNA, 25 bp, Homo sapien
ggcagtcttcatttgatccaggtca

SEQ ID NO: 104203 - DNA, 25 bp, Homo sapien
ggcattcatacagccaacaacatat

SEQ ID NO: 104204 - DNA, 25 bp, Homo sapien
ggtggtaaaccacccttatgattca

SEQ ID NO: 104205 - DNA, 25 bp, Homo sapien
taatgggtatattgtgctgtgcaac

SEQ ID NO: 104206 - DNA, 25 bp, Homo sapien
gctgtgcaacttggttaaactggga

SEQ ID NO: 104207 - DNA, 25 bp, Homo sapien
cccttccttgtgttgtgcaggttag

SEQ ID NO: 104208 - DNA, 25 bp, Homo sapien
tggctacgccccttggcctaacaaa

SEQ ID NO: 104209 - DNA, 25 bp, Homo sapien
gcaagtgagtcctctctgacaagga

SEQ ID NO: 104210 - DNA, 25 bp, Homo sapien
aacagcacggcggtttggctacgcc

SEQ ID NO: 104211 - DNA, 25 bp, Homo sapien
taaacacctatctgaactctgaaca

SEQ ID NO: 104212 - DNA, 25 bp, Homo sapien
tctgctacctaggatgtgttcctgg

SEQ ID NO: 104213 - DNA, 25 bp, Homo sapien
tcccacatttggtgaggatctcaaa

SEQ ID NO: 104214 - DNA, 25 bp, Homo sapien
gccacttactggtcaaaacttatgt

SEQ ID NO: 104215 - DNA, 25 bp, Homo sapien
tgttcctggattggcataagccact

SEQ ID NO: 104216 - DNA, 25 bp, Homo sapien
tatcttccaggtagagtgatctttt

SEQ ID NO: 104217 - DNA, 25 bp, Homo sapien
tctgttaggtgtagtgggcaaatga

SEQ ID NO: 104218 - DNA, 25 bp, Homo sapien
tatattctttcattgttgcgtggca

SEQ ID NO: 104219 - DNA, 25 bp, Homo sapien
taaatttgggcctctgttgttagat

SEQ ID NO: 104220 - DNA, 25 bp, Homo sapien
ttgtgatgaacccacttcggcctga

SEQ ID NO: 104221 - DNA, 25 bp, Homo sapien
tattgactatgaccaaagacagctg

SEQ ID NO: 104222 - DNA, 25 bp, Homo sapien
aaagaggtattctgtcccaagagag

SEQ ID NO: 104223 - DNA, 25 bp, Homo sapien
tgggctgcagcacaataacatgtac

SEQ ID NO: 104224 - DNA, 25 bp, Homo sapien
ctgagccttctcaacaacgagtcct

SEQ ID NO: 104225 - DNA, 25 bp, Homo sapien
gccttctcaacaacgagtcctcttg

SEQ ID NO: 104226 - DNA, 25 bp, Homo sapien
tctcaacaacgagtcctcttggtga

SEQ ID NO: 104227 - DNA, 25 bp, Homo sapien
tttgatattcatgatgctgtcacca

SEQ ID NO: 104228 - DNA, 25 bp, Homo sapien
ttaaattcaaataagcgcaatgcag

SEQ ID NO: 104229 - DNA, 25 bp, Homo sapien
ttggccactgttagcccacacactt

SEQ ID NO: 104230 - DNA, 25 bp, Homo sapien
aatgcagtagccactggtaaaggtc

SEQ ID NO: 104231 - DNA, 25 bp, Homo sapien
cactggtaaaggtctgttttggcca

SEQ ID NO: 104232 - DNA, 25 bp, Homo sapien
cagaattttcccactgaatgagcag

SEQ ID NO: 104233 - DNA, 25 bp, Homo sapien
aggagtgatattgccaaaatcatta

SEQ ID NO: 104234 - DNA, 25 bp, Homo sapien
agaattttcccactgaatgagcaga

SEQ ID NO: 104235 - DNA, 25 bp, Homo sapien
aacaggagtgatattgccaaaatca

SEQ ID NO: 104236 - DNA, 25 bp, Homo sapien
tcttctttgcctagctaactcctta

SEQ ID NO: 104237 - DNA, 25 bp, Homo sapien
tatgtgaggcatctgcaccaccaat

SEQ ID NO: 104238 - DNA, 25 bp, Homo sapien
tccttatcatgtaaatttagctcaa

SEQ ID NO: 104239 - DNA, 25 bp, Homo sapien
tgcaccaccaatttggaatatccta

SEQ ID NO: 104240 - DNA, 25 bp, Homo sapien
tgatgatgattgacacaatgtctgg

SEQ ID NO: 104241 - DNA, 25 bp, Homo sapien
cattgatgagccaagctcaaacaat

SEQ ID NO: 104242 - DNA, 25 bp, Homo sapien
catatttgtgagttcttcaagatga

SEQ ID NO: 104243 - DNA, 25 bp, Homo sapien
gatgacagctcactgaaccattgat

SEQ ID NO: 104244 - DNA, 25 bp, Homo sapien
gctccaacgtatcttcctgtcacaa

SEQ ID NO: 104245 - DNA, 25 bp, Homo sapien
gaattgctgatgttgccccaaaccc

SEQ ID NO: 104246 - DNA, 25 bp, Homo sapien
ccagtcacatagtcgctccaacgta

SEQ ID NO: 104247 - DNA, 25 bp, Homo sapien
taagccccatccacgggaattgctg

SEQ ID NO: 104248 - DNA, 25 bp, Homo sapien
tggctcttgttggtgaatgtccttc

SEQ ID NO: 104249 - DNA, 25 bp, Homo sapien
ggctcttgttggtgaatgtccttct

SEQ ID NO: 104250 - DNA, 25 bp, Homo sapien
ctggctcttgttggtgaatgtcctt

SEQ ID NO: 104251 - DNA, 25 bp, Homo sapien
tgatactagagtagcctggagctct

SEQ ID NO: 104252 - DNA, 25 bp, Homo sapien
tcaaagataggatagcactgggagg

SEQ ID NO: 104253 - DNA, 25 bp, Homo sapien
gatcaccttgcatgtctggcttaag

SEQ ID NO: 104254 - DNA, 25 bp, Homo sapien
gaaatctattttctgtgaccaggaa

SEQ ID NO: 104255 - DNA, 25 bp, Homo sapien
caagccagaagagagtgggggccaa

SEQ ID NO: 104256 - DNA, 25 bp, Homo sapien
ctacaagccagaagagagtgggggc

SEQ ID NO: 104257 - DNA, 25 bp, Homo sapien
aacagctgatctctcggcagatact

SEQ ID NO: 104258 - DNA, 25 bp, Homo sapien
cagctgatctctcggcagatactct

SEQ ID NO: 104259 - DNA, 25 bp, Homo sapien
gaccacatggagtatgggagtttcg

SEQ ID NO: 104260 - DNA, 25 bp, Homo sapien
agtatgggagtttcgaagaactgca

SEQ ID NO: 104261 - DNA, 25 bp, Homo sapien
catggagtatgggagtttcgaagaa

SEQ ID NO: 104262 - DNA, 25 bp, Homo sapien
ctaaggaccacatggagtatgggag

SEQ ID NO: 104263 - DNA, 25 bp, Homo sapien
ttcagaggacggtgtcaaaagatgg

SEQ ID NO: 104264 - DNA, 25 bp, Homo sapien
cacggctgtgaaggagtcggcactc

SEQ ID NO: 104265 - DNA, 25 bp, Homo sapien
agacggacagagtgaaagcatctcc

SEQ ID NO: 104266 - DNA, 25 bp, Homo sapien
caaaagatgggtgctcggctgctac

SEQ ID NO: 104267 - DNA, 25 bp, Homo sapien
atttcatcatcaccaacatctgggc

SEQ ID NO: 104268 - DNA, 25 bp, Homo sapien
tcatcatcaccaacatctgggctca

SEQ ID NO: 104269 - DNA, 25 bp, Homo sapien
catcatcaccaacatctgggctcat

SEQ ID NO: 104270 - DNA, 25 bp, Homo sapien
cgtgttccaatttcatcatcaccaa

SEQ ID NO: 104271 - DNA, 25 bp, Homo sapien
cttgtcatcaacatgtagtttctgc

SEQ ID NO: 104272 - DNA, 25 bp, Homo sapien
tgtcatcaacatgtagtttctgctt

SEQ ID NO: 104273 - DNA, 25 bp, Homo sapien
cttttccttgtgcttgcctgaaggc

SEQ ID NO: 104274 - DNA, 25 bp, Homo sapien
ttgtcatcaacatgtagtttctgct

SEQ ID NO: 104275 - DNA, 25 bp, Homo sapien
tccacagccattaactacggtgcag

SEQ ID NO: 104276 - DNA, 25 bp, Homo sapien
gctaagaaggaaactcagggcatca

SEQ ID NO: 104277 - DNA, 25 bp, Homo sapien
ttgcccgggacttggagctagtgca

SEQ ID NO: 104278 - DNA, 25 bp, Homo sapien
cagagctatctgttctgggctaaca

SEQ ID NO: 104279 - DNA, 25 bp, Homo sapien
tgactacatttaaccctactggaag

SEQ ID NO: 104280 - DNA, 25 bp, Homo sapien
tagcgtgaccgtggtttactgcagc

SEQ ID NO: 104281 - DNA, 25 bp, Homo sapien
gaaatccaaacataagcatctgctc

SEQ ID NO: 104282 - DNA, 25 bp, Homo sapien
cattccatgtttttagcctatagcc

SEQ ID NO: 104283 - DNA, 25 bp, Homo sapien
tattaagatacccaacaaggaggct

SEQ ID NO: 104284 - DNA, 25 bp, Homo sapien
tcctcactccttaggaaagcacagg

SEQ ID NO: 104285 - DNA, 25 bp, Homo sapien
tcagtccgctgatttgggaaacaaa

SEQ ID NO: 104286 - DNA, 25 bp, Homo sapien
gaacctgtttaggtgcagtcataca

SEQ ID NO: 104287 - DNA, 25 bp, Homo sapien
tgtggtggcaagatctccgctcact

SEQ ID NO: 104288 - DNA, 25 bp, Homo sapien
gctggagtgtggtggcaagatctcc

SEQ ID NO: 104289 - DNA, 25 bp, Homo sapien
gagtgtggtggcaagatctccgctc

SEQ ID NO: 104290 - DNA, 25 bp, Homo sapien
tggagtgtggtggcaagatctccgc

SEQ ID NO: 104291 - DNA, 25 bp, Homo sapien
aaataacctcttcaacccagacaag

SEQ ID NO: 104292 - DNA, 25 bp, Homo sapien
tttgtaccttacctgccccttatgc

SEQ ID NO: 104293 - DNA, 25 bp, Homo sapien
tgataatagtgcacacagcatatgg

SEQ ID NO: 104294 - DNA, 25 bp, Homo sapien
cagtcatcaaatcctctagctggta

SEQ ID NO: 104295 - DNA, 25 bp, Homo sapien
ttggcagctgaaaaatccttcctag

SEQ ID NO: 104296 - DNA, 25 bp, Homo sapien
gagcttcctagaggatatttccacc

SEQ ID NO: 104297 - DNA, 25 bp, Homo sapien
tagaggatatttccaccttcgtaga

SEQ ID NO: 104298 - DNA, 25 bp, Homo sapien
ttaaccacaaaatgcgtagggtgac

SEQ ID NO: 104299 - DNA, 25 bp, Homo sapien
ctcagcccattgcatgaagttttaa

SEQ ID NO: 104300 - DNA, 25 bp, Homo sapien
ggccaatccggagattcattccttg

SEQ ID NO: 104301 - DNA, 25 bp, Homo sapien
aatgaccccagattgatgatgcacc

SEQ ID NO: 104302 - DNA, 25 bp, Homo sapien
cccagattgatgatgcacctgaatg

SEQ ID NO: 104303 - DNA, 25 bp, Homo sapien
attgatagtttcatgggatttaaaa

SEQ ID NO: 104304 - DNA, 25 bp, Homo sapien
cattgatagtttcatgggatttaaa

SEQ ID NO: 104305 - DNA, 25 bp, Homo sapien
ctatgccaatgagaaacagataaaa

SEQ ID NO: 104306 - DNA, 25 bp, Homo sapien
caaactaagggtatgcaagctaacc

SEQ ID NO: 104307 - DNA, 25 bp, Homo sapien
tcctcaagggcgaagacatcatcaa

SEQ ID NO: 104308 - DNA, 25 bp, Homo sapien
tacctgagctcgctgaaagagaggg

SEQ ID NO: 104309 - DNA, 25 bp, Homo sapien
ggaattgaccaaaagtagcggccag

SEQ ID NO: 104310 - DNA, 25 bp, Homo sapien
gaggatattcaaaatagtatgacga

SEQ ID NO: 104311 - DNA, 25 bp, Homo sapien
tattcaaaatagtatgacgaaggtt

SEQ ID NO: 104312 - DNA, 25 bp, Homo sapien
gatattcaaaatagtatgacgaagg

SEQ ID NO: 104313 - DNA, 25 bp, Homo sapien
ctgaggatattcaaaatagtatgac

SEQ ID NO: 104314 - DNA, 25 bp, Homo sapien
tatgtgctcttttagacgtgggccc

SEQ ID NO: 104315 - DNA, 25 bp, Homo sapien
taatgatgaataccagcacagatgc

SEQ ID NO: 104316 - DNA, 25 bp, Homo sapien
tacagccttgtatttgagccccgtt

SEQ ID NO: 104317 - DNA, 25 bp, Homo sapien
cactggtagctttacaacactgggc

SEQ ID NO: 104318 - DNA, 25 bp, Homo sapien
gagagttgcctttccactatgacca

SEQ ID NO: 104319 - DNA, 25 bp, Homo sapien
ttgtgccttgctccggatctctcag

SEQ ID NO: 104320 - DNA, 25 bp, Homo sapien
gatctctcagcaggcaaagtgataa

SEQ ID NO: 104321 - DNA, 25 bp, Homo sapien
cagtccacatgtgttcggcgagtta

SEQ ID NO: 104322 - DNA, 25 bp, Homo sapien
tatcaattatccataggtggccctt

SEQ ID NO: 104323 - DNA, 25 bp, Homo sapien
ttggtcctagaatagggaaaggcac

SEQ ID NO: 104324 - DNA, 25 bp, Homo sapien
taatctgctgttgctagtcctagga

SEQ ID NO: 104325 - DNA, 25 bp, Homo sapien
gaaaggcactgctgctatgtcatgc

SEQ ID NO: 104326 - DNA, 25 bp, Homo sapien
catagaggagaaatatcttacaacc

SEQ ID NO: 104327 - DNA, 25 bp, Homo sapien
taaggcacctgcaccaaggatgttg

SEQ ID NO: 104328 - DNA, 25 bp, Homo sapien
cattaactcggtatactaattgaat

SEQ ID NO: 104329 - DNA, 25 bp, Homo sapien
tctttccactgaaaaaggtgtatca

SEQ ID NO: 104330 - DNA, 25 bp, Homo sapien
cactatctgcttaatgagcaatgac

SEQ ID NO: 104331 - DNA, 25 bp, Homo sapien
cacccctttgataaaggcagtcttg

SEQ ID NO: 104332 - DNA, 25 bp, Homo sapien
aaaaatccactatctgcttaatgag

SEQ ID NO: 104333 - DNA, 25 bp, Homo sapien
cttataaatataatgagaacaccat

SEQ ID NO: 104334 - DNA, 25 bp, Homo sapien
cctggacaatctggtcaacattagt

SEQ ID NO: 104335 - DNA, 25 bp, Homo sapien
aatctggtcaacattagtcagcaaa

SEQ ID NO: 104336 - DNA, 25 bp, Homo sapien
gacaatctggtcaacattagtcagc

SEQ ID NO: 104337 - DNA, 25 bp, Homo sapien
tggacaatctggtcaacattagtca

SEQ ID NO: 104338 - DNA, 25 bp, Homo sapien
catttactcgcctgcttccaaattt

SEQ ID NO: 104339 - DNA, 25 bp, Homo sapien
gtagacatttactcgcctgcttcca

SEQ ID NO: 104340 - DNA, 25 bp, Homo sapien
tagacatttactcgcctgcttccaa

SEQ ID NO: 104341 - DNA, 25 bp, Homo sapien
tttactcgcctgcttccaaattttg

SEQ ID NO: 104342 - DNA, 25 bp, Homo sapien
aaagaatatcataggaacctcctcc

SEQ ID NO: 104343 - DNA, 25 bp, Homo sapien
ctcttatttcagaaaatttacttga

SEQ ID NO: 104344 - DNA, 25 bp, Homo sapien
tatcataggaacctcctcctgcaga

SEQ ID NO: 104345 - DNA, 25 bp, Homo sapien
aatattttacattgatcacactcac

SEQ ID NO: 104346 - DNA, 25 bp, Homo sapien
tgaagcctagataattatgtaaagt

SEQ ID NO: 104347 - DNA, 25 bp, Homo sapien
tataatttcaaggtaagataaacaa

SEQ ID NO: 104348 - DNA, 25 bp, Homo sapien
gcttcttagtaacttcaattggtga

SEQ ID NO: 104349 - DNA, 25 bp, Homo sapien
gttattaaagcatgctacttacaaa

SEQ ID NO: 104350 - DNA, 25 bp, Homo sapien
gatgaaccatggtctaatggagcca

SEQ ID NO: 104351 - DNA, 25 bp, Homo sapien
tctgttaaatcatggatggcaatgt

SEQ ID NO: 104352 - DNA, 25 bp, Homo sapien
gttccgccgtcatcagagactttca

SEQ ID NO: 104353 - DNA, 25 bp, Homo sapien
tcaccttggctcctgtagacaattt

SEQ ID NO: 104354 - DNA, 25 bp, Homo sapien
gaccaatgggatacaatagagatcc

SEQ ID NO: 104355 - DNA, 25 bp, Homo sapien
tagtggactcacaattccagatttc

SEQ ID NO: 104356 - DNA, 25 bp, Homo sapien
caacagatgaagctgagacaactgg

SEQ ID NO: 104357 - DNA, 25 bp, Homo sapien
gttgccatgttaataccacccaaag

SEQ ID NO: 104358 - DNA, 25 bp, Homo sapien
ctgtacatcacctccttgggatctc

SEQ ID NO: 104359 - DNA, 25 bp, Homo sapien
cttgggatctccaattgttccctga

SEQ ID NO: 104360 - DNA, 25 bp, Homo sapien
gtacatcacctccttgggatctcca

SEQ ID NO: 104361 - DNA, 25 bp, Homo sapien
gggatctccaattgttccctgaagt

SEQ ID NO: 104362 - DNA, 25 bp, Homo sapien
tgatgacatcaagccagcatcaatg

SEQ ID NO: 104363 - DNA, 25 bp, Homo sapien
acaagaatagcaggcaaggaaacta

SEQ ID NO: 104364 - DNA, 25 bp, Homo sapien
ctgaagactgtaacatagttgtgac

SEQ ID NO: 104365 - DNA, 25 bp, Homo sapien
tttagtaaggtacggtgatgacatc

SEQ ID NO: 104366 - DNA, 25 bp, Homo sapien
gaacataaggagcttcttgcattct

SEQ ID NO: 104367 - DNA, 25 bp, Homo sapien
tcactgagtatggtgtggcgctaga

SEQ ID NO: 104368 - DNA, 25 bp, Homo sapien
tagaacctgcagagacttaaagaga

SEQ ID NO: 104369 - DNA, 25 bp, Homo sapien
ttccaaacaggagaacgatatgtgg

SEQ ID NO: 104370 - DNA, 25 bp, Homo sapien
cttgcattccaccaagtgaggtttc

SEQ ID NO: 104371 - DNA, 25 bp, Homo sapien
tggaagcctcacaaatggatttagt

SEQ ID NO: 104372 - DNA, 25 bp, Homo sapien
aatgaacggacactgaccaaaggga

SEQ ID NO: 104373 - DNA, 25 bp, Homo sapien
aactgctgtctatgaactgggaaac

SEQ ID NO: 104374 - DNA, 25 bp, Homo sapien
agtgcactgatgcaatctcacttca

SEQ ID NO: 104375 - DNA, 25 bp, Homo sapien
ctgagacagaatctctctgtgttgc

SEQ ID NO: 104376 - DNA, 25 bp, Homo sapien
gagtgcactgatgcaatctcacttc

SEQ ID NO: 104377 - DNA, 25 bp, Homo sapien
gcactgatgcaatctcacttcactg

SEQ ID NO: 104378 - DNA, 25 bp, Homo sapien
gattggtatgatccatgacattcct

SEQ ID NO: 104379 - DNA, 25 bp, Homo sapien
gaagataactgagtcactatcctca

SEQ ID NO: 104380 - DNA, 25 bp, Homo sapien
tactgggtaattgcaatacggattg

SEQ ID NO: 104381 - DNA, 25 bp, Homo sapien
gcatcgcagaacataagctgattct

SEQ ID NO: 104382 - DNA, 25 bp, Homo sapien
tatgaatcagtgaattccctttcaa

SEQ ID NO: 104383 - DNA, 25 bp, Homo sapien
ctttctgttcgattttgaaaactgc

SEQ ID NO: 104384 - DNA, 25 bp, Homo sapien
acaaatatgctaaatcttgagtaag

SEQ ID NO: 104385 - DNA, 25 bp, Homo sapien
cagagaatatgaggggcttttggct

SEQ ID NO: 104386 - DNA, 25 bp, Homo sapien
tcatactgtgggtaatctgaggagt

SEQ ID NO: 104387 - DNA, 25 bp, Homo sapien
agtgtgtccatgctatcatactgtg

SEQ ID NO: 104388 - DNA, 25 bp, Homo sapien
atataagccaataaggagacatgac

SEQ ID NO: 104389 - DNA, 25 bp, Homo sapien
taaaagtactgttttcagtgtgtcc

SEQ ID NO: 104390 - DNA, 25 bp, Homo sapien
caaatgcaccctaaatgtcccggaa

SEQ ID NO: 104391 - DNA, 25 bp, Homo sapien
tcagaatatcccgtaatagaggtgc

SEQ ID NO: 104392 - DNA, 25 bp, Homo sapien
ttagagactccaccactgatgttga

SEQ ID NO: 104393 - DNA, 25 bp, Homo sapien
caacacggtgggtcactggagaata

SEQ ID NO: 104394 - DNA, 25 bp, Homo sapien
tataaattgtgtctacctggcttct

SEQ ID NO: 104395 - DNA, 25 bp, Homo sapien
aattgtgtctacctggcttctactg

SEQ ID NO: 104396 - DNA, 25 bp, Homo sapien
tgtctctgaatataaattgtgtcta

SEQ ID NO: 104397 - DNA, 25 bp, Homo sapien
tgaatataaattgtgtctacctggc

SEQ ID NO: 104398 - DNA, 25 bp, Homo sapien
taaactactatgaccaaatccctgg

SEQ ID NO: 104399 - DNA, 25 bp, Homo sapien
gaagtgagagacacctcgcttgacc

SEQ ID NO: 104400 - DNA, 25 bp, Homo sapien
acttaggcattaggctgtcagacag

SEQ ID NO: 104401 - DNA, 25 bp, Homo sapien
tctgtgagagaactacctggtaaca

SEQ ID NO: 104402 - DNA, 25 bp, Homo sapien
gaattacaagcaataagagggccat

SEQ ID NO: 104403 - DNA, 25 bp, Homo sapien
tacttcacagcactcctgtgagaaa

SEQ ID NO: 104404 - DNA, 25 bp, Homo sapien
ctgtgagaaagctgaattacaagca

SEQ ID NO: 104405 - DNA, 25 bp, Homo sapien
tgtgtcttaactagcaggaccaggt

SEQ ID NO: 104406 - DNA, 25 bp, Homo sapien
gctacttgctgagaaaagatatctc

SEQ ID NO: 104407 - DNA, 25 bp, Homo sapien
ctttcttccgggctgttgatcagag

SEQ ID NO: 104408 - DNA, 25 bp, Homo sapien
tcagttccttgtcatctgaacctct

SEQ ID NO: 104409 - DNA, 25 bp, Homo sapien
gatgctgacaatagcccagtttgct

SEQ ID NO: 104410 - DNA, 25 bp, Homo sapien
tgaaaatttctaagtcataatgcat

SEQ ID NO: 104411 - DNA, 25 bp, Homo sapien
tattgaaaatttctaagtcataatg

SEQ ID NO: 104412 - DNA, 25 bp, Homo sapien
gatatattgaaaatttctaagtcat

SEQ ID NO: 104413 - DNA, 25 bp, Homo sapien
cgtggatatattgaaaatttctaag

SEQ ID NO: 104414 - DNA, 25 bp, Homo sapien
tgttgtagtagcttctgcaattctt

SEQ ID NO: 104415 - DNA, 25 bp, Homo sapien
ggctacttagcgctaaagatgtcat

SEQ ID NO: 104416 - DNA, 25 bp, Homo sapien
gtctggctacttagcgctaaagatg

SEQ ID NO: 104417 - DNA, 25 bp, Homo sapien
tttaagtgtgcaaagctgacaggtc

SEQ ID NO: 104418 - DNA, 25 bp, Homo sapien
gcaaagctgacaggtctggctactt

SEQ ID NO: 104419 - DNA, 25 bp, Homo sapien
gctgcataggactgtttggcaatac

SEQ ID NO: 104420 - DNA, 25 bp, Homo sapien
tcagctgcataggactgtttggcaa

SEQ ID NO: 104421 - DNA, 25 bp, Homo sapien
taatagcgaatgaaagtttttgata

SEQ ID NO: 104422 - DNA, 25 bp, Homo sapien
tgagtcagctgcataggactgtttg

SEQ ID NO: 104423 - DNA, 25 bp, Homo sapien
caagagctttgacatattcctggga

SEQ ID NO: 104424 - DNA, 25 bp, Homo sapien
gtagcactggaaaccaacaaccttg

SEQ ID NO: 104425 - DNA, 25 bp, Homo sapien
caacattgaaagtgtgtgccagcac

SEQ ID NO: 104426 - DNA, 25 bp, Homo sapien
gcaaaatggtgtgcatgcccaagaa

SEQ ID NO: 104427 - DNA, 25 bp, Homo sapien
ttggttcaacttagtgtttgctgcc

SEQ ID NO: 104428 - DNA, 25 bp, Homo sapien
taagttggttcaacttagtgtttgc

SEQ ID NO: 104429 - DNA, 25 bp, Homo sapien
caagtttattggaacaactaagttg

SEQ ID NO: 104430 - DNA, 25 bp, Homo sapien
tattggaacaactaagttggttcaa

SEQ ID NO: 104431 - DNA, 25 bp, Homo sapien
gcattgctgaaattctagtcgatct

SEQ ID NO: 104432 - DNA, 25 bp, Homo sapien
caagcattgctgaaattctagtcga

SEQ ID NO: 104433 - DNA, 25 bp, Homo sapien
cctccaagcattgctgaaattctag

SEQ ID NO: 104434 - DNA, 25 bp, Homo sapien
tccaaaacctccaagcattgctgaa

SEQ ID NO: 104435 - DNA, 25 bp, Homo sapien
tgtgcaataaaggtagtgataatgc

SEQ ID NO: 104436 - DNA, 25 bp, Homo sapien
cactcacgtctgtgcaataaaggta

SEQ ID NO: 104437 - DNA, 25 bp, Homo sapien
caatgtcatacccactcacgtctgt

SEQ ID NO: 104438 - DNA, 25 bp, Homo sapien
gtcatacccactcacgtctgtgcaa

SEQ ID NO: 104439 - DNA, 25 bp, Homo sapien
tccgctgtggtgctctcctgggagc

SEQ ID NO: 104440 - DNA, 25 bp, Homo sapien
gttccgctgtggtgctctcctggga

SEQ ID NO: 104441 - DNA, 25 bp, Homo sapien
ttccgctgtggtgctctcctgggag

SEQ ID NO: 104442 - DNA, 25 bp, Homo sapien
cagctcctgcctgaactgataattt

SEQ ID NO: 104443 - DNA, 25 bp, Homo sapien
tgcttagcttgcctgaagtagtgtt

SEQ ID NO: 104444 - DNA, 25 bp, Homo sapien
cttagcttgcctgaagtagtgttgc

SEQ ID NO: 104445 - DNA, 25 bp, Homo sapien
tagcttgcctgaagtagtgttgcat

SEQ ID NO: 104446 - DNA, 25 bp, Homo sapien
catggttggtatgagaatgactttt

SEQ ID NO: 104447 - DNA, 25 bp, Homo sapien
aagttttcaaaaagtcagatgaaat

SEQ ID NO: 104448 - DNA, 25 bp, Homo sapien
tccaactatgacagatatgcatggt

SEQ ID NO: 104449 - DNA, 25 bp, Homo sapien
cagatatgcatggttggtatgagaa

SEQ ID NO: 104450 - DNA, 25 bp, Homo sapien
ccacttaagcatggtctatgactct

SEQ ID NO: 104451 - DNA, 25 bp, Homo sapien
aaatcagggtaatgatgggaccata

SEQ ID NO: 104452 - DNA, 25 bp, Homo sapien
taattgcctaattccactgactagg

SEQ ID NO: 104453 - DNA, 25 bp, Homo sapien
gaatagatgcggtgaaaatgggcat

SEQ ID NO: 104454 - DNA, 25 bp, Homo sapien
atttatctctgcagattatataata

SEQ ID NO: 104455 - DNA, 25 bp, Homo sapien
tatttatctctgcagattatataat

SEQ ID NO: 104456 - DNA, 25 bp, Homo sapien
tttatctctgcagattatataatat

SEQ ID NO: 104457 - DNA, 25 bp, Homo sapien
tatctttgcaacaacagagggagaa

SEQ ID NO: 104458 - DNA, 25 bp, Homo sapien
catggacttgaggagattaaccgat

SEQ ID NO: 104459 - DNA, 25 bp, Homo sapien
taaccgattaatcttctgtggaaat

SEQ ID NO: 104460 - DNA, 25 bp, Homo sapien
tattttgagccgaagtccccatgga

SEQ ID NO: 104461 - DNA, 25 bp, Homo sapien
caccggctggttattctgggctacg

SEQ ID NO: 104462 - DNA, 25 bp, Homo sapien
gctttccaggctttccaccggctgg

SEQ ID NO: 104463 - DNA, 25 bp, Homo sapien
gctgcaaggtcattccagaaagtat

SEQ ID NO: 104464 - DNA, 25 bp, Homo sapien
gaaagtattgccctcataactagga

SEQ ID NO: 104465 - DNA, 25 bp, Homo sapien
caaccttcttttgagtgtagctcaa

SEQ ID NO: 104466 - DNA, 25 bp, Homo sapien
ttcctggaaacacaataagtattca

SEQ ID NO: 104467 - DNA, 25 bp, Homo sapien
tccctcctatcgatagcgtttatct

SEQ ID NO: 104468 - DNA, 25 bp, Homo sapien
tctgcagtggtgtacctattttcca

SEQ ID NO: 104469 - DNA, 25 bp, Homo sapien
actggcagaacttggtgtttcagca

SEQ ID NO: 104470 - DNA, 25 bp, Homo sapien
taatctctgatagggaacactggca

SEQ ID NO: 104471 - DNA, 25 bp, Homo sapien
caactgcatgacatggctgtaggaa

SEQ ID NO: 104472 - DNA, 25 bp, Homo sapien
taaaatctcacagttggcacctttc

SEQ ID NO: 104473 - DNA, 25 bp, Homo sapien
ttgatcttccacttatgttgcaaaa

SEQ ID NO: 104474 - DNA, 25 bp, Homo sapien
tttgatcttccacttatgttgcaaa

SEQ ID NO: 104475 - DNA, 25 bp, Homo sapien
atccacccagttttgccaaggacac

SEQ ID NO: 104476 - DNA, 25 bp, Homo sapien
cttggggaactttgctagataaatc

SEQ ID NO: 104477 - DNA, 25 bp, Homo sapien
gggaactttgctagataaatccacc

SEQ ID NO: 104478 - DNA, 25 bp, Homo sapien
ctttgctagataaatccacccagtt

SEQ ID NO: 104479 - DNA, 25 bp, Homo sapien
catcacactgggataaggccatgga

SEQ ID NO: 104480 - DNA, 25 bp, Homo sapien
gtgaggcactggacaatctggaatc

SEQ ID NO: 104481 - DNA, 25 bp, Homo sapien
gacattaagtactagagatttccaa

SEQ ID NO: 104482 - DNA, 25 bp, Homo sapien
tgaaacaccagcgtcagaatcagca

SEQ ID NO: 104483 - DNA, 25 bp, Homo sapien
agacaaatgtcagcattccaccaaa

SEQ ID NO: 104484 - DNA, 25 bp, Homo sapien
caaatgcctctggtctatcatttaa

SEQ ID NO: 104485 - DNA, 25 bp, Homo sapien
aatgcctctggtctatcatttaaaa

SEQ ID NO: 104486 - DNA, 25 bp, Homo sapien
accaaatgcctctggtctatcattt

SEQ ID NO: 104487 - DNA, 25 bp, Homo sapien
cttcatgccagataactcacaagtg

SEQ ID NO: 104488 - DNA, 25 bp, Homo sapien
tcatacttgatcagcaatgataaga

SEQ ID NO: 104489 - DNA, 25 bp, Homo sapien
ctcacaagtgtcaggctgcttagct

SEQ ID NO: 104490 - DNA, 25 bp, Homo sapien
attacttcatgccagataactcaca

SEQ ID NO: 104491 - DNA, 25 bp, Homo sapien
catttctggtgcatgtactataaag

SEQ ID NO: 104492 - DNA, 25 bp, Homo sapien
gtgaaatatgaacacatgccgggtt

SEQ ID NO: 104493 - DNA, 25 bp, Homo sapien
cctaaatgttgcagaagctaaagaa

SEQ ID NO: 104494 - DNA, 25 bp, Homo sapien
gatacacttctataaacctaaatgt

SEQ ID NO: 104495 - DNA, 25 bp, Homo sapien
gaggcttctttaccatgtatttatc

SEQ ID NO: 104496 - DNA, 25 bp, Homo sapien
gagatggttctattgtgacacagag

SEQ ID NO: 104497 - DNA, 25 bp, Homo sapien
gtaaatatgaacaaccaggtaagtc

SEQ ID NO: 104498 - DNA, 25 bp, Homo sapien
gctggagatggttctattgtgacac

SEQ ID NO: 104499 - DNA, 25 bp, Homo sapien
cagctaaacactcgcttttcagtct

SEQ ID NO: 104500 - DNA, 25 bp, Homo sapien
gctaaacactcgcttttcagtctcc

SEQ ID NO: 104501 - DNA, 25 bp, Homo sapien
tttgccagctaaacactcgcttttc

SEQ ID NO: 104502 - DNA, 25 bp, Homo sapien
tgccagctaaacactcgcttttcag

SEQ ID NO: 104503 - DNA, 25 bp, Homo sapien
cgccttcttttaatttccattcata

SEQ ID NO: 104504 - DNA, 25 bp, Homo sapien
tccattcataatcttgaaggtctcc

SEQ ID NO: 104505 - DNA, 25 bp, Homo sapien
tttccattcataatcttgaaggtct

SEQ ID NO: 104506 - DNA, 25 bp, Homo sapien
ctatccgccttcttttaatttccat

SEQ ID NO: 104507 - DNA, 25 bp, Homo sapien
cctctggtttgaagtgcctccatga

SEQ ID NO: 104508 - DNA, 25 bp, Homo sapien
tgctacttactgtacttcatctggc

SEQ ID NO: 104509 - DNA, 25 bp, Homo sapien
taaattttgttgacaggaaagcctc

SEQ ID NO: 104510 - DNA, 25 bp, Homo sapien
caaggcgggcgaattgcatgagtcc

SEQ ID NO: 104511 - DNA, 25 bp, Homo sapien
cttttctactgacttattttcttgg

SEQ ID NO: 104512 - DNA, 25 bp, Homo sapien
ctctcttttctactgacttattttc

SEQ ID NO: 104513 - DNA, 25 bp, Homo sapien
tcttttctactgacttattttcttg

SEQ ID NO: 104514 - DNA, 25 bp, Homo sapien
tttctactgacttattttcttggtg

SEQ ID NO: 104515 - DNA, 25 bp, Homo sapien
gcaatataaagcacaggttccatat

SEQ ID NO: 104516 - DNA, 25 bp, Homo sapien
gagtgtctccacatgtgtctcgtgt

SEQ ID NO: 104517 - DNA, 25 bp, Homo sapien
aaagcacaggttccatattggagtc

SEQ ID NO: 104518 - DNA, 25 bp, Homo sapien
gctgctagtataagttggatgagtg

SEQ ID NO: 104519 - DNA, 25 bp, Homo sapien
gaaattggaccattatctcatataa

SEQ ID NO: 104520 - DNA, 25 bp, Homo sapien
cataatggcacataggtactgttta

SEQ ID NO: 104521 - DNA, 25 bp, Homo sapien
ctcattagccacattcacgaatact

SEQ ID NO: 104522 - DNA, 25 bp, Homo sapien
cacgaatacttactatcatgtgtaa

SEQ ID NO: 104523 - DNA, 25 bp, Homo sapien
tatcttagagtcgttcccttcactt

SEQ ID NO: 104524 - DNA, 25 bp, Homo sapien
cttagagtcgttcccttcacttatg

SEQ ID NO: 104525 - DNA, 25 bp, Homo sapien
aggtggaggtgatgctatcttagag

SEQ ID NO: 104526 - DNA, 25 bp, Homo sapien
atgctatcttagagtcgttcccttc

SEQ ID NO: 104527 - DNA, 25 bp, Homo sapien
catcaggagagggatccctagcata

SEQ ID NO: 104528 - DNA, 25 bp, Homo sapien
gcaatcctctttctcacataagtaa

SEQ ID NO: 104529 - DNA, 25 bp, Homo sapien
taattactactctcatctccatcag

SEQ ID NO: 104530 - DNA, 25 bp, Homo sapien
tgcttacagcaatcctctttctcac

SEQ ID NO: 104531 - DNA, 25 bp, Homo sapien
taccatcagctactagctttcgaag

SEQ ID NO: 104532 - DNA, 25 bp, Homo sapien
tctagcaatttcatgtagacatgcc

SEQ ID NO: 104533 - DNA, 25 bp, Homo sapien
gctttcgaagttgacatttcatact

SEQ ID NO: 104534 - DNA, 25 bp, Homo sapien
ctgaagtatttctctagcaatttca

SEQ ID NO: 104535 - DNA, 25 bp, Homo sapien
acctgactgcattagtcaccctact

SEQ ID NO: 104536 - DNA, 25 bp, Homo sapien
aacacctgactgcattagtcaccct

SEQ ID NO: 104537 - DNA, 25 bp, Homo sapien
actttacctccacaacacctgactg

SEQ ID NO: 104538 - DNA, 25 bp, Homo sapien
ctccacaacacctgactgcattagt

SEQ ID NO: 104539 - DNA, 25 bp, Homo sapien
tttctttgaccaagtaccaaactgc

SEQ ID NO: 104540 - DNA, 25 bp, Homo sapien
tttgaccaagtaccaaactgcctgc

SEQ ID NO: 104541 - DNA, 25 bp, Homo sapien
tctttgaccaagtaccaaactgcct

SEQ ID NO: 104542 - DNA, 25 bp, Homo sapien
tgaccaagtaccaaactgcctgctg

SEQ ID NO: 104543 - DNA, 25 bp, Homo sapien
cacagagcttgcgtatacattttgg

SEQ ID NO: 104544 - DNA, 25 bp, Homo sapien
tccttggtgtgaagcaggtggctta

SEQ ID NO: 104545 - DNA, 25 bp, Homo sapien
ataaatagatgttgggtgccctccc

SEQ ID NO: 104546 - DNA, 25 bp, Homo sapien
caagagtattctgagtgggaaggct

SEQ ID NO: 104547 - DNA, 25 bp, Homo sapien
ctatgtgttccgttttggaataggt

SEQ ID NO: 104548 - DNA, 25 bp, Homo sapien
cttccaactatgtgttccgttttgg

SEQ ID NO: 104549 - DNA, 25 bp, Homo sapien
acttccaactatgtgttccgttttg

SEQ ID NO: 104550 - DNA, 25 bp, Homo sapien
ccaactatgtgttccgttttggaat

SEQ ID NO: 104551 - DNA, 25 bp, Homo sapien
aggtggcgaacccatttatggtggc

SEQ ID NO: 104552 - DNA, 25 bp, Homo sapien
taggaggtttaggtcactctaggtg

SEQ ID NO: 104553 - DNA, 25 bp, Homo sapien
tggcagatactaggaggtttaggtc

SEQ ID NO: 104554 - DNA, 25 bp, Homo sapien
aggcaggtggcgaacccatttatgg

SEQ ID NO: 104555 - DNA, 25 bp, Homo sapien
ggtcagcttccacaggtcagcattc

SEQ ID NO: 104556 - DNA, 25 bp, Homo sapien
gtcagcttccacaggtcagcattca

SEQ ID NO: 104557 - DNA, 25 bp, Homo sapien
tcagcttccacaggtcagcattcag

SEQ ID NO: 104558 - DNA, 25 bp, Homo sapien
gttgctgataaaggtgtcagacatt

SEQ ID NO: 104559 - DNA, 25 bp, Homo sapien
aaatggcaggaactgttaggtagca

SEQ ID NO: 104560 - DNA, 25 bp, Homo sapien
tgttttgaacatcgagcatttgctc

SEQ ID NO: 104561 - DNA, 25 bp, Homo sapien
ttgaacatcgagcatttgctcatcc

SEQ ID NO: 104562 - DNA, 25 bp, Homo sapien
actcatatagcagtgcaggaagacc

SEQ ID NO: 104563 - DNA, 25 bp, Homo sapien
accttgcacctgaacatggctgtga

SEQ ID NO: 104564 - DNA, 25 bp, Homo sapien
caggaagaccttgcacctgaacatg

SEQ ID NO: 104565 - DNA, 25 bp, Homo sapien
tcactcatatagcagtgcaggaaga

SEQ ID NO: 104566 - DNA, 25 bp, Homo sapien
tggtacttggacacaagattgttca

SEQ ID NO: 104567 - DNA, 25 bp, Homo sapien
actgttggtacttggacacaagatt

SEQ ID NO: 104568 - DNA, 25 bp, Homo sapien
tgttggtacttggacacaagattgt

SEQ ID NO: 104569 - DNA, 25 bp, Homo sapien
ttggtacttggacacaagattgttc

SEQ ID NO: 104570 - DNA, 25 bp, Homo sapien
tgtgaggtaaagacatgaacaacaa

SEQ ID NO: 104571 - DNA, 25 bp, Homo sapien
gtaaatagagaatccccatactcct

SEQ ID NO: 104572 - DNA, 25 bp, Homo sapien
cacagtgatacatggctatcccaga

SEQ ID NO: 104573 - DNA, 25 bp, Homo sapien
tactattacccagtaacagaaggat

SEQ ID NO: 104574 - DNA, 25 bp, Homo sapien
tctgaaatttccaccatggaggatt

SEQ ID NO: 104575 - DNA, 25 bp, Homo sapien
tcctctgaaatttccaccatggagg

SEQ ID NO: 104576 - DNA, 25 bp, Homo sapien
ctcctctgaaatttccaccatggag

SEQ ID NO: 104577 - DNA, 25 bp, Homo sapien
ctctgaaatttccaccatggaggat

SEQ ID NO: 104578 - DNA, 25 bp, Homo sapien
gcacgagggtatggatagccgattc

SEQ ID NO: 104579 - DNA, 25 bp, Homo sapien
tatggatagccgattccaccacttc

SEQ ID NO: 104580 - DNA, 25 bp, Homo sapien
agggtatggatagccgattccacca

SEQ ID NO: 104581 - DNA, 25 bp, Homo sapien
cgagggtatggatagccgattccac

SEQ ID NO: 104582 - DNA, 25 bp, Homo sapien
aagttctggctgtagttccctctgt

SEQ ID NO: 104583 - DNA, 25 bp, Homo sapien
gctgccactggttgtagccctgaga

SEQ ID NO: 104584 - DNA, 25 bp, Homo sapien
ttgatttttgtagccacgattgttt

SEQ ID NO: 104585 - DNA, 25 bp, Homo sapien
gttgtagccctgagattgatttttg

SEQ ID NO: 104586 - DNA, 25 bp, Homo sapien
tgtagccacgattgtttcctcgtcc

SEQ ID NO: 104587 - DNA, 25 bp, Homo sapien
ctgaggttctcttacgattcacttt

SEQ ID NO: 104588 - DNA, 25 bp, Homo sapien
tgtagaaccctgaaatactgacaca

SEQ ID NO: 104589 - DNA, 25 bp, Homo sapien
gaaaacagtcgacttcttgtgaagg

SEQ ID NO: 104590 - DNA, 25 bp, Homo sapien
tcttacgattcacttttaaactgca

SEQ ID NO: 104591 - DNA, 25 bp, Homo sapien
gagatggctctggtaattgaaccat

SEQ ID NO: 104592 - DNA, 25 bp, Homo sapien
tggagatggctctggtaattgaacc

SEQ ID NO: 104593 - DNA, 25 bp, Homo sapien
ccttttctccatatggagatggctc

SEQ ID NO: 104594 - DNA, 25 bp, Homo sapien
tctccatatggagatggctctggta

SEQ ID NO: 104595 - DNA, 25 bp, Homo sapien
atttgtaatgataaccttgacttct

SEQ ID NO: 104596 - DNA, 25 bp, Homo sapien
tttgtaatgataaccttgacttctc

SEQ ID NO: 104597 - DNA, 25 bp, Homo sapien
acttgattccacttttcttgatagg

SEQ ID NO: 104598 - DNA, 25 bp, Homo sapien
ttgattccacttttcttgataggtc

SEQ ID NO: 104599 - DNA, 25 bp, Homo sapien
cacttgattccacttttcttgatag

SEQ ID NO: 104600 - DNA, 25 bp, Homo sapien
tcacttgattccacttttcttgata

SEQ ID NO: 104601 - DNA, 25 bp, Homo sapien
aatgattaactgactatgcagttcc

SEQ ID NO: 104602 - DNA, 25 bp, Homo sapien
ggatgatgtaaccacagggtccaca

SEQ ID NO: 104603 - DNA, 25 bp, Homo sapien
tcccttaatttcgtttgggatgatg

SEQ ID NO: 104604 - DNA, 25 bp, Homo sapien
tgaaaatgattaactgactatgcag

SEQ ID NO: 104605 - DNA, 25 bp, Homo sapien
tgttcttgaaattaagatctgaact

SEQ ID NO: 104606 - DNA, 25 bp, Homo sapien
aattgttcttgaaattaagatctga

SEQ ID NO: 104607 - DNA, 25 bp, Homo sapien
tcttgaaattaagatctgaactggg

SEQ ID NO: 104608 - DNA, 25 bp, Homo sapien
tgaccttacaattctctttattgat

SEQ ID NO: 104609 - DNA, 25 bp, Homo sapien
tgttcagtttccaagtagttttgtg

SEQ ID NO: 104610 - DNA, 25 bp, Homo sapien
tgtggtgtggtgcagtgctaaaaaa

SEQ ID NO: 104611 - DNA, 25 bp, Homo sapien
tgtggtgcagtgctaaaaaaaatgt

SEQ ID NO: 104612 - DNA, 25 bp, Homo sapien
ggtgtggtgtggtgcagtgctaaaa

SEQ ID NO: 104613 - DNA, 25 bp, Homo sapien
ggtgcagtgctaaaaaaaatgtata

SEQ ID NO: 104614 - DNA, 25 bp, Homo sapien
gcccataatagtattgctaggtcaa

SEQ ID NO: 104615 - DNA, 25 bp, Homo sapien
accaacagtgttaaagcatttcatt

SEQ ID NO: 104616 - DNA, 25 bp, Homo sapien
atgcccataatagtattgctaggtc

SEQ ID NO: 104617 - DNA, 25 bp, Homo sapien
ccataatagtattgctaggtcaaat

SEQ ID NO: 104618 - DNA, 25 bp, Homo sapien
gcagcttcttaaatgatataaggag

SEQ ID NO: 104619 - DNA, 25 bp, Homo sapien
caggaataacggcagctcaggtcat

SEQ ID NO: 104620 - DNA, 25 bp, Homo sapien
ggtcatccatcaaaccagcactctg

SEQ ID NO: 104621 - DNA, 25 bp, Homo sapien
atcaaaccagcactctgtgtcagca

SEQ ID NO: 104622 - DNA, 25 bp, Homo sapien
atctttttagccagaagtatggtgc

SEQ ID NO: 104623 - DNA, 25 bp, Homo sapien
ccgtcgaggtagtgaagtatgaact

SEQ ID NO: 104624 - DNA, 25 bp, Homo sapien
tctaaggaatagttttgccgtcgag

SEQ ID NO: 104625 - DNA, 25 bp, Homo sapien
ctaaggaatagttttgccgtcgagg

SEQ ID NO: 104626 - DNA, 25 bp, Homo sapien
ttttgccgtcgaggtagtgaagtat

SEQ ID NO: 104627 - DNA, 25 bp, Homo sapien
caataatttgtcatagagcatattt

SEQ ID NO: 104628 - DNA, 25 bp, Homo sapien
caattgtgaactctcattatcagaa

SEQ ID NO: 104629 - DNA, 25 bp, Homo sapien
attttctgtcacaccagtcattacc

SEQ ID NO: 104630 - DNA, 25 bp, Homo sapien
caccagtcattaccagggtcaggat

SEQ ID NO: 104631 - DNA, 25 bp, Homo sapien
tctaatgaagtgacaagagtttgcc

SEQ ID NO: 104632 - DNA, 25 bp, Homo sapien
tgtgtggtgccaacttctgatatgt

SEQ ID NO: 104633 - DNA, 25 bp, Homo sapien
tacaagtctgcagcaaactgatcct

SEQ ID NO: 104634 - DNA, 25 bp, Homo sapien
tggtttataagaggcaaggtcctaa

SEQ ID NO: 104635 - DNA, 25 bp, Homo sapien
accctgcttttagccctagagctct

SEQ ID NO: 104636 - DNA, 25 bp, Homo sapien
cacaaaagagagaataggccaatcc

SEQ ID NO: 104637 - DNA, 25 bp, Homo sapien
cagcaagggcaaacatgggtagagt

SEQ ID NO: 104638 - DNA, 25 bp, Homo sapien
aactgccacggcctaggctcaatct

SEQ ID NO: 104639 - DNA, 25 bp, Homo sapien
catagatcaggaagtagattcgtga

SEQ ID NO: 104640 - DNA, 25 bp, Homo sapien
gaagctcctgttactgctggtactg

SEQ ID NO: 104641 - DNA, 25 bp, Homo sapien
ggtactgatgcatgtttttcgacaa

SEQ ID NO: 104642 - DNA, 25 bp, Homo sapien
ccagaagtagtgattcatagatcag

SEQ ID NO: 104643 - DNA, 25 bp, Homo sapien
ctagggtaaacagtcttcagtagaa

SEQ ID NO: 104644 - DNA, 25 bp, Homo sapien
cagtagaatcagtgttatgttcttt

SEQ ID NO: 104645 - DNA, 25 bp, Homo sapien
ggtaaacagtcttcagtagaatcag

SEQ ID NO: 104646 - DNA, 25 bp, Homo sapien
agggtaaacagtcttcagtagaatc

SEQ ID NO: 104647 - DNA, 25 bp, Homo sapien
caatttttcagattcccagacctcc

SEQ ID NO: 104648 - DNA, 25 bp, Homo sapien
aatttttcagattcccagacctcct

SEQ ID NO: 104649 - DNA, 25 bp, Homo sapien
gcccaccttctggacagtgttgtca

SEQ ID NO: 104650 - DNA, 25 bp, Homo sapien
caccttctggacagtgttgtcatag

SEQ ID NO: 104651 - DNA, 25 bp, Homo sapien
aagatgaaccccaatagaatgtcag

SEQ ID NO: 104652 - DNA, 25 bp, Homo sapien
caatagaatgtcagacctgtatgaa

SEQ ID NO: 104653 - DNA, 25 bp, Homo sapien
gacctgtatgaattttgccctgagc

SEQ ID NO: 104654 - DNA, 25 bp, Homo sapien
gaaccccaatagaatgtcagacctg

SEQ ID NO: 104655 - DNA, 25 bp, Homo sapien
tgcttccgtgtgcatccacacatcc

SEQ ID NO: 104656 - DNA, 25 bp, Homo sapien
tgtgagaggcccatctttggagcca

SEQ ID NO: 104657 - DNA, 25 bp, Homo sapien
cacacatcctctccccatgtgagag

SEQ ID NO: 104658 - DNA, 25 bp, Homo sapien
tctccccatgtgagaggcccatctt

SEQ ID NO: 104659 - DNA, 25 bp, Homo sapien
gcaatagcacctggatgtactttaa

SEQ ID NO: 104660 - DNA, 25 bp, Homo sapien
gcacctggatgtactttaacgtcag

SEQ ID NO: 104661 - DNA, 25 bp, Homo sapien
acgtcagtcactaggctgtatttta

SEQ ID NO: 104662 - DNA, 25 bp, Homo sapien
tactttaacgtcagtcactaggctg

SEQ ID NO: 104663 - DNA, 25 bp, Homo sapien
ctgctccaggtggaactgtggaact

SEQ ID NO: 104664 - DNA, 25 bp, Homo sapien
tccaggtggaactgtggaactttct

SEQ ID NO: 104665 - DNA, 25 bp, Homo sapien
tggaactgtggaactttctttatta

SEQ ID NO: 104666 - DNA, 25 bp, Homo sapien
tcactctccatgtgctgcccagcag

SEQ ID NO: 104667 - DNA, 25 bp, Homo sapien
ataggttctttggaggaccccagca

SEQ ID NO: 104668 - DNA, 25 bp, Homo sapien
gaggaccccagcaccacaaaatttc

SEQ ID NO: 104669 - DNA, 25 bp, Homo sapien
ggaccccagcaccacaaaatttcca

SEQ ID NO: 104670 - DNA, 25 bp, Homo sapien
gaccccagcaccacaaaatttccaa

SEQ ID NO: 104671 - DNA, 25 bp, Homo sapien
ctcccaccccggtgaagctgccacc

SEQ ID NO: 104672 - DNA, 25 bp, Homo sapien
gggacttcctacctgaagacctatg

SEQ ID NO: 104673 - DNA, 25 bp, Homo sapien
gaagacctatgggtactctgaacca

SEQ ID NO: 104674 - DNA, 25 bp, Homo sapien
tcctacctgaagacctatgggtact

SEQ ID NO: 104675 - DNA, 25 bp, Homo sapien
agagtagcaagccaaaccacgaggg

SEQ ID NO: 104676 - DNA, 25 bp, Homo sapien
tgtagactttgggtcaccggcacct

SEQ ID NO: 104677 - DNA, 25 bp, Homo sapien
gctttgaggctattgtgatgaccac

SEQ ID NO: 104678 - DNA, 25 bp, Homo sapien
tgtcagttactggattctgtgaccc

SEQ ID NO: 104679 - DNA, 25 bp, Homo sapien
gctttctcatagtttctatcgcact

SEQ ID NO: 104680 - DNA, 25 bp, Homo sapien
ctttttaacactagatggcaagttg

SEQ ID NO: 104681 - DNA, 25 bp, Homo sapien
gaatgcttctttttaacactagatg

SEQ ID NO: 104682 - DNA, 25 bp, Homo sapien
gtttctatcgcactcaatgtaatgt

SEQ ID NO: 104683 - DNA, 25 bp, Homo sapien
tgtctttcacaacttttgctgacct

SEQ ID NO: 104684 - DNA, 25 bp, Homo sapien
ccatttgtgggcgtttgaacattac

SEQ ID NO: 104685 - DNA, 25 bp, Homo sapien
caaagacaggtttgtaagtgaggat

SEQ ID NO: 104686 - DNA, 25 bp, Homo sapien
gtgaggattttgtctttcacaactt

SEQ ID NO: 104687 - DNA, 25 bp, Homo sapien
ctggcaaggaataagaaaggaagta

SEQ ID NO: 104688 - DNA, 25 bp, Homo sapien
tgcggcctcgcatgcaactatcttc

SEQ ID NO: 104689 - DNA, 25 bp, Homo sapien
cagatgtagagatgcggcctcgcat

SEQ ID NO: 104690 - DNA, 25 bp, Homo sapien
ttaggaccactcttggaaccagctg

SEQ ID NO: 104691 - DNA, 25 bp, Homo sapien
gccagttcttttgctgctattagga

SEQ ID NO: 104692 - DNA, 25 bp, Homo sapien
taaagggactgcaactaaacaggtc

SEQ ID NO: 104693 - DNA, 25 bp, Homo sapien
caaatgtcttgatgcaggagtgtgc

SEQ ID NO: 104694 - DNA, 25 bp, Homo sapien
ggtgatatttaaacagagaccccaa

SEQ ID NO: 104695 - DNA, 25 bp, Homo sapien
taaacaggtctgctagattagatgc

SEQ ID NO: 104696 - DNA, 25 bp, Homo sapien
acatttttcatagagtggtacttaa

SEQ ID NO: 104697 - DNA, 25 bp, Homo sapien
atggatcacaaactactaaacttgg

SEQ ID NO: 104698 - DNA, 25 bp, Homo sapien
gcctctttccatgggtgttaattaa

SEQ ID NO: 104699 - DNA, 25 bp, Homo sapien
tattctaatcaggatacattttgcc

SEQ ID NO: 104700 - DNA, 25 bp, Homo sapien
ttgatactgagctgaattttaagac

SEQ ID NO: 104701 - DNA, 25 bp, Homo sapien
gacataagctagcagtcccacttgg

SEQ ID NO: 104702 - DNA, 25 bp, Homo sapien
ggttccatgacagctggtaatcgac

SEQ ID NO: 104703 - DNA, 25 bp, Homo sapien
aaggacaggaagcagtatgcaatcc

SEQ ID NO: 104704 - DNA, 25 bp, Homo sapien
cactaaaatgccacaacaatgcttg

SEQ ID NO: 104705 - DNA, 25 bp, Homo sapien
tatagccttgatgggttacttttcc

SEQ ID NO: 104706 - DNA, 25 bp, Homo sapien
aaattgggagccgttcttatagcct

SEQ ID NO: 104707 - DNA, 25 bp, Homo sapien
ccccagaaggagtctctaagtcaca

SEQ ID NO: 104708 - DNA, 25 bp, Homo sapien
gttagagcatccctctctttgtaat

SEQ ID NO: 104709 - DNA, 25 bp, Homo sapien
taaagaagttagagcatccctctct

SEQ ID NO: 104710 - DNA, 25 bp, Homo sapien
gtcattaaagaagttagagcatccc

SEQ ID NO: 104711 - DNA, 25 bp, Homo sapien
aaaagtcattaaagaagttagagca

SEQ ID NO: 104712 - DNA, 25 bp, Homo sapien
gaaattctgtacagagttaaacgca

SEQ ID NO: 104713 - DNA, 25 bp, Homo sapien
tttgactggatatgccaaaggctca

SEQ ID NO: 104714 - DNA, 25 bp, Homo sapien
gtgaactttgcctctcagtgtcatg

SEQ ID NO: 104715 - DNA, 25 bp, Homo sapien
taaacgcaagtttaactctgagtga

SEQ ID NO: 104716 - DNA, 25 bp, Homo sapien
gcaaaaatgaacaggagtagctatg

SEQ ID NO: 104717 - DNA, 25 bp, Homo sapien
cacattgttggccataaattgagtc

SEQ ID NO: 104718 - DNA, 25 bp, Homo sapien
taaactggattctaggccacaggca

SEQ ID NO: 104719 - DNA, 25 bp, Homo sapien
cactagacagaatattgaggccgaa

SEQ ID NO: 104720 - DNA, 25 bp, Homo sapien
tctgggatctagcaattgggaggca

SEQ ID NO: 104721 - DNA, 25 bp, Homo sapien
gcagacttgggtaatgaagagaaaa

SEQ ID NO: 104722 - DNA, 25 bp, Homo sapien
gagacttatgggtgcaggaaagaaa

SEQ ID NO: 104723 - DNA, 25 bp, Homo sapien
aacaaaagttcttgagacttatggg

SEQ ID NO: 104724 - DNA, 25 bp, Homo sapien
gagtaatgggtctggattcccaaaa

SEQ ID NO: 104725 - DNA, 25 bp, Homo sapien
gaagtagtagggtgagtaatgggtc

SEQ ID NO: 104726 - DNA, 25 bp, Homo sapien
tagggtgagtaatgggtctggattc

SEQ ID NO: 104727 - DNA, 25 bp, Homo sapien
ggtgagtaatgggtctggattccca

SEQ ID NO: 104728 - DNA, 25 bp, Homo sapien
ttgattaggtgcctgctcctcgctt

SEQ ID NO: 104729 - DNA, 25 bp, Homo sapien
gattaggtgcctgctcctcgcttgc

SEQ ID NO: 104730 - DNA, 25 bp, Homo sapien
ggtgcctgctcctcgcttgcttctt

SEQ ID NO: 104731 - DNA, 25 bp, Homo sapien
ttaggtgcctgctcctcgcttgctt

SEQ ID NO: 104732 - DNA, 25 bp, Homo sapien
cttcttcttggtaaggaagacgtag

SEQ ID NO: 104733 - DNA, 25 bp, Homo sapien
tcttgaaacctgaacataatggtat

SEQ ID NO: 104734 - DNA, 25 bp, Homo sapien
cttgaagcactattcttgaaacctg

SEQ ID NO: 104735 - DNA, 25 bp, Homo sapien
taaggaagacgtagcacaaatatgc

SEQ ID NO: 104736 - DNA, 25 bp, Homo sapien
tcccttctctctcccttactccctg

SEQ ID NO: 104737 - DNA, 25 bp, Homo sapien
tctcccttctctctcccttactccc

SEQ ID NO: 104738 - DNA, 25 bp, Homo sapien
ccttctctctcccttactccctgtc

SEQ ID NO: 104739 - DNA, 25 bp, Homo sapien
ttctctctcccttactccctgtcat

SEQ ID NO: 104740 - DNA, 25 bp, Homo sapien
tgtgtctttgcaatggagtgctgaa

SEQ ID NO: 104741 - DNA, 25 bp, Homo sapien
gagtgctgaaggcataacgtgagtt

SEQ ID NO: 104742 - DNA, 25 bp, Homo sapien
gagttaaagcccacatgaaactgtc

SEQ ID NO: 104743 - DNA, 25 bp, Homo sapien
gaaactgtctactccactgatggct

SEQ ID NO: 104744 - DNA, 25 bp, Homo sapien
atatttattacgcatgtacagtgtg

SEQ ID NO: 104745 - DNA, 25 bp, Homo sapien
gtacagtgtgatagaacatgttcta

SEQ ID NO: 104746 - DNA, 25 bp, Homo sapien
gaacatgttctaagcctttgcatat

SEQ ID NO: 104747 - DNA, 25 bp, Homo sapien
cagcgcctggccgtttttatttatc

SEQ ID NO: 104748 - DNA, 25 bp, Homo sapien
tatgttattgctactatgttaccaa

SEQ ID NO: 104749 - DNA, 25 bp, Homo sapien
tgccattgtccaacttgaggtatgt

SEQ ID NO: 104750 - DNA, 25 bp, Homo sapien
tttgctaacatctttcttgggcttc

SEQ ID NO: 104751 - DNA, 25 bp, Homo sapien
cactggtgcctctttttggtaccga

SEQ ID NO: 104752 - DNA, 25 bp, Homo sapien
aggccaaatgggctgagcaatatgt

SEQ ID NO: 104753 - DNA, 25 bp, Homo sapien
aatgggctgagcaatatgttgtcac

SEQ ID NO: 104754 - DNA, 25 bp, Homo sapien
caatatgttgtcacgaaagactgca

SEQ ID NO: 104755 - DNA, 25 bp, Homo sapien
tgagcaatatgttgtcacgaaagac

SEQ ID NO: 104756 - DNA, 25 bp, Homo sapien
tctcaccatccaaagattgccgagc

SEQ ID NO: 104757 - DNA, 25 bp, Homo sapien
ttcgtctaccgccaaccacttctga

SEQ ID NO: 104758 - DNA, 25 bp, Homo sapien
gagtttgagccttgcgactctcacc

SEQ ID NO: 104759 - DNA, 25 bp, Homo sapien
cagcaagatctagggacagagtttg

SEQ ID NO: 104760 - DNA, 25 bp, Homo sapien
aatccgagttgtctgatgctccaag

SEQ ID NO: 104761 - DNA, 25 bp, Homo sapien
ggttacttgcttttatctcgggtga

SEQ ID NO: 104762 - DNA, 25 bp, Homo sapien
tgacatctgtgcaacagcgaaagaa

SEQ ID NO: 104763 - DNA, 25 bp, Homo sapien
tagctcttcagtgacagactcctgt

SEQ ID NO: 104764 - DNA, 25 bp, Homo sapien
gaagattattaatcatggggtgcat

SEQ ID NO: 104765 - DNA, 25 bp, Homo sapien
gaaaacagttgaagattattaatca

SEQ ID NO: 104766 - DNA, 25 bp, Homo sapien
acagttgaagattattaatcatggg

SEQ ID NO: 104767 - DNA, 25 bp, Homo sapien
aaacagttgaagattattaatcatg

SEQ ID NO: 104768 - DNA, 25 bp, Homo sapien
tgaaattagaattccgagtggaggc

SEQ ID NO: 104769 - DNA, 25 bp, Homo sapien
taagaattcgcagccctgtttctcc

SEQ ID NO: 104770 - DNA, 25 bp, Homo sapien
gaaattagaattccgagtggaggca

SEQ ID NO: 104771 - DNA, 25 bp, Homo sapien
gcatccctgaacatccccgttaatt

SEQ ID NO: 104772 - DNA, 25 bp, Homo sapien
ttccacagtgctcttataaagctca

SEQ ID NO: 104773 - DNA, 25 bp, Homo sapien
cttccacagtgctcttataaagctc

SEQ ID NO: 104774 - DNA, 25 bp, Homo sapien
tccacagtgctcttataaagctcac

SEQ ID NO: 104775 - DNA, 25 bp, Homo sapien
agctgcctggtatgtgatgatatag

SEQ ID NO: 104776 - DNA, 25 bp, Homo sapien
tttgtgggcaagtctgtactgaagc

SEQ ID NO: 104777 - DNA, 25 bp, Homo sapien
tccatgatggagagttttacatcct

SEQ ID NO: 104778 - DNA, 25 bp, Homo sapien
tatgtgatgatatagggcccagctg

SEQ ID NO: 104779 - DNA, 25 bp, Homo sapien
ttttgtagacaaatgctttttttca

SEQ ID NO: 104780 - DNA, 25 bp, Homo sapien
ggactttctcgatgcaggcttgcca

SEQ ID NO: 104781 - DNA, 25 bp, Homo sapien
cattgtagggctatcaatttgccta

SEQ ID NO: 104782 - DNA, 25 bp, Homo sapien
gttgtgtctcaagcaatagaaaggc

SEQ ID NO: 104783 - DNA, 25 bp, Homo sapien
aaaattaacccttgatccatgcgct

SEQ ID NO: 104784 - DNA, 25 bp, Homo sapien
gattcttcttttcacgtgaacactt

SEQ ID NO: 104785 - DNA, 25 bp, Homo sapien
gaagcagcccttcatccattaaagt

SEQ ID NO: 104786 - DNA, 25 bp, Homo sapien
tcacagcacctcactaggagtagat

SEQ ID NO: 104787 - DNA, 25 bp, Homo sapien
taaacaacccaatggagattgcccc

SEQ ID NO: 104788 - DNA, 25 bp, Homo sapien
tataattgagagaaacaccaggctc

SEQ ID NO: 104789 - DNA, 25 bp, Homo sapien
ccattactgaaagctctcttgtgat

SEQ ID NO: 104790 - DNA, 25 bp, Homo sapien
tgggctgtactggtgggaaccatta

SEQ ID NO: 104791 - DNA, 25 bp, Homo sapien
tatagcagccaatctgcttgtcatc

SEQ ID NO: 104792 - DNA, 25 bp, Homo sapien
tggcgtctgacgtgctatagcagcc

SEQ ID NO: 104793 - DNA, 25 bp, Homo sapien
caaaataaataatgtcatctttgaa

SEQ ID NO: 104794 - DNA, 25 bp, Homo sapien
aaaataaataatgtcatctttgaaa

SEQ ID NO: 104795 - DNA, 25 bp, Homo sapien
aaataaataatgtcatctttgaaat

SEQ ID NO: 104796 - DNA, 25 bp, Homo sapien
aataaataatgtcatctttgaaata

SEQ ID NO: 104797 - DNA, 25 bp, Homo sapien
tgttgcccaaacatagtggatattg

SEQ ID NO: 104798 - DNA, 25 bp, Homo sapien
tctgggagtaagtgttgtacaaagg

SEQ ID NO: 104799 - DNA, 25 bp, Homo sapien
aagcactttaagcatttcgggagac

SEQ ID NO: 104800 - DNA, 25 bp, Homo sapien
actggagtctattggtttgcctgga

SEQ ID NO: 104801 - DNA, 25 bp, Homo sapien
tacaagcattccttaactatcagaa

SEQ ID NO: 104802 - DNA, 25 bp, Homo sapien
cggtacttcctcagttacaagcatt

SEQ ID NO: 104803 - DNA, 25 bp, Homo sapien
gcttccctttcaggtgagttgatgt

SEQ ID NO: 104804 - DNA, 25 bp, Homo sapien
taacaagcagaaagcatgatccaat

SEQ ID NO: 104805 - DNA, 25 bp, Homo sapien
ttcaggctggggtacccgaagccca

SEQ ID NO: 104806 - DNA, 25 bp, Homo sapien
tactactaaattacctgattgctga

SEQ ID NO: 104807 - DNA, 25 bp, Homo sapien
ttacctgattgctgaaatagaacca

SEQ ID NO: 104808 - DNA, 25 bp, Homo sapien
cgaagcccaaaagacatggtgagtt

SEQ ID NO: 104809 - DNA, 25 bp, Homo sapien
agtctggttcccctgataggatggt

SEQ ID NO: 104810 - DNA, 25 bp, Homo sapien
gaagacctggatgtgaaagggaccc

SEQ ID NO: 104811 - DNA, 25 bp, Homo sapien
ctgataggatggtgtgatagaagat

SEQ ID NO: 104812 - DNA, 25 bp, Homo sapien
gtatctgaagacctggatgtgaaag

SEQ ID NO: 104813 - DNA, 25 bp, Homo sapien
gcgaaatagttacagcaagctaagg

SEQ ID NO: 104814 - DNA, 25 bp, Homo sapien
cgaaatagttacagcaagctaaggt

SEQ ID NO: 104815 - DNA, 25 bp, Homo sapien
tgtagagtatgtgtacagtgtttgt

SEQ ID NO: 104816 - DNA, 25 bp, Homo sapien
taaattcagtgtagagtatgtgtac

SEQ ID NO: 104817 - DNA, 25 bp, Homo sapien
tgtggctgaagcaattccaaacctc

SEQ ID NO: 104818 - DNA, 25 bp, Homo sapien
cctattgatcggttggctctgggag

SEQ ID NO: 104819 - DNA, 25 bp, Homo sapien
ctctggagctggcaccggtgctgtt

SEQ ID NO: 104820 - DNA, 25 bp, Homo sapien
gaggtcttatgtccaccatgcatgg

SEQ ID NO: 104821 - DNA, 25 bp, Homo sapien
gcagaagtatcagaagggttaattc

SEQ ID NO: 104822 - DNA, 25 bp, Homo sapien
gagaactgacttagaatgatcagaa

SEQ ID NO: 104823 - DNA, 25 bp, Homo sapien
aatacatgggcagaagtatcagaag

SEQ ID NO: 104824 - DNA, 25 bp, Homo sapien
attagaaacagcattgagaactgac

SEQ ID NO: 104825 - DNA, 25 bp, Homo sapien
ttgaagaaaaactggacatatttgc

SEQ ID NO: 104826 - DNA, 25 bp, Homo sapien
gttgaagaaaaactggacatatttg

SEQ ID NO: 104827 - DNA, 25 bp, Homo sapien
ggcagcttcagatagactgagaaat

SEQ ID NO: 104828 - DNA, 25 bp, Homo sapien
gcagcttcagatagactgagaaatc

SEQ ID NO: 104829 - DNA, 25 bp, Homo sapien
tggcagcttcagatagactgagaaa

SEQ ID NO: 104830 - DNA, 25 bp, Homo sapien
cgatctgctgtaaatgagatccgaa

SEQ ID NO: 104831 - DNA, 25 bp, Homo sapien
aatgagatccgaaaactttctccat

SEQ ID NO: 104832 - DNA, 25 bp, Homo sapien
tgacccttctccgatctgctgtaaa

SEQ ID NO: 104833 - DNA, 25 bp, Homo sapien
aaactgacccttctccgatctgctg

SEQ ID NO: 104834 - DNA, 25 bp, Homo sapien
tgctgccagaggaatgacgaaaacc

SEQ ID NO: 104835 - DNA, 25 bp, Homo sapien
gaggaagtcaatggccgggaaccat

SEQ ID NO: 104836 - DNA, 25 bp, Homo sapien
taagtgctccttgtaggcactgctg

SEQ ID NO: 104837 - DNA, 25 bp, Homo sapien
ttctctgtgcaatgttaagtgctcc

SEQ ID NO: 104838 - DNA, 25 bp, Homo sapien
gccacatgggcaccaacaattttcc

SEQ ID NO: 104839 - DNA, 25 bp, Homo sapien
ttcttttaagcttcttcccattgca

SEQ ID NO: 104840 - DNA, 25 bp, Homo sapien
caattttcctccagtggcagctaaa

SEQ ID NO: 104841 - DNA, 25 bp, Homo sapien
gcttcttcccattgcaagccacatg

SEQ ID NO: 104842 - DNA, 25 bp, Homo sapien
gtcacaggccccgaacctggtgtca

SEQ ID NO: 104843 - DNA, 25 bp, Homo sapien
gacatgggtgcatgttgatcacctt

SEQ ID NO: 104844 - DNA, 25 bp, Homo sapien
gcagacatgggtgcatgttgatcac

SEQ ID NO: 104845 - DNA, 25 bp, Homo sapien
tcttgtcacaggccccgaacctggt

SEQ ID NO: 104846 - DNA, 25 bp, Homo sapien
cttgtcgttcccaccctataatatt

SEQ ID NO: 104847 - DNA, 25 bp, Homo sapien
tttcccatcaggtcccgttgtattg

SEQ ID NO: 104848 - DNA, 25 bp, Homo sapien
catcaggtcccgttgtattgggatg

SEQ ID NO: 104849 - DNA, 25 bp, Homo sapien
ccttgtcgttcccaccctataatat

SEQ ID NO: 104850 - DNA, 25 bp, Homo sapien
tctttggcaagctgacatcctccct

SEQ ID NO: 104851 - DNA, 25 bp, Homo sapien
acactgctgacattaggctctattc

SEQ ID NO: 104852 - DNA, 25 bp, Homo sapien
tcctccctccatgagatatgaccag

SEQ ID NO: 104853 - DNA, 25 bp, Homo sapien
gaccagcccaagaaaacactgctga

SEQ ID NO: 104854 - DNA, 25 bp, Homo sapien
tcaaactcctgtgcaggataggaga

SEQ ID NO: 104855 - DNA, 25 bp, Homo sapien
gtagctgaattctccaactgggtag

SEQ ID NO: 104856 - DNA, 25 bp, Homo sapien
gaattctccaactgggtagtttgaa

SEQ ID NO: 104857 - DNA, 25 bp, Homo sapien
tccaactgggtagtttgaatgcagt

SEQ ID NO: 104858 - DNA, 25 bp, Homo sapien
gaaatgcttagaccatctgttgata

SEQ ID NO: 104859 - DNA, 25 bp, Homo sapien
catctgttgatattggtgaatctgc

SEQ ID NO: 104860 - DNA, 25 bp, Homo sapien
ttgatattggtgaatctgcttctcc

SEQ ID NO: 104861 - DNA, 25 bp, Homo sapien
tagaccatctgttgatattggtgaa

SEQ ID NO: 104862 - DNA, 25 bp, Homo sapien
gctggtgccctacttaattcattta

SEQ ID NO: 104863 - DNA, 25 bp, Homo sapien
aatgctggtgccctacttaattcat

SEQ ID NO: 104864 - DNA, 25 bp, Homo sapien
aaatgctggtgccctacttaattca

SEQ ID NO: 104865 - DNA, 25 bp, Homo sapien
ggtgccctacttaattcatttactc

SEQ ID NO: 104866 - DNA, 25 bp, Homo sapien
tgacttatagggttcagtgactgaa

SEQ ID NO: 104867 - DNA, 25 bp, Homo sapien
tagggttcagtgactgaaatgtatt

SEQ ID NO: 104868 - DNA, 25 bp, Homo sapien
tttttgtactgacttatagggttca

SEQ ID NO: 104869 - DNA, 25 bp, Homo sapien
tgtactgacttatagggttcagtga

SEQ ID NO: 104870 - DNA, 25 bp, Homo sapien
gttgttctcatgatgtagttgctgc

SEQ ID NO: 104871 - DNA, 25 bp, Homo sapien
caggggatctctctcaatgttgttc

SEQ ID NO: 104872 - DNA, 25 bp, Homo sapien
gaagtcatgcagctgatttgaatct

SEQ ID NO: 104873 - DNA, 25 bp, Homo sapien
gatctctctcaatgttgttctcatg

SEQ ID NO: 104874 - DNA, 25 bp, Homo sapien
tgagcttccaatagaatcagtggcg

SEQ ID NO: 104875 - DNA, 25 bp, Homo sapien
gctgagtagcactcagagtcgaaat

SEQ ID NO: 104876 - DNA, 25 bp, Homo sapien
gcactcagagtcgaaattatgcctc

SEQ ID NO: 104877 - DNA, 25 bp, Homo sapien
gcgaagatctggacaatagtgatga

SEQ ID NO: 104878 - DNA, 25 bp, Homo sapien
ttccaacttgtttccccttgagcat

SEQ ID NO: 104879 - DNA, 25 bp, Homo sapien
attccaacttgtttccccttgagca

SEQ ID NO: 104880 - DNA, 25 bp, Homo sapien
acattccaacttgtttccccttgag

SEQ ID NO: 104881 - DNA, 25 bp, Homo sapien
cattccaacttgtttccccttgagc

SEQ ID NO: 104882 - DNA, 25 bp, Homo sapien
ttatccctcctgcttgttggatcca

SEQ ID NO: 104883 - DNA, 25 bp, Homo sapien
tgttggatccaatcctcttgtcaga

SEQ ID NO: 104884 - DNA, 25 bp, Homo sapien
tcctgcttgttggatccaatcctct

SEQ ID NO: 104885 - DNA, 25 bp, Homo sapien
tccctcctgcttgttggatccaatc

SEQ ID NO: 104886 - DNA, 25 bp, Homo sapien
ttcttgcattaatgtcttaatagtt

SEQ ID NO: 104887 - DNA, 25 bp, Homo sapien
gcattaatgtcttaatagttttcat

SEQ ID NO: 104888 - DNA, 25 bp, Homo sapien
ttgcttacaataggtttgtctattc

SEQ ID NO: 104889 - DNA, 25 bp, Homo sapien
gtttgtctattctgagtcttttgtg

SEQ ID NO: 104890 - DNA, 25 bp, Homo sapien
gccgcctgctcatggagagcccggg

SEQ ID NO: 104891 - DNA, 25 bp, Homo sapien
gccgctgcctcatctatgagtaccg

SEQ ID NO: 104892 - DNA, 25 bp, Homo sapien
tcatctatgagtaccgccggctgtc

SEQ ID NO: 104893 - DNA, 25 bp, Homo sapien
ccggcgtgagttctgggctctggca

SEQ ID NO: 104894 - DNA, 25 bp, Homo sapien
gatcctcctgcactcgagttgggca

SEQ ID NO: 104895 - DNA, 25 bp, Homo sapien
tgggcatcgccagttggaacagtaa

SEQ ID NO: 104896 - DNA, 25 bp, Homo sapien
caggatactgctttgcggccagctt

SEQ ID NO: 104897 - DNA, 25 bp, Homo sapien
caacatagagtggtgtacaggatac

SEQ ID NO: 104898 - DNA, 25 bp, Homo sapien
ttcacagccagtcttatcaagtttc

SEQ ID NO: 104899 - DNA, 25 bp, Homo sapien
aagtttccatgtggaatttcttggg

SEQ ID NO: 104900 - DNA, 25 bp, Homo sapien
cagttcaatcttggaacagaataac

SEQ ID NO: 104901 - DNA, 25 bp, Homo sapien
agtcttatcaagtttccatgtggaa

SEQ ID NO: 104902 - DNA, 25 bp, Homo sapien
gggtacatacgccagatcttcagat

SEQ ID NO: 104903 - DNA, 25 bp, Homo sapien
tccaatgttgcatatttaagacaac

SEQ ID NO: 104904 - DNA, 25 bp, Homo sapien
tcgttgggaaaattctcttaagcca

SEQ ID NO: 104905 - DNA, 25 bp, Homo sapien
ggtgccccatggcagaaaattcgtt

SEQ ID NO: 104906 - DNA, 25 bp, Homo sapien
tgcactgctagtaactgactctctg

SEQ ID NO: 104907 - DNA, 25 bp, Homo sapien
caagtattagccagtatgtgtcagg

SEQ ID NO: 104908 - DNA, 25 bp, Homo sapien
gaccacctgcatactactacgaact

SEQ ID NO: 104909 - DNA, 25 bp, Homo sapien
tgtgtcaggcacaaaatactgtgct

SEQ ID NO: 104910 - DNA, 25 bp, Homo sapien
catcatagtgcatccaatgtccacc

SEQ ID NO: 104911 - DNA, 25 bp, Homo sapien
gtgcatccaatgtccaccaatctgg

SEQ ID NO: 104912 - DNA, 25 bp, Homo sapien
atttctgagcccatcatagtgcatc

SEQ ID NO: 104913 - DNA, 25 bp, Homo sapien
tgtccaccaatctggaaagctgcag

SEQ ID NO: 104914 - DNA, 25 bp, Homo sapien
tctctgttgctcgaatataaaccaa

SEQ ID NO: 104915 - DNA, 25 bp, Homo sapien
tatttctctgttgctcgaatataaa

SEQ ID NO: 104916 - DNA, 25 bp, Homo sapien
gttgctcgaatataaaccaatgatg

SEQ ID NO: 104917 - DNA, 25 bp, Homo sapien
tctgttgctcgaatataaaccaatg

SEQ ID NO: 104918 - DNA, 25 bp, Homo sapien
aatacacttctgaaactagtatagt

SEQ ID NO: 104919 - DNA, 25 bp, Homo sapien
cttggataccaagtatacacaaaat

SEQ ID NO: 104920 - DNA, 25 bp, Homo sapien
ttgcacagatcctctatataaaaca

SEQ ID NO: 104921 - DNA, 25 bp, Homo sapien
tctgaaactagtatagttgaactat

SEQ ID NO: 104922 - DNA, 25 bp, Homo sapien
tgctgcagggatactaggcaaatcg

SEQ ID NO: 104923 - DNA, 25 bp, Homo sapien
gaagtatttccaggcacgcatttcc

SEQ ID NO: 104924 - DNA, 25 bp, Homo sapien
cagttcatgcaatcaggtgtcccca

SEQ ID NO: 104925 - DNA, 25 bp, Homo sapien
tacaaggaagccagtagacatcact

SEQ ID NO: 104926 - DNA, 25 bp, Homo sapien
tatgccagattgcagaaaaggtttt

SEQ ID NO: 104927 - DNA, 25 bp, Homo sapien
catgcctgtggtggtcagttatcct

SEQ ID NO: 104928 - DNA, 25 bp, Homo sapien
cattggatggattagatctagtgac

SEQ ID NO: 104929 - DNA, 25 bp, Homo sapien
actcagtctagtaggcatgcctgtg

SEQ ID NO: 104930 - DNA, 25 bp, Homo sapien
cctgccatgtgtagctttttatgtg

SEQ ID NO: 104931 - DNA, 25 bp, Homo sapien
tggcactacaggcaacaagtgaaca

SEQ ID NO: 104932 - DNA, 25 bp, Homo sapien
gtgtgatagtagtcatctgattata

SEQ ID NO: 104933 - DNA, 25 bp, Homo sapien
gccacgtgtcctgccatgtgtagct

SEQ ID NO: 104934 - DNA, 25 bp, Homo sapien
tgtcaagttaacatccagttctact

SEQ ID NO: 104935 - DNA, 25 bp, Homo sapien
cctactggtgtgaatatggagtcaa

SEQ ID NO: 104936 - DNA, 25 bp, Homo sapien
gaattataagatgtcacatgtcaag

SEQ ID NO: 104937 - DNA, 25 bp, Homo sapien
gtgataacctcataacctctgtagt

SEQ ID NO: 104938 - DNA, 25 bp, Homo sapien
gaaaatgattttaggacgggcgcag

SEQ ID NO: 104939 - DNA, 25 bp, Homo sapien
aaaatgattttaggacgggcgcagt

SEQ ID NO: 104940 - DNA, 25 bp, Homo sapien
aaatgattttaggacgggcgcagtg

SEQ ID NO: 104941 - DNA, 25 bp, Homo sapien
tggaaaatgattttaggacgggcgc

SEQ ID NO: 104942 - DNA, 25 bp, Homo sapien
caaatactgaggtttgttgactgag

SEQ ID NO: 104943 - DNA, 25 bp, Homo sapien
ttaatgacagggcatacagtcagcc

SEQ ID NO: 104944 - DNA, 25 bp, Homo sapien
cacgggttctacatccacagatcca

SEQ ID NO: 104945 - DNA, 25 bp, Homo sapien
ggaaccaatcctctacaaatactga

SEQ ID NO: 104946 - DNA, 25 bp, Homo sapien
tgaaatgcactggttactggcataa

SEQ ID NO: 104947 - DNA, 25 bp, Homo sapien
gaacattagttatgttagctacacg

SEQ ID NO: 104948 - DNA, 25 bp, Homo sapien
tattgaagaataataagacctgttc

SEQ ID NO: 104949 - DNA, 25 bp, Homo sapien
actagtattgttgagactgggctac

SEQ ID NO: 104950 - DNA, 25 bp, Homo sapien
aaacttgacgtttcatcaatggcaa

SEQ ID NO: 104951 - DNA, 25 bp, Homo sapien
ggaaacttgacgtttcatcaatggc

SEQ ID NO: 104952 - DNA, 25 bp, Homo sapien
atgttaggaaacttgacgtttcatc

SEQ ID NO: 104953 - DNA, 25 bp, Homo sapien
catttccaaaaatttggtagattgc

SEQ ID NO: 104954 - DNA, 25 bp, Homo sapien
aaatggcccccgtctgagccctaga

SEQ ID NO: 104955 - DNA, 25 bp, Homo sapien
aggcagcctctggcaaaatggcccc

SEQ ID NO: 104956 - DNA, 25 bp, Homo sapien
tgccgtctccaaagggctcgatgga

SEQ ID NO: 104957 - DNA, 25 bp, Homo sapien
ggaagaaaccattgccgtctccaaa

SEQ ID NO: 104958 - DNA, 25 bp, Homo sapien
tctaaagctgcttggcgtaccctgc

SEQ ID NO: 104959 - DNA, 25 bp, Homo sapien
gaagctctaagtcgggcatcggtac

SEQ ID NO: 104960 - DNA, 25 bp, Homo sapien
gaagctgctataactggtcccaaga

SEQ ID NO: 104961 - DNA, 25 bp, Homo sapien
tccaggcggcgattgtagtgtctcc

SEQ ID NO: 104962 - DNA, 25 bp, Homo sapien
tcacactttcgactcaagaaaatta

SEQ ID NO: 104963 - DNA, 25 bp, Homo sapien
tgttaactgctaattcccaggtctg

SEQ ID NO: 104964 - DNA, 25 bp, Homo sapien
tcctatactgtgtgaaactggcctc

SEQ ID NO: 104965 - DNA, 25 bp, Homo sapien
gcataacatgtttccctcaagcagg

SEQ ID NO: 104966 - DNA, 25 bp, Homo sapien
tatctggcacgtactaggtattcaa

SEQ ID NO: 104967 - DNA, 25 bp, Homo sapien
tccttggttctgtccactgaaaggg

SEQ ID NO: 104968 - DNA, 25 bp, Homo sapien
tggttctgtccactgaaagggtcaa

SEQ ID NO: 104969 - DNA, 25 bp, Homo sapien
ggttctgtccactgaaagggtcaaa

SEQ ID NO: 104970 - DNA, 25 bp, Homo sapien
cttggttctgtccactgaaagggtc

SEQ ID NO: 104971 - DNA, 25 bp, Homo sapien
ctctctctcgttctgtatgtcattc

SEQ ID NO: 104972 - DNA, 25 bp, Homo sapien
tcgttctgtatgtcattcactggac

SEQ ID NO: 104973 - DNA, 25 bp, Homo sapien
tctcgttctgtatgtcattcactgg

SEQ ID NO: 104974 - DNA, 25 bp, Homo sapien
tctctcgttctgtatgtcattcact

SEQ ID NO: 104975 - DNA, 25 bp, Homo sapien
gaatccactaaatagcagaaacaaa

SEQ ID NO: 104976 - DNA, 25 bp, Homo sapien
gatttacttgatgccactaacccat

SEQ ID NO: 104977 - DNA, 25 bp, Homo sapien
caatctgtaatatgtcagagcacaa

SEQ ID NO: 104978 - DNA, 25 bp, Homo sapien
aatggtagccagctaatgatgtctg

SEQ ID NO: 104979 - DNA, 25 bp, Homo sapien
tacataccggtagtagcttctacat

SEQ ID NO: 104980 - DNA, 25 bp, Homo sapien
gattaacccataccaaacacattag

SEQ ID NO: 104981 - DNA, 25 bp, Homo sapien
tacatagctctgacataagcaacat

SEQ ID NO: 104982 - DNA, 25 bp, Homo sapien
taagcaacatttacactaagagtag

SEQ ID NO: 104983 - DNA, 25 bp, Homo sapien
ggtgagttcacaaaaatggatatat

SEQ ID NO: 104984 - DNA, 25 bp, Homo sapien
tccatgtttgtatgtgtctaaagat

SEQ ID NO: 104985 - DNA, 25 bp, Homo sapien
gaaatggtgagttcacaaaaatgga

SEQ ID NO: 104986 - DNA, 25 bp, Homo sapien
gatatggatattctcactttcttac

SEQ ID NO: 104987 - DNA, 25 bp, Homo sapien
gatgacctcaattgtcccggatcac

SEQ ID NO: 104988 - DNA, 25 bp, Homo sapien
taaactttgccaattatcaaatggc

SEQ ID NO: 104989 - DNA, 25 bp, Homo sapien
tgcattgacaggaaattatgcttcc

SEQ ID NO: 104990 - DNA, 25 bp, Homo sapien
tatgcctcaggtacacgttatttat

SEQ ID NO: 104991 - DNA, 25 bp, Homo sapien
tgcagatgggatgaaatcatatgtt

SEQ ID NO: 104992 - DNA, 25 bp, Homo sapien
ttgcagatgggatgaaatcatatgt

SEQ ID NO: 104993 - DNA, 25 bp, Homo sapien
aaaatcccgactattctgaaataag

SEQ ID NO: 104994 - DNA, 25 bp, Homo sapien
aagtttcttgatactctttttctgc

SEQ ID NO: 104995 - DNA, 25 bp, Homo sapien
tctgaaataagtttcttgatactct

SEQ ID NO: 104996 - DNA, 25 bp, Homo sapien
caatctgggttaaaatcccgactat

SEQ ID NO: 104997 - DNA, 25 bp, Homo sapien
aaacataactggacatattcttgca

SEQ ID NO: 104998 - DNA, 25 bp, Homo sapien
gaatctgtacaattaggaaatgagc

SEQ ID NO: 104999 - DNA, 25 bp, Homo sapien
aattaggaaatgagctcctcaatgg

SEQ ID NO: 105000 - DNA, 25 bp, Homo sapien
cataactggacatattcttgcattt

SEQ ID NO: 105001 - DNA, 25 bp, Homo sapien
taggaattgtaagtcagaacccaca

SEQ ID NO: 105002 - DNA, 25 bp, Homo sapien
gatgactgctagttgtccctaggaa

SEQ ID NO: 105003 - DNA, 25 bp, Homo sapien
tttgtttgatgagtcccagtagtac

SEQ ID NO: 105004 - DNA, 25 bp, Homo sapien
cacatatttgtgaaaatccaagttg

SEQ ID NO: 105005 - DNA, 25 bp, Homo sapien
cacctggtgtggatcactacaatat

SEQ ID NO: 105006 - DNA, 25 bp, Homo sapien
caggaacaggttaagtggcacagca

SEQ ID NO: 105007 - DNA, 25 bp, Homo sapien
tgttttgcatccataccataggtcc

SEQ ID NO: 105008 - DNA, 25 bp, Homo sapien
ctaagagtggatagtcctcaaaggc

SEQ ID NO: 105009 - DNA, 25 bp, Homo sapien
ccatttgaggaagtacactctgttt

SEQ ID NO: 105010 - DNA, 25 bp, Homo sapien
ttttgaccatttgaggaagtacact

SEQ ID NO: 105011 - DNA, 25 bp, Homo sapien
gtttgctgtgtcttactgccaaaat

SEQ ID NO: 105012 - DNA, 25 bp, Homo sapien
ctctgtttgactaccaaatgtttgc

SEQ ID NO: 105013 - DNA, 25 bp, Homo sapien
tatgctttggactagttcgaggtga

SEQ ID NO: 105014 - DNA, 25 bp, Homo sapien
aagcttttaagaggccaggaatttg

SEQ ID NO: 105015 - DNA, 25 bp, Homo sapien
acttggctttgatagtccttcgaag

SEQ ID NO: 105016 - DNA, 25 bp, Homo sapien
taataagaggagatgtatgctttgg

SEQ ID NO: 105017 - DNA, 25 bp, Homo sapien
aagatggcgatctcaccaaggcagg

SEQ ID NO: 105018 - DNA, 25 bp, Homo sapien
agatggcgatctcaccaaggcaggt

SEQ ID NO: 105019 - DNA, 25 bp, Homo sapien
tccccttggtatgggaggaacaggc

SEQ ID NO: 105020 - DNA, 25 bp, Homo sapien
tctgaaagatcaattggaagactat

SEQ ID NO: 105021 - DNA, 25 bp, Homo sapien
tgtgtcccactgtgcttaaatcagc

SEQ ID NO: 105022 - DNA, 25 bp, Homo sapien
tttatcaggcaaaaggcttattccc

SEQ ID NO: 105023 - DNA, 25 bp, Homo sapien
tccttaaatagcaactatattatag

SEQ ID NO: 105024 - DNA, 25 bp, Homo sapien
cccttcctactaattcatggtattt

SEQ ID NO: 105025 - DNA, 25 bp, Homo sapien
ctggcgtgataaattcccttcctac

SEQ ID NO: 105026 - DNA, 25 bp, Homo sapien
aattattctggtagtgggaactggc

SEQ ID NO: 105027 - DNA, 25 bp, Homo sapien
tatgacaaactgttcactggaaggg

SEQ ID NO: 105028 - DNA, 25 bp, Homo sapien
aaatgaattcccttcctagcactag

SEQ ID NO: 105029 - DNA, 25 bp, Homo sapien
tagggccacttctctattaaaagcg

SEQ ID NO: 105030 - DNA, 25 bp, Homo sapien
tactttctgaccctgagcaagacac

SEQ ID NO: 105031 - DNA, 25 bp, Homo sapien
gaagtactgccactcagttttgctc

SEQ ID NO: 105032 - DNA, 25 bp, Homo sapien
ttagctgcactattacgaagggacc

SEQ ID NO: 105033 - DNA, 25 bp, Homo sapien
agtccatcgtcaagtcgagcttcat

SEQ ID NO: 105034 - DNA, 25 bp, Homo sapien
cagaatcagggctttcaagatctga

SEQ ID NO: 105035 - DNA, 25 bp, Homo sapien
gggagttgtagacagagaagaagtc

SEQ ID NO: 105036 - DNA, 25 bp, Homo sapien
tcccctggggagttgtagacagaga

SEQ ID NO: 105037 - DNA, 25 bp, Homo sapien
cccctggggagttgtagacagagaa

SEQ ID NO: 105038 - DNA, 25 bp, Homo sapien
agttgtagacagagaagaagtcaat

SEQ ID NO: 105039 - DNA, 25 bp, Homo sapien
aacattaagatttagtgctgttcaa

SEQ ID NO: 105040 - DNA, 25 bp, Homo sapien
caataaacattaagatttagtgctg

SEQ ID NO: 105041 - DNA, 25 bp, Homo sapien
gctgttcaatactcacatcacatat

SEQ ID NO: 105042 - DNA, 25 bp, Homo sapien
gatttagtgctgttcaatactcaca

SEQ ID NO: 105043 - DNA, 25 bp, Homo sapien
tggggctttgttcagcaatatgaga

SEQ ID NO: 105044 - DNA, 25 bp, Homo sapien
actggggctttgttcagcaatatga

SEQ ID NO: 105045 - DNA, 25 bp, Homo sapien
ctggggctttgttcagcaatatgag

SEQ ID NO: 105046 - DNA, 25 bp, Homo sapien
gaccagatcatgaaagcatgtccag

SEQ ID NO: 105047 - DNA, 25 bp, Homo sapien
gaatcacatgcagttctcaccctaa

SEQ ID NO: 105048 - DNA, 25 bp, Homo sapien
tccagaatgaattcaggctggccag

SEQ ID NO: 105049 - DNA, 25 bp, Homo sapien
ggctggccagtatagtcagatttgc

SEQ ID NO: 105050 - DNA, 25 bp, Homo sapien
aatgcatataaagggctccgcacag

SEQ ID NO: 105051 - DNA, 25 bp, Homo sapien
caagtcactcaaccttatttgtaaa

SEQ ID NO: 105052 - DNA, 25 bp, Homo sapien
gtatctggaatcatgcttcctggct

SEQ ID NO: 105053 - DNA, 25 bp, Homo sapien
ctgctgagaagacctggacaagtca

SEQ ID NO: 105054 - DNA, 25 bp, Homo sapien
tgaccaattatgcttacactggatg

SEQ ID NO: 105055 - DNA, 25 bp, Homo sapien
ccaattatgcttacactggatgttg

SEQ ID NO: 105056 - DNA, 25 bp, Homo sapien
tatgcttacactggatgttgtaaac

SEQ ID NO: 105057 - DNA, 25 bp, Homo sapien
atgttgaccaattatgcttacactg

SEQ ID NO: 105058 - DNA, 25 bp, Homo sapien
tatcaagtgacctatcgtcttcaaa

SEQ ID NO: 105059 - DNA, 25 bp, Homo sapien
tcaccacatccaaacctatggttca

SEQ ID NO: 105060 - DNA, 25 bp, Homo sapien
tgtcttgggtattgttcattttgta

SEQ ID NO: 105061 - DNA, 25 bp, Homo sapien
ctaacgcgctagatgaaatatcaag

SEQ ID NO: 105062 - DNA, 25 bp, Homo sapien
tccatgcccacgcagcaatatggag

SEQ ID NO: 105063 - DNA, 25 bp, Homo sapien
ccatgcccacgcagcaatatggaga

SEQ ID NO: 105064 - DNA, 25 bp, Homo sapien
agtcctccatgcccacgcagcaata

SEQ ID NO: 105065 - DNA, 25 bp, Homo sapien
cctccatgcccacgcagcaatatgg

SEQ ID NO: 105066 - DNA, 25 bp, Homo sapien
gcttattatgtagtatcttaggata

SEQ ID NO: 105067 - DNA, 25 bp, Homo sapien
tttacaatttattcacacgttcatt

SEQ ID NO: 105068 - DNA, 25 bp, Homo sapien
ctagaatggactaggcacttaaacc

SEQ ID NO: 105069 - DNA, 25 bp, Homo sapien
cacacgttcattaagtcattataaa

SEQ ID NO: 105070 - DNA, 25 bp, Homo sapien
aaagcctttgtggttgtgaagtcaa

SEQ ID NO: 105071 - DNA, 25 bp, Homo sapien
cctttgtggttgtgaagtcaaaact

SEQ ID NO: 105072 - DNA, 25 bp, Homo sapien
tctgataaagcctttgtggttgtga

SEQ ID NO: 105073 - DNA, 25 bp, Homo sapien
actgagtcttctgataaagcctttg

SEQ ID NO: 105074 - DNA, 25 bp, Homo sapien
gctgtagccaatctgaggagggttt

SEQ ID NO: 105075 - DNA, 25 bp, Homo sapien
cacttgtctagatcttgtatgggag

SEQ ID NO: 105076 - DNA, 25 bp, Homo sapien
tagaagtacctaaactgcagctgtc

SEQ ID NO: 105077 - DNA, 25 bp, Homo sapien
tacgctgataaataagggctacttg

SEQ ID NO: 105078 - DNA, 25 bp, Homo sapien
aatattttgctggactgatcttcca

SEQ ID NO: 105079 - DNA, 25 bp, Homo sapien
gctggtgctgaacttaaacttccaa

SEQ ID NO: 105080 - DNA, 25 bp, Homo sapien
aaatccctgatggtggttcaatact

SEQ ID NO: 105081 - DNA, 25 bp, Homo sapien
cacagaagatatcactgattggctg

SEQ ID NO: 105082 - DNA, 25 bp, Homo sapien
ggcacgcatggctgtagctacattt

SEQ ID NO: 105083 - DNA, 25 bp, Homo sapien
aagtccgaccgtccgagctcaagtg

SEQ ID NO: 105084 - DNA, 25 bp, Homo sapien
aaataggctctctactttctcgggc

SEQ ID NO: 105085 - DNA, 25 bp, Homo sapien
tgggcccataggcacgcatggctgt

SEQ ID NO: 105086 - DNA, 25 bp, Homo sapien
tgtctcattcgttcccaggaatttt

SEQ ID NO: 105087 - DNA, 25 bp, Homo sapien
tcctgtatgtctcattcgttcccag

SEQ ID NO: 105088 - DNA, 25 bp, Homo sapien
ttttgtctcatcttgttataagtag

SEQ ID NO: 105089 - DNA, 25 bp, Homo sapien
tctcagttcctgtatgtctcattcg

SEQ ID NO: 105090 - DNA, 25 bp, Homo sapien
ttttccagatgtaaggcactgtact

SEQ ID NO: 105091 - DNA, 25 bp, Homo sapien
tctatcgatatagaattagtggcct

SEQ ID NO: 105092 - DNA, 25 bp, Homo sapien
cactgtactataagctgagaaaaca

SEQ ID NO: 105093 - DNA, 25 bp, Homo sapien
agacattgaccaagcattttccaga

SEQ ID NO: 105094 - DNA, 25 bp, Homo sapien
attaaataaactatgagagaacctt

SEQ ID NO: 105095 - DNA, 25 bp, Homo sapien
tacattaaataaactatgagagaac

SEQ ID NO: 105096 - DNA, 25 bp, Homo sapien
aatacattaaataaactatgagaga

SEQ ID NO: 105097 - DNA, 25 bp, Homo sapien
tagggtgcagtagtacgatcttagc

SEQ ID NO: 105098 - DNA, 25 bp, Homo sapien
tctggactatgagtgacagaaggca

SEQ ID NO: 105099 - DNA, 25 bp, Homo sapien
tggtttagagaatggtcgtagttct

SEQ ID NO: 105100 - DNA, 25 bp, Homo sapien
tatactgtgaaatagctccagtagg

SEQ ID NO: 105101 - DNA, 25 bp, Homo sapien
tcagccaaaagcctcagggcttctg

SEQ ID NO: 105102 - DNA, 25 bp, Homo sapien
cgctgaaacacgtgggatgcacatt

SEQ ID NO: 105103 - DNA, 25 bp, Homo sapien
ggttggctgctatcactacaatagg

SEQ ID NO: 105104 - DNA, 25 bp, Homo sapien
ggccagagttcagctacattaatga

SEQ ID NO: 105105 - DNA, 25 bp, Homo sapien
aaaggcagtaagtggatgctcccgc

SEQ ID NO: 105106 - DNA, 25 bp, Homo sapien
gttttatagaaacacagctatgccc

SEQ ID NO: 105107 - DNA, 25 bp, Homo sapien
gaaagactgcccttgagctacaaaa

SEQ ID NO: 105108 - DNA, 25 bp, Homo sapien
gcctattacctggatctttacagaa

SEQ ID NO: 105109 - DNA, 25 bp, Homo sapien
gctatgcccatttgtttagataccg

SEQ ID NO: 105110 - DNA, 25 bp, Homo sapien
aagcatctaataaaattcagtccct

SEQ ID NO: 105111 - DNA, 25 bp, Homo sapien
gaatgaaaagcagctaagcatctaa

SEQ ID NO: 105112 - DNA, 25 bp, Homo sapien
aaaatttgtttcatgcaactttgtg

SEQ ID NO: 105113 - DNA, 25 bp, Homo sapien
ctttgtgttcagtatctcagaatga

SEQ ID NO: 105114 - DNA, 25 bp, Homo sapien
ttactgtggtatctagctcttgatc

SEQ ID NO: 105115 - DNA, 25 bp, Homo sapien
gattcaccagccttgtgcaacaaaa

SEQ ID NO: 105116 - DNA, 25 bp, Homo sapien
gcagcacgagaaactccagaacgta

SEQ ID NO: 105117 - DNA, 25 bp, Homo sapien
gcacgtgcaggagttacattattaa

SEQ ID NO: 105118 - DNA, 25 bp, Homo sapien
cctttgctgcagataaaatacgttc

SEQ ID NO: 105119 - DNA, 25 bp, Homo sapien
tagcagcagctggtaatatgcgttc

SEQ ID NO: 105120 - DNA, 25 bp, Homo sapien
tatgcgttcagccatatcctttgct

SEQ ID NO: 105121 - DNA, 25 bp, Homo sapien
gtgaactgtcttgagcaaacttagc

SEQ ID NO: 105122 - DNA, 25 bp, Homo sapien
gaattcactgtgcactccctcaaga

SEQ ID NO: 105123 - DNA, 25 bp, Homo sapien
tctcactacccagaagtatgtagtg

SEQ ID NO: 105124 - DNA, 25 bp, Homo sapien
ccagaagtatgtagtgtcatctgta

SEQ ID NO: 105125 - DNA, 25 bp, Homo sapien
tggttaaataagaccatcccccagc

SEQ ID NO: 105126 - DNA, 25 bp, Homo sapien
catttgctgtccacctactgggcgg

SEQ ID NO: 105127 - DNA, 25 bp, Homo sapien
tcagtcttataaccacaaggaattg

SEQ ID NO: 105128 - DNA, 25 bp, Homo sapien
tctgaaaccataggcagtgaactga

SEQ ID NO: 105129 - DNA, 25 bp, Homo sapien
gatgttctggcctgagtcaaccctc

SEQ ID NO: 105130 - DNA, 25 bp, Homo sapien
tgctgtaagtttctaacagagtcct

SEQ ID NO: 105131 - DNA, 25 bp, Homo sapien
tttcaaagttaggatgacacatcat

SEQ ID NO: 105132 - DNA, 25 bp, Homo sapien
tctttagatgggacatacttttcaa

SEQ ID NO: 105133 - DNA, 25 bp, Homo sapien
cagagtccttaatatatggcaaatc

SEQ ID NO: 105134 - DNA, 25 bp, Homo sapien
atgagatcgtcttccttttgctgaa

SEQ ID NO: 105135 - DNA, 25 bp, Homo sapien
caacactgccagtatgagatcgtct

SEQ ID NO: 105136 - DNA, 25 bp, Homo sapien
aaggagtatctaatggtatctcccc

SEQ ID NO: 105137 - DNA, 25 bp, Homo sapien
acagatgatgatcttgtatttccaa

SEQ ID NO: 105138 - DNA, 25 bp, Homo sapien
tatatagtaggtgaattacgtctcc

SEQ ID NO: 105139 - DNA, 25 bp, Homo sapien
tacgtctccgtaacactgtaattta

SEQ ID NO: 105140 - DNA, 25 bp, Homo sapien
ctaacatagacttcaggacaaagaa

SEQ ID NO: 105141 - DNA, 25 bp, Homo sapien
gatcctaagttggacaccatgtgta

SEQ ID NO: 105142 - DNA, 25 bp, Homo sapien
tttgaaactaaagagtcatgcaaag

SEQ ID NO: 105143 - DNA, 25 bp, Homo sapien
gacacccctgtttagatgatcatcc

SEQ ID NO: 105144 - DNA, 25 bp, Homo sapien
ggtaggttggttggtcaatctgtct

SEQ ID NO: 105145 - DNA, 25 bp, Homo sapien
tcactgcaagtaagctcaatgtaag

SEQ ID NO: 105146 - DNA, 25 bp, Homo sapien
cctataaaaactattatacaaacat

SEQ ID NO: 105147 - DNA, 25 bp, Homo sapien
ttaaaaatctcattatgcattcatt

SEQ ID NO: 105148 - DNA, 25 bp, Homo sapien
taatttcatttgtactttcctataa

SEQ ID NO: 105149 - DNA, 25 bp, Homo sapien
tgaaagaaaggtgaaggtaatttca

SEQ ID NO: 105150 - DNA, 25 bp, Homo sapien
taatacgatcacgaaagtcttttgc

SEQ ID NO: 105151 - DNA, 25 bp, Homo sapien
tacgagggactgattttctggtgac

SEQ ID NO: 105152 - DNA, 25 bp, Homo sapien
taagccagttatgagtttaaggtac

SEQ ID NO: 105153 - DNA, 25 bp, Homo sapien
ggtgacttcacgaacttcagttaca

SEQ ID NO: 105154 - DNA, 25 bp, Homo sapien
atatttccctttcttttgcttattg

SEQ ID NO: 105155 - DNA, 25 bp, Homo sapien
tccctttcttttgcttattgtcttc

SEQ ID NO: 105156 - DNA, 25 bp, Homo sapien
atttataagtatcttggcatgtcat

SEQ ID NO: 105157 - DNA, 25 bp, Homo sapien
tatttataagtatcttggcatgtca

SEQ ID NO: 105158 - DNA, 25 bp, Homo sapien
tgtatttataagtatcttggcatgt

SEQ ID NO: 105159 - DNA, 25 bp, Homo sapien
gtatttataagtatcttggcatgtc

SEQ ID NO: 105160 - DNA, 25 bp, Homo sapien
tccactattgctggaattagcatgt

SEQ ID NO: 105161 - DNA, 25 bp, Homo sapien
gaacaacatttgtagcagccgcata

SEQ ID NO: 105162 - DNA, 25 bp, Homo sapien
tctaagtagaggaatcattttgtgc

SEQ ID NO: 105163 - DNA, 25 bp, Homo sapien
tcatgaagtcgagatttaaaagcat

SEQ ID NO: 105164 - DNA, 25 bp, Homo sapien
tgagcttttgtgcaaaatggctgta

SEQ ID NO: 105165 - DNA, 25 bp, Homo sapien
gcaagcttttccgtcatgtcctgtt

SEQ ID NO: 105166 - DNA, 25 bp, Homo sapien
agcaagcttttccgtcatgtcctgt

SEQ ID NO: 105167 - DNA, 25 bp, Homo sapien
aagcttttccgtcatgtcctgtttt

SEQ ID NO: 105168 - DNA, 25 bp, Homo sapien
acaataatgtatggggtaaaagtct

SEQ ID NO: 105169 - DNA, 25 bp, Homo sapien
taagttggtagctatcctaaaatta

SEQ ID NO: 105170 - DNA, 25 bp, Homo sapien
ctcttgtggatcattacacaattta

SEQ ID NO: 105171 - DNA, 25 bp, Homo sapien
ttgtgggtagctatattaagttggt

SEQ ID NO: 105172 - DNA, 25 bp, Homo sapien
tttctactagatactcctttgcatt

SEQ ID NO: 105173 - DNA, 25 bp, Homo sapien
tctactagatactcctttgcattgc

SEQ ID NO: 105174 - DNA, 25 bp, Homo sapien
ttctttctactagatactcctttgc

SEQ ID NO: 105175 - DNA, 25 bp, Homo sapien
tccttctttctactagatactcctt

SEQ ID NO: 105176 - DNA, 25 bp, Homo sapien
tgtacacagttttaacccatggacc

SEQ ID NO: 105177 - DNA, 25 bp, Homo sapien
taaataagcccaagctctgctaaat

SEQ ID NO: 105178 - DNA, 25 bp, Homo sapien
caattagttcatgcaaaagtggtaa

SEQ ID NO: 105179 - DNA, 25 bp, Homo sapien
ggaccttttatcaaacatgactttg

SEQ ID NO: 105180 - DNA, 25 bp, Homo sapien
gctctgtggcatgcggcttcctttg

SEQ ID NO: 105181 - DNA, 25 bp, Homo sapien
gccataaaacaaccaacactttctg

SEQ ID NO: 105182 - DNA, 25 bp, Homo sapien
ggcagagagccactatttgtcatat

SEQ ID NO: 105183 - DNA, 25 bp, Homo sapien
tagctgtggctgttcgtatatttcc

SEQ ID NO: 105184 - DNA, 25 bp, Homo sapien
catttaaaattgtcatatcgagtaa

SEQ ID NO: 105185 - DNA, 25 bp, Homo sapien
gagatgcagcctgatttaacagatt

SEQ ID NO: 105186 - DNA, 25 bp, Homo sapien
tgtcatatcgagtaattcctccaaa

SEQ ID NO: 105187 - DNA, 25 bp, Homo sapien
atatgtggtggttgagatgcagcct

SEQ ID NO: 105188 - DNA, 25 bp, Homo sapien
gacagatgtgtactcataggctgca

SEQ ID NO: 105189 - DNA, 25 bp, Homo sapien
tcatcccatgtgactcagatttcat

SEQ ID NO: 105190 - DNA, 25 bp, Homo sapien
taagtggtaaggttgatataggaca

SEQ ID NO: 105191 - DNA, 25 bp, Homo sapien
atagtgcaaatgagcaggacttttc

SEQ ID NO: 105192 - DNA, 25 bp, Homo sapien
gaagacctggcactatttttgagaa

SEQ ID NO: 105193 - DNA, 25 bp, Homo sapien
tactgcacaatcatattagcggact

SEQ ID NO: 105194 - DNA, 25 bp, Homo sapien
gagaaatgagacataccagaacatg

SEQ ID NO: 105195 - DNA, 25 bp, Homo sapien
tacttgtaagcccatgaattctgaa

SEQ ID NO: 105196 - DNA, 25 bp, Homo sapien
tcatagagatgagtgcctcaaagtc

SEQ ID NO: 105197 - DNA, 25 bp, Homo sapien
gaaaatgccgtatatagacactgtg

SEQ ID NO: 105198 - DNA, 25 bp, Homo sapien
tctgatatcatcaagccattggcat

SEQ ID NO: 105199 - DNA, 25 bp, Homo sapien
gaggaagctgccgtcttataatcag

SEQ ID NO: 105200 - DNA, 25 bp, Homo sapien
tgaaggtaaccctctcaatataact

SEQ ID NO: 105201 - DNA, 25 bp, Homo sapien
tttggagattgacccttatagaccg

SEQ ID NO: 105202 - DNA, 25 bp, Homo sapien
agatcaacagatcatccaccctgct

SEQ ID NO: 105203 - DNA, 25 bp, Homo sapien
cctggtttctggttgagtatggcca

SEQ ID NO: 105204 - DNA, 25 bp, Homo sapien
acttttttggattctctgacagtgt

SEQ ID NO: 105205 - DNA, 25 bp, Homo sapien
aacttttttggattctctgacagtg

SEQ ID NO: 105206 - DNA, 25 bp, Homo sapien
cacttaccatgtaatctgttgttcc

SEQ ID NO: 105207 - DNA, 25 bp, Homo sapien
taccatgtaatctgttgttccaggt

SEQ ID NO: 105208 - DNA, 25 bp, Homo sapien
tgttccaggtgcattagtattacta

SEQ ID NO: 105209 - DNA, 25 bp, Homo sapien
cattagtattactactgggctccaa

SEQ ID NO: 105210 - DNA, 25 bp, Homo sapien
acggccgcctggtccagggcacgat

SEQ ID NO: 105211 - DNA, 25 bp, Homo sapien
ccagggcacgatgcgcatgcgtcag

SEQ ID NO: 105212 - DNA, 25 bp, Homo sapien
cctggtccagggcacgatgcgcatg

SEQ ID NO: 105213 - DNA, 25 bp, Homo sapien
gcacgatgcgcatgcgtcagtgtcc

SEQ ID NO: 105214 - DNA, 25 bp, Homo sapien
tgagccggagcctgtgacgacctag

SEQ ID NO: 105215 - DNA, 25 bp, Homo sapien
cttatgatggatgccacttgatgcc

SEQ ID NO: 105216 - DNA, 25 bp, Homo sapien
tatgatggatgccacttgatgccat

SEQ ID NO: 105217 - DNA, 25 bp, Homo sapien
tgtgacgacctagccgaagatggca

SEQ ID NO: 105218 - DNA, 25 bp, Homo sapien
gctcagagagtagttgttttcataa

SEQ ID NO: 105219 - DNA, 25 bp, Homo sapien
attgtcctaagaaatgccatcatca

SEQ ID NO: 105220 - DNA, 25 bp, Homo sapien
tgctcagagagtagttgttttcata

SEQ ID NO: 105221 - DNA, 25 bp, Homo sapien
ttttcataattaatccaaaattgtc

SEQ ID NO: 105222 - DNA, 25 bp, Homo sapien
aaagtgctaagactgctcattgagg

SEQ ID NO: 105223 - DNA, 25 bp, Homo sapien
gaaagggtacagaatagctatcaaa

SEQ ID NO: 105224 - DNA, 25 bp, Homo sapien
caagtaggccgatcacccatgagtt

SEQ ID NO: 105225 - DNA, 25 bp, Homo sapien
aagggatcgtctcttcaaatggtgc

SEQ ID NO: 105226 - DNA, 25 bp, Homo sapien
acgcaccaccatgcccagctaattt

SEQ ID NO: 105227 - DNA, 25 bp, Homo sapien
cacgcaccaccatgcccagctaatt

SEQ ID NO: 105228 - DNA, 25 bp, Homo sapien
gctcactgcagccctcgccttccgg

SEQ ID NO: 105229 - DNA, 25 bp, Homo sapien
actgcagccctcgccttccgggttc

SEQ ID NO: 105230 - DNA, 25 bp, Homo sapien
ctctgaactgttgcctgtgctgcca

SEQ ID NO: 105231 - DNA, 25 bp, Homo sapien
gaagcaaatatacccagcctgtaaa

SEQ ID NO: 105232 - DNA, 25 bp, Homo sapien
cacattgggagagtcatcaggtgac

SEQ ID NO: 105233 - DNA, 25 bp, Homo sapien
tgtcagcgtcactggaaggtccaca

SEQ ID NO: 105234 - DNA, 25 bp, Homo sapien
tgtagctacctaatgttattcaact

SEQ ID NO: 105235 - DNA, 25 bp, Homo sapien
ttaatgacttgattaatttgtccct

SEQ ID NO: 105236 - DNA, 25 bp, Homo sapien
aatcataaacaataaggtctactgt

SEQ ID NO: 105237 - DNA, 25 bp, Homo sapien
tgattaatttgtcccttctgatacc

SEQ ID NO: 105238 - DNA, 25 bp, Homo sapien
ttatttcagcaattttacacacaca

SEQ ID NO: 105239 - DNA, 25 bp, Homo sapien
tttttatttcagcaattttacacac

SEQ ID NO: 105240 - DNA, 25 bp, Homo sapien
tgccaactttttatttcagcaattt

SEQ ID NO: 105241 - DNA, 25 bp, Homo sapien
ttgccaactttttatttcagcaatt

SEQ ID NO: 105242 - DNA, 25 bp, Homo sapien
tgtggaaatttctgtcaaaaaaata

SEQ ID NO: 105243 - DNA, 25 bp, Homo sapien
tatttaaatattgtggaaatttctg

SEQ ID NO: 105244 - DNA, 25 bp, Homo sapien
taaatattgtggaaatttctgtcaa

SEQ ID NO: 105245 - DNA, 25 bp, Homo sapien
tattgtggaaatttctgtcaaaaaa

SEQ ID NO: 105246 - DNA, 25 bp, Homo sapien
cgtgccgcttttcaaggtctgcata

SEQ ID NO: 105247 - DNA, 25 bp, Homo sapien
tcatctgatggtttaatgttgtcgt

SEQ ID NO: 105248 - DNA, 25 bp, Homo sapien
tccagtaaccatagcaatacggata

SEQ ID NO: 105249 - DNA, 25 bp, Homo sapien
tagcaatacggatagtgtatgaaaa

SEQ ID NO: 105250 - DNA, 25 bp, Homo sapien
taagtttattcagtgatgtacgcac

SEQ ID NO: 105251 - DNA, 25 bp, Homo sapien
tacctattggagataagtttattca

SEQ ID NO: 105252 - DNA, 25 bp, Homo sapien
gataagtttattcagtgatgtacgc

SEQ ID NO: 105253 - DNA, 25 bp, Homo sapien
agtacctattggagataagtttatt

SEQ ID NO: 105254 - DNA, 25 bp, Homo sapien
aatgccacaagagtgacaaatgcaa

SEQ ID NO: 105255 - DNA, 25 bp, Homo sapien
aatggtaggtactgccagccaaaaa

SEQ ID NO: 105256 - DNA, 25 bp, Homo sapien
gaaaatattagctacaaatgccaca

SEQ ID NO: 105257 - DNA, 25 bp, Homo sapien
gaccataaatggtaggtactgccag

SEQ ID NO: 105258 - DNA, 25 bp, Homo sapien
gtaatacagaggcttgcactgcaaa

SEQ ID NO: 105259 - DNA, 25 bp, Homo sapien
ttgttaagctgcagtgtaatacaga

SEQ ID NO: 105260 - DNA, 25 bp, Homo sapien
gacaaactgtagaggtttaacgcac

SEQ ID NO: 105261 - DNA, 25 bp, Homo sapien
ctgcaaagcttgacaaactgtagag

SEQ ID NO: 105262 - DNA, 25 bp, Homo sapien
aagtgagagaaaagccctgccctac

SEQ ID NO: 105263 - DNA, 25 bp, Homo sapien
gaccaaaaatgcaataagacgtagc

SEQ ID NO: 105264 - DNA, 25 bp, Homo sapien
taagacgtagcaaatgtgactagca

SEQ ID NO: 105265 - DNA, 25 bp, Homo sapien
tgactagcaaaccaactatattgtt

SEQ ID NO: 105266 - DNA, 25 bp, Homo sapien
ggcacagacccattagagcatcaat

SEQ ID NO: 105267 - DNA, 25 bp, Homo sapien
ttacagaccatagggcacagaccca

SEQ ID NO: 105268 - DNA, 25 bp, Homo sapien
cccattagagcatcaatgacagcgt

SEQ ID NO: 105269 - DNA, 25 bp, Homo sapien
ggttacagaccatagggcacagacc

SEQ ID NO: 105270 - DNA, 25 bp, Homo sapien
tgatcttcaaagcgcagcagtccct

SEQ ID NO: 105271 - DNA, 25 bp, Homo sapien
ttgatcttcaaagcgcagcagtccc

SEQ ID NO: 105272 - DNA, 25 bp, Homo sapien
gatcttcaaagcgcagcagtccctg

SEQ ID NO: 105273 - DNA, 25 bp, Homo sapien
gggtggaggttggatagaacatggc

SEQ ID NO: 105274 - DNA, 25 bp, Homo sapien
tgggtggaggttggatagaacatgg

SEQ ID NO: 105275 - DNA, 25 bp, Homo sapien
tatccggtgaaccttagaaatacta

SEQ ID NO: 105276 - DNA, 25 bp, Homo sapien
actgtgttatccggtgaaccttaga

SEQ ID NO: 105277 - DNA, 25 bp, Homo sapien
ccttagaaatactaattactggaat

SEQ ID NO: 105278 - DNA, 25 bp, Homo sapien
tgttatccggtgaaccttagaaata

SEQ ID NO: 105279 - DNA, 25 bp, Homo sapien
tcaccagggtccaatgtttctttta

SEQ ID NO: 105280 - DNA, 25 bp, Homo sapien
ttgtattgtttgtctcaggatcacc

SEQ ID NO: 105281 - DNA, 25 bp, Homo sapien
tatccaaaggtcaacactaagaggt

SEQ ID NO: 105282 - DNA, 25 bp, Homo sapien
aagaggtattgcctgaagcccccgc

SEQ ID NO: 105283 - DNA, 25 bp, Homo sapien
tgagcaatcaagacataaacaaatt

SEQ ID NO: 105284 - DNA, 25 bp, Homo sapien
catggtaaaccaggatgagcaatca

SEQ ID NO: 105285 - DNA, 25 bp, Homo sapien
tcttaagcaatatgcacatgctttt

SEQ ID NO: 105286 - DNA, 25 bp, Homo sapien
ccaaaaacaagtacattagcaaact

SEQ ID NO: 105287 - DNA, 25 bp, Homo sapien
atatttataggtttttgatctctct

SEQ ID NO: 105288 - DNA, 25 bp, Homo sapien
gcaggggaggagcaattaaaaacca

SEQ ID NO: 105289 - DNA, 25 bp, Homo sapien
ttataggtttttgatctctctctct

SEQ ID NO: 105290 - DNA, 25 bp, Homo sapien
aaatgaaaagacagtatgatgaaaa

SEQ ID NO: 105291 - DNA, 25 bp, Homo sapien
cagctagaacagcatgctcaaaagt

SEQ ID NO: 105292 - DNA, 25 bp, Homo sapien
gcagctagaacagcatgctcaaaag

SEQ ID NO: 105293 - DNA, 25 bp, Homo sapien
agctagaacagcatgctcaaaagtt

SEQ ID NO: 105294 - DNA, 25 bp, Homo sapien
aatgatgactatacagctgtgttgg

SEQ ID NO: 105295 - DNA, 25 bp, Homo sapien
tatacagctgtgttggaataccaag

SEQ ID NO: 105296 - DNA, 25 bp, Homo sapien
tatatagctgtaacttctctcaggt

SEQ ID NO: 105297 - DNA, 25 bp, Homo sapien
atttcccacagtctgtcagaacgga

SEQ ID NO: 105298 - DNA, 25 bp, Homo sapien
ggttatgtcttcaattcccgatggt

SEQ ID NO: 105299 - DNA, 25 bp, Homo sapien
gttcaccagttaaaagatctctagg

SEQ ID NO: 105300 - DNA, 25 bp, Homo sapien
gaagctaattcccttcgcaactgaa

SEQ ID NO: 105301 - DNA, 25 bp, Homo sapien
tcccgatggtagatcatcaccagga

SEQ ID NO: 105302 - DNA, 25 bp, Homo sapien
tacatacaagctactgaatccccac

SEQ ID NO: 105303 - DNA, 25 bp, Homo sapien
tcaaacaagctacaagtcactgggt

SEQ ID NO: 105304 - DNA, 25 bp, Homo sapien
tcatggagtcaagggataacaggtc

SEQ ID NO: 105305 - DNA, 25 bp, Homo sapien
taagtgatcactgtgccactcatgg

SEQ ID NO: 105306 - DNA, 25 bp, Homo sapien
taacttcatgctcattataattaaa

SEQ ID NO: 105307 - DNA, 25 bp, Homo sapien
aacttcatgctcattataattaaac

SEQ ID NO: 105308 - DNA, 25 bp, Homo sapien
gaaaggccattatagggaaatctac

SEQ ID NO: 105309 - DNA, 25 bp, Homo sapien
aaagcagttggtggtatcttagcac

SEQ ID NO: 105310 - DNA, 25 bp, Homo sapien
tgattgctgtgatgactacaatgta

SEQ ID NO: 105311 - DNA, 25 bp, Homo sapien
tttggagtgctaaaagagttctgta

SEQ ID NO: 105312 - DNA, 25 bp, Homo sapien
tcgttcatgagtcccattttcaatt

SEQ ID NO: 105313 - DNA, 25 bp, Homo sapien
taatccaaaactcctcatagagggc

SEQ ID NO: 105314 - DNA, 25 bp, Homo sapien
tctttcaaagagaaccacaactcgt

SEQ ID NO: 105315 - DNA, 25 bp, Homo sapien
tagagggcacatgatatgacacatc

SEQ ID NO: 105316 - DNA, 25 bp, Homo sapien
gactagtttctgtaaggaaggacga

SEQ ID NO: 105317 - DNA, 25 bp, Homo sapien
gcagaccatctcctaatgcaacaga

SEQ ID NO: 105318 - DNA, 25 bp, Homo sapien
cacctttattgaaccactagactag

SEQ ID NO: 105319 - DNA, 25 bp, Homo sapien
gtcaaatctggttgcaagcagacca

SEQ ID NO: 105320 - DNA, 25 bp, Homo sapien
tgcctcactccttcaatgctatggt

SEQ ID NO: 105321 - DNA, 25 bp, Homo sapien
gatgtatagtacaagctctgctgaa

SEQ ID NO: 105322 - DNA, 25 bp, Homo sapien
gctatggttttccatgtacttggca

SEQ ID NO: 105323 - DNA, 25 bp, Homo sapien
aagctgcccaaagcatatgcaccat

SEQ ID NO: 105324 - DNA, 25 bp, Homo sapien
ttcgtaaacgaaccattgccaatcc

SEQ ID NO: 105325 - DNA, 25 bp, Homo sapien
ccagatttccatgccgtcgttctaa

SEQ ID NO: 105326 - DNA, 25 bp, Homo sapien
ttggcattcttaatggcatcctgaa

SEQ ID NO: 105327 - DNA, 25 bp, Homo sapien
gccgggctagtttgacagcataaaa

SEQ ID NO: 105328 - DNA, 25 bp, Homo sapien
ttaatagaagatactcttaaaaata

SEQ ID NO: 105329 - DNA, 25 bp, Homo sapien
agatactcttaaaaatacaaatgca

SEQ ID NO: 105330 - DNA, 25 bp, Homo sapien
taatagaagatactcttaaaaatac

SEQ ID NO: 105331 - DNA, 25 bp, Homo sapien
tactcttaaaaatacaaatgcatac

SEQ ID NO: 105332 - DNA, 25 bp, Homo sapien
aaaatcagccggacgcggtgatgca

SEQ ID NO: 105333 - DNA, 25 bp, Homo sapien
agataaacatcttaaccgggcgtgg

SEQ ID NO: 105334 - DNA, 25 bp, Homo sapien
tgtgcttacaacataggcaacgcct

SEQ ID NO: 105335 - DNA, 25 bp, Homo sapien
cagttgatcatcctagtacctccta

SEQ ID NO: 105336 - DNA, 25 bp, Homo sapien
taataggtaatgaaccatgtacagc

SEQ ID NO: 105337 - DNA, 25 bp, Homo sapien
tattaacatcggaaccaaaatcttc

SEQ ID NO: 105338 - DNA, 25 bp, Homo sapien
aattgaggtataactttgtgttctc

SEQ ID NO: 105339 - DNA, 25 bp, Homo sapien
tccatttcaagtaaattgaggtata

SEQ ID NO: 105340 - DNA, 25 bp, Homo sapien
taatctatactaatcatcaaatccc

SEQ ID NO: 105341 - DNA, 25 bp, Homo sapien
cattcagtcatggtttaaattgtca

SEQ ID NO: 105342 - DNA, 25 bp, Homo sapien
tgccttcctgttaagtacatataca

SEQ ID NO: 105343 - DNA, 25 bp, Homo sapien
tgggtttcagggttcaatccttatc

SEQ ID NO: 105344 - DNA, 25 bp, Homo sapien
ctttcaggagtgtttgatgttcatc

SEQ ID NO: 105345 - DNA, 25 bp, Homo sapien
cctgttctttcaggagtgtttgatg

SEQ ID NO: 105346 - DNA, 25 bp, Homo sapien
gatgttcatcataagcattcagaag

SEQ ID NO: 105347 - DNA, 25 bp, Homo sapien
ttaaagaatcctgttctttcaggag

SEQ ID NO: 105348 - DNA, 25 bp, Homo sapien
ggtttgcctgtaaatcaccatcaat

SEQ ID NO: 105349 - DNA, 25 bp, Homo sapien
gataccacgcactataattatatac

SEQ ID NO: 105350 - DNA, 25 bp, Homo sapien
tcaccatcaatcatctgtgtagatg

SEQ ID NO: 105351 - DNA, 25 bp, Homo sapien
taattatatacagcttggtttgcct

SEQ ID NO: 105352 - DNA, 25 bp, Homo sapien
gaatgtattacacaattggaacaaa

SEQ ID NO: 105353 - DNA, 25 bp, Homo sapien
gcagagttccatatgtaaaagtata

SEQ ID NO: 105354 - DNA, 25 bp, Homo sapien
tctagtacttaaccaccaaagaatg

SEQ ID NO: 105355 - DNA, 25 bp, Homo sapien
gtatgttagcatattagaactgtgg

SEQ ID NO: 105356 - DNA, 25 bp, Homo sapien
tattgtccataattccaaggattct

SEQ ID NO: 105357 - DNA, 25 bp, Homo sapien
gaggataatattgtccataattcca

SEQ ID NO: 105358 - DNA, 25 bp, Homo sapien
gagggggaggataatattgtccata

SEQ ID NO: 105359 - DNA, 25 bp, Homo sapien
aattccaaggattctgataattgta

SEQ ID NO: 105360 - DNA, 25 bp, Homo sapien
taaatggtaggaaacagtatctgtg

SEQ ID NO: 105361 - DNA, 25 bp, Homo sapien
tatctgtggtaagctactaattgac

SEQ ID NO: 105362 - DNA, 25 bp, Homo sapien
gacaggttatcaaatacaacaagct

SEQ ID NO: 105363 - DNA, 25 bp, Homo sapien
gcattgcaaaagaattctagaccac

SEQ ID NO: 105364 - DNA, 25 bp, Homo sapien
gatgagtcttccgttttattacaaa

SEQ ID NO: 105365 - DNA, 25 bp, Homo sapien
ggatgagtcttccgttttattacaa

SEQ ID NO: 105366 - DNA, 25 bp, Homo sapien
taaggaggatcctagtccaagctca

SEQ ID NO: 105367 - DNA, 25 bp, Homo sapien
tagggaattggaactaaggacctca

SEQ ID NO: 105368 - DNA, 25 bp, Homo sapien
tacttgtaaagcatccaggtaagga

SEQ ID NO: 105369 - DNA, 25 bp, Homo sapien
gataaatcccttatgaatccctggt

SEQ ID NO: 105370 - DNA, 25 bp, Homo sapien
cagtaaatattatgtactacctcat

SEQ ID NO: 105371 - DNA, 25 bp, Homo sapien
aaatgcacagtaaatattatgtact

SEQ ID NO: 105372 - DNA, 25 bp, Homo sapien
atattatgtactacctcataaaaac

SEQ ID NO: 105373 - DNA, 25 bp, Homo sapien
tgcacagtaaatattatgtactacc

SEQ ID NO: 105374 - DNA, 25 bp, Homo sapien
gtagtcttagcagataaacatattt

SEQ ID NO: 105375 - DNA, 25 bp, Homo sapien
gggaatataatagctctcttagctt

SEQ ID NO: 105376 - DNA, 25 bp, Homo sapien
ttgggaatataatagctctcttagc

SEQ ID NO: 105377 - DNA, 25 bp, Homo sapien
ctgtagtcttagcagataaacatat

SEQ ID NO: 105378 - DNA, 25 bp, Homo sapien
aaaaataaggaatgactccagacca

SEQ ID NO: 105379 - DNA, 25 bp, Homo sapien
aatactcactgataagtccagtttg

SEQ ID NO: 105380 - DNA, 25 bp, Homo sapien
tccagaccattaagaccagaccaat

SEQ ID NO: 105381 - DNA, 25 bp, Homo sapien
cactgataagtccagtttgtgaaca

SEQ ID NO: 105382 - DNA, 25 bp, Homo sapien
ctctggaacgagaaggcgggactaa

SEQ ID NO: 105383 - DNA, 25 bp, Homo sapien
tcagatatccgtagcagcagcagct

SEQ ID NO: 105384 - DNA, 25 bp, Homo sapien
gccgctactgagtttccgttgggaa

SEQ ID NO: 105385 - DNA, 25 bp, Homo sapien
cagtttatccagttgaaaatgccgc

SEQ ID NO: 105386 - DNA, 25 bp, Homo sapien
tgaaaaagcgttctttgccgtccgc

SEQ ID NO: 105387 - DNA, 25 bp, Homo sapien
aaattgtacatgaccacggcggcaa

SEQ ID NO: 105388 - DNA, 25 bp, Homo sapien
gatgatcgggagatacttgagcccc

SEQ ID NO: 105389 - DNA, 25 bp, Homo sapien
ggtctttcccagtccggtaggcaga

SEQ ID NO: 105390 - DNA, 25 bp, Homo sapien
tgtcatttcggccatgtgggattgc

SEQ ID NO: 105391 - DNA, 25 bp, Homo sapien
tcatttcggccatgtgggattgcgg

SEQ ID NO: 105392 - DNA, 25 bp, Homo sapien
ccatgtgggattgcgggatacccat

SEQ ID NO: 105393 - DNA, 25 bp, Homo sapien
cggccatgtgggattgcgggatacc

SEQ ID NO: 105394 - DNA, 25 bp, Homo sapien
ttcaaaattagtccagtctaagata

SEQ ID NO: 105395 - DNA, 25 bp, Homo sapien
tcaaaattagtccagtctaagatac

SEQ ID NO: 105396 - DNA, 25 bp, Homo sapien
taagaaaaagcactctcttactgca

SEQ ID NO: 105397 - DNA, 25 bp, Homo sapien
gaaaaagcactctcttactgcacca

SEQ ID NO: 105398 - DNA, 25 bp, Homo sapien
gcactctcttactgcaccatatttc

SEQ ID NO: 105399 - DNA, 25 bp, Homo sapien
aaagcactctcttactgcaccatat

SEQ ID NO: 105400 - DNA, 25 bp, Homo sapien
gtttccgagagctttatgagcttca

SEQ ID NO: 105401 - DNA, 25 bp, Homo sapien
gcagcgggacaagctcctctagaaa

SEQ ID NO: 105402 - DNA, 25 bp, Homo sapien
aacactttatttcagcagcgggaca

SEQ ID NO: 105403 - DNA, 25 bp, Homo sapien
ggcaataagcatagtttccgagagc

SEQ ID NO: 105404 - DNA, 25 bp, Homo sapien
gatcactgtcccaaccatgactagg

SEQ ID NO: 105405 - DNA, 25 bp, Homo sapien
cttgagtagaagaggcaaaatcccc

SEQ ID NO: 105406 - DNA, 25 bp, Homo sapien
gtcattattttacctagccgccaag

SEQ ID NO: 105407 - DNA, 25 bp, Homo sapien
gccaagaagagacaccgcatatcca

SEQ ID NO: 105408 - DNA, 25 bp, Homo sapien
catggagcaggtgtacctattggaa

SEQ ID NO: 105409 - DNA, 25 bp, Homo sapien
gcacatgtatcaatatgccttccag

SEQ ID NO: 105410 - DNA, 25 bp, Homo sapien
tcaatgcggtgtaagctgtcagggc

SEQ ID NO: 105411 - DNA, 25 bp, Homo sapien
aaaagattgcttactggattgatgc

SEQ ID NO: 105412 - DNA, 25 bp, Homo sapien
ctttatatcactacctggtgtggca

SEQ ID NO: 105413 - DNA, 25 bp, Homo sapien
tatatcactacctggtgtggcactt

SEQ ID NO: 105414 - DNA, 25 bp, Homo sapien
tagagccaagattctaaagtgattt

SEQ ID NO: 105415 - DNA, 25 bp, Homo sapien
tctaaagtgatttgtatatttgact

SEQ ID NO: 105416 - DNA, 25 bp, Homo sapien
ccagaatttcccagacatactgttg

SEQ ID NO: 105417 - DNA, 25 bp, Homo sapien
catggctgggccgaaaaaatactaa

SEQ ID NO: 105418 - DNA, 25 bp, Homo sapien
gagtattattgtgcactgccctcca

SEQ ID NO: 105419 - DNA, 25 bp, Homo sapien
ggagctcctaacagacaaagctgga

SEQ ID NO: 105420 - DNA, 25 bp, Homo sapien
tagcaggttagtaataacttgttgc

SEQ ID NO: 105421 - DNA, 25 bp, Homo sapien
ttagcaggttagtaataacttgttg

SEQ ID NO: 105422 - DNA, 25 bp, Homo sapien
attagcaggttagtaataacttgtt

SEQ ID NO: 105423 - DNA, 25 bp, Homo sapien
ctgcccaattagcaggttagtaata

SEQ ID NO: 105424 - DNA, 25 bp, Homo sapien
ctggatataggtcttttggatggct

SEQ ID NO: 105425 - DNA, 25 bp, Homo sapien
atctggagaatcttcagaacgaagc

SEQ ID NO: 105426 - DNA, 25 bp, Homo sapien
cttcaccaagcggaacaataagctt

SEQ ID NO: 105427 - DNA, 25 bp, Homo sapien
tgtcaaaatatctggagaatcttca

SEQ ID NO: 105428 - DNA, 25 bp, Homo sapien
cacaatattcggagatgggtttttc

SEQ ID NO: 105429 - DNA, 25 bp, Homo sapien
ttttcctaaactgatctcttgccag

SEQ ID NO: 105430 - DNA, 25 bp, Homo sapien
cattcctctgaatcaaagaacgagc

SEQ ID NO: 105431 - DNA, 25 bp, Homo sapien
tttgttagatttgggatatcccttc

SEQ ID NO: 105432 - DNA, 25 bp, Homo sapien
taatcttagtatctagcaggtagct

SEQ ID NO: 105433 - DNA, 25 bp, Homo sapien
ggcctatcctcatgaatgttactgg

SEQ ID NO: 105434 - DNA, 25 bp, Homo sapien
tatacgtcctgtgaaaatatctgac

SEQ ID NO: 105435 - DNA, 25 bp, Homo sapien
caagcactgagctagatacaatgga

SEQ ID NO: 105436 - DNA, 25 bp, Homo sapien
gaagaaatataatgatctcattccc

SEQ ID NO: 105437 - DNA, 25 bp, Homo sapien
agaaatataatgatctcattcccat

SEQ ID NO: 105438 - DNA, 25 bp, Homo sapien
gcaaactctccctcgattatgcctt

SEQ ID NO: 105439 - DNA, 25 bp, Homo sapien
aaatagcaaactctccctcgattat

SEQ ID NO: 105440 - DNA, 25 bp, Homo sapien
catttcggccaagttcattttttga

SEQ ID NO: 105441 - DNA, 25 bp, Homo sapien
ccaagttcattttttgaccgtgtca

SEQ ID NO: 105442 - DNA, 25 bp, Homo sapien
gatgattatagagtttcatgaagtc

SEQ ID NO: 105443 - DNA, 25 bp, Homo sapien
tcatgaagtcttcatttcggccaag

SEQ ID NO: 105444 - DNA, 25 bp, Homo sapien
tttgctgaagtactacgtgtacgtg

SEQ ID NO: 105445 - DNA, 25 bp, Homo sapien
tgaagtactacgtgtacgtgcaaac

SEQ ID NO: 105446 - DNA, 25 bp, Homo sapien
accatttgctgaagtactacgtgta

SEQ ID NO: 105447 - DNA, 25 bp, Homo sapien
gctgaagtactacgtgtacgtgcaa

SEQ ID NO: 105448 - DNA, 25 bp, Homo sapien
aacagatctgttgctacaaaatata

SEQ ID NO: 105449 - DNA, 25 bp, Homo sapien
tgaagtgttcaattacaacttcttc

SEQ ID NO: 105450 - DNA, 25 bp, Homo sapien
agtgttcaattacaacttcttctaa

SEQ ID NO: 105451 - DNA, 25 bp, Homo sapien
ccatgacttgaagtgttcaattaca

SEQ ID NO: 105452 - DNA, 25 bp, Homo sapien
gacttgaagtgttcaattacaactt

SEQ ID NO: 105453 - DNA, 25 bp, Homo sapien
actttgtcttgccttaaagctacta

SEQ ID NO: 105454 - DNA, 25 bp, Homo sapien
ttgcaataactttgtcttgccttaa

SEQ ID NO: 105455 - DNA, 25 bp, Homo sapien
tgtcttgccttaaagctactaaata

SEQ ID NO: 105456 - DNA, 25 bp, Homo sapien
tgccttaaagctactaaatatgacc

SEQ ID NO: 105457 - DNA, 25 bp, Homo sapien
gcaatttcttgaacactatctcgaa

SEQ ID NO: 105458 - DNA, 25 bp, Homo sapien
ctatctcgaaatgaagagaagatca

SEQ ID NO: 105459 - DNA, 25 bp, Homo sapien
tgcttttccctgaggcatggccgac

SEQ ID NO: 105460 - DNA, 25 bp, Homo sapien
gaagatcataactcgggtctcatca

SEQ ID NO: 105461 - DNA, 25 bp, Homo sapien
tagaaaccagcgtgttgtaaccacc

SEQ ID NO: 105462 - DNA, 25 bp, Homo sapien
cgttgtacaagacgaattgggctct

SEQ ID NO: 105463 - DNA, 25 bp, Homo sapien
tacggccagttctacccattcgttg

SEQ ID NO: 105464 - DNA, 25 bp, Homo sapien
tatcctgccttgacgtttacggcca

SEQ ID NO: 105465 - DNA, 25 bp, Homo sapien
ggacctgcctgttacttgaaatagc

SEQ ID NO: 105466 - DNA, 25 bp, Homo sapien
gaaccattcgtggacttctttggta

SEQ ID NO: 105467 - DNA, 25 bp, Homo sapien
tcgctgcaagttccgagaaggcttc

SEQ ID NO: 105468 - DNA, 25 bp, Homo sapien
aaagatagatgactttcgctgcaag

SEQ ID NO: 105469 - DNA, 25 bp, Homo sapien
tttctgtcactctatactaccagtg

SEQ ID NO: 105470 - DNA, 25 bp, Homo sapien
tccatttgccacatgaataatctcg

SEQ ID NO: 105471 - DNA, 25 bp, Homo sapien
gatacgacctgctaagtaagaacag

SEQ ID NO: 105472 - DNA, 25 bp, Homo sapien
gggaaaaatgcatgtgtcaaatgca

SEQ ID NO: 105473 - DNA, 25 bp, Homo sapien
tcatagcagtattggaaagttcatc

SEQ ID NO: 105474 - DNA, 25 bp, Homo sapien
taatctctaagaatcaccaaactga

SEQ ID NO: 105475 - DNA, 25 bp, Homo sapien
aaaggagtatgtatcttaagtctta

SEQ ID NO: 105476 - DNA, 25 bp, Homo sapien
aaaaactggtattatgattctatca

SEQ ID NO: 105477 - DNA, 25 bp, Homo sapien
gactcttttcatttggttgcctaag

SEQ ID NO: 105478 - DNA, 25 bp, Homo sapien
gctctcagtcctggcttcttttgga

SEQ ID NO: 105479 - DNA, 25 bp, Homo sapien
ctcttttcatttggttgcctaagac

SEQ ID NO: 105480 - DNA, 25 bp, Homo sapien
tggcttcttttggactcttttcatt

SEQ ID NO: 105481 - DNA, 25 bp, Homo sapien
attcttcataaaaaaccactcagtt

SEQ ID NO: 105482 - DNA, 25 bp, Homo sapien
tacttcatgcttctaaatgtctcct

SEQ ID NO: 105483 - DNA, 25 bp, Homo sapien
cctaaacttctcttacctctgaaag

SEQ ID NO: 105484 - DNA, 25 bp, Homo sapien
tgaaagtacccatctgtctaggagc

SEQ ID NO: 105485 - DNA, 25 bp, Homo sapien
tcttctgataagaaccaatctttct

SEQ ID NO: 105486 - DNA, 25 bp, Homo sapien
cccttaatctataaagtctgttcca

SEQ ID NO: 105487 - DNA, 25 bp, Homo sapien
actgtcccttaatctataaagtctg

SEQ ID NO: 105488 - DNA, 25 bp, Homo sapien
ttctttaggctactttgcctcattc

SEQ ID NO: 105489 - DNA, 25 bp, Homo sapien
tgtgtaggcaaaggatgatcttgcc

SEQ ID NO: 105490 - DNA, 25 bp, Homo sapien
ggcatcgatctgagtgatcaacttg

SEQ ID NO: 105491 - DNA, 25 bp, Homo sapien
taaggcctataaaatggcggcatcg

SEQ ID NO: 105492 - DNA, 25 bp, Homo sapien
gagagagttgatgaattccagtggt

SEQ ID NO: 105493 - DNA, 25 bp, Homo sapien
gaaagactcacatcgtcgaactctg

SEQ ID NO: 105494 - DNA, 25 bp, Homo sapien
tattccaagtctgagagtccactga

SEQ ID NO: 105495 - DNA, 25 bp, Homo sapien
gaccagaggcgtttcactaatagca

SEQ ID NO: 105496 - DNA, 25 bp, Homo sapien
gattattagattcattcctgggagc

SEQ ID NO: 105497 - DNA, 25 bp, Homo sapien
aataaccaggagataacaattcttc

SEQ ID NO: 105498 - DNA, 25 bp, Homo sapien
cattttttgctgcactcagtggcaa

SEQ ID NO: 105499 - DNA, 25 bp, Homo sapien
catttgatgggataataacagttcc

SEQ ID NO: 105500 - DNA, 25 bp, Homo sapien
tatgatctcttggtattagtgcttg

SEQ ID NO: 105501 - DNA, 25 bp, Homo sapien
ttatgcagatacattggaccactgc

SEQ ID NO: 105502 - DNA, 25 bp, Homo sapien
tacattggaccactgcttttagact

SEQ ID NO: 105503 - DNA, 25 bp, Homo sapien
cattggaccactgcttttagacttt

SEQ ID NO: 105504 - DNA, 25 bp, Homo sapien
cagatacattggaccactgctttta

SEQ ID NO: 105505 - DNA, 25 bp, Homo sapien
tacagcacgacttcatatcaaacat

SEQ ID NO: 105506 - DNA, 25 bp, Homo sapien
taatggttagattacagaaacccag

SEQ ID NO: 105507 - DNA, 25 bp, Homo sapien
ttaaatagaacattcacgaaccatg

SEQ ID NO: 105508 - DNA, 25 bp, Homo sapien
gaaccatgtcctccatgctaacgag

SEQ ID NO: 105509 - DNA, 25 bp, Homo sapien
tcaaaaaaagatagtcttggagaac

SEQ ID NO: 105510 - DNA, 25 bp, Homo sapien
aaaagatagtcttggagaactctga

SEQ ID NO: 105511 - DNA, 25 bp, Homo sapien
aaaaaagatagtcttggagaactct

SEQ ID NO: 105512 - DNA, 25 bp, Homo sapien
agatagtcttggagaactctgaaca

SEQ ID NO: 105513 - DNA, 25 bp, Homo sapien
tcttcggaaaatctcgtcatcttca

SEQ ID NO: 105514 - DNA, 25 bp, Homo sapien
ttcggaaaatctcgtcatcttcact

SEQ ID NO: 105515 - DNA, 25 bp, Homo sapien
acttttcttcggaaaatctcgtcat

SEQ ID NO: 105516 - DNA, 25 bp, Homo sapien
tttcttcggaaaatctcgtcatctt

SEQ ID NO: 105517 - DNA, 25 bp, Homo sapien
ctgtttataggaaatctgcgctttt

SEQ ID NO: 105518 - DNA, 25 bp, Homo sapien
ctgcgctttttgacagcatgaagtg

SEQ ID NO: 105519 - DNA, 25 bp, Homo sapien
aggaaatctgcgctttttgacagca

SEQ ID NO: 105520 - DNA, 25 bp, Homo sapien
tataggaaatctgcgctttttgaca

SEQ ID NO: 105521 - DNA, 25 bp, Homo sapien
cagtagacacataggaggtatttaa

SEQ ID NO: 105522 - DNA, 25 bp, Homo sapien
taatgaatgcttgccgaattgctca

SEQ ID NO: 105523 - DNA, 25 bp, Homo sapien
tcaagtgtactgacaaaaataggat

SEQ ID NO: 105524 - DNA, 25 bp, Homo sapien
tctcctattgagtaacttatgacag

SEQ ID NO: 105525 - DNA, 25 bp, Homo sapien
tagctatcagctataaactggtgag

SEQ ID NO: 105526 - DNA, 25 bp, Homo sapien
cagacgctgtgactttactatccca

SEQ ID NO: 105527 - DNA, 25 bp, Homo sapien
tgtttagcctaaatccgtgacacac

SEQ ID NO: 105528 - DNA, 25 bp, Homo sapien
tatgatgtgcgtatcaggatccaac

SEQ ID NO: 105529 - DNA, 25 bp, Homo sapien
caagttttgactatgaggcctatca

SEQ ID NO: 105530 - DNA, 25 bp, Homo sapien
cagatgttctagttaaggtagcaag

SEQ ID NO: 105531 - DNA, 25 bp, Homo sapien
tacacaatgttaatacggactggct

SEQ ID NO: 105532 - DNA, 25 bp, Homo sapien
ttcagaagatcttcaagggcttcac

SEQ ID NO: 105533 - DNA, 25 bp, Homo sapien
gtctctttgggactttgatgcctct

SEQ ID NO: 105534 - DNA, 25 bp, Homo sapien
tggcattcccgttacaaaccttgaa

SEQ ID NO: 105535 - DNA, 25 bp, Homo sapien
tgcctcttctggcattcccgttaca

SEQ ID NO: 105536 - DNA, 25 bp, Homo sapien
ttgtgaacatggtttgggaaaattc

SEQ ID NO: 105537 - DNA, 25 bp, Homo sapien
catttatagcctgtgaaagttgagt

SEQ ID NO: 105538 - DNA, 25 bp, Homo sapien
tctgatgaaacatattctgcatctt

SEQ ID NO: 105539 - DNA, 25 bp, Homo sapien
agtcaagtaatgaggaatcttgttc

SEQ ID NO: 105540 - DNA, 25 bp, Homo sapien
tttcatctgatgaaacatattctgc

SEQ ID NO: 105541 - DNA, 25 bp, Homo sapien
tgttcatcattggactacgcaaaga

SEQ ID NO: 105542 - DNA, 25 bp, Homo sapien
tcatgtaaatagctctcatttcaga

SEQ ID NO: 105543 - DNA, 25 bp, Homo sapien
cttatgaatcattttgtacttattg

SEQ ID NO: 105544 - DNA, 25 bp, Homo sapien
tggactacgcaaagatttcatgtaa

SEQ ID NO: 105545 - DNA, 25 bp, Homo sapien
tgattggcctttgcaagactcctct

SEQ ID NO: 105546 - DNA, 25 bp, Homo sapien
tcttggagtagaacgcaccttggac

SEQ ID NO: 105547 - DNA, 25 bp, Homo sapien
aacagtgcttgggttaaccgcaata

SEQ ID NO: 105548 - DNA, 25 bp, Homo sapien
ccttggactgcgcagaagatccaga

SEQ ID NO: 105549 - DNA, 25 bp, Homo sapien
cttctggtaaccatctaaagatatt

SEQ ID NO: 105550 - DNA, 25 bp, Homo sapien
caagtttccttacatagtgttaaca

SEQ ID NO: 105551 - DNA, 25 bp, Homo sapien
attaaaacctaagcaccctgtgaat

SEQ ID NO: 105552 - DNA, 25 bp, Homo sapien
taagcaccctgtgaattgcccatat

SEQ ID NO: 105553 - DNA, 25 bp, Homo sapien
catgttatacttggtaaatatatac

SEQ ID NO: 105554 - DNA, 25 bp, Homo sapien
ttcagataagaagactatagttaat

SEQ ID NO: 105555 - DNA, 25 bp, Homo sapien
aagactatagttaattacaaggtat

SEQ ID NO: 105556 - DNA, 25 bp, Homo sapien
tcaaaacatcatgttatacttggta

SEQ ID NO: 105557 - DNA, 25 bp, Homo sapien
acacgtcatatatgaaaaagcaagg

SEQ ID NO: 105558 - DNA, 25 bp, Homo sapien
catatatgaaaaagcaaggacacca

SEQ ID NO: 105559 - DNA, 25 bp, Homo sapien
atatgaaaaagcaaggacaccatac

SEQ ID NO: 105560 - DNA, 25 bp, Homo sapien
tcatatatgaaaaagcaaggacacc

SEQ ID NO: 105561 - DNA, 25 bp, Homo sapien
aaagacaaggaatactgtttgtaat

SEQ ID NO: 105562 - DNA, 25 bp, Homo sapien
tttgtaatatacatgacaatgcaaa

SEQ ID NO: 105563 - DNA, 25 bp, Homo sapien
aagacaaggaatactgtttgtaata

SEQ ID NO: 105564 - DNA, 25 bp, Homo sapien
gacatcccattttcatgcattgaga

SEQ ID NO: 105565 - DNA, 25 bp, Homo sapien
acatcccattttcatgcattgagaa

SEQ ID NO: 105566 - DNA, 25 bp, Homo sapien
catcccattttcatgcattgagaaa

SEQ ID NO: 105567 - DNA, 25 bp, Homo sapien
acaatactacccaaaataatctatg

SEQ ID NO: 105568 - DNA, 25 bp, Homo sapien
cagagggcatgggaaacattagtgc

SEQ ID NO: 105569 - DNA, 25 bp, Homo sapien
gcagagggcatgggaaacattagtg

SEQ ID NO: 105570 - DNA, 25 bp, Homo sapien
ttccaaagtaatctgccaaatcctg

SEQ ID NO: 105571 - DNA, 25 bp, Homo sapien
ggaccatgagctcctctttttgcag

SEQ ID NO: 105572 - DNA, 25 bp, Homo sapien
tcttgacttggaacaggatgcccct

SEQ ID NO: 105573 - DNA, 25 bp, Homo sapien
taagagaagtatgtgtcccagctaa

SEQ ID NO: 105574 - DNA, 25 bp, Homo sapien
tgaagtgctagaatcctccaaagca

SEQ ID NO: 105575 - DNA, 25 bp, Homo sapien
cccagctaaatgtggtcttgacttg

SEQ ID NO: 105576 - DNA, 25 bp, Homo sapien
tgctggatctgctcaatgaacttgt

SEQ ID NO: 105577 - DNA, 25 bp, Homo sapien
gcaacccatgaattgctcttaggga

SEQ ID NO: 105578 - DNA, 25 bp, Homo sapien
ttcaaacatactctgcaggtgctgg

SEQ ID NO: 105579 - DNA, 25 bp, Homo sapien
gaggacaaacttctacttgcaaccc

SEQ ID NO: 105580 - DNA, 25 bp, Homo sapien
aaatattcatatttagggaaaggca

SEQ ID NO: 105581 - DNA, 25 bp, Homo sapien
gaaaggcaaacttcagtaactaata

SEQ ID NO: 105582 - DNA, 25 bp, Homo sapien
tcatatttagggaaaggcaaacttc

SEQ ID NO: 105583 - DNA, 25 bp, Homo sapien
aggcaaacttcagtaactaatatta

SEQ ID NO: 105584 - DNA, 25 bp, Homo sapien
caattaaggtagtcagcaggctgtc

SEQ ID NO: 105585 - DNA, 25 bp, Homo sapien
gaaaagaattcggattccagcgcca

SEQ ID NO: 105586 - DNA, 25 bp, Homo sapien
gcaaatctgcggtttcttcttggca

SEQ ID NO: 105587 - DNA, 25 bp, Homo sapien
caccactgttggaacatgaatacca

SEQ ID NO: 105588 - DNA, 25 bp, Homo sapien
gcagttatataacttatattgggaa

SEQ ID NO: 105589 - DNA, 25 bp, Homo sapien
tataacttatattgggaatacttaa

SEQ ID NO: 105590 - DNA, 25 bp, Homo sapien
aatgcagttatataacttatattgg

SEQ ID NO: 105591 - DNA, 25 bp, Homo sapien
gatgaaaactggtgacacatattta

SEQ ID NO: 105592 - DNA, 25 bp, Homo sapien
tgtcccttagcttcatacagtaact

SEQ ID NO: 105593 - DNA, 25 bp, Homo sapien
ctaatatatgttggcaggcaaaaaa

SEQ ID NO: 105594 - DNA, 25 bp, Homo sapien
taacattaaacttctatggaatgct

SEQ ID NO: 105595 - DNA, 25 bp, Homo sapien
aataatctaacaggcatgatgccgc

SEQ ID NO: 105596 - DNA, 25 bp, Homo sapien
ctatcttggttaagatcatttggta

SEQ ID NO: 105597 - DNA, 25 bp, Homo sapien
cctcagccttctgatgagttacttg

SEQ ID NO: 105598 - DNA, 25 bp, Homo sapien
ctgatgagttacttgtgcatacatg

SEQ ID NO: 105599 - DNA, 25 bp, Homo sapien
catacatggagatttcttgaagtga

SEQ ID NO: 105600 - DNA, 25 bp, Homo sapien
atttaatattgtgagaggtctttga

SEQ ID NO: 105601 - DNA, 25 bp, Homo sapien
tgtgagaggtctttgaaaaccccat

SEQ ID NO: 105602 - DNA, 25 bp, Homo sapien
tattgtgagaggtctttgaaaaccc

SEQ ID NO: 105603 - DNA, 25 bp, Homo sapien
ggtctttgaaaaccccatcttgagc

SEQ ID NO: 105604 - DNA, 25 bp, Homo sapien
catagggaaaatcgacaagttggct

SEQ ID NO: 105605 - DNA, 25 bp, Homo sapien
tgagctaatcacgttccaggaggtc

SEQ ID NO: 105606 - DNA, 25 bp, Homo sapien
ttttccacatggcagtaggcaagag

SEQ ID NO: 105607 - DNA, 25 bp, Homo sapien
gacagtacttaactgggacacacct

SEQ ID NO: 105608 - DNA, 25 bp, Homo sapien
aaactagatgtcctataacttatat

SEQ ID NO: 105609 - DNA, 25 bp, Homo sapien
atataagttataggacatctagttt

SEQ ID NO: 105610 - DNA, 25 bp, Homo sapien
gcagttattatccaagccagagtag

SEQ ID NO: 105611 - DNA, 25 bp, Homo sapien
tgtgataggcatatctatgaaacct

SEQ ID NO: 105612 - DNA, 25 bp, Homo sapien
tgttaccagttgttatccaaaccta

SEQ ID NO: 105613 - DNA, 25 bp, Homo sapien
gacaaacagttaatagatccaccat

SEQ ID NO: 105614 - DNA, 25 bp, Homo sapien
tagtcccatgattacatactcctgt

SEQ ID NO: 105615 - DNA, 25 bp, Homo sapien
aaattaggcattcagcaagaggcaa

SEQ ID NO: 105616 - DNA, 25 bp, Homo sapien
ggcagtcattcttgcagtgtaaaga

SEQ ID NO: 105617 - DNA, 25 bp, Homo sapien
gcgagaacccaataccctgtcataa

SEQ ID NO: 105618 - DNA, 25 bp, Homo sapien
gcaggtagctgtggataaataagcc

SEQ ID NO: 105619 - DNA, 25 bp, Homo sapien
ctggtcctgtgcatgaccacttcca

SEQ ID NO: 105620 - DNA, 25 bp, Homo sapien
tcctgtggccagtccttttcatgca

SEQ ID NO: 105621 - DNA, 25 bp, Homo sapien
aacaacatcgtggtttcctgtggcc

SEQ ID NO: 105622 - DNA, 25 bp, Homo sapien
tctgaggtgctaataagtggactgg

SEQ ID NO: 105623 - DNA, 25 bp, Homo sapien
tccacaaagcaaagacctaacaagg

SEQ ID NO: 105624 - DNA, 25 bp, Homo sapien
taaaattactgtgcaggtcctagcc

SEQ ID NO: 105625 - DNA, 25 bp, Homo sapien
tgagaaatagcatcctccacaaagc

SEQ ID NO: 105626 - DNA, 25 bp, Homo sapien
gatggtggttatcaagttgagatca

SEQ ID NO: 105627 - DNA, 25 bp, Homo sapien
ctgcatccagccattaattcttaaa

SEQ ID NO: 105628 - DNA, 25 bp, Homo sapien
taccagttatggttttatatctcaa

SEQ ID NO: 105629 - DNA, 25 bp, Homo sapien
tatctcaatatattcgctagaaatc

SEQ ID NO: 105630 - DNA, 25 bp, Homo sapien
tggagtgcgggctcattaactaaga

SEQ ID NO: 105631 - DNA, 25 bp, Homo sapien
aagccagatgacagccggtgttggc

SEQ ID NO: 105632 - DNA, 25 bp, Homo sapien
tggtaaatggctggactctaggaca

SEQ ID NO: 105633 - DNA, 25 bp, Homo sapien
gcttggttcaggtgttagtagtgca

SEQ ID NO: 105634 - DNA, 25 bp, Homo sapien
aaagcaaactatgaatcaccaggaa

SEQ ID NO: 105635 - DNA, 25 bp, Homo sapien
tgctataaagcccaacaaggatgga

SEQ ID NO: 105636 - DNA, 25 bp, Homo sapien
gctactacctctaacagttctcttg

SEQ ID NO: 105637 - DNA, 25 bp, Homo sapien
aagaaaaagtactgcgtgacaagca

SEQ ID NO: 105638 - DNA, 25 bp, Homo sapien
tggtgggcgtctgccctttaagcat

SEQ ID NO: 105639 - DNA, 25 bp, Homo sapien
cagatggtgggcgtctgccctttaa

SEQ ID NO: 105640 - DNA, 25 bp, Homo sapien
tccccgcagatggtgggcgtctgcc

SEQ ID NO: 105641 - DNA, 25 bp, Homo sapien
gcgggtccccgcagatggtgggcgt

SEQ ID NO: 105642 - DNA, 25 bp, Homo sapien
aagaaggataacagccgctacggcg

SEQ ID NO: 105643 - DNA, 25 bp, Homo sapien
gataacagccgctacggcgcacagc

SEQ ID NO: 105644 - DNA, 25 bp, Homo sapien
ctgagacggaaaagaaggataacag

SEQ ID NO: 105645 - DNA, 25 bp, Homo sapien
aggataacagccgctacggcgcaca

SEQ ID NO: 105646 - DNA, 25 bp, Homo sapien
cacacagtgtgaagctttctgtctc

SEQ ID NO: 105647 - DNA, 25 bp, Homo sapien
cagatgccttggtagcaactcgcac

SEQ ID NO: 105648 - DNA, 25 bp, Homo sapien
tgggaatattcctccaggctaagca

SEQ ID NO: 105649 - DNA, 25 bp, Homo sapien
caacttttcacggtcctgggaatat

SEQ ID NO: 105650 - DNA, 25 bp, Homo sapien
cacagattgcctgaaaaggagttag

SEQ ID NO: 105651 - DNA, 25 bp, Homo sapien
tccaaggtaaattttgtccacacag

SEQ ID NO: 105652 - DNA, 25 bp, Homo sapien
tgccatttacaggtttctagggaaa

SEQ ID NO: 105653 - DNA, 25 bp, Homo sapien
acattgcattaaacacccttgaagc

SEQ ID NO: 105654 - DNA, 25 bp, Homo sapien
caagttcaatggtgttggccagaca

SEQ ID NO: 105655 - DNA, 25 bp, Homo sapien
ggaagcagaattatcagcccagcat

SEQ ID NO: 105656 - DNA, 25 bp, Homo sapien
gaaccttctaagagatgtccctgga

SEQ ID NO: 105657 - DNA, 25 bp, Homo sapien
gatgcgcacgtctccacattgaatt

SEQ ID NO: 105658 - DNA, 25 bp, Homo sapien
ccagctcagagggtgtggctaacac

SEQ ID NO: 105659 - DNA, 25 bp, Homo sapien
tggctaacacctgcacgcctctacc

SEQ ID NO: 105660 - DNA, 25 bp, Homo sapien
cccagctcagagggtgtggctaaca

SEQ ID NO: 105661 - DNA, 25 bp, Homo sapien
gcagcaatggtcagtccaactgcta

SEQ ID NO: 105662 - DNA, 25 bp, Homo sapien
gcaatggtcagtccaactgctacca

SEQ ID NO: 105663 - DNA, 25 bp, Homo sapien
cagcaatggtcagtccaactgctac

SEQ ID NO: 105664 - DNA, 25 bp, Homo sapien
agcagcaatggtcagtccaactgct

SEQ ID NO: 105665 - DNA, 25 bp, Homo sapien
ttcatggcttgcaaaacataacggc

SEQ ID NO: 105666 - DNA, 25 bp, Homo sapien
gcttcatggcttgcaaaacataacg

SEQ ID NO: 105667 - DNA, 25 bp, Homo sapien
ttgttttacttgaggctccatatgc

SEQ ID NO: 105668 - DNA, 25 bp, Homo sapien
ttttacttgaggctccatatgcttc

SEQ ID NO: 105669 - DNA, 25 bp, Homo sapien
ctctataatagccaccactgaaggc

SEQ ID NO: 105670 - DNA, 25 bp, Homo sapien
tattaatgctgcttcccgttttgtc

SEQ ID NO: 105671 - DNA, 25 bp, Homo sapien
ctagtattaatgctgcttcccgttt

SEQ ID NO: 105672 - DNA, 25 bp, Homo sapien
ttaatgctgcttcccgttttgtcat

SEQ ID NO: 105673 - DNA, 25 bp, Homo sapien
agtattaatgctgcttcccgttttg

SEQ ID NO: 105674 - DNA, 25 bp, Homo sapien
tcaggatgatttgaaagcataattc

SEQ ID NO: 105675 - DNA, 25 bp, Homo sapien
caggatgatttgaaagcataattcg

SEQ ID NO: 105676 - DNA, 25 bp, Homo sapien
ctttgtcaggatgatttgaaagcat

SEQ ID NO: 105677 - DNA, 25 bp, Homo sapien
tgtcaggatgatttgaaagcataat

SEQ ID NO: 105678 - DNA, 25 bp, Homo sapien
ccttctagtaaatctttagcttcat

SEQ ID NO: 105679 - DNA, 25 bp, Homo sapien
ttattataaaaacttagtactcata

SEQ ID NO: 105680 - DNA, 25 bp, Homo sapien
tattataaaaacttagtactcatat

SEQ ID NO: 105681 - DNA, 25 bp, Homo sapien
tcaaaagcagtagcactaactgtcc

SEQ ID NO: 105682 - DNA, 25 bp, Homo sapien
actgtccagaactgagcaaatactc

SEQ ID NO: 105683 - DNA, 25 bp, Homo sapien
agccatcaaaagcagtagcactaac

SEQ ID NO: 105684 - DNA, 25 bp, Homo sapien
agcactaactgtccagaactgagca

SEQ ID NO: 105685 - DNA, 25 bp, Homo sapien
cccaagatgattgggggttcttcaa

SEQ ID NO: 105686 - DNA, 25 bp, Homo sapien
acccaagatgattgggggttcttca

SEQ ID NO: 105687 - DNA, 25 bp, Homo sapien
tttgagtaatcttgtttctttgtca

SEQ ID NO: 105688 - DNA, 25 bp, Homo sapien
agggctttatgaattcttaagatat

SEQ ID NO: 105689 - DNA, 25 bp, Homo sapien
agatttctggttgtaaatatttact

SEQ ID NO: 105690 - DNA, 25 bp, Homo sapien
gtttctttgtcagaaagatttctgg

SEQ ID NO: 105691 - DNA, 25 bp, Homo sapien
gacacccaggaatagcaacacaaat

SEQ ID NO: 105692 - DNA, 25 bp, Homo sapien
gaaagtaactgcatgaccagggtac

SEQ ID NO: 105693 - DNA, 25 bp, Homo sapien
cctctgggcagtagaatacctcatc

SEQ ID NO: 105694 - DNA, 25 bp, Homo sapien
gacatctgggacatcatagagcacc

SEQ ID NO: 105695 - DNA, 25 bp, Homo sapien
ggactggcacactcagcatgcgagg

SEQ ID NO: 105696 - DNA, 25 bp, Homo sapien
ggggactggcacactcagcatgcga

SEQ ID NO: 105697 - DNA, 25 bp, Homo sapien
gggactggcacactcagcatgcgag

SEQ ID NO: 105698 - DNA, 25 bp, Homo sapien
ctgaattggtttaccaattacaaca

SEQ ID NO: 105699 - DNA, 25 bp, Homo sapien
tgaattggtttaccaattacaacag

SEQ ID NO: 105700 - DNA, 25 bp, Homo sapien
tggctgttctaggtcttttgtttgt

SEQ ID NO: 105701 - DNA, 25 bp, Homo sapien
tactgaattggtttaccaattacaa

SEQ ID NO: 105702 - DNA, 25 bp, Homo sapien
ggtaagcatatgtttgtagttaacg

SEQ ID NO: 105703 - DNA, 25 bp, Homo sapien
gtagttaacgttatctgtccaaaca

SEQ ID NO: 105704 - DNA, 25 bp, Homo sapien
cttcacaggtaagcatatgtttgta

SEQ ID NO: 105705 - DNA, 25 bp, Homo sapien
tgtttgtagttaacgttatctgtcc

SEQ ID NO: 105706 - DNA, 25 bp, Homo sapien
actgggagaacaactgatcttttca

SEQ ID NO: 105707 - DNA, 25 bp, Homo sapien
actacacgggggtcaaggattcact

SEQ ID NO: 105708 - DNA, 25 bp, Homo sapien
gaacaactgatcttttcagagctat

SEQ ID NO: 105709 - DNA, 25 bp, Homo sapien
ctcaaacgccgtactgggagaacaa

SEQ ID NO: 105710 - DNA, 25 bp, Homo sapien
caggttttggagttcctcttccctg

SEQ ID NO: 105711 - DNA, 25 bp, Homo sapien
gccaacatgtcaggttttggagttc

SEQ ID NO: 105712 - DNA, 25 bp, Homo sapien
tttggagttcctcttccctgagtgg

SEQ ID NO: 105713 - DNA, 25 bp, Homo sapien
aacatgtcaggttttggagttcctc

SEQ ID NO: 105714 - DNA, 25 bp, Homo sapien
caattattgatgtcatattaccatc

SEQ ID NO: 105715 - DNA, 25 bp, Homo sapien
gattgaccaaaacttcaattattga

SEQ ID NO: 105716 - DNA, 25 bp, Homo sapien
gtctacctatcaagctagtttgcag

SEQ ID NO: 105717 - DNA, 25 bp, Homo sapien
tagaagtatattctcaggccacatt

SEQ ID NO: 105718 - DNA, 25 bp, Homo sapien
atattcatgtaaagcctcttggtaa

SEQ ID NO: 105719 - DNA, 25 bp, Homo sapien
catattcatgtaaagcctcttggta

SEQ ID NO: 105720 - DNA, 25 bp, Homo sapien
caatacttgacttttggtggctctc

SEQ ID NO: 105721 - DNA, 25 bp, Homo sapien
acttcaaggcctttcctcaagggct

SEQ ID NO: 105722 - DNA, 25 bp, Homo sapien
gaatctctgcaggtagagtggtgaa

SEQ ID NO: 105723 - DNA, 25 bp, Homo sapien
ggtggctctcactcactggcctctg

SEQ ID NO: 105724 - DNA, 25 bp, Homo sapien
catttgccaattccagaagagatgg

SEQ ID NO: 105725 - DNA, 25 bp, Homo sapien
cgttattggtggttgcttgacccct

SEQ ID NO: 105726 - DNA, 25 bp, Homo sapien
tggatgagaagggaagcagtacttt

SEQ ID NO: 105727 - DNA, 25 bp, Homo sapien
gttgcttgacccctgagggcatttg

SEQ ID NO: 105728 - DNA, 25 bp, Homo sapien
ctcttaatgtaagccagaagcctgc

SEQ ID NO: 105729 - DNA, 25 bp, Homo sapien
caagagggaacttccaattgaggtc

SEQ ID NO: 105730 - DNA, 25 bp, Homo sapien
tgactacacacaactgacaagaggg

SEQ ID NO: 105731 - DNA, 25 bp, Homo sapien
tacattttgagtaggcactggtgcc

SEQ ID NO: 105732 - DNA, 25 bp, Homo sapien
gactttttgtcataagttagcacaa

SEQ ID NO: 105733 - DNA, 25 bp, Homo sapien
actttttgtcataagttagcacaac

SEQ ID NO: 105734 - DNA, 25 bp, Homo sapien
ttttgtcataagttagcacaacaca

SEQ ID NO: 105735 - DNA, 25 bp, Homo sapien
tttttgtcataagttagcacaacac

SEQ ID NO: 105736 - DNA, 25 bp, Homo sapien
agcaagtttgaattattctgaggtg

SEQ ID NO: 105737 - DNA, 25 bp, Homo sapien
agtttgaattattctgaggtgcagc

SEQ ID NO: 105738 - DNA, 25 bp, Homo sapien
gtttgaattattctgaggtgcagcc

SEQ ID NO: 105739 - DNA, 25 bp, Homo sapien
caagtttgaattattctgaggtgca

SEQ ID NO: 105740 - DNA, 25 bp, Homo sapien
gtctccctgatgattaggagggctc

SEQ ID NO: 105741 - DNA, 25 bp, Homo sapien
tgtctccctgatgattaggagggct

SEQ ID NO: 105742 - DNA, 25 bp, Homo sapien
atgtctccctgatgattaggagggc

SEQ ID NO: 105743 - DNA, 25 bp, Homo sapien
tctccctgatgattaggagggctct

SEQ ID NO: 105744 - DNA, 25 bp, Homo sapien
aaagcatctctgttaataaacttgg

SEQ ID NO: 105745 - DNA, 25 bp, Homo sapien
tgaggaacctccagtatccttcccg

SEQ ID NO: 105746 - DNA, 25 bp, Homo sapien
acaagagcatgcactttgaggaacc

SEQ ID NO: 105747 - DNA, 25 bp, Homo sapien
ctgttccgtcttctgtaacaagagc

SEQ ID NO: 105748 - DNA, 25 bp, Homo sapien
caattcgaatgagacagtgatatcc

SEQ ID NO: 105749 - DNA, 25 bp, Homo sapien
gaatgagacagtgatatccattggg

SEQ ID NO: 105750 - DNA, 25 bp, Homo sapien
ggtaacaattcgaatgagacagtga

SEQ ID NO: 105751 - DNA, 25 bp, Homo sapien
tcaggtaacaattcgaatgagacag

SEQ ID NO: 105752 - DNA, 25 bp, Homo sapien
tggcagcttcctcaatactatcaat

SEQ ID NO: 105753 - DNA, 25 bp, Homo sapien
ctcaatactatcaatgcactcccat

SEQ ID NO: 105754 - DNA, 25 bp, Homo sapien
tcaatactatcaatgcactcccatc

SEQ ID NO: 105755 - DNA, 25 bp, Homo sapien
gcttcctcaatactatcaatgcact

SEQ ID NO: 105756 - DNA, 25 bp, Homo sapien
tctctcgtgctctgctgggattctt

SEQ ID NO: 105757 - DNA, 25 bp, Homo sapien
tatagtttgttgctctctcgtgctc

SEQ ID NO: 105758 - DNA, 25 bp, Homo sapien
tcatgtacatgcaatacggcaaact

SEQ ID NO: 105759 - DNA, 25 bp, Homo sapien
tacggcaaactaaatctgacaaaag

SEQ ID NO: 105760 - DNA, 25 bp, Homo sapien
ttttgacagctagtaaagtaagcgt

SEQ ID NO: 105761 - DNA, 25 bp, Homo sapien
gctagtaaagtaagcgtctgggact

SEQ ID NO: 105762 - DNA, 25 bp, Homo sapien
taaagtaagcgtctgggactgctgg

SEQ ID NO: 105763 - DNA, 25 bp, Homo sapien
tgacagctagtaaagtaagcgtctg

SEQ ID NO: 105764 - DNA, 25 bp, Homo sapien
atgataatacccactgttgtcaagg

SEQ ID NO: 105765 - DNA, 25 bp, Homo sapien
tgtcaaggatgcaggtaaacaggca

SEQ ID NO: 105766 - DNA, 25 bp, Homo sapien
caagattaaggctattcttaaggcc

SEQ ID NO: 105767 - DNA, 25 bp, Homo sapien
cagatgtcatagtctgttaacagtt

SEQ ID NO: 105768 - DNA, 25 bp, Homo sapien
tatagaacatgtaccaagcaatgtg

SEQ ID NO: 105769 - DNA, 25 bp, Homo sapien
cagatctggaaacaaaattcggtct

SEQ ID NO: 105770 - DNA, 25 bp, Homo sapien
tttattccatccagacagatctgga

SEQ ID NO: 105771 - DNA, 25 bp, Homo sapien
aaatctgttcaaaaatagtaccata

SEQ ID NO: 105772 - DNA, 25 bp, Homo sapien
tcccatactatacagagcatcagaa

SEQ ID NO: 105773 - DNA, 25 bp, Homo sapien
ctctttccggttcacacttcagaac

SEQ ID NO: 105774 - DNA, 25 bp, Homo sapien
tttccggttcacacttcagaacaag

SEQ ID NO: 105775 - DNA, 25 bp, Homo sapien
tccggttcacacttcagaacaagta

SEQ ID NO: 105776 - DNA, 25 bp, Homo sapien
ggttcacacttcagaacaagtagaa

SEQ ID NO: 105777 - DNA, 25 bp, Homo sapien
gccaaaaaggatccccacagagaaa

SEQ ID NO: 105778 - DNA, 25 bp, Homo sapien
gagaaaactcccatcctagtaggtg

SEQ ID NO: 105779 - DNA, 25 bp, Homo sapien
tacaaacagggcatggagcctcatc

SEQ ID NO: 105780 - DNA, 25 bp, Homo sapien
tcttgctagggtagcttcctcccag

SEQ ID NO: 105781 - DNA, 25 bp, Homo sapien
gcttctatgaagacacatgcacaca

SEQ ID NO: 105782 - DNA, 25 bp, Homo sapien
aacacttggacacagcgtggggaac

SEQ ID NO: 105783 - DNA, 25 bp, Homo sapien
tgaagccagaaaccatcattctgag

SEQ ID NO: 105784 - DNA, 25 bp, Homo sapien
tatgtttattgcagcactattcaca

SEQ ID NO: 105785 - DNA, 25 bp, Homo sapien
aaatcacccatgcatttgaagaaga

SEQ ID NO: 105786 - DNA, 25 bp, Homo sapien
aggcacaatatccaacaggttgcta

SEQ ID NO: 105787 - DNA, 25 bp, Homo sapien
tggtggtacttgaagtgtagaagta

SEQ ID NO: 105788 - DNA, 25 bp, Homo sapien
tatccaacaggttgctagagaaatg

SEQ ID NO: 105789 - DNA, 25 bp, Homo sapien
ctagagaatttgagtggcttgacca

SEQ ID NO: 105790 - DNA, 25 bp, Homo sapien
cagattatcccagtacaagtgcaag

SEQ ID NO: 105791 - DNA, 25 bp, Homo sapien
cacctgtaggtgatttggtcaacaa

SEQ ID NO: 105792 - DNA, 25 bp, Homo sapien
catatgcagcactcaaattcaggac

SEQ ID NO: 105793 - DNA, 25 bp, Homo sapien
tccaatttccatcaatagttgaatg

SEQ ID NO: 105794 - DNA, 25 bp, Homo sapien
tatattcaacaatgtaaggcagaga

SEQ ID NO: 105795 - DNA, 25 bp, Homo sapien
gtatgcattaatatacaaccaagca

SEQ ID NO: 105796 - DNA, 25 bp, Homo sapien
caaccaagcaattagtaaaacatac

SEQ ID NO: 105797 - DNA, 25 bp, Homo sapien
tgtaacagtaacccctttcagttga

SEQ ID NO: 105798 - DNA, 25 bp, Homo sapien
cacagacccattgtccattggataa

SEQ ID NO: 105799 - DNA, 25 bp, Homo sapien
tccattggataaatatatctcctcc

SEQ ID NO: 105800 - DNA, 25 bp, Homo sapien
aaactctcagtaggaattgtaacag

SEQ ID NO: 105801 - DNA, 25 bp, Homo sapien
attatggtggaaggtgaaggaaaag

SEQ ID NO: 105802 - DNA, 25 bp, Homo sapien
aggttttctccagacactgaaatct

SEQ ID NO: 105803 - DNA, 25 bp, Homo sapien
gaagcaggttttctccagacactga

SEQ ID NO: 105804 - DNA, 25 bp, Homo sapien
tttgaggaagcaggttttctccaga

SEQ ID NO: 105805 - DNA, 25 bp, Homo sapien
ctggcgccttgattttgtacttccc

SEQ ID NO: 105806 - DNA, 25 bp, Homo sapien
ggcattatacaaattccctctagaa

SEQ ID NO: 105807 - DNA, 25 bp, Homo sapien
tctggatgatagctttgttccctgg

SEQ ID NO: 105808 - DNA, 25 bp, Homo sapien
tgcaattgatgtctactaacacagt

SEQ ID NO: 105809 - DNA, 25 bp, Homo sapien
gaaagccatgcttccacaaacttgg

SEQ ID NO: 105810 - DNA, 25 bp, Homo sapien
aaagagaaatatgctgggtgttggc

SEQ ID NO: 105811 - DNA, 25 bp, Homo sapien
tttgaggccctctctgagtcagagt

SEQ ID NO: 105812 - DNA, 25 bp, Homo sapien
gaatacctgggctataactacttgt

SEQ ID NO: 105813 - DNA, 25 bp, Homo sapien
aatagaatacatgtctactctgcac

SEQ ID NO: 105814 - DNA, 25 bp, Homo sapien
cacaaaagggtgacttcagcagagg

SEQ ID NO: 105815 - DNA, 25 bp, Homo sapien
gataagccagctacttggtaacagg

SEQ ID NO: 105816 - DNA, 25 bp, Homo sapien
tgatctgtcttcacccgaatagatg

SEQ ID NO: 105817 - DNA, 25 bp, Homo sapien
aacaaacactgagccttcgatatgg

SEQ ID NO: 105818 - DNA, 25 bp, Homo sapien
tgtcaccttttgctctgagatcttg

SEQ ID NO: 105819 - DNA, 25 bp, Homo sapien
gcaaattacttgttctctatacctc

SEQ ID NO: 105820 - DNA, 25 bp, Homo sapien
tttaacatcagcttagtcgctggca

SEQ ID NO: 105821 - DNA, 25 bp, Homo sapien
gagcaattgcacatctatacaacca

SEQ ID NO: 105822 - DNA, 25 bp, Homo sapien
gaagttctgcaagacgttttgtatc

SEQ ID NO: 105823 - DNA, 25 bp, Homo sapien
gatggcatcgttttctctcaggagc

SEQ ID NO: 105824 - DNA, 25 bp, Homo sapien
ttctgctaaatttaagctgatggca

SEQ ID NO: 105825 - DNA, 25 bp, Homo sapien
gatcaactggattagtcatttctgc

SEQ ID NO: 105826 - DNA, 25 bp, Homo sapien
ggcaggacaacgtctttgtagctga

SEQ ID NO: 105827 - DNA, 25 bp, Homo sapien
cattgtgagctgaacttatgagtgc

SEQ ID NO: 105828 - DNA, 25 bp, Homo sapien
cggacgcacatgaaactgactgcat

SEQ ID NO: 105829 - DNA, 25 bp, Homo sapien
gaagactgtcaacgagagctctgcc

SEQ ID NO: 105830 - DNA, 25 bp, Homo sapien
cccttgtagtccttagtcttcagga

SEQ ID NO: 105831 - DNA, 25 bp, Homo sapien
aatctttatatcccttgtagtcctt

SEQ ID NO: 105832 - DNA, 25 bp, Homo sapien
ccttgtagtccttagtcttcaggaa

SEQ ID NO: 105833 - DNA, 25 bp, Homo sapien
cttgtagtccttagtcttcaggaaa

SEQ ID NO: 105834 - DNA, 25 bp, Homo sapien
tagcttaggcttggagttggtcaga

SEQ ID NO: 105835 - DNA, 25 bp, Homo sapien
gaagatttcttgtcgctattggcca

SEQ ID NO: 105836 - DNA, 25 bp, Homo sapien
tgtcaaacatatggacgactccaca

SEQ ID NO: 105837 - DNA, 25 bp, Homo sapien
ccttgcctacgaggactagcagtaa

SEQ ID NO: 105838 - DNA, 25 bp, Homo sapien
ctgaaacttgacacgtgcaaaatgg

SEQ ID NO: 105839 - DNA, 25 bp, Homo sapien
gaaacttgacacgtgcaaaatggca

SEQ ID NO: 105840 - DNA, 25 bp, Homo sapien
aaacttgacacgtgcaaaatggcag

SEQ ID NO: 105841 - DNA, 25 bp, Homo sapien
tgaaacttgacacgtgcaaaatggc

SEQ ID NO: 105842 - DNA, 25 bp, Homo sapien
cagcctccactcttgcatactccct

SEQ ID NO: 105843 - DNA, 25 bp, Homo sapien
ttccagcctccactcttgcatactc

SEQ ID NO: 105844 - DNA, 25 bp, Homo sapien
tccagcctccactcttgcatactcc

SEQ ID NO: 105845 - DNA, 25 bp, Homo sapien
cctccactcttgcatactccctcat

SEQ ID NO: 105846 - DNA, 25 bp, Homo sapien
tcaggcattcagttgagaccagtga

SEQ ID NO: 105847 - DNA, 25 bp, Homo sapien
taggaaagaatcatgtcctagagta

SEQ ID NO: 105848 - DNA, 25 bp, Homo sapien
agtgaatgccaacctttaggaaaga

SEQ ID NO: 105849 - DNA, 25 bp, Homo sapien
gagtaaggatctccactaggactaa

SEQ ID NO: 105850 - DNA, 25 bp, Homo sapien
tataatccgagtgattctgtgtaga

SEQ ID NO: 105851 - DNA, 25 bp, Homo sapien
ctggggaactctttttgcatacata

SEQ ID NO: 105852 - DNA, 25 bp, Homo sapien
gattctgtgtagacaaggtggcatt

SEQ ID NO: 105853 - DNA, 25 bp, Homo sapien
ggtggcattatataccttttctgct

SEQ ID NO: 105854 - DNA, 25 bp, Homo sapien
tgtttcacttgagatgactgttcct

SEQ ID NO: 105855 - DNA, 25 bp, Homo sapien
ctgtttcacttgagatgactgttcc

SEQ ID NO: 105856 - DNA, 25 bp, Homo sapien
ttcacttgagatgactgttccttca

SEQ ID NO: 105857 - DNA, 25 bp, Homo sapien
tttcacttgagatgactgttccttc

SEQ ID NO: 105858 - DNA, 25 bp, Homo sapien
cacgtatattctcccaaatgacatc

SEQ ID NO: 105859 - DNA, 25 bp, Homo sapien
aatgacatcccaattttttgcctgc

SEQ ID NO: 105860 - DNA, 25 bp, Homo sapien
gagtcaggatgaatagcaagattat

SEQ ID NO: 105861 - DNA, 25 bp, Homo sapien
gatgcttgtaaagaccataggtacc

SEQ ID NO: 105862 - DNA, 25 bp, Homo sapien
tatctatacactagaaagccgtcct

SEQ ID NO: 105863 - DNA, 25 bp, Homo sapien
tgatcttttacttcccaacgtcaag

SEQ ID NO: 105864 - DNA, 25 bp, Homo sapien
gaggacatggatagaaggtgttatc

SEQ ID NO: 105865 - DNA, 25 bp, Homo sapien
tcctttactagacaccaaaatctgc

SEQ ID NO: 105866 - DNA, 25 bp, Homo sapien
ttctgccgagtatacaggcttctgc

SEQ ID NO: 105867 - DNA, 25 bp, Homo sapien
acttctgccgagtatacaggcttct

SEQ ID NO: 105868 - DNA, 25 bp, Homo sapien
cttctgccgagtatacaggcttctg

SEQ ID NO: 105869 - DNA, 25 bp, Homo sapien
tcctgttcacatgaaaacatcctgt

SEQ ID NO: 105870 - DNA, 25 bp, Homo sapien
catcctgtcgaaaaagtgctactta

SEQ ID NO: 105871 - DNA, 25 bp, Homo sapien
ctttctctgcacaccaaatgcaggc

SEQ ID NO: 105872 - DNA, 25 bp, Homo sapien
tgaagaagttagaagctatgtcctc

SEQ ID NO: 105873 - DNA, 25 bp, Homo sapien
caacttacagcatttcagcggtctc

SEQ ID NO: 105874 - DNA, 25 bp, Homo sapien
cagcggtctctaagtaaaggattct

SEQ ID NO: 105875 - DNA, 25 bp, Homo sapien
cattgttcaaaattagccctggatc

SEQ ID NO: 105876 - DNA, 25 bp, Homo sapien
tttttggcgaatatgaggatagacc

SEQ ID NO: 105877 - DNA, 25 bp, Homo sapien
tatggcccactatcagtgttactat

SEQ ID NO: 105878 - DNA, 25 bp, Homo sapien
gtcattcagattcttgcaaccactg

SEQ ID NO: 105879 - DNA, 25 bp, Homo sapien
gtgttactatagatacttcctgacg

SEQ ID NO: 105880 - DNA, 25 bp, Homo sapien
tcaccatggattatagaagccagcc

SEQ ID NO: 105881 - DNA, 25 bp, Homo sapien
atgtggcctacacagtttcatagca

SEQ ID NO: 105882 - DNA, 25 bp, Homo sapien
atagaagtcaagttccaatgtggcc

SEQ ID NO: 105883 - DNA, 25 bp, Homo sapien
catggaacctttgttatgtagaatc

SEQ ID NO: 105884 - DNA, 25 bp, Homo sapien
taaagcatacaaaatgggattcaga

SEQ ID NO: 105885 - DNA, 25 bp, Homo sapien
ttggcaccaattagaatacacgttg

SEQ ID NO: 105886 - DNA, 25 bp, Homo sapien
cctggccatatgacatcttaaggga

SEQ ID NO: 105887 - DNA, 25 bp, Homo sapien
catcagagcatcatgaaagttgagt

SEQ ID NO: 105888 - DNA, 25 bp, Homo sapien
gccaaagccatcagagcatcatgaa

SEQ ID NO: 105889 - DNA, 25 bp, Homo sapien
agccatcagagcatcatgaaagttg

SEQ ID NO: 105890 - DNA, 25 bp, Homo sapien
gaaagttgagtatttcaataagcac

SEQ ID NO: 105891 - DNA, 25 bp, Homo sapien
cttagatttaacattgctggctttg

SEQ ID NO: 105892 - DNA, 25 bp, Homo sapien
gcttagatttaacattgctggcttt

SEQ ID NO: 105893 - DNA, 25 bp, Homo sapien
tgcaatttctagagccacaatcaga

SEQ ID NO: 105894 - DNA, 25 bp, Homo sapien
tcagacaataaacgaaccgatccat

SEQ ID NO: 105895 - DNA, 25 bp, Homo sapien
gagccacaatcagacaataaacgaa

SEQ ID NO: 105896 - DNA, 25 bp, Homo sapien
ttctagagccacaatcagacaataa

SEQ ID NO: 105897 - DNA, 25 bp, Homo sapien
tcagggaagtcatagcccaggaaga

SEQ ID NO: 105898 - DNA, 25 bp, Homo sapien
cagggaagtcatagcccaggaagaa

SEQ ID NO: 105899 - DNA, 25 bp, Homo sapien
aaatcagggaagtcatagcccagga

SEQ ID NO: 105900 - DNA, 25 bp, Homo sapien
aatcagggaagtcatagcccaggaa

SEQ ID NO: 105901 - DNA, 25 bp, Homo sapien
gctgttcatctttagccatcttgcc

SEQ ID NO: 105902 - DNA, 25 bp, Homo sapien
agactggagctgttcatctttagcc

SEQ ID NO: 105903 - DNA, 25 bp, Homo sapien
gcagactggagctgttcatctttag

SEQ ID NO: 105904 - DNA, 25 bp, Homo sapien
tgttcatctttagccatcttgccag

SEQ ID NO: 105905 - DNA, 25 bp, Homo sapien
ccacctgaagaagttggggcagtgt

SEQ ID NO: 105906 - DNA, 25 bp, Homo sapien
accacctgaagaagttggggcagtg

SEQ ID NO: 105907 - DNA, 25 bp, Homo sapien
aaccacctgaagaagttggggcagt

SEQ ID NO: 105908 - DNA, 25 bp, Homo sapien
aaaccacctgaagaagttggggcag

SEQ ID NO: 105909 - DNA, 25 bp, Homo sapien
gcaaaccacatactgagttgccagt

SEQ ID NO: 105910 - DNA, 25 bp, Homo sapien
atactgagttgccagtcctgccgcc

SEQ ID NO: 105911 - DNA, 25 bp, Homo sapien
acatactgagttgccagtcctgccg

SEQ ID NO: 105912 - DNA, 25 bp, Homo sapien
accacatactgagttgccagtcctg

SEQ ID NO: 105913 - DNA, 25 bp, Homo sapien
gaagatatgatttgcatggatgaaa

SEQ ID NO: 105914 - DNA, 25 bp, Homo sapien
taaaagaagatatgatttgcatgga

SEQ ID NO: 105915 - DNA, 25 bp, Homo sapien
tgatttgcatggatgaaatcttcat

SEQ ID NO: 105916 - DNA, 25 bp, Homo sapien
tgtaaaagaagatatgatttgcatg

SEQ ID NO: 105917 - DNA, 25 bp, Homo sapien
gaggttccagtgtattcctgtacag

SEQ ID NO: 105918 - DNA, 25 bp, Homo sapien
tttgaggttccagtgtattcctgta

SEQ ID NO: 105919 - DNA, 25 bp, Homo sapien
ggttccagtgtattcctgtacagga

SEQ ID NO: 105920 - DNA, 25 bp, Homo sapien
cagtgtattcctgtacaggaaggtc

SEQ ID NO: 105921 - DNA, 25 bp, Homo sapien
ctgttcccacgtaagacaaaactgt

SEQ ID NO: 105922 - DNA, 25 bp, Homo sapien
tgttcccacgtaagacaaaactgtc

SEQ ID NO: 105923 - DNA, 25 bp, Homo sapien
cctgttcccacgtaagacaaaactg

SEQ ID NO: 105924 - DNA, 25 bp, Homo sapien
aaattcaccggagtcttggtgtcca

SEQ ID NO: 105925 - DNA, 25 bp, Homo sapien
gatattgcatgacccaatgccgcca

SEQ ID NO: 105926 - DNA, 25 bp, Homo sapien
gagacccacaaagcagagtccagga

SEQ ID NO: 105927 - DNA, 25 bp, Homo sapien
tgaaatcagctaagggaagagaccc

SEQ ID NO: 105928 - DNA, 25 bp, Homo sapien
ggatcatttagatatgttgatgtaa

SEQ ID NO: 105929 - DNA, 25 bp, Homo sapien
gcatttactgcttgcagcacttttc

SEQ ID NO: 105930 - DNA, 25 bp, Homo sapien
agatatgttgatgtaatggactgca

SEQ ID NO: 105931 - DNA, 25 bp, Homo sapien
atgtaatggactgcaaactgaacag

SEQ ID NO: 105932 - DNA, 25 bp, Homo sapien
ctccggatgggtgctgtatttagat

SEQ ID NO: 105933 - DNA, 25 bp, Homo sapien
ccaagcatcttctaactagggctag

SEQ ID NO: 105934 - DNA, 25 bp, Homo sapien
gacagattggaactaaactttttgc

SEQ ID NO: 105935 - DNA, 25 bp, Homo sapien
tgaacaactgaattggaagctatga

SEQ ID NO: 105936 - DNA, 25 bp, Homo sapien
aagtgtcttgtatgccggaaggtca

SEQ ID NO: 105937 - DNA, 25 bp, Homo sapien
gaaggtcattcttgtggctgatgtg

SEQ ID NO: 105938 - DNA, 25 bp, Homo sapien
ggaagaagtgtcttgtatgccggaa

SEQ ID NO: 105939 - DNA, 25 bp, Homo sapien
ttacatgggaagaagtgtcttgtat

SEQ ID NO: 105940 - DNA, 25 bp, Homo sapien
gaaaatttagggtcagagcgaatct

SEQ ID NO: 105941 - DNA, 25 bp, Homo sapien
gagaacagggctatatacttccacc

SEQ ID NO: 105942 - DNA, 25 bp, Homo sapien
tcatcctattagagtggaagtcttc

SEQ ID NO: 105943 - DNA, 25 bp, Homo sapien
gctcaacacagaatggtgtaaataa

SEQ ID NO: 105944 - DNA, 25 bp, Homo sapien
tgattctataaggataatgaaaaac

SEQ ID NO: 105945 - DNA, 25 bp, Homo sapien
ctgattctataaggataatgaaaaa

SEQ ID NO: 105946 - DNA, 25 bp, Homo sapien
agtcacattcactattctataagga

SEQ ID NO: 105947 - DNA, 25 bp, Homo sapien
gaccagtcaatacactaagaacagt

SEQ ID NO: 105948 - DNA, 25 bp, Homo sapien
ttacaatgctgatgtaaagggacca

SEQ ID NO: 105949 - DNA, 25 bp, Homo sapien
gaacagtcacattcactattctata

SEQ ID NO: 105950 - DNA, 25 bp, Homo sapien
gatgtatacttgcaagtcacagggc

SEQ ID NO: 105951 - DNA, 25 bp, Homo sapien
gcttcaagcgggattaggggcggcg

SEQ ID NO: 105952 - DNA, 25 bp, Homo sapien
ataaaacaaaataatgttgaagtgt

SEQ ID NO: 105953 - DNA, 25 bp, Homo sapien
gcctgacatttctgccttcttatat

SEQ ID NO: 105954 - DNA, 25 bp, Homo sapien
gacttccaccttcccaattcccatc

SEQ ID NO: 105955 - DNA, 25 bp, Homo sapien
tccaccttcccaattcccatcccca

SEQ ID NO: 105956 - DNA, 25 bp, Homo sapien
tggacttccaccttcccaattccca

SEQ ID NO: 105957 - DNA, 25 bp, Homo sapien
cggattcagtacagaagctgaagtc

SEQ ID NO: 105958 - DNA, 25 bp, Homo sapien
cagaggttgaggtcctcggattcag

SEQ ID NO: 105959 - DNA, 25 bp, Homo sapien
cagaggttgattcagtacagaggtt

SEQ ID NO: 105960 - DNA, 25 bp, Homo sapien
ctgcaagcataagtagattcggtac

SEQ ID NO: 105961 - DNA, 25 bp, Homo sapien
tccaccagcgtaaatcagttggagt

SEQ ID NO: 105962 - DNA, 25 bp, Homo sapien
gcatccaccagcgtaaatcagttgg

SEQ ID NO: 105963 - DNA, 25 bp, Homo sapien
tgtgcatccaccagcgtaaatcagt

SEQ ID NO: 105964 - DNA, 25 bp, Homo sapien
caccagcgtaaatcagttggagtca

SEQ ID NO: 105965 - DNA, 25 bp, Homo sapien
tttcaaagcattgtctaatgttgct

SEQ ID NO: 105966 - DNA, 25 bp, Homo sapien
caaagcattgtctaatgttgctgca

SEQ ID NO: 105967 - DNA, 25 bp, Homo sapien
atgaaggccctgagaatgaaagcag

SEQ ID NO: 105968 - DNA, 25 bp, Homo sapien
agcattgtctaatgttgctgcagct

SEQ ID NO: 105969 - DNA, 25 bp, Homo sapien
cattgcctgggagcactataggatt

SEQ ID NO: 105970 - DNA, 25 bp, Homo sapien
ttgctactctctatcaccctgatgg

SEQ ID NO: 105971 - DNA, 25 bp, Homo sapien
gctttgctcgcaatgaaggaagtgg

SEQ ID NO: 105972 - DNA, 25 bp, Homo sapien
ccacagtagcatatttacaggcctg

SEQ ID NO: 105973 - DNA, 25 bp, Homo sapien
ttttaatagggatgaccaaacgctc

SEQ ID NO: 105974 - DNA, 25 bp, Homo sapien
gacagaagaaccaagttctccttcc

SEQ ID NO: 105975 - DNA, 25 bp, Homo sapien
tcagtccaacttcttttaataggga

SEQ ID NO: 105976 - DNA, 25 bp, Homo sapien
tgaccaaacgctcatctgctctatg

SEQ ID NO: 105977 - DNA, 25 bp, Homo sapien
tgctctctcggcatctatttttcca

SEQ ID NO: 105978 - DNA, 25 bp, Homo sapien
tgtttcttgtctgctctctcggcat

SEQ ID NO: 105979 - DNA, 25 bp, Homo sapien
tcttgtctgctctctcggcatctat

SEQ ID NO: 105980 - DNA, 25 bp, Homo sapien
tgtctgctctctcggcatctatttt

SEQ ID NO: 105981 - DNA, 25 bp, Homo sapien
ggtgttcgaaggagtctaataaata

SEQ ID NO: 105982 - DNA, 25 bp, Homo sapien
tctctaacttgttcactattggtgt

SEQ ID NO: 105983 - DNA, 25 bp, Homo sapien
taacttgttcactattggtgttcga

SEQ ID NO: 105984 - DNA, 25 bp, Homo sapien
tgttcactattggtgttcgaaggag

SEQ ID NO: 105985 - DNA, 25 bp, Homo sapien
ctccgttactgaacttggatttagc

SEQ ID NO: 105986 - DNA, 25 bp, Homo sapien
actccgttactgaacttggatttag

SEQ ID NO: 105987 - DNA, 25 bp, Homo sapien
tattaactccgttactgaacttgga

SEQ ID NO: 105988 - DNA, 25 bp, Homo sapien
tgttgtttattaactccgttactga

SEQ ID NO: 105989 - DNA, 25 bp, Homo sapien
cttcattgagaagcatgtgggtagc

SEQ ID NO: 105990 - DNA, 25 bp, Homo sapien
tctgtaggacttctgccagggccct

SEQ ID NO: 105991 - DNA, 25 bp, Homo sapien
ttgagaagcatgtgggtagcctcct

SEQ ID NO: 105992 - DNA, 25 bp, Homo sapien
tgactgatacagtcttggaaagctg

SEQ ID NO: 105993 - DNA, 25 bp, Homo sapien
attccttcacttatcctggtaagct

SEQ ID NO: 105994 - DNA, 25 bp, Homo sapien
tccttcacttatcctggtaagcttc

SEQ ID NO: 105995 - DNA, 25 bp, Homo sapien
ccttcacttatcctggtaagcttca

SEQ ID NO: 105996 - DNA, 25 bp, Homo sapien
aattccttcacttatcctggtaagc

SEQ ID NO: 105997 - DNA, 25 bp, Homo sapien
aatttgcacagctggcttgttgagg

SEQ ID NO: 105998 - DNA, 25 bp, Homo sapien
tctgcttaggtactggaagtggaaa

SEQ ID NO: 105999 - DNA, 25 bp, Homo sapien
catggtttctgcttaggtactggaa

SEQ ID NO: 106000 - DNA, 25 bp, Homo sapien
ttaatttgcacagctggcttgttga

SEQ ID NO: 106001 - DNA, 25 bp, Homo sapien
tgaaaagtgcattagcagtatgaac

SEQ ID NO: 106002 - DNA, 25 bp, Homo sapien
atgaaaagtgcattagcagtatgaa

SEQ ID NO: 106003 - DNA, 25 bp, Homo sapien
caatgaaaagtgcattagcagtatg

SEQ ID NO: 106004 - DNA, 25 bp, Homo sapien
aatgaaaagtgcattagcagtatga

SEQ ID NO: 106005 - DNA, 25 bp, Homo sapien
caaggacagtagtacgtgtcagttc

SEQ ID NO: 106006 - DNA, 25 bp, Homo sapien
tatttccataaggagggatttctga

SEQ ID NO: 106007 - DNA, 25 bp, Homo sapien
ttaagatttgcagttcaagccaaga

SEQ ID NO: 106008 - DNA, 25 bp, Homo sapien
tgacaattgacatacaccgtgtatt

SEQ ID NO: 106009 - DNA, 25 bp, Homo sapien
gatctccttaggaaaacatagcact

SEQ ID NO: 106010 - DNA, 25 bp, Homo sapien
ctatttcgtgtgtatggtgtcctat

SEQ ID NO: 106011 - DNA, 25 bp, Homo sapien
ggaaaacatagcactatttcgtgtg

SEQ ID NO: 106012 - DNA, 25 bp, Homo sapien
tcttggatctccttaggaaaacata

SEQ ID NO: 106013 - DNA, 25 bp, Homo sapien
taaagggagtagctttacctcagaa

SEQ ID NO: 106014 - DNA, 25 bp, Homo sapien
tgataaaacttcttgtacaaagggc

SEQ ID NO: 106015 - DNA, 25 bp, Homo sapien
tttagtgttgagcaaatcaccctgg

SEQ ID NO: 106016 - DNA, 25 bp, Homo sapien
cataattgagttctgcgtgtgacac

SEQ ID NO: 106017 - DNA, 25 bp, Homo sapien
ctattccacatcttggttgtggttc

SEQ ID NO: 106018 - DNA, 25 bp, Homo sapien
cactattccacatcttggttgtggt

SEQ ID NO: 106019 - DNA, 25 bp, Homo sapien
ggatttccaatgcactattccacat

SEQ ID NO: 106020 - DNA, 25 bp, Homo sapien
tgcactattccacatcttggttgtg

SEQ ID NO: 106021 - DNA, 25 bp, Homo sapien
agaggactctgcacaaccactggct

SEQ ID NO: 106022 - DNA, 25 bp, Homo sapien
gagacgacgtcagtgttccaaagcc

SEQ ID NO: 106023 - DNA, 25 bp, Homo sapien
caagaatggcaaaaagacgctgaga

SEQ ID NO: 106024 - DNA, 25 bp, Homo sapien
caacaatattggctggagtcctctc

SEQ ID NO: 106025 - DNA, 25 bp, Homo sapien
cacagctgtagccaatggattctga

SEQ ID NO: 106026 - DNA, 25 bp, Homo sapien
tcttagctagctctttaaccacggg

SEQ ID NO: 106027 - DNA, 25 bp, Homo sapien
taaccacgggccttagtactgctca

SEQ ID NO: 106028 - DNA, 25 bp, Homo sapien
actggtgagcccctattgatgcaac

SEQ ID NO: 106029 - DNA, 25 bp, Homo sapien
gcacccagccaaccatctataattc

SEQ ID NO: 106030 - DNA, 25 bp, Homo sapien
ccagccaaccatctataattctata

SEQ ID NO: 106031 - DNA, 25 bp, Homo sapien
cgcacccagccaaccatctataatt

SEQ ID NO: 106032 - DNA, 25 bp, Homo sapien
acccagccaaccatctataattcta

SEQ ID NO: 106033 - DNA, 25 bp, Homo sapien
ttccaagtccgtgaccggtgccgga

SEQ ID NO: 106034 - DNA, 25 bp, Homo sapien
ccaaggcggcgtccctgcgtggtct

SEQ ID NO: 106035 - DNA, 25 bp, Homo sapien
cggaaataagcaattgggggcttct

SEQ ID NO: 106036 - DNA, 25 bp, Homo sapien
taagaggtcagggtgcagaaataag

SEQ ID NO: 106037 - DNA, 25 bp, Homo sapien
gagttaccggaagctcggcgtctgt

SEQ ID NO: 106038 - DNA, 25 bp, Homo sapien
gagagttaccggaagctcggcgtct

SEQ ID NO: 106039 - DNA, 25 bp, Homo sapien
gttaccggaagctcggcgtctgtga

SEQ ID NO: 106040 - DNA, 25 bp, Homo sapien
gtctgtgatggtctagggggcttcc

SEQ ID NO: 106041 - DNA, 25 bp, Homo sapien
gtgctttttgagccaggatgagcca

SEQ ID NO: 106042 - DNA, 25 bp, Homo sapien
tggggcaaggcatattcacttcttc

SEQ ID NO: 106043 - DNA, 25 bp, Homo sapien
gcaaggcatattcacttcttctgtg

SEQ ID NO: 106044 - DNA, 25 bp, Homo sapien
gggcaaggcatattcacttcttctg

SEQ ID NO: 106045 - DNA, 25 bp, Homo sapien
gtaggatctgtagtcttcccggtga

SEQ ID NO: 106046 - DNA, 25 bp, Homo sapien
tcttcccggtgaagcgtcactgggt

SEQ ID NO: 106047 - DNA, 25 bp, Homo sapien
ctgggtagtgtagtgtctttttaga

SEQ ID NO: 106048 - DNA, 25 bp, Homo sapien
aagcgtcactgggtagtgtagtgtc

SEQ ID NO: 106049 - DNA, 25 bp, Homo sapien
cggccattgtggctaaacaggtact

SEQ ID NO: 106050 - DNA, 25 bp, Homo sapien
caggaaagtggtggtcgtatgctgc

SEQ ID NO: 106051 - DNA, 25 bp, Homo sapien
aacaggtactgctgggcaggaaagt

SEQ ID NO: 106052 - DNA, 25 bp, Homo sapien
cgtatgctgcgaaggcatcaacatt

SEQ ID NO: 106053 - DNA, 25 bp, Homo sapien
tccaggcggttcatggagccctctg

SEQ ID NO: 106054 - DNA, 25 bp, Homo sapien
gttctgatttccaggcggttcatgg

SEQ ID NO: 106055 - DNA, 25 bp, Homo sapien
tgctgagtcagccagagaatggaca

SEQ ID NO: 106056 - DNA, 25 bp, Homo sapien
ccagggttctgatttccaggcggtt

SEQ ID NO: 106057 - DNA, 25 bp, Homo sapien
tacaaagccataaactaagacccag

SEQ ID NO: 106058 - DNA, 25 bp, Homo sapien
tatcaccattggttgccagtcgcca

SEQ ID NO: 106059 - DNA, 25 bp, Homo sapien
tgtccccttaaaagcagaatctctc

SEQ ID NO: 106060 - DNA, 25 bp, Homo sapien
gaataatggtgtagctataggcaga

SEQ ID NO: 106061 - DNA, 25 bp, Homo sapien
gagataaagctgtgttttgcacata

SEQ ID NO: 106062 - DNA, 25 bp, Homo sapien
gcacataattggtgctcaaagcatt

SEQ ID NO: 106063 - DNA, 25 bp, Homo sapien
cacataattggtgctcaaagcatta

SEQ ID NO: 106064 - DNA, 25 bp, Homo sapien
cagttactggagataaagctgtgtt

SEQ ID NO: 106065 - DNA, 25 bp, Homo sapien
caggttgcgttttctgggtcgtgtc

SEQ ID NO: 106066 - DNA, 25 bp, Homo sapien
aggttgcgttttctgggtcgtgtca

SEQ ID NO: 106067 - DNA, 25 bp, Homo sapien
ggttgcgttttctgggtcgtgtcat

SEQ ID NO: 106068 - DNA, 25 bp, Homo sapien
gcaggttgcgttttctgggtcgtgt

SEQ ID NO: 106069 - DNA, 25 bp, Homo sapien
aatgcccggaattcgataatcgttc

SEQ ID NO: 106070 - DNA, 25 bp, Homo sapien
gatgtaatacaatgcccggaattcg

SEQ ID NO: 106071 - DNA, 25 bp, Homo sapien
tacaatgcccggaattcgataatcg

SEQ ID NO: 106072 - DNA, 25 bp, Homo sapien
tgccttcctgatgtaatacaatgcc

SEQ ID NO: 106073 - DNA, 25 bp, Homo sapien
ccaggcatcgggcacagtagctgcc

SEQ ID NO: 106074 - DNA, 25 bp, Homo sapien
aggcatcgggcacagtagctgcccc

SEQ ID NO: 106075 - DNA, 25 bp, Homo sapien
caggcatcgggcacagtagctgccc

SEQ ID NO: 106076 - DNA, 25 bp, Homo sapien
gaaggcccaggtggttgggatgaca

SEQ ID NO: 106077 - DNA, 25 bp, Homo sapien
gtcctcttgtttcctgaggtttatg

SEQ ID NO: 106078 - DNA, 25 bp, Homo sapien
aggtttatggagcagaggaagtcct

SEQ ID NO: 106079 - DNA, 25 bp, Homo sapien
ctctggcagtttagtgggagatctg

SEQ ID NO: 106080 - DNA, 25 bp, Homo sapien
tggccactgagtagcttacgaatgg

SEQ ID NO: 106081 - DNA, 25 bp, Homo sapien
gaagagttatctccgccttagcagc

SEQ ID NO: 106082 - DNA, 25 bp, Homo sapien
tacgaatggcaatgggttgcgctgc

SEQ ID NO: 106083 - DNA, 25 bp, Homo sapien
taccagtactgctcgtggccactga

SEQ ID NO: 106084 - DNA, 25 bp, Homo sapien
gttcacgtctttgaggagtggtggc

SEQ ID NO: 106085 - DNA, 25 bp, Homo sapien
tgttaacatttcttctgaaatgatt

SEQ ID NO: 106086 - DNA, 25 bp, Homo sapien
cttgtaattgtcacttttgttaaca

SEQ ID NO: 106087 - DNA, 25 bp, Homo sapien
tgtaattgtcacttttgttaacatt

SEQ ID NO: 106088 - DNA, 25 bp, Homo sapien
acatttcttctgaaatgattaccat

SEQ ID NO: 106089 - DNA, 25 bp, Homo sapien
agctgttttggtgtattccccacaa

SEQ ID NO: 106090 - DNA, 25 bp, Homo sapien
gagagaaaaacacccagctgttttg

SEQ ID NO: 106091 - DNA, 25 bp, Homo sapien
taacaactttagtctccacctccag

SEQ ID NO: 106092 - DNA, 25 bp, Homo sapien
tccgagtgcgtgatagggtcataac

SEQ ID NO: 106093 - DNA, 25 bp, Homo sapien
gatgctacttggcatctcagagtcc

SEQ ID NO: 106094 - DNA, 25 bp, Homo sapien
tgctacttggcatctcagagtcctg

SEQ ID NO: 106095 - DNA, 25 bp, Homo sapien
gctacttggcatctcagagtcctga

SEQ ID NO: 106096 - DNA, 25 bp, Homo sapien
tacttggcatctcagagtcctgatt

SEQ ID NO: 106097 - DNA, 25 bp, Homo sapien
gggacaatgaatttcaatgtcagac

SEQ ID NO: 106098 - DNA, 25 bp, Homo sapien
tttcaatgtcagaccccttcctcgt

SEQ ID NO: 106099 - DNA, 25 bp, Homo sapien
tgttgtggtgttgtggtatacttct

SEQ ID NO: 106100 - DNA, 25 bp, Homo sapien
atcttctcatcgtcaagtaactggg

SEQ ID NO: 106101 - DNA, 25 bp, Homo sapien
cttccagcgttttgttcattgttgg

SEQ ID NO: 106102 - DNA, 25 bp, Homo sapien
tcattgttggtgtcactgatataaa

SEQ ID NO: 106103 - DNA, 25 bp, Homo sapien
tttcttccagcgttttgttcattgt

SEQ ID NO: 106104 - DNA, 25 bp, Homo sapien
gttcattgttggtgtcactgatata

SEQ ID NO: 106105 - DNA, 25 bp, Homo sapien
tcagcaaaactgtgcaatgacactg

SEQ ID NO: 106106 - DNA, 25 bp, Homo sapien
gggtttccataagagagctttcagg

SEQ ID NO: 106107 - DNA, 25 bp, Homo sapien
tgctggcgacatggcctcagaagat

SEQ ID NO: 106108 - DNA, 25 bp, Homo sapien
gctttcaggtgattgtgctggcgac

SEQ ID NO: 106109 - DNA, 25 bp, Homo sapien
cacagggaaggacagcaagtaagga

SEQ ID NO: 106110 - DNA, 25 bp, Homo sapien
taaggtctgccccaaatgtgtactt

SEQ ID NO: 106111 - DNA, 25 bp, Homo sapien
taagcagacgctaagacaaggtttc

SEQ ID NO: 106112 - DNA, 25 bp, Homo sapien
gatgtactagaaagcattcccatga

SEQ ID NO: 106113 - DNA, 25 bp, Homo sapien
ggttttagggccagttgtgctcttc

SEQ ID NO: 106114 - DNA, 25 bp, Homo sapien
taagaccttcagagaaactctcagg

SEQ ID NO: 106115 - DNA, 25 bp, Homo sapien
tggttttacggcaaaatctgtactc

SEQ ID NO: 106116 - DNA, 25 bp, Homo sapien
ctctcaggaggtgttggtttattgg

SEQ ID NO: 106117 - DNA, 25 bp, Homo sapien
ctgctgcaggaaaccatccagggac

SEQ ID NO: 106118 - DNA, 25 bp, Homo sapien
ctggattttagagatctaggctggc

SEQ ID NO: 106119 - DNA, 25 bp, Homo sapien
gctggcatccagagccataaaataa

SEQ ID NO: 106120 - DNA, 25 bp, Homo sapien
ttttagagatctaggctggctctgc

SEQ ID NO: 106121 - DNA, 25 bp, Homo sapien
ttatatcgagacaacctgaagattc

SEQ ID NO: 106122 - DNA, 25 bp, Homo sapien
gaatttatatcgagacaacctgaag

SEQ ID NO: 106123 - DNA, 25 bp, Homo sapien
tttgaatttatatcgagacaacctg

SEQ ID NO: 106124 - DNA, 25 bp, Homo sapien
tatcgagacaacctgaagattccat

SEQ ID NO: 106125 - DNA, 25 bp, Homo sapien
gtttcaactgtgacgctgtgttccc

SEQ ID NO: 106126 - DNA, 25 bp, Homo sapien
tgttcccatttgatacacctttcaa

SEQ ID NO: 106127 - DNA, 25 bp, Homo sapien
gatacacctttcaacttgcaagctg

SEQ ID NO: 106128 - DNA, 25 bp, Homo sapien
tgacgctgtgttcccatttgataca

SEQ ID NO: 106129 - DNA, 25 bp, Homo sapien
gcctgactgctaatataagacatga

SEQ ID NO: 106130 - DNA, 25 bp, Homo sapien
tattattgaaatgcactccttcccg

SEQ ID NO: 106131 - DNA, 25 bp, Homo sapien
taaaccctggcctgtagtcttggag

SEQ ID NO: 106132 - DNA, 25 bp, Homo sapien
taacacagagctgactaaaccctgg

SEQ ID NO: 106133 - DNA, 25 bp, Homo sapien
gggagtattaggcttggcagacaca

SEQ ID NO: 106134 - DNA, 25 bp, Homo sapien
tattaggcttggcagacacatgatt

SEQ ID NO: 106135 - DNA, 25 bp, Homo sapien
taggcttggcagacacatgattgac

SEQ ID NO: 106136 - DNA, 25 bp, Homo sapien
gagtattaggcttggcagacacatg

SEQ ID NO: 106137 - DNA, 25 bp, Homo sapien
tattcagtgtactcctctggaccca

SEQ ID NO: 106138 - DNA, 25 bp, Homo sapien
ccagttgacctggtattcagtgtac

SEQ ID NO: 106139 - DNA, 25 bp, Homo sapien
ccagcacttcacaggtcattaacca

SEQ ID NO: 106140 - DNA, 25 bp, Homo sapien
ggtcattaaccagttgacctggtat

SEQ ID NO: 106141 - DNA, 25 bp, Homo sapien
ctgtcctcccaactttgtattccgt

SEQ ID NO: 106142 - DNA, 25 bp, Homo sapien
gttcagaccaaaccctggatggaaa

SEQ ID NO: 106143 - DNA, 25 bp, Homo sapien
atgactgattcccaactcctgtcct

SEQ ID NO: 106144 - DNA, 25 bp, Homo sapien
caactttgtattccgttcagaccaa

SEQ ID NO: 106145 - DNA, 25 bp, Homo sapien
ccaggacataggcatccagagaatc

SEQ ID NO: 106146 - DNA, 25 bp, Homo sapien
gacataggcatccagagaatcaaat

SEQ ID NO: 106147 - DNA, 25 bp, Homo sapien
aatgctcttccataatggagagtga

SEQ ID NO: 106148 - DNA, 25 bp, Homo sapien
tctaatggaactcccacgccaaaat

SEQ ID NO: 106149 - DNA, 25 bp, Homo sapien
gatggcaaatgcagactgcagctca

SEQ ID NO: 106150 - DNA, 25 bp, Homo sapien
cagatggcaaatgcagactgcagct

SEQ ID NO: 106151 - DNA, 25 bp, Homo sapien
gagacagtcagatggcaaatgcaga

SEQ ID NO: 106152 - DNA, 25 bp, Homo sapien
cagtcagatggcaaatgcagactgc

SEQ ID NO: 106153 - DNA, 25 bp, Homo sapien
tatttttcctagcagcaaaattcat

SEQ ID NO: 106154 - DNA, 25 bp, Homo sapien
tttcctagcagcaaaattcatatcc

SEQ ID NO: 106155 - DNA, 25 bp, Homo sapien
tcctagcagcaaaattcatatccat

SEQ ID NO: 106156 - DNA, 25 bp, Homo sapien
tttttcctagcagcaaaattcatat

SEQ ID NO: 106157 - DNA, 25 bp, Homo sapien
acctgactggaccagattaactgca

SEQ ID NO: 106158 - DNA, 25 bp, Homo sapien
ctggtgcaagccagcagtactcaag

SEQ ID NO: 106159 - DNA, 25 bp, Homo sapien
tgttaatgccatgcactggtgcaag

SEQ ID NO: 106160 - DNA, 25 bp, Homo sapien
aactgcagttgccatgttaatgcca

SEQ ID NO: 106161 - DNA, 25 bp, Homo sapien
taaaaaaagccacgatccacagaac

SEQ ID NO: 106162 - DNA, 25 bp, Homo sapien
gcatgtaaaaaaagccacgatccac

SEQ ID NO: 106163 - DNA, 25 bp, Homo sapien
cttggtctgactctagcatgtaaaa

SEQ ID NO: 106164 - DNA, 25 bp, Homo sapien
tctagcatgtaaaaaaagccacgat

SEQ ID NO: 106165 - DNA, 25 bp, Homo sapien
tcacaaggagcccttcaggacagcc

SEQ ID NO: 106166 - DNA, 25 bp, Homo sapien
caaggagcccttcaggacagccaag

SEQ ID NO: 106167 - DNA, 25 bp, Homo sapien
gacagccaaggataaaacgggcttc

SEQ ID NO: 106168 - DNA, 25 bp, Homo sapien
caggacagccaaggataaaacgggc

SEQ ID NO: 106169 - DNA, 25 bp, Homo sapien
cattattgaaaaagaattttggtga

SEQ ID NO: 106170 - DNA, 25 bp, Homo sapien
tcattattgaaaaagaattttggtg

SEQ ID NO: 106171 - DNA, 25 bp, Homo sapien
tatgtcttacataagatgtgtctat

SEQ ID NO: 106172 - DNA, 25 bp, Homo sapien
catcgttctctcagattatgtctta

SEQ ID NO: 106173 - DNA, 25 bp, Homo sapien
tccaccttattcttcgatattcaca

SEQ ID NO: 106174 - DNA, 25 bp, Homo sapien
tattcttcgatattcacacactgct

SEQ ID NO: 106175 - DNA, 25 bp, Homo sapien
tactgagtatttctgactgtggatg

SEQ ID NO: 106176 - DNA, 25 bp, Homo sapien
tggacacgtacagacttagcatgga

SEQ ID NO: 106177 - DNA, 25 bp, Homo sapien
taatgcacacgtgtattctgtggac

SEQ ID NO: 106178 - DNA, 25 bp, Homo sapien
gcatggaccccttttctactgagta

SEQ ID NO: 106179 - DNA, 25 bp, Homo sapien
tgccccttttgtaaggagttatgac

SEQ ID NO: 106180 - DNA, 25 bp, Homo sapien
caacgtgtagtgctttgatgcaaaa

SEQ ID NO: 106181 - DNA, 25 bp, Homo sapien
gagttatgacgtacttgtgcgcagg

SEQ ID NO: 106182 - DNA, 25 bp, Homo sapien
tatctgtgccccttttgtaaggagt

SEQ ID NO: 106183 - DNA, 25 bp, Homo sapien
cctctgatatattatcccagttcac

SEQ ID NO: 106184 - DNA, 25 bp, Homo sapien
aatcctgggtgggacttacattctt

SEQ ID NO: 106185 - DNA, 25 bp, Homo sapien
atcctgggtgggacttacattcttt

SEQ ID NO: 106186 - DNA, 25 bp, Homo sapien
aaatcctgggtgggacttacattct

SEQ ID NO: 106187 - DNA, 25 bp, Homo sapien
tggaaaatcctgggtgggacttaca

SEQ ID NO: 106188 - DNA, 25 bp, Homo sapien
tgggtcctgtggctcttttgagcta

SEQ ID NO: 106189 - DNA, 25 bp, Homo sapien
tagcacttcagccagttgtgactta

SEQ ID NO: 106190 - DNA, 25 bp, Homo sapien
ttttgagctattgtccctgtcctcc

SEQ ID NO: 106191 - DNA, 25 bp, Homo sapien
agcacttcagccagttgtgacttac

SEQ ID NO: 106192 - DNA, 25 bp, Homo sapien
tatctgggaatagtgcttagcaaac

SEQ ID NO: 106193 - DNA, 25 bp, Homo sapien
aaaagtttctgctatagacctagga

SEQ ID NO: 106194 - DNA, 25 bp, Homo sapien
gagattatctcttaactgcctgcct

SEQ ID NO: 106195 - DNA, 25 bp, Homo sapien
caatctgtttgacaaccctgtgcaa

SEQ ID NO: 106196 - DNA, 25 bp, Homo sapien
acttcaacagcctagacaggaactt

SEQ ID NO: 106197 - DNA, 25 bp, Homo sapien
aaggacatagacataagatttagtg

SEQ ID NO: 106198 - DNA, 25 bp, Homo sapien
ggaactttgctagcataaaaatctg

SEQ ID NO: 106199 - DNA, 25 bp, Homo sapien
ctagtatcatggttcaagaggaaac

SEQ ID NO: 106200 - DNA, 25 bp, Homo sapien
gaaaatagcaggcaagattctcggt

SEQ ID NO: 106201 - DNA, 25 bp, Homo sapien
gccagacacaattaagggacatgtt

SEQ ID NO: 106202 - DNA, 25 bp, Homo sapien
caagtgcatgaatgaacggactgct

SEQ ID NO: 106203 - DNA, 25 bp, Homo sapien
ttccagggcaggacactagctcgct

SEQ ID NO: 106204 - DNA, 25 bp, Homo sapien
gttgagttgcgttctgcaccagcgg

SEQ ID NO: 106205 - DNA, 25 bp, Homo sapien
ccttgattttccggctcaggaagtg

SEQ ID NO: 106206 - DNA, 25 bp, Homo sapien
ttgattttccggctcaggaagtggg

SEQ ID NO: 106207 - DNA, 25 bp, Homo sapien
acagttgagttgcgttctgcaccag

SEQ ID NO: 106208 - DNA, 25 bp, Homo sapien
cggggaatccgagctccagcagtct

SEQ ID NO: 106209 - DNA, 25 bp, Homo sapien
tatccccgcggggaatccgagctcc

SEQ ID NO: 106210 - DNA, 25 bp, Homo sapien
tgatttatccccgcggggaatccga

SEQ ID NO: 106211 - DNA, 25 bp, Homo sapien
gctccagcagtctttgatttaataa

SEQ ID NO: 106212 - DNA, 25 bp, Homo sapien
gggtttagccggcagcaacgcactc

SEQ ID NO: 106213 - DNA, 25 bp, Homo sapien
ggattgggctgcgagccgcttcccc

SEQ ID NO: 106214 - DNA, 25 bp, Homo sapien
cagcgagcgcgctgcggattgggct

SEQ ID NO: 106215 - DNA, 25 bp, Homo sapien
ttattgggagcgataaagaggcagc

SEQ ID NO: 106216 - DNA, 25 bp, Homo sapien
ccctcccggcgtggcatttgattta

SEQ ID NO: 106217 - DNA, 25 bp, Homo sapien
gataggctggtgagcgaaaatgcac

SEQ ID NO: 106218 - DNA, 25 bp, Homo sapien
gctatcgtgaccttgtgattcttag

SEQ ID NO: 106219 - DNA, 25 bp, Homo sapien
gcgaaaatgcacgactcgcgccgtt

SEQ ID NO: 106220 - DNA, 25 bp, Homo sapien
agtgtacggtgagtggaatcgcgac

SEQ ID NO: 106221 - DNA, 25 bp, Homo sapien
tcacgtgaagatggatttactgtac

SEQ ID NO: 106222 - DNA, 25 bp, Homo sapien
tactgtacggtctcgtgtggctgct

SEQ ID NO: 106223 - DNA, 25 bp, Homo sapien
gatctctggccaaggagtgtacggt

SEQ ID NO: 106224 - DNA, 25 bp, Homo sapien
gctggccgggcgctaaaggctattt

SEQ ID NO: 106225 - DNA, 25 bp, Homo sapien
aacaggattggcgttgcaatggcaa

SEQ ID NO: 106226 - DNA, 25 bp, Homo sapien
ctggtgtgcccaagcgagctccaga

SEQ ID NO: 106227 - DNA, 25 bp, Homo sapien
tccccgttcggcgatgcgagtctgt

SEQ ID NO: 106228 - DNA, 25 bp, Homo sapien
tctcttgcaagtggcggtgcctgga

SEQ ID NO: 106229 - DNA, 25 bp, Homo sapien
tggactctgctttcggctccgggaa

SEQ ID NO: 106230 - DNA, 25 bp, Homo sapien
tgcggatcgggtatttgcctggcat

SEQ ID NO: 106231 - DNA, 25 bp, Homo sapien
cacgcgtagacgtgtgtgcggatcg

SEQ ID NO: 106232 - DNA, 25 bp, Homo sapien
cggccgccggtccgcctgcgccccg

SEQ ID NO: 106233 - DNA, 25 bp, Homo sapien
ggccgccggtccgcctgcgccccgc

SEQ ID NO: 106234 - DNA, 25 bp, Homo sapien
gcctcgcggagcctttcggcgttgt

SEQ ID NO: 106235 - DNA, 25 bp, Homo sapien
ctttcggcgttgtccatactgatga

SEQ ID NO: 106236 - DNA, 25 bp, Homo sapien
agaaatacataacgggcattcgcca

SEQ ID NO: 106237 - DNA, 25 bp, Homo sapien
tcagcgtgcaaacgcagacggcggc

SEQ ID NO: 106238 - DNA, 25 bp, Homo sapien
tccaagtgaacatcactacatttca

SEQ ID NO: 106239 - DNA, 25 bp, Homo sapien
aggccaatctttgcagaacactaac

SEQ ID NO: 106240 - DNA, 25 bp, Homo sapien
acaaggccaatctttgcagaacact

SEQ ID NO: 106241 - DNA, 25 bp, Homo sapien
catcagtgataaatgtcttgggata

SEQ ID NO: 106242 - DNA, 25 bp, Homo sapien
gaatttcaggaatgttacataatcc

SEQ ID NO: 106243 - DNA, 25 bp, Homo sapien
caaaatagaatcacaagttattcta

SEQ ID NO: 106244 - DNA, 25 bp, Homo sapien
aatatgtttcactcggacttcaggg

SEQ ID NO: 106245 - DNA, 25 bp, Homo sapien
ccaatatccaaaaacagttactttg

SEQ ID NO: 106246 - DNA, 25 bp, Homo sapien
ggttcacatctccaacactctaagc

SEQ ID NO: 106247 - DNA, 25 bp, Homo sapien
tgccacgatttgatcaatcttagcc

SEQ ID NO: 106248 - DNA, 25 bp, Homo sapien
tctccttcaggacatatttaagtga

SEQ ID NO: 106249 - DNA, 25 bp, Homo sapien
tttgcctatttggttctgccacgat

SEQ ID NO: 106250 - DNA, 25 bp, Homo sapien
tgaaggcgtttaggagagcaatcac

SEQ ID NO: 106251 - DNA, 25 bp, Homo sapien
aatcaccatgtctaacactgctgct

SEQ ID NO: 106252 - DNA, 25 bp, Homo sapien
taggagagcaatcaccatgtctaac

SEQ ID NO: 106253 - DNA, 25 bp, Homo sapien
cgtttaggagagcaatcaccatgtc

SEQ ID NO: 106254 - DNA, 25 bp, Homo sapien
aagacttgcatctggcactgtagac

SEQ ID NO: 106255 - DNA, 25 bp, Homo sapien
tttgttgataaaagctccagaaaac

SEQ ID NO: 106256 - DNA, 25 bp, Homo sapien
gcatctggcactgtagacatttcag

SEQ ID NO: 106257 - DNA, 25 bp, Homo sapien
tattgatactgtccaaaagacttgc

SEQ ID NO: 106258 - DNA, 25 bp, Homo sapien
cagcacaaacaccatgattgccata

SEQ ID NO: 106259 - DNA, 25 bp, Homo sapien
cagaaggcaccattcgttgccggtt

SEQ ID NO: 106260 - DNA, 25 bp, Homo sapien
ccttctgtccccaagtatgacctag

SEQ ID NO: 106261 - DNA, 25 bp, Homo sapien
tatgacctagtcaccacagaaggca

SEQ ID NO: 106262 - DNA, 25 bp, Homo sapien
tggctgcagtctctaggagttgatt

SEQ ID NO: 106263 - DNA, 25 bp, Homo sapien
gaaggagtatttggaacatcccagc

SEQ ID NO: 106264 - DNA, 25 bp, Homo sapien
ttgcaaattcactagctgaaggagt

SEQ ID NO: 106265 - DNA, 25 bp, Homo sapien
ataaagtgatggctgcagtctctag

SEQ ID NO: 106266 - DNA, 25 bp, Homo sapien
tgtttttgaccggtatgctaagaag

SEQ ID NO: 106267 - DNA, 25 bp, Homo sapien
gctaagaagtagatactgctttgtc

SEQ ID NO: 106268 - DNA, 25 bp, Homo sapien
ctgtttttgaccggtatgctaagaa

SEQ ID NO: 106269 - DNA, 25 bp, Homo sapien
atctgtttttgaccggtatgctaag

SEQ ID NO: 106270 - DNA, 25 bp, Homo sapien
tacctttgtcgaccagaacttctcc

SEQ ID NO: 106271 - DNA, 25 bp, Homo sapien
gaaaagtcccctgaagtacactgga

SEQ ID NO: 106272 - DNA, 25 bp, Homo sapien
aatttttgcagtgtcccagagtcga

SEQ ID NO: 106273 - DNA, 25 bp, Homo sapien
catacagtccaaacttgtgggtctg

SEQ ID NO: 106274 - DNA, 25 bp, Homo sapien
gaagcagcttaccttgggcttagag

SEQ ID NO: 106275 - DNA, 25 bp, Homo sapien
taagatgctagtacgataaaggaga

SEQ ID NO: 106276 - DNA, 25 bp, Homo sapien
tggcagagttgcttaaacatctagg

SEQ ID NO: 106277 - DNA, 25 bp, Homo sapien
cagagtgtgaccataaagctcagtc

SEQ ID NO: 106278 - DNA, 25 bp, Homo sapien
tgtgtcatggggtaagactcttcgc

SEQ ID NO: 106279 - DNA, 25 bp, Homo sapien
ccagtggcggtttgattttagtctc

SEQ ID NO: 106280 - DNA, 25 bp, Homo sapien
gggtaagactcttcgcatctggaac

SEQ ID NO: 106281 - DNA, 25 bp, Homo sapien
cagatctgagctttacacccagtgg

SEQ ID NO: 106282 - DNA, 25 bp, Homo sapien
tgcaaaactgacattattaggaatc

SEQ ID NO: 106283 - DNA, 25 bp, Homo sapien
ggaatcactgtatcagaggtcatca

SEQ ID NO: 106284 - DNA, 25 bp, Homo sapien
ttaggaatcactgtatcagaggtca

SEQ ID NO: 106285 - DNA, 25 bp, Homo sapien
attacttgaggcattagtttctttc

SEQ ID NO: 106286 - DNA, 25 bp, Homo sapien
tcttgtgtcttcttacgcaagtcat

SEQ ID NO: 106287 - DNA, 25 bp, Homo sapien
ttattgttttctataccacaggctt

SEQ ID NO: 106288 - DNA, 25 bp, Homo sapien
ttcttgtgtcttcttacgcaagtca

SEQ ID NO: 106289 - DNA, 25 bp, Homo sapien
tattgttttctataccacaggcttt

SEQ ID NO: 106290 - DNA, 25 bp, Homo sapien
tatgcaaatacgttgagtggagacg

SEQ ID NO: 106291 - DNA, 25 bp, Homo sapien
gcctctggcatatgaaagagtttat

SEQ ID NO: 106292 - DNA, 25 bp, Homo sapien
gagacgtagtgtggcatagaccaag

SEQ ID NO: 106293 - DNA, 25 bp, Homo sapien
ttaattagggaatgtagcactcaat

SEQ ID NO: 106294 - DNA, 25 bp, Homo sapien
ctttcctctagtgcctgtcttcttc

SEQ ID NO: 106295 - DNA, 25 bp, Homo sapien
cctctagtgcctgtcttcttcattc

SEQ ID NO: 106296 - DNA, 25 bp, Homo sapien
tcttcttcattctgggcatattcat

SEQ ID NO: 106297 - DNA, 25 bp, Homo sapien
ttcctctagtgcctgtcttcttcat

SEQ ID NO: 106298 - DNA, 25 bp, Homo sapien
ccttttgagaataactcagatggaa

SEQ ID NO: 106299 - DNA, 25 bp, Homo sapien
tacacaaatgtatgttcgtattgac

SEQ ID NO: 106300 - DNA, 25 bp, Homo sapien
gaataactcagatggaaaatacaca

SEQ ID NO: 106301 - DNA, 25 bp, Homo sapien
ttgactttggagagctgaagaatca

SEQ ID NO: 106302 - DNA, 25 bp, Homo sapien
tgtttaagtctgaagcgtgatccct

SEQ ID NO: 106303 - DNA, 25 bp, Homo sapien
tatgtctctaaaccggggagctgtc

SEQ ID NO: 106304 - DNA, 25 bp, Homo sapien
tcctgacaaagctgattgaccgggt

SEQ ID NO: 106305 - DNA, 25 bp, Homo sapien
ccgggtttcaatgtatggttcttgt

SEQ ID NO: 106306 - DNA, 25 bp, Homo sapien
cttcaccatgtgatcaacatactgt

SEQ ID NO: 106307 - DNA, 25 bp, Homo sapien
tgtcaccagcaatgtcaggtggaca

SEQ ID NO: 106308 - DNA, 25 bp, Homo sapien
ggtggacatcgtgtatcacttgata

SEQ ID NO: 106309 - DNA, 25 bp, Homo sapien
caccatgtgatcaacatactgtcac

SEQ ID NO: 106310 - DNA, 25 bp, Homo sapien
gagtcattctgtccctaggatagcc

SEQ ID NO: 106311 - DNA, 25 bp, Homo sapien
taggatagccattaaacctagaacc

SEQ ID NO: 106312 - DNA, 25 bp, Homo sapien
acttaacttgtttgactgtgggtca

SEQ ID NO: 106313 - DNA, 25 bp, Homo sapien
ctcttcgccaagacaggccatagaa

SEQ ID NO: 106314 - DNA, 25 bp, Homo sapien
catgaaccaaatccagcttctagat

SEQ ID NO: 106315 - DNA, 25 bp, Homo sapien
tacagaattctgaatttcagggaag

SEQ ID NO: 106316 - DNA, 25 bp, Homo sapien
cttctctgagctcaagggtgaagat

SEQ ID NO: 106317 - DNA, 25 bp, Homo sapien
tcatgaaccaaatccagcttctaga

SEQ ID NO: 106318 - DNA, 25 bp, Homo sapien
ttaggtacatagttcaaggagtgag

SEQ ID NO: 106319 - DNA, 25 bp, Homo sapien
gaagtatagtgaccagtagacaaac

SEQ ID NO: 106320 - DNA, 25 bp, Homo sapien
ggcattcataaaattctgcacccaa

SEQ ID NO: 106321 - DNA, 25 bp, Homo sapien
gagtcttatccttcaatttatggca

SEQ ID NO: 106322 - DNA, 25 bp, Homo sapien
ttccttcttcattgagtgctcttga

SEQ ID NO: 106323 - DNA, 25 bp, Homo sapien
tcttcattgagtgctcttgattcat

SEQ ID NO: 106324 - DNA, 25 bp, Homo sapien
ttcttcattgagtgctcttgattca

SEQ ID NO: 106325 - DNA, 25 bp, Homo sapien
ccttcttcattgagtgctcttgatt

SEQ ID NO: 106326 - DNA, 25 bp, Homo sapien
gcttctcttctcttctgtagctctt

SEQ ID NO: 106327 - DNA, 25 bp, Homo sapien
aggcttctcttctcttctgtagctc

SEQ ID NO: 106328 - DNA, 25 bp, Homo sapien
cttttctaagtaggcttctcttctc

SEQ ID NO: 106329 - DNA, 25 bp, Homo sapien
tacttttctaagtaggcttctcttc

SEQ ID NO: 106330 - DNA, 25 bp, Homo sapien
gaaatgtacttggagctcaatacta

SEQ ID NO: 106331 - DNA, 25 bp, Homo sapien
catttagatgtcagtactatgttga

SEQ ID NO: 106332 - DNA, 25 bp, Homo sapien
gtgttggccagagtgctctccaatt

SEQ ID NO: 106333 - DNA, 25 bp, Homo sapien
tttctccatatgcagtacatcaact

SEQ ID NO: 106334 - DNA, 25 bp, Homo sapien
acagatctgtgctgttcttgcagag

SEQ ID NO: 106335 - DNA, 25 bp, Homo sapien
agtgatgggcataggataatcagta

SEQ ID NO: 106336 - DNA, 25 bp, Homo sapien
attaaatgaagctagttctttttct

SEQ ID NO: 106337 - DNA, 25 bp, Homo sapien
cagagtgatgggcataggataatca

SEQ ID NO: 106338 - DNA, 25 bp, Homo sapien
gttaacctaatcagcttcctcctta

SEQ ID NO: 106339 - DNA, 25 bp, Homo sapien
tgagttaacctaatcagcttcctcc

SEQ ID NO: 106340 - DNA, 25 bp, Homo sapien
taatcagcttcctccttacaaagga

SEQ ID NO: 106341 - DNA, 25 bp, Homo sapien
cctaatcagcttcctccttacaaag

SEQ ID NO: 106342 - DNA, 25 bp, Homo sapien
gctatttttctgattatcgagtcat

SEQ ID NO: 106343 - DNA, 25 bp, Homo sapien
tcttgaattgccctttctacattta

SEQ ID NO: 106344 - DNA, 25 bp, Homo sapien
ttgaattgccctttctacatttaga

SEQ ID NO: 106345 - DNA, 25 bp, Homo sapien
tttagagctatttttctgattatcg

SEQ ID NO: 106346 - DNA, 25 bp, Homo sapien
taattttggccttctgaagaacctc

SEQ ID NO: 106347 - DNA, 25 bp, Homo sapien
ccttctgaagaacctctgaagaaga

SEQ ID NO: 106348 - DNA, 25 bp, Homo sapien
ttctgaagaacctctgaagaagacc

SEQ ID NO: 106349 - DNA, 25 bp, Homo sapien
tggccttctgaagaacctctgaaga

SEQ ID NO: 106350 - DNA, 25 bp, Homo sapien
atctccttaaactccataacccaat

SEQ ID NO: 106351 - DNA, 25 bp, Homo sapien
cccaattaaatctagctcttcttca

SEQ ID NO: 106352 - DNA, 25 bp, Homo sapien
ccatctccttaaactccataaccca

SEQ ID NO: 106353 - DNA, 25 bp, Homo sapien
tccataacccaattaaatctagctc

SEQ ID NO: 106354 - DNA, 25 bp, Homo sapien
ccctttagagcagtaataagaactt

SEQ ID NO: 106355 - DNA, 25 bp, Homo sapien
tacatttaaagcaccctcttcaatc

SEQ ID NO: 106356 - DNA, 25 bp, Homo sapien
agacgaaaatccctttagagcagta

SEQ ID NO: 106357 - DNA, 25 bp, Homo sapien
aataactcttagactatggcttaca

SEQ ID NO: 106358 - DNA, 25 bp, Homo sapien
attcccacttctttcgggcttactg

SEQ ID NO: 106359 - DNA, 25 bp, Homo sapien
ctcttgcacatggagtcttctatat

SEQ ID NO: 106360 - DNA, 25 bp, Homo sapien
ttctatattcccacttctttcgggc

SEQ ID NO: 106361 - DNA, 25 bp, Homo sapien
tggagtcttctatattcccacttct

SEQ ID NO: 106362 - DNA, 25 bp, Homo sapien
agcacaagttacagccatttctaca

SEQ ID NO: 106363 - DNA, 25 bp, Homo sapien
acaagttacagccatttctacaccc

SEQ ID NO: 106364 - DNA, 25 bp, Homo sapien
gcacaagttacagccatttctacac

SEQ ID NO: 106365 - DNA, 25 bp, Homo sapien
aagttacagccatttctacacccat

SEQ ID NO: 106366 - DNA, 25 bp, Homo sapien
tgtcagatcagcattgttcacaccc

SEQ ID NO: 106367 - DNA, 25 bp, Homo sapien
tcagcattgttcacacccacatctg

SEQ ID NO: 106368 - DNA, 25 bp, Homo sapien
tctcccctacattgcatgggaaagc

SEQ ID NO: 106369 - DNA, 25 bp, Homo sapien
catgggaaagctttgtagatgcatt

SEQ ID NO: 106370 - DNA, 25 bp, Homo sapien
cagactttgccattctgagtcaggg

SEQ ID NO: 106371 - DNA, 25 bp, Homo sapien
ctgagtcagggagttttcatagtct

SEQ ID NO: 106372 - DNA, 25 bp, Homo sapien
tttccagactttgccattctgagtc

SEQ ID NO: 106373 - DNA, 25 bp, Homo sapien
tcagggagttttcatagtcttcagc

SEQ ID NO: 106374 - DNA, 25 bp, Homo sapien
tgaaggacaagtactagttttgacc

SEQ ID NO: 106375 - DNA, 25 bp, Homo sapien
acttgaaggacaagtactagttttg

SEQ ID NO: 106376 - DNA, 25 bp, Homo sapien
ctgaggttttatactttggcgtact

SEQ ID NO: 106377 - DNA, 25 bp, Homo sapien
gccaagtgggcgacttgaaggacaa

SEQ ID NO: 106378 - DNA, 25 bp, Homo sapien
gatgttcgacccagcaggagctaca

SEQ ID NO: 106379 - DNA, 25 bp, Homo sapien
caactgttcgcaggtgtatcgaggc

SEQ ID NO: 106380 - DNA, 25 bp, Homo sapien
taaataggaaggtaaagaggtgctc

SEQ ID NO: 106381 - DNA, 25 bp, Homo sapien
gaggtgctctggaacacgagatcat

SEQ ID NO: 106382 - DNA, 25 bp, Homo sapien
aagcttactctttatatgggctcaa

SEQ ID NO: 106383 - DNA, 25 bp, Homo sapien
gagtcgccgtcattctaaagcttac

SEQ ID NO: 106384 - DNA, 25 bp, Homo sapien
gctccaataggtaccatacgcacac

SEQ ID NO: 106385 - DNA, 25 bp, Homo sapien
gctcaagatagctccaataggtacc

SEQ ID NO: 106386 - DNA, 25 bp, Homo sapien
cagatgatgccatgtttgaagttaa

SEQ ID NO: 106387 - DNA, 25 bp, Homo sapien
tcaatgtgccccagagtgcttcaat

SEQ ID NO: 106388 - DNA, 25 bp, Homo sapien
ccagagtgcttcaataggaaaagcc

SEQ ID NO: 106389 - DNA, 25 bp, Homo sapien
ggagaaatcaatgtgccccagagtg

SEQ ID NO: 106390 - DNA, 25 bp, Homo sapien
gagactttagagaatacagttgacc

SEQ ID NO: 106391 - DNA, 25 bp, Homo sapien
gattggtgtggctccaatgatatgt

SEQ ID NO: 106392 - DNA, 25 bp, Homo sapien
aggtttgattggtgtggctccaatg

SEQ ID NO: 106393 - DNA, 25 bp, Homo sapien
tgaattgagactttagagaatacag

SEQ ID NO: 106394 - DNA, 25 bp, Homo sapien
tttatacttgttaaatacacacaaa

SEQ ID NO: 106395 - DNA, 25 bp, Homo sapien
ttatacttgttaaatacacacaaag

SEQ ID NO: 106396 - DNA, 25 bp, Homo sapien
tatacttgttaaatacacacaaaga

SEQ ID NO: 106397 - DNA, 25 bp, Homo sapien
gcaaagcctttgatgttggttggtt

SEQ ID NO: 106398 - DNA, 25 bp, Homo sapien
ggttggtttcttgccactcaacaca

SEQ ID NO: 106399 - DNA, 25 bp, Homo sapien
cctatggacttgacaccttggattc

SEQ ID NO: 106400 - DNA, 25 bp, Homo sapien
aactttgctctcacctgacaattag

SEQ ID NO: 106401 - DNA, 25 bp, Homo sapien
tatagaagcctcttgatgttctgcc

SEQ ID NO: 106402 - DNA, 25 bp, Homo sapien
gatacatcccaagatatttggccac

SEQ ID NO: 106403 - DNA, 25 bp, Homo sapien
tgttctgaatggaaagcctgatctg

SEQ ID NO: 106404 - DNA, 25 bp, Homo sapien
tggggacagcacaatcaaaagatac

SEQ ID NO: 106405 - DNA, 25 bp, Homo sapien
ttggccactagattaaggtaggatc

SEQ ID NO: 106406 - DNA, 25 bp, Homo sapien
caatgcactgtgattgtccttttat

SEQ ID NO: 106407 - DNA, 25 bp, Homo sapien
cagagcctcgggcagtcattagagg

SEQ ID NO: 106408 - DNA, 25 bp, Homo sapien
ctgctacagtcctatccacaatgca

SEQ ID NO: 106409 - DNA, 25 bp, Homo sapien
tctagcctgaaacttgtagcagagc

SEQ ID NO: 106410 - DNA, 25 bp, Homo sapien
tgaatggcatgctgcgcaaagatca

SEQ ID NO: 106411 - DNA, 25 bp, Homo sapien
taactgccagtaagcccaattcggt

SEQ ID NO: 106412 - DNA, 25 bp, Homo sapien
tatggcctctatagggatgaatggc

SEQ ID NO: 106413 - DNA, 25 bp, Homo sapien
gcaaagatcatgtaaattggccaca

SEQ ID NO: 106414 - DNA, 25 bp, Homo sapien
atgttttggtcttttggagatgaat

SEQ ID NO: 106415 - DNA, 25 bp, Homo sapien
ctggtattctagaggcaatgtactt

SEQ ID NO: 106416 - DNA, 25 bp, Homo sapien
tgttttggtcttttggagatgaata

SEQ ID NO: 106417 - DNA, 25 bp, Homo sapien
ttcaaatctactccagataggtggg

SEQ ID NO: 106418 - DNA, 25 bp, Homo sapien
ttctgggtccgataatatgaagtct

SEQ ID NO: 106419 - DNA, 25 bp, Homo sapien
tatgaagtctccaaggggtaaagac

SEQ ID NO: 106420 - DNA, 25 bp, Homo sapien
tccaaggggtaaagactgacatttc

SEQ ID NO: 106421 - DNA, 25 bp, Homo sapien
tgtattctattagtgcaacatcctt

SEQ ID NO: 106422 - DNA, 25 bp, Homo sapien
tagtgcaacatcctttcatttttct

SEQ ID NO: 106423 - DNA, 25 bp, Homo sapien
aacagatttgtcttcggtttcttca

SEQ ID NO: 106424 - DNA, 25 bp, Homo sapien
cactttgtctgttaagtggctgcca

SEQ ID NO: 106425 - DNA, 25 bp, Homo sapien
gtgctgataatttcgtttcctcaaa

SEQ ID NO: 106426 - DNA, 25 bp, Homo sapien
aagtcagaggcagcccttttattac

SEQ ID NO: 106427 - DNA, 25 bp, Homo sapien
ttgtgctgataatttcgtttcctca

SEQ ID NO: 106428 - DNA, 25 bp, Homo sapien
tgctgataatttcgtttcctcaaaa

SEQ ID NO: 106429 - DNA, 25 bp, Homo sapien
attactgaactaattccaggtttga

SEQ ID NO: 106430 - DNA, 25 bp, Homo sapien
tgaaaaacttcctaggcaaaatgac

SEQ ID NO: 106431 - DNA, 25 bp, Homo sapien
tgaagactatcacttgcctgtcagc

SEQ ID NO: 106432 - DNA, 25 bp, Homo sapien
gaaaaacttcctaggcaaaatgaca

SEQ ID NO: 106433 - DNA, 25 bp, Homo sapien
atacacgtgagcaataaaagacacc

SEQ ID NO: 106434 - DNA, 25 bp, Homo sapien
gaggtcaaaagcttgctttgagaag

SEQ ID NO: 106435 - DNA, 25 bp, Homo sapien
ccactttgtaaaatacacgtgagca

SEQ ID NO: 106436 - DNA, 25 bp, Homo sapien
gagaagtccttacagattgcagtgg

SEQ ID NO: 106437 - DNA, 25 bp, Homo sapien
gaattggttgtaacgttctgaggag

SEQ ID NO: 106438 - DNA, 25 bp, Homo sapien
agtaaaatatggagtcccgattgaa

SEQ ID NO: 106439 - DNA, 25 bp, Homo sapien
gagtcccgattgaattggttgtaac

SEQ ID NO: 106440 - DNA, 25 bp, Homo sapien
tctgaggaggaatcactgagactat

SEQ ID NO: 106441 - DNA, 25 bp, Homo sapien
gacatttcttggatagcggctatca

SEQ ID NO: 106442 - DNA, 25 bp, Homo sapien
aagcaggacatttcttggatagcgg

SEQ ID NO: 106443 - DNA, 25 bp, Homo sapien
cattaaagttaggattattctgcat

SEQ ID NO: 106444 - DNA, 25 bp, Homo sapien
gatagcggctatcagcttccttgtt

SEQ ID NO: 106445 - DNA, 25 bp, Homo sapien
ggatactgctgacggtgtttaatga

SEQ ID NO: 106446 - DNA, 25 bp, Homo sapien
tcaaactgaaagataatggaaacac

SEQ ID NO: 106447 - DNA, 25 bp, Homo sapien
tggaaacacagcttatcaacatttg

SEQ ID NO: 106448 - DNA, 25 bp, Homo sapien
ctcaactcgtgtatcttaagactaa

SEQ ID NO: 106449 - DNA, 25 bp, Homo sapien
ttgagtggaacctttctatccttgt

SEQ ID NO: 106450 - DNA, 25 bp, Homo sapien
cttgagtggaacctttctatccttg

SEQ ID NO: 106451 - DNA, 25 bp, Homo sapien
tttggtgcaacccataaacagcctc

SEQ ID NO: 106452 - DNA, 25 bp, Homo sapien
gaaagcaatagaggtagccatttgg

SEQ ID NO: 106453 - DNA, 25 bp, Homo sapien
gtcagaaagtttcatctgctggatc

SEQ ID NO: 106454 - DNA, 25 bp, Homo sapien
taaatgtggagttggtttctctggc

SEQ ID NO: 106455 - DNA, 25 bp, Homo sapien
gaacccacacatcgtccattatggt

SEQ ID NO: 106456 - DNA, 25 bp, Homo sapien
acacatcgtccattatggtccccaa

SEQ ID NO: 106457 - DNA, 25 bp, Homo sapien
tcctgaacccacacatcgtccatta

SEQ ID NO: 106458 - DNA, 25 bp, Homo sapien
catcgtccattatggtccccaaaac

SEQ ID NO: 106459 - DNA, 25 bp, Homo sapien
cctgggcctctggagtgttagaact

SEQ ID NO: 106460 - DNA, 25 bp, Homo sapien
tggctttgaagggttatccaggcct

SEQ ID NO: 106461 - DNA, 25 bp, Homo sapien
ttggtgcttgcaacagccagagagc

SEQ ID NO: 106462 - DNA, 25 bp, Homo sapien
gcagaacggtgtgatggcccttgaa

SEQ ID NO: 106463 - DNA, 25 bp, Homo sapien
atgtgcgttcttcagtgtccctgtg

SEQ ID NO: 106464 - DNA, 25 bp, Homo sapien
tatgtgcgttcttcagtgtccctgt

SEQ ID NO: 106465 - DNA, 25 bp, Homo sapien
catatgtgcgttcttcagtgtccct

SEQ ID NO: 106466 - DNA, 25 bp, Homo sapien
atatgtgcgttcttcagtgtccctg

SEQ ID NO: 106467 - DNA, 25 bp, Homo sapien
tcaaccaatgtcagtagcagtatca

SEQ ID NO: 106468 - DNA, 25 bp, Homo sapien
accaatgtcagtagcagtatcatca

SEQ ID NO: 106469 - DNA, 25 bp, Homo sapien
caatgtcagtagcagtatcatcaaa

SEQ ID NO: 106470 - DNA, 25 bp, Homo sapien
gcagtatcatcaaagttgatagcat

SEQ ID NO: 106471 - DNA, 25 bp, Homo sapien
tctccatcatctctttcagtaacac

SEQ ID NO: 106472 - DNA, 25 bp, Homo sapien
catttgcgtctgctgtcctttgcac

SEQ ID NO: 106473 - DNA, 25 bp, Homo sapien
cctataatgggagtgatttttaact

SEQ ID NO: 106474 - DNA, 25 bp, Homo sapien
ctgctgtcctttgcacctataatgg

SEQ ID NO: 106475 - DNA, 25 bp, Homo sapien
acttccatgccatttgcgtctgctg

SEQ ID NO: 106476 - DNA, 25 bp, Homo sapien
tccactgccagtgaggattctgcag

SEQ ID NO: 106477 - DNA, 25 bp, Homo sapien
gattctgcagacgttttttatcagg

SEQ ID NO: 106478 - DNA, 25 bp, Homo sapien
tgattaatggctccatcatccactg

SEQ ID NO: 106479 - DNA, 25 bp, Homo sapien
ggatttaccacttttgattaatggc

SEQ ID NO: 106480 - DNA, 25 bp, Homo sapien
cctgctttacctttgataaaccaca

SEQ ID NO: 106481 - DNA, 25 bp, Homo sapien
tttctcgtgatgtgcccctgcttta

SEQ ID NO: 106482 - DNA, 25 bp, Homo sapien
tcctctttctcgtgatgtgcccctg

SEQ ID NO: 106483 - DNA, 25 bp, Homo sapien
caatgtcctctttctcgtgatgtgc

SEQ ID NO: 106484 - DNA, 25 bp, Homo sapien
ctttgatggattgtgttgtcagagc

SEQ ID NO: 106485 - DNA, 25 bp, Homo sapien
gcagctgctcactcaaaataaactt

SEQ ID NO: 106486 - DNA, 25 bp, Homo sapien
gctagtgacgttcctcgatgaaaaa

SEQ ID NO: 106487 - DNA, 25 bp, Homo sapien
cattagatgcatcgtgctgttgcgg

SEQ ID NO: 106488 - DNA, 25 bp, Homo sapien
gctgttgcggtatgttaaattgtga

SEQ ID NO: 106489 - DNA, 25 bp, Homo sapien
catcctaatagtctatggcagtaca

SEQ ID NO: 106490 - DNA, 25 bp, Homo sapien
tcaaccacttcaaaagccgctccct

SEQ ID NO: 106491 - DNA, 25 bp, Homo sapien
gaggccacatcacaaggcacagtct

SEQ ID NO: 106492 - DNA, 25 bp, Homo sapien
caaaagccgctccctttgttccttg

SEQ ID NO: 106493 - DNA, 25 bp, Homo sapien
gaaggcctgaatccctggctagatt

SEQ ID NO: 106494 - DNA, 25 bp, Homo sapien
tcagcaatgactaaaagtttggact

SEQ ID NO: 106495 - DNA, 25 bp, Homo sapien
taggtgcttgtctagagtcttccgc

SEQ ID NO: 106496 - DNA, 25 bp, Homo sapien
tttggacttaagttccatggcctgc

SEQ ID NO: 106497 - DNA, 25 bp, Homo sapien
tcataataatcaaacacatcatctg

SEQ ID NO: 106498 - DNA, 25 bp, Homo sapien
gagttgatccaagtacaagtacatc

SEQ ID NO: 106499 - DNA, 25 bp, Homo sapien
catctatagatttcaggttccagag

SEQ ID NO: 106500 - DNA, 25 bp, Homo sapien
gctcttttatagatcagagagttga

SEQ ID NO: 106501 - DNA, 25 bp, Homo sapien
agagagttgatccaagtacaagtac

SEQ ID NO: 106502 - DNA, 25 bp, Homo sapien
tctaatgcggaatgaaaatgtctga

SEQ ID NO: 106503 - DNA, 25 bp, Homo sapien
tttgggtcaaaagcgtgcacatcaa

SEQ ID NO: 106504 - DNA, 25 bp, Homo sapien
cacatcaaagttacctctaatgcgg

SEQ ID NO: 106505 - DNA, 25 bp, Homo sapien
gggtcaaaagcgtgcacatcaaagt

SEQ ID NO: 106506 - DNA, 25 bp, Homo sapien
gcttctgctccagctatgtgagatg

SEQ ID NO: 106507 - DNA, 25 bp, Homo sapien
tgttgtaaagtgtgacatctcccct

SEQ ID NO: 106508 - DNA, 25 bp, Homo sapien
tgcgtgagttatgaaggcaggttcc

SEQ ID NO: 106509 - DNA, 25 bp, Homo sapien
caatgttgaaaggttcctaaagcct

SEQ ID NO: 106510 - DNA, 25 bp, Homo sapien
tattggagtcatgattgttagcaca

SEQ ID NO: 106511 - DNA, 25 bp, Homo sapien
gactgaacctgttgaccctttactg

SEQ ID NO: 106512 - DNA, 25 bp, Homo sapien
gaccatagatggaaagacctttctt

SEQ ID NO: 106513 - DNA, 25 bp, Homo sapien
tgttgaaccacaattgctagtctca

SEQ ID NO: 106514 - DNA, 25 bp, Homo sapien
cagaaggtgtatttactctgctggg

SEQ ID NO: 106515 - DNA, 25 bp, Homo sapien
cacttggggcttagggtgactcggg

SEQ ID NO: 106516 - DNA, 25 bp, Homo sapien
ttacccaagttctttgctcaatgat

SEQ ID NO: 106517 - DNA, 25 bp, Homo sapien
ctgctgggggatatcatcatttttc

SEQ ID NO: 106518 - DNA, 25 bp, Homo sapien
aactcttcactgctgaaatgggcta

SEQ ID NO: 106519 - DNA, 25 bp, Homo sapien
ctcaataacatcttgaggagctgtg

SEQ ID NO: 106520 - DNA, 25 bp, Homo sapien
caataactgtcacactaccctgctg

SEQ ID NO: 106521 - DNA, 25 bp, Homo sapien
gtcacactaccctgctgttcatttt

SEQ ID NO: 106522 - DNA, 25 bp, Homo sapien
ctgctctattcttaaaaccccatcg

SEQ ID NO: 106523 - DNA, 25 bp, Homo sapien
gctttgccctataaatggctgttac

SEQ ID NO: 106524 - DNA, 25 bp, Homo sapien
catcgctgtttcaccttgtcaactt

SEQ ID NO: 106525 - DNA, 25 bp, Homo sapien
tctcctagctttgccctataaatgg

SEQ ID NO: 106526 - DNA, 25 bp, Homo sapien
ctgtgttcagtcagaattgtcctga

SEQ ID NO: 106527 - DNA, 25 bp, Homo sapien
tctgagtcgttactgaaatggtcct

SEQ ID NO: 106528 - DNA, 25 bp, Homo sapien
gacgtcttctgagtcgttactgaaa

SEQ ID NO: 106529 - DNA, 25 bp, Homo sapien
aattgtcctgacgtcttctgagtcg

SEQ ID NO: 106530 - DNA, 25 bp, Homo sapien
ggctagcttttcatttagtgatgag

SEQ ID NO: 106531 - DNA, 25 bp, Homo sapien
attgccaaactcgagtccccaggat

SEQ ID NO: 106532 - DNA, 25 bp, Homo sapien
gatcccctgggatatgacttggcag

SEQ ID NO: 106533 - DNA, 25 bp, Homo sapien
ggatgaatgcgactccatgcctccg

SEQ ID NO: 106534 - DNA, 25 bp, Homo sapien
aaatgtgtacacataatccataatg

SEQ ID NO: 106535 - DNA, 25 bp, Homo sapien
ggaggacagagatggatactgcctt

SEQ ID NO: 106536 - DNA, 25 bp, Homo sapien
tacacataatccataatgaataact

SEQ ID NO: 106537 - DNA, 25 bp, Homo sapien
cataatgaataactgcagctccttg

SEQ ID NO: 106538 - DNA, 25 bp, Homo sapien
tgacactttccccagcctgaaactg

SEQ ID NO: 106539 - DNA, 25 bp, Homo sapien
actgcttctctccttgacccttctc

SEQ ID NO: 106540 - DNA, 25 bp, Homo sapien
ttgactgcttctctccttgaccctt

SEQ ID NO: 106541 - DNA, 25 bp, Homo sapien
tgcttctctccttgacccttctcat

SEQ ID NO: 106542 - DNA, 25 bp, Homo sapien
catcttgactgcttctctccttgac

SEQ ID NO: 106543 - DNA, 25 bp, Homo sapien
atctgatatcagtactcctttcggg

SEQ ID NO: 106544 - DNA, 25 bp, Homo sapien
tcgggggaaaagttctctgagaaca

SEQ ID NO: 106545 - DNA, 25 bp, Homo sapien
tatccttacatctgatatcagtact

SEQ ID NO: 106546 - DNA, 25 bp, Homo sapien
tacatctgatatcagtactcctttc

SEQ ID NO: 106547 - DNA, 25 bp, Homo sapien
aaaagctcaatgttgtccctagagg

SEQ ID NO: 106548 - DNA, 25 bp, Homo sapien
gatatttgtatcattgggctaccaa

SEQ ID NO: 106549 - DNA, 25 bp, Homo sapien
gtttcagaagtgttaaggaggctac

SEQ ID NO: 106550 - DNA, 25 bp, Homo sapien
tgctagctaaagatggtttcagaag

SEQ ID NO: 106551 - DNA, 25 bp, Homo sapien
cagaaggattggcagagaatgtgtt

SEQ ID NO: 106552 - DNA, 25 bp, Homo sapien
tttctgatagcaatgcacaaagcct

SEQ ID NO: 106553 - DNA, 25 bp, Homo sapien
cctaagcaacagaaggattggcaga

SEQ ID NO: 106554 - DNA, 25 bp, Homo sapien
gactttggagtctctgagcttaggc

SEQ ID NO: 106555 - DNA, 25 bp, Homo sapien
tctccatatcattgccagcatctgt

SEQ ID NO: 106556 - DNA, 25 bp, Homo sapien
gtttgcctgttaaatctgatgatag

SEQ ID NO: 106557 - DNA, 25 bp, Homo sapien
ttagccttttgtcagccagatagat

SEQ ID NO: 106558 - DNA, 25 bp, Homo sapien
cattctgtagtttgcctgttaaatc

SEQ ID NO: 106559 - DNA, 25 bp, Homo sapien
tcgggaagtaccagtatgaagtcca

SEQ ID NO: 106560 - DNA, 25 bp, Homo sapien
cagtatgaagtccataggagcctat

SEQ ID NO: 106561 - DNA, 25 bp, Homo sapien
gagcctatgtggcattggctcactg

SEQ ID NO: 106562 - DNA, 25 bp, Homo sapien
gaggtgccatactgtcgggaagtac

SEQ ID NO: 106563 - DNA, 25 bp, Homo sapien
tattctctacttccctgcatattat

SEQ ID NO: 106564 - DNA, 25 bp, Homo sapien
ggtaatacatattctctacttccct

SEQ ID NO: 106565 - DNA, 25 bp, Homo sapien
gattcttggcttgaggagaaagtga

SEQ ID NO: 106566 - DNA, 25 bp, Homo sapien
tacatattctctacttccctgcata

SEQ ID NO: 106567 - DNA, 25 bp, Homo sapien
ttttgctccagggatactgatccat

SEQ ID NO: 106568 - DNA, 25 bp, Homo sapien
agcagcggccgaagtaagggcttca

SEQ ID NO: 106569 - DNA, 25 bp, Homo sapien
attgtgaactttagcagcggccgaa

SEQ ID NO: 106570 - DNA, 25 bp, Homo sapien
aattttgctccagggatactgatcc

SEQ ID NO: 106571 - DNA, 25 bp, Homo sapien
gctgctggccgtagcgtgttacacc

SEQ ID NO: 106572 - DNA, 25 bp, Homo sapien
gccatgctgctggccgtagcgtgtt

SEQ ID NO: 106573 - DNA, 25 bp, Homo sapien
gccgtagcgtgttacaccatctggg

SEQ ID NO: 106574 - DNA, 25 bp, Homo sapien
gctggccgtagcgtgttacaccatc

SEQ ID NO: 106575 - DNA, 25 bp, Homo sapien
agtggtcgggggggcaaacacaatg

SEQ ID NO: 106576 - DNA, 25 bp, Homo sapien
tatccagtggtcgggggggcaaaca

SEQ ID NO: 106577 - DNA, 25 bp, Homo sapien
cagtggtcgggggggcaaacacaat

SEQ ID NO: 106578 - DNA, 25 bp, Homo sapien
tccagtggtcgggggggcaaacaca

SEQ ID NO: 106579 - DNA, 25 bp, Homo sapien
tatagccaggtatccgaggcttggc

SEQ ID NO: 106580 - DNA, 25 bp, Homo sapien
cagtagtagacttctgtttggtttg

SEQ ID NO: 106581 - DNA, 25 bp, Homo sapien
cttgttttgaaggatccccacagtg

SEQ ID NO: 106582 - DNA, 25 bp, Homo sapien
cacatctaaactcccttcttgtttt

SEQ ID NO: 106583 - DNA, 25 bp, Homo sapien
ccgcttgcggatcaaaggaaggaca

SEQ ID NO: 106584 - DNA, 25 bp, Homo sapien
cttgcggatcaaaggaaggacattt

SEQ ID NO: 106585 - DNA, 25 bp, Homo sapien
caaaaccgtaggccttggatcctgc

SEQ ID NO: 106586 - DNA, 25 bp, Homo sapien
tcaaaaccgtaggccttggatcctg

SEQ ID NO: 106587 - DNA, 25 bp, Homo sapien
tgctcgtgctgccacatctacagac

SEQ ID NO: 106588 - DNA, 25 bp, Homo sapien
ttgggctctccctaatgctcgtgct

SEQ ID NO: 106589 - DNA, 25 bp, Homo sapien
tctacagacctaatatgaatagcac

SEQ ID NO: 106590 - DNA, 25 bp, Homo sapien
ttctgccttgaaagtgaacactaat

SEQ ID NO: 106591 - DNA, 25 bp, Homo sapien
taagcatacgtctacaggaatgacg

SEQ ID NO: 106592 - DNA, 25 bp, Homo sapien
cacagtgccctctaagcatacgtct

SEQ ID NO: 106593 - DNA, 25 bp, Homo sapien
aaggatcccacagtgccctctaagc

SEQ ID NO: 106594 - DNA, 25 bp, Homo sapien
cgtctacaggaatgacgattttctg

SEQ ID NO: 106595 - DNA, 25 bp, Homo sapien
tgagatggtggtggtttaactccca

SEQ ID NO: 106596 - DNA, 25 bp, Homo sapien
ggtctgcaggcagatatcctgcttt

SEQ ID NO: 106597 - DNA, 25 bp, Homo sapien
tcctgctttggacagcctatgcttt

SEQ ID NO: 106598 - DNA, 25 bp, Homo sapien
agaatacacattggctggagtacac

SEQ ID NO: 106599 - DNA, 25 bp, Homo sapien
agaatttgttcttcacactccaagc

SEQ ID NO: 106600 - DNA, 25 bp, Homo sapien
caaaattcaagttctcactggaaaa

SEQ ID NO: 106601 - DNA, 25 bp, Homo sapien
tagtataattgggtagttcctctct

SEQ ID NO: 106602 - DNA, 25 bp, Homo sapien
tctccagaagtaagtactacattag

SEQ ID NO: 106603 - DNA, 25 bp, Homo sapien
ggaatatctccagaagtaagtacta

SEQ ID NO: 106604 - DNA, 25 bp, Homo sapien
aaccacaggaagaatgttatttgat

SEQ ID NO: 106605 - DNA, 25 bp, Homo sapien
tccattgaaaccacaggaagaatgt

SEQ ID NO: 106606 - DNA, 25 bp, Homo sapien
ttatgaaaggagttagccagccatt

SEQ ID NO: 106607 - DNA, 25 bp, Homo sapien
atttgatttatgaaaggagttagcc

SEQ ID NO: 106608 - DNA, 25 bp, Homo sapien
gagatgtagggccaagccttaccaa

SEQ ID NO: 106609 - DNA, 25 bp, Homo sapien
gcttagctggcggaaggtcagaaca

SEQ ID NO: 106610 - DNA, 25 bp, Homo sapien
tcagaacagggtcctacggacaggg

SEQ ID NO: 106611 - DNA, 25 bp, Homo sapien
gaacccaggaagatgcatatgtagg

SEQ ID NO: 106612 - DNA, 25 bp, Homo sapien
gtgatctccactcactgcaacctcc

SEQ ID NO: 106613 - DNA, 25 bp, Homo sapien
cgtgatctccactcactgcaacctc

SEQ ID NO: 106614 - DNA, 25 bp, Homo sapien
tcccgggttcaagctagtctcctgt

SEQ ID NO: 106615 - DNA, 25 bp, Homo sapien
cgggttcaagctagtctcctgtgtc

SEQ ID NO: 106616 - DNA, 25 bp, Homo sapien
tgaaaatccttgctctgggacatcc

SEQ ID NO: 106617 - DNA, 25 bp, Homo sapien
tgggacatccctggacaatgttttt

SEQ ID NO: 106618 - DNA, 25 bp, Homo sapien
gtctctgtgaaactctgtgaaagta

SEQ ID NO: 106619 - DNA, 25 bp, Homo sapien
ggacatccctggacaatgtttttgt

SEQ ID NO: 106620 - DNA, 25 bp, Homo sapien
caaagattgtataacagagaggttc

SEQ ID NO: 106621 - DNA, 25 bp, Homo sapien
taacactaggtatattcaacgggca

SEQ ID NO: 106622 - DNA, 25 bp, Homo sapien
taacagtggtatgctcctcaaagat

SEQ ID NO: 106623 - DNA, 25 bp, Homo sapien
cagagaggttctatactggtaacac

SEQ ID NO: 106624 - DNA, 25 bp, Homo sapien
gataaagtgaataagccaggggagc

SEQ ID NO: 106625 - DNA, 25 bp, Homo sapien
tcgataaagtgaataagccagggga

SEQ ID NO: 106626 - DNA, 25 bp, Homo sapien
ttcgataaagtgaataagccagggg

SEQ ID NO: 106627 - DNA, 25 bp, Homo sapien
taaagtgaataagccaggggagcag

SEQ ID NO: 106628 - DNA, 25 bp, Homo sapien
agatgtgctcaggtaatgccgggaa

SEQ ID NO: 106629 - DNA, 25 bp, Homo sapien
aattcacatctccatctgatctgga

SEQ ID NO: 106630 - DNA, 25 bp, Homo sapien
cacatctccatctgatctggaaatc

SEQ ID NO: 106631 - DNA, 25 bp, Homo sapien
ggtaatgccgggaattcacatctcc

SEQ ID NO: 106632 - DNA, 25 bp, Homo sapien
ctgatgacctgtggctgaaaagaga

SEQ ID NO: 106633 - DNA, 25 bp, Homo sapien
gacctgtggctgaaaagagagactc

SEQ ID NO: 106634 - DNA, 25 bp, Homo sapien
gggtgatcgggtgacacttatctcg

SEQ ID NO: 106635 - DNA, 25 bp, Homo sapien
acttatctcgtagaaggctggcagc

SEQ ID NO: 106636 - DNA, 25 bp, Homo sapien
tcagaagtgcttagtccctttaaaa

SEQ ID NO: 106637 - DNA, 25 bp, Homo sapien
caatagccattttgatggacagtta

SEQ ID NO: 106638 - DNA, 25 bp, Homo sapien
tggacagttattgcctcccagctga

SEQ ID NO: 106639 - DNA, 25 bp, Homo sapien
ccagctgaagggagtagaataatca

SEQ ID NO: 106640 - DNA, 25 bp, Homo sapien
tctggcatcggcagacgcgatcagt

SEQ ID NO: 106641 - DNA, 25 bp, Homo sapien
tcggcagacgcgatcagtcctgcat

SEQ ID NO: 106642 - DNA, 25 bp, Homo sapien
gggctttcctacttctggcatcggc

SEQ ID NO: 106643 - DNA, 25 bp, Homo sapien
acgcgatcagtcctgcatggtccca

SEQ ID NO: 106644 - DNA, 25 bp, Homo sapien
ctcttggggcagaactttttattct

SEQ ID NO: 106645 - DNA, 25 bp, Homo sapien
gctcttggggcagaactttttattc

SEQ ID NO: 106646 - DNA, 25 bp, Homo sapien
gtctgttgcctaatcctggagtccc

SEQ ID NO: 106647 - DNA, 25 bp, Homo sapien
gagtcccagtagcactacttcttgg

SEQ ID NO: 106648 - DNA, 25 bp, Homo sapien
tcacaaatcgtagctgtctgttgcc

SEQ ID NO: 106649 - DNA, 25 bp, Homo sapien
cttcgtgagccaagaaatggagtca

SEQ ID NO: 106650 - DNA, 25 bp, Homo sapien
ggaaacggtacatgtcagaacctgg

SEQ ID NO: 106651 - DNA, 25 bp, Homo sapien
tgcccgttggttccaaattgtcctg

SEQ ID NO: 106652 - DNA, 25 bp, Homo sapien
gaactttctgtaaggtgggcagtga

SEQ ID NO: 106653 - DNA, 25 bp, Homo sapien
gccacagaagcacattatggttgaa

SEQ ID NO: 106654 - DNA, 25 bp, Homo sapien
gtttttggctttagtgctctcttct

SEQ ID NO: 106655 - DNA, 25 bp, Homo sapien
gctttagtgctctcttctaaagcca

SEQ ID NO: 106656 - DNA, 25 bp, Homo sapien
ctttagtgctctcttctaaagccat

SEQ ID NO: 106657 - DNA, 25 bp, Homo sapien
ttggctttagtgctctcttctaaag

SEQ ID NO: 106658 - DNA, 25 bp, Homo sapien
caggcctctagggttctcagaatta

SEQ ID NO: 106659 - DNA, 25 bp, Homo sapien
cttgcatggactcatccagcagttt

SEQ ID NO: 106660 - DNA, 25 bp, Homo sapien
tccaggaaggatgtgagagcaatca

SEQ ID NO: 106661 - DNA, 25 bp, Homo sapien
gaattggcttttgccttgaccaggc

SEQ ID NO: 106662 - DNA, 25 bp, Homo sapien
tctttagtgttctgctcatggtccc

SEQ ID NO: 106663 - DNA, 25 bp, Homo sapien
ctttagtgttctgctcatggtccct

SEQ ID NO: 106664 - DNA, 25 bp, Homo sapien
aagtccccttctttaggcctctgca

SEQ ID NO: 106665 - DNA, 25 bp, Homo sapien
agtccccttctttaggcctctgcat

SEQ ID NO: 106666 - DNA, 25 bp, Homo sapien
ggaaactctggacttgatttctgat

SEQ ID NO: 106667 - DNA, 25 bp, Homo sapien
gacatgccttcattataacaaaacg

SEQ ID NO: 106668 - DNA, 25 bp, Homo sapien
ttttctaccccataggagaattctg

SEQ ID NO: 106669 - DNA, 25 bp, Homo sapien
gccttcattataacaaaacgttgta

SEQ ID NO: 106670 - DNA, 25 bp, Homo sapien
tccttatcattaggaaggctgtatt

SEQ ID NO: 106671 - DNA, 25 bp, Homo sapien
cattaggaaggctgtatttttcagc

SEQ ID NO: 106672 - DNA, 25 bp, Homo sapien
tatcattaggaaggctgtatttttc

SEQ ID NO: 106673 - DNA, 25 bp, Homo sapien
tatgttccttatcattaggaaggct

SEQ ID NO: 106674 - DNA, 25 bp, Homo sapien
aaatgacagtgactgaagtgcaggt

SEQ ID NO: 106675 - DNA, 25 bp, Homo sapien
tctgcagcactctgattcataatgt

SEQ ID NO: 106676 - DNA, 25 bp, Homo sapien
caggtttagctatttcaggtggtga

SEQ ID NO: 106677 - DNA, 25 bp, Homo sapien
cataatgtgtgcacaccgtgatgtg

SEQ ID NO: 106678 - DNA, 25 bp, Homo sapien
cccttattgctatagttccataatt

SEQ ID NO: 106679 - DNA, 25 bp, Homo sapien
ttattgctatagttccataattttc

SEQ ID NO: 106680 - DNA, 25 bp, Homo sapien
ggctgcagggcccttattgctatag

SEQ ID NO: 106681 - DNA, 25 bp, Homo sapien
ctgcagggcccttattgctatagtt

SEQ ID NO: 106682 - DNA, 25 bp, Homo sapien
tttctgtgactgttgcaagcatgag

SEQ ID NO: 106683 - DNA, 25 bp, Homo sapien
ttctgtgactgttgcaagcatgagg

SEQ ID NO: 106684 - DNA, 25 bp, Homo sapien
ctttctgtgactgttgcaagcatga

SEQ ID NO: 106685 - DNA, 25 bp, Homo sapien
tctctgcagaggtccatcttccacc

SEQ ID NO: 106686 - DNA, 25 bp, Homo sapien
cacccaatgtggctttactgctttg

SEQ ID NO: 106687 - DNA, 25 bp, Homo sapien
gtaggactgctactaatatgtccat

SEQ ID NO: 106688 - DNA, 25 bp, Homo sapien
tggaatcgtcaagtaggactgctac

SEQ ID NO: 106689 - DNA, 25 bp, Homo sapien
tatgactttgatatgacagagagga

SEQ ID NO: 106690 - DNA, 25 bp, Homo sapien
tgctatgactttgatatgacagaga

SEQ ID NO: 106691 - DNA, 25 bp, Homo sapien
tcttgctatgactttgatatgacag

SEQ ID NO: 106692 - DNA, 25 bp, Homo sapien
cttcatgaagggcatcgttgtgggg

SEQ ID NO: 106693 - DNA, 25 bp, Homo sapien
tttaatatgaactagctttttgact

SEQ ID NO: 106694 - DNA, 25 bp, Homo sapien
aatatgaactagctttttgactttt

SEQ ID NO: 106695 - DNA, 25 bp, Homo sapien
atttaatatgaactagctttttgac

SEQ ID NO: 106696 - DNA, 25 bp, Homo sapien
taatatgaactagctttttgacttt

SEQ ID NO: 106697 - DNA, 25 bp, Homo sapien
ccaattcttcccacttcttggtcat

SEQ ID NO: 106698 - DNA, 25 bp, Homo sapien
tcccaattcttcccacttcttggtc

SEQ ID NO: 106699 - DNA, 25 bp, Homo sapien
cttggtcccaattcttcccacttct

SEQ ID NO: 106700 - DNA, 25 bp, Homo sapien
tggtcccaattcttcccacttcttg

SEQ ID NO: 106701 - DNA, 25 bp, Homo sapien
gaaaattatccttgggtgccacaac

SEQ ID NO: 106702 - DNA, 25 bp, Homo sapien
tcaatgacgacacctgagaggctgt

SEQ ID NO: 106703 - DNA, 25 bp, Homo sapien
tattattctccatagagacagctgg

SEQ ID NO: 106704 - DNA, 25 bp, Homo sapien
gacactgaatggcagtaaactacca

SEQ ID NO: 106705 - DNA, 25 bp, Homo sapien
tcccaaagcagttccagcactctga

SEQ ID NO: 106706 - DNA, 25 bp, Homo sapien
ccgacataaatggtggtgtgagatc

SEQ ID NO: 106707 - DNA, 25 bp, Homo sapien
agttccagcactctgattatgtgca

SEQ ID NO: 106708 - DNA, 25 bp, Homo sapien
cacacttcctcgtgtgtgtttgcaa

SEQ ID NO: 106709 - DNA, 25 bp, Homo sapien
tttcattccattgagtaaataggca

SEQ ID NO: 106710 - DNA, 25 bp, Homo sapien
caggagtgtctaagggattttcgaa

SEQ ID NO: 106711 - DNA, 25 bp, Homo sapien
tcactttaaggagattacggaaagc

SEQ ID NO: 106712 - DNA, 25 bp, Homo sapien
gattttcgaagtaggcggctcattt

SEQ ID NO: 106713 - DNA, 25 bp, Homo sapien
tcctgcatcaagctggtgccctgca

SEQ ID NO: 106714 - DNA, 25 bp, Homo sapien
cacctgcacttcttgagaggcggaa

SEQ ID NO: 106715 - DNA, 25 bp, Homo sapien
gccctgcaaaccagcttgcacctgc

SEQ ID NO: 106716 - DNA, 25 bp, Homo sapien
tgcagctgctttcccggcccactgc

SEQ ID NO: 106717 - DNA, 25 bp, Homo sapien
tggatgaaactagagctttgtgggc

SEQ ID NO: 106718 - DNA, 25 bp, Homo sapien
tctgagctttgactaggagcttcct

SEQ ID NO: 106719 - DNA, 25 bp, Homo sapien
actttgcctcagattgctgtcaatc

SEQ ID NO: 106720 - DNA, 25 bp, Homo sapien
ctgtcaatctgatgaccagctctgc

SEQ ID NO: 106721 - DNA, 25 bp, Homo sapien
ccatcatccattgaagtcagcttct

SEQ ID NO: 106722 - DNA, 25 bp, Homo sapien
ggatgactcagagctctcccaaaca

SEQ ID NO: 106723 - DNA, 25 bp, Homo sapien
tgaggagccaacagaagggccagag

SEQ ID NO: 106724 - DNA, 25 bp, Homo sapien
gctccctgggtagttcaggctcctc

SEQ ID NO: 106725 - DNA, 25 bp, Homo sapien
cagccaatactgtaaaatttcactg

SEQ ID NO: 106726 - DNA, 25 bp, Homo sapien
aatgacgtgtcccagcaggcatgat

SEQ ID NO: 106727 - DNA, 25 bp, Homo sapien
agcaggcatgatctcctgatttgac

SEQ ID NO: 106728 - DNA, 25 bp, Homo sapien
tgttcaccctcaatgacgtgtccca

SEQ ID NO: 106729 - DNA, 25 bp, Homo sapien
caacagggaaaagacgtgcgatagc

SEQ ID NO: 106730 - DNA, 25 bp, Homo sapien
cagggaaaagacgtgcgatagcagc

SEQ ID NO: 106731 - DNA, 25 bp, Homo sapien
gaaaagacgtgcgatagcagcatca

SEQ ID NO: 106732 - DNA, 25 bp, Homo sapien
gacgtgcgatagcagcatcagcagt

SEQ ID NO: 106733 - DNA, 25 bp, Homo sapien
gattcagtgaaaaagcttcagaaga

SEQ ID NO: 106734 - DNA, 25 bp, Homo sapien
aagctgggaagcaggaattgtgagg

SEQ ID NO: 106735 - DNA, 25 bp, Homo sapien
aggagtaagggtcagggttgaagct

SEQ ID NO: 106736 - DNA, 25 bp, Homo sapien
ggaggatcaggcaggagtaagggtc

SEQ ID NO: 106737 - DNA, 25 bp, Homo sapien
tctaaggcctattggggcatctgct

SEQ ID NO: 106738 - DNA, 25 bp, Homo sapien
cacataggaagccaaatcagggggc

SEQ ID NO: 106739 - DNA, 25 bp, Homo sapien
gggcttggaataagttcagaggcta

SEQ ID NO: 106740 - DNA, 25 bp, Homo sapien
tcagaggctaaaggtctaaggccta

SEQ ID NO: 106741 - DNA, 25 bp, Homo sapien
gcttctagagagcaggaaatcttac

SEQ ID NO: 106742 - DNA, 25 bp, Homo sapien
gaggaattgttgatgccgtctttgc

SEQ ID NO: 106743 - DNA, 25 bp, Homo sapien
tatgctgtaccacaggcactaggcc

SEQ ID NO: 106744 - DNA, 25 bp, Homo sapien
tgcatacctatagggatgggaggaa

SEQ ID NO: 106745 - DNA, 25 bp, Homo sapien
ggatatacttctatgcaggaagcct

SEQ ID NO: 106746 - DNA, 25 bp, Homo sapien
tttatgtacatcaaatggatatact

SEQ ID NO: 106747 - DNA, 25 bp, Homo sapien
cttttatgtacatcaaatggatata

SEQ ID NO: 106748 - DNA, 25 bp, Homo sapien
tatacttctatgcaggaagcctcca

SEQ ID NO: 106749 - DNA, 25 bp, Homo sapien
accgcacttccctgctgcaggaggc

SEQ ID NO: 106750 - DNA, 25 bp, Homo sapien
tcaccgcacttccctgctgcaggag

SEQ ID NO: 106751 - DNA, 25 bp, Homo sapien
caccgcacttccctgctgcaggagg

SEQ ID NO: 106752 - DNA, 25 bp, Homo sapien
tgaaggcggtgggactaaagaagag

SEQ ID NO: 106753 - DNA, 25 bp, Homo sapien
gatggtagatgtgaaggcggtggga

SEQ ID NO: 106754 - DNA, 25 bp, Homo sapien
tgaaacttgggagcaacagcctgct

SEQ ID NO: 106755 - DNA, 25 bp, Homo sapien
cctgaagggaagtcacctatggctg

SEQ ID NO: 106756 - DNA, 25 bp, Homo sapien
tcctggcatgaccataatgaggctc

SEQ ID NO: 106757 - DNA, 25 bp, Homo sapien
ttcttgaccaaggaggacgtggaga

SEQ ID NO: 106758 - DNA, 25 bp, Homo sapien
caaccccagtgaacttggatgctgt

SEQ ID NO: 106759 - DNA, 25 bp, Homo sapien
gaactgctcccaacgtagagaaaac

SEQ ID NO: 106760 - DNA, 25 bp, Homo sapien
agcaccagccttcccttattcagag

SEQ ID NO: 106761 - DNA, 25 bp, Homo sapien
tcagagtcctccttaacttccactg

SEQ ID NO: 106762 - DNA, 25 bp, Homo sapien
aagtacttgtggacacaacttgtcc

SEQ ID NO: 106763 - DNA, 25 bp, Homo sapien
agtgtcagactcacctttcctgatc

SEQ ID NO: 106764 - DNA, 25 bp, Homo sapien
tcatccttgtagacatgactcctcc

SEQ ID NO: 106765 - DNA, 25 bp, Homo sapien
ccattattatgagggtccaaggccc

SEQ ID NO: 106766 - DNA, 25 bp, Homo sapien
tttcattcagatggccatcatcctt

SEQ ID NO: 106767 - DNA, 25 bp, Homo sapien
taaaatcgctaccattattatgagg

SEQ ID NO: 106768 - DNA, 25 bp, Homo sapien
ctccattctgtgtagcatgtactca

SEQ ID NO: 106769 - DNA, 25 bp, Homo sapien
gtactcaccaattcatctctcttaa

SEQ ID NO: 106770 - DNA, 25 bp, Homo sapien
ctgtgtagcatgtactcaccaattc

SEQ ID NO: 106771 - DNA, 25 bp, Homo sapien
gaatcccactggttgccttccctga

SEQ ID NO: 106772 - DNA, 25 bp, Homo sapien
tcatatccaatgcacaatcacaggg

SEQ ID NO: 106773 - DNA, 25 bp, Homo sapien
ttcatttaagaagggaagccagctt

SEQ ID NO: 106774 - DNA, 25 bp, Homo sapien
gaaatgtgtcatgtttcagctggca

SEQ ID NO: 106775 - DNA, 25 bp, Homo sapien
tggagagacaactcctgtccatgtg

SEQ ID NO: 106776 - DNA, 25 bp, Homo sapien
ctggcattggcattgcagtggattt

SEQ ID NO: 106777 - DNA, 25 bp, Homo sapien
cattgatttggagtgtaatcagcgt

SEQ ID NO: 106778 - DNA, 25 bp, Homo sapien
taatcagcgttcctcgttaccactg

SEQ ID NO: 106779 - DNA, 25 bp, Homo sapien
gcgttcctcgttaccactgtgtgca

SEQ ID NO: 106780 - DNA, 25 bp, Homo sapien
tttggagtgtaatcagcgttcctcg

SEQ ID NO: 106781 - DNA, 25 bp, Homo sapien
tgttgtccccattagctgaaaagtc

SEQ ID NO: 106782 - DNA, 25 bp, Homo sapien
catgttttcatactggtgtttccac

SEQ ID NO: 106783 - DNA, 25 bp, Homo sapien
tggactatcattgacttcccctggg

SEQ ID NO: 106784 - DNA, 25 bp, Homo sapien
tctggagtgtttatgcccgtgccct

SEQ ID NO: 106785 - DNA, 25 bp, Homo sapien
cttagccaactttgccagagggagc

SEQ ID NO: 106786 - DNA, 25 bp, Homo sapien
acagttatttgccaacagatagctt

SEQ ID NO: 106787 - DNA, 25 bp, Homo sapien
tttgccaacagatagctttcttagc

SEQ ID NO: 106788 - DNA, 25 bp, Homo sapien
ttagccaactttgccagagggagct

SEQ ID NO: 106789 - DNA, 25 bp, Homo sapien
agtcaaccacatctcttatcaggta

SEQ ID NO: 106790 - DNA, 25 bp, Homo sapien
taatgcaccccttgagtcaaccaca

SEQ ID NO: 106791 - DNA, 25 bp, Homo sapien
aaccacatctcttatcaggtacctg

SEQ ID NO: 106792 - DNA, 25 bp, Homo sapien
ttctattaatgcaccccttgagtca

SEQ ID NO: 106793 - DNA, 25 bp, Homo sapien
ctccaaggctctgatcaaatgtcag

SEQ ID NO: 106794 - DNA, 25 bp, Homo sapien
caaatgtcagcaacctggtgaagct

SEQ ID NO: 106795 - DNA, 25 bp, Homo sapien
tcctccaccacaggatggtgttgtt

SEQ ID NO: 106796 - DNA, 25 bp, Homo sapien
caaggctctgatcaaatgtcagcaa

SEQ ID NO: 106797 - DNA, 25 bp, Homo sapien
ggacaaatgtctgccacctgactgg

SEQ ID NO: 106798 - DNA, 25 bp, Homo sapien
tcgatgtttgggtgtgaggaccgat

SEQ ID NO: 106799 - DNA, 25 bp, Homo sapien
ttcagctatagaggtcctagggcat

SEQ ID NO: 106800 - DNA, 25 bp, Homo sapien
gagagcctttccctatccggttcac

SEQ ID NO: 106801 - DNA, 25 bp, Homo sapien
ggaacttcggggacatcgcagtttc

SEQ ID NO: 106802 - DNA, 25 bp, Homo sapien
agtttcaaaattgggcactacgcca

SEQ ID NO: 106803 - DNA, 25 bp, Homo sapien
catggggaaggaacttcggggacat

SEQ ID NO: 106804 - DNA, 25 bp, Homo sapien
cagtttcaaaattgggcactacgcc

SEQ ID NO: 106805 - DNA, 25 bp, Homo sapien
tagtccaagcaacttcagtaagcat

SEQ ID NO: 106806 - DNA, 25 bp, Homo sapien
gcaatttgccgggtagtccaagcaa

SEQ ID NO: 106807 - DNA, 25 bp, Homo sapien
cctgggcaatttgccgggtagtcca

SEQ ID NO: 106808 - DNA, 25 bp, Homo sapien
cgggtagtccaagcaacttcagtaa

SEQ ID NO: 106809 - DNA, 25 bp, Homo sapien
gggtgagaagagtttgctccacttt

SEQ ID NO: 106810 - DNA, 25 bp, Homo sapien
ttctcatcccaatccttagggtcac

SEQ ID NO: 106811 - DNA, 25 bp, Homo sapien
aagagtttgctccacttttcatggg

SEQ ID NO: 106812 - DNA, 25 bp, Homo sapien
catggggcaccgtgattccctggag

SEQ ID NO: 106813 - DNA, 25 bp, Homo sapien
tctttgcttgtttcacccttgagga

SEQ ID NO: 106814 - DNA, 25 bp, Homo sapien
agtaagccctctgccactgttcttt

SEQ ID NO: 106815 - DNA, 25 bp, Homo sapien
ttgcttgtttcacccttgaggatgg

SEQ ID NO: 106816 - DNA, 25 bp, Homo sapien
gggatgggcaggcggctttcttctg

SEQ ID NO: 106817 - DNA, 25 bp, Homo sapien
cagcagctctgggtcaagaagggga

SEQ ID NO: 106818 - DNA, 25 bp, Homo sapien
ttgtcagtttcagcagctctgggtc

SEQ ID NO: 106819 - DNA, 25 bp, Homo sapien
ctctgggtcaagaaggggagggaca

SEQ ID NO: 106820 - DNA, 25 bp, Homo sapien
gcagctctgggtcaagaaggggagg

SEQ ID NO: 106821 - DNA, 25 bp, Homo sapien
tctcttttgggaaggcgtggagaca

SEQ ID NO: 106822 - DNA, 25 bp, Homo sapien
tccacaactgttccataggtggctg

SEQ ID NO: 106823 - DNA, 25 bp, Homo sapien
gcttaattgtactgtcttgtcctcc

SEQ ID NO: 106824 - DNA, 25 bp, Homo sapien
gctgttgaatttaggacaccccatt

SEQ ID NO: 106825 - DNA, 25 bp, Homo sapien
cctggagctccactcttcggtaatg

SEQ ID NO: 106826 - DNA, 25 bp, Homo sapien
tgcttgccaactcatgttcccctgg

SEQ ID NO: 106827 - DNA, 25 bp, Homo sapien
cactcttcggtaatgtgaactaggg

SEQ ID NO: 106828 - DNA, 25 bp, Homo sapien
aaggccaggtgtcagtcccggtatc

SEQ ID NO: 106829 - DNA, 25 bp, Homo sapien
ccccagggatgcttggccacggttt

SEQ ID NO: 106830 - DNA, 25 bp, Homo sapien
acagctgtcccacagttccgcttgg

SEQ ID NO: 106831 - DNA, 25 bp, Homo sapien
tagatgggcatcaaagacaaatcac

SEQ ID NO: 106832 - DNA, 25 bp, Homo sapien
ccacggtttggctgggcaaatgcac

SEQ ID NO: 106833 - DNA, 25 bp, Homo sapien
tgaagtgggtgcagtaaatgctgac

SEQ ID NO: 106834 - DNA, 25 bp, Homo sapien
agtacatgaagtgggtgcagtaaat

SEQ ID NO: 106835 - DNA, 25 bp, Homo sapien
catgaagtgggtgcagtaaatgctg

SEQ ID NO: 106836 - DNA, 25 bp, Homo sapien
tacatgaagtgggtgcagtaaatgc

SEQ ID NO: 106837 - DNA, 25 bp, Homo sapien
acaacagagtgtagcatcccttcct

SEQ ID NO: 106838 - DNA, 25 bp, Homo sapien
caacaacagagtgtagcatcccttc

SEQ ID NO: 106839 - DNA, 25 bp, Homo sapien
aacaacagagtgtagcatcccttcc

SEQ ID NO: 106840 - DNA, 25 bp, Homo sapien
cttccttgctggcatgttccttctg

SEQ ID NO: 106841 - DNA, 25 bp, Homo sapien
tccttgctggcatgttccttctggc

SEQ ID NO: 106842 - DNA, 25 bp, Homo sapien
tttgtttcaggattcccttccttgc

SEQ ID NO: 106843 - DNA, 25 bp, Homo sapien
cttgctggcatgttccttctggcca

SEQ ID NO: 106844 - DNA, 25 bp, Homo sapien
atgatggcacatactgctttaattg

SEQ ID NO: 106845 - DNA, 25 bp, Homo sapien
cataggattcaatgatggcacatac

SEQ ID NO: 106846 - DNA, 25 bp, Homo sapien
gatggcacatactgctttaattgtg

SEQ ID NO: 106847 - DNA, 25 bp, Homo sapien
ctcccctcataggattcaatgatgg

SEQ ID NO: 106848 - DNA, 25 bp, Homo sapien
tgaccatagccgacttccctattgc

SEQ ID NO: 106849 - DNA, 25 bp, Homo sapien
gggctgaccatagccgacttcccta

SEQ ID NO: 106850 - DNA, 25 bp, Homo sapien
cggcagggctgaccatagccgactt

SEQ ID NO: 106851 - DNA, 25 bp, Homo sapien
ccatagccgacttccctattgcggg

SEQ ID NO: 106852 - DNA, 25 bp, Homo sapien
tgctaaaggctatgttggaagatat

SEQ ID NO: 106853 - DNA, 25 bp, Homo sapien
gatgcccggagttgggcacctatac

SEQ ID NO: 106854 - DNA, 25 bp, Homo sapien
gacttcctaactcggatgcccggag

SEQ ID NO: 106855 - DNA, 25 bp, Homo sapien
gatataggatagtgtgcaaaccgca

SEQ ID NO: 106856 - DNA, 25 bp, Homo sapien
cagagcagactcaatgtggcagcag

SEQ ID NO: 106857 - DNA, 25 bp, Homo sapien
ctcagtgagagcatcagtgtggcca

SEQ ID NO: 106858 - DNA, 25 bp, Homo sapien
gaactttgaaccttgatagaggagg

SEQ ID NO: 106859 - DNA, 25 bp, Homo sapien
gaattgaggacccaatggctcagtg

SEQ ID NO: 106860 - DNA, 25 bp, Homo sapien
actggaacacccatggagagctgca

SEQ ID NO: 106861 - DNA, 25 bp, Homo sapien
tgcagagggcaatgcagaagaggga

SEQ ID NO: 106862 - DNA, 25 bp, Homo sapien
gtgcctagtggatccttgttgtctg

SEQ ID NO: 106863 - DNA, 25 bp, Homo sapien
ctggtacacgttgctaaatgtgcct

SEQ ID NO: 106864 - DNA, 25 bp, Homo sapien
agagtaggaagagctccggtgtctc

SEQ ID NO: 106865 - DNA, 25 bp, Homo sapien
tttcacacattttcagaggctcagc

SEQ ID NO: 106866 - DNA, 25 bp, Homo sapien
gctatactaaatgaccacatatggg

SEQ ID NO: 106867 - DNA, 25 bp, Homo sapien
caatttttggtgaggatcctcttcc

SEQ ID NO: 106868 - DNA, 25 bp, Homo sapien
gatcatggaggccaatacaactgca

SEQ ID NO: 106869 - DNA, 25 bp, Homo sapien
caaagctccaagattccctgctggg

SEQ ID NO: 106870 - DNA, 25 bp, Homo sapien
taaaactcaattcaaagactcaggc

SEQ ID NO: 106871 - DNA, 25 bp, Homo sapien
caaagcattgtgttcaaggctctca

SEQ ID NO: 106872 - DNA, 25 bp, Homo sapien
taagtgtggacaatgagaggagctg

SEQ ID NO: 106873 - DNA, 25 bp, Homo sapien
gtaagtgtggacaatgagaggagct

SEQ ID NO: 106874 - DNA, 25 bp, Homo sapien
tctgagtaagtgtggacaatgagag

SEQ ID NO: 106875 - DNA, 25 bp, Homo sapien
atttctgagtaagtgtggacaatga

SEQ ID NO: 106876 - DNA, 25 bp, Homo sapien
gggcctattaggatcagcaggaaga

SEQ ID NO: 106877 - DNA, 25 bp, Homo sapien
tatgagagctctaatgaggaagacc

SEQ ID NO: 106878 - DNA, 25 bp, Homo sapien
gtgggccctaatgggcctattagga

SEQ ID NO: 106879 - DNA, 25 bp, Homo sapien
gacctcattgtaggctgatgtggca

SEQ ID NO: 106880 - DNA, 25 bp, Homo sapien
tgagtattaacgacgcctgaccctg

SEQ ID NO: 106881 - DNA, 25 bp, Homo sapien
catctgagtattaacgacgcctgac

SEQ ID NO: 106882 - DNA, 25 bp, Homo sapien
ttaacgacgcctgaccctgcttatc

SEQ ID NO: 106883 - DNA, 25 bp, Homo sapien
tcccatctgagtattaacgacgcct

SEQ ID NO: 106884 - DNA, 25 bp, Homo sapien
gatgtgcaggatatatctgtacttt

SEQ ID NO: 106885 - DNA, 25 bp, Homo sapien
tatggtggcatatcatttatgaaca

SEQ ID NO: 106886 - DNA, 25 bp, Homo sapien
cagtggatgtgcaggatatatctgt

SEQ ID NO: 106887 - DNA, 25 bp, Homo sapien
caagagccattatggtggcatatca

SEQ ID NO: 106888 - DNA, 25 bp, Homo sapien
tcatcagagtcaccaatgccaatgc

SEQ ID NO: 106889 - DNA, 25 bp, Homo sapien
gcagcccaggtggtcatcagagtca

SEQ ID NO: 106890 - DNA, 25 bp, Homo sapien
cttggaaagagcagcccaggtggtc

SEQ ID NO: 106891 - DNA, 25 bp, Homo sapien
gtcatcagagtcaccaatgccaatg

SEQ ID NO: 106892 - DNA, 25 bp, Homo sapien
tactgtgttgagatcactcatgatg

SEQ ID NO: 106893 - DNA, 25 bp, Homo sapien
atcttactgtgttgagatcactcat

SEQ ID NO: 106894 - DNA, 25 bp, Homo sapien
tggaagtactgctggtgagcaacaa

SEQ ID NO: 106895 - DNA, 25 bp, Homo sapien
gtgttgagatcactcatgatgtttc

SEQ ID NO: 106896 - DNA, 25 bp, Homo sapien
ggccatcctgagaccgctcgcgaag

SEQ ID NO: 106897 - DNA, 25 bp, Homo sapien
tcgcgaagcccaagatcatcaaaaa

SEQ ID NO: 106898 - DNA, 25 bp, Homo sapien
atggccatcctgagaccgctcgcga

SEQ ID NO: 106899 - DNA, 25 bp, Homo sapien
gagaccgctcgcgaagcccaagatc

SEQ ID NO: 106900 - DNA, 25 bp, Homo sapien
ggttgggcatcattgctttttcact

SEQ ID NO: 106901 - DNA, 25 bp, Homo sapien
aatttggttgggcatcattgctttt

SEQ ID NO: 106902 - DNA, 25 bp, Homo sapien
ttgaatttggttgggcatcattgct

SEQ ID NO: 106903 - DNA, 25 bp, Homo sapien
tggttgggcatcattgctttttcac

SEQ ID NO: 106904 - DNA, 25 bp, Homo sapien
ttcattaaggtaggcgtctgcaggc

SEQ ID NO: 106905 - DNA, 25 bp, Homo sapien
caggcgtactccatgttgtttgggc

SEQ ID NO: 106906 - DNA, 25 bp, Homo sapien
ttccctggagtggtaattctgagca

SEQ ID NO: 106907 - DNA, 25 bp, Homo sapien
tctgagcattcgaccaagagctttt

SEQ ID NO: 106908 - DNA, 25 bp, Homo sapien
agccacccgcgaaaattcggccagg

SEQ ID NO: 106909 - DNA, 25 bp, Homo sapien
cgaaaattcggccagggttctcgct

SEQ ID NO: 106910 - DNA, 25 bp, Homo sapien
cagctgtactggagccacccgcgaa

SEQ ID NO: 106911 - DNA, 25 bp, Homo sapien
gtactggagccacccgcgaaaattc

SEQ ID NO: 106912 - DNA, 25 bp, Homo sapien
tctcaaaaatttgaagagcgcatgc

SEQ ID NO: 106913 - DNA, 25 bp, Homo sapien
aagagcgcatgcgtgggccagcttc

SEQ ID NO: 106914 - DNA, 25 bp, Homo sapien
tgcattctgggtaaactgtctcaaa

SEQ ID NO: 106915 - DNA, 25 bp, Homo sapien
cacgcgtttcctttgagcactgcat

SEQ ID NO: 106916 - DNA, 25 bp, Homo sapien
actacagcccagaactcctggactc

SEQ ID NO: 106917 - DNA, 25 bp, Homo sapien
gtgcggacacccgatcggcatagcg

SEQ ID NO: 106918 - DNA, 25 bp, Homo sapien
tgcggacacccgatcggcatagcgc

SEQ ID NO: 106919 - DNA, 25 bp, Homo sapien
ccagaactcctggactcaagcgatc

SEQ ID NO: 106920 - DNA, 25 bp, Homo sapien
tcctttcgtacttcatgagcacacc

SEQ ID NO: 106921 - DNA, 25 bp, Homo sapien
tttcgtacttcatgagcacacccat

SEQ ID NO: 106922 - DNA, 25 bp, Homo sapien
gctcctttcgtacttcatgagcaca

SEQ ID NO: 106923 - DNA, 25 bp, Homo sapien
tggctcctttcgtacttcatgagca

SEQ ID NO: 106924 - DNA, 25 bp, Homo sapien
cttaaaatttgtgctctaggcgcct

SEQ ID NO: 106925 - DNA, 25 bp, Homo sapien
catctagtagagcattaaaacgcga

SEQ ID NO: 106926 - DNA, 25 bp, Homo sapien
caaatgttaagcaggcgctcacggt

SEQ ID NO: 106927 - DNA, 25 bp, Homo sapien
ggctccggtgagctgtaatcgcgca

SEQ ID NO: 106928 - DNA, 25 bp, Homo sapien
caaataatttttcatggcgggtagg

SEQ ID NO: 106929 - DNA, 25 bp, Homo sapien
cgcacaaggccttcgtactcttgat

SEQ ID NO: 106930 - DNA, 25 bp, Homo sapien
tgacttggcaattcctgctgaacaa

SEQ ID NO: 106931 - DNA, 25 bp, Homo sapien
gcttaactgcacctgagacgtggaa

SEQ ID NO: 106932 - DNA, 25 bp, Homo sapien
ttctcgccgtggttgcgtaccggga

SEQ ID NO: 106933 - DNA, 25 bp, Homo sapien
caggtgtgcctctgcgttacaggga

SEQ ID NO: 106934 - DNA, 25 bp, Homo sapien
tagaactgtctgagtggccccgtaa

SEQ ID NO: 106935 - DNA, 25 bp, Homo sapien
tagcaccgtgtctgtatgaagcccg

SEQ ID NO: 106936 - DNA, 25 bp, Homo sapien
aacggccacaaccacgtcaagctgg

SEQ ID NO: 106937 - DNA, 25 bp, Homo sapien
gcccaacggccacaaccacgtcaag

SEQ ID NO: 106938 - DNA, 25 bp, Homo sapien
ggccacaaccacgtcaagctggctt

SEQ ID NO: 106939 - DNA, 25 bp, Homo sapien
cacaaccacgtcaagctggctttga

SEQ ID NO: 106940 - DNA, 25 bp, Homo sapien
tcccgcgcttgtccttcagggtgga

SEQ ID NO: 106941 - DNA, 25 bp, Homo sapien
tgctgacagaggctcaacacggctc

SEQ ID NO: 106942 - DNA, 25 bp, Homo sapien
ggcaagtgccggctgatcacctcca

SEQ ID NO: 106943 - DNA, 25 bp, Homo sapien
cctaagccccaaggcgggcaagtgc

SEQ ID NO: 106944 - DNA, 25 bp, Homo sapien
gcttccaagaagaacgcgagactga

SEQ ID NO: 106945 - DNA, 25 bp, Homo sapien
ttccaagaagaacgcgagactgaca

SEQ ID NO: 106946 - DNA, 25 bp, Homo sapien
aggaccgagggtggcccgcgtctcg

SEQ ID NO: 106947 - DNA, 25 bp, Homo sapien
agaagaacgcgagactgacagggcc

SEQ ID NO: 106948 - DNA, 25 bp, Homo sapien
tctttcgggtccgtaggaagacgca

SEQ ID NO: 106949 - DNA, 25 bp, Homo sapien
ggtaggtctcaaggctgggagttca

SEQ ID NO: 106950 - DNA, 25 bp, Homo sapien
gggtcgggctgatggtaggtctcaa

SEQ ID NO: 106951 - DNA, 25 bp, Homo sapien
cgtaggaagacgcacaggaccctgg

SEQ ID NO: 106952 - DNA, 25 bp, Homo sapien
aaacttgaaacaggcgggattgcca

SEQ ID NO: 106953 - DNA, 25 bp, Homo sapien
gcgcttgtttcacgcaaaatttcag

SEQ ID NO: 106954 - DNA, 25 bp, Homo sapien
tattttactgttccccaactggaca

SEQ ID NO: 106955 - DNA, 25 bp, Homo sapien
gacagctgcttcatttgcgcttgtt

SEQ ID NO: 106956 - DNA, 25 bp, Homo sapien
gccccaagcagcgactcccctcgcc

SEQ ID NO: 106957 - DNA, 25 bp, Homo sapien
cgctgactgtgtagtggtcgaagac

SEQ ID NO: 106958 - DNA, 25 bp, Homo sapien
cctgtccggcggtgttatagagtcc

SEQ ID NO: 106959 - DNA, 25 bp, Homo sapien
gtcatagtcttcctgtccggcggtg

SEQ ID NO: 106960 - DNA, 25 bp, Homo sapien
gcgtcgttggcacagctcatgagta

SEQ ID NO: 106961 - DNA, 25 bp, Homo sapien
cattttgaaatgaggctggatttac

SEQ ID NO: 106962 - DNA, 25 bp, Homo sapien
acattttgaaatgaggctggattta

SEQ ID NO: 106963 - DNA, 25 bp, Homo sapien
tcacattttgaaatgaggctggatt

SEQ ID NO: 106964 - DNA, 25 bp, Homo sapien
ttctgggttaaagctgaacattcca

SEQ ID NO: 106965 - DNA, 25 bp, Homo sapien
ggttaaagctgaacattccacatag

SEQ ID NO: 106966 - DNA, 25 bp, Homo sapien
ttgttccacacatataggtttttct

SEQ ID NO: 106967 - DNA, 25 bp, Homo sapien
taaaatggctatgatagcctcatca

SEQ ID NO: 106968 - DNA, 25 bp, Homo sapien
ctgaagatgtttctcacgtaattaa

SEQ ID NO: 106969 - DNA, 25 bp, Homo sapien
cactgaagatgtttctcacgtaatt

SEQ ID NO: 106970 - DNA, 25 bp, Homo sapien
aagatgtttctcacgtaattaaaca

SEQ ID NO: 106971 - DNA, 25 bp, Homo sapien
gaagatgtttctcacgtaattaaac

SEQ ID NO: 106972 - DNA, 25 bp, Homo sapien
tttataatagattgtggcttcagat

SEQ ID NO: 106973 - DNA, 25 bp, Homo sapien
cagggtaactacacttaaagagttg

SEQ ID NO: 106974 - DNA, 25 bp, Homo sapien
caatgaataagactgacagggtaac

SEQ ID NO: 106975 - DNA, 25 bp, Homo sapien
gggcttgggacatagcaatgaataa

SEQ ID NO: 106976 - DNA, 25 bp, Homo sapien
attgattcagaacccactatgtacc

SEQ ID NO: 106977 - DNA, 25 bp, Homo sapien
ttcagtccattagcctggggtgggc

SEQ ID NO: 106978 - DNA, 25 bp, Homo sapien
ggcacacctcccagtaggttatata

SEQ ID NO: 106979 - DNA, 25 bp, Homo sapien
acacctcccagtaggttatatacaa

SEQ ID NO: 106980 - DNA, 25 bp, Homo sapien
taacttcagtccattagcctggggt

SEQ ID NO: 106981 - DNA, 25 bp, Homo sapien
ggaagagttgccaatagcagttact

SEQ ID NO: 106982 - DNA, 25 bp, Homo sapien
tctagctggtggtggatgttactgc

SEQ ID NO: 106983 - DNA, 25 bp, Homo sapien
tgtctgtccagtaactctcctttga

SEQ ID NO: 106984 - DNA, 25 bp, Homo sapien
caggatcaccatgttttgagagaat

SEQ ID NO: 106985 - DNA, 25 bp, Homo sapien
agtggctttcccctcatctacaaat

SEQ ID NO: 106986 - DNA, 25 bp, Homo sapien
gaggctcctttaaccgaacagtggc

SEQ ID NO: 106987 - DNA, 25 bp, Homo sapien
cccctcatctacaaatttggtgaag

SEQ ID NO: 106988 - DNA, 25 bp, Homo sapien
acaggaggctcctttaaccgaacag

SEQ ID NO: 106989 - DNA, 25 bp, Homo sapien
ttgcagtgaaccaagctcttcccac

SEQ ID NO: 106990 - DNA, 25 bp, Homo sapien
cctgggtgacagaatgagactccat

SEQ ID NO: 106991 - DNA, 25 bp, Homo sapien
tgcactccaacctgggtgacagaat

SEQ ID NO: 106992 - DNA, 25 bp, Homo sapien
caacctgggtgacagaatgagactc

SEQ ID NO: 106993 - DNA, 25 bp, Homo sapien
taatatggttcgtgcagaagattcc

SEQ ID NO: 106994 - DNA, 25 bp, Homo sapien
tcactggtgtgagcgttgaaactgg

SEQ ID NO: 106995 - DNA, 25 bp, Homo sapien
tcttgaaggtgtatgaggtctccaa

SEQ ID NO: 106996 - DNA, 25 bp, Homo sapien
gcaaagcatacgcatatcaactcgg

SEQ ID NO: 106997 - DNA, 25 bp, Homo sapien
tattagaatgctatcaaagacacca

SEQ ID NO: 106998 - DNA, 25 bp, Homo sapien
ctttattactctgagtttgatagga

SEQ ID NO: 106999 - DNA, 25 bp, Homo sapien
tctgagtttgataggaatattagaa

SEQ ID NO: 107000 - DNA, 25 bp, Homo sapien
caaagacaccacattacatgactat

SEQ ID NO: 107001 - DNA, 25 bp, Homo sapien
tgcttgtaaccagtagttagagcca

SEQ ID NO: 107002 - DNA, 25 bp, Homo sapien
tggacttcagcatgttttcacctga

SEQ ID NO: 107003 - DNA, 25 bp, Homo sapien
tcacctgatcatttagccaaacttg

SEQ ID NO: 107004 - DNA, 25 bp, Homo sapien
gttagagccatttatcaacagctag

SEQ ID NO: 107005 - DNA, 25 bp, Homo sapien
gggatctaggatggccctatttgca

SEQ ID NO: 107006 - DNA, 25 bp, Homo sapien
ctttggtacgggatctaggatggcc

SEQ ID NO: 107007 - DNA, 25 bp, Homo sapien
ccagggagtgtctcccacatgttta

SEQ ID NO: 107008 - DNA, 25 bp, Homo sapien
cattaatctctttcggatagatggt

SEQ ID NO: 107009 - DNA, 25 bp, Homo sapien
taaaaccctgtcagaaaagtctgaa

SEQ ID NO: 107010 - DNA, 25 bp, Homo sapien
aaatgagagtttaaaaccctgtcag

SEQ ID NO: 107011 - DNA, 25 bp, Homo sapien
ctagtcttacaacttaaaatgagag

SEQ ID NO: 107012 - DNA, 25 bp, Homo sapien
tctagtctctagcttaggctggcac

SEQ ID NO: 107013 - DNA, 25 bp, Homo sapien
agtggctgggcaagtaaggctaacc

SEQ ID NO: 107014 - DNA, 25 bp, Homo sapien
ggctaaccttaccttgcttaaggca

SEQ ID NO: 107015 - DNA, 25 bp, Homo sapien
cctttaaataggctcttccagggat

SEQ ID NO: 107016 - DNA, 25 bp, Homo sapien
aaacccttcagtggtgcccaagtca

SEQ ID NO: 107017 - DNA, 25 bp, Homo sapien
tttttgcggtatccaaatcttggca

SEQ ID NO: 107018 - DNA, 25 bp, Homo sapien
ccaaatcttggcagagatggaatgg

SEQ ID NO: 107019 - DNA, 25 bp, Homo sapien
caaacacaaatttttgcggtatcca

SEQ ID NO: 107020 - DNA, 25 bp, Homo sapien
ccacaaacacaaatttttgcggtat

SEQ ID NO: 107021 - DNA, 25 bp, Homo sapien
tactaagaccacagtgtgggcaaca

SEQ ID NO: 107022 - DNA, 25 bp, Homo sapien
ctactaagaccacagtgtgggcaac

SEQ ID NO: 107023 - DNA, 25 bp, Homo sapien
cagattcatggtagtagttccttga

SEQ ID NO: 107024 - DNA, 25 bp, Homo sapien
gaatgcagattcatggtagtagttc

SEQ ID NO: 107025 - DNA, 25 bp, Homo sapien
taagagataataggtgcttcagtac

SEQ ID NO: 107026 - DNA, 25 bp, Homo sapien
aattaacataacagcctagagaaca

SEQ ID NO: 107027 - DNA, 25 bp, Homo sapien
gataataggtgcttcagtaccaccc

SEQ ID NO: 107028 - DNA, 25 bp, Homo sapien
gaaataagagataataggtgcttca

SEQ ID NO: 107029 - DNA, 25 bp, Homo sapien
tccaatttgacgctgcaaaatcata

SEQ ID NO: 107030 - DNA, 25 bp, Homo sapien
tgagtaactatacacattcctcctc

SEQ ID NO: 107031 - DNA, 25 bp, Homo sapien
ggagtcatctaaatgagtaactata

SEQ ID NO: 107032 - DNA, 25 bp, Homo sapien
gcaccccaaactgatctgttattga

SEQ ID NO: 107033 - DNA, 25 bp, Homo sapien
tgagcctaactgcagatccaagagg

SEQ ID NO: 107034 - DNA, 25 bp, Homo sapien
tttccggaagaaggctaagaccaca

SEQ ID NO: 107035 - DNA, 25 bp, Homo sapien
gtgatccagttctaaactttgggat

SEQ ID NO: 107036 - DNA, 25 bp, Homo sapien
tgcaaagatggtcaacgtacctaaa

SEQ ID NO: 107037 - DNA, 25 bp, Homo sapien
ggaaaaagctcagccgcggtcccaa

SEQ ID NO: 107038 - DNA, 25 bp, Homo sapien
tggcagctacagctcgagcatcggc

SEQ ID NO: 107039 - DNA, 25 bp, Homo sapien
taggagccgcggctcggcttcgtct

SEQ ID NO: 107040 - DNA, 25 bp, Homo sapien
ggaccgttatgacaacccgcaactg

SEQ ID NO: 107041 - DNA, 25 bp, Homo sapien
tgccctcgctaactcatcccgggcc

SEQ ID NO: 107042 - DNA, 25 bp, Homo sapien
cgcggctgccctcgctaactcatcc

SEQ ID NO: 107043 - DNA, 25 bp, Homo sapien
gccgcctgcgctccacacatcctcg

SEQ ID NO: 107044 - DNA, 25 bp, Homo sapien
tggggcccgagacctctcatttacc

SEQ ID NO: 107045 - DNA, 25 bp, Homo sapien
gcggccgtcgccttggcctgtcacg

SEQ ID NO: 107046 - DNA, 25 bp, Homo sapien
cggccgtcgccttggcctgtcacgg

SEQ ID NO: 107047 - DNA, 25 bp, Homo sapien
gatcaaagttcagctggtacaccag

SEQ ID NO: 107048 - DNA, 25 bp, Homo sapien
tattcgggccggttatgcacctgga

SEQ ID NO: 107049 - DNA, 25 bp, Homo sapien
tcaaagcggcattcttcggcaggtc

SEQ ID NO: 107050 - DNA, 25 bp, Homo sapien
taggcattccgggtcaaggctagac

SEQ ID NO: 107051 - DNA, 25 bp, Homo sapien
tggatggtctacaggttttcttgtg

SEQ ID NO: 107052 - DNA, 25 bp, Homo sapien
ctgagtggatggtctacaggttttc

SEQ ID NO: 107053 - DNA, 25 bp, Homo sapien
cactctgagtggatggtctacaggt

SEQ ID NO: 107054 - DNA, 25 bp, Homo sapien
tggggaaatggctaccacagtaaac

SEQ ID NO: 107055 - DNA, 25 bp, Homo sapien
gttcatggtccctaatatctcccca

SEQ ID NO: 107056 - DNA, 25 bp, Homo sapien
taacttttacagagttcatggtccc

SEQ ID NO: 107057 - DNA, 25 bp, Homo sapien
tctataacttttacagagttcatgg

SEQ ID NO: 107058 - DNA, 25 bp, Homo sapien
agttcatggtccctaatatctcccc

SEQ ID NO: 107059 - DNA, 25 bp, Homo sapien
aactcttttattcaattgtatgtcc

SEQ ID NO: 107060 - DNA, 25 bp, Homo sapien
gactgtcgcttttgtaactgtgatt

SEQ ID NO: 107061 - DNA, 25 bp, Homo sapien
aaatagaagactgtcgcttttgtaa

SEQ ID NO: 107062 - DNA, 25 bp, Homo sapien
ttattcaattgtatgtcctgtttgg

SEQ ID NO: 107063 - DNA, 25 bp, Homo sapien
tattaaaccagtgaagcaatccctt

SEQ ID NO: 107064 - DNA, 25 bp, Homo sapien
tactgaaaatgactgttctgacagg

SEQ ID NO: 107065 - DNA, 25 bp, Homo sapien
tcctaataagtgtgtcaagagagtg

SEQ ID NO: 107066 - DNA, 25 bp, Homo sapien
aagtgtgttctatgaaggttccaaa

SEQ ID NO: 107067 - DNA, 25 bp, Homo sapien
caaaaatgagtattttattttgtca

SEQ ID NO: 107068 - DNA, 25 bp, Homo sapien
aaatgagtattttattttgtcagca

SEQ ID NO: 107069 - DNA, 25 bp, Homo sapien
aaaatgagtattttattttgtcagc

SEQ ID NO: 107070 - DNA, 25 bp, Homo sapien
gcaaaaatgagtattttattttgtc

SEQ ID NO: 107071 - DNA, 25 bp, Homo sapien
ttcaaactcaattatacaatgtagc

SEQ ID NO: 107072 - DNA, 25 bp, Homo sapien
tgtaatgctaactcaaaacttgtag

SEQ ID NO: 107073 - DNA, 25 bp, Homo sapien
ttatacaatgtagcaatagtaaata

SEQ ID NO: 107074 - DNA, 25 bp, Homo sapien
attaaaatgtaatgctaactcaaaa

SEQ ID NO: 107075 - DNA, 25 bp, Homo sapien
tctgcctcgagactcaaaggatcct

SEQ ID NO: 107076 - DNA, 25 bp, Homo sapien
taaagctggcactagaaagtatttc

SEQ ID NO: 107077 - DNA, 25 bp, Homo sapien
tggagcaaaatttaagcctgtttcc

SEQ ID NO: 107078 - DNA, 25 bp, Homo sapien
taaacgtctacattaaatatggagc

SEQ ID NO: 107079 - DNA, 25 bp, Homo sapien
atttgctctgataggaaaattgcct

SEQ ID NO: 107080 - DNA, 25 bp, Homo sapien
tgttgatttaatcactaaccccaaa

SEQ ID NO: 107081 - DNA, 25 bp, Homo sapien
aacatcttgtggttttatagaaatt

SEQ ID NO: 107082 - DNA, 25 bp, Homo sapien
ctttataacacctaaaatgtgaggc

SEQ ID NO: 107083 - DNA, 25 bp, Homo sapien
cacaatatacctggattcgacagca

SEQ ID NO: 107084 - DNA, 25 bp, Homo sapien
gtagtgtgcaggtcattaaagatca

SEQ ID NO: 107085 - DNA, 25 bp, Homo sapien
taaagatcatgtgaccaattgtgca

SEQ ID NO: 107086 - DNA, 25 bp, Homo sapien
ccaatatgcaggatggtagtgtgca

SEQ ID NO: 107087 - DNA, 25 bp, Homo sapien
tgattcttctgcctcagcctctcaa

SEQ ID NO: 107088 - DNA, 25 bp, Homo sapien
ggcactatctcggcccagtgcaacc

SEQ ID NO: 107089 - DNA, 25 bp, Homo sapien
gattcttctgcctcagcctctcaag

SEQ ID NO: 107090 - DNA, 25 bp, Homo sapien
tacagtggcactatctcggcccagt

SEQ ID NO: 107091 - DNA, 25 bp, Homo sapien
ctgagattgtgccagcctgggcgac

SEQ ID NO: 107092 - DNA, 25 bp, Homo sapien
ggcagaattgtttgaacctggaggc

SEQ ID NO: 107093 - DNA, 25 bp, Homo sapien
cccagcactttgtggatcatttgag

SEQ ID NO: 107094 - DNA, 25 bp, Homo sapien
gcagaattgtttgaacctggaggca

SEQ ID NO: 107095 - DNA, 25 bp, Homo sapien
taaaatctactgtcagcgtacagca

SEQ ID NO: 107096 - DNA, 25 bp, Homo sapien
catctatactgttgagtagtgcatt

SEQ ID NO: 107097 - DNA, 25 bp, Homo sapien
caacatggccatcactagcttggct

SEQ ID NO: 107098 - DNA, 25 bp, Homo sapien
tgtaaccaagattaacagaccctca

SEQ ID NO: 107099 - DNA, 25 bp, Homo sapien
aaacatccaggtggataactgcggg

SEQ ID NO: 107100 - DNA, 25 bp, Homo sapien
gaattgttaatgtgagatgcccatc

SEQ ID NO: 107101 - DNA, 25 bp, Homo sapien
ttaagtagctgggtaggcggtatta

SEQ ID NO: 107102 - DNA, 25 bp, Homo sapien
ggcggtattatttagtgcaactggg

SEQ ID NO: 107103 - DNA, 25 bp, Homo sapien
ttaaggatagctttccttaatggat

SEQ ID NO: 107104 - DNA, 25 bp, Homo sapien
tgttttgcgcaagggggctcttcca

SEQ ID NO: 107105 - DNA, 25 bp, Homo sapien
tttaaggatagctttccttaatgga

SEQ ID NO: 107106 - DNA, 25 bp, Homo sapien
aagagaacatttgttttgcgcaagg

SEQ ID NO: 107107 - DNA, 25 bp, Homo sapien
attgtgcttacactttgggcttcat

SEQ ID NO: 107108 - DNA, 25 bp, Homo sapien
aatcctcattaggttcactatcacc

SEQ ID NO: 107109 - DNA, 25 bp, Homo sapien
gatgctgggttatctgactggagtc

SEQ ID NO: 107110 - DNA, 25 bp, Homo sapien
gcataggtaggttaaataagttgcc

SEQ ID NO: 107111 - DNA, 25 bp, Homo sapien
tgctggtgcagttatgagactcaca

SEQ ID NO: 107112 - DNA, 25 bp, Homo sapien
gagaacatgacaatctgatatgtgg

SEQ ID NO: 107113 - DNA, 25 bp, Homo sapien
aatagacatgcaaggctgctggtgc

SEQ ID NO: 107114 - DNA, 25 bp, Homo sapien
aacagtttgggcctagaaagtggca

SEQ ID NO: 107115 - DNA, 25 bp, Homo sapien
gatggtatacttgagaaagttttct

SEQ ID NO: 107116 - DNA, 25 bp, Homo sapien
aactctatatcttatgtgattctga

SEQ ID NO: 107117 - DNA, 25 bp, Homo sapien
tcagttttctgcttaactctatatc

SEQ ID NO: 107118 - DNA, 25 bp, Homo sapien
tatggtaaactttaggatgttctgc

SEQ ID NO: 107119 - DNA, 25 bp, Homo sapien
tggaattagtcacagaaatgtagtc

SEQ ID NO: 107120 - DNA, 25 bp, Homo sapien
catcatgtataggtacagctggctt

SEQ ID NO: 107121 - DNA, 25 bp, Homo sapien
tatgcatacaagtaggtacatcatg

SEQ ID NO: 107122 - DNA, 25 bp, Homo sapien
cattctcacatgtagttggtcagaa

SEQ ID NO: 107123 - DNA, 25 bp, Homo sapien
cagcctggagcatacagtcttatcc

SEQ ID NO: 107124 - DNA, 25 bp, Homo sapien
tacgctggatatcctgagggcactt

SEQ ID NO: 107125 - DNA, 25 bp, Homo sapien
taaaacagtctgcagccattcgtgg

SEQ ID NO: 107126 - DNA, 25 bp, Homo sapien
aagtcaactctgagggctgtcagcc

SEQ ID NO: 107127 - DNA, 25 bp, Homo sapien
cagtagaagataggtaagtgtgtgc

SEQ ID NO: 107128 - DNA, 25 bp, Homo sapien
ttttatccttctaataagacagtag

SEQ ID NO: 107129 - DNA, 25 bp, Homo sapien
aaaagtctgagcattcacttacagg

SEQ ID NO: 107130 - DNA, 25 bp, Homo sapien
ttcacttacaggcatttttctcccc

SEQ ID NO: 107131 - DNA, 25 bp, Homo sapien
taagacatggcttatcggccttggc

SEQ ID NO: 107132 - DNA, 25 bp, Homo sapien
tttgggcaagctcaaaactagcctt

SEQ ID NO: 107133 - DNA, 25 bp, Homo sapien
taacgaatgcctgccataggctagg

SEQ ID NO: 107134 - DNA, 25 bp, Homo sapien
taaatgccagtagtattccccagct

SEQ ID NO: 107135 - DNA, 25 bp, Homo sapien
gtgtctctgaatttcgactgttatg

SEQ ID NO: 107136 - DNA, 25 bp, Homo sapien
gcctggtaggtggagaggttgctgt

SEQ ID NO: 107137 - DNA, 25 bp, Homo sapien
taacttgattcctaaaatgtgtctc

SEQ ID NO: 107138 - DNA, 25 bp, Homo sapien
ctgaatttcgactgttatggaataa

SEQ ID NO: 107139 - DNA, 25 bp, Homo sapien
cagagttagcaatgagataatttaa

SEQ ID NO: 107140 - DNA, 25 bp, Homo sapien
ctttttgagtattctatttatcttt

SEQ ID NO: 107141 - DNA, 25 bp, Homo sapien
actttttgagtattctatttatctt

SEQ ID NO: 107142 - DNA, 25 bp, Homo sapien
gtgaattatcattgtgccactatac

SEQ ID NO: 107143 - DNA, 25 bp, Homo sapien
taagaaattaacctagcctgggcac

SEQ ID NO: 107144 - DNA, 25 bp, Homo sapien
taaaattggtacacctgtatggaac

SEQ ID NO: 107145 - DNA, 25 bp, Homo sapien
taagtatttgtctctctagatacag

SEQ ID NO: 107146 - DNA, 25 bp, Homo sapien
tgcctttggatttccacccactgag

SEQ ID NO: 107147 - DNA, 25 bp, Homo sapien
cactgagccctctagtactactagg

SEQ ID NO: 107148 - DNA, 25 bp, Homo sapien
taatgtgaaaactagcagattggcc

SEQ ID NO: 107149 - DNA, 25 bp, Homo sapien
tctcagttactaaaaggtgtcaggc

SEQ ID NO: 107150 - DNA, 25 bp, Homo sapien
taaaatctgcattacgtgaattggg

SEQ ID NO: 107151 - DNA, 25 bp, Homo sapien
gatccaccctgtcaatattaccaag

SEQ ID NO: 107152 - DNA, 25 bp, Homo sapien
gagatataatcctaaacagggacag

SEQ ID NO: 107153 - DNA, 25 bp, Homo sapien
tggaacagtccaactagaccttagt

SEQ ID NO: 107154 - DNA, 25 bp, Homo sapien
cagtaagccgtgaggtaaaggatgt

SEQ ID NO: 107155 - DNA, 25 bp, Homo sapien
cagtgcatggcccatgatgtctcag

SEQ ID NO: 107156 - DNA, 25 bp, Homo sapien
aatgatgacatttccctaagagcag

SEQ ID NO: 107157 - DNA, 25 bp, Homo sapien
tgaggctgccaaagggctcgtccag

SEQ ID NO: 107158 - DNA, 25 bp, Homo sapien
gctgtagatacccagcaggagctga

SEQ ID NO: 107159 - DNA, 25 bp, Homo sapien
cctaagtcaggaagttgccatcgtc

SEQ ID NO: 107160 - DNA, 25 bp, Homo sapien
tgcccctcgtctccaagcaagatag

SEQ ID NO: 107161 - DNA, 25 bp, Homo sapien
caagatagtggtgggcttcaggtcc

SEQ ID NO: 107162 - DNA, 25 bp, Homo sapien
gaccagacatcagtctgttcatcaa

SEQ ID NO: 107163 - DNA, 25 bp, Homo sapien
ggcatatatcacacagcccagggac

SEQ ID NO: 107164 - DNA, 25 bp, Homo sapien
tgaacaccatttcgtaagggccttc

SEQ ID NO: 107165 - DNA, 25 bp, Homo sapien
ctgccacactcctgaagaatgcgtg

SEQ ID NO: 107166 - DNA, 25 bp, Homo sapien
ggtccacagtcatcattgaggccag

SEQ ID NO: 107167 - DNA, 25 bp, Homo sapien
agctgactgaggaggcaagcattgt

SEQ ID NO: 107168 - DNA, 25 bp, Homo sapien
ggcaagcattgtgagggtgctgctg

SEQ ID NO: 107169 - DNA, 25 bp, Homo sapien
gggctgcagtacctccagctgactg

SEQ ID NO: 107170 - DNA, 25 bp, Homo sapien
gaacgtaatatgagctcaacagtcc

SEQ ID NO: 107171 - DNA, 25 bp, Homo sapien
cagagccatgtaccatatcgcatca

SEQ ID NO: 107172 - DNA, 25 bp, Homo sapien
tcagtaaagccccttgtccaggtgt

SEQ ID NO: 107173 - DNA, 25 bp, Homo sapien
ggcacaaggcgccaccttctcaata

SEQ ID NO: 107174 - DNA, 25 bp, Homo sapien
tgatacttctatacaaattgatggc

SEQ ID NO: 107175 - DNA, 25 bp, Homo sapien
gctcttaggaaagtaccatgtccag

SEQ ID NO: 107176 - DNA, 25 bp, Homo sapien
tgaatggcaaatgagggtaggacct

SEQ ID NO: 107177 - DNA, 25 bp, Homo sapien
gagagacagttttaacattgccact

SEQ ID NO: 107178 - DNA, 25 bp, Homo sapien
gtggcagtgccttaccatatgtgta

SEQ ID NO: 107179 - DNA, 25 bp, Homo sapien
tgccttaccatatgtgtattgtcag

SEQ ID NO: 107180 - DNA, 25 bp, Homo sapien
tccatctttgtcaagtggagtgcca

SEQ ID NO: 107181 - DNA, 25 bp, Homo sapien
gtcaagtggagtgccaacctctcct

SEQ ID NO: 107182 - DNA, 25 bp, Homo sapien
tggagggacgttctggctcctcgca

SEQ ID NO: 107183 - DNA, 25 bp, Homo sapien
gctctcgctcgggaagtcgagccag

SEQ ID NO: 107184 - DNA, 25 bp, Homo sapien
aaggcggagccagtgcgtctgcaac

SEQ ID NO: 107185 - DNA, 25 bp, Homo sapien
gaattgtgttttggcagtacagcct

SEQ ID NO: 107186 - DNA, 25 bp, Homo sapien
tcgcgccgtcgctggcccgccgctt

SEQ ID NO: 107187 - DNA, 25 bp, Homo sapien
cgccgtcgctggcccgccgcttgcc

SEQ ID NO: 107188 - DNA, 25 bp, Homo sapien
cgcgccgtcgctggcccgccgcttg

SEQ ID NO: 107189 - DNA, 25 bp, Homo sapien
gcgccgtcgctggcccgccgcttgc

SEQ ID NO: 107190 - DNA, 25 bp, Homo sapien
gaagtttccgtccaccacggcgcag

SEQ ID NO: 107191 - DNA, 25 bp, Homo sapien
gcgttcctccgccacacagaacagc

SEQ ID NO: 107192 - DNA, 25 bp, Homo sapien
gtttccgtccaccacggcgcagtgg

SEQ ID NO: 107193 - DNA, 25 bp, Homo sapien
cacacgtagaggaagtttccgtcca

SEQ ID NO: 107194 - DNA, 25 bp, Homo sapien
aacggcgggacgacgtcaagccctg

SEQ ID NO: 107195 - DNA, 25 bp, Homo sapien
ggcggagagtggtaagaggcccgga

SEQ ID NO: 107196 - DNA, 25 bp, Homo sapien
ctgcgtccgctcaggccgagggtct

SEQ ID NO: 107197 - DNA, 25 bp, Homo sapien
ccggagccgggtctgaggctttaat

SEQ ID NO: 107198 - DNA, 25 bp, Homo sapien
gggtccttctaggtctgcgccagta

SEQ ID NO: 107199 - DNA, 25 bp, Homo sapien
tattttatttcgaatcgcgccgtgg

SEQ ID NO: 107200 - DNA, 25 bp, Homo sapien
tacaaaatgatacagcacggcgtcc

SEQ ID NO: 107201 - DNA, 25 bp, Homo sapien
taatcgcgctgtaactgcctttgca

SEQ ID NO: 107202 - DNA, 25 bp, Homo sapien
cacacatcaaaactgcattgcatgt

SEQ ID NO: 107203 - DNA, 25 bp, Homo sapien
gtagccaactacatagaggaagacc

SEQ ID NO: 107204 - DNA, 25 bp, Homo sapien
ttgtcttgtcttaagaaactgccac

SEQ ID NO: 107205 - DNA, 25 bp, Homo sapien
caccctaatcagtcagtagccaact

SEQ ID NO: 107206 - DNA, 25 bp, Homo sapien
cataaaattatgtttatcagttaca

SEQ ID NO: 107207 - DNA, 25 bp, Homo sapien
aatacagaatacataaaattatgtt

SEQ ID NO: 107208 - DNA, 25 bp, Homo sapien
aaaattatgtttatcagttacacag

SEQ ID NO: 107209 - DNA, 25 bp, Homo sapien
aaatacagaatacataaaattatgt

SEQ ID NO: 107210 - DNA, 25 bp, Homo sapien
aatatacttcattgtcttcaataga

SEQ ID NO: 107211 - DNA, 25 bp, Homo sapien
tatcaatatcataggtccaaatttc

SEQ ID NO: 107212 - DNA, 25 bp, Homo sapien
actatcaatatcataggtccaaatt

SEQ ID NO: 107213 - DNA, 25 bp, Homo sapien
aatttcatcattaggcaaatatact

SEQ ID NO: 107214 - DNA, 25 bp, Homo sapien
gggagacttcaaaaatgttgcagta

SEQ ID NO: 107215 - DNA, 25 bp, Homo sapien
aaatttcacacgtcactagaactgg

SEQ ID NO: 107216 - DNA, 25 bp, Homo sapien
gcactggtcttgagagaaatactaa

SEQ ID NO: 107217 - DNA, 25 bp, Homo sapien
gtctcaaattccctagagtctacag

SEQ ID NO: 107218 - DNA, 25 bp, Homo sapien
aatgtacagctttccattaatgcaa

SEQ ID NO: 107219 - DNA, 25 bp, Homo sapien
tacagctttccattaatgcaagcac

SEQ ID NO: 107220 - DNA, 25 bp, Homo sapien
tgtacagctttccattaatgcaagc

SEQ ID NO: 107221 - DNA, 25 bp, Homo sapien
acagctttccattaatgcaagcacc

SEQ ID NO: 107222 - DNA, 25 bp, Homo sapien
cacgtggtgtaggtggttgcccttc

SEQ ID NO: 107223 - DNA, 25 bp, Homo sapien
tatatacccagcaggaaagtttatc

SEQ ID NO: 107224 - DNA, 25 bp, Homo sapien
aaagtcggtgattttctcccaaatg

SEQ ID NO: 107225 - DNA, 25 bp, Homo sapien
ggtttcatctcttgttcgtaaatta

SEQ ID NO: 107226 - DNA, 25 bp, Homo sapien
tgtaacaaaacctgtaggctgggca

SEQ ID NO: 107227 - DNA, 25 bp, Homo sapien
tagaaacccagcctcaaagacttgg

SEQ ID NO: 107228 - DNA, 25 bp, Homo sapien
aggaaacccagccatagacggaatt

SEQ ID NO: 107229 - DNA, 25 bp, Homo sapien
caaattagcatctttagaaacccag

SEQ ID NO: 107230 - DNA, 25 bp, Homo sapien
tgtgaaaaaggcgtaatacaaggct

SEQ ID NO: 107231 - DNA, 25 bp, Homo sapien
gagttcactgtgtctcctacaccca

SEQ ID NO: 107232 - DNA, 25 bp, Homo sapien
cccataaccaccaaaatatattagt

SEQ ID NO: 107233 - DNA, 25 bp, Homo sapien
aacagtcttggagttcactgtgtct

SEQ ID NO: 107234 - DNA, 25 bp, Homo sapien
tacacccataaccaccaaaatatat

SEQ ID NO: 107235 - DNA, 25 bp, Homo sapien
aatatgtggacatcattatgccatc

SEQ ID NO: 107236 - DNA, 25 bp, Homo sapien
tatgtggacatcattatgccatccc

SEQ ID NO: 107237 - DNA, 25 bp, Homo sapien
tgccatccccagaatatctgctctt

SEQ ID NO: 107238 - DNA, 25 bp, Homo sapien
gtcaaatatgtggacatcattatgc

SEQ ID NO: 107239 - DNA, 25 bp, Homo sapien
gtaataaagttacattcctatgctc

SEQ ID NO: 107240 - DNA, 25 bp, Homo sapien
taataaagttacattcctatgctca

SEQ ID NO: 107241 - DNA, 25 bp, Homo sapien
aataaagttacattcctatgctcag

SEQ ID NO: 107242 - DNA, 25 bp, Homo sapien
actgcacatgtatgcgcggctcgtg

SEQ ID NO: 107243 - DNA, 25 bp, Homo sapien
gaacacgtccgccaaagatataacc

SEQ ID NO: 107244 - DNA, 25 bp, Homo sapien
caagaactgcacatgtatgcgcggc

SEQ ID NO: 107245 - DNA, 25 bp, Homo sapien
gccaaagatataacccttatttcca

SEQ ID NO: 107246 - DNA, 25 bp, Homo sapien
cagagctcccaaatcaatgtgtcaa

SEQ ID NO: 107247 - DNA, 25 bp, Homo sapien
caattattccacgaaatcagaggat

SEQ ID NO: 107248 - DNA, 25 bp, Homo sapien
ctgatactgcactgaaagattctcc

SEQ ID NO: 107249 - DNA, 25 bp, Homo sapien
cattaataagactgacacagagctc

SEQ ID NO: 107250 - DNA, 25 bp, Homo sapien
ccaggtgtctaggtttagatagtgc

SEQ ID NO: 107251 - DNA, 25 bp, Homo sapien
tagatagtgcaaatcattcatccta

SEQ ID NO: 107252 - DNA, 25 bp, Homo sapien
taggtttagatagtgcaaatcattc

SEQ ID NO: 107253 - DNA, 25 bp, Homo sapien
caagtccaggtgtctaggtttagat

SEQ ID NO: 107254 - DNA, 25 bp, Homo sapien
gggatattatctgcacttagtccac

SEQ ID NO: 107255 - DNA, 25 bp, Homo sapien
tcagctataggtgttaaagtatgcc

SEQ ID NO: 107256 - DNA, 25 bp, Homo sapien
tatgccatgaccgatgttttgggct

SEQ ID NO: 107257 - DNA, 25 bp, Homo sapien
cttagtccaccacataggaaaagtt

SEQ ID NO: 107258 - DNA, 25 bp, Homo sapien
tgtttccaacaatttgttgtgacat

SEQ ID NO: 107259 - DNA, 25 bp, Homo sapien
gtttccaacaatttgttgtgacatt

SEQ ID NO: 107260 - DNA, 25 bp, Homo sapien
ctaggtcttgttttaggtaaatgtg

SEQ ID NO: 107261 - DNA, 25 bp, Homo sapien
ttgttgtgacattatgaatccaacc

SEQ ID NO: 107262 - DNA, 25 bp, Homo sapien
tcacagctgctctaaacttatcacc

SEQ ID NO: 107263 - DNA, 25 bp, Homo sapien
ggtgacatctagcttgcaacctgat

SEQ ID NO: 107264 - DNA, 25 bp, Homo sapien
tctgccttagggaaactctggccat

SEQ ID NO: 107265 - DNA, 25 bp, Homo sapien
catttcatcatcgaagaacactgga

SEQ ID NO: 107266 - DNA, 25 bp, Homo sapien
ggccattaacagcacaccatgggaa

SEQ ID NO: 107267 - DNA, 25 bp, Homo sapien
tgcctcatgtggtgttctgtaccca

SEQ ID NO: 107268 - DNA, 25 bp, Homo sapien
tcaaactggcttactggctagcaga

SEQ ID NO: 107269 - DNA, 25 bp, Homo sapien
cagtagctgctcaaaaacttgtgat

SEQ ID NO: 107270 - DNA, 25 bp, Homo sapien
tgtatccaaggcaagtaagtcatct

SEQ ID NO: 107271 - DNA, 25 bp, Homo sapien
gtatccaaggcaagtaagtcatctt

SEQ ID NO: 107272 - DNA, 25 bp, Homo sapien
tatccaaggcaagtaagtcatcttt

SEQ ID NO: 107273 - DNA, 25 bp, Homo sapien
gaaagatcaataaatcattacagtg

SEQ ID NO: 107274 - DNA, 25 bp, Homo sapien
gagtagtgaataaggctgtgtttga

SEQ ID NO: 107275 - DNA, 25 bp, Homo sapien
ctgagtagtgaataaggctgtgttt

SEQ ID NO: 107276 - DNA, 25 bp, Homo sapien
gtttgaaagatcaataaatcattac

SEQ ID NO: 107277 - DNA, 25 bp, Homo sapien
gtttagtgctactggggaaagccat

SEQ ID NO: 107278 - DNA, 25 bp, Homo sapien
ctgcgacccagctgtttagtgctac

SEQ ID NO: 107279 - DNA, 25 bp, Homo sapien
gcgacccagctgtttagtgctactg

SEQ ID NO: 107280 - DNA, 25 bp, Homo sapien
gacccagctgtttagtgctactggg

SEQ ID NO: 107281 - DNA, 25 bp, Homo sapien
tagaagaaccacatttgcaaagccc

SEQ ID NO: 107282 - DNA, 25 bp, Homo sapien
tgaggaccatgcgaaggaatctgct

SEQ ID NO: 107283 - DNA, 25 bp, Homo sapien
tggccagaggtgagacagataaatg

SEQ ID NO: 107284 - DNA, 25 bp, Homo sapien
tgcaaagccctagagacgagaaata

SEQ ID NO: 107285 - DNA, 25 bp, Homo sapien
ggaaacagaatatatggcttaccat

SEQ ID NO: 107286 - DNA, 25 bp, Homo sapien
ttttatagcatagagactaaatctg

SEQ ID NO: 107287 - DNA, 25 bp, Homo sapien
tggcagctcctgtttatgtcatcct

SEQ ID NO: 107288 - DNA, 25 bp, Homo sapien
taatttcaaaccagatgagtctatg

SEQ ID NO: 107289 - DNA, 25 bp, Homo sapien
ttttttgagtacttgttgcagaagt

SEQ ID NO: 107290 - DNA, 25 bp, Homo sapien
ctctttgttcttctcggtgattagc

SEQ ID NO: 107291 - DNA, 25 bp, Homo sapien
ttagctgcagcccaaaatgttattt

SEQ ID NO: 107292 - DNA, 25 bp, Homo sapien
taggaggtaataaagatatctgact

SEQ ID NO: 107293 - DNA, 25 bp, Homo sapien
tcccatggcatatagtcacttaaca

SEQ ID NO: 107294 - DNA, 25 bp, Homo sapien
tgagtacaactctgtagaatggtgg

SEQ ID NO: 107295 - DNA, 25 bp, Homo sapien
gggccaaactgagggatttctataa

SEQ ID NO: 107296 - DNA, 25 bp, Homo sapien
taggtaagtgtcgaaaaggtcagga

SEQ ID NO: 107297 - DNA, 25 bp, Homo sapien
ccttagagtcgatgcaggccctgct

SEQ ID NO: 107298 - DNA, 25 bp, Homo sapien
ccgggctgcagagttggcttgaaaa

SEQ ID NO: 107299 - DNA, 25 bp, Homo sapien
ggcagtcgcttagctctcacgtggg

SEQ ID NO: 107300 - DNA, 25 bp, Homo sapien
gataatgtcctgaatcggtccctga

SEQ ID NO: 107301 - DNA, 25 bp, Homo sapien
ttgtagccgccccagacgaacatgt

SEQ ID NO: 107302 - DNA, 25 bp, Homo sapien
gcagatcctcgttgccatcagccat

SEQ ID NO: 107303 - DNA, 25 bp, Homo sapien
gcaggcaagctccatggactcatag

SEQ ID NO: 107304 - DNA, 25 bp, Homo sapien
gactcatagctctcgaaggctggcc

SEQ ID NO: 107305 - DNA, 25 bp, Homo sapien
ggctttgtgagcaccagggtgacat

SEQ ID NO: 107306 - DNA, 25 bp, Homo sapien
ataacgctccaatggcaacaacggg

SEQ ID NO: 107307 - DNA, 25 bp, Homo sapien
gcaccgcccaagcaacattaacagg

SEQ ID NO: 107308 - DNA, 25 bp, Homo sapien
ttccccggaataacgctccaatggc

SEQ ID NO: 107309 - DNA, 25 bp, Homo sapien
cctgtaagtgggcagcggttcccag

SEQ ID NO: 107310 - DNA, 25 bp, Homo sapien
ggccgtcctcataacgcgtctgagt

SEQ ID NO: 107311 - DNA, 25 bp, Homo sapien
cataacgcgtctgagtgatatcaca

SEQ ID NO: 107312 - DNA, 25 bp, Homo sapien
ctcgtaggccgtcctcataacgcgt

SEQ ID NO: 107313 - DNA, 25 bp, Homo sapien
ccatgttgtagatccatagttcttc

SEQ ID NO: 107314 - DNA, 25 bp, Homo sapien
tctctaggcagataaaagtcatata

SEQ ID NO: 107315 - DNA, 25 bp, Homo sapien
catataatcctctgacttgattact

SEQ ID NO: 107316 - DNA, 25 bp, Homo sapien
gatccatagttcttctctaggcaga

SEQ ID NO: 107317 - DNA, 25 bp, Homo sapien
ttagtcccccttataatatccacat

SEQ ID NO: 107318 - DNA, 25 bp, Homo sapien
tttagtcccccttataatatccaca

SEQ ID NO: 107319 - DNA, 25 bp, Homo sapien
acaagtacagcaccctgtctacaca

SEQ ID NO: 107320 - DNA, 25 bp, Homo sapien
gaatggtgtcctccaaacaagtaca

SEQ ID NO: 107321 - DNA, 25 bp, Homo sapien
cctgacatagaaggaggaacatcac

SEQ ID NO: 107322 - DNA, 25 bp, Homo sapien
cttattggtattgcctcttgaatgg

SEQ ID NO: 107323 - DNA, 25 bp, Homo sapien
aatacagattggcacacaaaatact

SEQ ID NO: 107324 - DNA, 25 bp, Homo sapien
aagaataaaaatgcctcaagccata

SEQ ID NO: 107325 - DNA, 25 bp, Homo sapien
tacataatgcctaggtaaatacaga

SEQ ID NO: 107326 - DNA, 25 bp, Homo sapien
caagccataatccttagaaacacta

SEQ ID NO: 107327 - DNA, 25 bp, Homo sapien
tcaagcatcacctcttcggtcaaga

SEQ ID NO: 107328 - DNA, 25 bp, Homo sapien
cataattaagacatttgctgccggg

SEQ ID NO: 107329 - DNA, 25 bp, Homo sapien
tggagcctacctaacaccatatgct

SEQ ID NO: 107330 - DNA, 25 bp, Homo sapien
gatagcctatagatgtgcctcacag

SEQ ID NO: 107331 - DNA, 25 bp, Homo sapien
tccctcacccatctatcacccttta

SEQ ID NO: 107332 - DNA, 25 bp, Homo sapien
ttatccctcacccatctatcaccct

SEQ ID NO: 107333 - DNA, 25 bp, Homo sapien
ttgcaaaattgtgctgatagccata

SEQ ID NO: 107334 - DNA, 25 bp, Homo sapien
caaaattgtgctgatagccatatat

SEQ ID NO: 107335 - DNA, 25 bp, Homo sapien
ttcccactgtaacactctgtctgta

SEQ ID NO: 107336 - DNA, 25 bp, Homo sapien
actctgtctgtagaccttgaatcca

SEQ ID NO: 107337 - DNA, 25 bp, Homo sapien
ttgtttttatatacccagacaccaa

SEQ ID NO: 107338 - DNA, 25 bp, Homo sapien
cccactgtaacactctgtctgtaga

SEQ ID NO: 107339 - DNA, 25 bp, Homo sapien
gttcccaatactttatcttcaggca

SEQ ID NO: 107340 - DNA, 25 bp, Homo sapien
ccaaaaagatgtttcatcgaattca

SEQ ID NO: 107341 - DNA, 25 bp, Homo sapien
tcttcaggcaaatatccataccctc

SEQ ID NO: 107342 - DNA, 25 bp, Homo sapien
catcgaattcaaaagttcccaatac

SEQ ID NO: 107343 - DNA, 25 bp, Homo sapien
catgatcattccatcctcttggatg

SEQ ID NO: 107344 - DNA, 25 bp, Homo sapien
agtatctaaaatatgtacatgatca

SEQ ID NO: 107345 - DNA, 25 bp, Homo sapien
tataggctggctccaggtaaatgtt

SEQ ID NO: 107346 - DNA, 25 bp, Homo sapien
agtagttataggctggctccaggta

SEQ ID NO: 107347 - DNA, 25 bp, Homo sapien
tctatttccgacagttgcacaggca

SEQ ID NO: 107348 - DNA, 25 bp, Homo sapien
aacacgaagcctctatttccgacag

SEQ ID NO: 107349 - DNA, 25 bp, Homo sapien
ggcatgggcagcacgaggtgaaggt

SEQ ID NO: 107350 - DNA, 25 bp, Homo sapien
tgcctccaaacacgaagcctctatt

SEQ ID NO: 107351 - DNA, 25 bp, Homo sapien
ttcaaaagcaagtcattgaagtcgt

SEQ ID NO: 107352 - DNA, 25 bp, Homo sapien
tcattgaagtcgtttgaatacttac

SEQ ID NO: 107353 - DNA, 25 bp, Homo sapien
caagtcattgaagtcgtttgaatac

SEQ ID NO: 107354 - DNA, 25 bp, Homo sapien
aagcaagtcattgaagtcgtttgaa

SEQ ID NO: 107355 - DNA, 25 bp, Homo sapien
tcccatgtatccagattaagatagt

SEQ ID NO: 107356 - DNA, 25 bp, Homo sapien
cagattaagatagtgaagatcattc

SEQ ID NO: 107357 - DNA, 25 bp, Homo sapien
tccactcccatgtatccagattaag

SEQ ID NO: 107358 - DNA, 25 bp, Homo sapien
tatccagattaagatagtgaagatc

SEQ ID NO: 107359 - DNA, 25 bp, Homo sapien
tatgtactaggcacatagttacagg

SEQ ID NO: 107360 - DNA, 25 bp, Homo sapien
aggcttcttggtataaactacatgc

SEQ ID NO: 107361 - DNA, 25 bp, Homo sapien
gttacaatatctgcatttagaagca

SEQ ID NO: 107362 - DNA, 25 bp, Homo sapien
taggcacatagttacaggaactgga

SEQ ID NO: 107363 - DNA, 25 bp, Homo sapien
caactgggcatatgccttgtggaat

SEQ ID NO: 107364 - DNA, 25 bp, Homo sapien
aaactggtgttagtgagtgccaaga

SEQ ID NO: 107365 - DNA, 25 bp, Homo sapien
tgagtgccaagatcgaccaactggg

SEQ ID NO: 107366 - DNA, 25 bp, Homo sapien
gctgtttatcagtggtaaatcctcc

SEQ ID NO: 107367 - DNA, 25 bp, Homo sapien
cattgacatttaaagggcacagctt

SEQ ID NO: 107368 - DNA, 25 bp, Homo sapien
gccctttgcatgttgtagcccttca

SEQ ID NO: 107369 - DNA, 25 bp, Homo sapien
aagccgtctcatcagtctctaatag

SEQ ID NO: 107370 - DNA, 25 bp, Homo sapien
caattagccaagtaagccctttgca

SEQ ID NO: 107371 - DNA, 25 bp, Homo sapien
tactgatgcagtaagtccaggcatc

SEQ ID NO: 107372 - DNA, 25 bp, Homo sapien
ggtttttcggtatatggatgattaa

SEQ ID NO: 107373 - DNA, 25 bp, Homo sapien
cttggtttttcggtatatggatgat

SEQ ID NO: 107374 - DNA, 25 bp, Homo sapien
ctgatgcagtaagtccaggcatcac

SEQ ID NO: 107375 - DNA, 25 bp, Homo sapien
gaaaggagatcattcgatactagga

SEQ ID NO: 107376 - DNA, 25 bp, Homo sapien
taaacttagatgcagttcaactcat

SEQ ID NO: 107377 - DNA, 25 bp, Homo sapien
tttcaaaccttagtgaatgctgaga

SEQ ID NO: 107378 - DNA, 25 bp, Homo sapien
catgcacagatgacggaaaggagat

SEQ ID NO: 107379 - DNA, 25 bp, Homo sapien
caaaaacgagtttgaagccacccag

SEQ ID NO: 107380 - DNA, 25 bp, Homo sapien
tagttcagaccaaaacatcatggcg

SEQ ID NO: 107381 - DNA, 25 bp, Homo sapien
caataaaaatcgtatgggagctgag

SEQ ID NO: 107382 - DNA, 25 bp, Homo sapien
tcttccataggtagggccaactggc

SEQ ID NO: 107383 - DNA, 25 bp, Homo sapien
acaagcaagttgttggcacatccac

SEQ ID NO: 107384 - DNA, 25 bp, Homo sapien
tgtgatggacaagcaagttgttggc

SEQ ID NO: 107385 - DNA, 25 bp, Homo sapien
tggacaagcaagttgttggcacatc

SEQ ID NO: 107386 - DNA, 25 bp, Homo sapien
cttctccttcatcgctggcacaagc

SEQ ID NO: 107387 - DNA, 25 bp, Homo sapien
aataatgtgaaggtagtatacttac

SEQ ID NO: 107388 - DNA, 25 bp, Homo sapien
tgctttgcaagtaagtttcagtaat

SEQ ID NO: 107389 - DNA, 25 bp, Homo sapien
cagtaataatgtgaaggtagtatac

SEQ ID NO: 107390 - DNA, 25 bp, Homo sapien
aatgctttgcaagtaagtttcagta

SEQ ID NO: 107391 - DNA, 25 bp, Homo sapien
cgtacaagagattttggttgaactg

SEQ ID NO: 107392 - DNA, 25 bp, Homo sapien
acaagagattttggttgaactgaaa

SEQ ID NO: 107393 - DNA, 25 bp, Homo sapien
tttggttgaactgaaaatattagta

SEQ ID NO: 107394 - DNA, 25 bp, Homo sapien
attttggttgaactgaaaatattag

SEQ ID NO: 107395 - DNA, 25 bp, Homo sapien
gtttttcgagagtgctaagtcttag

SEQ ID NO: 107396 - DNA, 25 bp, Homo sapien
tgctaagtcttaggaaacacaattt

SEQ ID NO: 107397 - DNA, 25 bp, Homo sapien
aacctagtttttcgagagtgctaag

SEQ ID NO: 107398 - DNA, 25 bp, Homo sapien
tcgagagtgctaagtcttaggaaac

SEQ ID NO: 107399 - DNA, 25 bp, Homo sapien
tttactgtttggaagtacattcact

SEQ ID NO: 107400 - DNA, 25 bp, Homo sapien
ttactgtttggaagtacattcactt

SEQ ID NO: 107401 - DNA, 25 bp, Homo sapien
tactgtttggaagtacattcacttg

SEQ ID NO: 107402 - DNA, 25 bp, Homo sapien
taccaaacctctgattaacactgtg

SEQ ID NO: 107403 - DNA, 25 bp, Homo sapien
tccagaagtgttgttactaccaaac

SEQ ID NO: 107404 - DNA, 25 bp, Homo sapien
aagtgttgttactaccaaacctctg

SEQ ID NO: 107405 - DNA, 25 bp, Homo sapien
gttgttactaccaaacctctgatta

SEQ ID NO: 107406 - DNA, 25 bp, Homo sapien
tgtccatgcaaggtgatcataggca

SEQ ID NO: 107407 - DNA, 25 bp, Homo sapien
ggttctctaggccattcacatgcac

SEQ ID NO: 107408 - DNA, 25 bp, Homo sapien
ccaacaggtgcaaactacaacaatg

SEQ ID NO: 107409 - DNA, 25 bp, Homo sapien
tgtttacaggattgctgtccatgca

SEQ ID NO: 107410 - DNA, 25 bp, Homo sapien
caaccattactttactttaatagag

SEQ ID NO: 107411 - DNA, 25 bp, Homo sapien
cattactttactttaatagaggaca

SEQ ID NO: 107412 - DNA, 25 bp, Homo sapien
ttactttactttaatagaggacagc

SEQ ID NO: 107413 - DNA, 25 bp, Homo sapien
attactttactttaatagaggacag

SEQ ID NO: 107414 - DNA, 25 bp, Homo sapien
aaccatctcagctaaaagtttggaa

SEQ ID NO: 107415 - DNA, 25 bp, Homo sapien
gatataaagtgaaacttactcctgg

SEQ ID NO: 107416 - DNA, 25 bp, Homo sapien
gaaaaagacttattccgcagcgtaa

SEQ ID NO: 107417 - DNA, 25 bp, Homo sapien
aagaaacatgattgaccatacagga

SEQ ID NO: 107418 - DNA, 25 bp, Homo sapien
tcaactctttggaactatgaagcag

SEQ ID NO: 107419 - DNA, 25 bp, Homo sapien
agagtttaagtaccactgttccagc

SEQ ID NO: 107420 - DNA, 25 bp, Homo sapien
cttagatggtatgtatatcaggaaa

SEQ ID NO: 107421 - DNA, 25 bp, Homo sapien
tcattacttattatgctaggcaaaa

SEQ ID NO: 107422 - DNA, 25 bp, Homo sapien
tataaaatgtttagcgacatcctcg

SEQ ID NO: 107423 - DNA, 25 bp, Homo sapien
ggatcatggctctccacaacgtcta

SEQ ID NO: 107424 - DNA, 25 bp, Homo sapien
tcgtgtcaacgaaaactatctctag

SEQ ID NO: 107425 - DNA, 25 bp, Homo sapien
tctccccaggacgagaaatagtggt

SEQ ID NO: 107426 - DNA, 25 bp, Homo sapien
taagacaagactgcaggctacgaag

SEQ ID NO: 107427 - DNA, 25 bp, Homo sapien
tatgtaactgtacaaacttggaaac

SEQ ID NO: 107428 - DNA, 25 bp, Homo sapien
ggataatgtccctacccaggagagg

SEQ ID NO: 107429 - DNA, 25 bp, Homo sapien
tatatgttcggaacaggaagagcaa

SEQ ID NO: 107430 - DNA, 25 bp, Homo sapien
tctgtcatgaatgagatgagtgccc

SEQ ID NO: 107431 - DNA, 25 bp, Homo sapien
gaggcaagcccttatcagacattga

SEQ ID NO: 107432 - DNA, 25 bp, Homo sapien
tgagtgcccttttgccacgtgagga

SEQ ID NO: 107433 - DNA, 25 bp, Homo sapien
ggaacctaaatacccagtgtgatgg

SEQ ID NO: 107434 - DNA, 25 bp, Homo sapien
cagccccagaaacctagaggtggac

SEQ ID NO: 107435 - DNA, 25 bp, Homo sapien
gcttcttaattagggtgattaccca

SEQ ID NO: 107436 - DNA, 25 bp, Homo sapien
caagactttgctgtagatgatccac

SEQ ID NO: 107437 - DNA, 25 bp, Homo sapien
ggtatggctactttgtgggcttctg

SEQ ID NO: 107438 - DNA, 25 bp, Homo sapien
taatggtgccttattcagtaagcat

SEQ ID NO: 107439 - DNA, 25 bp, Homo sapien
ataatggtgccttattcagtaagca

SEQ ID NO: 107440 - DNA, 25 bp, Homo sapien
ggcttttcttctagtcttaatatct

SEQ ID NO: 107441 - DNA, 25 bp, Homo sapien
tggcttttcttctagtcttaatatc

SEQ ID NO: 107442 - DNA, 25 bp, Homo sapien
tatcgtctgcaaattatggcttttc

SEQ ID NO: 107443 - DNA, 25 bp, Homo sapien
atctgtaggcagtcatatcgtctgc

SEQ ID NO: 107444 - DNA, 25 bp, Homo sapien
aaataaggagggatttccctatgag

SEQ ID NO: 107445 - DNA, 25 bp, Homo sapien
tattaacataggaatagctagacag

SEQ ID NO: 107446 - DNA, 25 bp, Homo sapien
tccctatgaggtagtaaaatattta

SEQ ID NO: 107447 - DNA, 25 bp, Homo sapien
ttattaacataggaatagctagaca

SEQ ID NO: 107448 - DNA, 25 bp, Homo sapien
tataaagctcatgccttcaagaagc

SEQ ID NO: 107449 - DNA, 25 bp, Homo sapien
tagaacagaatggacaataaagcct

SEQ ID NO: 107450 - DNA, 25 bp, Homo sapien
actccaggaagaggccctagaacag

SEQ ID NO: 107451 - DNA, 25 bp, Homo sapien
gccctgtgctagatacttactgagt

SEQ ID NO: 107452 - DNA, 25 bp, Homo sapien
aatagacctagtagagtaagtcctc

SEQ ID NO: 107453 - DNA, 25 bp, Homo sapien
agggccctaatctataactataatc

SEQ ID NO: 107454 - DNA, 25 bp, Homo sapien
gatagctcagctaccacagattact

SEQ ID NO: 107455 - DNA, 25 bp, Homo sapien
cttagctgtttaaagacttccttca

SEQ ID NO: 107456 - DNA, 25 bp, Homo sapien
gcagagatgaactaaatgaggagct

SEQ ID NO: 107457 - DNA, 25 bp, Homo sapien
gaactcatgactcaggttgaccaag

SEQ ID NO: 107458 - DNA, 25 bp, Homo sapien
gtaccctttgggaatgatcagacac

SEQ ID NO: 107459 - DNA, 25 bp, Homo sapien
cacctggcttggttggtagtcccac

SEQ ID NO: 107460 - DNA, 25 bp, Homo sapien
tctgcagtgttggactttcagtaca

SEQ ID NO: 107461 - DNA, 25 bp, Homo sapien
cacctagaagtaggacttggccggg

SEQ ID NO: 107462 - DNA, 25 bp, Homo sapien
tgcaatcatttttcacacctagaag

SEQ ID NO: 107463 - DNA, 25 bp, Homo sapien
ggtattgctgagctaatctgcagtg

SEQ ID NO: 107464 - DNA, 25 bp, Homo sapien
gactgtctaaagaatatcctagggc

SEQ ID NO: 107465 - DNA, 25 bp, Homo sapien
cgttcatttattgagagcagagtgg

SEQ ID NO: 107466 - DNA, 25 bp, Homo sapien
tctaaagcctattcagtgcctcact

SEQ ID NO: 107467 - DNA, 25 bp, Homo sapien
gcagagtgggaaaacaacatttctt

SEQ ID NO: 107468 - DNA, 25 bp, Homo sapien
ttcactattatattagggagtttaa

SEQ ID NO: 107469 - DNA, 25 bp, Homo sapien
gtatgtgttacccaatcaaaaaatc

SEQ ID NO: 107470 - DNA, 25 bp, Homo sapien
cagattagaaaatagtaaagtcctt

SEQ ID NO: 107471 - DNA, 25 bp, Homo sapien
tattcaaccatgagtatgtgttacc

SEQ ID NO: 107472 - DNA, 25 bp, Homo sapien
attgtgaaagtattgtttgggaact

SEQ ID NO: 107473 - DNA, 25 bp, Homo sapien
catgcaattgctctacctcagggac

SEQ ID NO: 107474 - DNA, 25 bp, Homo sapien
catcctacaccctcagagcaagtga

SEQ ID NO: 107475 - DNA, 25 bp, Homo sapien
ttagctaatgggtatcacaacatcc

SEQ ID NO: 107476 - DNA, 25 bp, Homo sapien
actggactagatgctcacaaatgaa

SEQ ID NO: 107477 - DNA, 25 bp, Homo sapien
tattgcctgctctccgaaggaaacc

SEQ ID NO: 107478 - DNA, 25 bp, Homo sapien
ccccgttagtcgttgaggattcagc

SEQ ID NO: 107479 - DNA, 25 bp, Homo sapien
tagcctagaaccaagcatatgatag

SEQ ID NO: 107480 - DNA, 25 bp, Homo sapien
gataccttctttgaccataacccag

SEQ ID NO: 107481 - DNA, 25 bp, Homo sapien
gatgtcattgacgttagtgaaatgc

SEQ ID NO: 107482 - DNA, 25 bp, Homo sapien
agaaatccatacttgttatcagagg

SEQ ID NO: 107483 - DNA, 25 bp, Homo sapien
gatctcagcttgtcagcatatgcca

SEQ ID NO: 107484 - DNA, 25 bp, Homo sapien
tatgccaatgccaaaaagtaagtca

SEQ ID NO: 107485 - DNA, 25 bp, Homo sapien
agtgggaaggtagcaccatgtatac

SEQ ID NO: 107486 - DNA, 25 bp, Homo sapien
taatttggaaaattgttatctgtaa

SEQ ID NO: 107487 - DNA, 25 bp, Homo sapien
aacaacatccaacttcagtgggaag

SEQ ID NO: 107488 - DNA, 25 bp, Homo sapien
taaacgttcattaaaggatcattat

SEQ ID NO: 107489 - DNA, 25 bp, Homo sapien
aggggtcgtgctaatctctgtttcg

SEQ ID NO: 107490 - DNA, 25 bp, Homo sapien
gaacacttaacaaatttcatgtcat

SEQ ID NO: 107491 - DNA, 25 bp, Homo sapien
gtcgtgctaatctctgtttcgttct

SEQ ID NO: 107492 - DNA, 25 bp, Homo sapien
tggaacacttaacaaatttcatgtc

SEQ ID NO: 107493 - DNA, 25 bp, Homo sapien
tacagagtagtcttgttaccagtcc

SEQ ID NO: 107494 - DNA, 25 bp, Homo sapien
tttgagtcttgaagaaagcattctt

SEQ ID NO: 107495 - DNA, 25 bp, Homo sapien
taccagtccatgtcatacttcaata

SEQ ID NO: 107496 - DNA, 25 bp, Homo sapien
gtgagctgccatacccagaccgtat

SEQ ID NO: 107497 - DNA, 25 bp, Homo sapien
gtcgtattcctctgtacccagtcag

SEQ ID NO: 107498 - DNA, 25 bp, Homo sapien
aatgtaaaatgtggatagtacctcc

SEQ ID NO: 107499 - DNA, 25 bp, Homo sapien
aaacagatttttacatgggtgggca

SEQ ID NO: 107500 - DNA, 25 bp, Homo sapien
tcatgtggtacacgagactttcgag

SEQ ID NO: 107501 - DNA, 25 bp, Homo sapien
tacagtaccctaagtgacgaggctc

SEQ ID NO: 107502 - DNA, 25 bp, Homo sapien
gaatattgggtcttctgcgcggccg

SEQ ID NO: 107503 - DNA, 25 bp, Homo sapien
gacacaaatacgttcgcctcgagga

SEQ ID NO: 107504 - DNA, 25 bp, Homo sapien
tactcgcggagctgaatgctaggta

SEQ ID NO: 107505 - DNA, 25 bp, Homo sapien
gcccaagacacaatggggcacggta

SEQ ID NO: 107506 - DNA, 25 bp, Homo sapien
cccaagacacaatggggcacggtaa

SEQ ID NO: 107507 - DNA, 25 bp, Homo sapien
ccaagacacaatggggcacggtaac

SEQ ID NO: 107508 - DNA, 25 bp, Homo sapien
agcccaagacacaatggggcacggt

SEQ ID NO: 107509 - DNA, 25 bp, Homo sapien
gagaatcctgtaatcaattgcagaa

SEQ ID NO: 107510 - DNA, 25 bp, Homo sapien
gagagcaggacccatcaaaatagga

SEQ ID NO: 107511 - DNA, 25 bp, Homo sapien
gagagttcgcctcgatcgttgagga

SEQ ID NO: 107512 - DNA, 25 bp, Homo sapien
caagaccgaggttcgatgagaatcc

SEQ ID NO: 107513 - DNA, 25 bp, Homo sapien
gatttactctctaagcataggactg

SEQ ID NO: 107514 - DNA, 25 bp, Homo sapien
actattctgacttcgtggcattctc

SEQ ID NO: 107515 - DNA, 25 bp, Homo sapien
tatgattccccagtacacaacaatg

SEQ ID NO: 107516 - DNA, 25 bp, Homo sapien
gctgtgtcgtacatatgaaactgtg

SEQ ID NO: 107517 - DNA, 25 bp, Homo sapien
tcagtagtgggatcgcgcctgtgaa

SEQ ID NO: 107518 - DNA, 25 bp, Homo sapien
gcgctatgccgatcgggtgtccgca

SEQ ID NO: 107519 - DNA, 25 bp, Homo sapien
ccggcccaggtcggaaacggagcag

SEQ ID NO: 107520 - DNA, 25 bp, Homo sapien
ggctgtagtgcgctatgccgatcgg

SEQ ID NO: 107521 - DNA, 25 bp, Homo sapien
tatctgctacaaggacggaggtggc

SEQ ID NO: 107522 - DNA, 25 bp, Homo sapien
tgctttcgcagatctactatggtcg

SEQ ID NO: 107523 - DNA, 25 bp, Homo sapien
caagcaacgctgacggaccaggtta

SEQ ID NO: 107524 - DNA, 25 bp, Homo sapien
tgtccggacgccacactatgagcat

SEQ ID NO: 107525 - DNA, 25 bp, Homo sapien
agagaacatttaggagggaactgta

SEQ ID NO: 107526 - DNA, 25 bp, Homo sapien
agaacatttaggagggaactgtaag

SEQ ID NO: 107527 - DNA, 25 bp, Homo sapien
attacatcactcatgaagaacacgg

SEQ ID NO: 107528 - DNA, 25 bp, Homo sapien
atgaagaacacggtgagagaacaga

SEQ ID NO: 107529 - DNA, 25 bp, Homo sapien
agcagaggccgaccgttcggacaag

SEQ ID NO: 107530 - DNA, 25 bp, Homo sapien
gctgccggaaaaggcgccgaggaaa

SEQ ID NO: 107531 - DNA, 25 bp, Homo sapien
aggcgccgaggaaaccgcctcactt

SEQ ID NO: 107532 - DNA, 25 bp, Homo sapien
acctctgtaaggagagcggcccgcg

SEQ ID NO: 107533 - DNA, 25 bp, Homo sapien
ccacaaaggagcgaagaccgaggtg

SEQ ID NO: 107534 - DNA, 25 bp, Homo sapien
ccgcctttccagctcggcccaaggg

SEQ ID NO: 107535 - DNA, 25 bp, Homo sapien
agcgaagaccgaggtggcccgcctt

SEQ ID NO: 107536 - DNA, 25 bp, Homo sapien
gagctccacaaaggagcgaagaccg

SEQ ID NO: 107537 - DNA, 25 bp, Homo sapien
tgcagagaaacagagagggagggga

SEQ ID NO: 107538 - DNA, 25 bp, Homo sapien
ctgcagagaaacagagagggagggg

SEQ ID NO: 107539 - DNA, 25 bp, Homo sapien
gcagagaaacagagagggaggggag

SEQ ID NO: 107540 - DNA, 25 bp, Homo sapien
tcatggatcctcgcgggaactcggt

SEQ ID NO: 107541 - DNA, 25 bp, Homo sapien
gatcctcgcgggaactcggtgcgct

SEQ ID NO: 107542 - DNA, 25 bp, Homo sapien
atggatcctcgcgggaactcggtgc

SEQ ID NO: 107543 - DNA, 25 bp, Homo sapien
tcctcgcgggaactcggtgcgctgc

SEQ ID NO: 107544 - DNA, 25 bp, Homo sapien
aaacgaagcctctcggccgcgagag

SEQ ID NO: 107545 - DNA, 25 bp, Homo sapien
ggcctgcgtgggagttgcctcctaa

SEQ ID NO: 107546 - DNA, 25 bp, Homo sapien
tcctctcaccgcgagggagactgca

SEQ ID NO: 107547 - DNA, 25 bp, Homo sapien
catcaccgaccgcacaacttgattt

SEQ ID NO: 107548 - DNA, 25 bp, Homo sapien
tcgcggtcggcgcagtccactacga

SEQ ID NO: 107549 - DNA, 25 bp, Homo sapien
cagtgtagtaatgccgccagagcgg

SEQ ID NO: 107550 - DNA, 25 bp, Homo sapien
ctggcgagcctcatcgatgcggtcg

SEQ ID NO: 107551 - DNA, 25 bp, Homo sapien
cgtccaggcccaacatgaggatccg

SEQ ID NO: 107552 - DNA, 25 bp, Homo sapien
gttagaggttaaccatgtgagcccc

SEQ ID NO: 107553 - DNA, 25 bp, Homo sapien
tgtagttagaggttaaccatgtgag

SEQ ID NO: 107554 - DNA, 25 bp, Homo sapien
gatttgtagttagaggttaaccatg

SEQ ID NO: 107555 - DNA, 25 bp, Homo sapien
agaggttaaccatgtgagcccctca

SEQ ID NO: 107556 - DNA, 25 bp, Homo sapien
gccactgtgggctaagtttactata

SEQ ID NO: 107557 - DNA, 25 bp, Homo sapien
tgtcagatcagagcatcctaacgca

SEQ ID NO: 107558 - DNA, 25 bp, Homo sapien
acatactgaggtgcaactggaacat

SEQ ID NO: 107559 - DNA, 25 bp, Homo sapien
ccatctgctggaagtcaacaagagc

SEQ ID NO: 107560 - DNA, 25 bp, Homo sapien
caatatggccaaagtgtgaaggacc

SEQ ID NO: 107561 - DNA, 25 bp, Homo sapien
caacaggagcctacatgagaatacc

SEQ ID NO: 107562 - DNA, 25 bp, Homo sapien
tggatatcaccagcgagcacactgc

SEQ ID NO: 107563 - DNA, 25 bp, Homo sapien
tagtggtcgcaatccagttactggt

SEQ ID NO: 107564 - DNA, 25 bp, Homo sapien
gttccttgcctgttcagctcactag

SEQ ID NO: 107565 - DNA, 25 bp, Homo sapien
taattcctaaatcccgctccattct

SEQ ID NO: 107566 - DNA, 25 bp, Homo sapien
ccaggcatattagtaggctctcaat

SEQ ID NO: 107567 - DNA, 25 bp, Homo sapien
cccacaatgtgaggttagttcttac

SEQ ID NO: 107568 - DNA, 25 bp, Homo sapien
tcatccaagtagtgaacacaagtag

SEQ ID NO: 107569 - DNA, 25 bp, Homo sapien
cacaagtagttcttcaaacctggcc

SEQ ID NO: 107570 - DNA, 25 bp, Homo sapien
ggtttaggcctctaatgatcccatc

SEQ ID NO: 107571 - DNA, 25 bp, Homo sapien
cttataagtaagaatgtgcggcatt

SEQ ID NO: 107572 - DNA, 25 bp, Homo sapien
ttctctgagacggagtcctgctctg

SEQ ID NO: 107573 - DNA, 25 bp, Homo sapien
tggagtgcagtggctcaatctgggc

SEQ ID NO: 107574 - DNA, 25 bp, Homo sapien
ctggagtgcagtggctcaatctggg

SEQ ID NO: 107575 - DNA, 25 bp, Homo sapien
agtagtactgtagcccgaactctca

SEQ ID NO: 107576 - DNA, 25 bp, Homo sapien
ctgacactgggactgttggttctcc

SEQ ID NO: 107577 - DNA, 25 bp, Homo sapien
tggttctcctatagaagacactgag

SEQ ID NO: 107578 - DNA, 25 bp, Homo sapien
gaagacactgagtagtactgtagcc

SEQ ID NO: 107579 - DNA, 25 bp, Homo sapien
gagctacagtattactcagtgtctt

SEQ ID NO: 107580 - DNA, 25 bp, Homo sapien
gatgtatgctgtccttaaggtacag

SEQ ID NO: 107581 - DNA, 25 bp, Homo sapien
tacagctgttgttgagctacagtat

SEQ ID NO: 107582 - DNA, 25 bp, Homo sapien
catgactagttacaggatgtatgct

SEQ ID NO: 107583 - DNA, 25 bp, Homo sapien
tcccctccccgcaatttccatgcag

SEQ ID NO: 107584 - DNA, 25 bp, Homo sapien
cccctccccgcaatttccatgcaga

SEQ ID NO: 107585 - DNA, 25 bp, Homo sapien
ctcccctccccgcaatttccatgca

SEQ ID NO: 107586 - DNA, 25 bp, Homo sapien
gcataggactccctctacccagcag

SEQ ID NO: 107587 - DNA, 25 bp, Homo sapien
cagctggatggatcccaggtggtcc

SEQ ID NO: 107588 - DNA, 25 bp, Homo sapien
gtctgtattcattgaacaccgccat

SEQ ID NO: 107589 - DNA, 25 bp, Homo sapien
tggatggatcccaggtggtcccagt

SEQ ID NO: 107590 - DNA, 25 bp, Homo sapien
tccaggaatgatagaggagacagat

SEQ ID NO: 107591 - DNA, 25 bp, Homo sapien
atccaggaatgatagaggagacaga

SEQ ID NO: 107592 - DNA, 25 bp, Homo sapien
ccaggaatgatagaggagacagatg

SEQ ID NO: 107593 - DNA, 25 bp, Homo sapien
gatacagcctgtggcataggtccag

SEQ ID NO: 107594 - DNA, 25 bp, Homo sapien
gggtcttctcttacatctggtagca

SEQ ID NO: 107595 - DNA, 25 bp, Homo sapien
tgagtgtggtgaacagatacagcct

SEQ ID NO: 107596 - DNA, 25 bp, Homo sapien
tgggatctgtgtctcgcaaaagcat

SEQ ID NO: 107597 - DNA, 25 bp, Homo sapien
acaatggtggggacacatcacccca

SEQ ID NO: 107598 - DNA, 25 bp, Homo sapien
gacaatggtggggacacatcacccc

SEQ ID NO: 107599 - DNA, 25 bp, Homo sapien
tgacaatggtggggacacatcaccc

SEQ ID NO: 107600 - DNA, 25 bp, Homo sapien
atgacaatggtggggacacatcacc

SEQ ID NO: 107601 - DNA, 25 bp, Homo sapien
cgtgaacacaatgtagaatactgtg

SEQ ID NO: 107602 - DNA, 25 bp, Homo sapien
gggttggccgtgaacacaatgtaga

SEQ ID NO: 107603 - DNA, 25 bp, Homo sapien
tggccgtgaacacaatgtagaatac

SEQ ID NO: 107604 - DNA, 25 bp, Homo sapien
aacacaatgtagaatactgtgtcac

SEQ ID NO: 107605 - DNA, 25 bp, Homo sapien
gacactgccaccactagcgtcctct

SEQ ID NO: 107606 - DNA, 25 bp, Homo sapien
tattcaaggtccagaaaggaggctc

SEQ ID NO: 107607 - DNA, 25 bp, Homo sapien
tcttcccttgatattcaaggtccag

SEQ ID NO: 107608 - DNA, 25 bp, Homo sapien
caccactagcgtcctctgaactatt

SEQ ID NO: 107609 - DNA, 25 bp, Homo sapien
ctcaaatggagttctggctgctgaa

SEQ ID NO: 107610 - DNA, 25 bp, Homo sapien
agttctggctgctgaacacctcccc

SEQ ID NO: 107611 - DNA, 25 bp, Homo sapien
ttctggctgctgaacacctccccgc

SEQ ID NO: 107612 - DNA, 25 bp, Homo sapien
atggagttctggctgctgaacacct

SEQ ID NO: 107613 - DNA, 25 bp, Homo sapien
ttggcctgcaccgatctgaccagat

SEQ ID NO: 107614 - DNA, 25 bp, Homo sapien
catttccccgaaccatcgcttggat

SEQ ID NO: 107615 - DNA, 25 bp, Homo sapien
gatgaagcacatcgcagagtactgc

SEQ ID NO: 107616 - DNA, 25 bp, Homo sapien
gaccagatctatttccatttccccg

SEQ ID NO: 107617 - DNA, 25 bp, Homo sapien
caggtatttccgtctgtaaacacaa

SEQ ID NO: 107618 - DNA, 25 bp, Homo sapien
catggaagctctgaacacatagttt

SEQ ID NO: 107619 - DNA, 25 bp, Homo sapien
agaaaccagggatctgcaataaggc

SEQ ID NO: 107620 - DNA, 25 bp, Homo sapien
tccaggcgttgagtagatgaccatt

SEQ ID NO: 107621 - DNA, 25 bp, Homo sapien
aatatttgaatactcagctgactgg

SEQ ID NO: 107622 - DNA, 25 bp, Homo sapien
tttaatatttgaatactcagctgac

SEQ ID NO: 107623 - DNA, 25 bp, Homo sapien
atttaatatttgaatactcagctga

SEQ ID NO: 107624 - DNA, 25 bp, Homo sapien
taatatttgaatactcagctgactg

SEQ ID NO: 107625 - DNA, 25 bp, Homo sapien
accagagttctgggcaagtccttag

SEQ ID NO: 107626 - DNA, 25 bp, Homo sapien
ccagagttctgggcaagtccttagt

SEQ ID NO: 107627 - DNA, 25 bp, Homo sapien
tctgagtatgagaagatcgttgaca

SEQ ID NO: 107628 - DNA, 25 bp, Homo sapien
ttgggctagctcctccaaccatagt

SEQ ID NO: 107629 - DNA, 25 bp, Homo sapien
ggtgctctggtgtgcggcttccacc

SEQ ID NO: 107630 - DNA, 25 bp, Homo sapien
gatcgcagctgcctctgttgggcta

SEQ ID NO: 107631 - DNA, 25 bp, Homo sapien
tacatgtcaatgctgtcagtttcaa

SEQ ID NO: 107632 - DNA, 25 bp, Homo sapien
aggcagcaggacaaattacatgtca

SEQ ID NO: 107633 - DNA, 25 bp, Homo sapien
aaaagaacgttccaacaggcagcag

SEQ ID NO: 107634 - DNA, 25 bp, Homo sapien
aaaaagaacgttccaacaggcagca

SEQ ID NO: 107635 - DNA, 25 bp, Homo sapien
gagaaattatattactctcgcctac

SEQ ID NO: 107636 - DNA, 25 bp, Homo sapien
tggctgttggtcaatccctgcccca

SEQ ID NO: 107637 - DNA, 25 bp, Homo sapien
ggcatccatcccctaggaatggctg

SEQ ID NO: 107638 - DNA, 25 bp, Homo sapien
acagactcagcactcccttcagcca

SEQ ID NO: 107639 - DNA, 25 bp, Homo sapien
catctgcgcccttataaaatctgca

SEQ ID NO: 107640 - DNA, 25 bp, Homo sapien
gaaaagagcgtccttcatctgcgcc

SEQ ID NO: 107641 - DNA, 25 bp, Homo sapien
agtctccaaagatggccactgttga

SEQ ID NO: 107642 - DNA, 25 bp, Homo sapien
tgtgcatattgttcctcctttagag

SEQ ID NO: 107643 - DNA, 25 bp, Homo sapien
tcctgttattggcaaaaaacccatc

SEQ ID NO: 107644 - DNA, 25 bp, Homo sapien
actaccaaccaaaactgctctgagc

SEQ ID NO: 107645 - DNA, 25 bp, Homo sapien
aacttcactaccaaccaaaactgct

SEQ ID NO: 107646 - DNA, 25 bp, Homo sapien
tcctccaacttcactaccaaccaaa

SEQ ID NO: 107647 - DNA, 25 bp, Homo sapien
tccacatcctccaacttcactacca

SEQ ID NO: 107648 - DNA, 25 bp, Homo sapien
gaaacatcagatgctcaagataagg

SEQ ID NO: 107649 - DNA, 25 bp, Homo sapien
gcaatcccagagtaagcatggtggc

SEQ ID NO: 107650 - DNA, 25 bp, Homo sapien
tatcagagctagaaggtacatcaag

SEQ ID NO: 107651 - DNA, 25 bp, Homo sapien
gccctgctatctgagttggctcatg

SEQ ID NO: 107652 - DNA, 25 bp, Homo sapien
cccattggctggctattaacacctg

SEQ ID NO: 107653 - DNA, 25 bp, Homo sapien
ttggctggctattaacacctggctc

SEQ ID NO: 107654 - DNA, 25 bp, Homo sapien
gatcccattggctggctattaacac

SEQ ID NO: 107655 - DNA, 25 bp, Homo sapien
ttattgatcccattggctggctatt

SEQ ID NO: 107656 - DNA, 25 bp, Homo sapien
tctgtacactcaccagacactggct

SEQ ID NO: 107657 - DNA, 25 bp, Homo sapien
cactggctgctggttgtcacggtgc

SEQ ID NO: 107658 - DNA, 25 bp, Homo sapien
cagacactggctgctggttgtcacg

SEQ ID NO: 107659 - DNA, 25 bp, Homo sapien
gctgctggttgtcacggtgctaaga

SEQ ID NO: 107660 - DNA, 25 bp, Homo sapien
tctggagagggtacgtccattctca

SEQ ID NO: 107661 - DNA, 25 bp, Homo sapien
gagctccagcatacaatccagatta

SEQ ID NO: 107662 - DNA, 25 bp, Homo sapien
gattaaaatctctccttcgcaggag

SEQ ID NO: 107663 - DNA, 25 bp, Homo sapien
gagcttctgagctctcgcgatgcag

SEQ ID NO: 107664 - DNA, 25 bp, Homo sapien
tagtaattcataggcagaaacaagg

SEQ ID NO: 107665 - DNA, 25 bp, Homo sapien
tgtttcaggccccatagatagtgct

SEQ ID NO: 107666 - DNA, 25 bp, Homo sapien
gggaattattttgcctggagacagg

SEQ ID NO: 107667 - DNA, 25 bp, Homo sapien
gctgcaagcctctgttagtaattca

SEQ ID NO: 107668 - DNA, 25 bp, Homo sapien
ctggtatgggagatacagcatcatc

SEQ ID NO: 107669 - DNA, 25 bp, Homo sapien
tatcttttcgtcctgccatccttag

SEQ ID NO: 107670 - DNA, 25 bp, Homo sapien
caaagcctttccaagatcactaagc

SEQ ID NO: 107671 - DNA, 25 bp, Homo sapien
ccaaagaacctatccgtggaatcaa

SEQ ID NO: 107672 - DNA, 25 bp, Homo sapien
tggcgatacaatcacctgcctctgc

SEQ ID NO: 107673 - DNA, 25 bp, Homo sapien
agctccagggctggcgatacaatca

SEQ ID NO: 107674 - DNA, 25 bp, Homo sapien
tgcaggaaggtaccacccaaacata

SEQ ID NO: 107675 - DNA, 25 bp, Homo sapien
tgcccatgcaggaaggtaccaccca

SEQ ID NO: 107676 - DNA, 25 bp, Homo sapien
tcaggaaaccgctgcaaagatgatc

SEQ ID NO: 107677 - DNA, 25 bp, Homo sapien
tgagtcacagtaaaccgacaaccgt

SEQ ID NO: 107678 - DNA, 25 bp, Homo sapien
tgtgacgtgtcctactcctgagagc

SEQ ID NO: 107679 - DNA, 25 bp, Homo sapien
caaagaaaccattgtggcagggctc

SEQ ID NO: 107680 - DNA, 25 bp, Homo sapien
ggaaaacattgaggccctgtagcca

SEQ ID NO: 107681 - DNA, 25 bp, Homo sapien
gaaatgcctagatactccacctcaa

SEQ ID NO: 107682 - DNA, 25 bp, Homo sapien
ccaaatttacagctgggaggatcag

SEQ ID NO: 107683 - DNA, 25 bp, Homo sapien
catgatgtcagcagcaccggtgttg

SEQ ID NO: 107684 - DNA, 25 bp, Homo sapien
cattgttcccgttggcagaaactga

SEQ ID NO: 107685 - DNA, 25 bp, Homo sapien
tctggctccaacttcttcgttttct

SEQ ID NO: 107686 - DNA, 25 bp, Homo sapien
gcacccattgttcccgttggcagaa

SEQ ID NO: 107687 - DNA, 25 bp, Homo sapien
tatgtgagatgcacaattgcaccca

SEQ ID NO: 107688 - DNA, 25 bp, Homo sapien
gaaccagggtttgcctacatgatgg

SEQ ID NO: 107689 - DNA, 25 bp, Homo sapien
aacacaagtcattggttgggagtag

SEQ ID NO: 107690 - DNA, 25 bp, Homo sapien
tttatgtcacagttcaacacaagtc

SEQ ID NO: 107691 - DNA, 25 bp, Homo sapien
gcactctgcatggtcgtctggaacc

SEQ ID NO: 107692 - DNA, 25 bp, Homo sapien
taagtcatattatgtcccctctctg

SEQ ID NO: 107693 - DNA, 25 bp, Homo sapien
tcaatcactttccatgaatggttct

SEQ ID NO: 107694 - DNA, 25 bp, Homo sapien
cagtcccatgttagagcatttctgc

SEQ ID NO: 107695 - DNA, 25 bp, Homo sapien
ttttctacactcctaacatgtggtc

SEQ ID NO: 107696 - DNA, 25 bp, Homo sapien
gccctggaggacgagctgctgggtg

SEQ ID NO: 107697 - DNA, 25 bp, Homo sapien
ggaggacgagctgctgggtggtcat

SEQ ID NO: 107698 - DNA, 25 bp, Homo sapien
gagacggaagccccatgggcccagg

SEQ ID NO: 107699 - DNA, 25 bp, Homo sapien
agacggaagccccatgggcccaggc

SEQ ID NO: 107700 - DNA, 25 bp, Homo sapien
gagtgacccggcaaatagtgaggct

SEQ ID NO: 107701 - DNA, 25 bp, Homo sapien
ggcaaatagtgaggctgctcgaagt

SEQ ID NO: 107702 - DNA, 25 bp, Homo sapien
tgacccggcaaatagtgaggctgct

SEQ ID NO: 107703 - DNA, 25 bp, Homo sapien
ccaggagtgacccggcaaatagtga

SEQ ID NO: 107704 - DNA, 25 bp, Homo sapien
tgttctgagcttccaagtgcgtcat

SEQ ID NO: 107705 - DNA, 25 bp, Homo sapien
cagactttatgttcggatctggcta

SEQ ID NO: 107706 - DNA, 25 bp, Homo sapien
cgtcatattgctagaattttcccca

SEQ ID NO: 107707 - DNA, 25 bp, Homo sapien
acagtgagagtcatgttgtctttgc

SEQ ID NO: 107708 - DNA, 25 bp, Homo sapien
cttgtatggacgacacttctcttcc

SEQ ID NO: 107709 - DNA, 25 bp, Homo sapien
atggacgacacttctcttcctccat

SEQ ID NO: 107710 - DNA, 25 bp, Homo sapien
gtatggacgacacttctcttcctcc

SEQ ID NO: 107711 - DNA, 25 bp, Homo sapien
tgtatggacgacacttctcttcctc

SEQ ID NO: 107712 - DNA, 25 bp, Homo sapien
cttcggttgtgggcgcttcctatgt

SEQ ID NO: 107713 - DNA, 25 bp, Homo sapien
gtgggcgcttcctatgtgcaggacc

SEQ ID NO: 107714 - DNA, 25 bp, Homo sapien
ttgtgggcgcttcctatgtgcagga

SEQ ID NO: 107715 - DNA, 25 bp, Homo sapien
cggttgtgggcgcttcctatgtgca

SEQ ID NO: 107716 - DNA, 25 bp, Homo sapien
tctaccccgctggtagcagtctgac

SEQ ID NO: 107717 - DNA, 25 bp, Homo sapien
tggaggctgagcatgttcgcctcta

SEQ ID NO: 107718 - DNA, 25 bp, Homo sapien
atgttcgcctctaccccgctggtag

SEQ ID NO: 107719 - DNA, 25 bp, Homo sapien
aggctgagcatgttcgcctctaccc

SEQ ID NO: 107720 - DNA, 25 bp, Homo sapien
tgaatcctgagggcttgttgggatc

SEQ ID NO: 107721 - DNA, 25 bp, Homo sapien
gccactttagtgacaggagctttaa

SEQ ID NO: 107722 - DNA, 25 bp, Homo sapien
gcagccactttagtgacaggagctt

SEQ ID NO: 107723 - DNA, 25 bp, Homo sapien
gaatcctgagggcttgttgggatcc

SEQ ID NO: 107724 - DNA, 25 bp, Homo sapien
ttggtgcaacagtcagtgcacaagt

SEQ ID NO: 107725 - DNA, 25 bp, Homo sapien
tgcaacagtcagtgcacaagtaaca

SEQ ID NO: 107726 - DNA, 25 bp, Homo sapien
tgcacaagtaacactcgggatggcg

SEQ ID NO: 107727 - DNA, 25 bp, Homo sapien
acaagtaacactcgggatggcggtg

SEQ ID NO: 107728 - DNA, 25 bp, Homo sapien
gagaacagtggtcggatctgccggg

SEQ ID NO: 107729 - DNA, 25 bp, Homo sapien
gggaacacggtaaccacttcatagc

SEQ ID NO: 107730 - DNA, 25 bp, Homo sapien
aacacggtaaccacttcatagccct

SEQ ID NO: 107731 - DNA, 25 bp, Homo sapien
agtggtcggatctgccgggtcactt

SEQ ID NO: 107732 - DNA, 25 bp, Homo sapien
cagttctaggatcaacgacgatttc

SEQ ID NO: 107733 - DNA, 25 bp, Homo sapien
gatgccagcttcagtcatcaggtca

SEQ ID NO: 107734 - DNA, 25 bp, Homo sapien
caaactgatgggatggagactaatc

SEQ ID NO: 107735 - DNA, 25 bp, Homo sapien
tctcgtgcttcctcgtggtccatga

SEQ ID NO: 107736 - DNA, 25 bp, Homo sapien
agctgtcccggcttctggcaggctg

SEQ ID NO: 107737 - DNA, 25 bp, Homo sapien
gtcccggcttctggcaggctgcttg

SEQ ID NO: 107738 - DNA, 25 bp, Homo sapien
gctgccagctgtcccggcttctggc

SEQ ID NO: 107739 - DNA, 25 bp, Homo sapien
ttggtgggcacgggctgccagctgt

SEQ ID NO: 107740 - DNA, 25 bp, Homo sapien
gagctcattagatcccagggttttt

SEQ ID NO: 107741 - DNA, 25 bp, Homo sapien
gagttgggaggagcacatgacccaa

SEQ ID NO: 107742 - DNA, 25 bp, Homo sapien
cccaagctgagctcattagatccca

SEQ ID NO: 107743 - DNA, 25 bp, Homo sapien
catgacccaagctgagctcattaga

SEQ ID NO: 107744 - DNA, 25 bp, Homo sapien
tgactgagatcttaaacgtattttc

SEQ ID NO: 107745 - DNA, 25 bp, Homo sapien
tttagtgactgagatcttaaacgta

SEQ ID NO: 107746 - DNA, 25 bp, Homo sapien
agtgactgagatcttaaacgtattt

SEQ ID NO: 107747 - DNA, 25 bp, Homo sapien
tagtgactgagatcttaaacgtatt

SEQ ID NO: 107748 - DNA, 25 bp, Homo sapien
gaaaatgcttcctgcatctcgcata

SEQ ID NO: 107749 - DNA, 25 bp, Homo sapien
gagctgtggccatcttaccctaaat

SEQ ID NO: 107750 - DNA, 25 bp, Homo sapien
tctcgcatagttcagaagcctctgg

SEQ ID NO: 107751 - DNA, 25 bp, Homo sapien
cagagcttttgcctcattgggcacc

SEQ ID NO: 107752 - DNA, 25 bp, Homo sapien
cttcgattgagagcaccgcttcagg

SEQ ID NO: 107753 - DNA, 25 bp, Homo sapien
ggccgtcctcttcgattgagagcac

SEQ ID NO: 107754 - DNA, 25 bp, Homo sapien
tcctcttcgattgagagcaccgctt

SEQ ID NO: 107755 - DNA, 25 bp, Homo sapien
gatggccgtcctcttcgattgagag

SEQ ID NO: 107756 - DNA, 25 bp, Homo sapien
tccatcctcccggcggtcgggcggc

SEQ ID NO: 107757 - DNA, 25 bp, Homo sapien
ctccatcctcccggcggtcgggcgg

SEQ ID NO: 107758 - DNA, 25 bp, Homo sapien
tagactgaaatgcttaaggcaggga

SEQ ID NO: 107759 - DNA, 25 bp, Homo sapien
aagatgaagactgagaaaatgtgtg

SEQ ID NO: 107760 - DNA, 25 bp, Homo sapien
ggctggatagactgaaatgcttaag

SEQ ID NO: 107761 - DNA, 25 bp, Homo sapien
tgtgctttgaaagcagacctgaaag

SEQ ID NO: 107762 - DNA, 25 bp, Homo sapien
tccaggaacgcagaccaacacagct

SEQ ID NO: 107763 - DNA, 25 bp, Homo sapien
aaatgtgtgcacttcttattctgag

SEQ ID NO: 107764 - DNA, 25 bp, Homo sapien
cagttggtggacctcatgcctggtg

SEQ ID NO: 107765 - DNA, 25 bp, Homo sapien
ccagagcagcgaatggatgccagtc

SEQ ID NO: 107766 - DNA, 25 bp, Homo sapien
tgggagtggagaatgaataaagaaa

SEQ ID NO: 107767 - DNA, 25 bp, Homo sapien
tctgtaactgattatgatcaattag

SEQ ID NO: 107768 - DNA, 25 bp, Homo sapien
ttgtaaacaccaatgcactcagacc

SEQ ID NO: 107769 - DNA, 25 bp, Homo sapien
aacaccaatgcactcagaccagcca

SEQ ID NO: 107770 - DNA, 25 bp, Homo sapien
tatcaggatcctgaggcccatctgg

SEQ ID NO: 107771 - DNA, 25 bp, Homo sapien
taactacttgctgttactggttcag

SEQ ID NO: 107772 - DNA, 25 bp, Homo sapien
ggctaagtaactacttgctgttact

SEQ ID NO: 107773 - DNA, 25 bp, Homo sapien
cctcgtggtgtacttctctggctaa

SEQ ID NO: 107774 - DNA, 25 bp, Homo sapien
gacgtaagccccgacattaaagcgc

SEQ ID NO: 107775 - DNA, 25 bp, Homo sapien
gacaaggatccattgctgggatgat

SEQ ID NO: 107776 - DNA, 25 bp, Homo sapien
gcgccaaagttgacaaggatccatt

SEQ ID NO: 107777 - DNA, 25 bp, Homo sapien
cccgacattaaagcgccaaagttga

SEQ ID NO: 107778 - DNA, 25 bp, Homo sapien
ttgccccatccttgcacttattgct

SEQ ID NO: 107779 - DNA, 25 bp, Homo sapien
tatccagttccataattaatctgtc

SEQ ID NO: 107780 - DNA, 25 bp, Homo sapien
tagttgattatccagttccataatt

SEQ ID NO: 107781 - DNA, 25 bp, Homo sapien
gcacttattgctcaggaatagttga

SEQ ID NO: 107782 - DNA, 25 bp, Homo sapien
cctctcagctgccaacgctgctcag

SEQ ID NO: 107783 - DNA, 25 bp, Homo sapien
tctcagctgccaacgctgctcagag

SEQ ID NO: 107784 - DNA, 25 bp, Homo sapien
ggacagggctccctccaagcccgaa

SEQ ID NO: 107785 - DNA, 25 bp, Homo sapien
acctcaggggaaggctcagcagtca

SEQ ID NO: 107786 - DNA, 25 bp, Homo sapien
gatgtgagttccaggtgcttgtgtt

SEQ ID NO: 107787 - DNA, 25 bp, Homo sapien
tgaagtccaggcattaacgatgtga

SEQ ID NO: 107788 - DNA, 25 bp, Homo sapien
gatttgttaatctgctgaagtccag

SEQ ID NO: 107789 - DNA, 25 bp, Homo sapien
cagatttgttaatctgctgaagtcc

SEQ ID NO: 107790 - DNA, 25 bp, Homo sapien
gaccagatgggtagcaggccattaa

SEQ ID NO: 107791 - DNA, 25 bp, Homo sapien
caggccattaaagtacagcagaaag

SEQ ID NO: 107792 - DNA, 25 bp, Homo sapien
ctgagaccagatgggtagcaggcca

SEQ ID NO: 107793 - DNA, 25 bp, Homo sapien
gggtagcaggccattaaagtacagc

SEQ ID NO: 107794 - DNA, 25 bp, Homo sapien
ggattaacattccaccgccctggac

SEQ ID NO: 107795 - DNA, 25 bp, Homo sapien
cattcgaaggccaatagggacagag

SEQ ID NO: 107796 - DNA, 25 bp, Homo sapien
tcgtttctaaatatgggagcctggg

SEQ ID NO: 107797 - DNA, 25 bp, Homo sapien
ttacagtttgaaagcaactgccacg

SEQ ID NO: 107798 - DNA, 25 bp, Homo sapien
tttatgttatgaagccattcgctca

SEQ ID NO: 107799 - DNA, 25 bp, Homo sapien
tgttccaaagagtagtaaccggatg

SEQ ID NO: 107800 - DNA, 25 bp, Homo sapien
tagaaagaccagtttcaggcttatg

SEQ ID NO: 107801 - DNA, 25 bp, Homo sapien
caggcttatgcacttacgtggctca

SEQ ID NO: 107802 - DNA, 25 bp, Homo sapien
ttttccggcacgtccttagagatcc

SEQ ID NO: 107803 - DNA, 25 bp, Homo sapien
gggctgtctgcaatacgaaaaattc

SEQ ID NO: 107804 - DNA, 25 bp, Homo sapien
gatccgatgtatagatgatgaccac

SEQ ID NO: 107805 - DNA, 25 bp, Homo sapien
taaaaattggtattgaggcgaggct

SEQ ID NO: 107806 - DNA, 25 bp, Homo sapien
tgtaaggcagggagatgattagttt

SEQ ID NO: 107807 - DNA, 25 bp, Homo sapien
cctttggtatatgtgactagtgtaa

SEQ ID NO: 107808 - DNA, 25 bp, Homo sapien
atttccagcacctttggtatatgtg

SEQ ID NO: 107809 - DNA, 25 bp, Homo sapien
tatatgtgactagtgtaaggcaggg

SEQ ID NO: 107810 - DNA, 25 bp, Homo sapien
gtatcgaagtgaagatattcatatt

SEQ ID NO: 107811 - DNA, 25 bp, Homo sapien
ctccttcagctagattttgactttg

SEQ ID NO: 107812 - DNA, 25 bp, Homo sapien
catattatatacatcagaaagaaaa

SEQ ID NO: 107813 - DNA, 25 bp, Homo sapien
tccttcagctagattttgactttga

SEQ ID NO: 107814 - DNA, 25 bp, Homo sapien
gaaaactctaaaagatatcagcgga

SEQ ID NO: 107815 - DNA, 25 bp, Homo sapien
taaaagatatcagcggatttgaaac

SEQ ID NO: 107816 - DNA, 25 bp, Homo sapien
cagcggatttgaaacttgtattata

SEQ ID NO: 107817 - DNA, 25 bp, Homo sapien
gttgttatgaacaacgaacaatggg

SEQ ID NO: 107818 - DNA, 25 bp, Homo sapien
cttctccacccgacttcatactgat

SEQ ID NO: 107819 - DNA, 25 bp, Homo sapien
cacccgacttcatactgatggccga

SEQ ID NO: 107820 - DNA, 25 bp, Homo sapien
tctccacccgacttcatactgatgg

SEQ ID NO: 107821 - DNA, 25 bp, Homo sapien
tttccttctccacccgacttcatac

SEQ ID NO: 107822 - DNA, 25 bp, Homo sapien
tattaatatgaacaagcatcttgtc

SEQ ID NO: 107823 - DNA, 25 bp, Homo sapien
gatgttgtagtcaccgatcttgagg

SEQ ID NO: 107824 - DNA, 25 bp, Homo sapien
aatatgaacaagcatcttgtcactg

SEQ ID NO: 107825 - DNA, 25 bp, Homo sapien
tcttgaggaattgcaagacttgctg

SEQ ID NO: 107826 - DNA, 25 bp, Homo sapien
gctacgactacagcagtatagctcc

SEQ ID NO: 107827 - DNA, 25 bp, Homo sapien
cgggatggtacagtgctacgactac

SEQ ID NO: 107828 - DNA, 25 bp, Homo sapien
tacagcagtatagctccggtggcgt

SEQ ID NO: 107829 - DNA, 25 bp, Homo sapien
aagcgggatggtacagtgctacgac

SEQ ID NO: 107830 - DNA, 25 bp, Homo sapien
taaatgccggtatttgctgctgaag

SEQ ID NO: 107831 - DNA, 25 bp, Homo sapien
cttgtcttggatcctcagtgctgcc

SEQ ID NO: 107832 - DNA, 25 bp, Homo sapien
gactacataacccaatgatggaggg

SEQ ID NO: 107833 - DNA, 25 bp, Homo sapien
tacagactgcctttgctagaaaatg

SEQ ID NO: 107834 - DNA, 25 bp, Homo sapien
tcttcaggatgatactgggaaaccg

SEQ ID NO: 107835 - DNA, 25 bp, Homo sapien
tatctgtggtgttggctatcatttc

SEQ ID NO: 107836 - DNA, 25 bp, Homo sapien
tgttgatgatctgccgccattggct

SEQ ID NO: 107837 - DNA, 25 bp, Homo sapien
actgtgcttggccaacctttgctct

SEQ ID NO: 107838 - DNA, 25 bp, Homo sapien
taaatccagtaatttgctgctaagg

SEQ ID NO: 107839 - DNA, 25 bp, Homo sapien
gcacagtaaaatcattggaagatag

SEQ ID NO: 107840 - DNA, 25 bp, Homo sapien
ttttttggcagtgctaaatcacctg

SEQ ID NO: 107841 - DNA, 25 bp, Homo sapien
tttttaagaggagaggtctcaccat

SEQ ID NO: 107842 - DNA, 25 bp, Homo sapien
gtctctggatgatgagcctctattc

SEQ ID NO: 107843 - DNA, 25 bp, Homo sapien
gctgtgtagtgttccgttatattta

SEQ ID NO: 107844 - DNA, 25 bp, Homo sapien
tcaatgaatacagttctagttagct

SEQ ID NO: 107845 - DNA, 25 bp, Homo sapien
tgcaacatgctttttacttaaatca

SEQ ID NO: 107846 - DNA, 25 bp, Homo sapien
ctattatcgtggcattagagaagga

SEQ ID NO: 107847 - DNA, 25 bp, Homo sapien
gaaggaagaagtgtaattgaacact

SEQ ID NO: 107848 - DNA, 25 bp, Homo sapien
tatttcggcattgggttgaacatca

SEQ ID NO: 107849 - DNA, 25 bp, Homo sapien
tccttcatttcaagtgtaagaggta

SEQ ID NO: 107850 - DNA, 25 bp, Homo sapien
agttgcaaccctctgatcctttttc

SEQ ID NO: 107851 - DNA, 25 bp, Homo sapien
cagagatttaattggcctggattgg

SEQ ID NO: 107852 - DNA, 25 bp, Homo sapien
tgcacatcagaattaatagaaagct

SEQ ID NO: 107853 - DNA, 25 bp, Homo sapien
gactgagaccgattgtacgatgcca

SEQ ID NO: 107854 - DNA, 25 bp, Homo sapien
gaatgctgatgcctgcatatcaccc

SEQ ID NO: 107855 - DNA, 25 bp, Homo sapien
tagagcattgctgtctagaagagat

SEQ ID NO: 107856 - DNA, 25 bp, Homo sapien
gaagagatacaatgtgagccacaca

SEQ ID NO: 107857 - DNA, 25 bp, Homo sapien
tcagggtgcatccacattttatgta

SEQ ID NO: 107858 - DNA, 25 bp, Homo sapien
gccttctagcgtatgtcttctggta

SEQ ID NO: 107859 - DNA, 25 bp, Homo sapien
aaattttgttcagtgacatgggcac

SEQ ID NO: 107860 - DNA, 25 bp, Homo sapien
tgtggactggtcacctttattcctg

SEQ ID NO: 107861 - DNA, 25 bp, Homo sapien
caggctgaacatcattaccatctag

SEQ ID NO: 107862 - DNA, 25 bp, Homo sapien
taagaatgtcacgttagcatggcgt

SEQ ID NO: 107863 - DNA, 25 bp, Homo sapien
gcaatgtgacgcaggtatataccca

SEQ ID NO: 107864 - DNA, 25 bp, Homo sapien
ccctttgaccacagacaagtgtgag

SEQ ID NO: 107865 - DNA, 25 bp, Homo sapien
gaccttacttccatgtgcagcccaa

SEQ ID NO: 107866 - DNA, 25 bp, Homo sapien
gagtgcagtaatcaggtaggcctat

SEQ ID NO: 107867 - DNA, 25 bp, Homo sapien
ttcttcagcgaggagaacagtccga

SEQ ID NO: 107868 - DNA, 25 bp, Homo sapien
tcatgttgcagtcatttcgtcaggc

SEQ ID NO: 107869 - DNA, 25 bp, Homo sapien
tcctcaggctggaatcgggcaagag

SEQ ID NO: 107870 - DNA, 25 bp, Homo sapien
ggcaagagaaagtcccgctggtatt

SEQ ID NO: 107871 - DNA, 25 bp, Homo sapien
tagcctgtgggataaccttaactct

SEQ ID NO: 107872 - DNA, 25 bp, Homo sapien
gctgtacctatgagctatccctgta

SEQ ID NO: 107873 - DNA, 25 bp, Homo sapien
tagggcctacttttggaggcaatcc

SEQ ID NO: 107874 - DNA, 25 bp, Homo sapien
gaggcaatccaaccctgatggctgt

SEQ ID NO: 107875 - DNA, 25 bp, Homo sapien
ttattgtggcactattcacaatagt

SEQ ID NO: 107876 - DNA, 25 bp, Homo sapien
cccaagggactataaatcatgctgc

SEQ ID NO: 107877 - DNA, 25 bp, Homo sapien
cacaatagtaaagacttggaaccaa

SEQ ID NO: 107878 - DNA, 25 bp, Homo sapien
tataaagacacatgcacacgtatgt

SEQ ID NO: 107879 - DNA, 25 bp, Homo sapien
atgacctgtccttaccaaccatgac

SEQ ID NO: 107880 - DNA, 25 bp, Homo sapien
agttttggagaaagatggcataaaa

SEQ ID NO: 107881 - DNA, 25 bp, Homo sapien
ccttaccaaccatgacctagagaag

SEQ ID NO: 107882 - DNA, 25 bp, Homo sapien
agccctgaatccctgactttgttaa

SEQ ID NO: 107883 - DNA, 25 bp, Homo sapien
gtgagcttatgttcatgacactgca

SEQ ID NO: 107884 - DNA, 25 bp, Homo sapien
gagcttatgttcatgacactgcatt

SEQ ID NO: 107885 - DNA, 25 bp, Homo sapien
tgcagtgagcttatgttcatgacac

SEQ ID NO: 107886 - DNA, 25 bp, Homo sapien
cagtgagcttatgttcatgacactg

SEQ ID NO: 107887 - DNA, 25 bp, Homo sapien
gaattagacttccaacaactatggg

SEQ ID NO: 107888 - DNA, 25 bp, Homo sapien
tcccacagataaagtcgtactgaac

SEQ ID NO: 107889 - DNA, 25 bp, Homo sapien
cgtactgaacagaaactcacaatca

SEQ ID NO: 107890 - DNA, 25 bp, Homo sapien
gaagttacaaaccaccataagtgag

SEQ ID NO: 107891 - DNA, 25 bp, Homo sapien
agcgtccccgcgtctgcggcaccct

SEQ ID NO: 107892 - DNA, 25 bp, Homo sapien
gtccccgcgtctgcggcaccctggc

SEQ ID NO: 107893 - DNA, 25 bp, Homo sapien
gcgagccagcgtccccgcgtctgcg

SEQ ID NO: 107894 - DNA, 25 bp, Homo sapien
agggagggagcgagccagcgtcccc

SEQ ID NO: 107895 - DNA, 25 bp, Homo sapien
gactgaatgaatagcaccgccagga

SEQ ID NO: 107896 - DNA, 25 bp, Homo sapien
tggtggcaaaaaccgagctgtctgg

SEQ ID NO: 107897 - DNA, 25 bp, Homo sapien
gagcaggcgctccatatttacaaga

SEQ ID NO: 107898 - DNA, 25 bp, Homo sapien
ttcgctgtgacaaagagcctccgtg

SEQ ID NO: 107899 - DNA, 25 bp, Homo sapien
acaggtgagtcgctgctcagagacc

SEQ ID NO: 107900 - DNA, 25 bp, Homo sapien
caggtgagtcgctgctcagagaccg

SEQ ID NO: 107901 - DNA, 25 bp, Homo sapien
ctgcacaggtgagtcgctgctcaga

SEQ ID NO: 107902 - DNA, 25 bp, Homo sapien
gcacaggtgagtcgctgctcagaga

SEQ ID NO: 107903 - DNA, 25 bp, Homo sapien
cagcaattgtactcttgggcactta

SEQ ID NO: 107904 - DNA, 25 bp, Homo sapien
ccagcaattgtactcttgggcactt

SEQ ID NO: 107905 - DNA, 25 bp, Homo sapien
ggatatggtgtaaagggaacacttc

SEQ ID NO: 107906 - DNA, 25 bp, Homo sapien
gttggcgtggatatggtgtaaaggg

SEQ ID NO: 107907 - DNA, 25 bp, Homo sapien
gatgttggcgtggatatggtgtaaa

SEQ ID NO: 107908 - DNA, 25 bp, Homo sapien
aaaaatagatgttggcgtggatatg

SEQ ID NO: 107909 - DNA, 25 bp, Homo sapien
cctctagtgggaagttagtgaatct

SEQ ID NO: 107910 - DNA, 25 bp, Homo sapien
tgcctttgggaacgctttctatagg

SEQ ID NO: 107911 - DNA, 25 bp, Homo sapien
ttaagcaggtgaattagagtggtct

SEQ ID NO: 107912 - DNA, 25 bp, Homo sapien
gcaaattattcctacttgagtccaa

SEQ ID NO: 107913 - DNA, 25 bp, Homo sapien
gcctctgctccactacctcttatca

SEQ ID NO: 107914 - DNA, 25 bp, Homo sapien
tacagccgtcttcattactgcaagc

SEQ ID NO: 107915 - DNA, 25 bp, Homo sapien
ttcattactgcaagcctctgctcca

SEQ ID NO: 107916 - DNA, 25 bp, Homo sapien
cctttttcactacagccgtcttcat

SEQ ID NO: 107917 - DNA, 25 bp, Homo sapien
tcagcaagggcttcaatcacatgag

SEQ ID NO: 107918 - DNA, 25 bp, Homo sapien
gaaatcacattaggagaacagggtt

SEQ ID NO: 107919 - DNA, 25 bp, Homo sapien
tcacatgaggccatacgaaagggcc

SEQ ID NO: 107920 - DNA, 25 bp, Homo sapien
cagcatcaagattaagggtcaacag

SEQ ID NO: 107921 - DNA, 25 bp, Homo sapien
aattactgagcaagtcactcctgtt

SEQ ID NO: 107922 - DNA, 25 bp, Homo sapien
acaattactgagcaagtcactcctg

SEQ ID NO: 107923 - DNA, 25 bp, Homo sapien
actcaacaattactgagcaagtcac

SEQ ID NO: 107924 - DNA, 25 bp, Homo sapien
ttgccactcaacaattactgagcaa

SEQ ID NO: 107925 - DNA, 25 bp, Homo sapien
tacgccacacaactgctgggaaatt

SEQ ID NO: 107926 - DNA, 25 bp, Homo sapien
accatgggagtttctttacgccaca

SEQ ID NO: 107927 - DNA, 25 bp, Homo sapien
actgcattcaaccagccccagaagt

SEQ ID NO: 107928 - DNA, 25 bp, Homo sapien
tggagtcacatgaccatgggagttt

SEQ ID NO: 107929 - DNA, 25 bp, Homo sapien
tcaagtgactgacgaggaagataaa

SEQ ID NO: 107930 - DNA, 25 bp, Homo sapien
gacataaataatacagaacgcaaca

SEQ ID NO: 107931 - DNA, 25 bp, Homo sapien
tattctacgaatgactatacttggt

SEQ ID NO: 107932 - DNA, 25 bp, Homo sapien
tttccacgtgaacgctgtcaaggcg

SEQ ID NO: 107933 - DNA, 25 bp, Homo sapien
tacaagagtcggtggcgtcgatcgc

SEQ ID NO: 107934 - DNA, 25 bp, Homo sapien
tctcctggccatggtagcgcaccat

SEQ ID NO: 107935 - DNA, 25 bp, Homo sapien
gaatcttgtatttgtccagagggcc

SEQ ID NO: 107936 - DNA, 25 bp, Homo sapien
gggccaacatccctgatgcgatcat

SEQ ID NO: 107937 - DNA, 25 bp, Homo sapien
ttctattagcaaaacgatagggtag

SEQ ID NO: 107938 - DNA, 25 bp, Homo sapien
tctattagcaaaacgatagggtagt

SEQ ID NO: 107939 - DNA, 25 bp, Homo sapien
tattagcaaaacgatagggtagtta

SEQ ID NO: 107940 - DNA, 25 bp, Homo sapien
tttctattagcaaaacgatagggta

SEQ ID NO: 107941 - DNA, 25 bp, Homo sapien
ctatgactataatcgtgagtcaact

SEQ ID NO: 107942 - DNA, 25 bp, Homo sapien
tataatcgtgagtcaactgcaacaa

SEQ ID NO: 107943 - DNA, 25 bp, Homo sapien
tgactataatcgtgagtcaactgca

SEQ ID NO: 107944 - DNA, 25 bp, Homo sapien
taatcgtgagtcaactgcaacaaaa

SEQ ID NO: 107945 - DNA, 25 bp, Homo sapien
gaagaaacaaacttgactataatga

SEQ ID NO: 107946 - DNA, 25 bp, Homo sapien
aagaaacaaacttgactataatgaa

SEQ ID NO: 107947 - DNA, 25 bp, Homo sapien
aagactagagacatacagaaacaag

SEQ ID NO: 107948 - DNA, 25 bp, Homo sapien
gaaacaagcttagtgagaggaggaa

SEQ ID NO: 107949 - DNA, 25 bp, Homo sapien
agtttgacaaacaaggccctggatt

SEQ ID NO: 107950 - DNA, 25 bp, Homo sapien
ataaaccaaagactagagacataca

SEQ ID NO: 107951 - DNA, 25 bp, Homo sapien
aagtctcagcaaacagtcatcctcg

SEQ ID NO: 107952 - DNA, 25 bp, Homo sapien
aaatgacgcaaagcaatgatgcctt

SEQ ID NO: 107953 - DNA, 25 bp, Homo sapien
catcctcgatataatgacacttgca

SEQ ID NO: 107954 - DNA, 25 bp, Homo sapien
gatgcctttgtctgtgatattccca

SEQ ID NO: 107955 - DNA, 25 bp, Homo sapien
aactattcaccttaacagcattatc

SEQ ID NO: 107956 - DNA, 25 bp, Homo sapien
aaaaagacaccacccctcacagtca

SEQ ID NO: 107957 - DNA, 25 bp, Homo sapien
cacccctcacagtcaattaaattct

SEQ ID NO: 107958 - DNA, 25 bp, Homo sapien
gtcaattaaattctaactattcacc

SEQ ID NO: 107959 - DNA, 25 bp, Homo sapien
caggccatggcgtgggtctggttgg

SEQ ID NO: 107960 - DNA, 25 bp, Homo sapien
gattattacagtgtcaggcagtgtt

SEQ ID NO: 107961 - DNA, 25 bp, Homo sapien
acagctttcctaaccagtggatgca

SEQ ID NO: 107962 - DNA, 25 bp, Homo sapien
gtgggtctggttggtggcacaagag

SEQ ID NO: 107963 - DNA, 25 bp, Homo sapien
tcaattgtaattttagttccagaga

SEQ ID NO: 107964 - DNA, 25 bp, Homo sapien
ggcagtgctgtcttaaaggcttgga

SEQ ID NO: 107965 - DNA, 25 bp, Homo sapien
ttcaattgtaattttagttccagag

SEQ ID NO: 107966 - DNA, 25 bp, Homo sapien
tcttaaaggcttggacaagattttc

SEQ ID NO: 107967 - DNA, 25 bp, Homo sapien
caggatcatgggaaatgcacgcaaa

SEQ ID NO: 107968 - DNA, 25 bp, Homo sapien
gaaaaacctaagcatagcccactag

SEQ ID NO: 107969 - DNA, 25 bp, Homo sapien
tattcagccaagtatctatgtccag

SEQ ID NO: 107970 - DNA, 25 bp, Homo sapien
gctatcaagaacacaagaatgcagg

SEQ ID NO: 107971 - DNA, 25 bp, Homo sapien
tacacttgacggaggcagattacta

SEQ ID NO: 107972 - DNA, 25 bp, Homo sapien
tattcaattcctgttagacggcctt

SEQ ID NO: 107973 - DNA, 25 bp, Homo sapien
cctgatatgggttaaatgctagtcc

SEQ ID NO: 107974 - DNA, 25 bp, Homo sapien
gacgctgcgacagagaactgcttga

SEQ ID NO: 107975 - DNA, 25 bp, Homo sapien
gacctggtacatctataggcaaacc

SEQ ID NO: 107976 - DNA, 25 bp, Homo sapien
tgcaggcaacgtggatttactgtaa

SEQ ID NO: 107977 - DNA, 25 bp, Homo sapien
aatggcatgaagctcggcagctgat

SEQ ID NO: 107978 - DNA, 25 bp, Homo sapien
agagcaagacctacaggctttgcag

SEQ ID NO: 107979 - DNA, 25 bp, Homo sapien
gcacttttctgaggacaatggctga

SEQ ID NO: 107980 - DNA, 25 bp, Homo sapien
gggataccgaaggacatatagtgca

SEQ ID NO: 107981 - DNA, 25 bp, Homo sapien
ttttagttgcagtacctaccccagc

SEQ ID NO: 107982 - DNA, 25 bp, Homo sapien
gttttctccgctataagacaaggca

SEQ ID NO: 107983 - DNA, 25 bp, Homo sapien
aggatggcagttgtggctttcagct

SEQ ID NO: 107984 - DNA, 25 bp, Homo sapien
tcattccagcactaggagacaggtc

SEQ ID NO: 107985 - DNA, 25 bp, Homo sapien
tcataggatctatcaaccagggccc

SEQ ID NO: 107986 - DNA, 25 bp, Homo sapien
tgccacctggtacagagagttggaa

SEQ ID NO: 107987 - DNA, 25 bp, Homo sapien
tactcaaaggctgacatgtgaacag

SEQ ID NO: 107988 - DNA, 25 bp, Homo sapien
taagaaagagccgaaagcaccactg

SEQ ID NO: 107989 - DNA, 25 bp, Homo sapien
gaacagctgttgcatcacccatatt

SEQ ID NO: 107990 - DNA, 25 bp, Homo sapien
tctccacatggaccctactcaaagg

SEQ ID NO: 107991 - DNA, 25 bp, Homo sapien
cagggcgtgtccacacagtaaagtg

SEQ ID NO: 107992 - DNA, 25 bp, Homo sapien
cacacagtaaagtggaagcaaattt

SEQ ID NO: 107993 - DNA, 25 bp, Homo sapien
gataatgtaactgttacctgaaagg

SEQ ID NO: 107994 - DNA, 25 bp, Homo sapien
gtgctgtgggctgctcaactgagta

SEQ ID NO: 107995 - DNA, 25 bp, Homo sapien
ggtgccaggaaaatgtttctatcaa

SEQ ID NO: 107996 - DNA, 25 bp, Homo sapien
gagtagttacgaagcaaatttggaa

SEQ ID NO: 107997 - DNA, 25 bp, Homo sapien
gaattacttatgtcaatccatgcaa

SEQ ID NO: 107998 - DNA, 25 bp, Homo sapien
ttgctatctccattggtatcagagc

SEQ ID NO: 107999 - DNA, 25 bp, Homo sapien
aatcgccttatacggccaaaaggag

SEQ ID NO: 108000 - DNA, 25 bp, Homo sapien
cagcacgtgactggcgcaaaatcgc

SEQ ID NO: 108001 - DNA, 25 bp, Homo sapien
gagattgacgaatgccccacaggag

SEQ ID NO: 108002 - DNA, 25 bp, Homo sapien
cctgattgtctccagcacgtgactg

SEQ ID NO: 108003 - DNA, 25 bp, Homo sapien
ctgacattcggcattcctcccattt

SEQ ID NO: 108004 - DNA, 25 bp, Homo sapien
ctgtttgtctgcctgacattcggca

SEQ ID NO: 108005 - DNA, 25 bp, Homo sapien
gtctgcctgacattcggcattcctc

SEQ ID NO: 108006 - DNA, 25 bp, Homo sapien
gtttgtctgcctgacattcggcatt

SEQ ID NO: 108007 - DNA, 25 bp, Homo sapien
gtagtgattgccctcttccaaagtc

SEQ ID NO: 108008 - DNA, 25 bp, Homo sapien
cagcctgcctgactagtttggatta

SEQ ID NO: 108009 - DNA, 25 bp, Homo sapien
tcagactctatggagaatgattccc

SEQ ID NO: 108010 - DNA, 25 bp, Homo sapien
tagttgtaatgtcactcagtccgtc

SEQ ID NO: 108011 - DNA, 25 bp, Homo sapien
tccagctattcgctgcagactggtt

SEQ ID NO: 108012 - DNA, 25 bp, Homo sapien
catctaattcgtttgtacgtcccga

SEQ ID NO: 108013 - DNA, 25 bp, Homo sapien
ccgaaagaactccattcagcattga

SEQ ID NO: 108014 - DNA, 25 bp, Homo sapien
gaaacatccaaacccttgtgaatgc

SEQ ID NO: 108015 - DNA, 25 bp, Homo sapien
tacaggtgtgaaccgagccgccata

SEQ ID NO: 108016 - DNA, 25 bp, Homo sapien
tctttctacactcattagttatcat

SEQ ID NO: 108017 - DNA, 25 bp, Homo sapien
catcaaccaatggtgatgtaaaaca

SEQ ID NO: 108018 - DNA, 25 bp, Homo sapien
tcatggtggccaaactggtttcgaa

SEQ ID NO: 108019 - DNA, 25 bp, Homo sapien
tgagccatctacctaaatatttagc

SEQ ID NO: 108020 - DNA, 25 bp, Homo sapien
caaatttctcatattgttctaataa

SEQ ID NO: 108021 - DNA, 25 bp, Homo sapien
cacattatgatttccatactcaata

SEQ ID NO: 108022 - DNA, 25 bp, Homo sapien
taaatccaggatctattcagtgact

SEQ ID NO: 108023 - DNA, 25 bp, Homo sapien
gacgcggttacagctgcgctttgca

SEQ ID NO: 108024 - DNA, 25 bp, Homo sapien
aagatgcctccaagggaccaaaggg

SEQ ID NO: 108025 - DNA, 25 bp, Homo sapien
cacggcctgcggaagtttgcaaatc

SEQ ID NO: 108026 - DNA, 25 bp, Homo sapien
tgttgcagggaaatgtggaccgctc

SEQ ID NO: 108027 - DNA, 25 bp, Homo sapien
gggagatcctctatcctcaaaaggc

SEQ ID NO: 108028 - DNA, 25 bp, Homo sapien
atctgaaagctcactggagttgggg

SEQ ID NO: 108029 - DNA, 25 bp, Homo sapien
atacggtctgattccattttcatga

SEQ ID NO: 108030 - DNA, 25 bp, Homo sapien
tctggggctacaatctcatctgaaa

SEQ ID NO: 108031 - DNA, 25 bp, Homo sapien
gcatttattgagaacagcattgaga

SEQ ID NO: 108032 - DNA, 25 bp, Homo sapien
gggttagcaatagcaaactctataa

SEQ ID NO: 108033 - DNA, 25 bp, Homo sapien
gcaagttagtagttgagcctgacca

SEQ ID NO: 108034 - DNA, 25 bp, Homo sapien
tttagcaaggttaagagatctatcc

SEQ ID NO: 108035 - DNA, 25 bp, Homo sapien
aaggagggttgcagagcagcttaaa

SEQ ID NO: 108036 - DNA, 25 bp, Homo sapien
cacacatgcaattttgcttaacaaa

SEQ ID NO: 108037 - DNA, 25 bp, Homo sapien
taagagtagtaaagtactttgagtg

SEQ ID NO: 108038 - DNA, 25 bp, Homo sapien
tgtttgggggttcaacacacacatg

SEQ ID NO: 108039 - DNA, 25 bp, Homo sapien
taactcgtgattatcttaagagagg

SEQ ID NO: 108040 - DNA, 25 bp, Homo sapien
agacaaatagtcctctagttccagg

SEQ ID NO: 108041 - DNA, 25 bp, Homo sapien
tttgtaacaagggtgccatggtatt

SEQ ID NO: 108042 - DNA, 25 bp, Homo sapien
tggaaacagctagtctatctcttgc

SEQ ID NO: 108043 - DNA, 25 bp, Homo sapien
tgttatatattttgcagttgacaaa

SEQ ID NO: 108044 - DNA, 25 bp, Homo sapien
ctgttatatattttgcagttgacaa

SEQ ID NO: 108045 - DNA, 25 bp, Homo sapien
gttatatattttgcagttgacaaat

SEQ ID NO: 108046 - DNA, 25 bp, Homo sapien
tctggtttcgatggaattcccttgg

SEQ ID NO: 108047 - DNA, 25 bp, Homo sapien
ttccagttatggacaaaatcatgcc

SEQ ID NO: 108048 - DNA, 25 bp, Homo sapien
tatgcttatattcacagccccatgc

SEQ ID NO: 108049 - DNA, 25 bp, Homo sapien
tcagactaaggctacatacttcaac

SEQ ID NO: 108050 - DNA, 25 bp, Homo sapien
gacaacttaattctttcgcatattc

SEQ ID NO: 108051 - DNA, 25 bp, Homo sapien
tatgaaggtaactggaatatccaag

SEQ ID NO: 108052 - DNA, 25 bp, Homo sapien
gcatattccctacattcatagcgtt

SEQ ID NO: 108053 - DNA, 25 bp, Homo sapien
tgtgagcacctttgtggttatgaag

SEQ ID NO: 108054 - DNA, 25 bp, Homo sapien
gagcagaaatgacggaagactttac

SEQ ID NO: 108055 - DNA, 25 bp, Homo sapien
tcttcacatggagcagaaatgacgg

SEQ ID NO: 108056 - DNA, 25 bp, Homo sapien
agaaatgacggaagactttaccaca

SEQ ID NO: 108057 - DNA, 25 bp, Homo sapien
catggagcagaaatgacggaagact

SEQ ID NO: 108058 - DNA, 25 bp, Homo sapien
gaactgtattgattgaaggctttac

SEQ ID NO: 108059 - DNA, 25 bp, Homo sapien
ggaactgtattgattgaaggcttta

SEQ ID NO: 108060 - DNA, 25 bp, Homo sapien
ttaaaggtaactgaaatgactggag

SEQ ID NO: 108061 - DNA, 25 bp, Homo sapien
aggtaactgaaatgactggaggatt

SEQ ID NO: 108062 - DNA, 25 bp, Homo sapien
taaaggtaactgaaatgactggagg

SEQ ID NO: 108063 - DNA, 25 bp, Homo sapien
taactgaaatgactggaggatttac

SEQ ID NO: 108064 - DNA, 25 bp, Homo sapien
catagtcccgaagcctctggttgag

SEQ ID NO: 108065 - DNA, 25 bp, Homo sapien
ctgatttggtttcgctgtcagcaga

SEQ ID NO: 108066 - DNA, 25 bp, Homo sapien
cagcagataccaccccagagttact

SEQ ID NO: 108067 - DNA, 25 bp, Homo sapien
gagttactctcatggtactgaaagg

SEQ ID NO: 108068 - DNA, 25 bp, Homo sapien
ataataccaccagtgataccattgt

SEQ ID NO: 108069 - DNA, 25 bp, Homo sapien
ccagtgataccattgtgagttttag

SEQ ID NO: 108070 - DNA, 25 bp, Homo sapien
ccaccagtgataccattgtgagttt

SEQ ID NO: 108071 - DNA, 25 bp, Homo sapien
taccaccagtgataccattgtgagt

SEQ ID NO: 108072 - DNA, 25 bp, Homo sapien
gcttggcataatgaattgcctgaag

SEQ ID NO: 108073 - DNA, 25 bp, Homo sapien
caaagtaagtggcagtgaatggcag

SEQ ID NO: 108074 - DNA, 25 bp, Homo sapien
ggtaaccgagaagaatggagtcatt

SEQ ID NO: 108075 - DNA, 25 bp, Homo sapien
catgttgttgactcttgtttaataa

SEQ ID NO: 108076 - DNA, 25 bp, Homo sapien
caggcgtgtgccttatttctgagag

SEQ ID NO: 108077 - DNA, 25 bp, Homo sapien
tgggaacgtgtctcccggtgacgca

SEQ ID NO: 108078 - DNA, 25 bp, Homo sapien
ttggcccacgaatgcccaggcgtgt

SEQ ID NO: 108079 - DNA, 25 bp, Homo sapien
ggtgttgtgttctcagcaggcctca

SEQ ID NO: 108080 - DNA, 25 bp, Homo sapien
gagggctacgttcccatcgcccttc

SEQ ID NO: 108081 - DNA, 25 bp, Homo sapien
gttcccatcgcccttcttcctctac

SEQ ID NO: 108082 - DNA, 25 bp, Homo sapien
ctacgttcccatcgcccttcttcct

SEQ ID NO: 108083 - DNA, 25 bp, Homo sapien
ggctacgttcccatcgcccttcttc

SEQ ID NO: 108084 - DNA, 25 bp, Homo sapien
taaggacaccgagatgttgccaaat

SEQ ID NO: 108085 - DNA, 25 bp, Homo sapien
gataaggacaccgagatgttgccaa

SEQ ID NO: 108086 - DNA, 25 bp, Homo sapien
ataaggacaccgagatgttgccaaa

SEQ ID NO: 108087 - DNA, 25 bp, Homo sapien
tgtgcccaccaaaacaagtgccaag

SEQ ID NO: 108088 - DNA, 25 bp, Homo sapien
tcatcgaagccaaaagtatgtgccc

SEQ ID NO: 108089 - DNA, 25 bp, Homo sapien
gccaaaagtatgtgcccaccaaaac

SEQ ID NO: 108090 - DNA, 25 bp, Homo sapien
gtatgtgcccaccaaaacaagtgcc

SEQ ID NO: 108091 - DNA, 25 bp, Homo sapien
cacactctcaaagaatttaacagcg

SEQ ID NO: 108092 - DNA, 25 bp, Homo sapien
cgcaacattttcaacggaaaacaca

SEQ ID NO: 108093 - DNA, 25 bp, Homo sapien
tgatagaccacgtaccgcaacattt

SEQ ID NO: 108094 - DNA, 25 bp, Homo sapien
taacagcgttatcagaaatacacaa

SEQ ID NO: 108095 - DNA, 25 bp, Homo sapien
ggagaaagcagatgaaccaagctca

SEQ ID NO: 108096 - DNA, 25 bp, Homo sapien
catcacaagcccgagttcacacaga

SEQ ID NO: 108097 - DNA, 25 bp, Homo sapien
aagctcagcatcacaagcccgagtt

SEQ ID NO: 108098 - DNA, 25 bp, Homo sapien
agcagatgaaccaagctcagcatca

SEQ ID NO: 108099 - DNA, 25 bp, Homo sapien
gctgggcgcagttcgctcagactct

SEQ ID NO: 108100 - DNA, 25 bp, Homo sapien
gcgcagttcgctcagactctgagga

SEQ ID NO: 108101 - DNA, 25 bp, Homo sapien
agttcgctcagactctgaggatgtt

SEQ ID NO: 108102 - DNA, 25 bp, Homo sapien
ccgcgctgggcgcagttcgctcaga

SEQ ID NO: 108103 - DNA, 25 bp, Homo sapien
gtggtccaggagctggtggcggtga

SEQ ID NO: 108104 - DNA, 25 bp, Homo sapien
ccaggagctggtggcggtgaggcgc

SEQ ID NO: 108105 - DNA, 25 bp, Homo sapien
gtccaggagctggtggcggtgaggc

SEQ ID NO: 108106 - DNA, 25 bp, Homo sapien
tggtccaggagctggtggcggtgag

SEQ ID NO: 108107 - DNA, 25 bp, Homo sapien
caactgtttctgtccctgcggttct

SEQ ID NO: 108108 - DNA, 25 bp, Homo sapien
aactgtttctgtccctgcggttctt

SEQ ID NO: 108109 - DNA, 25 bp, Homo sapien
actgtttctgtccctgcggttcttg

SEQ ID NO: 108110 - DNA, 25 bp, Homo sapien
ccaactgtttctgtccctgcggttc

SEQ ID NO: 108111 - DNA, 25 bp, Homo sapien
cgattcggtgacgcgggtaccgctc

SEQ ID NO: 108112 - DNA, 25 bp, Homo sapien
ggtgacgcgggtaccgctcggccat

SEQ ID NO: 108113 - DNA, 25 bp, Homo sapien
agcgcgattcggtgacgcgggtacc

SEQ ID NO: 108114 - DNA, 25 bp, Homo sapien
cccgacagcgcgattcggtgacgcg

SEQ ID NO: 108115 - DNA, 25 bp, Homo sapien
cacaagtccccggaggcgcctggtg

SEQ ID NO: 108116 - DNA, 25 bp, Homo sapien
tagccttcctcccaaccgatcgcta

SEQ ID NO: 108117 - DNA, 25 bp, Homo sapien
atcgctaaggcggaacccacaagtc

SEQ ID NO: 108118 - DNA, 25 bp, Homo sapien
ctcccaaccgatcgctaaggcggaa

SEQ ID NO: 108119 - DNA, 25 bp, Homo sapien
gtaatgcaaggaaatagtaccatca

SEQ ID NO: 108120 - DNA, 25 bp, Homo sapien
tggagatggcaactagcgggcaaca

SEQ ID NO: 108121 - DNA, 25 bp, Homo sapien
taaataatgaccattcagcagagaa

SEQ ID NO: 108122 - DNA, 25 bp, Homo sapien
aatattggaatggtggtaatgcaag

SEQ ID NO: 108123 - DNA, 25 bp, Homo sapien
taaatgctccagcaacagatacagc

SEQ ID NO: 108124 - DNA, 25 bp, Homo sapien
tgacagcctccgagagaaggatccg

SEQ ID NO: 108125 - DNA, 25 bp, Homo sapien
gtttcatctaactcaaaggaatggt

SEQ ID NO: 108126 - DNA, 25 bp, Homo sapien
ttgacaatgaggacttggactggtc

SEQ ID NO: 108127 - DNA, 25 bp, Homo sapien
ggttgtacatgtatctcaacatgaa

SEQ ID NO: 108128 - DNA, 25 bp, Homo sapien
ctggttgtacatgtatctcaacatg

SEQ ID NO: 108129 - DNA, 25 bp, Homo sapien
tggttgtacatgtatctcaacatga

SEQ ID NO: 108130 - DNA, 25 bp, Homo sapien
ttgtacatgtatctcaacatgaagt

SEQ ID NO: 108131 - DNA, 25 bp, Homo sapien
tgtggtctctcgctcagatccacct

SEQ ID NO: 108132 - DNA, 25 bp, Homo sapien
tgtagtctccaacccaatcaactga

SEQ ID NO: 108133 - DNA, 25 bp, Homo sapien
catatctgaattcctgtggtctctc

SEQ ID NO: 108134 - DNA, 25 bp, Homo sapien
cacctctccatgaaaaaccagtcaa

SEQ ID NO: 108135 - DNA, 25 bp, Homo sapien
gagtatccatcaataacactgcaac

SEQ ID NO: 108136 - DNA, 25 bp, Homo sapien
tgactgactatcaaaggttccctga

SEQ ID NO: 108137 - DNA, 25 bp, Homo sapien
gctaagggcaaatactgtggctgaa

SEQ ID NO: 108138 - DNA, 25 bp, Homo sapien
ctgtattgagctgatcattgtgcta

SEQ ID NO: 108139 - DNA, 25 bp, Homo sapien
catgtatgtagaaacacatatactc

SEQ ID NO: 108140 - DNA, 25 bp, Homo sapien
acgagaactcgtatgctaattgagt

SEQ ID NO: 108141 - DNA, 25 bp, Homo sapien
ctcgtatgctaattgagtcaaacaa

SEQ ID NO: 108142 - DNA, 25 bp, Homo sapien
ctgttgtttatctaattataacatg

SEQ ID NO: 108143 - DNA, 25 bp, Homo sapien
agaaaagttaaggaggcttatatat

SEQ ID NO: 108144 - DNA, 25 bp, Homo sapien
ggaagttaggttctgaatatcatgc

SEQ ID NO: 108145 - DNA, 25 bp, Homo sapien
atatatatatgtgataacagcatta

SEQ ID NO: 108146 - DNA, 25 bp, Homo sapien
cttatatatatatgtgataacagca

SEQ ID NO: 108147 - DNA, 25 bp, Homo sapien
ataagcttgagagacaataaggaat

SEQ ID NO: 108148 - DNA, 25 bp, Homo sapien
taagcttgagagacaataaggaatg

SEQ ID NO: 108149 - DNA, 25 bp, Homo sapien
ggcatcatcctaagcacttacttca

SEQ ID NO: 108150 - DNA, 25 bp, Homo sapien
aaatatcagttaccacaaaatggac

SEQ ID NO: 108151 - DNA, 25 bp, Homo sapien
aactggcatcatcctaagcacttac

SEQ ID NO: 108152 - DNA, 25 bp, Homo sapien
ttacaatgataagataactggcatc

SEQ ID NO: 108153 - DNA, 25 bp, Homo sapien
gctgaagatcatcctcctggacatt

SEQ ID NO: 108154 - DNA, 25 bp, Homo sapien
gtgctgaagatcatcctcctggaca

SEQ ID NO: 108155 - DNA, 25 bp, Homo sapien
ctgaagatcatcctcctggacattt

SEQ ID NO: 108156 - DNA, 25 bp, Homo sapien
aggtgctgaagatcatcctcctgga

SEQ ID NO: 108157 - DNA, 25 bp, Homo sapien
tccattgccagtctgccatactcag

SEQ ID NO: 108158 - DNA, 25 bp, Homo sapien
ccagtctgccatactcagtgaaaag

SEQ ID NO: 108159 - DNA, 25 bp, Homo sapien
ttgccagtctgccatactcagtgaa

SEQ ID NO: 108160 - DNA, 25 bp, Homo sapien
cattgccagtctgccatactcagtg

SEQ ID NO: 108161 - DNA, 25 bp, Homo sapien
gcacatgacggagtggaaaccctct

SEQ ID NO: 108162 - DNA, 25 bp, Homo sapien
ggatctgtttttagcatagacccca

SEQ ID NO: 108163 - DNA, 25 bp, Homo sapien
catagaccccataacaagcttactg

SEQ ID NO: 108164 - DNA, 25 bp, Homo sapien
ttactgttgttagcacatgacggag

SEQ ID NO: 108165 - DNA, 25 bp, Homo sapien
tgaatctgtctcaacaacactctga

SEQ ID NO: 108166 - DNA, 25 bp, Homo sapien
tcaacaacactctgagttctgattt

SEQ ID NO: 108167 - DNA, 25 bp, Homo sapien
tgtctcaacaacactctgagttctg

SEQ ID NO: 108168 - DNA, 25 bp, Homo sapien
tctgtctcaacaacactctgagttc

SEQ ID NO: 108169 - DNA, 25 bp, Homo sapien
cacaacagccgcagagtagcagtac

SEQ ID NO: 108170 - DNA, 25 bp, Homo sapien
tttaatttggcacatgctctcctca

SEQ ID NO: 108171 - DNA, 25 bp, Homo sapien
gattttgcattaagggtcatgggaa

SEQ ID NO: 108172 - DNA, 25 bp, Homo sapien
gcatttagtctaagttccgcaaaca

SEQ ID NO: 108173 - DNA, 25 bp, Homo sapien
caagaatttggcaccaccatcggct

SEQ ID NO: 108174 - DNA, 25 bp, Homo sapien
tccagtctcgaacaagaaatatcag

SEQ ID NO: 108175 - DNA, 25 bp, Homo sapien
tatgaaaattcgtatgggaaactcc

SEQ ID NO: 108176 - DNA, 25 bp, Homo sapien
caccaccatcggctccatatgaaaa

SEQ ID NO: 108177 - DNA, 25 bp, Homo sapien
ttctgacgttctgtagttcttcatg

SEQ ID NO: 108178 - DNA, 25 bp, Homo sapien
ggaatggatgtgttttctgacgttc

SEQ ID NO: 108179 - DNA, 25 bp, Homo sapien
cgttctgtagttcttcatgctggtt

SEQ ID NO: 108180 - DNA, 25 bp, Homo sapien
tgacgttctgtagttcttcatgctg

SEQ ID NO: 108181 - DNA, 25 bp, Homo sapien
taagcccaatagataaaatgacatt

SEQ ID NO: 108182 - DNA, 25 bp, Homo sapien
taaactatcagccataagcccaata

SEQ ID NO: 108183 - DNA, 25 bp, Homo sapien
taatcagactaagtgatgcaaacat

SEQ ID NO: 108184 - DNA, 25 bp, Homo sapien
tttttataatcagactaagtgatgc

SEQ ID NO: 108185 - DNA, 25 bp, Homo sapien
ctctttaatatctaggctctcggga

SEQ ID NO: 108186 - DNA, 25 bp, Homo sapien
cttgaagtactccaccagaccccgg

SEQ ID NO: 108187 - DNA, 25 bp, Homo sapien
gactaagtagccaaggaatcagtat

SEQ ID NO: 108188 - DNA, 25 bp, Homo sapien
tattcccattgatctctttaatatc

SEQ ID NO: 108189 - DNA, 25 bp, Homo sapien
tatgtcaaatctatcccacgaatgc

SEQ ID NO: 108190 - DNA, 25 bp, Homo sapien
tgctcccatattatcgggtctataa

SEQ ID NO: 108191 - DNA, 25 bp, Homo sapien
aatgctctagaaatgagagtgatac

SEQ ID NO: 108192 - DNA, 25 bp, Homo sapien
gaattacgatccaatatatgtcaaa

SEQ ID NO: 108193 - DNA, 25 bp, Homo sapien
aatgttcttagacccctctgccggg

SEQ ID NO: 108194 - DNA, 25 bp, Homo sapien
tctgccgggagtaacgcccttttca

SEQ ID NO: 108195 - DNA, 25 bp, Homo sapien
ctttttcaaacatctctgtctgcca

SEQ ID NO: 108196 - DNA, 25 bp, Homo sapien
gccaatctggcccttcttaaaggct

SEQ ID NO: 108197 - DNA, 25 bp, Homo sapien
tggatttgggatgtggtaattcttc

SEQ ID NO: 108198 - DNA, 25 bp, Homo sapien
ttcttcaccttgatagatctttata

SEQ ID NO: 108199 - DNA, 25 bp, Homo sapien
gccacggctgctaaattgttagctt

SEQ ID NO: 108200 - DNA, 25 bp, Homo sapien
cggctgctaaattgttagcttctgc

SEQ ID NO: 108201 - DNA, 25 bp, Homo sapien
cacggctgctaaattgttagcttct

SEQ ID NO: 108202 - DNA, 25 bp, Homo sapien
ttgccacggctgctaaattgttagc

SEQ ID NO: 108203 - DNA, 25 bp, Homo sapien
gaaaatctctgtttaccgtggccac

SEQ ID NO: 108204 - DNA, 25 bp, Homo sapien
aagtcaccagctacaagaaagtcag

SEQ ID NO: 108205 - DNA, 25 bp, Homo sapien
gaacactgggttcgacttaaagtca

SEQ ID NO: 108206 - DNA, 25 bp, Homo sapien
tgcactttatgttacggagatggct

SEQ ID NO: 108207 - DNA, 25 bp, Homo sapien
agtatttgtttatgcaatgcagagt

SEQ ID NO: 108208 - DNA, 25 bp, Homo sapien
tttgtttatgcaatgcagagtaaaa

SEQ ID NO: 108209 - DNA, 25 bp, Homo sapien
ttgtttatgcaatgcagagtaaaat

SEQ ID NO: 108210 - DNA, 25 bp, Homo sapien
tatttgtttatgcaatgcagagtaa

SEQ ID NO: 108211 - DNA, 25 bp, Homo sapien
cagagtaccggatatatgcccaagt

SEQ ID NO: 108212 - DNA, 25 bp, Homo sapien
gggtcagtcccattatcatattgca

SEQ ID NO: 108213 - DNA, 25 bp, Homo sapien
tgcacagggtgataagggtcagtcc

SEQ ID NO: 108214 - DNA, 25 bp, Homo sapien
gctagctatgatgtccaaaccaatg

SEQ ID NO: 108215 - DNA, 25 bp, Homo sapien
tacaggtacagagacaatctgaagt

SEQ ID NO: 108216 - DNA, 25 bp, Homo sapien
ccgactttggtgtagggaaagcttg

SEQ ID NO: 108217 - DNA, 25 bp, Homo sapien
gcttgatgatacagatgtctgtggg

SEQ ID NO: 108218 - DNA, 25 bp, Homo sapien
gctgctgcactgtaaagcttgtaca

SEQ ID NO: 108219 - DNA, 25 bp, Homo sapien
tcagtagattccgactttggtgtag

SEQ ID NO: 108220 - DNA, 25 bp, Homo sapien
tccgttctgatggaagcactttgaa

SEQ ID NO: 108221 - DNA, 25 bp, Homo sapien
taaattcaagcagaacacgtgtact

SEQ ID NO: 108222 - DNA, 25 bp, Homo sapien
attgacaattggtcatgcacctgta

SEQ ID NO: 108223 - DNA, 25 bp, Homo sapien
gatttaattataacccagtagtaga

SEQ ID NO: 108224 - DNA, 25 bp, Homo sapien
gcctgctgagttatgatgctgtgtt

SEQ ID NO: 108225 - DNA, 25 bp, Homo sapien
aaaaatatacaatgcagtgaaactc

SEQ ID NO: 108226 - DNA, 25 bp, Homo sapien
gatacagattaaatccagcctgctg

SEQ ID NO: 108227 - DNA, 25 bp, Homo sapien
gaatacattctttgtgtaccaaatg

SEQ ID NO: 108228 - DNA, 25 bp, Homo sapien
catttagcatggctctgacgaggca

SEQ ID NO: 108229 - DNA, 25 bp, Homo sapien
gaaggtgcgtgaaactcaaagttgc

SEQ ID NO: 108230 - DNA, 25 bp, Homo sapien
gagttcctgacagcatagcatactg

SEQ ID NO: 108231 - DNA, 25 bp, Homo sapien
gacagactgggttaagctaccaaaa

SEQ ID NO: 108232 - DNA, 25 bp, Homo sapien
gctgtgacccttgaaaacctagaga

SEQ ID NO: 108233 - DNA, 25 bp, Homo sapien
tcttcagagacacttgacggagtcc

SEQ ID NO: 108234 - DNA, 25 bp, Homo sapien
tgggacacgaacaaatactactagc

SEQ ID NO: 108235 - DNA, 25 bp, Homo sapien
tggagatcgtgcacatgaagactac

SEQ ID NO: 108236 - DNA, 25 bp, Homo sapien
tcttgtagccgccacccaaagcctc

SEQ ID NO: 108237 - DNA, 25 bp, Homo sapien
tcgttcttgtagccgccacccaaag

SEQ ID NO: 108238 - DNA, 25 bp, Homo sapien
cgtcgttcttgtagccgccacccaa

SEQ ID NO: 108239 - DNA, 25 bp, Homo sapien
gttcttgtagccgccacccaaagcc

SEQ ID NO: 108240 - DNA, 25 bp, Homo sapien
ccttcgtccttggtcgcgtgaaata

SEQ ID NO: 108241 - DNA, 25 bp, Homo sapien
ccttggtcgcgtgaaatactggttt

SEQ ID NO: 108242 - DNA, 25 bp, Homo sapien
tctccttcgtccttggtcgcgtgaa

SEQ ID NO: 108243 - DNA, 25 bp, Homo sapien
agggcttctccttcgtccttggtcg

SEQ ID NO: 108244 - DNA, 25 bp, Homo sapien
gagaaggatgctgtcccgaaagaaa

SEQ ID NO: 108245 - DNA, 25 bp, Homo sapien
tagggaggcagttcagcgcggcctc

SEQ ID NO: 108246 - DNA, 25 bp, Homo sapien
gcctctgcttcggagtgagtgtcag

SEQ ID NO: 108247 - DNA, 25 bp, Homo sapien
cctcgggcctcgtcgagaaggatgc

SEQ ID NO: 108248 - DNA, 25 bp, Homo sapien
ttagcgccctgaacatgcggcagtc

SEQ ID NO: 108249 - DNA, 25 bp, Homo sapien
tagcgccctgaacatgcggcagtcc

SEQ ID NO: 108250 - DNA, 25 bp, Homo sapien
gtccccgagcagcgtcgcagagcgg

SEQ ID NO: 108251 - DNA, 25 bp, Homo sapien
tccccgagcagcgtcgcagagcggg

SEQ ID NO: 108252 - DNA, 25 bp, Homo sapien
cagagcgggccgacttccgggaagg

SEQ ID NO: 108253 - DNA, 25 bp, Homo sapien
cgcagagcgggccgacttccgggaa

SEQ ID NO: 108254 - DNA, 25 bp, Homo sapien
cccgcggcggaccatggccctggcc

SEQ ID NO: 108255 - DNA, 25 bp, Homo sapien
cggcggcggtagtggtagcggttat

SEQ ID NO: 108256 - DNA, 25 bp, Homo sapien
tggtagcggttattcggcggcccgc

SEQ ID NO: 108257 - DNA, 25 bp, Homo sapien
gcggtagtggtagcggttattcggc

SEQ ID NO: 108258 - DNA, 25 bp, Homo sapien
tcccagaattcccagcggccgcggg

SEQ ID NO: 108259 - DNA, 25 bp, Homo sapien
cggcggcccgcgctgcgtcgagctt

SEQ ID NO: 108260 - DNA, 25 bp, Homo sapien
gcccgcgctgcgtcgagcttcccag

SEQ ID NO: 108261 - DNA, 25 bp, Homo sapien
ccagaattcccagcggccgcgggga

SEQ ID NO: 108262 - DNA, 25 bp, Homo sapien
gcctagagcgccggcacccgagtcc

SEQ ID NO: 108263 - DNA, 25 bp, Homo sapien
tgagtgaggacagccgcagctcggc

SEQ ID NO: 108264 - DNA, 25 bp, Homo sapien
gatgagtgaggacagccgcagctcg

SEQ ID NO: 108265 - DNA, 25 bp, Homo sapien
tagagcgccggcacccgagtcccgc

SEQ ID NO: 108266 - DNA, 25 bp, Homo sapien
tcagcggggcaggtttcgtccttca

SEQ ID NO: 108267 - DNA, 25 bp, Homo sapien
gcggggcaggtttcgtccttcatct

SEQ ID NO: 108268 - DNA, 25 bp, Homo sapien
ggggcaggtttcgtccttcatcttc

SEQ ID NO: 108269 - DNA, 25 bp, Homo sapien
cagcggggcaggtttcgtccttcat

SEQ ID NO: 108270 - DNA, 25 bp, Homo sapien
gctttggtgtagcacttgcctggga

SEQ ID NO: 108271 - DNA, 25 bp, Homo sapien
gcatgaacgtttccagcagaataga

SEQ ID NO: 108272 - DNA, 25 bp, Homo sapien
cattccgcattttttagagagctga

SEQ ID NO: 108273 - DNA, 25 bp, Homo sapien
gaaaaacgcactccctgatactcag

SEQ ID NO: 108274 - DNA, 25 bp, Homo sapien
gacattcaatgtcctgtttagacct

SEQ ID NO: 108275 - DNA, 25 bp, Homo sapien
cagcacgaaataaacagcattgcca

SEQ ID NO: 108276 - DNA, 25 bp, Homo sapien
tagttcctcaatcctgatcagcacg

SEQ ID NO: 108277 - DNA, 25 bp, Homo sapien
ggttgttgttaaagatactgagctc

SEQ ID NO: 108278 - DNA, 25 bp, Homo sapien
tgaagtttatcaacactactgaaat

SEQ ID NO: 108279 - DNA, 25 bp, Homo sapien
tttgaagtttatcaacactactgaa

SEQ ID NO: 108280 - DNA, 25 bp, Homo sapien
caacaccgttaacacttttgtggat

SEQ ID NO: 108281 - DNA, 25 bp, Homo sapien
tgaaatttgtcaacaccgttaacac

SEQ ID NO: 108282 - DNA, 25 bp, Homo sapien
gaaacagatccatacaagtacagtg

SEQ ID NO: 108283 - DNA, 25 bp, Homo sapien
catgctaagaacatacattagggaa

SEQ ID NO: 108284 - DNA, 25 bp, Homo sapien
atggtgctagaaaaactgattatcc

SEQ ID NO: 108285 - DNA, 25 bp, Homo sapien
tgtaacaccatagagaaaccagaaa

SEQ ID NO: 108286 - DNA, 25 bp, Homo sapien
aaactacaagaacagacaaagaagg

SEQ ID NO: 108287 - DNA, 25 bp, Homo sapien
caagaacagacaaagaaggtcactg

SEQ ID NO: 108288 - DNA, 25 bp, Homo sapien
ttcaacaagaggatatagtaatttt

SEQ ID NO: 108289 - DNA, 25 bp, Homo sapien
tcctgacaaggactaaaactacaag

SEQ ID NO: 108290 - DNA, 25 bp, Homo sapien
gctgtgcctcgggacagctcagcac

SEQ ID NO: 108291 - DNA, 25 bp, Homo sapien
caagctgtgcctcgggacagctcag

SEQ ID NO: 108292 - DNA, 25 bp, Homo sapien
aagctgtgcctcgggacagctcagc

SEQ ID NO: 108293 - DNA, 25 bp, Homo sapien
tgcaagctgtgcctcgggacagctc

SEQ ID NO: 108294 - DNA, 25 bp, Homo sapien
gcagagggcctttcgctgtgagacc

SEQ ID NO: 108295 - DNA, 25 bp, Homo sapien
agagcagctcccgacacgtggccaa

SEQ ID NO: 108296 - DNA, 25 bp, Homo sapien
ggcgccgcctttgtcagggatgact

SEQ ID NO: 108297 - DNA, 25 bp, Homo sapien
cacgtggccaagatcgtgaggcaga

SEQ ID NO: 108298 - DNA, 25 bp, Homo sapien
gagaagtgtcctgagtgcaactcct

SEQ ID NO: 108299 - DNA, 25 bp, Homo sapien
gaagtgtcctgagtgcaactcctgc

SEQ ID NO: 108300 - DNA, 25 bp, Homo sapien
aggccgaccacccagagaagtgtcc

SEQ ID NO: 108301 - DNA, 25 bp, Homo sapien
accaggccgaccacccagagaagtg

SEQ ID NO: 108302 - DNA, 25 bp, Homo sapien
gctgcaccatgaaggcgaatctcaa

SEQ ID NO: 108303 - DNA, 25 bp, Homo sapien
cctttcgagtgcgagttctgcagcg

SEQ ID NO: 108304 - DNA, 25 bp, Homo sapien
tcagctcagacttgaaaaggcacat

SEQ ID NO: 108305 - DNA, 25 bp, Homo sapien
tgtagcgccaagttcaaaatcagct

SEQ ID NO: 108306 - DNA, 25 bp, Homo sapien
tgacaagtgcttcagcggaaggaca

SEQ ID NO: 108307 - DNA, 25 bp, Homo sapien
ggacaacctgaccatgcacatgtga

SEQ ID NO: 108308 - DNA, 25 bp, Homo sapien
atgccgcacgagtgttacctgtgtg

SEQ ID NO: 108309 - DNA, 25 bp, Homo sapien
cacgagtgttacctgtgtgactatg

SEQ ID NO: 108310 - DNA, 25 bp, Homo sapien
gaaagacttggaccgctatctcaga

SEQ ID NO: 108311 - DNA, 25 bp, Homo sapien
ggtgacgaaccgctcaagtgtgagt

SEQ ID NO: 108312 - DNA, 25 bp, Homo sapien
gaggacattcgactgttgctaccca

SEQ ID NO: 108313 - DNA, 25 bp, Homo sapien
cagccgcccttggagagaggacatt

SEQ ID NO: 108314 - DNA, 25 bp, Homo sapien
tatctggacctctcagcactgtaaa

SEQ ID NO: 108315 - DNA, 25 bp, Homo sapien
tatcatggcatgacttaagggaaca

SEQ ID NO: 108316 - DNA, 25 bp, Homo sapien
catcatgtttggacctatctggacc

SEQ ID NO: 108317 - DNA, 25 bp, Homo sapien
tatttccagtcaaggcaaggctaag

SEQ ID NO: 108318 - DNA, 25 bp, Homo sapien
gagaaagcaaactgcccaagaagtc

SEQ ID NO: 108319 - DNA, 25 bp, Homo sapien
caagcactgctttatgggcaggaac

SEQ ID NO: 108320 - DNA, 25 bp, Homo sapien
tgcagggcactttccaagttcatca

SEQ ID NO: 108321 - DNA, 25 bp, Homo sapien
tgctagccacttccgccagcagttg

SEQ ID NO: 108322 - DNA, 25 bp, Homo sapien
tctaacatttagtgaactataagac

SEQ ID NO: 108323 - DNA, 25 bp, Homo sapien
tataagacttatgtaaggcagagaa

SEQ ID NO: 108324 - DNA, 25 bp, Homo sapien
tatacacatattgttaagccagaat

SEQ ID NO: 108325 - DNA, 25 bp, Homo sapien
cagagaagaacctgtagaaattgtc

SEQ ID NO: 108326 - DNA, 25 bp, Homo sapien
tagggtagcgtcagcccatcattgc

SEQ ID NO: 108327 - DNA, 25 bp, Homo sapien
ggacctagaaggcatgtgtcactct

SEQ ID NO: 108328 - DNA, 25 bp, Homo sapien
tttggatcccaagaatagggtagcg

SEQ ID NO: 108329 - DNA, 25 bp, Homo sapien
tgctattatacaacgtggacctaga

SEQ ID NO: 108330 - DNA, 25 bp, Homo sapien
accaggcggcatgtcctaagtgacc

SEQ ID NO: 108331 - DNA, 25 bp, Homo sapien
cagagagctcatgaacaggcagtga

SEQ ID NO: 108332 - DNA, 25 bp, Homo sapien
ttgaaaacagtgaagagaccaggac

SEQ ID NO: 108333 - DNA, 25 bp, Homo sapien
gggacgtcctcttaagcctgcagag

SEQ ID NO: 108334 - DNA, 25 bp, Homo sapien
gagcgaatagcagccttaaaaaatg

SEQ ID NO: 108335 - DNA, 25 bp, Homo sapien
tgaactccgaaaagagagagagcag

SEQ ID NO: 108336 - DNA, 25 bp, Homo sapien
aaaatgaactccgaaaagagagaga

SEQ ID NO: 108337 - DNA, 25 bp, Homo sapien
actggatgaagagtacaaggagcga

SEQ ID NO: 108338 - DNA, 25 bp, Homo sapien
ggcctcggaggtggatgatcaccat

SEQ ID NO: 108339 - DNA, 25 bp, Homo sapien
tagagcggcggaatgagtacaacct

SEQ ID NO: 108340 - DNA, 25 bp, Homo sapien
ccatgcggccatagagcggcggaat

SEQ ID NO: 108341 - DNA, 25 bp, Homo sapien
ggtggatgatcaccatgcggccata

SEQ ID NO: 108342 - DNA, 25 bp, Homo sapien
tgctgggtaagaatgccccggtgtc

SEQ ID NO: 108343 - DNA, 25 bp, Homo sapien
cattccagaaatcggtgccgcctgt

SEQ ID NO: 108344 - DNA, 25 bp, Homo sapien
tccagctgtaggacaactcaagagc

SEQ ID NO: 108345 - DNA, 25 bp, Homo sapien
tttaattagccgtacattctgcggg

SEQ ID NO: 108346 - DNA, 25 bp, Homo sapien
gacctatttaggtgaggcacagatg

SEQ ID NO: 108347 - DNA, 25 bp, Homo sapien
cccagagacttgtgcaatgaaagga

SEQ ID NO: 108348 - DNA, 25 bp, Homo sapien
tgtcactacaaggagtcattcactg

SEQ ID NO: 108349 - DNA, 25 bp, Homo sapien
ccttgccgggtgatctagttcttca

SEQ ID NO: 108350 - DNA, 25 bp, Homo sapien
tgtgtgtatcaaaggcttatcatag

SEQ ID NO: 108351 - DNA, 25 bp, Homo sapien
tcagtgtaatgggaagactatttcc

SEQ ID NO: 108352 - DNA, 25 bp, Homo sapien
tacaagactgtgatgaaggtggact

SEQ ID NO: 108353 - DNA, 25 bp, Homo sapien
tatgaacacgttatcttaaatactc

SEQ ID NO: 108354 - DNA, 25 bp, Homo sapien
cttggaggaggtggccccagtgctg

SEQ ID NO: 108355 - DNA, 25 bp, Homo sapien
catgttgagcttggaggaggtggcc

SEQ ID NO: 108356 - DNA, 25 bp, Homo sapien
atgttgagcttggaggaggtggccc

SEQ ID NO: 108357 - DNA, 25 bp, Homo sapien
tgagcttggaggaggtggccccagt

SEQ ID NO: 108358 - DNA, 25 bp, Homo sapien
tcttcagatgtgcaggtttcaggct

SEQ ID NO: 108359 - DNA, 25 bp, Homo sapien
tatggacgatcacctctaagttaga

SEQ ID NO: 108360 - DNA, 25 bp, Homo sapien
tgaggtcaccgtcccaagggtgtat

SEQ ID NO: 108361 - DNA, 25 bp, Homo sapien
gttgtaatgatctgccgtatggacg

SEQ ID NO: 108362 - DNA, 25 bp, Homo sapien
gaatattggtggctcttgctccgga

SEQ ID NO: 108363 - DNA, 25 bp, Homo sapien
ttacaggctggctgaaaaacgagtt

SEQ ID NO: 108364 - DNA, 25 bp, Homo sapien
catattatataggtggctgacctgg

SEQ ID NO: 108365 - DNA, 25 bp, Homo sapien
tccagagtgtgtataggaggaacat

SEQ ID NO: 108366 - DNA, 25 bp, Homo sapien
gtaggatgagaatcctgataaagtc

SEQ ID NO: 108367 - DNA, 25 bp, Homo sapien
gtccccgtaaacaccataacataca

SEQ ID NO: 108368 - DNA, 25 bp, Homo sapien
gacacatgagggaagcccctggaac

SEQ ID NO: 108369 - DNA, 25 bp, Homo sapien
tggaaccacgacgtttctcagttag

SEQ ID NO: 108370 - DNA, 25 bp, Homo sapien
agctcaactcctgaatttattacat

SEQ ID NO: 108371 - DNA, 25 bp, Homo sapien
agattgcgtagttgtcttttgtgac

SEQ ID NO: 108372 - DNA, 25 bp, Homo sapien
catcgaaacagattgcgtagttgtc

SEQ ID NO: 108373 - DNA, 25 bp, Homo sapien
gaatttattacatcgaaacagattg

SEQ ID NO: 108374 - DNA, 25 bp, Homo sapien
gacttctaagatgggcttgccatac

SEQ ID NO: 108375 - DNA, 25 bp, Homo sapien
aggacttctaagatgggcttgccat

SEQ ID NO: 108376 - DNA, 25 bp, Homo sapien
taggacagatcctctcctggtgttg

SEQ ID NO: 108377 - DNA, 25 bp, Homo sapien
ctcctggtgttgaggacttctaaga

SEQ ID NO: 108378 - DNA, 25 bp, Homo sapien
gaaggaagcttccagcggctaggct

SEQ ID NO: 108379 - DNA, 25 bp, Homo sapien
cttggagcccggaaagtggagattt

SEQ ID NO: 108380 - DNA, 25 bp, Homo sapien
gggtcgatgcgcgtaaacagtttcc

SEQ ID NO: 108381 - DNA, 25 bp, Homo sapien
acagtttcccagtataatgcccagg

SEQ ID NO: 108382 - DNA, 25 bp, Homo sapien
cgcccgtacagccttgtgattgaga

SEQ ID NO: 108383 - DNA, 25 bp, Homo sapien
gcccgtacagccttgtgattgagac

SEQ ID NO: 108384 - DNA, 25 bp, Homo sapien
cccgtacagccttgtgattgagacg

SEQ ID NO: 108385 - DNA, 25 bp, Homo sapien
ccgcccgtacagccttgtgattgag

SEQ ID NO: 108386 - DNA, 25 bp, Homo sapien
cgcttctgtgctttgaccgagagca

SEQ ID NO: 108387 - DNA, 25 bp, Homo sapien
gcctgcccggagctgaaagccgctt

SEQ ID NO: 108388 - DNA, 25 bp, Homo sapien
cggcagcaccgctgggtttgggcac

SEQ ID NO: 108389 - DNA, 25 bp, Homo sapien
ccgagagcaggcttgagtccccgag

SEQ ID NO: 108390 - DNA, 25 bp, Homo sapien
gctccggagagaccgacagaaggta

SEQ ID NO: 108391 - DNA, 25 bp, Homo sapien
cgacagaaggtaggcgagggcggcg

SEQ ID NO: 108392 - DNA, 25 bp, Homo sapien
gggcgctccggagagaccgacagaa

SEQ ID NO: 108393 - DNA, 25 bp, Homo sapien
gctgtgcgggcgctccggagagacc

SEQ ID NO: 108394 - DNA, 25 bp, Homo sapien
ctaacaaagcgtcctccttcgcttt

SEQ ID NO: 108395 - DNA, 25 bp, Homo sapien
agccctaacaaagcgtcctccttcg

SEQ ID NO: 108396 - DNA, 25 bp, Homo sapien
ctgcgaagtattgtcccgtttctcc

SEQ ID NO: 108397 - DNA, 25 bp, Homo sapien
ttctccagccctaacaaagcgtcct

SEQ ID NO: 108398 - DNA, 25 bp, Homo sapien
tccccattcgcgtccttttgaagga

SEQ ID NO: 108399 - DNA, 25 bp, Homo sapien
tcgcgtccttttgaaggacgcccgc

SEQ ID NO: 108400 - DNA, 25 bp, Homo sapien
cattcgcgtccttttgaaggacgcc

SEQ ID NO: 108401 - DNA, 25 bp, Homo sapien
cccattcgcgtccttttgaaggacg

SEQ ID NO: 108402 - DNA, 25 bp, Homo sapien
ctgagagcccggagcgaactgggca

SEQ ID NO: 108403 - DNA, 25 bp, Homo sapien
gcgaactgggcaccggatcactcgg

SEQ ID NO: 108404 - DNA, 25 bp, Homo sapien
gggtgcacggaggcctcgcgctgcc

SEQ ID NO: 108405 - DNA, 25 bp, Homo sapien
cccggagcgaactgggcaccggatc

SEQ ID NO: 108406 - DNA, 25 bp, Homo sapien
taacttcagatctcggaggcgggcg

SEQ ID NO: 108407 - DNA, 25 bp, Homo sapien
aatgttgatggccaatcgacacccg

SEQ ID NO: 108408 - DNA, 25 bp, Homo sapien
tacagggttccgagtcacttctaca

SEQ ID NO: 108409 - DNA, 25 bp, Homo sapien
gagccccggcgtttctaacttcaga

SEQ ID NO: 108410 - DNA, 25 bp, Homo sapien
ttcgtcctgtgtggcttgcgaccga

SEQ ID NO: 108411 - DNA, 25 bp, Homo sapien
aactccaaggagttttcgtcctgtg

SEQ ID NO: 108412 - DNA, 25 bp, Homo sapien
ggcttgcgaccgagggttagcttca

SEQ ID NO: 108413 - DNA, 25 bp, Homo sapien
cgagggttagcttcacccggagaag

SEQ ID NO: 108414 - DNA, 25 bp, Homo sapien
ccatcaggcggatccttcaagggca

SEQ ID NO: 108415 - DNA, 25 bp, Homo sapien
taatttctgtcgagtttctagcgca

SEQ ID NO: 108416 - DNA, 25 bp, Homo sapien
ggacttgggatcctatttgactgca

SEQ ID NO: 108417 - DNA, 25 bp, Homo sapien
tctagcgcactggattctcaaggaa

SEQ ID NO: 108418 - DNA, 25 bp, Homo sapien
tctgttcagtcaagaatgccaaccc

SEQ ID NO: 108419 - DNA, 25 bp, Homo sapien
gatcacagtcaacgtcattgccaaa

SEQ ID NO: 108420 - DNA, 25 bp, Homo sapien
tcttggcacacaaagaacctggttc

SEQ ID NO: 108421 - DNA, 25 bp, Homo sapien
ttcctgggacaaaaacttgctcagc

SEQ ID NO: 108422 - DNA, 25 bp, Homo sapien
taaacctatcacagcatcccaaggg

SEQ ID NO: 108423 - DNA, 25 bp, Homo sapien
tgatctgggaacaccgcagctggtt

SEQ ID NO: 108424 - DNA, 25 bp, Homo sapien
tgaggcaaaggtgatcgggccaact

SEQ ID NO: 108425 - DNA, 25 bp, Homo sapien
taagtacccactgcgtgcaatgcac

SEQ ID NO: 108426 - DNA, 25 bp, Homo sapien
aggcggccacgcagctacgggctgg

SEQ ID NO: 108427 - DNA, 25 bp, Homo sapien
cggctcgggcgatgcggccgcctgg

SEQ ID NO: 108428 - DNA, 25 bp, Homo sapien
cgcaggttgcggtcgaccatgtccc

SEQ ID NO: 108429 - DNA, 25 bp, Homo sapien
ccgcctggcagtcctgcgcgtccat

SEQ ID NO: 108430 - DNA, 25 bp, Homo sapien
tgagagtctcgctggtccaggttgg

SEQ ID NO: 108431 - DNA, 25 bp, Homo sapien
ctgagagtctcgctggtccaggttg

SEQ ID NO: 108432 - DNA, 25 bp, Homo sapien
gctgtaaccacacagcgtcccacag

SEQ ID NO: 108433 - DNA, 25 bp, Homo sapien
acatcaaacggccaccttggtgctt

SEQ ID NO: 108434 - DNA, 25 bp, Homo sapien
gattcttactggtgaaagctggtgg

SEQ ID NO: 108435 - DNA, 25 bp, Homo sapien
gggactcagaacctaactggatgat

SEQ ID NO: 108436 - DNA, 25 bp, Homo sapien
cttagccctctcagcagggtcccgt

SEQ ID NO: 108437 - DNA, 25 bp, Homo sapien
ttagccctctcagcagggtcccgtc

SEQ ID NO: 108438 - DNA, 25 bp, Homo sapien
agccctctcagcagggtcccgtcct

SEQ ID NO: 108439 - DNA, 25 bp, Homo sapien
ccctctcagcagggtcccgtccttt

SEQ ID NO: 108440 - DNA, 25 bp, Homo sapien
gggtcactaaggacacctctgtctc

SEQ ID NO: 108441 - DNA, 25 bp, Homo sapien
acaagtgacgatttgtccatgaggg

SEQ ID NO: 108442 - DNA, 25 bp, Homo sapien
tccatgaggggtcactaaggacacc

SEQ ID NO: 108443 - DNA, 25 bp, Homo sapien
tgtgacacaaaccacccaatcagga

SEQ ID NO: 108444 - DNA, 25 bp, Homo sapien
ttttcttccgagcattgaacaggag

SEQ ID NO: 108445 - DNA, 25 bp, Homo sapien
cgagcattgaacaggagtgtggaaa

SEQ ID NO: 108446 - DNA, 25 bp, Homo sapien
cagcaatttttcttccgagcattga

SEQ ID NO: 108447 - DNA, 25 bp, Homo sapien
cttccgagcattgaacaggagtgtg

SEQ ID NO: 108448 - DNA, 25 bp, Homo sapien
aataaattagcatgtctatcagagg

SEQ ID NO: 108449 - DNA, 25 bp, Homo sapien
tatcagaggaaggaaaacgtgttct

SEQ ID NO: 108450 - DNA, 25 bp, Homo sapien
tgtctatcagaggaaggaaaacgtg

SEQ ID NO: 108451 - DNA, 25 bp, Homo sapien
aaataaattagcatgtctatcagag

SEQ ID NO: 108452 - DNA, 25 bp, Homo sapien
aaatcattatcaacttcaagaatca

SEQ ID NO: 108453 - DNA, 25 bp, Homo sapien
gtaaaaatcattatcaacttcaaga

SEQ ID NO: 108454 - DNA, 25 bp, Homo sapien
aaaaatcattatcaacttcaagaat

SEQ ID NO: 108455 - DNA, 25 bp, Homo sapien
atcattatcaacttcaagaatcaaa

SEQ ID NO: 108456 - DNA, 25 bp, Homo sapien
tgtgtgaggaatctttaactctggt

SEQ ID NO: 108457 - DNA, 25 bp, Homo sapien
tcactgtgtgaggaatctttaactc

SEQ ID NO: 108458 - DNA, 25 bp, Homo sapien
caccccaggttcaactctcaggtag

SEQ ID NO: 108459 - DNA, 25 bp, Homo sapien
ccaggttcaactctcaggtagaagt

SEQ ID NO: 108460 - DNA, 25 bp, Homo sapien
tgactcaccaaaccaaggaccagtg

SEQ ID NO: 108461 - DNA, 25 bp, Homo sapien
tatgacatgtcaccatgggatgtgg

SEQ ID NO: 108462 - DNA, 25 bp, Homo sapien
tgtactccgaatataggcactgctg

SEQ ID NO: 108463 - DNA, 25 bp, Homo sapien
aactggctaagggtgacaaatcttc

SEQ ID NO: 108464 - DNA, 25 bp, Homo sapien
ctgcactgccatgaagataaacaat

SEQ ID NO: 108465 - DNA, 25 bp, Homo sapien
gaagggctgcttcataccagcaaca

SEQ ID NO: 108466 - DNA, 25 bp, Homo sapien
tgggttcccatcacgaagggctgct

SEQ ID NO: 108467 - DNA, 25 bp, Homo sapien
catcacgaagggctgcttcatacca

SEQ ID NO: 108468 - DNA, 25 bp, Homo sapien
cagcttcagtctgtgcgaagctgcc

SEQ ID NO: 108469 - DNA, 25 bp, Homo sapien
ccagcttcagtctgtgcgaagctgc

SEQ ID NO: 108470 - DNA, 25 bp, Homo sapien
acaggcagcttgttcaaccagttct

SEQ ID NO: 108471 - DNA, 25 bp, Homo sapien
aaacaggcagcttgttcaaccagtt

SEQ ID NO: 108472 - DNA, 25 bp, Homo sapien
ccagttctgaggcagatatggctaa

SEQ ID NO: 108473 - DNA, 25 bp, Homo sapien
tggctaagtggaaagcctgccatct

SEQ ID NO: 108474 - DNA, 25 bp, Homo sapien
tcctttctgggaacattgagacagc

SEQ ID NO: 108475 - DNA, 25 bp, Homo sapien
tttatatccgggtggcaaaacctca

SEQ ID NO: 108476 - DNA, 25 bp, Homo sapien
gaacgaagattcactcctgggtctg

SEQ ID NO: 108477 - DNA, 25 bp, Homo sapien
cacgtgttgaaggaccactaggcaa

SEQ ID NO: 108478 - DNA, 25 bp, Homo sapien
tagtcaacagacaagacatgaaagc

SEQ ID NO: 108479 - DNA, 25 bp, Homo sapien
gtcaacagacaagacatgaaagcca

SEQ ID NO: 108480 - DNA, 25 bp, Homo sapien
ctgtagtcaacagacaagacatgaa

SEQ ID NO: 108481 - DNA, 25 bp, Homo sapien
tgtagtcaacagacaagacatgaaa

SEQ ID NO: 108482 - DNA, 25 bp, Homo sapien
tgaaacatctttgtacaccgttctt

SEQ ID NO: 108483 - DNA, 25 bp, Homo sapien
gccttcaaaatgaggggtcatcaga

SEQ ID NO: 108484 - DNA, 25 bp, Homo sapien
agaggccccctggttactgaaacat

SEQ ID NO: 108485 - DNA, 25 bp, Homo sapien
tttgtacaccgttcttaacacatac

SEQ ID NO: 108486 - DNA, 25 bp, Homo sapien
tcttgccttggtccactcatagaca

SEQ ID NO: 108487 - DNA, 25 bp, Homo sapien
tcatagacacaaatggcatccgtag

SEQ ID NO: 108488 - DNA, 25 bp, Homo sapien
aatggcatccgtagtcagtccctcc

SEQ ID NO: 108489 - DNA, 25 bp, Homo sapien
gagacacacgggagtgatgccactt

SEQ ID NO: 108490 - DNA, 25 bp, Homo sapien
gtgctccctccactactggctgctg

SEQ ID NO: 108491 - DNA, 25 bp, Homo sapien
gcctttgataggacactaaagcctc

SEQ ID NO: 108492 - DNA, 25 bp, Homo sapien
tcggtgctccctccactactggctg

SEQ ID NO: 108493 - DNA, 25 bp, Homo sapien
gctcggtgctccctccactactggc

SEQ ID NO: 108494 - DNA, 25 bp, Homo sapien
cacgctatttaaaagggttccacag

SEQ ID NO: 108495 - DNA, 25 bp, Homo sapien
tctggtatgagcatctgataaaagc

SEQ ID NO: 108496 - DNA, 25 bp, Homo sapien
tagtacatgtgttaagcaataacag

SEQ ID NO: 108497 - DNA, 25 bp, Homo sapien
ctgtaaagcaatgaaaattagtaca

SEQ ID NO: 108498 - DNA, 25 bp, Homo sapien
ctagcacttttgcagcatttgttgc

SEQ ID NO: 108499 - DNA, 25 bp, Homo sapien
tcttctagcacttttgcagcatttg

SEQ ID NO: 108500 - DNA, 25 bp, Homo sapien
ttctagcacttttgcagcatttgtt

SEQ ID NO: 108501 - DNA, 25 bp, Homo sapien
tttttcttctagcacttttgcagca

SEQ ID NO: 108502 - DNA, 25 bp, Homo sapien
gaaaccatctaaagttgggatgctt

SEQ ID NO: 108503 - DNA, 25 bp, Homo sapien
ccacatcggccaaggaggactcttt

SEQ ID NO: 108504 - DNA, 25 bp, Homo sapien
caaaaagaaagcctgttgcactgcc

SEQ ID NO: 108505 - DNA, 25 bp, Homo sapien
tggtgtctatatgttcaaagtgtac

SEQ ID NO: 108506 - DNA, 25 bp, Homo sapien
aagacaatagcatcaactgggcatc

SEQ ID NO: 108507 - DNA, 25 bp, Homo sapien
tggagcttccaagacaatagcatca

SEQ ID NO: 108508 - DNA, 25 bp, Homo sapien
ccaagacaatagcatcaactgggca

SEQ ID NO: 108509 - DNA, 25 bp, Homo sapien
gttggtaaatggagcttccaagaca

SEQ ID NO: 108510 - DNA, 25 bp, Homo sapien
gataattgatacttgcaacccacat

SEQ ID NO: 108511 - DNA, 25 bp, Homo sapien
ggataattgatacttgcaacccaca

SEQ ID NO: 108512 - DNA, 25 bp, Homo sapien
aattagacactcatgtggacccctg

SEQ ID NO: 108513 - DNA, 25 bp, Homo sapien
aatctctctttatcagctgggcgcg

SEQ ID NO: 108514 - DNA, 25 bp, Homo sapien
gagaaatgagaacctaccaccagac

SEQ ID NO: 108515 - DNA, 25 bp, Homo sapien
cctaccttagcggagggcagaaaca

SEQ ID NO: 108516 - DNA, 25 bp, Homo sapien
cggcaccaaatttcatgcgcgtccg

SEQ ID NO: 108517 - DNA, 25 bp, Homo sapien
gtcacggcaccaaatttcatgcgcg

SEQ ID NO: 108518 - DNA, 25 bp, Homo sapien
aaaggactttcacaaggtagtgtca

SEQ ID NO: 108519 - DNA, 25 bp, Homo sapien
ggtcataggtggatttttctcatgg

SEQ ID NO: 108520 - DNA, 25 bp, Homo sapien
gggttgctgccaaacacgtcatgaa

SEQ ID NO: 108521 - DNA, 25 bp, Homo sapien
ccggcacgtgtagcaagctcctgtg

SEQ ID NO: 108522 - DNA, 25 bp, Homo sapien
tgctgccaaacacgtcatgaactgg

SEQ ID NO: 108523 - DNA, 25 bp, Homo sapien
ccaaacacgtcatgaactgggctgg

SEQ ID NO: 108524 - DNA, 25 bp, Homo sapien
gcactgtgagagttaccggaagctc

SEQ ID NO: 108525 - DNA, 25 bp, Homo sapien
gagttaccggaagctcggcgtctgt

SEQ ID NO: 108526 - DNA, 25 bp, Homo sapien
gagagttaccggaagctcggcgtct

SEQ ID NO: 108527 - DNA, 25 bp, Homo sapien
gttaccggaagctcggcgtctgtga

SEQ ID NO: 108528 - DNA, 25 bp, Homo sapien
ttaaggtggggcagcttctgagcca

SEQ ID NO: 108529 - DNA, 25 bp, Homo sapien
ggcagggcagggccttttcacttct

SEQ ID NO: 108530 - DNA, 25 bp, Homo sapien
tcagttaaggcagggcagggccttt

SEQ ID NO: 108531 - DNA, 25 bp, Homo sapien
gaaggaaattcacagggttaatcac

SEQ ID NO: 108532 - DNA, 25 bp, Homo sapien
tgtacgtaaaaatcctggaatgttc

SEQ ID NO: 108533 - DNA, 25 bp, Homo sapien
aagtgtacgtaaaaatcctggaatg

SEQ ID NO: 108534 - DNA, 25 bp, Homo sapien
agtgtacgtaaaaatcctggaatgt

SEQ ID NO: 108535 - DNA, 25 bp, Homo sapien
ttttgtcttttctcagggcatccat

SEQ ID NO: 108536 - DNA, 25 bp, Homo sapien
ttattttgtcttttctcagggcatc

SEQ ID NO: 108537 - DNA, 25 bp, Homo sapien
atcattaggaaagattattttgtct

SEQ ID NO: 108538 - DNA, 25 bp, Homo sapien
aaagattattttgtcttttctcagg

SEQ ID NO: 108539 - DNA, 25 bp, Homo sapien
atactccaaaggcactgtcctgtca

SEQ ID NO: 108540 - DNA, 25 bp, Homo sapien
ctttttcccatactccaaaggcact

SEQ ID NO: 108541 - DNA, 25 bp, Homo sapien
gtcatcctctccatgtaagatgaga

SEQ ID NO: 108542 - DNA, 25 bp, Homo sapien
tgtcatcctctccatgtaagatgag

SEQ ID NO: 108543 - DNA, 25 bp, Homo sapien
tcaaaggatggccattcaaagctgt

SEQ ID NO: 108544 - DNA, 25 bp, Homo sapien
agagactcaaaggatggccattcaa

SEQ ID NO: 108545 - DNA, 25 bp, Homo sapien
gagactcaaaggatggccattcaaa

SEQ ID NO: 108546 - DNA, 25 bp, Homo sapien
gtatgcattgcgtgcaatttcatag

SEQ ID NO: 108547 - DNA, 25 bp, Homo sapien
tctctttgttcctgtatgcattgcg

SEQ ID NO: 108548 - DNA, 25 bp, Homo sapien
tattaacagtgtggggcttttacaa

SEQ ID NO: 108549 - DNA, 25 bp, Homo sapien
gaggaaagataaccatcttgaccct

SEQ ID NO: 108550 - DNA, 25 bp, Homo sapien
tcatgaccactgcttgctcaggaaa

SEQ ID NO: 108551 - DNA, 25 bp, Homo sapien
tgaccactgcttgctcaggaaatct

SEQ ID NO: 108552 - DNA, 25 bp, Homo sapien
catgaccactgcttgctcaggaaat

SEQ ID NO: 108553 - DNA, 25 bp, Homo sapien
atgaccactgcttgctcaggaaatc

SEQ ID NO: 108554 - DNA, 25 bp, Homo sapien
tagatgaaggcttctcactgtatcc

SEQ ID NO: 108555 - DNA, 25 bp, Homo sapien
tccgaccagcccagtacaattttac

SEQ ID NO: 108556 - DNA, 25 bp, Homo sapien
tcacaggtggtgtttgggccaagtc

SEQ ID NO: 108557 - DNA, 25 bp, Homo sapien
gggcaggcccagatattcggaccat

SEQ ID NO: 108558 - DNA, 25 bp, Homo sapien
aaggatcattcaacgcctgtgctgc

SEQ ID NO: 108559 - DNA, 25 bp, Homo sapien
taatggctacaaacaagcagggcag

SEQ ID NO: 108560 - DNA, 25 bp, Homo sapien
gaaaagccatatacaggccgcaaga

SEQ ID NO: 108561 - DNA, 25 bp, Homo sapien
gagaacggccacctcaagacagatc

SEQ ID NO: 108562 - DNA, 25 bp, Homo sapien
ttcttctaggccaaaagagctctgg

SEQ ID NO: 108563 - DNA, 25 bp, Homo sapien
gaactgtctgcatgtgatcacgatg

SEQ ID NO: 108564 - DNA, 25 bp, Homo sapien
aagaagttattcgtgccaaggacag

SEQ ID NO: 108565 - DNA, 25 bp, Homo sapien
gatacatgagtacaagcgacagctc

SEQ ID NO: 108566 - DNA, 25 bp, Homo sapien
gatgatgtcttcctccgggaactcg

SEQ ID NO: 108567 - DNA, 25 bp, Homo sapien
tgtgatacgtgaactacactgtggt

SEQ ID NO: 108568 - DNA, 25 bp, Homo sapien
gactatgtgaaagacctgagccagc

SEQ ID NO: 108569 - DNA, 25 bp, Homo sapien
gagtcaaactatcccatgttctgtg

SEQ ID NO: 108570 - DNA, 25 bp, Homo sapien
gctgtgaatggcgtggctaaaatcc

SEQ ID NO: 108571 - DNA, 25 bp, Homo sapien
cattactctggcagtgggtctgaca

SEQ ID NO: 108572 - DNA, 25 bp, Homo sapien
ggaagcaaaaggatcaacatggccc

SEQ ID NO: 108573 - DNA, 25 bp, Homo sapien
catcgtgaagactaaagtgtgagcc

SEQ ID NO: 108574 - DNA, 25 bp, Homo sapien
aatgagcacattcctaatgggacac

SEQ ID NO: 108575 - DNA, 25 bp, Homo sapien
tacttgctgagagcactatttacgt

SEQ ID NO: 108576 - DNA, 25 bp, Homo sapien
agtgtccccatagctttagaagtca

SEQ ID NO: 108577 - DNA, 25 bp, Homo sapien
tctaacctcagaagacagctaattg

SEQ ID NO: 108578 - DNA, 25 bp, Homo sapien
atatcatccgccgtttcaaagcctc

SEQ ID NO: 108579 - DNA, 25 bp, Homo sapien
tccacccgtggtgcaggaactgtgt

SEQ ID NO: 108580 - DNA, 25 bp, Homo sapien
tgcaaccttgcaagatatcatccgc

SEQ ID NO: 108581 - DNA, 25 bp, Homo sapien
ctccaagtttggctccacccgtggt

SEQ ID NO: 108582 - DNA, 25 bp, Homo sapien
agtcactagattgtaccaggtcggg

SEQ ID NO: 108583 - DNA, 25 bp, Homo sapien
ggcacatggagagtcaacatagaaa

SEQ ID NO: 108584 - DNA, 25 bp, Homo sapien
gcatttatatcagggcaagggcaca

SEQ ID NO: 108585 - DNA, 25 bp, Homo sapien
gaaatactgtaaaggaccatcagtg

SEQ ID NO: 108586 - DNA, 25 bp, Homo sapien
atatcttaagtccatgctaatttgg

SEQ ID NO: 108587 - DNA, 25 bp, Homo sapien
cttaagtccatgctaatttggaatc

SEQ ID NO: 108588 - DNA, 25 bp, Homo sapien
agtccatgctaatttggaatcatta

SEQ ID NO: 108589 - DNA, 25 bp, Homo sapien
tatcttaagtccatgctaatttgga

SEQ ID NO: 108590 - DNA, 25 bp, Homo sapien
gagaagcaggaataatataggccat

SEQ ID NO: 108591 - DNA, 25 bp, Homo sapien
acgccatttcgttacagcagccacg

SEQ ID NO: 108592 - DNA, 25 bp, Homo sapien
aaacgccatttcgttacagcagcca

SEQ ID NO: 108593 - DNA, 25 bp, Homo sapien
cagccacggggaagcagtggatgag

SEQ ID NO: 108594 - DNA, 25 bp, Homo sapien
ggttccctgtgctaaggccctggtg

SEQ ID NO: 108595 - DNA, 25 bp, Homo sapien
gccctggtggcagtagccagtggag

SEQ ID NO: 108596 - DNA, 25 bp, Homo sapien
ttggtcaatggctgccctgcgcctc

SEQ ID NO: 108597 - DNA, 25 bp, Homo sapien
tagccttgatacctctcccttgggt

SEQ ID NO: 108598 - DNA, 25 bp, Homo sapien
tgggccgtggtagactcatagttcc

SEQ ID NO: 108599 - DNA, 25 bp, Homo sapien
cctaatttatggaatgggtgctatc

SEQ ID NO: 108600 - DNA, 25 bp, Homo sapien
ttggctacagaaaaactgttgcagg

SEQ ID NO: 108601 - DNA, 25 bp, Homo sapien
caatgagactcaatggctgggccgt

SEQ ID NO: 108602 - DNA, 25 bp, Homo sapien
gataccacgccttaaaaattgacag

SEQ ID NO: 108603 - DNA, 25 bp, Homo sapien
cacagcctaattttctggagtagtc

SEQ ID NO: 108604 - DNA, 25 bp, Homo sapien
aaaaagagtgaccagagggcaaagg

SEQ ID NO: 108605 - DNA, 25 bp, Homo sapien
gagatcttgagttgcagtccacagc

SEQ ID NO: 108606 - DNA, 25 bp, Homo sapien
caatagcctaaggatgtgccgtgga

SEQ ID NO: 108607 - DNA, 25 bp, Homo sapien
tgcagtctttacacccacagctctg

SEQ ID NO: 108608 - DNA, 25 bp, Homo sapien
taaccaacaaaggacctagacagcc

SEQ ID NO: 108609 - DNA, 25 bp, Homo sapien
ctgttcttacctccgcctgcgagag

SEQ ID NO: 108610 - DNA, 25 bp, Homo sapien
ggcaatcatctatgcgaccccagaa

SEQ ID NO: 108611 - DNA, 25 bp, Homo sapien
aagtgctgtctctgcgaatctgtcc

SEQ ID NO: 108612 - DNA, 25 bp, Homo sapien
tggacaagtaataagggaagtgctg

SEQ ID NO: 108613 - DNA, 25 bp, Homo sapien
ctctatctgaaaaccaaggcctgtg

SEQ ID NO: 108614 - DNA, 25 bp, Homo sapien
caatgcaccgggtgagctgagctcc

SEQ ID NO: 108615 - DNA, 25 bp, Homo sapien
tgcattcctctttacagtctctcaa

SEQ ID NO: 108616 - DNA, 25 bp, Homo sapien
actttgatttccgatcctcacccca

SEQ ID NO: 108617 - DNA, 25 bp, Homo sapien
gcatctctgaaacgcgtgtcttgtt

SEQ ID NO: 108618 - DNA, 25 bp, Homo sapien
aaagcattcacagcaccaagagata

SEQ ID NO: 108619 - DNA, 25 bp, Homo sapien
tgaggtacggaagggtatacccaga

SEQ ID NO: 108620 - DNA, 25 bp, Homo sapien
cacattgcctcaaccaagcatttgg

SEQ ID NO: 108621 - DNA, 25 bp, Homo sapien
gggatagagcgagaatctgcaccct

SEQ ID NO: 108622 - DNA, 25 bp, Homo sapien
tgttgacattcagcggtttcaaagt

SEQ ID NO: 108623 - DNA, 25 bp, Homo sapien
cattcagcggtttcaaagttgactt

SEQ ID NO: 108624 - DNA, 25 bp, Homo sapien
tttgttgacattcagcggtttcaaa

SEQ ID NO: 108625 - DNA, 25 bp, Homo sapien
cagcggtttcaaagttgacttctta

SEQ ID NO: 108626 - DNA, 25 bp, Homo sapien
tctttggataaaaatgtccgctgcc

SEQ ID NO: 108627 - DNA, 25 bp, Homo sapien
tcagaacattaacgtggagtaggcg

SEQ ID NO: 108628 - DNA, 25 bp, Homo sapien
tagggtagacaaacttggagatgca

SEQ ID NO: 108629 - DNA, 25 bp, Homo sapien
gctaaggtcccagttagcggcaaat

SEQ ID NO: 108630 - DNA, 25 bp, Homo sapien
catctgataagaccactgataagac

SEQ ID NO: 108631 - DNA, 25 bp, Homo sapien
gcttcaggtttacttggttgctcaa

SEQ ID NO: 108632 - DNA, 25 bp, Homo sapien
gatactgatgatgagaccactggct

SEQ ID NO: 108633 - DNA, 25 bp, Homo sapien
tgttgattcaagttcaggatactga

SEQ ID NO: 108634 - DNA, 25 bp, Homo sapien
attgagggcaggaagtaaagaataa

SEQ ID NO: 108635 - DNA, 25 bp, Homo sapien
tgagggcaggaagtaaagaataatt

SEQ ID NO: 108636 - DNA, 25 bp, Homo sapien
gaagtaaagaataatttatgaattc

SEQ ID NO: 108637 - DNA, 25 bp, Homo sapien
gtaaagaataatttatgaattccat

SEQ ID NO: 108638 - DNA, 25 bp, Homo sapien
ctttgccccaaagatcaatctattg

SEQ ID NO: 108639 - DNA, 25 bp, Homo sapien
ttaacattggctttcgatagacatt

SEQ ID NO: 108640 - DNA, 25 bp, Homo sapien
gctttcgatagacattacctttgcc

SEQ ID NO: 108641 - DNA, 25 bp, Homo sapien
tgccccaaagatcaatctattggta

SEQ ID NO: 108642 - DNA, 25 bp, Homo sapien
caggaaactttttgcaagtatcatc

SEQ ID NO: 108643 - DNA, 25 bp, Homo sapien
tgcaggaaactttttgcaagtatca

SEQ ID NO: 108644 - DNA, 25 bp, Homo sapien
ttgcaggaaactttttgcaagtatc

SEQ ID NO: 108645 - DNA, 25 bp, Homo sapien
gcaggaaactttttgcaagtatcat

SEQ ID NO: 108646 - DNA, 25 bp, Homo sapien
cactagttttcaactggccagatta

SEQ ID NO: 108647 - DNA, 25 bp, Homo sapien
ctcttgcggccaggatttaagacca

SEQ ID NO: 108648 - DNA, 25 bp, Homo sapien
aaaacatctggttgaaattcactag

SEQ ID NO: 108649 - DNA, 25 bp, Homo sapien
caatagtcactgaatcagggctggg

SEQ ID NO: 108650 - DNA, 25 bp, Homo sapien
gcatccgaacaggaatgaccaccat

SEQ ID NO: 108651 - DNA, 25 bp, Homo sapien
tctcaacatctgcatccgaacagga

SEQ ID NO: 108652 - DNA, 25 bp, Homo sapien
caacatctgcatccgaacaggaatg

SEQ ID NO: 108653 - DNA, 25 bp, Homo sapien
tctgcatccgaacaggaatgaccac

SEQ ID NO: 108654 - DNA, 25 bp, Homo sapien
tctggcaagagatgtctccattcat

SEQ ID NO: 108655 - DNA, 25 bp, Homo sapien
attaatcttgagtccataatgttac

SEQ ID NO: 108656 - DNA, 25 bp, Homo sapien
tattctattctgcacatgttgtccc

SEQ ID NO: 108657 - DNA, 25 bp, Homo sapien
tgttctttgtcgctcccaactctgg

SEQ ID NO: 108658 - DNA, 25 bp, Homo sapien
tatacaggtgctatcaaaagctaca

SEQ ID NO: 108659 - DNA, 25 bp, Homo sapien
agctacaggtatggccttggtatcc

SEQ ID NO: 108660 - DNA, 25 bp, Homo sapien
ggcacttagttcctatacaggtgct

SEQ ID NO: 108661 - DNA, 25 bp, Homo sapien
ttcgctgatggctttttactcctaa

SEQ ID NO: 108662 - DNA, 25 bp, Homo sapien
tataagtttcaccatccaaatcttc

SEQ ID NO: 108663 - DNA, 25 bp, Homo sapien
ccagagcccccaagtttctctataa

SEQ ID NO: 108664 - DNA, 25 bp, Homo sapien
agagcccccaagtttctctataagt

SEQ ID NO: 108665 - DNA, 25 bp, Homo sapien
caagtttctctataagtttcaccat

SEQ ID NO: 108666 - DNA, 25 bp, Homo sapien
ccttgttgtcttagtaaaaggactg

SEQ ID NO: 108667 - DNA, 25 bp, Homo sapien
ttctgatgtgcccttttactctttt

SEQ ID NO: 108668 - DNA, 25 bp, Homo sapien
atatcatgcaataaaccaattctga

SEQ ID NO: 108669 - DNA, 25 bp, Homo sapien
ataggatttgttaagttctctgata

SEQ ID NO: 108670 - DNA, 25 bp, Homo sapien
ctggctttgccatcaagtactccat

SEQ ID NO: 108671 - DNA, 25 bp, Homo sapien
gaggaaccagtctgaacctcagtgc

SEQ ID NO: 108672 - DNA, 25 bp, Homo sapien
gccaggaattgaattacaaagccat

SEQ ID NO: 108673 - DNA, 25 bp, Homo sapien
tgaagagccacatgctttgtggaga

SEQ ID NO: 108674 - DNA, 25 bp, Homo sapien
aagtgtttctccatgcatgtccttg

SEQ ID NO: 108675 - DNA, 25 bp, Homo sapien
gccagtcctagaacatgcaactctt

SEQ ID NO: 108676 - DNA, 25 bp, Homo sapien
gatgaccagatttggcagttaccag

SEQ ID NO: 108677 - DNA, 25 bp, Homo sapien
tgcaactctttgatgaccagatttg

SEQ ID NO: 108678 - DNA, 25 bp, Homo sapien
caaagggacaaccacaactccagtg

SEQ ID NO: 108679 - DNA, 25 bp, Homo sapien
ctcccggatttatgtcctgtcctcc

SEQ ID NO: 108680 - DNA, 25 bp, Homo sapien
taatcacaccctcggtacatttcac

SEQ ID NO: 108681 - DNA, 25 bp, Homo sapien
tgtcctccagctatgaagaacaccc

SEQ ID NO: 108682 - DNA, 25 bp, Homo sapien
gggaggaaccgtgttgagcatctgc

SEQ ID NO: 108683 - DNA, 25 bp, Homo sapien
ctgcagcagtaagttaattgtctgt

SEQ ID NO: 108684 - DNA, 25 bp, Homo sapien
tctgcagcagtaagttaattgtctg

SEQ ID NO: 108685 - DNA, 25 bp, Homo sapien
ttaatccatcctctgggacaattgg

SEQ ID NO: 108686 - DNA, 25 bp, Homo sapien
ctctgggacaattgggttgcttttt

SEQ ID NO: 108687 - DNA, 25 bp, Homo sapien
tcctctgggacaattgggttgcttt

SEQ ID NO: 108688 - DNA, 25 bp, Homo sapien
aatccatcctctgggacaattgggt

SEQ ID NO: 108689 - DNA, 25 bp, Homo sapien
acagaaaagcggctgcttctaccgc

SEQ ID NO: 108690 - DNA, 25 bp, Homo sapien
gacagaaaagcggctgcttctaccg

SEQ ID NO: 108691 - DNA, 25 bp, Homo sapien
cgaggagcgcctgtctagaggactc

SEQ ID NO: 108692 - DNA, 25 bp, Homo sapien
ccagtgagtggtgaagtcgggaaag

SEQ ID NO: 108693 - DNA, 25 bp, Homo sapien
aggactctcaatgcgcatgacaggg

SEQ ID NO: 108694 - DNA, 25 bp, Homo sapien
gagggaagaacgactctccgcaatg

SEQ ID NO: 108695 - DNA, 25 bp, Homo sapien
ccacctcacagggagcgcggtcgca

SEQ ID NO: 108696 - DNA, 25 bp, Homo sapien
tcacagggagcgcggtcgcagctcc

SEQ ID NO: 108697 - DNA, 25 bp, Homo sapien
agggagcgcggtcgcagctcccact

SEQ ID NO: 108698 - DNA, 25 bp, Homo sapien
acctcacagggagcgcggtcgcagc

SEQ ID NO: 108699 - DNA, 25 bp, Homo sapien
tctcgtccgtgatgacgcgaacgtt

SEQ ID NO: 108700 - DNA, 25 bp, Homo sapien
tgatgacgcgaacgttgctccgccg

SEQ ID NO: 108701 - DNA, 25 bp, Homo sapien
ctctccagttctcgtccgtgatgac

SEQ ID NO: 108702 - DNA, 25 bp, Homo sapien
cagttctcgtccgtgatgacgcgaa

SEQ ID NO: 108703 - DNA, 25 bp, Homo sapien
cccagaagaaacttaacattcacgg

SEQ ID NO: 108704 - DNA, 25 bp, Homo sapien
tcgctccgcaactcggaggcgcagt

SEQ ID NO: 108705 - DNA, 25 bp, Homo sapien
aacattcacgggtaagagacgaggg

SEQ ID NO: 108706 - DNA, 25 bp, Homo sapien
gggacgctcgctccgcaactcggag

SEQ ID NO: 108707 - DNA, 25 bp, Homo sapien
tttcgcaatattaacctcaagatct

SEQ ID NO: 108708 - DNA, 25 bp, Homo sapien
caatattaacctcaagatcttctcc

SEQ ID NO: 108709 - DNA, 25 bp, Homo sapien
tcgcaatattaacctcaagatcttc

SEQ ID NO: 108710 - DNA, 25 bp, Homo sapien
tctactttcgcaatattaacctcaa

SEQ ID NO: 108711 - DNA, 25 bp, Homo sapien
cacaaccagggaatctccattttgc

SEQ ID NO: 108712 - DNA, 25 bp, Homo sapien
tacacaaccagggaatctccatttt

SEQ ID NO: 108713 - DNA, 25 bp, Homo sapien
gacaagtcaggttaactagctgcag

SEQ ID NO: 108714 - DNA, 25 bp, Homo sapien
atacacaaccagggaatctccattt

SEQ ID NO: 108715 - DNA, 25 bp, Homo sapien
agcagttatgataaaccgtccactc

SEQ ID NO: 108716 - DNA, 25 bp, Homo sapien
gttatgataaaccgtccactcagtc

SEQ ID NO: 108717 - DNA, 25 bp, Homo sapien
cagttatgataaaccgtccactcag

SEQ ID NO: 108718 - DNA, 25 bp, Homo sapien
gcagttatgataaaccgtccactca

SEQ ID NO: 108719 - DNA, 25 bp, Homo sapien
gcatccttctccataatttagaatc

SEQ ID NO: 108720 - DNA, 25 bp, Homo sapien
caagccagaggcctactacttctga

SEQ ID NO: 108721 - DNA, 25 bp, Homo sapien
agaggcctactacttctgattacac

SEQ ID NO: 108722 - DNA, 25 bp, Homo sapien
gattacactataatgcatccttctc

SEQ ID NO: 108723 - DNA, 25 bp, Homo sapien
gacttaacacgctgaacaggatcac

SEQ ID NO: 108724 - DNA, 25 bp, Homo sapien
tactctacccaaggctgtacaacag

SEQ ID NO: 108725 - DNA, 25 bp, Homo sapien
gataacactaagcaaaacaagccct

SEQ ID NO: 108726 - DNA, 25 bp, Homo sapien
tctgggaaccaatccaggtaactgt

SEQ ID NO: 108727 - DNA, 25 bp, Homo sapien
gtccttggaccctgatagcgcctaa

SEQ ID NO: 108728 - DNA, 25 bp, Homo sapien
tccttggaccctgatagcgcctaaa

SEQ ID NO: 108729 - DNA, 25 bp, Homo sapien
tggaccctgatagcgcctaaattca

SEQ ID NO: 108730 - DNA, 25 bp, Homo sapien
ccctgatagcgcctaaattcaccat

SEQ ID NO: 108731 - DNA, 25 bp, Homo sapien
cctgatccacatagatagctgaaag

SEQ ID NO: 108732 - DNA, 25 bp, Homo sapien
cacatagatagctgaaagagtgctg

SEQ ID NO: 108733 - DNA, 25 bp, Homo sapien
tccacatagatagctgaaagagtgc

SEQ ID NO: 108734 - DNA, 25 bp, Homo sapien
aaagagtgctgacatactactcatc

SEQ ID NO: 108735 - DNA, 25 bp, Homo sapien
tggcaatccaaggtcttcaataaag

SEQ ID NO: 108736 - DNA, 25 bp, Homo sapien
caaggtcttcaataaagtagttatg

SEQ ID NO: 108737 - DNA, 25 bp, Homo sapien
aacagtatatgatccccacactggc

SEQ ID NO: 108738 - DNA, 25 bp, Homo sapien
ccacactggcaatccaaggtcttca

SEQ ID NO: 108739 - DNA, 25 bp, Homo sapien
tcctaataacagtccggaaaacaga

SEQ ID NO: 108740 - DNA, 25 bp, Homo sapien
aataacagtccggaaaacagagttg

SEQ ID NO: 108741 - DNA, 25 bp, Homo sapien
cctaataacagtccggaaaacagag

SEQ ID NO: 108742 - DNA, 25 bp, Homo sapien
ctaataacagtccggaaaacagagt

SEQ ID NO: 108743 - DNA, 25 bp, Homo sapien
tgtggtctgcgcctttttgaaggac

SEQ ID NO: 108744 - DNA, 25 bp, Homo sapien
tctgcgcctttttgaaggacaaagg

SEQ ID NO: 108745 - DNA, 25 bp, Homo sapien
ggtacggctgtggtctgcgcctttt

SEQ ID NO: 108746 - DNA, 25 bp, Homo sapien
aagggtatgggtacggctgtggtct

SEQ ID NO: 108747 - DNA, 25 bp, Homo sapien
gacctcagacttcatccctacataa

SEQ ID NO: 108748 - DNA, 25 bp, Homo sapien
tgcttaacagtagattgagttgggt

SEQ ID NO: 108749 - DNA, 25 bp, Homo sapien
aatcatgtgttccattacggaaggg

SEQ ID NO: 108750 - DNA, 25 bp, Homo sapien
ttagcaaccctagcaactcaaaatc

SEQ ID NO: 108751 - DNA, 25 bp, Homo sapien
aatgatggacccagagagcgttgtc

SEQ ID NO: 108752 - DNA, 25 bp, Homo sapien
gagcgttgtcttatggcattctgtg

SEQ ID NO: 108753 - DNA, 25 bp, Homo sapien
ctaggatttatctgtggccaatgat

SEQ ID NO: 108754 - DNA, 25 bp, Homo sapien
agagagcgttgtcttatggcattct

SEQ ID NO: 108755 - DNA, 25 bp, Homo sapien
tacctcaataatgcaatacttggga

SEQ ID NO: 108756 - DNA, 25 bp, Homo sapien
gaactatttaaaccatcatactgtg

SEQ ID NO: 108757 - DNA, 25 bp, Homo sapien
caatctagactgaaccctgcaatat

SEQ ID NO: 108758 - DNA, 25 bp, Homo sapien
acataaatcttattgcttggcacga

SEQ ID NO: 108759 - DNA, 25 bp, Homo sapien
tcttgagacaatgggcaaacttccc

SEQ ID NO: 108760 - DNA, 25 bp, Homo sapien
ggatctctcagtaaacttcagtttg

SEQ ID NO: 108761 - DNA, 25 bp, Homo sapien
cacacaatattaccagtcaggaaag

SEQ ID NO: 108762 - DNA, 25 bp, Homo sapien
taaaaagaccacgaaattgtcactg

SEQ ID NO: 108763 - DNA, 25 bp, Homo sapien
tggcccagaattctccaggatatta

SEQ ID NO: 108764 - DNA, 25 bp, Homo sapien
taatcccaaagtttctataagcctg

SEQ ID NO: 108765 - DNA, 25 bp, Homo sapien
cagtgacaatctttaagaaccgtga

SEQ ID NO: 108766 - DNA, 25 bp, Homo sapien
tcaagaccctatctgttcagccaac

SEQ ID NO: 108767 - DNA, 25 bp, Homo sapien
gaactctaccttaaattgaccatgg

SEQ ID NO: 108768 - DNA, 25 bp, Homo sapien
tgcaataaccaacatcacgagactg

SEQ ID NO: 108769 - DNA, 25 bp, Homo sapien
ggctgaataaggacgaaactgatga

SEQ ID NO: 108770 - DNA, 25 bp, Homo sapien
cacgagactgcaaatactgaataat

SEQ ID NO: 108771 - DNA, 25 bp, Homo sapien
ttgctagataagcagtaccaacata

SEQ ID NO: 108772 - DNA, 25 bp, Homo sapien
gttgctagataagcagtaccaacat

SEQ ID NO: 108773 - DNA, 25 bp, Homo sapien
agttgctagataagcagtaccaaca

SEQ ID NO: 108774 - DNA, 25 bp, Homo sapien
aagttgctagataagcagtaccaac

SEQ ID NO: 108775 - DNA, 25 bp, Homo sapien
tggttcatttatgcgaggaagaaaa

SEQ ID NO: 108776 - DNA, 25 bp, Homo sapien
aacagctgcctaacaacttaaacca

SEQ ID NO: 108777 - DNA, 25 bp, Homo sapien
gctgcctaacaacttaaaccaattg

SEQ ID NO: 108778 - DNA, 25 bp, Homo sapien
cagccctattgttagtttttgacaa

SEQ ID NO: 108779 - DNA, 25 bp, Homo sapien
cacatcacacaggattgtagtaagg

SEQ ID NO: 108780 - DNA, 25 bp, Homo sapien
aatgggaatgatcataatacacatc

SEQ ID NO: 108781 - DNA, 25 bp, Homo sapien
ttgaaaaattgctttggattcaagt

SEQ ID NO: 108782 - DNA, 25 bp, Homo sapien
acctgcttctcttgctcattgttga

SEQ ID NO: 108783 - DNA, 25 bp, Homo sapien
caggccagggcacttttgaataatc

SEQ ID NO: 108784 - DNA, 25 bp, Homo sapien
cctggacattagaggagtagctcac

SEQ ID NO: 108785 - DNA, 25 bp, Homo sapien
gcaatagcctcccttggtgttcagg

SEQ ID NO: 108786 - DNA, 25 bp, Homo sapien
catggttagtcccacccaagtacaa

SEQ ID NO: 108787 - DNA, 25 bp, Homo sapien
tctaagtaggccagtcacaagtaag

SEQ ID NO: 108788 - DNA, 25 bp, Homo sapien
gaaacagcacagtgaattgacccct

SEQ ID NO: 108789 - DNA, 25 bp, Homo sapien
tatgaggatgccaaagtaagtccca

SEQ ID NO: 108790 - DNA, 25 bp, Homo sapien
tgccagcacgtcctatggaaagtga

SEQ ID NO: 108791 - DNA, 25 bp, Homo sapien
tgttgaaaaactggttctcactttc

SEQ ID NO: 108792 - DNA, 25 bp, Homo sapien
cacaataagtctgtgcaatgtgttt

SEQ ID NO: 108793 - DNA, 25 bp, Homo sapien
cacccggggttcacaataagtctgt

SEQ ID NO: 108794 - DNA, 25 bp, Homo sapien
tctcttcctccgatgcttgattcca

SEQ ID NO: 108795 - DNA, 25 bp, Homo sapien
caattctgtaaaagtagtgacaatc

SEQ ID NO: 108796 - DNA, 25 bp, Homo sapien
tcccaacactgttcaataaccatca

SEQ ID NO: 108797 - DNA, 25 bp, Homo sapien
tccccacaatgtgcccactctgcac

SEQ ID NO: 108798 - DNA, 25 bp, Homo sapien
ccaacttcaatttgtgcatcttcaa

SEQ ID NO: 108799 - DNA, 25 bp, Homo sapien
tgcagatggtccctgagggcacagc

SEQ ID NO: 108800 - DNA, 25 bp, Homo sapien
cagatggtccctgagggcacagctc

SEQ ID NO: 108801 - DNA, 25 bp, Homo sapien
gcagatggtccctgagggcacagct

SEQ ID NO: 108802 - DNA, 25 bp, Homo sapien
ctgcagatggtccctgagggcacag

SEQ ID NO: 108803 - DNA, 25 bp, Homo sapien
tccagcatcctccagattctggctt

SEQ ID NO: 108804 - DNA, 25 bp, Homo sapien
gcttgctttgaatgcccataattgg

SEQ ID NO: 108805 - DNA, 25 bp, Homo sapien
tttgttgccagcagccaacactggc

SEQ ID NO: 108806 - DNA, 25 bp, Homo sapien
cactggcagcgaaagatggcttaaa

SEQ ID NO: 108807 - DNA, 25 bp, Homo sapien
tcactacgtcatggccaaaaggaga

SEQ ID NO: 108808 - DNA, 25 bp, Homo sapien
tataggtcaggagttgaggcacagc

SEQ ID NO: 108809 - DNA, 25 bp, Homo sapien
cattagctccaacaacactcaaggg

SEQ ID NO: 108810 - DNA, 25 bp, Homo sapien
tagcaataacataaccacggaagtg

SEQ ID NO: 108811 - DNA, 25 bp, Homo sapien
tggtctggcatcctgacagcaaatg

SEQ ID NO: 108812 - DNA, 25 bp, Homo sapien
agcaaatgtcgatttccttatgaag

SEQ ID NO: 108813 - DNA, 25 bp, Homo sapien
caggagcatcccctcacatatgggg

SEQ ID NO: 108814 - DNA, 25 bp, Homo sapien
ccagttccacatgctggacaggaag

SEQ ID NO: 108815 - DNA, 25 bp, Homo sapien
tgcactccagcctagggacacagca

SEQ ID NO: 108816 - DNA, 25 bp, Homo sapien
ctggcataattgagactgcaccact

SEQ ID NO: 108817 - DNA, 25 bp, Homo sapien
cactccagcctagggacacagcaag

SEQ ID NO: 108818 - DNA, 25 bp, Homo sapien
actgcactccagcctagggacacag

SEQ ID NO: 108819 - DNA, 25 bp, Homo sapien
tatcttttacttggacctcagagcc

SEQ ID NO: 108820 - DNA, 25 bp, Homo sapien
gagttggttgcaaatattatctttt

SEQ ID NO: 108821 - DNA, 25 bp, Homo sapien
gaaaagagttttgatggtcaactcc

SEQ ID NO: 108822 - DNA, 25 bp, Homo sapien
caactccagtgagttggttgcaaat

SEQ ID NO: 108823 - DNA, 25 bp, Homo sapien
tctgcctcagataatgaaggagacc

SEQ ID NO: 108824 - DNA, 25 bp, Homo sapien
tgtacatgggaagattgtcatatct

SEQ ID NO: 108825 - DNA, 25 bp, Homo sapien
gatgtacatgggaagattgtcatat

SEQ ID NO: 108826 - DNA, 25 bp, Homo sapien
cctcagataatgaaggagaccttac

SEQ ID NO: 108827 - DNA, 25 bp, Homo sapien
tattttctgcgatgcctgagtgtgc

SEQ ID NO: 108828 - DNA, 25 bp, Homo sapien
catctagattattcatcaagtgagg

SEQ ID NO: 108829 - DNA, 25 bp, Homo sapien
caagtgagggattccacaatacata

SEQ ID NO: 108830 - DNA, 25 bp, Homo sapien
ctgaaagccaaaatagtgccacatt

SEQ ID NO: 108831 - DNA, 25 bp, Homo sapien
aatttccaccaacccaagctcagta

SEQ ID NO: 108832 - DNA, 25 bp, Homo sapien
tccaccaacccaagctcagtattca

SEQ ID NO: 108833 - DNA, 25 bp, Homo sapien
caatttccaccaacccaagctcagt

SEQ ID NO: 108834 - DNA, 25 bp, Homo sapien
tttccaccaacccaagctcagtatt

SEQ ID NO: 108835 - DNA, 25 bp, Homo sapien
tgctgagagtgattaacaaccaaag

SEQ ID NO: 108836 - DNA, 25 bp, Homo sapien
tggattaggctgcaaagcgcaaagg

SEQ ID NO: 108837 - DNA, 25 bp, Homo sapien
gacgcgtgtctcgttcagcagttgg

SEQ ID NO: 108838 - DNA, 25 bp, Homo sapien
caaccaaagccatgaagactcggag

SEQ ID NO: 108839 - DNA, 25 bp, Homo sapien
tcctgagccgccgaaggcgtgtgga

SEQ ID NO: 108840 - DNA, 25 bp, Homo sapien
tctccactagtttggggacgttgcc

SEQ ID NO: 108841 - DNA, 25 bp, Homo sapien
cgagaagatccgcaagatgaagaag

SEQ ID NO: 108842 - DNA, 25 bp, Homo sapien
ggccctgcgttgcccagaggtgcca

SEQ ID NO: 108843 - DNA, 25 bp, Homo sapien
gctgcaatgggctcatctacactgg

SEQ ID NO: 108844 - DNA, 25 bp, Homo sapien
tacgtatgggaacaatgacaggaag

SEQ ID NO: 108845 - DNA, 25 bp, Homo sapien
tatgagaggctggtacacaaaggct

SEQ ID NO: 108846 - DNA, 25 bp, Homo sapien
acagtgacaagacggttggtaggca

SEQ ID NO: 108847 - DNA, 25 bp, Homo sapien
tgtccactgggcacaataggcccag

SEQ ID NO: 108848 - DNA, 25 bp, Homo sapien
tcctgctcaccatcgtaggcccttg

SEQ ID NO: 108849 - DNA, 25 bp, Homo sapien
tgaccttggctgtaggctcagttcc

SEQ ID NO: 108850 - DNA, 25 bp, Homo sapien
tcactctcagaaacctcaaaatgcc

SEQ ID NO: 108851 - DNA, 25 bp, Homo sapien
gcaccattgaactgggtggagagcc

SEQ ID NO: 108852 - DNA, 25 bp, Homo sapien
aaattaagttcctgcttgtggtcca

SEQ ID NO: 108853 - DNA, 25 bp, Homo sapien
gagccttccacatgatgattcaggg

SEQ ID NO: 108854 - DNA, 25 bp, Homo sapien
cagtcagagtgggatccatttttta

SEQ ID NO: 108855 - DNA, 25 bp, Homo sapien
cggtcattggctgttcccccagact

SEQ ID NO: 108856 - DNA, 25 bp, Homo sapien
tcattggctgttcccccagactttc

SEQ ID NO: 108857 - DNA, 25 bp, Homo sapien
ttggctgttcccccagactttccat

SEQ ID NO: 108858 - DNA, 25 bp, Homo sapien
ggtcattggctgttcccccagactt

SEQ ID NO: 108859 - DNA, 25 bp, Homo sapien
agcctactgcccatttgattttttc

SEQ ID NO: 108860 - DNA, 25 bp, Homo sapien
gctgctagcataagaggaaccagaa

SEQ ID NO: 108861 - DNA, 25 bp, Homo sapien
gaggaaccagaagcctactgcccat

SEQ ID NO: 108862 - DNA, 25 bp, Homo sapien
cttcttgtcagctgctagcataaga

SEQ ID NO: 108863 - DNA, 25 bp, Homo sapien
ttccagactccaggactcggttcat

SEQ ID NO: 108864 - DNA, 25 bp, Homo sapien
tttccagactccaggactcggttca

SEQ ID NO: 108865 - DNA, 25 bp, Homo sapien
ttttccagactccaggactcggttc

SEQ ID NO: 108866 - DNA, 25 bp, Homo sapien
gcaccatcaattggccatttctcac

SEQ ID NO: 108867 - DNA, 25 bp, Homo sapien
cttccagcaccatcaattggccatt

SEQ ID NO: 108868 - DNA, 25 bp, Homo sapien
agcaccatcaattggccatttctca

SEQ ID NO: 108869 - DNA, 25 bp, Homo sapien
tccagcaccatcaattggccatttc

SEQ ID NO: 108870 - DNA, 25 bp, Homo sapien
ttatgtgaccaaacagacacgtttt

SEQ ID NO: 108871 - DNA, 25 bp, Homo sapien
gacacgtttttgacacaggttggac

SEQ ID NO: 108872 - DNA, 25 bp, Homo sapien
tctgcaccaacttgcttgacctgaa

SEQ ID NO: 108873 - DNA, 25 bp, Homo sapien
gaagggcaacatcaggcagcattta

SEQ ID NO: 108874 - DNA, 25 bp, Homo sapien
aacttcaggcagctgcgttccgtgg

SEQ ID NO: 108875 - DNA, 25 bp, Homo sapien
tccgtggctgtacagctccgtggca

SEQ ID NO: 108876 - DNA, 25 bp, Homo sapien
caggagcccacagattatcacgata

SEQ ID NO: 108877 - DNA, 25 bp, Homo sapien
gacgtgtctgtgtggtatgtgccaa

SEQ ID NO: 108878 - DNA, 25 bp, Homo sapien
ttaggatgggcattccagagaaccc

SEQ ID NO: 108879 - DNA, 25 bp, Homo sapien
ttagcaagttgaatactcctacggg

SEQ ID NO: 108880 - DNA, 25 bp, Homo sapien
gagaacccatccaagatatcacctg

SEQ ID NO: 108881 - DNA, 25 bp, Homo sapien
cattcgagccctgttgacattagca

SEQ ID NO: 108882 - DNA, 25 bp, Homo sapien
tcaagcatgaactgactcagctccc

SEQ ID NO: 108883 - DNA, 25 bp, Homo sapien
atttggttcgttataacctctccag

SEQ ID NO: 108884 - DNA, 25 bp, Homo sapien
ttagtgctcaagcatgaactgactc

SEQ ID NO: 108885 - DNA, 25 bp, Homo sapien
ttctgctcttgctgccaactccctc

SEQ ID NO: 108886 - DNA, 25 bp, Homo sapien
ctgcagaagtcaatgtcttctctgg

SEQ ID NO: 108887 - DNA, 25 bp, Homo sapien
tgcagaagtcaatgtcttctctggt

SEQ ID NO: 108888 - DNA, 25 bp, Homo sapien
tacggagtttgttatatttctgttc

SEQ ID NO: 108889 - DNA, 25 bp, Homo sapien
cggagtttgttatatttctgttcta

SEQ ID NO: 108890 - DNA, 25 bp, Homo sapien
ggagtttgttatatttctgttctac

SEQ ID NO: 108891 - DNA, 25 bp, Homo sapien
atttacggagtttgttatatttctg

SEQ ID NO: 108892 - DNA, 25 bp, Homo sapien
cagcaatttgatttaatgtcatcaa

SEQ ID NO: 108893 - DNA, 25 bp, Homo sapien
tcatcaaattccatcacttcgactc

SEQ ID NO: 108894 - DNA, 25 bp, Homo sapien
gactctggtcaagtaatgcactgcc

SEQ ID NO: 108895 - DNA, 25 bp, Homo sapien
tccatcacttcgactctggtcaagt

SEQ ID NO: 108896 - DNA, 25 bp, Homo sapien
ttaacttgaatgttttgtcaaatcc

SEQ ID NO: 108897 - DNA, 25 bp, Homo sapien
ctttgaagatggatcacctctctca

SEQ ID NO: 108898 - DNA, 25 bp, Homo sapien
gactttgaagatggatcacctctct

SEQ ID NO: 108899 - DNA, 25 bp, Homo sapien
ttctttggagagaattttatttcca

SEQ ID NO: 108900 - DNA, 25 bp, Homo sapien
aaaaactctctagttccgcatgctg

SEQ ID NO: 108901 - DNA, 25 bp, Homo sapien
ctctagttccgcatgctgcttcttc

SEQ ID NO: 108902 - DNA, 25 bp, Homo sapien
tctctagttccgcatgctgcttctt

SEQ ID NO: 108903 - DNA, 25 bp, Homo sapien
aactctctagttccgcatgctgctt

SEQ ID NO: 108904 - DNA, 25 bp, Homo sapien
ttcatcatccatatcggaaaccaag

SEQ ID NO: 108905 - DNA, 25 bp, Homo sapien
ccatatcggaaaccaagtagtactg

SEQ ID NO: 108906 - DNA, 25 bp, Homo sapien
ttcatcaataccttctaatcctttc

SEQ ID NO: 108907 - DNA, 25 bp, Homo sapien
atcaataccttctaatcctttctcc

SEQ ID NO: 108908 - DNA, 25 bp, Homo sapien
gagacagactctttgcaggaacatg

SEQ ID NO: 108909 - DNA, 25 bp, Homo sapien
tgaacaactttacaccagagagctg

SEQ ID NO: 108910 - DNA, 25 bp, Homo sapien
tggtacccatgtttcccagctaggg

SEQ ID NO: 108911 - DNA, 25 bp, Homo sapien
tctatttgatggtagtggcaggcac

SEQ ID NO: 108912 - DNA, 25 bp, Homo sapien
gaaaccaatggcgaatggtacccat

SEQ ID NO: 108913 - DNA, 25 bp, Homo sapien
aaaaagcttccgcattacgcttctt

SEQ ID NO: 108914 - DNA, 25 bp, Homo sapien
taaaaagcttccgcattacgcttct

SEQ ID NO: 108915 - DNA, 25 bp, Homo sapien
aaaagcttccgcattacgcttcttc

SEQ ID NO: 108916 - DNA, 25 bp, Homo sapien
aaagcttccgcattacgcttcttct

SEQ ID NO: 108917 - DNA, 25 bp, Homo sapien
agattcctgattcctatacagtgat

SEQ ID NO: 108918 - DNA, 25 bp, Homo sapien
tgttggtgggatagttccatttatc

SEQ ID NO: 108919 - DNA, 25 bp, Homo sapien
taatttcagctattatactttaaca

SEQ ID NO: 108920 - DNA, 25 bp, Homo sapien
tcctgattcctatacagtgatgtat

SEQ ID NO: 108921 - DNA, 25 bp, Homo sapien
ggcccagaaagactgcatatccagt

SEQ ID NO: 108922 - DNA, 25 bp, Homo sapien
tatccagtgcaagctggtggagatg

SEQ ID NO: 108923 - DNA, 25 bp, Homo sapien
cagcctttggtttcataaagcacag

SEQ ID NO: 108924 - DNA, 25 bp, Homo sapien
tttttggcagccataaaccttgcca

SEQ ID NO: 108925 - DNA, 25 bp, Homo sapien
tccttggtggtaaccttccttcatg

SEQ ID NO: 108926 - DNA, 25 bp, Homo sapien
tagtctgaacaagctttttgaggct

SEQ ID NO: 108927 - DNA, 25 bp, Homo sapien
ttggtggtaaccttccttcatgcat

SEQ ID NO: 108928 - DNA, 25 bp, Homo sapien
tgcctgagatgaggtaccatgacta

SEQ ID NO: 108929 - DNA, 25 bp, Homo sapien
ttctttgtggctttggaactgttct

SEQ ID NO: 108930 - DNA, 25 bp, Homo sapien
caattcagaattgccaaagagggac

SEQ ID NO: 108931 - DNA, 25 bp, Homo sapien
tgtggctttggaactgttctgcagc

SEQ ID NO: 108932 - DNA, 25 bp, Homo sapien
tctctggaacagtgggccagctcct

SEQ ID NO: 108933 - DNA, 25 bp, Homo sapien
gcatcggctctctctggtaggcatt

SEQ ID NO: 108934 - DNA, 25 bp, Homo sapien
tgtggcttcacccactgactggcac

SEQ ID NO: 108935 - DNA, 25 bp, Homo sapien
ggcacggagcagagccctgcttcat

SEQ ID NO: 108936 - DNA, 25 bp, Homo sapien
gaggcagcgtatagaggcctccctg

SEQ ID NO: 108937 - DNA, 25 bp, Homo sapien
ccctgaagactaggcctctgctgac

SEQ ID NO: 108938 - DNA, 25 bp, Homo sapien
tggatgcaaggaactgctcctctcc

SEQ ID NO: 108939 - DNA, 25 bp, Homo sapien
ctctcctttgatcctgcaggcttca

SEQ ID NO: 108940 - DNA, 25 bp, Homo sapien
ttatccgcgtctggatgcaaggaac

SEQ ID NO: 108941 - DNA, 25 bp, Homo sapien
tttgatcctgcaggcttcacccacc

SEQ ID NO: 108942 - DNA, 25 bp, Homo sapien
cccctcaagcccagtgcttcctaag

SEQ ID NO: 108943 - DNA, 25 bp, Homo sapien
ctcaagcccagtgcttcctaagact

SEQ ID NO: 108944 - DNA, 25 bp, Homo sapien
ccctcaagcccagtgcttcctaaga

SEQ ID NO: 108945 - DNA, 25 bp, Homo sapien
gccccctcaagcccagtgcttccta

SEQ ID NO: 108946 - DNA, 25 bp, Homo sapien
ctcctttatctggcccacattccaa

SEQ ID NO: 108947 - DNA, 25 bp, Homo sapien
tcctttatctggcccacattccaag

SEQ ID NO: 108948 - DNA, 25 bp, Homo sapien
ttatctggcccacattccaaggcac

SEQ ID NO: 108949 - DNA, 25 bp, Homo sapien
ctttatctggcccacattccaaggc

SEQ ID NO: 108950 - DNA, 25 bp, Homo sapien
ccaacaccagtccaaccaaaataat

SEQ ID NO: 108951 - DNA, 25 bp, Homo sapien
aatcaggttgcagactagaacacag

SEQ ID NO: 108952 - DNA, 25 bp, Homo sapien
tcaccccaacaccagtccaaccaaa

SEQ ID NO: 108953 - DNA, 25 bp, Homo sapien
gtgcatctccgatgctccgtacgct

SEQ ID NO: 108954 - DNA, 25 bp, Homo sapien
tgtgcatctccgatgctccgtacgc

SEQ ID NO: 108955 - DNA, 25 bp, Homo sapien
tgcatctccgatgctccgtacgctt

SEQ ID NO: 108956 - DNA, 25 bp, Homo sapien
gtgtgcatctccgatgctccgtacg

SEQ ID NO: 108957 - DNA, 25 bp, Homo sapien
taggttggtcagaagctgtgacctc

SEQ ID NO: 108958 - DNA, 25 bp, Homo sapien
cattttaggttggtcagaagctgtg

SEQ ID NO: 108959 - DNA, 25 bp, Homo sapien
caggtcattttaggttggtcagaag

SEQ ID NO: 108960 - DNA, 25 bp, Homo sapien
tggccaggtcattttaggttggtca

SEQ ID NO: 108961 - DNA, 25 bp, Homo sapien
tgccttcacattcaattccaagctt

SEQ ID NO: 108962 - DNA, 25 bp, Homo sapien
aggccttctgtggttccccattgcc

SEQ ID NO: 108963 - DNA, 25 bp, Homo sapien
tccaagcttttgaatctgtctctca

SEQ ID NO: 108964 - DNA, 25 bp, Homo sapien
ctctcccatgttcaaaggccttctg

SEQ ID NO: 108965 - DNA, 25 bp, Homo sapien
tcaggtgtctcagcattaggttggg

SEQ ID NO: 108966 - DNA, 25 bp, Homo sapien
tcaaagtccacagagatttagcttg

SEQ ID NO: 108967 - DNA, 25 bp, Homo sapien
tttctgactggtaaaagaaagactg

SEQ ID NO: 108968 - DNA, 25 bp, Homo sapien
ctgctgcaatttctgactggtaaaa

SEQ ID NO: 108969 - DNA, 25 bp, Homo sapien
ttcactctgcaagccaagccctgat

SEQ ID NO: 108970 - DNA, 25 bp, Homo sapien
tagctcaactgggatgttgcaactg

SEQ ID NO: 108971 - DNA, 25 bp, Homo sapien
agccaagccctgattatagctcaac

SEQ ID NO: 108972 - DNA, 25 bp, Homo sapien
gaaaatgtggcaccagatcccaaaa

SEQ ID NO: 108973 - DNA, 25 bp, Homo sapien
gacaggttatagaaacacccatgga

SEQ ID NO: 108974 - DNA, 25 bp, Homo sapien
gttatagaaacacccatggagcact

SEQ ID NO: 108975 - DNA, 25 bp, Homo sapien
taaagacaggttatagaaacaccca

SEQ ID NO: 108976 - DNA, 25 bp, Homo sapien
ctggtaaagacaggttatagaaaca

SEQ ID NO: 108977 - DNA, 25 bp, Homo sapien
tcctgaatttcactattcccggtga

SEQ ID NO: 108978 - DNA, 25 bp, Homo sapien
ttaagaatttttgcggctttcctga

SEQ ID NO: 108979 - DNA, 25 bp, Homo sapien
tggacagattctcccactttaagaa

SEQ ID NO: 108980 - DNA, 25 bp, Homo sapien
ttctctccgagcagagatagaggga

SEQ ID NO: 108981 - DNA, 25 bp, Homo sapien
tgtccacagacacttttgagcttgg

SEQ ID NO: 108982 - DNA, 25 bp, Homo sapien
tgagcttggttaaatgcttgtaaag

SEQ ID NO: 108983 - DNA, 25 bp, Homo sapien
ctgaggacctcgcagggtataaact

SEQ ID NO: 108984 - DNA, 25 bp, Homo sapien
acttcaattacgctgtgttcttctg

SEQ ID NO: 108985 - DNA, 25 bp, Homo sapien
cagaatcgtcgaaacaaaattttca

SEQ ID NO: 108986 - DNA, 25 bp, Homo sapien
ctggaaccagaatcgtcgaaacaaa

SEQ ID NO: 108987 - DNA, 25 bp, Homo sapien
gggattgagattgggggaaagggca

SEQ ID NO: 108988 - DNA, 25 bp, Homo sapien
gccagagtggggtgctcaaggaaga

SEQ ID NO: 108989 - DNA, 25 bp, Homo sapien
ggcagactccaggcattaatcttca

SEQ ID NO: 108990 - DNA, 25 bp, Homo sapien
ctgctctcagaatggggcagactcc

SEQ ID NO: 108991 - DNA, 25 bp, Homo sapien
ctgctgctctcagaatggggcagac

SEQ ID NO: 108992 - DNA, 25 bp, Homo sapien
gcagactccaggcattaatcttcag

SEQ ID NO: 108993 - DNA, 25 bp, Homo sapien
cacagcccttgtttgtaaacaaaga

SEQ ID NO: 108994 - DNA, 25 bp, Homo sapien
acaggacacttggagagacaactca

SEQ ID NO: 108995 - DNA, 25 bp, Homo sapien
aacagcaaggaaagaacaagatgca

SEQ ID NO: 108996 - DNA, 25 bp, Homo sapien
agctgccagacctcaaagggaggca

SEQ ID NO: 108997 - DNA, 25 bp, Homo sapien
tagtggaagtcaaacatatgttcct

SEQ ID NO: 108998 - DNA, 25 bp, Homo sapien
atagtggaagtcaaacatatgttcc

SEQ ID NO: 108999 - DNA, 25 bp, Homo sapien
gcagcatagtggaagtcaaacatat

SEQ ID NO: 109000 - DNA, 25 bp, Homo sapien
gtggaagtcaaacatatgttcctgc

SEQ ID NO: 109001 - DNA, 25 bp, Homo sapien
cagctgtcgttgctgagagtcaaca

SEQ ID NO: 109002 - DNA, 25 bp, Homo sapien
tctccgctaaaggagggcaaggttc

SEQ ID NO: 109003 - DNA, 25 bp, Homo sapien
agagtcaacatctccgctaaaggag

SEQ ID NO: 109004 - DNA, 25 bp, Homo sapien
tcagctgtcgttgctgagagtcaac

SEQ ID NO: 109005 - DNA, 25 bp, Homo sapien
gggccagatgtaagcctaggacctg

SEQ ID NO: 109006 - DNA, 25 bp, Homo sapien
gaataggagcatggcgctgtgccat

SEQ ID NO: 109007 - DNA, 25 bp, Homo sapien
gatgtaagcctaggacctgagaagg

SEQ ID NO: 109008 - DNA, 25 bp, Homo sapien
ctaggacctgagaaggaataggagc

SEQ ID NO: 109009 - DNA, 25 bp, Homo sapien
ctgaaataactgtggcttgttgtta

SEQ ID NO: 109010 - DNA, 25 bp, Homo sapien
tgttagtcttgtagaagaattacat

SEQ ID NO: 109011 - DNA, 25 bp, Homo sapien
ggcttgttgttagtcttgtagaaga

SEQ ID NO: 109012 - DNA, 25 bp, Homo sapien
aagaattacatttcagcccattgct

SEQ ID NO: 109013 - DNA, 25 bp, Homo sapien
gtacctggcacatacttctagtcct

SEQ ID NO: 109014 - DNA, 25 bp, Homo sapien
tgcgttctccactggagagtacctg

SEQ ID NO: 109015 - DNA, 25 bp, Homo sapien
tacatctaattgagcggctgccccg

SEQ ID NO: 109016 - DNA, 25 bp, Homo sapien
agtgcaggcctttgtccaactgctt

SEQ ID NO: 109017 - DNA, 25 bp, Homo sapien
gatgtgtccttagactcctcgtggc

SEQ ID NO: 109018 - DNA, 25 bp, Homo sapien
tttctgtctcggattccattttgga

SEQ ID NO: 109019 - DNA, 25 bp, Homo sapien
tcctcgtggccgtggcagtttatca

SEQ ID NO: 109020 - DNA, 25 bp, Homo sapien
cattttggatgcgaatggaaattgg

SEQ ID NO: 109021 - DNA, 25 bp, Homo sapien
aaatgtgttgatgcaaggccctttg

SEQ ID NO: 109022 - DNA, 25 bp, Homo sapien
ctcaaatactcatcgctcaactcgt

SEQ ID NO: 109023 - DNA, 25 bp, Homo sapien
tcatcgctcaactcgtcttggagtt

SEQ ID NO: 109024 - DNA, 25 bp, Homo sapien
ctcaactcgtcttggagttgaagga

SEQ ID NO: 109025 - DNA, 25 bp, Homo sapien
aaggagcaattgatgccggacttgg

SEQ ID NO: 109026 - DNA, 25 bp, Homo sapien
tcaagaactttcatcttccttggct

SEQ ID NO: 109027 - DNA, 25 bp, Homo sapien
aagaactttcatcttccttggctcc

SEQ ID NO: 109028 - DNA, 25 bp, Homo sapien
catcttccttggctccacctcctct

SEQ ID NO: 109029 - DNA, 25 bp, Homo sapien
tcttccttggctccacctcctctct

SEQ ID NO: 109030 - DNA, 25 bp, Homo sapien
gtttccaaccagaagaagcttcata

SEQ ID NO: 109031 - DNA, 25 bp, Homo sapien
tttccaaccagaagaagcttcataa

SEQ ID NO: 109032 - DNA, 25 bp, Homo sapien
ccaaccagaagaagcttcataagaa

SEQ ID NO: 109033 - DNA, 25 bp, Homo sapien
tcagtatgccagcagagcaccaaaa

SEQ ID NO: 109034 - DNA, 25 bp, Homo sapien
cataagaggtgataacagggccagt

SEQ ID NO: 109035 - DNA, 25 bp, Homo sapien
cattgaaatgtcagtggtctcctca

SEQ ID NO: 109036 - DNA, 25 bp, Homo sapien
gaattccaacgccaggtcaccttat

SEQ ID NO: 109037 - DNA, 25 bp, Homo sapien
atacaaacgaccagcgtgatgttgg

SEQ ID NO: 109038 - DNA, 25 bp, Homo sapien
caccataacttgaatacaaacgacc

SEQ ID NO: 109039 - DNA, 25 bp, Homo sapien
taacttgaatacaaacgaccagcgt

SEQ ID NO: 109040 - DNA, 25 bp, Homo sapien
cttgaatacaaacgaccagcgtgat

SEQ ID NO: 109041 - DNA, 25 bp, Homo sapien
tggacatagagatttgagacacggg

SEQ ID NO: 109042 - DNA, 25 bp, Homo sapien
cgtccagtctcctgaatttaataac

SEQ ID NO: 109043 - DNA, 25 bp, Homo sapien
tcatttaaggtaagcgtccagtctc

SEQ ID NO: 109044 - DNA, 25 bp, Homo sapien
ttaataacttggacatagagatttg

SEQ ID NO: 109045 - DNA, 25 bp, Homo sapien
catcaggttacttggttagagagac

SEQ ID NO: 109046 - DNA, 25 bp, Homo sapien
ggtctgactgatacacggtgattct

SEQ ID NO: 109047 - DNA, 25 bp, Homo sapien
ttagagagacaaccagcctgtggtc

SEQ ID NO: 109048 - DNA, 25 bp, Homo sapien
tgatggtcttggtaagtagtcatct

SEQ ID NO: 109049 - DNA, 25 bp, Homo sapien
cccattaagaaatcatgcgaaatct

SEQ ID NO: 109050 - DNA, 25 bp, Homo sapien
gcattctcaaatacagctgaaagca

SEQ ID NO: 109051 - DNA, 25 bp, Homo sapien
cgtaggcagctgaatcccattaaga

SEQ ID NO: 109052 - DNA, 25 bp, Homo sapien
gaaatcatgcgaaatctctgtattc

SEQ ID NO: 109053 - DNA, 25 bp, Homo sapien
aaaggagacacggagagttccagcc

SEQ ID NO: 109054 - DNA, 25 bp, Homo sapien
gctaatctgttcatgtttataaaga

SEQ ID NO: 109055 - DNA, 25 bp, Homo sapien
aggagacacggagagttccagccat

SEQ ID NO: 109056 - DNA, 25 bp, Homo sapien
tcttgccagccatgacagaaagaaa

SEQ ID NO: 109057 - DNA, 25 bp, Homo sapien
gtctgcaataaggtagcatttgtcc

SEQ ID NO: 109058 - DNA, 25 bp, Homo sapien
tagcatttgtcccatttgggaatac

SEQ ID NO: 109059 - DNA, 25 bp, Homo sapien
actgtctgcaataaggtagcatttg

SEQ ID NO: 109060 - DNA, 25 bp, Homo sapien
ggtagcatttgtcccatttgggaat

SEQ ID NO: 109061 - DNA, 25 bp, Homo sapien
taggcatgcccgagttcagaagaca

SEQ ID NO: 109062 - DNA, 25 bp, Homo sapien
cagtcagcgtgaactgcctgggcaa

SEQ ID NO: 109063 - DNA, 25 bp, Homo sapien
tctgtcacagaaggaggtcgcatat

SEQ ID NO: 109064 - DNA, 25 bp, Homo sapien
caagggataacatgctgagggtcaa

SEQ ID NO: 109065 - DNA, 25 bp, Homo sapien
gaaagattgtccctgcctgtggcag

SEQ ID NO: 109066 - DNA, 25 bp, Homo sapien
gatatttactggaaggcgcctcctc

SEQ ID NO: 109067 - DNA, 25 bp, Homo sapien
ggaagtgatacatcttcagccccac

SEQ ID NO: 109068 - DNA, 25 bp, Homo sapien
gggcactctgcaatgcaaaacttaa

SEQ ID NO: 109069 - DNA, 25 bp, Homo sapien
ctctgttaaggaaatgctaaagtgt

SEQ ID NO: 109070 - DNA, 25 bp, Homo sapien
cagactctgttaaggaaatgctaaa

SEQ ID NO: 109071 - DNA, 25 bp, Homo sapien
gactctgttaaggaaatgctaaagt

SEQ ID NO: 109072 - DNA, 25 bp, Homo sapien
tcccagactctgttaaggaaatgct

SEQ ID NO: 109073 - DNA, 25 bp, Homo sapien
tgagccttcacactgttaacaatac

SEQ ID NO: 109074 - DNA, 25 bp, Homo sapien
ccagagatgagccttcacactgtta

SEQ ID NO: 109075 - DNA, 25 bp, Homo sapien
ctgccctggaagtagattttggtct

SEQ ID NO: 109076 - DNA, 25 bp, Homo sapien
gagatgagccttcacactgttaaca

SEQ ID NO: 109077 - DNA, 25 bp, Homo sapien
ttaaccatgagccttgagactcagc

SEQ ID NO: 109078 - DNA, 25 bp, Homo sapien
cattgcaagtggtattcacaggcca

SEQ ID NO: 109079 - DNA, 25 bp, Homo sapien
accaatgtgtccacattgcaagtgg

SEQ ID NO: 109080 - DNA, 25 bp, Homo sapien
ggccacagaagcgtcactgcttaac

SEQ ID NO: 109081 - DNA, 25 bp, Homo sapien
tcagggaatagcataaaatggcttc

SEQ ID NO: 109082 - DNA, 25 bp, Homo sapien
aggcagccttgggcgctgcactcca

SEQ ID NO: 109083 - DNA, 25 bp, Homo sapien
ttttgaatcatccttgtttccaggc

SEQ ID NO: 109084 - DNA, 25 bp, Homo sapien
ctgtcatcaggtttaatggcaaggc

SEQ ID NO: 109085 - DNA, 25 bp, Homo sapien
caacaaagcgtgcagactggaagac

SEQ ID NO: 109086 - DNA, 25 bp, Homo sapien
cgtgcagactggaagaccatccact

SEQ ID NO: 109087 - DNA, 25 bp, Homo sapien
agactggaagaccatccacttcctg

SEQ ID NO: 109088 - DNA, 25 bp, Homo sapien
aaagcccaacaaagcgtgcagactg

SEQ ID NO: 109089 - DNA, 25 bp, Homo sapien
tcacagctcgtaggctcctagctgg

SEQ ID NO: 109090 - DNA, 25 bp, Homo sapien
ctctcccaaatcaccgcagtctcct

SEQ ID NO: 109091 - DNA, 25 bp, Homo sapien
cagatcacagctcgtaggctcctag

SEQ ID NO: 109092 - DNA, 25 bp, Homo sapien
tagctggggattgcacagctccctc

SEQ ID NO: 109093 - DNA, 25 bp, Homo sapien
cagatgcaaggggttgaaccaccaa

SEQ ID NO: 109094 - DNA, 25 bp, Homo sapien
ggttcacagctactgcaagcgtggc

SEQ ID NO: 109095 - DNA, 25 bp, Homo sapien
tgaacagggaaagtgtgactgggca

SEQ ID NO: 109096 - DNA, 25 bp, Homo sapien
agatccaggctagggggaataaaca

SEQ ID NO: 109097 - DNA, 25 bp, Homo sapien
ccgatactgctccatctcttgcatt

SEQ ID NO: 109098 - DNA, 25 bp, Homo sapien
ctccatctcttgcattttctatctg

SEQ ID NO: 109099 - DNA, 25 bp, Homo sapien
catctcttgcattttctatctgggt

SEQ ID NO: 109100 - DNA, 25 bp, Homo sapien
cattttctatctgggtcacaggcat

SEQ ID NO: 109101 - DNA, 25 bp, Homo sapien
ccgttgccttctgcgacaccttgaa

SEQ ID NO: 109102 - DNA, 25 bp, Homo sapien
aatacagctgtcataaggaaaggcc

SEQ ID NO: 109103 - DNA, 25 bp, Homo sapien
aggaaaggccttgtctgttattgtc

SEQ ID NO: 109104 - DNA, 25 bp, Homo sapien
tctgcgacaccttgaatacagctgt

SEQ ID NO: 109105 - DNA, 25 bp, Homo sapien
ccatccagagaaaggctggtggagt

SEQ ID NO: 109106 - DNA, 25 bp, Homo sapien
ggactgccactgctcaacaagccaa

SEQ ID NO: 109107 - DNA, 25 bp, Homo sapien
aagacatccatccagagaaaggctg

SEQ ID NO: 109108 - DNA, 25 bp, Homo sapien
tgccactgctcaacaagccaaagac

SEQ ID NO: 109109 - DNA, 25 bp, Homo sapien
ttgtatctgcgctgataagatgcca

SEQ ID NO: 109110 - DNA, 25 bp, Homo sapien
tggtagcatgcttcttacttccaaa

SEQ ID NO: 109111 - DNA, 25 bp, Homo sapien
caactattcctagccagtggtagca

SEQ ID NO: 109112 - DNA, 25 bp, Homo sapien
tgctaattgtatctgcgctgataag

SEQ ID NO: 109113 - DNA, 25 bp, Homo sapien
gaactgaatattaggaactgtgatc

SEQ ID NO: 109114 - DNA, 25 bp, Homo sapien
aaactgggcagtttctaaggatact

SEQ ID NO: 109115 - DNA, 25 bp, Homo sapien
tttaaattagcggtactccagcact

SEQ ID NO: 109116 - DNA, 25 bp, Homo sapien
gggaaccatgccattagaactgaat

SEQ ID NO: 109117 - DNA, 25 bp, Homo sapien
gcaccaggcgttgggctctctggtc

SEQ ID NO: 109118 - DNA, 25 bp, Homo sapien
gaaagtcttgagcaccaggcgttgg

SEQ ID NO: 109119 - DNA, 25 bp, Homo sapien
ctgactcttcctaccggcgccgagc

SEQ ID NO: 109120 - DNA, 25 bp, Homo sapien
ctcggagaaagtcttgagcaccagg

SEQ ID NO: 109121 - DNA, 25 bp, Homo sapien
tgcccgacacccagagctaagggag

SEQ ID NO: 109122 - DNA, 25 bp, Homo sapien
ggagaagcgaccttaccaccggtgc

SEQ ID NO: 109123 - DNA, 25 bp, Homo sapien
agagtgagcgacctccgactcacgg

SEQ ID NO: 109124 - DNA, 25 bp, Homo sapien
gcggtgcactgccttcgctgggact

SEQ ID NO: 109125 - DNA, 25 bp, Homo sapien
agccacagcgacacagacctgggtg

SEQ ID NO: 109126 - DNA, 25 bp, Homo sapien
gggacctccgcgatgcagagaacca

SEQ ID NO: 109127 - DNA, 25 bp, Homo sapien
gctccgcagactaggcactttccgg

SEQ ID NO: 109128 - DNA, 25 bp, Homo sapien
cagagaaccagggaccgcgcacgga

SEQ ID NO: 109129 - DNA, 25 bp, Homo sapien
tttacacttacacgggtggaccgca

SEQ ID NO: 109130 - DNA, 25 bp, Homo sapien
ggaccgcagctgtccatacctgaca

SEQ ID NO: 109131 - DNA, 25 bp, Homo sapien
ggacactagctacacaactacacgg

SEQ ID NO: 109132 - DNA, 25 bp, Homo sapien
tcgtgcctttaagaaaacgcccgca

SEQ ID NO: 109133 - DNA, 25 bp, Homo sapien
caaaagggaaaacttgttgagatca

SEQ ID NO: 109134 - DNA, 25 bp, Homo sapien
ctatgctttacccataaggatacac

SEQ ID NO: 109135 - DNA, 25 bp, Homo sapien
tgtgaatgccatctgggatccaggc

SEQ ID NO: 109136 - DNA, 25 bp, Homo sapien
tctaccaaactagggcatttatgag

SEQ ID NO: 109137 - DNA, 25 bp, Homo sapien
gcacagctacagttggtagccctga

SEQ ID NO: 109138 - DNA, 25 bp, Homo sapien
atggcaaaacctgcacagctacagt

SEQ ID NO: 109139 - DNA, 25 bp, Homo sapien
ggtagccctgatcttgccttctctc

SEQ ID NO: 109140 - DNA, 25 bp, Homo sapien
ctacagttggtagccctgatcttgc

SEQ ID NO: 109141 - DNA, 25 bp, Homo sapien
gatcctgtaccttttttagctgagc

SEQ ID NO: 109142 - DNA, 25 bp, Homo sapien
tgcacaacatcagtcaccgtaagga

SEQ ID NO: 109143 - DNA, 25 bp, Homo sapien
tgagcaaaagacatgggccagtcag

SEQ ID NO: 109144 - DNA, 25 bp, Homo sapien
tgaagccatacagggaacatgagca

SEQ ID NO: 109145 - DNA, 25 bp, Homo sapien
gcacagtcctgaatacttcataaag

SEQ ID NO: 109146 - DNA, 25 bp, Homo sapien
gaacatcctatgtgatcatccttga

SEQ ID NO: 109147 - DNA, 25 bp, Homo sapien
taaccagtataaatccagtggcccc

SEQ ID NO: 109148 - DNA, 25 bp, Homo sapien
gaaattgcacaaagtattcagcaca

SEQ ID NO: 109149 - DNA, 25 bp, Homo sapien
tccccctccatattaccaaaagaga

SEQ ID NO: 109150 - DNA, 25 bp, Homo sapien
tatttactggatcatctggttgttc

SEQ ID NO: 109151 - DNA, 25 bp, Homo sapien
tctggttgttcggttcgtgcgtccc

SEQ ID NO: 109152 - DNA, 25 bp, Homo sapien
gatcatctggttgttcggttcgtgc

SEQ ID NO: 109153 - DNA, 25 bp, Homo sapien
acttcccctgaagtacacggacatt

SEQ ID NO: 109154 - DNA, 25 bp, Homo sapien
ctagatctggcggtgtgttaacttc

SEQ ID NO: 109155 - DNA, 25 bp, Homo sapien
tggcggtgtgttaacttcccctgaa

SEQ ID NO: 109156 - DNA, 25 bp, Homo sapien
tgaagtacacggacattaaaaccaa

SEQ ID NO: 109157 - DNA, 25 bp, Homo sapien
ctgcttgttcctgaagagtccttta

SEQ ID NO: 109158 - DNA, 25 bp, Homo sapien
ttcctgaagagtcctttattttgat

SEQ ID NO: 109159 - DNA, 25 bp, Homo sapien
cttgttcctgaagagtcctttattt

SEQ ID NO: 109160 - DNA, 25 bp, Homo sapien
tcctgaagagtcctttattttgata

SEQ ID NO: 109161 - DNA, 25 bp, Homo sapien
atcacggtgttcgactacgtgggtt

SEQ ID NO: 109162 - DNA, 25 bp, Homo sapien
aagcatcacggtgttcgactacgtg

SEQ ID NO: 109163 - DNA, 25 bp, Homo sapien
catcacggtgttcgactacgtgggt

SEQ ID NO: 109164 - DNA, 25 bp, Homo sapien
gcatcacggtgttcgactacgtggg

SEQ ID NO: 109165 - DNA, 25 bp, Homo sapien
gactctgttgttatgaaaattcaat

SEQ ID NO: 109166 - DNA, 25 bp, Homo sapien
tgttatgaaaattcaatttgttcat

SEQ ID NO: 109167 - DNA, 25 bp, Homo sapien
actctgttgttatgaaaattcaatt

SEQ ID NO: 109168 - DNA, 25 bp, Homo sapien
tgttgttatgaaaattcaatttgtt

SEQ ID NO: 109169 - DNA, 25 bp, Homo sapien
aatgcacacactgcggcggtcttgc

SEQ ID NO: 109170 - DNA, 25 bp, Homo sapien
gagattcatcgttgggaaggaaaat

SEQ ID NO: 109171 - DNA, 25 bp, Homo sapien
gatgttcagagattcatcgttggga

SEQ ID NO: 109172 - DNA, 25 bp, Homo sapien
ggaaaatgcacacactgcggcggtc

SEQ ID NO: 109173 - DNA, 25 bp, Homo sapien
agatcacatgagatcaggcaacatt

SEQ ID NO: 109174 - DNA, 25 bp, Homo sapien
tcacatgagatcaggcaacattcag

SEQ ID NO: 109175 - DNA, 25 bp, Homo sapien
ctagcttttgagatcacatgagatc

SEQ ID NO: 109176 - DNA, 25 bp, Homo sapien
gagatcaggcaacattcagggtagt

SEQ ID NO: 109177 - DNA, 25 bp, Homo sapien
ccttttctgagtcttagtatacttc

SEQ ID NO: 109178 - DNA, 25 bp, Homo sapien
gtatacttcaatcacaaagccatat

SEQ ID NO: 109179 - DNA, 25 bp, Homo sapien
tatggaggacagtaattctgctgat

SEQ ID NO: 109180 - DNA, 25 bp, Homo sapien
attatggaggacagtaattctgctg

SEQ ID NO: 109181 - DNA, 25 bp, Homo sapien
tatacatcatcattaactacagtca

SEQ ID NO: 109182 - DNA, 25 bp, Homo sapien
tttcaagtatacatcatcattaact

SEQ ID NO: 109183 - DNA, 25 bp, Homo sapien
ttttcaagtatacatcatcattaac

SEQ ID NO: 109184 - DNA, 25 bp, Homo sapien
tacatggacaaagctctgaaaccat

SEQ ID NO: 109185 - DNA, 25 bp, Homo sapien
atacatggacaaagctctgaaacca

SEQ ID NO: 109186 - DNA, 25 bp, Homo sapien
catacatggacaaagctctgaaacc

SEQ ID NO: 109187 - DNA, 25 bp, Homo sapien
aacctggaccagcaactggtgacac

SEQ ID NO: 109188 - DNA, 25 bp, Homo sapien
tggcagtcctttagcctgagcaggt

SEQ ID NO: 109189 - DNA, 25 bp, Homo sapien
gtccaaagaggtggcagtcctttag

SEQ ID NO: 109190 - DNA, 25 bp, Homo sapien
cctgagcaggtcacaaacctggacc

SEQ ID NO: 109191 - DNA, 25 bp, Homo sapien
gtaaagcttttgtgacaactccata

SEQ ID NO: 109192 - DNA, 25 bp, Homo sapien
ccattcttttggacaatatttgtaa

SEQ ID NO: 109193 - DNA, 25 bp, Homo sapien
tcttccattcttttggacaatattt

SEQ ID NO: 109194 - DNA, 25 bp, Homo sapien
tttgtgacaactccatatacacatg

SEQ ID NO: 109195 - DNA, 25 bp, Homo sapien
cataggaggcccaaattggtcgata

SEQ ID NO: 109196 - DNA, 25 bp, Homo sapien
taggaggcccaaattggtcgatacc

SEQ ID NO: 109197 - DNA, 25 bp, Homo sapien
ataggaggcccaaattggtcgatac

SEQ ID NO: 109198 - DNA, 25 bp, Homo sapien
tcataggaggcccaaattggtcgat

SEQ ID NO: 109199 - DNA, 25 bp, Homo sapien
ctgatcaatctgccattttccacat

SEQ ID NO: 109200 - DNA, 25 bp, Homo sapien
caatctgccattttccacatagtac

SEQ ID NO: 109201 - DNA, 25 bp, Homo sapien
tcaatctgccattttccacatagta

SEQ ID NO: 109202 - DNA, 25 bp, Homo sapien
gatcaatctgccattttccacatag

SEQ ID NO: 109203 - DNA, 25 bp, Homo sapien
taagcctctggctcgaagtattttc

SEQ ID NO: 109204 - DNA, 25 bp, Homo sapien
tcctctcggagcacacactgagaat

SEQ ID NO: 109205 - DNA, 25 bp, Homo sapien
tgaagttcccaagatcagcctgcag

SEQ ID NO: 109206 - DNA, 25 bp, Homo sapien
gagcacacactgagaatgaagaact

SEQ ID NO: 109207 - DNA, 25 bp, Homo sapien
aactgatctttgtgcatgtttggaa

SEQ ID NO: 109208 - DNA, 25 bp, Homo sapien
tgaacagcgacgtcatccagtcgga

SEQ ID NO: 109209 - DNA, 25 bp, Homo sapien
tccagtcggacagcctctttgatat

SEQ ID NO: 109210 - DNA, 25 bp, Homo sapien
tatatttaagatgagcttcggaagc

SEQ ID NO: 109211 - DNA, 25 bp, Homo sapien
tttccttctcaatcctattgagaag

SEQ ID NO: 109212 - DNA, 25 bp, Homo sapien
aagctgaagacttagttgccgtttc

SEQ ID NO: 109213 - DNA, 25 bp, Homo sapien
caatcctattgagaagatgtttttt

SEQ ID NO: 109214 - DNA, 25 bp, Homo sapien
tgaagacttagttgccgtttcatac

SEQ ID NO: 109215 - DNA, 25 bp, Homo sapien
taaacacaatgagtatgcagagatc

SEQ ID NO: 109216 - DNA, 25 bp, Homo sapien
caaggatgtacagattgctttccaa

SEQ ID NO: 109217 - DNA, 25 bp, Homo sapien
ttatttcccgtttatgagcagctcc

SEQ ID NO: 109218 - DNA, 25 bp, Homo sapien
taatggctgccgctgaatttctcca

SEQ ID NO: 109219 - DNA, 25 bp, Homo sapien
atggtcaatccaagagtcagcgatg

SEQ ID NO: 109220 - DNA, 25 bp, Homo sapien
gagtcagcgatgcttcaatttccct

SEQ ID NO: 109221 - DNA, 25 bp, Homo sapien
gtattcccctcatggtcaatccaag

SEQ ID NO: 109222 - DNA, 25 bp, Homo sapien
caatccaagagtcagcgatgcttca

SEQ ID NO: 109223 - DNA, 25 bp, Homo sapien
ttgtccaggggaaatcataaagtaa

SEQ ID NO: 109224 - DNA, 25 bp, Homo sapien
caattttccaacatttgtccagggg

SEQ ID NO: 109225 - DNA, 25 bp, Homo sapien
ggaaatcataaagtaattgtttctc

SEQ ID NO: 109226 - DNA, 25 bp, Homo sapien
tcataaagtaattgtttctcttcat

SEQ ID NO: 109227 - DNA, 25 bp, Homo sapien
ttaggaggagacaggttaggcccca

SEQ ID NO: 109228 - DNA, 25 bp, Homo sapien
tcttttgacttacagggcagcatgg

SEQ ID NO: 109229 - DNA, 25 bp, Homo sapien
tagccacaagggtctgtcagtaaac

SEQ ID NO: 109230 - DNA, 25 bp, Homo sapien
taaagaagactcctcagataagggc

SEQ ID NO: 109231 - DNA, 25 bp, Homo sapien
aaggaaaccatgaatcaaattcagg

SEQ ID NO: 109232 - DNA, 25 bp, Homo sapien
ggaaaccatgaatcaaattcaggaa

SEQ ID NO: 109233 - DNA, 25 bp, Homo sapien
aggaaaccatgaatcaaattcagga

SEQ ID NO: 109234 - DNA, 25 bp, Homo sapien
tgttgctcagaagttgcaggaggtg

SEQ ID NO: 109235 - DNA, 25 bp, Homo sapien
gggcaccccgtgtagtatatgagct

SEQ ID NO: 109236 - DNA, 25 bp, Homo sapien
ggacaggctgcagattcatatagag

SEQ ID NO: 109237 - DNA, 25 bp, Homo sapien
agcttccggatatggcgcaggacag

SEQ ID NO: 109238 - DNA, 25 bp, Homo sapien
aatacacttggtactatggttggca

SEQ ID NO: 109239 - DNA, 25 bp, Homo sapien
gatgaagtaacaagaaggcccttgg

SEQ ID NO: 109240 - DNA, 25 bp, Homo sapien
caaggtgccatgttagacgtttagg

SEQ ID NO: 109241 - DNA, 25 bp, Homo sapien
tggttggcaatgaacaacgccctgt

SEQ ID NO: 109242 - DNA, 25 bp, Homo sapien
gttagtgccattattgcagtagtgg

SEQ ID NO: 109243 - DNA, 25 bp, Homo sapien
ctgttccctcctaaactcaggttga

SEQ ID NO: 109244 - DNA, 25 bp, Homo sapien
gccattattgcagtagtgggttcat

SEQ ID NO: 109245 - DNA, 25 bp, Homo sapien
ggttcattatgagaggcggagtttg

SEQ ID NO: 109246 - DNA, 25 bp, Homo sapien
gaatccagctcggaagtataatcat

SEQ ID NO: 109247 - DNA, 25 bp, Homo sapien
ttgcatgcctgatgtctgaatccag

SEQ ID NO: 109248 - DNA, 25 bp, Homo sapien
gctcggaagtataatcatcacaggg

SEQ ID NO: 109249 - DNA, 25 bp, Homo sapien
gatgtctgaatccagctcggaagta

SEQ ID NO: 109250 - DNA, 25 bp, Homo sapien
tgtcactgatgtaagattcccggta

SEQ ID NO: 109251 - DNA, 25 bp, Homo sapien
ccaggttgtcactgatgtaagattc

SEQ ID NO: 109252 - DNA, 25 bp, Homo sapien
actgatgtaagattcccggtactgc

SEQ ID NO: 109253 - DNA, 25 bp, Homo sapien
gtcgaggtccaggttgtcactgatg

SEQ ID NO: 109254 - DNA, 25 bp, Homo sapien
tggagtagctgtcttctggccccgt

SEQ ID NO: 109255 - DNA, 25 bp, Homo sapien
cgggacaggcgcttgtgtttcatgc

SEQ ID NO: 109256 - DNA, 25 bp, Homo sapien
tcaatgcccgaggtgtgggaactgc

SEQ ID NO: 109257 - DNA, 25 bp, Homo sapien
catgactggtcattgagctgcaggt

SEQ ID NO: 109258 - DNA, 25 bp, Homo sapien
tagaaccaatgcttgaaaaaactgg

SEQ ID NO: 109259 - DNA, 25 bp, Homo sapien
tgaaaaaactgggagactaaacaga

SEQ ID NO: 109260 - DNA, 25 bp, Homo sapien
gctctccagacaccagttctataga

SEQ ID NO: 109261 - DNA, 25 bp, Homo sapien
tattactactgcctaaagttgctct

SEQ ID NO: 109262 - DNA, 25 bp, Homo sapien
ttcagcttccgcgacatgagcatgt

SEQ ID NO: 109263 - DNA, 25 bp, Homo sapien
tctgctccagatcccgggggtcatc

SEQ ID NO: 109264 - DNA, 25 bp, Homo sapien
gacatgagcatgtcctctgtgatgt

SEQ ID NO: 109265 - DNA, 25 bp, Homo sapien
gatgcacatgtctgggctgacttcc

SEQ ID NO: 109266 - DNA, 25 bp, Homo sapien
gaagaataacttcccgtaagagctc

SEQ ID NO: 109267 - DNA, 25 bp, Homo sapien
tggataacctgctaccaaggaagaa

SEQ ID NO: 109268 - DNA, 25 bp, Homo sapien
tacaacactgacctgaagagactct

SEQ ID NO: 109269 - DNA, 25 bp, Homo sapien
actcttagtgcagtccagtctctgg

SEQ ID NO: 109270 - DNA, 25 bp, Homo sapien
cagtgttggtcagagagatgattcc

SEQ ID NO: 109271 - DNA, 25 bp, Homo sapien
tctaagcatgtttagggtaagcagc

SEQ ID NO: 109272 - DNA, 25 bp, Homo sapien
tcttgaagactaagtgccaggatgg

SEQ ID NO: 109273 - DNA, 25 bp, Homo sapien
ggtaagcagcctaatgagtcagtgt

SEQ ID NO: 109274 - DNA, 25 bp, Homo sapien
tctgtatcactgcaactttagtgta

SEQ ID NO: 109275 - DNA, 25 bp, Homo sapien
tatcactgcaactttagtgtatgtg

SEQ ID NO: 109276 - DNA, 25 bp, Homo sapien
tctctgtatcactgcaactttagtg

SEQ ID NO: 109277 - DNA, 25 bp, Homo sapien
tcactgcaactttagtgtatgtgct

SEQ ID NO: 109278 - DNA, 25 bp, Homo sapien
tctggccacgaagcttaacaactgt

SEQ ID NO: 109279 - DNA, 25 bp, Homo sapien
tgtggaagagaatcagtactctggc

SEQ ID NO: 109280 - DNA, 25 bp, Homo sapien
gaagcttaacaactgtttctgaaga

SEQ ID NO: 109281 - DNA, 25 bp, Homo sapien
tctgaagagctcgaggtggaagacc

SEQ ID NO: 109282 - DNA, 25 bp, Homo sapien
ggaattagggccattagtcatacat

SEQ ID NO: 109283 - DNA, 25 bp, Homo sapien
taatagtttaaccaatgatcacagg

SEQ ID NO: 109284 - DNA, 25 bp, Homo sapien
tgtgcacacgtggttcgcctgaagc

SEQ ID NO: 109285 - DNA, 25 bp, Homo sapien
gaataaccagagtgtggaaacattt

SEQ ID NO: 109286 - DNA, 25 bp, Homo sapien
catccaaaggtgtaactctgagcag

SEQ ID NO: 109287 - DNA, 25 bp, Homo sapien
ctgcaatgcgcaggaagtctttctg

SEQ ID NO: 109288 - DNA, 25 bp, Homo sapien
caagctgtgtcgatcagtggaggtc

SEQ ID NO: 109289 - DNA, 25 bp, Homo sapien
agcaactgttgcaatagaggccttc

SEQ ID NO: 109290 - DNA, 25 bp, Homo sapien
cactgagcgggatgaaggagtcaca

SEQ ID NO: 109291 - DNA, 25 bp, Homo sapien
tgtataatactgactcccagccagg

SEQ ID NO: 109292 - DNA, 25 bp, Homo sapien
tgttcactttgggacagcctcaggg

SEQ ID NO: 109293 - DNA, 25 bp, Homo sapien
tgggtcccgccacaagagaatgatg

SEQ ID NO: 109294 - DNA, 25 bp, Homo sapien
ccaaaacgggtatactgacaagcga

SEQ ID NO: 109295 - DNA, 25 bp, Homo sapien
cagtttatgtagatataaagctcac

SEQ ID NO: 109296 - DNA, 25 bp, Homo sapien
tacaaatgtagatgtgcagaggcaa

SEQ ID NO: 109297 - DNA, 25 bp, Homo sapien
caagcgatagatatgtaagaaatgc

SEQ ID NO: 109298 - DNA, 25 bp, Homo sapien
gcaaagagctgtgttctgtcaaaga

SEQ ID NO: 109299 - DNA, 25 bp, Homo sapien
tcctccaggtgtcagcgtagggcaa

SEQ ID NO: 109300 - DNA, 25 bp, Homo sapien
ccagcaaaagctcatcaacctagcg

SEQ ID NO: 109301 - DNA, 25 bp, Homo sapien
acttgatgtcctcccacagtacgag

SEQ ID NO: 109302 - DNA, 25 bp, Homo sapien
tctcagctcttgttggataggtctc

SEQ ID NO: 109303 - DNA, 25 bp, Homo sapien
ctgtcagatagtaaaccccaaggaa

SEQ ID NO: 109304 - DNA, 25 bp, Homo sapien
tgctcgacagggctcatgatgtcct

SEQ ID NO: 109305 - DNA, 25 bp, Homo sapien
ttaggctccactagatggcaaatga

SEQ ID NO: 109306 - DNA, 25 bp, Homo sapien
ctgtgagattcagtggctctgtgtg

SEQ ID NO: 109307 - DNA, 25 bp, Homo sapien
acacctgtgagattcagtggctctg

SEQ ID NO: 109308 - DNA, 25 bp, Homo sapien
agggagagcaaagcgaggaccggct

SEQ ID NO: 109309 - DNA, 25 bp, Homo sapien
acagggagagcaaagcgaggaccgg

SEQ ID NO: 109310 - DNA, 25 bp, Homo sapien
cagcatgagagatgactctgccatg

SEQ ID NO: 109311 - DNA, 25 bp, Homo sapien
catgcgactgcgtgtccacaatcat

SEQ ID NO: 109312 - DNA, 25 bp, Homo sapien
agccagcatgagagatgactctgcc

SEQ ID NO: 109313 - DNA, 25 bp, Homo sapien
tctgccatgcgactgcgtgtccaca

SEQ ID NO: 109314 - DNA, 25 bp, Homo sapien
cctgactccacgacaccattcctgg

SEQ ID NO: 109315 - DNA, 25 bp, Homo sapien
atccctgactccacgacaccattcc

SEQ ID NO: 109316 - DNA, 25 bp, Homo sapien
aggatgcaagagatcatgagattca

SEQ ID NO: 109317 - DNA, 25 bp, Homo sapien
cagcgtacatccctgactccacgac

SEQ ID NO: 109318 - DNA, 25 bp, Homo sapien
actcccgctgggatattaggaattt

SEQ ID NO: 109319 - DNA, 25 bp, Homo sapien
caattagtagtgaactcccgctggg

SEQ ID NO: 109320 - DNA, 25 bp, Homo sapien
gaattttataacagggtctacacgc

SEQ ID NO: 109321 - DNA, 25 bp, Homo sapien
aaagggtctacacgcattgtgcaat

SEQ ID NO: 109322 - DNA, 25 bp, Homo sapien
tccttttgcagtgtgggtcgaaaaa

SEQ ID NO: 109323 - DNA, 25 bp, Homo sapien
cattccttttgcagtgtgggtcgaa

SEQ ID NO: 109324 - DNA, 25 bp, Homo sapien
gccgcacggcagcacgttctaatct

SEQ ID NO: 109325 - DNA, 25 bp, Homo sapien
gcacgttctaatctcaataccttct

SEQ ID NO: 109326 - DNA, 25 bp, Homo sapien
tccaaggagccatcagttccgggtt

SEQ ID NO: 109327 - DNA, 25 bp, Homo sapien
gagtgagacgtccatcctctgagac

SEQ ID NO: 109328 - DNA, 25 bp, Homo sapien
gagaccatcaagtatagtgcccggg

SEQ ID NO: 109329 - DNA, 25 bp, Homo sapien
tcttcaggacaaacgggagagtgcc

SEQ ID NO: 109330 - DNA, 25 bp, Homo sapien
attaaatctaagagagaagttcctt

SEQ ID NO: 109331 - DNA, 25 bp, Homo sapien
tcctggtaggtcagaattaaatcta

SEQ ID NO: 109332 - DNA, 25 bp, Homo sapien
aaatctaagagagaagttccttttg

SEQ ID NO: 109333 - DNA, 25 bp, Homo sapien
tgcttcaacaatccagttcttcctg

SEQ ID NO: 109334 - DNA, 25 bp, Homo sapien
tggcctctcacttcacagggcgtct

SEQ ID NO: 109335 - DNA, 25 bp, Homo sapien
ctcttgctccataaggtgtctcctc

SEQ ID NO: 109336 - DNA, 25 bp, Homo sapien
acgtggcctctcacttcacagggcg

SEQ ID NO: 109337 - DNA, 25 bp, Homo sapien
ctctctccagcaggataatcttaat

SEQ ID NO: 109338 - DNA, 25 bp, Homo sapien
tcccaggacttctgcgtgtgacctc

SEQ ID NO: 109339 - DNA, 25 bp, Homo sapien
caaggtgtctaaccctctggggctt

SEQ ID NO: 109340 - DNA, 25 bp, Homo sapien
aggtgtctaaccctctggggcttct

SEQ ID NO: 109341 - DNA, 25 bp, Homo sapien
gcatctcgcttcacgaggcatctcg

SEQ ID NO: 109342 - DNA, 25 bp, Homo sapien
tcacgaggcatctcgcttcgtgagg

SEQ ID NO: 109343 - DNA, 25 bp, Homo sapien
catctcgcttcgtgaggcatctcac

SEQ ID NO: 109344 - DNA, 25 bp, Homo sapien
tccacgaggcatctcgcttcacgag

SEQ ID NO: 109345 - DNA, 25 bp, Homo sapien
tctaacaattctcagggtgactggg

SEQ ID NO: 109346 - DNA, 25 bp, Homo sapien
gatctttgtgttatcagccgctgag

SEQ ID NO: 109347 - DNA, 25 bp, Homo sapien
tcacttgcggtcacacatatggctc

SEQ ID NO: 109348 - DNA, 25 bp, Homo sapien
gctcaaattccttatcgtggcacgg

SEQ ID NO: 109349 - DNA, 25 bp, Homo sapien
ttggaaggcataaactgaagacagc

SEQ ID NO: 109350 - DNA, 25 bp, Homo sapien
tgggattccctatccccgtgggcag

SEQ ID NO: 109351 - DNA, 25 bp, Homo sapien
caacctggactgttacgtgaaagag

SEQ ID NO: 109352 - DNA, 25 bp, Homo sapien
tggaatggcgatggccaaaagaacc

SEQ ID NO: 109353 - DNA, 25 bp, Homo sapien
ccttggacaaaagatcaagccattt

SEQ ID NO: 109354 - DNA, 25 bp, Homo sapien
gatatctgtcgaaaacagctggccc

SEQ ID NO: 109355 - DNA, 25 bp, Homo sapien
cctcaaagagaggatatctgtcgaa

SEQ ID NO: 109356 - DNA, 25 bp, Homo sapien
catttgtggagtcaatcaactgcag

SEQ ID NO: 109357 - DNA, 25 bp, Homo sapien
gacagatcctgtctttgccaaatgt

SEQ ID NO: 109358 - DNA, 25 bp, Homo sapien
gcagaatacttatttattgcaaaga

SEQ ID NO: 109359 - DNA, 25 bp, Homo sapien
tgcagagggaccaaataatattatt

SEQ ID NO: 109360 - DNA, 25 bp, Homo sapien
gactttcctataacaaggaagagat

SEQ ID NO: 109361 - DNA, 25 bp, Homo sapien
gagtccaacatcgtgaagcatcgcc

SEQ ID NO: 109362 - DNA, 25 bp, Homo sapien
gaatgtccagagtccaacatcgtga

SEQ ID NO: 109363 - DNA, 25 bp, Homo sapien
gtgaagcatcgccaaacgcttaaca

SEQ ID NO: 109364 - DNA, 25 bp, Homo sapien
caaacgcttaacacatgcttgagga

SEQ ID NO: 109365 - DNA, 25 bp, Homo sapien
cctgaatgttctttatcccaggtga

SEQ ID NO: 109366 - DNA, 25 bp, Homo sapien
ctgaatgttctttatcccaggtgat

SEQ ID NO: 109367 - DNA, 25 bp, Homo sapien
agacttggagcagcctgtctgaggt

SEQ ID NO: 109368 - DNA, 25 bp, Homo sapien
ctaagtgctcactgtagaatatggc

SEQ ID NO: 109369 - DNA, 25 bp, Homo sapien
agggagacttggagcagcctgtctg

SEQ ID NO: 109370 - DNA, 25 bp, Homo sapien
tatggctgaactacgcaggtggtcc

SEQ ID NO: 109371 - DNA, 25 bp, Homo sapien
tgtccagctggaactgttgcatcct

SEQ ID NO: 109372 - DNA, 25 bp, Homo sapien
tcttcctgtgagtattgtcgtgtcc

SEQ ID NO: 109373 - DNA, 25 bp, Homo sapien
ggacaaggttcccacgatacagcag

SEQ ID NO: 109374 - DNA, 25 bp, Homo sapien
gatacagcagcaataagagtctctt

SEQ ID NO: 109375 - DNA, 25 bp, Homo sapien
tgtgggtataggcagctgcaacttc

SEQ ID NO: 109376 - DNA, 25 bp, Homo sapien
tgagcgcccgtaatagtcgtttgca

SEQ ID NO: 109377 - DNA, 25 bp, Homo sapien
cgcagcaggcaggtagacaagatgt

SEQ ID NO: 109378 - DNA, 25 bp, Homo sapien
tgaagtgagcccagtaatgcagcca

SEQ ID NO: 109379 - DNA, 25 bp, Homo sapien
taatggtgccaagtgccatggcgag

SEQ ID NO: 109380 - DNA, 25 bp, Homo sapien
aatggcggccagcaacagatgcctg

SEQ ID NO: 109381 - DNA, 25 bp, Homo sapien
ccatgttgagttcggtgtacctgca

SEQ ID NO: 109382 - DNA, 25 bp, Homo sapien
gattgttaaggtccaggcacgttcc

SEQ ID NO: 109383 - DNA, 25 bp, Homo sapien
taggtcttatacttgagtttccaga

SEQ ID NO: 109384 - DNA, 25 bp, Homo sapien
cttgagtttccagacaaaatccaga

SEQ ID NO: 109385 - DNA, 25 bp, Homo sapien
ccttggcaagtggtgctaggtctta

SEQ ID NO: 109386 - DNA, 25 bp, Homo sapien
aaagcaaagcagaggtccttggcaa

SEQ ID NO: 109387 - DNA, 25 bp, Homo sapien
cagatttgctgcatgggaatgttgt

SEQ ID NO: 109388 - DNA, 25 bp, Homo sapien
tggagtacgaatcccatcactgctg

SEQ ID NO: 109389 - DNA, 25 bp, Homo sapien
atacaaagtagggcttggtgcggtg

SEQ ID NO: 109390 - DNA, 25 bp, Homo sapien
tgtgcagatttgctgcatgggaatg

SEQ ID NO: 109391 - DNA, 25 bp, Homo sapien
tctctttccattggaggttgcaatt

SEQ ID NO: 109392 - DNA, 25 bp, Homo sapien
tgcctgaaggtacaccatctcttgc

SEQ ID NO: 109393 - DNA, 25 bp, Homo sapien
gaaggtacaccatctcttgcttctc

SEQ ID NO: 109394 - DNA, 25 bp, Homo sapien
ttccattggaggttgcaatttcccc

SEQ ID NO: 109395 - DNA, 25 bp, Homo sapien
aagcagccttgccggagactgtggc

SEQ ID NO: 109396 - DNA, 25 bp, Homo sapien
caaagcagccttgccggagactgtg

SEQ ID NO: 109397 - DNA, 25 bp, Homo sapien
gcacaaagcagccttgccggagact

SEQ ID NO: 109398 - DNA, 25 bp, Homo sapien
acaaagcagccttgccggagactgt

SEQ ID NO: 109399 - DNA, 25 bp, Homo sapien
tagattttatggatcaaggctgtcc

SEQ ID NO: 109400 - DNA, 25 bp, Homo sapien
gagcttctctagtgatatcaagtgt

SEQ ID NO: 109401 - DNA, 25 bp, Homo sapien
tatgctggcattggtcatgaagtaa

SEQ ID NO: 109402 - DNA, 25 bp, Homo sapien
tggtttctgataccgacagtctaga

SEQ ID NO: 109403 - DNA, 25 bp, Homo sapien
cagagaatctgccaattggggttga

SEQ ID NO: 109404 - DNA, 25 bp, Homo sapien
tgcagagaccaagtggcattcgtca

SEQ ID NO: 109405 - DNA, 25 bp, Homo sapien
gggttgacactcccgcttacagact

SEQ ID NO: 109406 - DNA, 25 bp, Homo sapien
tacagacttccctctacagacgctg

SEQ ID NO: 109407 - DNA, 25 bp, Homo sapien
gccagcccttgagtgcatgtgtggg

SEQ ID NO: 109408 - DNA, 25 bp, Homo sapien
ggtaggtctgttggtcagtctctct

SEQ ID NO: 109409 - DNA, 25 bp, Homo sapien
agccagcccttgagtgcatgtgtgg

SEQ ID NO: 109410 - DNA, 25 bp, Homo sapien
cctcttcttggtagctgttagcggc

SEQ ID NO: 109411 - DNA, 25 bp, Homo sapien
tccatttcagggcttactctggtgg

SEQ ID NO: 109412 - DNA, 25 bp, Homo sapien
gcccagcccagcagtagtaggagtt

SEQ ID NO: 109413 - DNA, 25 bp, Homo sapien
cagcgttgtgagtatgtgtagcagc

SEQ ID NO: 109414 - DNA, 25 bp, Homo sapien
tagctcttaacaagtgagaacgatg

SEQ ID NO: 109415 - DNA, 25 bp, Homo sapien
taaaggaggaggcatatacatacat

SEQ ID NO: 109416 - DNA, 25 bp, Homo sapien
tgctgcatgagggtattaaactccc

SEQ ID NO: 109417 - DNA, 25 bp, Homo sapien
tatatcctgtcagaggaatctcaca

SEQ ID NO: 109418 - DNA, 25 bp, Homo sapien
aactcaacaggcctaattaccatgg

SEQ ID NO: 109419 - DNA, 25 bp, Homo sapien
taactggtgtgatgaagagagactc

SEQ ID NO: 109420 - DNA, 25 bp, Homo sapien
taccatggtaacaacatgcaccgtg

SEQ ID NO: 109421 - DNA, 25 bp, Homo sapien
tcttgcaaatatcttgtgcctagta

SEQ ID NO: 109422 - DNA, 25 bp, Homo sapien
tacagtaattccactagcccaagaa

SEQ ID NO: 109423 - DNA, 25 bp, Homo sapien
gactgtccaagataaaggagtcgta

SEQ ID NO: 109424 - DNA, 25 bp, Homo sapien
gcctgcattacaagatgactgtcca

SEQ ID NO: 109425 - DNA, 25 bp, Homo sapien
tagtaatagatttggcagagctcac

SEQ ID NO: 109426 - DNA, 25 bp, Homo sapien
cctaaagcctgaggctcactggcag

SEQ ID NO: 109427 - DNA, 25 bp, Homo sapien
gcctgaggctcactggcagatctgg

SEQ ID NO: 109428 - DNA, 25 bp, Homo sapien
tcagttcctaaagcctgaggctcac

SEQ ID NO: 109429 - DNA, 25 bp, Homo sapien
aaagcctgaggctcactggcagatc

SEQ ID NO: 109430 - DNA, 25 bp, Homo sapien
gctgtatcccctaaacagttatgta

SEQ ID NO: 109431 - DNA, 25 bp, Homo sapien
agttgacaaccattgaaattgggtg

SEQ ID NO: 109432 - DNA, 25 bp, Homo sapien
aaaagcccaacaattcagcaagcac

SEQ ID NO: 109433 - DNA, 25 bp, Homo sapien
caagtcaggttatgagtaggtttta

SEQ ID NO: 109434 - DNA, 25 bp, Homo sapien
catctggagtgaccaactgtcctga

SEQ ID NO: 109435 - DNA, 25 bp, Homo sapien
cagtttgttgccctgctgctagctc

SEQ ID NO: 109436 - DNA, 25 bp, Homo sapien
tagctctaggtttggacttcaggtc

SEQ ID NO: 109437 - DNA, 25 bp, Homo sapien
cccagttttagcaccgatagtctta

SEQ ID NO: 109438 - DNA, 25 bp, Homo sapien
gcagtctgctactataggctattaa

SEQ ID NO: 109439 - DNA, 25 bp, Homo sapien
tcccacgataggtggaagaaagtcc

SEQ ID NO: 109440 - DNA, 25 bp, Homo sapien
aaaactttccaacctagctgatgca

SEQ ID NO: 109441 - DNA, 25 bp, Homo sapien
tttatcactaccaattgcagtctgc

SEQ ID NO: 109442 - DNA, 25 bp, Homo sapien
gaggtgtaactgtgcctctctcttc

SEQ ID NO: 109443 - DNA, 25 bp, Homo sapien
agaggtgtaactgtgcctctctctt

SEQ ID NO: 109444 - DNA, 25 bp, Homo sapien
cagaggtgtaactgtgcctctctct

SEQ ID NO: 109445 - DNA, 25 bp, Homo sapien
tgtagcaaacttgaaccgtaagttg

SEQ ID NO: 109446 - DNA, 25 bp, Homo sapien
ggaaagcatagggtggttttctctc

SEQ ID NO: 109447 - DNA, 25 bp, Homo sapien
acacaaacaactgaactctgtccaa

SEQ ID NO: 109448 - DNA, 25 bp, Homo sapien
catcctgtctctgaataaggaaagc

SEQ ID NO: 109449 - DNA, 25 bp, Homo sapien
tagcagacatcacgagacttcattc

SEQ ID NO: 109450 - DNA, 25 bp, Homo sapien
gacttcattcctgaacacttcacag

SEQ ID NO: 109451 - DNA, 25 bp, Homo sapien
tgccatttgaaactaggtagcagac

SEQ ID NO: 109452 - DNA, 25 bp, Homo sapien
ccacctagagttaacaatggtcact

SEQ ID NO: 109453 - DNA, 25 bp, Homo sapien
tgtaacttaaaggatgtcacctcca

SEQ ID NO: 109454 - DNA, 25 bp, Homo sapien
tcaagagccaatatggaatgactcc

SEQ ID NO: 109455 - DNA, 25 bp, Homo sapien
tggccccaagggagcttactgcctc

SEQ ID NO: 109456 - DNA, 25 bp, Homo sapien
cagctagaatcagagtggtggcaga

SEQ ID NO: 109457 - DNA, 25 bp, Homo sapien
gccttttataagcacgagtccgtta

SEQ ID NO: 109458 - DNA, 25 bp, Homo sapien
gcacgagtccgttatgtcttaaaca

SEQ ID NO: 109459 - DNA, 25 bp, Homo sapien
ttatgtcttaaacagactcccacag

SEQ ID NO: 109460 - DNA, 25 bp, Homo sapien
aatgaaagggccttttataagcacg

SEQ ID NO: 109461 - DNA, 25 bp, Homo sapien
ctgctagagggttctgtgatttatg

SEQ ID NO: 109462 - DNA, 25 bp, Homo sapien
tcttatgaggatacttaggactgga

SEQ ID NO: 109463 - DNA, 25 bp, Homo sapien
tagagatttattcaggccactacaa

SEQ ID NO: 109464 - DNA, 25 bp, Homo sapien
tatttaacacaatggatggcttcct

SEQ ID NO: 109465 - DNA, 25 bp, Homo sapien
ggattaggacccgatactttagaga

SEQ ID NO: 109466 - DNA, 25 bp, Homo sapien
caagtttggtccagttctggcggtc

SEQ ID NO: 109467 - DNA, 25 bp, Homo sapien
ttaacaagtttggtccagttctggc

SEQ ID NO: 109468 - DNA, 25 bp, Homo sapien
tccaggatggggcttgatgattttt

SEQ ID NO: 109469 - DNA, 25 bp, Homo sapien
aacaagtttggtccagttctggcgg

SEQ ID NO: 109470 - DNA, 25 bp, Homo sapien
cttttctagcgtaccctcatagaat

SEQ ID NO: 109471 - DNA, 25 bp, Homo sapien
tgaacatttttgagaccggtcccca

SEQ ID NO: 109472 - DNA, 25 bp, Homo sapien
gaccggtccccaggtaccaagagca

SEQ ID NO: 109473 - DNA, 25 bp, Homo sapien
tcttccttttctagcgtaccctcat

SEQ ID NO: 109474 - DNA, 25 bp, Homo sapien
actgaacgaatgtgagagcctgtgc

SEQ ID NO: 109475 - DNA, 25 bp, Homo sapien
ctaaagaaaccagccactgaacgaa

SEQ ID NO: 109476 - DNA, 25 bp, Homo sapien
gagcctgtgcgttacctcactaatt

SEQ ID NO: 109477 - DNA, 25 bp, Homo sapien
ctggaagacacttttcgttgttcgt

SEQ ID NO: 109478 - DNA, 25 bp, Homo sapien
gccgtctatgctgtgtgggtggaga

SEQ ID NO: 109479 - DNA, 25 bp, Homo sapien
tcaaatcagcatgggagccgtctat

SEQ ID NO: 109480 - DNA, 25 bp, Homo sapien
gtgggtggagagtaagacgcaacat

SEQ ID NO: 109481 - DNA, 25 bp, Homo sapien
gagagacaaaacaacgtatttcttc

SEQ ID NO: 109482 - DNA, 25 bp, Homo sapien
ttttcagaggcaccagactgatcct

SEQ ID NO: 109483 - DNA, 25 bp, Homo sapien
cattcgtcagaagggtgtttcggct

SEQ ID NO: 109484 - DNA, 25 bp, Homo sapien
gcttatggaccaagagctcgccaca

SEQ ID NO: 109485 - DNA, 25 bp, Homo sapien
tgagcgatgcatcccttgttgaagg

SEQ ID NO: 109486 - DNA, 25 bp, Homo sapien
caggcatggactagcttggagataa

SEQ ID NO: 109487 - DNA, 25 bp, Homo sapien
tatccaactgtggatagcctcaggg

SEQ ID NO: 109488 - DNA, 25 bp, Homo sapien
tagatgtctataccaacaggcatgg

SEQ ID NO: 109489 - DNA, 25 bp, Homo sapien
ccatggcgctggctaagatgaagaa

SEQ ID NO: 109490 - DNA, 25 bp, Homo sapien
caatcatgtctttcaacaactggga

SEQ ID NO: 109491 - DNA, 25 bp, Homo sapien
ggacacttactgcttttctctcaac

SEQ ID NO: 109492 - DNA, 25 bp, Homo sapien
taaagatttattgggacacttactg

SEQ ID NO: 109493 - DNA, 25 bp, Homo sapien
tggaatccaccttgcacactcagtc

SEQ ID NO: 109494 - DNA, 25 bp, Homo sapien
ctttgtagggcccacactggctttg

SEQ ID NO: 109495 - DNA, 25 bp, Homo sapien
cccatcggcctagtctttggtgatg

SEQ ID NO: 109496 - DNA, 25 bp, Homo sapien
ggcctagtctttggtgatgcactgt

SEQ ID NO: 109497 - DNA, 25 bp, Homo sapien
tcggcctagtctttggtgatgcact

SEQ ID NO: 109498 - DNA, 25 bp, Homo sapien
ctagtctttggtgatgcactgtgac

SEQ ID NO: 109499 - DNA, 25 bp, Homo sapien
tcatcgtaactaggggatctcaaag

SEQ ID NO: 109500 - DNA, 25 bp, Homo sapien
catccttggtcggtattacctctga

SEQ ID NO: 109501 - DNA, 25 bp, Homo sapien
ttcatgagccagcaaatgtgcaagt

SEQ ID NO: 109502 - DNA, 25 bp, Homo sapien
atgtgcaagttcatcgtaactaggg

SEQ ID NO: 109503 - DNA, 25 bp, Homo sapien
gagtgctggatagatctttcagaaa

SEQ ID NO: 109504 - DNA, 25 bp, Homo sapien
cggagtgctggatagatctttcaga

SEQ ID NO: 109505 - DNA, 25 bp, Homo sapien
ggagtgctggatagatctttcagaa

SEQ ID NO: 109506 - DNA, 25 bp, Homo sapien
tatcctgtcgatattggcttccatc

SEQ ID NO: 109507 - DNA, 25 bp, Homo sapien
cctggcttgtgctatgctggcggtg

SEQ ID NO: 109508 - DNA, 25 bp, Homo sapien
ttaagctgctctaccagcttcctgg

SEQ ID NO: 109509 - DNA, 25 bp, Homo sapien
tatgctggcggtgttgttgctggcc

SEQ ID NO: 109510 - DNA, 25 bp, Homo sapien
ggctatacatcggaatgaactgaaa

SEQ ID NO: 109511 - DNA, 25 bp, Homo sapien
gaagtaaactccttcccataggaca

SEQ ID NO: 109512 - DNA, 25 bp, Homo sapien
gatgcctgaatcataccccaggaga

SEQ ID NO: 109513 - DNA, 25 bp, Homo sapien
tgttgggaacgcacagatgagctga

SEQ ID NO: 109514 - DNA, 25 bp, Homo sapien
gttatatctattgcagctaccccag

SEQ ID NO: 109515 - DNA, 25 bp, Homo sapien
gcagtagccctagcagtacatgtga

SEQ ID NO: 109516 - DNA, 25 bp, Homo sapien
aatatagacaacacactgcagtagc

SEQ ID NO: 109517 - DNA, 25 bp, Homo sapien
taccccagggttccacagatcgaat

SEQ ID NO: 109518 - DNA, 25 bp, Homo sapien
ttctctcctagtgcctggtggttgc

SEQ ID NO: 109519 - DNA, 25 bp, Homo sapien
cctaattgacacaaagaggtacagg

SEQ ID NO: 109520 - DNA, 25 bp, Homo sapien
tcaaggcatcagcttggttggtccc

SEQ ID NO: 109521 - DNA, 25 bp, Homo sapien
ttgaacaagtcctcacaaactgggt

SEQ ID NO: 109522 - DNA, 25 bp, Homo sapien
cttggcatgtgcttcacagtaggcc

SEQ ID NO: 109523 - DNA, 25 bp, Homo sapien
tttctgaagccggaacaggggtcag

SEQ ID NO: 109524 - DNA, 25 bp, Homo sapien
catcaaatctgcagctgccttggac

SEQ ID NO: 109525 - DNA, 25 bp, Homo sapien
aaggatggcacagaaaaacttcttc

SEQ ID NO: 109526 - DNA, 25 bp, Homo sapien
tggttctcctcgctctcttcaaatg

SEQ ID NO: 109527 - DNA, 25 bp, Homo sapien
aatgccgtggactagaaaggtgccc

SEQ ID NO: 109528 - DNA, 25 bp, Homo sapien
tcttaagtcaggatgtggatcggct

SEQ ID NO: 109529 - DNA, 25 bp, Homo sapien
tcctccaggcagttcgtcagaatca

SEQ ID NO: 109530 - DNA, 25 bp, Homo sapien
aaaggtgatcaagtcttccagggcc

SEQ ID NO: 109531 - DNA, 25 bp, Homo sapien
cgaattgcatctacacgggacagct

SEQ ID NO: 109532 - DNA, 25 bp, Homo sapien
gaaggagcgctctagttgcaaggaa

SEQ ID NO: 109533 - DNA, 25 bp, Homo sapien
tgaatagtggaaatcgtctgggcct

SEQ ID NO: 109534 - DNA, 25 bp, Homo sapien
taacaattcatcattgccaagagca

SEQ ID NO: 109535 - DNA, 25 bp, Homo sapien
taaaacacatacattgtccatgtgg

SEQ ID NO: 109536 - DNA, 25 bp, Homo sapien
cactccacagatcttatataggaaa

SEQ ID NO: 109537 - DNA, 25 bp, Homo sapien
tgtccatgtgggatgaaaatgtgca

SEQ ID NO: 109538 - DNA, 25 bp, Homo sapien
tgtggcatacctgcagcaagtgaaa

SEQ ID NO: 109539 - DNA, 25 bp, Homo sapien
gatgtacagacctagtaagaaatgc

SEQ ID NO: 109540 - DNA, 25 bp, Homo sapien
ccaaaggctgtacccaagatgtaca

SEQ ID NO: 109541 - DNA, 25 bp, Homo sapien
ggagcagctgcatctagagttctaa

SEQ ID NO: 109542 - DNA, 25 bp, Homo sapien
catgggagcgctggagcctagttct

SEQ ID NO: 109543 - DNA, 25 bp, Homo sapien
tgtacccactttaaagcaggagagg

SEQ ID NO: 109544 - DNA, 25 bp, Homo sapien
ggagcccatggccttcttcattaaa

SEQ ID NO: 109545 - DNA, 25 bp, Homo sapien
tcattgtggagatgcaatacccggc

SEQ ID NO: 109546 - DNA, 25 bp, Homo sapien
gccaggtagttgagattggacatga

SEQ ID NO: 109547 - DNA, 25 bp, Homo sapien
gccttgagagccaggtagttgagat

SEQ ID NO: 109548 - DNA, 25 bp, Homo sapien
ttggacatgatgtggttgacaaaga

SEQ ID NO: 109549 - DNA, 25 bp, Homo sapien
tgacaaagagcaccatgaaccagag

SEQ ID NO: 109550 - DNA, 25 bp, Homo sapien
gtgtgtgcatgtgtagcagcatctg

SEQ ID NO: 109551 - DNA, 25 bp, Homo sapien
catctgttgatctgtgctgggattc

SEQ ID NO: 109552 - DNA, 25 bp, Homo sapien
agcttgagtgggacatcgtatatcc

SEQ ID NO: 109553 - DNA, 25 bp, Homo sapien
tgggattctgtgttacaagcttgag

SEQ ID NO: 109554 - DNA, 25 bp, Homo sapien
cagagggcgctcttgagaaagaaga

SEQ ID NO: 109555 - DNA, 25 bp, Homo sapien
ctgcagacgaaagacgcgatgatgt

SEQ ID NO: 109556 - DNA, 25 bp, Homo sapien
tgcaagattgttccggtcagggatg

SEQ ID NO: 109557 - DNA, 25 bp, Homo sapien
tgatgtggcgccttctgagaactga

SEQ ID NO: 109558 - DNA, 25 bp, Homo sapien
ggcgcacgtcgacgctcaaataaac

SEQ ID NO: 109559 - DNA, 25 bp, Homo sapien
caatcgtggcttaaaagcggtggcc

SEQ ID NO: 109560 - DNA, 25 bp, Homo sapien
tgagtcgctccgaaatgacggcggc

SEQ ID NO: 109561 - DNA, 25 bp, Homo sapien
taggcagaaaaccaccgggaagcca

SEQ ID NO: 109562 - DNA, 25 bp, Homo sapien
tttgcagttgaagccggcggggttg

SEQ ID NO: 109563 - DNA, 25 bp, Homo sapien
gccggcggggttgtggtagtcgaga

SEQ ID NO: 109564 - DNA, 25 bp, Homo sapien
ggggttgtggtagtcgagagccgtc

SEQ ID NO: 109565 - DNA, 25 bp, Homo sapien
ggttgtggtagtcgagagccgtcaa

SEQ ID NO: 109566 - DNA, 25 bp, Homo sapien
cgctggcccataattagcaggtgct

SEQ ID NO: 109567 - DNA, 25 bp, Homo sapien
ttagcaggtgctcaaggtatcgcct

SEQ ID NO: 109568 - DNA, 25 bp, Homo sapien
cgcgctggcccataattagcaggtg

SEQ ID NO: 109569 - DNA, 25 bp, Homo sapien
caaggtatcgcctaattacccaggg

SEQ ID NO: 109570 - DNA, 25 bp, Homo sapien
tgtcttcaatcttgtagtgcctgat

SEQ ID NO: 109571 - DNA, 25 bp, Homo sapien
ttttcaaagaacttgggccagtcgc

SEQ ID NO: 109572 - DNA, 25 bp, Homo sapien
gatgtttcttaaattccctctgtct

SEQ ID NO: 109573 - DNA, 25 bp, Homo sapien
tcttcaagccaaacgatgaagtttc

SEQ ID NO: 109574 - DNA, 25 bp, Homo sapien
aacatacatgtagggtgtaaccaag

SEQ ID NO: 109575 - DNA, 25 bp, Homo sapien
tgaggcctagagattgacacttgcc

SEQ ID NO: 109576 - DNA, 25 bp, Homo sapien
tacacaacttacacctgggactaga

SEQ ID NO: 109577 - DNA, 25 bp, Homo sapien
gaaaagagtagccatgtaacataca

SEQ ID NO: 109578 - DNA, 25 bp, Homo sapien
tattcaagtctaacagctaaaccaa

SEQ ID NO: 109579 - DNA, 25 bp, Homo sapien
gaagccagtcaatagcttcttgtcg

SEQ ID NO: 109580 - DNA, 25 bp, Homo sapien
gcttcttgtcgatcttgaatcttga

SEQ ID NO: 109581 - DNA, 25 bp, Homo sapien
gaaaggacagttaacatctctgaga

SEQ ID NO: 109582 - DNA, 25 bp, Homo sapien
gagagcctccaaaaggaacctgcct

SEQ ID NO: 109583 - DNA, 25 bp, Homo sapien
aagagactggaaaatgctatgctgc

SEQ ID NO: 109584 - DNA, 25 bp, Homo sapien
gacaacttgacatgaacccagtgag

SEQ ID NO: 109585 - DNA, 25 bp, Homo sapien
gctatgctgctagacttgaagaagg

SEQ ID NO: 109586 - DNA, 25 bp, Homo sapien
gaaactatgtcaggtactgtgacag

SEQ ID NO: 109587 - DNA, 25 bp, Homo sapien
ctgaggcatcagcaaaaaattggct

SEQ ID NO: 109588 - DNA, 25 bp, Homo sapien
taagcacctgttgtgtgcaagaaac

SEQ ID NO: 109589 - DNA, 25 bp, Homo sapien
ggctgatgctccaaatcagtgtatg

SEQ ID NO: 109590 - DNA, 25 bp, Homo sapien
tccaaattgatcaatggttctgcat

SEQ ID NO: 109591 - DNA, 25 bp, Homo sapien
cagtttttgaattatcaggtactaa

SEQ ID NO: 109592 - DNA, 25 bp, Homo sapien
ccaaattgatcaatggttctgcatt

SEQ ID NO: 109593 - DNA, 25 bp, Homo sapien
tttgaattatcaggtactaaatcct

SEQ ID NO: 109594 - DNA, 25 bp, Homo sapien
atcatgacgctgaatctgaagcagg

SEQ ID NO: 109595 - DNA, 25 bp, Homo sapien
tgaagcaggttagccaaagccatca

SEQ ID NO: 109596 - DNA, 25 bp, Homo sapien
aggttagccaaagccatcacaccag

SEQ ID NO: 109597 - DNA, 25 bp, Homo sapien
caggtaatcatcatgacgctgaatc

SEQ ID NO: 109598 - DNA, 25 bp, Homo sapien
taaaactgcgaaatgacgagcatgc

SEQ ID NO: 109599 - DNA, 25 bp, Homo sapien
tacgctatgcattgtctgactctcc

SEQ ID NO: 109600 - DNA, 25 bp, Homo sapien
taactcaaaagggacaaatgtgcag

SEQ ID NO: 109601 - DNA, 25 bp, Homo sapien
tactgatgcttgtacttggcaaacg

SEQ ID NO: 109602 - DNA, 25 bp, Homo sapien
tgccttagcaactgcatcctgtgtc

SEQ ID NO: 109603 - DNA, 25 bp, Homo sapien
catcctgtgtcaggcgctcctgaac

SEQ ID NO: 109604 - DNA, 25 bp, Homo sapien
tttgtttgatttgccttagcaactg

SEQ ID NO: 109605 - DNA, 25 bp, Homo sapien
gctcctgaaccaaaatccgaattgc

SEQ ID NO: 109606 - DNA, 25 bp, Homo sapien
agcttttctcagcctacaaggtagg

SEQ ID NO: 109607 - DNA, 25 bp, Homo sapien
tcatgggatatagcttttctcagcc

SEQ ID NO: 109608 - DNA, 25 bp, Homo sapien
ttaaggggaaggtagtcatgggata

SEQ ID NO: 109609 - DNA, 25 bp, Homo sapien
ggggaaggtagtcatgggatatagc

SEQ ID NO: 109610 - DNA, 25 bp, Homo sapien
gacagtctctccaccgctgcacagc

SEQ ID NO: 109611 - DNA, 25 bp, Homo sapien
tctctccaccgctgcacagccagtg

SEQ ID NO: 109612 - DNA, 25 bp, Homo sapien
cagccagtgaaactttaggcatctt

SEQ ID NO: 109613 - DNA, 25 bp, Homo sapien
acagccagtgaaactttaggcatct

SEQ ID NO: 109614 - DNA, 25 bp, Homo sapien
ggcaggtgttatcagacactgctgc

SEQ ID NO: 109615 - DNA, 25 bp, Homo sapien
aggcaggtgttatcagacactgctg

SEQ ID NO: 109616 - DNA, 25 bp, Homo sapien
gtttgtctaaagcaacaggtaagcc

SEQ ID NO: 109617 - DNA, 25 bp, Homo sapien
tatgtttgtctaaagcaacaggtaa

SEQ ID NO: 109618 - DNA, 25 bp, Homo sapien
ctcctgtgtcaaaaccaagaatatg

SEQ ID NO: 109619 - DNA, 25 bp, Homo sapien
tgtgtcaaaaccaagaatatgtttg

SEQ ID NO: 109620 - DNA, 25 bp, Homo sapien
agaacactgcttcaatacataattt

SEQ ID NO: 109621 - DNA, 25 bp, Homo sapien
aaagaacactgcttcaatacataat

SEQ ID NO: 109622 - DNA, 25 bp, Homo sapien
gaacactgcttcaatacataatttt

SEQ ID NO: 109623 - DNA, 25 bp, Homo sapien
aagaacactgcttcaatacataatt

SEQ ID NO: 109624 - DNA, 25 bp, Homo sapien
gctcctctatgtgcagcaatcgcag

SEQ ID NO: 109625 - DNA, 25 bp, Homo sapien
tctatgtgcagcaatcgcagaattt

SEQ ID NO: 109626 - DNA, 25 bp, Homo sapien
tgagctcctctatgtgcagcaatcg

SEQ ID NO: 109627 - DNA, 25 bp, Homo sapien
ctctctgagctcctctatgtgcagc

SEQ ID NO: 109628 - DNA, 25 bp, Homo sapien
tatggttcccaactgtactaagtag

SEQ ID NO: 109629 - DNA, 25 bp, Homo sapien
tactaagtaggtgagaagctgaagt

SEQ ID NO: 109630 - DNA, 25 bp, Homo sapien
tccaaacatgccagaagtgtatggt

SEQ ID NO: 109631 - DNA, 25 bp, Homo sapien
taagcaatggtggtaaatctctaga

SEQ ID NO: 109632 - DNA, 25 bp, Homo sapien
tgatcctgtagtgcctctatagaag

SEQ ID NO: 109633 - DNA, 25 bp, Homo sapien
taaaccttgacagttggagaagcca

SEQ ID NO: 109634 - DNA, 25 bp, Homo sapien
gattttttacctctgcatcagtgca

SEQ ID NO: 109635 - DNA, 25 bp, Homo sapien
tagacgttcctgagcatccaagatg

SEQ ID NO: 109636 - DNA, 25 bp, Homo sapien
gtatggctttagcaccagccctggg

SEQ ID NO: 109637 - DNA, 25 bp, Homo sapien
taagactacccttgataccatgagc

SEQ ID NO: 109638 - DNA, 25 bp, Homo sapien
tttacttcacccagaaatcgaatgg

SEQ ID NO: 109639 - DNA, 25 bp, Homo sapien
tggacatattgtctgagggaccgaa

SEQ ID NO: 109640 - DNA, 25 bp, Homo sapien
ctttacagggtagcttgcaacatgg

SEQ ID NO: 109641 - DNA, 25 bp, Homo sapien
tgcttagatgctgcctaccacaggc

SEQ ID NO: 109642 - DNA, 25 bp, Homo sapien
gcatgctcacatgggctacaggcaa

SEQ ID NO: 109643 - DNA, 25 bp, Homo sapien
gacagactggaatagagaagctcct

SEQ ID NO: 109644 - DNA, 25 bp, Homo sapien
ggcataagggatgaaattcgcaaca

SEQ ID NO: 109645 - DNA, 25 bp, Homo sapien
ccatagtttgtatcgaagccattcc

SEQ ID NO: 109646 - DNA, 25 bp, Homo sapien
attcaagacttcaacaaacggaggg

SEQ ID NO: 109647 - DNA, 25 bp, Homo sapien
tgcgtaacagaatggttgtcaagcc

SEQ ID NO: 109648 - DNA, 25 bp, Homo sapien
caatgaaactttggccatgtctctg

SEQ ID NO: 109649 - DNA, 25 bp, Homo sapien
gaaactttggccatgtctctggagt

SEQ ID NO: 109650 - DNA, 25 bp, Homo sapien
tgaaactttggccatgtctctggag

SEQ ID NO: 109651 - DNA, 25 bp, Homo sapien
aatgaaactttggccatgtctctgg

SEQ ID NO: 109652 - DNA, 25 bp, Homo sapien
gaaaccagggttgacgctcacagta

SEQ ID NO: 109653 - DNA, 25 bp, Homo sapien
tagatcctgatgtgaagcccttggg

SEQ ID NO: 109654 - DNA, 25 bp, Homo sapien
tagggctgacctacatcaagtgaca

SEQ ID NO: 109655 - DNA, 25 bp, Homo sapien
gaatcaaatgatcaggcgaggcctc

SEQ ID NO: 109656 - DNA, 25 bp, Homo sapien
tggctgagcctagatttcacccgag

SEQ ID NO: 109657 - DNA, 25 bp, Homo sapien
catcaaactggtaggtctgctggtc

SEQ ID NO: 109658 - DNA, 25 bp, Homo sapien
gaattgattacgactgccgggagag

SEQ ID NO: 109659 - DNA, 25 bp, Homo sapien
caaagggctccataatcgtgggaat

SEQ ID NO: 109660 - DNA, 25 bp, Homo sapien
tgtggtggccactgccgaactttct

SEQ ID NO: 109661 - DNA, 25 bp, Homo sapien
ttctcagagccggtgattggtcccc

SEQ ID NO: 109662 - DNA, 25 bp, Homo sapien
gacgaaagctcagccgtggtgaagc

SEQ ID NO: 109663 - DNA, 25 bp, Homo sapien
tgccgttgctaatgttgcgggccgc

SEQ ID NO: 109664 - DNA, 25 bp, Homo sapien
cctccgtggccgcgggggagggcat

SEQ ID NO: 109665 - DNA, 25 bp, Homo sapien
gcctccgtggccgcgggggagggca

SEQ ID NO: 109666 - DNA, 25 bp, Homo sapien
taaagtctgagactcgcaaaagcgc

SEQ ID NO: 109667 - DNA, 25 bp, Homo sapien
caaagggtccttgacacgaacagag

SEQ ID NO: 109668 - DNA, 25 bp, Homo sapien
gcaaaagcgcttaagtggtacaact

SEQ ID NO: 109669 - DNA, 25 bp, Homo sapien
tgcagttagtataaacaaagggtcc

SEQ ID NO: 109670 - DNA, 25 bp, Homo sapien
aagtggtagaatttccccaacactg

SEQ ID NO: 109671 - DNA, 25 bp, Homo sapien
gagacagatggtagggataaagagg

SEQ ID NO: 109672 - DNA, 25 bp, Homo sapien
ctcttggcagtccttccagcaaaag

SEQ ID NO: 109673 - DNA, 25 bp, Homo sapien
tagaatttccccaacactggaggac

SEQ ID NO: 109674 - DNA, 25 bp, Homo sapien
gagcatagctcttcgtgatcctgaa

SEQ ID NO: 109675 - DNA, 25 bp, Homo sapien
tctgctgttcatcaggagcatagct

SEQ ID NO: 109676 - DNA, 25 bp, Homo sapien
tgcagacacagaagcacaacccatg

SEQ ID NO: 109677 - DNA, 25 bp, Homo sapien
gaggactgccagtattcgtaaaaat

SEQ ID NO: 109678 - DNA, 25 bp, Homo sapien
ctggaggaggtatctttcttcattc

SEQ ID NO: 109679 - DNA, 25 bp, Homo sapien
tgggacaagctcaacatcagggctg

SEQ ID NO: 109680 - DNA, 25 bp, Homo sapien
aagagaaggaaacacgggcaagctg

SEQ ID NO: 109681 - DNA, 25 bp, Homo sapien
tgcacttcttggtttgtgttgactt

SEQ ID NO: 109682 - DNA, 25 bp, Homo sapien
gatctcaacgttggtgtctggattt

SEQ ID NO: 109683 - DNA, 25 bp, Homo sapien
aagttatgataaagagtacagtaca

SEQ ID NO: 109684 - DNA, 25 bp, Homo sapien
gctatactttcgcatgactggcaat

SEQ ID NO: 109685 - DNA, 25 bp, Homo sapien
cgtactatacgtgatggcatgtgct

SEQ ID NO: 109686 - DNA, 25 bp, Homo sapien
tatgacattatgatggctatgacgt

SEQ ID NO: 109687 - DNA, 25 bp, Homo sapien
catgtggcatttagtggcccaggga

SEQ ID NO: 109688 - DNA, 25 bp, Homo sapien
cacaagtgtgggtaattgggcatga

SEQ ID NO: 109689 - DNA, 25 bp, Homo sapien
aaccaggatccctttctatactgac

SEQ ID NO: 109690 - DNA, 25 bp, Homo sapien
taaaaagattcaggaccacttagtc

SEQ ID NO: 109691 - DNA, 25 bp, Homo sapien
aaacgcttgagaaggaggtagccag

SEQ ID NO: 109692 - DNA, 25 bp, Homo sapien
tgagagagattccaatgagagaatc

SEQ ID NO: 109693 - DNA, 25 bp, Homo sapien
gtagccaggtacatggcacgattaa

SEQ ID NO: 109694 - DNA, 25 bp, Homo sapien
gaatttggagggctccgggattctc

SEQ ID NO: 109695 - DNA, 25 bp, Homo sapien
cttgtagaagtatgttacccggaga

SEQ ID NO: 109696 - DNA, 25 bp, Homo sapien
ggcttgtagaagtatgttacccgga

SEQ ID NO: 109697 - DNA, 25 bp, Homo sapien
gtagaagtatgttacccggagagca

SEQ ID NO: 109698 - DNA, 25 bp, Homo sapien
tgttcacccctttacacaattccca

SEQ ID NO: 109699 - DNA, 25 bp, Homo sapien
cactagcaaaatcatataactgtct

SEQ ID NO: 109700 - DNA, 25 bp, Homo sapien
tgcactagcaaaatcatataactgt

SEQ ID NO: 109701 - DNA, 25 bp, Homo sapien
gcactagcaaaatcatataactgtc

SEQ ID NO: 109702 - DNA, 25 bp, Homo sapien
cttgggaagctcatccatggggttt

SEQ ID NO: 109703 - DNA, 25 bp, Homo sapien
tcattacatggtttggtactcagta

SEQ ID NO: 109704 - DNA, 25 bp, Homo sapien
ttccaggtgactgtttacacttaag

SEQ ID NO: 109705 - DNA, 25 bp, Homo sapien
tatcattacatggtttggtactcag

SEQ ID NO: 109706 - DNA, 25 bp, Homo sapien
agacacaagaactgccattaagggg

SEQ ID NO: 109707 - DNA, 25 bp, Homo sapien
tcatatcagaaagacacaagaactg

SEQ ID NO: 109708 - DNA, 25 bp, Homo sapien
cagatatctaaaaattcatgagtat

SEQ ID NO: 109709 - DNA, 25 bp, Homo sapien
aaggcagttttagggtcatatcaga

SEQ ID NO: 109710 - DNA, 25 bp, Homo sapien
cacaggaccatttcagtcacgagtc

SEQ ID NO: 109711 - DNA, 25 bp, Homo sapien
aatggtccttatgtgctgagtcagc

SEQ ID NO: 109712 - DNA, 25 bp, Homo sapien
tgtatcttaaccagaattcaggccc

SEQ ID NO: 109713 - DNA, 25 bp, Homo sapien
cacgagtcatggtctgggtagagtc

SEQ ID NO: 109714 - DNA, 25 bp, Homo sapien
cttatctgcgcaaggctggattttc

SEQ ID NO: 109715 - DNA, 25 bp, Homo sapien
caatcgaaacatgtagggcctggcg

SEQ ID NO: 109716 - DNA, 25 bp, Homo sapien
gattttcttatgtcaatcgaaacat

SEQ ID NO: 109717 - DNA, 25 bp, Homo sapien
tttccaactacttatctgcgcaagg

SEQ ID NO: 109718 - DNA, 25 bp, Homo sapien
tcacactgctatgctagcaatgagt

SEQ ID NO: 109719 - DNA, 25 bp, Homo sapien
gcctccttgagctgccgtggctcca

SEQ ID NO: 109720 - DNA, 25 bp, Homo sapien
gttcgagcttcccaggccactttgt

SEQ ID NO: 109721 - DNA, 25 bp, Homo sapien
gagctgccgtggctccacccagttc

SEQ ID NO: 109722 - DNA, 25 bp, Homo sapien
tccggcatccgtataggtaaagagt

SEQ ID NO: 109723 - DNA, 25 bp, Homo sapien
caggcgatccggcatccgtataggt

SEQ ID NO: 109724 - DNA, 25 bp, Homo sapien
ggcgatccggcatccgtataggtaa

SEQ ID NO: 109725 - DNA, 25 bp, Homo sapien
cggctgcaggcgatccggcatccgt

SEQ ID NO: 109726 - DNA, 25 bp, Homo sapien
ggacctcagtatggttctccaaagc

SEQ ID NO: 109727 - DNA, 25 bp, Homo sapien
acctcagtatggttctccaaagccc

SEQ ID NO: 109728 - DNA, 25 bp, Homo sapien
gacctcagtatggttctccaaagcc

SEQ ID NO: 109729 - DNA, 25 bp, Homo sapien
tggacctcagtatggttctccaaag

SEQ ID NO: 109730 - DNA, 25 bp, Homo sapien
gaaggctgcccgtatctgcaagttg

SEQ ID NO: 109731 - DNA, 25 bp, Homo sapien
aagttgctctcgcacttattgtcag

SEQ ID NO: 109732 - DNA, 25 bp, Homo sapien
tcgcacttattgtcaggcccgcact

SEQ ID NO: 109733 - DNA, 25 bp, Homo sapien
cgtatctgcaagttgctctcgcact

SEQ ID NO: 109734 - DNA, 25 bp, Homo sapien
gacgtctctgctgtactggagcctg

SEQ ID NO: 109735 - DNA, 25 bp, Homo sapien
ctgtactggagcctgcccggcttct

SEQ ID NO: 109736 - DNA, 25 bp, Homo sapien
gttgatgctcaggagcagtttccag

SEQ ID NO: 109737 - DNA, 25 bp, Homo sapien
ggagcagtttccagacgtctctgct

SEQ ID NO: 109738 - DNA, 25 bp, Homo sapien
tccactcatatagactccctggtct

SEQ ID NO: 109739 - DNA, 25 bp, Homo sapien
tggagaaggagggaccatgcaactc

SEQ ID NO: 109740 - DNA, 25 bp, Homo sapien
ggagggaccatgcaactcgtccaac

SEQ ID NO: 109741 - DNA, 25 bp, Homo sapien
tccccattcgtggacaagctcttca

SEQ ID NO: 109742 - DNA, 25 bp, Homo sapien
ctgaggtcatgaagcagagtagcct

SEQ ID NO: 109743 - DNA, 25 bp, Homo sapien
tctatcttctttgcatcaactctcc

SEQ ID NO: 109744 - DNA, 25 bp, Homo sapien
ttggctttgaaccaaattcagctgc

SEQ ID NO: 109745 - DNA, 25 bp, Homo sapien
gctgctctatcttctttgcatcaac

SEQ ID NO: 109746 - DNA, 25 bp, Homo sapien
gtgggagctctaaagagaagtatca

SEQ ID NO: 109747 - DNA, 25 bp, Homo sapien
cccagctcagtcctactttcttggt

SEQ ID NO: 109748 - DNA, 25 bp, Homo sapien
agagaagtatcaggaaagctctacc

SEQ ID NO: 109749 - DNA, 25 bp, Homo sapien
ccgcacccctaactgatttgtggga

SEQ ID NO: 109750 - DNA, 25 bp, Homo sapien
aatacatcattgacacaactcagag

SEQ ID NO: 109751 - DNA, 25 bp, Homo sapien
tctaccagcagtgtacaaaaatgcc

SEQ ID NO: 109752 - DNA, 25 bp, Homo sapien
caaaaatgcctattcctgcacacac

SEQ ID NO: 109753 - DNA, 25 bp, Homo sapien
caactcagagaaatacagatcctta

SEQ ID NO: 109754 - DNA, 25 bp, Homo sapien
accattgcccctccatcactcttcc

SEQ ID NO: 109755 - DNA, 25 bp, Homo sapien
ttgctgctcttgctcgcaccattgc

SEQ ID NO: 109756 - DNA, 25 bp, Homo sapien
gcaccattgcccctccatcactctt

SEQ ID NO: 109757 - DNA, 25 bp, Homo sapien
tgccttgctgctcttgctcgcacca

SEQ ID NO: 109758 - DNA, 25 bp, Homo sapien
gtattcatttcccttgtctgtggtg

SEQ ID NO: 109759 - DNA, 25 bp, Homo sapien
cacacaaggtgagtgtgttgcttgg

SEQ ID NO: 109760 - DNA, 25 bp, Homo sapien
aaagcagcacacacaaggtgagtgt

SEQ ID NO: 109761 - DNA, 25 bp, Homo sapien
attcatttcccttgtctgtggtgca

SEQ ID NO: 109762 - DNA, 25 bp, Homo sapien
gagaaccttgagtaaggaaccatga

SEQ ID NO: 109763 - DNA, 25 bp, Homo sapien
tgagggaagagcaacatcagctgtg

SEQ ID NO: 109764 - DNA, 25 bp, Homo sapien
catcaccagactctttgggtcctta

SEQ ID NO: 109765 - DNA, 25 bp, Homo sapien
tgaagacaacggtaggagaaccttg

SEQ ID NO: 109766 - DNA, 25 bp, Homo sapien
tacaagaaatgtatgcttatggtgg

SEQ ID NO: 109767 - DNA, 25 bp, Homo sapien
cattgctcacttctactgaactcca

SEQ ID NO: 109768 - DNA, 25 bp, Homo sapien
gaactccaagtgatattttgggctg

SEQ ID NO: 109769 - DNA, 25 bp, Homo sapien
gatccattctaactatgcttctaaa

SEQ ID NO: 109770 - DNA, 25 bp, Homo sapien
ctgcggaagggcgagggccccggcg

SEQ ID NO: 109771 - DNA, 25 bp, Homo sapien
gcgtgcgggagcagagggctggagt

SEQ ID NO: 109772 - DNA, 25 bp, Homo sapien
gggtgctaaggagcccccggcagct

SEQ ID NO: 109773 - DNA, 25 bp, Homo sapien
ctggagtgaaggctgcggaagggcg

SEQ ID NO: 109774 - DNA, 25 bp, Homo sapien
caccgccgagttgcctttttccaca

SEQ ID NO: 109775 - DNA, 25 bp, Homo sapien
cgccgagttgcctttttccacagag

SEQ ID NO: 109776 - DNA, 25 bp, Homo sapien
tctggcagcggtagaacggcgactt

SEQ ID NO: 109777 - DNA, 25 bp, Homo sapien
ggcagcggtagaacggcgacttcat

SEQ ID NO: 109778 - DNA, 25 bp, Homo sapien
tagtgaagagcacggtcatcagcgc

SEQ ID NO: 109779 - DNA, 25 bp, Homo sapien
tacgggcagagaacacatagtgaag

SEQ ID NO: 109780 - DNA, 25 bp, Homo sapien
aacgagttgtccaatgcgggcgcaa

SEQ ID NO: 109781 - DNA, 25 bp, Homo sapien
ccatgaaaggtagcgcgcagaaagc

SEQ ID NO: 109782 - DNA, 25 bp, Homo sapien
atccgcggccggacagtctcagtgc

SEQ ID NO: 109783 - DNA, 25 bp, Homo sapien
gtccatcccgatccgctccaccctt

SEQ ID NO: 109784 - DNA, 25 bp, Homo sapien
gcctggcgccgcgtccatcccgatc

SEQ ID NO: 109785 - DNA, 25 bp, Homo sapien
gcatccgcggccggacagtctcagt

SEQ ID NO: 109786 - DNA, 25 bp, Homo sapien
gcctcacctactcccaggtgtcttg

SEQ ID NO: 109787 - DNA, 25 bp, Homo sapien
ctcacctactcccaggtgtcttggc

SEQ ID NO: 109788 - DNA, 25 bp, Homo sapien
agcctcacctactcccaggtgtctt

SEQ ID NO: 109789 - DNA, 25 bp, Homo sapien
tcacctactcccaggtgtcttggcg

SEQ ID NO: 109790 - DNA, 25 bp, Homo sapien
tatagcttattgtcacccatgtctc

SEQ ID NO: 109791 - DNA, 25 bp, Homo sapien
tatcattcagttgtctagatcccaa

SEQ ID NO: 109792 - DNA, 25 bp, Homo sapien
tggaggctagataacaaatgatgac

SEQ ID NO: 109793 - DNA, 25 bp, Homo sapien
tattcaatgtgtccagtaggtcaaa

SEQ ID NO: 109794 - DNA, 25 bp, Homo sapien
ggtctgtaagccaggtaaagataag

SEQ ID NO: 109795 - DNA, 25 bp, Homo sapien
ggtgtgcgtgtatatactaggcgtt

SEQ ID NO: 109796 - DNA, 25 bp, Homo sapien
tatactaggcgttacgagagagagg

SEQ ID NO: 109797 - DNA, 25 bp, Homo sapien
agagagggtctgtaagccaggtaaa

SEQ ID NO: 109798 - DNA, 25 bp, Homo sapien
gacccagtctgattaagtccctgaa

SEQ ID NO: 109799 - DNA, 25 bp, Homo sapien
taatggcagcaatggattcacttac

SEQ ID NO: 109800 - DNA, 25 bp, Homo sapien
ctcaagtttctaggtccctgccagg

SEQ ID NO: 109801 - DNA, 25 bp, Homo sapien
gaagctgagtacttgtcggagaccc

SEQ ID NO: 109802 - DNA, 25 bp, Homo sapien
gaaatcacagatagaaatcgcaagg

SEQ ID NO: 109803 - DNA, 25 bp, Homo sapien
tcgcaaggctcggaggtcttctgct

SEQ ID NO: 109804 - DNA, 25 bp, Homo sapien
taaatgctccatagtaagcgcgata

SEQ ID NO: 109805 - DNA, 25 bp, Homo sapien
caagggtccacaattgaaatcacag

SEQ ID NO: 109806 - DNA, 25 bp, Homo sapien
gtctaatgaaaatcttgtgaaaaaa

SEQ ID NO: 109807 - DNA, 25 bp, Homo sapien
ctaagaggtctaatgaaaatcttgt

SEQ ID NO: 109808 - DNA, 25 bp, Homo sapien
tcttgtgaaaaaatatccgaaatac

SEQ ID NO: 109809 - DNA, 25 bp, Homo sapien
gaggtctaatgaaaatcttgtgaaa

SEQ ID NO: 109810 - DNA, 25 bp, Homo sapien
cacagactggattccatgttagtgg

SEQ ID NO: 109811 - DNA, 25 bp, Homo sapien
acagactggattccatgttagtgga

SEQ ID NO: 109812 - DNA, 25 bp, Homo sapien
tcacagactggattccatgttagtg

SEQ ID NO: 109813 - DNA, 25 bp, Homo sapien
cagactggattccatgttagtggaa

SEQ ID NO: 109814 - DNA, 25 bp, Homo sapien
tattcctcagcttaccacagagtga

SEQ ID NO: 109815 - DNA, 25 bp, Homo sapien
caagtactccccgatggtggctggg

SEQ ID NO: 109816 - DNA, 25 bp, Homo sapien
taaacatggctctacagtgagtcac

SEQ ID NO: 109817 - DNA, 25 bp, Homo sapien
tatcgtcaactgaggctaagtcctg

SEQ ID NO: 109818 - DNA, 25 bp, Homo sapien
tatatgctgctccagttttgaaggt

SEQ ID NO: 109819 - DNA, 25 bp, Homo sapien
tcagttgtgctccttttcggctata

SEQ ID NO: 109820 - DNA, 25 bp, Homo sapien
tcttggaacctaagatcttaccgtc

SEQ ID NO: 109821 - DNA, 25 bp, Homo sapien
tctccacggacagcagaatacggct

SEQ ID NO: 109822 - DNA, 25 bp, Homo sapien
tagagtctccgcttcagttgcagct

SEQ ID NO: 109823 - DNA, 25 bp, Homo sapien
cctgcaagctgggtttagagtctcc

SEQ ID NO: 109824 - DNA, 25 bp, Homo sapien
cagagatgctgaaaccccttgaacc

SEQ ID NO: 109825 - DNA, 25 bp, Homo sapien
cagcaggctttgcaccttggagtcc

SEQ ID NO: 109826 - DNA, 25 bp, Homo sapien
tcattgccgagggtagtatctttac

SEQ ID NO: 109827 - DNA, 25 bp, Homo sapien
tgtctgcagcagtccaaagaaatat

SEQ ID NO: 109828 - DNA, 25 bp, Homo sapien
tcacaacagcatcaggcttagtgcc

SEQ ID NO: 109829 - DNA, 25 bp, Homo sapien
gtatctttacctccaagtgagcaag

SEQ ID NO: 109830 - DNA, 25 bp, Homo sapien
tctggtaccaataggagagctgctg

SEQ ID NO: 109831 - DNA, 25 bp, Homo sapien
gatccctccgtggtcaatcaaggaa

SEQ ID NO: 109832 - DNA, 25 bp, Homo sapien
tattggtttgggctataaagagccc

SEQ ID NO: 109833 - DNA, 25 bp, Homo sapien
cacacctgggagataggtctattcc

SEQ ID NO: 109834 - DNA, 25 bp, Homo sapien
gatgactaatctggacataccataa

SEQ ID NO: 109835 - DNA, 25 bp, Homo sapien
gaaggctcattcttagcaggtcgtg

SEQ ID NO: 109836 - DNA, 25 bp, Homo sapien
tagggatctagaccagatatacagc

SEQ ID NO: 109837 - DNA, 25 bp, Homo sapien
caggtcgtgccccatgaagattaaa

SEQ ID NO: 109838 - DNA, 25 bp, Homo sapien
gacttccaccatagcaacttgcaca

SEQ ID NO: 109839 - DNA, 25 bp, Homo sapien
cacaaccgggaaacaggtctatgcc

SEQ ID NO: 109840 - DNA, 25 bp, Homo sapien
aaatgaccagggcaagtcccattca

SEQ ID NO: 109841 - DNA, 25 bp, Homo sapien
tcttagatgtggctttagattcacc

SEQ ID NO: 109842 - DNA, 25 bp, Homo sapien
gacataatttactcaagcaagtgcc

SEQ ID NO: 109843 - DNA, 25 bp, Homo sapien
tagttaaaagctcaggcatgaagcc

SEQ ID NO: 109844 - DNA, 25 bp, Homo sapien
tgaagccacaactgaattcagatcc

SEQ ID NO: 109845 - DNA, 25 bp, Homo sapien
tatgtaacttaccagctacgtgagc

SEQ ID NO: 109846 - DNA, 25 bp, Homo sapien
gcttagtgaatacaacaggaccttc

SEQ ID NO: 109847 - DNA, 25 bp, Homo sapien
gaatgtcagataccaacacacgcgg

SEQ ID NO: 109848 - DNA, 25 bp, Homo sapien
tcttgggcatgtccttgcaggaagc

SEQ ID NO: 109849 - DNA, 25 bp, Homo sapien
caaatgagagtattggccatcagtc

SEQ ID NO: 109850 - DNA, 25 bp, Homo sapien
aagctctcggtccttgccactaggt

SEQ ID NO: 109851 - DNA, 25 bp, Homo sapien
gccactaggttgcagttccactgct

SEQ ID NO: 109852 - DNA, 25 bp, Homo sapien
gctctcggtccttgccactaggttg

SEQ ID NO: 109853 - DNA, 25 bp, Homo sapien
tgccactaggttgcagttccactgc

SEQ ID NO: 109854 - DNA, 25 bp, Homo sapien
gcacccaaattaccagtaaggtgga

SEQ ID NO: 109855 - DNA, 25 bp, Homo sapien
tctttccacccatgagcccaatttt

SEQ ID NO: 109856 - DNA, 25 bp, Homo sapien
caagcttttcagtccatctttgagt

SEQ ID NO: 109857 - DNA, 25 bp, Homo sapien
cataccaacatgctgtacaaatgat

SEQ ID NO: 109858 - DNA, 25 bp, Homo sapien
agaattgtaggtctgtatcacagcc

SEQ ID NO: 109859 - DNA, 25 bp, Homo sapien
gagttgcctttagcatcaccaaaga

SEQ ID NO: 109860 - DNA, 25 bp, Homo sapien
tgagctgctttgaaggatcattcct

SEQ ID NO: 109861 - DNA, 25 bp, Homo sapien
caagcctcttgttgaacctgtttga

SEQ ID NO: 109862 - DNA, 25 bp, Homo sapien
tcttgtatggactcattcttgcggc

SEQ ID NO: 109863 - DNA, 25 bp, Homo sapien
taggaggttctcgtgctggtcttgt

SEQ ID NO: 109864 - DNA, 25 bp, Homo sapien
tcaattatgttggtctggactcagc

SEQ ID NO: 109865 - DNA, 25 bp, Homo sapien
tagtctcctggtggcttgaatgcgg

SEQ ID NO: 109866 - DNA, 25 bp, Homo sapien
caaacaatgaagttaggagaaccca

SEQ ID NO: 109867 - DNA, 25 bp, Homo sapien
gaacccaatcccgtgaaatgagcgg

SEQ ID NO: 109868 - DNA, 25 bp, Homo sapien
gcaagtgtgtccatccaaggaacca

SEQ ID NO: 109869 - DNA, 25 bp, Homo sapien
tattcccaggaagatacactaagag

SEQ ID NO: 109870 - DNA, 25 bp, Homo sapien
ggtccggtactcgaagcgcacggca

SEQ ID NO: 109871 - DNA, 25 bp, Homo sapien
gtactcgaagcgcacggcagtctga

SEQ ID NO: 109872 - DNA, 25 bp, Homo sapien
ctgggaagcgttaagccccagcaga

SEQ ID NO: 109873 - DNA, 25 bp, Homo sapien
acggcagtctgacctcggctgggaa

SEQ ID NO: 109874 - DNA, 25 bp, Homo sapien
gccaggccttgcaagtgcgagtgtc

SEQ ID NO: 109875 - DNA, 25 bp, Homo sapien
tcggctgctgcatccgagcggcgct

SEQ ID NO: 109876 - DNA, 25 bp, Homo sapien
ggagcgttccgagactcagaggaaa

SEQ ID NO: 109877 - DNA, 25 bp, Homo sapien
tgcctggaaaagagatgcgccctcc

SEQ ID NO: 109878 - DNA, 25 bp, Homo sapien
gtcgcgtctcgcagtcctcagactg

SEQ ID NO: 109879 - DNA, 25 bp, Homo sapien
gggagtcattggaggcattgcccat

SEQ ID NO: 109880 - DNA, 25 bp, Homo sapien
tgtcgcgtctcgcagtcctcagact

SEQ ID NO: 109881 - DNA, 25 bp, Homo sapien
actgggagtcattggaggcattgcc

SEQ ID NO: 109882 - DNA, 25 bp, Homo sapien
catggcgaaagcgaagtaggtgcac

SEQ ID NO: 109883 - DNA, 25 bp, Homo sapien
tcggtcaccagcacgtggaacaagg

SEQ ID NO: 109884 - DNA, 25 bp, Homo sapien
ccatggcgaagagcatgagcatcgt

SEQ ID NO: 109885 - DNA, 25 bp, Homo sapien
agcgccagtgctatgaggttcccca

SEQ ID NO: 109886 - DNA, 25 bp, Homo sapien
gcgaaggtgatggtcatgatagcca

SEQ ID NO: 109887 - DNA, 25 bp, Homo sapien
gtacagctgcaggtaagcggtccgc

SEQ ID NO: 109888 - DNA, 25 bp, Homo sapien
gcgagcaccgagacaatgagaagca

SEQ ID NO: 109889 - DNA, 25 bp, Homo sapien
gacactgaagttgcaggcgagcacc

SEQ ID NO: 109890 - DNA, 25 bp, Homo sapien
gggaaggctacagatctttacaaat

SEQ ID NO: 109891 - DNA, 25 bp, Homo sapien
gcaacgcccataagccaggataagg

SEQ ID NO: 109892 - DNA, 25 bp, Homo sapien
caagttgcaaaaagtttgtagggcg

SEQ ID NO: 109893 - DNA, 25 bp, Homo sapien
ctgtggaaacgtagggagtgactta

SEQ ID NO: 109894 - DNA, 25 bp, Homo sapien
caattactaagccaagataggcaac

SEQ ID NO: 109895 - DNA, 25 bp, Homo sapien
ctccaggtcgtcaggctggaacagt

SEQ ID NO: 109896 - DNA, 25 bp, Homo sapien
cagtgacagccatcctaaggtggaa

SEQ ID NO: 109897 - DNA, 25 bp, Homo sapien
ggtactacattttgccctggcagga

SEQ ID NO: 109898 - DNA, 25 bp, Homo sapien
acaaatgctctaaacttctgcttca

SEQ ID NO: 109899 - DNA, 25 bp, Homo sapien
caaatgctctaaacttctgcttcag

SEQ ID NO: 109900 - DNA, 25 bp, Homo sapien
taacaaatgctctaaacttctgctt

SEQ ID NO: 109901 - DNA, 25 bp, Homo sapien
aataacaaatgctctaaacttctgc

SEQ ID NO: 109902 - DNA, 25 bp, Homo sapien
tctgacagtgacattaagagcgtgt

SEQ ID NO: 109903 - DNA, 25 bp, Homo sapien
agtgcataactgtaagctgaaggac

SEQ ID NO: 109904 - DNA, 25 bp, Homo sapien
taaagttgccccaaatcaaggcagc

SEQ ID NO: 109905 - DNA, 25 bp, Homo sapien
gcatcaaataactgctaaagttgcc

SEQ ID NO: 109906 - DNA, 25 bp, Homo sapien
gatgtaagaagcagtaatggaggca

SEQ ID NO: 109907 - DNA, 25 bp, Homo sapien
ctccagcttttacaggtcagacctg

SEQ ID NO: 109908 - DNA, 25 bp, Homo sapien
atgagcacatgaagatgtaagaagc

SEQ ID NO: 109909 - DNA, 25 bp, Homo sapien
ggtcagacctgttaatagtaggcac

SEQ ID NO: 109910 - DNA, 25 bp, Homo sapien
gtgggtttctacatcacagcgtttc

SEQ ID NO: 109911 - DNA, 25 bp, Homo sapien
cagaacagtttctgccctgacagag

SEQ ID NO: 109912 - DNA, 25 bp, Homo sapien
caaaagcatataagccatgtgggtt

SEQ ID NO: 109913 - DNA, 25 bp, Homo sapien
tgttgcataaactcccctgctcaga

SEQ ID NO: 109914 - DNA, 25 bp, Homo sapien
tacagtttatgcaatgggtcagtca

SEQ ID NO: 109915 - DNA, 25 bp, Homo sapien
tgatccccaagctgaatgcaaagct

SEQ ID NO: 109916 - DNA, 25 bp, Homo sapien
taattcccaacaccctaagacagtc

SEQ ID NO: 109917 - DNA, 25 bp, Homo sapien
tcttgctcgtgtaggaaagagacta

SEQ ID NO: 109918 - DNA, 25 bp, Homo sapien
aagaattgatggtgggtttcccaga

SEQ ID NO: 109919 - DNA, 25 bp, Homo sapien
agaagaattgatggtgggtttccca

SEQ ID NO: 109920 - DNA, 25 bp, Homo sapien
atggtgggtttcccagagagtagag

SEQ ID NO: 109921 - DNA, 25 bp, Homo sapien
tggtgggtttcccagagagtagagg

SEQ ID NO: 109922 - DNA, 25 bp, Homo sapien
agagcgcaaagggtagtcatcttca

SEQ ID NO: 109923 - DNA, 25 bp, Homo sapien
gcagccataggtgtttatgccggag

SEQ ID NO: 109924 - DNA, 25 bp, Homo sapien
tacaaagcaaattgcagagagcgca

SEQ ID NO: 109925 - DNA, 25 bp, Homo sapien
caagagcaggaaggtttggcagcca

SEQ ID NO: 109926 - DNA, 25 bp, Homo sapien
caatggctttagacacctagcccct

SEQ ID NO: 109927 - DNA, 25 bp, Homo sapien
ctcgccttctgcagaagaaggagca

SEQ ID NO: 109928 - DNA, 25 bp, Homo sapien
tggctttagacacctagcccctctt

SEQ ID NO: 109929 - DNA, 25 bp, Homo sapien
ccctcttttcttcactcgccttctg

SEQ ID NO: 109930 - DNA, 25 bp, Homo sapien
ttgataaaaacctaagagcttggag

SEQ ID NO: 109931 - DNA, 25 bp, Homo sapien
gggaagaggtttcattcatatatgc

SEQ ID NO: 109932 - DNA, 25 bp, Homo sapien
taaggatggcaaagacccaagggtc

SEQ ID NO: 109933 - DNA, 25 bp, Homo sapien
tcctttcgggaagaggtttcattca

SEQ ID NO: 109934 - DNA, 25 bp, Homo sapien
aacagaggactgaacgcattagtct

SEQ ID NO: 109935 - DNA, 25 bp, Homo sapien
gactgaacgcattagtctcagaaca

SEQ ID NO: 109936 - DNA, 25 bp, Homo sapien
cagaggactgaacgcattagtctca

SEQ ID NO: 109937 - DNA, 25 bp, Homo sapien
gaggactgaacgcattagtctcaga

SEQ ID NO: 109938 - DNA, 25 bp, Homo sapien
ttactggcatctgactgtgtagaac

SEQ ID NO: 109939 - DNA, 25 bp, Homo sapien
tagaacaggaagtttgtgttgcatc

SEQ ID NO: 109940 - DNA, 25 bp, Homo sapien
gttgcatcttgtgttcttaatgaaa

SEQ ID NO: 109941 - DNA, 25 bp, Homo sapien
tcttgtgttcttaatgaaatccgac

SEQ ID NO: 109942 - DNA, 25 bp, Homo sapien
gacaacttgacctgcagttcctgga

SEQ ID NO: 109943 - DNA, 25 bp, Homo sapien
tactgtagtgatgagagtactccca

SEQ ID NO: 109944 - DNA, 25 bp, Homo sapien
aatgcagccgattgttcctccaaag

SEQ ID NO: 109945 - DNA, 25 bp, Homo sapien
taagtgatcacaagacagcaggctt

SEQ ID NO: 109946 - DNA, 25 bp, Homo sapien
tatgtttaggaattacccatgggcc

SEQ ID NO: 109947 - DNA, 25 bp, Homo sapien
gctttggataaacaactcaatgaga

SEQ ID NO: 109948 - DNA, 25 bp, Homo sapien
ttgcaacctcactttaaaacctggc

SEQ ID NO: 109949 - DNA, 25 bp, Homo sapien
ctggcaaccacactttacgaatctg

SEQ ID NO: 109950 - DNA, 25 bp, Homo sapien
cctgtgtgaataaccttcttatctg

SEQ ID NO: 109951 - DNA, 25 bp, Homo sapien
cagtccactagggctccatactctg

SEQ ID NO: 109952 - DNA, 25 bp, Homo sapien
ttatctgctttggactctgatgccc

SEQ ID NO: 109953 - DNA, 25 bp, Homo sapien
gcccactgtaggctgcctttctgtg

SEQ ID NO: 109954 - DNA, 25 bp, Homo sapien
gtcaacttcagacttgttggtaaca

SEQ ID NO: 109955 - DNA, 25 bp, Homo sapien
tcaacttcagacttgttggtaacat

SEQ ID NO: 109956 - DNA, 25 bp, Homo sapien
agtcaacttcagacttgttggtaac

SEQ ID NO: 109957 - DNA, 25 bp, Homo sapien
cagcctcctccgaaggtggactgaa

SEQ ID NO: 109958 - DNA, 25 bp, Homo sapien
tttagggatatcacacatttggctg

SEQ ID NO: 109959 - DNA, 25 bp, Homo sapien
catttggctgtatacttagtgactt

SEQ ID NO: 109960 - DNA, 25 bp, Homo sapien
agtggtttgtggataagacctgagc

SEQ ID NO: 109961 - DNA, 25 bp, Homo sapien
tttcattgcatttgggagaacaata

SEQ ID NO: 109962 - DNA, 25 bp, Homo sapien
tgctaccaataattcagccacttcc

SEQ ID NO: 109963 - DNA, 25 bp, Homo sapien
gccacttcctgttcatgagatccta

SEQ ID NO: 109964 - DNA, 25 bp, Homo sapien
taacctttaagtcctctcttgctac

SEQ ID NO: 109965 - DNA, 25 bp, Homo sapien
tgctatcatgtttgacccatcgata

SEQ ID NO: 109966 - DNA, 25 bp, Homo sapien
gatattgttggtgaatgcctgggcc

SEQ ID NO: 109967 - DNA, 25 bp, Homo sapien
ttactccatttgctagccaaaagcc

SEQ ID NO: 109968 - DNA, 25 bp, Homo sapien
ctgactttgctcctgctgaccctgc

SEQ ID NO: 109969 - DNA, 25 bp, Homo sapien
ttggtccagccaaacattcctccct

SEQ ID NO: 109970 - DNA, 25 bp, Homo sapien
ctctcttctctatgctcatgcacag

SEQ ID NO: 109971 - DNA, 25 bp, Homo sapien
tcttctctatgctcatgcacagagc

SEQ ID NO: 109972 - DNA, 25 bp, Homo sapien
catgctttcttctctagcgctgcca

SEQ ID NO: 109973 - DNA, 25 bp, Homo sapien
aaaactctgcatttggctttgttct

SEQ ID NO: 109974 - DNA, 25 bp, Homo sapien
tcctctaagaataaatgtcctctaa

SEQ ID NO: 109975 - DNA, 25 bp, Homo sapien
taagaataaatgtcctctaaaactc

SEQ ID NO: 109976 - DNA, 25 bp, Homo sapien
tcatcctctaagaataaatgtcctc

SEQ ID NO: 109977 - DNA, 25 bp, Homo sapien
atctgcctctatgtgaacctccttt

SEQ ID NO: 109978 - DNA, 25 bp, Homo sapien
aatctgcctctatgtgaacctcctt

SEQ ID NO: 109979 - DNA, 25 bp, Homo sapien
cttttttgaatctagggctttcttg

SEQ ID NO: 109980 - DNA, 25 bp, Homo sapien
cacaaaatcatccttttccttaaat

SEQ ID NO: 109981 - DNA, 25 bp, Homo sapien
tagatgtggttttgtaatttcccta

SEQ ID NO: 109982 - DNA, 25 bp, Homo sapien
ctagatgtggttttgtaatttccct

SEQ ID NO: 109983 - DNA, 25 bp, Homo sapien
gcctgactttcgcatgttccccggg

SEQ ID NO: 109984 - DNA, 25 bp, Homo sapien
actggcctgactttcgcatgttccc

SEQ ID NO: 109985 - DNA, 25 bp, Homo sapien
catgggacttcctggcgtggtttgg

SEQ ID NO: 109986 - DNA, 25 bp, Homo sapien
tgactttcgcatgttccccgggttg

SEQ ID NO: 109987 - DNA, 25 bp, Homo sapien
catcctaactccgagggtcagggaa

SEQ ID NO: 109988 - DNA, 25 bp, Homo sapien
gctgactggtagatgttcaaccctg

SEQ ID NO: 109989 - DNA, 25 bp, Homo sapien
gagggcaccgcatcctaactccgag

SEQ ID NO: 109990 - DNA, 25 bp, Homo sapien
cactgcagcgcgctaagtctaaggg

SEQ ID NO: 109991 - DNA, 25 bp, Homo sapien
ttcttctgttccacgattcatggta

SEQ ID NO: 109992 - DNA, 25 bp, Homo sapien
cttctgttccacgattcatggtata

SEQ ID NO: 109993 - DNA, 25 bp, Homo sapien
tcttctgttccacgattcatggtat

SEQ ID NO: 109994 - DNA, 25 bp, Homo sapien
ttgggggctcttccattctttccat

SEQ ID NO: 109995 - DNA, 25 bp, Homo sapien
gtcttttcggctccggaatctccca

SEQ ID NO: 109996 - DNA, 25 bp, Homo sapien
tcggctccggaatctcccaaactta

SEQ ID NO: 109997 - DNA, 25 bp, Homo sapien
ctgtcttttcggctccggaatctcc

SEQ ID NO: 109998 - DNA, 25 bp, Homo sapien
tcaactgtcttttcggctccggaat

SEQ ID NO: 109999 - DNA, 25 bp, Homo sapien
cctaagtgacttaggttgatacaaa

SEQ ID NO: 110000 - DNA, 25 bp, Homo sapien
tcttgctagaggactggagtgtaaa

SEQ ID NO: 110001 - DNA, 25 bp, Homo sapien
gaggactggagtgtaaatcacctaa

SEQ ID NO: 110002 - DNA, 25 bp, Homo sapien
cttgctttgatttgggtcttgctag

SEQ ID NO: 110003 - DNA, 25 bp, Homo sapien
gtcacatgcagggttgggagggttg

SEQ ID NO: 110004 - DNA, 25 bp, Homo sapien
tggttaccttggtggtgagatatgc

SEQ ID NO: 110005 - DNA, 25 bp, Homo sapien
tcacacatgaagcagctgcagctcc

SEQ ID NO: 110006 - DNA, 25 bp, Homo sapien
agcaggatggcattggttaccttgg

SEQ ID NO: 110007 - DNA, 25 bp, Homo sapien
tggtgctggtttgaagatacacccc

SEQ ID NO: 110008 - DNA, 25 bp, Homo sapien
gaagttctccattgagaagctccat

SEQ ID NO: 110009 - DNA, 25 bp, Homo sapien
ctctataccggaaagcagcaatgga

SEQ ID NO: 110010 - DNA, 25 bp, Homo sapien
ccagtaatagcggtaaggatgatct

SEQ ID NO: 110011 - DNA, 25 bp, Homo sapien
aaagttaaaagtccaaccagcatgg

SEQ ID NO: 110012 - DNA, 25 bp, Homo sapien
tgtgaggtaaaggtgaacttaaaga

SEQ ID NO: 110013 - DNA, 25 bp, Homo sapien
ttaaaagtccaaccagcatggaaag

SEQ ID NO: 110014 - DNA, 25 bp, Homo sapien
ctgtgaggtaaaggtgaacttaaag

SEQ ID NO: 110015 - DNA, 25 bp, Homo sapien
cctgagtggttatagctttcctgta

SEQ ID NO: 110016 - DNA, 25 bp, Homo sapien
tcaggtctttctgctacctcttacc

SEQ ID NO: 110017 - DNA, 25 bp, Homo sapien
cctgcctcacctgtgctagaatgta

SEQ ID NO: 110018 - DNA, 25 bp, Homo sapien
cctctagtagggttggtcgccagtg

SEQ ID NO: 110019 - DNA, 25 bp, Homo sapien
gaagcgtctctgaaatctacccttg

SEQ ID NO: 110020 - DNA, 25 bp, Homo sapien
tctacccttgcaagcttcagacaaa

SEQ ID NO: 110021 - DNA, 25 bp, Homo sapien
aaatcagttgatctccctgagccac

SEQ ID NO: 110022 - DNA, 25 bp, Homo sapien
tcctcatggaaagagaggctccctc

SEQ ID NO: 110023 - DNA, 25 bp, Homo sapien
taaataacctgcattggacagcgcc

SEQ ID NO: 110024 - DNA, 25 bp, Homo sapien
aaatcagcgtttgtcaacctcaggg

SEQ ID NO: 110025 - DNA, 25 bp, Homo sapien
tatcctgcccgaaatggtagtcgtg

SEQ ID NO: 110026 - DNA, 25 bp, Homo sapien
tagtcgtgccaaggctgagtaacct

SEQ ID NO: 110027 - DNA, 25 bp, Homo sapien
gaattctaaataaagagtctattaa

SEQ ID NO: 110028 - DNA, 25 bp, Homo sapien
tgataatacactaataaaagaatac

SEQ ID NO: 110029 - DNA, 25 bp, Homo sapien
aaagctgactgaaatgagatttgta

SEQ ID NO: 110030 - DNA, 25 bp, Homo sapien
tcttgtgtgattaaaagctgactga

SEQ ID NO: 110031 - DNA, 25 bp, Homo sapien
gaaacattgactaacattggctgta

SEQ ID NO: 110032 - DNA, 25 bp, Homo sapien
ttggtctctgcagctagagttccca

SEQ ID NO: 110033 - DNA, 25 bp, Homo sapien
gagcagacagcatagaaacattgac

SEQ ID NO: 110034 - DNA, 25 bp, Homo sapien
taaaagatggctatggtcgctcttg

SEQ ID NO: 110035 - DNA, 25 bp, Homo sapien
gacagtcgtttgtccaggtaccaga

SEQ ID NO: 110036 - DNA, 25 bp, Homo sapien
tggtagatgtacaggcctagcactg

SEQ ID NO: 110037 - DNA, 25 bp, Homo sapien
tggtcagggcggtacacaattctct

SEQ ID NO: 110038 - DNA, 25 bp, Homo sapien
tgtcaaaatcaagggcgccacatat

SEQ ID NO: 110039 - DNA, 25 bp, Homo sapien
ctggagcctcctgagggcattttgc

SEQ ID NO: 110040 - DNA, 25 bp, Homo sapien
gggcattttgctttctcttttcgct

SEQ ID NO: 110041 - DNA, 25 bp, Homo sapien
ggcattttgctttctcttttcgctg

SEQ ID NO: 110042 - DNA, 25 bp, Homo sapien
attttgctttctcttttcgctgcat

SEQ ID NO: 110043 - DNA, 25 bp, Homo sapien
tgcaaaaaacaactctcggctggag

SEQ ID NO: 110044 - DNA, 25 bp, Homo sapien
ctgattgggcgcgtaatttccctac

SEQ ID NO: 110045 - DNA, 25 bp, Homo sapien
ggctcggctccgtagctgcaaaaaa

SEQ ID NO: 110046 - DNA, 25 bp, Homo sapien
ccggcgggaggactctgtaatcgtc

SEQ ID NO: 110047 - DNA, 25 bp, Homo sapien
ccccgccgggcgtggagggctcgcg

SEQ ID NO: 110048 - DNA, 25 bp, Homo sapien
gccgggcgtggagggctcgcggccg

SEQ ID NO: 110049 - DNA, 25 bp, Homo sapien
ctgcccccgccgggcgtggagggct

SEQ ID NO: 110050 - DNA, 25 bp, Homo sapien
ccgccgggcgtggagggctcgcggc

SEQ ID NO: 110051 - DNA, 25 bp, Homo sapien
gagcccggcaccgcggcgcctgagg

SEQ ID NO: 110052 - DNA, 25 bp, Homo sapien
cggagcccggcaccgcggcgcctga

SEQ ID NO: 110053 - DNA, 25 bp, Homo sapien
cacggagcccggcaccgcggcgcct

SEQ ID NO: 110054 - DNA, 25 bp, Homo sapien
actgcacggagcccggcaccgcggc

SEQ ID NO: 110055 - DNA, 25 bp, Homo sapien
gttgaggagacagagcgtggagaac

SEQ ID NO: 110056 - DNA, 25 bp, Homo sapien
aacagcgcggcgtagagcagggcgt

SEQ ID NO: 110057 - DNA, 25 bp, Homo sapien
caggtaggcaaaggcgaacagcgcg

SEQ ID NO: 110058 - DNA, 25 bp, Homo sapien
agaagagggtggtcctgagcgctgc

SEQ ID NO: 110059 - DNA, 25 bp, Homo sapien
tagtcaatacatgctagtagcctgg

SEQ ID NO: 110060 - DNA, 25 bp, Homo sapien
cctggaccaggcattttgaagggaa

SEQ ID NO: 110061 - DNA, 25 bp, Homo sapien
tataaatactagtcacggaaatggg

SEQ ID NO: 110062 - DNA, 25 bp, Homo sapien
ggctaactgccatggactagtcaat

SEQ ID NO: 110063 - DNA, 25 bp, Homo sapien
ggtactttctacacatttggtcaga

SEQ ID NO: 110064 - DNA, 25 bp, Homo sapien
ctctctccgaggttgtagcattcag

SEQ ID NO: 110065 - DNA, 25 bp, Homo sapien
taaacacgtgctttccgattcacca

SEQ ID NO: 110066 - DNA, 25 bp, Homo sapien
tagcccatggtttcggtttgatcca

SEQ ID NO: 110067 - DNA, 25 bp, Homo sapien
aagatgcttagtatgatttccattt

SEQ ID NO: 110068 - DNA, 25 bp, Homo sapien
agatgcttagtatgatttccatttt

SEQ ID NO: 110069 - DNA, 25 bp, Homo sapien
gaagatgcttagtatgatttccatt

SEQ ID NO: 110070 - DNA, 25 bp, Homo sapien
gggcttgttgaatatccggcaaaat

SEQ ID NO: 110071 - DNA, 25 bp, Homo sapien
aatcagaattgtatagagatgttca

SEQ ID NO: 110072 - DNA, 25 bp, Homo sapien
tacgagaatgtctccctaaactaaa

SEQ ID NO: 110073 - DNA, 25 bp, Homo sapien
catagtggtctctgataaactttgt

SEQ ID NO: 110074 - DNA, 25 bp, Homo sapien
tagtctcttctctctgcttagtctg

SEQ ID NO: 110075 - DNA, 25 bp, Homo sapien
gtctcttctctctgcttagtctgat

SEQ ID NO: 110076 - DNA, 25 bp, Homo sapien
tcttctctctgcttagtctgatttc

SEQ ID NO: 110077 - DNA, 25 bp, Homo sapien
tctctgcttagtctgatttcttcta

SEQ ID NO: 110078 - DNA, 25 bp, Homo sapien
tcaccttctatgtctatcatatggt

SEQ ID NO: 110079 - DNA, 25 bp, Homo sapien
tatgtctatcatatggttaacaact

SEQ ID NO: 110080 - DNA, 25 bp, Homo sapien
cccggccagatgttcaccttctatg

SEQ ID NO: 110081 - DNA, 25 bp, Homo sapien
gcacccggccagatgttcaccttct

SEQ ID NO: 110082 - DNA, 25 bp, Homo sapien
cattcccaagcttaccattgttatt

SEQ ID NO: 110083 - DNA, 25 bp, Homo sapien
ttcccaagcttaccattgttattgc

SEQ ID NO: 110084 - DNA, 25 bp, Homo sapien
caagttcagtggcacatctgacttt

SEQ ID NO: 110085 - DNA, 25 bp, Homo sapien
gtctgtcaagttcagtggcacatct

SEQ ID NO: 110086 - DNA, 25 bp, Homo sapien
gtggcacatctgactttacatataa

SEQ ID NO: 110087 - DNA, 25 bp, Homo sapien
gttcagtggcacatctgactttaca

SEQ ID NO: 110088 - DNA, 25 bp, Homo sapien
tataaagcccaaatgcagtagaatt

SEQ ID NO: 110089 - DNA, 25 bp, Homo sapien
tgcgcaagtcaagttcaccactaaa

SEQ ID NO: 110090 - DNA, 25 bp, Homo sapien
tgctcgaacaaacacagtccacttc

SEQ ID NO: 110091 - DNA, 25 bp, Homo sapien
aacacactaaagagatggcacaaag

SEQ ID NO: 110092 - DNA, 25 bp, Homo sapien
caggctatcattaattaatgctcga

SEQ ID NO: 110093 - DNA, 25 bp, Homo sapien
tttgcatatgtaacacactaaagag

SEQ ID NO: 110094 - DNA, 25 bp, Homo sapien
gattcgaggtagacattagctgatg

SEQ ID NO: 110095 - DNA, 25 bp, Homo sapien
cgaggtagacattagctgatgacat

SEQ ID NO: 110096 - DNA, 25 bp, Homo sapien
ctttgattcgaggtagacattagct

SEQ ID NO: 110097 - DNA, 25 bp, Homo sapien
ttgattcgaggtagacattagctga

SEQ ID NO: 110098 - DNA, 25 bp, Homo sapien
caatcacatggtcaatcaacaatgg

SEQ ID NO: 110099 - DNA, 25 bp, Homo sapien
gccacacataaactgtgatgatcaa

SEQ ID NO: 110100 - DNA, 25 bp, Homo sapien
aagtataaggcaagggagaagcaag

SEQ ID NO: 110101 - DNA, 25 bp, Homo sapien
aatgggctactatttggcttctgtt

SEQ ID NO: 110102 - DNA, 25 bp, Homo sapien
cctcctgtgctcaagcgattcttgt

SEQ ID NO: 110103 - DNA, 25 bp, Homo sapien
caggctggtcttgaactcctgagcc

SEQ ID NO: 110104 - DNA, 25 bp, Homo sapien
acctcctgtgctcaagcgattcttg

SEQ ID NO: 110105 - DNA, 25 bp, Homo sapien
ggctggtcttgaactcctgagccaa

SEQ ID NO: 110106 - DNA, 25 bp, Homo sapien
tcaaaggtcaccaatcagagtcagt

SEQ ID NO: 110107 - DNA, 25 bp, Homo sapien
agaaagcttatgaatctgtgggcca

SEQ ID NO: 110108 - DNA, 25 bp, Homo sapien
gcagaaacattacgggccaggagtg

SEQ ID NO: 110109 - DNA, 25 bp, Homo sapien
tcagtgagcttgaaaacagactagc

SEQ ID NO: 110110 - DNA, 25 bp, Homo sapien
cagtggtgacactacggctgtttag

SEQ ID NO: 110111 - DNA, 25 bp, Homo sapien
gtaaggataatatggctaactgccc

SEQ ID NO: 110112 - DNA, 25 bp, Homo sapien
taacataaaagatacgtgagtgctc

SEQ ID NO: 110113 - DNA, 25 bp, Homo sapien
aataatgggctgagtaccatggctc

SEQ ID NO: 110114 - DNA, 25 bp, Homo sapien
ccataagaaagaatgagatcctgta

SEQ ID NO: 110115 - DNA, 25 bp, Homo sapien
ataagaaagaatgagatcctgtaat

SEQ ID NO: 110116 - DNA, 25 bp, Homo sapien
cataagaaagaatgagatcctgtaa

SEQ ID NO: 110117 - DNA, 25 bp, Homo sapien
taactgtaatgaccctagacaaaat

SEQ ID NO: 110118 - DNA, 25 bp, Homo sapien
ataccgtttccgtgtcttctggcct

SEQ ID NO: 110119 - DNA, 25 bp, Homo sapien
ttaggtatgctggtaagtaatcccc

SEQ ID NO: 110120 - DNA, 25 bp, Homo sapien
gggtttgctaagcttgaaagacata

SEQ ID NO: 110121 - DNA, 25 bp, Homo sapien
ctatatatatgtgtgaggatggatt

SEQ ID NO: 110122 - DNA, 25 bp, Homo sapien
tagtattaaagaagatatccacaat

SEQ ID NO: 110123 - DNA, 25 bp, Homo sapien
tggtgtagtattaaagaagatatcc

SEQ ID NO: 110124 - DNA, 25 bp, Homo sapien
ctccatttccaactatatatatgtg

SEQ ID NO: 110125 - DNA, 25 bp, Homo sapien
gtagtcacagctgcacaacaatatg

SEQ ID NO: 110126 - DNA, 25 bp, Homo sapien
gtccctgtttacctctaagatgctg

SEQ ID NO: 110127 - DNA, 25 bp, Homo sapien
gagaggaatctacgtcaaatgaact

SEQ ID NO: 110128 - DNA, 25 bp, Homo sapien
gaactatacttgacactgactatgc

SEQ ID NO: 110129 - DNA, 25 bp, Homo sapien
tataacaagctctggaagagtacag

SEQ ID NO: 110130 - DNA, 25 bp, Homo sapien
tatcctgagatatggtgaccaccac

SEQ ID NO: 110131 - DNA, 25 bp, Homo sapien
cgacagtctggcacagagacatacc

SEQ ID NO: 110132 - DNA, 25 bp, Homo sapien
tacagaagaatgactacagagccca

SEQ ID NO: 110133 - DNA, 25 bp, Homo sapien
aaaacagtaccaccgaccatgctgg

SEQ ID NO: 110134 - DNA, 25 bp, Homo sapien
tttaatctctgtgcccggaaaaaca

SEQ ID NO: 110135 - DNA, 25 bp, Homo sapien
ctggtttaatctctgtgcccggaaa

SEQ ID NO: 110136 - DNA, 25 bp, Homo sapien
ctccacttatgtcttctacatgagc

SEQ ID NO: 110137 - DNA, 25 bp, Homo sapien
gactatttatcatgccagcaggtgc

SEQ ID NO: 110138 - DNA, 25 bp, Homo sapien
taagctctggaactataactgtgac

SEQ ID NO: 110139 - DNA, 25 bp, Homo sapien
ggattgtcgaaaaagtaagctctgg

SEQ ID NO: 110140 - DNA, 25 bp, Homo sapien
atcatcactatcatatcgtcttgga

SEQ ID NO: 110141 - DNA, 25 bp, Homo sapien
agtcatggtgccataccagcccaaa

SEQ ID NO: 110142 - DNA, 25 bp, Homo sapien
cagttttgtggtgtcacatataagc

SEQ ID NO: 110143 - DNA, 25 bp, Homo sapien
gctatgatgattgttcaaatctaaa

SEQ ID NO: 110144 - DNA, 25 bp, Homo sapien
tactacaagtaaagagcaaaggagc

SEQ ID NO: 110145 - DNA, 25 bp, Homo sapien
gcatcttgaggtattcagcatctac

SEQ ID NO: 110146 - DNA, 25 bp, Homo sapien
gaccagctatatcatgcttcagaga

SEQ ID NO: 110147 - DNA, 25 bp, Homo sapien
tagagcataccaatgaatataccgg

SEQ ID NO: 110148 - DNA, 25 bp, Homo sapien
ggctctccaaagaacactgctggcc

SEQ ID NO: 110149 - DNA, 25 bp, Homo sapien
tcagtgcaggatgaacagggaatcg

SEQ ID NO: 110150 - DNA, 25 bp, Homo sapien
gcaagaatttgggtaccctagtcag

SEQ ID NO: 110151 - DNA, 25 bp, Homo sapien
cgcttttgtcacttaataccacggg

SEQ ID NO: 110152 - DNA, 25 bp, Homo sapien
tctgagaagcaatctaacaactgga

SEQ ID NO: 110153 - DNA, 25 bp, Homo sapien
tcattgaggaatttcttgaataatc

SEQ ID NO: 110154 - DNA, 25 bp, Homo sapien
tttacagcaagggtcagtagagtcc

SEQ ID NO: 110155 - DNA, 25 bp, Homo sapien
gagtcccaaggatttgtagacttta

SEQ ID NO: 110156 - DNA, 25 bp, Homo sapien
taccttcctaggattataaggtaga

SEQ ID NO: 110157 - DNA, 25 bp, Homo sapien
catttggctctctggttaacagtcc

SEQ ID NO: 110158 - DNA, 25 bp, Homo sapien
taacctgcctcctatacctagctgg

SEQ ID NO: 110159 - DNA, 25 bp, Homo sapien
gcctcccgccttggtaaatgctgta

SEQ ID NO: 110160 - DNA, 25 bp, Homo sapien
gtgtttcctccaccgaatgttctgg

SEQ ID NO: 110161 - DNA, 25 bp, Homo sapien
ttcaaaggcataatagcaatgacag

SEQ ID NO: 110162 - DNA, 25 bp, Homo sapien
gcaatgacagtcttaagccaaacat

SEQ ID NO: 110163 - DNA, 25 bp, Homo sapien
cccgtcttggcctcaaaaaatactg

SEQ ID NO: 110164 - DNA, 25 bp, Homo sapien
tgtttctggacaatggaggcgaaag

SEQ ID NO: 110165 - DNA, 25 bp, Homo sapien
ccagtgtgtacaattaatgtggctg

SEQ ID NO: 110166 - DNA, 25 bp, Homo sapien
gaagaaagtatttggtaacacgcag

SEQ ID NO: 110167 - DNA, 25 bp, Homo sapien
tcataatgtttttgtagccagtgtg

SEQ ID NO: 110168 - DNA, 25 bp, Homo sapien
taacacgcagtgtacaatactaaca

SEQ ID NO: 110169 - DNA, 25 bp, Homo sapien
cctggttgcattagccaaagtgatt

SEQ ID NO: 110170 - DNA, 25 bp, Homo sapien
tctcttagccgtaacagtttcccag

SEQ ID NO: 110171 - DNA, 25 bp, Homo sapien
tactagtcaggtgcattttgtagac

SEQ ID NO: 110172 - DNA, 25 bp, Homo sapien
tgtttaaaatcctccttcgtgccca

SEQ ID NO: 110173 - DNA, 25 bp, Homo sapien
ggaatggccatggccgtccgggcgg

SEQ ID NO: 110174 - DNA, 25 bp, Homo sapien
ggtgggttcgcccatgagccctccc

SEQ ID NO: 110175 - DNA, 25 bp, Homo sapien
ggcgaggggcgaaaccctgcctgga

SEQ ID NO: 110176 - DNA, 25 bp, Homo sapien
ctggaggggtgggttcgcccatgag

SEQ ID NO: 110177 - DNA, 25 bp, Homo sapien
gcgccttatctctagggtccgccat

SEQ ID NO: 110178 - DNA, 25 bp, Homo sapien
aagcgccttatctctagggtccgcc

SEQ ID NO: 110179 - DNA, 25 bp, Homo sapien
agcgccttatctctagggtccgcca

SEQ ID NO: 110180 - DNA, 25 bp, Homo sapien
cgggctcggcgaaaggcttctgctt

SEQ ID NO: 110181 - DNA, 25 bp, Homo sapien
tcatctctaaggctcggttgccggg

SEQ ID NO: 110182 - DNA, 25 bp, Homo sapien
tctacacccgaaggagtgctgctcc

SEQ ID NO: 110183 - DNA, 25 bp, Homo sapien
tcagggccggatgacaaagcgcctt

SEQ ID NO: 110184 - DNA, 25 bp, Homo sapien
gggactccaccaagactgcccttct

SEQ ID NO: 110185 - DNA, 25 bp, Homo sapien
taacctgggaaacatcctcggccca

SEQ ID NO: 110186 - DNA, 25 bp, Homo sapien
caagactgcccttcttgcaccctaa

SEQ ID NO: 110187 - DNA, 25 bp, Homo sapien
tcttgcaccctaacctgggaaacat

SEQ ID NO: 110188 - DNA, 25 bp, Homo sapien
gtagggccttcagatcattttcaga

SEQ ID NO: 110189 - DNA, 25 bp, Homo sapien
cttttcatactgcttggtaagttct

SEQ ID NO: 110190 - DNA, 25 bp, Homo sapien
gggccttcagatcattttcagactt

SEQ ID NO: 110191 - DNA, 25 bp, Homo sapien
gacttttcatactgcttggtaagtt

SEQ ID NO: 110192 - DNA, 25 bp, Homo sapien
actgtttaagcacttcacccacgat

SEQ ID NO: 110193 - DNA, 25 bp, Homo sapien
taactgtttaagcacttcacccacg

SEQ ID NO: 110194 - DNA, 25 bp, Homo sapien
ttcagttaactgtttaagcacttca

SEQ ID NO: 110195 - DNA, 25 bp, Homo sapien
gttaactgtttaagcacttcaccca

SEQ ID NO: 110196 - DNA, 25 bp, Homo sapien
cgttgacagagggtttagttgtatt

SEQ ID NO: 110197 - DNA, 25 bp, Homo sapien
acgttgacagagggtttagttgtat

SEQ ID NO: 110198 - DNA, 25 bp, Homo sapien
ccacgttgacagagggtttagttgt

SEQ ID NO: 110199 - DNA, 25 bp, Homo sapien
cacgttgacagagggtttagttgta

SEQ ID NO: 110200 - DNA, 25 bp, Homo sapien
ctgtcgacgacaacccacaacatat

SEQ ID NO: 110201 - DNA, 25 bp, Homo sapien
tgtcgacgacaacccacaacatatc

SEQ ID NO: 110202 - DNA, 25 bp, Homo sapien
aatgccaactttcggcatccacaga

SEQ ID NO: 110203 - DNA, 25 bp, Homo sapien
gaaatgccaactttcggcatccaca

SEQ ID NO: 110204 - DNA, 25 bp, Homo sapien
ttagaaatgccaactttcggcatcc

SEQ ID NO: 110205 - DNA, 25 bp, Homo sapien
tagaaatgccaactttcggcatcca

SEQ ID NO: 110206 - DNA, 25 bp, Homo sapien
tcttgtcctcatgcaacctgaaata

SEQ ID NO: 110207 - DNA, 25 bp, Homo sapien
cttgtcctcatgcaacctgaaatat

SEQ ID NO: 110208 - DNA, 25 bp, Homo sapien
ttgtcctcatgcaacctgaaatatc

SEQ ID NO: 110209 - DNA, 25 bp, Homo sapien
aactgcgtgccaatacaatttcgga

SEQ ID NO: 110210 - DNA, 25 bp, Homo sapien
aaatgcacggtttccccttagagat

SEQ ID NO: 110211 - DNA, 25 bp, Homo sapien
tacagtgactttgggaattgctacc

SEQ ID NO: 110212 - DNA, 25 bp, Homo sapien
gcatgcccctttgtgtaatctcagt

SEQ ID NO: 110213 - DNA, 25 bp, Homo sapien
gatagttagtgtagtcatatccaaa

SEQ ID NO: 110214 - DNA, 25 bp, Homo sapien
ctcatgatagttagtgtagtcatat

SEQ ID NO: 110215 - DNA, 25 bp, Homo sapien
catgatagttagtgtagtcatatcc

SEQ ID NO: 110216 - DNA, 25 bp, Homo sapien
tagttagtgtagtcatatccaaagc

SEQ ID NO: 110217 - DNA, 25 bp, Homo sapien
gttataaaccagtggatccacctct

SEQ ID NO: 110218 - DNA, 25 bp, Homo sapien
taaaccagtggatccacctctctcg

SEQ ID NO: 110219 - DNA, 25 bp, Homo sapien
tggatccacctctctcggcaaatat

SEQ ID NO: 110220 - DNA, 25 bp, Homo sapien
cagtggatccacctctctcggcaaa

SEQ ID NO: 110221 - DNA, 25 bp, Homo sapien
ctgatagccctccaatctcagaata

SEQ ID NO: 110222 - DNA, 25 bp, Homo sapien
tcttaattcccggatctgttctgat

SEQ ID NO: 110223 - DNA, 25 bp, Homo sapien
cattcccagggtcctcatgagacat

SEQ ID NO: 110224 - DNA, 25 bp, Homo sapien
ggatctgttctgatagccctccaat

SEQ ID NO: 110225 - DNA, 25 bp, Homo sapien
gaggtattattcctacacgctgaaa

SEQ ID NO: 110226 - DNA, 25 bp, Homo sapien
ggaggtattattcctacacgctgaa

SEQ ID NO: 110227 - DNA, 25 bp, Homo sapien
tggtccatataacaaacagcctttt

SEQ ID NO: 110228 - DNA, 25 bp, Homo sapien
ctggtggtccatataacaaacagcc

SEQ ID NO: 110229 - DNA, 25 bp, Homo sapien
tcatttatcttattggtggagtaga

SEQ ID NO: 110230 - DNA, 25 bp, Homo sapien
atttatcttattggtggagtagaaa

SEQ ID NO: 110231 - DNA, 25 bp, Homo sapien
attcatttatcttattggtggagta

SEQ ID NO: 110232 - DNA, 25 bp, Homo sapien
catttatcttattggtggagtagaa

SEQ ID NO: 110233 - DNA, 25 bp, Homo sapien
ctgcgcctggcttaacatttcagta

SEQ ID NO: 110234 - DNA, 25 bp, Homo sapien
gcgcctggcttaacatttcagtatt

SEQ ID NO: 110235 - DNA, 25 bp, Homo sapien
tttgaggactgttgcactagaatca

SEQ ID NO: 110236 - DNA, 25 bp, Homo sapien
ggtctgtgaaccacaatttgaggac

SEQ ID NO: 110237 - DNA, 25 bp, Homo sapien
caggcttaatttgttcgctttggaa

SEQ ID NO: 110238 - DNA, 25 bp, Homo sapien
caatagatggtgtcagttgtttaac

SEQ ID NO: 110239 - DNA, 25 bp, Homo sapien
caataaccagtctgataatcacagc

SEQ ID NO: 110240 - DNA, 25 bp, Homo sapien
aaagcttcaaccacatagtgccaga

SEQ ID NO: 110241 - DNA, 25 bp, Homo sapien
caaagtgttggcactacaggtatga

SEQ ID NO: 110242 - DNA, 25 bp, Homo sapien
attttgtattttcagcagagacggg

SEQ ID NO: 110243 - DNA, 25 bp, Homo sapien
ggcatgaactactacacccagctaa

SEQ ID NO: 110244 - DNA, 25 bp, Homo sapien
cccaaagtgttggcactacaggtat

SEQ ID NO: 110245 - DNA, 25 bp, Homo sapien
gctggctagcaacggctcgtgccaa

SEQ ID NO: 110246 - DNA, 25 bp, Homo sapien
acggctcgtgccaagagtgtttttc

SEQ ID NO: 110247 - DNA, 25 bp, Homo sapien
ctttaagaaattgcagtccagctgg

SEQ ID NO: 110248 - DNA, 25 bp, Homo sapien
agtccagctggctagcaacggctcg

SEQ ID NO: 110249 - DNA, 25 bp, Homo sapien
tttcaataagtacaaaataatcttc

SEQ ID NO: 110250 - DNA, 25 bp, Homo sapien
tcaccaatgtacttgtctacaatag

SEQ ID NO: 110251 - DNA, 25 bp, Homo sapien
tgtctacaatagaactagatacaac

SEQ ID NO: 110252 - DNA, 25 bp, Homo sapien
tgtacttgtctacaatagaactaga

SEQ ID NO: 110253 - DNA, 25 bp, Homo sapien
agcactttcaccaatgtacttgtct

SEQ ID NO: 110254 - DNA, 25 bp, Homo sapien
atctctctgtcagctgaagtaccct

SEQ ID NO: 110255 - DNA, 25 bp, Homo sapien
aatctctctgtcagctgaagtaccc

SEQ ID NO: 110256 - DNA, 25 bp, Homo sapien
tggtctcaatgctcagacctcatga

SEQ ID NO: 110257 - DNA, 25 bp, Homo sapien
ctggtctcaatgctcagacctcatg

SEQ ID NO: 110258 - DNA, 25 bp, Homo sapien
ggtctcaatgctcagacctcatgat

SEQ ID NO: 110259 - DNA, 25 bp, Homo sapien
ctggagtactgtggcctgatcatcg

SEQ ID NO: 110260 - DNA, 25 bp, Homo sapien
tcacctcctgggctcgaccagtcct

SEQ ID NO: 110261 - DNA, 25 bp, Homo sapien
tactgtggcctgatcatcgctcact

SEQ ID NO: 110262 - DNA, 25 bp, Homo sapien
gagtactgtggcctgatcatcgctc

SEQ ID NO: 110263 - DNA, 25 bp, Homo sapien
aaagcaggatccagtgtatctggtc

SEQ ID NO: 110264 - DNA, 25 bp, Homo sapien
agtgtatctggtctgtttgtagcca

SEQ ID NO: 110265 - DNA, 25 bp, Homo sapien
gccatgatcattttaactctatgca

SEQ ID NO: 110266 - DNA, 25 bp, Homo sapien
cctggacgcagcaaagcaggatcca

SEQ ID NO: 110267 - DNA, 25 bp, Homo sapien
atgggacctgcatggattttcagta

SEQ ID NO: 110268 - DNA, 25 bp, Homo sapien
catgctttgtaatgggacctgcatg

SEQ ID NO: 110269 - DNA, 25 bp, Homo sapien
tatctggcatctagcaagagctcag

SEQ ID NO: 110270 - DNA, 25 bp, Homo sapien
aacatatcctcatgcctggtcctgg

SEQ ID NO: 110271 - DNA, 25 bp, Homo sapien
gatgatgcaccgtttggtcaggcaa

SEQ ID NO: 110272 - DNA, 25 bp, Homo sapien
caggcagaatttggttcacaagcca

SEQ ID NO: 110273 - DNA, 25 bp, Homo sapien
atttatgcccacatcgaaaatttaa

SEQ ID NO: 110274 - DNA, 25 bp, Homo sapien
tgcccacatcgaaaatttaaactga

SEQ ID NO: 110275 - DNA, 25 bp, Homo sapien
ttatgcccacatcgaaaatttaaac

SEQ ID NO: 110276 - DNA, 25 bp, Homo sapien
tatgcccacatcgaaaatttaaact

SEQ ID NO: 110277 - DNA, 25 bp, Homo sapien
tccattaaagccatccgaaagcttc

SEQ ID NO: 110278 - DNA, 25 bp, Homo sapien
ttctcagatctgctccattaaagcc

SEQ ID NO: 110279 - DNA, 25 bp, Homo sapien
agccatccgaaagcttcacaattgc

SEQ ID NO: 110280 - DNA, 25 bp, Homo sapien
gcttcagtacaaacatttctcagat

SEQ ID NO: 110281 - DNA, 25 bp, Homo sapien
ttattacttctgagccagtagttgt

SEQ ID NO: 110282 - DNA, 25 bp, Homo sapien
aagcttagatttattacttctgagc

SEQ ID NO: 110283 - DNA, 25 bp, Homo sapien
caacatgactgctatatatcacata

SEQ ID NO: 110284 - DNA, 25 bp, Homo sapien
taaaacaacatgactgctatatatc

SEQ ID NO: 110285 - DNA, 25 bp, Homo sapien
tgtactacaaaatcatgatcagcac

SEQ ID NO: 110286 - DNA, 25 bp, Homo sapien
tacaaaatcatgatcagcacgaatt

SEQ ID NO: 110287 - DNA, 25 bp, Homo sapien
tactacaaaatcatgatcagcacga

SEQ ID NO: 110288 - DNA, 25 bp, Homo sapien
cctgtactacaaaatcatgatcagc

SEQ ID NO: 110289 - DNA, 25 bp, Homo sapien
acaataagccaacatctgtcatgca

SEQ ID NO: 110290 - DNA, 25 bp, Homo sapien
tttttacaataagccaacatctgtc

SEQ ID NO: 110291 - DNA, 25 bp, Homo sapien
tatttttacaataagccaacatctg

SEQ ID NO: 110292 - DNA, 25 bp, Homo sapien
tttacaataagccaacatctgtcat

SEQ ID NO: 110293 - DNA, 25 bp, Homo sapien
atgatgttactcatatttttattca

SEQ ID NO: 110294 - DNA, 25 bp, Homo sapien
tattcatatacttttaatgacatca

SEQ ID NO: 110295 - DNA, 25 bp, Homo sapien
tatacttttaatgacatcattacca

SEQ ID NO: 110296 - DNA, 25 bp, Homo sapien
tcatatacttttaatgacatcatta

SEQ ID NO: 110297 - DNA, 25 bp, Homo sapien
tatgaaaagcttcaacactttccct

SEQ ID NO: 110298 - DNA, 25 bp, Homo sapien
tataccactatctcaaaccactttc

SEQ ID NO: 110299 - DNA, 25 bp, Homo sapien
ttacaaaatgctcacgcagcaaata

SEQ ID NO: 110300 - DNA, 25 bp, Homo sapien
ttccctttgtaacttgctgcaataa

SEQ ID NO: 110301 - DNA, 25 bp, Homo sapien
ttcaaaaatccacaatccatctggg

SEQ ID NO: 110302 - DNA, 25 bp, Homo sapien
acactcttagccaggtatccataca

SEQ ID NO: 110303 - DNA, 25 bp, Homo sapien
catacatacctaaagagtccttgga

SEQ ID NO: 110304 - DNA, 25 bp, Homo sapien
gaggagtacagacatacccacacat

SEQ ID NO: 110305 - DNA, 25 bp, Homo sapien
attattgatgcccaatgatgattcc

SEQ ID NO: 110306 - DNA, 25 bp, Homo sapien
ataattattgatgcccaatgatgat

SEQ ID NO: 110307 - DNA, 25 bp, Homo sapien
taataattattgatgcccaatgatg

SEQ ID NO: 110308 - DNA, 25 bp, Homo sapien
aattattgatgcccaatgatgattc

SEQ ID NO: 110309 - DNA, 25 bp, Homo sapien
ccaggatccagcacaggaaccagcc

SEQ ID NO: 110310 - DNA, 25 bp, Homo sapien
caggccgcccaggatccagcacagg

SEQ ID NO: 110311 - DNA, 25 bp, Homo sapien
gcccaggatccagcacaggaaccag

SEQ ID NO: 110312 - DNA, 25 bp, Homo sapien
ggccgcccaggatccagcacaggaa

SEQ ID NO: 110313 - DNA, 25 bp, Homo sapien
agactacagggtcccagtgactcca

SEQ ID NO: 110314 - DNA, 25 bp, Homo sapien
gagggcggcgggattacaactaaca

SEQ ID NO: 110315 - DNA, 25 bp, Homo sapien
ggagagtgttacacagccggccgac

SEQ ID NO: 110316 - DNA, 25 bp, Homo sapien
taacacacgcagactacagggtccc

SEQ ID NO: 110317 - DNA, 25 bp, Homo sapien
tggaagggaagggaactccagcttc

SEQ ID NO: 110318 - DNA, 25 bp, Homo sapien
tcttccttgcactgtggaagggaag

SEQ ID NO: 110319 - DNA, 25 bp, Homo sapien
ggcgtcttccttgcactgtggaagg

SEQ ID NO: 110320 - DNA, 25 bp, Homo sapien
ctcggcgtcttccttgcactgtgga

SEQ ID NO: 110321 - DNA, 25 bp, Homo sapien
tggggtcgcccctcggccggagcca

SEQ ID NO: 110322 - DNA, 25 bp, Homo sapien
gggtcgcccctcggccggagccaca

SEQ ID NO: 110323 - DNA, 25 bp, Homo sapien
tggcggctaagacggttggggactg

SEQ ID NO: 110324 - DNA, 25 bp, Homo sapien
ggtcgcccctcggccggagccacag

SEQ ID NO: 110325 - DNA, 25 bp, Homo sapien
caagaagattcggtaaagcagcggg

SEQ ID NO: 110326 - DNA, 25 bp, Homo sapien
tctgcacagtagacgggaaattggc

SEQ ID NO: 110327 - DNA, 25 bp, Homo sapien
ggaatctaaggctgtttcaccccga

SEQ ID NO: 110328 - DNA, 25 bp, Homo sapien
gactgactgcgggtggaatcttcgt

SEQ ID NO: 110329 - DNA, 25 bp, Homo sapien
gaaggacaatcagatggacactgac

SEQ ID NO: 110330 - DNA, 25 bp, Homo sapien
tctatggtctcttcatacaaaggaa

SEQ ID NO: 110331 - DNA, 25 bp, Homo sapien
gacactgacttctcaattgcatgaa

SEQ ID NO: 110332 - DNA, 25 bp, Homo sapien
ccatttgtatcaagttcaagagcaa

SEQ ID NO: 110333 - DNA, 25 bp, Homo sapien
ctataaaccccgagtaatgacagtt

SEQ ID NO: 110334 - DNA, 25 bp, Homo sapien
tagcaatcaatcagaaggaggccag

SEQ ID NO: 110335 - DNA, 25 bp, Homo sapien
tatagtagtagactataaaccccga

SEQ ID NO: 110336 - DNA, 25 bp, Homo sapien
gaaaactgttctcagcaatatagta

SEQ ID NO: 110337 - DNA, 25 bp, Homo sapien
tctcgtctcatagggtaggtccact

SEQ ID NO: 110338 - DNA, 25 bp, Homo sapien
ctcgtctcatagggtaggtccactc

SEQ ID NO: 110339 - DNA, 25 bp, Homo sapien
gcagatgaatatgggcctaagaaca

SEQ ID NO: 110340 - DNA, 25 bp, Homo sapien
tgggcctaagaacaatccaggtaaa

SEQ ID NO: 110341 - DNA, 25 bp, Homo sapien
agcagatgaatatgggcctaagaac

SEQ ID NO: 110342 - DNA, 25 bp, Homo sapien
tagcagatgaatatgggcctaagaa

SEQ ID NO: 110343 - DNA, 25 bp, Homo sapien
tacattaatgtcctcaaaaggttaa

SEQ ID NO: 110344 - DNA, 25 bp, Homo sapien
taatatacctgaagtgggcagcaag

SEQ ID NO: 110345 - DNA, 25 bp, Homo sapien
tagagcttgatggaacctttatgta

SEQ ID NO: 110346 - DNA, 25 bp, Homo sapien
ggttaacagggatatttcataccta

SEQ ID NO: 110347 - DNA, 25 bp, Homo sapien
tattttgtcgtatgcatattatatg

SEQ ID NO: 110348 - DNA, 25 bp, Homo sapien
caatattttgtcgtatgcatattat

SEQ ID NO: 110349 - DNA, 25 bp, Homo sapien
ttttgtcgtatgcatattatatggg

SEQ ID NO: 110350 - DNA, 25 bp, Homo sapien
tgtcgtatgcatattatatgggtta

SEQ ID NO: 110351 - DNA, 25 bp, Homo sapien
cagaaacaactgatggtacaaaacc

SEQ ID NO: 110352 - DNA, 25 bp, Homo sapien
caaactagatatgtacagaaacaac

SEQ ID NO: 110353 - DNA, 25 bp, Homo sapien
tatacactcttttgaacctttagaa

SEQ ID NO: 110354 - DNA, 25 bp, Homo sapien
tatatgacccatttttacaaactag

SEQ ID NO: 110355 - DNA, 25 bp, Homo sapien
ggattatctgcaatatccaggacta

SEQ ID NO: 110356 - DNA, 25 bp, Homo sapien
atctgcaatatccaggactaaatat

SEQ ID NO: 110357 - DNA, 25 bp, Homo sapien
ttatctgcaatatccaggactaaat

SEQ ID NO: 110358 - DNA, 25 bp, Homo sapien
gattatctgcaatatccaggactaa

SEQ ID NO: 110359 - DNA, 25 bp, Homo sapien
catttgtaagctcccatcaataaat

SEQ ID NO: 110360 - DNA, 25 bp, Homo sapien
tttgtaagctcccatcaataaattc

SEQ ID NO: 110361 - DNA, 25 bp, Homo sapien
ttgtaagctcccatcaataaattcc

SEQ ID NO: 110362 - DNA, 25 bp, Homo sapien
ccatttgtaagctcccatcaataaa

SEQ ID NO: 110363 - DNA, 25 bp, Homo sapien
cttctggagatccctgcatttccat

SEQ ID NO: 110364 - DNA, 25 bp, Homo sapien
tggagatccctgcatttccatgcac

SEQ ID NO: 110365 - DNA, 25 bp, Homo sapien
tctggagatccctgcatttccatgc

SEQ ID NO: 110366 - DNA, 25 bp, Homo sapien
ggagatccctgcatttccatgcaca

SEQ ID NO: 110367 - DNA, 25 bp, Homo sapien
ctgtacttcattccaaatgtttcca

SEQ ID NO: 110368 - DNA, 25 bp, Homo sapien
aaatgtttccataatgtatgcaata

SEQ ID NO: 110369 - DNA, 25 bp, Homo sapien
cattccaaatgtttccataatgtat

SEQ ID NO: 110370 - DNA, 25 bp, Homo sapien
taatgtatgcaataacaaaggctgc

SEQ ID NO: 110371 - DNA, 25 bp, Homo sapien
agaaaggaaatactgtacactggcc

SEQ ID NO: 110372 - DNA, 25 bp, Homo sapien
tttaagcaaagttatccattctaat

SEQ ID NO: 110373 - DNA, 25 bp, Homo sapien
caaatccagcattaggattaataca

SEQ ID NO: 110374 - DNA, 25 bp, Homo sapien
ctgaagttgatggacaaatccagca

SEQ ID NO: 110375 - DNA, 25 bp, Homo sapien
tctttcttgaacataagcaaaagca

SEQ ID NO: 110376 - DNA, 25 bp, Homo sapien
tttcttgaacataagcaaaagcatc

SEQ ID NO: 110377 - DNA, 25 bp, Homo sapien
attttgctaggtagatggcttcata

SEQ ID NO: 110378 - DNA, 25 bp, Homo sapien
ttttgctaggtagatggcttcatat

SEQ ID NO: 110379 - DNA, 25 bp, Homo sapien
gtggtaccagaatgaacagataatg

SEQ ID NO: 110380 - DNA, 25 bp, Homo sapien
taccagaatgaacagataatgacct

SEQ ID NO: 110381 - DNA, 25 bp, Homo sapien
ggtaccagaatgaacagataatgac

SEQ ID NO: 110382 - DNA, 25 bp, Homo sapien
ctgtggtaccagaatgaacagataa

SEQ ID NO: 110383 - DNA, 25 bp, Homo sapien
ggaagagtgcattaatcatcatgtc

SEQ ID NO: 110384 - DNA, 25 bp, Homo sapien
agagtgcattaatcatcatgtcttc

SEQ ID NO: 110385 - DNA, 25 bp, Homo sapien
gaagagtgcattaatcatcatgtct

SEQ ID NO: 110386 - DNA, 25 bp, Homo sapien
gagtgcattaatcatcatgtcttcc

SEQ ID NO: 110387 - DNA, 25 bp, Homo sapien
taaacttatgccctacaggactgtt

SEQ ID NO: 110388 - DNA, 25 bp, Homo sapien
caggctaaacccagatactgtgatt

SEQ ID NO: 110389 - DNA, 25 bp, Homo sapien
tgctgtgcttctatgggaactccaa

SEQ ID NO: 110390 - DNA, 25 bp, Homo sapien
ggaacagttaaaccagcagagggtc

SEQ ID NO: 110391 - DNA, 25 bp, Homo sapien
tcgccacttgcatggttccaaaatc

SEQ ID NO: 110392 - DNA, 25 bp, Homo sapien
ccattctgtgcagtcgccacttgca

SEQ ID NO: 110393 - DNA, 25 bp, Homo sapien
tgtgcagtcgccacttgcatggttc

SEQ ID NO: 110394 - DNA, 25 bp, Homo sapien
cagtcgccacttgcatggttccaaa

SEQ ID NO: 110395 - DNA, 25 bp, Homo sapien
tgtaatatacagtactgggcaggca

SEQ ID NO: 110396 - DNA, 25 bp, Homo sapien
gcagaatactggacgacaacgagat

SEQ ID NO: 110397 - DNA, 25 bp, Homo sapien
tgtttgagccggaacaatctcacag

SEQ ID NO: 110398 - DNA, 25 bp, Homo sapien
tgctgacctgcccaatagtgatcta

SEQ ID NO: 110399 - DNA, 25 bp, Homo sapien
taaacattaggtggacagacatgca

SEQ ID NO: 110400 - DNA, 25 bp, Homo sapien
attaatattgtactcagccaggcgc

SEQ ID NO: 110401 - DNA, 25 bp, Homo sapien
tcccttatcggagcactgttgaaca

SEQ ID NO: 110402 - DNA, 25 bp, Homo sapien
tgaactgtgaggtatggcagctccc

SEQ ID NO: 110403 - DNA, 25 bp, Homo sapien
tggcacagcagttttaatacaacca

SEQ ID NO: 110404 - DNA, 25 bp, Homo sapien
agcagttttaatacaaccaccaatc

SEQ ID NO: 110405 - DNA, 25 bp, Homo sapien
ggcacagcagttttaatacaaccac

SEQ ID NO: 110406 - DNA, 25 bp, Homo sapien
cacagcagttttaatacaaccacca

SEQ ID NO: 110407 - DNA, 25 bp, Homo sapien
gcacagtatgcaggtaggcctaatg

SEQ ID NO: 110408 - DNA, 25 bp, Homo sapien
tgttctgtggatgacctaccctttc

SEQ ID NO: 110409 - DNA, 25 bp, Homo sapien
gtgtctggccgttcacatctttggc

SEQ ID NO: 110410 - DNA, 25 bp, Homo sapien
tacatatgtcggctaccgtgtctgg

SEQ ID NO: 110411 - DNA, 25 bp, Homo sapien
gaattacaggtaaggtacaccatac

SEQ ID NO: 110412 - DNA, 25 bp, Homo sapien
gcagtgtacccacaatagatagcct

SEQ ID NO: 110413 - DNA, 25 bp, Homo sapien
tttcttaccactgaacaatttgagg

SEQ ID NO: 110414 - DNA, 25 bp, Homo sapien
caaggttggcacttcagtaaatccc

SEQ ID NO: 110415 - DNA, 25 bp, Homo sapien
gtggctcacgcctgtaatcccagca

SEQ ID NO: 110416 - DNA, 25 bp, Homo sapien
ctttgggaggctgaggtgggcagat

SEQ ID NO: 110417 - DNA, 25 bp, Homo sapien
aattagcctggtaaggccgggtgca

SEQ ID NO: 110418 - DNA, 25 bp, Homo sapien
cacaaggtcaggagtttgagaccag

SEQ ID NO: 110419 - DNA, 25 bp, Homo sapien
tttggatttccctccatgcagccag

SEQ ID NO: 110420 - DNA, 25 bp, Homo sapien
gaactgatctgtccttcgtgaaacg

SEQ ID NO: 110421 - DNA, 25 bp, Homo sapien
tcgtgaaacgcaacaaagctagttc

SEQ ID NO: 110422 - DNA, 25 bp, Homo sapien
cttatagcctatacagacgaactga

SEQ ID NO: 110423 - DNA, 25 bp, Homo sapien
tactgaaagtttatatagtatagtc

SEQ ID NO: 110424 - DNA, 25 bp, Homo sapien
tgaattatgactattcatttgttaa

SEQ ID NO: 110425 - DNA, 25 bp, Homo sapien
atagtctatgtagataaaaagtacc

SEQ ID NO: 110426 - DNA, 25 bp, Homo sapien
tatagtgggacatctaaggtcctct

SEQ ID NO: 110427 - DNA, 25 bp, Homo sapien
ttagagagatccaaagacttgccca

SEQ ID NO: 110428 - DNA, 25 bp, Homo sapien
gcatcttaagagttagtccacccgt

SEQ ID NO: 110429 - DNA, 25 bp, Homo sapien
tgctacggtgaggaataaaacctta

SEQ ID NO: 110430 - DNA, 25 bp, Homo sapien
tgaattctatttgaccctcctgaga

SEQ ID NO: 110431 - DNA, 25 bp, Homo sapien
tgttagaactgggtatagtgtatgc

SEQ ID NO: 110432 - DNA, 25 bp, Homo sapien
ctgggtatagtgtatgcagcataat

SEQ ID NO: 110433 - DNA, 25 bp, Homo sapien
aatattgttagaactgggtatagtg

SEQ ID NO: 110434 - DNA, 25 bp, Homo sapien
tagaactgggtatagtgtatgcagc

SEQ ID NO: 110435 - DNA, 25 bp, Homo sapien
tgaggctgcagtgagctatgattgc

SEQ ID NO: 110436 - DNA, 25 bp, Homo sapien
ggaggatcacttgagcccaggagtt

SEQ ID NO: 110437 - DNA, 25 bp, Homo sapien
tctggaggctgatgtgggaagctga

SEQ ID NO: 110438 - DNA, 25 bp, Homo sapien
gaggctgatgtgggaagctgaggta

SEQ ID NO: 110439 - DNA, 25 bp, Homo sapien
cagactttggcgtgggaaatgagac

SEQ ID NO: 110440 - DNA, 25 bp, Homo sapien
gctctctgcagccatcggttttgaa

SEQ ID NO: 110441 - DNA, 25 bp, Homo sapien
tttgaatgggcacgaacgtcccagg

SEQ ID NO: 110442 - DNA, 25 bp, Homo sapien
gaaatgagacagttggtcgcgctct

SEQ ID NO: 110443 - DNA, 25 bp, Homo sapien
gcctggctaggagcgccgaccgcag

SEQ ID NO: 110444 - DNA, 25 bp, Homo sapien
ctgggccgcggttcccaactgtggc

SEQ ID NO: 110445 - DNA, 25 bp, Homo sapien
gggagagtccgacgcgcctggctag

SEQ ID NO: 110446 - DNA, 25 bp, Homo sapien
gatccggatccggtgctgtgcacac

SEQ ID NO: 110447 - DNA, 25 bp, Homo sapien
accgagacaatgacgcggtgggaaa

SEQ ID NO: 110448 - DNA, 25 bp, Homo sapien
cagataaaccgagacaatgacgcgg

SEQ ID NO: 110449 - DNA, 25 bp, Homo sapien
taaaccgagacaatgacgcggtggg

SEQ ID NO: 110450 - DNA, 25 bp, Homo sapien
tgcagataaaccgagacaatgacgc

SEQ ID NO: 110451 - DNA, 25 bp, Homo sapien
tgggctgactgctaggtagacgtat

SEQ ID NO: 110452 - DNA, 25 bp, Homo sapien
acactggtcaccacttacgctgctg

SEQ ID NO: 110453 - DNA, 25 bp, Homo sapien
tacgctgctgggctgactgctaggt

SEQ ID NO: 110454 - DNA, 25 bp, Homo sapien
cacttacgctgctgggctgactgct

SEQ ID NO: 110455 - DNA, 25 bp, Homo sapien
gacaaagtgctacttaggtaagaca

SEQ ID NO: 110456 - DNA, 25 bp, Homo sapien
gaaaattatggtacaaggcaaggaa

SEQ ID NO: 110457 - DNA, 25 bp, Homo sapien
tgcataccaccacattctgctcatg

SEQ ID NO: 110458 - DNA, 25 bp, Homo sapien
ttatgtaacatctctgaacctctgt

SEQ ID NO: 110459 - DNA, 25 bp, Homo sapien
agaaaatccacaaacgaagtcatgt

SEQ ID NO: 110460 - DNA, 25 bp, Homo sapien
tgtagcacatgtttgagttattcaa

SEQ ID NO: 110461 - DNA, 25 bp, Homo sapien
gaagtcatgtggaacaatgtagcac

SEQ ID NO: 110462 - DNA, 25 bp, Homo sapien
aaatgaagctaaacttagccaacta

SEQ ID NO: 110463 - DNA, 25 bp, Homo sapien
tgttggatgtgaacggcaaaaccac

SEQ ID NO: 110464 - DNA, 25 bp, Homo sapien
caccgggagacaagcacaagaatat

SEQ ID NO: 110465 - DNA, 25 bp, Homo sapien
tagggaaactcctgcgcatacacac

SEQ ID NO: 110466 - DNA, 25 bp, Homo sapien
gagaactatgaagctgccgtagaga

SEQ ID NO: 110467 - DNA, 25 bp, Homo sapien
tggcttaaatgtagcaatctctgcg

SEQ ID NO: 110468 - DNA, 25 bp, Homo sapien
aaactactcacaactagcagatggc

SEQ ID NO: 110469 - DNA, 25 bp, Homo sapien
gaaaatgctattagtccgtcgtgct

SEQ ID NO: 110470 - DNA, 25 bp, Homo sapien
gaaaattcctagctcacatagccca

SEQ ID NO: 110471 - DNA, 25 bp, Homo sapien
catgtctgaccccataggtatcctt

SEQ ID NO: 110472 - DNA, 25 bp, Homo sapien
tacatgtttgtatggcaagttgcag

SEQ ID NO: 110473 - DNA, 25 bp, Homo sapien
caaggacttgccactttatctgggt

SEQ ID NO: 110474 - DNA, 25 bp, Homo sapien
aataactgccgtttccaaggacttg

SEQ ID NO: 110475 - DNA, 25 bp, Homo sapien
tgttattgccattaccacgtaggta

SEQ ID NO: 110476 - DNA, 25 bp, Homo sapien
gaatttctctcgagtatccacctag

SEQ ID NO: 110477 - DNA, 25 bp, Homo sapien
cagagtactgtcaaattgtctccca

SEQ ID NO: 110478 - DNA, 25 bp, Homo sapien
caatgtatgaaaacccgttgccaca

SEQ ID NO: 110479 - DNA, 25 bp, Homo sapien
tgcacactctcttgcaagagtgaac

SEQ ID NO: 110480 - DNA, 25 bp, Homo sapien
ctcccaaccattataactgaaatgg

SEQ ID NO: 110481 - DNA, 25 bp, Homo sapien
gcaagagtgaactcttgcatacccc

SEQ ID NO: 110482 - DNA, 25 bp, Homo sapien
tccactctcacattaacttcttgca

SEQ ID NO: 110483 - DNA, 25 bp, Homo sapien
ctctttcgctttttaaaggtctgag

SEQ ID NO: 110484 - DNA, 25 bp, Homo sapien
aaggtctgagtgactaaagagatca

SEQ ID NO: 110485 - DNA, 25 bp, Homo sapien
tctgagtgactaaagagatcagaac

SEQ ID NO: 110486 - DNA, 25 bp, Homo sapien
aagagatcagaacaggagggcacat

SEQ ID NO: 110487 - DNA, 25 bp, Homo sapien
tgtaattaagaagtgtgacttctgc

SEQ ID NO: 110488 - DNA, 25 bp, Homo sapien
agtttcctttgtaaccgtctcatcg

SEQ ID NO: 110489 - DNA, 25 bp, Homo sapien
ctgcacttgggtttgtggttacaaa

SEQ ID NO: 110490 - DNA, 25 bp, Homo sapien
caaacccagatcctaaaaaccagtg

SEQ ID NO: 110491 - DNA, 25 bp, Homo sapien
gcaggcaccgttccagaagtattaa

SEQ ID NO: 110492 - DNA, 25 bp, Homo sapien
ccatgaatttgctagcgaggcagtt

SEQ ID NO: 110493 - DNA, 25 bp, Homo sapien
taagaacgcttgcaaactcctggga

SEQ ID NO: 110494 - DNA, 25 bp, Homo sapien
gctgtttctgaaaggagttccctca

SEQ ID NO: 110495 - DNA, 25 bp, Homo sapien
tttacataaactccctcatctccgg

SEQ ID NO: 110496 - DNA, 25 bp, Homo sapien
tatagctgcatatccagttctgcag

SEQ ID NO: 110497 - DNA, 25 bp, Homo sapien
caagtgaactatttggaacgtccac

SEQ ID NO: 110498 - DNA, 25 bp, Homo sapien
ttttgtgccctaacaagcaattcct

SEQ ID NO: 110499 - DNA, 25 bp, Homo sapien
cagggcagagccgggaagcgatgaa

SEQ ID NO: 110500 - DNA, 25 bp, Homo sapien
aattccactggacttgagcttggca

SEQ ID NO: 110501 - DNA, 25 bp, Homo sapien
gaagcgatgaatttggagactctgt

SEQ ID NO: 110502 - DNA, 25 bp, Homo sapien
acagtcctgggagaacctcaggctt

SEQ ID NO: 110503 - DNA, 25 bp, Homo sapien
cttccttggcatcacagggcagagc

SEQ ID NO: 110504 - DNA, 25 bp, Homo sapien
agagcccagccattaccatggagac

SEQ ID NO: 110505 - DNA, 25 bp, Homo sapien
gcaggggcagggtgataaattgttg

SEQ ID NO: 110506 - DNA, 25 bp, Homo sapien
tttgcactgtatgctggacggcatt

SEQ ID NO: 110507 - DNA, 25 bp, Homo sapien
gaaggcatgaaattgtctagcagag

SEQ ID NO: 110508 - DNA, 25 bp, Homo sapien
caagatgtcagactggctggctgca

SEQ ID NO: 110509 - DNA, 25 bp, Homo sapien
gcttggcagctgaactattggaggg

SEQ ID NO: 110510 - DNA, 25 bp, Homo sapien
gtctccatggtaatggctgggctct

SEQ ID NO: 110511 - DNA, 25 bp, Homo sapien
aatgccgtccagcatacagtgcaaa

SEQ ID NO: 110512 - DNA, 25 bp, Homo sapien
caacaatttatcaccctgcccctgc

SEQ ID NO: 110513 - DNA, 25 bp, Homo sapien
ttcatcgcttcccggctctgccctg

SEQ ID NO: 110514 - DNA, 25 bp, Homo sapien
ctctgctagacaatttcatgccttc

SEQ ID NO: 110515 - DNA, 25 bp, Homo sapien
gctctgccctgtgatgccaaggaag

SEQ ID NO: 110516 - DNA, 25 bp, Homo sapien
ccctccaatagttcagctgccaagc

SEQ ID NO: 110517 - DNA, 25 bp, Homo sapien
tgcagccagccagtctgacatcttg

SEQ ID NO: 110518 - DNA, 25 bp, Homo sapien
acagagtctccaaattcatcgcttc

SEQ ID NO: 110519 - DNA, 25 bp, Homo sapien
aagcctgaggttctcccaggactgt

SEQ ID NO: 110520 - DNA, 25 bp, Homo sapien
tgccaagctcaagtccagtggaatt

SEQ ID NO: 110521 - DNA, 25 bp, Homo sapien
gtaatcctgccgattaacaatgcta

SEQ ID NO: 110522 - DNA, 25 bp, Homo sapien
taacaatgctatcccaactgataat

SEQ ID NO: 110523 - DNA, 25 bp, Homo sapien
caaactttagggtacagtaatcctg

SEQ ID NO: 110524 - DNA, 25 bp, Homo sapien
cacaagacaacagactgtctatagg

SEQ ID NO: 110525 - DNA, 25 bp, Homo sapien
tatcagggcaactggacctccagac

SEQ ID NO: 110526 - DNA, 25 bp, Homo sapien
cacagaagaagatccaactgcggac

SEQ ID NO: 110527 - DNA, 25 bp, Homo sapien
caactgcggacactcaatgaggtca

SEQ ID NO: 110528 - DNA, 25 bp, Homo sapien
tcctatcagggcaactggacctcca

SEQ ID NO: 110529 - DNA, 25 bp, Homo sapien
tttgtgctgccaattctgatcattt

SEQ ID NO: 110530 - DNA, 25 bp, Homo sapien
gcacaattttctgggggcgttcaga

SEQ ID NO: 110531 - DNA, 25 bp, Homo sapien
tctgggggcgttcagactgccacaa

SEQ ID NO: 110532 - DNA, 25 bp, Homo sapien
tctttgtgctgccaattctgatcat

SEQ ID NO: 110533 - DNA, 25 bp, Homo sapien
tttaaaggtaatgattattacaaca

SEQ ID NO: 110534 - DNA, 25 bp, Homo sapien
tcagctgcagagtttacgtcaaagg

SEQ ID NO: 110535 - DNA, 25 bp, Homo sapien
aaaccctgaagaacatcccggaatg

SEQ ID NO: 110536 - DNA, 25 bp, Homo sapien
tttgcaatgagtcacagctgcagag

SEQ ID NO: 110537 - DNA, 25 bp, Homo sapien
ggtgccaggcttaagagctgttcca

SEQ ID NO: 110538 - DNA, 25 bp, Homo sapien
ggacactcaactctgcaaccggagc

SEQ ID NO: 110539 - DNA, 25 bp, Homo sapien
aggacactcaactctgcaaccggag

SEQ ID NO: 110540 - DNA, 25 bp, Homo sapien
tttaataatgcaccaataaaggaac

SEQ ID NO: 110541 - DNA, 25 bp, Homo sapien
ttagcccttgcgcagccaacttctt

SEQ ID NO: 110542 - DNA, 25 bp, Homo sapien
attttactacgtccatgttcatgag

SEQ ID NO: 110543 - DNA, 25 bp, Homo sapien
aacttcttcttgacagtttctaatg

SEQ ID NO: 110544 - DNA, 25 bp, Homo sapien
actatggtacttccaggtattatcc

SEQ ID NO: 110545 - DNA, 25 bp, Homo sapien
tactaatattctttaagggacaagc

SEQ ID NO: 110546 - DNA, 25 bp, Homo sapien
tctttaagggacaagccagacaagt

SEQ ID NO: 110547 - DNA, 25 bp, Homo sapien
taagaaaccactatggtacttccag

SEQ ID NO: 110548 - DNA, 25 bp, Homo sapien
acctcaggatgcaaaggtgggaaca

SEQ ID NO: 110549 - DNA, 25 bp, Homo sapien
gcagaaggataggttgaaaaactac

SEQ ID NO: 110550 - DNA, 25 bp, Homo sapien
acatttacccactgtttctaaatga

SEQ ID NO: 110551 - DNA, 25 bp, Homo sapien
ttgagtacctcaggatgcaaaggtg

SEQ ID NO: 110552 - DNA, 25 bp, Homo sapien
taccaaaaacacatatggtcatcac

SEQ ID NO: 110553 - DNA, 25 bp, Homo sapien
gaagtctaataacatgccagtaagg

SEQ ID NO: 110554 - DNA, 25 bp, Homo sapien
gaatggctattgtaaagaagtctaa

SEQ ID NO: 110555 - DNA, 25 bp, Homo sapien
tacaagcaatcaacaaacgtgaaaa

SEQ ID NO: 110556 - DNA, 25 bp, Homo sapien
taggctgttctaagcattctggaga

SEQ ID NO: 110557 - DNA, 25 bp, Homo sapien
gatccgtttgttatcttgctcaccc

SEQ ID NO: 110558 - DNA, 25 bp, Homo sapien
gccctacagtgagcaacctcagact

SEQ ID NO: 110559 - DNA, 25 bp, Homo sapien
ttgctcacccgaaacaagtagttgt

SEQ ID NO: 110560 - DNA, 25 bp, Homo sapien
gatgattctcccaagtactgattag

SEQ ID NO: 110561 - DNA, 25 bp, Homo sapien
tatacagactgtgtgtcattctggc

SEQ ID NO: 110562 - DNA, 25 bp, Homo sapien
tgaactttagttagcttcccaagaa

SEQ ID NO: 110563 - DNA, 25 bp, Homo sapien
tattccagcaagtactaaatcggcc

SEQ ID NO: 110564 - DNA, 25 bp, Homo sapien
tacccactttgatggagacaatctg

SEQ ID NO: 110565 - DNA, 25 bp, Homo sapien
ccttttcagggaggacgagaaactg

SEQ ID NO: 110566 - DNA, 25 bp, Homo sapien
aaagatggaacataggcccacctag

SEQ ID NO: 110567 - DNA, 25 bp, Homo sapien
gaaacaggttcatcaagtacaagct

SEQ ID NO: 110568 - DNA, 25 bp, Homo sapien
agaactatgacttcagctccgccga

SEQ ID NO: 110569 - DNA, 25 bp, Homo sapien
tgaacatcgagcctgtgtgcgtgcg

SEQ ID NO: 110570 - DNA, 25 bp, Homo sapien
gcccggcaccgctatgaggtagtga

SEQ ID NO: 110571 - DNA, 25 bp, Homo sapien
tacgctggttctacaaggaggacaa

SEQ ID NO: 110572 - DNA, 25 bp, Homo sapien
cgcgaggccagcgttcggcggcggc

SEQ ID NO: 110573 - DNA, 25 bp, Homo sapien
agacgcgaggccagcgttcggcggc

SEQ ID NO: 110574 - DNA, 25 bp, Homo sapien
tcagacgcgaggccagcgttcggcg

SEQ ID NO: 110575 - DNA, 25 bp, Homo sapien
cgaggccagcgttcggcggcggcgt

SEQ ID NO: 110576 - DNA, 25 bp, Homo sapien
acggagccccgagcataacggccga

SEQ ID NO: 110577 - DNA, 25 bp, Homo sapien
gggtccccacggagccccgagcata

SEQ ID NO: 110578 - DNA, 25 bp, Homo sapien
agccccgagcataacggccgaggcg

SEQ ID NO: 110579 - DNA, 25 bp, Homo sapien
ccacggagccccgagcataacggcc

SEQ ID NO: 110580 - DNA, 25 bp, Homo sapien
tcccagtgggagtggtgacaccaag

SEQ ID NO: 110581 - DNA, 25 bp, Homo sapien
gactgattgcgcacccactgtgtgg

SEQ ID NO: 110582 - DNA, 25 bp, Homo sapien
gggtaaagcctatccacatctgggc

SEQ ID NO: 110583 - DNA, 25 bp, Homo sapien
taacacgtagcttaaggctctgggc

SEQ ID NO: 110584 - DNA, 25 bp, Homo sapien
caccgcgcccggccttagtacttct

SEQ ID NO: 110585 - DNA, 25 bp, Homo sapien
caatggaatgctttacatagagcca

SEQ ID NO: 110586 - DNA, 25 bp, Homo sapien
gaggagccacctgacacctattctg

SEQ ID NO: 110587 - DNA, 25 bp, Homo sapien
gccatggaagttcagataatgctgt

SEQ ID NO: 110588 - DNA, 25 bp, Homo sapien
ggactagaatagatgccccaaccca

SEQ ID NO: 110589 - DNA, 25 bp, Homo sapien
aataactccgtcaggcttgattcca

SEQ ID NO: 110590 - DNA, 25 bp, Homo sapien
caataactccgtcaggcttgattcc

SEQ ID NO: 110591 - DNA, 25 bp, Homo sapien
ataactccgtcaggcttgattccac

SEQ ID NO: 110592 - DNA, 25 bp, Homo sapien
tatttatagacaccactagactgtg

SEQ ID NO: 110593 - DNA, 25 bp, Homo sapien
gttgtttcatttggtcagggcatca

SEQ ID NO: 110594 - DNA, 25 bp, Homo sapien
gactgtgaatgcttcactgtagagc

SEQ ID NO: 110595 - DNA, 25 bp, Homo sapien
cagggcatcagataaaacactctca

SEQ ID NO: 110596 - DNA, 25 bp, Homo sapien
attgatctgtctgtagggagagaat

SEQ ID NO: 110597 - DNA, 25 bp, Homo sapien
ttgatctgtctgtagggagagaatg

SEQ ID NO: 110598 - DNA, 25 bp, Homo sapien
tattgatctgtctgtagggagagaa

SEQ ID NO: 110599 - DNA, 25 bp, Homo sapien
ttattgatctgtctgtagggagaga

SEQ ID NO: 110600 - DNA, 25 bp, Homo sapien
tattcatcatgaatccctacgttat

SEQ ID NO: 110601 - DNA, 25 bp, Homo sapien
atcatgaatccctacgttatttctg

SEQ ID NO: 110602 - DNA, 25 bp, Homo sapien
ttcatcatgaatccctacgttattt

SEQ ID NO: 110603 - DNA, 25 bp, Homo sapien
catcatgaatccctacgttatttct

SEQ ID NO: 110604 - DNA, 25 bp, Homo sapien
tggagaagccaaaaagggtttatga

SEQ ID NO: 110605 - DNA, 25 bp, Homo sapien
agagaacatgggtaattacaggccc

SEQ ID NO: 110606 - DNA, 25 bp, Homo sapien
gagaggttgagtcccttttcctcat

SEQ ID NO: 110607 - DNA, 25 bp, Homo sapien
tcatctctgtttggattggccaaca

SEQ ID NO: 110608 - DNA, 25 bp, Homo sapien
tgggcctgggccctaagatttttga

SEQ ID NO: 110609 - DNA, 25 bp, Homo sapien
ctaaagtgctttagctgggcctggg

SEQ ID NO: 110610 - DNA, 25 bp, Homo sapien
tctggatggcagagtttcctttgtg

SEQ ID NO: 110611 - DNA, 25 bp, Homo sapien
tcctttgtgcctaaagtgctttagc

SEQ ID NO: 110612 - DNA, 25 bp, Homo sapien
ggtcaggcggttaactgtctcccta

SEQ ID NO: 110613 - DNA, 25 bp, Homo sapien
gataggcagtttcccaacagatgga

SEQ ID NO: 110614 - DNA, 25 bp, Homo sapien
ggctcacaatgtacactaagaggca

SEQ ID NO: 110615 - DNA, 25 bp, Homo sapien
tgaacatcaggcgatcatcgggtga

SEQ ID NO: 110616 - DNA, 25 bp, Homo sapien
cggccaaaaagtttatgtagtcatg

SEQ ID NO: 110617 - DNA, 25 bp, Homo sapien
caaaaagtttatgtagtcatggatg

SEQ ID NO: 110618 - DNA, 25 bp, Homo sapien
tgtccccatttggtcaaacggccaa

SEQ ID NO: 110619 - DNA, 25 bp, Homo sapien
tggttgatagcagtatgccagatgt

SEQ ID NO: 110620 - DNA, 25 bp, Homo sapien
tggacaaaggagtgaggccaaagct

SEQ ID NO: 110621 - DNA, 25 bp, Homo sapien
aaactatctgggctcctttagcctg

SEQ ID NO: 110622 - DNA, 25 bp, Homo sapien
tgagctcttgatctgccttccctga

SEQ ID NO: 110623 - DNA, 25 bp, Homo sapien
aagctgtagtcccttgttgtctgag

SEQ ID NO: 110624 - DNA, 25 bp, Homo sapien
cttctctcagttccatggtctgcca

SEQ ID NO: 110625 - DNA, 25 bp, Homo sapien
ttctctcagttccatggtctgccat

SEQ ID NO: 110626 - DNA, 25 bp, Homo sapien
ggttttcaagtggtaatgcagtgaa

SEQ ID NO: 110627 - DNA, 25 bp, Homo sapien
tttcaagtggtaatgcagtgaatag

SEQ ID NO: 110628 - DNA, 25 bp, Homo sapien
gaggttttcaagtggtaatgcagtg

SEQ ID NO: 110629 - DNA, 25 bp, Homo sapien
tcaagtggtaatgcagtgaatagac

SEQ ID NO: 110630 - DNA, 25 bp, Homo sapien
cacgataccatgagaatgagtatcc

SEQ ID NO: 110631 - DNA, 25 bp, Homo sapien
gaatgagtatccactctcttggctt

SEQ ID NO: 110632 - DNA, 25 bp, Homo sapien
gagaatgagtatccactctcttggc

SEQ ID NO: 110633 - DNA, 25 bp, Homo sapien
atcacacacgataccatgagaatga

SEQ ID NO: 110634 - DNA, 25 bp, Homo sapien
tgatcaggtatactagtccattcag

SEQ ID NO: 110635 - DNA, 25 bp, Homo sapien
gatcaggtatactagtccattcaga

SEQ ID NO: 110636 - DNA, 25 bp, Homo sapien
ttgtttgaggcatatataatcatac

SEQ ID NO: 110637 - DNA, 25 bp, Homo sapien
tagatgattgtttgaggcatatata

SEQ ID NO: 110638 - DNA, 25 bp, Homo sapien
ttattagatgattgtttgaggcata

SEQ ID NO: 110639 - DNA, 25 bp, Homo sapien
gattgtttgaggcatatataatcat

SEQ ID NO: 110640 - DNA, 25 bp, Homo sapien
ctatcaatttcactggagatgtttc

SEQ ID NO: 110641 - DNA, 25 bp, Homo sapien
ttgtaggattggcttaattcaaaac

SEQ ID NO: 110642 - DNA, 25 bp, Homo sapien
tatttaggctatcaatttcactgga

SEQ ID NO: 110643 - DNA, 25 bp, Homo sapien
ctggcttaatagtcaaccttttgaa

SEQ ID NO: 110644 - DNA, 25 bp, Homo sapien
tggcccacactctaagttgcaaggt

SEQ ID NO: 110645 - DNA, 25 bp, Homo sapien
gaatctccgagtgtgagacccagac

SEQ ID NO: 110646 - DNA, 25 bp, Homo sapien
ccagggctgagaatagttgatctct

SEQ ID NO: 110647 - DNA, 25 bp, Homo sapien
aataagctgtaggtgaggctaacac

SEQ ID NO: 110648 - DNA, 25 bp, Homo sapien
ggcacgagagacaagccaagccatg

SEQ ID NO: 110649 - DNA, 25 bp, Homo sapien
gctgagccatgcctaagagccaagc

SEQ ID NO: 110650 - DNA, 25 bp, Homo sapien
tacttacactgtctctctcgcactg

SEQ ID NO: 110651 - DNA, 25 bp, Homo sapien
gccaattgtcatgttgaggtccaaa

SEQ ID NO: 110652 - DNA, 25 bp, Homo sapien
tgaacgcggctagttccgggtgggc

SEQ ID NO: 110653 - DNA, 25 bp, Homo sapien
cgggaaccagggctgaacgcggcta

SEQ ID NO: 110654 - DNA, 25 bp, Homo sapien
aggctccgaggtcccgcactgagag

SEQ ID NO: 110655 - DNA, 25 bp, Homo sapien
tcagcccgccactgcgctatggggg

SEQ ID NO: 110656 - DNA, 25 bp, Homo sapien
taggacaaagctcatagaagttaac

SEQ ID NO: 110657 - DNA, 25 bp, Homo sapien
tacctctacagagactagggcatca

SEQ ID NO: 110658 - DNA, 25 bp, Homo sapien
caggttgagacactatggaataatc

SEQ ID NO: 110659 - DNA, 25 bp, Homo sapien
gaagttaactgagaataagctggcc

SEQ ID NO: 110660 - DNA, 25 bp, Homo sapien
tgcgaatgctgtagctgaggacctt

SEQ ID NO: 110661 - DNA, 25 bp, Homo sapien
ggcaccaaatgcattaccatccctg

SEQ ID NO: 110662 - DNA, 25 bp, Homo sapien
tgggattactcaaaaaggcctctct

SEQ ID NO: 110663 - DNA, 25 bp, Homo sapien
gaggaccttggttgaacaccacatg

SEQ ID NO: 110664 - DNA, 25 bp, Homo sapien
tcagctatagaactctaacacgtgt

SEQ ID NO: 110665 - DNA, 25 bp, Homo sapien
cagctatagaactctaacacgtgtt

SEQ ID NO: 110666 - DNA, 25 bp, Homo sapien
tatagaactctaacacgtgttttta

SEQ ID NO: 110667 - DNA, 25 bp, Homo sapien
gctatagaactctaacacgtgtttt

SEQ ID NO: 110668 - DNA, 25 bp, Homo sapien
ctgagggtgccagattacctgaggt

SEQ ID NO: 110669 - DNA, 25 bp, Homo sapien
tcaacgagacagaaagtcaacaagg

SEQ ID NO: 110670 - DNA, 25 bp, Homo sapien
agatcaacgagacagaaagtcaaca

SEQ ID NO: 110671 - DNA, 25 bp, Homo sapien
cgagacagaaagtcaacaaggatac

SEQ ID NO: 110672 - DNA, 25 bp, Homo sapien
cagaaagtcaacaaggatacccagg

SEQ ID NO: 110673 - DNA, 25 bp, Homo sapien
gcacctgatcttccagccatgtcat

SEQ ID NO: 110674 - DNA, 25 bp, Homo sapien
atatctttcttgtgatgccttttac

SEQ ID NO: 110675 - DNA, 25 bp, Homo sapien
aattcatggcgctcattctttgtag

SEQ ID NO: 110676 - DNA, 25 bp, Homo sapien
gatgccttttactgttacttaactc

SEQ ID NO: 110677 - DNA, 25 bp, Homo sapien
tcaccatttgaaagtgccctctgct

SEQ ID NO: 110678 - DNA, 25 bp, Homo sapien
attttaggcccagcttatctctcac

SEQ ID NO: 110679 - DNA, 25 bp, Homo sapien
aggatcaacaatatcaatagactgc

SEQ ID NO: 110680 - DNA, 25 bp, Homo sapien
caacaatatcaatagactgctagaa

SEQ ID NO: 110681 - DNA, 25 bp, Homo sapien
gatcaacaatatcaatagactgcta

SEQ ID NO: 110682 - DNA, 25 bp, Homo sapien
aaaggatcaacaatatcaatagact

SEQ ID NO: 110683 - DNA, 25 bp, Homo sapien
gactcacatccaagtcccaagggtg

SEQ ID NO: 110684 - DNA, 25 bp, Homo sapien
tcgctcagcttatccaggagactca

SEQ ID NO: 110685 - DNA, 25 bp, Homo sapien
tgggacagaatgaccccaaagggaa

SEQ ID NO: 110686 - DNA, 25 bp, Homo sapien
aaagcagggtgaccatcgctcagct

SEQ ID NO: 110687 - DNA, 25 bp, Homo sapien
agctgttcaaggagataccagagaa

SEQ ID NO: 110688 - DNA, 25 bp, Homo sapien
gctgttcaaggagataccagagaaa

SEQ ID NO: 110689 - DNA, 25 bp, Homo sapien
gatggttgattatcaagctgttcaa

SEQ ID NO: 110690 - DNA, 25 bp, Homo sapien
gttgattatcaagctgttcaaggag

SEQ ID NO: 110691 - DNA, 25 bp, Homo sapien
ccatcttggaaccaccctccagtag

SEQ ID NO: 110692 - DNA, 25 bp, Homo sapien
atcttggaaccaccctccagtagtt

SEQ ID NO: 110693 - DNA, 25 bp, Homo sapien
gtgtgccatttgctatgaccatcag

SEQ ID NO: 110694 - DNA, 25 bp, Homo sapien
tggctgctgcctttcaatttgatct

SEQ ID NO: 110695 - DNA, 25 bp, Homo sapien
caatgagcaagggtccgtgggcgta

SEQ ID NO: 110696 - DNA, 25 bp, Homo sapien
cagtttgagcttcccggcaggtttg

SEQ ID NO: 110697 - DNA, 25 bp, Homo sapien
caggtacagctccttaaactcagtt

SEQ ID NO: 110698 - DNA, 25 bp, Homo sapien
cttaaactcagttctctggagttga

SEQ ID NO: 110699 - DNA, 25 bp, Homo sapien
ggtacagctccttaaactcagttct

SEQ ID NO: 110700 - DNA, 25 bp, Homo sapien
ttctctggagttgaagatctgtgaa

SEQ ID NO: 110701 - DNA, 25 bp, Homo sapien
tctggcaactcagtgatccttggtg

SEQ ID NO: 110702 - DNA, 25 bp, Homo sapien
gaagctgccagactagttaaagacc

SEQ ID NO: 110703 - DNA, 25 bp, Homo sapien
taaaacctaagctagcagtgggaaa

SEQ ID NO: 110704 - DNA, 25 bp, Homo sapien
aaatggactactgacttagcagacg

SEQ ID NO: 110705 - DNA, 25 bp, Homo sapien
tgcttcagcgatctgaattttcccc

SEQ ID NO: 110706 - DNA, 25 bp, Homo sapien
gaagtcaatggttgaatacggactt

SEQ ID NO: 110707 - DNA, 25 bp, Homo sapien
ttccattactgcttcagcgatctga

SEQ ID NO: 110708 - DNA, 25 bp, Homo sapien
caatggttgaatacggacttgtttt

SEQ ID NO: 110709 - DNA, 25 bp, Homo sapien
taggccaggagattaattcattcac

SEQ ID NO: 110710 - DNA, 25 bp, Homo sapien
caggtggttctaacatgcaacaagg

SEQ ID NO: 110711 - DNA, 25 bp, Homo sapien
gtccccaacttgtatataggccagg

SEQ ID NO: 110712 - DNA, 25 bp, Homo sapien
tactatgtgctagaatccagtcaaa

SEQ ID NO: 110713 - DNA, 25 bp, Homo sapien
tagtacagcgatgtcctctcaggga

SEQ ID NO: 110714 - DNA, 25 bp, Homo sapien
tacacataccggtctactgaaaatg

SEQ ID NO: 110715 - DNA, 25 bp, Homo sapien
gagatattccacatacaaggctttg

SEQ ID NO: 110716 - DNA, 25 bp, Homo sapien
gtaaggctcaatggccaggcatcca

SEQ ID NO: 110717 - DNA, 25 bp, Homo sapien
gagcagccttaagtaggaaggaaac

SEQ ID NO: 110718 - DNA, 25 bp, Homo sapien
tctagggtggtaccccaaagcactc

SEQ ID NO: 110719 - DNA, 25 bp, Homo sapien
ccatcaaactgtggtgtggtagggc

SEQ ID NO: 110720 - DNA, 25 bp, Homo sapien
gtagggcaagtcatggtattcagca

SEQ ID NO: 110721 - DNA, 25 bp, Homo sapien
taacccagactttagggaatgtgct

SEQ ID NO: 110722 - DNA, 25 bp, Homo sapien
cttggacaagcagtcctaaggctga

SEQ ID NO: 110723 - DNA, 25 bp, Homo sapien
tttgatcaggactctgtggcaggga

SEQ ID NO: 110724 - DNA, 25 bp, Homo sapien
tatatattggaccacacctctatgg

SEQ ID NO: 110725 - DNA, 25 bp, Homo sapien
gcaccatggaaggacgggagcatgc

SEQ ID NO: 110726 - DNA, 25 bp, Homo sapien
ctttgcaagtttccgtccagcccca

SEQ ID NO: 110727 - DNA, 25 bp, Homo sapien
gaaggacgggagcatgcacaagcct

SEQ ID NO: 110728 - DNA, 25 bp, Homo sapien
ttgcaagtttccgtccagccccact

SEQ ID NO: 110729 - DNA, 25 bp, Homo sapien
tcggcacaacagtgcttccccgtgg

SEQ ID NO: 110730 - DNA, 25 bp, Homo sapien
agtgcttccccgtggctttaccctg

SEQ ID NO: 110731 - DNA, 25 bp, Homo sapien
acttgcatctaagagtttgtctaca

SEQ ID NO: 110732 - DNA, 25 bp, Homo sapien
ttaccaacttgcatctaagagtttg

SEQ ID NO: 110733 - DNA, 25 bp, Homo sapien
cctgcagtgcagaggattatttctt

SEQ ID NO: 110734 - DNA, 25 bp, Homo sapien
aatgtatggcctgcagtgcagagga

SEQ ID NO: 110735 - DNA, 25 bp, Homo sapien
aaagatacagggatttaaatgtatg

SEQ ID NO: 110736 - DNA, 25 bp, Homo sapien
gtatggcctgcagtgcagaggatta

SEQ ID NO: 110737 - DNA, 25 bp, Homo sapien
gaggttgatcgacgactgctctaac

SEQ ID NO: 110738 - DNA, 25 bp, Homo sapien
gatcgacgactgctctaactgcttc

SEQ ID NO: 110739 - DNA, 25 bp, Homo sapien
gggaggttgatcgacgactgctcta

SEQ ID NO: 110740 - DNA, 25 bp, Homo sapien
ttgatcgacgactgctctaactgct

SEQ ID NO: 110741 - DNA, 25 bp, Homo sapien
tatgggctcttaacattgcaaatgt

SEQ ID NO: 110742 - DNA, 25 bp, Homo sapien
gaaatgagttcaccgtcctgacctc

SEQ ID NO: 110743 - DNA, 25 bp, Homo sapien
tcaagggtttgcctaagtaaataga

SEQ ID NO: 110744 - DNA, 25 bp, Homo sapien
cttgagtcaaaactatggttctgaa

SEQ ID NO: 110745 - DNA, 25 bp, Homo sapien
gctgagttgctacacacatctggag

SEQ ID NO: 110746 - DNA, 25 bp, Homo sapien
tgagctgctctgttaatgcacccat

SEQ ID NO: 110747 - DNA, 25 bp, Homo sapien
tcagggccgaagataaagttggagc

SEQ ID NO: 110748 - DNA, 25 bp, Homo sapien
cgttacttgtaatcgtgagctgctc

SEQ ID NO: 110749 - DNA, 25 bp, Homo sapien
agttattacaatacagccacaaata

SEQ ID NO: 110750 - DNA, 25 bp, Homo sapien
ttcacaaagttattacaatacagcc

SEQ ID NO: 110751 - DNA, 25 bp, Homo sapien
ttccaatttcacaaagttattacaa

SEQ ID NO: 110752 - DNA, 25 bp, Homo sapien
ctccattacaatcactgggaattcc

SEQ ID NO: 110753 - DNA, 25 bp, Homo sapien
tccatgacttctggtcatcccacat

SEQ ID NO: 110754 - DNA, 25 bp, Homo sapien
catccatgacttctggtcatcccac

SEQ ID NO: 110755 - DNA, 25 bp, Homo sapien
atccatgacttctggtcatcccaca

SEQ ID NO: 110756 - DNA, 25 bp, Homo sapien
tcatccatgacttctggtcatccca

SEQ ID NO: 110757 - DNA, 25 bp, Homo sapien
tcttgatccctctaaagtcagctct

SEQ ID NO: 110758 - DNA, 25 bp, Homo sapien
tccatccagcaagctattcttgatc

SEQ ID NO: 110759 - DNA, 25 bp, Homo sapien
tattcttgatccctctaaagtcagc

SEQ ID NO: 110760 - DNA, 25 bp, Homo sapien
cagcaagctattcttgatccctcta

SEQ ID NO: 110761 - DNA, 25 bp, Homo sapien
tctgcgtggaattgaggaaggcctt

SEQ ID NO: 110762 - DNA, 25 bp, Homo sapien
gaaggccttgctgatattactattg

SEQ ID NO: 110763 - DNA, 25 bp, Homo sapien
ggctattacatgcttctcccatggg

SEQ ID NO: 110764 - DNA, 25 bp, Homo sapien
cacagcgtgggcttaattatcatta

SEQ ID NO: 110765 - DNA, 25 bp, Homo sapien
gaagggaccttattgagtactttgc

SEQ ID NO: 110766 - DNA, 25 bp, Homo sapien
ggacaattgaatctaggcatgctta

SEQ ID NO: 110767 - DNA, 25 bp, Homo sapien
gaggcaaagtagaaccagcagcaag

SEQ ID NO: 110768 - DNA, 25 bp, Homo sapien
ttcagatccagaaattgagaccagg

SEQ ID NO: 110769 - DNA, 25 bp, Homo sapien
ctcaacgctattaatggctgagcat

SEQ ID NO: 110770 - DNA, 25 bp, Homo sapien
accctctcaacgctattaatggctg

SEQ ID NO: 110771 - DNA, 25 bp, Homo sapien
tctcaacgctattaatggctgagca

SEQ ID NO: 110772 - DNA, 25 bp, Homo sapien
cctctcaacgctattaatggctgag

SEQ ID NO: 110773 - DNA, 25 bp, Homo sapien
ttataccagatcaattcaaaaggca

SEQ ID NO: 110774 - DNA, 25 bp, Homo sapien
tatgagtgttcgctatcctgtgtcc

SEQ ID NO: 110775 - DNA, 25 bp, Homo sapien
tgagctgtctttccatttacgtaga

SEQ ID NO: 110776 - DNA, 25 bp, Homo sapien
tcaaaaggcattataccagtactgc

SEQ ID NO: 110777 - DNA, 25 bp, Homo sapien
caaaaacattgggaggctttgttat

SEQ ID NO: 110778 - DNA, 25 bp, Homo sapien
atcaacagcataataacactgagtt

SEQ ID NO: 110779 - DNA, 25 bp, Homo sapien
cagcataataacactgagttccaaa

SEQ ID NO: 110780 - DNA, 25 bp, Homo sapien
cataataacactgagttccaaaaac

SEQ ID NO: 110781 - DNA, 25 bp, Homo sapien
gcaggtgctggctgctgctctggca

SEQ ID NO: 110782 - DNA, 25 bp, Homo sapien
gtgctggctgctgctctggcactgt

SEQ ID NO: 110783 - DNA, 25 bp, Homo sapien
cttgccagtaactgcaggtgctggc

SEQ ID NO: 110784 - DNA, 25 bp, Homo sapien
aggtgctggctgctgctctggcact

SEQ ID NO: 110785 - DNA, 25 bp, Homo sapien
cttggcatctggctggtccagctgc

SEQ ID NO: 110786 - DNA, 25 bp, Homo sapien
tctggctggtccagctgccaacaca

SEQ ID NO: 110787 - DNA, 25 bp, Homo sapien
tggcatctggctggtccagctgcca

SEQ ID NO: 110788 - DNA, 25 bp, Homo sapien
catctggctggtccagctgccaaca

SEQ ID NO: 110789 - DNA, 25 bp, Homo sapien
tcaaggtggtttgggtagccacagc

SEQ ID NO: 110790 - DNA, 25 bp, Homo sapien
aatcaaggtggtttgggtagccaca

SEQ ID NO: 110791 - DNA, 25 bp, Homo sapien
ggtggtttgggtagccacagcagtc

SEQ ID NO: 110792 - DNA, 25 bp, Homo sapien
agaatcaaggtggtttgggtagcca

SEQ ID NO: 110793 - DNA, 25 bp, Homo sapien
ttgcaatgacacttggccagtagac

SEQ ID NO: 110794 - DNA, 25 bp, Homo sapien
gccagtagacttgggctcccattgt

SEQ ID NO: 110795 - DNA, 25 bp, Homo sapien
cacagcaaggcacagatatgggagc

SEQ ID NO: 110796 - DNA, 25 bp, Homo sapien
tatgcagaagtagagccatctgcct

SEQ ID NO: 110797 - DNA, 25 bp, Homo sapien
gcctttgtcccataaatattgttgt

SEQ ID NO: 110798 - DNA, 25 bp, Homo sapien
actttatacgttctgtctggctgat

SEQ ID NO: 110799 - DNA, 25 bp, Homo sapien
caatttataaatgatggctgcaaag

SEQ ID NO: 110800 - DNA, 25 bp, Homo sapien
tcttcacactttatacgttctgtct

SEQ ID NO: 110801 - DNA, 25 bp, Homo sapien
aagttggctgacgtccgcacatcct

SEQ ID NO: 110802 - DNA, 25 bp, Homo sapien
caaaggttacgaaccaccattctag

SEQ ID NO: 110803 - DNA, 25 bp, Homo sapien
atcattttggccaccggggggcaag

SEQ ID NO: 110804 - DNA, 25 bp, Homo sapien
caagtttgaaggagttttgatggca

SEQ ID NO: 110805 - DNA, 25 bp, Homo sapien
gaataattcaagagcaatacctggg

SEQ ID NO: 110806 - DNA, 25 bp, Homo sapien
gaatgatggaaccagactcttgact

SEQ ID NO: 110807 - DNA, 25 bp, Homo sapien
gatgatatgggcactagcaatacca

SEQ ID NO: 110808 - DNA, 25 bp, Homo sapien
ctgggctcaaatccgacacgttaac

SEQ ID NO: 110809 - DNA, 25 bp, Homo sapien
tgtttgaagtgttatgacagaccca

SEQ ID NO: 110810 - DNA, 25 bp, Homo sapien
gatgattgccagactaccacattca

SEQ ID NO: 110811 - DNA, 25 bp, Homo sapien
gcataaactaggactgagaagcaga

SEQ ID NO: 110812 - DNA, 25 bp, Homo sapien
gacacaaagacgtagggccaagtca

SEQ ID NO: 110813 - DNA, 25 bp, Homo sapien
ctttctctactagttggaacgtcag

SEQ ID NO: 110814 - DNA, 25 bp, Homo sapien
catcggtatgatggattcttcttcg

SEQ ID NO: 110815 - DNA, 25 bp, Homo sapien
ggaacgtcagtaaaacatcggtatg

SEQ ID NO: 110816 - DNA, 25 bp, Homo sapien
acttctgctgacatcttctccgctt

SEQ ID NO: 110817 - DNA, 25 bp, Homo sapien
caaagaaattgagatcacaggctga

SEQ ID NO: 110818 - DNA, 25 bp, Homo sapien
ttaaattagattgacacaagctctt

SEQ ID NO: 110819 - DNA, 25 bp, Homo sapien
ttgtagaattgagagggttcttctc

SEQ ID NO: 110820 - DNA, 25 bp, Homo sapien
gaattgagagggttcttctcaaaga

SEQ ID NO: 110821 - DNA, 25 bp, Homo sapien
cactccccttagacggtcctttctg

SEQ ID NO: 110822 - DNA, 25 bp, Homo sapien
tactgcatcattcagagggggacaa

SEQ ID NO: 110823 - DNA, 25 bp, Homo sapien
tgcatcattcagagggggacaaacc

SEQ ID NO: 110824 - DNA, 25 bp, Homo sapien
attcagagggggacaaaccctgtgt

SEQ ID NO: 110825 - DNA, 25 bp, Homo sapien
aagtccttttataatgacatgaatt

SEQ ID NO: 110826 - DNA, 25 bp, Homo sapien
gaagagctcacaggtttatgcaaga

SEQ ID NO: 110827 - DNA, 25 bp, Homo sapien
taagggaggcaatgtcatatcatac

SEQ ID NO: 110828 - DNA, 25 bp, Homo sapien
tgaaataaataccagggaagagctc

SEQ ID NO: 110829 - DNA, 25 bp, Homo sapien
cagactcacagtcgggtgtaaatca

SEQ ID NO: 110830 - DNA, 25 bp, Homo sapien
tttgccagacaaacgaggaggtgat

SEQ ID NO: 110831 - DNA, 25 bp, Homo sapien
cagtggtcatccctgctatgctgca

SEQ ID NO: 110832 - DNA, 25 bp, Homo sapien
taggcaggaggaaacattatcacaa

SEQ ID NO: 110833 - DNA, 25 bp, Homo sapien
gaaggctcatggttcctgcatgcca

SEQ ID NO: 110834 - DNA, 25 bp, Homo sapien
tggagccattcgacaggcagtgttc

SEQ ID NO: 110835 - DNA, 25 bp, Homo sapien
gttggagacagcgactccagttctc

SEQ ID NO: 110836 - DNA, 25 bp, Homo sapien
caacccaatcggtcatctgtttata

SEQ ID NO: 110837 - DNA, 25 bp, Homo sapien
aatcggtcatctgtttatagaaggc

SEQ ID NO: 110838 - DNA, 25 bp, Homo sapien
tatagtggctttagtcataatctcc

SEQ ID NO: 110839 - DNA, 25 bp, Homo sapien
gcatactgattactttgagctggtt

SEQ ID NO: 110840 - DNA, 25 bp, Homo sapien
caaactgatggggcttgggatgcac

SEQ ID NO: 110841 - DNA, 25 bp, Homo sapien
tacatgtcatttaactcgtgagtgg

SEQ ID NO: 110842 - DNA, 25 bp, Homo sapien
atacactcatctcctttaactccct

SEQ ID NO: 110843 - DNA, 25 bp, Homo sapien
tgaaggaggatctctctcccttcat

SEQ ID NO: 110844 - DNA, 25 bp, Homo sapien
gaatcagtgtgacccctaacgcaat

SEQ ID NO: 110845 - DNA, 25 bp, Homo sapien
gtatgtgccaaactctcagaatcag

SEQ ID NO: 110846 - DNA, 25 bp, Homo sapien
cgcatcacctatggcttctgaaggc

SEQ ID NO: 110847 - DNA, 25 bp, Homo sapien
ggctgctaccagaggaacacatctg

SEQ ID NO: 110848 - DNA, 25 bp, Homo sapien
cccacataatgaaggcctcagtgtc

SEQ ID NO: 110849 - DNA, 25 bp, Homo sapien
tcagtgtcattcctgaatgacatag

SEQ ID NO: 110850 - DNA, 25 bp, Homo sapien
cttcccctatattctcaccatcccc

SEQ ID NO: 110851 - DNA, 25 bp, Homo sapien
tcattcctgaatgacatagaaattc

SEQ ID NO: 110852 - DNA, 25 bp, Homo sapien
ttgactagccttatcaacttcccaa

SEQ ID NO: 110853 - DNA, 25 bp, Homo sapien
tttatttcgtctgtgttgactagcc

SEQ ID NO: 110854 - DNA, 25 bp, Homo sapien
tatcccagtaagcaatactccctca

SEQ ID NO: 110855 - DNA, 25 bp, Homo sapien
gctgataatctccataacattatga

SEQ ID NO: 110856 - DNA, 25 bp, Homo sapien
gtttggacagtcagataacatggca

SEQ ID NO: 110857 - DNA, 25 bp, Homo sapien
caggtaggtgtttggacagtcagat

SEQ ID NO: 110858 - DNA, 25 bp, Homo sapien
taggtgtttggacagtcagataaca

SEQ ID NO: 110859 - DNA, 25 bp, Homo sapien
caggcaggtaggtgtttggacagtc

SEQ ID NO: 110860 - DNA, 25 bp, Homo sapien
gggcttagccaatgtcagtaccatg

SEQ ID NO: 110861 - DNA, 25 bp, Homo sapien
gagcctacaaaaccatgagtcaatt

SEQ ID NO: 110862 - DNA, 25 bp, Homo sapien
gatagcgtttgggtatgtatcccat

SEQ ID NO: 110863 - DNA, 25 bp, Homo sapien
tggccgtgtgatgtgactgctccca

SEQ ID NO: 110864 - DNA, 25 bp, Homo sapien
ttataactatctgcctggacattga

SEQ ID NO: 110865 - DNA, 25 bp, Homo sapien
ttcttgacattcaggagatctgttt

SEQ ID NO: 110866 - DNA, 25 bp, Homo sapien
gaataaatgcaagttcttgacattc

SEQ ID NO: 110867 - DNA, 25 bp, Homo sapien
gaaacttgttcttctagaagccaag

SEQ ID NO: 110868 - DNA, 25 bp, Homo sapien
tccccagaccaagggccttcataag

SEQ ID NO: 110869 - DNA, 25 bp, Homo sapien
caagggccttcataagatcaatcgc

SEQ ID NO: 110870 - DNA, 25 bp, Homo sapien
cagaccaagggccttcataagatca

SEQ ID NO: 110871 - DNA, 25 bp, Homo sapien
gggccttcataagatcaatcgccat

SEQ ID NO: 110872 - DNA, 25 bp, Homo sapien
ccagctgctgatgactcttcaggaa

SEQ ID NO: 110873 - DNA, 25 bp, Homo sapien
gctcttcactggaggaaggatcatc

SEQ ID NO: 110874 - DNA, 25 bp, Homo sapien
tataggccacaaagaagttttgctc

SEQ ID NO: 110875 - DNA, 25 bp, Homo sapien
tcttcatggtgacaatctgcaggct

SEQ ID NO: 110876 - DNA, 25 bp, Homo sapien
tctggaaaaaatcttgatattcagc

SEQ ID NO: 110877 - DNA, 25 bp, Homo sapien
acagctggattttatgcttctcccc

SEQ ID NO: 110878 - DNA, 25 bp, Homo sapien
gcttctcccctcttaaggagttgac

SEQ ID NO: 110879 - DNA, 25 bp, Homo sapien
ggaaaaaatcttgatattcagccaa

SEQ ID NO: 110880 - DNA, 25 bp, Homo sapien
gcaccctgatctaagtcatccacta

SEQ ID NO: 110881 - DNA, 25 bp, Homo sapien
ttatgttgcaccctgatctaagtca

SEQ ID NO: 110882 - DNA, 25 bp, Homo sapien
gatctaagtcatccactacttctag

SEQ ID NO: 110883 - DNA, 25 bp, Homo sapien
aagtcatccactacttctagaacag

SEQ ID NO: 110884 - DNA, 25 bp, Homo sapien
gattgcagctgtgtaactggagcac

SEQ ID NO: 110885 - DNA, 25 bp, Homo sapien
gaaaacatctttgtcggaaaatgag

SEQ ID NO: 110886 - DNA, 25 bp, Homo sapien
tccccaacataaagacagggtgaag

SEQ ID NO: 110887 - DNA, 25 bp, Homo sapien
cacatgactttttgcaagttcccca

SEQ ID NO: 110888 - DNA, 25 bp, Homo sapien
caagaattgtatagagaaatcaggt

SEQ ID NO: 110889 - DNA, 25 bp, Homo sapien
gttaacaggtatgtcagtaattaca

SEQ ID NO: 110890 - DNA, 25 bp, Homo sapien
cttcctatgtatctgtagcaaaaca

SEQ ID NO: 110891 - DNA, 25 bp, Homo sapien
ccatggatcctaaacaaattgtgcc

SEQ ID NO: 110892 - DNA, 25 bp, Homo sapien
tgcaacagagctccagacgggtctg

SEQ ID NO: 110893 - DNA, 25 bp, Homo sapien
ttcgaacagatagaaactttgggcc

SEQ ID NO: 110894 - DNA, 25 bp, Homo sapien
tcatcctttctcctatgcagcttct

SEQ ID NO: 110895 - DNA, 25 bp, Homo sapien
gagttaatcattctagccctgtacc

SEQ ID NO: 110896 - DNA, 25 bp, Homo sapien
ggctcacagtatgcacccaataatg

SEQ ID NO: 110897 - DNA, 25 bp, Homo sapien
gtttgtcctcctaccgcctttctga

SEQ ID NO: 110898 - DNA, 25 bp, Homo sapien
tgctgctcatataagcacttgtagg

SEQ ID NO: 110899 - DNA, 25 bp, Homo sapien
caaaactttgtaaggcagttagagc

SEQ ID NO: 110900 - DNA, 25 bp, Homo sapien
ctctttctctttgcgtgaagtttga

SEQ ID NO: 110901 - DNA, 25 bp, Homo sapien
taccacaatatagtgagtaggattc

SEQ ID NO: 110902 - DNA, 25 bp, Homo sapien
ctgaggtgtcagtctatgaaaggaa

SEQ ID NO: 110903 - DNA, 25 bp, Homo sapien
ggcatctccttgagacactacttta

SEQ ID NO: 110904 - DNA, 25 bp, Homo sapien
tcccacaggttggatttctctgagg

SEQ ID NO: 110905 - DNA, 25 bp, Homo sapien
gtctctgagcattggcttttctcct

SEQ ID NO: 110906 - DNA, 25 bp, Homo sapien
tggtctctgagcattggcttttctc

SEQ ID NO: 110907 - DNA, 25 bp, Homo sapien
tggttggtctctgagcattggcttt

SEQ ID NO: 110908 - DNA, 25 bp, Homo sapien
gttggtctctgagcattggcttttc

SEQ ID NO: 110909 - DNA, 25 bp, Homo sapien
attgtcctggcagatgtctactgct

SEQ ID NO: 110910 - DNA, 25 bp, Homo sapien
tactgctgagtggtccctgaattgg

SEQ ID NO: 110911 - DNA, 25 bp, Homo sapien
ggcagatgtctactgctgagtggtc

SEQ ID NO: 110912 - DNA, 25 bp, Homo sapien
tgtctactgctgagtggtccctgaa

SEQ ID NO: 110913 - DNA, 25 bp, Homo sapien
ttcaccagagggtcacatttgttat

SEQ ID NO: 110914 - DNA, 25 bp, Homo sapien
aacatgtttctatccctatcatcat

SEQ ID NO: 110915 - DNA, 25 bp, Homo sapien
ttttcaccagagggtcacatttgtt

SEQ ID NO: 110916 - DNA, 25 bp, Homo sapien
gcttcccttaaggattaataacatg

SEQ ID NO: 110917 - DNA, 25 bp, Homo sapien
aacagttgtagaagtagcagaagac

SEQ ID NO: 110918 - DNA, 25 bp, Homo sapien
cagttgtagaagtagcagaagacag

SEQ ID NO: 110919 - DNA, 25 bp, Homo sapien
tgactaacagttgtagaagtagcag

SEQ ID NO: 110920 - DNA, 25 bp, Homo sapien
ctaacagttgtagaagtagcagaag

SEQ ID NO: 110921 - DNA, 25 bp, Homo sapien
ttcggtagatcaaaatctgtaggct

SEQ ID NO: 110922 - DNA, 25 bp, Homo sapien
taataaacacttttcggtagatcaa

SEQ ID NO: 110923 - DNA, 25 bp, Homo sapien
aacacttttcggtagatcaaaatct

SEQ ID NO: 110924 - DNA, 25 bp, Homo sapien
cttttcggtagatcaaaatctgtag

SEQ ID NO: 110925 - DNA, 25 bp, Homo sapien
caagctgtcctactcctcttgttcc

SEQ ID NO: 110926 - DNA, 25 bp, Homo sapien
gcaagctgtcctactcctcttgttc

SEQ ID NO: 110927 - DNA, 25 bp, Homo sapien
attgggtgtttcttgcttgtgtggc

SEQ ID NO: 110928 - DNA, 25 bp, Homo sapien
cattgggtgtttcttgcttgtgtgg

SEQ ID NO: 110929 - DNA, 25 bp, Homo sapien
tgcagaagttgggagttcttccatt

SEQ ID NO: 110930 - DNA, 25 bp, Homo sapien
tgggagttcttccattgggtgtttc

SEQ ID NO: 110931 - DNA, 25 bp, Homo sapien
agcagtgcctgattgacactatgaa

SEQ ID NO: 110932 - DNA, 25 bp, Homo sapien
tggctggtaaagcaggtcatcactc

SEQ ID NO: 110933 - DNA, 25 bp, Homo sapien
attaaatgttctggctggtaaagca

SEQ ID NO: 110934 - DNA, 25 bp, Homo sapien
gcctgattgacactatgaactgaaa

SEQ ID NO: 110935 - DNA, 25 bp, Homo sapien
gagcctttaagatgatgactggccc

SEQ ID NO: 110936 - DNA, 25 bp, Homo sapien
gcctttaagatgatgactggcccca

SEQ ID NO: 110937 - DNA, 25 bp, Homo sapien
ctttaagatgatgactggccccaag

SEQ ID NO: 110938 - DNA, 25 bp, Homo sapien
agagcctttaagatgatgactggcc

SEQ ID NO: 110939 - DNA, 25 bp, Homo sapien
gacagatattagacctagcccgagt

SEQ ID NO: 110940 - DNA, 25 bp, Homo sapien
gaacaagagttcatcaagccaagag

SEQ ID NO: 110941 - DNA, 25 bp, Homo sapien
gaaaatagcaggaactaaggcccac

SEQ ID NO: 110942 - DNA, 25 bp, Homo sapien
ccttttaagcaatctgggtgtccca

SEQ ID NO: 110943 - DNA, 25 bp, Homo sapien
cacaggagtaaaggtccaatgggcc

SEQ ID NO: 110944 - DNA, 25 bp, Homo sapien
ccaatgggccataggaagtcagaac

SEQ ID NO: 110945 - DNA, 25 bp, Homo sapien
cctgaccctgttgatgagattctga

SEQ ID NO: 110946 - DNA, 25 bp, Homo sapien
gacatactgctactgagacagctct

SEQ ID NO: 110947 - DNA, 25 bp, Homo sapien
tctgagtacttgttctgaatgatgc

SEQ ID NO: 110948 - DNA, 25 bp, Homo sapien
gatttgatgcttagcctcccgtagc

SEQ ID NO: 110949 - DNA, 25 bp, Homo sapien
gatgctatcgttttgtctaaattca

SEQ ID NO: 110950 - DNA, 25 bp, Homo sapien
caatctcagttttcgtgatagtttg

SEQ ID NO: 110951 - DNA, 25 bp, Homo sapien
agaaatggttgtgcacccataactt

SEQ ID NO: 110952 - DNA, 25 bp, Homo sapien
catcgagagtgggaagttggtttaa

SEQ ID NO: 110953 - DNA, 25 bp, Homo sapien
gggaaccggagacaggagctacttc

SEQ ID NO: 110954 - DNA, 25 bp, Homo sapien
ccaggtgaagaaacacgggagtgaa

SEQ ID NO: 110955 - DNA, 25 bp, Homo sapien
tgctgaagatctttcaaaccagttg

SEQ ID NO: 110956 - DNA, 25 bp, Homo sapien
taagccatgctgtttctacctccat

SEQ ID NO: 110957 - DNA, 25 bp, Homo sapien
aaccagttgggtccttgataagcca

SEQ ID NO: 110958 - DNA, 25 bp, Homo sapien
caccttatgctgaagatctttcaaa

SEQ ID NO: 110959 - DNA, 25 bp, Homo sapien
caggtaagagtctctcgtttcttaa

SEQ ID NO: 110960 - DNA, 25 bp, Homo sapien
tgtcatagaggcttgcttctgcctt

SEQ ID NO: 110961 - DNA, 25 bp, Homo sapien
gttggaagtcgcctaactgccagtt

SEQ ID NO: 110962 - DNA, 25 bp, Homo sapien
ctctcgtttcttaagatgtcataga

SEQ ID NO: 110963 - DNA, 25 bp, Homo sapien
ctttgcaggtcctagtgcattctgc

SEQ ID NO: 110964 - DNA, 25 bp, Homo sapien
tagtgcattctgctggcatactcat

SEQ ID NO: 110965 - DNA, 25 bp, Homo sapien
caggtcctagtgcattctgctggca

SEQ ID NO: 110966 - DNA, 25 bp, Homo sapien
tcctagtgcattctgctggcatact

SEQ ID NO: 110967 - DNA, 25 bp, Homo sapien
ggagtttctaaggtcatatttaaca

SEQ ID NO: 110968 - DNA, 25 bp, Homo sapien
gggcagagtagttgccatgtaaaaa

SEQ ID NO: 110969 - DNA, 25 bp, Homo sapien
gcaaagcctgataatccattgttca

SEQ ID NO: 110970 - DNA, 25 bp, Homo sapien
cattccatattgtgaaggacttaga

SEQ ID NO: 110971 - DNA, 25 bp, Homo sapien
cctagcatgattcctgcgtaatggt

SEQ ID NO: 110972 - DNA, 25 bp, Homo sapien
tacctagcatgattcctgcgtaatg

SEQ ID NO: 110973 - DNA, 25 bp, Homo sapien
agcatgattcctgcgtaatggtcca

SEQ ID NO: 110974 - DNA, 25 bp, Homo sapien
ttagtacctagcatgattcctgcgt

SEQ ID NO: 110975 - DNA, 25 bp, Homo sapien
gactgtattcaaattttaatttcat

SEQ ID NO: 110976 - DNA, 25 bp, Homo sapien
gtaatagttggactgtattcaaatt

SEQ ID NO: 110977 - DNA, 25 bp, Homo sapien
tggactgtattcaaattttaatttc

SEQ ID NO: 110978 - DNA, 25 bp, Homo sapien
ctgtaatagttggactgtattcaaa

SEQ ID NO: 110979 - DNA, 25 bp, Homo sapien
tcttcatctcggttgtcattaaagt

SEQ ID NO: 110980 - DNA, 25 bp, Homo sapien
tctcggttgtcattaaagtttagct

SEQ ID NO: 110981 - DNA, 25 bp, Homo sapien
ggttgtcattaaagtttagcttctg

SEQ ID NO: 110982 - DNA, 25 bp, Homo sapien
aagtttagcttctgatccaatattg

SEQ ID NO: 110983 - DNA, 25 bp, Homo sapien
ttctggtaagtccactcctgtcctt

SEQ ID NO: 110984 - DNA, 25 bp, Homo sapien
gtttgtgttctggtaagtccactcc

SEQ ID NO: 110985 - DNA, 25 bp, Homo sapien
ggaggaaacattgcctctaagtttg

SEQ ID NO: 110986 - DNA, 25 bp, Homo sapien
tgagccctggaggaaacattgcctc

SEQ ID NO: 110987 - DNA, 25 bp, Homo sapien
tccacttcagttacaggtggagatg

SEQ ID NO: 110988 - DNA, 25 bp, Homo sapien
ctccacttcagttacaggtggagat

SEQ ID NO: 110989 - DNA, 25 bp, Homo sapien
atgtaactctaactgatcatccttg

SEQ ID NO: 110990 - DNA, 25 bp, Homo sapien
tcaaggcccgttgtccaacagccac

SEQ ID NO: 110991 - DNA, 25 bp, Homo sapien
tattgttaactctgagtttgctgga

SEQ ID NO: 110992 - DNA, 25 bp, Homo sapien
gagaattcctcatgtaactctaact

SEQ ID NO: 110993 - DNA, 25 bp, Homo sapien
tgcataactttacagttccgatgaa

SEQ ID NO: 110994 - DNA, 25 bp, Homo sapien
ctaatgtttccaatgtgtgaacttc

SEQ ID NO: 110995 - DNA, 25 bp, Homo sapien
gttccgatgaatcacttcaagacta

SEQ ID NO: 110996 - DNA, 25 bp, Homo sapien
aactgtccaacttcaactaatgttt

SEQ ID NO: 110997 - DNA, 25 bp, Homo sapien
gctccttggaccagtgtggtctgtt

SEQ ID NO: 110998 - DNA, 25 bp, Homo sapien
tctggctccttggaccagtgtggtc

SEQ ID NO: 110999 - DNA, 25 bp, Homo sapien
tccatcagctcagctaggctccttt

SEQ ID NO: 111000 - DNA, 25 bp, Homo sapien
tcagctaggctcctttcagcttcct

SEQ ID NO: 111001 - DNA, 25 bp, Homo sapien
tctgtatttgagcacccaagacatg

SEQ ID NO: 111002 - DNA, 25 bp, Homo sapien
gcctcagttcatattgccaagggtg

SEQ ID NO: 111003 - DNA, 25 bp, Homo sapien
tttggtggagcaacaacactactgc

SEQ ID NO: 111004 - DNA, 25 bp, Homo sapien
gttcactggacagctgaggacagtc

SEQ ID NO: 111005 - DNA, 25 bp, Homo sapien
gagctctgtgcaattcccttgcatg

SEQ ID NO: 111006 - DNA, 25 bp, Homo sapien
tgggagtggaagctgtgctagccat

SEQ ID NO: 111007 - DNA, 25 bp, Homo sapien
ctctgtgcaattcccttgcatgggg

SEQ ID NO: 111008 - DNA, 25 bp, Homo sapien
gctctgtgcaattcccttgcatggg

SEQ ID NO: 111009 - DNA, 25 bp, Homo sapien
caattgtttagaccagatgcttcct

SEQ ID NO: 111010 - DNA, 25 bp, Homo sapien
gtagttgcaattgtttagaccagat

SEQ ID NO: 111011 - DNA, 25 bp, Homo sapien
gttgcaattgtttagaccagatgct

SEQ ID NO: 111012 - DNA, 25 bp, Homo sapien
tgcaattgtttagaccagatgcttc

SEQ ID NO: 111013 - DNA, 25 bp, Homo sapien
cagccataccagatcctctgtcaat

SEQ ID NO: 111014 - DNA, 25 bp, Homo sapien
atgaaaccttgttagattgcaggcc

SEQ ID NO: 111015 - DNA, 25 bp, Homo sapien
agatcctctgtcaattagaattctg

SEQ ID NO: 111016 - DNA, 25 bp, Homo sapien
cttgatgaaaccttgttagattgca

SEQ ID NO: 111017 - DNA, 25 bp, Homo sapien
cccagtgattaataccgtctgtcta

SEQ ID NO: 111018 - DNA, 25 bp, Homo sapien
taccgtctgtctaacacattccttg

SEQ ID NO: 111019 - DNA, 25 bp, Homo sapien
cacacgatatctgcctcgaaatcag

SEQ ID NO: 111020 - DNA, 25 bp, Homo sapien
tcgaaatcagattgccacccagtga

SEQ ID NO: 111021 - DNA, 25 bp, Homo sapien
tcaggtagcagcagcctcatctgag

SEQ ID NO: 111022 - DNA, 25 bp, Homo sapien
caggtagcagcagcctcatctgaga

SEQ ID NO: 111023 - DNA, 25 bp, Homo sapien
aggtagcagcagcctcatctgagaa

SEQ ID NO: 111024 - DNA, 25 bp, Homo sapien
ttcttagtacaggacacacttgtga

SEQ ID NO: 111025 - DNA, 25 bp, Homo sapien
cagagtgtcccaatatttcttagta

SEQ ID NO: 111026 - DNA, 25 bp, Homo sapien
tcccaatatttcttagtacaggaca

SEQ ID NO: 111027 - DNA, 25 bp, Homo sapien
aatatttcttagtacaggacacact

SEQ ID NO: 111028 - DNA, 25 bp, Homo sapien
tgataagcgccaatcagaaccatgg

SEQ ID NO: 111029 - DNA, 25 bp, Homo sapien
agccctccagatgttgctgctttgt

SEQ ID NO: 111030 - DNA, 25 bp, Homo sapien
tctgaagctgtctttagtgacacct

SEQ ID NO: 111031 - DNA, 25 bp, Homo sapien
ggctggacctgccaagaaactgctc

SEQ ID NO: 111032 - DNA, 25 bp, Homo sapien
ctaaaactgcagtgcttgtggaagc

SEQ ID NO: 111033 - DNA, 25 bp, Homo sapien
gaactttcactaaaactgcagtgct

SEQ ID NO: 111034 - DNA, 25 bp, Homo sapien
ttcactaaaactgcagtgcttgtgg

SEQ ID NO: 111035 - DNA, 25 bp, Homo sapien
actttcactaaaactgcagtgcttg

SEQ ID NO: 111036 - DNA, 25 bp, Homo sapien
acgctcagggtcctcagaagagaag

SEQ ID NO: 111037 - DNA, 25 bp, Homo sapien
tgtgccaaatgtttgccctgccggc

SEQ ID NO: 111038 - DNA, 25 bp, Homo sapien
gattcccatgaggagtcacgctcag

SEQ ID NO: 111039 - DNA, 25 bp, Homo sapien
ggacaactattttgctcagctcatg

SEQ ID NO: 111040 - DNA, 25 bp, Homo sapien
ttttactccatcaacccgatatagc

SEQ ID NO: 111041 - DNA, 25 bp, Homo sapien
aacccgatatagctgttctgctggc

SEQ ID NO: 111042 - DNA, 25 bp, Homo sapien
tgtggttgcaagctgagactgagtc

SEQ ID NO: 111043 - DNA, 25 bp, Homo sapien
ctgagtcaggtaagtaagaatgcac

SEQ ID NO: 111044 - DNA, 25 bp, Homo sapien
agggccagtggaagacttcctgctt

SEQ ID NO: 111045 - DNA, 25 bp, Homo sapien
ctacacagtaaccagggccagtgga

SEQ ID NO: 111046 - DNA, 25 bp, Homo sapien
taaccagggccagtggaagacttcc

SEQ ID NO: 111047 - DNA, 25 bp, Homo sapien
agtaaccagggccagtggaagactt

SEQ ID NO: 111048 - DNA, 25 bp, Homo sapien
tttccaactgatcaaattctctcat

SEQ ID NO: 111049 - DNA, 25 bp, Homo sapien
aaattctctcatggttacatcgagt

SEQ ID NO: 111050 - DNA, 25 bp, Homo sapien
tccaactgatcaaattctctcatgg

SEQ ID NO: 111051 - DNA, 25 bp, Homo sapien
tggttacatcgagtaatgcttctaa

SEQ ID NO: 111052 - DNA, 25 bp, Homo sapien
agcagctgccccaaccagcgtagtt

SEQ ID NO: 111053 - DNA, 25 bp, Homo sapien
ctgccccaaccagcgtagtttcttg

SEQ ID NO: 111054 - DNA, 25 bp, Homo sapien
ttggtgacaactgggagtatcagga

SEQ ID NO: 111055 - DNA, 25 bp, Homo sapien
tatcaggagtccagaaagctgcttg

SEQ ID NO: 111056 - DNA, 25 bp, Homo sapien
ttgtttgctgcgctacacctgagga

SEQ ID NO: 111057 - DNA, 25 bp, Homo sapien
ggactcaagagtgtgctcctgggtc

SEQ ID NO: 111058 - DNA, 25 bp, Homo sapien
aaatagatttctgttgtttgctgcg

SEQ ID NO: 111059 - DNA, 25 bp, Homo sapien
tgcgctacacctgaggactcaagag

SEQ ID NO: 111060 - DNA, 25 bp, Homo sapien
tcactttctactgaccactgatggc

SEQ ID NO: 111061 - DNA, 25 bp, Homo sapien
cactcttctctcactttctactgac

SEQ ID NO: 111062 - DNA, 25 bp, Homo sapien
tctcactttctactgaccactgatg

SEQ ID NO: 111063 - DNA, 25 bp, Homo sapien
ttctctcactttctactgaccactg

SEQ ID NO: 111064 - DNA, 25 bp, Homo sapien
tgttctatggcaaatgcatccccag

SEQ ID NO: 111065 - DNA, 25 bp, Homo sapien
gggccttcccaatgcaggctgcttg

SEQ ID NO: 111066 - DNA, 25 bp, Homo sapien
tacacagtcgtgaaaagccccgttc

SEQ ID NO: 111067 - DNA, 25 bp, Homo sapien
tgaggtcatctctatccgtcgctgt

SEQ ID NO: 111068 - DNA, 25 bp, Homo sapien
cactgaagcctttaactaagtagca

SEQ ID NO: 111069 - DNA, 25 bp, Homo sapien
gagaagaagggagatcactgaagcc

SEQ ID NO: 111070 - DNA, 25 bp, Homo sapien
atcactgaagcctttaactaagtag

SEQ ID NO: 111071 - DNA, 25 bp, Homo sapien
aactaagtagcaggggatatttcca

SEQ ID NO: 111072 - DNA, 25 bp, Homo sapien
cctaccacggaggaagcactgctca

SEQ ID NO: 111073 - DNA, 25 bp, Homo sapien
aggaagcactgctcaagtgtgtcgg

SEQ ID NO: 111074 - DNA, 25 bp, Homo sapien
accacggaggaagcactgctcaagt

SEQ ID NO: 111075 - DNA, 25 bp, Homo sapien
cggaggaagcactgctcaagtgtgt

SEQ ID NO: 111076 - DNA, 25 bp, Homo sapien
ctggccactctaggattagctaagg

SEQ ID NO: 111077 - DNA, 25 bp, Homo sapien
tccattggtgtgtacgtgacgtacg

SEQ ID NO: 111078 - DNA, 25 bp, Homo sapien
gacactgtggtcctgttctggtaag

SEQ ID NO: 111079 - DNA, 25 bp, Homo sapien
caagagactggccacatatttaggg

SEQ ID NO: 111080 - DNA, 25 bp, Homo sapien
caacttgggaatatattccttccct

SEQ ID NO: 111081 - DNA, 25 bp, Homo sapien
gacttgcatccacacgatttgatca

SEQ ID NO: 111082 - DNA, 25 bp, Homo sapien
tgatcaacttgggaatatattcctt

SEQ ID NO: 111083 - DNA, 25 bp, Homo sapien
aagacttgcatccacacgatttgat

SEQ ID NO: 111084 - DNA, 25 bp, Homo sapien
gacgtgggcgagtgggaaacaggcc

SEQ ID NO: 111085 - DNA, 25 bp, Homo sapien
agggtcggacctgcagactggccct

SEQ ID NO: 111086 - DNA, 25 bp, Homo sapien
tgtgcaagagtggagctggacgatt

SEQ ID NO: 111087 - DNA, 25 bp, Homo sapien
aaacaggcccgctgggtgagggtcg

SEQ ID NO: 111088 - DNA, 25 bp, Homo sapien
ctgcaggggaaggctccccggggtg

SEQ ID NO: 111089 - DNA, 25 bp, Homo sapien
tggaggggcttaagaggggtcgaga

SEQ ID NO: 111090 - DNA, 25 bp, Homo sapien
tctgcagacacagacggatctgatt

SEQ ID NO: 111091 - DNA, 25 bp, Homo sapien
gggcggtcgctctgcagatttcatg

SEQ ID NO: 111092 - DNA, 25 bp, Homo sapien
tctgattagcgctcgctggtccttg

SEQ ID NO: 111093 - DNA, 25 bp, Homo sapien
aaaaggccgcgcagaagcgtggagt

SEQ ID NO: 111094 - DNA, 25 bp, Homo sapien
cgttgcttttggatcaagcctacca

SEQ ID NO: 111095 - DNA, 25 bp, Homo sapien
ctgacggaagtcgtagggtgattct

SEQ ID NO: 111096 - DNA, 25 bp, Homo sapien
gattctcggcgttgcttttggatca

SEQ ID NO: 111097 - DNA, 25 bp, Homo sapien
tcgtagggtgattctcggcgttgct

SEQ ID NO: 111098 - DNA, 25 bp, Homo sapien
tcttttcccaatgtgaaggccttca

SEQ ID NO: 111099 - DNA, 25 bp, Homo sapien
gaaggtgtcccactattatacagaa

SEQ ID NO: 111100 - DNA, 25 bp, Homo sapien
cagaaatctcgagtcaaatgtcaac

SEQ ID NO: 111101 - DNA, 25 bp, Homo sapien
agtttaggatcccaacagattgggc

SEQ ID NO: 111102 - DNA, 25 bp, Homo sapien
atgttaacaaggatgcagtatcctc

SEQ ID NO: 111103 - DNA, 25 bp, Homo sapien
taatgttaacaaggatgcagtatcc

SEQ ID NO: 111104 - DNA, 25 bp, Homo sapien
aatgttaacaaggatgcagtatcct

SEQ ID NO: 111105 - DNA, 25 bp, Homo sapien
cctctcccatctggatgacacatgc

SEQ ID NO: 111106 - DNA, 25 bp, Homo sapien
tgccaatgcccctaagaagaaaacc

SEQ ID NO: 111107 - DNA, 25 bp, Homo sapien
gagatgaatcctggtgaatccgaaa

SEQ ID NO: 111108 - DNA, 25 bp, Homo sapien
ggcaacccgagttcttgagctccgg

SEQ ID NO: 111109 - DNA, 25 bp, Homo sapien
taaagggcttctgcgtctcaaaaca

SEQ ID NO: 111110 - DNA, 25 bp, Homo sapien
gaagcccagactcccatgggtattt

SEQ ID NO: 111111 - DNA, 25 bp, Homo sapien
tttctagtacctccgcacgtggtcc

SEQ ID NO: 111112 - DNA, 25 bp, Homo sapien
tacactaaactcagggaagcccaga

SEQ ID NO: 111113 - DNA, 25 bp, Homo sapien
aaggtacggcgactagtcggtgcat

SEQ ID NO: 111114 - DNA, 25 bp, Homo sapien
cactgggggttcatttagaagtctc

SEQ ID NO: 111115 - DNA, 25 bp, Homo sapien
ctgtctgatatcactgggggttcat

SEQ ID NO: 111116 - DNA, 25 bp, Homo sapien
atatcactgggggttcatttagaag

SEQ ID NO: 111117 - DNA, 25 bp, Homo sapien
gggttcatttagaagtctctgtcca

SEQ ID NO: 111118 - DNA, 25 bp, Homo sapien
aaaaaggctctccaccaaagggctg

SEQ ID NO: 111119 - DNA, 25 bp, Homo sapien
ttccttgagaaagactagaaagctt

SEQ ID NO: 111120 - DNA, 25 bp, Homo sapien
atccctttggacaggtttccttgag

SEQ ID NO: 111121 - DNA, 25 bp, Homo sapien
catctatacttaatccctgagagga

SEQ ID NO: 111122 - DNA, 25 bp, Homo sapien
gaggccaggccttggttggtacaac

SEQ ID NO: 111123 - DNA, 25 bp, Homo sapien
tgtggccccagagtggatttcctga

SEQ ID NO: 111124 - DNA, 25 bp, Homo sapien
ggattgtgtcagacatcttgccttc

SEQ ID NO: 111125 - DNA, 25 bp, Homo sapien
ccatgagtttaaggaacgtgccagg

SEQ ID NO: 111126 - DNA, 25 bp, Homo sapien
gccctgtggttgcaagattctgaaa

SEQ ID NO: 111127 - DNA, 25 bp, Homo sapien
actgagtttgcacaatctctgagcc

SEQ ID NO: 111128 - DNA, 25 bp, Homo sapien
tctgaaaagggccaaagtccggcca

SEQ ID NO: 111129 - DNA, 25 bp, Homo sapien
ctctgactccttgaaactgagtttg

SEQ ID NO: 111130 - DNA, 25 bp, Homo sapien
actccgaacttccccgcgtgcacac

SEQ ID NO: 111131 - DNA, 25 bp, Homo sapien
gactccgaacttccccgcgtgcaca

SEQ ID NO: 111132 - DNA, 25 bp, Homo sapien
ggactccgaacttccccgcgtgcac

SEQ ID NO: 111133 - DNA, 25 bp, Homo sapien
gggactccgaacttccccgcgtgca

SEQ ID NO: 111134 - DNA, 25 bp, Homo sapien
aagttgtcctgcttagctggctcga

SEQ ID NO: 111135 - DNA, 25 bp, Homo sapien
gtatcagcggagcacgcggacgttt

SEQ ID NO: 111136 - DNA, 25 bp, Homo sapien
tctttacgttagttagcggacatcg

SEQ ID NO: 111137 - DNA, 25 bp, Homo sapien
ggtgagcctcgtgtccccagcatgt

SEQ ID NO: 111138 - DNA, 25 bp, Homo sapien
ggcgagctgttgcaggcagggaggt

SEQ ID NO: 111139 - DNA, 25 bp, Homo sapien
cctgcaaaacgagtctgagagtggg

SEQ ID NO: 111140 - DNA, 25 bp, Homo sapien
tcctgcaaaacgagtctgagagtgg

SEQ ID NO: 111141 - DNA, 25 bp, Homo sapien
gtggggcgagctgttgcaggcaggg

SEQ ID NO: 111142 - DNA, 25 bp, Homo sapien
cctagagaattagcagggttgtggc

SEQ ID NO: 111143 - DNA, 25 bp, Homo sapien
aggacttttactggtttgggctgag

SEQ ID NO: 111144 - DNA, 25 bp, Homo sapien
tatttccatagtagaatgcaatttc

SEQ ID NO: 111145 - DNA, 25 bp, Homo sapien
tgcctgcattaagtgacctagagaa

SEQ ID NO: 111146 - DNA, 25 bp, Homo sapien
cattctctcgtgaaacttccagcaa

SEQ ID NO: 111147 - DNA, 25 bp, Homo sapien
acttccagcaacataggctttatct

SEQ ID NO: 111148 - DNA, 25 bp, Homo sapien
ggctttatcttggagtcattcctca

SEQ ID NO: 111149 - DNA, 25 bp, Homo sapien
tcctcattctctcgtgaaacttcca

SEQ ID NO: 111150 - DNA, 25 bp, Homo sapien
gctgcatttctccttgggtcgtttt

SEQ ID NO: 111151 - DNA, 25 bp, Homo sapien
ccttggaactgaattgtctactgag

SEQ ID NO: 111152 - DNA, 25 bp, Homo sapien
gccttggaactgaattgtctactga

SEQ ID NO: 111153 - DNA, 25 bp, Homo sapien
ctgcatttctccttgggtcgttttt

SEQ ID NO: 111154 - DNA, 25 bp, Homo sapien
tctaaaactgcattgtaagtgtctc

SEQ ID NO: 111155 - DNA, 25 bp, Homo sapien
aaactgcattgtaagtgtctctagg

SEQ ID NO: 111156 - DNA, 25 bp, Homo sapien
ccagaagaggttatctaaaactgca

SEQ ID NO: 111157 - DNA, 25 bp, Homo sapien
tttcccttgtgcgtccagaagaggt

SEQ ID NO: 111158 - DNA, 25 bp, Homo sapien
cagccatggacaacaccagcaagaa

SEQ ID NO: 111159 - DNA, 25 bp, Homo sapien
tctactactctctgaaggagtccac

SEQ ID NO: 111160 - DNA, 25 bp, Homo sapien
tgacattcaactgtacccgccaagc

SEQ ID NO: 111161 - DNA, 25 bp, Homo sapien
caccactagtgagcagagtgccagg

SEQ ID NO: 111162 - DNA, 25 bp, Homo sapien
aactgagccctaagattttgataac

SEQ ID NO: 111163 - DNA, 25 bp, Homo sapien
caaaggacttagagaaacatataag

SEQ ID NO: 111164 - DNA, 25 bp, Homo sapien
taaaaccactcagtatcctttatac

SEQ ID NO: 111165 - DNA, 25 bp, Homo sapien
gagctgaactgagccctaagatttt

SEQ ID NO: 111166 - DNA, 25 bp, Homo sapien
tcttgactgtttttgtcataagcta

SEQ ID NO: 111167 - DNA, 25 bp, Homo sapien
ttgctatgtagggcccaaacagggg

SEQ ID NO: 111168 - DNA, 25 bp, Homo sapien
agaggaagcgaggaaagttcttgac

SEQ ID NO: 111169 - DNA, 25 bp, Homo sapien
tgtttttgtcataagctagctttgt

SEQ ID NO: 111170 - DNA, 25 bp, Homo sapien
tagcaggtagaacagacaagaggga

SEQ ID NO: 111171 - DNA, 25 bp, Homo sapien
agggaagatccagcatctggaattg

SEQ ID NO: 111172 - DNA, 25 bp, Homo sapien
gcatctggaattgtctccaccatct

SEQ ID NO: 111173 - DNA, 25 bp, Homo sapien
tcctttagcaggtagaacagacaag

SEQ ID NO: 111174 - DNA, 25 bp, Homo sapien
agtttctgcattcccttgttaattt

SEQ ID NO: 111175 - DNA, 25 bp, Homo sapien
ccacaagggttgatggaatgctgac

SEQ ID NO: 111176 - DNA, 25 bp, Homo sapien
tgaagtacccatcataccacaaggg

SEQ ID NO: 111177 - DNA, 25 bp, Homo sapien
gcatgccattggaaccaagttggtg

SEQ ID NO: 111178 - DNA, 25 bp, Homo sapien
gaaattcagaatcagtgaagtaccc

SEQ ID NO: 111179 - DNA, 25 bp, Homo sapien
gggtcgccacatgggtgatgctctt

SEQ ID NO: 111180 - DNA, 25 bp, Homo sapien
gaagaagaatttgatttccgggtgc

SEQ ID NO: 111181 - DNA, 25 bp, Homo sapien
ttgatttccgggtgcctatgagagg

SEQ ID NO: 111182 - DNA, 25 bp, Homo sapien
tagggcttgtttggaagacccataa

SEQ ID NO: 111183 - DNA, 25 bp, Homo sapien
aactttccagattcacttgttttct

SEQ ID NO: 111184 - DNA, 25 bp, Homo sapien
cttaactttccagattcacttgttt

SEQ ID NO: 111185 - DNA, 25 bp, Homo sapien
taactttccagattcacttgttttc

SEQ ID NO: 111186 - DNA, 25 bp, Homo sapien
tgtgaggtgccgaacaatgtcctgg

SEQ ID NO: 111187 - DNA, 25 bp, Homo sapien
gcctgcttctttggcatccagatcc

SEQ ID NO: 111188 - DNA, 25 bp, Homo sapien
gcttctttggcatccagatccttca

SEQ ID NO: 111189 - DNA, 25 bp, Homo sapien
tatgatttgtgaggtgccgaacaat

SEQ ID NO: 111190 - DNA, 25 bp, Homo sapien
ggtgacgatatcagtggcgtttaca

SEQ ID NO: 111191 - DNA, 25 bp, Homo sapien
tggaagaccgcacagcgttctccag

SEQ ID NO: 111192 - DNA, 25 bp, Homo sapien
gtttacactggaagaccgcacagcg

SEQ ID NO: 111193 - DNA, 25 bp, Homo sapien
tcagtggcgtttacactggaagacc

SEQ ID NO: 111194 - DNA, 25 bp, Homo sapien
tactcttaaggcctataacatgcat

SEQ ID NO: 111195 - DNA, 25 bp, Homo sapien
gggactactcttaaggcctataaca

SEQ ID NO: 111196 - DNA, 25 bp, Homo sapien
gattgggactactcttaaggcctat

SEQ ID NO: 111197 - DNA, 25 bp, Homo sapien
ttgattgggactactcttaaggcct

SEQ ID NO: 111198 - DNA, 25 bp, Homo sapien
gcttgtcttctaaaacctaagtcag

SEQ ID NO: 111199 - DNA, 25 bp, Homo sapien
cagggcacttaagtcagaagctttc

SEQ ID NO: 111200 - DNA, 25 bp, Homo sapien
ccttttcagggcacttaagtcagaa

SEQ ID NO: 111201 - DNA, 25 bp, Homo sapien
ttgtctcttcttgataatatctagc

SEQ ID NO: 111202 - DNA, 25 bp, Homo sapien
gattgagatggtccatatgcatcct

SEQ ID NO: 111203 - DNA, 25 bp, Homo sapien
agatggtccatatgcatccttaggg

SEQ ID NO: 111204 - DNA, 25 bp, Homo sapien
ctagacgagagagcagattgagatg

SEQ ID NO: 111205 - DNA, 25 bp, Homo sapien
gagagcagattgagatggtccatat

SEQ ID NO: 111206 - DNA, 25 bp, Homo sapien
cctttgccatgaaggatatgtctga

SEQ ID NO: 111207 - DNA, 25 bp, Homo sapien
tcattacaatagacccatgggtctc

SEQ ID NO: 111208 - DNA, 25 bp, Homo sapien
tgccatgaaggatatgtctgattgt

SEQ ID NO: 111209 - DNA, 25 bp, Homo sapien
gctgtcatagagaatgtcattacaa

SEQ ID NO: 111210 - DNA, 25 bp, Homo sapien
tcgatgccctgacattgaggaaatg

SEQ ID NO: 111211 - DNA, 25 bp, Homo sapien
ctgcctgagttgaaggacctgctgt

SEQ ID NO: 111212 - DNA, 25 bp, Homo sapien
cccatttgctgcctgagttgaagga

SEQ ID NO: 111213 - DNA, 25 bp, Homo sapien
atcgatgccctgacattgaggaaat

SEQ ID NO: 111214 - DNA, 25 bp, Homo sapien
cagggaaaagggataagcttgatcc

SEQ ID NO: 111215 - DNA, 25 bp, Homo sapien
gagacattccaagcataccattccg

SEQ ID NO: 111216 - DNA, 25 bp, Homo sapien
gccaatggaacgtgggcacagcacg

SEQ ID NO: 111217 - DNA, 25 bp, Homo sapien
cacagcacgggaacaatgttcaagg

SEQ ID NO: 111218 - DNA, 25 bp, Homo sapien
atttaactcaatgtccccttccagg

SEQ ID NO: 111219 - DNA, 25 bp, Homo sapien
ttaactcaatgtccccttccaggag

SEQ ID NO: 111220 - DNA, 25 bp, Homo sapien
catatttaactcaatgtccccttcc

SEQ ID NO: 111221 - DNA, 25 bp, Homo sapien
tatttaactcaatgtccccttccag

SEQ ID NO: 111222 - DNA, 25 bp, Homo sapien
acatctccaccgtcgaccagggagc

SEQ ID NO: 111223 - DNA, 25 bp, Homo sapien
agtctctgctatccacagtggtatc

SEQ ID NO: 111224 - DNA, 25 bp, Homo sapien
agaacacatctccaccgtcgaccag

SEQ ID NO: 111225 - DNA, 25 bp, Homo sapien
tctccaccgtcgaccagggagccag

SEQ ID NO: 111226 - DNA, 25 bp, Homo sapien
gaagttatgtgcacaatttggtgtg

SEQ ID NO: 111227 - DNA, 25 bp, Homo sapien
cacaatttggtgtgcatttttgcat

SEQ ID NO: 111228 - DNA, 25 bp, Homo sapien
tatgtgcacaatttggtgtgcattt

SEQ ID NO: 111229 - DNA, 25 bp, Homo sapien
gtgcacaatttggtgtgcatttttg

SEQ ID NO: 111230 - DNA, 25 bp, Homo sapien
tgagaaaaggaatggagcaaaccac

SEQ ID NO: 111231 - DNA, 25 bp, Homo sapien
tatcgctctggtaatatggaacacc

SEQ ID NO: 111232 - DNA, 25 bp, Homo sapien
cagaataatcctttaaggccagagc

SEQ ID NO: 111233 - DNA, 25 bp, Homo sapien
tctgcagagcactgggaaacaatcc

SEQ ID NO: 111234 - DNA, 25 bp, Homo sapien
tcaagaactgtttaccatggagggt

SEQ ID NO: 111235 - DNA, 25 bp, Homo sapien
ccccagccagtttcagggtgactgc

SEQ ID NO: 111236 - DNA, 25 bp, Homo sapien
ggcacaaagcaacaagccagtggag

SEQ ID NO: 111237 - DNA, 25 bp, Homo sapien
aaatcctcgcgttttgactgactga

SEQ ID NO: 111238 - DNA, 25 bp, Homo sapien
tctcagtcctagctggtggagtgtt

SEQ ID NO: 111239 - DNA, 25 bp, Homo sapien
gtggcttggatctcagtcctagctg

SEQ ID NO: 111240 - DNA, 25 bp, Homo sapien
tcagactttccaggactatagaaag

SEQ ID NO: 111241 - DNA, 25 bp, Homo sapien
tccaggactatagaaagtttttgca

SEQ ID NO: 111242 - DNA, 25 bp, Homo sapien
tgatgtttagagcagtctcagaagt

SEQ ID NO: 111243 - DNA, 25 bp, Homo sapien
aatcttctcccatgtacagattgga

SEQ ID NO: 111244 - DNA, 25 bp, Homo sapien
tacagattggatgttgatgtttaga

SEQ ID NO: 111245 - DNA, 25 bp, Homo sapien
tgtttagagcagtctcagaagtcat

SEQ ID NO: 111246 - DNA, 25 bp, Homo sapien
tgtaggcaaccacaatgttacatcg

SEQ ID NO: 111247 - DNA, 25 bp, Homo sapien
gaagcagatatccaaccaaggaaca

SEQ ID NO: 111248 - DNA, 25 bp, Homo sapien
atcgactcccagaaacacccttagt

SEQ ID NO: 111249 - DNA, 25 bp, Homo sapien
tcagcaaacccgtagttgaagcaga

SEQ ID NO: 111250 - DNA, 25 bp, Homo sapien
gctaatggactatcaattttgctta

SEQ ID NO: 111251 - DNA, 25 bp, Homo sapien
taatggactatcaattttgcttatc

SEQ ID NO: 111252 - DNA, 25 bp, Homo sapien
cttgctaatggactatcaattttgc

SEQ ID NO: 111253 - DNA, 25 bp, Homo sapien
tgctaatggactatcaattttgctt

SEQ ID NO: 111254 - DNA, 25 bp, Homo sapien
aaggagaggtatttgttgcctcctc

SEQ ID NO: 111255 - DNA, 25 bp, Homo sapien
tctgcctgcaaagtgaggctccgtg

SEQ ID NO: 111256 - DNA, 25 bp, Homo sapien
tgcctgtgatacgagcaggaccctc

SEQ ID NO: 111257 - DNA, 25 bp, Homo sapien
gcagaaggagaggtatttgttgcct

SEQ ID NO: 111258 - DNA, 25 bp, Homo sapien
tgttggggtctcaatagatttcagg

SEQ ID NO: 111259 - DNA, 25 bp, Homo sapien
gcttcctcattaaggacaattgttg

SEQ ID NO: 111260 - DNA, 25 bp, Homo sapien
ttccttaaggcccatgccaagcatt

SEQ ID NO: 111261 - DNA, 25 bp, Homo sapien
taaggcccatgccaagcattctttc

SEQ ID NO: 111262 - DNA, 25 bp, Homo sapien
caaagctagaggtctgcctgctgaa

SEQ ID NO: 111263 - DNA, 25 bp, Homo sapien
gccaaagctagaggtctgcctgctg

SEQ ID NO: 111264 - DNA, 25 bp, Homo sapien
tcgccaaagctagaggtctgcctgc

SEQ ID NO: 111265 - DNA, 25 bp, Homo sapien
gtcgccaaagctagaggtctgcctg

SEQ ID NO: 111266 - DNA, 25 bp, Homo sapien
atatagtaacacatggttgggcttg

SEQ ID NO: 111267 - DNA, 25 bp, Homo sapien
gggggaaccaagtgatgcctccagg

SEQ ID NO: 111268 - DNA, 25 bp, Homo sapien
ccaggccatgaacactataaataac

SEQ ID NO: 111269 - DNA, 25 bp, Homo sapien
agtaacacatggttgggcttgtggt

SEQ ID NO: 111270 - DNA, 25 bp, Homo sapien
gccgcagttcaatgagctcactatt

SEQ ID NO: 111271 - DNA, 25 bp, Homo sapien
tctttgacatgatagaagtcagccg

SEQ ID NO: 111272 - DNA, 25 bp, Homo sapien
gcttgcttccttcaatacatactaa

SEQ ID NO: 111273 - DNA, 25 bp, Homo sapien
gctcactatttgtgcaacttaattg

SEQ ID NO: 111274 - DNA, 25 bp, Homo sapien
cttgtaagttgagagccaaatcctc

SEQ ID NO: 111275 - DNA, 25 bp, Homo sapien
gtatacacttgtaagttgagagcca

SEQ ID NO: 111276 - DNA, 25 bp, Homo sapien
acacttgtaagttgagagccaaatc

SEQ ID NO: 111277 - DNA, 25 bp, Homo sapien
ctccgtatacacttgtaagttgaga

SEQ ID NO: 111278 - DNA, 25 bp, Homo sapien
tgatggctgcacttgggcgtctgct

SEQ ID NO: 111279 - DNA, 25 bp, Homo sapien
aaattggagccaaagtggattcttg

SEQ ID NO: 111280 - DNA, 25 bp, Homo sapien
tcttggatcatgtatctcctcccgg

SEQ ID NO: 111281 - DNA, 25 bp, Homo sapien
tcctcccggttacaaagctgccaga

SEQ ID NO: 111282 - DNA, 25 bp, Homo sapien
cagaggactgtcagcaatgacagca

SEQ ID NO: 111283 - DNA, 25 bp, Homo sapien
tcagcaatgacagcaaccagggatg

SEQ ID NO: 111284 - DNA, 25 bp, Homo sapien
tggtcttcagaggactgtcagcaat

SEQ ID NO: 111285 - DNA, 25 bp, Homo sapien
atgacagcaaccagggatgctgaca

SEQ ID NO: 111286 - DNA, 25 bp, Homo sapien
tttggaaagctgttcggtagtatct

SEQ ID NO: 111287 - DNA, 25 bp, Homo sapien
ctgttcggtagtatctgcctgggcc

SEQ ID NO: 111288 - DNA, 25 bp, Homo sapien
gaaagctgttcggtagtatctgcct

SEQ ID NO: 111289 - DNA, 25 bp, Homo sapien
gttcggtagtatctgcctgggccat

SEQ ID NO: 111290 - DNA, 25 bp, Homo sapien
catcctgttccttctattaacttac

SEQ ID NO: 111291 - DNA, 25 bp, Homo sapien
tcatcctgttccttctattaactta

SEQ ID NO: 111292 - DNA, 25 bp, Homo sapien
cattgtcttggagctattgagggaa

SEQ ID NO: 111293 - DNA, 25 bp, Homo sapien
tgtactcactgttgttggaggcctg

SEQ ID NO: 111294 - DNA, 25 bp, Homo sapien
tgtaactccattccggcaaaatctg

SEQ ID NO: 111295 - DNA, 25 bp, Homo sapien
tggaggcctgggtatctgcatgaca

SEQ ID NO: 111296 - DNA, 25 bp, Homo sapien
tagtgctaatgtccagcgaagaatc

SEQ ID NO: 111297 - DNA, 25 bp, Homo sapien
taatgtccagcgaagaatctatgag

SEQ ID NO: 111298 - DNA, 25 bp, Homo sapien
tgggcctttagacttcaaaacaagc

SEQ ID NO: 111299 - DNA, 25 bp, Homo sapien
gaatctatgagacatattgggcctt

SEQ ID NO: 111300 - DNA, 25 bp, Homo sapien
tgatattgataaccagccacacttt

SEQ ID NO: 111301 - DNA, 25 bp, Homo sapien
ggtattgtgatattgataaccagcc

SEQ ID NO: 111302 - DNA, 25 bp, Homo sapien
tgccttctacgggataatcttttct

SEQ ID NO: 111303 - DNA, 25 bp, Homo sapien
cttatcttgccttctacgggataat

SEQ ID NO: 111304 - DNA, 25 bp, Homo sapien
cctgcaccacttcggtcattttctg

SEQ ID NO: 111305 - DNA, 25 bp, Homo sapien
gatggaatgctcttcgctgtgtaaa

SEQ ID NO: 111306 - DNA, 25 bp, Homo sapien
ctgtgtaaattctgcatctgctatt

SEQ ID NO: 111307 - DNA, 25 bp, Homo sapien
agttcataaaatagtcctgcaccac

SEQ ID NO: 111308 - DNA, 25 bp, Homo sapien
caactgcattttcaatgagcggctt

SEQ ID NO: 111309 - DNA, 25 bp, Homo sapien
cattttcaatgagcggcttgaggtc

SEQ ID NO: 111310 - DNA, 25 bp, Homo sapien
ctgcattttcaatgagcggcttgag

SEQ ID NO: 111311 - DNA, 25 bp, Homo sapien
actgcattttcaatgagcggcttga

SEQ ID NO: 111312 - DNA, 25 bp, Homo sapien
aaaatgtgttcatcatttaaaattg

SEQ ID NO: 111313 - DNA, 25 bp, Homo sapien
ccaaaatgtgttcatcatttaaaat

SEQ ID NO: 111314 - DNA, 25 bp, Homo sapien
tgtgttcatcatttaaaattgaaac

SEQ ID NO: 111315 - DNA, 25 bp, Homo sapien
aatgtgttcatcatttaaaattgaa

SEQ ID NO: 111316 - DNA, 25 bp, Homo sapien
tgagggctgaaatagtagacagagt

SEQ ID NO: 111317 - DNA, 25 bp, Homo sapien
gacattgagaagatccttgagcaat

SEQ ID NO: 111318 - DNA, 25 bp, Homo sapien
cccagatgagggctgaaatagtaga

SEQ ID NO: 111319 - DNA, 25 bp, Homo sapien
gtgagacattgagaagatccttgag

SEQ ID NO: 111320 - DNA, 25 bp, Homo sapien
ctatgaggtatgcatagatctgagg

SEQ ID NO: 111321 - DNA, 25 bp, Homo sapien
tgcatagatctgaggcttgagtcat

SEQ ID NO: 111322 - DNA, 25 bp, Homo sapien
tatgcatagatctgaggcttgagtc

SEQ ID NO: 111323 - DNA, 25 bp, Homo sapien
gaggtatgcatagatctgaggcttg

SEQ ID NO: 111324 - DNA, 25 bp, Homo sapien
tgtagccttcccaagaccaactttc

SEQ ID NO: 111325 - DNA, 25 bp, Homo sapien
ctgccaggcttgatcccctttgagg

SEQ ID NO: 111326 - DNA, 25 bp, Homo sapien
cagtgtgtattgcaggttgccctgt

SEQ ID NO: 111327 - DNA, 25 bp, Homo sapien
ctaccagtgcaaaagggtgttcagt

SEQ ID NO: 111328 - DNA, 25 bp, Homo sapien
gctgtgacctgtgacatgtgctcag

SEQ ID NO: 111329 - DNA, 25 bp, Homo sapien
ctggcctcgaggaaacccctggaag

SEQ ID NO: 111330 - DNA, 25 bp, Homo sapien
tgacctgtgacatgtgctcagatct

SEQ ID NO: 111331 - DNA, 25 bp, Homo sapien
tctggcctcgaggaaacccctggaa

SEQ ID NO: 111332 - DNA, 25 bp, Homo sapien
tgtaaaggagttgaatactgcctca

SEQ ID NO: 111333 - DNA, 25 bp, Homo sapien
tgcctcattagctcaggctcgtggg

SEQ ID NO: 111334 - DNA, 25 bp, Homo sapien
atactgcctcattagctcaggctcg

SEQ ID NO: 111335 - DNA, 25 bp, Homo sapien
taggctggcctttgtaaaggagttg

SEQ ID NO: 111336 - DNA, 25 bp, Homo sapien
gctctgaacctctcctgtaggctct

SEQ ID NO: 111337 - DNA, 25 bp, Homo sapien
tttgtcacagtgcagaaactccctt

SEQ ID NO: 111338 - DNA, 25 bp, Homo sapien
ttctagatgggtgcccttctgcccc

SEQ ID NO: 111339 - DNA, 25 bp, Homo sapien
taactgaacggatgtcggcaaccct

SEQ ID NO: 111340 - DNA, 25 bp, Homo sapien
gggactcaggtgttgctcacagtaa

SEQ ID NO: 111341 - DNA, 25 bp, Homo sapien
caggtgttgctcacagtaaagccac

SEQ ID NO: 111342 - DNA, 25 bp, Homo sapien
gtgttgctcacagtaaagccacctg

SEQ ID NO: 111343 - DNA, 25 bp, Homo sapien
gctcacagtaaagccacctgatgcc

SEQ ID NO: 111344 - DNA, 25 bp, Homo sapien
agctgtcacctggttcttctgacca

SEQ ID NO: 111345 - DNA, 25 bp, Homo sapien
tggttcttctgaccacaccaaggaa

SEQ ID NO: 111346 - DNA, 25 bp, Homo sapien
accacaccaaggaaattcctgctat

SEQ ID NO: 111347 - DNA, 25 bp, Homo sapien
cacctggttcttctgaccacaccaa

SEQ ID NO: 111348 - DNA, 25 bp, Homo sapien
aacagaacttcagttgccctccctg

SEQ ID NO: 111349 - DNA, 25 bp, Homo sapien
tgcagatgggtagccctgctgctga

SEQ ID NO: 111350 - DNA, 25 bp, Homo sapien
tggatccttctctgatgtcaactgc

SEQ ID NO: 111351 - DNA, 25 bp, Homo sapien
gatccttctctgatgtcaactgcca

SEQ ID NO: 111352 - DNA, 25 bp, Homo sapien
aagttcaaataaagggtaatgccat

SEQ ID NO: 111353 - DNA, 25 bp, Homo sapien
gcactgagaaaagctccaggcccat

SEQ ID NO: 111354 - DNA, 25 bp, Homo sapien
taatgccatttatgttggccacctg

SEQ ID NO: 111355 - DNA, 25 bp, Homo sapien
agaacaccagagtagaaagttcaaa

SEQ ID NO: 111356 - DNA, 25 bp, Homo sapien
agcctccgtgtgctttccctggatg

SEQ ID NO: 111357 - DNA, 25 bp, Homo sapien
ccagagtccggtggcgcacatactt

SEQ ID NO: 111358 - DNA, 25 bp, Homo sapien
gcgtcagattcatcattgctggcct

SEQ ID NO: 111359 - DNA, 25 bp, Homo sapien
gcaaatctcgttcacatggcgtcag

SEQ ID NO: 111360 - DNA, 25 bp, Homo sapien
cctatagtcaggcacagctcatgag

SEQ ID NO: 111361 - DNA, 25 bp, Homo sapien
tatagtcaggcacagctcatgagct

SEQ ID NO: 111362 - DNA, 25 bp, Homo sapien
ctatagtcaggcacagctcatgagc

SEQ ID NO: 111363 - DNA, 25 bp, Homo sapien
ttgcctacaaaaccgagacgccggc

SEQ ID NO: 111364 - DNA, 25 bp, Homo sapien
ttgctcataattgcacaggttccct

SEQ ID NO: 111365 - DNA, 25 bp, Homo sapien
tgtgacctttttctaatgggatggg

SEQ ID NO: 111366 - DNA, 25 bp, Homo sapien
gtctgaaagccgtttaagtaattgc

SEQ ID NO: 111367 - DNA, 25 bp, Homo sapien
cagcctttgatctgccagggagaaa

SEQ ID NO: 111368 - DNA, 25 bp, Homo sapien
tattgatcgagtgagctctcctgta

SEQ ID NO: 111369 - DNA, 25 bp, Homo sapien
ctcctgtagcttgagcagcctttga

SEQ ID NO: 111370 - DNA, 25 bp, Homo sapien
tatctgtagtggtcagagactcttc

SEQ ID NO: 111371 - DNA, 25 bp, Homo sapien
tagagccagctcctaatgatgtgaa

SEQ ID NO: 111372 - DNA, 25 bp, Homo sapien
taatgatgtgaaaccctcctcctct

SEQ ID NO: 111373 - DNA, 25 bp, Homo sapien
gtggatgacagaacttggtctagag

SEQ ID NO: 111374 - DNA, 25 bp, Homo sapien
catgtggatgacagaacttggtcta

SEQ ID NO: 111375 - DNA, 25 bp, Homo sapien
aaattccaagtgttcatctgccgtg

SEQ ID NO: 111376 - DNA, 25 bp, Homo sapien
attccaagtgttcatctgccgtgtg

SEQ ID NO: 111377 - DNA, 25 bp, Homo sapien
ccaagtgttcatctgccgtgtgctt

SEQ ID NO: 111378 - DNA, 25 bp, Homo sapien
tccaagtgttcatctgccgtgtgct

SEQ ID NO: 111379 - DNA, 25 bp, Homo sapien
tagtcagcattaagccctggctatg

SEQ ID NO: 111380 - DNA, 25 bp, Homo sapien
agtcagcattaagccctggctatgg

SEQ ID NO: 111381 - DNA, 25 bp, Homo sapien
atagtcagcattaagccctggctat

SEQ ID NO: 111382 - DNA, 25 bp, Homo sapien
ggggcctccttgtaaggagctcctc

SEQ ID NO: 111383 - DNA, 25 bp, Homo sapien
gggcctccttgtaaggagctcctcc

SEQ ID NO: 111384 - DNA, 25 bp, Homo sapien
caggttcagttcagttggatctttg

SEQ ID NO: 111385 - DNA, 25 bp, Homo sapien
cctccttgtaaggagctcctcctct

SEQ ID NO: 111386 - DNA, 25 bp, Homo sapien
cctggatactggcagagtggcccag

SEQ ID NO: 111387 - DNA, 25 bp, Homo sapien
gatactggcagagtggcccagggtg

SEQ ID NO: 111388 - DNA, 25 bp, Homo sapien
tggatactggcagagtggcccaggg

SEQ ID NO: 111389 - DNA, 25 bp, Homo sapien
ggatactggcagagtggcccagggt

SEQ ID NO: 111390 - DNA, 25 bp, Homo sapien
gccaagatgatcagatgtgaactca

SEQ ID NO: 111391 - DNA, 25 bp, Homo sapien
gatgtgaactcagtgccagaaacat

SEQ ID NO: 111392 - DNA, 25 bp, Homo sapien
tatggtgataaaatgcgaaaagaaa

SEQ ID NO: 111393 - DNA, 25 bp, Homo sapien
ccatctgtgtaaggggatcctgcca

SEQ ID NO: 111394 - DNA, 25 bp, Homo sapien
cccgaaggtttcagttgctcccagg

SEQ ID NO: 111395 - DNA, 25 bp, Homo sapien
tcagaggtggtggaagtccgttttc

SEQ ID NO: 111396 - DNA, 25 bp, Homo sapien
ggccacagtcattggacaagcagct

SEQ ID NO: 111397 - DNA, 25 bp, Homo sapien
caggcccgagtctctcagaaagaac

SEQ ID NO: 111398 - DNA, 25 bp, Homo sapien
ctgccatggcagcagttcagcccca

SEQ ID NO: 111399 - DNA, 25 bp, Homo sapien
actgccatggcagcagttcagcccc

SEQ ID NO: 111400 - DNA, 25 bp, Homo sapien
aactgtattccaaggtgttctgaag

SEQ ID NO: 111401 - DNA, 25 bp, Homo sapien
tagtgttcaggtgtccgcatgtgga

SEQ ID NO: 111402 - DNA, 25 bp, Homo sapien
gagcctcgttgggaatactatgcag

SEQ ID NO: 111403 - DNA, 25 bp, Homo sapien
taaccgtgagagtgagcctcgctgg

SEQ ID NO: 111404 - DNA, 25 bp, Homo sapien
gccattgagcaacatgttagttgta

SEQ ID NO: 111405 - DNA, 25 bp, Homo sapien
caacagggcatcttctgtagtcagt

SEQ ID NO: 111406 - DNA, 25 bp, Homo sapien
tcagtgccattgagcaacatgttag

SEQ ID NO: 111407 - DNA, 25 bp, Homo sapien
cagggcatcttctgtagtcagtgcc

SEQ ID NO: 111408 - DNA, 25 bp, Homo sapien
tgaagttggatttcggaggtgcacg

SEQ ID NO: 111409 - DNA, 25 bp, Homo sapien
cgggaatatgtgttcgtgtgtttaa

SEQ ID NO: 111410 - DNA, 25 bp, Homo sapien
ataaagtgaagttggatttcggagg

SEQ ID NO: 111411 - DNA, 25 bp, Homo sapien
atttcggaggtgcacgggaatatgt

SEQ ID NO: 111412 - DNA, 25 bp, Homo sapien
aaaggttggctctgatatgccctta

SEQ ID NO: 111413 - DNA, 25 bp, Homo sapien
caactttttgaaaggcagccaaaga

SEQ ID NO: 111414 - DNA, 25 bp, Homo sapien
aaggttggctctgatatgcccttac

SEQ ID NO: 111415 - DNA, 25 bp, Homo sapien
aatttagccgtttgctggtgtgctt

SEQ ID NO: 111416 - DNA, 25 bp, Homo sapien
tttagccgtttgctggtgtgcttct

SEQ ID NO: 111417 - DNA, 25 bp, Homo sapien
ttaatttagccgtttgctggtgtgc

SEQ ID NO: 111418 - DNA, 25 bp, Homo sapien
taatttagccgtttgctggtgtgct

SEQ ID NO: 111419 - DNA, 25 bp, Homo sapien
ttatagggaagcattgggcactgaa

SEQ ID NO: 111420 - DNA, 25 bp, Homo sapien
tctcacaggagagtgtaactggcat

SEQ ID NO: 111421 - DNA, 25 bp, Homo sapien
cagacaggtcttgaatcagacaact

SEQ ID NO: 111422 - DNA, 25 bp, Homo sapien
caactgctccaagcccagacaggtc

SEQ ID NO: 111423 - DNA, 25 bp, Homo sapien
gaatcagacaactctcacaggagag

SEQ ID NO: 111424 - DNA, 25 bp, Homo sapien
gaagccacgctgtaatctctcgtac

SEQ ID NO: 111425 - DNA, 25 bp, Homo sapien
cacgctgtaatctctcgtacttgca

SEQ ID NO: 111426 - DNA, 25 bp, Homo sapien
tgctcttcttggaagccacgctgta

SEQ ID NO: 111427 - DNA, 25 bp, Homo sapien
ttggaagccacgctgtaatctctcg

SEQ ID NO: 111428 - DNA, 25 bp, Homo sapien
ctgccatccactgcgtctctcttca

SEQ ID NO: 111429 - DNA, 25 bp, Homo sapien
tctgccatccactgcgtctctcttc

SEQ ID NO: 111430 - DNA, 25 bp, Homo sapien
tgccatccactgcgtctctcttcac

SEQ ID NO: 111431 - DNA, 25 bp, Homo sapien
atctgccatccactgcgtctctctt

SEQ ID NO: 111432 - DNA, 25 bp, Homo sapien
gcacaggattttgctaatccttgca

SEQ ID NO: 111433 - DNA, 25 bp, Homo sapien
ttactgcaatgccagctgcaccttc

SEQ ID NO: 111434 - DNA, 25 bp, Homo sapien
tgctgatattgctggcacaggattt

SEQ ID NO: 111435 - DNA, 25 bp, Homo sapien
caatgtcccactttactgcaatgcc

SEQ ID NO: 111436 - DNA, 25 bp, Homo sapien
gagggtcccacataaacagacaagg

SEQ ID NO: 111437 - DNA, 25 bp, Homo sapien
ggctgagccatctgattggatggca

SEQ ID NO: 111438 - DNA, 25 bp, Homo sapien
tggtcccttcatcatggagggtccc

SEQ ID NO: 111439 - DNA, 25 bp, Homo sapien
gcgctctcttctgctcggcttggtc

SEQ ID NO: 111440 - DNA, 25 bp, Homo sapien
gctagggtaaatcaggggtgtttca

SEQ ID NO: 111441 - DNA, 25 bp, Homo sapien
gtaaatcaggggtgtttcagcttcc

SEQ ID NO: 111442 - DNA, 25 bp, Homo sapien
agctctggtcccacagtaggaagga

SEQ ID NO: 111443 - DNA, 25 bp, Homo sapien
tctggtcccacagtaggaaggaggt

SEQ ID NO: 111444 - DNA, 25 bp, Homo sapien
atgtgagcagagccccaatctgttc

SEQ ID NO: 111445 - DNA, 25 bp, Homo sapien
aaggaaatcccagtcccttagagtg

SEQ ID NO: 111446 - DNA, 25 bp, Homo sapien
tcgtgcaaattctgccacctctggc

SEQ ID NO: 111447 - DNA, 25 bp, Homo sapien
ccagtcccttagagtgtcgtgcaaa

SEQ ID NO: 111448 - DNA, 25 bp, Homo sapien
ttattatggagcagagggcccacca

SEQ ID NO: 111449 - DNA, 25 bp, Homo sapien
tgttgtcttcaatgtcccatgggca

SEQ ID NO: 111450 - DNA, 25 bp, Homo sapien
cactatagttaatcatgcaagccct

SEQ ID NO: 111451 - DNA, 25 bp, Homo sapien
tctaatgggctacgggctggttctg

SEQ ID NO: 111452 - DNA, 25 bp, Homo sapien
caaagcatgggtggtaaattgatgg

SEQ ID NO: 111453 - DNA, 25 bp, Homo sapien
acaggctgaatctggtcaggacatc

SEQ ID NO: 111454 - DNA, 25 bp, Homo sapien
catcttgggagcttgtacagtgttc

SEQ ID NO: 111455 - DNA, 25 bp, Homo sapien
gagctatagtcataacactccagcc

SEQ ID NO: 111456 - DNA, 25 bp, Homo sapien
tcttactccgcctttgggtggccga

SEQ ID NO: 111457 - DNA, 25 bp, Homo sapien
tgggtggccgaagactcggcctcta

SEQ ID NO: 111458 - DNA, 25 bp, Homo sapien
gatccgcttctggtttcttactccg

SEQ ID NO: 111459 - DNA, 25 bp, Homo sapien
cactggttcgtccttctgtgaggtg

SEQ ID NO: 111460 - DNA, 25 bp, Homo sapien
tggccgccccacgtcgagaccagtg

SEQ ID NO: 111461 - DNA, 25 bp, Homo sapien
ccacgtcgagaccagtgccgcctcc

SEQ ID NO: 111462 - DNA, 25 bp, Homo sapien
cgccccacgtcgagaccagtgccgc

SEQ ID NO: 111463 - DNA, 25 bp, Homo sapien
cgctggccgccccacgtcgagacca

SEQ ID NO: 111464 - DNA, 25 bp, Homo sapien
cgtcacgggaaaagagcagcattgc

SEQ ID NO: 111465 - DNA, 25 bp, Homo sapien
ccaggccctgtgattctgaacgtca

SEQ ID NO: 111466 - DNA, 25 bp, Homo sapien
cattcgtactcaaggtttccccagg

SEQ ID NO: 111467 - DNA, 25 bp, Homo sapien
gctgggaggcttatgagaccccgca

SEQ ID NO: 111468 - DNA, 25 bp, Homo sapien
agtctgttcatcttcaataggctct

SEQ ID NO: 111469 - DNA, 25 bp, Homo sapien
ttcaataggctcttcatctgatgag

SEQ ID NO: 111470 - DNA, 25 bp, Homo sapien
catgatatatgaattggagtctgtt

SEQ ID NO: 111471 - DNA, 25 bp, Homo sapien
tatgaattggagtctgttcatcttc

SEQ ID NO: 111472 - DNA, 25 bp, Homo sapien
agagcacataaaccgagaaactgag

SEQ ID NO: 111473 - DNA, 25 bp, Homo sapien
gaagagcacataaaccgagaaactg

SEQ ID NO: 111474 - DNA, 25 bp, Homo sapien
ctggaagagcacataaaccgagaaa

SEQ ID NO: 111475 - DNA, 25 bp, Homo sapien
tggaagagcacataaaccgagaaac

SEQ ID NO: 111476 - DNA, 25 bp, Homo sapien
gctgagtggtcttgctctgtggatc

SEQ ID NO: 111477 - DNA, 25 bp, Homo sapien
gtcaacctgggatgttccagcttgg

SEQ ID NO: 111478 - DNA, 25 bp, Homo sapien
cacccccaacggagcccaacaagct

SEQ ID NO: 111479 - DNA, 25 bp, Homo sapien
gaagtcaacctgggatgttccagct

SEQ ID NO: 111480 - DNA, 25 bp, Homo sapien
ttcttctaacatctttaaatttaca

SEQ ID NO: 111481 - DNA, 25 bp, Homo sapien
tcttctaacatctttaaatttacaa

SEQ ID NO: 111482 - DNA, 25 bp, Homo sapien
gaaaacaaatatgtcttgtatacca

SEQ ID NO: 111483 - DNA, 25 bp, Homo sapien
ggtgcagaaaacaaatatgtcttgt

SEQ ID NO: 111484 - DNA, 25 bp, Homo sapien
ctggtgcagaaaacaaatatgtctt

SEQ ID NO: 111485 - DNA, 25 bp, Homo sapien
aaacaaatatgtcttgtataccaca

SEQ ID NO: 111486 - DNA, 25 bp, Homo sapien
tggtagagatccagaaggtttggga

SEQ ID NO: 111487 - DNA, 25 bp, Homo sapien
ctggtagagatccagaaggtttggg

SEQ ID NO: 111488 - DNA, 25 bp, Homo sapien
gatgatgggtgataattccacattg

SEQ ID NO: 111489 - DNA, 25 bp, Homo sapien
cgattggatgatgatgggtgataat

SEQ ID NO: 111490 - DNA, 25 bp, Homo sapien
ccctccatctgcgattggatgatga

SEQ ID NO: 111491 - DNA, 25 bp, Homo sapien
catctgcgattggatgatgatgggt

SEQ ID NO: 111492 - DNA, 25 bp, Homo sapien
aggttgtaagctcttccattatttc

SEQ ID NO: 111493 - DNA, 25 bp, Homo sapien
tccttacaacaaactatgaagtagg

SEQ ID NO: 111494 - DNA, 25 bp, Homo sapien
gaagtaggtgataactgaatagggc

SEQ ID NO: 111495 - DNA, 25 bp, Homo sapien
gcacgtatttgactacttaccctgt

SEQ ID NO: 111496 - DNA, 25 bp, Homo sapien
cattgtgccagtgctttcctagtgc

SEQ ID NO: 111497 - DNA, 25 bp, Homo sapien
aaaaattgattttcttgctattgaa

SEQ ID NO: 111498 - DNA, 25 bp, Homo sapien
caaaaaattgattttcttgctattg

SEQ ID NO: 111499 - DNA, 25 bp, Homo sapien
aaaattgattttcttgctattgaaa

SEQ ID NO: 111500 - DNA, 25 bp, Homo sapien
aaaaaattgattttcttgctattga

SEQ ID NO: 111501 - DNA, 25 bp, Homo sapien
tttttaggattgcttattgcttaga

SEQ ID NO: 111502 - DNA, 25 bp, Homo sapien
ttcaagtcatatttttaggattgct

SEQ ID NO: 111503 - DNA, 25 bp, Homo sapien
ttttaggattgcttattgcttagag

SEQ ID NO: 111504 - DNA, 25 bp, Homo sapien
tttaggattgcttattgcttagagg

SEQ ID NO: 111505 - DNA, 25 bp, Homo sapien
ggaaacttttcagtagaggctgctt

SEQ ID NO: 111506 - DNA, 25 bp, Homo sapien
gaaactttcacatcatcaactggat

SEQ ID NO: 111507 - DNA, 25 bp, Homo sapien
gggttgccagaaccagctacagtag

SEQ ID NO: 111508 - DNA, 25 bp, Homo sapien
aaacatcagagcatttgggttgcca

SEQ ID NO: 111509 - DNA, 25 bp, Homo sapien
caatagtatgtacatcagagtgagg

SEQ ID NO: 111510 - DNA, 25 bp, Homo sapien
tgagcatttgccaaggacttagaac

SEQ ID NO: 111511 - DNA, 25 bp, Homo sapien
gaacattagctgctgttatctagca

SEQ ID NO: 111512 - DNA, 25 bp, Homo sapien
gaacacagctttgtgcagagtaaga

SEQ ID NO: 111513 - DNA, 25 bp, Homo sapien
caccactgcctgggcttcagtcctg

SEQ ID NO: 111514 - DNA, 25 bp, Homo sapien
accactgcctgggcttcagtcctgg

SEQ ID NO: 111515 - DNA, 25 bp, Homo sapien
cagtgccttgcacacgaagattaat

SEQ ID NO: 111516 - DNA, 25 bp, Homo sapien
tggttactgcacaaatgccatgtag

SEQ ID NO: 111517 - DNA, 25 bp, Homo sapien
ttaatcaactgagagcaaggtgtgc

SEQ ID NO: 111518 - DNA, 25 bp, Homo sapien
gaacacctctaagcatcaagatagg

SEQ ID NO: 111519 - DNA, 25 bp, Homo sapien
aagatctcccaagtcctccatagca

SEQ ID NO: 111520 - DNA, 25 bp, Homo sapien
gacaagatctcccaagtcctccata

SEQ ID NO: 111521 - DNA, 25 bp, Homo sapien
caagacaagatctcccaagtcctcc

SEQ ID NO: 111522 - DNA, 25 bp, Homo sapien
agatctcccaagtcctccatagcag

SEQ ID NO: 111523 - DNA, 25 bp, Homo sapien
aataactagtgacagggtacagcat

SEQ ID NO: 111524 - DNA, 25 bp, Homo sapien
tgttattaaataactagtgacaggg

SEQ ID NO: 111525 - DNA, 25 bp, Homo sapien
taaataactagtgacagggtacagc

SEQ ID NO: 111526 - DNA, 25 bp, Homo sapien
tattaaataactagtgacagggtac

SEQ ID NO: 111527 - DNA, 25 bp, Homo sapien
gctctggtgatattgtgtcagacag

SEQ ID NO: 111528 - DNA, 25 bp, Homo sapien
tgatggtctgtattgccccggatcc

SEQ ID NO: 111529 - DNA, 25 bp, Homo sapien
ggctgtctatggcttgctctggtga

SEQ ID NO: 111530 - DNA, 25 bp, Homo sapien
ggatcctcttaggtctcgcaggctg

SEQ ID NO: 111531 - DNA, 25 bp, Homo sapien
aggatccattcccaaaacggactgg

SEQ ID NO: 111532 - DNA, 25 bp, Homo sapien
gagaggatccattcccaaaacggac

SEQ ID NO: 111533 - DNA, 25 bp, Homo sapien
ggtgagaggatccattcccaaaacg

SEQ ID NO: 111534 - DNA, 25 bp, Homo sapien
cggactggggcaaaaactgagaagt

SEQ ID NO: 111535 - DNA, 25 bp, Homo sapien
gtattaacaataaccatctcattgt

SEQ ID NO: 111536 - DNA, 25 bp, Homo sapien
tattaacaataaccatctcattgtc

SEQ ID NO: 111537 - DNA, 25 bp, Homo sapien
tgtattaacaataaccatctcattg

SEQ ID NO: 111538 - DNA, 25 bp, Homo sapien
ttgtattaacaataaccatctcatt

SEQ ID NO: 111539 - DNA, 25 bp, Homo sapien
gaaactcatgaagataattgtattg

SEQ ID NO: 111540 - DNA, 25 bp, Homo sapien
tcccgaaactcatgaagataattgt

SEQ ID NO: 111541 - DNA, 25 bp, Homo sapien
gtcccgaaactcatgaagataattg

SEQ ID NO: 111542 - DNA, 25 bp, Homo sapien
ccgaaactcatgaagataattgtat

SEQ ID NO: 111543 - DNA, 25 bp, Homo sapien
tatcttgatacagatcttgattgtg

SEQ ID NO: 111544 - DNA, 25 bp, Homo sapien
cttgatacagatcttgattgtgaat

SEQ ID NO: 111545 - DNA, 25 bp, Homo sapien
tcttgatacagatcttgattgtgaa

SEQ ID NO: 111546 - DNA, 25 bp, Homo sapien
ttatcttgatacagatcttgattgt

SEQ ID NO: 111547 - DNA, 25 bp, Homo sapien
caataaaactttaggaatatctgca

SEQ ID NO: 111548 - DNA, 25 bp, Homo sapien
agttgataacactggtggtttcatt

SEQ ID NO: 111549 - DNA, 25 bp, Homo sapien
ttaggaatatctgcacatgtacatt

SEQ ID NO: 111550 - DNA, 25 bp, Homo sapien
aattatgctagagaactgacatttc

SEQ ID NO: 111551 - DNA, 25 bp, Homo sapien
atgacgcccagccagtcattgaata

SEQ ID NO: 111552 - DNA, 25 bp, Homo sapien
ctgtcccctgggttcggctgactgc

SEQ ID NO: 111553 - DNA, 25 bp, Homo sapien
tgtcccctgggttcggctgactgca

SEQ ID NO: 111554 - DNA, 25 bp, Homo sapien
gcccagccagtcattgaataattat

SEQ ID NO: 111555 - DNA, 25 bp, Homo sapien
gaaattcaagcagttaatcagcagc

SEQ ID NO: 111556 - DNA, 25 bp, Homo sapien
tattacaatacatactagtgctctg

SEQ ID NO: 111557 - DNA, 25 bp, Homo sapien
caaacaggctggtcattgttttgca

SEQ ID NO: 111558 - DNA, 25 bp, Homo sapien
tcctctgaggataacaagggatgac

SEQ ID NO: 111559 - DNA, 25 bp, Homo sapien
tatccctgtatattgcatgaatgag

SEQ ID NO: 111560 - DNA, 25 bp, Homo sapien
aatgtatatctgactagtgggaaac

SEQ ID NO: 111561 - DNA, 25 bp, Homo sapien
tagctgtagatatcaggtgcttctg

SEQ ID NO: 111562 - DNA, 25 bp, Homo sapien
tcccttcgcttgaatattatccctg

SEQ ID NO: 111563 - DNA, 25 bp, Homo sapien
tttcttatctgaacatttactgccc

SEQ ID NO: 111564 - DNA, 25 bp, Homo sapien
tcttatctgaacatttactgccctt

SEQ ID NO: 111565 - DNA, 25 bp, Homo sapien
gctttcttatctgaacatttactgc

SEQ ID NO: 111566 - DNA, 25 bp, Homo sapien
tgctttcttatctgaacatttactg

SEQ ID NO: 111567 - DNA, 25 bp, Homo sapien
tacagttcttcctatttttcatgga

SEQ ID NO: 111568 - DNA, 25 bp, Homo sapien
gaaacttgtttagctatctcattct

SEQ ID NO: 111569 - DNA, 25 bp, Homo sapien
gaatatctgggtgaaaggttcttgt

SEQ ID NO: 111570 - DNA, 25 bp, Homo sapien
aggcagagactagaagaaacttgtt

SEQ ID NO: 111571 - DNA, 25 bp, Homo sapien
gaggatgtcgacagcgcggtgggac

SEQ ID NO: 111572 - DNA, 25 bp, Homo sapien
gacggccgtagtgtgaatgaagttt

SEQ ID NO: 111573 - DNA, 25 bp, Homo sapien
gcggccctgcattcccggggaggat

SEQ ID NO: 111574 - DNA, 25 bp, Homo sapien
gcggttccgcgctgcgttcgcaccg

SEQ ID NO: 111575 - DNA, 25 bp, Homo sapien
cacagttgtcgtcctgaaggttccc

SEQ ID NO: 111576 - DNA, 25 bp, Homo sapien
ttcatactcagaaccggctggtggt

SEQ ID NO: 111577 - DNA, 25 bp, Homo sapien
tctctaggcaagagacacagttgtc

SEQ ID NO: 111578 - DNA, 25 bp, Homo sapien
gagccccttggttggattccatgta

SEQ ID NO: 111579 - DNA, 25 bp, Homo sapien
gattccctcattgggaattttggct

SEQ ID NO: 111580 - DNA, 25 bp, Homo sapien
gctgattccctcattgggaattttg

SEQ ID NO: 111581 - DNA, 25 bp, Homo sapien
cctcattgggaattttggctgcaag

SEQ ID NO: 111582 - DNA, 25 bp, Homo sapien
ttccatggggtgctcttgtgggttc

SEQ ID NO: 111583 - DNA, 25 bp, Homo sapien
gggcctctgaatgtggccaacgtca

SEQ ID NO: 111584 - DNA, 25 bp, Homo sapien
tctgaatgtggccaacgtcaaatac

SEQ ID NO: 111585 - DNA, 25 bp, Homo sapien
ttagcctggtacagttgtcatctgg

SEQ ID NO: 111586 - DNA, 25 bp, Homo sapien
tcatctggagttggggcctctgaat

SEQ ID NO: 111587 - DNA, 25 bp, Homo sapien
cgttgctagttgtctctggtttctc

SEQ ID NO: 111588 - DNA, 25 bp, Homo sapien
gctccttgctctcccgttgctagtt

SEQ ID NO: 111589 - DNA, 25 bp, Homo sapien
tatgcctcattattgctgctccttg

SEQ ID NO: 111590 - DNA, 25 bp, Homo sapien
tgcctcattattgctgctccttgct

SEQ ID NO: 111591 - DNA, 25 bp, Homo sapien
tggagccacgctatcagcatcccag

SEQ ID NO: 111592 - DNA, 25 bp, Homo sapien
gaaagcctgtcttgggactttccag

SEQ ID NO: 111593 - DNA, 25 bp, Homo sapien
cttggctggagccacgctatcagca

SEQ ID NO: 111594 - DNA, 25 bp, Homo sapien
agccacgctatcagcatcccagggt

SEQ ID NO: 111595 - DNA, 25 bp, Homo sapien
aattttagacggcatctgagtggag

SEQ ID NO: 111596 - DNA, 25 bp, Homo sapien
aaaagtgcctaactacagtgctacc

SEQ ID NO: 111597 - DNA, 25 bp, Homo sapien
gcaataagcctaaacaaatgtgatg

SEQ ID NO: 111598 - DNA, 25 bp, Homo sapien
gaagatccaccctcggtgtgggtaa

SEQ ID NO: 111599 - DNA, 25 bp, Homo sapien
gaaagtcctttctgtggcggcatca

SEQ ID NO: 111600 - DNA, 25 bp, Homo sapien
tgttaggtggaaatgcccctgcacc

SEQ ID NO: 111601 - DNA, 25 bp, Homo sapien
cagccagcctctatgatgttgccag

SEQ ID NO: 111602 - DNA, 25 bp, Homo sapien
ggcatcagtccggtcatgaaggttt

SEQ ID NO: 111603 - DNA, 25 bp, Homo sapien
tcaggaggcttgaaacattaatggt

SEQ ID NO: 111604 - DNA, 25 bp, Homo sapien
taaaaccaatgctcccaagctgaat

SEQ ID NO: 111605 - DNA, 25 bp, Homo sapien
tccaagataatctcattcaggaggc

SEQ ID NO: 111606 - DNA, 25 bp, Homo sapien
tttgagatcattaacatgccagggc

SEQ ID NO: 111607 - DNA, 25 bp, Homo sapien
ttcataagagtttaaatgctgatat

SEQ ID NO: 111608 - DNA, 25 bp, Homo sapien
ccatatgtggactagtgatgaatag

SEQ ID NO: 111609 - DNA, 25 bp, Homo sapien
tactatggttgctttccctatttgt

SEQ ID NO: 111610 - DNA, 25 bp, Homo sapien
aatgctgatatttggtggaagtaga

SEQ ID NO: 111611 - DNA, 25 bp, Homo sapien
gaacaacgctgctattataagtaag

SEQ ID NO: 111612 - DNA, 25 bp, Homo sapien
tgaatgaactgaaccgttggaaagc

SEQ ID NO: 111613 - DNA, 25 bp, Homo sapien
tggtccttgggtaatgaggattccc

SEQ ID NO: 111614 - DNA, 25 bp, Homo sapien
gctgcctgtacagctctggagaagg

SEQ ID NO: 111615 - DNA, 25 bp, Homo sapien
gccgccgtgccattcttaaaggcgc

SEQ ID NO: 111616 - DNA, 25 bp, Homo sapien
ccggcccgctgaggccgcgttgata

SEQ ID NO: 111617 - DNA, 25 bp, Homo sapien
tctgtctaattttgagccgcgcctt

SEQ ID NO: 111618 - DNA, 25 bp, Homo sapien
taaaggcgcccgagtgtaggcgaca

SEQ ID NO: 111619 - DNA, 25 bp, Homo sapien
aatgcgggtgccagggagaaacaac

SEQ ID NO: 111620 - DNA, 25 bp, Homo sapien
cgctacaggtagttagacaggcatg

SEQ ID NO: 111621 - DNA, 25 bp, Homo sapien
cactaaagtgttaaccgaatgcggg

SEQ ID NO: 111622 - DNA, 25 bp, Homo sapien
gagaaacaacttcctaggcacgccc

SEQ ID NO: 111623 - DNA, 25 bp, Homo sapien
tacagtgccccggagcggacaaact

SEQ ID NO: 111624 - DNA, 25 bp, Homo sapien
tgccccggagcggacaaactttgta

SEQ ID NO: 111625 - DNA, 25 bp, Homo sapien
gagcggacaaactttgtaggtccgc

SEQ ID NO: 111626 - DNA, 25 bp, Homo sapien
gacaaactttgtaggtccgcacttg

SEQ ID NO: 111627 - DNA, 25 bp, Homo sapien
ttgctctgggtagagcccggctcca

SEQ ID NO: 111628 - DNA, 25 bp, Homo sapien
cttgctctgggtagagcccggctcc

SEQ ID NO: 111629 - DNA, 25 bp, Homo sapien
accaggccggtggtcacgatgaagc

SEQ ID NO: 111630 - DNA, 25 bp, Homo sapien
cgatgtagaaaagcggcgagtattc

SEQ ID NO: 111631 - DNA, 25 bp, Homo sapien
gatgaagcaggtaaagaccaccgcg

SEQ ID NO: 111632 - DNA, 25 bp, Homo sapien
gcgagtattcataaagcgttaccag

SEQ ID NO: 111633 - DNA, 25 bp, Homo sapien
caaacggtgatgcagggcagtgacg

SEQ ID NO: 111634 - DNA, 25 bp, Homo sapien
tcggagttctaggcacccggggaca

SEQ ID NO: 111635 - DNA, 25 bp, Homo sapien
gagaaagtcggagttctaggcaccc

SEQ ID NO: 111636 - DNA, 25 bp, Homo sapien
tctaggcacccggggacaccgaatc

SEQ ID NO: 111637 - DNA, 25 bp, Homo sapien
acttcgggaggtcatcgcgggcaga

SEQ ID NO: 111638 - DNA, 25 bp, Homo sapien
ttgtaattgaagctgaagatggatt

SEQ ID NO: 111639 - DNA, 25 bp, Homo sapien
aagatggattagtgatctctaagcc

SEQ ID NO: 111640 - DNA, 25 bp, Homo sapien
agccaaaaggattcttgacttgtct

SEQ ID NO: 111641 - DNA, 25 bp, Homo sapien
caaaaggattcttgacttgtctcat

SEQ ID NO: 111642 - DNA, 25 bp, Homo sapien
aatgagagaaaatctttggaaaaca

SEQ ID NO: 111643 - DNA, 25 bp, Homo sapien
aatgtttgttaaaagtctaatgaag

SEQ ID NO: 111644 - DNA, 25 bp, Homo sapien
gctaaaaaaagagggcaaacaatga

SEQ ID NO: 111645 - DNA, 25 bp, Homo sapien
atgtttgttaaaagtctaatgaagg

SEQ ID NO: 111646 - DNA, 25 bp, Homo sapien
gtgaggtatgatcatactactgcat

SEQ ID NO: 111647 - DNA, 25 bp, Homo sapien
ccacttgagcccagggtattggggc

SEQ ID NO: 111648 - DNA, 25 bp, Homo sapien
ttccagcctgggtggaagagcaaga

SEQ ID NO: 111649 - DNA, 25 bp, Homo sapien
tgcagtgaggtatgatcatactact

SEQ ID NO: 111650 - DNA, 25 bp, Homo sapien
accactacatttccacctggatgac

SEQ ID NO: 111651 - DNA, 25 bp, Homo sapien
aggtaggaggatcacggctgcagtc

SEQ ID NO: 111652 - DNA, 25 bp, Homo sapien
cgtggtcctaacttcttggaaggct

SEQ ID NO: 111653 - DNA, 25 bp, Homo sapien
gatcacaccactacatttccacctg

SEQ ID NO: 111654 - DNA, 25 bp, Homo sapien
ttttgaacactgcacccccagtagc

SEQ ID NO: 111655 - DNA, 25 bp, Homo sapien
gcacccccagtagcatgtaaggagg

SEQ ID NO: 111656 - DNA, 25 bp, Homo sapien
tgtaaggaggctatcttcaaggcaa

SEQ ID NO: 111657 - DNA, 25 bp, Homo sapien
tcaaggcaatctgttgtcaaggtta

SEQ ID NO: 111658 - DNA, 25 bp, Homo sapien
gtgctaatgggtatatcagacgaaa

SEQ ID NO: 111659 - DNA, 25 bp, Homo sapien
ttcagtgctaatgggtatatcagac

SEQ ID NO: 111660 - DNA, 25 bp, Homo sapien
ctaatgggtatatcagacgaaagga

SEQ ID NO: 111661 - DNA, 25 bp, Homo sapien
cagtgctaatgggtatatcagacga

SEQ ID NO: 111662 - DNA, 25 bp, Homo sapien
catcttctaatgcttgaggagtgct

SEQ ID NO: 111663 - DNA, 25 bp, Homo sapien
ttcctgatagagatattcactccac

SEQ ID NO: 111664 - DNA, 25 bp, Homo sapien
actgttcctgatagagatattcact

SEQ ID NO: 111665 - DNA, 25 bp, Homo sapien
gaggagtgcttattctgaagcaata

SEQ ID NO: 111666 - DNA, 25 bp, Homo sapien
taagaagtctaattttcagtgctaa

SEQ ID NO: 111667 - DNA, 25 bp, Homo sapien
tttcagtgctaatgggtatatcaga

SEQ ID NO: 111668 - DNA, 25 bp, Homo sapien
ccataagaagtctaattttcagtgc

SEQ ID NO: 111669 - DNA, 25 bp, Homo sapien
gtgctaatgggtatatcagatgaaa

SEQ ID NO: 111670 - DNA, 25 bp, Homo sapien
catcttctaatgcttggggagtgct

SEQ ID NO: 111671 - DNA, 25 bp, Homo sapien
ttcctgatagagatattcactccac

SEQ ID NO: 111672 - DNA, 25 bp, Homo sapien
actgttcctgatagagatattcact

SEQ ID NO: 111673 - DNA, 25 bp, Homo sapien
gggagtgcttattctgaagcaataa

SEQ ID NO: 111674 - DNA, 25 bp, Homo sapien
agttagcaacactttatccgtaaga

SEQ ID NO: 111675 - DNA, 25 bp, Homo sapien
aagttagcaacactttatccgtaag

SEQ ID NO: 111676 - DNA, 25 bp, Homo sapien
gttagcaacactttatccgtaagaa

SEQ ID NO: 111677 - DNA, 25 bp, Homo sapien
tctcttggtaactggcaatatattt

SEQ ID NO: 111678 - DNA, 25 bp, Homo sapien
ctcttggtaactggcaatatatttc

SEQ ID NO: 111679 - DNA, 25 bp, Homo sapien
gctaccaatggatagcgagatctgg

SEQ ID NO: 111680 - DNA, 25 bp, Homo sapien
catcctcatcagctaaggtcaatag

SEQ ID NO: 111681 - DNA, 25 bp, Homo sapien
ggtcaatagcgctaccaatggatag

SEQ ID NO: 111682 - DNA, 25 bp, Homo sapien
agcgagatctgggtactgtaccaaa

SEQ ID NO: 111683 - DNA, 25 bp, Homo sapien
caaataatgaagaaccaccattcaa

SEQ ID NO: 111684 - DNA, 25 bp, Homo sapien
aaccaccattcaaatcacttaaagg

SEQ ID NO: 111685 - DNA, 25 bp, Homo sapien
atcaaataatgaagaaccaccattc

SEQ ID NO: 111686 - DNA, 25 bp, Homo sapien
caaatcacttaaaggtaatgctttc

SEQ ID NO: 111687 - DNA, 25 bp, Homo sapien
aaagtcatattactgtgacccataa

SEQ ID NO: 111688 - DNA, 25 bp, Homo sapien
taaagtcatattactgtgacccata

SEQ ID NO: 111689 - DNA, 25 bp, Homo sapien
aagtcatattactgtgacccataag

SEQ ID NO: 111690 - DNA, 25 bp, Homo sapien
ctgaaggtactgttacacatataaa

SEQ ID NO: 111691 - DNA, 25 bp, Homo sapien
tactgtgatccataaggcaaaaaat

SEQ ID NO: 111692 - DNA, 25 bp, Homo sapien
aaggcaaaaaatgagtcatactctg

SEQ ID NO: 111693 - DNA, 25 bp, Homo sapien
aaaatgagtcatactctgaaggtac

SEQ ID NO: 111694 - DNA, 25 bp, Homo sapien
cctaggtgcttaactgcaaatgagt

SEQ ID NO: 111695 - DNA, 25 bp, Homo sapien
tgcatgtggcaagagcaccaaaaat

SEQ ID NO: 111696 - DNA, 25 bp, Homo sapien
gcaaattacgcatcatcttacacag

SEQ ID NO: 111697 - DNA, 25 bp, Homo sapien
tgacctcagctcaatggaacttcag

SEQ ID NO: 111698 - DNA, 25 bp, Homo sapien
aaaggacccagacacagagacatac

SEQ ID NO: 111699 - DNA, 25 bp, Homo sapien
gacgagaagcaaggattaacaggaa

SEQ ID NO: 111700 - DNA, 25 bp, Homo sapien
ttaacccttgggagacactcaggct

SEQ ID NO: 111701 - DNA, 25 bp, Homo sapien
aaaatatagtccctgacacgcacat

SEQ ID NO: 111702 - DNA, 25 bp, Homo sapien
cacttttgcttagagagctacatgc

SEQ ID NO: 111703 - DNA, 25 bp, Homo sapien
ggagactggcagaataactatggaa

SEQ ID NO: 111704 - DNA, 25 bp, Homo sapien
caaaaaggtacaattccaatggcaa

SEQ ID NO: 111705 - DNA, 25 bp, Homo sapien
agagagttatgagggcgactagccc

SEQ ID NO: 111706 - DNA, 25 bp, Homo sapien
tattgatacaatattctgcaggata

SEQ ID NO: 111707 - DNA, 25 bp, Homo sapien
ggatagtttataagtcctatcagga

SEQ ID NO: 111708 - DNA, 25 bp, Homo sapien
tattctgcaggatagtttataagtc

SEQ ID NO: 111709 - DNA, 25 bp, Homo sapien
tataagtcctatcaggaatatgaat

SEQ ID NO: 111710 - DNA, 25 bp, Homo sapien
tgttggagggagtgaaattattatt

SEQ ID NO: 111711 - DNA, 25 bp, Homo sapien
agaggaattgttggagggagtgaaa

SEQ ID NO: 111712 - DNA, 25 bp, Homo sapien
attgttggagggagtgaaattatta

SEQ ID NO: 111713 - DNA, 25 bp, Homo sapien
gaattgttggagggagtgaaattat

SEQ ID NO: 111714 - DNA, 25 bp, Homo sapien
ttccaacaaacttctgtctgtgttt

SEQ ID NO: 111715 - DNA, 25 bp, Homo sapien
caacaaacttctgtctgtgtttttt

SEQ ID NO: 111716 - DNA, 25 bp, Homo sapien
ccaacaaacttctgtctgtgttttt

SEQ ID NO: 111717 - DNA, 25 bp, Homo sapien
tccaacaaacttctgtctgtgtttt

SEQ ID NO: 111718 - DNA, 25 bp, Homo sapien
ggtaagagtacccagttcacagtcc

SEQ ID NO: 111719 - DNA, 25 bp, Homo sapien
cattctggcaaacaacacagtcctt

SEQ ID NO: 111720 - DNA, 25 bp, Homo sapien
tcttccgatggctcaacttcacttt

SEQ ID NO: 111721 - DNA, 25 bp, Homo sapien
gtgtgtctgcatggtaagagtaccc

SEQ ID NO: 111722 - DNA, 25 bp, Homo sapien
caaagagtcttcggtttgtctttat

SEQ ID NO: 111723 - DNA, 25 bp, Homo sapien
tcaaagagtcttcggtttgtcttta

SEQ ID NO: 111724 - DNA, 25 bp, Homo sapien
gagtcttcggtttgtctttatcttg

SEQ ID NO: 111725 - DNA, 25 bp, Homo sapien
aagagtcttcggtttgtctttatct

SEQ ID NO: 111726 - DNA, 25 bp, Homo sapien
gaggaaatctagctaataaaaggcc

SEQ ID NO: 111727 - DNA, 25 bp, Homo sapien
taaggtaaggcattaaaggtctcac

SEQ ID NO: 111728 - DNA, 25 bp, Homo sapien
tacacggagaacagtcaagaattat

SEQ ID NO: 111729 - DNA, 25 bp, Homo sapien
aattgcactccgattacatcaaagg

SEQ ID NO: 111730 - DNA, 25 bp, Homo sapien
catagctagtgaatgtagatgaaag

SEQ ID NO: 111731 - DNA, 25 bp, Homo sapien
ggcattattcttaatacaaacagga

SEQ ID NO: 111732 - DNA, 25 bp, Homo sapien
tgtagcccagactctcaacaagtat

SEQ ID NO: 111733 - DNA, 25 bp, Homo sapien
tcttcagagtgctatacctggttgg

SEQ ID NO: 111734 - DNA, 25 bp, Homo sapien
tgacacaagcccctaggaatcagtg

SEQ ID NO: 111735 - DNA, 25 bp, Homo sapien
tctgcttagatgttgccctggttcc

SEQ ID NO: 111736 - DNA, 25 bp, Homo sapien
ggtggctactcacctgtcaagtctg

SEQ ID NO: 111737 - DNA, 25 bp, Homo sapien
aaagaattgttgagaagcctggtgc

SEQ ID NO: 111738 - DNA, 25 bp, Homo sapien
ggagtatcccaagtgtcaaaccagg

SEQ ID NO: 111739 - DNA, 25 bp, Homo sapien
tcggataattctagccttcaggcct

SEQ ID NO: 111740 - DNA, 25 bp, Homo sapien
aacacttgatcttagagccctgagc

SEQ ID NO: 111741 - DNA, 25 bp, Homo sapien
tgggttaccccactagccattcaag

SEQ ID NO: 111742 - DNA, 25 bp, Homo sapien
caatttaatttgcaggcctccaatg

SEQ ID NO: 111743 - DNA, 25 bp, Homo sapien
ccattgtgaactcctgtctgtatgt

SEQ ID NO: 111744 - DNA, 25 bp, Homo sapien
tacacaatgaagtctcatccagcaa

SEQ ID NO: 111745 - DNA, 25 bp, Homo sapien
tattacgactgcatataagccccaa

SEQ ID NO: 111746 - DNA, 25 bp, Homo sapien
gtcgggtgccggatgccctttgctc

SEQ ID NO: 111747 - DNA, 25 bp, Homo sapien
aatgtggttcgtccgctcggctgac

SEQ ID NO: 111748 - DNA, 25 bp, Homo sapien
cagtgcgcagggttggacctgccca

SEQ ID NO: 111749 - DNA, 25 bp, Homo sapien
gtggccgaactcctgagaccggtcg

SEQ ID NO: 111750 - DNA, 25 bp, Homo sapien
ggtgcttcgagtcggggccgctgca

SEQ ID NO: 111751 - DNA, 25 bp, Homo sapien
cggcgcggggagagtgcggtgcttc

SEQ ID NO: 111752 - DNA, 25 bp, Homo sapien
gccgcgggccatgccgtcggggcgg

SEQ ID NO: 111753 - DNA, 25 bp, Homo sapien
cgcggcggctctcagcggggttggg

SEQ ID NO: 111754 - DNA, 25 bp, Homo sapien
taacagcgagaagcctgcttcccag

SEQ ID NO: 111755 - DNA, 25 bp, Homo sapien
aagaacgccagcaccagcaacagat

SEQ ID NO: 111756 - DNA, 25 bp, Homo sapien
tcttccccgcgcagaaaacttgcaa

SEQ ID NO: 111757 - DNA, 25 bp, Homo sapien
gcctcgggcgccgtgcttaagaacg

SEQ ID NO: 111758 - DNA, 25 bp, Homo sapien
tccggtggttctggctgatttcccc

SEQ ID NO: 111759 - DNA, 25 bp, Homo sapien
tgatttccccagagacgatgacaga

SEQ ID NO: 111760 - DNA, 25 bp, Homo sapien
gagacgcgttcctgttccaaggtgg

SEQ ID NO: 111761 - DNA, 25 bp, Homo sapien
tgacagacagtagcacggaaatgtt

SEQ ID NO: 111762 - DNA, 25 bp, Homo sapien
gcgcagtcggccagcgagtgctcca

SEQ ID NO: 111763 - DNA, 25 bp, Homo sapien
gcgcaacagtctgctcgcactcgtt

SEQ ID NO: 111764 - DNA, 25 bp, Homo sapien
ctcgcgttcgaggacgtgcagctcg

SEQ ID NO: 111765 - DNA, 25 bp, Homo sapien
tgggtctggctcacgcgcttgagca

SEQ ID NO: 111766 - DNA, 25 bp, Homo sapien
tcaatcattcatgctaccgtagcta

SEQ ID NO: 111767 - DNA, 25 bp, Homo sapien
agcggccggcggaggtaagtaggtg

SEQ ID NO: 111768 - DNA, 25 bp, Homo sapien
cgtagctaccacacggaaagggctg

SEQ ID NO: 111769 - DNA, 25 bp, Homo sapien
cacggaaagggctgacggagttcac

SEQ ID NO: 111770 - DNA, 25 bp, Homo sapien
ctgcatattattctgaagacgaagc

SEQ ID NO: 111771 - DNA, 25 bp, Homo sapien
tctgaagacgaagctctaaaaccag

SEQ ID NO: 111772 - DNA, 25 bp, Homo sapien
tattattctgaagacgaagctctaa

SEQ ID NO: 111773 - DNA, 25 bp, Homo sapien
attctgaagacgaagctctaaaacc

SEQ ID NO: 111774 - DNA, 25 bp, Homo sapien
gcctacaaggtcaattgagggttcc

SEQ ID NO: 111775 - DNA, 25 bp, Homo sapien
ttattatagagtggtgcctacaagg

SEQ ID NO: 111776 - DNA, 25 bp, Homo sapien
taagagccttacacatcaaaacagc

SEQ ID NO: 111777 - DNA, 25 bp, Homo sapien
gatacaagatgacttcggtacagga

SEQ ID NO: 111778 - DNA, 25 bp, Homo sapien
gtgtcaatccagtgtgctaaatgct

SEQ ID NO: 111779 - DNA, 25 bp, Homo sapien
ctaacatggcagtgtcaatccagtg

SEQ ID NO: 111780 - DNA, 25 bp, Homo sapien
ctcaggggacgacgaggcatcttct

SEQ ID NO: 111781 - DNA, 25 bp, Homo sapien
tgagctggtgatgtgcagatgccgt

SEQ ID NO: 111782 - DNA, 25 bp, Homo sapien
taagtatgccccattcgcagttcaa

SEQ ID NO: 111783 - DNA, 25 bp, Homo sapien
ccctacgtgagggagataaagcaca

SEQ ID NO: 111784 - DNA, 25 bp, Homo sapien
cctggagccaatgttccagtgcagg

SEQ ID NO: 111785 - DNA, 25 bp, Homo sapien
ccagtgcaggatttcttaaaaggta

SEQ ID NO: 111786 - DNA, 25 bp, Homo sapien
tgattccgccaactacagagaaaag

SEQ ID NO: 111787 - DNA, 25 bp, Homo sapien
aaaatgtaactgagctgattccgcc

SEQ ID NO: 111788 - DNA, 25 bp, Homo sapien
aagcaacccaactaaagccacctgt

SEQ ID NO: 111789 - DNA, 25 bp, Homo sapien
tagaaggcaccggtaattgagaaca

SEQ ID NO: 111790 - DNA, 25 bp, Homo sapien
gctgcttcagcaattgaggggaaaa

SEQ ID NO: 111791 - DNA, 25 bp, Homo sapien
tacctctgagagacgatgaccaaga

SEQ ID NO: 111792 - DNA, 25 bp, Homo sapien
gatcttggaaggcttgagtgacaag

SEQ ID NO: 111793 - DNA, 25 bp, Homo sapien
ctttgcatgctacctctgagagacg

SEQ ID NO: 111794 - DNA, 25 bp, Homo sapien
tcctggccagacctaagaagaccat

SEQ ID NO: 111795 - DNA, 25 bp, Homo sapien
tgagaatgcacctccttaaaagagg

SEQ ID NO: 111796 - DNA, 25 bp, Homo sapien
ggcaccagtaataccaccgctctga

SEQ ID NO: 111797 - DNA, 25 bp, Homo sapien
tagtgactattccagcctttagagg

SEQ ID NO: 111798 - DNA, 25 bp, Homo sapien
caatttcacaggctaacgggcatgg

SEQ ID NO: 111799 - DNA, 25 bp, Homo sapien
gaactataagtgtccctgggaatga

SEQ ID NO: 111800 - DNA, 25 bp, Homo sapien
catagagcaatacagaaacaggact

SEQ ID NO: 111801 - DNA, 25 bp, Homo sapien
tatgcacactggactcagaacagaa

SEQ ID NO: 111802 - DNA, 25 bp, Homo sapien
caaactggaagagcaagcaaggagc

SEQ ID NO: 111803 - DNA, 25 bp, Homo sapien
cacagacaactatgctcagcaaggg

SEQ ID NO: 111804 - DNA, 25 bp, Homo sapien
cagcaagggtgagctaagggaatta

SEQ ID NO: 111805 - DNA, 25 bp, Homo sapien
tacaacgtgcattgaagagacacat

SEQ ID NO: 111806 - DNA, 25 bp, Homo sapien
tgtacgttgcatagacatgccatca

SEQ ID NO: 111807 - DNA, 25 bp, Homo sapien
catgccatcaactccttattcaggg

SEQ ID NO: 111808 - DNA, 25 bp, Homo sapien
ggaagagtgatcctaaatctcccct

SEQ ID NO: 111809 - DNA, 25 bp, Homo sapien
tataagcaacatgtataagcgttca

SEQ ID NO: 111810 - DNA, 25 bp, Homo sapien
gatgggcattttgacagggcctcct

SEQ ID NO: 111811 - DNA, 25 bp, Homo sapien
tcaaacctttagcaggatgggcatt

SEQ ID NO: 111812 - DNA, 25 bp, Homo sapien
gggcctcctgagaattgtcagttta

SEQ ID NO: 111813 - DNA, 25 bp, Homo sapien
cagtttaggtattctcatccctgtg

SEQ ID NO: 111814 - DNA, 25 bp, Homo sapien
aaggcctcatgttccgagtccagtg

SEQ ID NO: 111815 - DNA, 25 bp, Homo sapien
gaagatcttccctccaaagggagca

SEQ ID NO: 111816 - DNA, 25 bp, Homo sapien
ggtgagtccactccctgagaatctc

SEQ ID NO: 111817 - DNA, 25 bp, Homo sapien
tttatgccacgttcggccaaggcct

SEQ ID NO: 111818 - DNA, 25 bp, Homo sapien
gttgggctgctctgaatgtaactcc

SEQ ID NO: 111819 - DNA, 25 bp, Homo sapien
cacgccctcacctttaaagtgggat

SEQ ID NO: 111820 - DNA, 25 bp, Homo sapien
gggcgatacagaggcaagctatttt

SEQ ID NO: 111821 - DNA, 25 bp, Homo sapien
gacaaaagtggcatactccctgctg

SEQ ID NO: 111822 - DNA, 25 bp, Homo sapien
tcacaaggtgaccatcaggagcagg

SEQ ID NO: 111823 - DNA, 25 bp, Homo sapien
ttttcgacagtcaagaagggtccac

SEQ ID NO: 111824 - DNA, 25 bp, Homo sapien
tgatttaatatcagcagcgccaaca

SEQ ID NO: 111825 - DNA, 25 bp, Homo sapien
ccatctttgaagtcagcagtggctg

SEQ ID NO: 111826 - DNA, 25 bp, Homo sapien
gaaaaggctagcataaggaagagtt

SEQ ID NO: 111827 - DNA, 25 bp, Homo sapien
tcaaatgccttctctaggctacgat

SEQ ID NO: 111828 - DNA, 25 bp, Homo sapien
gctgattaagtggtttgctgggatc

SEQ ID NO: 111829 - DNA, 25 bp, Homo sapien
ggaatttctgcccactcggaaggcc

SEQ ID NO: 111830 - DNA, 25 bp, Homo sapien
tgtttgatagaaacagtctagtatg

SEQ ID NO: 111831 - DNA, 25 bp, Homo sapien
cgcctggccccaactggcttatttt

SEQ ID NO: 111832 - DNA, 25 bp, Homo sapien
ttctgtcaaactcagtgtttgatag

SEQ ID NO: 111833 - DNA, 25 bp, Homo sapien
tgcgcctggccccaactggcttatt

SEQ ID NO: 111834 - DNA, 25 bp, Homo sapien
taaaggttacttgcgacatggaatc

SEQ ID NO: 111835 - DNA, 25 bp, Homo sapien
catggaatctaaaatcttacgggtg

SEQ ID NO: 111836 - DNA, 25 bp, Homo sapien
tgaggtaacacgagcaaaaaagagc

SEQ ID NO: 111837 - DNA, 25 bp, Homo sapien
tactctgtacactcgtgaggtaaca

SEQ ID NO: 111838 - DNA, 25 bp, Homo sapien
tgtgaagccactagggacctggcca

SEQ ID NO: 111839 - DNA, 25 bp, Homo sapien
tgcatgcaatatcagtacacggaat

SEQ ID NO: 111840 - DNA, 25 bp, Homo sapien
tctaatgactcatcaaactgactgc

SEQ ID NO: 111841 - DNA, 25 bp, Homo sapien
cctaccctgaactttgagtgaagaa

SEQ ID NO: 111842 - DNA, 25 bp, Homo sapien
tctccaaactctagaaagacctgtc

SEQ ID NO: 111843 - DNA, 25 bp, Homo sapien
tgaggaaatacaccttagtaacttg

SEQ ID NO: 111844 - DNA, 25 bp, Homo sapien
gccaacttctctgagaacaagcaag

SEQ ID NO: 111845 - DNA, 25 bp, Homo sapien
gttagccttaggagaaatcatattg

SEQ ID NO: 111846 - DNA, 25 bp, Homo sapien
cacttcagcctagcggatggaggtc

SEQ ID NO: 111847 - DNA, 25 bp, Homo sapien
gagggaagactactctctgattgtc

SEQ ID NO: 111848 - DNA, 25 bp, Homo sapien
cttaaaggtcgtgcctaccaaacag

SEQ ID NO: 111849 - DNA, 25 bp, Homo sapien
tcaggcatttttaaccaggagggtc

SEQ ID NO: 111850 - DNA, 25 bp, Homo sapien
tctggtctagaatatgggaatgctt

SEQ ID NO: 111851 - DNA, 25 bp, Homo sapien
gagtctagttgaacttggacacact

SEQ ID NO: 111852 - DNA, 25 bp, Homo sapien
taagaaagcatcaatgtcctgtaaa

SEQ ID NO: 111853 - DNA, 25 bp, Homo sapien
tctctcagataatgcataagaaagc

SEQ ID NO: 111854 - DNA, 25 bp, Homo sapien
cagagatgcctcatgggaccacaaa

SEQ ID NO: 111855 - DNA, 25 bp, Homo sapien
taccaggtatagatgggcagaccag

SEQ ID NO: 111856 - DNA, 25 bp, Homo sapien
actgaggccctattgagaagctgga

SEQ ID NO: 111857 - DNA, 25 bp, Homo sapien
caggtgacattcagaccgatcggcc

SEQ ID NO: 111858 - DNA, 25 bp, Homo sapien
gcttgactttcagagcatcagcaat

SEQ ID NO: 111859 - DNA, 25 bp, Homo sapien
tgaaggcctatttccatagctgctt

SEQ ID NO: 111860 - DNA, 25 bp, Homo sapien
tgcttccccaatagtctcatgcttg

SEQ ID NO: 111861 - DNA, 25 bp, Homo sapien
ttcatctgatgcagagttatactgc

SEQ ID NO: 111862 - DNA, 25 bp, Homo sapien
tacatactggtatgggctgatcatc

SEQ ID NO: 111863 - DNA, 25 bp, Homo sapien
tagaacaaatgggtagagcttaacc

SEQ ID NO: 111864 - DNA, 25 bp, Homo sapien
ttgaggattcagaccacaggttctt

SEQ ID NO: 111865 - DNA, 25 bp, Homo sapien
ggtctctatgcaatactgcctgcca

SEQ ID NO: 111866 - DNA, 25 bp, Homo sapien
ggcttccattgcacctagaacacaa

SEQ ID NO: 111867 - DNA, 25 bp, Homo sapien
ggctgactggcatggcattagctcc

SEQ ID NO: 111868 - DNA, 25 bp, Homo sapien
ccacatccagagtgatcttacaatg

SEQ ID NO: 111869 - DNA, 25 bp, Homo sapien
aaatcgggtctatatgaatcctgcc

SEQ ID NO: 111870 - DNA, 25 bp, Homo sapien
ctattatgtgccaaatactgttcca

SEQ ID NO: 111871 - DNA, 25 bp, Homo sapien
gaggacacagtaataagacagacaa

SEQ ID NO: 111872 - DNA, 25 bp, Homo sapien
tttagtgactatctattatgtgcca

SEQ ID NO: 111873 - DNA, 25 bp, Homo sapien
ccatctcaatacctaataaaagctg

SEQ ID NO: 111874 - DNA, 25 bp, Homo sapien
tgtgatttacttaccttacgctacg

SEQ ID NO: 111875 - DNA, 25 bp, Homo sapien
tgtaatggccgttcccagtgcatga

SEQ ID NO: 111876 - DNA, 25 bp, Homo sapien
agtgcatgaaacaaccttcccctca

SEQ ID NO: 111877 - DNA, 25 bp, Homo sapien
tacgctacgtattgcttctcattgt

SEQ ID NO: 111878 - DNA, 25 bp, Homo sapien
gtgagctcatgcagttccatgccat

SEQ ID NO: 111879 - DNA, 25 bp, Homo sapien
cagttcttagtctgtggtctcctct

SEQ ID NO: 111880 - DNA, 25 bp, Homo sapien
tatttaccgtcactcccctggtgag

SEQ ID NO: 111881 - DNA, 25 bp, Homo sapien
tcttaatgttgaaatgactcagttc

SEQ ID NO: 111882 - DNA, 25 bp, Homo sapien
gctgaacatgggatgaagactccac

SEQ ID NO: 111883 - DNA, 25 bp, Homo sapien
ccctgctgccttagttgagagagaa

SEQ ID NO: 111884 - DNA, 25 bp, Homo sapien
cagaacatctgctcgaggtaggcaa

SEQ ID NO: 111885 - DNA, 25 bp, Homo sapien
tgctgacagattccgaagggaggca

SEQ ID NO: 111886 - DNA, 25 bp, Homo sapien
gctaaagctagctgttaccaccaga

SEQ ID NO: 111887 - DNA, 25 bp, Homo sapien
ttcccgtgagcagtgacaggaagaa

SEQ ID NO: 111888 - DNA, 25 bp, Homo sapien
gctgctgtgacaattgagggctggg

SEQ ID NO: 111889 - DNA, 25 bp, Homo sapien
agcattcagcgccattcccgtgagc

SEQ ID NO: 111890 - DNA, 25 bp, Homo sapien
ggaactgataacaaccacctattga

SEQ ID NO: 111891 - DNA, 25 bp, Homo sapien
gactcttgcctaccggctgaaaggg

SEQ ID NO: 111892 - DNA, 25 bp, Homo sapien
ctgctgaggatctccgggcctagga

SEQ ID NO: 111893 - DNA, 25 bp, Homo sapien
tcaaggctggtacttccataaaagg

SEQ ID NO: 111894 - DNA, 25 bp, Homo sapien
gaatgctcagtgcaagcatacaacg

SEQ ID NO: 111895 - DNA, 25 bp, Homo sapien
gagacctcggtagggatgaaagaaa

SEQ ID NO: 111896 - DNA, 25 bp, Homo sapien
taaagaacgctgaaagaatgctcag

SEQ ID NO: 111897 - DNA, 25 bp, Homo sapien
tggggcacgcctctgttccgtgagt

SEQ ID NO: 111898 - DNA, 25 bp, Homo sapien
gaagtcactacaataggtcttgagg

SEQ ID NO: 111899 - DNA, 25 bp, Homo sapien
ctgagacttaaggagcaccaaagcc

SEQ ID NO: 111900 - DNA, 25 bp, Homo sapien
cataaccatgcgtttcttctgagac

SEQ ID NO: 111901 - DNA, 25 bp, Homo sapien
ggtatttcaataaacagcaagttga

SEQ ID NO: 111902 - DNA, 25 bp, Homo sapien
caagggcaaatggtggttggaagaa

SEQ ID NO: 111903 - DNA, 25 bp, Homo sapien
aagactcagttgctctaaaatactt

SEQ ID NO: 111904 - DNA, 25 bp, Homo sapien
tactttcataccgaatggtatttgc

SEQ ID NO: 111905 - DNA, 25 bp, Homo sapien
cattgtactccatcgtttgtgtctt

SEQ ID NO: 111906 - DNA, 25 bp, Homo sapien
ctgtccttcctggccaagctgacat

SEQ ID NO: 111907 - DNA, 25 bp, Homo sapien
gctactaccagtaggaattccctgt

SEQ ID NO: 111908 - DNA, 25 bp, Homo sapien
ttccctgtccttcctggccaagctg

SEQ ID NO: 111909 - DNA, 25 bp, Homo sapien
cagtggctactaccagtaggaattc

SEQ ID NO: 111910 - DNA, 25 bp, Homo sapien
atgctcggctaatcaaaaggcctgt

SEQ ID NO: 111911 - DNA, 25 bp, Homo sapien
tgctcggctaatcaaaaggcctgtt

SEQ ID NO: 111912 - DNA, 25 bp, Homo sapien
catgctcggctaatcaaaaggcctg

SEQ ID NO: 111913 - DNA, 25 bp, Homo sapien
gataagtgtcccatcagtattaggg

SEQ ID NO: 111914 - DNA, 25 bp, Homo sapien
aagtctgtctccagtctttcctgac

SEQ ID NO: 111915 - DNA, 25 bp, Homo sapien
cacactgaagtgactttgtgacaaa

SEQ ID NO: 111916 - DNA, 25 bp, Homo sapien
tcttctggaaactcaaagctccttg

SEQ ID NO: 111917 - DNA, 25 bp, Homo sapien
gaatagtcacaaagccaacttgcat

SEQ ID NO: 111918 - DNA, 25 bp, Homo sapien
cacaaagccaacttgcatgcacaaa

SEQ ID NO: 111919 - DNA, 25 bp, Homo sapien
aatagtcggctgaatctctgggtgt

SEQ ID NO: 111920 - DNA, 25 bp, Homo sapien
ttgcaacaaacatcagatatccggg

SEQ ID NO: 111921 - DNA, 25 bp, Homo sapien
caggccatgtagaggtgtttctcca

SEQ ID NO: 111922 - DNA, 25 bp, Homo sapien
gctctctcagatgataagcattcgg

SEQ ID NO: 111923 - DNA, 25 bp, Homo sapien
tatattcctgttacctagcctgcac

SEQ ID NO: 111924 - DNA, 25 bp, Homo sapien
tcggcacctggtaaacaattgttaa

SEQ ID NO: 111925 - DNA, 25 bp, Homo sapien
agaccgtgtaggaatcgcagggcca

SEQ ID NO: 111926 - DNA, 25 bp, Homo sapien
tgggacttccactgtgcaacaaagg

SEQ ID NO: 111927 - DNA, 25 bp, Homo sapien
caacaaaggctgtacgtctgcagag

SEQ ID NO: 111928 - DNA, 25 bp, Homo sapien
tgattaattaacttggacccctgtg

SEQ ID NO: 111929 - DNA, 25 bp, Homo sapien
gcttcatgtggtgcgaaggttcacg

SEQ ID NO: 111930 - DNA, 25 bp, Homo sapien
aatcagcttagttgccttggttcag

SEQ ID NO: 111931 - DNA, 25 bp, Homo sapien
cttggttcagtactttagaccgcgg

SEQ ID NO: 111932 - DNA, 25 bp, Homo sapien
tagaccgcggtctatcattttactc

SEQ ID NO: 111933 - DNA, 25 bp, Homo sapien
gtttttgtctcactgactattggat

SEQ ID NO: 111934 - DNA, 25 bp, Homo sapien
aaaaagtagtcaagctaagtagaga

SEQ ID NO: 111935 - DNA, 25 bp, Homo sapien
ggataaatcccctcctaaggtgcag

SEQ ID NO: 111936 - DNA, 25 bp, Homo sapien
ggtgcagtacaatgctacaaatagg

SEQ ID NO: 111937 - DNA, 25 bp, Homo sapien
ctgtaaactccaagatccttttagg

SEQ ID NO: 111938 - DNA, 25 bp, Homo sapien
tgagctaatttaagggagccctccc

SEQ ID NO: 111939 - DNA, 25 bp, Homo sapien
gcaagacactgactgaagaactgag

SEQ ID NO: 111940 - DNA, 25 bp, Homo sapien
caagctcatttgtactgcagggtga

SEQ ID NO: 111941 - DNA, 25 bp, Homo sapien
ggcacgagtcagcacacacagatga

SEQ ID NO: 111942 - DNA, 25 bp, Homo sapien
taatgcaaggctctagactgcgagg

SEQ ID NO: 111943 - DNA, 25 bp, Homo sapien
tgcaaggctctagactgcgaggatc

SEQ ID NO: 111944 - DNA, 25 bp, Homo sapien
aatgcaaggctctagactgcgagga

SEQ ID NO: 111945 - DNA, 25 bp, Homo sapien
gcaaggctctagactgcgaggatct

SEQ ID NO: 111946 - DNA, 25 bp, Homo sapien
catatccacttggtaagaaccgtag

SEQ ID NO: 111947 - DNA, 25 bp, Homo sapien
gtgagagttatgcaggatcctcgga

SEQ ID NO: 111948 - DNA, 25 bp, Homo sapien
gttatgcaggatcctcggagacttt

SEQ ID NO: 111949 - DNA, 25 bp, Homo sapien
gcttggaactacgatttccattaca

SEQ ID NO: 111950 - DNA, 25 bp, Homo sapien
ggaatctaaaccttgacggacatta

SEQ ID NO: 111951 - DNA, 25 bp, Homo sapien
taaaccgcttaactaccagtgatgc

SEQ ID NO: 111952 - DNA, 25 bp, Homo sapien
ggtctgcacagcgaagccttacagt

SEQ ID NO: 111953 - DNA, 25 bp, Homo sapien
attctgaaagcaaataagatcctgc

SEQ ID NO: 111954 - DNA, 25 bp, Homo sapien
gccagtcctagacccaggtactgca

SEQ ID NO: 111955 - DNA, 25 bp, Homo sapien
taacactctgtaaggccagtcctag

SEQ ID NO: 111956 - DNA, 25 bp, Homo sapien
aaggccagtcctagacccaggtact

SEQ ID NO: 111957 - DNA, 25 bp, Homo sapien
cttaacactctgtaaggccagtcct

SEQ ID NO: 111958 - DNA, 25 bp, Homo sapien
cccttcatggtacggtgtgcagggc

SEQ ID NO: 111959 - DNA, 25 bp, Homo sapien
taaagtgtgttgaaactgagtagcc

SEQ ID NO: 111960 - DNA, 25 bp, Homo sapien
tcagggatgcctcttatcagcaacc

SEQ ID NO: 111961 - DNA, 25 bp, Homo sapien
gcaacccactggaagtctgtaaccc

SEQ ID NO: 111962 - DNA, 25 bp, Homo sapien
accaccctactaccttgctgctgct

SEQ ID NO: 111963 - DNA, 25 bp, Homo sapien
gctgagccctttccataggtttccc

SEQ ID NO: 111964 - DNA, 25 bp, Homo sapien
aagatgccaccaccctactaccttg

SEQ ID NO: 111965 - DNA, 25 bp, Homo sapien
gagaagtgaaactaacaacagcatc

SEQ ID NO: 111966 - DNA, 25 bp, Homo sapien
gcttaacccccaagtcaaacgctgc

SEQ ID NO: 111967 - DNA, 25 bp, Homo sapien
cccccaagtcaaacgctgcacagag

SEQ ID NO: 111968 - DNA, 25 bp, Homo sapien
ccaagtcaaacgctgcacagagcag

SEQ ID NO: 111969 - DNA, 25 bp, Homo sapien
gtcaaacgctgcacagagcaggcct

SEQ ID NO: 111970 - DNA, 25 bp, Homo sapien
acaccactcccaaccatggggagcc

SEQ ID NO: 111971 - DNA, 25 bp, Homo sapien
agagctggggttactaaagccacaa

SEQ ID NO: 111972 - DNA, 25 bp, Homo sapien
gagagctggggttactaaagccaca

SEQ ID NO: 111973 - DNA, 25 bp, Homo sapien
tggggagcctttccaccactgaaga

SEQ ID NO: 111974 - DNA, 25 bp, Homo sapien
gggctcaggtcctctaaaggcatcc

SEQ ID NO: 111975 - DNA, 25 bp, Homo sapien
caggtcctctaaaggcatcccttct

SEQ ID NO: 111976 - DNA, 25 bp, Homo sapien
agggctcaggtcctctaaaggcatc

SEQ ID NO: 111977 - DNA, 25 bp, Homo sapien
gctcaggtcctctaaaggcatccct

SEQ ID NO: 111978 - DNA, 25 bp, Homo sapien
tgggcacagctcatcattattgagt

SEQ ID NO: 111979 - DNA, 25 bp, Homo sapien
tgttaggtgaaaaatttgtgagttg

SEQ ID NO: 111980 - DNA, 25 bp, Homo sapien
atttgtgagttgatggaatgatcac

SEQ ID NO: 111981 - DNA, 25 bp, Homo sapien
atcacataagagattgctccatctc

SEQ ID NO: 111982 - DNA, 25 bp, Homo sapien
tggtctgacgatgaacccacaagac

SEQ ID NO: 111983 - DNA, 25 bp, Homo sapien
gtaacaggagcaaaattctcttgat

SEQ ID NO: 111984 - DNA, 25 bp, Homo sapien
cacaagacatgcagtaacaggagca

SEQ ID NO: 111985 - DNA, 25 bp, Homo sapien
gattagaggaccataatattttgct

SEQ ID NO: 111986 - DNA, 25 bp, Homo sapien
ttggtgaagtttggtatcaactcac

SEQ ID NO: 111987 - DNA, 25 bp, Homo sapien
tgctccggagaaccgtttggtgaag

SEQ ID NO: 111988 - DNA, 25 bp, Homo sapien
ctgggcgtgagagccagtacgttac

SEQ ID NO: 111989 - DNA, 25 bp, Homo sapien
cacaatccccagttatgtgctgctc

SEQ ID NO: 111990 - DNA, 25 bp, Homo sapien
ccagagaagcctgggcgtgagagcc

SEQ ID NO: 111991 - DNA, 25 bp, Homo sapien
ccagttatgtgctgctccaaggagg

SEQ ID NO: 111992 - DNA, 25 bp, Homo sapien
tagcgcctaagatgggttcagttgt

SEQ ID NO: 111993 - DNA, 25 bp, Homo sapien
taagaactgtaggagtatcaggtgc

SEQ ID NO: 111994 - DNA, 25 bp, Homo sapien
tggacaatcggagcccaagatgctg

SEQ ID NO: 111995 - DNA, 25 bp, Homo sapien
caagatgctggttgttagcgcctaa

SEQ ID NO: 111996 - DNA, 25 bp, Homo sapien
tcaccaggtcacatgtccaatgtat

SEQ ID NO: 111997 - DNA, 25 bp, Homo sapien
cctcagctttgtgtctctgataagt

SEQ ID NO: 111998 - DNA, 25 bp, Homo sapien
tttctattatggctgatgacatggc

SEQ ID NO: 111999 - DNA, 25 bp, Homo sapien
cagtcacagacacaggtagggtagt

SEQ ID NO: 112000 - DNA, 25 bp, Homo sapien
ccacaattgagctcagtgacttgca

SEQ ID NO: 112001 - DNA, 25 bp, Homo sapien
tctctgctgtagatatgtcttggac

SEQ ID NO: 112002 - DNA, 25 bp, Homo sapien
tgtcttggacacatctgaaccctcc

SEQ ID NO: 112003 - DNA, 25 bp, Homo sapien
gatgtagtttaagaatccacctctc

SEQ ID NO: 112004 - DNA, 25 bp, Homo sapien
gcaacactgtaaggagtagaatcca

SEQ ID NO: 112005 - DNA, 25 bp, Homo sapien
gggctccatttctagaaccaacagg

SEQ ID NO: 112006 - DNA, 25 bp, Homo sapien
ttctaaagtactcctaggccctcca

SEQ ID NO: 112007 - DNA, 25 bp, Homo sapien
caggactcaacacattatttggcag

SEQ ID NO: 112008 - DNA, 25 bp, Homo sapien
gcccctatgtccagggagtttggaa

SEQ ID NO: 112009 - DNA, 25 bp, Homo sapien
gagtgacagcactggcctactgtgt

SEQ ID NO: 112010 - DNA, 25 bp, Homo sapien
ttctaaactctatggaggaaggcag

SEQ ID NO: 112011 - DNA, 25 bp, Homo sapien
tctagccacaatggttctgagctgg

SEQ ID NO: 112012 - DNA, 25 bp, Homo sapien
gatgctacagaaggagacaagacct

SEQ ID NO: 112013 - DNA, 25 bp, Homo sapien
cagatgagggcccttggctttggcc

SEQ ID NO: 112014 - DNA, 25 bp, Homo sapien
gacaagacctcagagctcataggga

SEQ ID NO: 112015 - DNA, 25 bp, Homo sapien
caagttgcaagcatgctgccatcta

SEQ ID NO: 112016 - DNA, 25 bp, Homo sapien
tcccaaaaggagcacggcattgtcc

SEQ ID NO: 112017 - DNA, 25 bp, Homo sapien
tgtccagacagtcaacagaggagta

SEQ ID NO: 112018 - DNA, 25 bp, Homo sapien
cggcattgtccacgtaacctaactg

SEQ ID NO: 112019 - DNA, 25 bp, Homo sapien
gcccctgttgcacaagaggctctag

SEQ ID NO: 112020 - DNA, 25 bp, Homo sapien
ccttatgatggcctgttagtccctc

SEQ ID NO: 112021 - DNA, 25 bp, Homo sapien
attcccagagggcacaaaaaccagg

SEQ ID NO: 112022 - DNA, 25 bp, Homo sapien
cacgtttgtatttccagcccaggtt

SEQ ID NO: 112023 - DNA, 25 bp, Homo sapien
gagtatgcagacaactccacgtttg

SEQ ID NO: 112024 - DNA, 25 bp, Homo sapien
caggtaccggcacagctgggtgctc

SEQ ID NO: 112025 - DNA, 25 bp, Homo sapien
aggtaccggcacagctgggtgctcc

SEQ ID NO: 112026 - DNA, 25 bp, Homo sapien
ggtaccggcacagctgggtgctcca

SEQ ID NO: 112027 - DNA, 25 bp, Homo sapien
cttccatggagactttccatctgta

SEQ ID NO: 112028 - DNA, 25 bp, Homo sapien
ctttccagagtagagatctggtcat

SEQ ID NO: 112029 - DNA, 25 bp, Homo sapien
agatctggtcatttcttccatggag

SEQ ID NO: 112030 - DNA, 25 bp, Homo sapien
gagtagagatctggtcatttcttcc

SEQ ID NO: 112031 - DNA, 25 bp, Homo sapien
tcacctctactatgttttctgaata

SEQ ID NO: 112032 - DNA, 25 bp, Homo sapien
ggacacagtggaaaacttaagtgca

SEQ ID NO: 112033 - DNA, 25 bp, Homo sapien
caatatcacctgattcaggacacag

SEQ ID NO: 112034 - DNA, 25 bp, Homo sapien
aacttcaaggtttgatgatgtcagc

SEQ ID NO: 112035 - DNA, 25 bp, Homo sapien
tcaaacggaagccagaccctacatg

SEQ ID NO: 112036 - DNA, 25 bp, Homo sapien
gaccctacatgcagggacttggtca

SEQ ID NO: 112037 - DNA, 25 bp, Homo sapien
gacttggtcacactggctaggtcct

SEQ ID NO: 112038 - DNA, 25 bp, Homo sapien
tcttccagagagcaaagaatctttg

SEQ ID NO: 112039 - DNA, 25 bp, Homo sapien
gctgtaagcctactgtaatcagagg

SEQ ID NO: 112040 - DNA, 25 bp, Homo sapien
aatcagaggtggctagtgtacatcc

SEQ ID NO: 112041 - DNA, 25 bp, Homo sapien
ctggtgactactgagctgctgagca

SEQ ID NO: 112042 - DNA, 25 bp, Homo sapien
catggacagtacatctcaacttgga

SEQ ID NO: 112043 - DNA, 25 bp, Homo sapien
ttgcaccactgtaccctggggcttg

SEQ ID NO: 112044 - DNA, 25 bp, Homo sapien
ctgtagatccagctactccagacgc

SEQ ID NO: 112045 - DNA, 25 bp, Homo sapien
gtagatccagctactccagacgctg

SEQ ID NO: 112046 - DNA, 25 bp, Homo sapien
attgcttgagcttcagaggtcgagg

SEQ ID NO: 112047 - DNA, 25 bp, Homo sapien
tcgaggtttcctggcttcagcaaag

SEQ ID NO: 112048 - DNA, 25 bp, Homo sapien
tcctgttgccattggttaatgattc

SEQ ID NO: 112049 - DNA, 25 bp, Homo sapien
atattctactttcgcgtcgaggttt

SEQ ID NO: 112050 - DNA, 25 bp, Homo sapien
cagatgagttaacaggagggaaatc

SEQ ID NO: 112051 - DNA, 25 bp, Homo sapien
gagagttctgccacccattgagctt

SEQ ID NO: 112052 - DNA, 25 bp, Homo sapien
tcggttctggccaccaaagctggtc

SEQ ID NO: 112053 - DNA, 25 bp, Homo sapien
tgcggtcctccaagtgattcagcca

SEQ ID NO: 112054 - DNA, 25 bp, Homo sapien
cataatccacagagtctgagcggcc

SEQ ID NO: 112055 - DNA, 25 bp, Homo sapien
tcacagggtgcatggagcagacact

SEQ ID NO: 112056 - DNA, 25 bp, Homo sapien
tataacccaaatttggaccatcagt

SEQ ID NO: 112057 - DNA, 25 bp, Homo sapien
cagacactgtcagcaggacatgcca

SEQ ID NO: 112058 - DNA, 25 bp, Homo sapien
gagcaacaaatatggggtccaaagg

SEQ ID NO: 112059 - DNA, 25 bp, Homo sapien
gtaactcagtgtctcagcaaatcca

SEQ ID NO: 112060 - DNA, 25 bp, Homo sapien
tctcctaaggtgttggactgagcga

SEQ ID NO: 112061 - DNA, 25 bp, Homo sapien
ctgagcgagagaagtccatggcatt

SEQ ID NO: 112062 - DNA, 25 bp, Homo sapien
tgcatgaagacaggcacacgaggtc

SEQ ID NO: 112063 - DNA, 25 bp, Homo sapien
gttattccactgaggtactgtttca

SEQ ID NO: 112064 - DNA, 25 bp, Homo sapien
gcttggttattccactgaggtactg

SEQ ID NO: 112065 - DNA, 25 bp, Homo sapien
cttcagtgtttgcttggttattcca

SEQ ID NO: 112066 - DNA, 25 bp, Homo sapien
tgtttgcttggttattccactgagg

SEQ ID NO: 112067 - DNA, 25 bp, Homo sapien
tgaaccaccataggcaacacagagg

SEQ ID NO: 112068 - DNA, 25 bp, Homo sapien
tgagtgaacaagtgacccaaaggct

SEQ ID NO: 112069 - DNA, 25 bp, Homo sapien
gtaaggtgcttatgtcaggcgccca

SEQ ID NO: 112070 - DNA, 25 bp, Homo sapien
catggacttacacgcagtgctaggc

SEQ ID NO: 112071 - DNA, 25 bp, Homo sapien
ctctcccttcatgagcctgttcttc

SEQ ID NO: 112072 - DNA, 25 bp, Homo sapien
gttcttcctcttcactgtcctccat

SEQ ID NO: 112073 - DNA, 25 bp, Homo sapien
tgttcttcctcttcactgtcctcca

SEQ ID NO: 112074 - DNA, 25 bp, Homo sapien
ccttcatgagcctgttcttcctctt

SEQ ID NO: 112075 - DNA, 25 bp, Homo sapien
cctaccatgtgctaagtgctctcag

SEQ ID NO: 112076 - DNA, 25 bp, Homo sapien
ccctctttgataaatccagtggtca

SEQ ID NO: 112077 - DNA, 25 bp, Homo sapien
gctttcaggttgaggtgcccaggcc

SEQ ID NO: 112078 - DNA, 25 bp, Homo sapien
tgtgctgctaactcccaaatgtcta

SEQ ID NO: 112079 - DNA, 25 bp, Homo sapien
cctgctcttaactgactgatacctg

SEQ ID NO: 112080 - DNA, 25 bp, Homo sapien
tcttaactgactgatacctgagatt

SEQ ID NO: 112081 - DNA, 25 bp, Homo sapien
cacaccctgctcttaactgactgat

SEQ ID NO: 112082 - DNA, 25 bp, Homo sapien
tattttacctaatagaatgttgaga

SEQ ID NO: 112083 - DNA, 25 bp, Homo sapien
ttagctccatatgggttttgctggg

SEQ ID NO: 112084 - DNA, 25 bp, Homo sapien
ggcttttccaaaaggatgcatctca

SEQ ID NO: 112085 - DNA, 25 bp, Homo sapien
gcatctcagaaaggctggctgtgaa

SEQ ID NO: 112086 - DNA, 25 bp, Homo sapien
tgctcccattggcttcactgtctag

SEQ ID NO: 112087 - DNA, 25 bp, Homo sapien
ggctatcatgctatacgaaaggctg

SEQ ID NO: 112088 - DNA, 25 bp, Homo sapien
aatgtcttactgtgcaaagcagaag

SEQ ID NO: 112089 - DNA, 25 bp, Homo sapien
gcatcaactacctatctggatcaag

SEQ ID NO: 112090 - DNA, 25 bp, Homo sapien
ggaaagacatagagcaacctgtcag

SEQ ID NO: 112091 - DNA, 25 bp, Homo sapien
agaagtgagaatccccgtgagttta

SEQ ID NO: 112092 - DNA, 25 bp, Homo sapien
tatggtgcttacttcaaagagcagg

SEQ ID NO: 112093 - DNA, 25 bp, Homo sapien
tcacactccaggtagcagttactga

SEQ ID NO: 112094 - DNA, 25 bp, Homo sapien
tactatcgactcatcagcagcactc

SEQ ID NO: 112095 - DNA, 25 bp, Homo sapien
caaccgtttcagactatctggtgga

SEQ ID NO: 112096 - DNA, 25 bp, Homo sapien
gcagactgtttacggctgccctgag

SEQ ID NO: 112097 - DNA, 25 bp, Homo sapien
gatgctttgactggtgcctgccagg

SEQ ID NO: 112098 - DNA, 25 bp, Homo sapien
tctgtatagccaggattagagtcag

SEQ ID NO: 112099 - DNA, 25 bp, Homo sapien
caggaggacatcttgaagggcagcc

SEQ ID NO: 112100 - DNA, 25 bp, Homo sapien
ttgttcaggaggacatcttgaaggg

SEQ ID NO: 112101 - DNA, 25 bp, Homo sapien
ttcaggaggacatcttgaagggcag

SEQ ID NO: 112102 - DNA, 25 bp, Homo sapien
tgttcaggaggacatcttgaagggc

SEQ ID NO: 112103 - DNA, 25 bp, Homo sapien
cagtgggttaggtttctccaaggag

SEQ ID NO: 112104 - DNA, 25 bp, Homo sapien
acctatagtgcccacacattggtcc

SEQ ID NO: 112105 - DNA, 25 bp, Homo sapien
cctctcagtgggttaggtttctcca

SEQ ID NO: 112106 - DNA, 25 bp, Homo sapien
tctccaaggaggccaaacctatagt

SEQ ID NO: 112107 - DNA, 25 bp, Homo sapien
cagcaggttgaatacaggcctggca

SEQ ID NO: 112108 - DNA, 25 bp, Homo sapien
tcacagcaggttgaatacaggcctg

SEQ ID NO: 112109 - DNA, 25 bp, Homo sapien
agcaggttgaatacaggcctggcat

SEQ ID NO: 112110 - DNA, 25 bp, Homo sapien
cacagcaggttgaatacaggcctgg

SEQ ID NO: 112111 - DNA, 25 bp, Homo sapien
gaatgtgttacgagcagtggtctga

SEQ ID NO: 112112 - DNA, 25 bp, Homo sapien
gggtcctctagctcgtaagtcctca

SEQ ID NO: 112113 - DNA, 25 bp, Homo sapien
gggacacagatcgtttcaaagggct

SEQ ID NO: 112114 - DNA, 25 bp, Homo sapien
gaagaggctacactgctttgtggag

SEQ ID NO: 112115 - DNA, 25 bp, Homo sapien
tttctgccatggtcaacctggagtt

SEQ ID NO: 112116 - DNA, 25 bp, Homo sapien
tatttcccagattttggcaagaagc

SEQ ID NO: 112117 - DNA, 25 bp, Homo sapien
ggaatctgagccctttctgccatgg

SEQ ID NO: 112118 - DNA, 25 bp, Homo sapien
tctggttcctatttcccagattttg

SEQ ID NO: 112119 - DNA, 25 bp, Homo sapien
tttacaaacagaagatcctatcacc

SEQ ID NO: 112120 - DNA, 25 bp, Homo sapien
tatcaccattagctgtgactcattt

SEQ ID NO: 112121 - DNA, 25 bp, Homo sapien
caatgaggtacaaggttggagcagc

SEQ ID NO: 112122 - DNA, 25 bp, Homo sapien
gactcatttaatggtctacaagtca

SEQ ID NO: 112123 - DNA, 25 bp, Homo sapien
cccaagtgacacatggcttttgctg

SEQ ID NO: 112124 - DNA, 25 bp, Homo sapien
attaagacacatcccctcactctgg

SEQ ID NO: 112125 - DNA, 25 bp, Homo sapien
gcttttgctgcctgttatatacctt

SEQ ID NO: 112126 - DNA, 25 bp, Homo sapien
tacctttaaagacccatttgtatca

SEQ ID NO: 112127 - DNA, 25 bp, Homo sapien
tgcactcataggaagtcgttttgaa

SEQ ID NO: 112128 - DNA, 25 bp, Homo sapien
tgaataacatctggtggcggaagag

SEQ ID NO: 112129 - DNA, 25 bp, Homo sapien
gagtcctcagcaatggcatcttgca

SEQ ID NO: 112130 - DNA, 25 bp, Homo sapien
cataggaagtcgttttgaataacat

SEQ ID NO: 112131 - DNA, 25 bp, Homo sapien
gtggtcctggtaactgcagatggaa

SEQ ID NO: 112132 - DNA, 25 bp, Homo sapien
aaagctctctccctccaagatatga

SEQ ID NO: 112133 - DNA, 25 bp, Homo sapien
tctctccctccaagatatgactgca

SEQ ID NO: 112134 - DNA, 25 bp, Homo sapien
ggaagatcaactcccattcaccaca

SEQ ID NO: 112135 - DNA, 25 bp, Homo sapien
ggtcattcttgataatagtgctaca

SEQ ID NO: 112136 - DNA, 25 bp, Homo sapien
tgttctatatttgcctgctggtctt

SEQ ID NO: 112137 - DNA, 25 bp, Homo sapien
tgctggtctttaccagtgggattca

SEQ ID NO: 112138 - DNA, 25 bp, Homo sapien
cttcagaaagctcctagaccttgct

SEQ ID NO: 112139 - DNA, 25 bp, Homo sapien
aaatatatcaggacttgaaaggccc

SEQ ID NO: 112140 - DNA, 25 bp, Homo sapien
ctaggccataggataatggaagttc

SEQ ID NO: 112141 - DNA, 25 bp, Homo sapien
tgaaaggcccaaagattggctaggc

SEQ ID NO: 112142 - DNA, 25 bp, Homo sapien
tctaaagtgcatctgaaataacccc

SEQ ID NO: 112143 - DNA, 25 bp, Homo sapien
gaaaaagggcatcctgatccccaaa

SEQ ID NO: 112144 - DNA, 25 bp, Homo sapien
ggtgtgtccgctgaccatttctcca

SEQ ID NO: 112145 - DNA, 25 bp, Homo sapien
aaactctttctgtcgtgggggtgtg

SEQ ID NO: 112146 - DNA, 25 bp, Homo sapien
aagctatggaatgtatccggatgca

SEQ ID NO: 112147 - DNA, 25 bp, Homo sapien
ctgggagaaaagcgcggcatatttg

SEQ ID NO: 112148 - DNA, 25 bp, Homo sapien
aaagcgcggcatatttgtgcaggcg

SEQ ID NO: 112149 - DNA, 25 bp, Homo sapien
ggagaaaagcgcggcatatttgtgc

SEQ ID NO: 112150 - DNA, 25 bp, Homo sapien
agaaaagcgcggcatatttgtgcag

SEQ ID NO: 112151 - DNA, 25 bp, Homo sapien
gctggcactcggtgagggccatcat

SEQ ID NO: 112152 - DNA, 25 bp, Homo sapien
agctggcactcggtgagggccatca

SEQ ID NO: 112153 - DNA, 25 bp, Homo sapien
ctggcactcggtgagggccatcatc

SEQ ID NO: 112154 - DNA, 25 bp, Homo sapien
tggcactcggtgagggccatcatct

SEQ ID NO: 112155 - DNA, 25 bp, Homo sapien
ttgtgtcttgcacctttggtaacat

SEQ ID NO: 112156 - DNA, 25 bp, Homo sapien
aattttgtgtcttgcacctttggta

SEQ ID NO: 112157 - DNA, 25 bp, Homo sapien
acaattttgtgtcttgcacctttgg

SEQ ID NO: 112158 - DNA, 25 bp, Homo sapien
ttttgtgtcttgcacctttggtaac

SEQ ID NO: 112159 - DNA, 25 bp, Homo sapien
tgaaagtggaaatgttccctcatcc

SEQ ID NO: 112160 - DNA, 25 bp, Homo sapien
tacgctctagaaggtctgtcgatga

SEQ ID NO: 112161 - DNA, 25 bp, Homo sapien
ttggtaaggaaaccacatggtacgc

SEQ ID NO: 112162 - DNA, 25 bp, Homo sapien
ggtctgtcgatgacacttccagtgg

SEQ ID NO: 112163 - DNA, 25 bp, Homo sapien
ggcagctgcttgataagggttcagt

SEQ ID NO: 112164 - DNA, 25 bp, Homo sapien
caggcagctgcttgataagggttca

SEQ ID NO: 112165 - DNA, 25 bp, Homo sapien
ccaggcagctgcttgataagggttc

SEQ ID NO: 112166 - DNA, 25 bp, Homo sapien
ggatggggcaaattgagtcccaggc

SEQ ID NO: 112167 - DNA, 25 bp, Homo sapien
gaggtcctgccaacggcccaaccag

SEQ ID NO: 112168 - DNA, 25 bp, Homo sapien
ggtcctgccaacggcccaaccagcc

SEQ ID NO: 112169 - DNA, 25 bp, Homo sapien
ttgaggtcctgccaacggcccaacc

SEQ ID NO: 112170 - DNA, 25 bp, Homo sapien
cttgaggtcctgccaacggcccaac

SEQ ID NO: 112171 - DNA, 25 bp, Homo sapien
aaagggaccactttcgtttcatcat

SEQ ID NO: 112172 - DNA, 25 bp, Homo sapien
aagggaccactttcgtttcatcatt

SEQ ID NO: 112173 - DNA, 25 bp, Homo sapien
gctcttacaggattcgtggctgctg

SEQ ID NO: 112174 - DNA, 25 bp, Homo sapien
tgccctgagctcttacaggattcgt

SEQ ID NO: 112175 - DNA, 25 bp, Homo sapien
gattcgtggctgctggtaccctcat

SEQ ID NO: 112176 - DNA, 25 bp, Homo sapien
tacaggattcgtggctgctggtacc

SEQ ID NO: 112177 - DNA, 25 bp, Homo sapien
caggaagacctctgttaggctcagg

SEQ ID NO: 112178 - DNA, 25 bp, Homo sapien
ctggacggtgagagcaggaagacct

SEQ ID NO: 112179 - DNA, 25 bp, Homo sapien
gaagacctctgttaggctcaggaat

SEQ ID NO: 112180 - DNA, 25 bp, Homo sapien
gacggtgagagcaggaagacctctg

SEQ ID NO: 112181 - DNA, 25 bp, Homo sapien
ctggtgcagttcctggagcgggatg

SEQ ID NO: 112182 - DNA, 25 bp, Homo sapien
gtgcagttcctggagcgggatgcgc

SEQ ID NO: 112183 - DNA, 25 bp, Homo sapien
gcagttcctggagcgggatgcgcag

SEQ ID NO: 112184 - DNA, 25 bp, Homo sapien
ctggagcgggatgcgcaggctgccc

SEQ ID NO: 112185 - DNA, 25 bp, Homo sapien
ctttccccatgacgcgtgtgaactg

SEQ ID NO: 112186 - DNA, 25 bp, Homo sapien
gagctgtaggccttgatcggagtca

SEQ ID NO: 112187 - DNA, 25 bp, Homo sapien
aggccttgatcggagtcaggatcat

SEQ ID NO: 112188 - DNA, 25 bp, Homo sapien
gctccccatcgcagctgctcagctg

SEQ ID NO: 112189 - DNA, 25 bp, Homo sapien
ggctggcatcccctagtctgaggga

SEQ ID NO: 112190 - DNA, 25 bp, Homo sapien
gctgagtgaacggtttgttcccaaa

SEQ ID NO: 112191 - DNA, 25 bp, Homo sapien
ccaatgagcactgtaataaaagggc

SEQ ID NO: 112192 - DNA, 25 bp, Homo sapien
atcatctttttcgaagtccttccca

SEQ ID NO: 112193 - DNA, 25 bp, Homo sapien
tcttacccaaaggaccacgctgtgg

SEQ ID NO: 112194 - DNA, 25 bp, Homo sapien
tttaggacatgccttaaggtgggtg

SEQ ID NO: 112195 - DNA, 25 bp, Homo sapien
ccagcatgtatgcttggatggtctg

SEQ ID NO: 112196 - DNA, 25 bp, Homo sapien
gcataaattattctactggtggaca

SEQ ID NO: 112197 - DNA, 25 bp, Homo sapien
tgagctgtaaataggaacttatatt

SEQ ID NO: 112198 - DNA, 25 bp, Homo sapien
gaattagacacttgtctatgagctg

SEQ ID NO: 112199 - DNA, 25 bp, Homo sapien
catgaattagacacttgtctatgag

SEQ ID NO: 112200 - DNA, 25 bp, Homo sapien
ttgtctatgagctgtaaataggaac

SEQ ID NO: 112201 - DNA, 25 bp, Homo sapien
cactgacaactttggccagagccgc

SEQ ID NO: 112202 - DNA, 25 bp, Homo sapien
tgagaacttcgatagcacagggccc

SEQ ID NO: 112203 - DNA, 25 bp, Homo sapien
ccagagccgcttgggcacataagaa

SEQ ID NO: 112204 - DNA, 25 bp, Homo sapien
cataagaatccatacggccaagagg

SEQ ID NO: 112205 - DNA, 25 bp, Homo sapien
gagttccggtgtgcttttatcagag

SEQ ID NO: 112206 - DNA, 25 bp, Homo sapien
gagagggttcctccacggaaatgcc

SEQ ID NO: 112207 - DNA, 25 bp, Homo sapien
gaaccgagtctgtaccaccaggact

SEQ ID NO: 112208 - DNA, 25 bp, Homo sapien
tcagggatgaccttatcagaggctt

SEQ ID NO: 112209 - DNA, 25 bp, Homo sapien
cccctccgctggcagccccaggttg

SEQ ID NO: 112210 - DNA, 25 bp, Homo sapien
cagccccctccgctggcagccccag

SEQ ID NO: 112211 - DNA, 25 bp, Homo sapien
tccgctggcagccccaggttgggct

SEQ ID NO: 112212 - DNA, 25 bp, Homo sapien
cctccgctggcagccccaggttggg

SEQ ID NO: 112213 - DNA, 25 bp, Homo sapien
cattggctatgatgcccaaaatctc

SEQ ID NO: 112214 - DNA, 25 bp, Homo sapien
tctgcattggctatgatgcccaaaa

SEQ ID NO: 112215 - DNA, 25 bp, Homo sapien
tatgggggatctgcattggctatga

SEQ ID NO: 112216 - DNA, 25 bp, Homo sapien
gggatctgcattggctatgatgccc

SEQ ID NO: 112217 - DNA, 25 bp, Homo sapien
ccctgagcacctcaatgggcagcgg

SEQ ID NO: 112218 - DNA, 25 bp, Homo sapien
ggaggtcggcgcattccctgagcac

SEQ ID NO: 112219 - DNA, 25 bp, Homo sapien
attacagacatgacatcttccctgg

SEQ ID NO: 112220 - DNA, 25 bp, Homo sapien
aacagcatccaagaaggtgggaatg

SEQ ID NO: 112221 - DNA, 25 bp, Homo sapien
ttggactgcacagaccggccgtttg

SEQ ID NO: 112222 - DNA, 25 bp, Homo sapien
ttggtggtggtatacggctgttcat

SEQ ID NO: 112223 - DNA, 25 bp, Homo sapien
ccgtttggtggtggtatacggctgt

SEQ ID NO: 112224 - DNA, 25 bp, Homo sapien
ggactgcacagaccggccgtttggt

SEQ ID NO: 112225 - DNA, 25 bp, Homo sapien
ctgtcgatatcctgatatgtctaga

SEQ ID NO: 112226 - DNA, 25 bp, Homo sapien
gatatcctgatatgtctagaagggt

SEQ ID NO: 112227 - DNA, 25 bp, Homo sapien
cgagggaaagaccgaaagagcttct

SEQ ID NO: 112228 - DNA, 25 bp, Homo sapien
gtcgatatcctgatatgtctagaag

SEQ ID NO: 112229 - DNA, 25 bp, Homo sapien
gaggagtctggaaccttttctattc

SEQ ID NO: 112230 - DNA, 25 bp, Homo sapien
ggagtctggaaccttttctattcac

SEQ ID NO: 112231 - DNA, 25 bp, Homo sapien
gtgttgcaagaggagtctggaacct

SEQ ID NO: 112232 - DNA, 25 bp, Homo sapien
tggtgttgcaagaggagtctggaac

SEQ ID NO: 112233 - DNA, 25 bp, Homo sapien
gcagcaaagagccgccccatcttca

SEQ ID NO: 112234 - DNA, 25 bp, Homo sapien
ctcttggaacttgtctcccaagggc

SEQ ID NO: 112235 - DNA, 25 bp, Homo sapien
gagcagcaaagagccgccccatctt

SEQ ID NO: 112236 - DNA, 25 bp, Homo sapien
aggagcagcaaagagccgccccatc

SEQ ID NO: 112237 - DNA, 25 bp, Homo sapien
gaggtcaaggttcatgtcccctgct

SEQ ID NO: 112238 - DNA, 25 bp, Homo sapien
tccacctccagaaggctctcggatg

SEQ ID NO: 112239 - DNA, 25 bp, Homo sapien
tgggttagcccaatccaagtgttac

SEQ ID NO: 112240 - DNA, 25 bp, Homo sapien
ggatgtggaccaatgacaacacagg

SEQ ID NO: 112241 - DNA, 25 bp, Homo sapien
tggaggaaggacaatctgactacgt

SEQ ID NO: 112242 - DNA, 25 bp, Homo sapien
gaattctgggcttgtgcctttctac

SEQ ID NO: 112243 - DNA, 25 bp, Homo sapien
tctagattctggtcagaagctcatc

SEQ ID NO: 112244 - DNA, 25 bp, Homo sapien
gtggccaaggaaggagttctagatt

SEQ ID NO: 112245 - DNA, 25 bp, Homo sapien
ccagcagtgcagatctcagaaaatg

SEQ ID NO: 112246 - DNA, 25 bp, Homo sapien
cagcagtgcagatctcagaaaatgt

SEQ ID NO: 112247 - DNA, 25 bp, Homo sapien
agtttaaccagttgagggtgatagg

SEQ ID NO: 112248 - DNA, 25 bp, Homo sapien
ggaagcagggctgacgtagtttaac

SEQ ID NO: 112249 - DNA, 25 bp, Homo sapien
cacaggggaggtttgtaccaagcct

SEQ ID NO: 112250 - DNA, 25 bp, Homo sapien
gctgacgtagtttaaccagttgagg

SEQ ID NO: 112251 - DNA, 25 bp, Homo sapien
tcattcacggatgttgaagtcaaaa

SEQ ID NO: 112252 - DNA, 25 bp, Homo sapien
attcacggatgttgaagtcaaaatg

SEQ ID NO: 112253 - DNA, 25 bp, Homo sapien
ggatgttgaagtcaaaatgttttac

SEQ ID NO: 112254 - DNA, 25 bp, Homo sapien
cacggatgttgaagtcaaaatgttt

SEQ ID NO: 112255 - DNA, 25 bp, Homo sapien
cctccctgcaaagtcggctgcataa

SEQ ID NO: 112256 - DNA, 25 bp, Homo sapien
caaagtcggctgcataagggccagg

SEQ ID NO: 112257 - DNA, 25 bp, Homo sapien
gagcccttagcatcacgtgcagatg

SEQ ID NO: 112258 - DNA, 25 bp, Homo sapien
ggtccatgcttctcctgggtccggg

SEQ ID NO: 112259 - DNA, 25 bp, Homo sapien
cagccgtcgggagggagttggattg

SEQ ID NO: 112260 - DNA, 25 bp, Homo sapien
tggttggagctgacgaatccactgg

SEQ ID NO: 112261 - DNA, 25 bp, Homo sapien
acgaatccactggtgcccaagaggc

SEQ ID NO: 112262 - DNA, 25 bp, Homo sapien
ggtagctgtggtgttgcgctggttg

SEQ ID NO: 112263 - DNA, 25 bp, Homo sapien
actggcgcgggttccgtctgcccat

SEQ ID NO: 112264 - DNA, 25 bp, Homo sapien
gcagccttgggccttgagcttggcc

SEQ ID NO: 112265 - DNA, 25 bp, Homo sapien
tgcagccttgggccttgagcttggc

SEQ ID NO: 112266 - DNA, 25 bp, Homo sapien
ggtaccctgggtagtgaatcctgcc

SEQ ID NO: 112267 - DNA, 25 bp, Homo sapien
aatccctacccacagagcttcgaga

SEQ ID NO: 112268 - DNA, 25 bp, Homo sapien
tcttacaatgtactccaaagcgagg

SEQ ID NO: 112269 - DNA, 25 bp, Homo sapien
cccagaacctcagacctacttgtgt

SEQ ID NO: 112270 - DNA, 25 bp, Homo sapien
gcggcttggcatgctattgctgccc

SEQ ID NO: 112271 - DNA, 25 bp, Homo sapien
tggactgagctgtgggtgcggcttg

SEQ ID NO: 112272 - DNA, 25 bp, Homo sapien
cagcgagcgggtcctctggactgag

SEQ ID NO: 112273 - DNA, 25 bp, Homo sapien
ggctgctggaacatcagcatgttct

SEQ ID NO: 112274 - DNA, 25 bp, Homo sapien
gccctcttgtgctatctctggttta

SEQ ID NO: 112275 - DNA, 25 bp, Homo sapien
tggcaaggcacagtttaaaaaagga

SEQ ID NO: 112276 - DNA, 25 bp, Homo sapien
gccaagccgccgctattcatgctgg

SEQ ID NO: 112277 - DNA, 25 bp, Homo sapien
ccatccgattgcaaccaactctggg

SEQ ID NO: 112278 - DNA, 25 bp, Homo sapien
gcactgctttgtgtggaaaggccca

SEQ ID NO: 112279 - DNA, 25 bp, Homo sapien
tgcccgtgaattgtgtagaaccagg

SEQ ID NO: 112280 - DNA, 25 bp, Homo sapien
gatgagtcctgtaaacccgagcaag

SEQ ID NO: 112281 - DNA, 25 bp, Homo sapien
tgaagacatctaacagccaggagga

SEQ ID NO: 112282 - DNA, 25 bp, Homo sapien
tagaatcccgttttgccaatgacag

SEQ ID NO: 112283 - DNA, 25 bp, Homo sapien
ggcattccaggaaaaatctatagaa

SEQ ID NO: 112284 - DNA, 25 bp, Homo sapien
catccctgagttgaccatgggaacg

SEQ ID NO: 112285 - DNA, 25 bp, Homo sapien
ccaatgacagcggaggcaactctgt

SEQ ID NO: 112286 - DNA, 25 bp, Homo sapien
acatgtgtggcacccacggtgcaat

SEQ ID NO: 112287 - DNA, 25 bp, Homo sapien
gtaaccgtccatccctgctgggtct

SEQ ID NO: 112288 - DNA, 25 bp, Homo sapien
cccacggtgcaattctgcagtgctt

SEQ ID NO: 112289 - DNA, 25 bp, Homo sapien
ttgtccttggcagtaaccgtccatc

SEQ ID NO: 112290 - DNA, 25 bp, Homo sapien
ggcccagggtcaagaagattccgga

SEQ ID NO: 112291 - DNA, 25 bp, Homo sapien
agaatgctacccatccctaatgagg

SEQ ID NO: 112292 - DNA, 25 bp, Homo sapien
cacgtatggagtagtcctgtgctca

SEQ ID NO: 112293 - DNA, 25 bp, Homo sapien
ccccaaggtctaggctgacttgaga

SEQ ID NO: 112294 - DNA, 25 bp, Homo sapien
aaaacagatccatgccatctcgccg

SEQ ID NO: 112295 - DNA, 25 bp, Homo sapien
tcgccgcacgtataagacagaaaga

SEQ ID NO: 112296 - DNA, 25 bp, Homo sapien
tgggagaagcccatatgttcacact

SEQ ID NO: 112297 - DNA, 25 bp, Homo sapien
ggctaggaaccctcagctgtatggg

SEQ ID NO: 112298 - DNA, 25 bp, Homo sapien
tcctgacccatgttccggcatcgat

SEQ ID NO: 112299 - DNA, 25 bp, Homo sapien
tgttccaggtgaccgagaagtctcc

SEQ ID NO: 112300 - DNA, 25 bp, Homo sapien
gaagacaaccgtgccaatacgtgag

SEQ ID NO: 112301 - DNA, 25 bp, Homo sapien
cggcatcgatgggtttggaagacaa

SEQ ID NO: 112302 - DNA, 25 bp, Homo sapien
ctgctggagccctcactgtcagcac

SEQ ID NO: 112303 - DNA, 25 bp, Homo sapien
actgtcagcacctccgcaggcctca

SEQ ID NO: 112304 - DNA, 25 bp, Homo sapien
tcactgtcagcacctccgcaggcct

SEQ ID NO: 112305 - DNA, 25 bp, Homo sapien
ccctcactgtcagcacctccgcagg

SEQ ID NO: 112306 - DNA, 25 bp, Homo sapien
aaatagctggtcatgtcacagtctg

SEQ ID NO: 112307 - DNA, 25 bp, Homo sapien
agctggtcatgtcacagtctgtgcc

SEQ ID NO: 112308 - DNA, 25 bp, Homo sapien
aatagctggtcatgtcacagtctgt

SEQ ID NO: 112309 - DNA, 25 bp, Homo sapien
tagctggtcatgtcacagtctgtgc

SEQ ID NO: 112310 - DNA, 25 bp, Homo sapien
cacagtccactgtgaacttgggaac

SEQ ID NO: 112311 - DNA, 25 bp, Homo sapien
acacagtccactgtgaacttgggaa

SEQ ID NO: 112312 - DNA, 25 bp, Homo sapien
gactgtcagcgctggcatggaaggg

SEQ ID NO: 112313 - DNA, 25 bp, Homo sapien
gcgctggcatggaaggggctccact

SEQ ID NO: 112314 - DNA, 25 bp, Homo sapien
agcgctggcatggaaggggctccac

SEQ ID NO: 112315 - DNA, 25 bp, Homo sapien
acttggggactgtcagcgctggcat

SEQ ID NO: 112316 - DNA, 25 bp, Homo sapien
acaaggaggagataagcagggtgcc

SEQ ID NO: 112317 - DNA, 25 bp, Homo sapien
ctgcaggcgataaagggttatgttg

SEQ ID NO: 112318 - DNA, 25 bp, Homo sapien
taaagggttatgttggtgacaagga

SEQ ID NO: 112319 - DNA, 25 bp, Homo sapien
taagcagggtgccacctggttccac

SEQ ID NO: 112320 - DNA, 25 bp, Homo sapien
cctgttgttgatgtcaggttcggtc

SEQ ID NO: 112321 - DNA, 25 bp, Homo sapien
gaggcacaacgactccagcctgttg

SEQ ID NO: 112322 - DNA, 25 bp, Homo sapien
ggcgtgttcggtcatactgaggcac

SEQ ID NO: 112323 - DNA, 25 bp, Homo sapien
atgtcaggttcggtcacgggaagct

SEQ ID NO: 112324 - DNA, 25 bp, Homo sapien
agagcagtggctcgcaaatgaggct

SEQ ID NO: 112325 - DNA, 25 bp, Homo sapien
gctcgcaaatgaggctctttataga

SEQ ID NO: 112326 - DNA, 25 bp, Homo sapien
cagtggctcgcaaatgaggctcttt

SEQ ID NO: 112327 - DNA, 25 bp, Homo sapien
gtggctcgcaaatgaggctctttat

SEQ ID NO: 112328 - DNA, 25 bp, Homo sapien
gaggtaaagatgagctggcagcacc

SEQ ID NO: 112329 - DNA, 25 bp, Homo sapien
cctctatgaggtaaagatgagctgg

SEQ ID NO: 112330 - DNA, 25 bp, Homo sapien
cctcctgccagaggtaccagggatg

SEQ ID NO: 112331 - DNA, 25 bp, Homo sapien
ccagtctcctctatgaggtaaagat

SEQ ID NO: 112332 - DNA, 25 bp, Homo sapien
tgatgataatgttggtacttagcag

SEQ ID NO: 112333 - DNA, 25 bp, Homo sapien
tccaaaatgccaattgtctgagatg

SEQ ID NO: 112334 - DNA, 25 bp, Homo sapien
tacttagcagtttgatatgagcctc

SEQ ID NO: 112335 - DNA, 25 bp, Homo sapien
tttggtattcttgctgctaatgatg

SEQ ID NO: 112336 - DNA, 25 bp, Homo sapien
actcattagcatactgtctccagca

SEQ ID NO: 112337 - DNA, 25 bp, Homo sapien
ctgcccgttcctcttcccataaaag

SEQ ID NO: 112338 - DNA, 25 bp, Homo sapien
ctagaggccaacagatgtgagcctc

SEQ ID NO: 112339 - DNA, 25 bp, Homo sapien
cttcccataaaaggacttgactcat

SEQ ID NO: 112340 - DNA, 25 bp, Homo sapien
acgttttggagaagtggatgaccca

SEQ ID NO: 112341 - DNA, 25 bp, Homo sapien
tacgttttggagaagtggatgaccc

SEQ ID NO: 112342 - DNA, 25 bp, Homo sapien
gttttggagaagtggatgacccagg

SEQ ID NO: 112343 - DNA, 25 bp, Homo sapien
ctacgttttggagaagtggatgacc

SEQ ID NO: 112344 - DNA, 25 bp, Homo sapien
ctagatggtggaggtccggtcaacc

SEQ ID NO: 112345 - DNA, 25 bp, Homo sapien
tagatggtggaggtccggtcaaccc

SEQ ID NO: 112346 - DNA, 25 bp, Homo sapien
ctgaagatggcggacactggacccg

SEQ ID NO: 112347 - DNA, 25 bp, Homo sapien
tggacccgcagcagtcgatttcacg

SEQ ID NO: 112348 - DNA, 25 bp, Homo sapien
gcgcggtcactctcgtcttcagctt

SEQ ID NO: 112349 - DNA, 25 bp, Homo sapien
ggaggattctgtgcaaccctgaaga

SEQ ID NO: 112350 - DNA, 25 bp, Homo sapien
tcttgctttgggtgcacgtgcccgc

SEQ ID NO: 112351 - DNA, 25 bp, Homo sapien
ggcctcagggacatccaatcaggat

SEQ ID NO: 112352 - DNA, 25 bp, Homo sapien
acgtgcccgcgatatccttctgtgg

SEQ ID NO: 112353 - DNA, 25 bp, Homo sapien
tttacgaggatgacctacgctctca

SEQ ID NO: 112354 - DNA, 25 bp, Homo sapien
aaagacggacagctcaggcctacat

SEQ ID NO: 112355 - DNA, 25 bp, Homo sapien
gtgaaagacggacagctcaggccta

SEQ ID NO: 112356 - DNA, 25 bp, Homo sapien
gacagctcaggcctacatgactgca

SEQ ID NO: 112357 - DNA, 25 bp, Homo sapien
ctaacggtgaaagacggacagctca

SEQ ID NO: 112358 - DNA, 25 bp, Homo sapien
ttcaagtccacccatacgctcctcc

SEQ ID NO: 112359 - DNA, 25 bp, Homo sapien
gctgtgctcattccagccacgtcca

SEQ ID NO: 112360 - DNA, 25 bp, Homo sapien
catgtccttcaagtccacccatacg

SEQ ID NO: 112361 - DNA, 25 bp, Homo sapien
gtgctcattccagccacgtccatgt

SEQ ID NO: 112362 - DNA, 25 bp, Homo sapien
ccataactgatcacatgatgtcctc

SEQ ID NO: 112363 - DNA, 25 bp, Homo sapien
ctgcgagcaaacccataactgatca

SEQ ID NO: 112364 - DNA, 25 bp, Homo sapien
tgcgagcaaacccataactgatcac

SEQ ID NO: 112365 - DNA, 25 bp, Homo sapien
aactgatcacatgatgtcctcatcc

SEQ ID NO: 112366 - DNA, 25 bp, Homo sapien
agtgacaggataatgccccatgggt

SEQ ID NO: 112367 - DNA, 25 bp, Homo sapien
gagggaggcctctccgtgacaagca

SEQ ID NO: 112368 - DNA, 25 bp, Homo sapien
tgacaggataatgccccatgggtgg

SEQ ID NO: 112369 - DNA, 25 bp, Homo sapien
gtgtgtggagcaaggctgggagtga

SEQ ID NO: 112370 - DNA, 25 bp, Homo sapien
tgtaaaggttttgagctcattttct

SEQ ID NO: 112371 - DNA, 25 bp, Homo sapien
cctaatgtaaaggttttgagctcat

SEQ ID NO: 112372 - DNA, 25 bp, Homo sapien
taatgtaaaggttttgagctcattt

SEQ ID NO: 112373 - DNA, 25 bp, Homo sapien
ctcctccagtggaacttgtacccac

SEQ ID NO: 112374 - DNA, 25 bp, Homo sapien
gctctctggacttgctgactgaccc

SEQ ID NO: 112375 - DNA, 25 bp, Homo sapien
tgactgacccctctgtacgctgttg

SEQ ID NO: 112376 - DNA, 25 bp, Homo sapien
gtgaagtagatgcagcctccaggct

SEQ ID NO: 112377 - DNA, 25 bp, Homo sapien
cctcagcagtgacaggtgaagtaga

SEQ ID NO: 112378 - DNA, 25 bp, Homo sapien
ggcacccgactcatccatgtaacaa

SEQ ID NO: 112379 - DNA, 25 bp, Homo sapien
taattcatactgtgcggatagcgct

SEQ ID NO: 112380 - DNA, 25 bp, Homo sapien
tcaatctcccaccaagtaacgagtg

SEQ ID NO: 112381 - DNA, 25 bp, Homo sapien
tctccctgatcttgcctctggctga

SEQ ID NO: 112382 - DNA, 25 bp, Homo sapien
ctgggttgggtgcatgtttttgatc

SEQ ID NO: 112383 - DNA, 25 bp, Homo sapien
agaaaattgttcggatttcattaag

SEQ ID NO: 112384 - DNA, 25 bp, Homo sapien
attgttcggatttcattaaggcctt

SEQ ID NO: 112385 - DNA, 25 bp, Homo sapien
gggtgcatgtttttgatcttgaaag

SEQ ID NO: 112386 - DNA, 25 bp, Homo sapien
caggaaaacaggacgaaaggcatgc

SEQ ID NO: 112387 - DNA, 25 bp, Homo sapien
tacacaggatttgagagctcggtgc

SEQ ID NO: 112388 - DNA, 25 bp, Homo sapien
ttgcaccggcagtagctacaagagg

SEQ ID NO: 112389 - DNA, 25 bp, Homo sapien
tagaacttagtcacccaaggagagg

SEQ ID NO: 112390 - DNA, 25 bp, Homo sapien
agttcaggctctaacctcccaccac

SEQ ID NO: 112391 - DNA, 25 bp, Homo sapien
aagacttccagttcaggctctaacc

SEQ ID NO: 112392 - DNA, 25 bp, Homo sapien
gacttccagttcaggctctaacctc

SEQ ID NO: 112393 - DNA, 25 bp, Homo sapien
caaagacttccagttcaggctctaa

SEQ ID NO: 112394 - DNA, 25 bp, Homo sapien
tcagtccctcagacagtccggtttg

SEQ ID NO: 112395 - DNA, 25 bp, Homo sapien
tgagtctttgaaccaggagtgatcc

SEQ ID NO: 112396 - DNA, 25 bp, Homo sapien
cgagagccgctgtgcgtgaaagcac

SEQ ID NO: 112397 - DNA, 25 bp, Homo sapien
ggagtgatccacaggttgcagccca

SEQ ID NO: 112398 - DNA, 25 bp, Homo sapien
tcccaggcccctcggaattgagatg

SEQ ID NO: 112399 - DNA, 25 bp, Homo sapien
cttggagaatcctctgcagtgtgca

SEQ ID NO: 112400 - DNA, 25 bp, Homo sapien
catccagatggtttttcaggcccta

SEQ ID NO: 112401 - DNA, 25 bp, Homo sapien
gattcatggttttttgcaggtgcca

SEQ ID NO: 112402 - DNA, 25 bp, Homo sapien
aaagttggagttgaggcgattataa

SEQ ID NO: 112403 - DNA, 25 bp, Homo sapien
gagttgaggcgattataaacagcag

SEQ ID NO: 112404 - DNA, 25 bp, Homo sapien
gctaaaggtagagcattactaaagt

SEQ ID NO: 112405 - DNA, 25 bp, Homo sapien
tataagccatcatttttgctaaagg

SEQ ID NO: 112406 - DNA, 25 bp, Homo sapien
tctgagcactcaactcatgtttggc

SEQ ID NO: 112407 - DNA, 25 bp, Homo sapien
aaaacaagtgtgacttcgaggacca

SEQ ID NO: 112408 - DNA, 25 bp, Homo sapien
tacagtgatggttggcttgagtacc

SEQ ID NO: 112409 - DNA, 25 bp, Homo sapien
tagcccagtataaacattagcctgc

SEQ ID NO: 112410 - DNA, 25 bp, Homo sapien
cagtcgtaatgttagtcaccaaggg

SEQ ID NO: 112411 - DNA, 25 bp, Homo sapien
gagctgtgtccaacgttttaaccaa

SEQ ID NO: 112412 - DNA, 25 bp, Homo sapien
taatttgcctcataagcataggagc

SEQ ID NO: 112413 - DNA, 25 bp, Homo sapien
caataaaagtggtgtagtgccgaaa

SEQ ID NO: 112414 - DNA, 25 bp, Homo sapien
aatcacggaagccttgcggcctgct

SEQ ID NO: 112415 - DNA, 25 bp, Homo sapien
tagtggttgaagcaacgtaagtctg

SEQ ID NO: 112416 - DNA, 25 bp, Homo sapien
aaacaaattgctgtagcaatcacgg

SEQ ID NO: 112417 - DNA, 25 bp, Homo sapien
tgaagcaacgtaagtctgcatctgc

SEQ ID NO: 112418 - DNA, 25 bp, Homo sapien
caggcctgaggactcttctatcctt

SEQ ID NO: 112419 - DNA, 25 bp, Homo sapien
gaggactcttctatccttgtcaagg

SEQ ID NO: 112420 - DNA, 25 bp, Homo sapien
ttgtcaggcctgaggactcttctat

SEQ ID NO: 112421 - DNA, 25 bp, Homo sapien
gcctgaggactcttctatccttgtc

SEQ ID NO: 112422 - DNA, 25 bp, Homo sapien
cttttttggagtacatgtgcatgct

SEQ ID NO: 112423 - DNA, 25 bp, Homo sapien
tactgctgtcaatacttttttggag

SEQ ID NO: 112424 - DNA, 25 bp, Homo sapien
aaacaatactgctgtcaatactttt

SEQ ID NO: 112425 - DNA, 25 bp, Homo sapien
tcaatacttttttggagtacatgtg

SEQ ID NO: 112426 - DNA, 25 bp, Homo sapien
caaacctttaacttgtggaggctgc

SEQ ID NO: 112427 - DNA, 25 bp, Homo sapien
aaatacttgagggatgttacccagc

SEQ ID NO: 112428 - DNA, 25 bp, Homo sapien
tgaccaaccgtaggaaacagaatgc

SEQ ID NO: 112429 - DNA, 25 bp, Homo sapien
ggtatacctgaaaactgacattgtg

SEQ ID NO: 112430 - DNA, 25 bp, Homo sapien
gctgagaggatgagaatagctcatc

SEQ ID NO: 112431 - DNA, 25 bp, Homo sapien
gataactttatacgtgaaaacttga

SEQ ID NO: 112432 - DNA, 25 bp, Homo sapien
ctgttgtaatgaggagcaaaatgtt

SEQ ID NO: 112433 - DNA, 25 bp, Homo sapien
cgtagtgtttgtgacaaggctggct

SEQ ID NO: 112434 - DNA, 25 bp, Homo sapien
ttctacatcttgaaccactgtgcgt

SEQ ID NO: 112435 - DNA, 25 bp, Homo sapien
cattctacatcttgaaccactgtgc

SEQ ID NO: 112436 - DNA, 25 bp, Homo sapien
ttgaaccactgtgcgtgcggttccc

SEQ ID NO: 112437 - DNA, 25 bp, Homo sapien
atcttgaaccactgtgcgtgcggtt

SEQ ID NO: 112438 - DNA, 25 bp, Homo sapien
agcaatgtggatcttgactggttca

SEQ ID NO: 112439 - DNA, 25 bp, Homo sapien
agttcctattagacagagatcaggc

SEQ ID NO: 112440 - DNA, 25 bp, Homo sapien
tcctgtggagttcctattagacaga

SEQ ID NO: 112441 - DNA, 25 bp, Homo sapien
ccccagagcaatgtggatcttgact

SEQ ID NO: 112442 - DNA, 25 bp, Homo sapien
tgaactgctgtaagcttgcccgttt

SEQ ID NO: 112443 - DNA, 25 bp, Homo sapien
tgtgtgaactgctgtaagcttgccc

SEQ ID NO: 112444 - DNA, 25 bp, Homo sapien
actgctgtaagcttgcccgtttttt

SEQ ID NO: 112445 - DNA, 25 bp, Homo sapien
ctgttgtgtgaactgctgtaagctt

SEQ ID NO: 112446 - DNA, 25 bp, Homo sapien
aacaggatgctgatagtctccagca

SEQ ID NO: 112447 - DNA, 25 bp, Homo sapien
gatgctgatagtctccagcaggtcc

SEQ ID NO: 112448 - DNA, 25 bp, Homo sapien
tggcagagcccaggaaacaggatgc

SEQ ID NO: 112449 - DNA, 25 bp, Homo sapien
ggcagagcccaggaaacaggatgct

SEQ ID NO: 112450 - DNA, 25 bp, Homo sapien
gccactggagacaagtaccactagg

SEQ ID NO: 112451 - DNA, 25 bp, Homo sapien
cctggagtacactgccactggagac

SEQ ID NO: 112452 - DNA, 25 bp, Homo sapien
gaggtcctggagtacactgccactg

SEQ ID NO: 112453 - DNA, 25 bp, Homo sapien
agtaccactagggtttgatgatgct

SEQ ID NO: 112454 - DNA, 25 bp, Homo sapien
gatgagatggggcacccagagacag

SEQ ID NO: 112455 - DNA, 25 bp, Homo sapien
gggcacccagagacaggagagtcta

SEQ ID NO: 112456 - DNA, 25 bp, Homo sapien
acccagagacaggagagtctattac

SEQ ID NO: 112457 - DNA, 25 bp, Homo sapien
gcacccagagacaggagagtctatt

SEQ ID NO: 112458 - DNA, 25 bp, Homo sapien
ctaatgcgagttgtggtagggcttg

SEQ ID NO: 112459 - DNA, 25 bp, Homo sapien
aaaatgctgtccaagcaggaactca

SEQ ID NO: 112460 - DNA, 25 bp, Homo sapien
actaatgcgagttgtggtagggctt

SEQ ID NO: 112461 - DNA, 25 bp, Homo sapien
gttgcagcgtctctccatgactgtc

SEQ ID NO: 112462 - DNA, 25 bp, Homo sapien
tgatccaaattcctggcattctggg

SEQ ID NO: 112463 - DNA, 25 bp, Homo sapien
taccttccatgggagcatctgtggt

SEQ ID NO: 112464 - DNA, 25 bp, Homo sapien
agtgcctcttgtgtggattgatcca

SEQ ID NO: 112465 - DNA, 25 bp, Homo sapien
cagtgttctcatcatacataagttt

SEQ ID NO: 112466 - DNA, 25 bp, Homo sapien
aaagccttcttgatgaatggtgtca

SEQ ID NO: 112467 - DNA, 25 bp, Homo sapien
tgttctcatcatacataagtttgaa

SEQ ID NO: 112468 - DNA, 25 bp, Homo sapien
tgaaagccttcttgatgaatggtgt

SEQ ID NO: 112469 - DNA, 25 bp, Homo sapien
gccctgccatcggacactgttgtgt

SEQ ID NO: 112470 - DNA, 25 bp, Homo sapien
cactgttgtgttggagataatgctc

SEQ ID NO: 112471 - DNA, 25 bp, Homo sapien
gctctgcagatagatattgatccat

SEQ ID NO: 112472 - DNA, 25 bp, Homo sapien
tgtcccttcctcagatgatagagcc

SEQ ID NO: 112473 - DNA, 25 bp, Homo sapien
ggagaagggatcctagcatgccact

SEQ ID NO: 112474 - DNA, 25 bp, Homo sapien
gacacgtgaacatgatcctggccaa

SEQ ID NO: 112475 - DNA, 25 bp, Homo sapien
tgtcctcagggcacatagtcacaga

SEQ ID NO: 112476 - DNA, 25 bp, Homo sapien
cacaggtgccaggataatgaatgac

SEQ ID NO: 112477 - DNA, 25 bp, Homo sapien
tacacatctccagaaggatagccca

SEQ ID NO: 112478 - DNA, 25 bp, Homo sapien
tatctcttgccatcacttcgtctgg

SEQ ID NO: 112479 - DNA, 25 bp, Homo sapien
gctagtagaagtgcaattgacccca

SEQ ID NO: 112480 - DNA, 25 bp, Homo sapien
gcatggtcatgtagagatgatgcca

SEQ ID NO: 112481 - DNA, 25 bp, Homo sapien
tttttgcacatggtgatagttaagg

SEQ ID NO: 112482 - DNA, 25 bp, Homo sapien
accaaggccaatatcctgaagggta

SEQ ID NO: 112483 - DNA, 25 bp, Homo sapien
ttttgtggacttagtcatgaaatat

SEQ ID NO: 112484 - DNA, 25 bp, Homo sapien
atttgctagggtttcttctgggatt

SEQ ID NO: 112485 - DNA, 25 bp, Homo sapien
atgggattgcacaagactacaggca

SEQ ID NO: 112486 - DNA, 25 bp, Homo sapien
gatatatcctaggtattttgtgtgt

SEQ ID NO: 112487 - DNA, 25 bp, Homo sapien
tagatatatcctaggtattttgtgt

SEQ ID NO: 112488 - DNA, 25 bp, Homo sapien
gtaaatgggattgcacaagactaca

SEQ ID NO: 112489 - DNA, 25 bp, Homo sapien
actggtccgaaggccatgctgaagt

SEQ ID NO: 112490 - DNA, 25 bp, Homo sapien
ctggtccgaaggccatgctgaagtt

SEQ ID NO: 112491 - DNA, 25 bp, Homo sapien
tactggtccgaaggccatgctgaag

SEQ ID NO: 112492 - DNA, 25 bp, Homo sapien
cagtctgggcgcttgcttaagtgga

SEQ ID NO: 112493 - DNA, 25 bp, Homo sapien
ccggctaatttccacgcggagggcg

SEQ ID NO: 112494 - DNA, 25 bp, Homo sapien
tgtaggtcttacaaagcagatgctt

SEQ ID NO: 112495 - DNA, 25 bp, Homo sapien
tgcgagtaactgctgccatcaccat

SEQ ID NO: 112496 - DNA, 25 bp, Homo sapien
ttatctctacagaagcgacaaggtg

SEQ ID NO: 112497 - DNA, 25 bp, Homo sapien
tgagggcacgaaggatgccaagatt

SEQ ID NO: 112498 - DNA, 25 bp, Homo sapien
taccaagagaaccaaccggaacaga

SEQ ID NO: 112499 - DNA, 25 bp, Homo sapien
attagaggctctagaagatctcgcc

SEQ ID NO: 112500 - DNA, 25 bp, Homo sapien
tggagagcagacaacagatgaactc

SEQ ID NO: 112501 - DNA, 25 bp, Homo sapien
ctggagagcagacaacagatgaact

SEQ ID NO: 112502 - DNA, 25 bp, Homo sapien
ctgtagaaacacttaggctccacaa

SEQ ID NO: 112503 - DNA, 25 bp, Homo sapien
catagtccttgatatttgagttgga

SEQ ID NO: 112504 - DNA, 25 bp, Homo sapien
acttaggctccacaaacggaagtca

SEQ ID NO: 112505 - DNA, 25 bp, Homo sapien
tccttgatatttgagttggattctg

SEQ ID NO: 112506 - DNA, 25 bp, Homo sapien
tagtttacatattaagcttctatta

SEQ ID NO: 112507 - DNA, 25 bp, Homo sapien
ggaaaagcacagttagtacatgaaa

SEQ ID NO: 112508 - DNA, 25 bp, Homo sapien
gggaaaagcacagttagtacatgaa

SEQ ID NO: 112509 - DNA, 25 bp, Homo sapien
gtttacatattaagcttctattaga

SEQ ID NO: 112510 - DNA, 25 bp, Homo sapien
aacaaattatccagattctaatgtt

SEQ ID NO: 112511 - DNA, 25 bp, Homo sapien
gattctaatgttataaatactgctt

SEQ ID NO: 112512 - DNA, 25 bp, Homo sapien
ttccagcaggaagtttcttctgggc

SEQ ID NO: 112513 - DNA, 25 bp, Homo sapien
tcttctgggcactttctggatgtat

SEQ ID NO: 112514 - DNA, 25 bp, Homo sapien
taatattttcattattttctgccat

SEQ ID NO: 112515 - DNA, 25 bp, Homo sapien
ctaatattttcattattttctgcca

SEQ ID NO: 112516 - DNA, 25 bp, Homo sapien
taggagcccagtaatgtcaggagaa

SEQ ID NO: 112517 - DNA, 25 bp, Homo sapien
tctgatcgaggtgggaaaggacact

SEQ ID NO: 112518 - DNA, 25 bp, Homo sapien
gctgagtctcgaagtaaaaaggtac

SEQ ID NO: 112519 - DNA, 25 bp, Homo sapien
aagccctgaagagtgccgactacta

SEQ ID NO: 112520 - DNA, 25 bp, Homo sapien
agtgggcgtgggagggactgagtcg

SEQ ID NO: 112521 - DNA, 25 bp, Homo sapien
cgactcagtccctcccacgcccact

SEQ ID NO: 112522 - DNA, 25 bp, Homo sapien
catcgatgccatcataagttgtaca

SEQ ID NO: 112523 - DNA, 25 bp, Homo sapien
tctgcatatatgctgcagggaaaaa

SEQ ID NO: 112524 - DNA, 25 bp, Homo sapien
aaggaattggaagggcatcgatgcc

SEQ ID NO: 112525 - DNA, 25 bp, Homo sapien
tccgaattaagggagtggatagaag

SEQ ID NO: 112526 - DNA, 25 bp, Homo sapien
gctgttctggtgcatcaatcctgag

SEQ ID NO: 112527 - DNA, 25 bp, Homo sapien
ggtgcatcaatcctgagtactctaa

SEQ ID NO: 112528 - DNA, 25 bp, Homo sapien
tctggtgcatcaatcctgagtactc

SEQ ID NO: 112529 - DNA, 25 bp, Homo sapien
ctagcattgctgttctggtgcatca

SEQ ID NO: 112530 - DNA, 25 bp, Homo sapien
ggaaggaagctctctattgcgtgga

SEQ ID NO: 112531 - DNA, 25 bp, Homo sapien
tgtacaaagggttagacagctcacc

SEQ ID NO: 112532 - DNA, 25 bp, Homo sapien
ttctcagtgatctacaaaagcgcca

SEQ ID NO: 112533 - DNA, 25 bp, Homo sapien
taagcgtgagttagatcttggccgg

SEQ ID NO: 112534 - DNA, 25 bp, Homo sapien
tacaccatggctctcaagtctgaaa

SEQ ID NO: 112535 - DNA, 25 bp, Homo sapien
agttttacacagaccatatgaaggg

SEQ ID NO: 112536 - DNA, 25 bp, Homo sapien
tccaggaagtcgagttacaagtatc

SEQ ID NO: 112537 - DNA, 25 bp, Homo sapien
ggaatagatcatacaagcctgactg

SEQ ID NO: 112538 - DNA, 25 bp, Homo sapien
ctcctcctggcgccggaacaggaag

SEQ ID NO: 112539 - DNA, 25 bp, Homo sapien
ggcgatgggtccgagggactgggcc

SEQ ID NO: 112540 - DNA, 25 bp, Homo sapien
agaagcggcgatgggtccgagggac

SEQ ID NO: 112541 - DNA, 25 bp, Homo sapien
ctagaagcggcgatgggtccgaggg

SEQ ID NO: 112542 - DNA, 25 bp, Homo sapien
aagcggcgatgggtccgagggactg

SEQ ID NO: 112543 - DNA, 25 bp, Homo sapien
ggcaatatccgagaccgcagtaggg

SEQ ID NO: 112544 - DNA, 25 bp, Homo sapien
cggcaatatccgagaccgcagtagg

SEQ ID NO: 112545 - DNA, 25 bp, Homo sapien
ccggcaatatccgagaccgcagtag

SEQ ID NO: 112546 - DNA, 25 bp, Homo sapien
accacggcccgagcactggacgtga

SEQ ID NO: 112547 - DNA, 25 bp, Homo sapien
tagaaacgcttagtcctggtgccag

SEQ ID NO: 112548 - DNA, 25 bp, Homo sapien
acgactcccactagtaccgaagcag

SEQ ID NO: 112549 - DNA, 25 bp, Homo sapien
gacgtgactcgatgcacctcggtca

SEQ ID NO: 112550 - DNA, 25 bp, Homo sapien
gtgcttgggtggaaaacaaatacca

SEQ ID NO: 112551 - DNA, 25 bp, Homo sapien
taaaaaccaggccagtaatgttgcg

SEQ ID NO: 112552 - DNA, 25 bp, Homo sapien
caaatctcttagtcgctgcctggaa

SEQ ID NO: 112553 - DNA, 25 bp, Homo sapien
ggaagatcggaatcgtacccacatc

SEQ ID NO: 112554 - DNA, 25 bp, Homo sapien
ggaaactctcatggctgttagggta

SEQ ID NO: 112555 - DNA, 25 bp, Homo sapien
gttgaactccatgaattaccagtgg

SEQ ID NO: 112556 - DNA, 25 bp, Homo sapien
taaacagtatgggactacacagtga

SEQ ID NO: 112557 - DNA, 25 bp, Homo sapien
cacagtgatgaaacccggacatgaa

SEQ ID NO: 112558 - DNA, 25 bp, Homo sapien
gcaagagcatgttctgagtagcaaa

SEQ ID NO: 112559 - DNA, 25 bp, Homo sapien
tgtatacgctatcagcccatcttgg

SEQ ID NO: 112560 - DNA, 25 bp, Homo sapien
gcttcggcagtgtatacagacttca

SEQ ID NO: 112561 - DNA, 25 bp, Homo sapien
aaacatggtatacttaggcttcggc

SEQ ID NO: 112562 - DNA, 25 bp, Homo sapien
ctctcctgggaatgctaatgtttaa

SEQ ID NO: 112563 - DNA, 25 bp, Homo sapien
gaacataaaggacaagaacccaagc

SEQ ID NO: 112564 - DNA, 25 bp, Homo sapien
cctagggtaggaagcatcattactg

SEQ ID NO: 112565 - DNA, 25 bp, Homo sapien
cagtattaacatagagccacctttg

SEQ ID NO: 112566 - DNA, 25 bp, Homo sapien
caaggtatagtatagtccctcggta

SEQ ID NO: 112567 - DNA, 25 bp, Homo sapien
tgtgttagcattctggttggaaatg

SEQ ID NO: 112568 - DNA, 25 bp, Homo sapien
aaatcatctcgttcaagaacaaggt

SEQ ID NO: 112569 - DNA, 25 bp, Homo sapien
tatgcacatcttcccgtataaatca

SEQ ID NO: 112570 - DNA, 25 bp, Homo sapien
ggaacacaaaacagatacgtctttc

SEQ ID NO: 112571 - DNA, 25 bp, Homo sapien
tggaacacaaaacagatacgtcttt

SEQ ID NO: 112572 - DNA, 25 bp, Homo sapien
ctggaacacaaaacagatacgtctt

SEQ ID NO: 112573 - DNA, 25 bp, Homo sapien
ggccaccaggcattggtggagcacc

SEQ ID NO: 112574 - DNA, 25 bp, Homo sapien
actgaagatggagcactcggattat

SEQ ID NO: 112575 - DNA, 25 bp, Homo sapien
ttattccaagggttggagcctggcc

SEQ ID NO: 112576 - DNA, 25 bp, Homo sapien
cagaaggtcctgaaggcacttggaa

SEQ ID NO: 112577 - DNA, 25 bp, Homo sapien
aacattacctactcattgccttgga

SEQ ID NO: 112578 - DNA, 25 bp, Homo sapien
taatcttgagctcgagaactgcttg

SEQ ID NO: 112579 - DNA, 25 bp, Homo sapien
agagactgcttttactgaactgtac

SEQ ID NO: 112580 - DNA, 25 bp, Homo sapien
tcaagctagacaggtagagactgct

SEQ ID NO: 112581 - DNA, 25 bp, Homo sapien
catttggttatatgaccaaggcagg

SEQ ID NO: 112582 - DNA, 25 bp, Homo sapien
aactaagatgttaaccccacactgg

SEQ ID NO: 112583 - DNA, 25 bp, Homo sapien
ccatttggttatatgaccaaggcag

SEQ ID NO: 112584 - DNA, 25 bp, Homo sapien
aaggcaggctcctcaactaagatgt

SEQ ID NO: 112585 - DNA, 25 bp, Homo sapien
tgactaatctaatcagagatctggc

SEQ ID NO: 112586 - DNA, 25 bp, Homo sapien
tacactaatgcaaggaggaagtttt

SEQ ID NO: 112587 - DNA, 25 bp, Homo sapien
ggaaaatctttactctgcgtttgga

SEQ ID NO: 112588 - DNA, 25 bp, Homo sapien
gcgtttggatactcgtttggcttac

SEQ ID NO: 112589 - DNA, 25 bp, Homo sapien
tgcaatagaaaaaagaaaaagtcaa

SEQ ID NO: 112590 - DNA, 25 bp, Homo sapien
ctgcaatagaaaaaagaaaaagtca

SEQ ID NO: 112591 - DNA, 25 bp, Homo sapien
gccctctaatagtgaaaccagcaat

SEQ ID NO: 112592 - DNA, 25 bp, Homo sapien
gaggcagttatcttctctgagaggt

SEQ ID NO: 112593 - DNA, 25 bp, Homo sapien
gcgtcatctcttcgtccattgttaa

SEQ ID NO: 112594 - DNA, 25 bp, Homo sapien
tactacgcatccaagtacaagaggc

SEQ ID NO: 112595 - DNA, 25 bp, Homo sapien
tgccagtttaccacatcagggagga

SEQ ID NO: 112596 - DNA, 25 bp, Homo sapien
tacagggaacgctctgggcaaaaga

SEQ ID NO: 112597 - DNA, 25 bp, Homo sapien
gaccaggtttatttgtccgacagag

SEQ ID NO: 112598 - DNA, 25 bp, Homo sapien
gactttagtgctgtatgacccaatg

SEQ ID NO: 112599 - DNA, 25 bp, Homo sapien
cttgatatttaagcaacacagtcac

SEQ ID NO: 112600 - DNA, 25 bp, Homo sapien
cataaggtgccaaaaaactaccagg

SEQ ID NO: 112601 - DNA, 25 bp, Homo sapien
taaataacaaggtcaggtctactcc

SEQ ID NO: 112602 - DNA, 25 bp, Homo sapien
ggtctactccaaatctaagaatctg

SEQ ID NO: 112603 - DNA, 25 bp, Homo sapien
tgagaaccgggtgtgaatgacgacc

SEQ ID NO: 112604 - DNA, 25 bp, Homo sapien
gactcagatgttttcgacagccaga

SEQ ID NO: 112605 - DNA, 25 bp, Homo sapien
tatatttgagagtaccccaggtagc

SEQ ID NO: 112606 - DNA, 25 bp, Homo sapien
gatattcaacccaggcacagtcttg

SEQ ID NO: 112607 - DNA, 25 bp, Homo sapien
cagtatctgctgatcagtgacaggc

SEQ ID NO: 112608 - DNA, 25 bp, Homo sapien
aatgccagcgaaatctcctgtggga

SEQ ID NO: 112609 - DNA, 25 bp, Homo sapien
tctggttaccaagagtagcctagcc

SEQ ID NO: 112610 - DNA, 25 bp, Homo sapien
ccttagtgaatgcaggtcacatgca

SEQ ID NO: 112611 - DNA, 25 bp, Homo sapien
ctttaataattatacctggagtctg

SEQ ID NO: 112612 - DNA, 25 bp, Homo sapien
gaacccacagatacaagcggccgac

SEQ ID NO: 112613 - DNA, 25 bp, Homo sapien
agcggccgactgtatgtgaatgaag

SEQ ID NO: 112614 - DNA, 25 bp, Homo sapien
tacaagcggccgactgtatgtgaat

SEQ ID NO: 112615 - DNA, 25 bp, Homo sapien
tctttgtcctcaggtaacactatct

SEQ ID NO: 112616 - DNA, 25 bp, Homo sapien
ttgcatttcctagaatcttacttat

SEQ ID NO: 112617 - DNA, 25 bp, Homo sapien
ctactacctgtctctacagattagc

SEQ ID NO: 112618 - DNA, 25 bp, Homo sapien
tcattcatgttgtttagagtatcag

SEQ ID NO: 112619 - DNA, 25 bp, Homo sapien
cgagactcactggttggccaggcgt

SEQ ID NO: 112620 - DNA, 25 bp, Homo sapien
ggtaataggctcactagaacctggg

SEQ ID NO: 112621 - DNA, 25 bp, Homo sapien
tgcaccagaaggactgacgagactc

SEQ ID NO: 112622 - DNA, 25 bp, Homo sapien
tttaattcagcaatgcaccagaagg

SEQ ID NO: 112623 - DNA, 25 bp, Homo sapien
caaatagaattgacccaatagtgga

SEQ ID NO: 112624 - DNA, 25 bp, Homo sapien
tgaatgagcgatgcttattaatcca

SEQ ID NO: 112625 - DNA, 25 bp, Homo sapien
tgacttcctagtgagtaggcactca

SEQ ID NO: 112626 - DNA, 25 bp, Homo sapien
tagcagatgacaataatgaatgagc

SEQ ID NO: 112627 - DNA, 25 bp, Homo sapien
agctcacgtctttgctcaggtgcct

SEQ ID NO: 112628 - DNA, 25 bp, Homo sapien
aggaagcccatggtccagctcacgt

SEQ ID NO: 112629 - DNA, 25 bp, Homo sapien
tccagctcacgtctttgctcaggtg

SEQ ID NO: 112630 - DNA, 25 bp, Homo sapien
catggtccagctcacgtctttgctc

SEQ ID NO: 112631 - DNA, 25 bp, Homo sapien
tcgtggacggcaagctgccttctgc

SEQ ID NO: 112632 - DNA, 25 bp, Homo sapien
tactcagcagttgcccagcagttgc

SEQ ID NO: 112633 - DNA, 25 bp, Homo sapien
ggttagggactgttctactcagcag

SEQ ID NO: 112634 - DNA, 25 bp, Homo sapien
cagcagttgctttaagtagacaggc

SEQ ID NO: 112635 - DNA, 25 bp, Homo sapien
cacactcatctgtagccaaagccat

SEQ ID NO: 112636 - DNA, 25 bp, Homo sapien
ttgacaccgtgtccctcctgctctc

SEQ ID NO: 112637 - DNA, 25 bp, Homo sapien
tgctctccagcacactcatctgtag

SEQ ID NO: 112638 - DNA, 25 bp, Homo sapien
cttgacaccgtgtccctcctgctct

SEQ ID NO: 112639 - DNA, 25 bp, Homo sapien
cacagtaatgctgctggcttgccag

SEQ ID NO: 112640 - DNA, 25 bp, Homo sapien
tgaagctgcgtatcaaggctttcat

SEQ ID NO: 112641 - DNA, 25 bp, Homo sapien
cagttgttgaagctgcgtatcaagg

SEQ ID NO: 112642 - DNA, 25 bp, Homo sapien
tctgggatgaaagacaacagcacag

SEQ ID NO: 112643 - DNA, 25 bp, Homo sapien
ttgccctagagggataatgcaaggg

SEQ ID NO: 112644 - DNA, 25 bp, Homo sapien
gggtgctgtagtcacattcgcaatg

SEQ ID NO: 112645 - DNA, 25 bp, Homo sapien
tccgggagcacatgggacgtttgga

SEQ ID NO: 112646 - DNA, 25 bp, Homo sapien
gccatgtgctttaacccagtaggag

SEQ ID NO: 112647 - DNA, 25 bp, Homo sapien
agctcagatttgcccggatccacca

SEQ ID NO: 112648 - DNA, 25 bp, Homo sapien
tttgcccggatccaccatgttctgg

SEQ ID NO: 112649 - DNA, 25 bp, Homo sapien
acctgtggcattctccaggactgtc

SEQ ID NO: 112650 - DNA, 25 bp, Homo sapien
ctgtggcattctccaggactgtcat

SEQ ID NO: 112651 - DNA, 25 bp, Homo sapien
cactgattcccacactgctggctta

SEQ ID NO: 112652 - DNA, 25 bp, Homo sapien
actgattcccacactgctggcttac

SEQ ID NO: 112653 - DNA, 25 bp, Homo sapien
ccactgattcccacactgctggctt

SEQ ID NO: 112654 - DNA, 25 bp, Homo sapien
gaaagcttgagtttgggcccctgac

SEQ ID NO: 112655 - DNA, 25 bp, Homo sapien
tgataaaggaagagtagagcaagcc

SEQ ID NO: 112656 - DNA, 25 bp, Homo sapien
ggcccctgacggattgtgagtcagt

SEQ ID NO: 112657 - DNA, 25 bp, Homo sapien
aagccggtctgcagagatgagttga

SEQ ID NO: 112658 - DNA, 25 bp, Homo sapien
tgcagcaagaatcagaaggaattcc

SEQ ID NO: 112659 - DNA, 25 bp, Homo sapien
agcaagaatcagaaggaattcctaa

SEQ ID NO: 112660 - DNA, 25 bp, Homo sapien
ctgcagcaagaatcagaaggaattc

SEQ ID NO: 112661 - DNA, 25 bp, Homo sapien
gcagcaagaatcagaaggaattcct

SEQ ID NO: 112662 - DNA, 25 bp, Homo sapien
caggccaaagaatccttgcaggttg

SEQ ID NO: 112663 - DNA, 25 bp, Homo sapien
atccttgcaggttggaacaaggatc

SEQ ID NO: 112664 - DNA, 25 bp, Homo sapien
caccaggccaaagaatccttgcagg

SEQ ID NO: 112665 - DNA, 25 bp, Homo sapien
tccttgcaggttggaacaaggatct

SEQ ID NO: 112666 - DNA, 25 bp, Homo sapien
gagccccgcgccggccagacacccc

SEQ ID NO: 112667 - DNA, 25 bp, Homo sapien
cagccagtcctctccccggaccagg

SEQ ID NO: 112668 - DNA, 25 bp, Homo sapien
gccggccagacaccccgagccgccg

SEQ ID NO: 112669 - DNA, 25 bp, Homo sapien
cggtggctccgagcctcaaatactc

SEQ ID NO: 112670 - DNA, 25 bp, Homo sapien
tggctggctccggacggctgctggc

SEQ ID NO: 112671 - DNA, 25 bp, Homo sapien
cgctcgttggctggctccggacggc

SEQ ID NO: 112672 - DNA, 25 bp, Homo sapien
gctggctccggacggctgctggcga

SEQ ID NO: 112673 - DNA, 25 bp, Homo sapien
cgttggctggctccggacggctgct

SEQ ID NO: 112674 - DNA, 25 bp, Homo sapien
tctccggaccgcgccccaagcagcg

SEQ ID NO: 112675 - DNA, 25 bp, Homo sapien
cctctccggaccgcgccccaagcag

SEQ ID NO: 112676 - DNA, 25 bp, Homo sapien
accgcgccccaagcagcgcccgggc

SEQ ID NO: 112677 - DNA, 25 bp, Homo sapien
cggaccgcgccccaagcagcgcccg

SEQ ID NO: 112678 - DNA, 25 bp, Homo sapien
tcgataatcaaaggcgactgccccg

SEQ ID NO: 112679 - DNA, 25 bp, Homo sapien
tgggtctcgtaaggtgctgccaacc

SEQ ID NO: 112680 - DNA, 25 bp, Homo sapien
aacgccagcgccctcgataatcaaa

SEQ ID NO: 112681 - DNA, 25 bp, Homo sapien
aggctccgcagaaggtggcccgtgc

SEQ ID NO: 112682 - DNA, 25 bp, Homo sapien
cgtctggtttgctgagcgagcccct

SEQ ID NO: 112683 - DNA, 25 bp, Homo sapien
gctccaaccccaattagagaaactg

SEQ ID NO: 112684 - DNA, 25 bp, Homo sapien
tcgcagcgggacctggtgggactgg

SEQ ID NO: 112685 - DNA, 25 bp, Homo sapien
agagaaactggagcggccgtctggt

SEQ ID NO: 112686 - DNA, 25 bp, Homo sapien
ccgggaggcgccctatgcagtcctg

SEQ ID NO: 112687 - DNA, 25 bp, Homo sapien
tcattcgcgctccacagcgagatct

SEQ ID NO: 112688 - DNA, 25 bp, Homo sapien
gcaagcaccattttctgtgggatca

SEQ ID NO: 112689 - DNA, 25 bp, Homo sapien
tcccggtggaagaactcattcgcgc

SEQ ID NO: 112690 - DNA, 25 bp, Homo sapien
gattcggaaaagcttagagtttgca

SEQ ID NO: 112691 - DNA, 25 bp, Homo sapien
cagtctttgcaaagccgggtcatgc

SEQ ID NO: 112692 - DNA, 25 bp, Homo sapien
agtctttgcaaagccgggtcatgcc

SEQ ID NO: 112693 - DNA, 25 bp, Homo sapien
gggcatttgattcggaaaagcttag

SEQ ID NO: 112694 - DNA, 25 bp, Homo sapien
ttggaagctgacgaaagctttttct

SEQ ID NO: 112695 - DNA, 25 bp, Homo sapien
tcattgcgcagcaacccaattccca

SEQ ID NO: 112696 - DNA, 25 bp, Homo sapien
cccaagtagttaattgtatcagtct

SEQ ID NO: 112697 - DNA, 25 bp, Homo sapien
aatcctagagacagcctgagtcact

SEQ ID NO: 112698 - DNA, 25 bp, Homo sapien
tttataaacttgaggtaggccaggc

SEQ ID NO: 112699 - DNA, 25 bp, Homo sapien
cacacaatttcctagtatgaaatgt

SEQ ID NO: 112700 - DNA, 25 bp, Homo sapien
ttataaacttgaggtaggccaggcg

SEQ ID NO: 112701 - DNA, 25 bp, Homo sapien
cttttatggaaacacacaatttcct

SEQ ID NO: 112702 - DNA, 25 bp, Homo sapien
gggtcaatccatcaggcggtactcg

SEQ ID NO: 112703 - DNA, 25 bp, Homo sapien
taaagaccgcttaacagagcgagac

SEQ ID NO: 112704 - DNA, 25 bp, Homo sapien
ccccagaatctggactaagtgctga

SEQ ID NO: 112705 - DNA, 25 bp, Homo sapien
tacgtaacttagtgaggcatcctcc

SEQ ID NO: 112706 - DNA, 25 bp, Homo sapien
tgtctgctcataaaggtccctgacc

SEQ ID NO: 112707 - DNA, 25 bp, Homo sapien
tagatatgtgaaccccaccctggtg

SEQ ID NO: 112708 - DNA, 25 bp, Homo sapien
cctttaacaaagagtagctatccgc

SEQ ID NO: 112709 - DNA, 25 bp, Homo sapien
gctgcactatgctattctaggccca

SEQ ID NO: 112710 - DNA, 25 bp, Homo sapien
gtttcaacaccacctcggagggcag

SEQ ID NO: 112711 - DNA, 25 bp, Homo sapien
ggaatgcatcccctgaaaataaggg

SEQ ID NO: 112712 - DNA, 25 bp, Homo sapien
catggtggcccaaagtcatctgtca

SEQ ID NO: 112713 - DNA, 25 bp, Homo sapien
taaccatggtttgaagcatccacag

SEQ ID NO: 112714 - DNA, 25 bp, Homo sapien
gaaaccgtataagttgctactgcag

SEQ ID NO: 112715 - DNA, 25 bp, Homo sapien
ttttccaacctagggaactgctggc

SEQ ID NO: 112716 - DNA, 25 bp, Homo sapien
aaaggctgccacactaccgtataag

SEQ ID NO: 112717 - DNA, 25 bp, Homo sapien
ttggatgccatacgaaacaatcttg

SEQ ID NO: 112718 - DNA, 25 bp, Homo sapien
gagcatttctgtagagcatggcctc

SEQ ID NO: 112719 - DNA, 25 bp, Homo sapien
gggatgctcatcctttactatactg

SEQ ID NO: 112720 - DNA, 25 bp, Homo sapien
caggcatgcaaaacgtttgggattt

SEQ ID NO: 112721 - DNA, 25 bp, Homo sapien
tatcatagtcagacattacctttga

SEQ ID NO: 112722 - DNA, 25 bp, Homo sapien
caaataaatgagaagagggataccc

SEQ ID NO: 112723 - DNA, 25 bp, Homo sapien
aaggtgctgttggagctaagcctca

SEQ ID NO: 112724 - DNA, 25 bp, Homo sapien
gatgctaccaaagagggtttgccta

SEQ ID NO: 112725 - DNA, 25 bp, Homo sapien
gaagggcctacagtgcagcaaggca

SEQ ID NO: 112726 - DNA, 25 bp, Homo sapien
tactgagacaggaaagacaatgacc

SEQ ID NO: 112727 - DNA, 25 bp, Homo sapien
tagcctgtgctctgaatcttaccca

SEQ ID NO: 112728 - DNA, 25 bp, Homo sapien
cctaagtcagtagtgtggcgccaca

SEQ ID NO: 112729 - DNA, 25 bp, Homo sapien
gatgctatccagctagattgccaaa

SEQ ID NO: 112730 - DNA, 25 bp, Homo sapien
ccaaatctgctgctggaaaaacaag

SEQ ID NO: 112731 - DNA, 25 bp, Homo sapien
cctcattggacaaatgagtccaggg

SEQ ID NO: 112732 - DNA, 25 bp, Homo sapien
cctcaaccatgtggagctgatcaag

SEQ ID NO: 112733 - DNA, 25 bp, Homo sapien
aacaaggctccagcttgcaagccct

SEQ ID NO: 112734 - DNA, 25 bp, Homo sapien
agagtccactcccttccgccctggg

SEQ ID NO: 112735 - DNA, 25 bp, Homo sapien
tcagctcctgccggcagagtccact

SEQ ID NO: 112736 - DNA, 25 bp, Homo sapien
gctcctgccggcagagtccactccc

SEQ ID NO: 112737 - DNA, 25 bp, Homo sapien
gagtccactcccttccgccctgggc

SEQ ID NO: 112738 - DNA, 25 bp, Homo sapien
cacttcccgctactcagaggatttc

SEQ ID NO: 112739 - DNA, 25 bp, Homo sapien
cgcacttcccgctactcagaggatt

SEQ ID NO: 112740 - DNA, 25 bp, Homo sapien
gcacttcccgctactcagaggattt

SEQ ID NO: 112741 - DNA, 25 bp, Homo sapien
tgcctcccaacgtctcagatcaggg

SEQ ID NO: 112742 - DNA, 25 bp, Homo sapien
tcatcaccgtgagaaaaacaatcac

SEQ ID NO: 112743 - DNA, 25 bp, Homo sapien
caagtcaggagttagcgctcctcta

SEQ ID NO: 112744 - DNA, 25 bp, Homo sapien
gaatatggcaaaggcattacatgca

SEQ ID NO: 112745 - DNA, 25 bp, Homo sapien
aagcagaattttcaggaaaatagga

SEQ ID NO: 112746 - DNA, 25 bp, Homo sapien
agcagaattttcaggaaaataggaa

SEQ ID NO: 112747 - DNA, 25 bp, Homo sapien
attacgggacagaaagcattctcaa

SEQ ID NO: 112748 - DNA, 25 bp, Homo sapien
aagacatacacaattacgggacaga

SEQ ID NO: 112749 - DNA, 25 bp, Homo sapien
taggctccggtggcacttggctgtc

SEQ ID NO: 112750 - DNA, 25 bp, Homo sapien
tgcctgtccaggataagcccctggg

SEQ ID NO: 112751 - DNA, 25 bp, Homo sapien
gtttccagacccagataacgcatca

SEQ ID NO: 112752 - DNA, 25 bp, Homo sapien
cagggtaggcgcctggaggtgcctg

SEQ ID NO: 112753 - DNA, 25 bp, Homo sapien
gcaggggcgccataggggccagtgg

SEQ ID NO: 112754 - DNA, 25 bp, Homo sapien
aggggcgccataggggccagtggca

SEQ ID NO: 112755 - DNA, 25 bp, Homo sapien
cagcaggggcgccataggggccagt

SEQ ID NO: 112756 - DNA, 25 bp, Homo sapien
ccagcaggggcgccataggggccag

SEQ ID NO: 112757 - DNA, 25 bp, Homo sapien
aggcaccactcccccaggcaaaggc

SEQ ID NO: 112758 - DNA, 25 bp, Homo sapien
gcaccactcccccaggcaaaggcag

SEQ ID NO: 112759 - DNA, 25 bp, Homo sapien
caccactcccccaggcaaaggcagg

SEQ ID NO: 112760 - DNA, 25 bp, Homo sapien
ggcaccactcccccaggcaaaggca

SEQ ID NO: 112761 - DNA, 25 bp, Homo sapien
ggcttcaccgtgcccagaattgtta

SEQ ID NO: 112762 - DNA, 25 bp, Homo sapien
gggcttcaccgtgcccagaattgtt

SEQ ID NO: 112763 - DNA, 25 bp, Homo sapien
ttgggcttcaccgtgcccagaattg

SEQ ID NO: 112764 - DNA, 25 bp, Homo sapien
cattgggcttcaccgtgcccagaat

SEQ ID NO: 112765 - DNA, 25 bp, Homo sapien
aaaccaatctacaaatagagtagac

SEQ ID NO: 112766 - DNA, 25 bp, Homo sapien
tctacaaatagagtagacttgttaa

SEQ ID NO: 112767 - DNA, 25 bp, Homo sapien
caaaaaccaatctacaaatagagta

SEQ ID NO: 112768 - DNA, 25 bp, Homo sapien
ccaatctacaaatagagtagacttg

SEQ ID NO: 112769 - DNA, 25 bp, Homo sapien
ggtattcgtattttaatctgcactc

SEQ ID NO: 112770 - DNA, 25 bp, Homo sapien
tgcactctagaccaactaacaaaga

SEQ ID NO: 112771 - DNA, 25 bp, Homo sapien
ctatagagcggtaacaccagagtca

SEQ ID NO: 112772 - DNA, 25 bp, Homo sapien
ccagagtcatcagtaggtattcgta

SEQ ID NO: 112773 - DNA, 25 bp, Homo sapien
ccccatccctgagtttctcaaagtg

SEQ ID NO: 112774 - DNA, 25 bp, Homo sapien
acaagtcctctttgactaaccccat

SEQ ID NO: 112775 - DNA, 25 bp, Homo sapien
ctccctggaggttaatgcaaacaca

SEQ ID NO: 112776 - DNA, 25 bp, Homo sapien
aggttaatgcaaacacaagtcctct

SEQ ID NO: 112777 - DNA, 25 bp, Homo sapien
ctcataattaaccagaagccctagt

SEQ ID NO: 112778 - DNA, 25 bp, Homo sapien
ccagctatatagttaacagccatca

SEQ ID NO: 112779 - DNA, 25 bp, Homo sapien
tcaatacctggtaaaggcaagccag

SEQ ID NO: 112780 - DNA, 25 bp, Homo sapien
gataatggttatctctttcctgctc

SEQ ID NO: 112781 - DNA, 25 bp, Homo sapien
ctgttgttctcattgaagcgtgggt

SEQ ID NO: 112782 - DNA, 25 bp, Homo sapien
aagtggaaggcaacatcattccctc

SEQ ID NO: 112783 - DNA, 25 bp, Homo sapien
tgtattgcaaacaatgactctcctg

SEQ ID NO: 112784 - DNA, 25 bp, Homo sapien
tcattgaagcgtgggttaaagtgga

SEQ ID NO: 112785 - DNA, 25 bp, Homo sapien
tagtcaaccctaaatgctgtggatc

SEQ ID NO: 112786 - DNA, 25 bp, Homo sapien
gcaacaaagtcgcagtataactgta

SEQ ID NO: 112787 - DNA, 25 bp, Homo sapien
tgcttacaaataaaaagcgtgctgt

SEQ ID NO: 112788 - DNA, 25 bp, Homo sapien
gaaaagatatccaccaaatgtagac

SEQ ID NO: 112789 - DNA, 25 bp, Homo sapien
gccacacgtgggtggcatacatctg

SEQ ID NO: 112790 - DNA, 25 bp, Homo sapien
aaaatgaaatactactggccaggca

SEQ ID NO: 112791 - DNA, 25 bp, Homo sapien
aaacacgaaaataggattcctctgg

SEQ ID NO: 112792 - DNA, 25 bp, Homo sapien
agaaatctactcttcccaatagtgg

SEQ ID NO: 112793 - DNA, 25 bp, Homo sapien
gaggctaaagatttgcctgcataaa

SEQ ID NO: 112794 - DNA, 25 bp, Homo sapien
ggaggctaaagatttgcctgcataa

SEQ ID NO: 112795 - DNA, 25 bp, Homo sapien
aggctaaagatttgcctgcataaaa

SEQ ID NO: 112796 - DNA, 25 bp, Homo sapien
aaaatgccaagttatgctgggcggg

SEQ ID NO: 112797 - DNA, 25 bp, Homo sapien
tccttatcatttgtgggaccagtta

SEQ ID NO: 112798 - DNA, 25 bp, Homo sapien
taatttcaaaccagtctggcctgag

SEQ ID NO: 112799 - DNA, 25 bp, Homo sapien
gcatatgtcagctggatttaggcat

SEQ ID NO: 112800 - DNA, 25 bp, Homo sapien
agtggtcaggttcaaccagtacttg

SEQ ID NO: 112801 - DNA, 25 bp, Homo sapien
tgaagtggtcaggttcaaccagtac

SEQ ID NO: 112802 - DNA, 25 bp, Homo sapien
cttgaagtggtcaggttcaaccagt

SEQ ID NO: 112803 - DNA, 25 bp, Homo sapien
ggtcaggttcaaccagtacttgtat

SEQ ID NO: 112804 - DNA, 25 bp, Homo sapien
caacaagtgagcatcattcactgca

SEQ ID NO: 112805 - DNA, 25 bp, Homo sapien
tgaggtctatgtcaccagaaattcc

SEQ ID NO: 112806 - DNA, 25 bp, Homo sapien
tttaacccgatgattgtactgcaac

SEQ ID NO: 112807 - DNA, 25 bp, Homo sapien
tatatgaagcactggtgaggtctat

SEQ ID NO: 112808 - DNA, 25 bp, Homo sapien
catgaaacctttacacatgtaaggt

SEQ ID NO: 112809 - DNA, 25 bp, Homo sapien
agagggatattgatgaatgtaaaaa

SEQ ID NO: 112810 - DNA, 25 bp, Homo sapien
cagtgaacatgaaacctttacacat

SEQ ID NO: 112811 - DNA, 25 bp, Homo sapien
ttcactcacagtgaacatgaaacct

SEQ ID NO: 112812 - DNA, 25 bp, Homo sapien
cagctttgggtattacatattccag

SEQ ID NO: 112813 - DNA, 25 bp, Homo sapien
tagatgagcttttcggattccgaag

SEQ ID NO: 112814 - DNA, 25 bp, Homo sapien
tgacatgctgcggtttcaaacagtt

SEQ ID NO: 112815 - DNA, 25 bp, Homo sapien
tagagatgcgcattaaatccttacc

SEQ ID NO: 112816 - DNA, 25 bp, Homo sapien
acaatcgctgttatcctgttttttc

SEQ ID NO: 112817 - DNA, 25 bp, Homo sapien
gggtccctgacttcctgcaacatgt

SEQ ID NO: 112818 - DNA, 25 bp, Homo sapien
ccctgacttcctgcaacatgtatat

SEQ ID NO: 112819 - DNA, 25 bp, Homo sapien
gtccctgacttcctgcaacatgtat

SEQ ID NO: 112820 - DNA, 25 bp, Homo sapien
tctgttttccttaagcattggccag

SEQ ID NO: 112821 - DNA, 25 bp, Homo sapien
ttccttaagcattggccagcttgag

SEQ ID NO: 112822 - DNA, 25 bp, Homo sapien
cttaagcattggccagcttgagaag

SEQ ID NO: 112823 - DNA, 25 bp, Homo sapien
taagcattggccagcttgagaagta

SEQ ID NO: 112824 - DNA, 25 bp, Homo sapien
actaaaattgctcataggaaatcac

SEQ ID NO: 112825 - DNA, 25 bp, Homo sapien
tgctcataggaaatcactgtctcag

SEQ ID NO: 112826 - DNA, 25 bp, Homo sapien
gtcgacacaggaaggatataagtac

SEQ ID NO: 112827 - DNA, 25 bp, Homo sapien
tcttcactggtcaagcaagttccta

SEQ ID NO: 112828 - DNA, 25 bp, Homo sapien
tagctccgacattaaattcccgtag

SEQ ID NO: 112829 - DNA, 25 bp, Homo sapien
tgttcttcactagctccgacattaa

SEQ ID NO: 112830 - DNA, 25 bp, Homo sapien
ttcccgtagctcttcccaggtccca

SEQ ID NO: 112831 - DNA, 25 bp, Homo sapien
gaaactgttcttcactagctccgac

SEQ ID NO: 112832 - DNA, 25 bp, Homo sapien
tggttaaagcccctccaatcagcgg

SEQ ID NO: 112833 - DNA, 25 bp, Homo sapien
caagtttgaatttcgtggaggctcg

SEQ ID NO: 112834 - DNA, 25 bp, Homo sapien
aatatcgcacggagcaaaccaatcg

SEQ ID NO: 112835 - DNA, 25 bp, Homo sapien
caatcgcaagcctcgttgagtggaa

SEQ ID NO: 112836 - DNA, 25 bp, Homo sapien
gatttggaccatccctagccagagg

SEQ ID NO: 112837 - DNA, 25 bp, Homo sapien
taagtgacctagagtgacaccagct

SEQ ID NO: 112838 - DNA, 25 bp, Homo sapien
cagtgaactagcatggtaagtgacc

SEQ ID NO: 112839 - DNA, 25 bp, Homo sapien
cagcacccacgcatggagggaggat

SEQ ID NO: 112840 - DNA, 25 bp, Homo sapien
tatgtcaaagtgacccatatggctc

SEQ ID NO: 112841 - DNA, 25 bp, Homo sapien
ttttggtaccaagtctcagatatcc

SEQ ID NO: 112842 - DNA, 25 bp, Homo sapien
tcagatctttcaagtaggagtgaga

SEQ ID NO: 112843 - DNA, 25 bp, Homo sapien
tgaaccatccacgtaatttaaatgt

SEQ ID NO: 112844 - DNA, 25 bp, Homo sapien
gagagagtttcatagtaggcatact

SEQ ID NO: 112845 - DNA, 25 bp, Homo sapien
gagtttcatagtaggcatactttgg

SEQ ID NO: 112846 - DNA, 25 bp, Homo sapien
cagatgggaatctgcatagcttgat

SEQ ID NO: 112847 - DNA, 25 bp, Homo sapien
tagcttgatttggtgcctccactgc

SEQ ID NO: 112848 - DNA, 25 bp, Homo sapien
cacagataggtttgaatttccagaa

SEQ ID NO: 112849 - DNA, 25 bp, Homo sapien
aagaaagcctcagataagctccagg

SEQ ID NO: 112850 - DNA, 25 bp, Homo sapien
caggatcagccagatattctggtaa

SEQ ID NO: 112851 - DNA, 25 bp, Homo sapien
aacagtggaaaacaattagagtatc

SEQ ID NO: 112852 - DNA, 25 bp, Homo sapien
catgcccgcaatgaaaaattccgtc

SEQ ID NO: 112853 - DNA, 25 bp, Homo sapien
tatgcaaatagggaacccagcccca

SEQ ID NO: 112854 - DNA, 25 bp, Homo sapien
ccatcagcggatatagaagcccttg

SEQ ID NO: 112855 - DNA, 25 bp, Homo sapien
ggtggagccaaccaagaattgatgc

SEQ ID NO: 112856 - DNA, 25 bp, Homo sapien
tgaacacatgtctaatactgggccg

SEQ ID NO: 112857 - DNA, 25 bp, Homo sapien
tgggtgccaccatatggtaagcctg

SEQ ID NO: 112858 - DNA, 25 bp, Homo sapien
tactgggccgcatgatgttggtttc

SEQ ID NO: 112859 - DNA, 25 bp, Homo sapien
ggtaagcctgctgtactgcaattga

SEQ ID NO: 112860 - DNA, 25 bp, Homo sapien
tctagcacaaatgcctgcttcccaa

SEQ ID NO: 112861 - DNA, 25 bp, Homo sapien
tgagtttacccatttcacctgagag

SEQ ID NO: 112862 - DNA, 25 bp, Homo sapien
catcatcaaaatcagcggccatttc

SEQ ID NO: 112863 - DNA, 25 bp, Homo sapien
tcctgcttcagacatgagtttaccc

SEQ ID NO: 112864 - DNA, 25 bp, Homo sapien
ttacagaagtttttcatcccacatt

SEQ ID NO: 112865 - DNA, 25 bp, Homo sapien
tcatcaacctggatgttacagaagt

SEQ ID NO: 112866 - DNA, 25 bp, Homo sapien
ccttttcgtcgatgtttgggtgata

SEQ ID NO: 112867 - DNA, 25 bp, Homo sapien
tagcttcatcaacctggatgttaca

SEQ ID NO: 112868 - DNA, 25 bp, Homo sapien
ctgggggtcattcaccagtgctatg

SEQ ID NO: 112869 - DNA, 25 bp, Homo sapien
gggtcattcaccagtgctatgaggg

SEQ ID NO: 112870 - DNA, 25 bp, Homo sapien
gggggtcattcaccagtgctatgag

SEQ ID NO: 112871 - DNA, 25 bp, Homo sapien
gtcattcaccagtgctatgagggac

SEQ ID NO: 112872 - DNA, 25 bp, Homo sapien
gtccacaggtcgcttttccccatat

SEQ ID NO: 112873 - DNA, 25 bp, Homo sapien
actgccacaagcgaacgccaggcgg

SEQ ID NO: 112874 - DNA, 25 bp, Homo sapien
ctgccacaagcgaacgccaggcggt

SEQ ID NO: 112875 - DNA, 25 bp, Homo sapien
tgccacaagcgaacgccaggcggtg

SEQ ID NO: 112876 - DNA, 25 bp, Homo sapien
taactgccacaagcgaacgccaggc

SEQ ID NO: 112877 - DNA, 25 bp, Homo sapien
tgaagtagattgaagcagtgatttt

SEQ ID NO: 112878 - DNA, 25 bp, Homo sapien
gaagtagattgaagcagtgattttt

SEQ ID NO: 112879 - DNA, 25 bp, Homo sapien
caatggcctccatgtaaggtgatgt

SEQ ID NO: 112880 - DNA, 25 bp, Homo sapien
gataaattaaatcaatggagtccca

SEQ ID NO: 112881 - DNA, 25 bp, Homo sapien
tagtttagaaaagggtctcattggc

SEQ ID NO: 112882 - DNA, 25 bp, Homo sapien
tacatacagggagattaattaagtg

SEQ ID NO: 112883 - DNA, 25 bp, Homo sapien
gagagaagaatcaactggaaccagc

SEQ ID NO: 112884 - DNA, 25 bp, Homo sapien
tataacatctcaaccctgacaggag

SEQ ID NO: 112885 - DNA, 25 bp, Homo sapien
ccgggtcatgtaggaaggtaagcca

SEQ ID NO: 112886 - DNA, 25 bp, Homo sapien
gattcatacaagatgctgagccctg

SEQ ID NO: 112887 - DNA, 25 bp, Homo sapien
caggggctgcccacaagattaatga

SEQ ID NO: 112888 - DNA, 25 bp, Homo sapien
cagaagtttgatcggccttgatggc

SEQ ID NO: 112889 - DNA, 25 bp, Homo sapien
attcagaagtttgatcggcctaggg

SEQ ID NO: 112890 - DNA, 25 bp, Homo sapien
cttccacgtagctacctttctcatg

SEQ ID NO: 112891 - DNA, 25 bp, Homo sapien
ggaggggccacggatccagagtttc

SEQ ID NO: 112892 - DNA, 25 bp, Homo sapien
cgccggcccaatcgacggttggccg

SEQ ID NO: 112893 - DNA, 25 bp, Homo sapien
gcgccggcccaatcgacggttggcc

SEQ ID NO: 112894 - DNA, 25 bp, Homo sapien
tgcaccagcccgacgcagtggtggc

SEQ ID NO: 112895 - DNA, 25 bp, Homo sapien
gctgagtcggaccgagcacccagcg

SEQ ID NO: 112896 - DNA, 25 bp, Homo sapien
gggaggcctggctcactccccaccg

SEQ ID NO: 112897 - DNA, 25 bp, Homo sapien
caacgctcgccccgaaacccatttg

SEQ ID NO: 112898 - DNA, 25 bp, Homo sapien
cactgcgattccaagcgttcgtgga

SEQ ID NO: 112899 - DNA, 25 bp, Homo sapien
caaatccactgcgattccaagcgtt

SEQ ID NO: 112900 - DNA, 25 bp, Homo sapien
caagcgttcgtggaagacaacttcc

SEQ ID NO: 112901 - DNA, 25 bp, Homo sapien
cgaacaactttcgattcaaatccac

SEQ ID NO: 112902 - DNA, 25 bp, Homo sapien
ccagaatcgctaccgctcgggaaag

SEQ ID NO: 112903 - DNA, 25 bp, Homo sapien
atacagccgtgtagccggccccaga

SEQ ID NO: 112904 - DNA, 25 bp, Homo sapien
taccgctcgggaaagacacatgcaa

SEQ ID NO: 112905 - DNA, 25 bp, Homo sapien
gggaaagacacatgcaagcgtccat

SEQ ID NO: 112906 - DNA, 25 bp, Homo sapien
agcatgggtgaaaaagatcctgcca

SEQ ID NO: 112907 - DNA, 25 bp, Homo sapien
aaaaatgtttcacacgagttctggc

SEQ ID NO: 112908 - DNA, 25 bp, Homo sapien
gaaggcattcatcataccatagtag

SEQ ID NO: 112909 - DNA, 25 bp, Homo sapien
tacacaacactcacaagctggcttt

SEQ ID NO: 112910 - DNA, 25 bp, Homo sapien
gtcacagtccctatctgagtacctg

SEQ ID NO: 112911 - DNA, 25 bp, Homo sapien
acactgtattaatgctctcctggaa

SEQ ID NO: 112912 - DNA, 25 bp, Homo sapien
aatggattactgagagcctcttctg

SEQ ID NO: 112913 - DNA, 25 bp, Homo sapien
ggatatatcatctctgtgtcacagt

SEQ ID NO: 112914 - DNA, 25 bp, Homo sapien
tgttttatccttattcacctggcct

SEQ ID NO: 112915 - DNA, 25 bp, Homo sapien
tggatagaccgatagataggcaata

SEQ ID NO: 112916 - DNA, 25 bp, Homo sapien
tccgcagtccccaagaattcgtctg

SEQ ID NO: 112917 - DNA, 25 bp, Homo sapien
ggcatttttctaactcgctcaggca

SEQ ID NO: 112918 - DNA, 25 bp, Homo sapien
caggatcctgaataagccaaagtaa

SEQ ID NO: 112919 - DNA, 25 bp, Homo sapien
gactaagcccgtggtacatgccagt

SEQ ID NO: 112920 - DNA, 25 bp, Homo sapien
aaatgtaggcacgacttggatagaa

SEQ ID NO: 112921 - DNA, 25 bp, Homo sapien
taatctgttgattcagcccgctcaa

SEQ ID NO: 112922 - DNA, 25 bp, Homo sapien
aaacttctggtagcggctttctgat

SEQ ID NO: 112923 - DNA, 25 bp, Homo sapien
taaacttctggtagcggctttctga

SEQ ID NO: 112924 - DNA, 25 bp, Homo sapien
cttctggtagcggctttctgattca

SEQ ID NO: 112925 - DNA, 25 bp, Homo sapien
acttctggtagcggctttctgattc

SEQ ID NO: 112926 - DNA, 25 bp, Homo sapien
caccataacctaaaactcctgtgtt

SEQ ID NO: 112927 - DNA, 25 bp, Homo sapien
ggctaccatgcccaaagggatatgc

SEQ ID NO: 112928 - DNA, 25 bp, Homo sapien
aaaatgcacaccagactgtaaacta

SEQ ID NO: 112929 - DNA, 25 bp, Homo sapien
tacaaggttcatattatagtcatcc

SEQ ID NO: 112930 - DNA, 25 bp, Homo sapien
agatttaaagttcttataatgctgt

SEQ ID NO: 112931 - DNA, 25 bp, Homo sapien
gtttgtgccgtgagatttaaagttc

SEQ ID NO: 112932 - DNA, 25 bp, Homo sapien
cgaggggtttgtgccgtgagattta

SEQ ID NO: 112933 - DNA, 25 bp, Homo sapien
ccagacagacttcgaggggtttgtg

SEQ ID NO: 112934 - DNA, 25 bp, Homo sapien
tatagtgacgatggtagagctcttc

SEQ ID NO: 112935 - DNA, 25 bp, Homo sapien
gaataatcctgatgactgaacttga

SEQ ID NO: 112936 - DNA, 25 bp, Homo sapien
taaagctcttaaggccctccctgga

SEQ ID NO: 112937 - DNA, 25 bp, Homo sapien
gcaaaagtgtcctttgagactacct

SEQ ID NO: 112938 - DNA, 25 bp, Homo sapien
aatgctggacggcagtggttattca

SEQ ID NO: 112939 - DNA, 25 bp, Homo sapien
caccccaccttaggtaacatgctgt

SEQ ID NO: 112940 - DNA, 25 bp, Homo sapien
gccaatgctggacggcagtggttat

SEQ ID NO: 112941 - DNA, 25 bp, Homo sapien
catgctgttcctcgactcccaggag

SEQ ID NO: 112942 - DNA, 25 bp, Homo sapien
aaagtgcttattgccgacatgatgc

SEQ ID NO: 112943 - DNA, 25 bp, Homo sapien
aatgtatcaaacaggccgtacgtgg

SEQ ID NO: 112944 - DNA, 25 bp, Homo sapien
tatacctcctggctgatagcacagg

SEQ ID NO: 112945 - DNA, 25 bp, Homo sapien
caaaaggttctttcttgctagagga

SEQ ID NO: 112946 - DNA, 25 bp, Homo sapien
ttgagagaagtctcactcttgcccc

SEQ ID NO: 112947 - DNA, 25 bp, Homo sapien
cactcttgcccccaggcttgagtgc

SEQ ID NO: 112948 - DNA, 25 bp, Homo sapien
tcactcttgcccccaggcttgagtg

SEQ ID NO: 112949 - DNA, 25 bp, Homo sapien
agagaagtctcactcttgcccccag

SEQ ID NO: 112950 - DNA, 25 bp, Homo sapien
cactgtgcagaaagctacctccagt

SEQ ID NO: 112951 - DNA, 25 bp, Homo sapien
cgcactgtgcagaaagctacctcca

SEQ ID NO: 112952 - DNA, 25 bp, Homo sapien
tgtgcagaaagctacctccagtagg

SEQ ID NO: 112953 - DNA, 25 bp, Homo sapien
ctgtgcagaaagctacctccagtag

SEQ ID NO: 112954 - DNA, 25 bp, Homo sapien
tcacaaacactcagcagagggcgtg

SEQ ID NO: 112955 - DNA, 25 bp, Homo sapien
caggttggacaagcgtgtgctacac

SEQ ID NO: 112956 - DNA, 25 bp, Homo sapien
aaactggtacaaacataagggctca

SEQ ID NO: 112957 - DNA, 25 bp, Homo sapien
gatgtgaaccctagcaatctgactg

SEQ ID NO: 112958 - DNA, 25 bp, Homo sapien
ggtgccgtgcctctgctcgattttc

SEQ ID NO: 112959 - DNA, 25 bp, Homo sapien
ttgatggtagggctatagagggaac

SEQ ID NO: 112960 - DNA, 25 bp, Homo sapien
ggttttgatggtagggctatagagg

SEQ ID NO: 112961 - DNA, 25 bp, Homo sapien
gttttgatggtagggctatagaggg

SEQ ID NO: 112962 - DNA, 25 bp, Homo sapien
tttgatggtagggctatagagggaa

SEQ ID NO: 112963 - DNA, 25 bp, Homo sapien
ggtgcagaccatgctatgcagagag

SEQ ID NO: 112964 - DNA, 25 bp, Homo sapien
gggagttgtcctagctaccaaattc

SEQ ID NO: 112965 - DNA, 25 bp, Homo sapien
ggacacaaaacagagggcttcccag

SEQ ID NO: 112966 - DNA, 25 bp, Homo sapien
ttcttcttaggcagtaacatggtcc

SEQ ID NO: 112967 - DNA, 25 bp, Homo sapien
tggtacatacacatggcttcctggc

SEQ ID NO: 112968 - DNA, 25 bp, Homo sapien
ggcatgagccatcaggcccggccaa

SEQ ID NO: 112969 - DNA, 25 bp, Homo sapien
cgcctcgacctcctgaagtgtcggg

SEQ ID NO: 112970 - DNA, 25 bp, Homo sapien
attataggcatgagccatcaggccc

SEQ ID NO: 112971 - DNA, 25 bp, Homo sapien
cccgcctcgacctcctgaagtgtcg

SEQ ID NO: 112972 - DNA, 25 bp, Homo sapien
taccacacctggctaatttttgtat

SEQ ID NO: 112973 - DNA, 25 bp, Homo sapien
agctggggactacagacacgcacta

SEQ ID NO: 112974 - DNA, 25 bp, Homo sapien
tagctggggactacagacacgcact

SEQ ID NO: 112975 - DNA, 25 bp, Homo sapien
ttggtggaaatggggtttcaccatg

SEQ ID NO: 112976 - DNA, 25 bp, Homo sapien
attcaaagaggtccgcttaaagttg

SEQ ID NO: 112977 - DNA, 25 bp, Homo sapien
ttgcctccacgaaaagaattcaaag

SEQ ID NO: 112978 - DNA, 25 bp, Homo sapien
tttgcttgcctccacgaaaagaatt

SEQ ID NO: 112979 - DNA, 25 bp, Homo sapien
caaagaggtccgcttaaagttgcag

SEQ ID NO: 112980 - DNA, 25 bp, Homo sapien
tgacacaatcatagcccatcgttct

SEQ ID NO: 112981 - DNA, 25 bp, Homo sapien
tagcccatcgttctggaaacctgag

SEQ ID NO: 112982 - DNA, 25 bp, Homo sapien
gaaacctgagacattgctgtagaga

SEQ ID NO: 112983 - DNA, 25 bp, Homo sapien
gacattgctgtagagacatctcccc

SEQ ID NO: 112984 - DNA, 25 bp, Homo sapien
tcctaatgaggccaaaaattatcct

SEQ ID NO: 112985 - DNA, 25 bp, Homo sapien
aatcagtaaatcctggtttggtggt

SEQ ID NO: 112986 - DNA, 25 bp, Homo sapien
attcttcctaatgaggccaaaaatt

SEQ ID NO: 112987 - DNA, 25 bp, Homo sapien
gaggccaaaaattatcctgtctcca

SEQ ID NO: 112988 - DNA, 25 bp, Homo sapien
tataaagaattatgtcccagacttc

SEQ ID NO: 112989 - DNA, 25 bp, Homo sapien
gatggtagactaaacacatagctct

SEQ ID NO: 112990 - DNA, 25 bp, Homo sapien
gacttctggttaaggatggtagact

SEQ ID NO: 112991 - DNA, 25 bp, Homo sapien
gaattatgtcccagacttctggtta

SEQ ID NO: 112992 - DNA, 25 bp, Homo sapien
tgaaagttcaggaaaaattggccag

SEQ ID NO: 112993 - DNA, 25 bp, Homo sapien
aaatcctttcacacactatatagaa

SEQ ID NO: 112994 - DNA, 25 bp, Homo sapien
caaggtgatttaacagttgtaccct

SEQ ID NO: 112995 - DNA, 25 bp, Homo sapien
ctatatagaatgttggtcctgtgca

SEQ ID NO: 112996 - DNA, 25 bp, Homo sapien
atgtaactactttgggcaacaatgc

SEQ ID NO: 112997 - DNA, 25 bp, Homo sapien
gtctcagtaaaaggtcatatgtaac

SEQ ID NO: 112998 - DNA, 25 bp, Homo sapien
tcagtaaaaggtcatatgtaactac

SEQ ID NO: 112999 - DNA, 25 bp, Homo sapien
ggagccagggaatagaaggcatctg

SEQ ID NO: 113000 - DNA, 25 bp, Homo sapien
gctaacaatagcccactagaaagag

SEQ ID NO: 113001 - DNA, 25 bp, Homo sapien
tggaaggaatgttttaaatcgacaa

SEQ ID NO: 113002 - DNA, 25 bp, Homo sapien
gtaaacaccacaaactacaactgca

SEQ ID NO: 113003 - DNA, 25 bp, Homo sapien
tttgacttgaaaacacctgcccttc

SEQ ID NO: 113004 - DNA, 25 bp, Homo sapien
cacataagaggcacttttccataaa

SEQ ID NO: 113005 - DNA, 25 bp, Homo sapien
gaactcctttgactaaaagcacctg

SEQ ID NO: 113006 - DNA, 25 bp, Homo sapien
ccatcatttgctgggtttgagagcc

SEQ ID NO: 113007 - DNA, 25 bp, Homo sapien
ttccccatcatttgctgggtttgag

SEQ ID NO: 113008 - DNA, 25 bp, Homo sapien
ccccatcatttgctgggtttgagag

SEQ ID NO: 113009 - DNA, 25 bp, Homo sapien
ctttccccatcatttgctgggtttg

SEQ ID NO: 113010 - DNA, 25 bp, Homo sapien
tccctgctgacttccggggggtgct

SEQ ID NO: 113011 - DNA, 25 bp, Homo sapien
tggagcttccaatatggctttaggt

SEQ ID NO: 113012 - DNA, 25 bp, Homo sapien
ggaaagacacttgatgttatgtggc

SEQ ID NO: 113013 - DNA, 25 bp, Homo sapien
tggtggttcataggagttctctgcg

SEQ ID NO: 113014 - DNA, 25 bp, Homo sapien
aagtggtccttcttcttcgccctgg

SEQ ID NO: 113015 - DNA, 25 bp, Homo sapien
cctgttactacactggtgggatgca

SEQ ID NO: 113016 - DNA, 25 bp, Homo sapien
tcaatgccacatgcaaaaggctcag

SEQ ID NO: 113017 - DNA, 25 bp, Homo sapien
caacagcccagatatcaagtggtcc

SEQ ID NO: 113018 - DNA, 25 bp, Homo sapien
tgtggttcaccaacctcaagatttc

SEQ ID NO: 113019 - DNA, 25 bp, Homo sapien
cagctagctagcagagcactggctc

SEQ ID NO: 113020 - DNA, 25 bp, Homo sapien
actgcaggcacacctctggattggc

SEQ ID NO: 113021 - DNA, 25 bp, Homo sapien
ggcagaataggactcagacactgca

SEQ ID NO: 113022 - DNA, 25 bp, Homo sapien
catgtcaaggacacggactggttcg

SEQ ID NO: 113023 - DNA, 25 bp, Homo sapien
ccaacttggctaccatgtcaaggac

SEQ ID NO: 113024 - DNA, 25 bp, Homo sapien
tgccgcttcaggcactcagactcca

SEQ ID NO: 113025 - DNA, 25 bp, Homo sapien
cgacggaagctgttattccttgaga

SEQ ID NO: 113026 - DNA, 25 bp, Homo sapien
cacagatacagaccccacaggattc

SEQ ID NO: 113027 - DNA, 25 bp, Homo sapien
ttgaagggccacaatccacagatac

SEQ ID NO: 113028 - DNA, 25 bp, Homo sapien
gaacaacgatcagctcttgaagggc

SEQ ID NO: 113029 - DNA, 25 bp, Homo sapien
gtgtcaggtgcctccaagacgcctt

SEQ ID NO: 113030 - DNA, 25 bp, Homo sapien
gcagtttgcgaacccggctctaact

SEQ ID NO: 113031 - DNA, 25 bp, Homo sapien
ggctctaactctgcactgtctatgt

SEQ ID NO: 113032 - DNA, 25 bp, Homo sapien
ctatgtggaaactcactcctgctgg

SEQ ID NO: 113033 - DNA, 25 bp, Homo sapien
tgttgctgtttttcacggcagtttg

SEQ ID NO: 113034 - DNA, 25 bp, Homo sapien
tgctgaggctccaaaagctgctgga

SEQ ID NO: 113035 - DNA, 25 bp, Homo sapien
tgcaaggatcctctctatagcgtgg

SEQ ID NO: 113036 - DNA, 25 bp, Homo sapien
tagtctgacaagtgctgaccaggtg

SEQ ID NO: 113037 - DNA, 25 bp, Homo sapien
tagtaagggacacaagctctctgct

SEQ ID NO: 113038 - DNA, 25 bp, Homo sapien
gaacccagtgattgtcatgaagccc

SEQ ID NO: 113039 - DNA, 25 bp, Homo sapien
aatcctttctgagaccggtggcagc

SEQ ID NO: 113040 - DNA, 25 bp, Homo sapien
tatggattgcccgattaaagctgtg

SEQ ID NO: 113041 - DNA, 25 bp, Homo sapien
ggtggcagcacatccaataccctgg

SEQ ID NO: 113042 - DNA, 25 bp, Homo sapien
gaatccaactgtgggataccacccg

SEQ ID NO: 113043 - DNA, 25 bp, Homo sapien
gatgccactataaacaacaagacca

SEQ ID NO: 113044 - DNA, 25 bp, Homo sapien
tttagaaaatgcctgagcaatgcag

SEQ ID NO: 113045 - DNA, 25 bp, Homo sapien
gggctacgctcatttgaacggtgta

SEQ ID NO: 113046 - DNA, 25 bp, Homo sapien
taacgtgcactttcatagccccatg

SEQ ID NO: 113047 - DNA, 25 bp, Homo sapien
tcacaggatcaagcatacgaggtct

SEQ ID NO: 113048 - DNA, 25 bp, Homo sapien
tatagccgcaacactatcctagctg

SEQ ID NO: 113049 - DNA, 25 bp, Homo sapien
taaaggcgctcaggtttaacgtgca

SEQ ID NO: 113050 - DNA, 25 bp, Homo sapien
ttcaggttgtccagttaaaccatta

SEQ ID NO: 113051 - DNA, 25 bp, Homo sapien
aggttagcctttcaactatttagag

SEQ ID NO: 113052 - DNA, 25 bp, Homo sapien
tttggtatcctttgagcaggttagc

SEQ ID NO: 113053 - DNA, 25 bp, Homo sapien
ttctcaatcttgtggatcactaaaa

SEQ ID NO: 113054 - DNA, 25 bp, Homo sapien
gctttgtgtcccacatgaaaaccag

SEQ ID NO: 113055 - DNA, 25 bp, Homo sapien
cctcacgcagtcacagctttgtgtc

SEQ ID NO: 113056 - DNA, 25 bp, Homo sapien
tgctcttggtcactttaacccctca

SEQ ID NO: 113057 - DNA, 25 bp, Homo sapien
gaaaaccagatcaagagtggctgat

SEQ ID NO: 113058 - DNA, 25 bp, Homo sapien
caggaaagcaggtagtgcggcacac

SEQ ID NO: 113059 - DNA, 25 bp, Homo sapien
cttgcctagaaatgaagccctggga

SEQ ID NO: 113060 - DNA, 25 bp, Homo sapien
gcggcacactactggagacatttta

SEQ ID NO: 113061 - DNA, 25 bp, Homo sapien
taaccggcgatttctgagggaccca

SEQ ID NO: 113062 - DNA, 25 bp, Homo sapien
gtgaaccactccaggaataggagca

SEQ ID NO: 113063 - DNA, 25 bp, Homo sapien
ctcctcctctagtttccctggttct

SEQ ID NO: 113064 - DNA, 25 bp, Homo sapien
gggagaggtgaaccactccaggaat

SEQ ID NO: 113065 - DNA, 25 bp, Homo sapien
tttgcttcagatgatcaagtaaggg

SEQ ID NO: 113066 - DNA, 25 bp, Homo sapien
gcttagggtttgaacagtcctctcg

SEQ ID NO: 113067 - DNA, 25 bp, Homo sapien
tggagtcatttaagagagcctaaaa

SEQ ID NO: 113068 - DNA, 25 bp, Homo sapien
tccaaaagaggtatctcctaagcac

SEQ ID NO: 113069 - DNA, 25 bp, Homo sapien
tcctaagcacagagccaccaacgtg

SEQ ID NO: 113070 - DNA, 25 bp, Homo sapien
tgctgccacataagggactgccatc

SEQ ID NO: 113071 - DNA, 25 bp, Homo sapien
ggcatgagcccttcatacttcttaa

SEQ ID NO: 113072 - DNA, 25 bp, Homo sapien
gatctgagacttcagtaccagtatg

SEQ ID NO: 113073 - DNA, 25 bp, Homo sapien
caaccacctggaatggtgatgctac

SEQ ID NO: 113074 - DNA, 25 bp, Homo sapien
taagaactttatcaacatcttcata

SEQ ID NO: 113075 - DNA, 25 bp, Homo sapien
ttttaagaactttatcaacatcttc

SEQ ID NO: 113076 - DNA, 25 bp, Homo sapien
aagaactttatcaacatcttcatat

SEQ ID NO: 113077 - DNA, 25 bp, Homo sapien
tttaagaactttatcaacatcttca

SEQ ID NO: 113078 - DNA, 25 bp, Homo sapien
ttttgtaacgctacagctgctatgg

SEQ ID NO: 113079 - DNA, 25 bp, Homo sapien
gattaagcccacaattgagacctac

SEQ ID NO: 113080 - DNA, 25 bp, Homo sapien
tacagcatggtttacagattaagcc

SEQ ID NO: 113081 - DNA, 25 bp, Homo sapien
cattgtacctggtcatccaagagct

SEQ ID NO: 113082 - DNA, 25 bp, Homo sapien
aacaacgccctatctctttaattct

SEQ ID NO: 113083 - DNA, 25 bp, Homo sapien
agaacaacgccctatctctttaatt

SEQ ID NO: 113084 - DNA, 25 bp, Homo sapien
gaacaacgccctatctctttaattc

SEQ ID NO: 113085 - DNA, 25 bp, Homo sapien
caacgccctatctctttaattctct

SEQ ID NO: 113086 - DNA, 25 bp, Homo sapien
tcatactgcccctttatctggagca

SEQ ID NO: 113087 - DNA, 25 bp, Homo sapien
tcaggagctattgccatggtcatac

SEQ ID NO: 113088 - DNA, 25 bp, Homo sapien
ggcagcagtttaaagcatgctccca

SEQ ID NO: 113089 - DNA, 25 bp, Homo sapien
ggttctcgaacagggtgtgtgcttt

SEQ ID NO: 113090 - DNA, 25 bp, Homo sapien
aaggcctctaggatgcccacgtgga

SEQ ID NO: 113091 - DNA, 25 bp, Homo sapien
tggttttgtgcaacagacccctggg

SEQ ID NO: 113092 - DNA, 25 bp, Homo sapien
cactgctgcatcgagggtagcaaga

SEQ ID NO: 113093 - DNA, 25 bp, Homo sapien
tgcatgtgacctacaatgacctggt

SEQ ID NO: 113094 - DNA, 25 bp, Homo sapien
ggtgccagaaccatatgtaaacagc

SEQ ID NO: 113095 - DNA, 25 bp, Homo sapien
tatcaccattgggtagagtggacgg

SEQ ID NO: 113096 - DNA, 25 bp, Homo sapien
ggactagtgtccgagaatctcctca

SEQ ID NO: 113097 - DNA, 25 bp, Homo sapien
gtatcatgttgcaggaattccccat

SEQ ID NO: 113098 - DNA, 25 bp, Homo sapien
gctgagagatgcacaacagtcatgg

SEQ ID NO: 113099 - DNA, 25 bp, Homo sapien
tagtctcacgagttgtaagagtggg

SEQ ID NO: 113100 - DNA, 25 bp, Homo sapien
catccagttctggagttcgtagaga

SEQ ID NO: 113101 - DNA, 25 bp, Homo sapien
cgatcttgtaagagttgtctagcta

SEQ ID NO: 113102 - DNA, 25 bp, Homo sapien
gattggcatgatagcacctctgata

SEQ ID NO: 113103 - DNA, 25 bp, Homo sapien
taggcttttctcgttgtgggtggtc

SEQ ID NO: 113104 - DNA, 25 bp, Homo sapien
tccaagtccgaggtgctatatagct

SEQ ID NO: 113105 - DNA, 25 bp, Homo sapien
cctatgaaagagtcctaacaggcat

SEQ ID NO: 113106 - DNA, 25 bp, Homo sapien
gaaatgcagcgcagatccttacggc

SEQ ID NO: 113107 - DNA, 25 bp, Homo sapien
tcagggccctttgaagtacgagcag

SEQ ID NO: 113108 - DNA, 25 bp, Homo sapien
cagcagtgcaggtgggatgatctcc

SEQ ID NO: 113109 - DNA, 25 bp, Homo sapien
cagacttaggaccagcatgggccat

SEQ ID NO: 113110 - DNA, 25 bp, Homo sapien
gagtcccagccagctaaagttttga

SEQ ID NO: 113111 - DNA, 25 bp, Homo sapien
cgctaggagaggaatcggaaaagat

SEQ ID NO: 113112 - DNA, 25 bp, Homo sapien
ctggttcagatatgtgagatgagcc

SEQ ID NO: 113113 - DNA, 25 bp, Homo sapien
cagtggccattagtttgctggcaga

SEQ ID NO: 113114 - DNA, 25 bp, Homo sapien
gattacatctgtcactgcgctccat

SEQ ID NO: 113115 - DNA, 25 bp, Homo sapien
gctatgattacatctgtcactgcgc

SEQ ID NO: 113116 - DNA, 25 bp, Homo sapien
tctgtcactgcgctccatgttggat

SEQ ID NO: 113117 - DNA, 25 bp, Homo sapien
tgcgctccatgttggataacagagt

SEQ ID NO: 113118 - DNA, 25 bp, Homo sapien
gaatgagtcaccatcagacctcgtg

SEQ ID NO: 113119 - DNA, 25 bp, Homo sapien
taacattaaatgagtgccggcagca

SEQ ID NO: 113120 - DNA, 25 bp, Homo sapien
ttgtcctaataaagtgctcacgtgg

SEQ ID NO: 113121 - DNA, 25 bp, Homo sapien
gacatagatctaaaggagtggaccc

SEQ ID NO: 113122 - DNA, 25 bp, Homo sapien
cctaacctcttgatctgccctcctt

SEQ ID NO: 113123 - DNA, 25 bp, Homo sapien
tcctaacctcttgatctgccctcct

SEQ ID NO: 113124 - DNA, 25 bp, Homo sapien
tctcctaacctcttgatctgccctc

SEQ ID NO: 113125 - DNA, 25 bp, Homo sapien
gatctcctaacctcttgatctgccc

SEQ ID NO: 113126 - DNA, 25 bp, Homo sapien
ccacttgtagcgtggctttctcaaa

SEQ ID NO: 113127 - DNA, 25 bp, Homo sapien
taaaccgtagaggaaagcattttga

SEQ ID NO: 113128 - DNA, 25 bp, Homo sapien
tccggccaggtgcaagggttaatgc

SEQ ID NO: 113129 - DNA, 25 bp, Homo sapien
gggtatcggcaattaattatggagc

SEQ ID NO: 113130 - DNA, 25 bp, Homo sapien
cccgagctgggttgtgtgctttctc

SEQ ID NO: 113131 - DNA, 25 bp, Homo sapien
gactgctggaaagtcagtttaaggg

SEQ ID NO: 113132 - DNA, 25 bp, Homo sapien
tctgtatcacagagggactgctgga

SEQ ID NO: 113133 - DNA, 25 bp, Homo sapien
tggctgcctctgaagcccgagctgg

SEQ ID NO: 113134 - DNA, 25 bp, Homo sapien
gaaaagcccctcactaactgtagaa

SEQ ID NO: 113135 - DNA, 25 bp, Homo sapien
caaaccgtctgtgcctgcatggatc

SEQ ID NO: 113136 - DNA, 25 bp, Homo sapien
taaaatctggaaccttacagcacag

SEQ ID NO: 113137 - DNA, 25 bp, Homo sapien
taccgactgtcaataggccttgaac

SEQ ID NO: 113138 - DNA, 25 bp, Homo sapien
tttgccaagagaatgaatgtgctta

SEQ ID NO: 113139 - DNA, 25 bp, Homo sapien
cacagcaaagctggaagagtctaca

SEQ ID NO: 113140 - DNA, 25 bp, Homo sapien
ctgttggcattgtaaacaagggcaa

SEQ ID NO: 113141 - DNA, 25 bp, Homo sapien
ttggcattgtaaacaagggcaagat

SEQ ID NO: 113142 - DNA, 25 bp, Homo sapien
agaggtgaggcacctgatacatgtt

SEQ ID NO: 113143 - DNA, 25 bp, Homo sapien
aggtgaggcacctgatacatgttct

SEQ ID NO: 113144 - DNA, 25 bp, Homo sapien
aaagaggtgaggcacctgatacatg

SEQ ID NO: 113145 - DNA, 25 bp, Homo sapien
ggaaagaggtgaggcacctgataca

SEQ ID NO: 113146 - DNA, 25 bp, Homo sapien
tcatgaagactcaatgcgtttcctt

SEQ ID NO: 113147 - DNA, 25 bp, Homo sapien
atgaagactcaatgcgtttcctttt

SEQ ID NO: 113148 - DNA, 25 bp, Homo sapien
catgaagactcaatgcgtttccttt

SEQ ID NO: 113149 - DNA, 25 bp, Homo sapien
taaagtcctcctatgtctaaaatcg

SEQ ID NO: 113150 - DNA, 25 bp, Homo sapien
tctcattggagcctggtattacaaa

SEQ ID NO: 113151 - DNA, 25 bp, Homo sapien
aaggaacaccggttacacgcactct

SEQ ID NO: 113152 - DNA, 25 bp, Homo sapien
caacctgttacaaatactggcaatg

SEQ ID NO: 113153 - DNA, 25 bp, Homo sapien
ttcaagatgcgcctttctggagcca

SEQ ID NO: 113154 - DNA, 25 bp, Homo sapien
gagaaagtcttgacaggctccctgc

SEQ ID NO: 113155 - DNA, 25 bp, Homo sapien
tatcatctttcgctccatggagtgg

SEQ ID NO: 113156 - DNA, 25 bp, Homo sapien
tagtgtcatggtctccccagtgttg

SEQ ID NO: 113157 - DNA, 25 bp, Homo sapien
tacagctaatacaactgagggactg

SEQ ID NO: 113158 - DNA, 25 bp, Homo sapien
tgatatagccactagtcagatgtgg

SEQ ID NO: 113159 - DNA, 25 bp, Homo sapien
cactgtttaatgcaatgatatagcc

SEQ ID NO: 113160 - DNA, 25 bp, Homo sapien
tcccaaatgatcagtcggtactcag

SEQ ID NO: 113161 - DNA, 25 bp, Homo sapien
ctaagaatgtacatgtgtgccgggt

SEQ ID NO: 113162 - DNA, 25 bp, Homo sapien
aataaattcgaatacaggccgggtg

SEQ ID NO: 113163 - DNA, 25 bp, Homo sapien
gaagtgcgatccatgctgtttgcca

SEQ ID NO: 113164 - DNA, 25 bp, Homo sapien
catggagctgttcgcttagaagggt

SEQ ID NO: 113165 - DNA, 25 bp, Homo sapien
gctatacctgtacataattcactcc

SEQ ID NO: 113166 - DNA, 25 bp, Homo sapien
gccctaagttaagaatgtccacaag

SEQ ID NO: 113167 - DNA, 25 bp, Homo sapien
ccatagtatagagtcaatcctttta

SEQ ID NO: 113168 - DNA, 25 bp, Homo sapien
gaaatgagtcgcaattaattatgcc

SEQ ID NO: 113169 - DNA, 25 bp, Homo sapien
caaggtgacaatggcgaagtctccc

SEQ ID NO: 113170 - DNA, 25 bp, Homo sapien
gattccttgcaattagggttcccat

SEQ ID NO: 113171 - DNA, 25 bp, Homo sapien
gcagccgcagtgcttgcagaaggca

SEQ ID NO: 113172 - DNA, 25 bp, Homo sapien
aactagttatcgtagccaaggtgac

SEQ ID NO: 113173 - DNA, 25 bp, Homo sapien
caggattcagcagttacccttgaga

SEQ ID NO: 113174 - DNA, 25 bp, Homo sapien
gaagcttattgtcaccaggattcag

SEQ ID NO: 113175 - DNA, 25 bp, Homo sapien
acagtcttgccagctcagcaatgca

SEQ ID NO: 113176 - DNA, 25 bp, Homo sapien
ccatgctgtcagaatagaagtcctc

SEQ ID NO: 113177 - DNA, 25 bp, Homo sapien
tgttgtaattttgcactctgaatag

SEQ ID NO: 113178 - DNA, 25 bp, Homo sapien
gttgtaattttgcactctgaatagt

SEQ ID NO: 113179 - DNA, 25 bp, Homo sapien
gtggcaggaggagagagcaattata

SEQ ID NO: 113180 - DNA, 25 bp, Homo sapien
cttttcagcatcttgggtggcagga

SEQ ID NO: 113181 - DNA, 25 bp, Homo sapien
ggtggcaggaggagagagcaattat

SEQ ID NO: 113182 - DNA, 25 bp, Homo sapien
cttcttttcagcatcttgggtggca

SEQ ID NO: 113183 - DNA, 25 bp, Homo sapien
tgctgcttctttacgacagcagagg

SEQ ID NO: 113184 - DNA, 25 bp, Homo sapien
gagctcgctttcaggccggatgtcc

SEQ ID NO: 113185 - DNA, 25 bp, Homo sapien
agtgagctcgctttcaggccggatg

SEQ ID NO: 113186 - DNA, 25 bp, Homo sapien
ccatttcacaaaacgagtgagctcg

SEQ ID NO: 113187 - DNA, 25 bp, Homo sapien
ctttcaggccggatgtcctgtccga

SEQ ID NO: 113188 - DNA, 25 bp, Homo sapien
tatagagaatggctctctgccctca

SEQ ID NO: 113189 - DNA, 25 bp, Homo sapien
gagtagctgtttggccttccaggtc

SEQ ID NO: 113190 - DNA, 25 bp, Homo sapien
tcctgggtaaactggttaatcgcaa

SEQ ID NO: 113191 - DNA, 25 bp, Homo sapien
ggctctctgccctcatatagtgggg

SEQ ID NO: 113192 - DNA, 25 bp, Homo sapien
tggggatgccccctttgcccagagc

SEQ ID NO: 113193 - DNA, 25 bp, Homo sapien
gatgccccctttgcccagagctttc

SEQ ID NO: 113194 - DNA, 25 bp, Homo sapien
gggatgccccctttgcccagagctt

SEQ ID NO: 113195 - DNA, 25 bp, Homo sapien
tagtggggatgccccctttgcccag

SEQ ID NO: 113196 - DNA, 25 bp, Homo sapien
tgggctcgacatcctgtgcagtcac

SEQ ID NO: 113197 - DNA, 25 bp, Homo sapien
tgatgggctcgacatcctgtgcagt

SEQ ID NO: 113198 - DNA, 25 bp, Homo sapien
gggctcgacatcctgtgcagtcacc

SEQ ID NO: 113199 - DNA, 25 bp, Homo sapien
cttgatgggctcgacatcctgtgca

SEQ ID NO: 113200 - DNA, 25 bp, Homo sapien
gccttgccttccttttgataacgca

SEQ ID NO: 113201 - DNA, 25 bp, Homo sapien
ccttgccttccttttgataacgcag

SEQ ID NO: 113202 - DNA, 25 bp, Homo sapien
agccttgccttccttttgataacgc

SEQ ID NO: 113203 - DNA, 25 bp, Homo sapien
tatatacagaaaactcaacagtgta

SEQ ID NO: 113204 - DNA, 25 bp, Homo sapien
tatttttatatacagaaaactcaac

SEQ ID NO: 113205 - DNA, 25 bp, Homo sapien
atacagaaaactcaacagtgtacct

SEQ ID NO: 113206 - DNA, 25 bp, Homo sapien
tttatatacagaaaactcaacagtg

SEQ ID NO: 113207 - DNA, 25 bp, Homo sapien
tctgtatcggttcctcttgcattaa

SEQ ID NO: 113208 - DNA, 25 bp, Homo sapien
gtatcggttcctcttgcattaaaga

SEQ ID NO: 113209 - DNA, 25 bp, Homo sapien
cttctgtatcggttcctcttgcatt

SEQ ID NO: 113210 - DNA, 25 bp, Homo sapien
ttccacccttctgtatcggttcctc

SEQ ID NO: 113211 - DNA, 25 bp, Homo sapien
ctcctctagtaacatctgcagctct

SEQ ID NO: 113212 - DNA, 25 bp, Homo sapien
tggaggtccggttatgtaggctttg

SEQ ID NO: 113213 - DNA, 25 bp, Homo sapien
gagtacattgttagacactgtagtt

SEQ ID NO: 113214 - DNA, 25 bp, Homo sapien
actgtagttttttgataagtgacac

SEQ ID NO: 113215 - DNA, 25 bp, Homo sapien
ctgtagttttttgataagtgacact

SEQ ID NO: 113216 - DNA, 25 bp, Homo sapien
caactggagtacattgttagacact

SEQ ID NO: 113217 - DNA, 25 bp, Homo sapien
aaagttgaaaggcttggatgttcac

SEQ ID NO: 113218 - DNA, 25 bp, Homo sapien
caaagttgaaaggcttggatgttca

SEQ ID NO: 113219 - DNA, 25 bp, Homo sapien
tcaaagttgaaaggcttggatgttc

SEQ ID NO: 113220 - DNA, 25 bp, Homo sapien
tatctcttcgagctactttctcttt

SEQ ID NO: 113221 - DNA, 25 bp, Homo sapien
gtccaaataccaatatctcttcgag

SEQ ID NO: 113222 - DNA, 25 bp, Homo sapien
tgcaggcgctattattttgtgaatt

SEQ ID NO: 113223 - DNA, 25 bp, Homo sapien
cttataagacgctccatatttgcag

SEQ ID NO: 113224 - DNA, 25 bp, Homo sapien
gcaccatggttcacatcattcagaa

SEQ ID NO: 113225 - DNA, 25 bp, Homo sapien
tgaagctgacctgcctggactatga

SEQ ID NO: 113226 - DNA, 25 bp, Homo sapien
cattcagaactgtgtaggcaatagg

SEQ ID NO: 113227 - DNA, 25 bp, Homo sapien
taatccctggcctcatacgagagga

SEQ ID NO: 113228 - DNA, 25 bp, Homo sapien
tgagaacattatctggtggtgtcgg

SEQ ID NO: 113229 - DNA, 25 bp, Homo sapien
gactccttcatataagccattaaca

SEQ ID NO: 113230 - DNA, 25 bp, Homo sapien
tggaaagtcatcaaacatgagaaca

SEQ ID NO: 113231 - DNA, 25 bp, Homo sapien
gcagtatccttatctgcatatgaaa

SEQ ID NO: 113232 - DNA, 25 bp, Homo sapien
gagaaaacactcctttagccctgcc

SEQ ID NO: 113233 - DNA, 25 bp, Homo sapien
gaattggtataccacagtccactgt

SEQ ID NO: 113234 - DNA, 25 bp, Homo sapien
caagcggccctaaacatgtacaatc

SEQ ID NO: 113235 - DNA, 25 bp, Homo sapien
gacagctaactgatcactaatgaca

SEQ ID NO: 113236 - DNA, 25 bp, Homo sapien
taagctgcccattcgattcaaatta

SEQ ID NO: 113237 - DNA, 25 bp, Homo sapien
tcggtttgtggctttggtcactgct

SEQ ID NO: 113238 - DNA, 25 bp, Homo sapien
ttgtccctgtcatgcttcaagctgc

SEQ ID NO: 113239 - DNA, 25 bp, Homo sapien
tgttagctgtctttctcacatgacc

SEQ ID NO: 113240 - DNA, 25 bp, Homo sapien
ctttagaaccagtaaagatgaattg

SEQ ID NO: 113241 - DNA, 25 bp, Homo sapien
ccaatttcttctgagtcaacaattt

SEQ ID NO: 113242 - DNA, 25 bp, Homo sapien
gttaaccttcataggctttgttcca

SEQ ID NO: 113243 - DNA, 25 bp, Homo sapien
ccacatctccagtataccaatttct

SEQ ID NO: 113244 - DNA, 25 bp, Homo sapien
aagccaccttttggtacttctgtat

SEQ ID NO: 113245 - DNA, 25 bp, Homo sapien
tttctcagcagctacttacccagtg

SEQ ID NO: 113246 - DNA, 25 bp, Homo sapien
gcgagccacagttcccaacctttat

SEQ ID NO: 113247 - DNA, 25 bp, Homo sapien
atgttcttcacagttatgtaattct

SEQ ID NO: 113248 - DNA, 25 bp, Homo sapien
cactctgaactcaatcttagaacct

SEQ ID NO: 113249 - DNA, 25 bp, Homo sapien
aagtactggctatcttctgagcgtg

SEQ ID NO: 113250 - DNA, 25 bp, Homo sapien
cttctgagcgtgtgccagaagatcc

SEQ ID NO: 113251 - DNA, 25 bp, Homo sapien
tgttgaaaagcgaagccgttagtcc

SEQ ID NO: 113252 - DNA, 25 bp, Homo sapien
agcaatctgtctctgaagtactggc

SEQ ID NO: 113253 - DNA, 25 bp, Homo sapien
tacaccaacagaatttcctgtacat

SEQ ID NO: 113254 - DNA, 25 bp, Homo sapien
ctgtacatgggctggttaaaagtat

SEQ ID NO: 113255 - DNA, 25 bp, Homo sapien
gtacatgggctggttaaaagtatcc

SEQ ID NO: 113256 - DNA, 25 bp, Homo sapien
ggaatgaacagcagaaccgtttcta

SEQ ID NO: 113257 - DNA, 25 bp, Homo sapien
ccgccgcagtcgctcaggtgccgtc

SEQ ID NO: 113258 - DNA, 25 bp, Homo sapien
ggcggcgccggcactacagcccggg

SEQ ID NO: 113259 - DNA, 25 bp, Homo sapien
tgccgtcgcgccgctcggcaggaaa

SEQ ID NO: 113260 - DNA, 25 bp, Homo sapien
ctgtgcggccgggaaaggagaccgg

SEQ ID NO: 113261 - DNA, 25 bp, Homo sapien
gcgtaagtgtggcccagctccggcc

SEQ ID NO: 113262 - DNA, 25 bp, Homo sapien
gccgaggaggcggtaatccgccttc

SEQ ID NO: 113263 - DNA, 25 bp, Homo sapien
tgcctccgtccaccggccgaggagg

SEQ ID NO: 113264 - DNA, 25 bp, Homo sapien
ccggagacgcgctgcctccgtccac

SEQ ID NO: 113265 - DNA, 25 bp, Homo sapien
cctgacctggggactcgcaaagggc

SEQ ID NO: 113266 - DNA, 25 bp, Homo sapien
gggcgagcgcccagaccgccggagg

SEQ ID NO: 113267 - DNA, 25 bp, Homo sapien
tcatgctgctttccgtgcccaaccg

SEQ ID NO: 113268 - DNA, 25 bp, Homo sapien
ttcgccggtgtcgagagtggtccat

SEQ ID NO: 113269 - DNA, 25 bp, Homo sapien
aactgaaggggtcaggccgaatcgc

SEQ ID NO: 113270 - DNA, 25 bp, Homo sapien
ctgaaggggtcaggccgaatcgcta

SEQ ID NO: 113271 - DNA, 25 bp, Homo sapien
gggtcaggccgaatcgctaggacac

SEQ ID NO: 113272 - DNA, 25 bp, Homo sapien
gtcaggccgaatcgctaggacacac

SEQ ID NO: 113273 - DNA, 25 bp, Homo sapien
accaaactggagacactgttgccat

SEQ ID NO: 113274 - DNA, 25 bp, Homo sapien
tgggatcattatcccaagtctcacc

SEQ ID NO: 113275 - DNA, 25 bp, Homo sapien
accagcaattgcttcggaccaaact

SEQ ID NO: 113276 - DNA, 25 bp, Homo sapien
cactgttgccattagcctgctaggt

SEQ ID NO: 113277 - DNA, 25 bp, Homo sapien
gataagaatggcttgcaccaggctg

SEQ ID NO: 113278 - DNA, 25 bp, Homo sapien
cagattctgcatggccttaaggaca

SEQ ID NO: 113279 - DNA, 25 bp, Homo sapien
tacacaacttctatcagggcagagc

SEQ ID NO: 113280 - DNA, 25 bp, Homo sapien
tggataggcctaacagcacatgtgg

SEQ ID NO: 113281 - DNA, 25 bp, Homo sapien
gagtatgtaagagggtctccaccac

SEQ ID NO: 113282 - DNA, 25 bp, Homo sapien
tcatgtggagtatgtaagagggtct

SEQ ID NO: 113283 - DNA, 25 bp, Homo sapien
tggagtatgtaagagggtctccacc

SEQ ID NO: 113284 - DNA, 25 bp, Homo sapien
tgtaagagggtctccaccacactct

SEQ ID NO: 113285 - DNA, 25 bp, Homo sapien
taattccttaatgagccttaggcag

SEQ ID NO: 113286 - DNA, 25 bp, Homo sapien
cacttatgaggcaactactgaggta

SEQ ID NO: 113287 - DNA, 25 bp, Homo sapien
ttaagatcacacatgcagtaagtgg

SEQ ID NO: 113288 - DNA, 25 bp, Homo sapien
ttcaggctccctagtgcccaagctg

SEQ ID NO: 113289 - DNA, 25 bp, Homo sapien
caacatggtgaaagaatatcctggg

SEQ ID NO: 113290 - DNA, 25 bp, Homo sapien
tcaaactgggtattagatacaaggc

SEQ ID NO: 113291 - DNA, 25 bp, Homo sapien
gaatatcctgataacaaggttgagg

SEQ ID NO: 113292 - DNA, 25 bp, Homo sapien
ggatacaactagatctggcaaaact

SEQ ID NO: 113293 - DNA, 25 bp, Homo sapien
tgaagaaatcttgccacccaaaaag

SEQ ID NO: 113294 - DNA, 25 bp, Homo sapien
gaaaaggaaactagtgcccagcaaa

SEQ ID NO: 113295 - DNA, 25 bp, Homo sapien
gagacaccataagaaagtcagaaga

SEQ ID NO: 113296 - DNA, 25 bp, Homo sapien
gaacatcttcataaccgtgaggtag

SEQ ID NO: 113297 - DNA, 25 bp, Homo sapien
tgagtctgtccaacattaaaaccag

SEQ ID NO: 113298 - DNA, 25 bp, Homo sapien
ttctaagtagcaaaagggttgccaa

SEQ ID NO: 113299 - DNA, 25 bp, Homo sapien
taaaaacacgaattcacaccagatg

SEQ ID NO: 113300 - DNA, 25 bp, Homo sapien
tagatactggcatatagactcaaca

SEQ ID NO: 113301 - DNA, 25 bp, Homo sapien
gatgttgccttcaacagacacagct

SEQ ID NO: 113302 - DNA, 25 bp, Homo sapien
acagatgttgccttcaacagacaca

SEQ ID NO: 113303 - DNA, 25 bp, Homo sapien
cagatgttgccttcaacagacacag

SEQ ID NO: 113304 - DNA, 25 bp, Homo sapien
agatgttgccttcaacagacacagc

SEQ ID NO: 113305 - DNA, 25 bp, Homo sapien
cacagggaaattcctatcattgcta

SEQ ID NO: 113306 - DNA, 25 bp, Homo sapien
gaaattgtaccttaagaactatggc

SEQ ID NO: 113307 - DNA, 25 bp, Homo sapien
gattcgacatctacgcaaacagcaa

SEQ ID NO: 113308 - DNA, 25 bp, Homo sapien
cactgaaattaagaggcatttgctt

SEQ ID NO: 113309 - DNA, 25 bp, Homo sapien
ggaggcaaagggttgcagcaagcca

SEQ ID NO: 113310 - DNA, 25 bp, Homo sapien
caaggtcacaccactgcactccagc

SEQ ID NO: 113311 - DNA, 25 bp, Homo sapien
gcctgggtgacggaacgaaaatcta

SEQ ID NO: 113312 - DNA, 25 bp, Homo sapien
caggaggcaaagggttgcagcaagc

SEQ ID NO: 113313 - DNA, 25 bp, Homo sapien
tagcaacacagacgttactggtgac

SEQ ID NO: 113314 - DNA, 25 bp, Homo sapien
gaagaactctcaagggagactgagg

SEQ ID NO: 113315 - DNA, 25 bp, Homo sapien
ctattaaggaggagagacggaccaa

SEQ ID NO: 113316 - DNA, 25 bp, Homo sapien
aactaggagtttgctgtcccggacg

SEQ ID NO: 113317 - DNA, 25 bp, Homo sapien
tttaaaatcctgctctatattgaga

SEQ ID NO: 113318 - DNA, 25 bp, Homo sapien
taaaatcctgctctatattgagagt

SEQ ID NO: 113319 - DNA, 25 bp, Homo sapien
gaagaatatgcacgggccccaggtt

SEQ ID NO: 113320 - DNA, 25 bp, Homo sapien
ccctgaagaatatgcacgggcccca

SEQ ID NO: 113321 - DNA, 25 bp, Homo sapien
tcaaagaaaaaaagtatccacactc

SEQ ID NO: 113322 - DNA, 25 bp, Homo sapien
caaagaaaaaaagtatccacactca

SEQ ID NO: 113323 - DNA, 25 bp, Homo sapien
tctcaaagaaaaaaagtatccacac

SEQ ID NO: 113324 - DNA, 25 bp, Homo sapien
ttctcaaagaaaaaaagtatccaca

SEQ ID NO: 113325 - DNA, 25 bp, Homo sapien
aagaacctgtcagtctcataaaaat

SEQ ID NO: 113326 - DNA, 25 bp, Homo sapien
taactagaaggagtagaaaacatcc

SEQ ID NO: 113327 - DNA, 25 bp, Homo sapien
gtggcatttcaaatctaacctgacc

SEQ ID NO: 113328 - DNA, 25 bp, Homo sapien
tgacctacaaatctaaacaggttag

SEQ ID NO: 113329 - DNA, 25 bp, Homo sapien
tacttttgtcaatgtgatcctataa

SEQ ID NO: 113330 - DNA, 25 bp, Homo sapien
gtacttttgtcaatgtgatcctata

SEQ ID NO: 113331 - DNA, 25 bp, Homo sapien
ggtacttttgtcaatgtgatcctat

SEQ ID NO: 113332 - DNA, 25 bp, Homo sapien
taataactattgaaggaataagaac

SEQ ID NO: 113333 - DNA, 25 bp, Homo sapien
tgtaataactattgaaggaataaga

SEQ ID NO: 113334 - DNA, 25 bp, Homo sapien
aatatgctgactcataaaactccat

SEQ ID NO: 113335 - DNA, 25 bp, Homo sapien
taaaatatgctgactcataaaactc

SEQ ID NO: 113336 - DNA, 25 bp, Homo sapien
ctgttttggtaggaataagcttttg

SEQ ID NO: 113337 - DNA, 25 bp, Homo sapien
tatctgttttggtaggaataagctt

SEQ ID NO: 113338 - DNA, 25 bp, Homo sapien
ttatctgttttggtaggaataagct

SEQ ID NO: 113339 - DNA, 25 bp, Homo sapien
atctgttttggtaggaataagcttt

SEQ ID NO: 113340 - DNA, 25 bp, Homo sapien
taaagtctcgaggtacactctcaga

SEQ ID NO: 113341 - DNA, 25 bp, Homo sapien
taatttaaagtctcgaggtacactc

SEQ ID NO: 113342 - DNA, 25 bp, Homo sapien
tcagagtcggattcatggaggtttc

SEQ ID NO: 113343 - DNA, 25 bp, Homo sapien
ggtacactctcagagtcggattcat

SEQ ID NO: 113344 - DNA, 25 bp, Homo sapien
gaacaggtgcaacttgatcatcttc

SEQ ID NO: 113345 - DNA, 25 bp, Homo sapien
tctttgatgacctgctcttcaagca

SEQ ID NO: 113346 - DNA, 25 bp, Homo sapien
tttcaacgacattcaatggaacagg

SEQ ID NO: 113347 - DNA, 25 bp, Homo sapien
ttccctaacactacttgaagtttca

SEQ ID NO: 113348 - DNA, 25 bp, Homo sapien
ttgccaggaatctttgatgcgtcac

SEQ ID NO: 113349 - DNA, 25 bp, Homo sapien
gtttcttcttcgaggcagctgcttc

SEQ ID NO: 113350 - DNA, 25 bp, Homo sapien
tgtttagtaactgggacaggttcta

SEQ ID NO: 113351 - DNA, 25 bp, Homo sapien
ggtgggctgtttagtaactgggaca

SEQ ID NO: 113352 - DNA, 25 bp, Homo sapien
tcttgtttagtctcttggtggaggg

SEQ ID NO: 113353 - DNA, 25 bp, Homo sapien
tttcttgtttagtctcttggtggag

SEQ ID NO: 113354 - DNA, 25 bp, Homo sapien
ctttttgatggtaccatgagagttt

SEQ ID NO: 113355 - DNA, 25 bp, Homo sapien
gatggtaccatgagagtttccacct

SEQ ID NO: 113356 - DNA, 25 bp, Homo sapien
tctggatcccttctacttggtcagg

SEQ ID NO: 113357 - DNA, 25 bp, Homo sapien
ctttgtcagtttcggtcttcagttt

SEQ ID NO: 113358 - DNA, 25 bp, Homo sapien
tcagcattatccatcaaaggaatat

SEQ ID NO: 113359 - DNA, 25 bp, Homo sapien
tttaagcaaatcaataacctctctc

SEQ ID NO: 113360 - DNA, 25 bp, Homo sapien
aaaatctttaaacttcacttcagca

SEQ ID NO: 113361 - DNA, 25 bp, Homo sapien
atcatagtcttcaaggacagaagaa

SEQ ID NO: 113362 - DNA, 25 bp, Homo sapien
taaagcatcttgtattacaccagac

SEQ ID NO: 113363 - DNA, 25 bp, Homo sapien
tacaccagacttctcctttagcaag

SEQ ID NO: 113364 - DNA, 25 bp, Homo sapien
taagcttactcgtagcggacactcg

SEQ ID NO: 113365 - DNA, 25 bp, Homo sapien
aatacaagggcatgtgtgcactcac

SEQ ID NO: 113366 - DNA, 25 bp, Homo sapien
tagttcctcctgctacacagcatgg

SEQ ID NO: 113367 - DNA, 25 bp, Homo sapien
taacttatctaaggccacaaagctg

SEQ ID NO: 113368 - DNA, 25 bp, Homo sapien
gaaattctggaatgttataccccac

SEQ ID NO: 113369 - DNA, 25 bp, Homo sapien
tactaacattgagatctggacccac

SEQ ID NO: 113370 - DNA, 25 bp, Homo sapien
tgtccaagggaagtttaacagagca

SEQ ID NO: 113371 - DNA, 25 bp, Homo sapien
gaaaagacaacgaaggtaggcagtg

SEQ ID NO: 113372 - DNA, 25 bp, Homo sapien
ttccttcacagcagcgagtaacttg

SEQ ID NO: 113373 - DNA, 25 bp, Homo sapien
tgtataagcgtagtcaattctccct

SEQ ID NO: 113374 - DNA, 25 bp, Homo sapien
cttacaccgatcctttgtagcagca

SEQ ID NO: 113375 - DNA, 25 bp, Homo sapien
tgggttaactgcttacaccgatcct

SEQ ID NO: 113376 - DNA, 25 bp, Homo sapien
tgttttgaaatacattatgttcctt

SEQ ID NO: 113377 - DNA, 25 bp, Homo sapien
gttccaattcgatctttcatccttg

SEQ ID NO: 113378 - DNA, 25 bp, Homo sapien
ttctaatgttccaattcgatctttc

SEQ ID NO: 113379 - DNA, 25 bp, Homo sapien
gtctcttgataactgacatgtattt

SEQ ID NO: 113380 - DNA, 25 bp, Homo sapien
attttcctgcttcaagtgagctatc

SEQ ID NO: 113381 - DNA, 25 bp, Homo sapien
ctgcttcaagtgagctatctctgcc

SEQ ID NO: 113382 - DNA, 25 bp, Homo sapien
tgactgcatctctcagtataccatt

SEQ ID NO: 113383 - DNA, 25 bp, Homo sapien
gatttgtagtgttgctgactgcatc

SEQ ID NO: 113384 - DNA, 25 bp, Homo sapien
ctgaaaacagtaactggattaggag

SEQ ID NO: 113385 - DNA, 25 bp, Homo sapien
tcagtcagctcattcaccaacctag

SEQ ID NO: 113386 - DNA, 25 bp, Homo sapien
tcaccaacctagcataatcctggcg

SEQ ID NO: 113387 - DNA, 25 bp, Homo sapien
tcaactgagtagctgcttgctcagc

SEQ ID NO: 113388 - DNA, 25 bp, Homo sapien
tcctggcgtagtttatttagttctg

SEQ ID NO: 113389 - DNA, 25 bp, Homo sapien
ttccgctgttctcttcctgatgtag

SEQ ID NO: 113390 - DNA, 25 bp, Homo sapien
gttctcttcctgatgtagctctgaa

SEQ ID NO: 113391 - DNA, 25 bp, Homo sapien
ctgttctcttcctgatgtagctctg

SEQ ID NO: 113392 - DNA, 25 bp, Homo sapien
ctcatgttccgctgttctcttcctg

SEQ ID NO: 113393 - DNA, 25 bp, Homo sapien
gctccaactgttgttttgataccaa

SEQ ID NO: 113394 - DNA, 25 bp, Homo sapien
gataccaaggtatctgtaagcttac

SEQ ID NO: 113395 - DNA, 25 bp, Homo sapien
taactgcattagtctttgctccaac

SEQ ID NO: 113396 - DNA, 25 bp, Homo sapien
taagcttactatgcagactctgtac

SEQ ID NO: 113397 - DNA, 25 bp, Homo sapien
ggaatggaactgctgaatttgagct

SEQ ID NO: 113398 - DNA, 25 bp, Homo sapien
ctgggaatggaactgctgaatttga

SEQ ID NO: 113399 - DNA, 25 bp, Homo sapien
ctgaatttgagctttcaaagcctca

SEQ ID NO: 113400 - DNA, 25 bp, Homo sapien
ctgggctgctatctgggaatggaac

SEQ ID NO: 113401 - DNA, 25 bp, Homo sapien
cttctgctagaactgaagcggaggt

SEQ ID NO: 113402 - DNA, 25 bp, Homo sapien
ttgttaaacgatcacgttcacttgc

SEQ ID NO: 113403 - DNA, 25 bp, Homo sapien
cttgttaaacgatcacgttcacttg

SEQ ID NO: 113404 - DNA, 25 bp, Homo sapien
tttacttgttaaacgatcacgttca

SEQ ID NO: 113405 - DNA, 25 bp, Homo sapien
tacttgttaaacgatcacgttcact

SEQ ID NO: 113406 - DNA, 25 bp, Homo sapien
gctcatttgccagggcctgtaattt

SEQ ID NO: 113407 - DNA, 25 bp, Homo sapien
ttgccagggcctgtaatttctgcac

SEQ ID NO: 113408 - DNA, 25 bp, Homo sapien
ggcctgtaatttctgcacttcagct

SEQ ID NO: 113409 - DNA, 25 bp, Homo sapien
cagggcctgtaatttctgcacttca

SEQ ID NO: 113410 - DNA, 25 bp, Homo sapien
catcttctccaattcatgtgcagca

SEQ ID NO: 113411 - DNA, 25 bp, Homo sapien
tgcatcttctccaattcatgtgcag

SEQ ID NO: 113412 - DNA, 25 bp, Homo sapien
tgttgcatcttctccaattcatgtg

SEQ ID NO: 113413 - DNA, 25 bp, Homo sapien
tcttctccaattcatgtgcagcagc

SEQ ID NO: 113414 - DNA, 25 bp, Homo sapien
ttcatgttgtagttgctcttccagc

SEQ ID NO: 113415 - DNA, 25 bp, Homo sapien
gaaacaagagtctgtagcttctgaa

SEQ ID NO: 113416 - DNA, 25 bp, Homo sapien
aacaagagtctgtagcttctgaact

SEQ ID NO: 113417 - DNA, 25 bp, Homo sapien
cagaaacaagagtctgtagcttctg

SEQ ID NO: 113418 - DNA, 25 bp, Homo sapien
caagagtctgtagcttctgaacttc

SEQ ID NO: 113419 - DNA, 25 bp, Homo sapien
tgcttcctacacctgaagaaacaac

SEQ ID NO: 113420 - DNA, 25 bp, Homo sapien
tacataactaaactgttcaatctct

SEQ ID NO: 113421 - DNA, 25 bp, Homo sapien
tacacctgaagaaacaacaacttgg

SEQ ID NO: 113422 - DNA, 25 bp, Homo sapien
gtttctgcttttatacgctcaatct

SEQ ID NO: 113423 - DNA, 25 bp, Homo sapien
tcagcatgtaggtaagcaactagca

SEQ ID NO: 113424 - DNA, 25 bp, Homo sapien
tcctgacacagcatacaaagccctt

SEQ ID NO: 113425 - DNA, 25 bp, Homo sapien
tattaagtctaagttacctgcacct

SEQ ID NO: 113426 - DNA, 25 bp, Homo sapien
tctattgcataaacctgactcagct

SEQ ID NO: 113427 - DNA, 25 bp, Homo sapien
ttccatttgttccacaacatcctta

SEQ ID NO: 113428 - DNA, 25 bp, Homo sapien
tccatttgttccacaacatccttat

SEQ ID NO: 113429 - DNA, 25 bp, Homo sapien
tttgttccacaacatccttattagg

SEQ ID NO: 113430 - DNA, 25 bp, Homo sapien
catttgttccacaacatccttatta

SEQ ID NO: 113431 - DNA, 25 bp, Homo sapien
agtaattcttccacagtctttaact

SEQ ID NO: 113432 - DNA, 25 bp, Homo sapien
ctgaataagtccagtttcaagtaat

SEQ ID NO: 113433 - DNA, 25 bp, Homo sapien
taattcttccacagtctttaacttc

SEQ ID NO: 113434 - DNA, 25 bp, Homo sapien
tcttccacagtctttaacttctcat

SEQ ID NO: 113435 - DNA, 25 bp, Homo sapien
ttcagctcctcttctttagttgcca

SEQ ID NO: 113436 - DNA, 25 bp, Homo sapien
attcagctcctcttctttagttgcc

SEQ ID NO: 113437 - DNA, 25 bp, Homo sapien
tcagctcctcttctttagttgccac

SEQ ID NO: 113438 - DNA, 25 bp, Homo sapien
tttttcaaagacacataagcaaaac

SEQ ID NO: 113439 - DNA, 25 bp, Homo sapien
tcaaagacacataagcaaaacatga

SEQ ID NO: 113440 - DNA, 25 bp, Homo sapien
tttcaaagacacataagcaaaacat

SEQ ID NO: 113441 - DNA, 25 bp, Homo sapien
ctttttcaaagacacataagcaaaa

SEQ ID NO: 113442 - DNA, 25 bp, Homo sapien
ctgatcattttgcttagcttttaag

SEQ ID NO: 113443 - DNA, 25 bp, Homo sapien
tgcttagcttttaagtcttgaactt

SEQ ID NO: 113444 - DNA, 25 bp, Homo sapien
cttgaacttcttttgtcagagatga

SEQ ID NO: 113445 - DNA, 25 bp, Homo sapien
ttgtcagagatgaattttctgttct

SEQ ID NO: 113446 - DNA, 25 bp, Homo sapien
tatgcaacagtttgcccactgttta

SEQ ID NO: 113447 - DNA, 25 bp, Homo sapien
ccactgtttaaaagagaatgggctg

SEQ ID NO: 113448 - DNA, 25 bp, Homo sapien
tgtggcatgagcctacagtcttagc

SEQ ID NO: 113449 - DNA, 25 bp, Homo sapien
gggaggagttatcggttgagcccag

SEQ ID NO: 113450 - DNA, 25 bp, Homo sapien
actttcttaagttcttcaactagag

SEQ ID NO: 113451 - DNA, 25 bp, Homo sapien
cttaagttcttcaactagagaggca

SEQ ID NO: 113452 - DNA, 25 bp, Homo sapien
ttcttaagttcttcaactagagagg

SEQ ID NO: 113453 - DNA, 25 bp, Homo sapien
ttaagttcttcaactagagaggcaa

SEQ ID NO: 113454 - DNA, 25 bp, Homo sapien
gttagcaactttgagaagttctgcc

SEQ ID NO: 113455 - DNA, 25 bp, Homo sapien
ctgcctccagaagctcttctacaga

SEQ ID NO: 113456 - DNA, 25 bp, Homo sapien
tttcaagctggacatttcctatttc

SEQ ID NO: 113457 - DNA, 25 bp, Homo sapien
ttcaagctggacatttcctatttct

SEQ ID NO: 113458 - DNA, 25 bp, Homo sapien
agcagtgggatggagaaggaataaa

SEQ ID NO: 113459 - DNA, 25 bp, Homo sapien
aacaccactgcactcagaccagtca

SEQ ID NO: 113460 - DNA, 25 bp, Homo sapien
atctgtaactggttgtgatcaatca

SEQ ID NO: 113461 - DNA, 25 bp, Homo sapien
agtgggatggagaaggaataaagaa

SEQ ID NO: 113462 - DNA, 25 bp, Homo sapien
gctcctgaactttggaagtgataga

SEQ ID NO: 113463 - DNA, 25 bp, Homo sapien
tccctgtattggctaggtctttctc

SEQ ID NO: 113464 - DNA, 25 bp, Homo sapien
ctgtaaccacttccctgtattggct

SEQ ID NO: 113465 - DNA, 25 bp, Homo sapien
ccaaaacagccttcatggtattcat

SEQ ID NO: 113466 - DNA, 25 bp, Homo sapien
caaaacagccttcatggtattcatc

SEQ ID NO: 113467 - DNA, 25 bp, Homo sapien
ctctttcaagttatgttgtgctact

SEQ ID NO: 113468 - DNA, 25 bp, Homo sapien
tttcaagttatgttgtgctacttcc

SEQ ID NO: 113469 - DNA, 25 bp, Homo sapien
agttatgttgtgctacttcctgaac

SEQ ID NO: 113470 - DNA, 25 bp, Homo sapien
caagttatgttgtgctacttcctga

SEQ ID NO: 113471 - DNA, 25 bp, Homo sapien
acaatctcaagttcttcaaactgtg

SEQ ID NO: 113472 - DNA, 25 bp, Homo sapien
atctcaagttcttcaaactgtgatg

SEQ ID NO: 113473 - DNA, 25 bp, Homo sapien
cttcaaactgtgatgcagaagaggc

SEQ ID NO: 113474 - DNA, 25 bp, Homo sapien
tcttcaaactgtgatgcagaagagg

SEQ ID NO: 113475 - DNA, 25 bp, Homo sapien
ctagaattttttacaaagatctgca

SEQ ID NO: 113476 - DNA, 25 bp, Homo sapien
tagaattttttacaaagatctgcat

SEQ ID NO: 113477 - DNA, 25 bp, Homo sapien
gaattttttacaaagatctgcatta

SEQ ID NO: 113478 - DNA, 25 bp, Homo sapien
aattttttacaaagatctgcattaa

SEQ ID NO: 113479 - DNA, 25 bp, Homo sapien
tgtgttttgctagaaagatcactct

SEQ ID NO: 113480 - DNA, 25 bp, Homo sapien
gtaacagctgtgttttgctagaaag

SEQ ID NO: 113481 - DNA, 25 bp, Homo sapien
ttagcatggcttctaacctcttcaa

SEQ ID NO: 113482 - DNA, 25 bp, Homo sapien
gcttctaacctcttcaattcatttt

SEQ ID NO: 113483 - DNA, 25 bp, Homo sapien
cattttatgcatgggtacttactca

SEQ ID NO: 113484 - DNA, 25 bp, Homo sapien
gccaataatgacacctagtatctgg

SEQ ID NO: 113485 - DNA, 25 bp, Homo sapien
caagttagtatagttcaacagagta

SEQ ID NO: 113486 - DNA, 25 bp, Homo sapien
tgggagggagactcattctgtactc

SEQ ID NO: 113487 - DNA, 25 bp, Homo sapien
gaaatataccgaaatagctctaaga

SEQ ID NO: 113488 - DNA, 25 bp, Homo sapien
acctcaactctagtaacattttggg

SEQ ID NO: 113489 - DNA, 25 bp, Homo sapien
gggttttatcctatgcactgctgga

SEQ ID NO: 113490 - DNA, 25 bp, Homo sapien
tactagctgcggagtttgcatgtct

SEQ ID NO: 113491 - DNA, 25 bp, Homo sapien
gctgctcaatttgggacttaaacaa

SEQ ID NO: 113492 - DNA, 25 bp, Homo sapien
ctgctcaatttgggacttaaacaat

SEQ ID NO: 113493 - DNA, 25 bp, Homo sapien
ctcaatttgggacttaaacaatttg

SEQ ID NO: 113494 - DNA, 25 bp, Homo sapien
tgctcaatttgggacttaaacaatt

SEQ ID NO: 113495 - DNA, 25 bp, Homo sapien
aaatactcatatgtcactggttata

SEQ ID NO: 113496 - DNA, 25 bp, Homo sapien
aggcaagacatctaataatacctac

SEQ ID NO: 113497 - DNA, 25 bp, Homo sapien
tactcatatgtcactggttatataa

SEQ ID NO: 113498 - DNA, 25 bp, Homo sapien
ttttgccacgtaagtgaaaggcaag

SEQ ID NO: 113499 - DNA, 25 bp, Homo sapien
aataattcttcatgagggggaaaag

SEQ ID NO: 113500 - DNA, 25 bp, Homo sapien
ttaataattcttcatgagggggaaa

SEQ ID NO: 113501 - DNA, 25 bp, Homo sapien
cttttaataattcttcatgaggggg

SEQ ID NO: 113502 - DNA, 25 bp, Homo sapien
ttttaataattcttcatgaggggga

SEQ ID NO: 113503 - DNA, 25 bp, Homo sapien
gaaagaagacccagtaagataactg

SEQ ID NO: 113504 - DNA, 25 bp, Homo sapien
gcatcttagccaaaggtactactca

SEQ ID NO: 113505 - DNA, 25 bp, Homo sapien
caatggtgcgaacttcctgggctaa

SEQ ID NO: 113506 - DNA, 25 bp, Homo sapien
catcacacccggaatttctaaactt

SEQ ID NO: 113507 - DNA, 25 bp, Homo sapien
catataagaggctggcaaactaggg

SEQ ID NO: 113508 - DNA, 25 bp, Homo sapien
gtttcccagaaacgcagaaggcaat

SEQ ID NO: 113509 - DNA, 25 bp, Homo sapien
ggtcccacaggcctaaaatgctatc

SEQ ID NO: 113510 - DNA, 25 bp, Homo sapien
tgtaggtcctcaaactaagagctgt

SEQ ID NO: 113511 - DNA, 25 bp, Homo sapien
ctcaggcttgtgctaaagagaaatc

SEQ ID NO: 113512 - DNA, 25 bp, Homo sapien
taatatggtatgctcaggcttgtgc

SEQ ID NO: 113513 - DNA, 25 bp, Homo sapien
ccatacaaagcccatcctatgaatt

SEQ ID NO: 113514 - DNA, 25 bp, Homo sapien
tataagtttttatgcctaatatggt

SEQ ID NO: 113515 - DNA, 25 bp, Homo sapien
gatccctacctatcaacatttgcta

SEQ ID NO: 113516 - DNA, 25 bp, Homo sapien
taggtaaacagtaatacaacttaga

SEQ ID NO: 113517 - DNA, 25 bp, Homo sapien
gaacatgaatacatgtagcaagatt

SEQ ID NO: 113518 - DNA, 25 bp, Homo sapien
aaatatcaagagatagcaccttgaa

SEQ ID NO: 113519 - DNA, 25 bp, Homo sapien
ctcattccagagaccacttatttct

SEQ ID NO: 113520 - DNA, 25 bp, Homo sapien
tcttcctctggtgttcaactgcatc

SEQ ID NO: 113521 - DNA, 25 bp, Homo sapien
ttcttcctctggtgttcaactgcat

SEQ ID NO: 113522 - DNA, 25 bp, Homo sapien
cttcctctggtgttcaactgcatcc

SEQ ID NO: 113523 - DNA, 25 bp, Homo sapien
aagaaaagcttcattctgataaaga

SEQ ID NO: 113524 - DNA, 25 bp, Homo sapien
agcttcattctgataaagatctact

SEQ ID NO: 113525 - DNA, 25 bp, Homo sapien
taagaataagaattcatcttttcac

SEQ ID NO: 113526 - DNA, 25 bp, Homo sapien
tgttctccaataatgccccgccccc

SEQ ID NO: 113527 - DNA, 25 bp, Homo sapien
cacctcaagttttgtggctaagcaa

SEQ ID NO: 113528 - DNA, 25 bp, Homo sapien
cagaagtggcaattcatgtacctaa

SEQ ID NO: 113529 - DNA, 25 bp, Homo sapien
tactgttataccaacacagaagtgg

SEQ ID NO: 113530 - DNA, 25 bp, Homo sapien
gtatatcggcaagttcacctcaagt

SEQ ID NO: 113531 - DNA, 25 bp, Homo sapien
ccacagctcaagtaagttaggaaac

SEQ ID NO: 113532 - DNA, 25 bp, Homo sapien
gaaactgagccaagtatacacagaa

SEQ ID NO: 113533 - DNA, 25 bp, Homo sapien
tttcacacgggttcaatgtctccag

SEQ ID NO: 113534 - DNA, 25 bp, Homo sapien
ggaaagactgacactgctatctgct

SEQ ID NO: 113535 - DNA, 25 bp, Homo sapien
tgagctagttgatcaaagcaaaggg

SEQ ID NO: 113536 - DNA, 25 bp, Homo sapien
gacgcccactttccatgttttagta

SEQ ID NO: 113537 - DNA, 25 bp, Homo sapien
taggaatcccatagtaacccactgt

SEQ ID NO: 113538 - DNA, 25 bp, Homo sapien
ggcccaataacactcataggacttt

SEQ ID NO: 113539 - DNA, 25 bp, Homo sapien
aagtcttgttcactttgtcctgcag

SEQ ID NO: 113540 - DNA, 25 bp, Homo sapien
tttttcagttgatgccaatgcttcc

SEQ ID NO: 113541 - DNA, 25 bp, Homo sapien
ggaagtcttgttcactttgtcctgc

SEQ ID NO: 113542 - DNA, 25 bp, Homo sapien
cttggaagtcttgttcactttgtcc

SEQ ID NO: 113543 - DNA, 25 bp, Homo sapien
gattcaatagagtaccatggcacac

SEQ ID NO: 113544 - DNA, 25 bp, Homo sapien
tgtacaattgcaactactcccagtg

SEQ ID NO: 113545 - DNA, 25 bp, Homo sapien
tagatctttagctatgcaagaaggc

SEQ ID NO: 113546 - DNA, 25 bp, Homo sapien
taaaaccctcatcgctgacagaaat

SEQ ID NO: 113547 - DNA, 25 bp, Homo sapien
gacacttgtatatggactctgctat

SEQ ID NO: 113548 - DNA, 25 bp, Homo sapien
aaatgcacatctaaaccaagccaag

SEQ ID NO: 113549 - DNA, 25 bp, Homo sapien
tagggtaatgacttatcacgcacca

SEQ ID NO: 113550 - DNA, 25 bp, Homo sapien
gaaagaacaaggagcaactgatggc

SEQ ID NO: 113551 - DNA, 25 bp, Homo sapien
aactcaacagcttccacctgttgct

SEQ ID NO: 113552 - DNA, 25 bp, Homo sapien
agggacagacacctttggaaataat

SEQ ID NO: 113553 - DNA, 25 bp, Homo sapien
tgagaacttctttagcctccaactc

SEQ ID NO: 113554 - DNA, 25 bp, Homo sapien
caaattagaagggacagacaccttt

SEQ ID NO: 113555 - DNA, 25 bp, Homo sapien
tacgaatctcctcatgaaagtgcac

SEQ ID NO: 113556 - DNA, 25 bp, Homo sapien
gagatgttgggtacatcaggcctca

SEQ ID NO: 113557 - DNA, 25 bp, Homo sapien
gaggaacatgctaacaccacaggga

SEQ ID NO: 113558 - DNA, 25 bp, Homo sapien
tactgagccttaatctgaccaggaa

SEQ ID NO: 113559 - DNA, 25 bp, Homo sapien
ttctcttggctcataaagtactgcc

SEQ ID NO: 113560 - DNA, 25 bp, Homo sapien
tctatacgtttactcagtgctaggt

SEQ ID NO: 113561 - DNA, 25 bp, Homo sapien
tgatcagatcggaacatatcctcga

SEQ ID NO: 113562 - DNA, 25 bp, Homo sapien
caactcaaaagtggtagagatctcc

SEQ ID NO: 113563 - DNA, 25 bp, Homo sapien
aatccatgcaaccattcaccataac

SEQ ID NO: 113564 - DNA, 25 bp, Homo sapien
atccatgcaaccattcaccataact

SEQ ID NO: 113565 - DNA, 25 bp, Homo sapien
tggtactaaagtctttagtcaggtg

SEQ ID NO: 113566 - DNA, 25 bp, Homo sapien
ataaatagtcttggtactaaagtct

SEQ ID NO: 113567 - DNA, 25 bp, Homo sapien
gaaacactacatttcaacctttcta

SEQ ID NO: 113568 - DNA, 25 bp, Homo sapien
tctaagtagcgatgaagttcattca

SEQ ID NO: 113569 - DNA, 25 bp, Homo sapien
acactctagctgtaacaatgtgtgc

SEQ ID NO: 113570 - DNA, 25 bp, Homo sapien
tcacactctagctgtaacaatgtgt

SEQ ID NO: 113571 - DNA, 25 bp, Homo sapien
ttcacactctagctgtaacaatgtg

SEQ ID NO: 113572 - DNA, 25 bp, Homo sapien
ttttcacactctagctgtaacaatg

SEQ ID NO: 113573 - DNA, 25 bp, Homo sapien
attcatgttctaatgccaagataaa

SEQ ID NO: 113574 - DNA, 25 bp, Homo sapien
ttcatgttctaatgccaagataaaa

SEQ ID NO: 113575 - DNA, 25 bp, Homo sapien
aattcatgttctaatgccaagataa

SEQ ID NO: 113576 - DNA, 25 bp, Homo sapien
tttaatagtcttgtgtgattcatcg

SEQ ID NO: 113577 - DNA, 25 bp, Homo sapien
gattcatcgaccttaactttccatt

SEQ ID NO: 113578 - DNA, 25 bp, Homo sapien
aatagtcttgtgtgattcatcgacc

SEQ ID NO: 113579 - DNA, 25 bp, Homo sapien
tcttgtgtgattcatcgaccttaac

SEQ ID NO: 113580 - DNA, 25 bp, Homo sapien
gcaaaataacattcaggtcccagga

SEQ ID NO: 113581 - DNA, 25 bp, Homo sapien
gcattagactattctggagggctca

SEQ ID NO: 113582 - DNA, 25 bp, Homo sapien
gtaaattctgcacattggccccaaa

SEQ ID NO: 113583 - DNA, 25 bp, Homo sapien
tggttcaagccccacacatcgagaa

SEQ ID NO: 113584 - DNA, 25 bp, Homo sapien
taatcgctctagctcttgttctgaa

SEQ ID NO: 113585 - DNA, 25 bp, Homo sapien
tccttattttcgcttcttaatcgct

SEQ ID NO: 113586 - DNA, 25 bp, Homo sapien
gcttcttaatcgctctagctcttgt

SEQ ID NO: 113587 - DNA, 25 bp, Homo sapien
tattttcgcttcttaatcgctctag

SEQ ID NO: 113588 - DNA, 25 bp, Homo sapien
cctttcataatatttccccacaaga

SEQ ID NO: 113589 - DNA, 25 bp, Homo sapien
cactacccaagatattaagagcata

SEQ ID NO: 113590 - DNA, 25 bp, Homo sapien
taaactatagatcttcagacaaccg

SEQ ID NO: 113591 - DNA, 25 bp, Homo sapien
tcagacaaccgttaatgctaaaaac

SEQ ID NO: 113592 - DNA, 25 bp, Homo sapien
tgtaacataggtagatcgttccatc

SEQ ID NO: 113593 - DNA, 25 bp, Homo sapien
taggtagatcgttccatctctgcct

SEQ ID NO: 113594 - DNA, 25 bp, Homo sapien
ccatttccaaatgttctcgttctct

SEQ ID NO: 113595 - DNA, 25 bp, Homo sapien
ttccatttccaaatgttctcgttct

SEQ ID NO: 113596 - DNA, 25 bp, Homo sapien
ctgcaatgaagtttagagtttaaga

SEQ ID NO: 113597 - DNA, 25 bp, Homo sapien
gctctgccacaaacaacttatactg

SEQ ID NO: 113598 - DNA, 25 bp, Homo sapien
ttaagattgatctccttatgatagc

SEQ ID NO: 113599 - DNA, 25 bp, Homo sapien
tttgtatgctactcggaagctctgc

SEQ ID NO: 113600 - DNA, 25 bp, Homo sapien
tcttactgcttcagaatatgaatca

SEQ ID NO: 113601 - DNA, 25 bp, Homo sapien
atgaatcatcaagttttttctgcaa

SEQ ID NO: 113602 - DNA, 25 bp, Homo sapien
tgcttcagaatatgaatcatcaagt

SEQ ID NO: 113603 - DNA, 25 bp, Homo sapien
ttctgtcttactgcttcagaatatg

SEQ ID NO: 113604 - DNA, 25 bp, Homo sapien
ttgatacccagtggaggacaagctt

SEQ ID NO: 113605 - DNA, 25 bp, Homo sapien
tgatacccagtggaggacaagcttc

SEQ ID NO: 113606 - DNA, 25 bp, Homo sapien
gattatgctgatacctctaggactg

SEQ ID NO: 113607 - DNA, 25 bp, Homo sapien
tagaaccagtctcacaatgcagggt

SEQ ID NO: 113608 - DNA, 25 bp, Homo sapien
tagggctctgtgtgtatgaacatcc

SEQ ID NO: 113609 - DNA, 25 bp, Homo sapien
ggctaagcagtagaggttcccatct

SEQ ID NO: 113610 - DNA, 25 bp, Homo sapien
gtgtttcatttaactgtgccttcaa

SEQ ID NO: 113611 - DNA, 25 bp, Homo sapien
cttatgcaaatcaccagctaccttc

SEQ ID NO: 113612 - DNA, 25 bp, Homo sapien
cagttctaagttttgtgagtgtttc

SEQ ID NO: 113613 - DNA, 25 bp, Homo sapien
atcaccagctaccttctgtctttca

SEQ ID NO: 113614 - DNA, 25 bp, Homo sapien
tgtacagaatacaagctaagaatat

SEQ ID NO: 113615 - DNA, 25 bp, Homo sapien
tattagtctagattacaggttagtc

SEQ ID NO: 113616 - DNA, 25 bp, Homo sapien
aggttagtcaaatctggcccaaagc

SEQ ID NO: 113617 - DNA, 25 bp, Homo sapien
gatatttaggttagtattagtctag

SEQ ID NO: 113618 - DNA, 25 bp, Homo sapien
ctatttttgactggataagctccag

SEQ ID NO: 113619 - DNA, 25 bp, Homo sapien
agctcttagtaagtaagtgccaggc

SEQ ID NO: 113620 - DNA, 25 bp, Homo sapien
taaaaagccattgactggtacctgt

SEQ ID NO: 113621 - DNA, 25 bp, Homo sapien
taaagatctgcccaaattcacatgg

SEQ ID NO: 113622 - DNA, 25 bp, Homo sapien
tgactttcggagatggaccttatac

SEQ ID NO: 113623 - DNA, 25 bp, Homo sapien
cctttgtgagctgttggtttaccgc

SEQ ID NO: 113624 - DNA, 25 bp, Homo sapien
gctgttggtttaccgcctgaagcaa

SEQ ID NO: 113625 - DNA, 25 bp, Homo sapien
taacacctggtagtgctctttctcc

SEQ ID NO: 113626 - DNA, 25 bp, Homo sapien
tctgatttagacttacagacattgt

SEQ ID NO: 113627 - DNA, 25 bp, Homo sapien
tcagtgatgagttgcccctcagggt

SEQ ID NO: 113628 - DNA, 25 bp, Homo sapien
ggtcaaaggaggcacagataacccc

SEQ ID NO: 113629 - DNA, 25 bp, Homo sapien
tgaggccttgtatagcccaacacag

SEQ ID NO: 113630 - DNA, 25 bp, Homo sapien
caaaaactgcattcaccggctggaa

SEQ ID NO: 113631 - DNA, 25 bp, Homo sapien
attttgaaggagagcatgtgtcaag

SEQ ID NO: 113632 - DNA, 25 bp, Homo sapien
agcattttgaaggagagcatgtgtc

SEQ ID NO: 113633 - DNA, 25 bp, Homo sapien
gcattttgaaggagagcatgtgtca

SEQ ID NO: 113634 - DNA, 25 bp, Homo sapien
cattttgaaggagagcatgtgtcaa

SEQ ID NO: 113635 - DNA, 25 bp, Homo sapien
tataaagaagagctacgggaaccaa

SEQ ID NO: 113636 - DNA, 25 bp, Homo sapien
gaagggcctatattggatctagcaa

SEQ ID NO: 113637 - DNA, 25 bp, Homo sapien
tatcgcttaggtcgaaaggcaaggg

SEQ ID NO: 113638 - DNA, 25 bp, Homo sapien
gccaactgcgttgtgagggtataca

SEQ ID NO: 113639 - DNA, 25 bp, Homo sapien
ccccacaaatggaaagcggaggatg

SEQ ID NO: 113640 - DNA, 25 bp, Homo sapien
gttgaatacaaccttaccccagtga

SEQ ID NO: 113641 - DNA, 25 bp, Homo sapien
tgtacttcaggagccctacaaaagg

SEQ ID NO: 113642 - DNA, 25 bp, Homo sapien
caaaagggatcagtgaacacagtgc

SEQ ID NO: 113643 - DNA, 25 bp, Homo sapien
caacagaaggcaatcagaagacatt

SEQ ID NO: 113644 - DNA, 25 bp, Homo sapien
aaacaaagcaacagaaggcaatcag

SEQ ID NO: 113645 - DNA, 25 bp, Homo sapien
aatcagaagacatttgtcaaacacc

SEQ ID NO: 113646 - DNA, 25 bp, Homo sapien
caaacaccaaaagtacatattccat

SEQ ID NO: 113647 - DNA, 25 bp, Homo sapien
gaaaagacaaaactctgttcagtgt

SEQ ID NO: 113648 - DNA, 25 bp, Homo sapien
tatcctcaaatgaacagtttcccaa

SEQ ID NO: 113649 - DNA, 25 bp, Homo sapien
tatcttcaggaatgtaaaggtctaa

SEQ ID NO: 113650 - DNA, 25 bp, Homo sapien
aaactaaactctgaaggtgtctaca

SEQ ID NO: 113651 - DNA, 25 bp, Homo sapien
gtcagaggcagttacttcccaaaat

SEQ ID NO: 113652 - DNA, 25 bp, Homo sapien
gtaaaacagtgtacaacatcagtat

SEQ ID NO: 113653 - DNA, 25 bp, Homo sapien
cttgagttgaagtcagaggcagtta

SEQ ID NO: 113654 - DNA, 25 bp, Homo sapien
caaaaaccgattacattagcaacaa

SEQ ID NO: 113655 - DNA, 25 bp, Homo sapien
gggcactttacattggaccaaactg

SEQ ID NO: 113656 - DNA, 25 bp, Homo sapien
gtgccaatgcactcctgcgtggaca

SEQ ID NO: 113657 - DNA, 25 bp, Homo sapien
catgtaaactgtgtaaccgtgcctg

SEQ ID NO: 113658 - DNA, 25 bp, Homo sapien
catcagttagaaaggttacagaggc

SEQ ID NO: 113659 - DNA, 25 bp, Homo sapien
tgacaggagactggactgtgtcccc

SEQ ID NO: 113660 - DNA, 25 bp, Homo sapien
tagaaaaaggtagcttgaatcccca

SEQ ID NO: 113661 - DNA, 25 bp, Homo sapien
gatgatgtagtatctggccttcaga

SEQ ID NO: 113662 - DNA, 25 bp, Homo sapien
gaatttgttcgttacaggtggcagc

SEQ ID NO: 113663 - DNA, 25 bp, Homo sapien
atcactactgatctcatcagaagac

SEQ ID NO: 113664 - DNA, 25 bp, Homo sapien
tcactactgatctcatcagaagaca

SEQ ID NO: 113665 - DNA, 25 bp, Homo sapien
atgcatgactttgtaacactgtgca

SEQ ID NO: 113666 - DNA, 25 bp, Homo sapien
tgataagcctgcacaatttaggtgg

SEQ ID NO: 113667 - DNA, 25 bp, Homo sapien
ggtatatgccctagaaaagctccta

SEQ ID NO: 113668 - DNA, 25 bp, Homo sapien
cctagcaggaggtattcagatcact

SEQ ID NO: 113669 - DNA, 25 bp, Homo sapien
taagccaaagttccatccctaggta

SEQ ID NO: 113670 - DNA, 25 bp, Homo sapien
catatcccgaattatcactgcctca

SEQ ID NO: 113671 - DNA, 25 bp, Homo sapien
ccatgatttgatggctggagtagcc

SEQ ID NO: 113672 - DNA, 25 bp, Homo sapien
atgatttgatggctggagtagccct

SEQ ID NO: 113673 - DNA, 25 bp, Homo sapien
cgaattatcactgcctcataatctt

SEQ ID NO: 113674 - DNA, 25 bp, Homo sapien
cagagagaggtttagtatccaggca

SEQ ID NO: 113675 - DNA, 25 bp, Homo sapien
taagctagactgaaaccttggcgca

SEQ ID NO: 113676 - DNA, 25 bp, Homo sapien
gaaaacacgaactggtgcccaaagc

SEQ ID NO: 113677 - DNA, 25 bp, Homo sapien
tcatcggacacaccaagaagccagt

SEQ ID NO: 113678 - DNA, 25 bp, Homo sapien
tctccctaacatgactcatgtctgg

SEQ ID NO: 113679 - DNA, 25 bp, Homo sapien
ggcagacatctacataccctttgtt

SEQ ID NO: 113680 - DNA, 25 bp, Homo sapien
ggcccaactggatagatgccaagac

SEQ ID NO: 113681 - DNA, 25 bp, Homo sapien
catgactcatgtctggtccatggca

SEQ ID NO: 113682 - DNA, 25 bp, Homo sapien
attgattttagggccaattctcctg

SEQ ID NO: 113683 - DNA, 25 bp, Homo sapien
ttcattgattttagggccaattctc

SEQ ID NO: 113684 - DNA, 25 bp, Homo sapien
tcattgattttagggccaattctcc

SEQ ID NO: 113685 - DNA, 25 bp, Homo sapien
ctggagacaagaggttaaaggggtg

SEQ ID NO: 113686 - DNA, 25 bp, Homo sapien
tatcctagtttgaaggaaatcaggc

SEQ ID NO: 113687 - DNA, 25 bp, Homo sapien
ggctcatgcaattacagaagctggt

SEQ ID NO: 113688 - DNA, 25 bp, Homo sapien
gaagctggttaagtcccaaggtctg

SEQ ID NO: 113689 - DNA, 25 bp, Homo sapien
gagggtctgacttccttcagaaaga

SEQ ID NO: 113690 - DNA, 25 bp, Homo sapien
tcttggttgtccctgaaacatacac

SEQ ID NO: 113691 - DNA, 25 bp, Homo sapien
gactccaaatgcgtcagtctgtctc

SEQ ID NO: 113692 - DNA, 25 bp, Homo sapien
catggagagactagatatacctctg

SEQ ID NO: 113693 - DNA, 25 bp, Homo sapien
gaacccattgagcagtctttgactc

SEQ ID NO: 113694 - DNA, 25 bp, Homo sapien
ggagacttaattgatttgtacgtga

SEQ ID NO: 113695 - DNA, 25 bp, Homo sapien
tgaatcaaggctccatacaaagtca

SEQ ID NO: 113696 - DNA, 25 bp, Homo sapien
ctagcgaagtttggtcacaaatgtg

SEQ ID NO: 113697 - DNA, 25 bp, Homo sapien
tgtacgtgaaaaacgccacagtgcc

SEQ ID NO: 113698 - DNA, 25 bp, Homo sapien
cttaagatcaggatcccctggcaaa

SEQ ID NO: 113699 - DNA, 25 bp, Homo sapien
taaccgatacttgaagcaagccacc

SEQ ID NO: 113700 - DNA, 25 bp, Homo sapien
agcaaacagcttaagcagccaacag

SEQ ID NO: 113701 - DNA, 25 bp, Homo sapien
cagccaacagcataaggagcagaga

SEQ ID NO: 113702 - DNA, 25 bp, Homo sapien
tcagttccaggggattcccaccaag

SEQ ID NO: 113703 - DNA, 25 bp, Homo sapien
aggggcagctcttcgccttctcagt

SEQ ID NO: 113704 - DNA, 25 bp, Homo sapien
cacagcattgctgacaggggcagct

SEQ ID NO: 113705 - DNA, 25 bp, Homo sapien
caccaagctggggtagttccaatcc

SEQ ID NO: 113706 - DNA, 25 bp, Homo sapien
catggtcttagagcagaggaacacc

SEQ ID NO: 113707 - DNA, 25 bp, Homo sapien
atggtcttagagcagaggaacacca

SEQ ID NO: 113708 - DNA, 25 bp, Homo sapien
tggtcttagagcagaggaacaccac

SEQ ID NO: 113709 - DNA, 25 bp, Homo sapien
gctggcatattcagcgagataatat

SEQ ID NO: 113710 - DNA, 25 bp, Homo sapien
tctacatcattcagggctgtgatgc

SEQ ID NO: 113711 - DNA, 25 bp, Homo sapien
tccctcatctacatcattcagggct

SEQ ID NO: 113712 - DNA, 25 bp, Homo sapien
cttgcctgaggtgctactccctcat

SEQ ID NO: 113713 - DNA, 25 bp, Homo sapien
atgggagcagtagcattctggctgg

SEQ ID NO: 113714 - DNA, 25 bp, Homo sapien
ctggtgggtgacagcatgtaagtga

SEQ ID NO: 113715 - DNA, 25 bp, Homo sapien
aatgggagcagtagcattctggctg

SEQ ID NO: 113716 - DNA, 25 bp, Homo sapien
cttcccagacaccacacatgggcag

SEQ ID NO: 113717 - DNA, 25 bp, Homo sapien
aatggatacaagatagcagaagatg

SEQ ID NO: 113718 - DNA, 25 bp, Homo sapien
caacgcagcttctgaatggatacaa

SEQ ID NO: 113719 - DNA, 25 bp, Homo sapien
ggatacaagatagcagaagatgctc

SEQ ID NO: 113720 - DNA, 25 bp, Homo sapien
tctgctgtgccatcttcaacgcagc

SEQ ID NO: 113721 - DNA, 25 bp, Homo sapien
aatcgagacctccattcttgcataa

SEQ ID NO: 113722 - DNA, 25 bp, Homo sapien
tcttgcataatggtacctggacttg

SEQ ID NO: 113723 - DNA, 25 bp, Homo sapien
tatctgcatccaaggagttaacaaa

SEQ ID NO: 113724 - DNA, 25 bp, Homo sapien
tacgcagagttggattatcttatct

SEQ ID NO: 113725 - DNA, 25 bp, Homo sapien
ggaggtaagggtcctcgcacagcct

SEQ ID NO: 113726 - DNA, 25 bp, Homo sapien
atgatggaggtaagggtcctcgcac

SEQ ID NO: 113727 - DNA, 25 bp, Homo sapien
tctctgcaggttgaatgatggaggt

SEQ ID NO: 113728 - DNA, 25 bp, Homo sapien
atggaggtaagggtcctcgcacagc

SEQ ID NO: 113729 - DNA, 25 bp, Homo sapien
tggcaggcagagagattcaaaatga

SEQ ID NO: 113730 - DNA, 25 bp, Homo sapien
tggatcccacgacacataacaaatg

SEQ ID NO: 113731 - DNA, 25 bp, Homo sapien
tccaattgatcagcctggatcccac

SEQ ID NO: 113732 - DNA, 25 bp, Homo sapien
ccacgttgcgttggaatatttctgg

SEQ ID NO: 113733 - DNA, 25 bp, Homo sapien
tgttatgaataagctgtcttctgac

SEQ ID NO: 113734 - DNA, 25 bp, Homo sapien
tctgactggctcaggtcacaacgta

SEQ ID NO: 113735 - DNA, 25 bp, Homo sapien
caggtcacaacgtatgtttattaat

SEQ ID NO: 113736 - DNA, 25 bp, Homo sapien
ttatgaataagctgtcttctgactg

SEQ ID NO: 113737 - DNA, 25 bp, Homo sapien
cttacccagattttctaggtgctcc

SEQ ID NO: 113738 - DNA, 25 bp, Homo sapien
tagcgatagaattatcatagccaga

SEQ ID NO: 113739 - DNA, 25 bp, Homo sapien
cagattttctaggtgctcctggcag

SEQ ID NO: 113740 - DNA, 25 bp, Homo sapien
gccaatggtctgctatagcgataga

SEQ ID NO: 113741 - DNA, 25 bp, Homo sapien
cgagcaccaggacctgcacctctgc

SEQ ID NO: 113742 - DNA, 25 bp, Homo sapien
catcgagcaccaggacctgcacctc

SEQ ID NO: 113743 - DNA, 25 bp, Homo sapien
gcaccaggacctgcacctctgccat

SEQ ID NO: 113744 - DNA, 25 bp, Homo sapien
atcgagcaccaggacctgcacctct

SEQ ID NO: 113745 - DNA, 25 bp, Homo sapien
aggcggcccaggagatggccttgac

SEQ ID NO: 113746 - DNA, 25 bp, Homo sapien
ggccgccaggcggcccaggagatgg

SEQ ID NO: 113747 - DNA, 25 bp, Homo sapien
gatggccgccaggcggcccaggaga

SEQ ID NO: 113748 - DNA, 25 bp, Homo sapien
ccaggcggcccaggagatggccttg

SEQ ID NO: 113749 - DNA, 25 bp, Homo sapien
ttgatgccctcgcagcgtacgacta

SEQ ID NO: 113750 - DNA, 25 bp, Homo sapien
tgatgccctcgcagcgtacgactac

SEQ ID NO: 113751 - DNA, 25 bp, Homo sapien
agagatgttgatgccctcgcagcgt

SEQ ID NO: 113752 - DNA, 25 bp, Homo sapien
gatgttgatgccctcgcagcgtacg

SEQ ID NO: 113753 - DNA, 25 bp, Homo sapien
cttgccgaggaaagccagattcttc

SEQ ID NO: 113754 - DNA, 25 bp, Homo sapien
cgcttgccgaggaaagccagattct

SEQ ID NO: 113755 - DNA, 25 bp, Homo sapien
gccgaggaaagccagattcttcaac

SEQ ID NO: 113756 - DNA, 25 bp, Homo sapien
cggaagtggtaggcgcttcgaaaag

SEQ ID NO: 113757 - DNA, 25 bp, Homo sapien
agcctgtcgccccagaagggcaaac

SEQ ID NO: 113758 - DNA, 25 bp, Homo sapien
tcttgagcctgtcgccccagaaggg

SEQ ID NO: 113759 - DNA, 25 bp, Homo sapien
ctcttgagcctgtcgccccagaagg

SEQ ID NO: 113760 - DNA, 25 bp, Homo sapien
ctgtcgccccagaagggcaaacttt

SEQ ID NO: 113761 - DNA, 25 bp, Homo sapien
cttcttccagtagtggatcttggct

SEQ ID NO: 113762 - DNA, 25 bp, Homo sapien
tcttctcggcctgtttccgtagcct

SEQ ID NO: 113763 - DNA, 25 bp, Homo sapien
ttcttcttccagtagtggatcttgg

SEQ ID NO: 113764 - DNA, 25 bp, Homo sapien
gtttcttcttccagtagtggatctt

SEQ ID NO: 113765 - DNA, 25 bp, Homo sapien
tatcaatcagttcttgcctgggcta

SEQ ID NO: 113766 - DNA, 25 bp, Homo sapien
tccgagcgctttcaagtaacgtcag

SEQ ID NO: 113767 - DNA, 25 bp, Homo sapien
taaacaggagctccactcacaaggg

SEQ ID NO: 113768 - DNA, 25 bp, Homo sapien
tctatgctgctataaataccctgtg

SEQ ID NO: 113769 - DNA, 25 bp, Homo sapien
gaattgaagatcctcttctcaggga

SEQ ID NO: 113770 - DNA, 25 bp, Homo sapien
caggagctccgggaggcataaatga

SEQ ID NO: 113771 - DNA, 25 bp, Homo sapien
tatctgtaaggcagtgctgttccag

SEQ ID NO: 113772 - DNA, 25 bp, Homo sapien
gctccgggaggcataaatgaattga

SEQ ID NO: 113773 - DNA, 25 bp, Homo sapien
cattccccttcctcggaagttattg

SEQ ID NO: 113774 - DNA, 25 bp, Homo sapien
tggcattccccttcctcggaagtta

SEQ ID NO: 113775 - DNA, 25 bp, Homo sapien
tcttcctcaaaagtaatattgtgag

SEQ ID NO: 113776 - DNA, 25 bp, Homo sapien
caaaagtaatattgtgaggacagag

SEQ ID NO: 113777 - DNA, 25 bp, Homo sapien
acagaggcagccttgctgtaaatgg

SEQ ID NO: 113778 - DNA, 25 bp, Homo sapien
gctgtaaatggttctggtgtcagcc

SEQ ID NO: 113779 - DNA, 25 bp, Homo sapien
tgagcttccttaaaaagatgcccct

SEQ ID NO: 113780 - DNA, 25 bp, Homo sapien
tccaaggtcaccaaagtatctaaga

SEQ ID NO: 113781 - DNA, 25 bp, Homo sapien
tgtttgaacattgaagaggtctggg

SEQ ID NO: 113782 - DNA, 25 bp, Homo sapien
aatggttctggagggctattctgag

SEQ ID NO: 113783 - DNA, 25 bp, Homo sapien
tccagtcatgctagtctcaggtggc

SEQ ID NO: 113784 - DNA, 25 bp, Homo sapien
gagcaaaaccagagggtcccatcca

SEQ ID NO: 113785 - DNA, 25 bp, Homo sapien
accctggtcactcagtaactgtgtg

SEQ ID NO: 113786 - DNA, 25 bp, Homo sapien
ggagcaaagtagactccacagtggt

SEQ ID NO: 113787 - DNA, 25 bp, Homo sapien
gtctgccccactgatgagcactcat

SEQ ID NO: 113788 - DNA, 25 bp, Homo sapien
tgtgttctctatggccaagtctggg

SEQ ID NO: 113789 - DNA, 25 bp, Homo sapien
taaattttgacatgtacgtagtccc

SEQ ID NO: 113790 - DNA, 25 bp, Homo sapien
aacacagattggcacctgtctgccc

SEQ ID NO: 113791 - DNA, 25 bp, Homo sapien
gaattttggtgacagcatagggtga

SEQ ID NO: 113792 - DNA, 25 bp, Homo sapien
tctgactggtaccaacgactccagg

SEQ ID NO: 113793 - DNA, 25 bp, Homo sapien
cagaactgtataggcctgtgtgggc

SEQ ID NO: 113794 - DNA, 25 bp, Homo sapien
ggttgacctgtccaagagctctctc

SEQ ID NO: 113795 - DNA, 25 bp, Homo sapien
tgcttctgtgcagtgacttgaggag

SEQ ID NO: 113796 - DNA, 25 bp, Homo sapien
catcaattgtttgaaaaaccctgag

SEQ ID NO: 113797 - DNA, 25 bp, Homo sapien
gctaataattgagtcagccacaacc

SEQ ID NO: 113798 - DNA, 25 bp, Homo sapien
gggaaaaggcaataacatcaattgt

SEQ ID NO: 113799 - DNA, 25 bp, Homo sapien
gatggtggcacaagacccatcttac

SEQ ID NO: 113800 - DNA, 25 bp, Homo sapien
aatcaggggtgaagctgatggtggc

SEQ ID NO: 113801 - DNA, 25 bp, Homo sapien
tagggtcacatagtaaatcaggggt

SEQ ID NO: 113802 - DNA, 25 bp, Homo sapien
ctagggtcacatagtaaatcagggg

SEQ ID NO: 113803 - DNA, 25 bp, Homo sapien
agtaatagatgacccctcgatggcc

SEQ ID NO: 113804 - DNA, 25 bp, Homo sapien
cttggacagcagtaatagatgaccc

SEQ ID NO: 113805 - DNA, 25 bp, Homo sapien
tgacccctcgatggcctgagggtgc

SEQ ID NO: 113806 - DNA, 25 bp, Homo sapien
gacagcagtaatagatgacccctcg

SEQ ID NO: 113807 - DNA, 25 bp, Homo sapien
tgtcaccacgatcagtgaaatctct

SEQ ID NO: 113808 - DNA, 25 bp, Homo sapien
ccacgatcagtgaaatctctccaaa

SEQ ID NO: 113809 - DNA, 25 bp, Homo sapien
tgtgtcaccacgatcagtgaaatct

SEQ ID NO: 113810 - DNA, 25 bp, Homo sapien
ctctgtgtcaccacgatcagtgaaa

SEQ ID NO: 113811 - DNA, 25 bp, Homo sapien
tcttttccacataatttctgctttt

SEQ ID NO: 113812 - DNA, 25 bp, Homo sapien
tctcttttccacataatttctgctt

SEQ ID NO: 113813 - DNA, 25 bp, Homo sapien
ttttttcttccctcatagcgcttac

SEQ ID NO: 113814 - DNA, 25 bp, Homo sapien
gcttttttcttccctcatagcgctt

SEQ ID NO: 113815 - DNA, 25 bp, Homo sapien
ccctgtgaaggcttcagtattcaca

SEQ ID NO: 113816 - DNA, 25 bp, Homo sapien
ggaactgacagaggctaagaacaca

SEQ ID NO: 113817 - DNA, 25 bp, Homo sapien
ggcacagcaggaaggaactgacaga

SEQ ID NO: 113818 - DNA, 25 bp, Homo sapien
caatcactgggcagttctaaccctg

SEQ ID NO: 113819 - DNA, 25 bp, Homo sapien
aattttctacttaccatgttgtcgg

SEQ ID NO: 113820 - DNA, 25 bp, Homo sapien
gaaacccggtgtgagacagtgtgat

SEQ ID NO: 113821 - DNA, 25 bp, Homo sapien
taagtgcgtgcgatcttccaggaca

SEQ ID NO: 113822 - DNA, 25 bp, Homo sapien
caaatgcagaagcacgtaacttaca

SEQ ID NO: 113823 - DNA, 25 bp, Homo sapien
cattgtcgctcatagccctcattca

SEQ ID NO: 113824 - DNA, 25 bp, Homo sapien
tgctgcagtgcgtccccacgggtgt

SEQ ID NO: 113825 - DNA, 25 bp, Homo sapien
tctgtgccgtagttaaccttctctt

SEQ ID NO: 113826 - DNA, 25 bp, Homo sapien
tcatggctaccacctctaacacagt

SEQ ID NO: 113827 - DNA, 25 bp, Homo sapien
tctggaggatctgccacaataatgt

SEQ ID NO: 113828 - DNA, 25 bp, Homo sapien
gctgtaggaagttaccaggtagcct

SEQ ID NO: 113829 - DNA, 25 bp, Homo sapien
tgctcaactaggcaatgcatctctg

SEQ ID NO: 113830 - DNA, 25 bp, Homo sapien
gatataggaagagcccgtgtcttca

SEQ ID NO: 113831 - DNA, 25 bp, Homo sapien
tccacctgcatatggcctgagcaat

SEQ ID NO: 113832 - DNA, 25 bp, Homo sapien
agctgatggtcagcctcaaggcagc

SEQ ID NO: 113833 - DNA, 25 bp, Homo sapien
gcctgagcaatctgcaagctccact

SEQ ID NO: 113834 - DNA, 25 bp, Homo sapien
ctacccaagatccaccaactaaagg

SEQ ID NO: 113835 - DNA, 25 bp, Homo sapien
gatgccgctcatgtcttctatgctt

SEQ ID NO: 113836 - DNA, 25 bp, Homo sapien
aatagaggcaagaagatgccgctca

SEQ ID NO: 113837 - DNA, 25 bp, Homo sapien
gaagatacccagatggtggtctctg

SEQ ID NO: 113838 - DNA, 25 bp, Homo sapien
gacaccagcatgctccggcattgca

SEQ ID NO: 113839 - DNA, 25 bp, Homo sapien
taatttcatcatacgcaccttgcat

SEQ ID NO: 113840 - DNA, 25 bp, Homo sapien
gattcctggcacaatcctcgtattt

SEQ ID NO: 113841 - DNA, 25 bp, Homo sapien
ctcgtatttgttatagggctattaa

SEQ ID NO: 113842 - DNA, 25 bp, Homo sapien
cagaaagcaggcttgcaatgtctac

SEQ ID NO: 113843 - DNA, 25 bp, Homo sapien
ccgtttgtaatcagagccataggaa

SEQ ID NO: 113844 - DNA, 25 bp, Homo sapien
ttttgctgtccgtttgtaatcagag

SEQ ID NO: 113845 - DNA, 25 bp, Homo sapien
gtaatcagagccataggaacttggg

SEQ ID NO: 113846 - DNA, 25 bp, Homo sapien
tgtccgtttgtaatcagagccatag

SEQ ID NO: 113847 - DNA, 25 bp, Homo sapien
tccacttcgggatcacgcaggtgct

SEQ ID NO: 113848 - DNA, 25 bp, Homo sapien
cacttcgggatcacgcaggtgctga

SEQ ID NO: 113849 - DNA, 25 bp, Homo sapien
tgtccacttcgggatcacgcaggtg

SEQ ID NO: 113850 - DNA, 25 bp, Homo sapien
tcagtgtccacttcgggatcacgca

SEQ ID NO: 113851 - DNA, 25 bp, Homo sapien
aaaatgttagatgggcagcaatgac

SEQ ID NO: 113852 - DNA, 25 bp, Homo sapien
tataaaatgttagatgggcagcaat

SEQ ID NO: 113853 - DNA, 25 bp, Homo sapien
ctataaaatgttagatgggcagcaa

SEQ ID NO: 113854 - DNA, 25 bp, Homo sapien
gctgccaggatatgccttgtttaga

SEQ ID NO: 113855 - DNA, 25 bp, Homo sapien
tatgccttgtttagaaaggagggcc

SEQ ID NO: 113856 - DNA, 25 bp, Homo sapien
caggatatgccttgtttagaaagga

SEQ ID NO: 113857 - DNA, 25 bp, Homo sapien
ctcccgctgccaggatatgccttgt

SEQ ID NO: 113858 - DNA, 25 bp, Homo sapien
atttctgggttacttccttatccat

SEQ ID NO: 113859 - DNA, 25 bp, Homo sapien
cctttaagactcttccctctgtaga

SEQ ID NO: 113860 - DNA, 25 bp, Homo sapien
tggacttgcctccagtctctcggta

SEQ ID NO: 113861 - DNA, 25 bp, Homo sapien
tggcctctgtagcttatgccagtca

SEQ ID NO: 113862 - DNA, 25 bp, Homo sapien
tccagtctctcggtagcccactttg

SEQ ID NO: 113863 - DNA, 25 bp, Homo sapien
cacagtagctggctactgattgcac

SEQ ID NO: 113864 - DNA, 25 bp, Homo sapien
gggcttcacctgctctcgggtacat

SEQ ID NO: 113865 - DNA, 25 bp, Homo sapien
tcggtcctcgctctggcctggactg

SEQ ID NO: 113866 - DNA, 25 bp, Homo sapien
gctctgagaaccaggctcctggaat

SEQ ID NO: 113867 - DNA, 25 bp, Homo sapien
tcgctctggcctggactgagatttt

SEQ ID NO: 113868 - DNA, 25 bp, Homo sapien
catttctgtgtaggtatgtgatgtg

SEQ ID NO: 113869 - DNA, 25 bp, Homo sapien
attgtaacctgtgaagcatttctgt

SEQ ID NO: 113870 - DNA, 25 bp, Homo sapien
ctgtattgtaacctgtgaagcattt

SEQ ID NO: 113871 - DNA, 25 bp, Homo sapien
tctgtgtaggtatgtgatgtgtgcc

SEQ ID NO: 113872 - DNA, 25 bp, Homo sapien
cactatacccctaatgcccagatag

SEQ ID NO: 113873 - DNA, 25 bp, Homo sapien
ttccacctccactatacccctaatg

SEQ ID NO: 113874 - DNA, 25 bp, Homo sapien
gatagcatgtgacgccagggagctt

SEQ ID NO: 113875 - DNA, 25 bp, Homo sapien
aatgcccagatagcatgtgacgcca

SEQ ID NO: 113876 - DNA, 25 bp, Homo sapien
aatgcagacaggacacggtttcccc

SEQ ID NO: 113877 - DNA, 25 bp, Homo sapien
cacagcctgtcccacatcaaggaat

SEQ ID NO: 113878 - DNA, 25 bp, Homo sapien
gagccattgtctaggaatgcagaca

SEQ ID NO: 113879 - DNA, 25 bp, Homo sapien
caaggtcagtggaaagaggctttgc

SEQ ID NO: 113880 - DNA, 25 bp, Homo sapien
gaagctggtgacaaatccattcaca

SEQ ID NO: 113881 - DNA, 25 bp, Homo sapien
tggaagctggtgacaaatccattca

SEQ ID NO: 113882 - DNA, 25 bp, Homo sapien
ttggaagctggtgacaaatccattc

SEQ ID NO: 113883 - DNA, 25 bp, Homo sapien
agctggtgacaaatccattcacagc

SEQ ID NO: 113884 - DNA, 25 bp, Homo sapien
cacttggcatctagcttctccagac

SEQ ID NO: 113885 - DNA, 25 bp, Homo sapien
atgtccacagccacacttggcatct

SEQ ID NO: 113886 - DNA, 25 bp, Homo sapien
agccacacttggcatctagcttctc

SEQ ID NO: 113887 - DNA, 25 bp, Homo sapien
tggacatcctctggatgtccacagc

SEQ ID NO: 113888 - DNA, 25 bp, Homo sapien
tcagcccttgcttcttcgatagata

SEQ ID NO: 113889 - DNA, 25 bp, Homo sapien
ttcttcgatagatacagagctctct

SEQ ID NO: 113890 - DNA, 25 bp, Homo sapien
tgcttcttcgatagatacagagctc

SEQ ID NO: 113891 - DNA, 25 bp, Homo sapien
gcccttgcttcttcgatagatacag

SEQ ID NO: 113892 - DNA, 25 bp, Homo sapien
tcatgtgaaagccaagactgtcccc

SEQ ID NO: 113893 - DNA, 25 bp, Homo sapien
catccatgcaagatgcagcaggctt

SEQ ID NO: 113894 - DNA, 25 bp, Homo sapien
aattcatccaagaagctgctctgcc

SEQ ID NO: 113895 - DNA, 25 bp, Homo sapien
gttgggagaccctgcaattcatcca

SEQ ID NO: 113896 - DNA, 25 bp, Homo sapien
tgggtgctgctgaccagtgccagct

SEQ ID NO: 113897 - DNA, 25 bp, Homo sapien
ttgaagctgtatttacacagtgctc

SEQ ID NO: 113898 - DNA, 25 bp, Homo sapien
tgctctcggaaaaatgacagttgac

SEQ ID NO: 113899 - DNA, 25 bp, Homo sapien
gaggggcttacacgctccaggaaat

SEQ ID NO: 113900 - DNA, 25 bp, Homo sapien
ggttagccacaccagtaattcagag

SEQ ID NO: 113901 - DNA, 25 bp, Homo sapien
gatgatgaacgttaccttagactcg

SEQ ID NO: 113902 - DNA, 25 bp, Homo sapien
tgttgtgtaatcaggagcatcccat

SEQ ID NO: 113903 - DNA, 25 bp, Homo sapien
tcttggcttagataggcagagtgcc

SEQ ID NO: 113904 - DNA, 25 bp, Homo sapien
tgggccagtcgccagcaggtctaga

SEQ ID NO: 113905 - DNA, 25 bp, Homo sapien
tcgccagcaggtctagaagtgggcc

SEQ ID NO: 113906 - DNA, 25 bp, Homo sapien
cagcaggtctagaagtgggccccag

SEQ ID NO: 113907 - DNA, 25 bp, Homo sapien
aaaggctgggccagtcgccagcagg

SEQ ID NO: 113908 - DNA, 25 bp, Homo sapien
attttctccagccaaccgtcgtgac

SEQ ID NO: 113909 - DNA, 25 bp, Homo sapien
gcactcatcttggacacaggccaca

SEQ ID NO: 113910 - DNA, 25 bp, Homo sapien
ccgtcgtgacactgattcattgttt

SEQ ID NO: 113911 - DNA, 25 bp, Homo sapien
gcccacttgtgccagcttgttggca

SEQ ID NO: 113912 - DNA, 25 bp, Homo sapien
cttgcctctggttatttgccttcaa

SEQ ID NO: 113913 - DNA, 25 bp, Homo sapien
tgcctctggttatttgccttcaatc

SEQ ID NO: 113914 - DNA, 25 bp, Homo sapien
atctgttagaaactcttgcctctgg

SEQ ID NO: 113915 - DNA, 25 bp, Homo sapien
gatctgttagaaactcttgcctctg

SEQ ID NO: 113916 - DNA, 25 bp, Homo sapien
gaaaatgtggaattattgacatctc

SEQ ID NO: 113917 - DNA, 25 bp, Homo sapien
catcaccataagctgaactcaacgg

SEQ ID NO: 113918 - DNA, 25 bp, Homo sapien
ctcaaactctacaggtccaaaagca

SEQ ID NO: 113919 - DNA, 25 bp, Homo sapien
agcattctttaactcagggaatggg

SEQ ID NO: 113920 - DNA, 25 bp, Homo sapien
cctgaacttggtcatcctcacagcc

SEQ ID NO: 113921 - DNA, 25 bp, Homo sapien
aacttggtcatcctcacagcctctt

SEQ ID NO: 113922 - DNA, 25 bp, Homo sapien
agcctctttcttcttcttttaccat

SEQ ID NO: 113923 - DNA, 25 bp, Homo sapien
tgaacttggtcatcctcacagcctc

SEQ ID NO: 113924 - DNA, 25 bp, Homo sapien
cattagattatcgaggacactctcc

SEQ ID NO: 113925 - DNA, 25 bp, Homo sapien
ggctatagccaagcgaagctgacac

SEQ ID NO: 113926 - DNA, 25 bp, Homo sapien
cactttgaaacacagcattatgggc

SEQ ID NO: 113927 - DNA, 25 bp, Homo sapien
aactgattgaaccaggcccattaga

SEQ ID NO: 113928 - DNA, 25 bp, Homo sapien
ggtacacagacatctcagaatctga

SEQ ID NO: 113929 - DNA, 25 bp, Homo sapien
cctggtacacagacatctcagaatc

SEQ ID NO: 113930 - DNA, 25 bp, Homo sapien
tacacagacatctcagaatctgagg

SEQ ID NO: 113931 - DNA, 25 bp, Homo sapien
acagacatctcagaatctgaggggc

SEQ ID NO: 113932 - DNA, 25 bp, Homo sapien
cttcaaatggacttgcactgcttct

SEQ ID NO: 113933 - DNA, 25 bp, Homo sapien
gttcagtgaaaaaagagccgctggg

SEQ ID NO: 113934 - DNA, 25 bp, Homo sapien
gaggacaaattacacagccgagccc

SEQ ID NO: 113935 - DNA, 25 bp, Homo sapien
aaattcccacaatgcttgttcagtg

SEQ ID NO: 113936 - DNA, 25 bp, Homo sapien
gaagtagcacctttccatactgccc

SEQ ID NO: 113937 - DNA, 25 bp, Homo sapien
catttgcaataacctcaaagccttt

SEQ ID NO: 113938 - DNA, 25 bp, Homo sapien
tcccttgaagtagcacctttccata

SEQ ID NO: 113939 - DNA, 25 bp, Homo sapien
tccatactgccctgctctcctagta

SEQ ID NO: 113940 - DNA, 25 bp, Homo sapien
ctgtagcccactccaccccagtccc

SEQ ID NO: 113941 - DNA, 25 bp, Homo sapien
tagcccactccaccccagtccccca

SEQ ID NO: 113942 - DNA, 25 bp, Homo sapien
tgtagcccactccaccccagtcccc

SEQ ID NO: 113943 - DNA, 25 bp, Homo sapien
cagggagacggacttggatgcaaat

SEQ ID NO: 113944 - DNA, 25 bp, Homo sapien
aagctacaatgcagtgggagcctcg

SEQ ID NO: 113945 - DNA, 25 bp, Homo sapien
caaaataccacttagcagggagacg

SEQ ID NO: 113946 - DNA, 25 bp, Homo sapien
taactccggaggctgtacagtcatg

SEQ ID NO: 113947 - DNA, 25 bp, Homo sapien
caaggaaggccccaattaccacatt

SEQ ID NO: 113948 - DNA, 25 bp, Homo sapien
ctgggcaggcaataattcaggtctc

SEQ ID NO: 113949 - DNA, 25 bp, Homo sapien
aaacatgctgcgcttcgaacttccc

SEQ ID NO: 113950 - DNA, 25 bp, Homo sapien
gggacagcattcgataaacatgctg

SEQ ID NO: 113951 - DNA, 25 bp, Homo sapien
tcaagaaaagtagagacgtaaccac

SEQ ID NO: 113952 - DNA, 25 bp, Homo sapien
taccactaatctactgggtcatagg

SEQ ID NO: 113953 - DNA, 25 bp, Homo sapien
ggtcataggacccaagagctaaggg

SEQ ID NO: 113954 - DNA, 25 bp, Homo sapien
taattcagtacatgttccaaagcgt

SEQ ID NO: 113955 - DNA, 25 bp, Homo sapien
catattataagcacagtctcatgtc

SEQ ID NO: 113956 - DNA, 25 bp, Homo sapien
aagacatggatcttgtcatattatt

SEQ ID NO: 113957 - DNA, 25 bp, Homo sapien
cccagtaggattgtagctcattgaa

SEQ ID NO: 113958 - DNA, 25 bp, Homo sapien
ttctttcatcatattataagcacag

SEQ ID NO: 113959 - DNA, 25 bp, Homo sapien
gtattattattggttaagtgtccca

SEQ ID NO: 113960 - DNA, 25 bp, Homo sapien
gatctgcactcttccttcttgtgct

SEQ ID NO: 113961 - DNA, 25 bp, Homo sapien
tattattggttaagtgtcccagtcc

SEQ ID NO: 113962 - DNA, 25 bp, Homo sapien
gtcccagtcctggatctgcactctt

SEQ ID NO: 113963 - DNA, 25 bp, Homo sapien
cttccaaaatggcacctgttgctgc

SEQ ID NO: 113964 - DNA, 25 bp, Homo sapien
gatgccggcagatttaatgcccagt

SEQ ID NO: 113965 - DNA, 25 bp, Homo sapien
aagatgccggcagatttaatgccca

SEQ ID NO: 113966 - DNA, 25 bp, Homo sapien
gcccagtgagagcttgttctctgct

SEQ ID NO: 113967 - DNA, 25 bp, Homo sapien
tatgtctagtcagtatgtttgttcc

SEQ ID NO: 113968 - DNA, 25 bp, Homo sapien
gttgccaagttctaaatgcttaaaa

SEQ ID NO: 113969 - DNA, 25 bp, Homo sapien
tgttccaccctacttgttgccaagt

SEQ ID NO: 113970 - DNA, 25 bp, Homo sapien
gaggcggtagctcatgtcctgacag

SEQ ID NO: 113971 - DNA, 25 bp, Homo sapien
tctataacttcccaggagccggaaa

SEQ ID NO: 113972 - DNA, 25 bp, Homo sapien
ccttgccccagtctatcacttggga

SEQ ID NO: 113973 - DNA, 25 bp, Homo sapien
agaacaagtctataacttcccagga

SEQ ID NO: 113974 - DNA, 25 bp, Homo sapien
tgccccagtctatcacttgggaaat

SEQ ID NO: 113975 - DNA, 25 bp, Homo sapien
ctgaaacgtgatacaataaggtcct

SEQ ID NO: 113976 - DNA, 25 bp, Homo sapien
cgtgatacaataaggtcctattgtc

SEQ ID NO: 113977 - DNA, 25 bp, Homo sapien
gaaacgtgatacaataaggtcctat

SEQ ID NO: 113978 - DNA, 25 bp, Homo sapien
tacaataaggtcctattgtctttaa

SEQ ID NO: 113979 - DNA, 25 bp, Homo sapien
tcctatcttctcttggtcatttaca

SEQ ID NO: 113980 - DNA, 25 bp, Homo sapien
tattttaactcctatcttctcttgg

SEQ ID NO: 113981 - DNA, 25 bp, Homo sapien
ttttctggcaccataacagttgcat

SEQ ID NO: 113982 - DNA, 25 bp, Homo sapien
cataacagttgcatattttaactcc

SEQ ID NO: 113983 - DNA, 25 bp, Homo sapien
agagctcatgaactgatgcgtgtcc

SEQ ID NO: 113984 - DNA, 25 bp, Homo sapien
ctggattgactgttactgggctctc

SEQ ID NO: 113985 - DNA, 25 bp, Homo sapien
actgatgcgtgtcctggattgactg

SEQ ID NO: 113986 - DNA, 25 bp, Homo sapien
aaaagagctcatgaactgatgcgtg

SEQ ID NO: 113987 - DNA, 25 bp, Homo sapien
ggaaatcaccaaaatcttgtgtctg

SEQ ID NO: 113988 - DNA, 25 bp, Homo sapien
cttttaaagcatgtaggaaatcacc

SEQ ID NO: 113989 - DNA, 25 bp, Homo sapien
taggaaatcaccaaaatcttgtgtc

SEQ ID NO: 113990 - DNA, 25 bp, Homo sapien
tatgcttttaaagcatgtaggaaat

SEQ ID NO: 113991 - DNA, 25 bp, Homo sapien
aaataatgatcccaagccctctctg

SEQ ID NO: 113992 - DNA, 25 bp, Homo sapien
tacaggtccctttgatgactgaatg

SEQ ID NO: 113993 - DNA, 25 bp, Homo sapien
aacaggcagatcgtcttacaggtcc

SEQ ID NO: 113994 - DNA, 25 bp, Homo sapien
gactgaatgacgtcaatgctgaagg

SEQ ID NO: 113995 - DNA, 25 bp, Homo sapien
aagtagcgacaggcgaacagtgtga

SEQ ID NO: 113996 - DNA, 25 bp, Homo sapien
tgtgtgaattgattcaaggctctca

SEQ ID NO: 113997 - DNA, 25 bp, Homo sapien
cgaacagtgtgaggacggctacgtt

SEQ ID NO: 113998 - DNA, 25 bp, Homo sapien
ggacggctacgttctttgtgtgaat

SEQ ID NO: 113999 - DNA, 25 bp, Homo sapien
cagtcatttcttgcactggaggctg

SEQ ID NO: 114000 - DNA, 25 bp, Homo sapien
cacagtcatttcttgcactggaggc

SEQ ID NO: 114001 - DNA, 25 bp, Homo sapien
tctccataattgtacgctgctcttg

SEQ ID NO: 114002 - DNA, 25 bp, Homo sapien
gctgctcttggagcgctcgaatgga

SEQ ID NO: 114003 - DNA, 25 bp, Homo sapien
tcccatctcgtctttttaagataaa

SEQ ID NO: 114004 - DNA, 25 bp, Homo sapien
ggtttcaaagcagaatctttccctg

SEQ ID NO: 114005 - DNA, 25 bp, Homo sapien
ctgaggtttcaaagcagaatctttc

SEQ ID NO: 114006 - DNA, 25 bp, Homo sapien
tctggtgatatgacaccaacctgag

SEQ ID NO: 114007 - DNA, 25 bp, Homo sapien
ggaaggtgagttgacaggatccact

SEQ ID NO: 114008 - DNA, 25 bp, Homo sapien
ttcaggattagtgggccggttggca

SEQ ID NO: 114009 - DNA, 25 bp, Homo sapien
cctgtgacctcctttgctgaattca

SEQ ID NO: 114010 - DNA, 25 bp, Homo sapien
ttgtctctaaggaaaccagctcctg

SEQ ID NO: 114011 - DNA, 25 bp, Homo sapien
tttgccccatggagcctcagcctat

SEQ ID NO: 114012 - DNA, 25 bp, Homo sapien
ggagcctcagcctatggctcagcac

SEQ ID NO: 114013 - DNA, 25 bp, Homo sapien
ttgccccatggagcctcagcctatg

SEQ ID NO: 114014 - DNA, 25 bp, Homo sapien
ccatggagcctcagcctatggctca

SEQ ID NO: 114015 - DNA, 25 bp, Homo sapien
ggcgtgagccccacagccagctaat

SEQ ID NO: 114016 - DNA, 25 bp, Homo sapien
ataggcgtgagccccacagccagct

SEQ ID NO: 114017 - DNA, 25 bp, Homo sapien
tcccaaagtgctgctatgattcttt

SEQ ID NO: 114018 - DNA, 25 bp, Homo sapien
cccaaagtgctgctatgattctttg

SEQ ID NO: 114019 - DNA, 25 bp, Homo sapien
atgactccggagaaacaaggatccc

SEQ ID NO: 114020 - DNA, 25 bp, Homo sapien
ttgcagatgactccggagaaacaag

SEQ ID NO: 114021 - DNA, 25 bp, Homo sapien
gactccggagaaacaaggatcccat

SEQ ID NO: 114022 - DNA, 25 bp, Homo sapien
cacttgcagatgactccggagaaac

SEQ ID NO: 114023 - DNA, 25 bp, Homo sapien
cctatccataaccataactataacc

SEQ ID NO: 114024 - DNA, 25 bp, Homo sapien
atgtgactgggtcacaaactggaca

SEQ ID NO: 114025 - DNA, 25 bp, Homo sapien
gcataggcaaagtgtttagtttacc

SEQ ID NO: 114026 - DNA, 25 bp, Homo sapien
tgcataggcaaagtgtttagtttac

SEQ ID NO: 114027 - DNA, 25 bp, Homo sapien
ttgcataggcaaagtgtttagttta

SEQ ID NO: 114028 - DNA, 25 bp, Homo sapien
ggtgcctggaaattgtctgtaccaa

SEQ ID NO: 114029 - DNA, 25 bp, Homo sapien
gctgatctgttccagccagccttac

SEQ ID NO: 114030 - DNA, 25 bp, Homo sapien
aaagcttgtgaatgatacagcactt

SEQ ID NO: 114031 - DNA, 25 bp, Homo sapien
gctgttaacggcatggctgatctgt

SEQ ID NO: 114032 - DNA, 25 bp, Homo sapien
gaactgtgcgagagtgatgcctcac

SEQ ID NO: 114033 - DNA, 25 bp, Homo sapien
cacaaacttgtgtttaatgtgctct

SEQ ID NO: 114034 - DNA, 25 bp, Homo sapien
tcctccctgaactgtgcgagagtga

SEQ ID NO: 114035 - DNA, 25 bp, Homo sapien
tgctctcggaggatagactgagttc

SEQ ID NO: 114036 - DNA, 25 bp, Homo sapien
tatacaggagtttagacatggccac

SEQ ID NO: 114037 - DNA, 25 bp, Homo sapien
gactgttgggagcatcagaattagc

SEQ ID NO: 114038 - DNA, 25 bp, Homo sapien
ctgtagtcgttctggtgacaaatac

SEQ ID NO: 114039 - DNA, 25 bp, Homo sapien
tgaatcccttatggagagcagctgg

SEQ ID NO: 114040 - DNA, 25 bp, Homo sapien
ttgtccagcactttctccaagctct

SEQ ID NO: 114041 - DNA, 25 bp, Homo sapien
actttatcttcacagcttgtccagc

SEQ ID NO: 114042 - DNA, 25 bp, Homo sapien
gtccagcactttctccaagctcttt

SEQ ID NO: 114043 - DNA, 25 bp, Homo sapien
gcttgtccagcactttctccaagct

SEQ ID NO: 114044 - DNA, 25 bp, Homo sapien
cacacgcagaaactggccaaatttg

SEQ ID NO: 114045 - DNA, 25 bp, Homo sapien
gccactaattagcaatgcgccacac

SEQ ID NO: 114046 - DNA, 25 bp, Homo sapien
ggccatattcagctcaagcttcctc

SEQ ID NO: 114047 - DNA, 25 bp, Homo sapien
tgcgccacactgttcaatgaccttc

SEQ ID NO: 114048 - DNA, 25 bp, Homo sapien
gaagaagcacgagatcagaaaatat

SEQ ID NO: 114049 - DNA, 25 bp, Homo sapien
ggaagaagcacgagatcagaaaata

SEQ ID NO: 114050 - DNA, 25 bp, Homo sapien
aggaagaagcacgagatcagaaaat

SEQ ID NO: 114051 - DNA, 25 bp, Homo sapien
ttctggctccacgaaagcaggccaa

SEQ ID NO: 114052 - DNA, 25 bp, Homo sapien
tggttgagggagagatacaaacttc

SEQ ID NO: 114053 - DNA, 25 bp, Homo sapien
cctacatcagcatggttgagggaga

SEQ ID NO: 114054 - DNA, 25 bp, Homo sapien
agtccatagccagctgccgagagtg

SEQ ID NO: 114055 - DNA, 25 bp, Homo sapien
taacttgggtgcaataagggcactc

SEQ ID NO: 114056 - DNA, 25 bp, Homo sapien
taggaaagtgcaccagctaggaggc

SEQ ID NO: 114057 - DNA, 25 bp, Homo sapien
gatttacaaaacatccacccgcctg

SEQ ID NO: 114058 - DNA, 25 bp, Homo sapien
aagggcacgtagacacacagctctg

SEQ ID NO: 114059 - DNA, 25 bp, Homo sapien
ctccttgctgtgcttcgcatctgct

SEQ ID NO: 114060 - DNA, 25 bp, Homo sapien
cctccttgctgtgcttcgcatctgc

SEQ ID NO: 114061 - DNA, 25 bp, Homo sapien
tgtgcctgtgtgcgttgcattgcat

SEQ ID NO: 114062 - DNA, 25 bp, Homo sapien
tgcctgtgtgcgttgcattgcatta

SEQ ID NO: 114063 - DNA, 25 bp, Homo sapien
gcctgtgtgcgttgcattgcattat

SEQ ID NO: 114064 - DNA, 25 bp, Homo sapien
cctgtgtgcgttgcattgcattata

SEQ ID NO: 114065 - DNA, 25 bp, Homo sapien
taagcactcataatgtgctagaaac

SEQ ID NO: 114066 - DNA, 25 bp, Homo sapien
ggctttaaaatatcgtagactgtat

SEQ ID NO: 114067 - DNA, 25 bp, Homo sapien
tgaccgtgatttaatcaatgcactg

SEQ ID NO: 114068 - DNA, 25 bp, Homo sapien
cgtaaatgttcctttatgaccgtga

SEQ ID NO: 114069 - DNA, 25 bp, Homo sapien
tggatgtagctaccccggcttgtgg

SEQ ID NO: 114070 - DNA, 25 bp, Homo sapien
cgtagaggacgtttcgaaggcgctt

SEQ ID NO: 114071 - DNA, 25 bp, Homo sapien
tgtgtcccggcttacaactagaggt

SEQ ID NO: 114072 - DNA, 25 bp, Homo sapien
tagaatagcgctctctcgacgtcac

SEQ ID NO: 114073 - DNA, 25 bp, Homo sapien
gccccgagtcagagccggcaacaaa

SEQ ID NO: 114074 - DNA, 25 bp, Homo sapien
gtcagagccggcaacaaatgggacc

SEQ ID NO: 114075 - DNA, 25 bp, Homo sapien
ccggcaacaaatgggacccggcagc

SEQ ID NO: 114076 - DNA, 25 bp, Homo sapien
caacaaatgggacccggcagcaggg

SEQ ID NO: 114077 - DNA, 25 bp, Homo sapien
cgctgctgctccgtcgtggctgcgc

SEQ ID NO: 114078 - DNA, 25 bp, Homo sapien
cgccgctacaatcccatcccgagaa

SEQ ID NO: 114079 - DNA, 25 bp, Homo sapien
ggctgcgcggctgctccgcctgact

SEQ ID NO: 114080 - DNA, 25 bp, Homo sapien
gctacaatcccatcccgagaacggg

SEQ ID NO: 114081 - DNA, 25 bp, Homo sapien
cactggctccttattgggggcgcag

SEQ ID NO: 114082 - DNA, 25 bp, Homo sapien
ttattgggggcgcagtgttcctcct

SEQ ID NO: 114083 - DNA, 25 bp, Homo sapien
tttcactggctccttattgggggcg

SEQ ID NO: 114084 - DNA, 25 bp, Homo sapien
tattgggggcgcagtgttcctcctg

SEQ ID NO: 114085 - DNA, 25 bp, Homo sapien
gggtcgcccgagttctggccacttc

SEQ ID NO: 114086 - DNA, 25 bp, Homo sapien
gcagcccggcgtccgccgcagcacc

SEQ ID NO: 114087 - DNA, 25 bp, Homo sapien
ctgggtcgcccgagttctggccact

SEQ ID NO: 114088 - DNA, 25 bp, Homo sapien
cgctgggtcgcccgagttctggcca

SEQ ID NO: 114089 - DNA, 25 bp, Homo sapien
tcatcggaacaatttgcaaagcgca

SEQ ID NO: 114090 - DNA, 25 bp, Homo sapien
gaacaatttgcaaagcgcagccggg

SEQ ID NO: 114091 - DNA, 25 bp, Homo sapien
tcagcttcgggaagcgaccccgcga

SEQ ID NO: 114092 - DNA, 25 bp, Homo sapien
gcgaccgcggcgcctcacatggagt

SEQ ID NO: 114093 - DNA, 25 bp, Homo sapien
taatcttccgcgtcaagttcacagt

SEQ ID NO: 114094 - DNA, 25 bp, Homo sapien
caaaaccaaactccacaagattagg

SEQ ID NO: 114095 - DNA, 25 bp, Homo sapien
ggttgggctgaagttacataagaca

SEQ ID NO: 114096 - DNA, 25 bp, Homo sapien
gacagactaaactgcggcttttctc

SEQ ID NO: 114097 - DNA, 25 bp, Homo sapien
gagccacatgcttcaaattgaatcc

SEQ ID NO: 114098 - DNA, 25 bp, Homo sapien
atccagaaaggatgctttgaggaac

SEQ ID NO: 114099 - DNA, 25 bp, Homo sapien
aattgaatccagaaaggatgctttg

SEQ ID NO: 114100 - DNA, 25 bp, Homo sapien
agcaagagagccacatgcttcaaat

SEQ ID NO: 114101 - DNA, 25 bp, Homo sapien
ttaataggcattaatgaccacagcc

SEQ ID NO: 114102 - DNA, 25 bp, Homo sapien
cactgtggcgcactgcaatgcagct

SEQ ID NO: 114103 - DNA, 25 bp, Homo sapien
ggtggaatcagaacagatggcctgc

SEQ ID NO: 114104 - DNA, 25 bp, Homo sapien
gagaatgactcgcaatagccttaaa

SEQ ID NO: 114105 - DNA, 25 bp, Homo sapien
ctcacccttgccatcgcacagaagg

SEQ ID NO: 114106 - DNA, 25 bp, Homo sapien
gctacgcccattgtgagcaactgtt

SEQ ID NO: 114107 - DNA, 25 bp, Homo sapien
ttgccatcgcacagaagggggctac

SEQ ID NO: 114108 - DNA, 25 bp, Homo sapien
cagaagggggctacgcccattgtga

SEQ ID NO: 114109 - DNA, 25 bp, Homo sapien
gcttattacattagcagaacctgct

SEQ ID NO: 114110 - DNA, 25 bp, Homo sapien
tcaactgaagggcatttctggtaca

SEQ ID NO: 114111 - DNA, 25 bp, Homo sapien
tagtgcacaggcaggcaaccatgat

SEQ ID NO: 114112 - DNA, 25 bp, Homo sapien
tgtatgctttattatcccggacaag

SEQ ID NO: 114113 - DNA, 25 bp, Homo sapien
tgggagcttcccataacttctcagg

SEQ ID NO: 114114 - DNA, 25 bp, Homo sapien
cttctcaggtaaagaagtgatgtca

SEQ ID NO: 114115 - DNA, 25 bp, Homo sapien
gcggagtatcgagcacacaaagcac

SEQ ID NO: 114116 - DNA, 25 bp, Homo sapien
gatgtcaggcaaggaaccacagccc

SEQ ID NO: 114117 - DNA, 25 bp, Homo sapien
tagattaatttgcacctaacaagaa

SEQ ID NO: 114118 - DNA, 25 bp, Homo sapien
gcaaaatagaacttaaggagacatt

SEQ ID NO: 114119 - DNA, 25 bp, Homo sapien
tcctactgaggattgtatggcatct

SEQ ID NO: 114120 - DNA, 25 bp, Homo sapien
ggagacattattgttgtatctactg

SEQ ID NO: 114121 - DNA, 25 bp, Homo sapien
actgggtcttccacatccctcttct

SEQ ID NO: 114122 - DNA, 25 bp, Homo sapien
cttccaaactgggtcttccacatcc

SEQ ID NO: 114123 - DNA, 25 bp, Homo sapien
aaactgggtcttccacatccctctt

SEQ ID NO: 114124 - DNA, 25 bp, Homo sapien
cccttccaaactgggtcttccacat

SEQ ID NO: 114125 - DNA, 25 bp, Homo sapien
tcttcctccaaccaggccacacaca

SEQ ID NO: 114126 - DNA, 25 bp, Homo sapien
aacatgcaaaacaaatccagtctac

SEQ ID NO: 114127 - DNA, 25 bp, Homo sapien
gaacatgcaaaacaaatccagtcta

SEQ ID NO: 114128 - DNA, 25 bp, Homo sapien
ccaaccaggccacacacaaaaagaa

SEQ ID NO: 114129 - DNA, 25 bp, Homo sapien
tggctgttgagaggtttcatatttc

SEQ ID NO: 114130 - DNA, 25 bp, Homo sapien
ttctttgcataatcccctttacctc

SEQ ID NO: 114131 - DNA, 25 bp, Homo sapien
tgcataatcccctttacctctacag

SEQ ID NO: 114132 - DNA, 25 bp, Homo sapien
cataatcccctttacctctacaggg

SEQ ID NO: 114133 - DNA, 25 bp, Homo sapien
gtgtgacaacgtaagttcatcttcc

SEQ ID NO: 114134 - DNA, 25 bp, Homo sapien
ctgtgtgacaacgtaagttcatctt

SEQ ID NO: 114135 - DNA, 25 bp, Homo sapien
caacgtaagttcatcttccattatc

SEQ ID NO: 114136 - DNA, 25 bp, Homo sapien
gacaacgtaagttcatcttccatta

SEQ ID NO: 114137 - DNA, 25 bp, Homo sapien
ccttgggccgcttgtagagggcaaa

SEQ ID NO: 114138 - DNA, 25 bp, Homo sapien
gcgtggatatcacatggacggtgct

SEQ ID NO: 114139 - DNA, 25 bp, Homo sapien
gggtttgacaccatttgccttgggc

SEQ ID NO: 114140 - DNA, 25 bp, Homo sapien
tcctccgtcctctatctccattggg

SEQ ID NO: 114141 - DNA, 25 bp, Homo sapien
tgtttgccagcaccctcccaactct

SEQ ID NO: 114142 - DNA, 25 bp, Homo sapien
cccaactcttgacagacccacctac

SEQ ID NO: 114143 - DNA, 25 bp, Homo sapien
ttgccagcaccctcccaactcttga

SEQ ID NO: 114144 - DNA, 25 bp, Homo sapien
actgtttgccagcaccctcccaact

SEQ ID NO: 114145 - DNA, 25 bp, Homo sapien
agaaggatatccatagagcccagag

SEQ ID NO: 114146 - DNA, 25 bp, Homo sapien
gaagaaggatatccatagagcccag

SEQ ID NO: 114147 - DNA, 25 bp, Homo sapien
cacaggaagaaggatatccatagag

SEQ ID NO: 114148 - DNA, 25 bp, Homo sapien
caggaagaaggatatccatagagcc

SEQ ID NO: 114149 - DNA, 25 bp, Homo sapien
ccacttctcacggttactgttgtat

SEQ ID NO: 114150 - DNA, 25 bp, Homo sapien
attttccattcggaaataggccagc

SEQ ID NO: 114151 - DNA, 25 bp, Homo sapien
aaatggccctcatgtttctctaaac

SEQ ID NO: 114152 - DNA, 25 bp, Homo sapien
tgtagcaatgacattaaatggccct

SEQ ID NO: 114153 - DNA, 25 bp, Homo sapien
aaatgtccatgctagggatggcgac

SEQ ID NO: 114154 - DNA, 25 bp, Homo sapien
agaaaaccttaagcgtgatgcagct

SEQ ID NO: 114155 - DNA, 25 bp, Homo sapien
ttctcacttagattggacagggtag

SEQ ID NO: 114156 - DNA, 25 bp, Homo sapien
gattcagagggcaacagcagtgcag

SEQ ID NO: 114157 - DNA, 25 bp, Homo sapien
gccagcacttcaggtcttacagatg

SEQ ID NO: 114158 - DNA, 25 bp, Homo sapien
cgagctccacacccatacattttaa

SEQ ID NO: 114159 - DNA, 25 bp, Homo sapien
taactcatagactcccacctctttt

SEQ ID NO: 114160 - DNA, 25 bp, Homo sapien
ccctccagaccctaactcatagact

SEQ ID NO: 114161 - DNA, 25 bp, Homo sapien
tggagcgcttcgtatgaccaaaaca

SEQ ID NO: 114162 - DNA, 25 bp, Homo sapien
catagaatactgcacgggctggtga

SEQ ID NO: 114163 - DNA, 25 bp, Homo sapien
tctgaagggaaaccactctgattgt

SEQ ID NO: 114164 - DNA, 25 bp, Homo sapien
tgaaatgacaacttactggagcgct

SEQ ID NO: 114165 - DNA, 25 bp, Homo sapien
aaaatgactacggtttggagccact

SEQ ID NO: 114166 - DNA, 25 bp, Homo sapien
cattgattcatgctaaagtgccagc

SEQ ID NO: 114167 - DNA, 25 bp, Homo sapien
gaaactagttagactgccaccctgg

SEQ ID NO: 114168 - DNA, 25 bp, Homo sapien
gactttagtaggagctcttgagaca

SEQ ID NO: 114169 - DNA, 25 bp, Homo sapien
gattcccagggcaagcattaataaa

SEQ ID NO: 114170 - DNA, 25 bp, Homo sapien
tatgatatgattcccagggcaagca

SEQ ID NO: 114171 - DNA, 25 bp, Homo sapien
tcagtgttgttaacttattgtttac

SEQ ID NO: 114172 - DNA, 25 bp, Homo sapien
gataagacacgtttggtgaaacagg

SEQ ID NO: 114173 - DNA, 25 bp, Homo sapien
gacacgtctgttgtgtgcctcttgt

SEQ ID NO: 114174 - DNA, 25 bp, Homo sapien
tgctctgtcacactgagtcagcagc

SEQ ID NO: 114175 - DNA, 25 bp, Homo sapien
agtcagcagctgggacacgtctgtt

SEQ ID NO: 114176 - DNA, 25 bp, Homo sapien
cagaagcaagggacaaggtaatgct

SEQ ID NO: 114177 - DNA, 25 bp, Homo sapien
aaccatcaatcctgcagtgtggccc

SEQ ID NO: 114178 - DNA, 25 bp, Homo sapien
gattgtcatctgtgcgtcaaacagt

SEQ ID NO: 114179 - DNA, 25 bp, Homo sapien
gtcaaacagtacacacccctgctgg

SEQ ID NO: 114180 - DNA, 25 bp, Homo sapien
ctgctggtgtgcctttgcgcaaatg

SEQ ID NO: 114181 - DNA, 25 bp, Homo sapien
tactatcagcaattacagggcagtg

SEQ ID NO: 114182 - DNA, 25 bp, Homo sapien
taagcacccagcattacggtaggct

SEQ ID NO: 114183 - DNA, 25 bp, Homo sapien
tgtggtcgcatcactcctggtagtc

SEQ ID NO: 114184 - DNA, 25 bp, Homo sapien
tactcagtcggagctctcagaaacc

SEQ ID NO: 114185 - DNA, 25 bp, Homo sapien
gaacctgggagcgaaatccttgctg

SEQ ID NO: 114186 - DNA, 25 bp, Homo sapien
ctatgtcagataagcaaggtgagcc

SEQ ID NO: 114187 - DNA, 25 bp, Homo sapien
tagccacgcatgtgcaagaacctgg

SEQ ID NO: 114188 - DNA, 25 bp, Homo sapien
gcctggcagcaaggaatacatccaa

SEQ ID NO: 114189 - DNA, 25 bp, Homo sapien
cagttacgtggcagctagcctaaca

SEQ ID NO: 114190 - DNA, 25 bp, Homo sapien
atctgatcgtgctaaaaaattgcca

SEQ ID NO: 114191 - DNA, 25 bp, Homo sapien
cagtgaatccactgatgacagggtc

SEQ ID NO: 114192 - DNA, 25 bp, Homo sapien
tgtgtaggttcagacaatcaactct

SEQ ID NO: 114193 - DNA, 25 bp, Homo sapien
tctttcctggctcaaggcaacaaac

SEQ ID NO: 114194 - DNA, 25 bp, Homo sapien
tgttattgatcctccttttttccag

SEQ ID NO: 114195 - DNA, 25 bp, Homo sapien
gcaacaaaccacaggttattcccca

SEQ ID NO: 114196 - DNA, 25 bp, Homo sapien
cactcatcttacaatacgttacagg

SEQ ID NO: 114197 - DNA, 25 bp, Homo sapien
aggtgatgaattttatcgatggcct

SEQ ID NO: 114198 - DNA, 25 bp, Homo sapien
agaggtgatgaattttatcgatggc

SEQ ID NO: 114199 - DNA, 25 bp, Homo sapien
gaggtgatgaattttatcgatggcc

SEQ ID NO: 114200 - DNA, 25 bp, Homo sapien
tacaggattcagttcctaggagcct

SEQ ID NO: 114201 - DNA, 25 bp, Homo sapien
tgcccctgggtaatgtgaccataaa

SEQ ID NO: 114202 - DNA, 25 bp, Homo sapien
tatccctaagtgcagtcaattctca

SEQ ID NO: 114203 - DNA, 25 bp, Homo sapien
ttgatttaccgaatactgagccact

SEQ ID NO: 114204 - DNA, 25 bp, Homo sapien
gggtcacgctcaagtacaaagaagc

SEQ ID NO: 114205 - DNA, 25 bp, Homo sapien
ggcaggcacgctcaatctatcagca

SEQ ID NO: 114206 - DNA, 25 bp, Homo sapien
cctggtacagaatctatggcacgca

SEQ ID NO: 114207 - DNA, 25 bp, Homo sapien
tactgagctattcgataaaccctgg

SEQ ID NO: 114208 - DNA, 25 bp, Homo sapien
gttttaggctgcttttcgttaggca

SEQ ID NO: 114209 - DNA, 25 bp, Homo sapien
ttttaggctgcttttcgttaggcat

SEQ ID NO: 114210 - DNA, 25 bp, Homo sapien
aatcagggttttaggctgcttttcg

SEQ ID NO: 114211 - DNA, 25 bp, Homo sapien
atcagggttttaggctgcttttcgt

SEQ ID NO: 114212 - DNA, 25 bp, Homo sapien
aatgtatccactttcggccagtggg

SEQ ID NO: 114213 - DNA, 25 bp, Homo sapien
gaaaaagcctgacgacatccacgct

SEQ ID NO: 114214 - DNA, 25 bp, Homo sapien
gaggctagcgcatggaaatgtatcc

SEQ ID NO: 114215 - DNA, 25 bp, Homo sapien
gagctggcttcctgcgaaaaagcct

SEQ ID NO: 114216 - DNA, 25 bp, Homo sapien
ggatatactgtgttgacctttgcag

SEQ ID NO: 114217 - DNA, 25 bp, Homo sapien
tatccgtatccttatcatgtgtgta

SEQ ID NO: 114218 - DNA, 25 bp, Homo sapien
tgaaacatatccgtatccttatcat

SEQ ID NO: 114219 - DNA, 25 bp, Homo sapien
taggatatactgtgttgacctttgc

SEQ ID NO: 114220 - DNA, 25 bp, Homo sapien
gctgaagttcaggactactgcaaat

SEQ ID NO: 114221 - DNA, 25 bp, Homo sapien
catgaagtggacatatgcctttttt

SEQ ID NO: 114222 - DNA, 25 bp, Homo sapien
tgaattaggtgatccagattaggcc

SEQ ID NO: 114223 - DNA, 25 bp, Homo sapien
gagctggtgcatttctttctagtcc

SEQ ID NO: 114224 - DNA, 25 bp, Homo sapien
agcctcatagcgacagtcactgtca

SEQ ID NO: 114225 - DNA, 25 bp, Homo sapien
tgtcacaagatttgtccatctccat

SEQ ID NO: 114226 - DNA, 25 bp, Homo sapien
tggagcctcatagcgacagtcactg

SEQ ID NO: 114227 - DNA, 25 bp, Homo sapien
tcactgtcacaagatttgtccatct

SEQ ID NO: 114228 - DNA, 25 bp, Homo sapien
tgtcgcacacgatcctgcaggcgaa

SEQ ID NO: 114229 - DNA, 25 bp, Homo sapien
ttttggaagagtcaaatccggcggc

SEQ ID NO: 114230 - DNA, 25 bp, Homo sapien
gatctgggcttcgtccgtgttctgg

SEQ ID NO: 114231 - DNA, 25 bp, Homo sapien
tctgtgacaacgaagtcgatagggc

SEQ ID NO: 114232 - DNA, 25 bp, Homo sapien
tagaaatcgtgtacttcttgacagt

SEQ ID NO: 114233 - DNA, 25 bp, Homo sapien
catttttctagaaatcgtgtacttc

SEQ ID NO: 114234 - DNA, 25 bp, Homo sapien
ttctagaaatcgtgtacttcttgac

SEQ ID NO: 114235 - DNA, 25 bp, Homo sapien
gaaatcgtgtacttcttgacagtac

SEQ ID NO: 114236 - DNA, 25 bp, Homo sapien
ggatgcatcaccaggacgccattag

SEQ ID NO: 114237 - DNA, 25 bp, Homo sapien
agctttcctcgttgctgggccgacc

SEQ ID NO: 114238 - DNA, 25 bp, Homo sapien
catctccacagacagagatctcgcg

SEQ ID NO: 114239 - DNA, 25 bp, Homo sapien
tggtttctcgcaaggtgtacacatc

SEQ ID NO: 114240 - DNA, 25 bp, Homo sapien
agtttcgtacttcacacttgcagag

SEQ ID NO: 114241 - DNA, 25 bp, Homo sapien
ttaggcttgagtagtttcgtacttc

SEQ ID NO: 114242 - DNA, 25 bp, Homo sapien
tgagtagtttcgtacttcacacttg

SEQ ID NO: 114243 - DNA, 25 bp, Homo sapien
cttcacacttgcagagtgaagcaca

SEQ ID NO: 114244 - DNA, 25 bp, Homo sapien
tcagccatggtgcactgtaagacgc

SEQ ID NO: 114245 - DNA, 25 bp, Homo sapien
gacaagtgctaggtcaaatcctcta

SEQ ID NO: 114246 - DNA, 25 bp, Homo sapien
catggctatggcaagatcagaaacc

SEQ ID NO: 114247 - DNA, 25 bp, Homo sapien
tgtaagacgcatacgctgtgcctga

SEQ ID NO: 114248 - DNA, 25 bp, Homo sapien
gagcacacgtgtccacagggagtga

SEQ ID NO: 114249 - DNA, 25 bp, Homo sapien
caactgagatatgcccagggctgct

SEQ ID NO: 114250 - DNA, 25 bp, Homo sapien
tctgagttggagtatgaaaaagccc

SEQ ID NO: 114251 - DNA, 25 bp, Homo sapien
ggcggtcctgcgtctacataaaatc

SEQ ID NO: 114252 - DNA, 25 bp, Homo sapien
caatgacgacgctgctgttttgagc

SEQ ID NO: 114253 - DNA, 25 bp, Homo sapien
aaagtcgtagatggctgtcaagggc

SEQ ID NO: 114254 - DNA, 25 bp, Homo sapien
taatcaagcagacttcaatgacgac

SEQ ID NO: 114255 - DNA, 25 bp, Homo sapien
ggtatctgttacactcctgccatgt

SEQ ID NO: 114256 - DNA, 25 bp, Homo sapien
gaagtcgtctcattggtcgcacaga

SEQ ID NO: 114257 - DNA, 25 bp, Homo sapien
ccactgttatgaggcaaggctgcaa

SEQ ID NO: 114258 - DNA, 25 bp, Homo sapien
taaagggatcttcctacaagtggcc

SEQ ID NO: 114259 - DNA, 25 bp, Homo sapien
ccttctaggagcagtgatacgatcg

SEQ ID NO: 114260 - DNA, 25 bp, Homo sapien
caattaataaactcaacagctggag

SEQ ID NO: 114261 - DNA, 25 bp, Homo sapien
aaaatcagttctactcgtatcaacc

SEQ ID NO: 114262 - DNA, 25 bp, Homo sapien
caaggtttaaatatgtattgtgcag

SEQ ID NO: 114263 - DNA, 25 bp, Homo sapien
ttaacttggaagttagagaagtgaa

SEQ ID NO: 114264 - DNA, 25 bp, Homo sapien
tcagccatgatgattcagactaaac

SEQ ID NO: 114265 - DNA, 25 bp, Homo sapien
cagcagcctagggtaataatccagc

SEQ ID NO: 114266 - DNA, 25 bp, Homo sapien
tccaatccaagaagtgaattattcc

SEQ ID NO: 114267 - DNA, 25 bp, Homo sapien
aattagaggccacaccattaacaga

SEQ ID NO: 114268 - DNA, 25 bp, Homo sapien
gtctagagtcttactgtggtttcca

SEQ ID NO: 114269 - DNA, 25 bp, Homo sapien
gtttattacttacaggctccaagag

SEQ ID NO: 114270 - DNA, 25 bp, Homo sapien
tctctaattgtctgatgcccggcct

SEQ ID NO: 114271 - DNA, 25 bp, Homo sapien
ggttgtatacaaaaggtgtgctcac

SEQ ID NO: 114272 - DNA, 25 bp, Homo sapien
ttttcgttgaggtgaccagggcaat

SEQ ID NO: 114273 - DNA, 25 bp, Homo sapien
tccatcaggcacatggtggaaacca

SEQ ID NO: 114274 - DNA, 25 bp, Homo sapien
gtttcctgctccacatccgcatggt

SEQ ID NO: 114275 - DNA, 25 bp, Homo sapien
ttcctggtggggatttgcacccagt

SEQ ID NO: 114276 - DNA, 25 bp, Homo sapien
ctgcccttgtcctctagatgtgcac

SEQ ID NO: 114277 - DNA, 25 bp, Homo sapien
cccttgtcctctagatgtgcacaca

SEQ ID NO: 114278 - DNA, 25 bp, Homo sapien
gcccttgtcctctagatgtgcacac

SEQ ID NO: 114279 - DNA, 25 bp, Homo sapien
tgcccttgtcctctagatgtgcaca

SEQ ID NO: 114280 - DNA, 25 bp, Homo sapien
gggcattgaaacagatgccagtggc

SEQ ID NO: 114281 - DNA, 25 bp, Homo sapien
ccatttttgggtgaagggcattgaa

SEQ ID NO: 114282 - DNA, 25 bp, Homo sapien
tgtgcgtgtccattccaaaccattt

SEQ ID NO: 114283 - DNA, 25 bp, Homo sapien
catgccatctacaccgtccataatg

SEQ ID NO: 114284 - DNA, 25 bp, Homo sapien
gattttaggagttctattgccccac

SEQ ID NO: 114285 - DNA, 25 bp, Homo sapien
tgagttgctttggaacatcaggcag

SEQ ID NO: 114286 - DNA, 25 bp, Homo sapien
gatcacagcatcttcgtgaactgat

SEQ ID NO: 114287 - DNA, 25 bp, Homo sapien
ttgctttggaacatcaggcagaagg

SEQ ID NO: 114288 - DNA, 25 bp, Homo sapien
ttacagtgtacaaggcatatagaat

SEQ ID NO: 114289 - DNA, 25 bp, Homo sapien
cagcagcagagtgtagtggccacga

SEQ ID NO: 114290 - DNA, 25 bp, Homo sapien
tggaaccagaacttgacactcgtgt

SEQ ID NO: 114291 - DNA, 25 bp, Homo sapien
catatagaatatgaggcagcagcag

SEQ ID NO: 114292 - DNA, 25 bp, Homo sapien
gctaatacgtatgagctaagtgcac

SEQ ID NO: 114293 - DNA, 25 bp, Homo sapien
caatgtaactgtgttgtgagaaaga

SEQ ID NO: 114294 - DNA, 25 bp, Homo sapien
ctggccagatgaagttagctaatac

SEQ ID NO: 114295 - DNA, 25 bp, Homo sapien
tataaagcgaggagacaagataatt

SEQ ID NO: 114296 - DNA, 25 bp, Homo sapien
ctagcaaggatgtagccacgacctc

SEQ ID NO: 114297 - DNA, 25 bp, Homo sapien
agccacgacctcacttttatcttcc

SEQ ID NO: 114298 - DNA, 25 bp, Homo sapien
ttgctagcaaggatgtagccacgac

SEQ ID NO: 114299 - DNA, 25 bp, Homo sapien
tgctagcaaggatgtagccacgacc

SEQ ID NO: 114300 - DNA, 25 bp, Homo sapien
ccaacagaaatcctgcttcaatctg

SEQ ID NO: 114301 - DNA, 25 bp, Homo sapien
tcccaacagaaatcctgcttcaatc

SEQ ID NO: 114302 - DNA, 25 bp, Homo sapien
ctcccaacagaaatcctgcttcaat

SEQ ID NO: 114303 - DNA, 25 bp, Homo sapien
cccaacagaaatcctgcttcaatct

SEQ ID NO: 114304 - DNA, 25 bp, Homo sapien
gactcctctccctgtagcttgccct

SEQ ID NO: 114305 - DNA, 25 bp, Homo sapien
ggggcagaaactttgccagactcct

SEQ ID NO: 114306 - DNA, 25 bp, Homo sapien
gcctctgtcctatttccccatcaca

SEQ ID NO: 114307 - DNA, 25 bp, Homo sapien
ccagtgtgcctgttccatattccag

SEQ ID NO: 114308 - DNA, 25 bp, Homo sapien
ctagaccctttcatttccagtgatg

SEQ ID NO: 114309 - DNA, 25 bp, Homo sapien
tccagtgatgttcttaactcctccc

SEQ ID NO: 114310 - DNA, 25 bp, Homo sapien
tagaccctttcatttccagtgatgt

SEQ ID NO: 114311 - DNA, 25 bp, Homo sapien
tgatgttcttaactcctcccgcttt

SEQ ID NO: 114312 - DNA, 25 bp, Homo sapien
gaaagctctccaaacagagaggtga

SEQ ID NO: 114313 - DNA, 25 bp, Homo sapien
gtaccttcttcacgccttgaaaatc

SEQ ID NO: 114314 - DNA, 25 bp, Homo sapien
ttcttcacgccttgaaaatccacca

SEQ ID NO: 114315 - DNA, 25 bp, Homo sapien
tccaccacaggtatgtggagatcca

SEQ ID NO: 114316 - DNA, 25 bp, Homo sapien
tattaagcttgatgaagaatatggc

SEQ ID NO: 114317 - DNA, 25 bp, Homo sapien
gtgtttcctaagttattaagcttga

SEQ ID NO: 114318 - DNA, 25 bp, Homo sapien
tgtaagacatcatataattgatcag

SEQ ID NO: 114319 - DNA, 25 bp, Homo sapien
caagaagagggattggtgtttccta

SEQ ID NO: 114320 - DNA, 25 bp, Homo sapien
ccaccaatacatccacaggccacat

SEQ ID NO: 114321 - DNA, 25 bp, Homo sapien
tatctggagttcctgttgtggaaca

SEQ ID NO: 114322 - DNA, 25 bp, Homo sapien
ggtgaacacaggtttcttctgtact

SEQ ID NO: 114323 - DNA, 25 bp, Homo sapien
cgagtctaccagagaaggtgaacac

SEQ ID NO: 114324 - DNA, 25 bp, Homo sapien
cttctgtactacaatcccgaaacat

SEQ ID NO: 114325 - DNA, 25 bp, Homo sapien
gcaaagaaaagcagttgaattcggt

SEQ ID NO: 114326 - DNA, 25 bp, Homo sapien
caagccacggaggttatttcagtta

SEQ ID NO: 114327 - DNA, 25 bp, Homo sapien
ggccataaactctgcaagccacgga

SEQ ID NO: 114328 - DNA, 25 bp, Homo sapien
tctctggagtggtgataaagaacac

SEQ ID NO: 114329 - DNA, 25 bp, Homo sapien
tttggctgagcttgcattaccccac

SEQ ID NO: 114330 - DNA, 25 bp, Homo sapien
ttttggctgagcttgcattacccca

SEQ ID NO: 114331 - DNA, 25 bp, Homo sapien
ttcacagcgatgcagctgattagca

SEQ ID NO: 114332 - DNA, 25 bp, Homo sapien
ttcttgttaacttccgactgatctg

SEQ ID NO: 114333 - DNA, 25 bp, Homo sapien
gcttggacttcacagcgatgcagct

SEQ ID NO: 114334 - DNA, 25 bp, Homo sapien
gatcccactccatgggggcttgcag

SEQ ID NO: 114335 - DNA, 25 bp, Homo sapien
acatacctgtggagatagttaacct

SEQ ID NO: 114336 - DNA, 25 bp, Homo sapien
gggcttttcctcactctatcaaagg

SEQ ID NO: 114337 - DNA, 25 bp, Homo sapien
gaagttgtaccaattcacactctcc

SEQ ID NO: 114338 - DNA, 25 bp, Homo sapien
ggaagggcagcttcttgtatgactc

SEQ ID NO: 114339 - DNA, 25 bp, Homo sapien
aatagaccatcaaataacagtacgg

SEQ ID NO: 114340 - DNA, 25 bp, Homo sapien
acagtacggattaccaacagagtgg

SEQ ID NO: 114341 - DNA, 25 bp, Homo sapien
taaagattaagtggtctagcttcag

SEQ ID NO: 114342 - DNA, 25 bp, Homo sapien
tccccaaatgaagtccatacatgag

SEQ ID NO: 114343 - DNA, 25 bp, Homo sapien
tggctactgaagcttctgcatgcgt

SEQ ID NO: 114344 - DNA, 25 bp, Homo sapien
tcaggtcctttaaggtgttctctat

SEQ ID NO: 114345 - DNA, 25 bp, Homo sapien
ggtcctttaaggtgttctctatgct

SEQ ID NO: 114346 - DNA, 25 bp, Homo sapien
cctttaaggtgttctctatgctgtt

SEQ ID NO: 114347 - DNA, 25 bp, Homo sapien
ttctacacttgtgcacgtgagctgt

SEQ ID NO: 114348 - DNA, 25 bp, Homo sapien
ttgtgcacgtgagctgtgcccactt

SEQ ID NO: 114349 - DNA, 25 bp, Homo sapien
gcccacttccgtgactgcctgaatg

SEQ ID NO: 114350 - DNA, 25 bp, Homo sapien
cacttgtgcacgtgagctgtgccca

SEQ ID NO: 114351 - DNA, 25 bp, Homo sapien
tcataactcttagtcagcaaactgg

SEQ ID NO: 114352 - DNA, 25 bp, Homo sapien
taactcttagtcagcaaactggcct

SEQ ID NO: 114353 - DNA, 25 bp, Homo sapien
gtgttcataactcttagtcagcaaa

SEQ ID NO: 114354 - DNA, 25 bp, Homo sapien
tgttcataactcttagtcagcaaac

SEQ ID NO: 114355 - DNA, 25 bp, Homo sapien
ctgtgacgatggtggttgtggggta

SEQ ID NO: 114356 - DNA, 25 bp, Homo sapien
ggagaggaggcatgggaacatgtct

SEQ ID NO: 114357 - DNA, 25 bp, Homo sapien
gacgatggtggttgtggggtaggga

SEQ ID NO: 114358 - DNA, 25 bp, Homo sapien
agaggaggcatgggaacatgtcttg

SEQ ID NO: 114359 - DNA, 25 bp, Homo sapien
tctgggaaagtgatgtaggtctgaa

SEQ ID NO: 114360 - DNA, 25 bp, Homo sapien
atacagtagaccatgagtaaaggcc

SEQ ID NO: 114361 - DNA, 25 bp, Homo sapien
tctgggcatacagtagaccatgagt

SEQ ID NO: 114362 - DNA, 25 bp, Homo sapien
taggaggtaactagatggctgtgta

SEQ ID NO: 114363 - DNA, 25 bp, Homo sapien
catgagttagcatcagaaagtatca

SEQ ID NO: 114364 - DNA, 25 bp, Homo sapien
tgttgagaatttacatgagttagca

SEQ ID NO: 114365 - DNA, 25 bp, Homo sapien
ggtagatcatgtgttgagaatttac

SEQ ID NO: 114366 - DNA, 25 bp, Homo sapien
gtatcacaagcccattgtacaccat

SEQ ID NO: 114367 - DNA, 25 bp, Homo sapien
gtcactaagcaagccgatgacatcc

SEQ ID NO: 114368 - DNA, 25 bp, Homo sapien
ggagagtgactacggacacagcaat

SEQ ID NO: 114369 - DNA, 25 bp, Homo sapien
taaccagaaatctttaactggtcac

SEQ ID NO: 114370 - DNA, 25 bp, Homo sapien
gccagtggagagtgactacggacac

SEQ ID NO: 114371 - DNA, 25 bp, Homo sapien
aggaggggacagaaaacatgacctc

SEQ ID NO: 114372 - DNA, 25 bp, Homo sapien
gaggggacagaaaacatgacctcat

SEQ ID NO: 114373 - DNA, 25 bp, Homo sapien
ctgtaggaggggacagaaaacatga

SEQ ID NO: 114374 - DNA, 25 bp, Homo sapien
gtaggaggggacagaaaacatgacc

SEQ ID NO: 114375 - DNA, 25 bp, Homo sapien
caaatttgctgttgacatttgtcca

SEQ ID NO: 114376 - DNA, 25 bp, Homo sapien
tttgtccatacagtcaccttgcaga

SEQ ID NO: 114377 - DNA, 25 bp, Homo sapien
catagatgaagggaccaagacggtg

SEQ ID NO: 114378 - DNA, 25 bp, Homo sapien
gagatttaacgactttattccagac

SEQ ID NO: 114379 - DNA, 25 bp, Homo sapien
caaggggcaactggctatctttagt

SEQ ID NO: 114380 - DNA, 25 bp, Homo sapien
gggcaactggctatctttagtcatc

SEQ ID NO: 114381 - DNA, 25 bp, Homo sapien
aggggcaactggctatctttagtca

SEQ ID NO: 114382 - DNA, 25 bp, Homo sapien
acaaggggcaactggctatctttag

SEQ ID NO: 114383 - DNA, 25 bp, Homo sapien
atcactgggccaaaagcttattagc

SEQ ID NO: 114384 - DNA, 25 bp, Homo sapien
tttgtcattggcaccattgcttcca

SEQ ID NO: 114385 - DNA, 25 bp, Homo sapien
ccactgcagctttctactggccaaa

SEQ ID NO: 114386 - DNA, 25 bp, Homo sapien
gtcttaacagtgtctccactgcagc

SEQ ID NO: 114387 - DNA, 25 bp, Homo sapien
ggtccctggagccacgacagatagt

SEQ ID NO: 114388 - DNA, 25 bp, Homo sapien
catattcaggataatgcggtgtcca

SEQ ID NO: 114389 - DNA, 25 bp, Homo sapien
gtcattttgccctggcatattcagg

SEQ ID NO: 114390 - DNA, 25 bp, Homo sapien
cagccattatgttgtatgaggtccc

SEQ ID NO: 114391 - DNA, 25 bp, Homo sapien
ttgtcccaaaggaacacaaacttca

SEQ ID NO: 114392 - DNA, 25 bp, Homo sapien
tgtcccaaaggaacacaaacttcat

SEQ ID NO: 114393 - DNA, 25 bp, Homo sapien
gcgactttatctgccaccaaatgcc

SEQ ID NO: 114394 - DNA, 25 bp, Homo sapien
tgtgtgacacagagcgactttatct

SEQ ID NO: 114395 - DNA, 25 bp, Homo sapien
acagagcgactttatctgccaccaa

SEQ ID NO: 114396 - DNA, 25 bp, Homo sapien
tctggacatatcatttgatttccag

SEQ ID NO: 114397 - DNA, 25 bp, Homo sapien
atggcgggcgtttcatgaagaccac

SEQ ID NO: 114398 - DNA, 25 bp, Homo sapien
cccaagtgtgagtgccggtgccttt

SEQ ID NO: 114399 - DNA, 25 bp, Homo sapien
tttgcgggcctcatttcgtccttcc

SEQ ID NO: 114400 - DNA, 25 bp, Homo sapien
ccagacacagtttgcgggcctcatt

SEQ ID NO: 114401 - DNA, 25 bp, Homo sapien
agccagctgagatcggagttgtgtt

SEQ ID NO: 114402 - DNA, 25 bp, Homo sapien
gatcggagttgtgttgtctttgtga

SEQ ID NO: 114403 - DNA, 25 bp, Homo sapien
taatcccttgttaatggacactttc

SEQ ID NO: 114404 - DNA, 25 bp, Homo sapien
gtctttgtgattctagcagatttta

SEQ ID NO: 114405 - DNA, 25 bp, Homo sapien
tccgtgactgatggctccgtgacgc

SEQ ID NO: 114406 - DNA, 25 bp, Homo sapien
tgatggctccgtgacgccggcagcc

SEQ ID NO: 114407 - DNA, 25 bp, Homo sapien
cccttgcagccataatccgtgactg

SEQ ID NO: 114408 - DNA, 25 bp, Homo sapien
cataatccgtgactgatggctccgt

SEQ ID NO: 114409 - DNA, 25 bp, Homo sapien
ttcagcctgttgttggacctccagc

SEQ ID NO: 114410 - DNA, 25 bp, Homo sapien
cacttgagcttctaaagggtctgat

SEQ ID NO: 114411 - DNA, 25 bp, Homo sapien
ggtctgatacttccgggttggaatg

SEQ ID NO: 114412 - DNA, 25 bp, Homo sapien
tgttttctagcccagacacttgagc

SEQ ID NO: 114413 - DNA, 25 bp, Homo sapien
ccaagagggagcaaatcagccaagt

SEQ ID NO: 114414 - DNA, 25 bp, Homo sapien
ttaaagtcagattcaccgcaggcat

SEQ ID NO: 114415 - DNA, 25 bp, Homo sapien
gaagacctagaaactccccaagatg

SEQ ID NO: 114416 - DNA, 25 bp, Homo sapien
tatgacctgccttgcgggagaaagg

SEQ ID NO: 114417 - DNA, 25 bp, Homo sapien
tcatccactaccaattgatgaacaa

SEQ ID NO: 114418 - DNA, 25 bp, Homo sapien
cctttgcgaggtactggtttgcact

SEQ ID NO: 114419 - DNA, 25 bp, Homo sapien
gggcctttgcgaggtactggtttgc

SEQ ID NO: 114420 - DNA, 25 bp, Homo sapien
ggcctttgcgaggtactggtttgca

SEQ ID NO: 114421 - DNA, 25 bp, Homo sapien
gcctttgcgaggtactggtttgcac

SEQ ID NO: 114422 - DNA, 25 bp, Homo sapien
tagacattgctagatgtagctgagt

SEQ ID NO: 114423 - DNA, 25 bp, Homo sapien
ggtgggctgctgcactaggtcatta

SEQ ID NO: 114424 - DNA, 25 bp, Homo sapien
caggctggggcattgatacgctttc

SEQ ID NO: 114425 - DNA, 25 bp, Homo sapien
tctctgcaaggagcacaacctgggc

SEQ ID NO: 114426 - DNA, 25 bp, Homo sapien
tacagatttcctccgagtgccgctt

SEQ ID NO: 114427 - DNA, 25 bp, Homo sapien
cagatttcctccgagtgccgctttc

SEQ ID NO: 114428 - DNA, 25 bp, Homo sapien
acagatttcctccgagtgccgcttt

SEQ ID NO: 114429 - DNA, 25 bp, Homo sapien
atacagatttcctccgagtgccgct

SEQ ID NO: 114430 - DNA, 25 bp, Homo sapien
accgtagatcgagggaacaaaggct

SEQ ID NO: 114431 - DNA, 25 bp, Homo sapien
caccgtagatcgagggaacaaaggc

SEQ ID NO: 114432 - DNA, 25 bp, Homo sapien
ggcaccgtagatcgagggaacaaag

SEQ ID NO: 114433 - DNA, 25 bp, Homo sapien
ctgggcaccgtagatcgagggaaca

SEQ ID NO: 114434 - DNA, 25 bp, Homo sapien
ttgtgagtgactgtttgaaatattt

SEQ ID NO: 114435 - DNA, 25 bp, Homo sapien
cacatttgtgagtgactgtttgaaa

SEQ ID NO: 114436 - DNA, 25 bp, Homo sapien
atatttcagccacgccgcagggtcc

SEQ ID NO: 114437 - DNA, 25 bp, Homo sapien
aatatttcagccacgccgcagggtc

SEQ ID NO: 114438 - DNA, 25 bp, Homo sapien
gaagaaacttcaagagagtaggagg

SEQ ID NO: 114439 - DNA, 25 bp, Homo sapien
tgcgggagctttgttaaccacataa

SEQ ID NO: 114440 - DNA, 25 bp, Homo sapien
cccaggtaagaagaagaagattgct

SEQ ID NO: 114441 - DNA, 25 bp, Homo sapien
gaggtccatagaacctggcactctg

SEQ ID NO: 114442 - DNA, 25 bp, Homo sapien
ccagagcctgagtatgtgcataaga

SEQ ID NO: 114443 - DNA, 25 bp, Homo sapien
cccgtaagtggcttcagacatagga

SEQ ID NO: 114444 - DNA, 25 bp, Homo sapien
ggatttatccccgtaagtggcttca

SEQ ID NO: 114445 - DNA, 25 bp, Homo sapien
ggattggctccagagcctgagtatg

SEQ ID NO: 114446 - DNA, 25 bp, Homo sapien
aagatgcagacattgcctttggctc

SEQ ID NO: 114447 - DNA, 25 bp, Homo sapien
gagagaatatacaggacaagagaag

SEQ ID NO: 114448 - DNA, 25 bp, Homo sapien
cattgattgcatccatgtgccatta

SEQ ID NO: 114449 - DNA, 25 bp, Homo sapien
tcctccagaatacagggatgagaga

SEQ ID NO: 114450 - DNA, 25 bp, Homo sapien
ccacaggcctaccttctccatggct

SEQ ID NO: 114451 - DNA, 25 bp, Homo sapien
ccggccacaggcctaccttctccat

SEQ ID NO: 114452 - DNA, 25 bp, Homo sapien
ggccacaggcctaccttctccatgg

SEQ ID NO: 114453 - DNA, 25 bp, Homo sapien
gatttaaggttcctaatcaccagga

SEQ ID NO: 114454 - DNA, 25 bp, Homo sapien
gagccaggccctgcgagttttcccg

SEQ ID NO: 114455 - DNA, 25 bp, Homo sapien
gagttttcccgcagtgcaccacgca

SEQ ID NO: 114456 - DNA, 25 bp, Homo sapien
tgcaccacgcattggcgttcaccta

SEQ ID NO: 114457 - DNA, 25 bp, Homo sapien
ccgcagtgcaccacgcattggcgtt

SEQ ID NO: 114458 - DNA, 25 bp, Homo sapien
gcggcttccgggtcgagcctccgcg

SEQ ID NO: 114459 - DNA, 25 bp, Homo sapien
cggcttccgggtcgagcctccgcgg

SEQ ID NO: 114460 - DNA, 25 bp, Homo sapien
ccacggcggcttccgggtcgagcct

SEQ ID NO: 114461 - DNA, 25 bp, Homo sapien
gcggccacggcggcttccgggtcga

SEQ ID NO: 114462 - DNA, 25 bp, Homo sapien
agaacccggtgcgacacggagctcc

SEQ ID NO: 114463 - DNA, 25 bp, Homo sapien
ccagcccaagaacccggtgcgacac

SEQ ID NO: 114464 - DNA, 25 bp, Homo sapien
ccagtggcgaccgagggagaaggac

SEQ ID NO: 114465 - DNA, 25 bp, Homo sapien
gggccagtggcgaccgagggagaag

SEQ ID NO: 114466 - DNA, 25 bp, Homo sapien
ccctgccgtcgccatggggactcat

SEQ ID NO: 114467 - DNA, 25 bp, Homo sapien
gcgccgcagccccactcggactgcc

SEQ ID NO: 114468 - DNA, 25 bp, Homo sapien
acgccgccgcggatgcccccggagc

SEQ ID NO: 114469 - DNA, 25 bp, Homo sapien
ggccacggcggcgaacaccgccacg

SEQ ID NO: 114470 - DNA, 25 bp, Homo sapien
cctgcccgttctgggaccaggggag

SEQ ID NO: 114471 - DNA, 25 bp, Homo sapien
cagaccgaatgccaagagcaggggc

SEQ ID NO: 114472 - DNA, 25 bp, Homo sapien
tacgccccatctcgaaaacctgaga

SEQ ID NO: 114473 - DNA, 25 bp, Homo sapien
aggcgaaaccaacaatacgccccat

SEQ ID NO: 114474 - DNA, 25 bp, Homo sapien
taaagaaaccacaacgacaggaatg

SEQ ID NO: 114475 - DNA, 25 bp, Homo sapien
gaagtggagaggtcgataagcccca

SEQ ID NO: 114476 - DNA, 25 bp, Homo sapien
gatcttcaacgtggtaggcagccct

SEQ ID NO: 114477 - DNA, 25 bp, Homo sapien
tagtaagtgcccaacaaacgtcagt

SEQ ID NO: 114478 - DNA, 25 bp, Homo sapien
aattgagccttgagaagaccgcagc

SEQ ID NO: 114479 - DNA, 25 bp, Homo sapien
ttttcatagaaacagccgcacctgg

SEQ ID NO: 114480 - DNA, 25 bp, Homo sapien
ttgcattaatttgactggataaaac

SEQ ID NO: 114481 - DNA, 25 bp, Homo sapien
atccaaatgcttgcattggggtttt

SEQ ID NO: 114482 - DNA, 25 bp, Homo sapien
gaatgacactcctccaaagttttca

SEQ ID NO: 114483 - DNA, 25 bp, Homo sapien
tattagagaatgacactcctccaaa

SEQ ID NO: 114484 - DNA, 25 bp, Homo sapien
agctcatgtgcggctgtgatcagtt

SEQ ID NO: 114485 - DNA, 25 bp, Homo sapien
tcatgtgcggctgtgatcagttccc

SEQ ID NO: 114486 - DNA, 25 bp, Homo sapien
tccaagctcatgtgcggctgtgatc

SEQ ID NO: 114487 - DNA, 25 bp, Homo sapien
ccaagctcatgtgcggctgtgatca

SEQ ID NO: 114488 - DNA, 25 bp, Homo sapien
gccacagagaagattgacgcggtag

SEQ ID NO: 114489 - DNA, 25 bp, Homo sapien
gacgcggtaggcaattgaaccaaaa

SEQ ID NO: 114490 - DNA, 25 bp, Homo sapien
taatgatgcagctactgctccaaat

SEQ ID NO: 114491 - DNA, 25 bp, Homo sapien
ccaccagcgtgaacaaaggatagcc

SEQ ID NO: 114492 - DNA, 25 bp, Homo sapien
tattaccatagagatggcttctcct

SEQ ID NO: 114493 - DNA, 25 bp, Homo sapien
tctcctttttgaagggtgtctattg

SEQ ID NO: 114494 - DNA, 25 bp, Homo sapien
cttccactcaatcaataggctactg

SEQ ID NO: 114495 - DNA, 25 bp, Homo sapien
ggtgtctattgtttgacaaaacaga

SEQ ID NO: 114496 - DNA, 25 bp, Homo sapien
taaatgacacgacatataccctcct

SEQ ID NO: 114497 - DNA, 25 bp, Homo sapien
tagtgataccggaacatatgaagga

SEQ ID NO: 114498 - DNA, 25 bp, Homo sapien
taatgatagtgacttcagtactcct

SEQ ID NO: 114499 - DNA, 25 bp, Homo sapien
gcaatgtaaatcttccccgaggtaa

SEQ ID NO: 114500 - DNA, 25 bp, Homo sapien
tcaaagtgagagatacaagctgcag

SEQ ID NO: 114501 - DNA, 25 bp, Homo sapien
tgcagggcaaaaacctggcagctcc

SEQ ID NO: 114502 - DNA, 25 bp, Homo sapien
tatttcaagctatctgctgccgctg

SEQ ID NO: 114503 - DNA, 25 bp, Homo sapien
gtggagagctgcactgttatcagac

SEQ ID NO: 114504 - DNA, 25 bp, Homo sapien
gcttgataaaattacttacaccatt

SEQ ID NO: 114505 - DNA, 25 bp, Homo sapien
tcaatgtaggtccaaacattttcaa

SEQ ID NO: 114506 - DNA, 25 bp, Homo sapien
aatgcttgataaaattacttacacc

SEQ ID NO: 114507 - DNA, 25 bp, Homo sapien
cctcaatgtaggtccaaacattttc

SEQ ID NO: 114508 - DNA, 25 bp, Homo sapien
gagacctggtagtgatcatcaaagc

SEQ ID NO: 114509 - DNA, 25 bp, Homo sapien
cactgcactctcctgtactgttgga

SEQ ID NO: 114510 - DNA, 25 bp, Homo sapien
tatggtacaccccaatgccagtaca

SEQ ID NO: 114511 - DNA, 25 bp, Homo sapien
tacaactctggatgccccatagaac

SEQ ID NO: 114512 - DNA, 25 bp, Homo sapien
ctgcagcatctacctctcttctcat

SEQ ID NO: 114513 - DNA, 25 bp, Homo sapien
tctgcagcatctacctctcttctca

SEQ ID NO: 114514 - DNA, 25 bp, Homo sapien
aagtccacatctgcagcatctacct

SEQ ID NO: 114515 - DNA, 25 bp, Homo sapien
acatctgcagcatctacctctcttc

SEQ ID NO: 114516 - DNA, 25 bp, Homo sapien
tatgaaatgttttggagggcccagt

SEQ ID NO: 114517 - DNA, 25 bp, Homo sapien
tcttttcggctaaccacagctagag

SEQ ID NO: 114518 - DNA, 25 bp, Homo sapien
gagcagaaagtcatgtgtacgtcca

SEQ ID NO: 114519 - DNA, 25 bp, Homo sapien
caaaacagaagagaggacgtacgcc

SEQ ID NO: 114520 - DNA, 25 bp, Homo sapien
gattgtttaagctaaaaacctctgc

SEQ ID NO: 114521 - DNA, 25 bp, Homo sapien
gaccactgccatgttagacgagaaa

SEQ ID NO: 114522 - DNA, 25 bp, Homo sapien
gcaaggattcctccagcagatgagc

SEQ ID NO: 114523 - DNA, 25 bp, Homo sapien
aaacctctgctgcaatggaccactg

SEQ ID NO: 114524 - DNA, 25 bp, Homo sapien
agagtattattgtgtgctggttaca

SEQ ID NO: 114525 - DNA, 25 bp, Homo sapien
tatgcacaaaacatagagtattatt

SEQ ID NO: 114526 - DNA, 25 bp, Homo sapien
tgtgctggttacataaactaaggcc

SEQ ID NO: 114527 - DNA, 25 bp, Homo sapien
agttgaaagagaatccaaggtatta

SEQ ID NO: 114528 - DNA, 25 bp, Homo sapien
ctgggaaaggtagtctctcacaaat

SEQ ID NO: 114529 - DNA, 25 bp, Homo sapien
tgggaaaggtagtctctcacaaata

SEQ ID NO: 114530 - DNA, 25 bp, Homo sapien
gaaaggtagtctctcacaaatatcg

SEQ ID NO: 114531 - DNA, 25 bp, Homo sapien
ggtagtctctcacaaatatcgtatt

SEQ ID NO: 114532 - DNA, 25 bp, Homo sapien
tccaccgggcgtgattaaggtaaga

SEQ ID NO: 114533 - DNA, 25 bp, Homo sapien
gggcagcaaaccagcagagaagtac

SEQ ID NO: 114534 - DNA, 25 bp, Homo sapien
tgtgtcaaaaatccttgcagtgttg

SEQ ID NO: 114535 - DNA, 25 bp, Homo sapien
tgcagtgttgtctggtctccccagg

SEQ ID NO: 114536 - DNA, 25 bp, Homo sapien
tatttcagacatactggatcctatt

SEQ ID NO: 114537 - DNA, 25 bp, Homo sapien
tttcagacatactggatcctatttc

SEQ ID NO: 114538 - DNA, 25 bp, Homo sapien
atttcagacatactggatcctattt

SEQ ID NO: 114539 - DNA, 25 bp, Homo sapien
ttcagacatactggatcctatttca

SEQ ID NO: 114540 - DNA, 25 bp, Homo sapien
taaattacaccgaaactgtgagaac

SEQ ID NO: 114541 - DNA, 25 bp, Homo sapien
tagaggtaacaactacttctcagac

SEQ ID NO: 114542 - DNA, 25 bp, Homo sapien
aaatatttgacagtacagtcggccc

SEQ ID NO: 114543 - DNA, 25 bp, Homo sapien
caaagatagagcttacggcaaggat

SEQ ID NO: 114544 - DNA, 25 bp, Homo sapien
tgctgtaacaatctctggaaggtag

SEQ ID NO: 114545 - DNA, 25 bp, Homo sapien
gatgacttggtccacacagaacaca

SEQ ID NO: 114546 - DNA, 25 bp, Homo sapien
cattctcattcagggagtgctaaga

SEQ ID NO: 114547 - DNA, 25 bp, Homo sapien
gacatatggtctaggattactctca

SEQ ID NO: 114548 - DNA, 25 bp, Homo sapien
tccaagacgttttccaatggtaaca

SEQ ID NO: 114549 - DNA, 25 bp, Homo sapien
catgagagataattcccagccattc

SEQ ID NO: 114550 - DNA, 25 bp, Homo sapien
tactgtatagaatatccccgactgg

SEQ ID NO: 114551 - DNA, 25 bp, Homo sapien
ccccgactggtttggtaggaagctg

SEQ ID NO: 114552 - DNA, 25 bp, Homo sapien
gagagttcggtcctcatatttgtta

SEQ ID NO: 114553 - DNA, 25 bp, Homo sapien
ttgcacaaactgcaagggcttggat

SEQ ID NO: 114554 - DNA, 25 bp, Homo sapien
gcacaaactgcaagggcttggatgt

SEQ ID NO: 114555 - DNA, 25 bp, Homo sapien
gttgaatgagagttcggtcctcata

SEQ ID NO: 114556 - DNA, 25 bp, Homo sapien
aatatctaaatttgctctccaagca

SEQ ID NO: 114557 - DNA, 25 bp, Homo sapien
aagccatactaatgatggattctgt

SEQ ID NO: 114558 - DNA, 25 bp, Homo sapien
taaatttgctctccaagcaaagaac

SEQ ID NO: 114559 - DNA, 25 bp, Homo sapien
cagtaaaaagccatactaatgatgg

SEQ ID NO: 114560 - DNA, 25 bp, Homo sapien
taaggaaatatgttgttaagtgccc

SEQ ID NO: 114561 - DNA, 25 bp, Homo sapien
tactctaatctcagagactgctgcc

SEQ ID NO: 114562 - DNA, 25 bp, Homo sapien
acagaaatacggttgctcttttgcc

SEQ ID NO: 114563 - DNA, 25 bp, Homo sapien
cacccgttgtactgtattaccttgt

SEQ ID NO: 114564 - DNA, 25 bp, Homo sapien
taatgctatcaatcagctcctcata

SEQ ID NO: 114565 - DNA, 25 bp, Homo sapien
gagacatgcaaccagtgggtccagt

SEQ ID NO: 114566 - DNA, 25 bp, Homo sapien
tgggtccagttgactatttaatgct

SEQ ID NO: 114567 - DNA, 25 bp, Homo sapien
taaatatgctgcatgcacctagttg

SEQ ID NO: 114568 - DNA, 25 bp, Homo sapien
tgcattgctctgcatccagaatcgt

SEQ ID NO: 114569 - DNA, 25 bp, Homo sapien
tgctctgcatccagaatcgttccac

SEQ ID NO: 114570 - DNA, 25 bp, Homo sapien
ctactgcattgctctgcatccagaa

SEQ ID NO: 114571 - DNA, 25 bp, Homo sapien
tactgcattgctctgcatccagaat

SEQ ID NO: 114572 - DNA, 25 bp, Homo sapien
tgcagccaaaccaatgccagcgagg

SEQ ID NO: 114573 - DNA, 25 bp, Homo sapien
aaaccaatgccagcgaggacggcca

SEQ ID NO: 114574 - DNA, 25 bp, Homo sapien
cattgctattcagcactcggttagt

SEQ ID NO: 114575 - DNA, 25 bp, Homo sapien
cattccagacactgaagcccattgc

SEQ ID NO: 114576 - DNA, 25 bp, Homo sapien
aggagttcaggaccagcctaggcaa

SEQ ID NO: 114577 - DNA, 25 bp, Homo sapien
ctaggcaacatagtgagaccttgtc

SEQ ID NO: 114578 - DNA, 25 bp, Homo sapien
gctgaagagggaggcttgcttgaga

SEQ ID NO: 114579 - DNA, 25 bp, Homo sapien
tgaagagggaggcttgcttgagacc

SEQ ID NO: 114580 - DNA, 25 bp, Homo sapien
tgtaacggagagaatttcctggcaa

SEQ ID NO: 114581 - DNA, 25 bp, Homo sapien
ctcctctgagtaagataattgcatc

SEQ ID NO: 114582 - DNA, 25 bp, Homo sapien
taattgcatcatgaggcatagaggt

SEQ ID NO: 114583 - DNA, 25 bp, Homo sapien
gatccactaatgaaatgtcaggcct

SEQ ID NO: 114584 - DNA, 25 bp, Homo sapien
taaatgtgaccattccactaggtaa

SEQ ID NO: 114585 - DNA, 25 bp, Homo sapien
ggaaagttgacacctggcaagtgct

SEQ ID NO: 114586 - DNA, 25 bp, Homo sapien
cactaggtaatattccttccacagg

SEQ ID NO: 114587 - DNA, 25 bp, Homo sapien
cacaggattccaccggttcccagga

SEQ ID NO: 114588 - DNA, 25 bp, Homo sapien
taatttgtcacaagacccccatggc

SEQ ID NO: 114589 - DNA, 25 bp, Homo sapien
cattcctcagggttgaatacaatct

SEQ ID NO: 114590 - DNA, 25 bp, Homo sapien
tccaggttgggtcgccttcatgaat

SEQ ID NO: 114591 - DNA, 25 bp, Homo sapien
tcttcggtccagttatagatacttt

SEQ ID NO: 114592 - DNA, 25 bp, Homo sapien
agattcccaagaagatggatcaaac

SEQ ID NO: 114593 - DNA, 25 bp, Homo sapien
ttcattggccacagattcccaagaa

SEQ ID NO: 114594 - DNA, 25 bp, Homo sapien
ttcttcattggccacagattcccaa

SEQ ID NO: 114595 - DNA, 25 bp, Homo sapien
tggccacagattcccaagaagatgg

SEQ ID NO: 114596 - DNA, 25 bp, Homo sapien
ggactccatcactagcagcagtgtg

SEQ ID NO: 114597 - DNA, 25 bp, Homo sapien
tgcccttggacaagtagcctttcca

SEQ ID NO: 114598 - DNA, 25 bp, Homo sapien
gaactttggactccatcactagcag

SEQ ID NO: 114599 - DNA, 25 bp, Homo sapien
gttagatgagtgttccagaggcaga

SEQ ID NO: 114600 - DNA, 25 bp, Homo sapien
gtctgccaacacatccctgaaggta

SEQ ID NO: 114601 - DNA, 25 bp, Homo sapien
aaagggaaacctgctgagtctgcca

SEQ ID NO: 114602 - DNA, 25 bp, Homo sapien
tcatccaagttgtattcagaacgcc

SEQ ID NO: 114603 - DNA, 25 bp, Homo sapien
tgaaggtacccaacacgaagctcat

SEQ ID NO: 114604 - DNA, 25 bp, Homo sapien
tgtgagcagtttctgccaggttaaa

SEQ ID NO: 114605 - DNA, 25 bp, Homo sapien
tgagcgtagagttgagctttcactt

SEQ ID NO: 114606 - DNA, 25 bp, Homo sapien
tcatatgcttgagcgtagagttgag

SEQ ID NO: 114607 - DNA, 25 bp, Homo sapien
gctttcacttttgaaggcatgtgag

SEQ ID NO: 114608 - DNA, 25 bp, Homo sapien
gaaaggttctttgatgcacagttga

SEQ ID NO: 114609 - DNA, 25 bp, Homo sapien
tgacactccaatgacatcctctctg

SEQ ID NO: 114610 - DNA, 25 bp, Homo sapien
ccttgccctaccatctgtttggtta

SEQ ID NO: 114611 - DNA, 25 bp, Homo sapien
gaagctgggcctccttactgccaga

SEQ ID NO: 114612 - DNA, 25 bp, Homo sapien
gacacgggtgtaaaggctgtagcat

SEQ ID NO: 114613 - DNA, 25 bp, Homo sapien
cctactccagggcaaacaaatgcat

SEQ ID NO: 114614 - DNA, 25 bp, Homo sapien
tgagccctcctctgataagacacgg

SEQ ID NO: 114615 - DNA, 25 bp, Homo sapien
cgaggccagagatcaggcttgagat

SEQ ID NO: 114616 - DNA, 25 bp, Homo sapien
cgctcacaggcgatggcatagttct

SEQ ID NO: 114617 - DNA, 25 bp, Homo sapien
tatcagcttgctgtgggtcattcgg

SEQ ID NO: 114618 - DNA, 25 bp, Homo sapien
tggtttccgataacagcacttcagg

SEQ ID NO: 114619 - DNA, 25 bp, Homo sapien
gcatctcttgcctgaagacgcagca

SEQ ID NO: 114620 - DNA, 25 bp, Homo sapien
tttgcagttcttttcttaggtgctt

SEQ ID NO: 114621 - DNA, 25 bp, Homo sapien
tcttttcttaggtgctttagagcac

SEQ ID NO: 114622 - DNA, 25 bp, Homo sapien
gttcttttcttaggtgctttagagc

SEQ ID NO: 114623 - DNA, 25 bp, Homo sapien
cagttcttttcttaggtgctttaga

SEQ ID NO: 114624 - DNA, 25 bp, Homo sapien
tcagacatttttcctatttctcaga

SEQ ID NO: 114625 - DNA, 25 bp, Homo sapien
cagacatttttcctatttctcagac

SEQ ID NO: 114626 - DNA, 25 bp, Homo sapien
tagcagaccttagtcactgaatacc

SEQ ID NO: 114627 - DNA, 25 bp, Homo sapien
attttggaagctgaacgatgagcag

SEQ ID NO: 114628 - DNA, 25 bp, Homo sapien
cactgaaatggtaatttggtaacac

SEQ ID NO: 114629 - DNA, 25 bp, Homo sapien
ccattaaacagtactgctggaccat

SEQ ID NO: 114630 - DNA, 25 bp, Homo sapien
gcttgaagtgtaagactatgtaaca

SEQ ID NO: 114631 - DNA, 25 bp, Homo sapien
cacccatttggtgtttagcttgaag

SEQ ID NO: 114632 - DNA, 25 bp, Homo sapien
tccaagaacgatctaagacagtaaa

SEQ ID NO: 114633 - DNA, 25 bp, Homo sapien
aatgtactctcacctaaagcctaac

SEQ ID NO: 114634 - DNA, 25 bp, Homo sapien
ggaaccatgcaagctccacaggaga

SEQ ID NO: 114635 - DNA, 25 bp, Homo sapien
tgctagtacaatgccacggaactgt

SEQ ID NO: 114636 - DNA, 25 bp, Homo sapien
gaattgtgcagtcaaggccctgtca

SEQ ID NO: 114637 - DNA, 25 bp, Homo sapien
caaaagcggattaatgagctcctcc

SEQ ID NO: 114638 - DNA, 25 bp, Homo sapien
cattatgatcctatctactccgggc

SEQ ID NO: 114639 - DNA, 25 bp, Homo sapien
caccacatgcgtatgtagatgcaga

SEQ ID NO: 114640 - DNA, 25 bp, Homo sapien
tactccgggccatcatatcattggt

SEQ ID NO: 114641 - DNA, 25 bp, Homo sapien
tcaaagagagagtggcccaaagtca

SEQ ID NO: 114642 - DNA, 25 bp, Homo sapien
ttagtcagataacatgggagccacc

SEQ ID NO: 114643 - DNA, 25 bp, Homo sapien
gacactgctagaacgctggccaaat

SEQ ID NO: 114644 - DNA, 25 bp, Homo sapien
tactcctatcagaggcaacagcggg

SEQ ID NO: 114645 - DNA, 25 bp, Homo sapien
ggagtgtagcccacccagtggttag

SEQ ID NO: 114646 - DNA, 25 bp, Homo sapien
tgctaaagctttagctccttgtttg

SEQ ID NO: 114647 - DNA, 25 bp, Homo sapien
gatgtcttcattgaatatgatcact

SEQ ID NO: 114648 - DNA, 25 bp, Homo sapien
taaagctttagctccttgtttgctc

SEQ ID NO: 114649 - DNA, 25 bp, Homo sapien
aagctttagctccttgtttgctctg

SEQ ID NO: 114650 - DNA, 25 bp, Homo sapien
ggataggagtatagccccataattg

SEQ ID NO: 114651 - DNA, 25 bp, Homo sapien
tgtacagtgctggaaacgctacttg

SEQ ID NO: 114652 - DNA, 25 bp, Homo sapien
tatgtaccagaagacttgcaactct

SEQ ID NO: 114653 - DNA, 25 bp, Homo sapien
gagaactccactttcaggccaataa

SEQ ID NO: 114654 - DNA, 25 bp, Homo sapien
tctgtcacaacctttctaatgatga

SEQ ID NO: 114655 - DNA, 25 bp, Homo sapien
tctaatgatgaatagcctctctcca

SEQ ID NO: 114656 - DNA, 25 bp, Homo sapien
ctgagacctaaacttataatcccga

SEQ ID NO: 114657 - DNA, 25 bp, Homo sapien
taatcccgaaggtctaattcttctg

SEQ ID NO: 114658 - DNA, 25 bp, Homo sapien
gcagtagcttcccatcttgttaggg

SEQ ID NO: 114659 - DNA, 25 bp, Homo sapien
gagcttcctggttgcgaaaggccgc

SEQ ID NO: 114660 - DNA, 25 bp, Homo sapien
ttctggatgtgagcgtagttcggcc

SEQ ID NO: 114661 - DNA, 25 bp, Homo sapien
tttttgcgggcaagcctagtcggag

SEQ ID NO: 114662 - DNA, 25 bp, Homo sapien
tcctaaaactcactggactttctgt

SEQ ID NO: 114663 - DNA, 25 bp, Homo sapien
tgtaaacccagaatcttaattaata

SEQ ID NO: 114664 - DNA, 25 bp, Homo sapien
cccagaatcttaattaatacagacg

SEQ ID NO: 114665 - DNA, 25 bp, Homo sapien
aacccagaatcttaattaatacaga

SEQ ID NO: 114666 - DNA, 25 bp, Homo sapien
taaacccagaatcttaattaataca

SEQ ID NO: 114667 - DNA, 25 bp, Homo sapien
cacagtaaccgttccgtgaagtaat

SEQ ID NO: 114668 - DNA, 25 bp, Homo sapien
cagattccatacaccacagtaaccg

SEQ ID NO: 114669 - DNA, 25 bp, Homo sapien
ttccgtgaagtaattcttgcagaac

SEQ ID NO: 114670 - DNA, 25 bp, Homo sapien
tacaccacagtaaccgttccgtgaa

SEQ ID NO: 114671 - DNA, 25 bp, Homo sapien
tcaatcctcagtgtacatccgaagg

SEQ ID NO: 114672 - DNA, 25 bp, Homo sapien
tgagtctgcggcacaggccaaaacc

SEQ ID NO: 114673 - DNA, 25 bp, Homo sapien
gctcatcccagctgagtctgcggca

SEQ ID NO: 114674 - DNA, 25 bp, Homo sapien
gtgtacatccgaaggcagaggacag

SEQ ID NO: 114675 - DNA, 25 bp, Homo sapien
caaaggtgccagttagctgttctga

SEQ ID NO: 114676 - DNA, 25 bp, Homo sapien
tgcggctcagaaatgacggtggctc

SEQ ID NO: 114677 - DNA, 25 bp, Homo sapien
tgagagcccaaaccatgctaggtgg

SEQ ID NO: 114678 - DNA, 25 bp, Homo sapien
aggaaataagtcttcttgcacaggc

SEQ ID NO: 114679 - DNA, 25 bp, Homo sapien
gcctctttccatagactgtactctg

SEQ ID NO: 114680 - DNA, 25 bp, Homo sapien
cctgttcagtggttgagaaggcaat

SEQ ID NO: 114681 - DNA, 25 bp, Homo sapien
taacgatgcattagtgaaccaaaca

SEQ ID NO: 114682 - DNA, 25 bp, Homo sapien
tatgtattaatactagccacagttc

SEQ ID NO: 114683 - DNA, 25 bp, Homo sapien
taccacgcgccagttctgctgggaa

SEQ ID NO: 114684 - DNA, 25 bp, Homo sapien
gaacttggccggatacttgagcacc

SEQ ID NO: 114685 - DNA, 25 bp, Homo sapien
tatcaacaactaccattggttgagg

SEQ ID NO: 114686 - DNA, 25 bp, Homo sapien
gttgaggaggacctaccacgcgcca

SEQ ID NO: 114687 - DNA, 25 bp, Homo sapien
taataagcacggctgccttgagctt

SEQ ID NO: 114688 - DNA, 25 bp, Homo sapien
taataataagcacggctgccttgag

SEQ ID NO: 114689 - DNA, 25 bp, Homo sapien
aataataataagcacggctgccttg

SEQ ID NO: 114690 - DNA, 25 bp, Homo sapien
aataataagcacggctgccttgagc

SEQ ID NO: 114691 - DNA, 25 bp, Homo sapien
atgggtaagttgacctgggctctga

SEQ ID NO: 114692 - DNA, 25 bp, Homo sapien
tgaggcaagggctcaacatggcagc

SEQ ID NO: 114693 - DNA, 25 bp, Homo sapien
tgggctgaggcccgggtaatgggta

SEQ ID NO: 114694 - DNA, 25 bp, Homo sapien
gtaatgggtaagttgacctgggctc

SEQ ID NO: 114695 - DNA, 25 bp, Homo sapien
tgtttatggagcatccataccaggg

SEQ ID NO: 114696 - DNA, 25 bp, Homo sapien
ctgttcccagccctgaatgcatctg

SEQ ID NO: 114697 - DNA, 25 bp, Homo sapien
cattcattcagggagtgtttatgga

SEQ ID NO: 114698 - DNA, 25 bp, Homo sapien
tgcatctgtgggtaaaggcgagcat

SEQ ID NO: 114699 - DNA, 25 bp, Homo sapien
caggaaggtgcctccgcgagtatat

SEQ ID NO: 114700 - DNA, 25 bp, Homo sapien
cgcaggtcctgtttacccaacaggt

SEQ ID NO: 114701 - DNA, 25 bp, Homo sapien
gctctccaggctgagcgcaagcttg

SEQ ID NO: 114702 - DNA, 25 bp, Homo sapien
gagtatatgcgtagaccgctcgctc

SEQ ID NO: 114703 - DNA, 25 bp, Homo sapien
acgcagctgctccgacggtcaggct

SEQ ID NO: 114704 - DNA, 25 bp, Homo sapien
tgctccgacggtcaggctccagagc

SEQ ID NO: 114705 - DNA, 25 bp, Homo sapien
tcaagtgtgtacgatggcccgtgga

SEQ ID NO: 114706 - DNA, 25 bp, Homo sapien
gagagcgagcaggacccacgcagct

SEQ ID NO: 114707 - DNA, 25 bp, Homo sapien
cctgcagtctatcatcagcttgctg

SEQ ID NO: 114708 - DNA, 25 bp, Homo sapien
cagggtcgttgagtgcgtcatggaa

SEQ ID NO: 114709 - DNA, 25 bp, Homo sapien
gaaggacccttgctatctgaatgga

SEQ ID NO: 114710 - DNA, 25 bp, Homo sapien
gcaccaagtccccaattccagttga

SEQ ID NO: 114711 - DNA, 25 bp, Homo sapien
aactacttgtcgctttcaccttgtt

SEQ ID NO: 114712 - DNA, 25 bp, Homo sapien
ctacttgtcgctttcaccttgttgg

SEQ ID NO: 114713 - DNA, 25 bp, Homo sapien
tacttgtcgctttcaccttgttggc

SEQ ID NO: 114714 - DNA, 25 bp, Homo sapien
ctaactacttgtcgctttcaccttg

SEQ ID NO: 114715 - DNA, 25 bp, Homo sapien
gccagatattcagctagtgcaacat

SEQ ID NO: 114716 - DNA, 25 bp, Homo sapien
cataacggtctgatgtaacatgttg

SEQ ID NO: 114717 - DNA, 25 bp, Homo sapien
ccttcacattgagccagatattcag

SEQ ID NO: 114718 - DNA, 25 bp, Homo sapien
gctgtgcttgaaggtccttgaactg

SEQ ID NO: 114719 - DNA, 25 bp, Homo sapien
tgtgggtaggtgtgtcctggacatc

SEQ ID NO: 114720 - DNA, 25 bp, Homo sapien
gggtaggtgtgtcctggacatcatc

SEQ ID NO: 114721 - DNA, 25 bp, Homo sapien
ctctcttgtgggtaggtgtgtcctg

SEQ ID NO: 114722 - DNA, 25 bp, Homo sapien
cttgtgggtaggtgtgtcctggaca

SEQ ID NO: 114723 - DNA, 25 bp, Homo sapien
agcaggacctgttaggtcatgtgaa

SEQ ID NO: 114724 - DNA, 25 bp, Homo sapien
catgtgaatagctcagggtgacatc

SEQ ID NO: 114725 - DNA, 25 bp, Homo sapien
caccatactgttggccacaagcagg

SEQ ID NO: 114726 - DNA, 25 bp, Homo sapien
ctgccagacaccatactgttggcca

SEQ ID NO: 114727 - DNA, 25 bp, Homo sapien
caggttgccttcatgttcagaagtg

SEQ ID NO: 114728 - DNA, 25 bp, Homo sapien
tcaggttgccttcatgttcagaagt

SEQ ID NO: 114729 - DNA, 25 bp, Homo sapien
aaggaagacttgcttcttttagtct

SEQ ID NO: 114730 - DNA, 25 bp, Homo sapien
tctttttatcttcgtaataccagcc

SEQ ID NO: 114731 - DNA, 25 bp, Homo sapien
ttttatcttcgtaataccagccctc

SEQ ID NO: 114732 - DNA, 25 bp, Homo sapien
tttatcttcgtaataccagccctca

SEQ ID NO: 114733 - DNA, 25 bp, Homo sapien
atcttcgtaataccagccctcatct

SEQ ID NO: 114734 - DNA, 25 bp, Homo sapien
gaattgaggtttcatgctggaagcc

SEQ ID NO: 114735 - DNA, 25 bp, Homo sapien
tctgccccaggtagtcagtggtggc

SEQ ID NO: 114736 - DNA, 25 bp, Homo sapien
agccagtatcccgagttgtttgcca

SEQ ID NO: 114737 - DNA, 25 bp, Homo sapien
tatcctgatatgagtcctactgccg

SEQ ID NO: 114738 - DNA, 25 bp, Homo sapien
tctataacacacatggaccacagaa

SEQ ID NO: 114739 - DNA, 25 bp, Homo sapien
ccactttccaatctgttggttggtg

SEQ ID NO: 114740 - DNA, 25 bp, Homo sapien
gcctggcatttaaggttttacagca

SEQ ID NO: 114741 - DNA, 25 bp, Homo sapien
taaaggcttaacatcttagcctggc

SEQ ID NO: 114742 - DNA, 25 bp, Homo sapien
gaaccatcgtgcctagcctaacaaa

SEQ ID NO: 114743 - DNA, 25 bp, Homo sapien
taattgcagtatcaaggaaaaactg

SEQ ID NO: 114744 - DNA, 25 bp, Homo sapien
tagcagagctcagccatgaaaccag

SEQ ID NO: 114745 - DNA, 25 bp, Homo sapien
tcccctccagttaatggctgatatg

SEQ ID NO: 114746 - DNA, 25 bp, Homo sapien
ctgctgaagctccatatggtgtcat

SEQ ID NO: 114747 - DNA, 25 bp, Homo sapien
gagaacacatgtgggtcttggtgtc

SEQ ID NO: 114748 - DNA, 25 bp, Homo sapien
agaacacatgtgggtcttggtgtct

SEQ ID NO: 114749 - DNA, 25 bp, Homo sapien
tgagaacacatgtgggtcttggtgt

SEQ ID NO: 114750 - DNA, 25 bp, Homo sapien
ttggtgcacacaaggtgctccgcac

SEQ ID NO: 114751 - DNA, 25 bp, Homo sapien
gaggttggtgcacacaaggtgctcc

SEQ ID NO: 114752 - DNA, 25 bp, Homo sapien
tgtcccagatgtgtggaaggaggtt

SEQ ID NO: 114753 - DNA, 25 bp, Homo sapien
ctctgggtgtcccagatgtgtggaa

SEQ ID NO: 114754 - DNA, 25 bp, Homo sapien
cagttgggccaatacaattgaagcc

SEQ ID NO: 114755 - DNA, 25 bp, Homo sapien
ttatctctaagcaattcatgtggcc

SEQ ID NO: 114756 - DNA, 25 bp, Homo sapien
aactggtgactgcaaggtgaaaggc

SEQ ID NO: 114757 - DNA, 25 bp, Homo sapien
ttatttcatatcagctcccaaggca

SEQ ID NO: 114758 - DNA, 25 bp, Homo sapien
cagggagttgctcaagaggctcaga

SEQ ID NO: 114759 - DNA, 25 bp, Homo sapien
ccggaagcgggtctgaaactcgcag

SEQ ID NO: 114760 - DNA, 25 bp, Homo sapien
tccagagagactaccggaggaggca

SEQ ID NO: 114761 - DNA, 25 bp, Homo sapien
tggatgcgaaggctcgagccccaga

SEQ ID NO: 114762 - DNA, 25 bp, Homo sapien
tctcccggtaggatgagccgctgac

SEQ ID NO: 114763 - DNA, 25 bp, Homo sapien
gcttctcctggcctcgaagggcgag

SEQ ID NO: 114764 - DNA, 25 bp, Homo sapien
ggaagcccgagcaattcccagtttg

SEQ ID NO: 114765 - DNA, 25 bp, Homo sapien
gaaatccaggtcttcggccactgga

SEQ ID NO: 114766 - DNA, 25 bp, Homo sapien
gcccgtactgccgccgccacaggcg

SEQ ID NO: 114767 - DNA, 25 bp, Homo sapien
ccgccacaggcgcaagacgctggga

SEQ ID NO: 114768 - DNA, 25 bp, Homo sapien
aggcgcaagacgctgggaggctggg

SEQ ID NO: 114769 - DNA, 25 bp, Homo sapien
ccacaggcgcaagacgctgggaggc

SEQ ID NO: 114770 - DNA, 25 bp, Homo sapien
tgtatttcaccttgggagtgtttct

SEQ ID NO: 114771 - DNA, 25 bp, Homo sapien
caaatctttatctttcccacaggga

SEQ ID NO: 114772 - DNA, 25 bp, Homo sapien
gatctgttgccccaaatctttatct

SEQ ID NO: 114773 - DNA, 25 bp, Homo sapien
tcccacagggattcttggccctttg

SEQ ID NO: 114774 - DNA, 25 bp, Homo sapien
caaacctgaacgatttcttaggcac

SEQ ID NO: 114775 - DNA, 25 bp, Homo sapien
aaatgggccaatgatcatggtgctc

SEQ ID NO: 114776 - DNA, 25 bp, Homo sapien
tggagagcctaacaacaagatcttg

SEQ ID NO: 114777 - DNA, 25 bp, Homo sapien
tagttgaacataaggcaccctggtc

SEQ ID NO: 114778 - DNA, 25 bp, Homo sapien
atttgattccccgaggccagaaact

SEQ ID NO: 114779 - DNA, 25 bp, Homo sapien
ttcactcgagttcgccggagagagg

SEQ ID NO: 114780 - DNA, 25 bp, Homo sapien
ctccctcgcgggtggcagagttatt

SEQ ID NO: 114781 - DNA, 25 bp, Homo sapien
ggccagtcgccagtccgcgtagttt

SEQ ID NO: 114782 - DNA, 25 bp, Homo sapien
tcaacatgactttgccgggtcgcgg

SEQ ID NO: 114783 - DNA, 25 bp, Homo sapien
ttgtcgtggtccccgaccctggtca

SEQ ID NO: 114784 - DNA, 25 bp, Homo sapien
gaccctggtcaccaggccgagcgaa

SEQ ID NO: 114785 - DNA, 25 bp, Homo sapien
ccgagcgaacgtgaagagtgttttt

SEQ ID NO: 114786 - DNA, 25 bp, Homo sapien
gggttgtaattacgcagcctcccaa

SEQ ID NO: 114787 - DNA, 25 bp, Homo sapien
cctgggttgtaattacgcagcctcc

SEQ ID NO: 114788 - DNA, 25 bp, Homo sapien
ctgggttgtaattacgcagcctccc

SEQ ID NO: 114789 - DNA, 25 bp, Homo sapien
ggttgtaattacgcagcctcccaac

SEQ ID NO: 114790 - DNA, 25 bp, Homo sapien
ccgccgctcgagcccctgtcggccc

SEQ ID NO: 114791 - DNA, 25 bp, Homo sapien
tttgaggtgtaataacgatcgttgc

SEQ ID NO: 114792 - DNA, 25 bp, Homo sapien
gggtcgtcgcttctgcaaaacgtcg

SEQ ID NO: 114793 - DNA, 25 bp, Homo sapien
cgaaacgctgcgaatgtaatctggg

SEQ ID NO: 114794 - DNA, 25 bp, Homo sapien
tgtttttatgtcaacgccgttctgg

SEQ ID NO: 114795 - DNA, 25 bp, Homo sapien
caaagcgacgaattaattaccaact

SEQ ID NO: 114796 - DNA, 25 bp, Homo sapien
tataagaaccgacaacaaagcgacg

SEQ ID NO: 114797 - DNA, 25 bp, Homo sapien
ccccaaattaaaggcagcgagctgt

SEQ ID NO: 114798 - DNA, 25 bp, Homo sapien
caacttcattaacataggtccccaa

SEQ ID NO: 114799 - DNA, 25 bp, Homo sapien
ggctgccgagagcttgctgcctcgt

SEQ ID NO: 114800 - DNA, 25 bp, Homo sapien
tgctgtaaatcccaaggacggccac

SEQ ID NO: 114801 - DNA, 25 bp, Homo sapien
tcccgtaattcgttaattgctgtaa

SEQ ID NO: 114802 - DNA, 25 bp, Homo sapien
ctcgtgcgcactcccgtaattcgtt

SEQ ID NO: 114803 - DNA, 25 bp, Homo sapien
actctgcttcaggtgatcgaggtgg

SEQ ID NO: 114804 - DNA, 25 bp, Homo sapien
ttgactcctgggaacgcgacagcca

SEQ ID NO: 114805 - DNA, 25 bp, Homo sapien
ggcggccgccaggtgtttcagtaca

SEQ ID NO: 114806 - DNA, 25 bp, Homo sapien
acagccagcgggtctccggactgga

SEQ ID NO: 114807 - DNA, 25 bp, Homo sapien
tgcaacttttcaaggcgacacccag

SEQ ID NO: 114808 - DNA, 25 bp, Homo sapien
agcttgcctgctaccaactgctgca

SEQ ID NO: 114809 - DNA, 25 bp, Homo sapien
gagccgggcagtctgcaatttccaa

SEQ ID NO: 114810 - DNA, 25 bp, Homo sapien
aagagcatgttcttacaggtgaaga

SEQ ID NO: 114811 - DNA, 25 bp, Homo sapien
caaaggaaaagtctgtcgtgcccat

SEQ ID NO: 114812 - DNA, 25 bp, Homo sapien
tatgtaaactgacagctaccaccct

SEQ ID NO: 114813 - DNA, 25 bp, Homo sapien
agctctgtaagctcaaggctgctgc

SEQ ID NO: 114814 - DNA, 25 bp, Homo sapien
gatttcaaggaaacttcaggaccag

SEQ ID NO: 114815 - DNA, 25 bp, Homo sapien
ggttttcattagacacgattacaga

SEQ ID NO: 114816 - DNA, 25 bp, Homo sapien
taagaactgtcgtgagcacagcagt

SEQ ID NO: 114817 - DNA, 25 bp, Homo sapien
gagggctcctctaaaattcatgcgg

SEQ ID NO: 114818 - DNA, 25 bp, Homo sapien
tcatgtagtgcattaaacgccaggc

SEQ ID NO: 114819 - DNA, 25 bp, Homo sapien
tgcaaatgagtcagaacagaaccca

SEQ ID NO: 114820 - DNA, 25 bp, Homo sapien
gaccatgtgcgctcaagactgtacc

SEQ ID NO: 114821 - DNA, 25 bp, Homo sapien
tttggaaaacttggctgattcgccg

SEQ ID NO: 114822 - DNA, 25 bp, Homo sapien
gcccagtctggtttgctaaatttct

SEQ ID NO: 114823 - DNA, 25 bp, Homo sapien
caattcatgcaaacaactcctacag

SEQ ID NO: 114824 - DNA, 25 bp, Homo sapien
tcctacagttttccctaggagcact

SEQ ID NO: 114825 - DNA, 25 bp, Homo sapien
tacaagtccttacaccctagagcaa

SEQ ID NO: 114826 - DNA, 25 bp, Homo sapien
gctgtggatgagcaatacaagtcct

SEQ ID NO: 114827 - DNA, 25 bp, Homo sapien
gacacacactagatcagtaggactg

SEQ ID NO: 114828 - DNA, 25 bp, Homo sapien
tcaaagactctggtgtgtccagaca

SEQ ID NO: 114829 - DNA, 25 bp, Homo sapien
tgacccacaattcatacccagaagg

SEQ ID NO: 114830 - DNA, 25 bp, Homo sapien
tctctacagaccacaggctatgcac

SEQ ID NO: 114831 - DNA, 25 bp, Homo sapien
tggaactattaacactttgggccaa

SEQ ID NO: 114832 - DNA, 25 bp, Homo sapien
aaaattgtcgctggttgagaaacac

SEQ ID NO: 114833 - DNA, 25 bp, Homo sapien
tattaccccggccacattaatcatg

SEQ ID NO: 114834 - DNA, 25 bp, Homo sapien
tgtgatgactaaaaacgtctccaga

SEQ ID NO: 114835 - DNA, 25 bp, Homo sapien
aaatgtggaacgatccacaaatttg

SEQ ID NO: 114836 - DNA, 25 bp, Homo sapien
catcctcatgcaggggctatactaa

SEQ ID NO: 114837 - DNA, 25 bp, Homo sapien
aatgtggaacgatccacaaatttgc

SEQ ID NO: 114838 - DNA, 25 bp, Homo sapien
tgtatagcaggacaccgaccttctg

SEQ ID NO: 114839 - DNA, 25 bp, Homo sapien
tgaaggccaccgcattcatcaggtg

SEQ ID NO: 114840 - DNA, 25 bp, Homo sapien
gaatagaaccatgggtggactacca

SEQ ID NO: 114841 - DNA, 25 bp, Homo sapien
caggatcctgactgctagggtagca

SEQ ID NO: 114842 - DNA, 25 bp, Homo sapien
gaaagcggcacacaaagactttcac

SEQ ID NO: 114843 - DNA, 25 bp, Homo sapien
taacaacggaaagcggcacacaaag

SEQ ID NO: 114844 - DNA, 25 bp, Homo sapien
aacggaaagcggcacacaaagactt

SEQ ID NO: 114845 - DNA, 25 bp, Homo sapien
ttggagttaacaacggaaagcggca

SEQ ID NO: 114846 - DNA, 25 bp, Homo sapien
gtcaaaaagacccaatgctatgtta

SEQ ID NO: 114847 - DNA, 25 bp, Homo sapien
agacccaatgctatgttaacaaaaa

SEQ ID NO: 114848 - DNA, 25 bp, Homo sapien
tatttgatctacaacatacatcctg

SEQ ID NO: 114849 - DNA, 25 bp, Homo sapien
accaggcaaaagtgactatagttac

SEQ ID NO: 114850 - DNA, 25 bp, Homo sapien
tactgatggcaaattgatccgagag

SEQ ID NO: 114851 - DNA, 25 bp, Homo sapien
ccactgcaccattgatctgaataca

SEQ ID NO: 114852 - DNA, 25 bp, Homo sapien
aaagcggccactgcaccattgatct

SEQ ID NO: 114853 - DNA, 25 bp, Homo sapien
tacaatccaattcattactgatggc

SEQ ID NO: 114854 - DNA, 25 bp, Homo sapien
caataaactgggtcatttccatcat

SEQ ID NO: 114855 - DNA, 25 bp, Homo sapien
ggttgtggcacaataaactgggtca

SEQ ID NO: 114856 - DNA, 25 bp, Homo sapien
ggcacaataaactgggtcatttcca

SEQ ID NO: 114857 - DNA, 25 bp, Homo sapien
actaggttgtggcacaataaactgg

SEQ ID NO: 114858 - DNA, 25 bp, Homo sapien
ggcaggagaagaagagcccctgatt

SEQ ID NO: 114859 - DNA, 25 bp, Homo sapien
aggagaagaagagcccctgattagg

SEQ ID NO: 114860 - DNA, 25 bp, Homo sapien
aagaagagcccctgattaggaggta

SEQ ID NO: 114861 - DNA, 25 bp, Homo sapien
ctggcaggagaagaagagcccctga

SEQ ID NO: 114862 - DNA, 25 bp, Homo sapien
tagcgtcaatgaaaagtgaagcatc

SEQ ID NO: 114863 - DNA, 25 bp, Homo sapien
tgaagcatcagtcttattgctggaa

SEQ ID NO: 114864 - DNA, 25 bp, Homo sapien
ggagggcctctatttagaagagcaa

SEQ ID NO: 114865 - DNA, 25 bp, Homo sapien
tatgctgagagacctttaccctacc

SEQ ID NO: 114866 - DNA, 25 bp, Homo sapien
ggcaccaccagctttaacttagcac

SEQ ID NO: 114867 - DNA, 25 bp, Homo sapien
caccaccagctttaacttagcacat

SEQ ID NO: 114868 - DNA, 25 bp, Homo sapien
cagaagtttggcaggtgcgtgagct

SEQ ID NO: 114869 - DNA, 25 bp, Homo sapien
catgaccggtttccctgggaagtca

SEQ ID NO: 114870 - DNA, 25 bp, Homo sapien
gtcaacagaagtttggcaggtgcgt

SEQ ID NO: 114871 - DNA, 25 bp, Homo sapien
tcatgaccggtttccctgggaagtc

SEQ ID NO: 114872 - DNA, 25 bp, Homo sapien
ggctcctccgaagaggttaaaagca

SEQ ID NO: 114873 - DNA, 25 bp, Homo sapien
gctcctccgaagaggttaaaagcat

SEQ ID NO: 114874 - DNA, 25 bp, Homo sapien
ctttgttgtgtttataatacatgta

SEQ ID NO: 114875 - DNA, 25 bp, Homo sapien
gcctttgttgtgtttataatacatg

SEQ ID NO: 114876 - DNA, 25 bp, Homo sapien
gggcctttgttgtgtttataataca

SEQ ID NO: 114877 - DNA, 25 bp, Homo sapien
agcttctgagtaatatattgtacaa

SEQ ID NO: 114878 - DNA, 25 bp, Homo sapien
tgctgcccggctgaacagtgttcaa

SEQ ID NO: 114879 - DNA, 25 bp, Homo sapien
ccactgtgtagggattaggcctggc

SEQ ID NO: 114880 - DNA, 25 bp, Homo sapien
tactgccaacagttactagggtttg

SEQ ID NO: 114881 - DNA, 25 bp, Homo sapien
taggcctggcggtctgagaatttgc

SEQ ID NO: 114882 - DNA, 25 bp, Homo sapien
tagccaaagtaggaaatgcaaacaa

SEQ ID NO: 114883 - DNA, 25 bp, Homo sapien
aattcacagttagccaaagtaggaa

SEQ ID NO: 114884 - DNA, 25 bp, Homo sapien
cagttagccaaagtaggaaatgcaa

SEQ ID NO: 114885 - DNA, 25 bp, Homo sapien
cattgttcaataattcacagttagc

SEQ ID NO: 114886 - DNA, 25 bp, Homo sapien
gcttagagccctgaaataactagtg

SEQ ID NO: 114887 - DNA, 25 bp, Homo sapien
tttgcaaattaggatcactgcttag

SEQ ID NO: 114888 - DNA, 25 bp, Homo sapien
catttccattggagcattagacagt

SEQ ID NO: 114889 - DNA, 25 bp, Homo sapien
tagacagtgaaatacgtgcaaacat

SEQ ID NO: 114890 - DNA, 25 bp, Homo sapien
tgtcatggttcacgcaagtcttagt

SEQ ID NO: 114891 - DNA, 25 bp, Homo sapien
cacaaaagccattccctaatagtag

SEQ ID NO: 114892 - DNA, 25 bp, Homo sapien
tgtacacctaagttgcatggatcct

SEQ ID NO: 114893 - DNA, 25 bp, Homo sapien
taattttggcaacccaatcgactca

SEQ ID NO: 114894 - DNA, 25 bp, Homo sapien
tcatattatcatagcctgaagctgc

SEQ ID NO: 114895 - DNA, 25 bp, Homo sapien
ccaagcttgatgtgactggtgttat

SEQ ID NO: 114896 - DNA, 25 bp, Homo sapien
catagcctgaagctgcaatccccaa

SEQ ID NO: 114897 - DNA, 25 bp, Homo sapien
caggcctctctgtgtcaggcaaatc

SEQ ID NO: 114898 - DNA, 25 bp, Homo sapien
cctgtaatttgagtgatcgaagcca

SEQ ID NO: 114899 - DNA, 25 bp, Homo sapien
tgaggttgctcaactcaaggaacaa

SEQ ID NO: 114900 - DNA, 25 bp, Homo sapien
tcagcaaaagtgaaagaaactccag

SEQ ID NO: 114901 - DNA, 25 bp, Homo sapien
gtcccctggactggtaattccctga

SEQ ID NO: 114902 - DNA, 25 bp, Homo sapien
ttccaaacacttgagtatatgtctc

SEQ ID NO: 114903 - DNA, 25 bp, Homo sapien
ccttttcaataattgaaaacgattg

SEQ ID NO: 114904 - DNA, 25 bp, Homo sapien
aaacacttgagtatatgtctcatag

SEQ ID NO: 114905 - DNA, 25 bp, Homo sapien
tttttccaaacacttgagtatatgt

SEQ ID NO: 114906 - DNA, 25 bp, Homo sapien
gagcgttcacttaatcaatttgaca

SEQ ID NO: 114907 - DNA, 25 bp, Homo sapien
tgttggagtctgtggctgctctagc

SEQ ID NO: 114908 - DNA, 25 bp, Homo sapien
ttttacaacttaagcaagatcagac

SEQ ID NO: 114909 - DNA, 25 bp, Homo sapien
tcaagtacttccagcgagggaggtt

SEQ ID NO: 114910 - DNA, 25 bp, Homo sapien
ccgagattgtgccactgcccttcag

SEQ ID NO: 114911 - DNA, 25 bp, Homo sapien
ggtggaggcttcggtgagccgagat

SEQ ID NO: 114912 - DNA, 25 bp, Homo sapien
cgagattgtgccactgcccttcagc

SEQ ID NO: 114913 - DNA, 25 bp, Homo sapien
ggaggcttcggtgagccgagattgt

SEQ ID NO: 114914 - DNA, 25 bp, Homo sapien
ttaaggtcgacatcatcatcgcttt

SEQ ID NO: 114915 - DNA, 25 bp, Homo sapien
tcagactaagtcctgaagtatcttc

SEQ ID NO: 114916 - DNA, 25 bp, Homo sapien
ggttaaggtcgacatcatcatcgct

SEQ ID NO: 114917 - DNA, 25 bp, Homo sapien
ttcattctggaggttaaggtcgaca

SEQ ID NO: 114918 - DNA, 25 bp, Homo sapien
tttctgccaactggggtacatttga

SEQ ID NO: 114919 - DNA, 25 bp, Homo sapien
ccaactggggtacatttgatgtcat

SEQ ID NO: 114920 - DNA, 25 bp, Homo sapien
ctgccaactggggtacatttgatgt

SEQ ID NO: 114921 - DNA, 25 bp, Homo sapien
gtttctgccaactggggtacatttg

SEQ ID NO: 114922 - DNA, 25 bp, Homo sapien
gaatgaaggtatcccagaatgccct

SEQ ID NO: 114923 - DNA, 25 bp, Homo sapien
gacttcggcccctgtcggtaatgca

SEQ ID NO: 114924 - DNA, 25 bp, Homo sapien
tcaataacaaagacttcggcccctg

SEQ ID NO: 114925 - DNA, 25 bp, Homo sapien
ccctgtcggtaatgcaaactgtgaa

SEQ ID NO: 114926 - DNA, 25 bp, Homo sapien
atagtgttttccctaaagcagcaaa

SEQ ID NO: 114927 - DNA, 25 bp, Homo sapien
tttctaatagttgctgccagttctt

SEQ ID NO: 114928 - DNA, 25 bp, Homo sapien
gtgttttccctaaagcagcaaatac

SEQ ID NO: 114929 - DNA, 25 bp, Homo sapien
aaggcatttctaatagttgctgcca

SEQ ID NO: 114930 - DNA, 25 bp, Homo sapien
atcctttcctcaataaagatctttt

SEQ ID NO: 114931 - DNA, 25 bp, Homo sapien
tggtgtgggccacacatataaggaa

SEQ ID NO: 114932 - DNA, 25 bp, Homo sapien
gggccacacatataaggaaagtttg

SEQ ID NO: 114933 - DNA, 25 bp, Homo sapien
gggcaattaatggtgtgggccacac

SEQ ID NO: 114934 - DNA, 25 bp, Homo sapien
gtatttacataggaataaggcctta

SEQ ID NO: 114935 - DNA, 25 bp, Homo sapien
gcaagggtatttacataggaataag

SEQ ID NO: 114936 - DNA, 25 bp, Homo sapien
caagggtatttacataggaataagg

SEQ ID NO: 114937 - DNA, 25 bp, Homo sapien
cattgtaaaagcttgttcctgcagt

SEQ ID NO: 114938 - DNA, 25 bp, Homo sapien
catataagtggcgactgactggcgc

SEQ ID NO: 114939 - DNA, 25 bp, Homo sapien
cagttttgccgctctgcagcttcgg

SEQ ID NO: 114940 - DNA, 25 bp, Homo sapien
tcattctctgagcagcggattgaag

SEQ ID NO: 114941 - DNA, 25 bp, Homo sapien
cagtaaggttcaggatacagccaac

SEQ ID NO: 114942 - DNA, 25 bp, Homo sapien
tgcaccagctcactaagtcctttag

SEQ ID NO: 114943 - DNA, 25 bp, Homo sapien
cagaccatcagtccctaaaagtagg

SEQ ID NO: 114944 - DNA, 25 bp, Homo sapien
tgggcaaagggagcgatttctcttt

SEQ ID NO: 114945 - DNA, 25 bp, Homo sapien
ctccttgattgacaccccttttcct

SEQ ID NO: 114946 - DNA, 25 bp, Homo sapien
tatcccacaactcatactagtaaag

SEQ ID NO: 114947 - DNA, 25 bp, Homo sapien
aactcatactagtaaagtctgtgcc

SEQ ID NO: 114948 - DNA, 25 bp, Homo sapien
actagtaaagtctgtgccctccttg

SEQ ID NO: 114949 - DNA, 25 bp, Homo sapien
caagtggagaatacctcttcatcca

SEQ ID NO: 114950 - DNA, 25 bp, Homo sapien
cagtgacaatcttcccttctcgcct

SEQ ID NO: 114951 - DNA, 25 bp, Homo sapien
ccttctcgccttccacaagtggaga

SEQ ID NO: 114952 - DNA, 25 bp, Homo sapien
tcgccttccacaagtggagaatacc

SEQ ID NO: 114953 - DNA, 25 bp, Homo sapien
ttcttcgttactcaactctttgttg

SEQ ID NO: 114954 - DNA, 25 bp, Homo sapien
aattagttcttcgttactcaactct

SEQ ID NO: 114955 - DNA, 25 bp, Homo sapien
ttgttgattcctggcaccgggaaga

SEQ ID NO: 114956 - DNA, 25 bp, Homo sapien
acttctaatatacgcacaggtaagc

SEQ ID NO: 114957 - DNA, 25 bp, Homo sapien
tagttgtaagacttagtttctccaa

SEQ ID NO: 114958 - DNA, 25 bp, Homo sapien
taatagttgtaagacttagtttctc

SEQ ID NO: 114959 - DNA, 25 bp, Homo sapien
ttgttttgatgaactaaataatagt

SEQ ID NO: 114960 - DNA, 25 bp, Homo sapien
actaaataatagttgtaagacttag

SEQ ID NO: 114961 - DNA, 25 bp, Homo sapien
caaaagtcctgcagaagttgagttc

SEQ ID NO: 114962 - DNA, 25 bp, Homo sapien
gatacaactcaaacataggcacagg

SEQ ID NO: 114963 - DNA, 25 bp, Homo sapien
gcacacattgtctactggtgggaga

SEQ ID NO: 114964 - DNA, 25 bp, Homo sapien
tacatatattggctggcatagtggc

SEQ ID NO: 114965 - DNA, 25 bp, Homo sapien
tccaatataagatcctgctgctgct

SEQ ID NO: 114966 - DNA, 25 bp, Homo sapien
caatataagatcctgctgctgcttg

SEQ ID NO: 114967 - DNA, 25 bp, Homo sapien
ctttccaatataagatcctgctgct

SEQ ID NO: 114968 - DNA, 25 bp, Homo sapien
ttccaatataagatcctgctgctgc

SEQ ID NO: 114969 - DNA, 25 bp, Homo sapien
gaaagccctagatcaacatctggag

SEQ ID NO: 114970 - DNA, 25 bp, Homo sapien
tattttctgctacatttgaaagtac

SEQ ID NO: 114971 - DNA, 25 bp, Homo sapien
ttcttggaagaaccctggactgaaa

SEQ ID NO: 114972 - DNA, 25 bp, Homo sapien
agagattcttggaagaaccctggac

SEQ ID NO: 114973 - DNA, 25 bp, Homo sapien
tcagacagtcgcaatttggaggcca

SEQ ID NO: 114974 - DNA, 25 bp, Homo sapien
cagacagtcgcaatttggaggccat

SEQ ID NO: 114975 - DNA, 25 bp, Homo sapien
gccagagctacgagggcaatgccaa

SEQ ID NO: 114976 - DNA, 25 bp, Homo sapien
tgacttgaaacagcgccagaggtga

SEQ ID NO: 114977 - DNA, 25 bp, Homo sapien
gctagggaatcttctctcagagcac

SEQ ID NO: 114978 - DNA, 25 bp, Homo sapien
ggtgaatccgtttccactgctaggg

SEQ ID NO: 114979 - DNA, 25 bp, Homo sapien
agaatgatcttaattggtgcaaggt

SEQ ID NO: 114980 - DNA, 25 bp, Homo sapien
ttcagaatgatcttaattggtgcaa

SEQ ID NO: 114981 - DNA, 25 bp, Homo sapien
tcagaatgatcttaattggtgcaag

SEQ ID NO: 114982 - DNA, 25 bp, Homo sapien
cagaatgatcttaattggtgcaagg

SEQ ID NO: 114983 - DNA, 25 bp, Homo sapien
ccttatccctgtgttacatttggga

SEQ ID NO: 114984 - DNA, 25 bp, Homo sapien
ggttagtatgttattagagatcctc

SEQ ID NO: 114985 - DNA, 25 bp, Homo sapien
catttgggagaacttaaacagacct

SEQ ID NO: 114986 - DNA, 25 bp, Homo sapien
tccttttggcatgcgataaaatgaa

SEQ ID NO: 114987 - DNA, 25 bp, Homo sapien
ttatcataaacttctaccagcaagc

SEQ ID NO: 114988 - DNA, 25 bp, Homo sapien
tatcataaacttctaccagcaagca

SEQ ID NO: 114989 - DNA, 25 bp, Homo sapien
tcataaacttctaccagcaagcagc

SEQ ID NO: 114990 - DNA, 25 bp, Homo sapien
tattatcataaacttctaccagcaa

SEQ ID NO: 114991 - DNA, 25 bp, Homo sapien
taacctgaagagtggcagaagttcc

SEQ ID NO: 114992 - DNA, 25 bp, Homo sapien
gaagttcctcataatggtgagcagg

SEQ ID NO: 114993 - DNA, 25 bp, Homo sapien
cagagcagcaatatcaagtctgttg

SEQ ID NO: 114994 - DNA, 25 bp, Homo sapien
ttaagatgcactaaccagagcagca

SEQ ID NO: 114995 - DNA, 25 bp, Homo sapien
cataggaagctgctttcagttgaaa

SEQ ID NO: 114996 - DNA, 25 bp, Homo sapien
ttatcttcataggaagctgctttca

SEQ ID NO: 114997 - DNA, 25 bp, Homo sapien
tcttcataggaagctgctttcagtt

SEQ ID NO: 114998 - DNA, 25 bp, Homo sapien
tcataggaagctgctttcagttgaa

SEQ ID NO: 114999 - DNA, 25 bp, Homo sapien
ttaaggccagggtcagatggttgca

SEQ ID NO: 115000 - DNA, 25 bp, Homo sapien
ttggccattgacaaggtcttttgag

SEQ ID NO: 115001 - DNA, 25 bp, Homo sapien
gattgttcggttcagtttgtggtac

SEQ ID NO: 115002 - DNA, 25 bp, Homo sapien
agatgttttgtgagagattgttcgg

SEQ ID NO: 115003 - DNA, 25 bp, Homo sapien
cattagccggcattacacattgagc

SEQ ID NO: 115004 - DNA, 25 bp, Homo sapien
acttcattgagagggacataggtca

SEQ ID NO: 115005 - DNA, 25 bp, Homo sapien
tgtagatgacaatgaacggcccaat

SEQ ID NO: 115006 - DNA, 25 bp, Homo sapien
gttttgaactgtgctgttggaccca

SEQ ID NO: 115007 - DNA, 25 bp, Homo sapien
aagtgatacagaggcgaggctttgc

SEQ ID NO: 115008 - DNA, 25 bp, Homo sapien
tgtcaagctcaatcagaacgcaatg

SEQ ID NO: 115009 - DNA, 25 bp, Homo sapien
tctgcctgcatcaaagttaagactt

SEQ ID NO: 115010 - DNA, 25 bp, Homo sapien
tgctggcgagacttagaacaaagac

SEQ ID NO: 115011 - DNA, 25 bp, Homo sapien
tcaaagcaatttgctaattgcagat

SEQ ID NO: 115012 - DNA, 25 bp, Homo sapien
gcctcctctctgtttaatgtttcat

SEQ ID NO: 115013 - DNA, 25 bp, Homo sapien
tcctctctgtttaatgtttcatgtg

SEQ ID NO: 115014 - DNA, 25 bp, Homo sapien
cctcctctctgtttaatgtttcatg

SEQ ID NO: 115015 - DNA, 25 bp, Homo sapien
ccctggagtccaatagaactgccat

SEQ ID NO: 115016 - DNA, 25 bp, Homo sapien
tccctggagtccaatagaactgcca

SEQ ID NO: 115017 - DNA, 25 bp, Homo sapien
gctccctggagtccaatagaactgc

SEQ ID NO: 115018 - DNA, 25 bp, Homo sapien
agctccctggagtccaatagaactg

SEQ ID NO: 115019 - DNA, 25 bp, Homo sapien
gacgagagtacttgttatcaccaca

SEQ ID NO: 115020 - DNA, 25 bp, Homo sapien
gatgctagaggtttgccacaatggc

SEQ ID NO: 115021 - DNA, 25 bp, Homo sapien
caaactggtcaaggaagtacaactc

SEQ ID NO: 115022 - DNA, 25 bp, Homo sapien
cagagaatttgaaccacaggatgat

SEQ ID NO: 115023 - DNA, 25 bp, Homo sapien
gtcacattttgtgggcactaccact

SEQ ID NO: 115024 - DNA, 25 bp, Homo sapien
tgggctggctgtgtaacagtcacat

SEQ ID NO: 115025 - DNA, 25 bp, Homo sapien
gctggctgtgtaacagtcacatttt

SEQ ID NO: 115026 - DNA, 25 bp, Homo sapien
gggcactaccactggctgctcaagc

SEQ ID NO: 115027 - DNA, 25 bp, Homo sapien
tcatgcagtcaaattccactggtag

SEQ ID NO: 115028 - DNA, 25 bp, Homo sapien
agtcaaattccactggtagagcgag

SEQ ID NO: 115029 - DNA, 25 bp, Homo sapien
tgcagtcaaattccactggtagagc

SEQ ID NO: 115030 - DNA, 25 bp, Homo sapien
gacatcatgcagtcaaattccactg

SEQ ID NO: 115031 - DNA, 25 bp, Homo sapien
gcctgtgaggcagactggcttggaa

SEQ ID NO: 115032 - DNA, 25 bp, Homo sapien
tcccacaatgcccactgctgcactt

SEQ ID NO: 115033 - DNA, 25 bp, Homo sapien
tcccaggaagcctgtgaggcagact

SEQ ID NO: 115034 - DNA, 25 bp, Homo sapien
ggaagcctgtgaggcagactggctt

SEQ ID NO: 115035 - DNA, 25 bp, Homo sapien
atgcccacaaccatcatgggcagtg

SEQ ID NO: 115036 - DNA, 25 bp, Homo sapien
tgcccacaaccatcatgggcagtgt

SEQ ID NO: 115037 - DNA, 25 bp, Homo sapien
gcccacaaccatcatgggcagtgtc

SEQ ID NO: 115038 - DNA, 25 bp, Homo sapien
aatgcccacaaccatcatgggcagt

SEQ ID NO: 115039 - DNA, 25 bp, Homo sapien
gccttgaggggtttccacatagccc

SEQ ID NO: 115040 - DNA, 25 bp, Homo sapien
cttgaggggtttccacatagcccac

SEQ ID NO: 115041 - DNA, 25 bp, Homo sapien
aggccttgaggggtttccacatagc

SEQ ID NO: 115042 - DNA, 25 bp, Homo sapien
cttgaaggtccggaggccttgaggg

SEQ ID NO: 115043 - DNA, 25 bp, Homo sapien
gccagttcttatagaagcgcctctt

SEQ ID NO: 115044 - DNA, 25 bp, Homo sapien
agaagcgcctcttgcactcatcact

SEQ ID NO: 115045 - DNA, 25 bp, Homo sapien
tatagaagcgcctcttgcactcatc

SEQ ID NO: 115046 - DNA, 25 bp, Homo sapien
tttatgccagttcttatagaagcgc

SEQ ID NO: 115047 - DNA, 25 bp, Homo sapien
tggtgcagaggaagcggtgcatctg

SEQ ID NO: 115048 - DNA, 25 bp, Homo sapien
aagcggtgcatctgagtgtgggcaa

SEQ ID NO: 115049 - DNA, 25 bp, Homo sapien
gcagaggaagcggtgcatctgagtg

SEQ ID NO: 115050 - DNA, 25 bp, Homo sapien
gaggaagcggtgcatctgagtgtgg

SEQ ID NO: 115051 - DNA, 25 bp, Homo sapien
cccaatacaggacaccttgcgtggg

SEQ ID NO: 115052 - DNA, 25 bp, Homo sapien
acaggacaccttgcgtgggccttgg

SEQ ID NO: 115053 - DNA, 25 bp, Homo sapien
ttcttggccatggtgtctccattca

SEQ ID NO: 115054 - DNA, 25 bp, Homo sapien
aatacaggacaccttgcgtgggcct

SEQ ID NO: 115055 - DNA, 25 bp, Homo sapien
ccatagtggccaaagacacccagag

SEQ ID NO: 115056 - DNA, 25 bp, Homo sapien
caccatagtggccaaagacacccag

SEQ ID NO: 115057 - DNA, 25 bp, Homo sapien
ggtagccctggccaatcttatggat

SEQ ID NO: 115058 - DNA, 25 bp, Homo sapien
tagtggccaaagacacccagagggt

SEQ ID NO: 115059 - DNA, 25 bp, Homo sapien
cagtcttctgcagagcccgctgttt

SEQ ID NO: 115060 - DNA, 25 bp, Homo sapien
ttcttgagtcgtcccatggatgctt

SEQ ID NO: 115061 - DNA, 25 bp, Homo sapien
tggtctttcttgagtcgtcccatgg

SEQ ID NO: 115062 - DNA, 25 bp, Homo sapien
gtcagtcttctgcagagcccgctgt

SEQ ID NO: 115063 - DNA, 25 bp, Homo sapien
gtggataataacttttattgagacc

SEQ ID NO: 115064 - DNA, 25 bp, Homo sapien
agtggataataacttttattgagac

SEQ ID NO: 115065 - DNA, 25 bp, Homo sapien
cagtggataataacttttattgaga

SEQ ID NO: 115066 - DNA, 25 bp, Homo sapien
tcagtgagcaaagaagttgtatgca

SEQ ID NO: 115067 - DNA, 25 bp, Homo sapien
agggaatgcacattataataactcc

SEQ ID NO: 115068 - DNA, 25 bp, Homo sapien
cacattgattaagtaatgtgtgaaa

SEQ ID NO: 115069 - DNA, 25 bp, Homo sapien
gaagagatgcaatttttacacagta

SEQ ID NO: 115070 - DNA, 25 bp, Homo sapien
ctggttccttgctcttcagagacac

SEQ ID NO: 115071 - DNA, 25 bp, Homo sapien
gttccttgctcttcagagacacaaa

SEQ ID NO: 115072 - DNA, 25 bp, Homo sapien
ttgctcttcagagacacaaacttca

SEQ ID NO: 115073 - DNA, 25 bp, Homo sapien
gagccctggttccttgctcttcaga

SEQ ID NO: 115074 - DNA, 25 bp, Homo sapien
tgtttccctgtagaaaatggccaat

SEQ ID NO: 115075 - DNA, 25 bp, Homo sapien
atgtttccctgtagaaaatggccaa

SEQ ID NO: 115076 - DNA, 25 bp, Homo sapien
atggccaataaacgcattttcaaaa

SEQ ID NO: 115077 - DNA, 25 bp, Homo sapien
aaatggccaataaacgcattttcaa

SEQ ID NO: 115078 - DNA, 25 bp, Homo sapien
gatctatggacgtggccactggtcc

SEQ ID NO: 115079 - DNA, 25 bp, Homo sapien
gaacacaaacgggtatgcggggcac

SEQ ID NO: 115080 - DNA, 25 bp, Homo sapien
tagggatctatggacgtggccactg

SEQ ID NO: 115081 - DNA, 25 bp, Homo sapien
tgcggggcacaaaccatagggatct

SEQ ID NO: 115082 - DNA, 25 bp, Homo sapien
tctggtccagtctctgtacagagac

SEQ ID NO: 115083 - DNA, 25 bp, Homo sapien
gaagagcttgaacaatgcattgggc

SEQ ID NO: 115084 - DNA, 25 bp, Homo sapien
aagagacccacatggatatggtgct

SEQ ID NO: 115085 - DNA, 25 bp, Homo sapien
gcattgggcagccactctggtccag

SEQ ID NO: 115086 - DNA, 25 bp, Homo sapien
tagattcttctcatgcataagcaca

SEQ ID NO: 115087 - DNA, 25 bp, Homo sapien
ataagcacacttacaccctcacaga

SEQ ID NO: 115088 - DNA, 25 bp, Homo sapien
gggaccggccctcagaaacatggct

SEQ ID NO: 115089 - DNA, 25 bp, Homo sapien
gttcacactacttagattcttctca

SEQ ID NO: 115090 - DNA, 25 bp, Homo sapien
ttctttatctctcccattgatcgtg

SEQ ID NO: 115091 - DNA, 25 bp, Homo sapien
tatgcagtgtacaagctttctggga

SEQ ID NO: 115092 - DNA, 25 bp, Homo sapien
tgtgcattgatccaagtcggccatc

SEQ ID NO: 115093 - DNA, 25 bp, Homo sapien
gggagcatgtaccactgttttccta

SEQ ID NO: 115094 - DNA, 25 bp, Homo sapien
tgtaacacacataaggggcttttga

SEQ ID NO: 115095 - DNA, 25 bp, Homo sapien
atgtaacacacataaggggcttttg

SEQ ID NO: 115096 - DNA, 25 bp, Homo sapien
tgaatggccatcgtaaatttcctct

SEQ ID NO: 115097 - DNA, 25 bp, Homo sapien
aatggccatcgtaaatttcctctgt

SEQ ID NO: 115098 - DNA, 25 bp, Homo sapien
tatttcctgctctaactctattacc

SEQ ID NO: 115099 - DNA, 25 bp, Homo sapien
tttcctgctctaactctattaccat

SEQ ID NO: 115100 - DNA, 25 bp, Homo sapien
atttcctgctctaactctattacca

SEQ ID NO: 115101 - DNA, 25 bp, Homo sapien
ttatttcctgctctaactctattac

SEQ ID NO: 115102 - DNA, 25 bp, Homo sapien
cctcttttctgtcaatctcatgtac

SEQ ID NO: 115103 - DNA, 25 bp, Homo sapien
aaaggaggtgactggcatatggaac

SEQ ID NO: 115104 - DNA, 25 bp, Homo sapien
agctggatttagtagtccaggtgaa

SEQ ID NO: 115105 - DNA, 25 bp, Homo sapien
ccaggtgaagcgccaagcaccaaga

SEQ ID NO: 115106 - DNA, 25 bp, Homo sapien
cataaaaaatcggtaactttgatgt

SEQ ID NO: 115107 - DNA, 25 bp, Homo sapien
ataaaaaatcggtaactttgatgtg

SEQ ID NO: 115108 - DNA, 25 bp, Homo sapien
aaaaaatcggtaactttgatgtgct

SEQ ID NO: 115109 - DNA, 25 bp, Homo sapien
taaaaaatcggtaactttgatgtgc

SEQ ID NO: 115110 - DNA, 25 bp, Homo sapien
agttcactagataactcgtccctat

SEQ ID NO: 115111 - DNA, 25 bp, Homo sapien
taactcgtccctataaagatcatct

SEQ ID NO: 115112 - DNA, 25 bp, Homo sapien
ctcagttcactagataactcgtccc

SEQ ID NO: 115113 - DNA, 25 bp, Homo sapien
tcagttcactagataactcgtccct

SEQ ID NO: 115114 - DNA, 25 bp, Homo sapien
cttcatcagacagtgatgacctctg

SEQ ID NO: 115115 - DNA, 25 bp, Homo sapien
ttcatcagacagtgatgacctctga

SEQ ID NO: 115116 - DNA, 25 bp, Homo sapien
tcatcagacagtgatgacctctgac

SEQ ID NO: 115117 - DNA, 25 bp, Homo sapien
tcattagattgaagaaaagcagaag

SEQ ID NO: 115118 - DNA, 25 bp, Homo sapien
gcagaaggaccatgggtattttctt

SEQ ID NO: 115119 - DNA, 25 bp, Homo sapien
cagaaggaccatgggtattttcttg

SEQ ID NO: 115120 - DNA, 25 bp, Homo sapien
tgataaatggccgtgtttgtcacaa

SEQ ID NO: 115121 - DNA, 25 bp, Homo sapien
gatggctctgggatatccccactct

SEQ ID NO: 115122 - DNA, 25 bp, Homo sapien
tggtcgtgaggtgatattgcctcca

SEQ ID NO: 115123 - DNA, 25 bp, Homo sapien
catgcagtgacagcaatatgctaag

SEQ ID NO: 115124 - DNA, 25 bp, Homo sapien
tctctcgatatatggcaatgcgatg

SEQ ID NO: 115125 - DNA, 25 bp, Homo sapien
aagggcttggagcttggaaggcttc

SEQ ID NO: 115126 - DNA, 25 bp, Homo sapien
gacttgtcttctctcgatatatggc

SEQ ID NO: 115127 - DNA, 25 bp, Homo sapien
cgatatatggcaatgcgatgaatga

SEQ ID NO: 115128 - DNA, 25 bp, Homo sapien
tataccggatggattctttacctgt

SEQ ID NO: 115129 - DNA, 25 bp, Homo sapien
tgataacaacttcagcagcgagaaa

SEQ ID NO: 115130 - DNA, 25 bp, Homo sapien
gaacaacggaaagccacattagagg

SEQ ID NO: 115131 - DNA, 25 bp, Homo sapien
tgagttcttcttcctagccctagga

SEQ ID NO: 115132 - DNA, 25 bp, Homo sapien
gggtccattgtagccatccttccag

SEQ ID NO: 115133 - DNA, 25 bp, Homo sapien
ctttttcccagcaagcaaagatgac

SEQ ID NO: 115134 - DNA, 25 bp, Homo sapien
ggatcttcccttctatggtcaccca

SEQ ID NO: 115135 - DNA, 25 bp, Homo sapien
ccttccaggacactgggtcggttca

SEQ ID NO: 115136 - DNA, 25 bp, Homo sapien
gggatcaatttttctcgtgtaccca

SEQ ID NO: 115137 - DNA, 25 bp, Homo sapien
gatcaatttttctcgtgtacccaca

SEQ ID NO: 115138 - DNA, 25 bp, Homo sapien
tgccacacattttccggggatcaat

SEQ ID NO: 115139 - DNA, 25 bp, Homo sapien
aatttttctcgtgtacccacagatc

SEQ ID NO: 115140 - DNA, 25 bp, Homo sapien
aacaatccttcattgggatgggaga

SEQ ID NO: 115141 - DNA, 25 bp, Homo sapien
ccttcactgtgaatgaattggttgg

SEQ ID NO: 115142 - DNA, 25 bp, Homo sapien
gagggggctcgcatccatccactgt

SEQ ID NO: 115143 - DNA, 25 bp, Homo sapien
ctgtccccttcactgtgaatgaatt

SEQ ID NO: 115144 - DNA, 25 bp, Homo sapien
cagaactatatccaaaggctgccat

SEQ ID NO: 115145 - DNA, 25 bp, Homo sapien
ctgtgtctatagtctttgatgcctc

SEQ ID NO: 115146 - DNA, 25 bp, Homo sapien
tgcctcagaactatatccaaaggct

SEQ ID NO: 115147 - DNA, 25 bp, Homo sapien
gtgtctatagtctttgatgcctcag

SEQ ID NO: 115148 - DNA, 25 bp, Homo sapien
gttcacgccgcagagcaccggttct

SEQ ID NO: 115149 - DNA, 25 bp, Homo sapien
acggaacggttcacgccgcagagca

SEQ ID NO: 115150 - DNA, 25 bp, Homo sapien
gccctttctgcagcacggaacggtt

SEQ ID NO: 115151 - DNA, 25 bp, Homo sapien
cgcagagcaccggttctcaaacttg

SEQ ID NO: 115152 - DNA, 25 bp, Homo sapien
cacaattgaaatgacaagcgttgaa

SEQ ID NO: 115153 - DNA, 25 bp, Homo sapien
tgacaagcgttgaaatgggggcctc

SEQ ID NO: 115154 - DNA, 25 bp, Homo sapien
aatgacaagcgttgaaatgggggcc

SEQ ID NO: 115155 - DNA, 25 bp, Homo sapien
attgaaatgacaagcgttgaaatgg

SEQ ID NO: 115156 - DNA, 25 bp, Homo sapien
aatcagtcaggcgagagatgtctaa

SEQ ID NO: 115157 - DNA, 25 bp, Homo sapien
gatgtctaatgaagctgccagacgg

SEQ ID NO: 115158 - DNA, 25 bp, Homo sapien
catgtttacagctccgggagtgaga

SEQ ID NO: 115159 - DNA, 25 bp, Homo sapien
tgccagacggatttgtagccaggct

SEQ ID NO: 115160 - DNA, 25 bp, Homo sapien
gttgctttgattcttgattatttgg

SEQ ID NO: 115161 - DNA, 25 bp, Homo sapien
gctttgattcttgattatttggctt

SEQ ID NO: 115162 - DNA, 25 bp, Homo sapien
gattcttgattatttggctttgtgt

SEQ ID NO: 115163 - DNA, 25 bp, Homo sapien
ctaatacttggagttgctttgattc

SEQ ID NO: 115164 - DNA, 25 bp, Homo sapien
gtctttgccagcagaactaagccag

SEQ ID NO: 115165 - DNA, 25 bp, Homo sapien
cagaactaagccagtgctccttcct

SEQ ID NO: 115166 - DNA, 25 bp, Homo sapien
tgtctttgccagcagaactaagcca

SEQ ID NO: 115167 - DNA, 25 bp, Homo sapien
ggccagttctgtggactgtcaaagt

SEQ ID NO: 115168 - DNA, 25 bp, Homo sapien
gcaatcatcgctaaaaattgcctgg

SEQ ID NO: 115169 - DNA, 25 bp, Homo sapien
ttgcctggtccaccagtcagtttgg

SEQ ID NO: 115170 - DNA, 25 bp, Homo sapien
agtccacctggtggaccatctgcca

SEQ ID NO: 115171 - DNA, 25 bp, Homo sapien
tgagacttctaataatattgctaac

SEQ ID NO: 115172 - DNA, 25 bp, Homo sapien
cagtcatattccagtaaggaatgca

SEQ ID NO: 115173 - DNA, 25 bp, Homo sapien
tattgctaacaagtaagttctgaac

SEQ ID NO: 115174 - DNA, 25 bp, Homo sapien
gcattttgccctgtgaggaaaacga

SEQ ID NO: 115175 - DNA, 25 bp, Homo sapien
caagcagccatggttagttagctct

SEQ ID NO: 115176 - DNA, 25 bp, Homo sapien
catacacaggatttgtttgggtaaa

SEQ ID NO: 115177 - DNA, 25 bp, Homo sapien
ggtccctgacatctgacgtgggtcc

SEQ ID NO: 115178 - DNA, 25 bp, Homo sapien
aaaaacacaggagccctatgccaag

SEQ ID NO: 115179 - DNA, 25 bp, Homo sapien
caaatggtcttaggccaagtgaccc

SEQ ID NO: 115180 - DNA, 25 bp, Homo sapien
ctgcagggcctccactatcatcacc

SEQ ID NO: 115181 - DNA, 25 bp, Homo sapien
tgatccatccatatcatttctccca

SEQ ID NO: 115182 - DNA, 25 bp, Homo sapien
tctcccacaaatggtcttaggccaa

SEQ ID NO: 115183 - DNA, 25 bp, Homo sapien
tcttactgtctcaggagcggcagag

SEQ ID NO: 115184 - DNA, 25 bp, Homo sapien
ttggtcttactgtctcaggagcggc

SEQ ID NO: 115185 - DNA, 25 bp, Homo sapien
gggttggtcttactgtctcaggagc

SEQ ID NO: 115186 - DNA, 25 bp, Homo sapien
tggtcttactgtctcaggagcggca

SEQ ID NO: 115187 - DNA, 25 bp, Homo sapien
tatgaggaaccgatggaaagtggca

SEQ ID NO: 115188 - DNA, 25 bp, Homo sapien
ggaatgacatgaatgcctttggaat

SEQ ID NO: 115189 - DNA, 25 bp, Homo sapien
ggtactgagtctgatgttgagcact

SEQ ID NO: 115190 - DNA, 25 bp, Homo sapien
gagaggacacatgggtactgagtct

SEQ ID NO: 115191 - DNA, 25 bp, Homo sapien
ttgctcaaacgaggctccatctcct

SEQ ID NO: 115192 - DNA, 25 bp, Homo sapien
ttggaaagttgctcaaacgaggctc

SEQ ID NO: 115193 - DNA, 25 bp, Homo sapien
ttgttaaatgtttggaaagttgctc

SEQ ID NO: 115194 - DNA, 25 bp, Homo sapien
gtttggggctatggccttctccagg

SEQ ID NO: 115195 - DNA, 25 bp, Homo sapien
tgttaattgaaatgctctagcactg

SEQ ID NO: 115196 - DNA, 25 bp, Homo sapien
gacaaagcgtctgaatatgtatgtg

SEQ ID NO: 115197 - DNA, 25 bp, Homo sapien
tatgtatgtgtatggtgtagacacg

SEQ ID NO: 115198 - DNA, 25 bp, Homo sapien
tgtttcaccgcagctcttcctagct

SEQ ID NO: 115199 - DNA, 25 bp, Homo sapien
ggcccaacactatctgattggcaat

SEQ ID NO: 115200 - DNA, 25 bp, Homo sapien
aagaatgcattggagtgtgttgcag

SEQ ID NO: 115201 - DNA, 25 bp, Homo sapien
aaggattctgatcatggcccaacac

SEQ ID NO: 115202 - DNA, 25 bp, Homo sapien
tattctccgggcagtcctgatgaag

SEQ ID NO: 115203 - DNA, 25 bp, Homo sapien
caaaagcgatgtgcaatgtcaaagc

SEQ ID NO: 115204 - DNA, 25 bp, Homo sapien
agaaacaaaagcgatgtgcaatgtc

SEQ ID NO: 115205 - DNA, 25 bp, Homo sapien
aaagcgatgtgcaatgtcaaagcat

SEQ ID NO: 115206 - DNA, 25 bp, Homo sapien
aacaaaagcgatgtgcaatgtcaaa

SEQ ID NO: 115207 - DNA, 25 bp, Homo sapien
ctcttgggagtagcttccacccaat

SEQ ID NO: 115208 - DNA, 25 bp, Homo sapien
gggagtagcttccacccaatgcagc

SEQ ID NO: 115209 - DNA, 25 bp, Homo sapien
ggtagctttgccagcagacatcaac

SEQ ID NO: 115210 - DNA, 25 bp, Homo sapien
gcatgacttgctcgggtagctttgc

SEQ ID NO: 115211 - DNA, 25 bp, Homo sapien
ttctttggccagtactgagattggc

SEQ ID NO: 115212 - DNA, 25 bp, Homo sapien
tgcttcccagagtttttccctgagg

SEQ ID NO: 115213 - DNA, 25 bp, Homo sapien
taggtctggtgactgtctaggactg

SEQ ID NO: 115214 - DNA, 25 bp, Homo sapien
tctaggactgacaggacaatgacag

SEQ ID NO: 115215 - DNA, 25 bp, Homo sapien
cacaacagacacatttacttggcag

SEQ ID NO: 115216 - DNA, 25 bp, Homo sapien
tcatgccagatcaaggctgtaaacc

SEQ ID NO: 115217 - DNA, 25 bp, Homo sapien
gaaatattttgcatcggcagtgtag

SEQ ID NO: 115218 - DNA, 25 bp, Homo sapien
cagtgtagaatgtgtcaaggcacag

SEQ ID NO: 115219 - DNA, 25 bp, Homo sapien
gactaacaaagctcacatctgggag

SEQ ID NO: 115220 - DNA, 25 bp, Homo sapien
tacctaaggtagtggctaaggcatg

SEQ ID NO: 115221 - DNA, 25 bp, Homo sapien
tcaaccagagtagatgaagtgtcct

SEQ ID NO: 115222 - DNA, 25 bp, Homo sapien
acagatggtctttctctgagggaaa

SEQ ID NO: 115223 - DNA, 25 bp, Homo sapien
gacagtgtttagcaacatgcagccc

SEQ ID NO: 115224 - DNA, 25 bp, Homo sapien
tgtatttcacttaaggtggaggacc

SEQ ID NO: 115225 - DNA, 25 bp, Homo sapien
cattaggagtggatcggaatacttc

SEQ ID NO: 115226 - DNA, 25 bp, Homo sapien
ggaatacttctgctttctgggtaaa

SEQ ID NO: 115227 - DNA, 25 bp, Homo sapien
tagctaccaggctttaactgcctgg

SEQ ID NO: 115228 - DNA, 25 bp, Homo sapien
taacttgctccaagaatagttggca

SEQ ID NO: 115229 - DNA, 25 bp, Homo sapien
tggaacccagattctaaaaagagac

SEQ ID NO: 115230 - DNA, 25 bp, Homo sapien
aatgacattggtggactcaaagtcc

SEQ ID NO: 115231 - DNA, 25 bp, Homo sapien
tttcccaagaccttgactctctgtg

SEQ ID NO: 115232 - DNA, 25 bp, Homo sapien
cgtatatatacacactttaatatat

SEQ ID NO: 115233 - DNA, 25 bp, Homo sapien
tatatatatgtaaaaccttttccca

SEQ ID NO: 115234 - DNA, 25 bp, Homo sapien
ccttttcccaagaccttgactctct

SEQ ID NO: 115235 - DNA, 25 bp, Homo sapien
ttcgttaagaaccatactagcctca

SEQ ID NO: 115236 - DNA, 25 bp, Homo sapien
gacacagctagttagacttcctggg

SEQ ID NO: 115237 - DNA, 25 bp, Homo sapien
gaatatagtgaatagggccggacat

SEQ ID NO: 115238 - DNA, 25 bp, Homo sapien
gagtaggccactgcatagaagattc

SEQ ID NO: 115239 - DNA, 25 bp, Homo sapien
gtaccactgcattgcagactgggtg

SEQ ID NO: 115240 - DNA, 25 bp, Homo sapien
ttagccggatgtgatggcgcacact

SEQ ID NO: 115241 - DNA, 25 bp, Homo sapien
ccaggaggcggagccgagattgtac

SEQ ID NO: 115242 - DNA, 25 bp, Homo sapien
ccggatgtgatggcgcacacttgta

SEQ ID NO: 115243 - DNA, 25 bp, Homo sapien
tgtgcgccgcgcctctgaggcgcag

SEQ ID NO: 115244 - DNA, 25 bp, Homo sapien
gcatgtgaagcggagacggcatcca

SEQ ID NO: 115245 - DNA, 25 bp, Homo sapien
cggagctggcgagccgagcggagac

SEQ ID NO: 115246 - DNA, 25 bp, Homo sapien
cgcagcatgtgaagcggagacggca

SEQ ID NO: 115247 - DNA, 25 bp, Homo sapien
ggcggtgacaatgggagcagcgcgg

SEQ ID NO: 115248 - DNA, 25 bp, Homo sapien
ccacttccggcgtatgaggcggtga

SEQ ID NO: 115249 - DNA, 25 bp, Homo sapien
tgacaagcgtttgcggcttcgcttc

SEQ ID NO: 115250 - DNA, 25 bp, Homo sapien
aggcagctgacaagcgtttgcggct

SEQ ID NO: 115251 - DNA, 25 bp, Homo sapien
ttctttcgccgctcgttttattcgc

SEQ ID NO: 115252 - DNA, 25 bp, Homo sapien
ttcgccgctcgttttattcgccggc

SEQ ID NO: 115253 - DNA, 25 bp, Homo sapien
tcccgacaacctccctggcgcgcgc

SEQ ID NO: 115254 - DNA, 25 bp, Homo sapien
gacaacctccctggcgcgcgcagtt

SEQ ID NO: 115255 - DNA, 25 bp, Homo sapien
tctacttccggaatggtggcccgca

SEQ ID NO: 115256 - DNA, 25 bp, Homo sapien
gcagaccggctttctcagacagact

SEQ ID NO: 115257 - DNA, 25 bp, Homo sapien
tcataattaaggtcgccaccgagga

SEQ ID NO: 115258 - DNA, 25 bp, Homo sapien
aacgcttctgagtcgctctaggcca

SEQ ID NO: 115259 - DNA, 25 bp, Homo sapien
ctggagaatctcacggtgccacaaa

SEQ ID NO: 115260 - DNA, 25 bp, Homo sapien
ggttcgtggcttatgagccacactg

SEQ ID NO: 115261 - DNA, 25 bp, Homo sapien
tctcacggtgccacaaagtggagtt

SEQ ID NO: 115262 - DNA, 25 bp, Homo sapien
tggagttcccggttcgtggcttatg

SEQ ID NO: 115263 - DNA, 25 bp, Homo sapien
tgccccatggacagatttgaggatg

SEQ ID NO: 115264 - DNA, 25 bp, Homo sapien
tggagcagattatttggcagtcttt

SEQ ID NO: 115265 - DNA, 25 bp, Homo sapien
tcaaaatcggcatagacatgcccca

SEQ ID NO: 115266 - DNA, 25 bp, Homo sapien
ggatgtgaaccatgagtactacaga

SEQ ID NO: 115267 - DNA, 25 bp, Homo sapien
gacaggtaccctgagtcttcttgcc

SEQ ID NO: 115268 - DNA, 25 bp, Homo sapien
ggtaccctgagtcttcttgccaatc

SEQ ID NO: 115269 - DNA, 25 bp, Homo sapien
tagtgaatgacaggtaccctgagtc

SEQ ID NO: 115270 - DNA, 25 bp, Homo sapien
cttatagtgaatgacaggtaccctg

SEQ ID NO: 115271 - DNA, 25 bp, Homo sapien
gaagactctggctcgtttttcaaca

SEQ ID NO: 115272 - DNA, 25 bp, Homo sapien
ggcacataacttgctccattgaaga

SEQ ID NO: 115273 - DNA, 25 bp, Homo sapien
gagcagtgctttaagaaagggacca

SEQ ID NO: 115274 - DNA, 25 bp, Homo sapien
gaacagctatcacgactctcaacga

SEQ ID NO: 115275 - DNA, 25 bp, Homo sapien
gaaaagcaacaactggccagagttc

SEQ ID NO: 115276 - DNA, 25 bp, Homo sapien
gcaagtcaggcaactggctcaattt

SEQ ID NO: 115277 - DNA, 25 bp, Homo sapien
ttgtacgtcccagttttccaagctg

SEQ ID NO: 115278 - DNA, 25 bp, Homo sapien
taaagtaccaaatggacaagcctgc

SEQ ID NO: 115279 - DNA, 25 bp, Homo sapien
ttaacttttctccatatgttaaata

SEQ ID NO: 115280 - DNA, 25 bp, Homo sapien
agcaagtaccagagaaaaatctcac

SEQ ID NO: 115281 - DNA, 25 bp, Homo sapien
ataaaacgataaagcaagtaccaga

SEQ ID NO: 115282 - DNA, 25 bp, Homo sapien
cgataaagcaagtaccagagaaaaa

SEQ ID NO: 115283 - DNA, 25 bp, Homo sapien
taaaaagtatacgtaactgcaggga

SEQ ID NO: 115284 - DNA, 25 bp, Homo sapien
gtgagtgagtcatcttgcaagcaga

SEQ ID NO: 115285 - DNA, 25 bp, Homo sapien
gattctaccctgaaagttcccagct

SEQ ID NO: 115286 - DNA, 25 bp, Homo sapien
cattactcttttcataggtggagcc

SEQ ID NO: 115287 - DNA, 25 bp, Homo sapien
cacctcaattttggagccatttaca

SEQ ID NO: 115288 - DNA, 25 bp, Homo sapien
ggagtatatttttgaccatgataga

SEQ ID NO: 115289 - DNA, 25 bp, Homo sapien
taagaatgacataatccatgaacac

SEQ ID NO: 115290 - DNA, 25 bp, Homo sapien
tctaataaagtgagtaactggagta

SEQ ID NO: 115291 - DNA, 25 bp, Homo sapien
gtatgtaggttaaggtatagcccca

SEQ ID NO: 115292 - DNA, 25 bp, Homo sapien
tggaacctgccgatgaatctatctg

SEQ ID NO: 115293 - DNA, 25 bp, Homo sapien
tcaggactaagagtaggaaccaatc

SEQ ID NO: 115294 - DNA, 25 bp, Homo sapien
gagtcagcctatcgatgaacagaga

SEQ ID NO: 115295 - DNA, 25 bp, Homo sapien
gtactcatgagagattcacaaggga

SEQ ID NO: 115296 - DNA, 25 bp, Homo sapien
ggatcttcttccctatgtagtctgg

SEQ ID NO: 115297 - DNA, 25 bp, Homo sapien
ttagtttgccaatgagaggtactca

SEQ ID NO: 115298 - DNA, 25 bp, Homo sapien
cctatgtagtctgggttagtttgcc

SEQ ID NO: 115299 - DNA, 25 bp, Homo sapien
tacacaagggtgaactagaatatcc

SEQ ID NO: 115300 - DNA, 25 bp, Homo sapien
tactagaagtcagaattgcagagtc

SEQ ID NO: 115301 - DNA, 25 bp, Homo sapien
cactaaatgcagagtcatccattgc

SEQ ID NO: 115302 - DNA, 25 bp, Homo sapien
aatatcctgaagtggagatccattg

SEQ ID NO: 115303 - DNA, 25 bp, Homo sapien
tctaagttctcataccaagagtatg

SEQ ID NO: 115304 - DNA, 25 bp, Homo sapien
tattgtctgataaatagaacttttt

SEQ ID NO: 115305 - DNA, 25 bp, Homo sapien
caagagtatgaattatctacttatc

SEQ ID NO: 115306 - DNA, 25 bp, Homo sapien
aagatcagcaaactctcaactattc

SEQ ID NO: 115307 - DNA, 25 bp, Homo sapien
acttacttggttggtcatcaatgac

SEQ ID NO: 115308 - DNA, 25 bp, Homo sapien
gttctccaatcccatcgttcagcag

SEQ ID NO: 115309 - DNA, 25 bp, Homo sapien
ctgttgctccaattgaatcccatga

SEQ ID NO: 115310 - DNA, 25 bp, Homo sapien
tgctccaattgaatcccatgagttc

SEQ ID NO: 115311 - DNA, 25 bp, Homo sapien
ttcggagatgagaaaagcgctttac

SEQ ID NO: 115312 - DNA, 25 bp, Homo sapien
tacaaaggtgtacaatgcattcttg

SEQ ID NO: 115313 - DNA, 25 bp, Homo sapien
gatctgccgcatagggcatgcagta

SEQ ID NO: 115314 - DNA, 25 bp, Homo sapien
tgttcctatacttgctcgtccaggc

SEQ ID NO: 115315 - DNA, 25 bp, Homo sapien
tcctccttcatttgataaaaaccca

SEQ ID NO: 115316 - DNA, 25 bp, Homo sapien
taatggttattcttagttgtacttc

SEQ ID NO: 115317 - DNA, 25 bp, Homo sapien
aatggttattcttagttgtacttct

SEQ ID NO: 115318 - DNA, 25 bp, Homo sapien
tggttattcttagttgtacttcttc

SEQ ID NO: 115319 - DNA, 25 bp, Homo sapien
caataatccagatcaataagctttt

SEQ ID NO: 115320 - DNA, 25 bp, Homo sapien
aatacttcaagctggccaaaactag

SEQ ID NO: 115321 - DNA, 25 bp, Homo sapien
agcttttctctcgaaatacttcaag

SEQ ID NO: 115322 - DNA, 25 bp, Homo sapien
cagatcaataagcttttctctcgaa

SEQ ID NO: 115323 - DNA, 25 bp, Homo sapien
agttacagttccagaaagactaatt

SEQ ID NO: 115324 - DNA, 25 bp, Homo sapien
caaaagttacagttccagaaagact

SEQ ID NO: 115325 - DNA, 25 bp, Homo sapien
cagaaagactaatttccattgattt

SEQ ID NO: 115326 - DNA, 25 bp, Homo sapien
cttggctccaaaagttacagttcca

SEQ ID NO: 115327 - DNA, 25 bp, Homo sapien
ggttttcctgatgcaaaaacttgaa

SEQ ID NO: 115328 - DNA, 25 bp, Homo sapien
gttttcctgatgcaaaaacttgaac

SEQ ID NO: 115329 - DNA, 25 bp, Homo sapien
tggttttcctgatgcaaaaacttga

SEQ ID NO: 115330 - DNA, 25 bp, Homo sapien
tataaacaagaaggcggcagagggc

SEQ ID NO: 115331 - DNA, 25 bp, Homo sapien
ccaatctttgcttatccagaccact

SEQ ID NO: 115332 - DNA, 25 bp, Homo sapien
taaagtacacaaactgttatgtggg

SEQ ID NO: 115333 - DNA, 25 bp, Homo sapien
taggtaataactgcaaacaccattt

SEQ ID NO: 115334 - DNA, 25 bp, Homo sapien
caggggctttagaattccagatgta

SEQ ID NO: 115335 - DNA, 25 bp, Homo sapien
gcaggggctttagaattccagatgt

SEQ ID NO: 115336 - DNA, 25 bp, Homo sapien
tacaataataatgatccatatgtta

SEQ ID NO: 115337 - DNA, 25 bp, Homo sapien
acaataataatgatccatatgttac

SEQ ID NO: 115338 - DNA, 25 bp, Homo sapien
ttacaataataatgatccatatgtt

SEQ ID NO: 115339 - DNA, 25 bp, Homo sapien
ggagtggctgcctgaatctctgaac

SEQ ID NO: 115340 - DNA, 25 bp, Homo sapien
tgacccaggaccagtctaaaatgag

SEQ ID NO: 115341 - DNA, 25 bp, Homo sapien
tgcacattatctacaacccactggg

SEQ ID NO: 115342 - DNA, 25 bp, Homo sapien
tgtaacaacaccttatactaggagc

SEQ ID NO: 115343 - DNA, 25 bp, Homo sapien
ttgaagagatgtagttgtctctaac

SEQ ID NO: 115344 - DNA, 25 bp, Homo sapien
gaagagatgtagttgtctctaacat

SEQ ID NO: 115345 - DNA, 25 bp, Homo sapien
ttttgaagagatgtagttgtctcta

SEQ ID NO: 115346 - DNA, 25 bp, Homo sapien
tgaagagatgtagttgtctctaaca

SEQ ID NO: 115347 - DNA, 25 bp, Homo sapien
agtcaataggatagttctgattaag

SEQ ID NO: 115348 - DNA, 25 bp, Homo sapien
tagtcaataggatagttctgattaa

SEQ ID NO: 115349 - DNA, 25 bp, Homo sapien
taatatggctactgacatcctaagc

SEQ ID NO: 115350 - DNA, 25 bp, Homo sapien
caaagtggcagattaacaagcttac

SEQ ID NO: 115351 - DNA, 25 bp, Homo sapien
taaatgatactctctactcacagag

SEQ ID NO: 115352 - DNA, 25 bp, Homo sapien
cagcaagagcagtattaggtctaaa

SEQ ID NO: 115353 - DNA, 25 bp, Homo sapien
aagtccaacttgacaatgaactgct

SEQ ID NO: 115354 - DNA, 25 bp, Homo sapien
tttcttgaatggtcacttaaagtcc

SEQ ID NO: 115355 - DNA, 25 bp, Homo sapien
tatataattgcagaagcaggtagag

SEQ ID NO: 115356 - DNA, 25 bp, Homo sapien
gaatgaagttttgaggttcgtgaga

SEQ ID NO: 115357 - DNA, 25 bp, Homo sapien
ggagttcaaaggtcgctaattacac

SEQ ID NO: 115358 - DNA, 25 bp, Homo sapien
gatctcaatgggatgaaaacctaag

SEQ ID NO: 115359 - DNA, 25 bp, Homo sapien
taattacactaaggagttcccagac

SEQ ID NO: 115360 - DNA, 25 bp, Homo sapien
tacaatcaagattccaaatggctcc

SEQ ID NO: 115361 - DNA, 25 bp, Homo sapien
ttcttctttaattgtggcaacggac

SEQ ID NO: 115362 - DNA, 25 bp, Homo sapien
gattaagcttctggaatcggaatcc

SEQ ID NO: 115363 - DNA, 25 bp, Homo sapien
cttctggaatcggaatccctttgaa

SEQ ID NO: 115364 - DNA, 25 bp, Homo sapien
ggcaacggactctgaagaaaggaaa

SEQ ID NO: 115365 - DNA, 25 bp, Homo sapien
gactcttagagtgtcttatagctta

SEQ ID NO: 115366 - DNA, 25 bp, Homo sapien
aatgaataaaatccatagtgagata

SEQ ID NO: 115367 - DNA, 25 bp, Homo sapien
aatccatagtgagataattttttag

SEQ ID NO: 115368 - DNA, 25 bp, Homo sapien
tgcaaacgcaaagcatctttcaagt

SEQ ID NO: 115369 - DNA, 25 bp, Homo sapien
gcaattttgcatctagagaaggtct

SEQ ID NO: 115370 - DNA, 25 bp, Homo sapien
aaagggaatttagcaattttgcatc

SEQ ID NO: 115371 - DNA, 25 bp, Homo sapien
tagagaaggtctgacactatccaaa

SEQ ID NO: 115372 - DNA, 25 bp, Homo sapien
atctttcactggaagtagttgctca

SEQ ID NO: 115373 - DNA, 25 bp, Homo sapien
ttattgaagaataattacctatgtg

SEQ ID NO: 115374 - DNA, 25 bp, Homo sapien
tatatccatgaaacagctggtgcgg

SEQ ID NO: 115375 - DNA, 25 bp, Homo sapien
tagacccatggagatatgctgcccc

SEQ ID NO: 115376 - DNA, 25 bp, Homo sapien
tatagagaataaacgcacaccctgg

SEQ ID NO: 115377 - DNA, 25 bp, Homo sapien
taaattgaaactagaggaggctggc

SEQ ID NO: 115378 - DNA, 25 bp, Homo sapien
tgccagtctgacagtttaagccaag

SEQ ID NO: 115379 - DNA, 25 bp, Homo sapien
tctagtaaatagtagggagcccaca

SEQ ID NO: 115380 - DNA, 25 bp, Homo sapien
caaggaacgtgtcctatgatgggca

SEQ ID NO: 115381 - DNA, 25 bp, Homo sapien
taagccaaggcactacacagtgtgt

SEQ ID NO: 115382 - DNA, 25 bp, Homo sapien
ccaaacacccattcaagcaactgag

SEQ ID NO: 115383 - DNA, 25 bp, Homo sapien
cccattcaagcaactgagtaggcat

SEQ ID NO: 115384 - DNA, 25 bp, Homo sapien
caattgtacagccattttattaact

SEQ ID NO: 115385 - DNA, 25 bp, Homo sapien
cattttattaactccaaacacccat

SEQ ID NO: 115386 - DNA, 25 bp, Homo sapien
gacaatgtaaaagacctccagaagt

SEQ ID NO: 115387 - DNA, 25 bp, Homo sapien
gtagctgcagcctaggataccttat

SEQ ID NO: 115388 - DNA, 25 bp, Homo sapien
gggccctcctatgcaggactgggaa

SEQ ID NO: 115389 - DNA, 25 bp, Homo sapien
ccaactccggtttgatcatggttca

SEQ ID NO: 115390 - DNA, 25 bp, Homo sapien
ccagcactggtttggtgaaccccat

SEQ ID NO: 115391 - DNA, 25 bp, Homo sapien
gagtcccatcttctcgctaaaggag

SEQ ID NO: 115392 - DNA, 25 bp, Homo sapien
ggaaagaacaatgtctggagtgagc

SEQ ID NO: 115393 - DNA, 25 bp, Homo sapien
gagagttttccagaggtccggcaga

SEQ ID NO: 115394 - DNA, 25 bp, Homo sapien
catcttgttcaactgagaaaatggt

SEQ ID NO: 115395 - DNA, 25 bp, Homo sapien
tcaactgagaaaatggttcttgtgg

SEQ ID NO: 115396 - DNA, 25 bp, Homo sapien
tcttgtgggaattcttttaactgat

SEQ ID NO: 115397 - DNA, 25 bp, Homo sapien
ttaatccagagcaatttccatcttg

SEQ ID NO: 115398 - DNA, 25 bp, Homo sapien
catcaggattcttttgctttttctt

SEQ ID NO: 115399 - DNA, 25 bp, Homo sapien
atcaggattcttttgctttttcttt

SEQ ID NO: 115400 - DNA, 25 bp, Homo sapien
tcaggattcttttgctttttctttc

SEQ ID NO: 115401 - DNA, 25 bp, Homo sapien
aacagcaaagggtgtttgtctaaca

SEQ ID NO: 115402 - DNA, 25 bp, Homo sapien
gaaacagcaaagggtgtttgtctaa

SEQ ID NO: 115403 - DNA, 25 bp, Homo sapien
agaaacagcaaagggtgtttgtcta

SEQ ID NO: 115404 - DNA, 25 bp, Homo sapien
acagcaaagggtgtttgtctaacag

SEQ ID NO: 115405 - DNA, 25 bp, Homo sapien
gaaagtaccaggtcaaccagagtgg

SEQ ID NO: 115406 - DNA, 25 bp, Homo sapien
cattagcaaggaagtgaaacagggc

SEQ ID NO: 115407 - DNA, 25 bp, Homo sapien
gaagagtagagccacgttgtgccca

SEQ ID NO: 115408 - DNA, 25 bp, Homo sapien
catgtacctactaagattcgcgggc

SEQ ID NO: 115409 - DNA, 25 bp, Homo sapien
gggtggtgctcatttcaaaatcttc

SEQ ID NO: 115410 - DNA, 25 bp, Homo sapien
gaaaataaaagtcaccagaaataga

SEQ ID NO: 115411 - DNA, 25 bp, Homo sapien
gtgcttgcctgcgatatgcttacaa

SEQ ID NO: 115412 - DNA, 25 bp, Homo sapien
agatgaaaggtaccattgtattcag

SEQ ID NO: 115413 - DNA, 25 bp, Homo sapien
cagatattgtctgcatctgcggagg

SEQ ID NO: 115414 - DNA, 25 bp, Homo sapien
ggctgaattaagcagtgctggccag

SEQ ID NO: 115415 - DNA, 25 bp, Homo sapien
gagcgtctaaaagtgggttaatggc

SEQ ID NO: 115416 - DNA, 25 bp, Homo sapien
tcttgaaccagaaaacgaaatttga

SEQ ID NO: 115417 - DNA, 25 bp, Homo sapien
gttatgtcgtctgcactcatcttca

SEQ ID NO: 115418 - DNA, 25 bp, Homo sapien
tcagaccctctaccactggggtatg

SEQ ID NO: 115419 - DNA, 25 bp, Homo sapien
cttctagtctgtgagttatgtcgtc

SEQ ID NO: 115420 - DNA, 25 bp, Homo sapien
accttgaacttctagtctgtgagtt

SEQ ID NO: 115421 - DNA, 25 bp, Homo sapien
ttatattgagggtttgatgtatcca

SEQ ID NO: 115422 - DNA, 25 bp, Homo sapien
tatattgagggtttgatgtatccag

SEQ ID NO: 115423 - DNA, 25 bp, Homo sapien
tattgacagcatctgaactgatggg

SEQ ID NO: 115424 - DNA, 25 bp, Homo sapien
gagctctgaaggtccagtactgtta

SEQ ID NO: 115425 - DNA, 25 bp, Homo sapien
cagtggagttaggatatgggttttc

SEQ ID NO: 115426 - DNA, 25 bp, Homo sapien
cttatttgaacagtggagttaggat

SEQ ID NO: 115427 - DNA, 25 bp, Homo sapien
tgcaactcaaacgaatttggagttt

SEQ ID NO: 115428 - DNA, 25 bp, Homo sapien
tcttgcaactcaaacgaatttggag

SEQ ID NO: 115429 - DNA, 25 bp, Homo sapien
ctcttgcaactcaaacgaatttgga

SEQ ID NO: 115430 - DNA, 25 bp, Homo sapien
cttgcaactcaaacgaatttggagt

SEQ ID NO: 115431 - DNA, 25 bp, Homo sapien
aaggttctcactcagccgccgtcgc

SEQ ID NO: 115432 - DNA, 25 bp, Homo sapien
cacagccgccaaggttctcactcag

SEQ ID NO: 115433 - DNA, 25 bp, Homo sapien
cctcagctgttaggccgggtaaagt

SEQ ID NO: 115434 - DNA, 25 bp, Homo sapien
cgtcgccgtaaagcgcctcagctgt

SEQ ID NO: 115435 - DNA, 25 bp, Homo sapien
taggcccaggcggtacctccgccat

SEQ ID NO: 115436 - DNA, 25 bp, Homo sapien
ctaggcccaggcggtacctccgcca

SEQ ID NO: 115437 - DNA, 25 bp, Homo sapien
aggcccaggcggtacctccgccatc

SEQ ID NO: 115438 - DNA, 25 bp, Homo sapien
agcggaggcacggatgccccttggc

SEQ ID NO: 115439 - DNA, 25 bp, Homo sapien
gccttcgtgctcttcgtcgtcctcc

SEQ ID NO: 115440 - DNA, 25 bp, Homo sapien
ctgagggcagcggaggcacggatgc

SEQ ID NO: 115441 - DNA, 25 bp, Homo sapien
gccgccttcgtgctcttcgtcgtcc

SEQ ID NO: 115442 - DNA, 25 bp, Homo sapien
ggtgccgcagttcggggctaatcaa

SEQ ID NO: 115443 - DNA, 25 bp, Homo sapien
agttcggggctaatcaatccgttga

SEQ ID NO: 115444 - DNA, 25 bp, Homo sapien
cgcagttcggggctaatcaatccgt

SEQ ID NO: 115445 - DNA, 25 bp, Homo sapien
tcggggctaatcaatccgttgagct

SEQ ID NO: 115446 - DNA, 25 bp, Homo sapien
gtgccctcggccagtccattgcggg

SEQ ID NO: 115447 - DNA, 25 bp, Homo sapien
tgtggtcgcggccacctctgctacg

SEQ ID NO: 115448 - DNA, 25 bp, Homo sapien
cgcagttcttgcattactagagagg

SEQ ID NO: 115449 - DNA, 25 bp, Homo sapien
ctctcgcccgagtgtaccccggctc

SEQ ID NO: 115450 - DNA, 25 bp, Homo sapien
gctcggattcatatcggacatatcg

SEQ ID NO: 115451 - DNA, 25 bp, Homo sapien
cttcttaagctgcagtcggcggtca

SEQ ID NO: 115452 - DNA, 25 bp, Homo sapien
tgatatcgggcatttgtagctcgga

SEQ ID NO: 115453 - DNA, 25 bp, Homo sapien
tagggttcggacagatctttggtga

SEQ ID NO: 115454 - DNA, 25 bp, Homo sapien
cattacaggttatccacggaaaacg

SEQ ID NO: 115455 - DNA, 25 bp, Homo sapien
gagattgatgtaagggcaactgtcc

SEQ ID NO: 115456 - DNA, 25 bp, Homo sapien
cactgaatggatcaagggtatgtca

SEQ ID NO: 115457 - DNA, 25 bp, Homo sapien
gtttgttaccataatgagaggccag

SEQ ID NO: 115458 - DNA, 25 bp, Homo sapien
accattggtaagcattttcgacggg

SEQ ID NO: 115459 - DNA, 25 bp, Homo sapien
aatacattgccatcaggtactgcac

SEQ ID NO: 115460 - DNA, 25 bp, Homo sapien
tgcaagacagcagtcacagaagttt

SEQ ID NO: 115461 - DNA, 25 bp, Homo sapien
gataatgggaactcttgcaagacag

SEQ ID NO: 115462 - DNA, 25 bp, Homo sapien
caacttgcaaacgatggcacctaca

SEQ ID NO: 115463 - DNA, 25 bp, Homo sapien
ataacctctgcggaacatctttttg

SEQ ID NO: 115464 - DNA, 25 bp, Homo sapien
tcctgtatttggaatccacggctaa

SEQ ID NO: 115465 - DNA, 25 bp, Homo sapien
ggctaacatggctatataacctctg

SEQ ID NO: 115466 - DNA, 25 bp, Homo sapien
cagtctccctcaaccatggcatata

SEQ ID NO: 115467 - DNA, 25 bp, Homo sapien
acagtctccctcaaccatggcatat

SEQ ID NO: 115468 - DNA, 25 bp, Homo sapien
gtctccctcaaccatggcatatata

SEQ ID NO: 115469 - DNA, 25 bp, Homo sapien
ctccctcaaccatggcatatatagc

SEQ ID NO: 115470 - DNA, 25 bp, Homo sapien
agaattctctaaggcacatctgacc

SEQ ID NO: 115471 - DNA, 25 bp, Homo sapien
caccgtgcagtaggatacaaagaaa

SEQ ID NO: 115472 - DNA, 25 bp, Homo sapien
tactatatgtagaaacaccgtgcag

SEQ ID NO: 115473 - DNA, 25 bp, Homo sapien
tatgttaatgcgcagatagctctac

SEQ ID NO: 115474 - DNA, 25 bp, Homo sapien
cggagatttccaaatgtatctcttt

SEQ ID NO: 115475 - DNA, 25 bp, Homo sapien
cacggagatttccaaatgtatctct

SEQ ID NO: 115476 - DNA, 25 bp, Homo sapien
acggagatttccaaatgtatctctt

SEQ ID NO: 115477 - DNA, 25 bp, Homo sapien
ggagatttccaaatgtatctctttc

SEQ ID NO: 115478 - DNA, 25 bp, Homo sapien
tcataaagtttcaaagcggacttat

SEQ ID NO: 115479 - DNA, 25 bp, Homo sapien
tgaacagcctcttatctcgaacaaa

SEQ ID NO: 115480 - DNA, 25 bp, Homo sapien
ccatttaaatagtatctgaacagcc

SEQ ID NO: 115481 - DNA, 25 bp, Homo sapien
gccacagtttaagtcgcagtgcatc

SEQ ID NO: 115482 - DNA, 25 bp, Homo sapien
tatacttatctacacaggcactggc

SEQ ID NO: 115483 - DNA, 25 bp, Homo sapien
catgcaaaggtcgattctgtgcgga

SEQ ID NO: 115484 - DNA, 25 bp, Homo sapien
gaacaaatgtgccatgccaaagtgc

SEQ ID NO: 115485 - DNA, 25 bp, Homo sapien
taaatcttggctatcaactggcaca

SEQ ID NO: 115486 - DNA, 25 bp, Homo sapien
catagatttgtcgagcaagtgggaa

SEQ ID NO: 115487 - DNA, 25 bp, Homo sapien
tcagttgtagccaagtgaacccatg

SEQ ID NO: 115488 - DNA, 25 bp, Homo sapien
tgtcagccagtaccataacacaggg

SEQ ID NO: 115489 - DNA, 25 bp, Homo sapien
agtacagtcagtcctaaagaggcag

SEQ ID NO: 115490 - DNA, 25 bp, Homo sapien
gcaaaacaacccaatcataaaatgc

SEQ ID NO: 115491 - DNA, 25 bp, Homo sapien
gtaaaagcaaaacaacccaatcata

SEQ ID NO: 115492 - DNA, 25 bp, Homo sapien
aaaatgcacacagctgtatctaaaa

SEQ ID NO: 115493 - DNA, 25 bp, Homo sapien
atgcacacagctgtatctaaaagaa

SEQ ID NO: 115494 - DNA, 25 bp, Homo sapien
gactggacagtagtgatctaaagtg

SEQ ID NO: 115495 - DNA, 25 bp, Homo sapien
gggagtgaaaaggacacatctatcc

SEQ ID NO: 115496 - DNA, 25 bp, Homo sapien
ccttatataaagtgtgactggacag

SEQ ID NO: 115497 - DNA, 25 bp, Homo sapien
gctacacatgtgactagtaactacc

SEQ ID NO: 115498 - DNA, 25 bp, Homo sapien
caacttgaccactcatgagatgacc

SEQ ID NO: 115499 - DNA, 25 bp, Homo sapien
gaaaggctacataacaagggcagtg

SEQ ID NO: 115500 - DNA, 25 bp, Homo sapien
taaggctaaaaaggtaagtctcatc

SEQ ID NO: 115501 - DNA, 25 bp, Homo sapien
gatagacctccatgttccaacttga

SEQ ID NO: 115502 - DNA, 25 bp, Homo sapien
cagatgaccagcgagggtcaaaggt

SEQ ID NO: 115503 - DNA, 25 bp, Homo sapien
accagcgagggtcaaaggtaataca

SEQ ID NO: 115504 - DNA, 25 bp, Homo sapien
atgaccagcgagggtcaaaggtaat

SEQ ID NO: 115505 - DNA, 25 bp, Homo sapien
gaccagcgagggtcaaaggtaatac

SEQ ID NO: 115506 - DNA, 25 bp, Homo sapien
taaaggcagcaggttcagcccctta

SEQ ID NO: 115507 - DNA, 25 bp, Homo sapien
tatacaatcatgagaaatcctggcc

SEQ ID NO: 115508 - DNA, 25 bp, Homo sapien
taacaggttgtaccaagcctggcac

SEQ ID NO: 115509 - DNA, 25 bp, Homo sapien
tactaaaatccctcggtcaaggaga

SEQ ID NO: 115510 - DNA, 25 bp, Homo sapien
cacgatcacatgcaaacttcacact

SEQ ID NO: 115511 - DNA, 25 bp, Homo sapien
ccagtatagtgtttattgcacaaag

SEQ ID NO: 115512 - DNA, 25 bp, Homo sapien
gatgtttcccagtatagtgtttatt

SEQ ID NO: 115513 - DNA, 25 bp, Homo sapien
cacacgatcacatgcaaacttcaca

SEQ ID NO: 115514 - DNA, 25 bp, Homo sapien
aagacagtgtctcggttttcctgaa

SEQ ID NO: 115515 - DNA, 25 bp, Homo sapien
gaagaagttcctacctggagtctga

SEQ ID NO: 115516 - DNA, 25 bp, Homo sapien
gttaggcttatgtcacaggtctacc

SEQ ID NO: 115517 - DNA, 25 bp, Homo sapien
gagaccctctgttattggcacgtaa

SEQ ID NO: 115518 - DNA, 25 bp, Homo sapien
cacaacctagaaggtaggagctact

SEQ ID NO: 115519 - DNA, 25 bp, Homo sapien
aggagctactattcgccccagggtg

SEQ ID NO: 115520 - DNA, 25 bp, Homo sapien
tacaaagaaggctgcactctgcgac

SEQ ID NO: 115521 - DNA, 25 bp, Homo sapien
gagtcatcacttgagagcacgccaa

SEQ ID NO: 115522 - DNA, 25 bp, Homo sapien
caggtctactttgggctgctccagc

SEQ ID NO: 115523 - DNA, 25 bp, Homo sapien
aggtctactttgggctgctccagca

SEQ ID NO: 115524 - DNA, 25 bp, Homo sapien
ggtctactttgggctgctccagcag

SEQ ID NO: 115525 - DNA, 25 bp, Homo sapien
aaagatgagctcttcccccttgttg

SEQ ID NO: 115526 - DNA, 25 bp, Homo sapien
ctaacacaaagatgagctcttcccc

SEQ ID NO: 115527 - DNA, 25 bp, Homo sapien
tttgtctccacatcctttgcccttc

SEQ ID NO: 115528 - DNA, 25 bp, Homo sapien
cccttgttgtctcttctttgtctcc

SEQ ID NO: 115529 - DNA, 25 bp, Homo sapien
cagcaggtcccatttgctttgcatc

SEQ ID NO: 115530 - DNA, 25 bp, Homo sapien
gtgccagcaggtcccatttgctttg

SEQ ID NO: 115531 - DNA, 25 bp, Homo sapien
tgccagcaggtcccatttgctttgc

SEQ ID NO: 115532 - DNA, 25 bp, Homo sapien
tgtgccagcaggtcccatttgcttt

SEQ ID NO: 115533 - DNA, 25 bp, Homo sapien
gcaatggctagtgtccgtaggtaaa

SEQ ID NO: 115534 - DNA, 25 bp, Homo sapien
aaggtgagagcaatggctagtgtcc

SEQ ID NO: 115535 - DNA, 25 bp, Homo sapien
ccgtaggtaaagagctctgtgccag

SEQ ID NO: 115536 - DNA, 25 bp, Homo sapien
gctagtgtccgtaggtaaagagctc

SEQ ID NO: 115537 - DNA, 25 bp, Homo sapien
gaggggcccagcatcatttggtgta

SEQ ID NO: 115538 - DNA, 25 bp, Homo sapien
aggggcccagcatcatttggtgtaa

SEQ ID NO: 115539 - DNA, 25 bp, Homo sapien
agaggggcccagcatcatttggtgt

SEQ ID NO: 115540 - DNA, 25 bp, Homo sapien
tctttgcttgttcgggacctgtggc

SEQ ID NO: 115541 - DNA, 25 bp, Homo sapien
tgtgaatgccatcaaatcacttggt

SEQ ID NO: 115542 - DNA, 25 bp, Homo sapien
gcctggcgagggttaacaagaacag

SEQ ID NO: 115543 - DNA, 25 bp, Homo sapien
gatttgattgcataataggcccatt

SEQ ID NO: 115544 - DNA, 25 bp, Homo sapien
tcttttgttctactggaattaagct

SEQ ID NO: 115545 - DNA, 25 bp, Homo sapien
gagctcttttgttctactggaatta

SEQ ID NO: 115546 - DNA, 25 bp, Homo sapien
gctcttttgttctactggaattaag

SEQ ID NO: 115547 - DNA, 25 bp, Homo sapien
caccttgttctgagctcttttgttc

SEQ ID NO: 115548 - DNA, 25 bp, Homo sapien
cctctggaacactgttatagccagt

SEQ ID NO: 115549 - DNA, 25 bp, Homo sapien
actcttgtttggaggatttgatata

SEQ ID NO: 115550 - DNA, 25 bp, Homo sapien
gacgccagaacatcagtcacgctga

SEQ ID NO: 115551 - DNA, 25 bp, Homo sapien
tagccagtaaacatgctcccagacg

SEQ ID NO: 115552 - DNA, 25 bp, Homo sapien
gcttattcggttgcaattggtcatt

SEQ ID NO: 115553 - DNA, 25 bp, Homo sapien
tgctcatgccactttcttgaattac

SEQ ID NO: 115554 - DNA, 25 bp, Homo sapien
cattgccactacttccaccaagagg

SEQ ID NO: 115555 - DNA, 25 bp, Homo sapien
gacctgctgcttattcggttgcaat

SEQ ID NO: 115556 - DNA, 25 bp, Homo sapien
ggagacctatctcacgtgcaaagaa

SEQ ID NO: 115557 - DNA, 25 bp, Homo sapien
gacctatctcacgtgcaaagaaaca

SEQ ID NO: 115558 - DNA, 25 bp, Homo sapien
ccaatacaggaacagccaaattcat

SEQ ID NO: 115559 - DNA, 25 bp, Homo sapien
acaggaacagccaaattcataaagc

SEQ ID NO: 115560 - DNA, 25 bp, Homo sapien
cactcctaaaaccccaagaacgcag

SEQ ID NO: 115561 - DNA, 25 bp, Homo sapien
caagaacgcagaaacaaggtactct

SEQ ID NO: 115562 - DNA, 25 bp, Homo sapien
cccaagaacgcagaaacaaggtact

SEQ ID NO: 115563 - DNA, 25 bp, Homo sapien
agaacgcagaaacaaggtactctcc

SEQ ID NO: 115564 - DNA, 25 bp, Homo sapien
tggggatggacttattctgctggac

SEQ ID NO: 115565 - DNA, 25 bp, Homo sapien
tattctgctggacaatagcaagtag

SEQ ID NO: 115566 - DNA, 25 bp, Homo sapien
agaagaatcaggaatgactggtaca

SEQ ID NO: 115567 - DNA, 25 bp, Homo sapien
gaagaatcaggaatgactggtacaa

SEQ ID NO: 115568 - DNA, 25 bp, Homo sapien
cacacttcaatgctctcattggcca

SEQ ID NO: 115569 - DNA, 25 bp, Homo sapien
tggagacaggagcatcgtatccttt

SEQ ID NO: 115570 - DNA, 25 bp, Homo sapien
tatccttttggagctcgagggatct

SEQ ID NO: 115571 - DNA, 25 bp, Homo sapien
tccacaaatgcaaaggctactttat

SEQ ID NO: 115572 - DNA, 25 bp, Homo sapien
tgcccaggatgctctatgaaaactt

SEQ ID NO: 115573 - DNA, 25 bp, Homo sapien
tcacggagcagatcgccttataagt

SEQ ID NO: 115574 - DNA, 25 bp, Homo sapien
tgaagaacaatcactggctagggcc

SEQ ID NO: 115575 - DNA, 25 bp, Homo sapien
gggattttacacaagtgacctggca

SEQ ID NO: 115576 - DNA, 25 bp, Homo sapien
gacaggggacataggagcacagacc

SEQ ID NO: 115577 - DNA, 25 bp, Homo sapien
aggggacataggagcacagaccgcc

SEQ ID NO: 115578 - DNA, 25 bp, Homo sapien
aggacaggggacataggagcacaga

SEQ ID NO: 115579 - DNA, 25 bp, Homo sapien
gggacataggagcacagaccgccat

SEQ ID NO: 115580 - DNA, 25 bp, Homo sapien
aataccactctatcagtcattacca

SEQ ID NO: 115581 - DNA, 25 bp, Homo sapien
ctctttagaaataccactctatcag

SEQ ID NO: 115582 - DNA, 25 bp, Homo sapien
tagaaataccactctatcagtcatt

SEQ ID NO: 115583 - DNA, 25 bp, Homo sapien
ctttagaaataccactctatcagtc

SEQ ID NO: 115584 - DNA, 25 bp, Homo sapien
tgtatccgatggtaaatgctgtttt

SEQ ID NO: 115585 - DNA, 25 bp, Homo sapien
tccgatggtaaatgctgttttcctg

SEQ ID NO: 115586 - DNA, 25 bp, Homo sapien
ccgatggtaaatgctgttttcctgg

SEQ ID NO: 115587 - DNA, 25 bp, Homo sapien
tatccgatggtaaatgctgttttcc

SEQ ID NO: 115588 - DNA, 25 bp, Homo sapien
ctcgtctacagtcatgcagttgtaa

SEQ ID NO: 115589 - DNA, 25 bp, Homo sapien
cactcccacttctcgtctacagtca

SEQ ID NO: 115590 - DNA, 25 bp, Homo sapien
ccacttctcgtctacagtcatgcag

SEQ ID NO: 115591 - DNA, 25 bp, Homo sapien
tgcatctccggctgccgatcctcca

SEQ ID NO: 115592 - DNA, 25 bp, Homo sapien
gaagaagagagatgtgttcagcgat

SEQ ID NO: 115593 - DNA, 25 bp, Homo sapien
ctgaagaagagagatgtgttcagcg

SEQ ID NO: 115594 - DNA, 25 bp, Homo sapien
tgaagaagagagatgtgttcagcga

SEQ ID NO: 115595 - DNA, 25 bp, Homo sapien
aagaagagagatgtgttcagcgata

SEQ ID NO: 115596 - DNA, 25 bp, Homo sapien
tcatacctggtgtcatcggccacat

SEQ ID NO: 115597 - DNA, 25 bp, Homo sapien
cagcgaatgtagaaatcaagcggaa

SEQ ID NO: 115598 - DNA, 25 bp, Homo sapien
tagtgtcttctgatccccctaggca

SEQ ID NO: 115599 - DNA, 25 bp, Homo sapien
gaccataatgaccaagttcacactg

SEQ ID NO: 115600 - DNA, 25 bp, Homo sapien
caaagtttgcttccaacagctgtaa

SEQ ID NO: 115601 - DNA, 25 bp, Homo sapien
aagaccttgataccgattttgacct

SEQ ID NO: 115602 - DNA, 25 bp, Homo sapien
tgattatgatcattgcctggtacag

SEQ ID NO: 115603 - DNA, 25 bp, Homo sapien
ggtttatactgtcaatggccactga

SEQ ID NO: 115604 - DNA, 25 bp, Homo sapien
gcctgcctttctagattagggacca

SEQ ID NO: 115605 - DNA, 25 bp, Homo sapien
gaattatgggagcttcactctgaga

SEQ ID NO: 115606 - DNA, 25 bp, Homo sapien
catcacctaataaagtactgggccc

SEQ ID NO: 115607 - DNA, 25 bp, Homo sapien
gatgggcaccgtgagctaaaacgag

SEQ ID NO: 115608 - DNA, 25 bp, Homo sapien
tgtgacggctgctgtacctcacctg

SEQ ID NO: 115609 - DNA, 25 bp, Homo sapien
ggaaactgaggactctcggtatctg

SEQ ID NO: 115610 - DNA, 25 bp, Homo sapien
tgtgatggggttactcctcagaggt

SEQ ID NO: 115611 - DNA, 25 bp, Homo sapien
gactctcggtatctgtgacggctgc

SEQ ID NO: 115612 - DNA, 25 bp, Homo sapien
aaagatataacccacttctcccata

SEQ ID NO: 115613 - DNA, 25 bp, Homo sapien
ctaaagatataacccacttctccca

SEQ ID NO: 115614 - DNA, 25 bp, Homo sapien
taaagatataacccacttctcccat

SEQ ID NO: 115615 - DNA, 25 bp, Homo sapien
aactgcatgcttgcccgcctgcagt

SEQ ID NO: 115616 - DNA, 25 bp, Homo sapien
ttttggacaatcttctaactgcatg

SEQ ID NO: 115617 - DNA, 25 bp, Homo sapien
gtcttgtgccgaaatggaattctcc

SEQ ID NO: 115618 - DNA, 25 bp, Homo sapien
cttttggagccaagatcaatgttgt

SEQ ID NO: 115619 - DNA, 25 bp, Homo sapien
tcttatggtgatgccatagttaaag

SEQ ID NO: 115620 - DNA, 25 bp, Homo sapien
aagctgtcttatggtgatgccatag

SEQ ID NO: 115621 - DNA, 25 bp, Homo sapien
tggtgatgccatagttaaagataac

SEQ ID NO: 115622 - DNA, 25 bp, Homo sapien
tgatgccatagttaaagataacatc

SEQ ID NO: 115623 - DNA, 25 bp, Homo sapien
cttttccaacagaaactataaacat

SEQ ID NO: 115624 - DNA, 25 bp, Homo sapien
tgtggttgtattctgttattatccc

SEQ ID NO: 115625 - DNA, 25 bp, Homo sapien
cgtggagatgcgatcattgttcatt

SEQ ID NO: 115626 - DNA, 25 bp, Homo sapien
tggagatgcgatcattgttcatttc

SEQ ID NO: 115627 - DNA, 25 bp, Homo sapien
gatggtaccaacttcattataaaga

SEQ ID NO: 115628 - DNA, 25 bp, Homo sapien
tggtaccaacttcattataaagaaa

SEQ ID NO: 115629 - DNA, 25 bp, Homo sapien
aagagatggtaccaacttcattata

SEQ ID NO: 115630 - DNA, 25 bp, Homo sapien
gagatggtaccaacttcattataaa

SEQ ID NO: 115631 - DNA, 25 bp, Homo sapien
ctcactgagacctcctttgtaaggc

SEQ ID NO: 115632 - DNA, 25 bp, Homo sapien
actgagacctcctttgtaaggccct

SEQ ID NO: 115633 - DNA, 25 bp, Homo sapien
gagacctcctttgtaaggccctcca

SEQ ID NO: 115634 - DNA, 25 bp, Homo sapien
tcactgagacctcctttgtaaggcc

SEQ ID NO: 115635 - DNA, 25 bp, Homo sapien
tcctggacacacactatcgtgttcc

SEQ ID NO: 115636 - DNA, 25 bp, Homo sapien
cagttttctatcagactatattctc

SEQ ID NO: 115637 - DNA, 25 bp, Homo sapien
acacactatcgtgttccacatctga

SEQ ID NO: 115638 - DNA, 25 bp, Homo sapien
ttctatcagactatattctccagct

SEQ ID NO: 115639 - DNA, 25 bp, Homo sapien
tccacggtagaacttcgtcgtacta

SEQ ID NO: 115640 - DNA, 25 bp, Homo sapien
gaaaacctattggatgcaatataga

SEQ ID NO: 115641 - DNA, 25 bp, Homo sapien
gaatttcaaatatagtctgttgaac

SEQ ID NO: 115642 - DNA, 25 bp, Homo sapien
cgtactaggagcttcgattgggaat

SEQ ID NO: 115643 - DNA, 25 bp, Homo sapien
gatacgtgctcaaattctgattggg

SEQ ID NO: 115644 - DNA, 25 bp, Homo sapien
tgattggggatctaaccacctgtgc

SEQ ID NO: 115645 - DNA, 25 bp, Homo sapien
tgggaaaatatattcgtctgatacg

SEQ ID NO: 115646 - DNA, 25 bp, Homo sapien
tatattcgtctgatacgtgctcaaa

SEQ ID NO: 115647 - DNA, 25 bp, Homo sapien
acatttgtctgttggcctcttggga

SEQ ID NO: 115648 - DNA, 25 bp, Homo sapien
agacaaggggattactcacatttgt

SEQ ID NO: 115649 - DNA, 25 bp, Homo sapien
ttgtctgttggcctcttgggagcag

SEQ ID NO: 115650 - DNA, 25 bp, Homo sapien
acagcgtaggtgatggcaaagacaa

SEQ ID NO: 115651 - DNA, 25 bp, Homo sapien
cttgttggcagttgccactaccatt

SEQ ID NO: 115652 - DNA, 25 bp, Homo sapien
ttggcagttgccactaccattagcc

SEQ ID NO: 115653 - DNA, 25 bp, Homo sapien
ccacttgttggcagttgccactacc

SEQ ID NO: 115654 - DNA, 25 bp, Homo sapien
gttggcagttgccactaccattagc

SEQ ID NO: 115655 - DNA, 25 bp, Homo sapien
gcccctaacacagggcgcattctga

SEQ ID NO: 115656 - DNA, 25 bp, Homo sapien
gagaagccgtgtatctttcaccatg

SEQ ID NO: 115657 - DNA, 25 bp, Homo sapien
taacacagggcgcattctgagaagc

SEQ ID NO: 115658 - DNA, 25 bp, Homo sapien
cgcattctgagaagccgtgtatctt

SEQ ID NO: 115659 - DNA, 25 bp, Homo sapien
gccggagagctagtgtttctgacat

SEQ ID NO: 115660 - DNA, 25 bp, Homo sapien
ttccaaatcagtaggccggagagct

SEQ ID NO: 115661 - DNA, 25 bp, Homo sapien
atcagtaggccggagagctagtgtt

SEQ ID NO: 115662 - DNA, 25 bp, Homo sapien
cagtaggccggagagctagtgtttc

SEQ ID NO: 115663 - DNA, 25 bp, Homo sapien
ggcatgacccatccacttgttgctg

SEQ ID NO: 115664 - DNA, 25 bp, Homo sapien
gcaatattgccatacagagagagac

SEQ ID NO: 115665 - DNA, 25 bp, Homo sapien
tggttagcagtagccaaagctttgg

SEQ ID NO: 115666 - DNA, 25 bp, Homo sapien
ggtaatagtagagttcagagctcca

SEQ ID NO: 115667 - DNA, 25 bp, Homo sapien
gcttcaatttcagcgcctgttatta

SEQ ID NO: 115668 - DNA, 25 bp, Homo sapien
attaatcattgcttcaatttcagcg

SEQ ID NO: 115669 - DNA, 25 bp, Homo sapien
aatcattgcttcaatttcagcgcct

SEQ ID NO: 115670 - DNA, 25 bp, Homo sapien
cttcaatttcagcgcctgttattag

SEQ ID NO: 115671 - DNA, 25 bp, Homo sapien
cgttttcattcaatttgtcactgag

SEQ ID NO: 115672 - DNA, 25 bp, Homo sapien
caatttgtcactgagtctcttatca

SEQ ID NO: 115673 - DNA, 25 bp, Homo sapien
cactgagtctcttatcagtccctga

SEQ ID NO: 115674 - DNA, 25 bp, Homo sapien
ccagcaaatacttcacgttttcatt

SEQ ID NO: 115675 - DNA, 25 bp, Homo sapien
gaggacaccttgataagtccccaaa

SEQ ID NO: 115676 - DNA, 25 bp, Homo sapien
ttggtgtcatggtcactagtctgag

SEQ ID NO: 115677 - DNA, 25 bp, Homo sapien
cccaaaggaggctctatagggcttg

SEQ ID NO: 115678 - DNA, 25 bp, Homo sapien
cttggtgaaagaacagcatagttgg

SEQ ID NO: 115679 - DNA, 25 bp, Homo sapien
tgtgctttcctgaggtgtcagtgtt

SEQ ID NO: 115680 - DNA, 25 bp, Homo sapien
gtgctttcctgaggtgtcagtgttt

SEQ ID NO: 115681 - DNA, 25 bp, Homo sapien
ctgcttctgctgtagcaacagcagg

SEQ ID NO: 115682 - DNA, 25 bp, Homo sapien
tctgctgtagcaacagcaggttcat

SEQ ID NO: 115683 - DNA, 25 bp, Homo sapien
gcttctgctgtagcaacagcaggtt

SEQ ID NO: 115684 - DNA, 25 bp, Homo sapien
ttctgctgtagcaacagcaggttca

SEQ ID NO: 115685 - DNA, 25 bp, Homo sapien
tccccggcagttctcagtactaaag

SEQ ID NO: 115686 - DNA, 25 bp, Homo sapien
tctccccggcagttctcagtactaa

SEQ ID NO: 115687 - DNA, 25 bp, Homo sapien
cggcagttctcagtactaaagccaa

SEQ ID NO: 115688 - DNA, 25 bp, Homo sapien
atgaacatgtggctgtgccttgaaa

SEQ ID NO: 115689 - DNA, 25 bp, Homo sapien
tcttctttttgacccaagagtggaa

SEQ ID NO: 115690 - DNA, 25 bp, Homo sapien
caagagtggaacaaatccttcccct

SEQ ID NO: 115691 - DNA, 25 bp, Homo sapien
tccactgttctgacagggaatcttc

SEQ ID NO: 115692 - DNA, 25 bp, Homo sapien
tagtgaccaggccaaaactttccat

SEQ ID NO: 115693 - DNA, 25 bp, Homo sapien
tcttcccttagtggagagccagctt

SEQ ID NO: 115694 - DNA, 25 bp, Homo sapien
agcattttaatgggctcttccctta

SEQ ID NO: 115695 - DNA, 25 bp, Homo sapien
gaagagccccgtgacctcggtgctt

SEQ ID NO: 115696 - DNA, 25 bp, Homo sapien
atcacttgtcggacaggaagagccc

SEQ ID NO: 115697 - DNA, 25 bp, Homo sapien
aaggcagcttttcctgttgagaaga

SEQ ID NO: 115698 - DNA, 25 bp, Homo sapien
tcagacagaggaaatcttgcttcca

SEQ ID NO: 115699 - DNA, 25 bp, Homo sapien
cttgcttccaaaaggcagcttttcc

SEQ ID NO: 115700 - DNA, 25 bp, Homo sapien
gagaagaattctctatttcctgcat

SEQ ID NO: 115701 - DNA, 25 bp, Homo sapien
ggtcagctcgttcactccgggctgt

SEQ ID NO: 115702 - DNA, 25 bp, Homo sapien
ttggagccagagacccgtgcaaaag

SEQ ID NO: 115703 - DNA, 25 bp, Homo sapien
taggaggttcttcaccctgggaaga

SEQ ID NO: 115704 - DNA, 25 bp, Homo sapien
tccgggctgttgagacgctgccagc

SEQ ID NO: 115705 - DNA, 25 bp, Homo sapien
tgcgtgcggggcgctggggacgcag

SEQ ID NO: 115706 - DNA, 25 bp, Homo sapien
ctggggacgcaggctggggaggctc

SEQ ID NO: 115707 - DNA, 25 bp, Homo sapien
tggggacgcaggctggggaggctcg

SEQ ID NO: 115708 - DNA, 25 bp, Homo sapien
gtgcggggcgctggggacgcaggct

SEQ ID NO: 115709 - DNA, 25 bp, Homo sapien
ggatcaccggctactatggctatta

SEQ ID NO: 115710 - DNA, 25 bp, Homo sapien
ggtggccactatcgaggaccggatc

SEQ ID NO: 115711 - DNA, 25 bp, Homo sapien
tattatccaggttactccagccaga

SEQ ID NO: 115712 - DNA, 25 bp, Homo sapien
cccgcgctctctatggatgtcaagg

SEQ ID NO: 115713 - DNA, 25 bp, Homo sapien
tgcaccagctcccgggccccgcgct

SEQ ID NO: 115714 - DNA, 25 bp, Homo sapien
cgggccccgcgctgcgctctccgcc

SEQ ID NO: 115715 - DNA, 25 bp, Homo sapien
cccgcgctgcgctctccgccccgcc

SEQ ID NO: 115716 - DNA, 25 bp, Homo sapien
gcgctgcgctctccgccccgccgca

SEQ ID NO: 115717 - DNA, 25 bp, Homo sapien
atcaaggaggtctgatcttcagtcc

SEQ ID NO: 115718 - DNA, 25 bp, Homo sapien
tgcaatagtcaagcccacatgtgat

SEQ ID NO: 115719 - DNA, 25 bp, Homo sapien
gaggtctgatcttcagtccactggg

SEQ ID NO: 115720 - DNA, 25 bp, Homo sapien
tgctgaaatgtgcaatagtcaagcc

SEQ ID NO: 115721 - DNA, 25 bp, Homo sapien
gcctctgacactttcctggatggat

SEQ ID NO: 115722 - DNA, 25 bp, Homo sapien
ttgcctctgacactttcctggatgg

SEQ ID NO: 115723 - DNA, 25 bp, Homo sapien
ctgacactttcctggatggattcca

SEQ ID NO: 115724 - DNA, 25 bp, Homo sapien
tctgacactttcctggatggattcc

SEQ ID NO: 115725 - DNA, 25 bp, Homo sapien
gtcactttgctgtggctgatcctgg

SEQ ID NO: 115726 - DNA, 25 bp, Homo sapien
tagtgatggctgcaggccaacttcc

SEQ ID NO: 115727 - DNA, 25 bp, Homo sapien
cacatggcttggagctgtgctgtaa

SEQ ID NO: 115728 - DNA, 25 bp, Homo sapien
cactgttcggctgggtcacatggct

SEQ ID NO: 115729 - DNA, 25 bp, Homo sapien
caacaggagatatagtctatggcat

SEQ ID NO: 115730 - DNA, 25 bp, Homo sapien
gaaatccataatctggaagtagaaa

SEQ ID NO: 115731 - DNA, 25 bp, Homo sapien
tgctcaggctctcatatcccttact

SEQ ID NO: 115732 - DNA, 25 bp, Homo sapien
gatatagtctatggcatttttcacc

SEQ ID NO: 115733 - DNA, 25 bp, Homo sapien
caggtttctgttctgcaaagtggtt

SEQ ID NO: 115734 - DNA, 25 bp, Homo sapien
caggcaggtttctgttctgcaaagt

SEQ ID NO: 115735 - DNA, 25 bp, Homo sapien
ctgttctgcaaagtggttctgggag

SEQ ID NO: 115736 - DNA, 25 bp, Homo sapien
tttctgttctgcaaagtggttctgg

SEQ ID NO: 115737 - DNA, 25 bp, Homo sapien
gactgtcttccaagatacctggata

SEQ ID NO: 115738 - DNA, 25 bp, Homo sapien
tcttccaagatacctggatatctgg

SEQ ID NO: 115739 - DNA, 25 bp, Homo sapien
aattactgactgtcttccaagatac

SEQ ID NO: 115740 - DNA, 25 bp, Homo sapien
agatacctggatatctggaataagg

SEQ ID NO: 115741 - DNA, 25 bp, Homo sapien
cataaatatcgaaagatattcctag

SEQ ID NO: 115742 - DNA, 25 bp, Homo sapien
cactctggaggcatgatcctgcagc

SEQ ID NO: 115743 - DNA, 25 bp, Homo sapien
gatttacataaatatcgaaagatat

SEQ ID NO: 115744 - DNA, 25 bp, Homo sapien
gctcttctggagactccaacccctt

SEQ ID NO: 115745 - DNA, 25 bp, Homo sapien
tggttccgtttctgtgtcctctttc

SEQ ID NO: 115746 - DNA, 25 bp, Homo sapien
cagtgctagacgtgtgttctggttc

SEQ ID NO: 115747 - DNA, 25 bp, Homo sapien
catgcctacagtgctagacgtgtgt

SEQ ID NO: 115748 - DNA, 25 bp, Homo sapien
tagacgtgtgttctggttccgtttc

SEQ ID NO: 115749 - DNA, 25 bp, Homo sapien
gcagtttccaaagccgtccttggga

SEQ ID NO: 115750 - DNA, 25 bp, Homo sapien
ggataggctggaccccaatcctgtc

SEQ ID NO: 115751 - DNA, 25 bp, Homo sapien
cagcacctaagtcacgcctctggaa

SEQ ID NO: 115752 - DNA, 25 bp, Homo sapien
cacgcctctggaactttggcaagtt

SEQ ID NO: 115753 - DNA, 25 bp, Homo sapien
cgcctgtggaagaatacagctgctt

SEQ ID NO: 115754 - DNA, 25 bp, Homo sapien
ttcgcctgtggaagaatacagctgc

SEQ ID NO: 115755 - DNA, 25 bp, Homo sapien
tcagattcgcctgtggaagaataca

SEQ ID NO: 115756 - DNA, 25 bp, Homo sapien
gattcgcctgtggaagaatacagct

SEQ ID NO: 115757 - DNA, 25 bp, Homo sapien
cacagggacggctgacccagccaaa

SEQ ID NO: 115758 - DNA, 25 bp, Homo sapien
ttgatccacagggacggctgaccca

SEQ ID NO: 115759 - DNA, 25 bp, Homo sapien
tgtcagtggggtgtcacttgcaggg

SEQ ID NO: 115760 - DNA, 25 bp, Homo sapien
agggacggctgacccagccaaacct

SEQ ID NO: 115761 - DNA, 25 bp, Homo sapien
ttcctcagtattacccttacttatc

SEQ ID NO: 115762 - DNA, 25 bp, Homo sapien
ttacttatctggtgcacctctccct

SEQ ID NO: 115763 - DNA, 25 bp, Homo sapien
tacccttacttatctggtgcacctc

SEQ ID NO: 115764 - DNA, 25 bp, Homo sapien
cagtattacccttacttatctggtg

SEQ ID NO: 115765 - DNA, 25 bp, Homo sapien
agtcccgttacatcatgacactcgg

SEQ ID NO: 115766 - DNA, 25 bp, Homo sapien
gaagtcgcagattggtgaagagtcc

SEQ ID NO: 115767 - DNA, 25 bp, Homo sapien
agtaaccaagagcagaaaactcact

SEQ ID NO: 115768 - DNA, 25 bp, Homo sapien
tcggcagtaaccaagagcagaaaac

SEQ ID NO: 115769 - DNA, 25 bp, Homo sapien
catcagataacagtcatagctctcc

SEQ ID NO: 115770 - DNA, 25 bp, Homo sapien
acgaggatcagggacacacttgagg

SEQ ID NO: 115771 - DNA, 25 bp, Homo sapien
tcttttagagatgccctgccgagaa

SEQ ID NO: 115772 - DNA, 25 bp, Homo sapien
gaggcacgaggatcagggacacact

SEQ ID NO: 115773 - DNA, 25 bp, Homo sapien
ggagtctcggcccagttcatttttc

SEQ ID NO: 115774 - DNA, 25 bp, Homo sapien
gagtctcggcccagttcatttttca

SEQ ID NO: 115775 - DNA, 25 bp, Homo sapien
agtctcggcccagttcatttttcaa

SEQ ID NO: 115776 - DNA, 25 bp, Homo sapien
tcttcacatgtgttcagggtcttgc

SEQ ID NO: 115777 - DNA, 25 bp, Homo sapien
aggtcagatttacacacttgttcaa

SEQ ID NO: 115778 - DNA, 25 bp, Homo sapien
gtgttcagggtcttgcagaaaggct

SEQ ID NO: 115779 - DNA, 25 bp, Homo sapien
ttacacacttgttcaaggtgaggtg

SEQ ID NO: 115780 - DNA, 25 bp, Homo sapien
cctcggcattgtattccatgtccat

SEQ ID NO: 115781 - DNA, 25 bp, Homo sapien
agtgagccttctccctcggcattgt

SEQ ID NO: 115782 - DNA, 25 bp, Homo sapien
gagccttctccctcggcattgtatt

SEQ ID NO: 115783 - DNA, 25 bp, Homo sapien
ttctccctcggcattgtattccatg

SEQ ID NO: 115784 - DNA, 25 bp, Homo sapien
ctattggtttggttgttgacaacac

SEQ ID NO: 115785 - DNA, 25 bp, Homo sapien
tattggtttggttgttgacaacact

SEQ ID NO: 115786 - DNA, 25 bp, Homo sapien
aagtttggcaacagccttccaggtg

SEQ ID NO: 115787 - DNA, 25 bp, Homo sapien
cattgatgcatacagccttccaggt

SEQ ID NO: 115788 - DNA, 25 bp, Homo sapien
tggtgttcccaagtgcccgggctgt

SEQ ID NO: 115789 - DNA, 25 bp, Homo sapien
gctgttgtctttggcttcagtgtgg

SEQ ID NO: 115790 - DNA, 25 bp, Homo sapien
taaacactctgcttcagtaggtaga

SEQ ID NO: 115791 - DNA, 25 bp, Homo sapien
caattacagttgtctctaggtatcc

SEQ ID NO: 115792 - DNA, 25 bp, Homo sapien
tactgaatgaattacctgtggccat

SEQ ID NO: 115793 - DNA, 25 bp, Homo sapien
tcatggatgctcaagcgccttacat

SEQ ID NO: 115794 - DNA, 25 bp, Homo sapien
atgcatcttccaagtgctccaaggc

SEQ ID NO: 115795 - DNA, 25 bp, Homo sapien
ttcagcagataatgcatcttccaag

SEQ ID NO: 115796 - DNA, 25 bp, Homo sapien
ccaagtgctccaaggcgaagagccg

SEQ ID NO: 115797 - DNA, 25 bp, Homo sapien
ggtttttcagcagataatgcatctt

SEQ ID NO: 115798 - DNA, 25 bp, Homo sapien
cttcttgagctcttgctgtaggcca

SEQ ID NO: 115799 - DNA, 25 bp, Homo sapien
tgctgtgctcagtacttaacatgga

SEQ ID NO: 115800 - DNA, 25 bp, Homo sapien
gcagaaacctcacttgtaataaata

SEQ ID NO: 115801 - DNA, 25 bp, Homo sapien
taaactcgattgagtatcacaattc

SEQ ID NO: 115802 - DNA, 25 bp, Homo sapien
ttctccattagaccttcttcatcca

SEQ ID NO: 115803 - DNA, 25 bp, Homo sapien
attctccattagaccttcttcatcc

SEQ ID NO: 115804 - DNA, 25 bp, Homo sapien
tattctccattagaccttcttcatc

SEQ ID NO: 115805 - DNA, 25 bp, Homo sapien
gtattctccattagaccttcttcat

SEQ ID NO: 115806 - DNA, 25 bp, Homo sapien
tatgaggacaacatctggtcttaga

SEQ ID NO: 115807 - DNA, 25 bp, Homo sapien
gacaagggaacaaagctcaatatct

SEQ ID NO: 115808 - DNA, 25 bp, Homo sapien
ctcagggctggtatgtatgaggaca

SEQ ID NO: 115809 - DNA, 25 bp, Homo sapien
tggttgatccctagatatgagttac

SEQ ID NO: 115810 - DNA, 25 bp, Homo sapien
tccaggatcttttggaggtatcgtg

SEQ ID NO: 115811 - DNA, 25 bp, Homo sapien
aactttgtcttgtctgttgggaagg

SEQ ID NO: 115812 - DNA, 25 bp, Homo sapien
ggagaccctggagacatcgatgaat

SEQ ID NO: 115813 - DNA, 25 bp, Homo sapien
ggataaaggtatccatagtgacacc

SEQ ID NO: 115814 - DNA, 25 bp, Homo sapien
tctcgtatgggtgcctgatcaacca

SEQ ID NO: 115815 - DNA, 25 bp, Homo sapien
aatagatccttgaatctcgtatggg

SEQ ID NO: 115816 - DNA, 25 bp, Homo sapien
tcgttgatgatcattggcaagaaca

SEQ ID NO: 115817 - DNA, 25 bp, Homo sapien
gccacagattttgtatcgttgatga

SEQ ID NO: 115818 - DNA, 25 bp, Homo sapien
agagaccctttgggtaatttatcag

SEQ ID NO: 115819 - DNA, 25 bp, Homo sapien
aattctgggcctaatctggttggga

SEQ ID NO: 115820 - DNA, 25 bp, Homo sapien
cagcgtttgtagctgggaagatgaa

SEQ ID NO: 115821 - DNA, 25 bp, Homo sapien
tgaatccgaaggagggaccttggat

SEQ ID NO: 115822 - DNA, 25 bp, Homo sapien
gatgaaaaagtttaagtgaatccga

SEQ ID NO: 115823 - DNA, 25 bp, Homo sapien
taccacctgggtttgtttatcacaa

SEQ ID NO: 115824 - DNA, 25 bp, Homo sapien
aaagtattgcacatcccacaggacc

SEQ ID NO: 115825 - DNA, 25 bp, Homo sapien
gaaatcagccataggcattgggtga

SEQ ID NO: 115826 - DNA, 25 bp, Homo sapien
gccgaagatttgtatgaaatcagcc

SEQ ID NO: 115827 - DNA, 25 bp, Homo sapien
gcctgacctctgccttactcttttt

SEQ ID NO: 115828 - DNA, 25 bp, Homo sapien
tttagtacagagtaggtttctccac

SEQ ID NO: 115829 - DNA, 25 bp, Homo sapien
ctgacctctgccttactcttttttt

SEQ ID NO: 115830 - DNA, 25 bp, Homo sapien
ttagtacagagtaggtttctccaca

SEQ ID NO: 115831 - DNA, 25 bp, Homo sapien
ggtgcttgccatggtgcggaccaca

SEQ ID NO: 115832 - DNA, 25 bp, Homo sapien
ccacacagagacaggaatacagtga

SEQ ID NO: 115833 - DNA, 25 bp, Homo sapien
tctgggccttccagctagcgggaaa

SEQ ID NO: 115834 - DNA, 25 bp, Homo sapien
caggaacactgaatttgcttggact

SEQ ID NO: 115835 - DNA, 25 bp, Homo sapien
agaaaaagagctaaaagacatattt

SEQ ID NO: 115836 - DNA, 25 bp, Homo sapien
cggccgcctcgctgaagaaaaagag

SEQ ID NO: 115837 - DNA, 25 bp, Homo sapien
cagcccggccgcctcgctgaagaaa

SEQ ID NO: 115838 - DNA, 25 bp, Homo sapien
gcccggccgcctcgctgaagaaaaa

SEQ ID NO: 115839 - DNA, 25 bp, Homo sapien
ggtcttgcccgtgagggtcttcaca

SEQ ID NO: 115840 - DNA, 25 bp, Homo sapien
cccgtgagggtcttcacaaagatct

SEQ ID NO: 115841 - DNA, 25 bp, Homo sapien
tcttgcccgtgagggtcttcacaaa

SEQ ID NO: 115842 - DNA, 25 bp, Homo sapien
tgcccgtgagggtcttcacaaagat

SEQ ID NO: 115843 - DNA, 25 bp, Homo sapien
tggtcaggtgggataccctccttgt

SEQ ID NO: 115844 - DNA, 25 bp, Homo sapien
ctggtcaggtgggataccctccttg

SEQ ID NO: 115845 - DNA, 25 bp, Homo sapien
ggtcaggtgggataccctccttgtc

SEQ ID NO: 115846 - DNA, 25 bp, Homo sapien
tgcaggcaagcatagcacttgcagc

SEQ ID NO: 115847 - DNA, 25 bp, Homo sapien
ttggtgtggccgcatttcttcttgt

SEQ ID NO: 115848 - DNA, 25 bp, Homo sapien
cagccgtttcccagcaaatatcaga

SEQ ID NO: 115849 - DNA, 25 bp, Homo sapien
tcttgtggcagttgatagcaccggg

SEQ ID NO: 115850 - DNA, 25 bp, Homo sapien
gggcagaaggctgctgcccttcaag

SEQ ID NO: 115851 - DNA, 25 bp, Homo sapien
gctgcccttcaaggaaggaagagcc

SEQ ID NO: 115852 - DNA, 25 bp, Homo sapien
ggacactttattgaggccccagggc

SEQ ID NO: 115853 - DNA, 25 bp, Homo sapien
tctgctccagtcaatgaaagggaca

SEQ ID NO: 115854 - DNA, 25 bp, Homo sapien
ccagctctggggctgctttcctcct

SEQ ID NO: 115855 - DNA, 25 bp, Homo sapien
ctcttccctgccagctctggggctg

SEQ ID NO: 115856 - DNA, 25 bp, Homo sapien
gctctggggctgctttcctcctggg

SEQ ID NO: 115857 - DNA, 25 bp, Homo sapien
cctcttccctgccagctctggggct

SEQ ID NO: 115858 - DNA, 25 bp, Homo sapien
cttgagactccggaatagttgggag

SEQ ID NO: 115859 - DNA, 25 bp, Homo sapien
gcctcgtggtcactgacagaatctg

SEQ ID NO: 115860 - DNA, 25 bp, Homo sapien
ggaatagttgggaggtgctgccgga

SEQ ID NO: 115861 - DNA, 25 bp, Homo sapien
cggaggtgcccaaatgtctcatgtg

SEQ ID NO: 115862 - DNA, 25 bp, Homo sapien
tgagagagaagttcccgaaaacaac

SEQ ID NO: 115863 - DNA, 25 bp, Homo sapien
gcagtgtccccaatgccactcagag

SEQ ID NO: 115864 - DNA, 25 bp, Homo sapien
gctcgcaatcccacagcagtgagag

SEQ ID NO: 115865 - DNA, 25 bp, Homo sapien
ttcaaaccgtcgatcgcagtgtccc

SEQ ID NO: 115866 - DNA, 25 bp, Homo sapien
ccagcccagcctcccagctccgcac

SEQ ID NO: 115867 - DNA, 25 bp, Homo sapien
ctccagcccagcctcccagctccgc

SEQ ID NO: 115868 - DNA, 25 bp, Homo sapien
agctccagcccagcctcccagctcc

SEQ ID NO: 115869 - DNA, 25 bp, Homo sapien
cgcactcctagctccagcccagcct

SEQ ID NO: 115870 - DNA, 25 bp, Homo sapien
gatttgcgctccttgcctgaaccaa

SEQ ID NO: 115871 - DNA, 25 bp, Homo sapien
caagccgtccatagtttccacaagg

SEQ ID NO: 115872 - DNA, 25 bp, Homo sapien
tctcttccgcgtagatagggaggcg

SEQ ID NO: 115873 - DNA, 25 bp, Homo sapien
tcgtgtaaacggtgccctggtctct

SEQ ID NO: 115874 - DNA, 25 bp, Homo sapien
aatgggtatcgttcacttctggctc

SEQ ID NO: 115875 - DNA, 25 bp, Homo sapien
ctactagatgaaatgcaggatgccc

SEQ ID NO: 115876 - DNA, 25 bp, Homo sapien
cagaaatgttcgtatcagcagagac

SEQ ID NO: 115877 - DNA, 25 bp, Homo sapien
catgggacttggtacgtgggaatca

SEQ ID NO: 115878 - DNA, 25 bp, Homo sapien
tgttctacatagcagctccagttct

SEQ ID NO: 115879 - DNA, 25 bp, Homo sapien
tctacatagcagctccagttcttca

SEQ ID NO: 115880 - DNA, 25 bp, Homo sapien
ttcttcatcttccacggcaggacct

SEQ ID NO: 115881 - DNA, 25 bp, Homo sapien
tcttcatcttccacggcaggacctc

SEQ ID NO: 115882 - DNA, 25 bp, Homo sapien
ctgattgctttagcacacagttttc

SEQ ID NO: 115883 - DNA, 25 bp, Homo sapien
ttcgtgctagctcaagccccacttt

SEQ ID NO: 115884 - DNA, 25 bp, Homo sapien
caacttttcccttcgtgctagctca

SEQ ID NO: 115885 - DNA, 25 bp, Homo sapien
tgaaaattgtcctgattgctttagc

SEQ ID NO: 115886 - DNA, 25 bp, Homo sapien
gggctctgcctagatgcctgttgga

SEQ ID NO: 115887 - DNA, 25 bp, Homo sapien
cccctaatacttcacaatctgcttt

SEQ ID NO: 115888 - DNA, 25 bp, Homo sapien
cctagatgcctgttggaatatccca

SEQ ID NO: 115889 - DNA, 25 bp, Homo sapien
gaatatcccattatccccactgctt

SEQ ID NO: 115890 - DNA, 25 bp, Homo sapien
cttgccggtctgtcctagtaagctg

SEQ ID NO: 115891 - DNA, 25 bp, Homo sapien
gtcctagtaagctgcaggttagctg

SEQ ID NO: 115892 - DNA, 25 bp, Homo sapien
gccggtctgtcctagtaagctgcag

SEQ ID NO: 115893 - DNA, 25 bp, Homo sapien
ggtctgtcctagtaagctgcaggtt

SEQ ID NO: 115894 - DNA, 25 bp, Homo sapien
agcatcaggtcgcagtgactcagca

SEQ ID NO: 115895 - DNA, 25 bp, Homo sapien
gatctgatcttgtcaccggctctga

SEQ ID NO: 115896 - DNA, 25 bp, Homo sapien
gggaccaatcagaaggtcggtcttc

SEQ ID NO: 115897 - DNA, 25 bp, Homo sapien
gactcagcaccgtgtggcagctgtt

SEQ ID NO: 115898 - DNA, 25 bp, Homo sapien
ggctgatcttgaatccctgatctca

SEQ ID NO: 115899 - DNA, 25 bp, Homo sapien
ctgatcttgaatccctgatctcagg

SEQ ID NO: 115900 - DNA, 25 bp, Homo sapien
gatcttgaatccctgatctcaggtg

SEQ ID NO: 115901 - DNA, 25 bp, Homo sapien
aggctgatcttgaatccctgatctc

SEQ ID NO: 115902 - DNA, 25 bp, Homo sapien
aggtcgccatagtgatgccacactc

SEQ ID NO: 115903 - DNA, 25 bp, Homo sapien
tattgtctaacgctgtcagcaggca

SEQ ID NO: 115904 - DNA, 25 bp, Homo sapien
taatttgccgtattgtctaacgctg

SEQ ID NO: 115905 - DNA, 25 bp, Homo sapien
gccgtattgtctaacgctgtcagca

SEQ ID NO: 115906 - DNA, 25 bp, Homo sapien
ggaaaataatttgccgtattgtcta

SEQ ID NO: 115907 - DNA, 25 bp, Homo sapien
agtctccgcggccaacaagtctcgg

SEQ ID NO: 115908 - DNA, 25 bp, Homo sapien
ggtcgcagtctccgcggccaacaag

SEQ ID NO: 115909 - DNA, 25 bp, Homo sapien
ggtagtaaggcagactgagagaaga

SEQ ID NO: 115910 - DNA, 25 bp, Homo sapien
gccaacaagtctcggcgctcgcggg

SEQ ID NO: 115911 - DNA, 25 bp, Homo sapien
aggtcgatcacgaccgccgtcttct

SEQ ID NO: 115912 - DNA, 25 bp, Homo sapien
tcccaggtcgatcacgaccgccgtc

SEQ ID NO: 115913 - DNA, 25 bp, Homo sapien
ccaggtcgatcacgaccgccgtctt

SEQ ID NO: 115914 - DNA, 25 bp, Homo sapien
aaggcctctcccaggtcgatcacga

SEQ ID NO: 115915 - DNA, 25 bp, Homo sapien
gagctgcccagcgagtcggcgatga

SEQ ID NO: 115916 - DNA, 25 bp, Homo sapien
tgcccagcgagtcggcgatgaggac

SEQ ID NO: 115917 - DNA, 25 bp, Homo sapien
gagtcggcgatgaggacccaggcag

SEQ ID NO: 115918 - DNA, 25 bp, Homo sapien
agcgagtcggcgatgaggacccagg

SEQ ID NO: 115919 - DNA, 25 bp, Homo sapien
cacagatgatcccaaagggtttgtt

SEQ ID NO: 115920 - DNA, 25 bp, Homo sapien
tcggattcgcatcgcccagggagga

SEQ ID NO: 115921 - DNA, 25 bp, Homo sapien
gggcggcgacgagggcaattcaaca

SEQ ID NO: 115922 - DNA, 25 bp, Homo sapien
tctctgggagtcagaccccgatcct

SEQ ID NO: 115923 - DNA, 25 bp, Homo sapien
ctgaggagcccagggtaagcggggt

SEQ ID NO: 115924 - DNA, 25 bp, Homo sapien
ggggtctaggtcacggttgtcatcc

SEQ ID NO: 115925 - DNA, 25 bp, Homo sapien
actgaggagcccagggtaagcgggg

SEQ ID NO: 115926 - DNA, 25 bp, Homo sapien
cagggtaagcggggtctaggtcacg

SEQ ID NO: 115927 - DNA, 25 bp, Homo sapien
gggtttcacctcttaatgtgcccag

SEQ ID NO: 115928 - DNA, 25 bp, Homo sapien
gggtcccaggaccacattgattgtc

SEQ ID NO: 115929 - DNA, 25 bp, Homo sapien
gatctatgccatccgaaaggttgag

SEQ ID NO: 115930 - DNA, 25 bp, Homo sapien
caaggactcttaatctagggtccca

SEQ ID NO: 115931 - DNA, 25 bp, Homo sapien
aagtgctaggatttcgggcacgaca

SEQ ID NO: 115932 - DNA, 25 bp, Homo sapien
ggcacgacactaccgccggctaaat

SEQ ID NO: 115933 - DNA, 25 bp, Homo sapien
taggatttcgggcacgacactaccg

SEQ ID NO: 115934 - DNA, 25 bp, Homo sapien
cattattttaaaaacgatgctcttt

SEQ ID NO: 115935 - DNA, 25 bp, Homo sapien
ctttttatcacactaggaattatac

SEQ ID NO: 115936 - DNA, 25 bp, Homo sapien
aggtaggaatataattcttctgtat

SEQ ID NO: 115937 - DNA, 25 bp, Homo sapien
gatattatactgaacaactctgaca

SEQ ID NO: 115938 - DNA, 25 bp, Homo sapien
tattatactgaacaactctgacagg

SEQ ID NO: 115939 - DNA, 25 bp, Homo sapien
taattcttctgtattgatattatac

SEQ ID NO: 115940 - DNA, 25 bp, Homo sapien
gataatcacaactcggcggtctctg

SEQ ID NO: 115941 - DNA, 25 bp, Homo sapien
gaacacgagtgagtgtctctctgaa

SEQ ID NO: 115942 - DNA, 25 bp, Homo sapien
aaagaacacgagtgagtgtctctct

SEQ ID NO: 115943 - DNA, 25 bp, Homo sapien
gagaaggacataataccgattcgat

SEQ ID NO: 115944 - DNA, 25 bp, Homo sapien
ggaccatggcagaattaattccaag

SEQ ID NO: 115945 - DNA, 25 bp, Homo sapien
gtcagaagagccattagatgacttg

SEQ ID NO: 115946 - DNA, 25 bp, Homo sapien
ggctttccctatatccacaatctag

SEQ ID NO: 115947 - DNA, 25 bp, Homo sapien
tatatccacaatctaggaccatggc

SEQ ID NO: 115948 - DNA, 25 bp, Homo sapien
gcaaaggtggctggctgacaaaaaa

SEQ ID NO: 115949 - DNA, 25 bp, Homo sapien
tgcaaaggtggctggctgacaaaaa

SEQ ID NO: 115950 - DNA, 25 bp, Homo sapien
ggtggctggctgacaaaaaagatat

SEQ ID NO: 115951 - DNA, 25 bp, Homo sapien
aaaggtggctggctgacaaaaaaga

SEQ ID NO: 115952 - DNA, 25 bp, Homo sapien
gatgctcatctatactctgcttaaa

SEQ ID NO: 115953 - DNA, 25 bp, Homo sapien
gaaatgtactagtttatacggtcag

SEQ ID NO: 115954 - DNA, 25 bp, Homo sapien
tacatgtagatctcaaaattgcaag

SEQ ID NO: 115955 - DNA, 25 bp, Homo sapien
taagaagaggagtcaactacccatc

SEQ ID NO: 115956 - DNA, 25 bp, Homo sapien
acacaattcattagatacagctggg

SEQ ID NO: 115957 - DNA, 25 bp, Homo sapien
taagctacacaccaaatttagaagg

SEQ ID NO: 115958 - DNA, 25 bp, Homo sapien
taggcctgtgcagctacttaataca

SEQ ID NO: 115959 - DNA, 25 bp, Homo sapien
tctgataaagtagccactaggcctg

SEQ ID NO: 115960 - DNA, 25 bp, Homo sapien
agtgctccccaacaatttagaactg

SEQ ID NO: 115961 - DNA, 25 bp, Homo sapien
ctcctaggggtagtgctccccaaca

SEQ ID NO: 115962 - DNA, 25 bp, Homo sapien
ttcctcctaggggtagtgctcccca

SEQ ID NO: 115963 - DNA, 25 bp, Homo sapien
gctccccaacaatttagaactggga

SEQ ID NO: 115964 - DNA, 25 bp, Homo sapien
gttccaatagttgagtttccaactc

SEQ ID NO: 115965 - DNA, 25 bp, Homo sapien
cacttgtgtcaacagtacattgttc

SEQ ID NO: 115966 - DNA, 25 bp, Homo sapien
gagggaaggctctgttctttagcaa

SEQ ID NO: 115967 - DNA, 25 bp, Homo sapien
tacattgttccaatagttgagtttc

SEQ ID NO: 115968 - DNA, 25 bp, Homo sapien
cagtctattaaattgccttcacatt

SEQ ID NO: 115969 - DNA, 25 bp, Homo sapien
aacagtctattaaattgccttcaca

SEQ ID NO: 115970 - DNA, 25 bp, Homo sapien
taattttctcaaaaagtctaacaga

SEQ ID NO: 115971 - DNA, 25 bp, Homo sapien
aaaacagtctattaaattgccttca

SEQ ID NO: 115972 - DNA, 25 bp, Homo sapien
aatgtcctctaagacaccttccgga

SEQ ID NO: 115973 - DNA, 25 bp, Homo sapien
atgtcctctaagacaccttccggaa

SEQ ID NO: 115974 - DNA, 25 bp, Homo sapien
taatgtcctctaagacaccttccgg

SEQ ID NO: 115975 - DNA, 25 bp, Homo sapien
ttaatgtcctctaagacaccttccg

SEQ ID NO: 115976 - DNA, 25 bp, Homo sapien
caagttctcgtgactatctaagcaa

SEQ ID NO: 115977 - DNA, 25 bp, Homo sapien
tatgctactatgctagacagtgagc

SEQ ID NO: 115978 - DNA, 25 bp, Homo sapien
gacagtgagctaggcactaaagcta

SEQ ID NO: 115979 - DNA, 25 bp, Homo sapien
aaaacacatgtgttgagaatccaca

SEQ ID NO: 115980 - DNA, 25 bp, Homo sapien
ggctagttattataattgaacagag

SEQ ID NO: 115981 - DNA, 25 bp, Homo sapien
tgaacagagtgtacctacaccccag

SEQ ID NO: 115982 - DNA, 25 bp, Homo sapien
aacaattctattcaagtgaacatgc

SEQ ID NO: 115983 - DNA, 25 bp, Homo sapien
gaaaaggagaccttattatggctag

SEQ ID NO: 115984 - DNA, 25 bp, Homo sapien
agatcacttacaaagcaagtacgcg

SEQ ID NO: 115985 - DNA, 25 bp, Homo sapien
tgctgcttggatttttagtcctcgc

SEQ ID NO: 115986 - DNA, 25 bp, Homo sapien
gatttttagtcctcgcttcagatca

SEQ ID NO: 115987 - DNA, 25 bp, Homo sapien
tagtcctcgcttcagatcacttaca

SEQ ID NO: 115988 - DNA, 25 bp, Homo sapien
tccacacatgttgtaacctttgcaa

SEQ ID NO: 115989 - DNA, 25 bp, Homo sapien
taagtccacacatgttgtaaccttt

SEQ ID NO: 115990 - DNA, 25 bp, Homo sapien
tataaatatcataaacataagtcca

SEQ ID NO: 115991 - DNA, 25 bp, Homo sapien
acataagtccacacatgttgtaacc

SEQ ID NO: 115992 - DNA, 25 bp, Homo sapien
tcttctctccatctaatggatagtc

SEQ ID NO: 115993 - DNA, 25 bp, Homo sapien
gatccaaggatatgtaaaatcttct

SEQ ID NO: 115994 - DNA, 25 bp, Homo sapien
ctgattgatccaaggatatgtaaaa

SEQ ID NO: 115995 - DNA, 25 bp, Homo sapien
catctaatggatagtcaacatttgg

SEQ ID NO: 115996 - DNA, 25 bp, Homo sapien
tagctagcaaaaagtactacattct

SEQ ID NO: 115997 - DNA, 25 bp, Homo sapien
catatagttttaccggaacacagtc

SEQ ID NO: 115998 - DNA, 25 bp, Homo sapien
tgctaccctgtcctactgcctttaa

SEQ ID NO: 115999 - DNA, 25 bp, Homo sapien
catatggacccataaagcctgagca

SEQ ID NO: 116000 - DNA, 25 bp, Homo sapien
atccaatattaaagtggcaactgat

SEQ ID NO: 116001 - DNA, 25 bp, Homo sapien
tattaaagtggcaactgattgctct

SEQ ID NO: 116002 - DNA, 25 bp, Homo sapien
ctgtataagggaatccaatattaaa

SEQ ID NO: 116003 - DNA, 25 bp, Homo sapien
tgtataagggaatccaatattaaag

SEQ ID NO: 116004 - DNA, 25 bp, Homo sapien
acccgggggcggaggttgtgctgag

SEQ ID NO: 116005 - DNA, 25 bp, Homo sapien
ctccagcctgggcaacaagagcaac

SEQ ID NO: 116006 - DNA, 25 bp, Homo sapien
tgagatcatgccattgcactccagc

SEQ ID NO: 116007 - DNA, 25 bp, Homo sapien
ccgggggcggaggttgtgctgagct

SEQ ID NO: 116008 - DNA, 25 bp, Homo sapien
gaagtgccacctatgactaccaaat

SEQ ID NO: 116009 - DNA, 25 bp, Homo sapien
tggagaaatcctggcaacatagaag

SEQ ID NO: 116010 - DNA, 25 bp, Homo sapien
tggcaacatagaagtgccacctatg

SEQ ID NO: 116011 - DNA, 25 bp, Homo sapien
tatgactaccaaattctctgctagt

SEQ ID NO: 116012 - DNA, 25 bp, Homo sapien
tcgaaatgtcttagtgccaagtgct

SEQ ID NO: 116013 - DNA, 25 bp, Homo sapien
tatgaattcgaaatgtcttagtgcc

SEQ ID NO: 116014 - DNA, 25 bp, Homo sapien
ggtggagtatgaattcgaaatgtct

SEQ ID NO: 116015 - DNA, 25 bp, Homo sapien
tagcttttgcaggtggagtatgaat

SEQ ID NO: 116016 - DNA, 25 bp, Homo sapien
tacggcccgtctgattataatattc

SEQ ID NO: 116017 - DNA, 25 bp, Homo sapien
cctttgaaacagaacggctcccaag

SEQ ID NO: 116018 - DNA, 25 bp, Homo sapien
cagaggtggttgagttttcccgaca

SEQ ID NO: 116019 - DNA, 25 bp, Homo sapien
gaacaccaatcaggtatacggcccg

SEQ ID NO: 116020 - DNA, 25 bp, Homo sapien
gaattatatattaatgcaaagagta

SEQ ID NO: 116021 - DNA, 25 bp, Homo sapien
caaaacatcctacatactttgtaca

SEQ ID NO: 116022 - DNA, 25 bp, Homo sapien
ttaccactacacaagagaaacaaag

SEQ ID NO: 116023 - DNA, 25 bp, Homo sapien
cactatagtcctctataacaaaaca

SEQ ID NO: 116024 - DNA, 25 bp, Homo sapien
atacagcaaatctcaataagcacca

SEQ ID NO: 116025 - DNA, 25 bp, Homo sapien
tacagcaaatctcaataagcaccag

SEQ ID NO: 116026 - DNA, 25 bp, Homo sapien
acagcaaatctcaataagcaccagc

SEQ ID NO: 116027 - DNA, 25 bp, Homo sapien
aatacagcaaatctcaataagcacc

SEQ ID NO: 116028 - DNA, 25 bp, Homo sapien
tagacaagccttgttctacgagagc

SEQ ID NO: 116029 - DNA, 25 bp, Homo sapien
taatgagcccagaacaggttatgtg

SEQ ID NO: 116030 - DNA, 25 bp, Homo sapien
tactgtgcttaaggaaagagtgcta

SEQ ID NO: 116031 - DNA, 25 bp, Homo sapien
taggactagaggacacaggtatccc

SEQ ID NO: 116032 - DNA, 25 bp, Homo sapien
aaaccagggcaattctaggatctga

SEQ ID NO: 116033 - DNA, 25 bp, Homo sapien
taagtcactcgtttagcaagaggga

SEQ ID NO: 116034 - DNA, 25 bp, Homo sapien
aaagcatagtttgccgaaagcgtca

SEQ ID NO: 116035 - DNA, 25 bp, Homo sapien
tataaggatggcagactaaaggagg

SEQ ID NO: 116036 - DNA, 25 bp, Homo sapien
cacaggatgccgcaaactagtaaca

SEQ ID NO: 116037 - DNA, 25 bp, Homo sapien
tctgtggctcgttccgcggctccgg

SEQ ID NO: 116038 - DNA, 25 bp, Homo sapien
aaactagtaacaggcccgctcattg

SEQ ID NO: 116039 - DNA, 25 bp, Homo sapien
ctgccaaccaataacctttttctct

SEQ ID NO: 116040 - DNA, 25 bp, Homo sapien
caaagggacgcgtagggattccagg

SEQ ID NO: 116041 - DNA, 25 bp, Homo sapien
tagggattccaggcccggagcgctt

SEQ ID NO: 116042 - DNA, 25 bp, Homo sapien
ccaaagggacgcgtagggattccag

SEQ ID NO: 116043 - DNA, 25 bp, Homo sapien
ggattccaggcccggagcgcttccc

SEQ ID NO: 116044 - DNA, 25 bp, Homo sapien
catataggggataaagacgaccggt

SEQ ID NO: 116045 - DNA, 25 bp, Homo sapien
cagccgaaggcggtctcagagcacc

SEQ ID NO: 116046 - DNA, 25 bp, Homo sapien
gaaccccatgtggtctgtccgagtt

SEQ ID NO: 116047 - DNA, 25 bp, Homo sapien
aagacgaccggtctccaaacagctg

SEQ ID NO: 116048 - DNA, 25 bp, Homo sapien
tgtgaatcagcagcaccctaggaac

SEQ ID NO: 116049 - DNA, 25 bp, Homo sapien
cactgcctcggtggttctcaagaga

SEQ ID NO: 116050 - DNA, 25 bp, Homo sapien
taaactgagcggtcaatgatctgca

SEQ ID NO: 116051 - DNA, 25 bp, Homo sapien
gctacacctgcgctgaaaagcttca

SEQ ID NO: 116052 - DNA, 25 bp, Homo sapien
aatattcgtatctggagttcttggg

SEQ ID NO: 116053 - DNA, 25 bp, Homo sapien
gactgtagtagatgcaaaatggcaa

SEQ ID NO: 116054 - DNA, 25 bp, Homo sapien
acttgctaaagcgttggttctggga

SEQ ID NO: 116055 - DNA, 25 bp, Homo sapien
ttcacatgcagtacgaaatgactat

SEQ ID NO: 116056 - DNA, 25 bp, Homo sapien
gatacaggtcccaggtgaagtcaga

SEQ ID NO: 116057 - DNA, 25 bp, Homo sapien
tgttccaaagatagcggtagtagct

SEQ ID NO: 116058 - DNA, 25 bp, Homo sapien
ccagcactggagttcgaacatttaa

SEQ ID NO: 116059 - DNA, 25 bp, Homo sapien
gaaagggaaacttgtcagagcagca

SEQ ID NO: 116060 - DNA, 25 bp, Homo sapien
aacatcaggaacctgttatatccca

SEQ ID NO: 116061 - DNA, 25 bp, Homo sapien
ctgaaacatcaggaacctgttatat

SEQ ID NO: 116062 - DNA, 25 bp, Homo sapien
caggaacctgttatatcccaacaaa

SEQ ID NO: 116063 - DNA, 25 bp, Homo sapien
ctgttatatcccaacaaagaccttg

SEQ ID NO: 116064 - DNA, 25 bp, Homo sapien
gtaatgaccatacagtttcttcccc

SEQ ID NO: 116065 - DNA, 25 bp, Homo sapien
ttggcagtaatgaccatacagtttc

SEQ ID NO: 116066 - DNA, 25 bp, Homo sapien
tatctttggcagtaatgaccataca

SEQ ID NO: 116067 - DNA, 25 bp, Homo sapien
ttgtatctttggcagtaatgaccat

SEQ ID NO: 116068 - DNA, 25 bp, Homo sapien
ttgaaaaactcttccgtcaggagag

SEQ ID NO: 116069 - DNA, 25 bp, Homo sapien
ttcaacttgaaaaactcttccgtca

SEQ ID NO: 116070 - DNA, 25 bp, Homo sapien
aaaactcttccgtcaggagagaatg

SEQ ID NO: 116071 - DNA, 25 bp, Homo sapien
tcttccgtcaggagagaatgtagag

SEQ ID NO: 116072 - DNA, 25 bp, Homo sapien
gagacatgtaatacctggttaaatg

SEQ ID NO: 116073 - DNA, 25 bp, Homo sapien
aggagacatgtaatacctggttaaa

SEQ ID NO: 116074 - DNA, 25 bp, Homo sapien
ataacaaagcctaatcgccaaaaat

SEQ ID NO: 116075 - DNA, 25 bp, Homo sapien
aagcctaatcgccaaaaatatataa

SEQ ID NO: 116076 - DNA, 25 bp, Homo sapien
gcatttgttcactttgggtgtagta

SEQ ID NO: 116077 - DNA, 25 bp, Homo sapien
ggaggagaatagctcgagaccagga

SEQ ID NO: 116078 - DNA, 25 bp, Homo sapien
agtgagaccatgcctcttttttaaa

SEQ ID NO: 116079 - DNA, 25 bp, Homo sapien
aaagcgagatcctatgtcctgcccc

SEQ ID NO: 116080 - DNA, 25 bp, Homo sapien
ttacaggcgcgcactgccatgcccg

SEQ ID NO: 116081 - DNA, 25 bp, Homo sapien
ggcgcgcactgccatgcccggctaa

SEQ ID NO: 116082 - DNA, 25 bp, Homo sapien
aagcaatacacctgcctcagcctcc

SEQ ID NO: 116083 - DNA, 25 bp, Homo sapien
caagcaatacacctgcctcagcctc

SEQ ID NO: 116084 - DNA, 25 bp, Homo sapien
aggttatcctggatgctagaataca

SEQ ID NO: 116085 - DNA, 25 bp, Homo sapien
tcatgttcatttttgattccatgtc

SEQ ID NO: 116086 - DNA, 25 bp, Homo sapien
ggttatcctggatgctagaatacat

SEQ ID NO: 116087 - DNA, 25 bp, Homo sapien
caacatgccgatcaacattaaaaag

SEQ ID NO: 116088 - DNA, 25 bp, Homo sapien
ccatctttgcatctgattccaatag

SEQ ID NO: 116089 - DNA, 25 bp, Homo sapien
accatctttgcatctgattccaata

SEQ ID NO: 116090 - DNA, 25 bp, Homo sapien
catgccgatcaacattaaaaagtct

SEQ ID NO: 116091 - DNA, 25 bp, Homo sapien
taacttagataccagctgcatgaat

SEQ ID NO: 116092 - DNA, 25 bp, Homo sapien
taaaggtgttcgctatctgatggca

SEQ ID NO: 116093 - DNA, 25 bp, Homo sapien
gaatgctgcctttctactggacagt

SEQ ID NO: 116094 - DNA, 25 bp, Homo sapien
tcatgtatctatggcttggcttgca

SEQ ID NO: 116095 - DNA, 25 bp, Homo sapien
ctggagcacaatggcaccatctggg

SEQ ID NO: 116096 - DNA, 25 bp, Homo sapien
agcacaatggcaccatctgggctca

SEQ ID NO: 116097 - DNA, 25 bp, Homo sapien
gtagctgggattggctaatttttat

SEQ ID NO: 116098 - DNA, 25 bp, Homo sapien
ggagcacaatggcaccatctgggct

SEQ ID NO: 116099 - DNA, 25 bp, Homo sapien
agcatctgccaacaaacctgctact

SEQ ID NO: 116100 - DNA, 25 bp, Homo sapien
gaatgttgtagccaaagttagatct

SEQ ID NO: 116101 - DNA, 25 bp, Homo sapien
gcatctgccaacaaacctgctactg

SEQ ID NO: 116102 - DNA, 25 bp, Homo sapien
aaagttagatctgaagttggaagct

SEQ ID NO: 116103 - DNA, 25 bp, Homo sapien
tactgtccaaaaggttcctcaatat

SEQ ID NO: 116104 - DNA, 25 bp, Homo sapien
cagaagagcttattaataaacttct

SEQ ID NO: 116105 - DNA, 25 bp, Homo sapien
gttcctcaatatgttatcaacttac

SEQ ID NO: 116106 - DNA, 25 bp, Homo sapien
gaagagcttattaataaacttctat

SEQ ID NO: 116107 - DNA, 25 bp, Homo sapien
atgcacatacatggccactctgtct

SEQ ID NO: 116108 - DNA, 25 bp, Homo sapien
cacatacatggccactctgtctgca

SEQ ID NO: 116109 - DNA, 25 bp, Homo sapien
tgcacatacatggccactctgtctg

SEQ ID NO: 116110 - DNA, 25 bp, Homo sapien
catgcacatacatggccactctgtc

SEQ ID NO: 116111 - DNA, 25 bp, Homo sapien
cccagcctcaagtagtttctatgta

SEQ ID NO: 116112 - DNA, 25 bp, Homo sapien
ctattgcgccagctagagtacagtg

SEQ ID NO: 116113 - DNA, 25 bp, Homo sapien
taaatatctatagtacagatctgcc

SEQ ID NO: 116114 - DNA, 25 bp, Homo sapien
cattgccctaatacttatcgacgag

SEQ ID NO: 116115 - DNA, 25 bp, Homo sapien
gttaactgatgaactcagagctcag

SEQ ID NO: 116116 - DNA, 25 bp, Homo sapien
cataatgtaatttaactgagaagct

SEQ ID NO: 116117 - DNA, 25 bp, Homo sapien
ggtattttacatggtctgaaaacaa

SEQ ID NO: 116118 - DNA, 25 bp, Homo sapien
gaatgactaatgtcagcctgggcag

SEQ ID NO: 116119 - DNA, 25 bp, Homo sapien
tgaaattgtgacatacagtgggcac

SEQ ID NO: 116120 - DNA, 25 bp, Homo sapien
gtattcatgggaggtcctaaaacca

SEQ ID NO: 116121 - DNA, 25 bp, Homo sapien
taccgatatgagacttatccttcag

SEQ ID NO: 116122 - DNA, 25 bp, Homo sapien
gcagcatcttacacatcatcttata

SEQ ID NO: 116123 - DNA, 25 bp, Homo sapien
tacacatataactcagtaagtactt

SEQ ID NO: 116124 - DNA, 25 bp, Homo sapien
cagcttaaaccatggcaataacata

SEQ ID NO: 116125 - DNA, 25 bp, Homo sapien
tatacaaacagcttaaaccatggca

SEQ ID NO: 116126 - DNA, 25 bp, Homo sapien
catataactcagtaagtactttgaa

SEQ ID NO: 116127 - DNA, 25 bp, Homo sapien
gtagagttgcgcaccgtcattcaca

SEQ ID NO: 116128 - DNA, 25 bp, Homo sapien
atcatgtagagttgcgcaccgtcat

SEQ ID NO: 116129 - DNA, 25 bp, Homo sapien
atgtagagttgcgcaccgtcattca

SEQ ID NO: 116130 - DNA, 25 bp, Homo sapien
ctgatgggtcaatcatgtagagttg

SEQ ID NO: 116131 - DNA, 25 bp, Homo sapien
tgctaatgaaataccattaaactaa

SEQ ID NO: 116132 - DNA, 25 bp, Homo sapien
cttataatgagacttaaatgctaat

SEQ ID NO: 116133 - DNA, 25 bp, Homo sapien
tataatgagacttaaatgctaatga

SEQ ID NO: 116134 - DNA, 25 bp, Homo sapien
taatgagacttaaatgctaatgaaa

SEQ ID NO: 116135 - DNA, 25 bp, Homo sapien
ctatttccgtctttgcagcttgcct

SEQ ID NO: 116136 - DNA, 25 bp, Homo sapien
cttctctatttccgtctttgcagct

SEQ ID NO: 116137 - DNA, 25 bp, Homo sapien
ctggctttgccgatggcacagcccc

SEQ ID NO: 116138 - DNA, 25 bp, Homo sapien
tggctttgccgatggcacagcccca

SEQ ID NO: 116139 - DNA, 25 bp, Homo sapien
taatctgcagttgagcttgggctaa

SEQ ID NO: 116140 - DNA, 25 bp, Homo sapien
ccaacttggcctaccaaactggtag

SEQ ID NO: 116141 - DNA, 25 bp, Homo sapien
tgttcagaaccagctgattctgtgg

SEQ ID NO: 116142 - DNA, 25 bp, Homo sapien
gataggaacctagcatcatactagt

SEQ ID NO: 116143 - DNA, 25 bp, Homo sapien
gatagtaactgctctaaatattcta

SEQ ID NO: 116144 - DNA, 25 bp, Homo sapien
ttcccattccttgctaggatttaac

SEQ ID NO: 116145 - DNA, 25 bp, Homo sapien
tccttgctaggatttaactacagaa

SEQ ID NO: 116146 - DNA, 25 bp, Homo sapien
acagaaagacagatagtaactgctc

SEQ ID NO: 116147 - DNA, 25 bp, Homo sapien
gaagagaacaatggtacagagcagg

SEQ ID NO: 116148 - DNA, 25 bp, Homo sapien
ttttcaagtttattagctgtatggc

SEQ ID NO: 116149 - DNA, 25 bp, Homo sapien
ttttttagtaaacagaccatcagaa

SEQ ID NO: 116150 - DNA, 25 bp, Homo sapien
taattgcatcctaaaaagtcaaact

SEQ ID NO: 116151 - DNA, 25 bp, Homo sapien
acgtgggtttctgaatagacaggca

SEQ ID NO: 116152 - DNA, 25 bp, Homo sapien
cagtctagacttaaggtgattcaac

SEQ ID NO: 116153 - DNA, 25 bp, Homo sapien
tgatagtaaccagtccaagattttg

SEQ ID NO: 116154 - DNA, 25 bp, Homo sapien
ccctagggcctagctgaggagtctg

SEQ ID NO: 116155 - DNA, 25 bp, Homo sapien
tgttcatcagaagaacattttccac

SEQ ID NO: 116156 - DNA, 25 bp, Homo sapien
agaccagaatcgaagtttcctgatt

SEQ ID NO: 116157 - DNA, 25 bp, Homo sapien
tttatactcagatataaaaccaagg

SEQ ID NO: 116158 - DNA, 25 bp, Homo sapien
tgaaaaagaccagaatcgaagtttc

SEQ ID NO: 116159 - DNA, 25 bp, Homo sapien
tttttgcaacttctttaacgatatc

SEQ ID NO: 116160 - DNA, 25 bp, Homo sapien
cgatatcacggcaggtcatttcttt

SEQ ID NO: 116161 - DNA, 25 bp, Homo sapien
aacttctttaacgatatcacggcag

SEQ ID NO: 116162 - DNA, 25 bp, Homo sapien
ctttaacgatatcacggcaggtcat

SEQ ID NO: 116163 - DNA, 25 bp, Homo sapien
atatatatatgcaaaggtcaaatga

SEQ ID NO: 116164 - DNA, 25 bp, Homo sapien
cagcttcttaggattaatgtaatat

SEQ ID NO: 116165 - DNA, 25 bp, Homo sapien
tatatatgcaaaggtcaaatgaaat

SEQ ID NO: 116166 - DNA, 25 bp, Homo sapien
aacagcttcttaggattaatgtaat

SEQ ID NO: 116167 - DNA, 25 bp, Homo sapien
tggcagtagtctttttaagctcctt

SEQ ID NO: 116168 - DNA, 25 bp, Homo sapien
tcaacctatagcttcttggcagtag

SEQ ID NO: 116169 - DNA, 25 bp, Homo sapien
aaactaatttatgtgcttgcaatta

SEQ ID NO: 116170 - DNA, 25 bp, Homo sapien
ggcatatatgccacataacctggcc

SEQ ID NO: 116171 - DNA, 25 bp, Homo sapien
ctttagagatataacttggctgggc

SEQ ID NO: 116172 - DNA, 25 bp, Homo sapien
tctactctcccgacaaatgttgaat

SEQ ID NO: 116173 - DNA, 25 bp, Homo sapien
gaagtagttcacagacccaaagtca

SEQ ID NO: 116174 - DNA, 25 bp, Homo sapien
gatacctcataaagaacacggattc

SEQ ID NO: 116175 - DNA, 25 bp, Homo sapien
gctttatccttaacttcgtcatgta

SEQ ID NO: 116176 - DNA, 25 bp, Homo sapien
aaagctttatccttaacttcgtcat

SEQ ID NO: 116177 - DNA, 25 bp, Homo sapien
ccttaacttcgtcatgtactatgta

SEQ ID NO: 116178 - DNA, 25 bp, Homo sapien
tatccttaacttcgtcatgtactat

SEQ ID NO: 116179 - DNA, 25 bp, Homo sapien
catatctgactcacctaaggttgca

SEQ ID NO: 116180 - DNA, 25 bp, Homo sapien
gagtaccatattgtaacttgcagta

SEQ ID NO: 116181 - DNA, 25 bp, Homo sapien
ggatctacccaatccacatatctga

SEQ ID NO: 116182 - DNA, 25 bp, Homo sapien
ttgcagtataccataggatctaccc

SEQ ID NO: 116183 - DNA, 25 bp, Homo sapien
cttctcttatatcttttggaacaat

SEQ ID NO: 116184 - DNA, 25 bp, Homo sapien
cttcttctcttatatcttttggaac

SEQ ID NO: 116185 - DNA, 25 bp, Homo sapien
ctgcttcttctcttatatcttttgg

SEQ ID NO: 116186 - DNA, 25 bp, Homo sapien
tgcttcttctcttatatcttttgga

SEQ ID NO: 116187 - DNA, 25 bp, Homo sapien
ctttacccactagagataacctaga

SEQ ID NO: 116188 - DNA, 25 bp, Homo sapien
atttcatagaaaccaccccagtcta

SEQ ID NO: 116189 - DNA, 25 bp, Homo sapien
aaccaccccagtctatttatattat

SEQ ID NO: 116190 - DNA, 25 bp, Homo sapien
tctttgcagtctaaacctcccaagt

SEQ ID NO: 116191 - DNA, 25 bp, Homo sapien
cccgtctctgtattattggtgaagc

SEQ ID NO: 116192 - DNA, 25 bp, Homo sapien
aaaacccgtctctgtattattggtg

SEQ ID NO: 116193 - DNA, 25 bp, Homo sapien
cgtctctgtattattggtgaagcca

SEQ ID NO: 116194 - DNA, 25 bp, Homo sapien
tattattggtgaagccaaaaataca

SEQ ID NO: 116195 - DNA, 25 bp, Homo sapien
attgttatatcccacacctgtgggc

SEQ ID NO: 116196 - DNA, 25 bp, Homo sapien
gttatatcccacacctgtgggcaag

SEQ ID NO: 116197 - DNA, 25 bp, Homo sapien
tatatcccacacctgtgggcaagtt

SEQ ID NO: 116198 - DNA, 25 bp, Homo sapien
aaaattgttatatcccacacctgtg

SEQ ID NO: 116199 - DNA, 25 bp, Homo sapien
attcatcttcttccttcagagattc

SEQ ID NO: 116200 - DNA, 25 bp, Homo sapien
ctgattcatcttcttccttcagaga

SEQ ID NO: 116201 - DNA, 25 bp, Homo sapien
ttatcatcatctgattcatcttctt

SEQ ID NO: 116202 - DNA, 25 bp, Homo sapien
atattatcatcatctgattcatctt

SEQ ID NO: 116203 - DNA, 25 bp, Homo sapien
taaatagttacattggactggagta

SEQ ID NO: 116204 - DNA, 25 bp, Homo sapien
gggctaaatagttacattggactgg

SEQ ID NO: 116205 - DNA, 25 bp, Homo sapien
gctaaatagttacattggactggag

SEQ ID NO: 116206 - DNA, 25 bp, Homo sapien
atagttacattggactggagtagaa

SEQ ID NO: 116207 - DNA, 25 bp, Homo sapien
tttaatgaaaattggacagtatgta

SEQ ID NO: 116208 - DNA, 25 bp, Homo sapien
taatgaaaattggacagtatgtata

SEQ ID NO: 116209 - DNA, 25 bp, Homo sapien
gaaaattggacagtatgtataatcc

SEQ ID NO: 116210 - DNA, 25 bp, Homo sapien
aaatttaatgaaaattggacagtat

SEQ ID NO: 116211 - DNA, 25 bp, Homo sapien
tgaacctacatttgttaatcctgtt

SEQ ID NO: 116212 - DNA, 25 bp, Homo sapien
tctcatcagtggttacaaagtatcc

SEQ ID NO: 116213 - DNA, 25 bp, Homo sapien
caaagtatccttacaattgaaccta

SEQ ID NO: 116214 - DNA, 25 bp, Homo sapien
taatcctgttcagtgtgtatgaaaa

SEQ ID NO: 116215 - DNA, 25 bp, Homo sapien
tcctacctagtgagttcaaatctgt

SEQ ID NO: 116216 - DNA, 25 bp, Homo sapien
ggtgatcttcgaaccacactttgag

SEQ ID NO: 116217 - DNA, 25 bp, Homo sapien
aagttgtctgttgcatgcattccca

SEQ ID NO: 116218 - DNA, 25 bp, Homo sapien
gaattacctcagatacttattgaaa

SEQ ID NO: 116219 - DNA, 25 bp, Homo sapien
ctgagtggtggtgcttatgctcctc

SEQ ID NO: 116220 - DNA, 25 bp, Homo sapien
tgagtggtggtgcttatgctcctcc

SEQ ID NO: 116221 - DNA, 25 bp, Homo sapien
agaaaactctttgagaagtttactg

SEQ ID NO: 116222 - DNA, 25 bp, Homo sapien
agacatggtcttccatttccctgag

SEQ ID NO: 116223 - DNA, 25 bp, Homo sapien
tgtttaggaggaatataggttttca

SEQ ID NO: 116224 - DNA, 25 bp, Homo sapien
ttccatttccctgagcacttcttag

SEQ ID NO: 116225 - DNA, 25 bp, Homo sapien
tgatttttgggcagtactcaggctg

SEQ ID NO: 116226 - DNA, 25 bp, Homo sapien
tttttgggcagtactcaggctgaag

SEQ ID NO: 116227 - DNA, 25 bp, Homo sapien
tttgatttttgggcagtactcaggc

SEQ ID NO: 116228 - DNA, 25 bp, Homo sapien
gatttttgggcagtactcaggctga

SEQ ID NO: 116229 - DNA, 25 bp, Homo sapien
gctcgatatacagcagtatcctttc

SEQ ID NO: 116230 - DNA, 25 bp, Homo sapien
agcactgttagtccgcatctctccc

SEQ ID NO: 116231 - DNA, 25 bp, Homo sapien
atattcattatcgtcatcctcttca

SEQ ID NO: 116232 - DNA, 25 bp, Homo sapien
ccagtgcattcattatcagcatatt

SEQ ID NO: 116233 - DNA, 25 bp, Homo sapien
aaaccactaaaaccagtgcattcat

SEQ ID NO: 116234 - DNA, 25 bp, Homo sapien
cagcatattcattatcgtcatcctc

SEQ ID NO: 116235 - DNA, 25 bp, Homo sapien
cagagacgactgaagatgaaaaaac

SEQ ID NO: 116236 - DNA, 25 bp, Homo sapien
ttagtggctactgaaaataccacca

SEQ ID NO: 116237 - DNA, 25 bp, Homo sapien
caccaggacaggactatctaaagac

SEQ ID NO: 116238 - DNA, 25 bp, Homo sapien
aaagacactgtacagtttaaaacat

SEQ ID NO: 116239 - DNA, 25 bp, Homo sapien
gagggaacgagcagtaccattcact

SEQ ID NO: 116240 - DNA, 25 bp, Homo sapien
gcaaagttttagatgaagcctgcag

SEQ ID NO: 116241 - DNA, 25 bp, Homo sapien
tccctaattgggacaaggcattgtc

SEQ ID NO: 116242 - DNA, 25 bp, Homo sapien
gaccagtcacatcgatttgcaaggg

SEQ ID NO: 116243 - DNA, 25 bp, Homo sapien
tcactttaggtgagcatttgtacag

SEQ ID NO: 116244 - DNA, 25 bp, Homo sapien
cacaaaagtgatgtttaggaatact

SEQ ID NO: 116245 - DNA, 25 bp, Homo sapien
gtacagtgaaacattttgctacaca

SEQ ID NO: 116246 - DNA, 25 bp, Homo sapien
cattttgctacacaaaagtgatgtt

SEQ ID NO: 116247 - DNA, 25 bp, Homo sapien
tagattggtttttgtgcggccgtcc

SEQ ID NO: 116248 - DNA, 25 bp, Homo sapien
tccgcgtgctcctcacgggataaag

SEQ ID NO: 116249 - DNA, 25 bp, Homo sapien
atggtaaacttctccctgcggcggg

SEQ ID NO: 116250 - DNA, 25 bp, Homo sapien
ccagctgtgggagccttcttagtta

SEQ ID NO: 116251 - DNA, 25 bp, Homo sapien
tgagcagactcgcttctacacgaac

SEQ ID NO: 116252 - DNA, 25 bp, Homo sapien
gctcatgacgccgaagagcttcgga

SEQ ID NO: 116253 - DNA, 25 bp, Homo sapien
tctacacgaactcctattggctgct

SEQ ID NO: 116254 - DNA, 25 bp, Homo sapien
ttcggataggacctcgctacctgcc

SEQ ID NO: 116255 - DNA, 25 bp, Homo sapien
tgaagtgcgcgctgtcagctccaga

SEQ ID NO: 116256 - DNA, 25 bp, Homo sapien
agccgcggctgcagttcctgcgccg

SEQ ID NO: 116257 - DNA, 25 bp, Homo sapien
ggctgcagttcctgcgccgggttcc

SEQ ID NO: 116258 - DNA, 25 bp, Homo sapien
tgcgggtgaagtgcgcgctgtcagc

SEQ ID NO: 116259 - DNA, 25 bp, Homo sapien
gtgccacttgcctagcatccctctc

SEQ ID NO: 116260 - DNA, 25 bp, Homo sapien
aaagcttccaactgcaccgggacct

SEQ ID NO: 116261 - DNA, 25 bp, Homo sapien
tggccccttcccttgcgctcgccgt

SEQ ID NO: 116262 - DNA, 25 bp, Homo sapien
cccgaggaagcggacgaggaggcgg

SEQ ID NO: 116263 - DNA, 25 bp, Homo sapien
cgcggaagcaaacttagcggcgcgg

SEQ ID NO: 116264 - DNA, 25 bp, Homo sapien
cgcgcggaagcaaacttagcggcgc

SEQ ID NO: 116265 - DNA, 25 bp, Homo sapien
cggaagcaaacttagcggcgcggcc

SEQ ID NO: 116266 - DNA, 25 bp, Homo sapien
gaagcaaacttagcggcgcggccag

SEQ ID NO: 116267 - DNA, 25 bp, Homo sapien
ggtggcggcagcggagtgtcacggc

SEQ ID NO: 116268 - DNA, 25 bp, Homo sapien
gtggcggcagcggagtgtcacggcg

SEQ ID NO: 116269 - DNA, 25 bp, Homo sapien
cggtggcggcagcggagtgtcacgg

SEQ ID NO: 116270 - DNA, 25 bp, Homo sapien
cagatagctccggaaaaggccagag

SEQ ID NO: 116271 - DNA, 25 bp, Homo sapien
caggacagatagctccggaaaaggc

SEQ ID NO: 116272 - DNA, 25 bp, Homo sapien
ggaatgctcaactcggagctccagg

SEQ ID NO: 116273 - DNA, 25 bp, Homo sapien
tcgctggccactttgacccggaatg

SEQ ID NO: 116274 - DNA, 25 bp, Homo sapien
ggacaagaccccttacgagggcagc

SEQ ID NO: 116275 - DNA, 25 bp, Homo sapien
agaaccccacgagcgccaaagggca

SEQ ID NO: 116276 - DNA, 25 bp, Homo sapien
taatcagtcaactgcggggagcgac

SEQ ID NO: 116277 - DNA, 25 bp, Homo sapien
agaatcctcaccagccaagggacaa

SEQ ID NO: 116278 - DNA, 25 bp, Homo sapien
gcgagctatcttcgcagtcgctaga

SEQ ID NO: 116279 - DNA, 25 bp, Homo sapien
cagctcagcgagctatcttcgcagt

SEQ ID NO: 116280 - DNA, 25 bp, Homo sapien
ctgtggggttccagctcagcgagct

SEQ ID NO: 116281 - DNA, 25 bp, Homo sapien
gggttccagctcagcgagctatctt

SEQ ID NO: 116282 - DNA, 25 bp, Homo sapien
agaacgctatatgagatcctttccc

SEQ ID NO: 116283 - DNA, 25 bp, Homo sapien
cagagcttaatatgctgaaacagta

SEQ ID NO: 116284 - DNA, 25 bp, Homo sapien
taagtgcaaagttaacagtgtacac

SEQ ID NO: 116285 - DNA, 25 bp, Homo sapien
gaaacattcaatggccacagcattc

SEQ ID NO: 116286 - DNA, 25 bp, Homo sapien
aggaacataaaactgtgaatgtcat

SEQ ID NO: 116287 - DNA, 25 bp, Homo sapien
aaaggaacataaaactgtgaatgtc

SEQ ID NO: 116288 - DNA, 25 bp, Homo sapien
ctggtgaaaggaacataaaactgtg

SEQ ID NO: 116289 - DNA, 25 bp, Homo sapien
ggtgaaaggaacataaaactgtgaa

SEQ ID NO: 116290 - DNA, 25 bp, Homo sapien
tacttggcactgacatcggttccca

SEQ ID NO: 116291 - DNA, 25 bp, Homo sapien
tcacagaaggcacctcggtacttgg

SEQ ID NO: 116292 - DNA, 25 bp, Homo sapien
cccactgtcaggtaggcaggctcat

SEQ ID NO: 116293 - DNA, 25 bp, Homo sapien
tcaccagccttttcacagtcttaat

SEQ ID NO: 116294 - DNA, 25 bp, Homo sapien
tgttgggcatagaacaagtcagacg

SEQ ID NO: 116295 - DNA, 25 bp, Homo sapien
caggcactactctatgtgttgggca

SEQ ID NO: 116296 - DNA, 25 bp, Homo sapien
tttgagggtccactatgtatcaggc

SEQ ID NO: 116297 - DNA, 25 bp, Homo sapien
gaccctttaggaatcactgctctag

SEQ ID NO: 116298 - DNA, 25 bp, Homo sapien
cttggtcatcttgtaccaattgtgt

SEQ ID NO: 116299 - DNA, 25 bp, Homo sapien
ggtcatcttgtaccaattgtgtggt

SEQ ID NO: 116300 - DNA, 25 bp, Homo sapien
gtaccaattgtgtggtattatcctg

SEQ ID NO: 116301 - DNA, 25 bp, Homo sapien
catcttgtaccaattgtgtggtatt

SEQ ID NO: 116302 - DNA, 25 bp, Homo sapien
tcctgaaaagatccatcagatgtcc

SEQ ID NO: 116303 - DNA, 25 bp, Homo sapien
aacttgctgataatagcttcctgaa

SEQ ID NO: 116304 - DNA, 25 bp, Homo sapien
tccttgtttcaacaatagctccaac

SEQ ID NO: 116305 - DNA, 25 bp, Homo sapien
ggtataccaactagcatctgtcaac

SEQ ID NO: 116306 - DNA, 25 bp, Homo sapien
tctccatctcccgaccttgtgattc

SEQ ID NO: 116307 - DNA, 25 bp, Homo sapien
tccatctcccgaccttgtgattcac

SEQ ID NO: 116308 - DNA, 25 bp, Homo sapien
ctccatctcccgaccttgtgattca

SEQ ID NO: 116309 - DNA, 25 bp, Homo sapien
cagacaaagtgaggtacgtctcaat

SEQ ID NO: 116310 - DNA, 25 bp, Homo sapien
ggtacgtctcaatgttcgctcatca

SEQ ID NO: 116311 - DNA, 25 bp, Homo sapien
tctcaatgttcgctcatcaccatca

SEQ ID NO: 116312 - DNA, 25 bp, Homo sapien
ctctcctttcagacaaagtgaggta

SEQ ID NO: 116313 - DNA, 25 bp, Homo sapien
tgcaattactggagttccaaaatgc

SEQ ID NO: 116314 - DNA, 25 bp, Homo sapien
ctttgcaattactggagttccaaaa

SEQ ID NO: 116315 - DNA, 25 bp, Homo sapien
cttctttgcaattactggagttcca

SEQ ID NO: 116316 - DNA, 25 bp, Homo sapien
ttctttgcaattactggagttccaa

SEQ ID NO: 116317 - DNA, 25 bp, Homo sapien
aagttagaataacttgatcattatc

SEQ ID NO: 116318 - DNA, 25 bp, Homo sapien
taaaagttagaataacttgatcatt

SEQ ID NO: 116319 - DNA, 25 bp, Homo sapien
ctaaaagttagaataacttgatcat

SEQ ID NO: 116320 - DNA, 25 bp, Homo sapien
aaaagttagaataacttgatcatta

SEQ ID NO: 116321 - DNA, 25 bp, Homo sapien
caaagcaggataccattcagtcctc

SEQ ID NO: 116322 - DNA, 25 bp, Homo sapien
agtcctctccgttgcagacaccaca

SEQ ID NO: 116323 - DNA, 25 bp, Homo sapien
tgcagacaccacacttacaactttt

SEQ ID NO: 116324 - DNA, 25 bp, Homo sapien
taattcatcattgagacggcgcttg

SEQ ID NO: 116325 - DNA, 25 bp, Homo sapien
gaactaaacactgatcctttttcac

SEQ ID NO: 116326 - DNA, 25 bp, Homo sapien
tttagaatcaataaatgatcgaact

SEQ ID NO: 116327 - DNA, 25 bp, Homo sapien
taaacactgatcctttttcactgtg

SEQ ID NO: 116328 - DNA, 25 bp, Homo sapien
aaatgatcgaactaaacactgatcc

SEQ ID NO: 116329 - DNA, 25 bp, Homo sapien
cggtagattgagaatgtctacttcc

SEQ ID NO: 116330 - DNA, 25 bp, Homo sapien
ctggtttagtggagagctcagattc

SEQ ID NO: 116331 - DNA, 25 bp, Homo sapien
gattccggtagattgagaatgtcta

SEQ ID NO: 116332 - DNA, 25 bp, Homo sapien
gagagctcagattccggtagattga

SEQ ID NO: 116333 - DNA, 25 bp, Homo sapien
tcatcatcactactggatgactcaa

SEQ ID NO: 116334 - DNA, 25 bp, Homo sapien
tggatgactcaaggatttcacttat

SEQ ID NO: 116335 - DNA, 25 bp, Homo sapien
gactcaaggatttcacttatatcca

SEQ ID NO: 116336 - DNA, 25 bp, Homo sapien
ttatcaggaacaactctagttttta

SEQ ID NO: 116337 - DNA, 25 bp, Homo sapien
caaatgcaaagtggttagattcccc

SEQ ID NO: 116338 - DNA, 25 bp, Homo sapien
tcttagggcatagcatccgcagggt

SEQ ID NO: 116339 - DNA, 25 bp, Homo sapien
cagcccatttcaaagcatctggcaa

SEQ ID NO: 116340 - DNA, 25 bp, Homo sapien
tccgcagggttatacagcactactt

SEQ ID NO: 116341 - DNA, 25 bp, Homo sapien
acagaaaactatcccaagatggctt

SEQ ID NO: 116342 - DNA, 25 bp, Homo sapien
caataacttttactacaagtgacag

SEQ ID NO: 116343 - DNA, 25 bp, Homo sapien
taaagggaagttagatatcttatcc

SEQ ID NO: 116344 - DNA, 25 bp, Homo sapien
caagcaaggagcattgttactcaat

SEQ ID NO: 116345 - DNA, 25 bp, Homo sapien
gaacatttgtaagctgtactcaccc

SEQ ID NO: 116346 - DNA, 25 bp, Homo sapien
tttaattcaagtagagccctctttg

SEQ ID NO: 116347 - DNA, 25 bp, Homo sapien
taatgtatcttacagctcaacagca

SEQ ID NO: 116348 - DNA, 25 bp, Homo sapien
gctataagaagtcccatatcatgga

SEQ ID NO: 116349 - DNA, 25 bp, Homo sapien
gctctgaggacatgtctggactgga

SEQ ID NO: 116350 - DNA, 25 bp, Homo sapien
tgttaagacagcaccctccaagctc

SEQ ID NO: 116351 - DNA, 25 bp, Homo sapien
caaggagtacatcagaagtggcagc

SEQ ID NO: 116352 - DNA, 25 bp, Homo sapien
tgggcagatccctatcatggaagga

SEQ ID NO: 116353 - DNA, 25 bp, Homo sapien
tgtccctctcttcaggatcaagttc

SEQ ID NO: 116354 - DNA, 25 bp, Homo sapien
ggaggaagttgtccctctcttcagg

SEQ ID NO: 116355 - DNA, 25 bp, Homo sapien
cataaacttataaagctgctggagg

SEQ ID NO: 116356 - DNA, 25 bp, Homo sapien
tctgtcttccataaacttataaagc

SEQ ID NO: 116357 - DNA, 25 bp, Homo sapien
gtcacatccaccctgatgataaacc

SEQ ID NO: 116358 - DNA, 25 bp, Homo sapien
gatgataaaccagtctgaagagttt

SEQ ID NO: 116359 - DNA, 25 bp, Homo sapien
aagagattgagatctttatagccca

SEQ ID NO: 116360 - DNA, 25 bp, Homo sapien
aagagtttgaagagattgagatctt

SEQ ID NO: 116361 - DNA, 25 bp, Homo sapien
cacatcaatacatgtttcaaaaagc

SEQ ID NO: 116362 - DNA, 25 bp, Homo sapien
tgccaaggtccatataaatttgctt

SEQ ID NO: 116363 - DNA, 25 bp, Homo sapien
gaatgccaaggtccatataaatttg

SEQ ID NO: 116364 - DNA, 25 bp, Homo sapien
gccaaggtccatataaatttgcttc

SEQ ID NO: 116365 - DNA, 25 bp, Homo sapien
aatgccaaggtccatataaatttgc

SEQ ID NO: 116366 - DNA, 25 bp, Homo sapien
tgatcataaaatgccgtcctgagac

SEQ ID NO: 116367 - DNA, 25 bp, Homo sapien
gtatcataatcgcagacactacctg

SEQ ID NO: 116368 - DNA, 25 bp, Homo sapien
cctgagacgtctgagcttgtgatag

SEQ ID NO: 116369 - DNA, 25 bp, Homo sapien
cactacctgcatcctgattttggaa

SEQ ID NO: 116370 - DNA, 25 bp, Homo sapien
cagttctgaactgaatatttgccga

SEQ ID NO: 116371 - DNA, 25 bp, Homo sapien
tggtgatgaacagttctgaactgaa

SEQ ID NO: 116372 - DNA, 25 bp, Homo sapien
ttgccgaacggcagtactcctcaaa

SEQ ID NO: 116373 - DNA, 25 bp, Homo sapien
tgaactgaatatttgccgaacggca

SEQ ID NO: 116374 - DNA, 25 bp, Homo sapien
ttgatctaatttgagagcctcttcc

SEQ ID NO: 116375 - DNA, 25 bp, Homo sapien
tcactttcactgtttgaatcgatat

SEQ ID NO: 116376 - DNA, 25 bp, Homo sapien
ttcctcaggttcactcttcacttct

SEQ ID NO: 116377 - DNA, 25 bp, Homo sapien
tgtttgaatcgatattttcctcagg

SEQ ID NO: 116378 - DNA, 25 bp, Homo sapien
ggtgacacttatgcaacggtgagaa

SEQ ID NO: 116379 - DNA, 25 bp, Homo sapien
cagaatttcaggtttgcaaggtaaa

SEQ ID NO: 116380 - DNA, 25 bp, Homo sapien
tctggaactggacggtggtgacact

SEQ ID NO: 116381 - DNA, 25 bp, Homo sapien
caaagttggaagatacaaccagcat

SEQ ID NO: 116382 - DNA, 25 bp, Homo sapien
ggtctgtatacctttgtcccagaaa

SEQ ID NO: 116383 - DNA, 25 bp, Homo sapien
tttgggtctgtatacctttgtccca

SEQ ID NO: 116384 - DNA, 25 bp, Homo sapien
ctataaaatttgggtctgtatacct

SEQ ID NO: 116385 - DNA, 25 bp, Homo sapien
gtgcccggcctagcaggtgctttta

SEQ ID NO: 116386 - DNA, 25 bp, Homo sapien
tacatctcgagcaattctccttcgt

SEQ ID NO: 116387 - DNA, 25 bp, Homo sapien
gtctttgtcagaatcctcctgtttt

SEQ ID NO: 116388 - DNA, 25 bp, Homo sapien
atagaatttacatctcgagcaattc

SEQ ID NO: 116389 - DNA, 25 bp, Homo sapien
gcagtttcatagtcatcatctacat

SEQ ID NO: 116390 - DNA, 25 bp, Homo sapien
gaatctctaagcaggaacaaagcgc

SEQ ID NO: 116391 - DNA, 25 bp, Homo sapien
ttagacaagaggaacggaagtccca

SEQ ID NO: 116392 - DNA, 25 bp, Homo sapien
caagtgctattaaaatggtgcgacc

SEQ ID NO: 116393 - DNA, 25 bp, Homo sapien
tcttttgactgggtggcgcagcctt

SEQ ID NO: 116394 - DNA, 25 bp, Homo sapien
gataatgctactaataacttaatgg

SEQ ID NO: 116395 - DNA, 25 bp, Homo sapien
gaatccaacaggtagattattcaca

SEQ ID NO: 116396 - DNA, 25 bp, Homo sapien
tattcacaacctaagtattacctta

SEQ ID NO: 116397 - DNA, 25 bp, Homo sapien
ctgcagtaagttataatactgataa

SEQ ID NO: 116398 - DNA, 25 bp, Homo sapien
aaaacttctccgtcatcaatttcag

SEQ ID NO: 116399 - DNA, 25 bp, Homo sapien
atgtaccaaatataaaacttctccg

SEQ ID NO: 116400 - DNA, 25 bp, Homo sapien
tccatccatagtaatgtaccaaata

SEQ ID NO: 116401 - DNA, 25 bp, Homo sapien
ctgacattccatccatagtaatgta

SEQ ID NO: 116402 - DNA, 25 bp, Homo sapien
ggtgtgatcctggtagtctctggct

SEQ ID NO: 116403 - DNA, 25 bp, Homo sapien
gcattgacactgctagtataacagc

SEQ ID NO: 116404 - DNA, 25 bp, Homo sapien
taagatgccctatggttccccttgc

SEQ ID NO: 116405 - DNA, 25 bp, Homo sapien
aacacttgcacggttggaagttgca

SEQ ID NO: 116406 - DNA, 25 bp, Homo sapien
gatccagggctaacaaagggataac

SEQ ID NO: 116407 - DNA, 25 bp, Homo sapien
atccagggctaacaaagggataact

SEQ ID NO: 116408 - DNA, 25 bp, Homo sapien
ctgatccagggctaacaaagggata

SEQ ID NO: 116409 - DNA, 25 bp, Homo sapien
tgatccagggctaacaaagggataa

SEQ ID NO: 116410 - DNA, 25 bp, Homo sapien
cctttgtccaaaggccagattatcc

SEQ ID NO: 116411 - DNA, 25 bp, Homo sapien
ttgtccaaaggccagattatcctgt

SEQ ID NO: 116412 - DNA, 25 bp, Homo sapien
caaaggccagattatcctgtcagcc

SEQ ID NO: 116413 - DNA, 25 bp, Homo sapien
gtccacctttgtccaaaggccagat

SEQ ID NO: 116414 - DNA, 25 bp, Homo sapien
aacaatgtggtaatgtgttagtttt

SEQ ID NO: 116415 - DNA, 25 bp, Homo sapien
tgtggtaatgtgttagttttaagct

SEQ ID NO: 116416 - DNA, 25 bp, Homo sapien
atgtggtaatgtgttagttttaagc

SEQ ID NO: 116417 - DNA, 25 bp, Homo sapien
caatgtggtaatgtgttagttttaa

SEQ ID NO: 116418 - DNA, 25 bp, Homo sapien
cactgtttgctgtcttagataagcc

SEQ ID NO: 116419 - DNA, 25 bp, Homo sapien
catacggcatgtttgatgagagggt

SEQ ID NO: 116420 - DNA, 25 bp, Homo sapien
tcgtccccgttttgacttctgcctc

SEQ ID NO: 116421 - DNA, 25 bp, Homo sapien
tgatgagagggttgattttaaagga

SEQ ID NO: 116422 - DNA, 25 bp, Homo sapien
ccatttgacagaggtgagctgtctg

SEQ ID NO: 116423 - DNA, 25 bp, Homo sapien
attccatttgacagaggtgagctgt

SEQ ID NO: 116424 - DNA, 25 bp, Homo sapien
gagctgtctggtatattgctgcgag

SEQ ID NO: 116425 - DNA, 25 bp, Homo sapien
tatattgctgcgagcacttctggta

SEQ ID NO: 116426 - DNA, 25 bp, Homo sapien
aaccaaggtttcaggcccgatcaga

SEQ ID NO: 116427 - DNA, 25 bp, Homo sapien
aaatctacttcatggcaaaccaagg

SEQ ID NO: 116428 - DNA, 25 bp, Homo sapien
tcaactgctacatcctcaatgctgg

SEQ ID NO: 116429 - DNA, 25 bp, Homo sapien
gcttcgagactcatcttgactaaga

SEQ ID NO: 116430 - DNA, 25 bp, Homo sapien
tctctctctcttgtacaattatact

SEQ ID NO: 116431 - DNA, 25 bp, Homo sapien
gctctctctctcttgtacaattata

SEQ ID NO: 116432 - DNA, 25 bp, Homo sapien
tctctctcttgtacaattatactac

SEQ ID NO: 116433 - DNA, 25 bp, Homo sapien
tgctctctctctcttgtacaattat

SEQ ID NO: 116434 - DNA, 25 bp, Homo sapien
ttttgccattaatccactatttcca

SEQ ID NO: 116435 - DNA, 25 bp, Homo sapien
ggctgcagcacttgttcgctttggg

SEQ ID NO: 116436 - DNA, 25 bp, Homo sapien
ttggctgcagcacttgttcgctttg

SEQ ID NO: 116437 - DNA, 25 bp, Homo sapien
cactatttccatcacttggcctctt

SEQ ID NO: 116438 - DNA, 25 bp, Homo sapien
taggacaggaagatcttcactatca

SEQ ID NO: 116439 - DNA, 25 bp, Homo sapien
ttgtctaggacaggaagatcttcac

SEQ ID NO: 116440 - DNA, 25 bp, Homo sapien
gaagatcttcactatcactgctttg

SEQ ID NO: 116441 - DNA, 25 bp, Homo sapien
tgaattgtctaggacaggaagatct

SEQ ID NO: 116442 - DNA, 25 bp, Homo sapien
ggagatcgtgcaagtttctgtggct

SEQ ID NO: 116443 - DNA, 25 bp, Homo sapien
tagatacattaagatgctttactgg

SEQ ID NO: 116444 - DNA, 25 bp, Homo sapien
gggatattcttgcaggagatcgtgc

SEQ ID NO: 116445 - DNA, 25 bp, Homo sapien
ggatgaattcggatgtttttctctg

SEQ ID NO: 116446 - DNA, 25 bp, Homo sapien
agtattcatctatcaagttttctat

SEQ ID NO: 116447 - DNA, 25 bp, Homo sapien
tcatctatcaagttttctataagct

SEQ ID NO: 116448 - DNA, 25 bp, Homo sapien
catctatcaagttttctataagctt

SEQ ID NO: 116449 - DNA, 25 bp, Homo sapien
ctatcaagttttctataagcttctt

SEQ ID NO: 116450 - DNA, 25 bp, Homo sapien
taattgttagtgctacaaagggcac

SEQ ID NO: 116451 - DNA, 25 bp, Homo sapien
aatctcctacagtaagctgaataag

SEQ ID NO: 116452 - DNA, 25 bp, Homo sapien
catacatggcttcttaatggagacc

SEQ ID NO: 116453 - DNA, 25 bp, Homo sapien
tcagaatagtttccctgtattgaca

SEQ ID NO: 116454 - DNA, 25 bp, Homo sapien
cttggagaaatgagattctctctgt

SEQ ID NO: 116455 - DNA, 25 bp, Homo sapien
tcttggagaaatgagattctctctg

SEQ ID NO: 116456 - DNA, 25 bp, Homo sapien
cctcctgtctatggttgcaacttca

SEQ ID NO: 116457 - DNA, 25 bp, Homo sapien
tctcctcctgtctatggttgcaact

SEQ ID NO: 116458 - DNA, 25 bp, Homo sapien
ttttctcctcctgtctatggttgca

SEQ ID NO: 116459 - DNA, 25 bp, Homo sapien
tcctcctgtctatggttgcaacttc

SEQ ID NO: 116460 - DNA, 25 bp, Homo sapien
cttagggatggactgtagatggaca

SEQ ID NO: 116461 - DNA, 25 bp, Homo sapien
gcattatctcatctgctgggacagt

SEQ ID NO: 116462 - DNA, 25 bp, Homo sapien
gaagggctagctcagacactactcc

SEQ ID NO: 116463 - DNA, 25 bp, Homo sapien
cattctcagggtacacactgttcca

SEQ ID NO: 116464 - DNA, 25 bp, Homo sapien
gagggacagcaatctaactattcag

SEQ ID NO: 116465 - DNA, 25 bp, Homo sapien
cacatgtagtgattggcaaggatct

SEQ ID NO: 116466 - DNA, 25 bp, Homo sapien
tgagcatcagggcttttaaatacag

SEQ ID NO: 116467 - DNA, 25 bp, Homo sapien
gaagccaagaggattaggccttgag

SEQ ID NO: 116468 - DNA, 25 bp, Homo sapien
ggagatgatgatgagggactcattc

SEQ ID NO: 116469 - DNA, 25 bp, Homo sapien
aagcagatgacatggaggctcccgc

SEQ ID NO: 116470 - DNA, 25 bp, Homo sapien
ctgcattctacagcaagtacatttt

SEQ ID NO: 116471 - DNA, 25 bp, Homo sapien
gacatggaggctcccgcatgagaca

SEQ ID NO: 116472 - DNA, 25 bp, Homo sapien
tgtcaaaccagttgagtgctttctg

SEQ ID NO: 116473 - DNA, 25 bp, Homo sapien
tctgtggttgtaattcagggtttgg

SEQ ID NO: 116474 - DNA, 25 bp, Homo sapien
ttagcaatgtcaaaccagttgagtg

SEQ ID NO: 116475 - DNA, 25 bp, Homo sapien
gtgctttctgtggttgtaattcagg

SEQ ID NO: 116476 - DNA, 25 bp, Homo sapien
gacaaatatggcaggctgcttaacc

SEQ ID NO: 116477 - DNA, 25 bp, Homo sapien
tttgtcaagggataagatagtccac

SEQ ID NO: 116478 - DNA, 25 bp, Homo sapien
gaaagtgcagcagtaactattcagc

SEQ ID NO: 116479 - DNA, 25 bp, Homo sapien
gcacactgctgaacatatactttgg

SEQ ID NO: 116480 - DNA, 25 bp, Homo sapien
agtttaaatactaggactgccaaag

SEQ ID NO: 116481 - DNA, 25 bp, Homo sapien
gagacagactccctttaacacaggc

SEQ ID NO: 116482 - DNA, 25 bp, Homo sapien
gagagctattgtcatccaaagagtg

SEQ ID NO: 116483 - DNA, 25 bp, Homo sapien
caggatgcaacctcctgtaaaaagg

SEQ ID NO: 116484 - DNA, 25 bp, Homo sapien
tgccatcactagtgtttagctctga

SEQ ID NO: 116485 - DNA, 25 bp, Homo sapien
tacaaaatctatcagtctgtggaac

SEQ ID NO: 116486 - DNA, 25 bp, Homo sapien
aaattcattcggcagtatagcaaac

SEQ ID NO: 116487 - DNA, 25 bp, Homo sapien
cctgatatacagtctagagcatcta

SEQ ID NO: 116488 - DNA, 25 bp, Homo sapien
cattgagatacttctgctttgcaaa

SEQ ID NO: 116489 - DNA, 25 bp, Homo sapien
tttacattgagatacttctgctttg

SEQ ID NO: 116490 - DNA, 25 bp, Homo sapien
aacatggcctttattaatactgccc

SEQ ID NO: 116491 - DNA, 25 bp, Homo sapien
tttattaatactgcccactgagctc

SEQ ID NO: 116492 - DNA, 25 bp, Homo sapien
aatctgattttccaactgtaagtta

SEQ ID NO: 116493 - DNA, 25 bp, Homo sapien
gattttccaactgtaagttacaagc

SEQ ID NO: 116494 - DNA, 25 bp, Homo sapien
ctgtaagttacaagcacttaggaaa

SEQ ID NO: 116495 - DNA, 25 bp, Homo sapien
caactgtaagttacaagcacttagg

SEQ ID NO: 116496 - DNA, 25 bp, Homo sapien
ttaggttgacggcaacttgtcttct

SEQ ID NO: 116497 - DNA, 25 bp, Homo sapien
caccttccctttcacatagttaatg

SEQ ID NO: 116498 - DNA, 25 bp, Homo sapien
gacggcaacttgtcttctaagacca

SEQ ID NO: 116499 - DNA, 25 bp, Homo sapien
gcaacttgtcttctaagaccaccaa

SEQ ID NO: 116500 - DNA, 25 bp, Homo sapien
caggaaggcgaaggcgccacaggcc

SEQ ID NO: 116501 - DNA, 25 bp, Homo sapien
aatacaatagcccaggaaggcgaag

SEQ ID NO: 116502 - DNA, 25 bp, Homo sapien
gccgcttccggttgaggtaaataca

SEQ ID NO: 116503 - DNA, 25 bp, Homo sapien
tgtcccgcaggcggcgcttgaacgc

SEQ ID NO: 116504 - DNA, 25 bp, Homo sapien
ctgctcctcagccttttgaggctct

SEQ ID NO: 116505 - DNA, 25 bp, Homo sapien
tcagccttttgaggctctgctcttc

SEQ ID NO: 116506 - DNA, 25 bp, Homo sapien
gccttttgaggctctgctcttcttt

SEQ ID NO: 116507 - DNA, 25 bp, Homo sapien
tcctcagccttttgaggctctgctc

SEQ ID NO: 116508 - DNA, 25 bp, Homo sapien
gccctgcgggagaacaatctagaag

SEQ ID NO: 116509 - DNA, 25 bp, Homo sapien
ttctgagctacaagaaaggccctgc

SEQ ID NO: 116510 - DNA, 25 bp, Homo sapien
gagatttacaaaacacgaagatgcc

SEQ ID NO: 116511 - DNA, 25 bp, Homo sapien
ggtttttaagtgtcctgtgcggctc

SEQ ID NO: 116512 - DNA, 25 bp, Homo sapien
ccgtacctcttgcaagaaaagttct

SEQ ID NO: 116513 - DNA, 25 bp, Homo sapien
tttttattcttcgttggatcccaca

SEQ ID NO: 116514 - DNA, 25 bp, Homo sapien
ctctagataaccaaagttctcccat

SEQ ID NO: 116515 - DNA, 25 bp, Homo sapien
aaagttctcccatccgtacctcttg

SEQ ID NO: 116516 - DNA, 25 bp, Homo sapien
gaggtgttgaatccccattctgtgc

SEQ ID NO: 116517 - DNA, 25 bp, Homo sapien
gcattgccgaggtgttgaatcccca

SEQ ID NO: 116518 - DNA, 25 bp, Homo sapien
agttcccgtggttgctcgcacacta

SEQ ID NO: 116519 - DNA, 25 bp, Homo sapien
ctcgcacactaaaagggcattgccg

SEQ ID NO: 116520 - DNA, 25 bp, Homo sapien
cacaaagataattaaatatgtgctc

SEQ ID NO: 116521 - DNA, 25 bp, Homo sapien
caaagataattaaatatgtgctcac

SEQ ID NO: 116522 - DNA, 25 bp, Homo sapien
ttactgtgtacatttcacaaagata

SEQ ID NO: 116523 - DNA, 25 bp, Homo sapien
actgtgtacatttcacaaagataat

SEQ ID NO: 116524 - DNA, 25 bp, Homo sapien
gcatacatacaccaagcagtttagt

SEQ ID NO: 116525 - DNA, 25 bp, Homo sapien
caggaaattctagttgatgcataca

SEQ ID NO: 116526 - DNA, 25 bp, Homo sapien
gtcttatgcctaatgaatcctgaaa

SEQ ID NO: 116527 - DNA, 25 bp, Homo sapien
tcttcaggaaacaatcccatctgcc

SEQ ID NO: 116528 - DNA, 25 bp, Homo sapien
ctccaagcagtcctgttcattcatg

SEQ ID NO: 116529 - DNA, 25 bp, Homo sapien
gttcattcatgtctgcctcaaattg

SEQ ID NO: 116530 - DNA, 25 bp, Homo sapien
tgttgaggccttatgattcagcagc

SEQ ID NO: 116531 - DNA, 25 bp, Homo sapien
tttggcaaatggaaaccgctggaga

SEQ ID NO: 116532 - DNA, 25 bp, Homo sapien
cactggactgtggatacgttgaaat

SEQ ID NO: 116533 - DNA, 25 bp, Homo sapien
ccatctgtcatgactgtttggcaaa

SEQ ID NO: 116534 - DNA, 25 bp, Homo sapien
gccaagatggcctacctagagaaac

SEQ ID NO: 116535 - DNA, 25 bp, Homo sapien
tcttactaattagctttcagccaag

SEQ ID NO: 116536 - DNA, 25 bp, Homo sapien
gacagttacattgtaccaagtcaga

SEQ ID NO: 116537 - DNA, 25 bp, Homo sapien
gcagctgctgagttactgtttcaca

SEQ ID NO: 116538 - DNA, 25 bp, Homo sapien
actgaacctaagtcctacatttagg

SEQ ID NO: 116539 - DNA, 25 bp, Homo sapien
cacattcttatatctagattaactg

SEQ ID NO: 116540 - DNA, 25 bp, Homo sapien
ttagaactagccaggatatagtaaa

SEQ ID NO: 116541 - DNA, 25 bp, Homo sapien
gaaatgctcaacctttttagaacta

SEQ ID NO: 116542 - DNA, 25 bp, Homo sapien
tcagcagtatgttagataagagtgg

SEQ ID NO: 116543 - DNA, 25 bp, Homo sapien
tgcactgggtagaactttcagcagt

SEQ ID NO: 116544 - DNA, 25 bp, Homo sapien
tagattctttcgattttgcatgttc

SEQ ID NO: 116545 - DNA, 25 bp, Homo sapien
ggacactgctgaacttaattaattc

SEQ ID NO: 116546 - DNA, 25 bp, Homo sapien
tgcgaagcgggacagcgcttcgccg

SEQ ID NO: 116547 - DNA, 25 bp, Homo sapien
gcgcttcgccgggtcgggtgcagac

SEQ ID NO: 116548 - DNA, 25 bp, Homo sapien
cgccgggtcgggtgcagaccttcct

SEQ ID NO: 116549 - DNA, 25 bp, Homo sapien
gagcagtggggggtgcgaagcggga

SEQ ID NO: 116550 - DNA, 25 bp, Homo sapien
tccaagacttgaagagctcccgact

SEQ ID NO: 116551 - DNA, 25 bp, Homo sapien
gaaagctaagcgctctctggtgctc

SEQ ID NO: 116552 - DNA, 25 bp, Homo sapien
tgttgacactgcttcgcttccgaag

SEQ ID NO: 116553 - DNA, 25 bp, Homo sapien
tattttaaggtagcacattgccgca

SEQ ID NO: 116554 - DNA, 25 bp, Homo sapien
tgacaacagcgtcagttgcccgcag

SEQ ID NO: 116555 - DNA, 25 bp, Homo sapien
cctccagatgcaatcgtcggaaaca

SEQ ID NO: 116556 - DNA, 25 bp, Homo sapien
taaattcacccctacgtatctccag

SEQ ID NO: 116557 - DNA, 25 bp, Homo sapien
ccgagacccgcaccgtcgtgggtgt

SEQ ID NO: 116558 - DNA, 25 bp, Homo sapien
agcgtaatagctttcttcagccaca

SEQ ID NO: 116559 - DNA, 25 bp, Homo sapien
ataagaagcgtaatagctttcttca

SEQ ID NO: 116560 - DNA, 25 bp, Homo sapien
agaagcgtaatagctttcttcagcc

SEQ ID NO: 116561 - DNA, 25 bp, Homo sapien
gaagcgtaatagctttcttcagcca

SEQ ID NO: 116562 - DNA, 25 bp, Homo sapien
gaatccaggattagagctgactata

SEQ ID NO: 116563 - DNA, 25 bp, Homo sapien
tattaatacaccacgccaaaatgtg

SEQ ID NO: 116564 - DNA, 25 bp, Homo sapien
ccaaacacatgtagtggcgggctta

SEQ ID NO: 116565 - DNA, 25 bp, Homo sapien
cccagagctggtagggcaaaaccaa

SEQ ID NO: 116566 - DNA, 25 bp, Homo sapien
tttttttcttctccaagctgacctc

SEQ ID NO: 116567 - DNA, 25 bp, Homo sapien
ttcttctccaagctgacctcagagc

SEQ ID NO: 116568 - DNA, 25 bp, Homo sapien
tttttcttctccaagctgacctcag

SEQ ID NO: 116569 - DNA, 25 bp, Homo sapien
tttcttctccaagctgacctcagag

SEQ ID NO: 116570 - DNA, 25 bp, Homo sapien
accaaatgatctccatgattttgag

SEQ ID NO: 116571 - DNA, 25 bp, Homo sapien
gattttgagaaactacctcacgaag

SEQ ID NO: 116572 - DNA, 25 bp, Homo sapien
aacacagggcaactcatctttcagc

SEQ ID NO: 116573 - DNA, 25 bp, Homo sapien
tatttgcagacaatgccggaggaac

SEQ ID NO: 116574 - DNA, 25 bp, Homo sapien
tacaaactagacttatatcttacgt

SEQ ID NO: 116575 - DNA, 25 bp, Homo sapien
actggttgaaaaactacatggaatc

SEQ ID NO: 116576 - DNA, 25 bp, Homo sapien
tagacttatatcttacgtttgggaa

SEQ ID NO: 116577 - DNA, 25 bp, Homo sapien
tcaaacatctgtacaaactagactt

SEQ ID NO: 116578 - DNA, 25 bp, Homo sapien
ttctagcagaagttaagtctgatga

SEQ ID NO: 116579 - DNA, 25 bp, Homo sapien
gattttctaatagaggctggtaaca

SEQ ID NO: 116580 - DNA, 25 bp, Homo sapien
attttctaatagaggctggtaacaa

SEQ ID NO: 116581 - DNA, 25 bp, Homo sapien
ctggtaacaatttctagcagaagtt

SEQ ID NO: 116582 - DNA, 25 bp, Homo sapien
tttatccaaaggcaacacttgcact

SEQ ID NO: 116583 - DNA, 25 bp, Homo sapien
ggcaacacttgcactgcaacgtctt

SEQ ID NO: 116584 - DNA, 25 bp, Homo sapien
ttgcactgcaacgtctttagaaaaa

SEQ ID NO: 116585 - DNA, 25 bp, Homo sapien
caaaggcaacacttgcactgcaacg

SEQ ID NO: 116586 - DNA, 25 bp, Homo sapien
ctgttcttagagcatctttctgtcc

SEQ ID NO: 116587 - DNA, 25 bp, Homo sapien
ctttctgtcccattgtatactgaga

SEQ ID NO: 116588 - DNA, 25 bp, Homo sapien
gcatctttctgtcccattgtatact

SEQ ID NO: 116589 - DNA, 25 bp, Homo sapien
tactgagaaatgaagatgtcatttg

SEQ ID NO: 116590 - DNA, 25 bp, Homo sapien
caggaatacgttacagctagatagg

SEQ ID NO: 116591 - DNA, 25 bp, Homo sapien
taaacattgtccttcatgttaagaa

SEQ ID NO: 116592 - DNA, 25 bp, Homo sapien
ggtgactgagtataaaatgggtatg

SEQ ID NO: 116593 - DNA, 25 bp, Homo sapien
aagaatgtatcattctggctgggca

SEQ ID NO: 116594 - DNA, 25 bp, Homo sapien
cagcactattgatgtacactttgtg

SEQ ID NO: 116595 - DNA, 25 bp, Homo sapien
cactttgtgactattttttatccca

SEQ ID NO: 116596 - DNA, 25 bp, Homo sapien
cattgtaaaacgattatagtcaagc

SEQ ID NO: 116597 - DNA, 25 bp, Homo sapien
aaaagaattgtaagaattacagcac

SEQ ID NO: 116598 - DNA, 25 bp, Homo sapien
tcatgagcctgaggaggtagagact

SEQ ID NO: 116599 - DNA, 25 bp, Homo sapien
gtgagttgtgatcaccccactgtga

SEQ ID NO: 116600 - DNA, 25 bp, Homo sapien
aggatctcatgagcctgaggaggta

SEQ ID NO: 116601 - DNA, 25 bp, Homo sapien
caccccactgtgatcactccagcct

SEQ ID NO: 116602 - DNA, 25 bp, Homo sapien
tgagataacttattaccttcagaca

SEQ ID NO: 116603 - DNA, 25 bp, Homo sapien
caaaaagtttggtctgtaactgact

SEQ ID NO: 116604 - DNA, 25 bp, Homo sapien
gataacttattaccttcagacaagc

SEQ ID NO: 116605 - DNA, 25 bp, Homo sapien
ataacttattaccttcagacaagct

SEQ ID NO: 116606 - DNA, 25 bp, Homo sapien
gctgaatcaattccactgggtgaaa

SEQ ID NO: 116607 - DNA, 25 bp, Homo sapien
ctttatcaacggagctgcggttgca

SEQ ID NO: 116608 - DNA, 25 bp, Homo sapien
gcagccacggttgtagctgaatcaa

SEQ ID NO: 116609 - DNA, 25 bp, Homo sapien
tcctgagtaacagcatccttctcta

SEQ ID NO: 116610 - DNA, 25 bp, Homo sapien
gctgctctgtaacacgttgcaggtg

SEQ ID NO: 116611 - DNA, 25 bp, Homo sapien
cttgtttcctctgaatgcttgtttg

SEQ ID NO: 116612 - DNA, 25 bp, Homo sapien
tcaagatgccttatgtgctgctcca

SEQ ID NO: 116613 - DNA, 25 bp, Homo sapien
gcttttcgtgatcatgacaatgtaa

SEQ ID NO: 116614 - DNA, 25 bp, Homo sapien
gctacatcaaccaggcttatcttga

SEQ ID NO: 116615 - DNA, 25 bp, Homo sapien
atcctcttagcttggcctgccaagc

SEQ ID NO: 116616 - DNA, 25 bp, Homo sapien
gactcaaggtctccggcagtctcag

SEQ ID NO: 116617 - DNA, 25 bp, Homo sapien
aagtgcagttgtattatcatagttc

SEQ ID NO: 116618 - DNA, 25 bp, Homo sapien
cagctaccaagattagggtgttctg

SEQ ID NO: 116619 - DNA, 25 bp, Homo sapien
aaactactagtcttgagtgcagcac

SEQ ID NO: 116620 - DNA, 25 bp, Homo sapien
tctggaggagggcatactaacaggc

SEQ ID NO: 116621 - DNA, 25 bp, Homo sapien
tatataaagatggattacagctacc

SEQ ID NO: 116622 - DNA, 25 bp, Homo sapien
tgtttatcaaaactcgtatcttcaa

SEQ ID NO: 116623 - DNA, 25 bp, Homo sapien
tatcaaaactcgtatcttcaacttc

SEQ ID NO: 116624 - DNA, 25 bp, Homo sapien
tttatcaaaactcgtatcttcaact

SEQ ID NO: 116625 - DNA, 25 bp, Homo sapien
ctgtttatcaaaactcgtatcttca

SEQ ID NO: 116626 - DNA, 25 bp, Homo sapien
gcaaatctgcgaggtgctggtgtct

SEQ ID NO: 116627 - DNA, 25 bp, Homo sapien
ctttgatagttcatcatcccttgaa

SEQ ID NO: 116628 - DNA, 25 bp, Homo sapien
ctctgtgacacgacacttccatatt

SEQ ID NO: 116629 - DNA, 25 bp, Homo sapien
tctgtgacacgacacttccatattt

SEQ ID NO: 116630 - DNA, 25 bp, Homo sapien
ccctctttgatagttcatcatccct

SEQ ID NO: 116631 - DNA, 25 bp, Homo sapien
caaaatttgttccaatagtcttaca

SEQ ID NO: 116632 - DNA, 25 bp, Homo sapien
tgacctagttagtgaggtggtgttt

SEQ ID NO: 116633 - DNA, 25 bp, Homo sapien
ttttgacctagttagtgaggtggtg

SEQ ID NO: 116634 - DNA, 25 bp, Homo sapien
ttcaaaatttgttccaatagtctta

SEQ ID NO: 116635 - DNA, 25 bp, Homo sapien
gacttctgcatagtcactttagttg

SEQ ID NO: 116636 - DNA, 25 bp, Homo sapien
tctctttttggccaaggtcatgaag

SEQ ID NO: 116637 - DNA, 25 bp, Homo sapien
ctctttttggccaaggtcatgaaga

SEQ ID NO: 116638 - DNA, 25 bp, Homo sapien
ttctgcatagtcactttagttgttt

SEQ ID NO: 116639 - DNA, 25 bp, Homo sapien
aagcttcaacatactcagagattct

SEQ ID NO: 116640 - DNA, 25 bp, Homo sapien
tcaacatactcagagattcttttgg

SEQ ID NO: 116641 - DNA, 25 bp, Homo sapien
tggaagcttcaacatactcagagat

SEQ ID NO: 116642 - DNA, 25 bp, Homo sapien
gcttcaacatactcagagattcttt

SEQ ID NO: 116643 - DNA, 25 bp, Homo sapien
aagcttaacagaattctgtggaaga

SEQ ID NO: 116644 - DNA, 25 bp, Homo sapien
ggcagctccatcttttgcacgaata

SEQ ID NO: 116645 - DNA, 25 bp, Homo sapien
tacagatcttgttgtattggttgtt

SEQ ID NO: 116646 - DNA, 25 bp, Homo sapien
cattgataagcgaatacatggcagc

SEQ ID NO: 116647 - DNA, 25 bp, Homo sapien
tccactgtctttctgatcctaattt

SEQ ID NO: 116648 - DNA, 25 bp, Homo sapien
ttctgatcctaattttctctgacat

SEQ ID NO: 116649 - DNA, 25 bp, Homo sapien
tcatccactgtctttctgatcctaa

SEQ ID NO: 116650 - DNA, 25 bp, Homo sapien
ctgaatttctgcagaaatagtttta

SEQ ID NO: 116651 - DNA, 25 bp, Homo sapien
gtgttggttctaatatctttagtca

SEQ ID NO: 116652 - DNA, 25 bp, Homo sapien
gttttatcttgtgtgttggttctaa

SEQ ID NO: 116653 - DNA, 25 bp, Homo sapien
tggaattacagatttgttgacagtt

SEQ ID NO: 116654 - DNA, 25 bp, Homo sapien
tattctgacctttcttggttctctg

SEQ ID NO: 116655 - DNA, 25 bp, Homo sapien
gttctattacttttggtctctgtgg

SEQ ID NO: 116656 - DNA, 25 bp, Homo sapien
gaattaaatctgagatatggtcctt

SEQ ID NO: 116657 - DNA, 25 bp, Homo sapien
ttttaagagtgcttcgatggccctg

SEQ ID NO: 116658 - DNA, 25 bp, Homo sapien
gatggccctgataaactggctttcc

SEQ ID NO: 116659 - DNA, 25 bp, Homo sapien
tctacaccaccgaggtgaggtcctg

SEQ ID NO: 116660 - DNA, 25 bp, Homo sapien
tgatgtctcagaccgtcacctacac

SEQ ID NO: 116661 - DNA, 25 bp, Homo sapien
gttggtggtgatgtctcagaccgtc

SEQ ID NO: 116662 - DNA, 25 bp, Homo sapien
ctggtcatagtctgaaatttatctt

SEQ ID NO: 116663 - DNA, 25 bp, Homo sapien
tgtcatggggtctgtgatgttcttc

SEQ ID NO: 116664 - DNA, 25 bp, Homo sapien
tcaactcttttgtgtggcaggtatc

SEQ ID NO: 116665 - DNA, 25 bp, Homo sapien
tctccagatcatcaatgtgactact

SEQ ID NO: 116666 - DNA, 25 bp, Homo sapien
tgttttcaccttccagttcttccag

SEQ ID NO: 116667 - DNA, 25 bp, Homo sapien
aaatgtctatggaacacacacacaa

SEQ ID NO: 116668 - DNA, 25 bp, Homo sapien
ataaagtaagcgggcaaaggaagag

SEQ ID NO: 116669 - DNA, 25 bp, Homo sapien
catccattgagggtattgggacaca

SEQ ID NO: 116670 - DNA, 25 bp, Homo sapien
taagcgggcaaaggaagaggctaaa

SEQ ID NO: 116671 - DNA, 25 bp, Homo sapien
cacaacataattctgaataaccagc

SEQ ID NO: 116672 - DNA, 25 bp, Homo sapien
tctttccctgtctcaattacccagg

SEQ ID NO: 116673 - DNA, 25 bp, Homo sapien
ttatgtacagacaatcaaattctat

SEQ ID NO: 116674 - DNA, 25 bp, Homo sapien
tcaattacccaggatcaaccttggc

SEQ ID NO: 116675 - DNA, 25 bp, Homo sapien
gatcgccatgaggtaacacaggaac

SEQ ID NO: 116676 - DNA, 25 bp, Homo sapien
gaacaaatattgctgatcgccatga

SEQ ID NO: 116677 - DNA, 25 bp, Homo sapien
tttgttgcatagaagtcagtctgtg

SEQ ID NO: 116678 - DNA, 25 bp, Homo sapien
ttagaatccatcttcttaggttttg

SEQ ID NO: 116679 - DNA, 25 bp, Homo sapien
tcagatgaccttccaatgtacctga

SEQ ID NO: 116680 - DNA, 25 bp, Homo sapien
ttgccataggaatcagatgaccttc

SEQ ID NO: 116681 - DNA, 25 bp, Homo sapien
tgccataggaatcagatgaccttcc

SEQ ID NO: 116682 - DNA, 25 bp, Homo sapien
gatgaccttccaatgtacctgaaaa

SEQ ID NO: 116683 - DNA, 25 bp, Homo sapien
gatggaggaatagaagtagtcacag

SEQ ID NO: 116684 - DNA, 25 bp, Homo sapien
cacagttacagggtgtggcttgctg

SEQ ID NO: 116685 - DNA, 25 bp, Homo sapien
catttctacaatggctatgttaggt

SEQ ID NO: 116686 - DNA, 25 bp, Homo sapien
tctacttttcgagatgatggaggaa

SEQ ID NO: 116687 - DNA, 25 bp, Homo sapien
tgctcattcgttcaatacacattga

SEQ ID NO: 116688 - DNA, 25 bp, Homo sapien
aatttcctccatggactgactgtgc

SEQ ID NO: 116689 - DNA, 25 bp, Homo sapien
cattgaccgggtttgtacttggctc

SEQ ID NO: 116690 - DNA, 25 bp, Homo sapien
aggtctcccgaagcctccatagctg

SEQ ID NO: 116691 - DNA, 25 bp, Homo sapien
gctgtcaatatctacactgggtaat

SEQ ID NO: 116692 - DNA, 25 bp, Homo sapien
gaggtgaaaggacatcagcactact

SEQ ID NO: 116693 - DNA, 25 bp, Homo sapien
tactatttgaaatgctgtcaatatc

SEQ ID NO: 116694 - DNA, 25 bp, Homo sapien
tctttggggctagacagaggtgaaa

SEQ ID NO: 116695 - DNA, 25 bp, Homo sapien
catcaaagttagttcctggaaactt

SEQ ID NO: 116696 - DNA, 25 bp, Homo sapien
atttcatcaaagttagttcctggaa

SEQ ID NO: 116697 - DNA, 25 bp, Homo sapien
ttcatcaaagttagttcctggaaac

SEQ ID NO: 116698 - DNA, 25 bp, Homo sapien
tatttcatcaaagttagttcctgga

SEQ ID NO: 116699 - DNA, 25 bp, Homo sapien
tttgtagaatcagctttaacacttc

SEQ ID NO: 116700 - DNA, 25 bp, Homo sapien
aagcaactggcggaaatggaggacc

SEQ ID NO: 116701 - DNA, 25 bp, Homo sapien
taaactccagaattggttcagagtc

SEQ ID NO: 116702 - DNA, 25 bp, Homo sapien
tatccagaatatcagcagtgggctg

SEQ ID NO: 116703 - DNA, 25 bp, Homo sapien
ggttcacttgtctcactgactgaaa

SEQ ID NO: 116704 - DNA, 25 bp, Homo sapien
cactgatactaggtgcaatctgttg

SEQ ID NO: 116705 - DNA, 25 bp, Homo sapien
gtcagtggttcacttgtctcactga

SEQ ID NO: 116706 - DNA, 25 bp, Homo sapien
tgaaacactgatactaggtgcaatc

SEQ ID NO: 116707 - DNA, 25 bp, Homo sapien
catctctaccaaattgattgactga

SEQ ID NO: 116708 - DNA, 25 bp, Homo sapien
tgtgtgcctggacccaaaatgattt

SEQ ID NO: 116709 - DNA, 25 bp, Homo sapien
ttatgatcatgtcgctgcagtccag

SEQ ID NO: 116710 - DNA, 25 bp, Homo sapien
agttatgatcatgtcgctgcagtcc

SEQ ID NO: 116711 - DNA, 25 bp, Homo sapien
gaaagaatagcttatcctgaggctg

SEQ ID NO: 116712 - DNA, 25 bp, Homo sapien
aggccaacctataaggaccaaagag

SEQ ID NO: 116713 - DNA, 25 bp, Homo sapien
gactctgaagtctaggattcgggct

SEQ ID NO: 116714 - DNA, 25 bp, Homo sapien
caatagtgcctatgcttgagccata

SEQ ID NO: 116715 - DNA, 25 bp, Homo sapien
tcacatttgagttcacaggaacacc

SEQ ID NO: 116716 - DNA, 25 bp, Homo sapien
gcaagagcttcgttaacaaaatgtt

SEQ ID NO: 116717 - DNA, 25 bp, Homo sapien
gcatgacagcaatggtctcagcaag

SEQ ID NO: 116718 - DNA, 25 bp, Homo sapien
aacaaaaagctggagggcgccactg

SEQ ID NO: 116719 - DNA, 25 bp, Homo sapien
tcatttgttgaagcatccccagaaa

SEQ ID NO: 116720 - DNA, 25 bp, Homo sapien
catttgttgaagcatccccagaaac

SEQ ID NO: 116721 - DNA, 25 bp, Homo sapien
taaatgtctcaaaaattccccatac

SEQ ID NO: 116722 - DNA, 25 bp, Homo sapien
tattcttcaataaatgtctcaaaaa

SEQ ID NO: 116723 - DNA, 25 bp, Homo sapien
caataaatgtctcaaaaattcccca

SEQ ID NO: 116724 - DNA, 25 bp, Homo sapien
ctattcttcaataaatgtctcaaaa

SEQ ID NO: 116725 - DNA, 25 bp, Homo sapien
taggtttgaactgcaagaggccaat

SEQ ID NO: 116726 - DNA, 25 bp, Homo sapien
tcaaccaaatgtggatcaagaacag

SEQ ID NO: 116727 - DNA, 25 bp, Homo sapien
tctggttatgtaagaaagcaacttg

SEQ ID NO: 116728 - DNA, 25 bp, Homo sapien
gcttctgaggtaaagatgtctgtaa

SEQ ID NO: 116729 - DNA, 25 bp, Homo sapien
taggcagtggggtgcacactcttgc

SEQ ID NO: 116730 - DNA, 25 bp, Homo sapien
tgtggggtaggcagtggggtgcaca

SEQ ID NO: 116731 - DNA, 25 bp, Homo sapien
gggtaggcagtggggtgcacactct

SEQ ID NO: 116732 - DNA, 25 bp, Homo sapien
ctgtggggtaggcagtggggtgcac

SEQ ID NO: 116733 - DNA, 25 bp, Homo sapien
tcatgatccgaatcacagggagaag

SEQ ID NO: 116734 - DNA, 25 bp, Homo sapien
tgatgaaggtgagcaaggaggcgta

SEQ ID NO: 116735 - DNA, 25 bp, Homo sapien
tttcacaggaaaagccatatcatga

SEQ ID NO: 116736 - DNA, 25 bp, Homo sapien
tctttaccaaaacacactccttagc

SEQ ID NO: 116737 - DNA, 25 bp, Homo sapien
gcaggtctccatcaccccatggctt

SEQ ID NO: 116738 - DNA, 25 bp, Homo sapien
ttcttcttgaggtgagttagggttc

SEQ ID NO: 116739 - DNA, 25 bp, Homo sapien
gaagctctgggcttgataccttcaa

SEQ ID NO: 116740 - DNA, 25 bp, Homo sapien
ccatcaccccatggcttgggaagct

SEQ ID NO: 116741 - DNA, 25 bp, Homo sapien
gaatcagaacctggcatctgtgagg

SEQ ID NO: 116742 - DNA, 25 bp, Homo sapien
gggaaatccatactctctggttctt

SEQ ID NO: 116743 - DNA, 25 bp, Homo sapien
gacagtaacactcaatgtgctctcc

SEQ ID NO: 116744 - DNA, 25 bp, Homo sapien
gctctccagtgttgatgaatcagaa

SEQ ID NO: 116745 - DNA, 25 bp, Homo sapien
cattaaggtttgtcaggtacagtcc

SEQ ID NO: 116746 - DNA, 25 bp, Homo sapien
ggtttgtcaggtacagtcctatatc

SEQ ID NO: 116747 - DNA, 25 bp, Homo sapien
ctatcattaaggtttgtcaggtaca

SEQ ID NO: 116748 - DNA, 25 bp, Homo sapien
caggtacagtcctatatcttctaaa

SEQ ID NO: 116749 - DNA, 25 bp, Homo sapien
tcaacggcatcatgcagagtgctgg

SEQ ID NO: 116750 - DNA, 25 bp, Homo sapien
ttcaacggcatcatgcagagtgctg

SEQ ID NO: 116751 - DNA, 25 bp, Homo sapien
tttcaacggcatcatgcagagtgct

SEQ ID NO: 116752 - DNA, 25 bp, Homo sapien
catttcaacggcatcatgcagagtg

SEQ ID NO: 116753 - DNA, 25 bp, Homo sapien
ggtaacaatttgcaatcagctagat

SEQ ID NO: 116754 - DNA, 25 bp, Homo sapien
cataatgaaatgtgcaagaaactct

SEQ ID NO: 116755 - DNA, 25 bp, Homo sapien
aagggttaacatccctggacctcat

SEQ ID NO: 116756 - DNA, 25 bp, Homo sapien
tttactactagagccacgagggtta

SEQ ID NO: 116757 - DNA, 25 bp, Homo sapien
ttgcccttcactaggaggatcatcc

SEQ ID NO: 116758 - DNA, 25 bp, Homo sapien
gcccttcactaggaggatcatcctc

SEQ ID NO: 116759 - DNA, 25 bp, Homo sapien
tgcccttcactaggaggatcatcct

SEQ ID NO: 116760 - DNA, 25 bp, Homo sapien
tgaatgatagactgcttgctgggaa

SEQ ID NO: 116761 - DNA, 25 bp, Homo sapien
gaatgatagactgcttgctgggaaa

SEQ ID NO: 116762 - DNA, 25 bp, Homo sapien
gctgcatatagagagaatgtcccat

SEQ ID NO: 116763 - DNA, 25 bp, Homo sapien
tattagtgacaggtggctgcatata

SEQ ID NO: 116764 - DNA, 25 bp, Homo sapien
ctgaaactgtgtcaaattgccgaga

SEQ ID NO: 116765 - DNA, 25 bp, Homo sapien
gatcacattgttgatccaaagactg

SEQ ID NO: 116766 - DNA, 25 bp, Homo sapien
tttgaggagtcacttcaagcaagac

SEQ ID NO: 116767 - DNA, 25 bp, Homo sapien
tcactcaccacatggcaagcattta

SEQ ID NO: 116768 - DNA, 25 bp, Homo sapien
gacctgtacctccatcctatacggg

SEQ ID NO: 116769 - DNA, 25 bp, Homo sapien
caagcaagacttccctcatctatga

SEQ ID NO: 116770 - DNA, 25 bp, Homo sapien
cagcggctactggtaaattaacatc

SEQ ID NO: 116771 - DNA, 25 bp, Homo sapien
gaaccagcttagaatttggctccaa

SEQ ID NO: 116772 - DNA, 25 bp, Homo sapien
aaactcattggaccatgactagcac

SEQ ID NO: 116773 - DNA, 25 bp, Homo sapien
ggaccatgactagcacatgaatctt

SEQ ID NO: 116774 - DNA, 25 bp, Homo sapien
gatggtttgtgttcaacttgcttaa

SEQ ID NO: 116775 - DNA, 25 bp, Homo sapien
cttgttgctgtgaaggtgcaatatc

SEQ ID NO: 116776 - DNA, 25 bp, Homo sapien
cacgtaggtaactttgtgatggttt

SEQ ID NO: 116777 - DNA, 25 bp, Homo sapien
ttctaacacgtaggtaactttgtga

SEQ ID NO: 116778 - DNA, 25 bp, Homo sapien
gttatacttggtcagcaccaccacg

SEQ ID NO: 116779 - DNA, 25 bp, Homo sapien
cacagtatgtaatatgagaggcaat

SEQ ID NO: 116780 - DNA, 25 bp, Homo sapien
taaaggtaaccacacgagtttgata

SEQ ID NO: 116781 - DNA, 25 bp, Homo sapien
cgctgactgtggaattaaaggtaac

SEQ ID NO: 116782 - DNA, 25 bp, Homo sapien
tttaattcccctgtgataaggtgaa

SEQ ID NO: 116783 - DNA, 25 bp, Homo sapien
tctatgtatgagaggattgaattcc

SEQ ID NO: 116784 - DNA, 25 bp, Homo sapien
catttggcaatgtctcagagtttca

SEQ ID NO: 116785 - DNA, 25 bp, Homo sapien
gccaaggcaatcatattcattcaag

SEQ ID NO: 116786 - DNA, 25 bp, Homo sapien
tacattaatcagtacatagaatcag

SEQ ID NO: 116787 - DNA, 25 bp, Homo sapien
aactagcctcttatttgtattgatg

SEQ ID NO: 116788 - DNA, 25 bp, Homo sapien
tagaatcaggtaagtggtatcacgt

SEQ ID NO: 116789 - DNA, 25 bp, Homo sapien
tcctgggctcatgacaaataaattg

SEQ ID NO: 116790 - DNA, 25 bp, Homo sapien
gtatatagtatgtttgactttgtaa

SEQ ID NO: 116791 - DNA, 25 bp, Homo sapien
gtttgactttgtaatgataatttat

SEQ ID NO: 116792 - DNA, 25 bp, Homo sapien
gaaaaataatttgcgcacgtggtca

SEQ ID NO: 116793 - DNA, 25 bp, Homo sapien
caataatagcatggatttgtggaca

SEQ ID NO: 116794 - DNA, 25 bp, Homo sapien
ttggattcacagatttttggcacac

SEQ ID NO: 116795 - DNA, 25 bp, Homo sapien
cacacttattagtctgtgccccaac

SEQ ID NO: 116796 - DNA, 25 bp, Homo sapien
cctaatgggtattcagtggtattta

SEQ ID NO: 116797 - DNA, 25 bp, Homo sapien
aacagttttccaaggtgcatgttgc

SEQ ID NO: 116798 - DNA, 25 bp, Homo sapien
cctcaccaacacatggtagtatcag

SEQ ID NO: 116799 - DNA, 25 bp, Homo sapien
catttatcttgaatgaatacatagg

SEQ ID NO: 116800 - DNA, 25 bp, Homo sapien
ctcaaggtcggcaaggcggccacaa

SEQ ID NO: 116801 - DNA, 25 bp, Homo sapien
ttcccgggtactatgtggagaagcc

SEQ ID NO: 116802 - DNA, 25 bp, Homo sapien
ttatcccgggagagcagatgctttg

SEQ ID NO: 116803 - DNA, 25 bp, Homo sapien
ccactgtgttggatgatgaggcttc

SEQ ID NO: 116804 - DNA, 25 bp, Homo sapien
gtgaggatccgtcttgtcggcaacg

SEQ ID NO: 116805 - DNA, 25 bp, Homo sapien
tgaggatccgtcttgtcggcaacgt

SEQ ID NO: 116806 - DNA, 25 bp, Homo sapien
agtgaggatccgtcttgtcggcaac

SEQ ID NO: 116807 - DNA, 25 bp, Homo sapien
cagagcagcccacaattttgcaata

SEQ ID NO: 116808 - DNA, 25 bp, Homo sapien
agagcagcccacaattttgcaatac

SEQ ID NO: 116809 - DNA, 25 bp, Homo sapien
gaacagagcagcccacaattttgca

SEQ ID NO: 116810 - DNA, 25 bp, Homo sapien
ccttatgaacagagcagcccacaat

SEQ ID NO: 116811 - DNA, 25 bp, Homo sapien
acctacagcggcccgggcatttctc

SEQ ID NO: 116812 - DNA, 25 bp, Homo sapien
acatctccacctacagcggcccggg

SEQ ID NO: 116813 - DNA, 25 bp, Homo sapien
tccacctacagcggcccgggcattt

SEQ ID NO: 116814 - DNA, 25 bp, Homo sapien
ctgtacatctccacctacagcggcc

SEQ ID NO: 116815 - DNA, 25 bp, Homo sapien
ttccccttcatgtttcctgatacat

SEQ ID NO: 116816 - DNA, 25 bp, Homo sapien
cactttttccccttcatgtttcctg

SEQ ID NO: 116817 - DNA, 25 bp, Homo sapien
catgctgacatttcgagggcactac

SEQ ID NO: 116818 - DNA, 25 bp, Homo sapien
ttcatgtttcctgatacatgctgac

SEQ ID NO: 116819 - DNA, 25 bp, Homo sapien
tgcttgtttcccctgttccttttca

SEQ ID NO: 116820 - DNA, 25 bp, Homo sapien
ctactgcttgtttcccctgttcctt

SEQ ID NO: 116821 - DNA, 25 bp, Homo sapien
tctactgcttgtttcccctgttcct

SEQ ID NO: 116822 - DNA, 25 bp, Homo sapien
ctctactgcttgtttcccctgttcc

SEQ ID NO: 116823 - DNA, 25 bp, Homo sapien
tcatggaactactgctctgctcctc

SEQ ID NO: 116824 - DNA, 25 bp, Homo sapien
catcatctagtaggtcctcctcagc

SEQ ID NO: 116825 - DNA, 25 bp, Homo sapien
tcatctttcttcatggaactactgc

SEQ ID NO: 116826 - DNA, 25 bp, Homo sapien
aagtcatctgcaccccgctccgact

SEQ ID NO: 116827 - DNA, 25 bp, Homo sapien
ctacgtaaagaaatgatgggataag

SEQ ID NO: 116828 - DNA, 25 bp, Homo sapien
agttatcttcgccattggtgctgtc

SEQ ID NO: 116829 - DNA, 25 bp, Homo sapien
cttaagagttatcttcgccattggt

SEQ ID NO: 116830 - DNA, 25 bp, Homo sapien
tatgtgcttaagagttatcttcgcc

SEQ ID NO: 116831 - DNA, 25 bp, Homo sapien
tactagggcatcaaaggaggtgaaa

SEQ ID NO: 116832 - DNA, 25 bp, Homo sapien
aacaaaactactagggcatcaaagg

SEQ ID NO: 116833 - DNA, 25 bp, Homo sapien
aaaactacgttgttgcatttgtgtt

SEQ ID NO: 116834 - DNA, 25 bp, Homo sapien
ctacgttgttgcatttgtgttgaac

SEQ ID NO: 116835 - DNA, 25 bp, Homo sapien
ccagataccagtcatagatctcctg

SEQ ID NO: 116836 - DNA, 25 bp, Homo sapien
acccaccagataccagtcatagatc

SEQ ID NO: 116837 - DNA, 25 bp, Homo sapien
gtttctgcgtgggtgtccttttatg

SEQ ID NO: 116838 - DNA, 25 bp, Homo sapien
ccttctaccattcacgcccctctgc

SEQ ID NO: 116839 - DNA, 25 bp, Homo sapien
tctcctgcgggcatttagtgttaga

SEQ ID NO: 116840 - DNA, 25 bp, Homo sapien
tcctcttgtctgctgcatacacata

SEQ ID NO: 116841 - DNA, 25 bp, Homo sapien
ctcctcttgtctgctgcatacacat

SEQ ID NO: 116842 - DNA, 25 bp, Homo sapien
ctcttgtctgctgcatacacataca

SEQ ID NO: 116843 - DNA, 25 bp, Homo sapien
tcttgtctgctgcatacacatacat

SEQ ID NO: 116844 - DNA, 25 bp, Homo sapien
ctgtgaaaacagtctgatacaaacc

SEQ ID NO: 116845 - DNA, 25 bp, Homo sapien
aaggcagcagttgttggctgtgaaa

SEQ ID NO: 116846 - DNA, 25 bp, Homo sapien
ctgatacaaaccagatgggaactta

SEQ ID NO: 116847 - DNA, 25 bp, Homo sapien
gtgtcaggatatagagaaggcagca

SEQ ID NO: 116848 - DNA, 25 bp, Homo sapien
ctgtaaggcacagctgtataggccc

SEQ ID NO: 116849 - DNA, 25 bp, Homo sapien
gggtaatagttccaagctgtaaggc

SEQ ID NO: 116850 - DNA, 25 bp, Homo sapien
tcgcagcagtgctttgatagcgtgg

SEQ ID NO: 116851 - DNA, 25 bp, Homo sapien
gcaaggccatcgcagcagtgctttg

SEQ ID NO: 116852 - DNA, 25 bp, Homo sapien
tgtacacacgacaccagtgggaata

SEQ ID NO: 116853 - DNA, 25 bp, Homo sapien
caccagtgggaataagggccagtcc

SEQ ID NO: 116854 - DNA, 25 bp, Homo sapien
cagtgggaataagggccagtccaag

SEQ ID NO: 116855 - DNA, 25 bp, Homo sapien
accagtgggaataagggccagtcca

SEQ ID NO: 116856 - DNA, 25 bp, Homo sapien
caagtaagtggcttcataattctca

SEQ ID NO: 116857 - DNA, 25 bp, Homo sapien
tactggaagggtgagtattgtgctc

SEQ ID NO: 116858 - DNA, 25 bp, Homo sapien
caaacacggcctacaactaggtcaa

SEQ ID NO: 116859 - DNA, 25 bp, Homo sapien
cacttgttgatttacgaggtttact

SEQ ID NO: 116860 - DNA, 25 bp, Homo sapien
caaaggtatcaataccacctcagag

SEQ ID NO: 116861 - DNA, 25 bp, Homo sapien
aaaggtatcaataccacctcagaga

SEQ ID NO: 116862 - DNA, 25 bp, Homo sapien
acaaaggtatcaataccacctcaga

SEQ ID NO: 116863 - DNA, 25 bp, Homo sapien
aggtatcaataccacctcagagatc

SEQ ID NO: 116864 - DNA, 25 bp, Homo sapien
tccctccagtttaatagagctccct

SEQ ID NO: 116865 - DNA, 25 bp, Homo sapien
tccaagagttagagagggacagaaa

SEQ ID NO: 116866 - DNA, 25 bp, Homo sapien
tggtccctccagtttaatagagctc

SEQ ID NO: 116867 - DNA, 25 bp, Homo sapien
tgtttctaaacttccaagagttaga

SEQ ID NO: 116868 - DNA, 25 bp, Homo sapien
aagaaaagtgcttactatgatgtta

SEQ ID NO: 116869 - DNA, 25 bp, Homo sapien
atgtttaaatgttatctgtgttcac

SEQ ID NO: 116870 - DNA, 25 bp, Homo sapien
aaagtgcttactatgatgttaatgt

SEQ ID NO: 116871 - DNA, 25 bp, Homo sapien
tttaaatgttatctgtgttcacttc

SEQ ID NO: 116872 - DNA, 25 bp, Homo sapien
tcagttaagcatagaaataatcatg

SEQ ID NO: 116873 - DNA, 25 bp, Homo sapien
tgattcattcctattcactaaaaga

SEQ ID NO: 116874 - DNA, 25 bp, Homo sapien
gatctagtggcctgaatgtaaagaa

SEQ ID NO: 116875 - DNA, 25 bp, Homo sapien
gcactcccaccgttattctcataaa

SEQ ID NO: 116876 - DNA, 25 bp, Homo sapien
tacggattaagctcaatttgtgtcc

SEQ ID NO: 116877 - DNA, 25 bp, Homo sapien
cacatgtgaggtacggattaagctc

SEQ ID NO: 116878 - DNA, 25 bp, Homo sapien
gctcaatttgtgtccgatccatatc

SEQ ID NO: 116879 - DNA, 25 bp, Homo sapien
aaaatacacatgtgaggtacggatt

SEQ ID NO: 116880 - DNA, 25 bp, Homo sapien
cccagctgtctgtgaaaatgttaca

SEQ ID NO: 116881 - DNA, 25 bp, Homo sapien
tctttaaaatcagccctgagttcca

SEQ ID NO: 116882 - DNA, 25 bp, Homo sapien
gttccagcaatgcagttgcttccca

SEQ ID NO: 116883 - DNA, 25 bp, Homo sapien
taaaatcagccctgagttccagcaa

SEQ ID NO: 116884 - DNA, 25 bp, Homo sapien
tcagaccatgcgttagaagcttcct

SEQ ID NO: 116885 - DNA, 25 bp, Homo sapien
tgaacaggcgaaaagggtaacattc

SEQ ID NO: 116886 - DNA, 25 bp, Homo sapien
tgcattccttaagggcatggacagt

SEQ ID NO: 116887 - DNA, 25 bp, Homo sapien
taagagaactctttagactgggaac

SEQ ID NO: 116888 - DNA, 25 bp, Homo sapien
ccaagtagctgcgagggactaaagg

SEQ ID NO: 116889 - DNA, 25 bp, Homo sapien
gacaaacctccacagcccgagttta

SEQ ID NO: 116890 - DNA, 25 bp, Homo sapien
tgacaaacctccacagcccgagttt

SEQ ID NO: 116891 - DNA, 25 bp, Homo sapien
ttacctatacaggaaaccttcttca

SEQ ID NO: 116892 - DNA, 25 bp, Homo sapien
tacctatacaggaaaccttcttcac

SEQ ID NO: 116893 - DNA, 25 bp, Homo sapien
gaagaagaggagcagaaaaaataac

SEQ ID NO: 116894 - DNA, 25 bp, Homo sapien
gaggaagaagaggagcagaaaaaat

SEQ ID NO: 116895 - DNA, 25 bp, Homo sapien
gagaggaagaagaggagcagaaaaa

SEQ ID NO: 116896 - DNA, 25 bp, Homo sapien
agaagaggagcagaaaaaataacta

SEQ ID NO: 116897 - DNA, 25 bp, Homo sapien
gatataaggttagcaatgtcagagg

SEQ ID NO: 116898 - DNA, 25 bp, Homo sapien
cccacttcatggattgagagcaata

SEQ ID NO: 116899 - DNA, 25 bp, Homo sapien
tactgagtgcctaagggtgctatgc

SEQ ID NO: 116900 - DNA, 25 bp, Homo sapien
gaaaaacatactgcagtggtcatcc

SEQ ID NO: 116901 - DNA, 25 bp, Homo sapien
taaaggtttgtggttagagcaagaa

SEQ ID NO: 116902 - DNA, 25 bp, Homo sapien
tcccattaccattaaaagatagcca

SEQ ID NO: 116903 - DNA, 25 bp, Homo sapien
taagtggtcaaaaactaagcgctcc

SEQ ID NO: 116904 - DNA, 25 bp, Homo sapien
tagctaggagagcaataaaacacta

SEQ ID NO: 116905 - DNA, 25 bp, Homo sapien
acaaaggagaagctcattcagctca

SEQ ID NO: 116906 - DNA, 25 bp, Homo sapien
tcattcagctcaacatgcgtaacct

SEQ ID NO: 116907 - DNA, 25 bp, Homo sapien
tgcgtaacctgagtatttacgtgct

SEQ ID NO: 116908 - DNA, 25 bp, Homo sapien
caacatgcgtaacctgagtatttac

SEQ ID NO: 116909 - DNA, 25 bp, Homo sapien
tgtgaagcggagagtggcactgctt

SEQ ID NO: 116910 - DNA, 25 bp, Homo sapien
gcggagagtggcactgctttcccac

SEQ ID NO: 116911 - DNA, 25 bp, Homo sapien
tctgtgaagcggagagtggcactgc

SEQ ID NO: 116912 - DNA, 25 bp, Homo sapien
gaagcggagagtggcactgctttcc

SEQ ID NO: 116913 - DNA, 25 bp, Homo sapien
gtatctgcccccgaagactccatgt

SEQ ID NO: 116914 - DNA, 25 bp, Homo sapien
tcactgacggcagcatcactgacat

SEQ ID NO: 116915 - DNA, 25 bp, Homo sapien
cctcgaggttcactgacggcagcat

SEQ ID NO: 116916 - DNA, 25 bp, Homo sapien
agcagtcctcgaggttcactgacgg

SEQ ID NO: 116917 - DNA, 25 bp, Homo sapien
aaaccagtggcataaacactgtgct

SEQ ID NO: 116918 - DNA, 25 bp, Homo sapien
aacagtctgagagagggttttaagc

SEQ ID NO: 116919 - DNA, 25 bp, Homo sapien
cagtctgagagagggttttaagcca

SEQ ID NO: 116920 - DNA, 25 bp, Homo sapien
tctgagagagggttttaagccaagg

SEQ ID NO: 116921 - DNA, 25 bp, Homo sapien
accaaacagtctgagagagggtttt

SEQ ID NO: 116922 - DNA, 25 bp, Homo sapien
tcactactctatgctatctcaggat

SEQ ID NO: 116923 - DNA, 25 bp, Homo sapien
taatagagttacatgtttcacaggt

SEQ ID NO: 116924 - DNA, 25 bp, Homo sapien
tgcctagatgtcaaaagccatgccc

SEQ ID NO: 116925 - DNA, 25 bp, Homo sapien
tactccctggagacaaacttagcag

SEQ ID NO: 116926 - DNA, 25 bp, Homo sapien
cccagagtcttgtagatgaatatca

SEQ ID NO: 116927 - DNA, 25 bp, Homo sapien
caaagggccatatcaaagaaaacgg

SEQ ID NO: 116928 - DNA, 25 bp, Homo sapien
tgcacagggagtagaataaatcaaa

SEQ ID NO: 116929 - DNA, 25 bp, Homo sapien
taaccaaatacctgagagaagctgt

SEQ ID NO: 116930 - DNA, 25 bp, Homo sapien
agtatacaaagaacgaatttaggat

SEQ ID NO: 116931 - DNA, 25 bp, Homo sapien
gatgtcaacagttccctgatactgg

SEQ ID NO: 116932 - DNA, 25 bp, Homo sapien
aaagagatgtcaacagttccctgat

SEQ ID NO: 116933 - DNA, 25 bp, Homo sapien
cctgatactggaaggacagagttta

SEQ ID NO: 116934 - DNA, 25 bp, Homo sapien
tccctgatactggaaggacagagtt

SEQ ID NO: 116935 - DNA, 25 bp, Homo sapien
acagctctcagacaagtcctcaaca

SEQ ID NO: 116936 - DNA, 25 bp, Homo sapien
acatcatatatcagtgtcaaaatgc

SEQ ID NO: 116937 - DNA, 25 bp, Homo sapien
caatccggcatacatgagaaccagc

SEQ ID NO: 116938 - DNA, 25 bp, Homo sapien
gcacttcagctgatactttccacag

SEQ ID NO: 116939 - DNA, 25 bp, Homo sapien
cgggccaatcttggccacggagtgc

SEQ ID NO: 116940 - DNA, 25 bp, Homo sapien
cagccaataactcgggccaatcttg

SEQ ID NO: 116941 - DNA, 25 bp, Homo sapien
aagtcacagccaataactcgggcca

SEQ ID NO: 116942 - DNA, 25 bp, Homo sapien
taactcgggccaatcttggccacgg

SEQ ID NO: 116943 - DNA, 25 bp, Homo sapien
tattttcctaccatttgtcaaccca

SEQ ID NO: 116944 - DNA, 25 bp, Homo sapien
gagttctacagtcatattgtgattg

SEQ ID NO: 116945 - DNA, 25 bp, Homo sapien
attttcctaccatttgtcaacccag

SEQ ID NO: 116946 - DNA, 25 bp, Homo sapien
agactgagttctacagtcatattgt

SEQ ID NO: 116947 - DNA, 25 bp, Homo sapien
aacggctgtggcttgccgaatcaaa

SEQ ID NO: 116948 - DNA, 25 bp, Homo sapien
cttgccttgtaacggaaacccagtg

SEQ ID NO: 116949 - DNA, 25 bp, Homo sapien
aattttggatgtcaataagagaccc

SEQ ID NO: 116950 - DNA, 25 bp, Homo sapien
tgtttttaacggctgtggcttgccg

SEQ ID NO: 116951 - DNA, 25 bp, Homo sapien
ctcatttctgtaggtggacaactct

SEQ ID NO: 116952 - DNA, 25 bp, Homo sapien
gagaagacacagtacctccgaggct

SEQ ID NO: 116953 - DNA, 25 bp, Homo sapien
caacaggcagtattcttttcaggga

SEQ ID NO: 116954 - DNA, 25 bp, Homo sapien
ctatgtcctgagatagaagctggca

SEQ ID NO: 116955 - DNA, 25 bp, Homo sapien
tccgaggctcaaaaggaccagtatt

SEQ ID NO: 116956 - DNA, 25 bp, Homo sapien
cgaaggtgtccacgccccacacatg

SEQ ID NO: 116957 - DNA, 25 bp, Homo sapien
cgccccacacatggccgagaagtgg

SEQ ID NO: 116958 - DNA, 25 bp, Homo sapien
agaagtggagtccttgaacacaaag

SEQ ID NO: 116959 - DNA, 25 bp, Homo sapien
tggccgagaagtggagtccttgaac

SEQ ID NO: 116960 - DNA, 25 bp, Homo sapien
tccagccttagaagatgcaaaaggc

SEQ ID NO: 116961 - DNA, 25 bp, Homo sapien
tgcaaaaggcaacaacccagggctc

SEQ ID NO: 116962 - DNA, 25 bp, Homo sapien
agtcccttctctgtataagctggtg

SEQ ID NO: 116963 - DNA, 25 bp, Homo sapien
gctggtgaacccactgaactcatct

SEQ ID NO: 116964 - DNA, 25 bp, Homo sapien
gcaccagatgctttttacccttagg

SEQ ID NO: 116965 - DNA, 25 bp, Homo sapien
aagctcagcacgggcgaagtgcgca

SEQ ID NO: 116966 - DNA, 25 bp, Homo sapien
tacccttaggcttcgtggttatgcc

SEQ ID NO: 116967 - DNA, 25 bp, Homo sapien
cacgggcgaagtgcgcagcagaaaa

SEQ ID NO: 116968 - DNA, 25 bp, Homo sapien
aaatgtacaattaatgactgctgag

SEQ ID NO: 116969 - DNA, 25 bp, Homo sapien
gcgcgatcttacaagaaacgcaaca

SEQ ID NO: 116970 - DNA, 25 bp, Homo sapien
aaacgcaacacccagagttagtgca

SEQ ID NO: 116971 - DNA, 25 bp, Homo sapien
aactgaagcacaaagcgcgatctta

SEQ ID NO: 116972 - DNA, 25 bp, Homo sapien
caccacgggggggtgtccctgtatg

SEQ ID NO: 116973 - DNA, 25 bp, Homo sapien
aaacttggttctgctgcaccacggg

SEQ ID NO: 116974 - DNA, 25 bp, Homo sapien
cacgggggggtgtccctgtatgcat

SEQ ID NO: 116975 - DNA, 25 bp, Homo sapien
cttcggtcagaacagagggaggaaa

SEQ ID NO: 116976 - DNA, 25 bp, Homo sapien
aggtgcagagttccatgtgtgcaaa

SEQ ID NO: 116977 - DNA, 25 bp, Homo sapien
ggtgcagagttccatgtgtgcaaat

SEQ ID NO: 116978 - DNA, 25 bp, Homo sapien
aaggtgcagagttccatgtgtgcaa

SEQ ID NO: 116979 - DNA, 25 bp, Homo sapien
gaaggtgcagagttccatgtgtgca

SEQ ID NO: 116980 - DNA, 25 bp, Homo sapien
tgtctggaagtgagttgcattcccc

SEQ ID NO: 116981 - DNA, 25 bp, Homo sapien
tccccaccgtcgtaatcactgatta

SEQ ID NO: 116982 - DNA, 25 bp, Homo sapien
ggccagggtgattccatgaagtttg

SEQ ID NO: 116983 - DNA, 25 bp, Homo sapien
taaggtgattaagtctccaccagcc

SEQ ID NO: 116984 - DNA, 25 bp, Homo sapien
tctacaaatgccttgtccagcggtg

SEQ ID NO: 116985 - DNA, 25 bp, Homo sapien
cattctacaaatgccttgtccagcg

SEQ ID NO: 116986 - DNA, 25 bp, Homo sapien
aaatgccttgtccagcggtgaacat

SEQ ID NO: 116987 - DNA, 25 bp, Homo sapien
tacaaatgccttgtccagcggtgaa

SEQ ID NO: 116988 - DNA, 25 bp, Homo sapien
cgattttgccctcgctcctcattgg

SEQ ID NO: 116989 - DNA, 25 bp, Homo sapien
gcagttgggctctccggagaacttt

SEQ ID NO: 116990 - DNA, 25 bp, Homo sapien
tggctctttctcgtcgcccaaagct

SEQ ID NO: 116991 - DNA, 25 bp, Homo sapien
cagcatcctgttacagtcggccgcg

SEQ ID NO: 116992 - DNA, 25 bp, Homo sapien
gggacggtggctagaagccctcgag

SEQ ID NO: 116993 - DNA, 25 bp, Homo sapien
cggtggctagaagccctcgagtcct

SEQ ID NO: 116994 - DNA, 25 bp, Homo sapien
agaagccctcgagtcctgcgcgcga

SEQ ID NO: 116995 - DNA, 25 bp, Homo sapien
tggctagaagccctcgagtcctgcg

SEQ ID NO: 116996 - DNA, 25 bp, Homo sapien
cagtcgggcagcgagagccgtcacc

SEQ ID NO: 116997 - DNA, 25 bp, Homo sapien
agcgagagccgtcaccgcagccggg

SEQ ID NO: 116998 - DNA, 25 bp, Homo sapien
cccccagtcgggcagcgagagccgt

SEQ ID NO: 116999 - DNA, 25 bp, Homo sapien
tcgggcagcgagagccgtcaccgca

SEQ ID NO: 117000 - DNA, 25 bp, Homo sapien
ccgtcccggccggactcggcttcat

SEQ ID NO: 117001 - DNA, 25 bp, Homo sapien
gtgcgctgccgctcggtgtctgcct

SEQ ID NO: 117002 - DNA, 25 bp, Homo sapien
tcccgggtgcgctgccgctcggtgt

SEQ ID NO: 117003 - DNA, 25 bp, Homo sapien
gggctccgccgtgcgctgctcgcct

SEQ ID NO: 117004 - DNA, 25 bp, Homo sapien
tcttagcagcaagatgttctcctcc

SEQ ID NO: 117005 - DNA, 25 bp, Homo sapien
tctcctccaggcgactgcgctgcgc

SEQ ID NO: 117006 - DNA, 25 bp, Homo sapien
tgctttcttagcagcaagatgttct

SEQ ID NO: 117007 - DNA, 25 bp, Homo sapien
caattgctttcttagcagcaagatg

SEQ ID NO: 117008 - DNA, 25 bp, Homo sapien
tcacagctggcagaacgtataaaat

SEQ ID NO: 117009 - DNA, 25 bp, Homo sapien
acgtataaaatatgagaggagggga

SEQ ID NO: 117010 - DNA, 25 bp, Homo sapien
cgtataaaatatgagaggaggggac

SEQ ID NO: 117011 - DNA, 25 bp, Homo sapien
cagctggcagaacgtataaaatatg

SEQ ID NO: 117012 - DNA, 25 bp, Homo sapien
gctaggccgactgtctgtctccagg

SEQ ID NO: 117013 - DNA, 25 bp, Homo sapien
ctcaggtcacttatctgcttgtcaa

SEQ ID NO: 117014 - DNA, 25 bp, Homo sapien
tgcttgtcaagctcttgcaactgat

SEQ ID NO: 117015 - DNA, 25 bp, Homo sapien
tttctacatccagtctcaggtcact

SEQ ID NO: 117016 - DNA, 25 bp, Homo sapien
aaagcaggtgctggaatgacaactg

SEQ ID NO: 117017 - DNA, 25 bp, Homo sapien
agggatcctgaagccccatcactca

SEQ ID NO: 117018 - DNA, 25 bp, Homo sapien
tctgagagactcaaggtcgcctcca

SEQ ID NO: 117019 - DNA, 25 bp, Homo sapien
cactcactgaacaccgagttagagg

SEQ ID NO: 117020 - DNA, 25 bp, Homo sapien
ctagatgaaactgagttctagatgt

SEQ ID NO: 117021 - DNA, 25 bp, Homo sapien
tagatgtaagtatggcactaaatgc

SEQ ID NO: 117022 - DNA, 25 bp, Homo sapien
actaaatgccgcaaagtgatgaacc

SEQ ID NO: 117023 - DNA, 25 bp, Homo sapien
ctgagttctagatgtaagtatggca

SEQ ID NO: 117024 - DNA, 25 bp, Homo sapien
tacagacaacctaacagcaaaggct

SEQ ID NO: 117025 - DNA, 25 bp, Homo sapien
acctaacagcaaaggctcagaaaca

SEQ ID NO: 117026 - DNA, 25 bp, Homo sapien
gaaagaaaatacagacaacctaaca

SEQ ID NO: 117027 - DNA, 25 bp, Homo sapien
cctggctgagttttagctttacata

SEQ ID NO: 117028 - DNA, 25 bp, Homo sapien
tgtgcttcctcaaatgattgctgct

SEQ ID NO: 117029 - DNA, 25 bp, Homo sapien
gatatgaagacaccagccaattagc

SEQ ID NO: 117030 - DNA, 25 bp, Homo sapien
caaggcctggtgcaactgtctcaat

SEQ ID NO: 117031 - DNA, 25 bp, Homo sapien
gcccagaccctctagataacacagt

SEQ ID NO: 117032 - DNA, 25 bp, Homo sapien
tcaagggaattaaattgtggtgtgg

SEQ ID NO: 117033 - DNA, 25 bp, Homo sapien
caagggaattaaattgtggtgtgga

SEQ ID NO: 117034 - DNA, 25 bp, Homo sapien
gagagggaacggcaaactgcccctg

SEQ ID NO: 117035 - DNA, 25 bp, Homo sapien
ggaacggcaaactgcccctgaggcc

SEQ ID NO: 117036 - DNA, 25 bp, Homo sapien
cattcccgtttttagacaccagatc

SEQ ID NO: 117037 - DNA, 25 bp, Homo sapien
gatatacatcattcccgtttttaga

SEQ ID NO: 117038 - DNA, 25 bp, Homo sapien
agacaccagatcacactggtacttg

SEQ ID NO: 117039 - DNA, 25 bp, Homo sapien
gtggactgggatagcgatatacatc

SEQ ID NO: 117040 - DNA, 25 bp, Homo sapien
tacaactttgttctcctgcggcggg

SEQ ID NO: 117041 - DNA, 25 bp, Homo sapien
gacacgcctgtttcgaattcttaag

SEQ ID NO: 117042 - DNA, 25 bp, Homo sapien
tgttcagagaaggtatcccgccaga

SEQ ID NO: 117043 - DNA, 25 bp, Homo sapien
gtcccaatggcggaacaccgagcat

SEQ ID NO: 117044 - DNA, 25 bp, Homo sapien
tgacggtgggcaagccgttctccag

SEQ ID NO: 117045 - DNA, 25 bp, Homo sapien
ctgacggtgggcaagccgttctcca

SEQ ID NO: 117046 - DNA, 25 bp, Homo sapien
acggtgggcaagccgttctccagcc

SEQ ID NO: 117047 - DNA, 25 bp, Homo sapien
gacggtgggcaagccgttctccagc

SEQ ID NO: 117048 - DNA, 25 bp, Homo sapien
ttcaaagagccagaccgaaagcgga

SEQ ID NO: 117049 - DNA, 25 bp, Homo sapien
tcgctgtccccgaagcagttggtgg

SEQ ID NO: 117050 - DNA, 25 bp, Homo sapien
agtactcggagtcgctagccacgta

SEQ ID NO: 117051 - DNA, 25 bp, Homo sapien
tcttcgtaggaaatctcggccgagg

SEQ ID NO: 117052 - DNA, 25 bp, Homo sapien
ttattaggaacagggcctaggcacc

SEQ ID NO: 117053 - DNA, 25 bp, Homo sapien
tatgtggtgcccctcaacaggaaaa

SEQ ID NO: 117054 - DNA, 25 bp, Homo sapien
tagtgaatgtctctgtgcccaagga

SEQ ID NO: 117055 - DNA, 25 bp, Homo sapien
taatatgttcaggtcaacgcttcgg

SEQ ID NO: 117056 - DNA, 25 bp, Homo sapien
catctggttttatacccaaataaca

SEQ ID NO: 117057 - DNA, 25 bp, Homo sapien
gtgtaaacatctggttttataccca

SEQ ID NO: 117058 - DNA, 25 bp, Homo sapien
tgtaaacatctggttttatacccaa

SEQ ID NO: 117059 - DNA, 25 bp, Homo sapien
acaggtgtaaacatctggttttata

SEQ ID NO: 117060 - DNA, 25 bp, Homo sapien
tcacactagatcgttaaatttaaaa

SEQ ID NO: 117061 - DNA, 25 bp, Homo sapien
aagttcacactagatcgttaaattt

SEQ ID NO: 117062 - DNA, 25 bp, Homo sapien
ttaaaatgcaggttataagacagca

SEQ ID NO: 117063 - DNA, 25 bp, Homo sapien
taagacagcaatttgagagtatttt

SEQ ID NO: 117064 - DNA, 25 bp, Homo sapien
agatgagggctgtttacagaacacc

SEQ ID NO: 117065 - DNA, 25 bp, Homo sapien
ctggagaacaggcaagcatctggca

SEQ ID NO: 117066 - DNA, 25 bp, Homo sapien
gagccacaggctatgagagataccc

SEQ ID NO: 117067 - DNA, 25 bp, Homo sapien
gagagatacccatccatgctgacag

SEQ ID NO: 117068 - DNA, 25 bp, Homo sapien
aagatatgtacccttaatggataac

SEQ ID NO: 117069 - DNA, 25 bp, Homo sapien
acccagcatccattctgtaccctga

SEQ ID NO: 117070 - DNA, 25 bp, Homo sapien
gatatgtacccttaatggataacat

SEQ ID NO: 117071 - DNA, 25 bp, Homo sapien
attgtaagatatgtacccttaatgg

SEQ ID NO: 117072 - DNA, 25 bp, Homo sapien
caacaaatccttggccttcctgaag

SEQ ID NO: 117073 - DNA, 25 bp, Homo sapien
tagcaacaaatccttggccttcctg

SEQ ID NO: 117074 - DNA, 25 bp, Homo sapien
ctttagcaacaaatccttggccttc

SEQ ID NO: 117075 - DNA, 25 bp, Homo sapien
ccttcctgaagccatctgaccccat

SEQ ID NO: 117076 - DNA, 25 bp, Homo sapien
tctccctggtgtgactgaggcgtgc

SEQ ID NO: 117077 - DNA, 25 bp, Homo sapien
gctgaaaggtgaggctgtcacacag

SEQ ID NO: 117078 - DNA, 25 bp, Homo sapien
gaagcaggcgcaagctctcttctct

SEQ ID NO: 117079 - DNA, 25 bp, Homo sapien
aggaagcaggcgcaagctctcttct

SEQ ID NO: 117080 - DNA, 25 bp, Homo sapien
ctgcatgtgaagcagctggcaactt

SEQ ID NO: 117081 - DNA, 25 bp, Homo sapien
cagacacactggcatacggctagat

SEQ ID NO: 117082 - DNA, 25 bp, Homo sapien
aaataagttcttacatttcgtggca

SEQ ID NO: 117083 - DNA, 25 bp, Homo sapien
ttgcagtttcactcctgaggcaccg

SEQ ID NO: 117084 - DNA, 25 bp, Homo sapien
actcctgaggcaccgaaaccaagaa

SEQ ID NO: 117085 - DNA, 25 bp, Homo sapien
ctctaaatcacagggaaggcacctt

SEQ ID NO: 117086 - DNA, 25 bp, Homo sapien
ctcccatgggataggtatacttggg

SEQ ID NO: 117087 - DNA, 25 bp, Homo sapien
tgctcccatgggataggtatacttg

SEQ ID NO: 117088 - DNA, 25 bp, Homo sapien
agctgctcccatgggataggtatac

SEQ ID NO: 117089 - DNA, 25 bp, Homo sapien
gagctgctcccatgggataggtata

SEQ ID NO: 117090 - DNA, 25 bp, Homo sapien
gaagtgctgtcagaatgtctaacac

SEQ ID NO: 117091 - DNA, 25 bp, Homo sapien
tcagaatgtctaacacagagattca

SEQ ID NO: 117092 - DNA, 25 bp, Homo sapien
gctgtcagaatgtctaacacagaga

SEQ ID NO: 117093 - DNA, 25 bp, Homo sapien
ctggaagtgctgtcagaatgtctaa

SEQ ID NO: 117094 - DNA, 25 bp, Homo sapien
tgtttgtgaatgatagccctgcagg

SEQ ID NO: 117095 - DNA, 25 bp, Homo sapien
tagccctgcaggatatcctctttaa

SEQ ID NO: 117096 - DNA, 25 bp, Homo sapien
gctttgcagctgttgataatgggtc

SEQ ID NO: 117097 - DNA, 25 bp, Homo sapien
gggtccctgcccaagtgtggattta

SEQ ID NO: 117098 - DNA, 25 bp, Homo sapien
ccaaataagaaaattctgagcttag

SEQ ID NO: 117099 - DNA, 25 bp, Homo sapien
ttcctctgcatgtgctattccagca

SEQ ID NO: 117100 - DNA, 25 bp, Homo sapien
gcatccaccataagatctgttgagg

SEQ ID NO: 117101 - DNA, 25 bp, Homo sapien
gaagacttcatcaaacagagctcct

SEQ ID NO: 117102 - DNA, 25 bp, Homo sapien
ttataggacaacatcgctgagtacc

SEQ ID NO: 117103 - DNA, 25 bp, Homo sapien
tccagaggaattataggacaacatc

SEQ ID NO: 117104 - DNA, 25 bp, Homo sapien
gaattataggacaacatcgctgagt

SEQ ID NO: 117105 - DNA, 25 bp, Homo sapien
gaggaattataggacaacatcgctg

SEQ ID NO: 117106 - DNA, 25 bp, Homo sapien
ctgctgttcttgcaggaatgactgt

SEQ ID NO: 117107 - DNA, 25 bp, Homo sapien
ctgttcttgcaggaatgactgtgtg

SEQ ID NO: 117108 - DNA, 25 bp, Homo sapien
tgctgttcttgcaggaatgactgtg

SEQ ID NO: 117109 - DNA, 25 bp, Homo sapien
tgggctgctcattgttatccttgtt

SEQ ID NO: 117110 - DNA, 25 bp, Homo sapien
tgggccccagtaattctcaagtttg

SEQ ID NO: 117111 - DNA, 25 bp, Homo sapien
ggcaatagaatagtttgtgtggcta

SEQ ID NO: 117112 - DNA, 25 bp, Homo sapien
gaatccggctagctgtccttattag

SEQ ID NO: 117113 - DNA, 25 bp, Homo sapien
tctcaagtttggtgagaatccggct

SEQ ID NO: 117114 - DNA, 25 bp, Homo sapien
tgatttgagcaaaacatccatgcct

SEQ ID NO: 117115 - DNA, 25 bp, Homo sapien
ttgatttgagcaaaacatccatgcc

SEQ ID NO: 117116 - DNA, 25 bp, Homo sapien
gatttgagcaaaacatccatgcctt

SEQ ID NO: 117117 - DNA, 25 bp, Homo sapien
tttgagcaaaacatccatgcctttt

SEQ ID NO: 117118 - DNA, 25 bp, Homo sapien
acacggcatagagggactgtggttt

SEQ ID NO: 117119 - DNA, 25 bp, Homo sapien
tcaggaacacggcatagagggactg

SEQ ID NO: 117120 - DNA, 25 bp, Homo sapien
tggaaccctctgcatcacttttatc

SEQ ID NO: 117121 - DNA, 25 bp, Homo sapien
gaaccctctgcatcacttttatctg

SEQ ID NO: 117122 - DNA, 25 bp, Homo sapien
tggccagatttagcacttccgggtg

SEQ ID NO: 117123 - DNA, 25 bp, Homo sapien
tccgggtgagctatcttaacaatgc

SEQ ID NO: 117124 - DNA, 25 bp, Homo sapien
gagtcttaacacagcgttgggtgcc

SEQ ID NO: 117125 - DNA, 25 bp, Homo sapien
taagcccattggtgaggcctcatcg

SEQ ID NO: 117126 - DNA, 25 bp, Homo sapien
gaagcttcacttagagccaaatgga

SEQ ID NO: 117127 - DNA, 25 bp, Homo sapien
gctgtggagttcttggacaaaagcc

SEQ ID NO: 117128 - DNA, 25 bp, Homo sapien
gccaaatggagcaaatcagactgtg

SEQ ID NO: 117129 - DNA, 25 bp, Homo sapien
gatgacacaataacctctgcgggaa

SEQ ID NO: 117130 - DNA, 25 bp, Homo sapien
tgatacacaattcgcacaagattcc

SEQ ID NO: 117131 - DNA, 25 bp, Homo sapien
tacacaattcgcacaagattccaga

SEQ ID NO: 117132 - DNA, 25 bp, Homo sapien
gttgatacacaattcgcacaagatt

SEQ ID NO: 117133 - DNA, 25 bp, Homo sapien
caattcgcacaagattccagaaatg

SEQ ID NO: 117134 - DNA, 25 bp, Homo sapien
gtgagagcagatgacaagtccgtga

SEQ ID NO: 117135 - DNA, 25 bp, Homo sapien
agcattgagatcctctgaagtcctg

SEQ ID NO: 117136 - DNA, 25 bp, Homo sapien
agcagcattgagatcctctgaagtc

SEQ ID NO: 117137 - DNA, 25 bp, Homo sapien
gcagatgacaagtccgtgagtggcc

SEQ ID NO: 117138 - DNA, 25 bp, Homo sapien
ctgctcagggaggggcgtaccaggg

SEQ ID NO: 117139 - DNA, 25 bp, Homo sapien
ctggcaggatgaggagaaaagggag

SEQ ID NO: 117140 - DNA, 25 bp, Homo sapien
ggaggggcgtaccagggagcctggc

SEQ ID NO: 117141 - DNA, 25 bp, Homo sapien
ctgtggagacagagccacgctgctc

SEQ ID NO: 117142 - DNA, 25 bp, Homo sapien
caaaagctgatccagtcgctaccga

SEQ ID NO: 117143 - DNA, 25 bp, Homo sapien
ctcacagatactgactgccctcttg

SEQ ID NO: 117144 - DNA, 25 bp, Homo sapien
ccttgtttctgggacactgtgacag

SEQ ID NO: 117145 - DNA, 25 bp, Homo sapien
tcttgataacaagcctcccagcatt

SEQ ID NO: 117146 - DNA, 25 bp, Homo sapien
gtgatccgatccagagttcagaagg

SEQ ID NO: 117147 - DNA, 25 bp, Homo sapien
caccgggacagaagacgagagaggt

SEQ ID NO: 117148 - DNA, 25 bp, Homo sapien
gacgagagaggtgatccgatccaga

SEQ ID NO: 117149 - DNA, 25 bp, Homo sapien
gatccagagttcagaagggcactca

SEQ ID NO: 117150 - DNA, 25 bp, Homo sapien
gccagagtcttaacccaaaaggcta

SEQ ID NO: 117151 - DNA, 25 bp, Homo sapien
caatttgaggtactccacaaagtcc

SEQ ID NO: 117152 - DNA, 25 bp, Homo sapien
tctctagaggtagctcagattccac

SEQ ID NO: 117153 - DNA, 25 bp, Homo sapien
caaagtccattaaccggctcagtca

SEQ ID NO: 117154 - DNA, 25 bp, Homo sapien
cgaaacatcagcatgtccacagtga

SEQ ID NO: 117155 - DNA, 25 bp, Homo sapien
taaaactgcgaaacctattaggcat

SEQ ID NO: 117156 - DNA, 25 bp, Homo sapien
ggataagtaggtacagatctcagga

SEQ ID NO: 117157 - DNA, 25 bp, Homo sapien
gctgaggataatgctccctgagaat

SEQ ID NO: 117158 - DNA, 25 bp, Homo sapien
tggagccactctgacacaaatgatt

SEQ ID NO: 117159 - DNA, 25 bp, Homo sapien
tctctgataatcctctgtatgccag

SEQ ID NO: 117160 - DNA, 25 bp, Homo sapien
aaagacagccccaagagactgcaaa

SEQ ID NO: 117161 - DNA, 25 bp, Homo sapien
ccagttctgaacaatcttggagcca

SEQ ID NO: 117162 - DNA, 25 bp, Homo sapien
tgaaaaattatcagtgctcttggga

SEQ ID NO: 117163 - DNA, 25 bp, Homo sapien
gaagcgaccagtagaaattcaagga

SEQ ID NO: 117164 - DNA, 25 bp, Homo sapien
cttgggatttatggaagcagtcagc

SEQ ID NO: 117165 - DNA, 25 bp, Homo sapien
gccaagttacaattagaagcgacca

SEQ ID NO: 117166 - DNA, 25 bp, Homo sapien
cctttctcagtcctatgagaaggag

SEQ ID NO: 117167 - DNA, 25 bp, Homo sapien
tctggccacctggttggagaactca

SEQ ID NO: 117168 - DNA, 25 bp, Homo sapien
gttaccccatcctttctcagtccta

SEQ ID NO: 117169 - DNA, 25 bp, Homo sapien
tctgtaaccccatgttaccccatcc

SEQ ID NO: 117170 - DNA, 25 bp, Homo sapien
accaccctgaggttctcttatacct

SEQ ID NO: 117171 - DNA, 25 bp, Homo sapien
ttttcaaatgtacactaccaccacc

SEQ ID NO: 117172 - DNA, 25 bp, Homo sapien
ccaccaccctgaggttctcttatac

SEQ ID NO: 117173 - DNA, 25 bp, Homo sapien
tcgttgatggcaacggcccgttttc

SEQ ID NO: 117174 - DNA, 25 bp, Homo sapien
cctcacatggattcggtataggaca

SEQ ID NO: 117175 - DNA, 25 bp, Homo sapien
gacagcctcacatggattcggtata

SEQ ID NO: 117176 - DNA, 25 bp, Homo sapien
gcctcacatggattcggtataggac

SEQ ID NO: 117177 - DNA, 25 bp, Homo sapien
cagcctcacatggattcggtatagg

SEQ ID NO: 117178 - DNA, 25 bp, Homo sapien
ataactttatttgatgtatctgacg

SEQ ID NO: 117179 - DNA, 25 bp, Homo sapien
tttataactttatttgatgtatctg

SEQ ID NO: 117180 - DNA, 25 bp, Homo sapien
tataactttatttgatgtatctgac

SEQ ID NO: 117181 - DNA, 25 bp, Homo sapien
taactttatttgatgtatctgacga

SEQ ID NO: 117182 - DNA, 25 bp, Homo sapien
ttgtgtcaagatctagcgctgtcat

SEQ ID NO: 117183 - DNA, 25 bp, Homo sapien
cagccattaaggtaatttgtgtcaa

SEQ ID NO: 117184 - DNA, 25 bp, Homo sapien
ttgcacagccattaaggtaatttgt

SEQ ID NO: 117185 - DNA, 25 bp, Homo sapien
gtaatttgtgtcaagatctagcgct

SEQ ID NO: 117186 - DNA, 25 bp, Homo sapien
ggcaggcagacaatgctttcaacat

SEQ ID NO: 117187 - DNA, 25 bp, Homo sapien
ttaagcagaggccttggactgagga

SEQ ID NO: 117188 - DNA, 25 bp, Homo sapien
ccttggactgaggacagtgtcctgc

SEQ ID NO: 117189 - DNA, 25 bp, Homo sapien
tccatgggacaggactcaggagatg

SEQ ID NO: 117190 - DNA, 25 bp, Homo sapien
tgcagttccagaggcatagcaggcc

SEQ ID NO: 117191 - DNA, 25 bp, Homo sapien
tgtgtcagacaagggcaaaggtata

SEQ ID NO: 117192 - DNA, 25 bp, Homo sapien
caggaatattccagtggcactcgga

SEQ ID NO: 117193 - DNA, 25 bp, Homo sapien
agttgctctgggcactacggttctc

SEQ ID NO: 117194 - DNA, 25 bp, Homo sapien
gtccctactcttgccgcagcctggc

SEQ ID NO: 117195 - DNA, 25 bp, Homo sapien
ctgtccctactcttgccgcagcctg

SEQ ID NO: 117196 - DNA, 25 bp, Homo sapien
tgtccctactcttgccgcagcctgg

SEQ ID NO: 117197 - DNA, 25 bp, Homo sapien
ccaatgacattcatgctgtactgat

SEQ ID NO: 117198 - DNA, 25 bp, Homo sapien
tggactgtgcacacttgggttgtca

SEQ ID NO: 117199 - DNA, 25 bp, Homo sapien
acagccaacagcaccggatggactg

SEQ ID NO: 117200 - DNA, 25 bp, Homo sapien
tccccattttattgctccaatgaca

SEQ ID NO: 117201 - DNA, 25 bp, Homo sapien
ccatgaggacgatgtgaacgggact

SEQ ID NO: 117202 - DNA, 25 bp, Homo sapien
gagctccccggaagcatggagaccg

SEQ ID NO: 117203 - DNA, 25 bp, Homo sapien
tgtcgtggaggaacctagctcctgc

SEQ ID NO: 117204 - DNA, 25 bp, Homo sapien
gagaccgtggtgatagttgccatag

SEQ ID NO: 117205 - DNA, 25 bp, Homo sapien
cttctaatttcaatttgctgtgtgc

SEQ ID NO: 117206 - DNA, 25 bp, Homo sapien
gaaacatgcaataaaaatcactgcc

SEQ ID NO: 117207 - DNA, 25 bp, Homo sapien
atgaaacatgcaataaaaatcactg

SEQ ID NO: 117208 - DNA, 25 bp, Homo sapien
gctgtgtgcagaattccttcttttc

SEQ ID NO: 117209 - DNA, 25 bp, Homo sapien
taagactcacattgacaagagccag

SEQ ID NO: 117210 - DNA, 25 bp, Homo sapien
tcacaaggttgtacgaatggacaca

SEQ ID NO: 117211 - DNA, 25 bp, Homo sapien
gatactgatttaaccccagggagag

SEQ ID NO: 117212 - DNA, 25 bp, Homo sapien
catcagttggcatcgaaaagtccca

SEQ ID NO: 117213 - DNA, 25 bp, Homo sapien
tctcatcaccttgactgaagatgtc

SEQ ID NO: 117214 - DNA, 25 bp, Homo sapien
caccttgactgaagatgtcgttgct

SEQ ID NO: 117215 - DNA, 25 bp, Homo sapien
ttgctgtggcaaccggcccctgcat

SEQ ID NO: 117216 - DNA, 25 bp, Homo sapien
tcatcaccttgactgaagatgtcgt

SEQ ID NO: 117217 - DNA, 25 bp, Homo sapien
tgcctttgttaatacagcacatgcc

SEQ ID NO: 117218 - DNA, 25 bp, Homo sapien
ctgatgacatcgcaaattacaagtg

SEQ ID NO: 117219 - DNA, 25 bp, Homo sapien
gatgtaagtggagtttgcctttgtt

SEQ ID NO: 117220 - DNA, 25 bp, Homo sapien
tggcattgtttatagttcagagatc

SEQ ID NO: 117221 - DNA, 25 bp, Homo sapien
tgtggctgaccatgtacgatgagac

SEQ ID NO: 117222 - DNA, 25 bp, Homo sapien
tacgatgagacaaccattacatcaa

SEQ ID NO: 117223 - DNA, 25 bp, Homo sapien
ggctgaccatgtacgatgagacaac

SEQ ID NO: 117224 - DNA, 25 bp, Homo sapien
agggagtcttctcttgtggtcaatt

SEQ ID NO: 117225 - DNA, 25 bp, Homo sapien
ccacattgggaacacatgtagttgt

SEQ ID NO: 117226 - DNA, 25 bp, Homo sapien
tgtggatgcatacacttccggaatg

SEQ ID NO: 117227 - DNA, 25 bp, Homo sapien
ttctagggtttgtctggttggcagc

SEQ ID NO: 117228 - DNA, 25 bp, Homo sapien
tagttgtgttctgcctgtaagtggc

SEQ ID NO: 117229 - DNA, 25 bp, Homo sapien
tcaacatcctttgattgcctgcata

SEQ ID NO: 117230 - DNA, 25 bp, Homo sapien
tgtcaacatctttgagggccattat

SEQ ID NO: 117231 - DNA, 25 bp, Homo sapien
ttctggtgtcaacatctttgagggc

SEQ ID NO: 117232 - DNA, 25 bp, Homo sapien
tctgaagattctggtgtcaacatct

SEQ ID NO: 117233 - DNA, 25 bp, Homo sapien
tgatgttccaagacacctagtcttg

SEQ ID NO: 117234 - DNA, 25 bp, Homo sapien
agacacctagtcttgcaggctcctt

SEQ ID NO: 117235 - DNA, 25 bp, Homo sapien
gttccaagacacctagtcttgcagg

SEQ ID NO: 117236 - DNA, 25 bp, Homo sapien
caagacacctagtcttgcaggctcc

SEQ ID NO: 117237 - DNA, 25 bp, Homo sapien
cacccttctgctggagtatggccga

SEQ ID NO: 117238 - DNA, 25 bp, Homo sapien
ttttttcaaatccacccttctgctg

SEQ ID NO: 117239 - DNA, 25 bp, Homo sapien
atcctccaggaaagttcagaaagaa

SEQ ID NO: 117240 - DNA, 25 bp, Homo sapien
ggagtatggccgatgatcctccagg

SEQ ID NO: 117241 - DNA, 25 bp, Homo sapien
caagatagtctcagattctcttctc

SEQ ID NO: 117242 - DNA, 25 bp, Homo sapien
tgccaattcatctgtctcagtctca

SEQ ID NO: 117243 - DNA, 25 bp, Homo sapien
gcattgtgatgttcttgtgttgggt

SEQ ID NO: 117244 - DNA, 25 bp, Homo sapien
aggtgctgcaatcatctggaggaga

SEQ ID NO: 117245 - DNA, 25 bp, Homo sapien
tgaattgctgccactgttgccgtgg

SEQ ID NO: 117246 - DNA, 25 bp, Homo sapien
gaattgctgccactgttgccgtgga

SEQ ID NO: 117247 - DNA, 25 bp, Homo sapien
aattgctgccactgttgccgtggaa

SEQ ID NO: 117248 - DNA, 25 bp, Homo sapien
ttgctgccactgttgccgtggaaac

SEQ ID NO: 117249 - DNA, 25 bp, Homo sapien
tgaacaatagagttagcaagagtac

SEQ ID NO: 117250 - DNA, 25 bp, Homo sapien
tgcctccaacagaaacaaactccag

SEQ ID NO: 117251 - DNA, 25 bp, Homo sapien
caagagtacaaccaagtgcaattag

SEQ ID NO: 117252 - DNA, 25 bp, Homo sapien
gatttcatatggactttccctctcc

SEQ ID NO: 117253 - DNA, 25 bp, Homo sapien
cactgagccttcacccagggttttc

SEQ ID NO: 117254 - DNA, 25 bp, Homo sapien
tttggtgagtggaggccatccttct

SEQ ID NO: 117255 - DNA, 25 bp, Homo sapien
tggtctctataactggatcctgcag

SEQ ID NO: 117256 - DNA, 25 bp, Homo sapien
tgtcagatgtatggtgcttctccct

SEQ ID NO: 117257 - DNA, 25 bp, Homo sapien
acataatcatctcaatgaggtgagg

SEQ ID NO: 117258 - DNA, 25 bp, Homo sapien
ggacatcccctgagttgagagaaag

SEQ ID NO: 117259 - DNA, 25 bp, Homo sapien
cataatcatctcaatgaggtgaggc

SEQ ID NO: 117260 - DNA, 25 bp, Homo sapien
aggagatggggacatcccctgagtt

SEQ ID NO: 117261 - DNA, 25 bp, Homo sapien
gatggtggaaggtgaaagtcacgtc

SEQ ID NO: 117262 - DNA, 25 bp, Homo sapien
aatgatggtggaaggtgaaagtcac

SEQ ID NO: 117263 - DNA, 25 bp, Homo sapien
ggtggaaggtgaaagtcacgtctta

SEQ ID NO: 117264 - DNA, 25 bp, Homo sapien
caatgatggtggaaggtgaaagtca

SEQ ID NO: 117265 - DNA, 25 bp, Homo sapien
ttctatggtgtcttcaggattgggt

SEQ ID NO: 117266 - DNA, 25 bp, Homo sapien
caggattgggtttagaataaggatc

SEQ ID NO: 117267 - DNA, 25 bp, Homo sapien
aatttcatcaagtaacatcttaagt

SEQ ID NO: 117268 - DNA, 25 bp, Homo sapien
tgggtttagaataaggatccagaaa

SEQ ID NO: 117269 - DNA, 25 bp, Homo sapien
taaaatgctcttgtggataatgcat

SEQ ID NO: 117270 - DNA, 25 bp, Homo sapien
tgttgatgggatctcgctggaatgt

SEQ ID NO: 117271 - DNA, 25 bp, Homo sapien
gatgggatctcgctggaatgtaatg

SEQ ID NO: 117272 - DNA, 25 bp, Homo sapien
gaatgtaatgatttgtgtgattgca

SEQ ID NO: 117273 - DNA, 25 bp, Homo sapien
atggaaaaaccttctgttgatggga

SEQ ID NO: 117274 - DNA, 25 bp, Homo sapien
attgtaacttttctcttcttgctta

SEQ ID NO: 117275 - DNA, 25 bp, Homo sapien
actataaatgtcaatttattgtaac

SEQ ID NO: 117276 - DNA, 25 bp, Homo sapien
atgtcaatttattgtaacttttctc

SEQ ID NO: 117277 - DNA, 25 bp, Homo sapien
ttgtaacttttctcttcttgcttac

SEQ ID NO: 117278 - DNA, 25 bp, Homo sapien
cagatattgctcctacttgacacat

SEQ ID NO: 117279 - DNA, 25 bp, Homo sapien
taagacccgtttcatccagatattg

SEQ ID NO: 117280 - DNA, 25 bp, Homo sapien
tgcacagttgacctgattctaagac

SEQ ID NO: 117281 - DNA, 25 bp, Homo sapien
tctattcttgcaatgcacagttgac

SEQ ID NO: 117282 - DNA, 25 bp, Homo sapien
tctaccatcacctgaattaatagtg

SEQ ID NO: 117283 - DNA, 25 bp, Homo sapien
tcaaaattaagccaggaaagcccaa

SEQ ID NO: 117284 - DNA, 25 bp, Homo sapien
gaaagcccaaaaggctgttctacca

SEQ ID NO: 117285 - DNA, 25 bp, Homo sapien
ggtctggatttgcagtgccctgtgt

SEQ ID NO: 117286 - DNA, 25 bp, Homo sapien
taacaacgtgtgcagccttttgtcc

SEQ ID NO: 117287 - DNA, 25 bp, Homo sapien
tcccggggtcctaacaacgtgtgca

SEQ ID NO: 117288 - DNA, 25 bp, Homo sapien
gggtcctaacaacgtgtgcagcctt

SEQ ID NO: 117289 - DNA, 25 bp, Homo sapien
aacgtgtgcagccttttgtccagct

SEQ ID NO: 117290 - DNA, 25 bp, Homo sapien
tatcttgctaacatgtcctcttaga

SEQ ID NO: 117291 - DNA, 25 bp, Homo sapien
ccagcatgatgtatggtcacatttt

SEQ ID NO: 117292 - DNA, 25 bp, Homo sapien
tcaacatcccatttaccagcatgat

SEQ ID NO: 117293 - DNA, 25 bp, Homo sapien
gactttgtgtatcactatatttgat

SEQ ID NO: 117294 - DNA, 25 bp, Homo sapien
aaggccagtataaacagtggtactt

SEQ ID NO: 117295 - DNA, 25 bp, Homo sapien
aggccagtataaacagtggtacttg

SEQ ID NO: 117296 - DNA, 25 bp, Homo sapien
aaaggccagtataaacagtggtact

SEQ ID NO: 117297 - DNA, 25 bp, Homo sapien
cacacttggagataactacccatca

SEQ ID NO: 117298 - DNA, 25 bp, Homo sapien
gatataactggatgggactttggga

SEQ ID NO: 117299 - DNA, 25 bp, Homo sapien
acttggagataactacccatcacca

SEQ ID NO: 117300 - DNA, 25 bp, Homo sapien
caagagatcctggaatttcaacctg

SEQ ID NO: 117301 - DNA, 25 bp, Homo sapien
caccattggcggagaaaaagaacct

SEQ ID NO: 117302 - DNA, 25 bp, Homo sapien
ttttttggtgccaaatctatcacca

SEQ ID NO: 117303 - DNA, 25 bp, Homo sapien
ttctcttagactgtaggtgatctga

SEQ ID NO: 117304 - DNA, 25 bp, Homo sapien
tctcttagactgtaggtgatctgac

SEQ ID NO: 117305 - DNA, 25 bp, Homo sapien
gacttgctccataaccaggacaggg

SEQ ID NO: 117306 - DNA, 25 bp, Homo sapien
agagacttgctccataaccaggaca

SEQ ID NO: 117307 - DNA, 25 bp, Homo sapien
cttgctccataaccaggacagggat

SEQ ID NO: 117308 - DNA, 25 bp, Homo sapien
gagacttgctccataaccaggacag

SEQ ID NO: 117309 - DNA, 25 bp, Homo sapien
tgtagatcacaaggagcattaactc

SEQ ID NO: 117310 - DNA, 25 bp, Homo sapien
caggctgcacaagctttgtagatca

SEQ ID NO: 117311 - DNA, 25 bp, Homo sapien
tactttgatgtacactctcagggag

SEQ ID NO: 117312 - DNA, 25 bp, Homo sapien
ggatttgtaaacacgctccaacaag

SEQ ID NO: 117313 - DNA, 25 bp, Homo sapien
gatcaaaagtaactgataactcaga

SEQ ID NO: 117314 - DNA, 25 bp, Homo sapien
taactcagaaagtatggagaaagtc

SEQ ID NO: 117315 - DNA, 25 bp, Homo sapien
ttttgggatgtgtctttagcggtac

SEQ ID NO: 117316 - DNA, 25 bp, Homo sapien
tagcggtacttctgttgatcaaaag

SEQ ID NO: 117317 - DNA, 25 bp, Homo sapien
taagatgaaacattgaggtaaagtg

SEQ ID NO: 117318 - DNA, 25 bp, Homo sapien
caaataagatgaaacattgaggtaa

SEQ ID NO: 117319 - DNA, 25 bp, Homo sapien
ctaagaacacacaaataagatgaaa

SEQ ID NO: 117320 - DNA, 25 bp, Homo sapien
aataagatgaaacattgaggtaaag

SEQ ID NO: 117321 - DNA, 25 bp, Homo sapien
cagttgttggtcgttctttacccat

SEQ ID NO: 117322 - DNA, 25 bp, Homo sapien
ctggtagaacggaacctaacagttg

SEQ ID NO: 117323 - DNA, 25 bp, Homo sapien
tactcccaagctggtagaacggaac

SEQ ID NO: 117324 - DNA, 25 bp, Homo sapien
tttgtactcccaagctggtagaacg

SEQ ID NO: 117325 - DNA, 25 bp, Homo sapien
tgttaagaagttaggcatggtagtg

SEQ ID NO: 117326 - DNA, 25 bp, Homo sapien
tacaattcaaggattaagcttttgg

SEQ ID NO: 117327 - DNA, 25 bp, Homo sapien
caagtttaggattgaaaaagacact

SEQ ID NO: 117328 - DNA, 25 bp, Homo sapien
tcaatctgaatgctttgttctcaca

SEQ ID NO: 117329 - DNA, 25 bp, Homo sapien
atattgaaattccatgtaaggtttt

SEQ ID NO: 117330 - DNA, 25 bp, Homo sapien
caaaaacagcttgtagagtgctaac

SEQ ID NO: 117331 - DNA, 25 bp, Homo sapien
aaaatccctgcctggtttcaaccag

SEQ ID NO: 117332 - DNA, 25 bp, Homo sapien
gcttaaacgtgtactcaaaaacagc

SEQ ID NO: 117333 - DNA, 25 bp, Homo sapien
cagtgtggtcgctgttgatgtatag

SEQ ID NO: 117334 - DNA, 25 bp, Homo sapien
ttgtatctggaaactggagtgttta

SEQ ID NO: 117335 - DNA, 25 bp, Homo sapien
ttgacatagacaggactacacccat

SEQ ID NO: 117336 - DNA, 25 bp, Homo sapien
ccttggtcctgctgacgtgtagctc

SEQ ID NO: 117337 - DNA, 25 bp, Homo sapien
gacgtgtagctctgcagtaacatct

SEQ ID NO: 117338 - DNA, 25 bp, Homo sapien
tctggtgctgatgtttcaggccaga

SEQ ID NO: 117339 - DNA, 25 bp, Homo sapien
cagcttcgctcctggggttctcagg

SEQ ID NO: 117340 - DNA, 25 bp, Homo sapien
tctactctcagacctaattttatgt

SEQ ID NO: 117341 - DNA, 25 bp, Homo sapien
ccagcttcgctcctggggttctcag

SEQ ID NO: 117342 - DNA, 25 bp, Homo sapien
actctcagacctaattttatgttaa

SEQ ID NO: 117343 - DNA, 25 bp, Homo sapien
gaactgaatatctcgtcttgacaac

SEQ ID NO: 117344 - DNA, 25 bp, Homo sapien
cttgacaacgatcctgccttttggg

SEQ ID NO: 117345 - DNA, 25 bp, Homo sapien
tctccgcattacctcggagggtgcc

SEQ ID NO: 117346 - DNA, 25 bp, Homo sapien
tgtgataaagtcatgcatggaacca

SEQ ID NO: 117347 - DNA, 25 bp, Homo sapien
gattgatatcaggtaccgccacatc

SEQ ID NO: 117348 - DNA, 25 bp, Homo sapien
aaggtggcgattgatatcaggtacc

SEQ ID NO: 117349 - DNA, 25 bp, Homo sapien
ttgatatcaggtaccgccacatcca

SEQ ID NO: 117350 - DNA, 25 bp, Homo sapien
ggcgattgatatcaggtaccgccac

SEQ ID NO: 117351 - DNA, 25 bp, Homo sapien
gggcacttgtgtaggagcctttcaa

SEQ ID NO: 117352 - DNA, 25 bp, Homo sapien
tctttgctaacttggtagggacaca

SEQ ID NO: 117353 - DNA, 25 bp, Homo sapien
cacctttggcttgaatagaactcct

SEQ ID NO: 117354 - DNA, 25 bp, Homo sapien
tagcagccctcagaatacaggcgca

SEQ ID NO: 117355 - DNA, 25 bp, Homo sapien
tgtctgctatctctggaaccgtctg

SEQ ID NO: 117356 - DNA, 25 bp, Homo sapien
gatggagggatactctcttgagcta

SEQ ID NO: 117357 - DNA, 25 bp, Homo sapien
caccctggcataaaacccctggaat

SEQ ID NO: 117358 - DNA, 25 bp, Homo sapien
taatggacattgcaaacagatggga

SEQ ID NO: 117359 - DNA, 25 bp, Homo sapien
tgaaaaagcggcatcggaacagaac

SEQ ID NO: 117360 - DNA, 25 bp, Homo sapien
ttcaattctgtagtcactggcctca

SEQ ID NO: 117361 - DNA, 25 bp, Homo sapien
tcttatttgaacagctcctcggagt

SEQ ID NO: 117362 - DNA, 25 bp, Homo sapien
tagtccatctgtgagacctgtgctg

SEQ ID NO: 117363 - DNA, 25 bp, Homo sapien
tctgggtacaatgggatccggttaa

SEQ ID NO: 117364 - DNA, 25 bp, Homo sapien
taggttactaactcgcaggtgacat

SEQ ID NO: 117365 - DNA, 25 bp, Homo sapien
tcacagccgctcgtaggttactaac

SEQ ID NO: 117366 - DNA, 25 bp, Homo sapien
gaaaggcggctctgcactctgggta

SEQ ID NO: 117367 - DNA, 25 bp, Homo sapien
caccactgagcagtgccacttaatg

SEQ ID NO: 117368 - DNA, 25 bp, Homo sapien
cttaatgaatgagtgcggcgggcaa

SEQ ID NO: 117369 - DNA, 25 bp, Homo sapien
tgcggcgggcaaggaggagcgtccc

SEQ ID NO: 117370 - DNA, 25 bp, Homo sapien
cagtgccacttaatgaatgagtgcg

SEQ ID NO: 117371 - DNA, 25 bp, Homo sapien
tgctcggacgcgaacgggtacacga

SEQ ID NO: 117372 - DNA, 25 bp, Homo sapien
caggcgctccgtccctttcgaatgg

SEQ ID NO: 117373 - DNA, 25 bp, Homo sapien
ggtccaacttagtctgaattacagg

SEQ ID NO: 117374 - DNA, 25 bp, Homo sapien
agcaaggcggcgagtgttaccccgc

SEQ ID NO: 117375 - DNA, 25 bp, Homo sapien
cagcaaaacggtcacggtggcattt

SEQ ID NO: 117376 - DNA, 25 bp, Homo sapien
cacggtggcatttgctcttgatgct

SEQ ID NO: 117377 - DNA, 25 bp, Homo sapien
ctaccagcaaaacggtcacggtggc

SEQ ID NO: 117378 - DNA, 25 bp, Homo sapien
aaacggtcacggtggcatttgctct

SEQ ID NO: 117379 - DNA, 25 bp, Homo sapien
acatcgaatcgaaacagcagtggca

SEQ ID NO: 117380 - DNA, 25 bp, Homo sapien
caacgggattcatcttgcaggcaac

SEQ ID NO: 117381 - DNA, 25 bp, Homo sapien
tgggtcctgctcgaatctcaagaaa

SEQ ID NO: 117382 - DNA, 25 bp, Homo sapien
taagattccgaaggcaggagtcgcc

SEQ ID NO: 117383 - DNA, 25 bp, Homo sapien
acagatgtgtaccactatgctcagc

SEQ ID NO: 117384 - DNA, 25 bp, Homo sapien
tgctcagctacttttttttagaagg

SEQ ID NO: 117385 - DNA, 25 bp, Homo sapien
tagaaggggggtgaggcagggcgtg

SEQ ID NO: 117386 - DNA, 25 bp, Homo sapien
agtgcaggaacacaatcttggttca

SEQ ID NO: 117387 - DNA, 25 bp, Homo sapien
tcaggtcaaagatctcagcaaatcc

SEQ ID NO: 117388 - DNA, 25 bp, Homo sapien
tagtgaccagatagtataagacatc

SEQ ID NO: 117389 - DNA, 25 bp, Homo sapien
taacaagagttccagactgtggaaa

SEQ ID NO: 117390 - DNA, 25 bp, Homo sapien
cagaaaatcatgctgtaacaagagt

SEQ ID NO: 117391 - DNA, 25 bp, Homo sapien
ggcgctttaatacccacgatgaagt

SEQ ID NO: 117392 - DNA, 25 bp, Homo sapien
cgatgaagtcatcattcacataaca

SEQ ID NO: 117393 - DNA, 25 bp, Homo sapien
tttaatagagtcaaagggtcctgaa

SEQ ID NO: 117394 - DNA, 25 bp, Homo sapien
tagaatttttgaggcgctttaatac

SEQ ID NO: 117395 - DNA, 25 bp, Homo sapien
tatgttgataacactgtaagttgaa

SEQ ID NO: 117396 - DNA, 25 bp, Homo sapien
tacatttaatacaccaacctgctga

SEQ ID NO: 117397 - DNA, 25 bp, Homo sapien
catcttgataaagccattgtatgtt

SEQ ID NO: 117398 - DNA, 25 bp, Homo sapien
cttccttgaggatgatttggtcata

SEQ ID NO: 117399 - DNA, 25 bp, Homo sapien
gcactttaaaatagagtcccagaaa

SEQ ID NO: 117400 - DNA, 25 bp, Homo sapien
caacacctgccctagaagagagtgc

SEQ ID NO: 117401 - DNA, 25 bp, Homo sapien
aaacaaatgcacagggacctaccca

SEQ ID NO: 117402 - DNA, 25 bp, Homo sapien
tacaccactgggtcaaacgtgtccc

SEQ ID NO: 117403 - DNA, 25 bp, Homo sapien
catgtctcctgtattggtactccaa

SEQ ID NO: 117404 - DNA, 25 bp, Homo sapien
gattatgaggcatgtccaagctggg

SEQ ID NO: 117405 - DNA, 25 bp, Homo sapien
ggtactccaagctacgccagacaat

SEQ ID NO: 117406 - DNA, 25 bp, Homo sapien
tcacctttgataagcattgtctagc

SEQ ID NO: 117407 - DNA, 25 bp, Homo sapien
gcagacaggctgcttaaagctggaa

SEQ ID NO: 117408 - DNA, 25 bp, Homo sapien
caaaatggaaagactaacgatttct

SEQ ID NO: 117409 - DNA, 25 bp, Homo sapien
ggactccacggcacataatatgaaa

SEQ ID NO: 117410 - DNA, 25 bp, Homo sapien
taagagcttaaagcagacaggctgc

SEQ ID NO: 117411 - DNA, 25 bp, Homo sapien
cagaaagcatggtcggtggcaagct

SEQ ID NO: 117412 - DNA, 25 bp, Homo sapien
tttaacaagcctgcagcggctgccg

SEQ ID NO: 117413 - DNA, 25 bp, Homo sapien
ggccttgttatcctgagctccgaca

SEQ ID NO: 117414 - DNA, 25 bp, Homo sapien
gcaaatgcaaacacttcggcctggt

SEQ ID NO: 117415 - DNA, 25 bp, Homo sapien
tttgcctactctatgaaatacagac

SEQ ID NO: 117416 - DNA, 25 bp, Homo sapien
taaaagcatgatattgacttgacag

SEQ ID NO: 117417 - DNA, 25 bp, Homo sapien
gacaatgtgcatgagtataataaac

SEQ ID NO: 117418 - DNA, 25 bp, Homo sapien
actgcgtcctgcctgaaattgactc

SEQ ID NO: 117419 - DNA, 25 bp, Homo sapien
cagttactgtggagctgacgaccta

SEQ ID NO: 117420 - DNA, 25 bp, Homo sapien
tcagtaccgtaagggttcagaggac

SEQ ID NO: 117421 - DNA, 25 bp, Homo sapien
agagactcatgaacaaggccaccgt

SEQ ID NO: 117422 - DNA, 25 bp, Homo sapien
tccagggactagcagttttttcggc

SEQ ID NO: 117423 - DNA, 25 bp, Homo sapien
tatggattttcaagtggctaatgaa

SEQ ID NO: 117424 - DNA, 25 bp, Homo sapien
tgtggaatctatatggattttcaag

SEQ ID NO: 117425 - DNA, 25 bp, Homo sapien
tctatatggattttcaagtggctaa

SEQ ID NO: 117426 - DNA, 25 bp, Homo sapien
ttttcaagtggctaatgaactctcc

SEQ ID NO: 117427 - DNA, 25 bp, Homo sapien
gcaggtggtcctctagacccagtaa

SEQ ID NO: 117428 - DNA, 25 bp, Homo sapien
tcctggaacttcacccagcaggtgg

SEQ ID NO: 117429 - DNA, 25 bp, Homo sapien
gaattgtgtgttccccgcaggtttc

SEQ ID NO: 117430 - DNA, 25 bp, Homo sapien
gaaagggcgtttctcagtcagtgtg

SEQ ID NO: 117431 - DNA, 25 bp, Homo sapien
tctgttctatttcttgatgtgacta

SEQ ID NO: 117432 - DNA, 25 bp, Homo sapien
ggctgaattctgttctatttcttga

SEQ ID NO: 117433 - DNA, 25 bp, Homo sapien
ttctatttcttgatgtgactaaacg

SEQ ID NO: 117434 - DNA, 25 bp, Homo sapien
tgttctatttcttgatgtgactaaa

SEQ ID NO: 117435 - DNA, 25 bp, Homo sapien
caaagttgctatcatttcgcagccg

SEQ ID NO: 117436 - DNA, 25 bp, Homo sapien
ccgatacgtgatttctgggtgatca

SEQ ID NO: 117437 - DNA, 25 bp, Homo sapien
gggtgatcattatttcggaaacagc

SEQ ID NO: 117438 - DNA, 25 bp, Homo sapien
tccatggtctgaagcgcaaagttgc

SEQ ID NO: 117439 - DNA, 25 bp, Homo sapien
cgtaagtacactggtaggagtcatc

SEQ ID NO: 117440 - DNA, 25 bp, Homo sapien
aggagaacactaacgcagcttacag

SEQ ID NO: 117441 - DNA, 25 bp, Homo sapien
tattaagcatgtttaaaggccaggc

SEQ ID NO: 117442 - DNA, 25 bp, Homo sapien
aatgggtcctgcactagatgcatcc

SEQ ID NO: 117443 - DNA, 25 bp, Homo sapien
caggttctggctttctatttcaaac

SEQ ID NO: 117444 - DNA, 25 bp, Homo sapien
ggcaggttctggctttctatttcaa

SEQ ID NO: 117445 - DNA, 25 bp, Homo sapien
aatggatctccttctactactgtca

SEQ ID NO: 117446 - DNA, 25 bp, Homo sapien
ccttctactactgtcagatctttgg

SEQ ID NO: 117447 - DNA, 25 bp, Homo sapien
tggtaccagtctctacagaagaagg

SEQ ID NO: 117448 - DNA, 25 bp, Homo sapien
tatagcagacccacagtagacacac

SEQ ID NO: 117449 - DNA, 25 bp, Homo sapien
cattttaagtgggaaaccctgcctg

SEQ ID NO: 117450 - DNA, 25 bp, Homo sapien
gaaatgtgggcacaagtgacacctg

SEQ ID NO: 117451 - DNA, 25 bp, Homo sapien
tttaaagattcacatggctgacctc

SEQ ID NO: 117452 - DNA, 25 bp, Homo sapien
gcctactagagaacaaggtgctcca

SEQ ID NO: 117453 - DNA, 25 bp, Homo sapien
aagttaggacccacattggcccgct

SEQ ID NO: 117454 - DNA, 25 bp, Homo sapien
taacagatacagaggtaagatggtc

SEQ ID NO: 117455 - DNA, 25 bp, Homo sapien
gaggcacctaagcagacctcaagtc

SEQ ID NO: 117456 - DNA, 25 bp, Homo sapien
tatttgtccagaataaacagcccca

SEQ ID NO: 117457 - DNA, 25 bp, Homo sapien
catgacatggtgatagtacaacatc

SEQ ID NO: 117458 - DNA, 25 bp, Homo sapien
agaaataagttaagcccctggagag

SEQ ID NO: 117459 - DNA, 25 bp, Homo sapien
tggaagtgcaaacatggcttctctg

SEQ ID NO: 117460 - DNA, 25 bp, Homo sapien
tttttcttgctacagtatatttgcc

SEQ ID NO: 117461 - DNA, 25 bp, Homo sapien
ctgtgtttgtctgtgaggtccagtt

SEQ ID NO: 117462 - DNA, 25 bp, Homo sapien
ggcttctctgtgtttgtctgtgagg

SEQ ID NO: 117463 - DNA, 25 bp, Homo sapien
gcttgccaagcaaacccacttgtgt

SEQ ID NO: 117464 - DNA, 25 bp, Homo sapien
acttgacttcagttggtgttgacaa

SEQ ID NO: 117465 - DNA, 25 bp, Homo sapien
gacttcagttggtgttgacaactgc

SEQ ID NO: 117466 - DNA, 25 bp, Homo sapien
aagcaaacccacttgtgtgagctcc

SEQ ID NO: 117467 - DNA, 25 bp, Homo sapien
taacaaaaggtatgcatcactctag

SEQ ID NO: 117468 - DNA, 25 bp, Homo sapien
cccaattgttcagagctagcaatca

SEQ ID NO: 117469 - DNA, 25 bp, Homo sapien
cagttctaaggaatgctgtaacaaa

SEQ ID NO: 117470 - DNA, 25 bp, Homo sapien
agtactccatcgctaaccagggcag

SEQ ID NO: 117471 - DNA, 25 bp, Homo sapien
cccttggaagggagcacttggtcct

SEQ ID NO: 117472 - DNA, 25 bp, Homo sapien
cttctcaagggcaggataggagcag

SEQ ID NO: 117473 - DNA, 25 bp, Homo sapien
ggttagaccctccagccagaaaaga

SEQ ID NO: 117474 - DNA, 25 bp, Homo sapien
gaaaagaggctatactcaactgctg

SEQ ID NO: 117475 - DNA, 25 bp, Homo sapien
gttcgctagaccacaaatcacaggc

SEQ ID NO: 117476 - DNA, 25 bp, Homo sapien
tagtaaggcccaaaataagctatgc

SEQ ID NO: 117477 - DNA, 25 bp, Homo sapien
taaaggacatgctctgcggttgttc

SEQ ID NO: 117478 - DNA, 25 bp, Homo sapien
gacaaaaatttcttcgtagcagctg

SEQ ID NO: 117479 - DNA, 25 bp, Homo sapien
tggaatgcatcaagacccttcagca

SEQ ID NO: 117480 - DNA, 25 bp, Homo sapien
aattgtcttctcttactggatttct

SEQ ID NO: 117481 - DNA, 25 bp, Homo sapien
cattgtcaggacaagagctttgctt

SEQ ID NO: 117482 - DNA, 25 bp, Homo sapien
gaagtaagttctaaagcattatgca

SEQ ID NO: 117483 - DNA, 25 bp, Homo sapien
tgctgcaggagccatgtgaaactcc

SEQ ID NO: 117484 - DNA, 25 bp, Homo sapien
tgcaatactggtccctgcatgcaga

SEQ ID NO: 117485 - DNA, 25 bp, Homo sapien
cctcctcctttgtgaggcattaaga

SEQ ID NO: 117486 - DNA, 25 bp, Homo sapien
tttgggcaatgtatctccagtttcc

SEQ ID NO: 117487 - DNA, 25 bp, Homo sapien
caactcaggcagttgtgtgaatttc

SEQ ID NO: 117488 - DNA, 25 bp, Homo sapien
agtgccttaaaagctggcagtaact

SEQ ID NO: 117489 - DNA, 25 bp, Homo sapien
tgatatctcaactcaggcagttgtg

SEQ ID NO: 117490 - DNA, 25 bp, Homo sapien
gctggcagtaactgatatctcaact

SEQ ID NO: 117491 - DNA, 25 bp, Homo sapien
tagaattcaggccaacttgtagctc

SEQ ID NO: 117492 - DNA, 25 bp, Homo sapien
catggaattgagctgatcaatgtag

SEQ ID NO: 117493 - DNA, 25 bp, Homo sapien
tcaggccaacttgtagctcccttgt

SEQ ID NO: 117494 - DNA, 25 bp, Homo sapien
ttgagctgatcaatgtagaattcag

SEQ ID NO: 117495 - DNA, 25 bp, Homo sapien
gcaaaggacaaagcgcatccttgca

SEQ ID NO: 117496 - DNA, 25 bp, Homo sapien
cttgcagagggtctttctgtcaaag

SEQ ID NO: 117497 - DNA, 25 bp, Homo sapien
taaatacctgctcacatgagaagca

SEQ ID NO: 117498 - DNA, 25 bp, Homo sapien
tcaaagctgctaaggtgtacattgg

SEQ ID NO: 117499 - DNA, 25 bp, Homo sapien
cagtgctgtctttaaactctctata

SEQ ID NO: 117500 - DNA, 25 bp, Homo sapien
ctcattggttttgtcctcagtgctg

SEQ ID NO: 117501 - DNA, 25 bp, Homo sapien
cattggttttgtcctcagtgctgtc

SEQ ID NO: 117502 - DNA, 25 bp, Homo sapien
tctctaaagccagcagagattttct

SEQ ID NO: 117503 - DNA, 25 bp, Homo sapien
taagtgctgatcactgacccaaaca

SEQ ID NO: 117504 - DNA, 25 bp, Homo sapien
ttttatatgttgattgctgacgcac

SEQ ID NO: 117505 - DNA, 25 bp, Homo sapien
caagtagctgggatagtgagtgacc

SEQ ID NO: 117506 - DNA, 25 bp, Homo sapien
gataatctacatccctaaggttttg

SEQ ID NO: 117507 - DNA, 25 bp, Homo sapien
caagtcgatgaatctggttacaaac

SEQ ID NO: 117508 - DNA, 25 bp, Homo sapien
tgataggccatccaagtcgatgaat

SEQ ID NO: 117509 - DNA, 25 bp, Homo sapien
ctttagaaagttgaggatacatgat

SEQ ID NO: 117510 - DNA, 25 bp, Homo sapien
gttgaggatacatgataggccatcc

SEQ ID NO: 117511 - DNA, 25 bp, Homo sapien
cgtgagcccggccttgagagttgtt

SEQ ID NO: 117512 - DNA, 25 bp, Homo sapien
taacgcctttatacagccaatgaga

SEQ ID NO: 117513 - DNA, 25 bp, Homo sapien
tactctcagaatgagccaggacgtg

SEQ ID NO: 117514 - DNA, 25 bp, Homo sapien
aaagcgggtcctttcgctggcatac

SEQ ID NO: 117515 - DNA, 25 bp, Homo sapien
ccagtgcttttatccaagtcgttaa

SEQ ID NO: 117516 - DNA, 25 bp, Homo sapien
gacatgatggcagtcttgagactca

SEQ ID NO: 117517 - DNA, 25 bp, Homo sapien
ggcagtcttgagactcacttcatct

SEQ ID NO: 117518 - DNA, 25 bp, Homo sapien
ttcatctcgataccgcccagtgctt

SEQ ID NO: 117519 - DNA, 25 bp, Homo sapien
tctaatgttgaattttcgtgttccc

SEQ ID NO: 117520 - DNA, 25 bp, Homo sapien
tatctattacaggttgaattcctaa

SEQ ID NO: 117521 - DNA, 25 bp, Homo sapien
catcagaaattcatagcgaagatga

SEQ ID NO: 117522 - DNA, 25 bp, Homo sapien
caggttgaattcctaacatcagaaa

SEQ ID NO: 117523 - DNA, 25 bp, Homo sapien
tcatttcggagcatttcaaaaaagt

SEQ ID NO: 117524 - DNA, 25 bp, Homo sapien
atttcggagcatttcaaaaaagtct

SEQ ID NO: 117525 - DNA, 25 bp, Homo sapien
tcatcttcatttcggagcatttcaa

SEQ ID NO: 117526 - DNA, 25 bp, Homo sapien
gttcatcttcatttcggagcatttc

SEQ ID NO: 117527 - DNA, 25 bp, Homo sapien
tatgtgtcagcctcttcctggtcag

SEQ ID NO: 117528 - DNA, 25 bp, Homo sapien
cagctcaaacatctgagttgcactt

SEQ ID NO: 117529 - DNA, 25 bp, Homo sapien
tggacatgaaatgcgggtaagcttc

SEQ ID NO: 117530 - DNA, 25 bp, Homo sapien
tgcgggtaagcttcactatgtgtca

SEQ ID NO: 117531 - DNA, 25 bp, Homo sapien
tgtcctttgtcattctggataacta

SEQ ID NO: 117532 - DNA, 25 bp, Homo sapien
ctgaacagtgttgccactcctcttg

SEQ ID NO: 117533 - DNA, 25 bp, Homo sapien
tgtggagtcagggtcctgtcctttg

SEQ ID NO: 117534 - DNA, 25 bp, Homo sapien
aattctatctagtagtagccagtac

SEQ ID NO: 117535 - DNA, 25 bp, Homo sapien
tcattttttccgcttgttctttcca

SEQ ID NO: 117536 - DNA, 25 bp, Homo sapien
tctcattttttccgcttgttctttc

SEQ ID NO: 117537 - DNA, 25 bp, Homo sapien
gaagagaggaaatcacttagcccat

SEQ ID NO: 117538 - DNA, 25 bp, Homo sapien
gacacatacaggcattcaacaggta

SEQ ID NO: 117539 - DNA, 25 bp, Homo sapien
tcctcaggttgcaaaggtcgagact

SEQ ID NO: 117540 - DNA, 25 bp, Homo sapien
ttagcccatccacacagtgagaaag

SEQ ID NO: 117541 - DNA, 25 bp, Homo sapien
tatgctcagtagtctccttttcaag

SEQ ID NO: 117542 - DNA, 25 bp, Homo sapien
ccttctcttgagtcttagcatcaca

SEQ ID NO: 117543 - DNA, 25 bp, Homo sapien
gtgaggtccgccacctgctgcttga

SEQ ID NO: 117544 - DNA, 25 bp, Homo sapien
ttagcatcacattctcgttctttct

SEQ ID NO: 117545 - DNA, 25 bp, Homo sapien
tcctggtgctccaggcgagggtcca

SEQ ID NO: 117546 - DNA, 25 bp, Homo sapien
tgctccaggcgagggtccacctggg

SEQ ID NO: 117547 - DNA, 25 bp, Homo sapien
cctggtgctccaggcgagggtccac

SEQ ID NO: 117548 - DNA, 25 bp, Homo sapien
tggtgctccaggcgagggtccacct

SEQ ID NO: 117549 - DNA, 25 bp, Homo sapien
ggaggaggagggccacctggaggga

SEQ ID NO: 117550 - DNA, 25 bp, Homo sapien
ggaggcggtggagggggaagcatcc

SEQ ID NO: 117551 - DNA, 25 bp, Homo sapien
ggcggtggagggggaagcatcccac

SEQ ID NO: 117552 - DNA, 25 bp, Homo sapien
gggaggcggtggagggggaagcatc

SEQ ID NO: 117553 - DNA, 25 bp, Homo sapien
ctaggcccattggagcaccaggagg

SEQ ID NO: 117554 - DNA, 25 bp, Homo sapien
agcaccaggaggtggcatgattgcc

SEQ ID NO: 117555 - DNA, 25 bp, Homo sapien
cttcttcagtgctaggcccattgga

SEQ ID NO: 117556 - DNA, 25 bp, Homo sapien
gcaccaggaggtggcatgattgccc

SEQ ID NO: 117557 - DNA, 25 bp, Homo sapien
gtttagaccagttgaaggatttcag

SEQ ID NO: 117558 - DNA, 25 bp, Homo sapien
gcatttgtgggctgaggaatgcttt

SEQ ID NO: 117559 - DNA, 25 bp, Homo sapien
ctcgggcagtttagaccagttgaag

SEQ ID NO: 117560 - DNA, 25 bp, Homo sapien
ccagttgaaggatttcagggcattt

SEQ ID NO: 117561 - DNA, 25 bp, Homo sapien
tccaggtcttcaagatctagaattt

SEQ ID NO: 117562 - DNA, 25 bp, Homo sapien
tttcggtccatactgttccttccag

SEQ ID NO: 117563 - DNA, 25 bp, Homo sapien
caggtcttcaagatctagaattttg

SEQ ID NO: 117564 - DNA, 25 bp, Homo sapien
gaagacttttgtatcatcaatttcg

SEQ ID NO: 117565 - DNA, 25 bp, Homo sapien
ctaacaggcacttggacggagacac

SEQ ID NO: 117566 - DNA, 25 bp, Homo sapien
taagaggcccagcattcgtgtgttc

SEQ ID NO: 117567 - DNA, 25 bp, Homo sapien
cagcctagaattcatatgccggtca

SEQ ID NO: 117568 - DNA, 25 bp, Homo sapien
tgcacagggtagatccaacagccta

SEQ ID NO: 117569 - DNA, 25 bp, Homo sapien
gaactgtccacatatttgtcccaga

SEQ ID NO: 117570 - DNA, 25 bp, Homo sapien
gctcttgagaactgtccacatattt

SEQ ID NO: 117571 - DNA, 25 bp, Homo sapien
tgagaactgtccacatatttgtccc

SEQ ID NO: 117572 - DNA, 25 bp, Homo sapien
gtccacatatttgtcccagagcatt

SEQ ID NO: 117573 - DNA, 25 bp, Homo sapien
tgtatctagccaaacaactggctga

SEQ ID NO: 117574 - DNA, 25 bp, Homo sapien
cctttgcctctctgagaattgtatc

SEQ ID NO: 117575 - DNA, 25 bp, Homo sapien
gcagggttcctgttgcatgcataca

SEQ ID NO: 117576 - DNA, 25 bp, Homo sapien
tggtattcatgccattacctttgta

SEQ ID NO: 117577 - DNA, 25 bp, Homo sapien
tgcttggagttactgttcacaaaga

SEQ ID NO: 117578 - DNA, 25 bp, Homo sapien
ctgcttggagttactgttcacaaag

SEQ ID NO: 117579 - DNA, 25 bp, Homo sapien
gcttggagttactgttcacaaagaa

SEQ ID NO: 117580 - DNA, 25 bp, Homo sapien
ttggagttactgttcacaaagaaat

SEQ ID NO: 117581 - DNA, 25 bp, Homo sapien
aattcctatggattgcagacagaag

SEQ ID NO: 117582 - DNA, 25 bp, Homo sapien
tcagctgaggcttgccattgccggt

SEQ ID NO: 117583 - DNA, 25 bp, Homo sapien
gaagaactgtcactatgaatcaggc

SEQ ID NO: 117584 - DNA, 25 bp, Homo sapien
caaaggctacagtctagttggtaaa

SEQ ID NO: 117585 - DNA, 25 bp, Homo sapien
agaaatccatcaaagtccaacaggg

SEQ ID NO: 117586 - DNA, 25 bp, Homo sapien
gaaatccatcaaagtccaacaggga

SEQ ID NO: 117587 - DNA, 25 bp, Homo sapien
aaatccatcaaagtccaacagggac

SEQ ID NO: 117588 - DNA, 25 bp, Homo sapien
atccatcaaagtccaacagggacat

SEQ ID NO: 117589 - DNA, 25 bp, Homo sapien
cgaccatcaatcaccgaaagctctt

SEQ ID NO: 117590 - DNA, 25 bp, Homo sapien
ctcgatagaaggatgttgcaattct

SEQ ID NO: 117591 - DNA, 25 bp, Homo sapien
gaactcagagtgtcatcaatggcat

SEQ ID NO: 117592 - DNA, 25 bp, Homo sapien
aattctgagctctccgaccatcaat

SEQ ID NO: 117593 - DNA, 25 bp, Homo sapien
tgttaacaggatggttcaggttacc

SEQ ID NO: 117594 - DNA, 25 bp, Homo sapien
taaacacagggtacggccatttaca

SEQ ID NO: 117595 - DNA, 25 bp, Homo sapien
gaagtcaccttataccagcctcaat

SEQ ID NO: 117596 - DNA, 25 bp, Homo sapien
caggttaccttactagttgcattac

SEQ ID NO: 117597 - DNA, 25 bp, Homo sapien
tgcaacaagagactcactcctttgt

SEQ ID NO: 117598 - DNA, 25 bp, Homo sapien
gatataacaatagtcttacccaggg

SEQ ID NO: 117599 - DNA, 25 bp, Homo sapien
cttacaacctataactaatgtggcg

SEQ ID NO: 117600 - DNA, 25 bp, Homo sapien
taatttgtaagcattagacccagac

SEQ ID NO: 117601 - DNA, 25 bp, Homo sapien
gcccgtttgatttcgtcattggata

SEQ ID NO: 117602 - DNA, 25 bp, Homo sapien
gggcagatcttcctgttcgtccatt

SEQ ID NO: 117603 - DNA, 25 bp, Homo sapien
gttcgtccattgttagaattgcccg

SEQ ID NO: 117604 - DNA, 25 bp, Homo sapien
tagaattgcccgtttgatttcgtca

SEQ ID NO: 117605 - DNA, 25 bp, Homo sapien
agccttggccatccgatccagttcg

SEQ ID NO: 117606 - DNA, 25 bp, Homo sapien
ggctcatctcaaaaaggaacctatc

SEQ ID NO: 117607 - DNA, 25 bp, Homo sapien
gatccagttcgtgtttatgttcctc

SEQ ID NO: 117608 - DNA, 25 bp, Homo sapien
tgttcctccaataggtcaatgtcac

SEQ ID NO: 117609 - DNA, 25 bp, Homo sapien
gaaaagttattacttgataaggcca

SEQ ID NO: 117610 - DNA, 25 bp, Homo sapien
gaaaaaaccctcaccgtggctcatc

SEQ ID NO: 117611 - DNA, 25 bp, Homo sapien
gactggtgaggagaatgatactgac

SEQ ID NO: 117612 - DNA, 25 bp, Homo sapien
gtggctcatccatagacaagaagtg

SEQ ID NO: 117613 - DNA, 25 bp, Homo sapien
ttttgaagtacagcgattgcaacct

SEQ ID NO: 117614 - DNA, 25 bp, Homo sapien
aagtacagcgattgcaacctttgct

SEQ ID NO: 117615 - DNA, 25 bp, Homo sapien
ctttttgaagtacagcgattgcaac

SEQ ID NO: 117616 - DNA, 25 bp, Homo sapien
ttgaagtacagcgattgcaaccttt

SEQ ID NO: 117617 - DNA, 25 bp, Homo sapien
cttccactttaggtttcacttctgc

SEQ ID NO: 117618 - DNA, 25 bp, Homo sapien
gcaccactcctaaacacctcttctg

SEQ ID NO: 117619 - DNA, 25 bp, Homo sapien
ctgcttgagggcaccactcctaaac

SEQ ID NO: 117620 - DNA, 25 bp, Homo sapien
cacctcttctgagccagaacgaatt

SEQ ID NO: 117621 - DNA, 25 bp, Homo sapien
ttgagggcaccactcctaaacacct

SEQ ID NO: 117622 - DNA, 25 bp, Homo sapien
tgtttaggctagatatcttgaatcc

SEQ ID NO: 117623 - DNA, 25 bp, Homo sapien
gcaattttgtttaggctagatatct

SEQ ID NO: 117624 - DNA, 25 bp, Homo sapien
tgcattccctctttgacctttattc

SEQ ID NO: 117625 - DNA, 25 bp, Homo sapien
gatatcttgaatccatatgcattcc

SEQ ID NO: 117626 - DNA, 25 bp, Homo sapien
gaaacagagctctcaaggaaactca

SEQ ID NO: 117627 - DNA, 25 bp, Homo sapien
gagacctgcaatgagcaactaagta

SEQ ID NO: 117628 - DNA, 25 bp, Homo sapien
ggtggcagggctataacaacagctg

SEQ ID NO: 117629 - DNA, 25 bp, Homo sapien
taatatgcctaatgaccctaccctg

SEQ ID NO: 117630 - DNA, 25 bp, Homo sapien
tcacaggctagtgggacaatcaaat

SEQ ID NO: 117631 - DNA, 25 bp, Homo sapien
gctagtgggacaatcaaatgtgaaa

SEQ ID NO: 117632 - DNA, 25 bp, Homo sapien
ctgacaacaggtgacaacagtattt

SEQ ID NO: 117633 - DNA, 25 bp, Homo sapien
tggcttgtgtacttcacaggctagt

SEQ ID NO: 117634 - DNA, 25 bp, Homo sapien
tgcttgttgtaaccataggcaagct

SEQ ID NO: 117635 - DNA, 25 bp, Homo sapien
ggcaagctgaatgagccacctgacc

SEQ ID NO: 117636 - DNA, 25 bp, Homo sapien
accataggcaagctgaatgagccac

SEQ ID NO: 117637 - DNA, 25 bp, Homo sapien
aaggccgaataccttgcttgttgta

SEQ ID NO: 117638 - DNA, 25 bp, Homo sapien
ggaagagtgagcctatttttttcac

SEQ ID NO: 117639 - DNA, 25 bp, Homo sapien
ccatacacatctttcttgctataga

SEQ ID NO: 117640 - DNA, 25 bp, Homo sapien
taaaagaaatgctttgctattgaca

SEQ ID NO: 117641 - DNA, 25 bp, Homo sapien
tagaaaggtttaaaaccatgcctga

SEQ ID NO: 117642 - DNA, 25 bp, Homo sapien
aaaagaaatgctttgctattgagag

SEQ ID NO: 117643 - DNA, 25 bp, Homo sapien
atgctttgctattgagagacttctt

SEQ ID NO: 117644 - DNA, 25 bp, Homo sapien
aaatgctttgctattgagagacttc

SEQ ID NO: 117645 - DNA, 25 bp, Homo sapien
ttaaaagaaatgctttgctattgag

SEQ ID NO: 117646 - DNA, 25 bp, Homo sapien
ctgtcatctgcccatgtgattctta

SEQ ID NO: 117647 - DNA, 25 bp, Homo sapien
tgtcatctgcccatgtgattcttac

SEQ ID NO: 117648 - DNA, 25 bp, Homo sapien
aaacagtggccaacaattttggcca

SEQ ID NO: 117649 - DNA, 25 bp, Homo sapien
acagtggccaacaattttggccact

SEQ ID NO: 117650 - DNA, 25 bp, Homo sapien
aacagtggccaacaattttggccac

SEQ ID NO: 117651 - DNA, 25 bp, Homo sapien
caaaacagtggccaacaattttggc

SEQ ID NO: 117652 - DNA, 25 bp, Homo sapien
gactgctacgcattacaatcacctg

SEQ ID NO: 117653 - DNA, 25 bp, Homo sapien
taaaacagttggttgtgccagctcc

SEQ ID NO: 117654 - DNA, 25 bp, Homo sapien
gggctaaccccagagattcatttaa

SEQ ID NO: 117655 - DNA, 25 bp, Homo sapien
ggccagcaagtaggataacagtatc

SEQ ID NO: 117656 - DNA, 25 bp, Homo sapien
tctggcctactgatagtttttaata

SEQ ID NO: 117657 - DNA, 25 bp, Homo sapien
ctggcctactgatagtttttaataa

SEQ ID NO: 117658 - DNA, 25 bp, Homo sapien
gtctggcctactgatagtttttaat

SEQ ID NO: 117659 - DNA, 25 bp, Homo sapien
cttcatttagattgagaacactggg

SEQ ID NO: 117660 - DNA, 25 bp, Homo sapien
tagtgatgagatagtgcaaaagggt

SEQ ID NO: 117661 - DNA, 25 bp, Homo sapien
tcgcagcttgaggaatatctcgcaa

SEQ ID NO: 117662 - DNA, 25 bp, Homo sapien
tctcgcaattcttcatttagattga

SEQ ID NO: 117663 - DNA, 25 bp, Homo sapien
ttattgcaatgttctgacacttagg

SEQ ID NO: 117664 - DNA, 25 bp, Homo sapien
gcttcccattaaagagccgccttgg

SEQ ID NO: 117665 - DNA, 25 bp, Homo sapien
gccttatttagtatatttccaccag

SEQ ID NO: 117666 - DNA, 25 bp, Homo sapien
gagcctgctcattatacttttcaaa

SEQ ID NO: 117667 - DNA, 25 bp, Homo sapien
aaatagcaatgttttagcaatcaac

SEQ ID NO: 117668 - DNA, 25 bp, Homo sapien
tcacgcttggaagtccatcctattt

SEQ ID NO: 117669 - DNA, 25 bp, Homo sapien
tagcaatcaacatgtgacttacaca

SEQ ID NO: 117670 - DNA, 25 bp, Homo sapien
aaatatttcacgcttggaagtccat

SEQ ID NO: 117671 - DNA, 25 bp, Homo sapien
cttctcaaggtacttatttctttgt

SEQ ID NO: 117672 - DNA, 25 bp, Homo sapien
acttctcaaggtacttatttctttg

SEQ ID NO: 117673 - DNA, 25 bp, Homo sapien
ttctcaaggtacttatttctttgtc

SEQ ID NO: 117674 - DNA, 25 bp, Homo sapien
ggaagtggctgctccgattattgca

SEQ ID NO: 117675 - DNA, 25 bp, Homo sapien
agtggctgctccgattattgcaaca

SEQ ID NO: 117676 - DNA, 25 bp, Homo sapien
gaagtggctgctccgattattgcaa

SEQ ID NO: 117677 - DNA, 25 bp, Homo sapien
gtggctgctccgattattgcaacac

SEQ ID NO: 117678 - DNA, 25 bp, Homo sapien
aacaggcacgtttcatcctaccagg

SEQ ID NO: 117679 - DNA, 25 bp, Homo sapien
gggagagtcctcacagcattactga

SEQ ID NO: 117680 - DNA, 25 bp, Homo sapien
gataacctccctctatgcacctaag

SEQ ID NO: 117681 - DNA, 25 bp, Homo sapien
tctgaaggatacttatgagaggcac

SEQ ID NO: 117682 - DNA, 25 bp, Homo sapien
caagcaggagcgtagtcatcacagt

SEQ ID NO: 117683 - DNA, 25 bp, Homo sapien
tatatttggccaggcgaagctctgc

SEQ ID NO: 117684 - DNA, 25 bp, Homo sapien
gatgcagtgtatatgacccaaggga

SEQ ID NO: 117685 - DNA, 25 bp, Homo sapien
tacaatactacgtcacctccaaggg

SEQ ID NO: 117686 - DNA, 25 bp, Homo sapien
cacaaacttatctccgggctgtggg

SEQ ID NO: 117687 - DNA, 25 bp, Homo sapien
ggtctttagcttctgctagaaggtc

SEQ ID NO: 117688 - DNA, 25 bp, Homo sapien
gcttctgctagaaggtcttcaacat

SEQ ID NO: 117689 - DNA, 25 bp, Homo sapien
tgatgaactggctgacaacagacac

SEQ ID NO: 117690 - DNA, 25 bp, Homo sapien
gtcttgtatatgaatgtgaatgcat

SEQ ID NO: 117691 - DNA, 25 bp, Homo sapien
ctgtcttgtatatgaatgtgaatgc

SEQ ID NO: 117692 - DNA, 25 bp, Homo sapien
aatgcattttggaagaggaaacaac

SEQ ID NO: 117693 - DNA, 25 bp, Homo sapien
gtatatgaatgtgaatgcattttgg

SEQ ID NO: 117694 - DNA, 25 bp, Homo sapien
acctcatttgagcttaacatgtatg

SEQ ID NO: 117695 - DNA, 25 bp, Homo sapien
tgagcctatatttatcttcagctgc

SEQ ID NO: 117696 - DNA, 25 bp, Homo sapien
tattgtagggtatagcaccctagac

SEQ ID NO: 117697 - DNA, 25 bp, Homo sapien
aacatgtatgatgacctcctatgac

SEQ ID NO: 117698 - DNA, 25 bp, Homo sapien
ctgagcttccatgcgagctcgacgt

SEQ ID NO: 117699 - DNA, 25 bp, Homo sapien
tccatgcgagctcgacgttcttctt

SEQ ID NO: 117700 - DNA, 25 bp, Homo sapien
gcttccatgcgagctcgacgttctt

SEQ ID NO: 117701 - DNA, 25 bp, Homo sapien
tgcgagctcgacgttcttcttcctc

SEQ ID NO: 117702 - DNA, 25 bp, Homo sapien
caaacacttctcctgagcgtaaagc

SEQ ID NO: 117703 - DNA, 25 bp, Homo sapien
catctggttggtaatacgtttgcga

SEQ ID NO: 117704 - DNA, 25 bp, Homo sapien
gcgtaaagctgaaacaaggtcatca

SEQ ID NO: 117705 - DNA, 25 bp, Homo sapien
gtttgcgattccgtttcaatttaga

SEQ ID NO: 117706 - DNA, 25 bp, Homo sapien
tcaagagcacttggcagagataact

SEQ ID NO: 117707 - DNA, 25 bp, Homo sapien
tattgcagacctgggttaactcggg

SEQ ID NO: 117708 - DNA, 25 bp, Homo sapien
gattcctgtacagtgcacacattgg

SEQ ID NO: 117709 - DNA, 25 bp, Homo sapien
caatggcacatggaattacctgcac

SEQ ID NO: 117710 - DNA, 25 bp, Homo sapien
gcagtttgatgacactgttttaata

SEQ ID NO: 117711 - DNA, 25 bp, Homo sapien
tttaataattcatagaaagcatata

SEQ ID NO: 117712 - DNA, 25 bp, Homo sapien
tgttttaataattcatagaaagcat

SEQ ID NO: 117713 - DNA, 25 bp, Homo sapien
cagtttgatgacactgttttaataa

SEQ ID NO: 117714 - DNA, 25 bp, Homo sapien
ctgatagcaatacagacaactctgg

SEQ ID NO: 117715 - DNA, 25 bp, Homo sapien
agccaagatgtgtgggagactgacc

SEQ ID NO: 117716 - DNA, 25 bp, Homo sapien
gactgaccgagggtcacagctcatg

SEQ ID NO: 117717 - DNA, 25 bp, Homo sapien
caatgggaagttttagggctgctct

SEQ ID NO: 117718 - DNA, 25 bp, Homo sapien
gggcccctgtaagcacacgattcga

SEQ ID NO: 117719 - DNA, 25 bp, Homo sapien
cacgattcgatgtaattggaactgg

SEQ ID NO: 117720 - DNA, 25 bp, Homo sapien
cttccttggacttgatcttcaaatc

SEQ ID NO: 117721 - DNA, 25 bp, Homo sapien
ggcaaatgcggaggctgatgttaat

SEQ ID NO: 117722 - DNA, 25 bp, Homo sapien
gcttcattggatttccctctctagg

SEQ ID NO: 117723 - DNA, 25 bp, Homo sapien
gagaaacagggtgctggccaatttc

SEQ ID NO: 117724 - DNA, 25 bp, Homo sapien
tcattggatttccctctctaggcac

SEQ ID NO: 117725 - DNA, 25 bp, Homo sapien
ggagaaacagggtgctggccaattt

SEQ ID NO: 117726 - DNA, 25 bp, Homo sapien
catcctgattcttcggctggggaaa

SEQ ID NO: 117727 - DNA, 25 bp, Homo sapien
cgtgcatataagtgactctccggag

SEQ ID NO: 117728 - DNA, 25 bp, Homo sapien
cggaggaacacagattggccacagt

SEQ ID NO: 117729 - DNA, 25 bp, Homo sapien
gctgcccatccacgtgcatataagt

SEQ ID NO: 117730 - DNA, 25 bp, Homo sapien
ccctgtcaacgatggtgaaaatctg

SEQ ID NO: 117731 - DNA, 25 bp, Homo sapien
gaacctggttcccttagtgatgtcc

SEQ ID NO: 117732 - DNA, 25 bp, Homo sapien
tgatttcccctgtgcacctgaaaga

SEQ ID NO: 117733 - DNA, 25 bp, Homo sapien
catagcagcctgaggcaagttgtca

SEQ ID NO: 117734 - DNA, 25 bp, Homo sapien
ggtgaacacctacgcgcgcgtgctg

SEQ ID NO: 117735 - DNA, 25 bp, Homo sapien
aacatttcgatgctcctagggcgca

SEQ ID NO: 117736 - DNA, 25 bp, Homo sapien
atctgcaagacggtgcgcctgtcgg

SEQ ID NO: 117737 - DNA, 25 bp, Homo sapien
gcgcgtgctgcgcttcttcagcgag

SEQ ID NO: 117738 - DNA, 25 bp, Homo sapien
aattctctaaagacagcacacccct

SEQ ID NO: 117739 - DNA, 25 bp, Homo sapien
caggtacatactgaagtacattcag

SEQ ID NO: 117740 - DNA, 25 bp, Homo sapien
tattcctgccctacccgtggtatgc

SEQ ID NO: 117741 - DNA, 25 bp, Homo sapien
tacatttaagggagatgcaagtcga

SEQ ID NO: 117742 - DNA, 25 bp, Homo sapien
tgttcctgcacaacgagggctacag

SEQ ID NO: 117743 - DNA, 25 bp, Homo sapien
tcgctttggacttcgggcttgtgcc

SEQ ID NO: 117744 - DNA, 25 bp, Homo sapien
tggtgaccgccttcgtggcatgcga

SEQ ID NO: 117745 - DNA, 25 bp, Homo sapien
agggctacagctccatgtgcggcca

SEQ ID NO: 117746 - DNA, 25 bp, Homo sapien
aacatccgggccacagcgagctcgg

SEQ ID NO: 117747 - DNA, 25 bp, Homo sapien
ctagatcagcggatctggcagctgc

SEQ ID NO: 117748 - DNA, 25 bp, Homo sapien
agctgcaccgaacatccgggccaca

SEQ ID NO: 117749 - DNA, 25 bp, Homo sapien
ccgggcgacagctccgaagttcctc

SEQ ID NO: 117750 - DNA, 25 bp, Homo sapien
gcctgaaggtttttttcgagaagca

SEQ ID NO: 117751 - DNA, 25 bp, Homo sapien
ccgaagtcaaccctcaagcaagtgt

SEQ ID NO: 117752 - DNA, 25 bp, Homo sapien
ccgaggccagccgtgtaggaaagta

SEQ ID NO: 117753 - DNA, 25 bp, Homo sapien
ctagtagcccgttgcggacagacca

SEQ ID NO: 117754 - DNA, 25 bp, Homo sapien
caaagacctggcatttcgccgcaga

SEQ ID NO: 117755 - DNA, 25 bp, Homo sapien
aggctccaagcgactgttgaatttc

SEQ ID NO: 117756 - DNA, 25 bp, Homo sapien
tgccctttgtgacgggcgctataaa

SEQ ID NO: 117757 - DNA, 25 bp, Homo sapien
atttcctttagcgaacgatggctaa

SEQ ID NO: 117758 - DNA, 25 bp, Homo sapien
ttttttgcagcggtcctgccctttg

SEQ ID NO: 117759 - DNA, 25 bp, Homo sapien
cgaattcacaatctagactgcctgg

SEQ ID NO: 117760 - DNA, 25 bp, Homo sapien
tatgggctttacatctagtagatgc

SEQ ID NO: 117761 - DNA, 25 bp, Homo sapien
cactggcctctttaatgggcgctta

SEQ ID NO: 117762 - DNA, 25 bp, Homo sapien
tgcagaaggtaaggaattggaaact

SEQ ID NO: 117763 - DNA, 25 bp, Homo sapien
taaataatagggtcttcccacaata

SEQ ID NO: 117764 - DNA, 25 bp, Homo sapien
ataatagggtcttcccacaataaag

SEQ ID NO: 117765 - DNA, 25 bp, Homo sapien
tagggtcttcccacaataaagtcca

SEQ ID NO: 117766 - DNA, 25 bp, Homo sapien
agacatcaaaatgccaacatgaaca

SEQ ID NO: 117767 - DNA, 25 bp, Homo sapien
cattctataagacatcccatttcag

SEQ ID NO: 117768 - DNA, 25 bp, Homo sapien
tcaacttactgtacaagacacggta

SEQ ID NO: 117769 - DNA, 25 bp, Homo sapien
caatgactatattaatgcctccata

SEQ ID NO: 117770 - DNA, 25 bp, Homo sapien
caagatagagccaatcataaagttc

SEQ ID NO: 117771 - DNA, 25 bp, Homo sapien
aaatccaagatagagccaatcataa

SEQ ID NO: 117772 - DNA, 25 bp, Homo sapien
tatttctgtgcattcgttctctgtc

SEQ ID NO: 117773 - DNA, 25 bp, Homo sapien
gatagagccaatcataaagttcagg

SEQ ID NO: 117774 - DNA, 25 bp, Homo sapien
cgagtaccattcaatgaagaaccaa

SEQ ID NO: 117775 - DNA, 25 bp, Homo sapien
gtaaaaccagaggaagcattgccat

SEQ ID NO: 117776 - DNA, 25 bp, Homo sapien
ctttttccccgagtaccattcaatg

SEQ ID NO: 117777 - DNA, 25 bp, Homo sapien
caatgtaaaaccagaggaagcattg

SEQ ID NO: 117778 - DNA, 25 bp, Homo sapien
tggaagcacaaccaaggctgttaac

SEQ ID NO: 117779 - DNA, 25 bp, Homo sapien
taaaaggactaactcacatggctgc

SEQ ID NO: 117780 - DNA, 25 bp, Homo sapien
ggcttgaaacaagaaccactgatca

SEQ ID NO: 117781 - DNA, 25 bp, Homo sapien
gaagagatttctgtgcctaacgtaa

SEQ ID NO: 117782 - DNA, 25 bp, Homo sapien
gataatagctgccatgctgcattca

SEQ ID NO: 117783 - DNA, 25 bp, Homo sapien
aggtgataatagctgccatgctgca

SEQ ID NO: 117784 - DNA, 25 bp, Homo sapien
taatagctgccatgctgcattcaaa

SEQ ID NO: 117785 - DNA, 25 bp, Homo sapien
tagctgccatgctgcattcaaataa

SEQ ID NO: 117786 - DNA, 25 bp, Homo sapien
tgggtagacggcttcatgagtacag

SEQ ID NO: 117787 - DNA, 25 bp, Homo sapien
agtcagaaagcatcaatactcgaca

SEQ ID NO: 117788 - DNA, 25 bp, Homo sapien
tgtggtaacgtaatctggacttggg

SEQ ID NO: 117789 - DNA, 25 bp, Homo sapien
tgggttgtaaagcatcgtgtaccag

SEQ ID NO: 117790 - DNA, 25 bp, Homo sapien
agaagaggtcggagcagcatcatta

SEQ ID NO: 117791 - DNA, 25 bp, Homo sapien
cagaagaggtcggagcagcatcatt

SEQ ID NO: 117792 - DNA, 25 bp, Homo sapien
gggaagaagtaaagtgcagcataaa

SEQ ID NO: 117793 - DNA, 25 bp, Homo sapien
taaatcgatcagatttccctaaccc

SEQ ID NO: 117794 - DNA, 25 bp, Homo sapien
cagatttccctaacccacatgcaat

SEQ ID NO: 117795 - DNA, 25 bp, Homo sapien
tgaagcacggttaaaattgggaaga

SEQ ID NO: 117796 - DNA, 25 bp, Homo sapien
cagccactggcttgcctactttatc

SEQ ID NO: 117797 - DNA, 25 bp, Homo sapien
catataaaggatggtgtccaacatc

SEQ ID NO: 117798 - DNA, 25 bp, Homo sapien
tccaacatccttgggacgttcaatg

SEQ ID NO: 117799 - DNA, 25 bp, Homo sapien
tacattaccaagctccatataaagg

SEQ ID NO: 117800 - DNA, 25 bp, Homo sapien
tctaacagggaaatagaggagctag

SEQ ID NO: 117801 - DNA, 25 bp, Homo sapien
caggtccctattccctagagcaaga

SEQ ID NO: 117802 - DNA, 25 bp, Homo sapien
ctcaaaagacagagagggtagccag

SEQ ID NO: 117803 - DNA, 25 bp, Homo sapien
taagacctggtagtaaaaagccata

SEQ ID NO: 117804 - DNA, 25 bp, Homo sapien
caaccagttctgtgagacttacaac

SEQ ID NO: 117805 - DNA, 25 bp, Homo sapien
tctgtctcgattacccagctctgca

SEQ ID NO: 117806 - DNA, 25 bp, Homo sapien
gatagtaaatagtttcagccctgca

SEQ ID NO: 117807 - DNA, 25 bp, Homo sapien
aaaactatccttgggccagctttga

SEQ ID NO: 117808 - DNA, 25 bp, Homo sapien
cagccagagtaaccaaagataacac

SEQ ID NO: 117809 - DNA, 25 bp, Homo sapien
ccaaagataacactaatataatgta

SEQ ID NO: 117810 - DNA, 25 bp, Homo sapien
tcagaagcagacatgtacacagcca

SEQ ID NO: 117811 - DNA, 25 bp, Homo sapien
aatataatgtatgggaaggcgtaat

SEQ ID NO: 117812 - DNA, 25 bp, Homo sapien
cacagaaggatatggaatgcacaat

SEQ ID NO: 117813 - DNA, 25 bp, Homo sapien
cccagggaaatatatagtccagtac

SEQ ID NO: 117814 - DNA, 25 bp, Homo sapien
gctaccaagtggcatcaatcagcca

SEQ ID NO: 117815 - DNA, 25 bp, Homo sapien
ccttcatgctggatagttgggcctg

SEQ ID NO: 117816 - DNA, 25 bp, Homo sapien
ttctgaccagaagatcatagcagtt

SEQ ID NO: 117817 - DNA, 25 bp, Homo sapien
tggaaatggagattattccataggc

SEQ ID NO: 117818 - DNA, 25 bp, Homo sapien
tctttctgaccagaagatcatagca

SEQ ID NO: 117819 - DNA, 25 bp, Homo sapien
atgaagtaaccagtggctgaagaga

SEQ ID NO: 117820 - DNA, 25 bp, Homo sapien
agtgtccattggctccttctgagag

SEQ ID NO: 117821 - DNA, 25 bp, Homo sapien
gctggtgtaggtaccaaagccaaaa

SEQ ID NO: 117822 - DNA, 25 bp, Homo sapien
tgaaggttcggtaaattttgcagtg

SEQ ID NO: 117823 - DNA, 25 bp, Homo sapien
ttctgagagtatccttgaaggttcg

SEQ ID NO: 117824 - DNA, 25 bp, Homo sapien
tacttttttattaggagcacttctc

SEQ ID NO: 117825 - DNA, 25 bp, Homo sapien
ttaggagcacttctcaggtttttgg

SEQ ID NO: 117826 - DNA, 25 bp, Homo sapien
caggtttttggcatttcacatgtct

SEQ ID NO: 117827 - DNA, 25 bp, Homo sapien
tttttggcatttcacatgtctacac

SEQ ID NO: 117828 - DNA, 25 bp, Homo sapien
ggaacacattgctaggtacacagaa

SEQ ID NO: 117829 - DNA, 25 bp, Homo sapien
caattacgccactgttaaggactgc

SEQ ID NO: 117830 - DNA, 25 bp, Homo sapien
tgtttgctatcagaccccacaagta

SEQ ID NO: 117831 - DNA, 25 bp, Homo sapien
cctagcggccttccagtgtagcaga

SEQ ID NO: 117832 - DNA, 25 bp, Homo sapien
gttgcaaccatgagtcttaaggcct

SEQ ID NO: 117833 - DNA, 25 bp, Homo sapien
ctactacaggaaaagtgagtgcact

SEQ ID NO: 117834 - DNA, 25 bp, Homo sapien
tatacccgagatatgagaggaaact

SEQ ID NO: 117835 - DNA, 25 bp, Homo sapien
gtaactcaaggatacaactgctgtg

SEQ ID NO: 117836 - DNA, 25 bp, Homo sapien
aaggcaggtgaggcccttacttcca

SEQ ID NO: 117837 - DNA, 25 bp, Homo sapien
tgacccttgaaagggggctgcatca

SEQ ID NO: 117838 - DNA, 25 bp, Homo sapien
ggggctgcatcatgacagcagactt

SEQ ID NO: 117839 - DNA, 25 bp, Homo sapien
ttggctgggagatgaaatagatttt

SEQ ID NO: 117840 - DNA, 25 bp, Homo sapien
aagtgcatgatggtgagagcccaag

SEQ ID NO: 117841 - DNA, 25 bp, Homo sapien
gcctttcctgccgagtgctctgatg

SEQ ID NO: 117842 - DNA, 25 bp, Homo sapien
tgtagcttctaatgttccccgtggc

SEQ ID NO: 117843 - DNA, 25 bp, Homo sapien
taaaagcagtcgaccgcacttatgg

SEQ ID NO: 117844 - DNA, 25 bp, Homo sapien
ggaatgtctggagtggtaacagctc

SEQ ID NO: 117845 - DNA, 25 bp, Homo sapien
cggggactggacacaaacaggaatg

SEQ ID NO: 117846 - DNA, 25 bp, Homo sapien
gactggacacaaacaggaatgtctg

SEQ ID NO: 117847 - DNA, 25 bp, Homo sapien
aacaggaatgtctggagtggtaaca

SEQ ID NO: 117848 - DNA, 25 bp, Homo sapien
gtaattgagcttcaggcagagttgg

SEQ ID NO: 117849 - DNA, 25 bp, Homo sapien
gcagagttggctctgaatttcctgg

SEQ ID NO: 117850 - DNA, 25 bp, Homo sapien
ggcttctgtaattgagcttcaggca

SEQ ID NO: 117851 - DNA, 25 bp, Homo sapien
ctaatatggcttctgtaattgagct

SEQ ID NO: 117852 - DNA, 25 bp, Homo sapien
gaaagaacgaaacagtgcccgtggc

SEQ ID NO: 117853 - DNA, 25 bp, Homo sapien
tggaatagtccatattagcactggg

SEQ ID NO: 117854 - DNA, 25 bp, Homo sapien
tgcccgtggcccttggtataacaga

SEQ ID NO: 117855 - DNA, 25 bp, Homo sapien
caggagaccaagaatactctggagc

SEQ ID NO: 117856 - DNA, 25 bp, Homo sapien
aacactcttccaaaccatgaaaagt

SEQ ID NO: 117857 - DNA, 25 bp, Homo sapien
acttttcatggtttggaagagtgtt

SEQ ID NO: 117858 - DNA, 25 bp, Homo sapien
tcttattgttccatgcatcccagtg

SEQ ID NO: 117859 - DNA, 25 bp, Homo sapien
tggcagaaccattaactgagagggc

SEQ ID NO: 117860 - DNA, 25 bp, Homo sapien
ataatgcatcaatcgcctcctccgg

SEQ ID NO: 117861 - DNA, 25 bp, Homo sapien
tctgcccaaaggttgaaatctcctg

SEQ ID NO: 117862 - DNA, 25 bp, Homo sapien
tctccagggtagcacccttgggcag

SEQ ID NO: 117863 - DNA, 25 bp, Homo sapien
gctttacccgtctccagggtagcac

SEQ ID NO: 117864 - DNA, 25 bp, Homo sapien
gccttcgcggccagaaccgctttac

SEQ ID NO: 117865 - DNA, 25 bp, Homo sapien
ccagccaacgctgtcgcgtggagcg

SEQ ID NO: 117866 - DNA, 25 bp, Homo sapien
tgacatttatgatgccgttgacttg

SEQ ID NO: 117867 - DNA, 25 bp, Homo sapien
tccttcaacccacaaacagagaggg

SEQ ID NO: 117868 - DNA, 25 bp, Homo sapien
ggacagagcagtaggctttctctcc

SEQ ID NO: 117869 - DNA, 25 bp, Homo sapien
tctccagtgattgttgcttgccaac

SEQ ID NO: 117870 - DNA, 25 bp, Homo sapien
ggcaccgcattctgacatggattcc

SEQ ID NO: 117871 - DNA, 25 bp, Homo sapien
gacttagggaatgataactggggct

SEQ ID NO: 117872 - DNA, 25 bp, Homo sapien
agtggccacagctctaaagatctcc

SEQ ID NO: 117873 - DNA, 25 bp, Homo sapien
tcagtaaaggtacctgctggcacct

SEQ ID NO: 117874 - DNA, 25 bp, Homo sapien
taactggggctatcattggactggc

SEQ ID NO: 117875 - DNA, 25 bp, Homo sapien
tctcaggccacagcgtggtagtcat

SEQ ID NO: 117876 - DNA, 25 bp, Homo sapien
catctcaggccacagcgtggtagtc

SEQ ID NO: 117877 - DNA, 25 bp, Homo sapien
atctcaggccacagcgtggtagtca

SEQ ID NO: 117878 - DNA, 25 bp, Homo sapien
aaacaccagagtactcttcatagtg

SEQ ID NO: 117879 - DNA, 25 bp, Homo sapien
tgaagagagctggcgttggcaagag

SEQ ID NO: 117880 - DNA, 25 bp, Homo sapien
acaccagagtactcttcatagtgaa

SEQ ID NO: 117881 - DNA, 25 bp, Homo sapien
tcaaaacaccagagtactcttcata

SEQ ID NO: 117882 - DNA, 25 bp, Homo sapien
tgtccaggttagatccatcaacagc

SEQ ID NO: 117883 - DNA, 25 bp, Homo sapien
catcaacagctaggttacagcagct

SEQ ID NO: 117884 - DNA, 25 bp, Homo sapien
aatctgctttgtaagagactcctct

SEQ ID NO: 117885 - DNA, 25 bp, Homo sapien
tcagtatttgggacctgggagtcac

SEQ ID NO: 117886 - DNA, 25 bp, Homo sapien
ctttctggtgggcctgtagtgcatg

SEQ ID NO: 117887 - DNA, 25 bp, Homo sapien
tgcctttctggtgggcctgtagtgc

SEQ ID NO: 117888 - DNA, 25 bp, Homo sapien
tggtgggcctgtagtgcatggccat

SEQ ID NO: 117889 - DNA, 25 bp, Homo sapien
ttctggtgggcctgtagtgcatggc

SEQ ID NO: 117890 - DNA, 25 bp, Homo sapien
taaccacaaggtgagtagctggcac

SEQ ID NO: 117891 - DNA, 25 bp, Homo sapien
aagagacacttttgaggttccagcc

SEQ ID NO: 117892 - DNA, 25 bp, Homo sapien
tgactacctggtggaaagctacctg

SEQ ID NO: 117893 - DNA, 25 bp, Homo sapien
gaacctgggctcctatatgactacc

SEQ ID NO: 117894 - DNA, 25 bp, Homo sapien
ctgtttgggcttagatgttagttta

SEQ ID NO: 117895 - DNA, 25 bp, Homo sapien
cgtcctcagagtaatctttggcagg

SEQ ID NO: 117896 - DNA, 25 bp, Homo sapien
tatgtcggggctgatctctcaacgt

SEQ ID NO: 117897 - DNA, 25 bp, Homo sapien
gggctgatctctcaacgtcctcaga

SEQ ID NO: 117898 - DNA, 25 bp, Homo sapien
tgatgtgtaagagactacctggtgg

SEQ ID NO: 117899 - DNA, 25 bp, Homo sapien
taggatgtgcctgacactagcaatg

SEQ ID NO: 117900 - DNA, 25 bp, Homo sapien
tcaactgtggcaagagctggttaaa

SEQ ID NO: 117901 - DNA, 25 bp, Homo sapien
ctagcaatgtagtggttaccaaagc

SEQ ID NO: 117902 - DNA, 25 bp, Homo sapien
gaggtcgggcctgcagtgagctttg

SEQ ID NO: 117903 - DNA, 25 bp, Homo sapien
ggaggtcgggcctgcagtgagcttt

SEQ ID NO: 117904 - DNA, 25 bp, Homo sapien
tttgatcacaccactgcactccagc

SEQ ID NO: 117905 - DNA, 25 bp, Homo sapien
gatgtgggaggatcacttgagccca

SEQ ID NO: 117906 - DNA, 25 bp, Homo sapien
taagtgcatatgtgattcttataca

SEQ ID NO: 117907 - DNA, 25 bp, Homo sapien
catatgtgattcttatacactttaa

SEQ ID NO: 117908 - DNA, 25 bp, Homo sapien
gtgcatatgtgattcttatacactt

SEQ ID NO: 117909 - DNA, 25 bp, Homo sapien
aagtgcatatgtgattcttatacac

SEQ ID NO: 117910 - DNA, 25 bp, Homo sapien
agagacctctgcagttattgcactg

SEQ ID NO: 117911 - DNA, 25 bp, Homo sapien
tctgcagttattgcactggagacaa

SEQ ID NO: 117912 - DNA, 25 bp, Homo sapien
gcactggagacaaaacgcagttctt

SEQ ID NO: 117913 - DNA, 25 bp, Homo sapien
gagacaaaacgcagttctttcttca

SEQ ID NO: 117914 - DNA, 25 bp, Homo sapien
cagtgaggtccggtcagcttctgtg

SEQ ID NO: 117915 - DNA, 25 bp, Homo sapien
ttaatcactgtttgtggacagcagg

SEQ ID NO: 117916 - DNA, 25 bp, Homo sapien
cagcaggtttgtgctcatgccaagc

SEQ ID NO: 117917 - DNA, 25 bp, Homo sapien
tgctcatgccaagcttgactcctgg

SEQ ID NO: 117918 - DNA, 25 bp, Homo sapien
agtggctccataaccctcaccactc

SEQ ID NO: 117919 - DNA, 25 bp, Homo sapien
ggctccataaccctcaccactccct

SEQ ID NO: 117920 - DNA, 25 bp, Homo sapien
ccctctggcctgagttacaatggct

SEQ ID NO: 117921 - DNA, 25 bp, Homo sapien
cctctggcctgagttacaatggctc

SEQ ID NO: 117922 - DNA, 25 bp, Homo sapien
acaaggagcagcgtttgctccttca

SEQ ID NO: 117923 - DNA, 25 bp, Homo sapien
tgtgggtctggttttacaaggagca

SEQ ID NO: 117924 - DNA, 25 bp, Homo sapien
agggtttccaacatagttctcagga

SEQ ID NO: 117925 - DNA, 25 bp, Homo sapien
gggtttccaacatagttctcaggat

SEQ ID NO: 117926 - DNA, 25 bp, Homo sapien
tagtattaaaaacaatcggatacat

SEQ ID NO: 117927 - DNA, 25 bp, Homo sapien
gctatggtaacccagacagcttaga

SEQ ID NO: 117928 - DNA, 25 bp, Homo sapien
tagaatgataacctatcaaggtatg

SEQ ID NO: 117929 - DNA, 25 bp, Homo sapien
ccttattggaacttgacaaattgac

SEQ ID NO: 117930 - DNA, 25 bp, Homo sapien
tgtacataggctgcagcttctggga

SEQ ID NO: 117931 - DNA, 25 bp, Homo sapien
gaaatgagcacagcactctagggac

SEQ ID NO: 117932 - DNA, 25 bp, Homo sapien
tcaggatttacacacggtctcaggc

SEQ ID NO: 117933 - DNA, 25 bp, Homo sapien
tataagtgacttgggttggctgacc

SEQ ID NO: 117934 - DNA, 25 bp, Homo sapien
ccctaattcgggaggcacagctttg

SEQ ID NO: 117935 - DNA, 25 bp, Homo sapien
tattcaaagtctgagcgcgccagtg

SEQ ID NO: 117936 - DNA, 25 bp, Homo sapien
agtttaccagcagtctaagcgcccc

SEQ ID NO: 117937 - DNA, 25 bp, Homo sapien
cttcaagtcctaagtgcggcgggcc

SEQ ID NO: 117938 - DNA, 25 bp, Homo sapien
gggtcccagtggctcaggcaccggg

SEQ ID NO: 117939 - DNA, 25 bp, Homo sapien
gggatccgcaggacgagctgctgcc

SEQ ID NO: 117940 - DNA, 25 bp, Homo sapien
agaacgaagcggtgacgccgaaagg

SEQ ID NO: 117941 - DNA, 25 bp, Homo sapien
tccgcaggacgagctgctgccgctg

SEQ ID NO: 117942 - DNA, 25 bp, Homo sapien
gattcgagtggatttggcacatccc

SEQ ID NO: 117943 - DNA, 25 bp, Homo sapien
tctcagttgggaaggcgacgctgct

SEQ ID NO: 117944 - DNA, 25 bp, Homo sapien
tactggtcactctcagaactgtggc

SEQ ID NO: 117945 - DNA, 25 bp, Homo sapien
tccccaaacgagaggaagattcgag

SEQ ID NO: 117946 - DNA, 25 bp, Homo sapien
cagacagcttatgattaggatggcc

SEQ ID NO: 117947 - DNA, 25 bp, Homo sapien
tggaggctgtcctgataactcattt

SEQ ID NO: 117948 - DNA, 25 bp, Homo sapien
tccttgcctattgacaccctgtttg

SEQ ID NO: 117949 - DNA, 25 bp, Homo sapien
aagatgcaagcttcatggaatgtcc

SEQ ID NO: 117950 - DNA, 25 bp, Homo sapien
gaaatcctcaagatgcgcatggtgg

SEQ ID NO: 117951 - DNA, 25 bp, Homo sapien
aaagatgggtcttcgtatgggcaca

SEQ ID NO: 117952 - DNA, 25 bp, Homo sapien
tctcacagtgtgtgcggtaccgtct

SEQ ID NO: 117953 - DNA, 25 bp, Homo sapien
caaaagattaggcagactctgggct

SEQ ID NO: 117954 - DNA, 25 bp, Homo sapien
tacagggccgcgctctcagtcttct

SEQ ID NO: 117955 - DNA, 25 bp, Homo sapien
aaagatacttgagcaaaaatgattt

SEQ ID NO: 117956 - DNA, 25 bp, Homo sapien
gactgggcagctcccagttacaggg

SEQ ID NO: 117957 - DNA, 25 bp, Homo sapien
ttactgtcgcccttctcacacgaaa

SEQ ID NO: 117958 - DNA, 25 bp, Homo sapien
gcacaaacccggactttctctcctg

SEQ ID NO: 117959 - DNA, 25 bp, Homo sapien
tgtttgtgccccgaactagtagtgg

SEQ ID NO: 117960 - DNA, 25 bp, Homo sapien
gcctgagtgaatctcctgcacaaac

SEQ ID NO: 117961 - DNA, 25 bp, Homo sapien
aactagtagtgggagggagcaattt

SEQ ID NO: 117962 - DNA, 25 bp, Homo sapien
cgttgattatatttctcaggttgaa

SEQ ID NO: 117963 - DNA, 25 bp, Homo sapien
ttagaccttaggcttataacgttga

SEQ ID NO: 117964 - DNA, 25 bp, Homo sapien
tttctcaggttgaagcacatcatca

SEQ ID NO: 117965 - DNA, 25 bp, Homo sapien
gaccttaggcttataacgttgatta

SEQ ID NO: 117966 - DNA, 25 bp, Homo sapien
tggctgaccacagccgcaagccgct

SEQ ID NO: 117967 - DNA, 25 bp, Homo sapien
ggctgaccacagccgcaagccgctg

SEQ ID NO: 117968 - DNA, 25 bp, Homo sapien
gaccacagccgcaagccgctgcgcg

SEQ ID NO: 117969 - DNA, 25 bp, Homo sapien
ctgaccacagccgcaagccgctgcg

SEQ ID NO: 117970 - DNA, 25 bp, Homo sapien
gaagcgcggagcctctctggccttg

SEQ ID NO: 117971 - DNA, 25 bp, Homo sapien
gaaagcaacgcgttatgggcaaggt

SEQ ID NO: 117972 - DNA, 25 bp, Homo sapien
ttagctctcgggtcctggaagcgcg

SEQ ID NO: 117973 - DNA, 25 bp, Homo sapien
cttgagccccgagggcatggccctg

SEQ ID NO: 117974 - DNA, 25 bp, Homo sapien
ggagcttctcgctggcaggtttttc

SEQ ID NO: 117975 - DNA, 25 bp, Homo sapien
gtacctgcgcttatcttttcactta

SEQ ID NO: 117976 - DNA, 25 bp, Homo sapien
ctcctgggaaacggcgggagcttct

SEQ ID NO: 117977 - DNA, 25 bp, Homo sapien
aggtttttctgtacctgcgcttatc

SEQ ID NO: 117978 - DNA, 25 bp, Homo sapien
gcggttgcctaggtaacctgatctc

SEQ ID NO: 117979 - DNA, 25 bp, Homo sapien
tccgagtccactccgatttcccaat

SEQ ID NO: 117980 - DNA, 25 bp, Homo sapien
gggcaatccgattcaagtccgagtc

SEQ ID NO: 117981 - DNA, 25 bp, Homo sapien
gtacagactgcctgtggcggttgcc

SEQ ID NO: 117982 - DNA, 25 bp, Homo sapien
cattgcaccattacggagttccctt

SEQ ID NO: 117983 - DNA, 25 bp, Homo sapien
aaatctgcatagttggctgtaggcc

SEQ ID NO: 117984 - DNA, 25 bp, Homo sapien
tgtcaggtttggttagggagcactt

SEQ ID NO: 117985 - DNA, 25 bp, Homo sapien
tgttctggtaccctgactgcctcag

SEQ ID NO: 117986 - DNA, 25 bp, Homo sapien
taaaaacagtgatcataatattata

SEQ ID NO: 117987 - DNA, 25 bp, Homo sapien
attaaaaacagtgatcataatatta

SEQ ID NO: 117988 - DNA, 25 bp, Homo sapien
ccattaaaaacagtgatcataatat

SEQ ID NO: 117989 - DNA, 25 bp, Homo sapien
cttccattaaaaacagtgatcataa

SEQ ID NO: 117990 - DNA, 25 bp, Homo sapien
tggtttaggttttcactttcaatca

SEQ ID NO: 117991 - DNA, 25 bp, Homo sapien
cagttctttaattatttcttcttgg

SEQ ID NO: 117992 - DNA, 25 bp, Homo sapien
tccaactatacgaggataccctaag

SEQ ID NO: 117993 - DNA, 25 bp, Homo sapien
cataagataagccattgcacaaaca

SEQ ID NO: 117994 - DNA, 25 bp, Homo sapien
acaaggctctaaccctgaaatttct

SEQ ID NO: 117995 - DNA, 25 bp, Homo sapien
gagcaacaatggtaagactcgttaa

SEQ ID NO: 117996 - DNA, 25 bp, Homo sapien
ccaaatttctacattcttgaagacc

SEQ ID NO: 117997 - DNA, 25 bp, Homo sapien
attgtggttcagccaaagaaccttc

SEQ ID NO: 117998 - DNA, 25 bp, Homo sapien
tttattagatttccagcaaggttga

SEQ ID NO: 117999 - DNA, 25 bp, Homo sapien
tccagcaaggttgagatcttttaaa

SEQ ID NO: 118000 - DNA, 25 bp, Homo sapien
ttagatttccagcaaggttgagatc

SEQ ID NO: 118001 - DNA, 25 bp, Homo sapien
gcaaggttgagatcttttaaattct

SEQ ID NO: 118002 - DNA, 25 bp, Homo sapien
gttgttcattggagtcaagacatcg

SEQ ID NO: 118003 - DNA, 25 bp, Homo sapien
tccagttgttcattggagtcaagac

SEQ ID NO: 118004 - DNA, 25 bp, Homo sapien
ccagttgttcattggagtcaagaca

SEQ ID NO: 118005 - DNA, 25 bp, Homo sapien
tgttcattggagtcaagacatcgac

SEQ ID NO: 118006 - DNA, 25 bp, Homo sapien
ctcagcacttagaacacagcaggca

SEQ ID NO: 118007 - DNA, 25 bp, Homo sapien
ttattactttcagccaacttcgagg

SEQ ID NO: 118008 - DNA, 25 bp, Homo sapien
tctcattaccaggatggtgcctgag

SEQ ID NO: 118009 - DNA, 25 bp, Homo sapien
ccaaaggaagaactaggaagcatta

SEQ ID NO: 118010 - DNA, 25 bp, Homo sapien
gcagcctggttaagttcgtgagttc

SEQ ID NO: 118011 - DNA, 25 bp, Homo sapien
ccaatgtgtcaaatctttgaaggca

SEQ ID NO: 118012 - DNA, 25 bp, Homo sapien
taaatcctttaagcaaggcagcctg

SEQ ID NO: 118013 - DNA, 25 bp, Homo sapien
tatattgagggtcattcagacataa

SEQ ID NO: 118014 - DNA, 25 bp, Homo sapien
aataattttactcgttcttctggca

SEQ ID NO: 118015 - DNA, 25 bp, Homo sapien
gaataattttactcgttcttctggc

SEQ ID NO: 118016 - DNA, 25 bp, Homo sapien
taattttactcgttcttctggcaac

SEQ ID NO: 118017 - DNA, 25 bp, Homo sapien
gaagagtttttatacgcatattata

SEQ ID NO: 118018 - DNA, 25 bp, Homo sapien
ttttcttaaggtatggccactggga

SEQ ID NO: 118019 - DNA, 25 bp, Homo sapien
aaaatagattaagcatattcattaa

SEQ ID NO: 118020 - DNA, 25 bp, Homo sapien
gaaaatagattaagcatattcatta

SEQ ID NO: 118021 - DNA, 25 bp, Homo sapien
cattcaaggcatttagtttggccaa

SEQ ID NO: 118022 - DNA, 25 bp, Homo sapien
aagacttggttcttcagtgacagtt

SEQ ID NO: 118023 - DNA, 25 bp, Homo sapien
tgagttcagccagttctcgttccaa

SEQ ID NO: 118024 - DNA, 25 bp, Homo sapien
tactttactgttattggatccatca

SEQ ID NO: 118025 - DNA, 25 bp, Homo sapien
tcatctagttttttgttccagaatg

SEQ ID NO: 118026 - DNA, 25 bp, Homo sapien
catctagttttttgttccagaatgt

SEQ ID NO: 118027 - DNA, 25 bp, Homo sapien
tctagttttttgttccagaatgtta

SEQ ID NO: 118028 - DNA, 25 bp, Homo sapien
atctagttttttgttccagaatgtt

SEQ ID NO: 118029 - DNA, 25 bp, Homo sapien
aaaatacatacagctattagaatga

SEQ ID NO: 118030 - DNA, 25 bp, Homo sapien
gaaaaatacatacagctattagaat

SEQ ID NO: 118031 - DNA, 25 bp, Homo sapien
gagaaaaatacatacagctattaga

SEQ ID NO: 118032 - DNA, 25 bp, Homo sapien
tattggagagaaaaatacatacagc

SEQ ID NO: 118033 - DNA, 25 bp, Homo sapien
cacagtctctaactcaattaacaaa

SEQ ID NO: 118034 - DNA, 25 bp, Homo sapien
ctctaactcaattaacaaaagtggg

SEQ ID NO: 118035 - DNA, 25 bp, Homo sapien
gtctctaactcaattaacaaaagtg

SEQ ID NO: 118036 - DNA, 25 bp, Homo sapien
ctaactcaattaacaaaagtgggat

SEQ ID NO: 118037 - DNA, 25 bp, Homo sapien
catgtacccagttcctattgtgtgg

SEQ ID NO: 118038 - DNA, 25 bp, Homo sapien
tccagggttatgtgccaagtccatt

SEQ ID NO: 118039 - DNA, 25 bp, Homo sapien
tactagtaggccttggttctaaagc

SEQ ID NO: 118040 - DNA, 25 bp, Homo sapien
gaaattgtgcccctctaattgaagc

SEQ ID NO: 118041 - DNA, 25 bp, Homo sapien
gccaagcttgcagtatgctaaaact

SEQ ID NO: 118042 - DNA, 25 bp, Homo sapien
tgaagctaagagataatgacataca

SEQ ID NO: 118043 - DNA, 25 bp, Homo sapien
tatctaatttactatcaggctgaca

SEQ ID NO: 118044 - DNA, 25 bp, Homo sapien
ccaagtaaacaggttaatgctaatc

SEQ ID NO: 118045 - DNA, 25 bp, Homo sapien
tacgcataaaattccggtcctgtct

SEQ ID NO: 118046 - DNA, 25 bp, Homo sapien
atacgcataaaattccggtcctgtc

SEQ ID NO: 118047 - DNA, 25 bp, Homo sapien
aaattccggtcctgtctagcacaga

SEQ ID NO: 118048 - DNA, 25 bp, Homo sapien
cataaaattccggtcctgtctagca

SEQ ID NO: 118049 - DNA, 25 bp, Homo sapien
aacgtgacagaattaattcatagca

SEQ ID NO: 118050 - DNA, 25 bp, Homo sapien
ccaggcacaaaaacgtgacagaatt

SEQ ID NO: 118051 - DNA, 25 bp, Homo sapien
tgaagtcccaggcacaaaaacgtga

SEQ ID NO: 118052 - DNA, 25 bp, Homo sapien
cacaaaaacgtgacagaattaattc

SEQ ID NO: 118053 - DNA, 25 bp, Homo sapien
cagaatacggttgttaactttaatg

SEQ ID NO: 118054 - DNA, 25 bp, Homo sapien
gatgcgttttacttttactcctgta

SEQ ID NO: 118055 - DNA, 25 bp, Homo sapien
taatgatgcgttttacttttactcc

SEQ ID NO: 118056 - DNA, 25 bp, Homo sapien
ttctcttcgaattttagtctcagaa

SEQ ID NO: 118057 - DNA, 25 bp, Homo sapien
cactgaaacttcaggatcaaaaaca

SEQ ID NO: 118058 - DNA, 25 bp, Homo sapien
ctgaaacttcaggatcaaaaacata

SEQ ID NO: 118059 - DNA, 25 bp, Homo sapien
tttcaagtatttgtagaagatgctt

SEQ ID NO: 118060 - DNA, 25 bp, Homo sapien
gcattccagcatccttcggtagctc

SEQ ID NO: 118061 - DNA, 25 bp, Homo sapien
gagctcatgcttaagagagattttc

SEQ ID NO: 118062 - DNA, 25 bp, Homo sapien
aaaaattcaattctgggacactcac

SEQ ID NO: 118063 - DNA, 25 bp, Homo sapien
acttatacttagactgttagaaaca

SEQ ID NO: 118064 - DNA, 25 bp, Homo sapien
tatacttagactgttagaaacaatg

SEQ ID NO: 118065 - DNA, 25 bp, Homo sapien
gaaagtcatgtattactacactggt

SEQ ID NO: 118066 - DNA, 25 bp, Homo sapien
cttaatgctgacataataatcactc

SEQ ID NO: 118067 - DNA, 25 bp, Homo sapien
cagtaagtatctgttaaaagtgtgg

SEQ ID NO: 118068 - DNA, 25 bp, Homo sapien
gaacatctccttggttgataaaacc

SEQ ID NO: 118069 - DNA, 25 bp, Homo sapien
caatttgtctttagctgattttaac

SEQ ID NO: 118070 - DNA, 25 bp, Homo sapien
tgatgattcaggacaaataaggcct

SEQ ID NO: 118071 - DNA, 25 bp, Homo sapien
gcctatcttccggagtactttatat

SEQ ID NO: 118072 - DNA, 25 bp, Homo sapien
gcaatccatacactttacaatttgt

SEQ ID NO: 118073 - DNA, 25 bp, Homo sapien
aaccattggatagttggattgactg

SEQ ID NO: 118074 - DNA, 25 bp, Homo sapien
aaaacttttgtaatgaggaggatgc

SEQ ID NO: 118075 - DNA, 25 bp, Homo sapien
aaatatttccgaggaatgaacactg

SEQ ID NO: 118076 - DNA, 25 bp, Homo sapien
ggattgactgatggattctttttca

SEQ ID NO: 118077 - DNA, 25 bp, Homo sapien
gacaaaccacttgcactgccgaaca

SEQ ID NO: 118078 - DNA, 25 bp, Homo sapien
gcactgccgaacactgcaatcacag

SEQ ID NO: 118079 - DNA, 25 bp, Homo sapien
attcaacaacatattccggcaaaac

SEQ ID NO: 118080 - DNA, 25 bp, Homo sapien
catattccggcaaaacaaggtcatg

SEQ ID NO: 118081 - DNA, 25 bp, Homo sapien
tggaaaatactgatacttctgggtt

SEQ ID NO: 118082 - DNA, 25 bp, Homo sapien
cttggaaaatactgatacttctggg

SEQ ID NO: 118083 - DNA, 25 bp, Homo sapien
cagaaaataaagagggtgccttgac

SEQ ID NO: 118084 - DNA, 25 bp, Homo sapien
ctttcttctagaataacattgttga

SEQ ID NO: 118085 - DNA, 25 bp, Homo sapien
taaacgctagtctttgcaagggaaa

SEQ ID NO: 118086 - DNA, 25 bp, Homo sapien
ggtcgggccttgattctgggctcca

SEQ ID NO: 118087 - DNA, 25 bp, Homo sapien
catccaaactaatcagttttggtcg

SEQ ID NO: 118088 - DNA, 25 bp, Homo sapien
cacaatatgactgtaaacgctagtc

SEQ ID NO: 118089 - DNA, 25 bp, Homo sapien
ctagagagcactgatttaatccaag

SEQ ID NO: 118090 - DNA, 25 bp, Homo sapien
gagaaatggacgctttaggtagcat

SEQ ID NO: 118091 - DNA, 25 bp, Homo sapien
tcacattatattactactagagagc

SEQ ID NO: 118092 - DNA, 25 bp, Homo sapien
tggcatcatcagacaggcagtttag

SEQ ID NO: 118093 - DNA, 25 bp, Homo sapien
tggagagatctctcaatttactcaa

SEQ ID NO: 118094 - DNA, 25 bp, Homo sapien
agctgtttccatgtagattcagact

SEQ ID NO: 118095 - DNA, 25 bp, Homo sapien
acaggtaaattcattaaagctaatg

SEQ ID NO: 118096 - DNA, 25 bp, Homo sapien
ctaatgtttagttttcgaagtcctg

SEQ ID NO: 118097 - DNA, 25 bp, Homo sapien
aattggctactaagcttgtgtattt

SEQ ID NO: 118098 - DNA, 25 bp, Homo sapien
gtggttcaggtttcaagagttgaat

SEQ ID NO: 118099 - DNA, 25 bp, Homo sapien
tcataagctggtgaaaacttgtccc

SEQ ID NO: 118100 - DNA, 25 bp, Homo sapien
gaattagtcattcctttataaggta

SEQ ID NO: 118101 - DNA, 25 bp, Homo sapien
gaatttactatatggcccttctgtt

SEQ ID NO: 118102 - DNA, 25 bp, Homo sapien
tgttgaatatcaagagtgagaaggc

SEQ ID NO: 118103 - DNA, 25 bp, Homo sapien
tccagctcaagtctaagtgcttcag

SEQ ID NO: 118104 - DNA, 25 bp, Homo sapien
tcagacctctaaatccctcaagggt

SEQ ID NO: 118105 - DNA, 25 bp, Homo sapien
tatcacatggttatggcttgcatcc

SEQ ID NO: 118106 - DNA, 25 bp, Homo sapien
ggtaagagtctttaatctgccaata

SEQ ID NO: 118107 - DNA, 25 bp, Homo sapien
gttcctgcaataaatttcatagctg

SEQ ID NO: 118108 - DNA, 25 bp, Homo sapien
gccaataacactcagcctcaatgtg

SEQ ID NO: 118109 - DNA, 25 bp, Homo sapien
caataaatttcatagctgctgttgc

SEQ ID NO: 118110 - DNA, 25 bp, Homo sapien
tcctctttagtactagaatgccgta

SEQ ID NO: 118111 - DNA, 25 bp, Homo sapien
ggccatatactaagtatccgtggtc

SEQ ID NO: 118112 - DNA, 25 bp, Homo sapien
tgcgtcagaattttggcagaaggcc

SEQ ID NO: 118113 - DNA, 25 bp, Homo sapien
agtatccgtggtctctcctctttag

SEQ ID NO: 118114 - DNA, 25 bp, Homo sapien
gaatgatgcccatttcaaattttcc

SEQ ID NO: 118115 - DNA, 25 bp, Homo sapien
gctgaatgatgcccatttcaaattt

SEQ ID NO: 118116 - DNA, 25 bp, Homo sapien
ttgctgaatgatgcccatttcaaat

SEQ ID NO: 118117 - DNA, 25 bp, Homo sapien
attgctgaatgatgcccatttcaaa

SEQ ID NO: 118118 - DNA, 25 bp, Homo sapien
aatgtgagctcttccaagttaatac

SEQ ID NO: 118119 - DNA, 25 bp, Homo sapien
tgagatgcagtttccatctaatgtg

SEQ ID NO: 118120 - DNA, 25 bp, Homo sapien
tccaagttaatacaggattccagac

SEQ ID NO: 118121 - DNA, 25 bp, Homo sapien
gcagtttccatctaatgtgagctct

SEQ ID NO: 118122 - DNA, 25 bp, Homo sapien
aattgtgcatctcctgattgacagc

SEQ ID NO: 118123 - DNA, 25 bp, Homo sapien
tgttctcaagagaaagcgagtgaag

SEQ ID NO: 118124 - DNA, 25 bp, Homo sapien
tcccaaccagtgagaagattattat

SEQ ID NO: 118125 - DNA, 25 bp, Homo sapien
tatgctgaggcgagttaatttagtc

SEQ ID NO: 118126 - DNA, 25 bp, Homo sapien
acacatgtctagaatgaccaagttg

SEQ ID NO: 118127 - DNA, 25 bp, Homo sapien
ctagaatgaccaagttgcataaacc

SEQ ID NO: 118128 - DNA, 25 bp, Homo sapien
atgaaatattacaaacaaccggtag

SEQ ID NO: 118129 - DNA, 25 bp, Homo sapien
gattccatataatgatgttcccaca

SEQ ID NO: 118130 - DNA, 25 bp, Homo sapien
tcttgcatttgtttgaagttggaat

SEQ ID NO: 118131 - DNA, 25 bp, Homo sapien
cagaagtaagtctaccaccaaacaa

SEQ ID NO: 118132 - DNA, 25 bp, Homo sapien
ttttgcactgtcagtctctgatggt

SEQ ID NO: 118133 - DNA, 25 bp, Homo sapien
ccttgtcgttctgcaatcatgtcag

SEQ ID NO: 118134 - DNA, 25 bp, Homo sapien
gttctgtagattcacattacacaca

SEQ ID NO: 118135 - DNA, 25 bp, Homo sapien
ttggtcgactggaatcaaatccact

SEQ ID NO: 118136 - DNA, 25 bp, Homo sapien
cacatttctaaattggtcgactgga

SEQ ID NO: 118137 - DNA, 25 bp, Homo sapien
gattaatccactgaatgaggtaaga

SEQ ID NO: 118138 - DNA, 25 bp, Homo sapien
gaataatttgcattggaaaccttga

SEQ ID NO: 118139 - DNA, 25 bp, Homo sapien
tgtctactggttaagtgagtctgag

SEQ ID NO: 118140 - DNA, 25 bp, Homo sapien
acagtagttgtctactggttaagtg

SEQ ID NO: 118141 - DNA, 25 bp, Homo sapien
tactggttaagtgagtctgaggctt

SEQ ID NO: 118142 - DNA, 25 bp, Homo sapien
ctttagtctgggcatgattgattca

SEQ ID NO: 118143 - DNA, 25 bp, Homo sapien
ctgtccatagccacttgaaggcact

SEQ ID NO: 118144 - DNA, 25 bp, Homo sapien
gtccatagccacttgaaggcacttt

SEQ ID NO: 118145 - DNA, 25 bp, Homo sapien
tgtccatagccacttgaaggcactt

SEQ ID NO: 118146 - DNA, 25 bp, Homo sapien
gtttgaggccataaacttaacttca

SEQ ID NO: 118147 - DNA, 25 bp, Homo sapien
ctgaaacacataggtaagtttgagg

SEQ ID NO: 118148 - DNA, 25 bp, Homo sapien
cataggtaagtttgaggccataaac

SEQ ID NO: 118149 - DNA, 25 bp, Homo sapien
acacataggtaagtttgaggccata

SEQ ID NO: 118150 - DNA, 25 bp, Homo sapien
taaactgtgcattattggaggcaaa

SEQ ID NO: 118151 - DNA, 25 bp, Homo sapien
gtagctggatcaaattacaaattcc

SEQ ID NO: 118152 - DNA, 25 bp, Homo sapien
ttgtagcccaaatgaagaacttcta

SEQ ID NO: 118153 - DNA, 25 bp, Homo sapien
tctgttaagttgtagctggatcaaa

SEQ ID NO: 118154 - DNA, 25 bp, Homo sapien
tcctccaagtgaagtgccaataaag

SEQ ID NO: 118155 - DNA, 25 bp, Homo sapien
tgtaatttgcccagttctcgtagtc

SEQ ID NO: 118156 - DNA, 25 bp, Homo sapien
gatcggatgcggttatggtccacta

SEQ ID NO: 118157 - DNA, 25 bp, Homo sapien
tggtccactaccaattcttgaagga

SEQ ID NO: 118158 - DNA, 25 bp, Homo sapien
gagagtagagataacgtcaagtttt

SEQ ID NO: 118159 - DNA, 25 bp, Homo sapien
gagtagagataacgtcaagtttttc

SEQ ID NO: 118160 - DNA, 25 bp, Homo sapien
agagataacgtcaagtttttccagt

SEQ ID NO: 118161 - DNA, 25 bp, Homo sapien
gtagagataacgtcaagtttttcca

SEQ ID NO: 118162 - DNA, 25 bp, Homo sapien
tgtaagttaggcagtcgaaatataa

SEQ ID NO: 118163 - DNA, 25 bp, Homo sapien
ctgtaagttaggcagtcgaaatata

SEQ ID NO: 118164 - DNA, 25 bp, Homo sapien
tgccctatcatctgaattcacagga

SEQ ID NO: 118165 - DNA, 25 bp, Homo sapien
gtagttcagcgaggtgaaattcagc

SEQ ID NO: 118166 - DNA, 25 bp, Homo sapien
ttgcttgtagttcagcgaggtgaaa

SEQ ID NO: 118167 - DNA, 25 bp, Homo sapien
ctatcatctgaattcacaggacttc

SEQ ID NO: 118168 - DNA, 25 bp, Homo sapien
cacagcattctaataatgttacttc

SEQ ID NO: 118169 - DNA, 25 bp, Homo sapien
tcaaaccacagcattctaataatgt

SEQ ID NO: 118170 - DNA, 25 bp, Homo sapien
gattcatttatattctctaccgtgg

SEQ ID NO: 118171 - DNA, 25 bp, Homo sapien
cgtggtccaggtcttcataacatct

SEQ ID NO: 118172 - DNA, 25 bp, Homo sapien
aggattttgagatggtgaaattatc

SEQ ID NO: 118173 - DNA, 25 bp, Homo sapien
catggcaaagtactttgcaggtgtg

SEQ ID NO: 118174 - DNA, 25 bp, Homo sapien
attttgagatggtgaaattatcctg

SEQ ID NO: 118175 - DNA, 25 bp, Homo sapien
tacatggcaaagtactttgcaggtg

SEQ ID NO: 118176 - DNA, 25 bp, Homo sapien
ctatgggaggagttttcacttggcc

SEQ ID NO: 118177 - DNA, 25 bp, Homo sapien
gctgaatccactaggcagaagtaca

SEQ ID NO: 118178 - DNA, 25 bp, Homo sapien
tctgccatccataggagagtgggta

SEQ ID NO: 118179 - DNA, 25 bp, Homo sapien
gacgtcagatcccaagtaatggctg

SEQ ID NO: 118180 - DNA, 25 bp, Homo sapien
gtgattcttttacattctatctgaa

SEQ ID NO: 118181 - DNA, 25 bp, Homo sapien
ttcttttacattctatctgaaattg

SEQ ID NO: 118182 - DNA, 25 bp, Homo sapien
ttaagtgattcttttacattctatc

SEQ ID NO: 118183 - DNA, 25 bp, Homo sapien
tacattctatctgaaattgtcaaaa

SEQ ID NO: 118184 - DNA, 25 bp, Homo sapien
gctatttctgcatggatgctccgag

SEQ ID NO: 118185 - DNA, 25 bp, Homo sapien
cttctcttatcttggttgctctggt

SEQ ID NO: 118186 - DNA, 25 bp, Homo sapien
tccctctgagttgccgaaaagctat

SEQ ID NO: 118187 - DNA, 25 bp, Homo sapien
tgtgcagtaggagatgcaatattct

SEQ ID NO: 118188 - DNA, 25 bp, Homo sapien
caatgttcttaggctttgagctagg

SEQ ID NO: 118189 - DNA, 25 bp, Homo sapien
gcaatgttcttaggctttgagctag

SEQ ID NO: 118190 - DNA, 25 bp, Homo sapien
gatcttggaaagttgctcccaaaaa

SEQ ID NO: 118191 - DNA, 25 bp, Homo sapien
tgatcttggaaagttgctcccaaaa

SEQ ID NO: 118192 - DNA, 25 bp, Homo sapien
atcttggaaagttgctcccaaaaat

SEQ ID NO: 118193 - DNA, 25 bp, Homo sapien
ttgtacaactactaaacaggtgagt

SEQ ID NO: 118194 - DNA, 25 bp, Homo sapien
tgtatgctcatttctctttaggcag

SEQ ID NO: 118195 - DNA, 25 bp, Homo sapien
tttttaactgaccactgtccgctag

SEQ ID NO: 118196 - DNA, 25 bp, Homo sapien
tcatatggaactgaagtgcttcagt

SEQ ID NO: 118197 - DNA, 25 bp, Homo sapien
agcagggaaatagcgcgcttcgttc

SEQ ID NO: 118198 - DNA, 25 bp, Homo sapien
cttcgttcgcgccaggactaggcca

SEQ ID NO: 118199 - DNA, 25 bp, Homo sapien
tggtctcgcactgggcctagcagaa

SEQ ID NO: 118200 - DNA, 25 bp, Homo sapien
acgggagtcgctcgtgctctggtct

SEQ ID NO: 118201 - DNA, 25 bp, Homo sapien
cccgaatgcggaggcagaaaagctg

SEQ ID NO: 118202 - DNA, 25 bp, Homo sapien
agtcacccgagggaagagaagacgc

SEQ ID NO: 118203 - DNA, 25 bp, Homo sapien
tttccatggctaacgtctactccgg

SEQ ID NO: 118204 - DNA, 25 bp, Homo sapien
ccagggaccgcatttttgcaggtaa

SEQ ID NO: 118205 - DNA, 25 bp, Homo sapien
tctacaaagtgtaaaaatgggacgc

SEQ ID NO: 118206 - DNA, 25 bp, Homo sapien
tacagctcctttgggaaacagtcta

SEQ ID NO: 118207 - DNA, 25 bp, Homo sapien
caaactcgcctggaatgtgtcactt

SEQ ID NO: 118208 - DNA, 25 bp, Homo sapien
cagggtatgatagggacgttccttc

SEQ ID NO: 118209 - DNA, 25 bp, Homo sapien
gacatgacctcttagaaatgagcct

SEQ ID NO: 118210 - DNA, 25 bp, Homo sapien
tgtcaattgacagcttacaggtgca

SEQ ID NO: 118211 - DNA, 25 bp, Homo sapien
gaatgaagtctgctactcacatgaa

SEQ ID NO: 118212 - DNA, 25 bp, Homo sapien
gaaagacatagacttgcctcccggg

SEQ ID NO: 118213 - DNA, 25 bp, Homo sapien
gaaatggtcatgagtctgtcagcta

SEQ ID NO: 118214 - DNA, 25 bp, Homo sapien
taccctggttccgtagactcactag

SEQ ID NO: 118215 - DNA, 25 bp, Homo sapien
cagcaattgagattccctgtcagat

SEQ ID NO: 118216 - DNA, 25 bp, Homo sapien
gcagtctcttactaggcctgattgg

SEQ ID NO: 118217 - DNA, 25 bp, Homo sapien
tacaagttatatggtaagcaccccg

SEQ ID NO: 118218 - DNA, 25 bp, Homo sapien
aaaggtattcactcaaattcaagac

SEQ ID NO: 118219 - DNA, 25 bp, Homo sapien
gtgcccagcaaaagacttttgatgt

SEQ ID NO: 118220 - DNA, 25 bp, Homo sapien
gaacaagcacgttaacatctctttg

SEQ ID NO: 118221 - DNA, 25 bp, Homo sapien
tagccgggacgaaaggtatgagcca

SEQ ID NO: 118222 - DNA, 25 bp, Homo sapien
gggcattagctctttgacatgacgg

SEQ ID NO: 118223 - DNA, 25 bp, Homo sapien
agaatattaattacggagggcacgg

SEQ ID NO: 118224 - DNA, 25 bp, Homo sapien
tgtagggcatgactctctaggcccc

SEQ ID NO: 118225 - DNA, 25 bp, Homo sapien
agatcaatctggcaacgtactgaga

SEQ ID NO: 118226 - DNA, 25 bp, Homo sapien
tgtggtaggaacactaacatgagat

SEQ ID NO: 118227 - DNA, 25 bp, Homo sapien
tcatacctgttgaatagcaactccc

SEQ ID NO: 118228 - DNA, 25 bp, Homo sapien
cagtattgtcagctgcaggcacaat

SEQ ID NO: 118229 - DNA, 25 bp, Homo sapien
tagtaacagatcatgtaactaatgt

SEQ ID NO: 118230 - DNA, 25 bp, Homo sapien
aaaatgtgtcatttgagttttccaa

SEQ ID NO: 118231 - DNA, 25 bp, Homo sapien
caatggatatcagcagactaaagcc

SEQ ID NO: 118232 - DNA, 25 bp, Homo sapien
ttttcccatgatatctagtaacaga

SEQ ID NO: 118233 - DNA, 25 bp, Homo sapien
gatgcccaaaggagatgcttagtag

SEQ ID NO: 118234 - DNA, 25 bp, Homo sapien
tgctgggtaccactgagctcatgct

SEQ ID NO: 118235 - DNA, 25 bp, Homo sapien
tacatactacaggttaggcatcaca

SEQ ID NO: 118236 - DNA, 25 bp, Homo sapien
cagagcagtttggtctagctgagta

SEQ ID NO: 118237 - DNA, 25 bp, Homo sapien
ggcacatacttgacactaagttgct

SEQ ID NO: 118238 - DNA, 25 bp, Homo sapien
atttataactgtacttctcagaccc

SEQ ID NO: 118239 - DNA, 25 bp, Homo sapien
ctcagacccctttctggcacatact

SEQ ID NO: 118240 - DNA, 25 bp, Homo sapien
cacattactatttcatctcctcact

SEQ ID NO: 118241 - DNA, 25 bp, Homo sapien
tgaaagtcacatgcttttctgtaac

SEQ ID NO: 118242 - DNA, 25 bp, Homo sapien
catgcttttctgtaacacagcagtt

SEQ ID NO: 118243 - DNA, 25 bp, Homo sapien
cactcgggattattctgaaagtcac

SEQ ID NO: 118244 - DNA, 25 bp, Homo sapien
cctcactcgggattattctgaaagt

SEQ ID NO: 118245 - DNA, 25 bp, Homo sapien
tatttgggagcagataccatgttcc

SEQ ID NO: 118246 - DNA, 25 bp, Homo sapien
gaacagtctgtggaaagcgcttcag

SEQ ID NO: 118247 - DNA, 25 bp, Homo sapien
gaagaatagtagagcagtgcctcct

SEQ ID NO: 118248 - DNA, 25 bp, Homo sapien
cctaatttgaatcgagggcctccaa

SEQ ID NO: 118249 - DNA, 25 bp, Homo sapien
gatgatttttaatccatggattcat

SEQ ID NO: 118250 - DNA, 25 bp, Homo sapien
aagctctcttactctgtatacttaa

SEQ ID NO: 118251 - DNA, 25 bp, Homo sapien
tgatgatttttaatccatggattca

SEQ ID NO: 118252 - DNA, 25 bp, Homo sapien
gctctcttactctgtatacttaaaa

SEQ ID NO: 118253 - DNA, 25 bp, Homo sapien
tctgaaggccgaaagaccatgatca

SEQ ID NO: 118254 - DNA, 25 bp, Homo sapien
tctttactgagggacagtccagccc

SEQ ID NO: 118255 - DNA, 25 bp, Homo sapien
tagcatgcacatcaaaacccttggc

SEQ ID NO: 118256 - DNA, 25 bp, Homo sapien
gaaacaggtggtagccctcaagacc

SEQ ID NO: 118257 - DNA, 25 bp, Homo sapien
tagagctggcatatttaccacaaac

SEQ ID NO: 118258 - DNA, 25 bp, Homo sapien
acctgctccattgcccataagagaa

SEQ ID NO: 118259 - DNA, 25 bp, Homo sapien
cgtaagtgggttgacatagatgagc

SEQ ID NO: 118260 - DNA, 25 bp, Homo sapien
caaggccgaactctaaaacctgctc

SEQ ID NO: 118261 - DNA, 25 bp, Homo sapien
gatgctatagctgttccagcagaca

SEQ ID NO: 118262 - DNA, 25 bp, Homo sapien
tagctgttccagcagacatgatgaa

SEQ ID NO: 118263 - DNA, 25 bp, Homo sapien
aatatgatgctatagctgttccagc

SEQ ID NO: 118264 - DNA, 25 bp, Homo sapien
gttccagcagacatgatgaacatta

SEQ ID NO: 118265 - DNA, 25 bp, Homo sapien
caaagtgatgaagcaagctagtttc

SEQ ID NO: 118266 - DNA, 25 bp, Homo sapien
tagtttctaaaagagccaagactaa

SEQ ID NO: 118267 - DNA, 25 bp, Homo sapien
tgacccatatcacttaagttcagac

SEQ ID NO: 118268 - DNA, 25 bp, Homo sapien
gagccaagactaatataatgatgta

SEQ ID NO: 118269 - DNA, 25 bp, Homo sapien
ttgcacatccttcggataaaaggga

SEQ ID NO: 118270 - DNA, 25 bp, Homo sapien
tagcccacaatagcctgggaattgc

SEQ ID NO: 118271 - DNA, 25 bp, Homo sapien
gcttctcaaagaatacagtcacagt

SEQ ID NO: 118272 - DNA, 25 bp, Homo sapien
taaagttagcaaaatccgtctgaca

SEQ ID NO: 118273 - DNA, 25 bp, Homo sapien
gaacaaacacttgtatatggtataa

SEQ ID NO: 118274 - DNA, 25 bp, Homo sapien
tatgagcacatttaagcgatgaact

SEQ ID NO: 118275 - DNA, 25 bp, Homo sapien
tatatggtataataccacacaaata

SEQ ID NO: 118276 - DNA, 25 bp, Homo sapien
ggatatgatttgtaacacaaggtta

SEQ ID NO: 118277 - DNA, 25 bp, Homo sapien
gaaagaaatgctatcatggcaaaag

SEQ ID NO: 118278 - DNA, 25 bp, Homo sapien
tgtgaatccaatacagacagacact

SEQ ID NO: 118279 - DNA, 25 bp, Homo sapien
acactgagtggagcccttgtaagga

SEQ ID NO: 118280 - DNA, 25 bp, Homo sapien
ccttgtaaggaactgtccaatgaaa

SEQ ID NO: 118281 - DNA, 25 bp, Homo sapien
ctgttccaccatatgtctgtactgg

SEQ ID NO: 118282 - DNA, 25 bp, Homo sapien
tgtctgtactggagatcaagtgtac

SEQ ID NO: 118283 - DNA, 25 bp, Homo sapien
gtgtactgttgatacaatgactgtc

SEQ ID NO: 118284 - DNA, 25 bp, Homo sapien
tactgttgatacaatgactgtctcc

SEQ ID NO: 118285 - DNA, 25 bp, Homo sapien
cagtcacggcaaactgcaatttaga

SEQ ID NO: 118286 - DNA, 25 bp, Homo sapien
tctctgtccatgatgtcaaaagcac

SEQ ID NO: 118287 - DNA, 25 bp, Homo sapien
gatgaactgaatcaaacgatcacgt

SEQ ID NO: 118288 - DNA, 25 bp, Homo sapien
aaaactatgatgaccaacacgaatg

SEQ ID NO: 118289 - DNA, 25 bp, Homo sapien
cacacacacaggctgtggtgcctgc

SEQ ID NO: 118290 - DNA, 25 bp, Homo sapien
cacacaggctgtggtgcctgctgct

SEQ ID NO: 118291 - DNA, 25 bp, Homo sapien
cacacacaggctgtggtgcctgctg

SEQ ID NO: 118292 - DNA, 25 bp, Homo sapien
acacaggctgtggtgcctgctgctc

SEQ ID NO: 118293 - DNA, 25 bp, Homo sapien
ctgggcaccatttggtagtagtaca

SEQ ID NO: 118294 - DNA, 25 bp, Homo sapien
caccatttggtagtagtacactgta

SEQ ID NO: 118295 - DNA, 25 bp, Homo sapien
ccattgcagtctgcagtacagcagt

SEQ ID NO: 118296 - DNA, 25 bp, Homo sapien
cattgcagtctgcagtacagcagtc

SEQ ID NO: 118297 - DNA, 25 bp, Homo sapien
aacggcccaagtaatgagatccagg

SEQ ID NO: 118298 - DNA, 25 bp, Homo sapien
ttaatagagcagtaagtatagccac

SEQ ID NO: 118299 - DNA, 25 bp, Homo sapien
cacattaaacgatcctgaaaacggc

SEQ ID NO: 118300 - DNA, 25 bp, Homo sapien
gtatagccacattccagaatcatta

SEQ ID NO: 118301 - DNA, 25 bp, Homo sapien
gcgagcttctgcagtatgacaggat

SEQ ID NO: 118302 - DNA, 25 bp, Homo sapien
acttcatcaactctgcgagcttctg

SEQ ID NO: 118303 - DNA, 25 bp, Homo sapien
ttctgcagtatgacaggatgtttcc

SEQ ID NO: 118304 - DNA, 25 bp, Homo sapien
aactctgcgagcttctgcagtatga

SEQ ID NO: 118305 - DNA, 25 bp, Homo sapien
atttcacaggcaaaacagtacaggg

SEQ ID NO: 118306 - DNA, 25 bp, Homo sapien
agaatcaattatgcctgatagaaca

SEQ ID NO: 118307 - DNA, 25 bp, Homo sapien
gtacagggtgtcaagacatttccaa

SEQ ID NO: 118308 - DNA, 25 bp, Homo sapien
ttatgcctgatagaacattcctggc

SEQ ID NO: 118309 - DNA, 25 bp, Homo sapien
atttaaactgtctatgtcttctggg

SEQ ID NO: 118310 - DNA, 25 bp, Homo sapien
tttttgatagttggctcatcatcaa

SEQ ID NO: 118311 - DNA, 25 bp, Homo sapien
ctggcaaatctttcaactgatgttt

SEQ ID NO: 118312 - DNA, 25 bp, Homo sapien
caggccttttggagcagtattgaac

SEQ ID NO: 118313 - DNA, 25 bp, Homo sapien
ctctgtgattctactgatcctggaa

SEQ ID NO: 118314 - DNA, 25 bp, Homo sapien
tagaatgatcaccaaccctctgtga

SEQ ID NO: 118315 - DNA, 25 bp, Homo sapien
gaatgatcaccaaccctctgtgatt

SEQ ID NO: 118316 - DNA, 25 bp, Homo sapien
accctctgtgattctactgatcctg

SEQ ID NO: 118317 - DNA, 25 bp, Homo sapien
gctttgtaaagatcgttttcaggaa

SEQ ID NO: 118318 - DNA, 25 bp, Homo sapien
caacagcagggtatcctaatagaac

SEQ ID NO: 118319 - DNA, 25 bp, Homo sapien
gcagggtatcctaatagaactgctt

SEQ ID NO: 118320 - DNA, 25 bp, Homo sapien
ttcctttgtcaacagcagggtatcc

SEQ ID NO: 118321 - DNA, 25 bp, Homo sapien
tcttccagtacatttgaggccttct

SEQ ID NO: 118322 - DNA, 25 bp, Homo sapien
tctgcgggtaagcatactaagtgag

SEQ ID NO: 118323 - DNA, 25 bp, Homo sapien
tcttctggaaataacgagctcatct

SEQ ID NO: 118324 - DNA, 25 bp, Homo sapien
cagctagtcctccactctgcgggta

SEQ ID NO: 118325 - DNA, 25 bp, Homo sapien
tcttgtaaaattgcttccttccact

SEQ ID NO: 118326 - DNA, 25 bp, Homo sapien
catattagaatcataccccagagaa

SEQ ID NO: 118327 - DNA, 25 bp, Homo sapien
tcagataccaaaccaatgtaccagt

SEQ ID NO: 118328 - DNA, 25 bp, Homo sapien
tcttctattggacctaaacttgctt

SEQ ID NO: 118329 - DNA, 25 bp, Homo sapien
caaatatgttatagcatactacaca

SEQ ID NO: 118330 - DNA, 25 bp, Homo sapien
ggcattgcactatggctacacaaca

SEQ ID NO: 118331 - DNA, 25 bp, Homo sapien
tacttagctctcttataggtcaggc

SEQ ID NO: 118332 - DNA, 25 bp, Homo sapien
gaaatcagctattctagagttcatc

SEQ ID NO: 118333 - DNA, 25 bp, Homo sapien
gcaagagtgatcaaggccccagtat

SEQ ID NO: 118334 - DNA, 25 bp, Homo sapien
taatgtgtctacactccgttgcaga

SEQ ID NO: 118335 - DNA, 25 bp, Homo sapien
tagcatgcttctctcttgagcgaca

SEQ ID NO: 118336 - DNA, 25 bp, Homo sapien
taaagtctccatcccgtaagtgcgg

SEQ ID NO: 118337 - DNA, 25 bp, Homo sapien
ccgatatatgggttagactttccca

SEQ ID NO: 118338 - DNA, 25 bp, Homo sapien
tacaggcaagcctggttgtctgctt

SEQ ID NO: 118339 - DNA, 25 bp, Homo sapien
acatctgttccctcttacaggcaag

SEQ ID NO: 118340 - DNA, 25 bp, Homo sapien
gaaaattggatattccaggtaacac

SEQ ID NO: 118341 - DNA, 25 bp, Homo sapien
aatggtgttccacgtttctctgaag

SEQ ID NO: 118342 - DNA, 25 bp, Homo sapien
taaagttcactgaagttcccggatg

SEQ ID NO: 118343 - DNA, 25 bp, Homo sapien
gatcactttgctagatatagggtcc

SEQ ID NO: 118344 - DNA, 25 bp, Homo sapien
tatttgcctgcggatctctttgcat

SEQ ID NO: 118345 - DNA, 25 bp, Homo sapien
tgcgcccagccttatgttaacctta

SEQ ID NO: 118346 - DNA, 25 bp, Homo sapien
gcgcccagccttatgttaaccttaa

SEQ ID NO: 118347 - DNA, 25 bp, Homo sapien
gagggctatcctcctagctcatgga

SEQ ID NO: 118348 - DNA, 25 bp, Homo sapien
ggaagctgtgggtgtctcttcctct

SEQ ID NO: 118349 - DNA, 25 bp, Homo sapien
gatcttatatcttgcaaccatcctg

SEQ ID NO: 118350 - DNA, 25 bp, Homo sapien
ggctccatgctcacgatctcatcta

SEQ ID NO: 118351 - DNA, 25 bp, Homo sapien
gaaacttggaagtatgagtcggcca

SEQ ID NO: 118352 - DNA, 25 bp, Homo sapien
tgttgctatcggaagatgatttccc

SEQ ID NO: 118353 - DNA, 25 bp, Homo sapien
aattagctggctaaagacccatggg

SEQ ID NO: 118354 - DNA, 25 bp, Homo sapien
tgcagcagcccttagaaacttatac

SEQ ID NO: 118355 - DNA, 25 bp, Homo sapien
gagattctttcctagagccgttaga

SEQ ID NO: 118356 - DNA, 25 bp, Homo sapien
gaagcgtggctctactggcaccttg

SEQ ID NO: 118357 - DNA, 25 bp, Homo sapien
gaactgctaggtcacatgtcaactc

SEQ ID NO: 118358 - DNA, 25 bp, Homo sapien
ccctgatgactaattatacggagca

SEQ ID NO: 118359 - DNA, 25 bp, Homo sapien
tctatctttatagactggcctgttc

SEQ ID NO: 118360 - DNA, 25 bp, Homo sapien
tagttatcaccatcctatctcctca

SEQ ID NO: 118361 - DNA, 25 bp, Homo sapien
tggtggtgaatgatacaataggctc

SEQ ID NO: 118362 - DNA, 25 bp, Homo sapien
tattatagtcacagatacgtgcaac

SEQ ID NO: 118363 - DNA, 25 bp, Homo sapien
gatctgttgcctcagcgatgcatag

SEQ ID NO: 118364 - DNA, 25 bp, Homo sapien
ctgccttttctgatctgttgcctca

SEQ ID NO: 118365 - DNA, 25 bp, Homo sapien
tcaccattaggcaaaatcttagtca

SEQ ID NO: 118366 - DNA, 25 bp, Homo sapien
cattaggcaaaatcttagtcacttc

SEQ ID NO: 118367 - DNA, 25 bp, Homo sapien
tcataaacttagagaaaaattgcat

SEQ ID NO: 118368 - DNA, 25 bp, Homo sapien
gcattgtaattaggcaaacttttcc

SEQ ID NO: 118369 - DNA, 25 bp, Homo sapien
aaaatgtacacaagttgcctgtatt

SEQ ID NO: 118370 - DNA, 25 bp, Homo sapien
caagttgcctgtattcagaatcaag

SEQ ID NO: 118371 - DNA, 25 bp, Homo sapien
cacttggatcaataattcttgaagg

SEQ ID NO: 118372 - DNA, 25 bp, Homo sapien
acagcttcaggatttaactttccca

SEQ ID NO: 118373 - DNA, 25 bp, Homo sapien
gtggatgagcttgtatactataacg

SEQ ID NO: 118374 - DNA, 25 bp, Homo sapien
ttcccatgaaagattggcccactga

SEQ ID NO: 118375 - DNA, 25 bp, Homo sapien
atgtatgtggagaggttttgaagaa

SEQ ID NO: 118376 - DNA, 25 bp, Homo sapien
tttgaagaataaatcggatatccca

SEQ ID NO: 118377 - DNA, 25 bp, Homo sapien
aatgtatgtggagaggttttgaaga

SEQ ID NO: 118378 - DNA, 25 bp, Homo sapien
tcggatatcccaggggaggttctgc

SEQ ID NO: 118379 - DNA, 25 bp, Homo sapien
agcttagctgttctcaggcatctga

SEQ ID NO: 118380 - DNA, 25 bp, Homo sapien
tatgttaaccttcaacaggatccat

SEQ ID NO: 118381 - DNA, 25 bp, Homo sapien
gaaccaactttacggagcttagctg

SEQ ID NO: 118382 - DNA, 25 bp, Homo sapien
tgttttttagaaccattaagatggc

SEQ ID NO: 118383 - DNA, 25 bp, Homo sapien
tataccttaagacactagtaactgg

SEQ ID NO: 118384 - DNA, 25 bp, Homo sapien
ggatgaaccccgctcctttcacata

SEQ ID NO: 118385 - DNA, 25 bp, Homo sapien
actggtagtcctgttgggtaaatca

SEQ ID NO: 118386 - DNA, 25 bp, Homo sapien
tttagtagtcatatgcagattaccc

SEQ ID NO: 118387 - DNA, 25 bp, Homo sapien
tcagtcattatctcctcacaggttg

SEQ ID NO: 118388 - DNA, 25 bp, Homo sapien
tacttctgacataacttctagttca

SEQ ID NO: 118389 - DNA, 25 bp, Homo sapien
cttctcaagttaactctatgtctct

SEQ ID NO: 118390 - DNA, 25 bp, Homo sapien
cctggaaatccagttacgtgtatgt

SEQ ID NO: 118391 - DNA, 25 bp, Homo sapien
ggttaccctatagatgacacagcag

SEQ ID NO: 118392 - DNA, 25 bp, Homo sapien
tattccactttagccctgtattagc

SEQ ID NO: 118393 - DNA, 25 bp, Homo sapien
tctcttgcataaaggtactttgtgg

SEQ ID NO: 118394 - DNA, 25 bp, Homo sapien
tctgaccttagaattcctgcaccaa

SEQ ID NO: 118395 - DNA, 25 bp, Homo sapien
ccttctaagcatggctttaggcgtc

SEQ ID NO: 118396 - DNA, 25 bp, Homo sapien
taggcgtctaccataagttttgaca

SEQ ID NO: 118397 - DNA, 25 bp, Homo sapien
tgtgcgtttaagactataaatttcc

SEQ ID NO: 118398 - DNA, 25 bp, Homo sapien
gtagcactttcactactcagttcaa

SEQ ID NO: 118399 - DNA, 25 bp, Homo sapien
tctttagcagatagggaactactcg

SEQ ID NO: 118400 - DNA, 25 bp, Homo sapien
tcaaggttcgccaaagacagtcaag

SEQ ID NO: 118401 - DNA, 25 bp, Homo sapien
tacacataaactgctggcgggaatg

SEQ ID NO: 118402 - DNA, 25 bp, Homo sapien
tgtcagcagcccaagatggaaaagg

SEQ ID NO: 118403 - DNA, 25 bp, Homo sapien
ggtgaactatggggataaaatataa

SEQ ID NO: 118404 - DNA, 25 bp, Homo sapien
ataataaagagaggactcttgcgtg

SEQ ID NO: 118405 - DNA, 25 bp, Homo sapien
aatataataaagagaggactcttgc

SEQ ID NO: 118406 - DNA, 25 bp, Homo sapien
gggtgaactatggggataaaatata

SEQ ID NO: 118407 - DNA, 25 bp, Homo sapien
tttaatagatatgactttgcttcca

SEQ ID NO: 118408 - DNA, 25 bp, Homo sapien
ccaatgcaccagcagaattagtgtc

SEQ ID NO: 118409 - DNA, 25 bp, Homo sapien
tgggaattccaagaccaatgcacca

SEQ ID NO: 118410 - DNA, 25 bp, Homo sapien
taactcatactatattcttggataa

SEQ ID NO: 118411 - DNA, 25 bp, Homo sapien
cctcctctaaaccagagatgatgct

SEQ ID NO: 118412 - DNA, 25 bp, Homo sapien
taggtatgatatgctgatccagaaa

SEQ ID NO: 118413 - DNA, 25 bp, Homo sapien
aagagttatcttccatatatctcaa

SEQ ID NO: 118414 - DNA, 25 bp, Homo sapien
gaatttagcattgcagtccaatgct

SEQ ID NO: 118415 - DNA, 25 bp, Homo sapien
gaacacttaaaatcttcttagcaaa

SEQ ID NO: 118416 - DNA, 25 bp, Homo sapien
cttagcaaatttcaaatatgctata

SEQ ID NO: 118417 - DNA, 25 bp, Homo sapien
tagcaaatttcaaatatgctataca

SEQ ID NO: 118418 - DNA, 25 bp, Homo sapien
cttaaaatcttcttagcaaatttca

SEQ ID NO: 118419 - DNA, 25 bp, Homo sapien
cataaaaggttatcagactgggtca

SEQ ID NO: 118420 - DNA, 25 bp, Homo sapien
gacaggccaccttactacagaggaa

SEQ ID NO: 118421 - DNA, 25 bp, Homo sapien
gactgggtcatgacacactaaaatg

SEQ ID NO: 118422 - DNA, 25 bp, Homo sapien
tattccaactctttgcaggacagtg

SEQ ID NO: 118423 - DNA, 25 bp, Homo sapien
gatatacttgttttgccccttgacc

SEQ ID NO: 118424 - DNA, 25 bp, Homo sapien
ccaggagtttggtagagtaagtagc

SEQ ID NO: 118425 - DNA, 25 bp, Homo sapien
ttgacctgaccgacactggttccca

SEQ ID NO: 118426 - DNA, 25 bp, Homo sapien
cccatgaagcggctaccaaagctgt

SEQ ID NO: 118427 - DNA, 25 bp, Homo sapien
caaaatccttgatgaatgtttgagg

SEQ ID NO: 118428 - DNA, 25 bp, Homo sapien
aaaatccttgatgaatgtttgaggt

SEQ ID NO: 118429 - DNA, 25 bp, Homo sapien
caatatttgtcgtcttgggtaacaa

SEQ ID NO: 118430 - DNA, 25 bp, Homo sapien
gtcaatatttgtcgtcttgggtaac

SEQ ID NO: 118431 - DNA, 25 bp, Homo sapien
tagcttgagattttcttccgtaacc

SEQ ID NO: 118432 - DNA, 25 bp, Homo sapien
tgacagggagatcttgaagtgtatg

SEQ ID NO: 118433 - DNA, 25 bp, Homo sapien
gattttcttccgtaaccgcatctcc

SEQ ID NO: 118434 - DNA, 25 bp, Homo sapien
gaagtgtatgttggggttccaacac

SEQ ID NO: 118435 - DNA, 25 bp, Homo sapien
tccatgattaaaggtagcccagctc

SEQ ID NO: 118436 - DNA, 25 bp, Homo sapien
tagggtacatgaatctgtgcagtca

SEQ ID NO: 118437 - DNA, 25 bp, Homo sapien
aggtgggcaaatcgctagagctcac

SEQ ID NO: 118438 - DNA, 25 bp, Homo sapien
tacataagattagtcaaagttggcc

SEQ ID NO: 118439 - DNA, 25 bp, Homo sapien
catatatctcacatggtgatttttt

SEQ ID NO: 118440 - DNA, 25 bp, Homo sapien
gcatatatctcacatggtgattttt

SEQ ID NO: 118441 - DNA, 25 bp, Homo sapien
taagggtgactaattttagacatta

SEQ ID NO: 118442 - DNA, 25 bp, Homo sapien
ggttctgcagtgatcccgggtcctt

SEQ ID NO: 118443 - DNA, 25 bp, Homo sapien
tccagggagtgccaaactgttaaga

SEQ ID NO: 118444 - DNA, 25 bp, Homo sapien
gacctgacgctactatgggccgagt

SEQ ID NO: 118445 - DNA, 25 bp, Homo sapien
gacatcttacgcaggactcaaggga

SEQ ID NO: 118446 - DNA, 25 bp, Homo sapien
cagcatgtttgcaagccaatgggat

SEQ ID NO: 118447 - DNA, 25 bp, Homo sapien
tcagcctcggtgcaatgtatgttaa

SEQ ID NO: 118448 - DNA, 25 bp, Homo sapien
gttctcctctgaccttatgctttgg

SEQ ID NO: 118449 - DNA, 25 bp, Homo sapien
tccaaaatttgagtcccaggttctc

SEQ ID NO: 118450 - DNA, 25 bp, Homo sapien
tttcaatcactgtacgatttcccac

SEQ ID NO: 118451 - DNA, 25 bp, Homo sapien
atttcaatcactgtacgatttccca

SEQ ID NO: 118452 - DNA, 25 bp, Homo sapien
ttcaatcactgtacgatttcccaca

SEQ ID NO: 118453 - DNA, 25 bp, Homo sapien
cattccgatccaatgtgctgatcaa

SEQ ID NO: 118454 - DNA, 25 bp, Homo sapien
tgctgccagcattccaacattccga

SEQ ID NO: 118455 - DNA, 25 bp, Homo sapien
tgtgctgatcaacattaataagtcg

SEQ ID NO: 118456 - DNA, 25 bp, Homo sapien
cattccaacattccgatccaatgtg

SEQ ID NO: 118457 - DNA, 25 bp, Homo sapien
aaagaacaagcatctgcctacaaac

SEQ ID NO: 118458 - DNA, 25 bp, Homo sapien
taaagaacaagcatctgcctacaaa

SEQ ID NO: 118459 - DNA, 25 bp, Homo sapien
ctaaagaacaagcatctgcctacaa

SEQ ID NO: 118460 - DNA, 25 bp, Homo sapien
gatgttttagtggagtgttataacc

SEQ ID NO: 118461 - DNA, 25 bp, Homo sapien
tgtccactctgtttgcaagatgttt

SEQ ID NO: 118462 - DNA, 25 bp, Homo sapien
gagtgttataaccaaagtcagattt

SEQ ID NO: 118463 - DNA, 25 bp, Homo sapien
atgtccactctgtttgcaagatgtt

SEQ ID NO: 118464 - DNA, 25 bp, Homo sapien
aacacctgatgagtcaatcatggaa

SEQ ID NO: 118465 - DNA, 25 bp, Homo sapien
tgcactgtcattcatactgtaagac

SEQ ID NO: 118466 - DNA, 25 bp, Homo sapien
cagtggcacaggcccaataaccata

SEQ ID NO: 118467 - DNA, 25 bp, Homo sapien
tggaaaattgtgcactgtcattcat

SEQ ID NO: 118468 - DNA, 25 bp, Homo sapien
tctgtaacagtatcatagcaggtca

SEQ ID NO: 118469 - DNA, 25 bp, Homo sapien
cgtaaactttatccttagcgtcatc

SEQ ID NO: 118470 - DNA, 25 bp, Homo sapien
taacatagaatagatactggagtaa

SEQ ID NO: 118471 - DNA, 25 bp, Homo sapien
tagttaaaccactaacccagctgag

SEQ ID NO: 118472 - DNA, 25 bp, Homo sapien
ggccagccgtatggtctcttaagaa

SEQ ID NO: 118473 - DNA, 25 bp, Homo sapien
tctagttactagtgctcgtggagct

SEQ ID NO: 118474 - DNA, 25 bp, Homo sapien
tataatcaaggtgtaggccagccgt

SEQ ID NO: 118475 - DNA, 25 bp, Homo sapien
ccatgcttgcaagctgagaaggcga

SEQ ID NO: 118476 - DNA, 25 bp, Homo sapien
tctctagcttttcctcatctctatc

SEQ ID NO: 118477 - DNA, 25 bp, Homo sapien
cagaattgtccctctcttctaatat

SEQ ID NO: 118478 - DNA, 25 bp, Homo sapien
tcttggtttctctgactctgtcttt

SEQ ID NO: 118479 - DNA, 25 bp, Homo sapien
tctgcatctcttggtttctctgact

SEQ ID NO: 118480 - DNA, 25 bp, Homo sapien
accagttgttctctgctaacaccct

SEQ ID NO: 118481 - DNA, 25 bp, Homo sapien
tggcaccttaagcatcaccagttgt

SEQ ID NO: 118482 - DNA, 25 bp, Homo sapien
ttagactggcaccttaagcatcacc

SEQ ID NO: 118483 - DNA, 25 bp, Homo sapien
tctctgctaacaccctggtaggaac

SEQ ID NO: 118484 - DNA, 25 bp, Homo sapien
tttgaagagggctcgataagactga

SEQ ID NO: 118485 - DNA, 25 bp, Homo sapien
tagtatggggcagaccgcccaggtt

SEQ ID NO: 118486 - DNA, 25 bp, Homo sapien
tcaatcaactgaaaaattgctaggt

SEQ ID NO: 118487 - DNA, 25 bp, Homo sapien
gaccgcccaggttgatcaatcaact

SEQ ID NO: 118488 - DNA, 25 bp, Homo sapien
tggcataaaccatcaaggctcccac

SEQ ID NO: 118489 - DNA, 25 bp, Homo sapien
gggctttggcataaaccatcaaggc

SEQ ID NO: 118490 - DNA, 25 bp, Homo sapien
tgggggctttggcataaaccatcaa

SEQ ID NO: 118491 - DNA, 25 bp, Homo sapien
cacatttctattggtgggggctttg

SEQ ID NO: 118492 - DNA, 25 bp, Homo sapien
tcattagcttagtacaaattgtagc

SEQ ID NO: 118493 - DNA, 25 bp, Homo sapien
tctcccagaacagaacatgcgagca

SEQ ID NO: 118494 - DNA, 25 bp, Homo sapien
gacagtgcccctaaatgaatttcat

SEQ ID NO: 118495 - DNA, 25 bp, Homo sapien
ttctgctacccattttctcccagaa

SEQ ID NO: 118496 - DNA, 25 bp, Homo sapien
cagaatgtgcggctattaggtgccc

SEQ ID NO: 118497 - DNA, 25 bp, Homo sapien
gcccaccaatgtgcgagtgcaactg

SEQ ID NO: 118498 - DNA, 25 bp, Homo sapien
gctgcccttcgaacccatggtgggt

SEQ ID NO: 118499 - DNA, 25 bp, Homo sapien
cactccctgcgaagatggtgtacac

SEQ ID NO: 118500 - DNA, 25 bp, Homo sapien
aggcgcgctcacgaccgcgtcgccc

SEQ ID NO: 118501 - DNA, 25 bp, Homo sapien
caggcgcgctcacgaccgcgtcgcc

SEQ ID NO: 118502 - DNA, 25 bp, Homo sapien
gcaggcgcgctcacgaccgcgtcgc

SEQ ID NO: 118503 - DNA, 25 bp, Homo sapien
cgttccggagcaacagccgcctgag

SEQ ID NO: 118504 - DNA, 25 bp, Homo sapien
ggacccgaagctgcgggccggacga

SEQ ID NO: 118505 - DNA, 25 bp, Homo sapien
ggacgagcgccgagaccactgctct

SEQ ID NO: 118506 - DNA, 25 bp, Homo sapien
gagcgccgagaccactgctctctag

SEQ ID NO: 118507 - DNA, 25 bp, Homo sapien
cagagagcgggtcccggagaaggag

SEQ ID NO: 118508 - DNA, 25 bp, Homo sapien
gaggaagagccgaggactcatcgct

SEQ ID NO: 118509 - DNA, 25 bp, Homo sapien
cggctcagatcatccgggcgttgga

SEQ ID NO: 118510 - DNA, 25 bp, Homo sapien
ttcgcgcctcagctgtctagagtcc

SEQ ID NO: 118511 - DNA, 25 bp, Homo sapien
aaactgcagttggtagaaggctctc

SEQ ID NO: 118512 - DNA, 25 bp, Homo sapien
ctcaggtgatgaaattttcaaaacg

SEQ ID NO: 118513 - DNA, 25 bp, Homo sapien
tcaaaacgtatctaaaactgcagtt

SEQ ID NO: 118514 - DNA, 25 bp, Homo sapien
gctgtctttcaagaaaaggctccaa

SEQ ID NO: 118515 - DNA, 25 bp, Homo sapien
gaagagggcttcagaataacacaca

SEQ ID NO: 118516 - DNA, 25 bp, Homo sapien
gttaatgacatgatggcaaactcaa

SEQ ID NO: 118517 - DNA, 25 bp, Homo sapien
tggttattgagataagccaaggcta

SEQ ID NO: 118518 - DNA, 25 bp, Homo sapien
ctgtaactcagcaatgtgtagaaat

SEQ ID NO: 118519 - DNA, 25 bp, Homo sapien
tctcagtactagaacaattcccagg

SEQ ID NO: 118520 - DNA, 25 bp, Homo sapien
tcagtactagaacaattcccaggaa

SEQ ID NO: 118521 - DNA, 25 bp, Homo sapien
aaatctcagtactagaacaattccc

SEQ ID NO: 118522 - DNA, 25 bp, Homo sapien
aggaaatctcagtactagaacaatt

SEQ ID NO: 118523 - DNA, 25 bp, Homo sapien
ccaaggaggtcacaacaaactgtaa

SEQ ID NO: 118524 - DNA, 25 bp, Homo sapien
ccatactgagtcttaaatggttcag

SEQ ID NO: 118525 - DNA, 25 bp, Homo sapien
taagagtaaaggttcatgatgtcca

SEQ ID NO: 118526 - DNA, 25 bp, Homo sapien
tatggactggcttggatgaaggcaa

SEQ ID NO: 118527 - DNA, 25 bp, Homo sapien
taaatcactctgtacaattctctgt

SEQ ID NO: 118528 - DNA, 25 bp, Homo sapien
tagtgctagagtgaagaccagaaac

SEQ ID NO: 118529 - DNA, 25 bp, Homo sapien
ttttcaattagtgctagagtgaaga

SEQ ID NO: 118530 - DNA, 25 bp, Homo sapien
acaattctctgttaataaatttgaa

SEQ ID NO: 118531 - DNA, 25 bp, Homo sapien
caaaagttaacacccgctggtctag

SEQ ID NO: 118532 - DNA, 25 bp, Homo sapien
gctggtctagaatgggcccacacaa

SEQ ID NO: 118533 - DNA, 25 bp, Homo sapien
cacccgctggtctagaatgggccca

SEQ ID NO: 118534 - DNA, 25 bp, Homo sapien
agttaacacccgctggtctagaatg

SEQ ID NO: 118535 - DNA, 25 bp, Homo sapien
cttaactggaaactcttgcctcatc

SEQ ID NO: 118536 - DNA, 25 bp, Homo sapien
ttccttaactggaaactcttgcctc

SEQ ID NO: 118537 - DNA, 25 bp, Homo sapien
tccttaactggaaactcttgcctca

SEQ ID NO: 118538 - DNA, 25 bp, Homo sapien
cagtttccttaactggaaactcttg

SEQ ID NO: 118539 - DNA, 25 bp, Homo sapien
aatttgcatgctccttcaagccttt

SEQ ID NO: 118540 - DNA, 25 bp, Homo sapien
aatgctccaaatttgcatgctcctt

SEQ ID NO: 118541 - DNA, 25 bp, Homo sapien
tttgcatgctccttcaagcctttgc

SEQ ID NO: 118542 - DNA, 25 bp, Homo sapien
gcatgctccttcaagcctttgctca

SEQ ID NO: 118543 - DNA, 25 bp, Homo sapien
gcatgctgcttagcccatatcgcaa

SEQ ID NO: 118544 - DNA, 25 bp, Homo sapien
taagacacctacagctgttgaccca

SEQ ID NO: 118545 - DNA, 25 bp, Homo sapien
gaaggtgctcctgcagaccctttaa

SEQ ID NO: 118546 - DNA, 25 bp, Homo sapien
aagggccctcgatacagccagagag

SEQ ID NO: 118547 - DNA, 25 bp, Homo sapien
tcacactcatgttgtctcgacttcc

SEQ ID NO: 118548 - DNA, 25 bp, Homo sapien
gcttctggcgatactttgggtgcat

SEQ ID NO: 118549 - DNA, 25 bp, Homo sapien
aaatcacactcatgttgtctcgact

SEQ ID NO: 118550 - DNA, 25 bp, Homo sapien
tcttcactgcttctggcgatacttt

SEQ ID NO: 118551 - DNA, 25 bp, Homo sapien
tgaagatttttctttaataaagcta

SEQ ID NO: 118552 - DNA, 25 bp, Homo sapien
tgtgttgaagatttttctttaataa

SEQ ID NO: 118553 - DNA, 25 bp, Homo sapien
caatgcttgcatgcgattagaggtc

SEQ ID NO: 118554 - DNA, 25 bp, Homo sapien
tgttccacgtgggacaacgcattta

SEQ ID NO: 118555 - DNA, 25 bp, Homo sapien
catgtctgcccaagttaaagtgcca

SEQ ID NO: 118556 - DNA, 25 bp, Homo sapien
tatgactatcaagtggcggacagca

SEQ ID NO: 118557 - DNA, 25 bp, Homo sapien
tgcgcatcacatggactaagtcggg

SEQ ID NO: 118558 - DNA, 25 bp, Homo sapien
gctggggatgttctcactcgctaat

SEQ ID NO: 118559 - DNA, 25 bp, Homo sapien
tgttctcactcgctaatgtgcgcat

SEQ ID NO: 118560 - DNA, 25 bp, Homo sapien
cactcgctaatgtgcgcatcacatg

SEQ ID NO: 118561 - DNA, 25 bp, Homo sapien
tcaggcatagaaacatggtccatat

SEQ ID NO: 118562 - DNA, 25 bp, Homo sapien
ttcagggtgttaagttactcaggga

SEQ ID NO: 118563 - DNA, 25 bp, Homo sapien
gaacatggtcacacttgcaaaacac

SEQ ID NO: 118564 - DNA, 25 bp, Homo sapien
tgttttaacccttggaattgcttga

SEQ ID NO: 118565 - DNA, 25 bp, Homo sapien
ttgtaaacggcttcaataacattcc

SEQ ID NO: 118566 - DNA, 25 bp, Homo sapien
gtcgtcatttttgtaaggattcagt

SEQ ID NO: 118567 - DNA, 25 bp, Homo sapien
aggattcagtctattgtaaacggct

SEQ ID NO: 118568 - DNA, 25 bp, Homo sapien
agtgtcgtcatttttgtaaggattc

SEQ ID NO: 118569 - DNA, 25 bp, Homo sapien
cacatatcatctgttgatgtagagt

SEQ ID NO: 118570 - DNA, 25 bp, Homo sapien
taccacatatcatctgttgatgtag

SEQ ID NO: 118571 - DNA, 25 bp, Homo sapien
ccacatatcatctgttgatgtagag

SEQ ID NO: 118572 - DNA, 25 bp, Homo sapien
acatatcatctgttgatgtagagtc

SEQ ID NO: 118573 - DNA, 25 bp, Homo sapien
gaaggtaaactccatggctagatga

SEQ ID NO: 118574 - DNA, 25 bp, Homo sapien
ctttggaggtgaaggtaaactccat

SEQ ID NO: 118575 - DNA, 25 bp, Homo sapien
ccttaaagttgaggatggatgttaa

SEQ ID NO: 118576 - DNA, 25 bp, Homo sapien
atccccttccttaaagttgaggatg

SEQ ID NO: 118577 - DNA, 25 bp, Homo sapien
gcaggcccagccaatcatgatagca

SEQ ID NO: 118578 - DNA, 25 bp, Homo sapien
tcatggaaacaacgaaggaacatcc

SEQ ID NO: 118579 - DNA, 25 bp, Homo sapien
gaatatcttactaggaacagcagca

SEQ ID NO: 118580 - DNA, 25 bp, Homo sapien
gctggagtctgatttacaacacgaa

SEQ ID NO: 118581 - DNA, 25 bp, Homo sapien
tatgagaaacgtctcattacaacgg

SEQ ID NO: 118582 - DNA, 25 bp, Homo sapien
ggcaaatccaagctgatacacatct

SEQ ID NO: 118583 - DNA, 25 bp, Homo sapien
gagactaacatctttccctatgaga

SEQ ID NO: 118584 - DNA, 25 bp, Homo sapien
cagtgttgtccaattaaaagagact

SEQ ID NO: 118585 - DNA, 25 bp, Homo sapien
gattctaaagacatgggccaattaa

SEQ ID NO: 118586 - DNA, 25 bp, Homo sapien
cctaccatagagtgttagattgtca

SEQ ID NO: 118587 - DNA, 25 bp, Homo sapien
catcttaaccacttggattctaaag

SEQ ID NO: 118588 - DNA, 25 bp, Homo sapien
tatttcaaatcacaaatacatctta

SEQ ID NO: 118589 - DNA, 25 bp, Homo sapien
gacaaaaatacagaagggcacggaa

SEQ ID NO: 118590 - DNA, 25 bp, Homo sapien
tactttcacatgcttaatcagagga

SEQ ID NO: 118591 - DNA, 25 bp, Homo sapien
gggaatctgcctactgaatgattac

SEQ ID NO: 118592 - DNA, 25 bp, Homo sapien
caacagttttctagtgggaatctgc

SEQ ID NO: 118593 - DNA, 25 bp, Homo sapien
aatgttagggtaaaacagagcctgc

SEQ ID NO: 118594 - DNA, 25 bp, Homo sapien
cacaatagaggtgcaaaagtgcctt

SEQ ID NO: 118595 - DNA, 25 bp, Homo sapien
taaaggccgttggataaatgcaatc

SEQ ID NO: 118596 - DNA, 25 bp, Homo sapien
tttacagccacgtacaaggaagact

SEQ ID NO: 118597 - DNA, 25 bp, Homo sapien
taggattcatcagtctcaaaacgcc

SEQ ID NO: 118598 - DNA, 25 bp, Homo sapien
gggcccatgaaccactacaatattg

SEQ ID NO: 118599 - DNA, 25 bp, Homo sapien
gactcaagttattttcatgccctag

SEQ ID NO: 118600 - DNA, 25 bp, Homo sapien
actaattttgttccgcagctacccg

SEQ ID NO: 118601 - DNA, 25 bp, Homo sapien
tctgcaaccattcgcaggctgaatg

SEQ ID NO: 118602 - DNA, 25 bp, Homo sapien
agtatatctgcactatggaggccaa

SEQ ID NO: 118603 - DNA, 25 bp, Homo sapien
tcattaactgtgtgcattggtggtg

SEQ ID NO: 118604 - DNA, 25 bp, Homo sapien
gctatttagtcaagggataaccagg

SEQ ID NO: 118605 - DNA, 25 bp, Homo sapien
agaaactactctggcttctttattt

SEQ ID NO: 118606 - DNA, 25 bp, Homo sapien
tttcatgacaataaccatcaactca

SEQ ID NO: 118607 - DNA, 25 bp, Homo sapien
tgacaataaccatcaactcaaactt

SEQ ID NO: 118608 - DNA, 25 bp, Homo sapien
caataaccatcaactcaaacttctt

SEQ ID NO: 118609 - DNA, 25 bp, Homo sapien
taaggatcattgcaacaggatatgt

SEQ ID NO: 118610 - DNA, 25 bp, Homo sapien
ttttattaaggatcattgcaacagg

SEQ ID NO: 118611 - DNA, 25 bp, Homo sapien
ttaaggatcattgcaacaggatatg

SEQ ID NO: 118612 - DNA, 25 bp, Homo sapien
tattaaggatcattgcaacaggata

SEQ ID NO: 118613 - DNA, 25 bp, Homo sapien
ttttactgacactgcggtcctgtca

SEQ ID NO: 118614 - DNA, 25 bp, Homo sapien
ccatttggtcgtgaagcagggaaac

SEQ ID NO: 118615 - DNA, 25 bp, Homo sapien
tttccttcttggaaccctgctcctc

SEQ ID NO: 118616 - DNA, 25 bp, Homo sapien
cactgcggtcctgtcagatgccaaa

SEQ ID NO: 118617 - DNA, 25 bp, Homo sapien
cacttgcccacaagctacagcaggt

SEQ ID NO: 118618 - DNA, 25 bp, Homo sapien
accatttagtatataagttgctgaa

SEQ ID NO: 118619 - DNA, 25 bp, Homo sapien
cagcaggttgtcgattaaattcacc

SEQ ID NO: 118620 - DNA, 25 bp, Homo sapien
taagttgctgaatggcaagatggga

SEQ ID NO: 118621 - DNA, 25 bp, Homo sapien
gaagagaggaggagtcccacgttgc

SEQ ID NO: 118622 - DNA, 25 bp, Homo sapien
agatgtgaaaccactcaaagcttcc

SEQ ID NO: 118623 - DNA, 25 bp, Homo sapien
gatgtgaaaccactcaaagcttccc

SEQ ID NO: 118624 - DNA, 25 bp, Homo sapien
gagtcccacgttgcgcttcccaagg

SEQ ID NO: 118625 - DNA, 25 bp, Homo sapien
tttaaaagcaggatatgcttggtgt

SEQ ID NO: 118626 - DNA, 25 bp, Homo sapien
ggtgtaatgttacatcactaagaag

SEQ ID NO: 118627 - DNA, 25 bp, Homo sapien
caggatatgcttggtgtaatgttac

SEQ ID NO: 118628 - DNA, 25 bp, Homo sapien
atggtaatttgccaacctccatcga

SEQ ID NO: 118629 - DNA, 25 bp, Homo sapien
agggtgaagggattgaggcttggga

SEQ ID NO: 118630 - DNA, 25 bp, Homo sapien
gcaagggtgaagggattgaggcttg

SEQ ID NO: 118631 - DNA, 25 bp, Homo sapien
ggtgaagggattgaggcttgggagc

SEQ ID NO: 118632 - DNA, 25 bp, Homo sapien
ggcaagggtgaagggattgaggctt

SEQ ID NO: 118633 - DNA, 25 bp, Homo sapien
gcgaaggacactcagtgattgatgt

SEQ ID NO: 118634 - DNA, 25 bp, Homo sapien
tccaaggggctacggcagtaacagc

SEQ ID NO: 118635 - DNA, 25 bp, Homo sapien
aaatgctgaggcgaaggacactcag

SEQ ID NO: 118636 - DNA, 25 bp, Homo sapien
cctcctgtccaaggggctacggcag

SEQ ID NO: 118637 - DNA, 25 bp, Homo sapien
tcaatggccaagagcatgacaggag

SEQ ID NO: 118638 - DNA, 25 bp, Homo sapien
tgctcttccgtgaggacagccagga

SEQ ID NO: 118639 - DNA, 25 bp, Homo sapien
taatgtgaatcgaatcatgccctgc

SEQ ID NO: 118640 - DNA, 25 bp, Homo sapien
aagggcgggctcatcacatgctcat

SEQ ID NO: 118641 - DNA, 25 bp, Homo sapien
aacatttatgatgcctcaagttctg

SEQ ID NO: 118642 - DNA, 25 bp, Homo sapien
tgatgcaccctgagctgctgataaa

SEQ ID NO: 118643 - DNA, 25 bp, Homo sapien
gataaacattgaggcggagattagc

SEQ ID NO: 118644 - DNA, 25 bp, Homo sapien
tatttcaggtaacatttatgatgcc

SEQ ID NO: 118645 - DNA, 25 bp, Homo sapien
caggaaaaggcggagacagcgcctc

SEQ ID NO: 118646 - DNA, 25 bp, Homo sapien
atgggtgcagcgaggagaaaaatcc

SEQ ID NO: 118647 - DNA, 25 bp, Homo sapien
tgagctggacgagccatccactgtg

SEQ ID NO: 118648 - DNA, 25 bp, Homo sapien
agaaaaatccgtggtgtgtgaccat

SEQ ID NO: 118649 - DNA, 25 bp, Homo sapien
gccacacttcggctttgtaaaggtg

SEQ ID NO: 118650 - DNA, 25 bp, Homo sapien
tgggttggggagccgagtcctccca

SEQ ID NO: 118651 - DNA, 25 bp, Homo sapien
cagccacacttcggctttgtaaagg

SEQ ID NO: 118652 - DNA, 25 bp, Homo sapien
cacacttcggctttgtaaaggtggg

SEQ ID NO: 118653 - DNA, 25 bp, Homo sapien
cagtgatgtacgttattgagtcccc

SEQ ID NO: 118654 - DNA, 25 bp, Homo sapien
caagcccaaactggcaagctctctt

SEQ ID NO: 118655 - DNA, 25 bp, Homo sapien
agaactctcaatcccctctgttttt

SEQ ID NO: 118656 - DNA, 25 bp, Homo sapien
gaaatttgccgcttgaaaatcacag

SEQ ID NO: 118657 - DNA, 25 bp, Homo sapien
tcaaacataagggttcctccatcag

SEQ ID NO: 118658 - DNA, 25 bp, Homo sapien
tcctccatcaggtatgcctttttct

SEQ ID NO: 118659 - DNA, 25 bp, Homo sapien
cttcacatgtatggaggaccctcag

SEQ ID NO: 118660 - DNA, 25 bp, Homo sapien
taatcacaatgatagcttcacatgt

SEQ ID NO: 118661 - DNA, 25 bp, Homo sapien
tcaagatgccaacgagcgatgctgc

SEQ ID NO: 118662 - DNA, 25 bp, Homo sapien
gaaaataagctgttggctctagccc

SEQ ID NO: 118663 - DNA, 25 bp, Homo sapien
tctagcccaaagcagccttggatgg

SEQ ID NO: 118664 - DNA, 25 bp, Homo sapien
gcttctcgggtagcctggcaaaaaa

SEQ ID NO: 118665 - DNA, 25 bp, Homo sapien
ccagttcataactggggggcagcag

SEQ ID NO: 118666 - DNA, 25 bp, Homo sapien
aagcgcaacaaagtataacagtgag

SEQ ID NO: 118667 - DNA, 25 bp, Homo sapien
tcaaacaagtaagcgcaacaaagta

SEQ ID NO: 118668 - DNA, 25 bp, Homo sapien
acagacgaggagcacccagttcata

SEQ ID NO: 118669 - DNA, 25 bp, Homo sapien
gatttcagcataagcagagctcatt

SEQ ID NO: 118670 - DNA, 25 bp, Homo sapien
ctgccaaatgctggcctggaatgca

SEQ ID NO: 118671 - DNA, 25 bp, Homo sapien
tttgttactgccaaatgctggcctg

SEQ ID NO: 118672 - DNA, 25 bp, Homo sapien
ttggcatggtaataagatttcagca

SEQ ID NO: 118673 - DNA, 25 bp, Homo sapien
acttctgagtttactgtcaagacca

SEQ ID NO: 118674 - DNA, 25 bp, Homo sapien
gagttccacgtccacataagccttc

SEQ ID NO: 118675 - DNA, 25 bp, Homo sapien
gtaatcaaagcctaaccgagttcca

SEQ ID NO: 118676 - DNA, 25 bp, Homo sapien
tgaacttctgagtttactgtcaaga

SEQ ID NO: 118677 - DNA, 25 bp, Homo sapien
tggatctgatgtcaagaaacctggg

SEQ ID NO: 118678 - DNA, 25 bp, Homo sapien
tggtggtgtcaatagcactggatct

SEQ ID NO: 118679 - DNA, 25 bp, Homo sapien
aggtggtcttgcaggagcccagttt

SEQ ID NO: 118680 - DNA, 25 bp, Homo sapien
cacttcctgtataggcggccagttg

SEQ ID NO: 118681 - DNA, 25 bp, Homo sapien
aaaatcagaactagtttcttgaaca

SEQ ID NO: 118682 - DNA, 25 bp, Homo sapien
taaaatcagaactagtttcttgaac

SEQ ID NO: 118683 - DNA, 25 bp, Homo sapien
aaatcagaactagtttcttgaacag

SEQ ID NO: 118684 - DNA, 25 bp, Homo sapien
ttcccacacctgctgggcagttttg

SEQ ID NO: 118685 - DNA, 25 bp, Homo sapien
ctcttcccacacctgctgggcagtt

SEQ ID NO: 118686 - DNA, 25 bp, Homo sapien
ctgccctttttacctccatctcttc

SEQ ID NO: 118687 - DNA, 25 bp, Homo sapien
tcccacacctgctgggcagttttgt

SEQ ID NO: 118688 - DNA, 25 bp, Homo sapien
cacacaggcgatgcatgctcattga

SEQ ID NO: 118689 - DNA, 25 bp, Homo sapien
aggcacacaggcgatgcatgctcat

SEQ ID NO: 118690 - DNA, 25 bp, Homo sapien
agctggacaaaaatgacagacagga

SEQ ID NO: 118691 - DNA, 25 bp, Homo sapien
cgatgcatgctcattgatttgcaca

SEQ ID NO: 118692 - DNA, 25 bp, Homo sapien
cacactttttgtctcctggcactca

SEQ ID NO: 118693 - DNA, 25 bp, Homo sapien
caaaagaggctcacataatgccctg

SEQ ID NO: 118694 - DNA, 25 bp, Homo sapien
ttcagagttgcagtcacaaatgcct

SEQ ID NO: 118695 - DNA, 25 bp, Homo sapien
ggcactcaaaacacatccctgctgg

SEQ ID NO: 118696 - DNA, 25 bp, Homo sapien
ctcagacactaggtacctccaaaat

SEQ ID NO: 118697 - DNA, 25 bp, Homo sapien
tcagacactaggtacctccaaaatg

SEQ ID NO: 118698 - DNA, 25 bp, Homo sapien
cagacactaggtacctccaaaatgt

SEQ ID NO: 118699 - DNA, 25 bp, Homo sapien
agacactaggtacctccaaaatgtt

SEQ ID NO: 118700 - DNA, 25 bp, Homo sapien
gccttcgatcgagatctcgtctgtg

SEQ ID NO: 118701 - DNA, 25 bp, Homo sapien
ctcgccttcgatcgagatctcgtct

SEQ ID NO: 118702 - DNA, 25 bp, Homo sapien
ttcgatcgagatctcgtctgtgccg

SEQ ID NO: 118703 - DNA, 25 bp, Homo sapien
tcgccttcgatcgagatctcgtctg

SEQ ID NO: 118704 - DNA, 25 bp, Homo sapien
atcctcatccatggcgaaatcttcg

SEQ ID NO: 118705 - DNA, 25 bp, Homo sapien
catcctcatccatggcgaaatcttc

SEQ ID NO: 118706 - DNA, 25 bp, Homo sapien
ccatcctcatccatggcgaaatctt

SEQ ID NO: 118707 - DNA, 25 bp, Homo sapien
gccttcaacagagcgttgtggtccg

SEQ ID NO: 118708 - DNA, 25 bp, Homo sapien
ccagccttcaacagagcgttgtggt

SEQ ID NO: 118709 - DNA, 25 bp, Homo sapien
tccagccttcaacagagcgttgtgg

SEQ ID NO: 118710 - DNA, 25 bp, Homo sapien
cagccttcaacagagcgttgtggtc

SEQ ID NO: 118711 - DNA, 25 bp, Homo sapien
tgtttcatattcaactagagtatac

SEQ ID NO: 118712 - DNA, 25 bp, Homo sapien
ttgagtccctccatagcagcctggg

SEQ ID NO: 118713 - DNA, 25 bp, Homo sapien
tttcatattcaactagagtataccc

SEQ ID NO: 118714 - DNA, 25 bp, Homo sapien
ccatcaaatcctggccattgagtcc

SEQ ID NO: 118715 - DNA, 25 bp, Homo sapien
tggacttctgctgcgtcttcggcca

SEQ ID NO: 118716 - DNA, 25 bp, Homo sapien
tccggtctggacttctgctgcgtct

SEQ ID NO: 118717 - DNA, 25 bp, Homo sapien
tcagcgacgtctccggtctggactt

SEQ ID NO: 118718 - DNA, 25 bp, Homo sapien
gacgtctccggtctggacttctgct

SEQ ID NO: 118719 - DNA, 25 bp, Homo sapien
aaatggaacatttattcgcaactca

SEQ ID NO: 118720 - DNA, 25 bp, Homo sapien
ataaacacagcaagttccaccccag

SEQ ID NO: 118721 - DNA, 25 bp, Homo sapien
tcgcaactcaaatactacgcatata

SEQ ID NO: 118722 - DNA, 25 bp, Homo sapien
aaatataaacacagcaagttccacc

SEQ ID NO: 118723 - DNA, 25 bp, Homo sapien
tagaaactcacataactagcccagg

SEQ ID NO: 118724 - DNA, 25 bp, Homo sapien
catgcctttagacagctggaagtac

SEQ ID NO: 118725 - DNA, 25 bp, Homo sapien
agaaatcatatagtcccaggttggg

SEQ ID NO: 118726 - DNA, 25 bp, Homo sapien
tatagccgcattgtcctcagtgtgt

SEQ ID NO: 118727 - DNA, 25 bp, Homo sapien
tgacccaggcttaattttcttatag

SEQ ID NO: 118728 - DNA, 25 bp, Homo sapien
tcttataggtatttcttccctggac

SEQ ID NO: 118729 - DNA, 25 bp, Homo sapien
ctggaactggtgacccaggcttaat

SEQ ID NO: 118730 - DNA, 25 bp, Homo sapien
actggtgacccaggcttaattttct

SEQ ID NO: 118731 - DNA, 25 bp, Homo sapien
cttccttttaggtaagctgccatac

SEQ ID NO: 118732 - DNA, 25 bp, Homo sapien
ctcttccttttaggtaagctgccat

SEQ ID NO: 118733 - DNA, 25 bp, Homo sapien
tccttttaggtaagctgccataccc

SEQ ID NO: 118734 - DNA, 25 bp, Homo sapien
cttttaggtaagctgccatacccat

SEQ ID NO: 118735 - DNA, 25 bp, Homo sapien
cagagcgtttactttaaagggcata

SEQ ID NO: 118736 - DNA, 25 bp, Homo sapien
caccaagggacatattcagagcgtt

SEQ ID NO: 118737 - DNA, 25 bp, Homo sapien
ggagaaatctgggtgtccgtgaacc

SEQ ID NO: 118738 - DNA, 25 bp, Homo sapien
tggttgtacacacgccaccaaggga

SEQ ID NO: 118739 - DNA, 25 bp, Homo sapien
tgtagttaggatccgctgtggcgtc

SEQ ID NO: 118740 - DNA, 25 bp, Homo sapien
tatcccctgggttggtgcggcccga

SEQ ID NO: 118741 - DNA, 25 bp, Homo sapien
catgtggcggtttttctctgggccg

SEQ ID NO: 118742 - DNA, 25 bp, Homo sapien
aggtctcgtccagagcgcgatctcg

SEQ ID NO: 118743 - DNA, 25 bp, Homo sapien
tcaggtaaaggcaaaccttcagctg

SEQ ID NO: 118744 - DNA, 25 bp, Homo sapien
tgtctttgtaacagggatgctctcc

SEQ ID NO: 118745 - DNA, 25 bp, Homo sapien
ttccaggacaaaatgggagcaggca

SEQ ID NO: 118746 - DNA, 25 bp, Homo sapien
caagggtaatccaaggtgtgctttc

SEQ ID NO: 118747 - DNA, 25 bp, Homo sapien
gttcacgtctgataacgcagatgca

SEQ ID NO: 118748 - DNA, 25 bp, Homo sapien
taacgcagatgcagaccacgaagtc

SEQ ID NO: 118749 - DNA, 25 bp, Homo sapien
tcacgtctgataacgcagatgcaga

SEQ ID NO: 118750 - DNA, 25 bp, Homo sapien
tctgataacgcagatgcagaccacg

SEQ ID NO: 118751 - DNA, 25 bp, Homo sapien
tgtctcggtcgagaggtctccagag

SEQ ID NO: 118752 - DNA, 25 bp, Homo sapien
ttccagttgccaaagcagctgagtg

SEQ ID NO: 118753 - DNA, 25 bp, Homo sapien
tgtaacgaaacagcaaaccttgcgg

SEQ ID NO: 118754 - DNA, 25 bp, Homo sapien
tttcccaccaaataggcagtgatgc

SEQ ID NO: 118755 - DNA, 25 bp, Homo sapien
gagtgcggcagcgttcactactcct

SEQ ID NO: 118756 - DNA, 25 bp, Homo sapien
gagaaaaagagaggcgagtgcggca

SEQ ID NO: 118757 - DNA, 25 bp, Homo sapien
aacctggaggttgaaaagacatgcg

SEQ ID NO: 118758 - DNA, 25 bp, Homo sapien
catgcgagtgtctgggagaaaaaga

SEQ ID NO: 118759 - DNA, 25 bp, Homo sapien
gaatcagcacgccaggactatttca

SEQ ID NO: 118760 - DNA, 25 bp, Homo sapien
cagcacgccaggactatttcagcac

SEQ ID NO: 118761 - DNA, 25 bp, Homo sapien
atcaaagcttgaatcagcacgccag

SEQ ID NO: 118762 - DNA, 25 bp, Homo sapien
tcaaagcttgaatcagcacgccagg

SEQ ID NO: 118763 - DNA, 25 bp, Homo sapien
attggcggcgcgggcgccatggaga

SEQ ID NO: 118764 - DNA, 25 bp, Homo sapien
tggcggcgcgggcgccatggagacc

SEQ ID NO: 118765 - DNA, 25 bp, Homo sapien
ggcggattggcggcgcgggcgccat

SEQ ID NO: 118766 - DNA, 25 bp, Homo sapien
cggattggcggcgcgggcgccatgg

SEQ ID NO: 118767 - DNA, 25 bp, Homo sapien
ggctgagtgtgccaggcgcttgttg

SEQ ID NO: 118768 - DNA, 25 bp, Homo sapien
agcgggacacgcagcagatgcccgc

SEQ ID NO: 118769 - DNA, 25 bp, Homo sapien
ggacgaccccgactggaggaggtgc

SEQ ID NO: 118770 - DNA, 25 bp, Homo sapien
acacactaccgggtggcggcggtgg

SEQ ID NO: 118771 - DNA, 25 bp, Homo sapien
tactcggtacttgtccacaggtccc

SEQ ID NO: 118772 - DNA, 25 bp, Homo sapien
tgttcgccgtcccaaatggtgcgcg

SEQ ID NO: 118773 - DNA, 25 bp, Homo sapien
tttccaggatatgatagagctcgcg

SEQ ID NO: 118774 - DNA, 25 bp, Homo sapien
gcaggtaccactcgcgtagcaggtg

SEQ ID NO: 118775 - DNA, 25 bp, Homo sapien
gcagccgctcggtccctttgtcggc

SEQ ID NO: 118776 - DNA, 25 bp, Homo sapien
tgcagccgctcggtccctttgtcgg

SEQ ID NO: 118777 - DNA, 25 bp, Homo sapien
ctgcagccgctcggtccctttgtcg

SEQ ID NO: 118778 - DNA, 25 bp, Homo sapien
agccgctcggtccctttgtcggcgg

SEQ ID NO: 118779 - DNA, 25 bp, Homo sapien
atgaggccgggctcttccgcaaaat

SEQ ID NO: 118780 - DNA, 25 bp, Homo sapien
aaggattgtaaggagcatttgggcc

SEQ ID NO: 118781 - DNA, 25 bp, Homo sapien
aaaatgtttggctaatcgagatcca

SEQ ID NO: 118782 - DNA, 25 bp, Homo sapien
gagatccacactccgggaaacgaaa

SEQ ID NO: 118783 - DNA, 25 bp, Homo sapien
catttctaacggtgcgtctgcctgg

SEQ ID NO: 118784 - DNA, 25 bp, Homo sapien
ctgagcaagtgctcccgcgatcgcg

SEQ ID NO: 118785 - DNA, 25 bp, Homo sapien
gcctggggcttacgcctgagcaagt

SEQ ID NO: 118786 - DNA, 25 bp, Homo sapien
tcccgcgatcgcgttggatcgggtc

SEQ ID NO: 118787 - DNA, 25 bp, Homo sapien
agatggctgaagtggccgccttgct

SEQ ID NO: 118788 - DNA, 25 bp, Homo sapien
cgcccggaaccctgtgacaggacct

SEQ ID NO: 118789 - DNA, 25 bp, Homo sapien
cgccttgctggatagactggcggcc

SEQ ID NO: 118790 - DNA, 25 bp, Homo sapien
tggtggcgacgcccagcacctctgg

SEQ ID NO: 118791 - DNA, 25 bp, Homo sapien
ctggttcccgtggtcgcggccaaag

SEQ ID NO: 118792 - DNA, 25 bp, Homo sapien
ttctgtggcgctggatttgcaggtc

SEQ ID NO: 118793 - DNA, 25 bp, Homo sapien
cgctggttcccgtggtcgcggccaa

SEQ ID NO: 118794 - DNA, 25 bp, Homo sapien
cttctgagcatcctggatgggcaac

SEQ ID NO: 118795 - DNA, 25 bp, Homo sapien
ctcagcttgcagttcgggttccgaa

SEQ ID NO: 118796 - DNA, 25 bp, Homo sapien
tttcgacgtgaaatacccatgggag

SEQ ID NO: 118797 - DNA, 25 bp, Homo sapien
taagaccttccggagaccatttgct

SEQ ID NO: 118798 - DNA, 25 bp, Homo sapien
gctacagagaaacctaccatggcgg

SEQ ID NO: 118799 - DNA, 25 bp, Homo sapien
ccttagagaggacgctcacatgttg

SEQ ID NO: 118800 - DNA, 25 bp, Homo sapien
gagaggacgctcacatgttgccaat

SEQ ID NO: 118801 - DNA, 25 bp, Homo sapien
cttagagaggacgctcacatgttgc

SEQ ID NO: 118802 - DNA, 25 bp, Homo sapien
tagagaggacgctcacatgttgcca

SEQ ID NO: 118803 - DNA, 25 bp, Homo sapien
catgcatgtgcacgaggaaaaatta

SEQ ID NO: 118804 - DNA, 25 bp, Homo sapien
taatcgaggccattaccaggacaat

SEQ ID NO: 118805 - DNA, 25 bp, Homo sapien
caatgaggcccttgatgacttgttc

SEQ ID NO: 118806 - DNA, 25 bp, Homo sapien
gacttgttctatgcttaattcggag

SEQ ID NO: 118807 - DNA, 25 bp, Homo sapien
taaagtggaggcgagaggaactgcg

SEQ ID NO: 118808 - DNA, 25 bp, Homo sapien
tttataagccggaaaagagcctgac

SEQ ID NO: 118809 - DNA, 25 bp, Homo sapien
gaaactggagtgtggttgaaatgtt

SEQ ID NO: 118810 - DNA, 25 bp, Homo sapien
ttcacattggtcaggtccgttgaaa

SEQ ID NO: 118811 - DNA, 25 bp, Homo sapien
tctctttgggagcggaccgtggctt

SEQ ID NO: 118812 - DNA, 25 bp, Homo sapien
cttctctttgggagcggaccgtggc

SEQ ID NO: 118813 - DNA, 25 bp, Homo sapien
ctttgggagcggaccgtggcttggg

SEQ ID NO: 118814 - DNA, 25 bp, Homo sapien
tctttgggagcggaccgtggcttgg

SEQ ID NO: 118815 - DNA, 25 bp, Homo sapien
aggcctacacgtccgcgagttcgcg

SEQ ID NO: 118816 - DNA, 25 bp, Homo sapien
tcctcgagccgctgagtcacgcagc

SEQ ID NO: 118817 - DNA, 25 bp, Homo sapien
cagtaggagtggctcgaggcctaca

SEQ ID NO: 118818 - DNA, 25 bp, Homo sapien
tcacgcagcccaacagtaggagtgg

SEQ ID NO: 118819 - DNA, 25 bp, Homo sapien
agctctacttctatgttgatgtgaa

SEQ ID NO: 118820 - DNA, 25 bp, Homo sapien
tgtgacaaccgagaatagattttga

SEQ ID NO: 118821 - DNA, 25 bp, Homo sapien
gggtgaagaacatcgaagggcttct

SEQ ID NO: 118822 - DNA, 25 bp, Homo sapien
tgttgatgtgaattggtttatctga

SEQ ID NO: 118823 - DNA, 25 bp, Homo sapien
tgctggtgcctttttgctactatca

SEQ ID NO: 118824 - DNA, 25 bp, Homo sapien
gtctgctggtgcctttttgctacta

SEQ ID NO: 118825 - DNA, 25 bp, Homo sapien
gctggtgcctttttgctactatcat

SEQ ID NO: 118826 - DNA, 25 bp, Homo sapien
gtgtctgctggtgcctttttgctac

SEQ ID NO: 118827 - DNA, 25 bp, Homo sapien
ctgagcaatagctgataatcctttc

SEQ ID NO: 118828 - DNA, 25 bp, Homo sapien
gagcaatagctgataatcctttcct

SEQ ID NO: 118829 - DNA, 25 bp, Homo sapien
caatagctgataatcctttccttgt

SEQ ID NO: 118830 - DNA, 25 bp, Homo sapien
gcaatagctgataatcctttccttg

SEQ ID NO: 118831 - DNA, 25 bp, Homo sapien
gcctaagacaggatgttctttgttg

SEQ ID NO: 118832 - DNA, 25 bp, Homo sapien
gactcagctaaggtgcctaagacag

SEQ ID NO: 118833 - DNA, 25 bp, Homo sapien
tggtgactcagctaaggtgcctaag

SEQ ID NO: 118834 - DNA, 25 bp, Homo sapien
taaggtgcctaagacaggatgttct

SEQ ID NO: 118835 - DNA, 25 bp, Homo sapien
tggttgagaatcgaatctgtggacc

SEQ ID NO: 118836 - DNA, 25 bp, Homo sapien
tcaggtggttgagaatcgaatctgt

SEQ ID NO: 118837 - DNA, 25 bp, Homo sapien
gagaatcgaatctgtggacctgaat

SEQ ID NO: 118838 - DNA, 25 bp, Homo sapien
aatctgtggacctgaatttgcatcc

SEQ ID NO: 118839 - DNA, 25 bp, Homo sapien
aaatagcaaatggaccaacaggacc

SEQ ID NO: 118840 - DNA, 25 bp, Homo sapien
taagggaaatcagtgacggtgaaca

SEQ ID NO: 118841 - DNA, 25 bp, Homo sapien
tgaacatgatgaagtcagtgacggg

SEQ ID NO: 118842 - DNA, 25 bp, Homo sapien
tttggaaaccaatcaactgtcttga

SEQ ID NO: 118843 - DNA, 25 bp, Homo sapien
cctttaattgctgggtagaattcag

SEQ ID NO: 118844 - DNA, 25 bp, Homo sapien
attactgatttaaagcccttacttg

SEQ ID NO: 118845 - DNA, 25 bp, Homo sapien
agaagagtttgagaattgctttaat

SEQ ID NO: 118846 - DNA, 25 bp, Homo sapien
atcctttaattgctgggtagaattc

SEQ ID NO: 118847 - DNA, 25 bp, Homo sapien
ctaacatattcctaatgtgctccat

SEQ ID NO: 118848 - DNA, 25 bp, Homo sapien
ttgggttggccaggtaaatcaggaa

SEQ ID NO: 118849 - DNA, 25 bp, Homo sapien
gctggatgcagtccaagaagaaagg

SEQ ID NO: 118850 - DNA, 25 bp, Homo sapien
tttcttcctattgagcaacacccac

SEQ ID NO: 118851 - DNA, 25 bp, Homo sapien
tgtgatcagcgtaaagtggcagttg

SEQ ID NO: 118852 - DNA, 25 bp, Homo sapien
ttatgttagaagcacagagggccac

SEQ ID NO: 118853 - DNA, 25 bp, Homo sapien
cagtgtgaactgtataaacgcccat

SEQ ID NO: 118854 - DNA, 25 bp, Homo sapien
tctagtgtgccctcaatttgcaaat

SEQ ID NO: 118855 - DNA, 25 bp, Homo sapien
taggttggcattgctggtattacca

SEQ ID NO: 118856 - DNA, 25 bp, Homo sapien
cttcaccttcagcttccactctgaa

SEQ ID NO: 118857 - DNA, 25 bp, Homo sapien
cttcagcttccactctgaatgccat

SEQ ID NO: 118858 - DNA, 25 bp, Homo sapien
tcaccttcagcttccactctgaatg

SEQ ID NO: 118859 - DNA, 25 bp, Homo sapien
accttcagcttccactctgaatgcc

SEQ ID NO: 118860 - DNA, 25 bp, Homo sapien
tcactggttcttaatacgggaagat

SEQ ID NO: 118861 - DNA, 25 bp, Homo sapien
ccacttggtgtcatgtggagaaatg

SEQ ID NO: 118862 - DNA, 25 bp, Homo sapien
cactggttcttaatacgggaagatt

SEQ ID NO: 118863 - DNA, 25 bp, Homo sapien
cacttggtgtcatgtggagaaatgg

SEQ ID NO: 118864 - DNA, 25 bp, Homo sapien
attttgactgtttcataacacttag

SEQ ID NO: 118865 - DNA, 25 bp, Homo sapien
cattttgactgtttcataacactta

SEQ ID NO: 118866 - DNA, 25 bp, Homo sapien
acattttgactgtttcataacactt

SEQ ID NO: 118867 - DNA, 25 bp, Homo sapien
gattgctggtaacaaacttgacctc

SEQ ID NO: 118868 - DNA, 25 bp, Homo sapien
caaacttgacctcttgagaaagagg

SEQ ID NO: 118869 - DNA, 25 bp, Homo sapien
tgtttgttggtgtggaagaactcag

SEQ ID NO: 118870 - DNA, 25 bp, Homo sapien
cccagtggcaccatgtttgttggtg

SEQ ID NO: 118871 - DNA, 25 bp, Homo sapien
tgcacgttgatgtcaacactgattg

SEQ ID NO: 118872 - DNA, 25 bp, Homo sapien
caacactgattgctgattttggact

SEQ ID NO: 118873 - DNA, 25 bp, Homo sapien
gggctctaagccgtttgcacgttga

SEQ ID NO: 118874 - DNA, 25 bp, Homo sapien
gctctaagccgtttgcacgttgatg

SEQ ID NO: 118875 - DNA, 25 bp, Homo sapien
cgggctctagagttcccaatggaag

SEQ ID NO: 118876 - DNA, 25 bp, Homo sapien
ctctgtagcctgtttgtgtatccga

SEQ ID NO: 118877 - DNA, 25 bp, Homo sapien
gtgtatccgatactactaaatgtgg

SEQ ID NO: 118878 - DNA, 25 bp, Homo sapien
tataagaacttcgatgggtgggaac

SEQ ID NO: 118879 - DNA, 25 bp, Homo sapien
aatggttcttgggtcaagtgtagcg

SEQ ID NO: 118880 - DNA, 25 bp, Homo sapien
ttcttgggtcaagtgtagcgctaac

SEQ ID NO: 118881 - DNA, 25 bp, Homo sapien
gcgctaacagtgaggatttggccat

SEQ ID NO: 118882 - DNA, 25 bp, Homo sapien
caagtgtagcgctaacagtgaggat

SEQ ID NO: 118883 - DNA, 25 bp, Homo sapien
tgacagctgagtgacaaggcctgaa

SEQ ID NO: 118884 - DNA, 25 bp, Homo sapien
gataaaaaccctggatgttccctca

SEQ ID NO: 118885 - DNA, 25 bp, Homo sapien
tgaaagttgtaacgcgatccctcct

SEQ ID NO: 118886 - DNA, 25 bp, Homo sapien
tcatgaatagcaggtagctctccct

SEQ ID NO: 118887 - DNA, 25 bp, Homo sapien
ttctaacacagaagccaacatggat

SEQ ID NO: 118888 - DNA, 25 bp, Homo sapien
tatctacaaaaacaacgccagtatg

SEQ ID NO: 118889 - DNA, 25 bp, Homo sapien
ttttagtaggatcaagcccaactgc

SEQ ID NO: 118890 - DNA, 25 bp, Homo sapien
gggctccatccagtagtaggaccag

SEQ ID NO: 118891 - DNA, 25 bp, Homo sapien
tcccactgaggatgacaatcagggt

SEQ ID NO: 118892 - DNA, 25 bp, Homo sapien
cactgaggatgacaatcagggtttt

SEQ ID NO: 118893 - DNA, 25 bp, Homo sapien
ggatgacaatcagggttttagacgc

SEQ ID NO: 118894 - DNA, 25 bp, Homo sapien
aatcagggttttagacgctgtggtc

SEQ ID NO: 118895 - DNA, 25 bp, Homo sapien
gaagccagcgcactagtgtgtgtcc

SEQ ID NO: 118896 - DNA, 25 bp, Homo sapien
catggacaattcacactgagggacc

SEQ ID NO: 118897 - DNA, 25 bp, Homo sapien
tgagggacccgaaggctcagtctca

SEQ ID NO: 118898 - DNA, 25 bp, Homo sapien
ggactctaaaaactctcggagacta

SEQ ID NO: 118899 - DNA, 25 bp, Homo sapien
ggccctagggagagcagcggccttg

SEQ ID NO: 118900 - DNA, 25 bp, Homo sapien
ctagggagagcagcggccttgtccc

SEQ ID NO: 118901 - DNA, 25 bp, Homo sapien
ccctagggagagcagcggccttgtc

SEQ ID NO: 118902 - DNA, 25 bp, Homo sapien
gagcagcggccttgtcccccacgca

SEQ ID NO: 118903 - DNA, 25 bp, Homo sapien
tcggacccaaactcttcacccgcgc

SEQ ID NO: 118904 - DNA, 25 bp, Homo sapien
tggaggagctccactttcttggtgg

SEQ ID NO: 118905 - DNA, 25 bp, Homo sapien
gtagagaggacgtcactttctgggc

SEQ ID NO: 118906 - DNA, 25 bp, Homo sapien
gggcttgtcgctagaacttcccgcg

SEQ ID NO: 118907 - DNA, 25 bp, Homo sapien
tctttggcaaagtccgaaggcagga

SEQ ID NO: 118908 - DNA, 25 bp, Homo sapien
ccaatagaggcttgtatcccgcact

SEQ ID NO: 118909 - DNA, 25 bp, Homo sapien
tacaactcagctgtcgtcgccttgg

SEQ ID NO: 118910 - DNA, 25 bp, Homo sapien
tccaccggttcagagagaatcgcgc

SEQ ID NO: 118911 - DNA, 25 bp, Homo sapien
gctgctgctgcaccgaacgcggcgg

SEQ ID NO: 118912 - DNA, 25 bp, Homo sapien
cacagaactcgcgcggagcgggcct

SEQ ID NO: 118913 - DNA, 25 bp, Homo sapien
tgctgctgcaccgaacgcggcggcg

SEQ ID NO: 118914 - DNA, 25 bp, Homo sapien
gaactcgcgcggagcgggccttcct

SEQ ID NO: 118915 - DNA, 25 bp, Homo sapien
ttcgagaaccagctgttaagggacc

SEQ ID NO: 118916 - DNA, 25 bp, Homo sapien
tccagagcgcgcatattccagatgt

SEQ ID NO: 118917 - DNA, 25 bp, Homo sapien
tgacctcttggctgaaaacgaagct

SEQ ID NO: 118918 - DNA, 25 bp, Homo sapien
taaacacgcgattgttcgagtcccc

SEQ ID NO: 118919 - DNA, 25 bp, Homo sapien
cccgtgattactgcttgtaaacttg

SEQ ID NO: 118920 - DNA, 25 bp, Homo sapien
taggctcgtggaagttgtgtctcgc

SEQ ID NO: 118921 - DNA, 25 bp, Homo sapien
ccagctccgcctgggataattttag

SEQ ID NO: 118922 - DNA, 25 bp, Homo sapien
aatgtctgcagatccggcgaggagc

SEQ ID NO: 118923 - DNA, 25 bp, Homo sapien
cgtctcttcctactccggtgactac

SEQ ID NO: 118924 - DNA, 25 bp, Homo sapien
tttaatttcttacatgccgtctctt

SEQ ID NO: 118925 - DNA, 25 bp, Homo sapien
atttcttacatgccgtctcttccta

SEQ ID NO: 118926 - DNA, 25 bp, Homo sapien
taatttcttacatgccgtctcttcc

SEQ ID NO: 118927 - DNA, 25 bp, Homo sapien
catcatttggtttgggagctcaggg

SEQ ID NO: 118928 - DNA, 25 bp, Homo sapien
caaacaccctgcacaaagatagctt

SEQ ID NO: 118929 - DNA, 25 bp, Homo sapien
caggcttcaaaggacgctgcggaaa

SEQ ID NO: 118930 - DNA, 25 bp, Homo sapien
gatagctttcaatgaccctgacagg

SEQ ID NO: 118931 - DNA, 25 bp, Homo sapien
caacgaatctggcaacctggtattt

SEQ ID NO: 118932 - DNA, 25 bp, Homo sapien
cagtgctgccggatggtgtctagaa

SEQ ID NO: 118933 - DNA, 25 bp, Homo sapien
tctgtagcctactcctgtaaagggt

SEQ ID NO: 118934 - DNA, 25 bp, Homo sapien
ggccatcatctgaaccaagagtagt

SEQ ID NO: 118935 - DNA, 25 bp, Homo sapien
tctgggcaactgatacgcctgtttc

SEQ ID NO: 118936 - DNA, 25 bp, Homo sapien
ggcacccagtctgagttctgggcaa

SEQ ID NO: 118937 - DNA, 25 bp, Homo sapien
tgtgagacagaaatagacgtgacca

SEQ ID NO: 118938 - DNA, 25 bp, Homo sapien
caagtgcctaaatgtcttaatgctc

SEQ ID NO: 118939 - DNA, 25 bp, Homo sapien
ttaaaggctactgagtgcgccggcc

SEQ ID NO: 118940 - DNA, 25 bp, Homo sapien
gagtttctaaatcaacgggcagtga

SEQ ID NO: 118941 - DNA, 25 bp, Homo sapien
taattaaatatgagctcaccgggag

SEQ ID NO: 118942 - DNA, 25 bp, Homo sapien
cttaggtgatactggcgacgggtcc

SEQ ID NO: 118943 - DNA, 25 bp, Homo sapien
tctggctacaagcctgggcggagtc

SEQ ID NO: 118944 - DNA, 25 bp, Homo sapien
aagccccgacgcctgtgggccccat

SEQ ID NO: 118945 - DNA, 25 bp, Homo sapien
agcccggcgagatagcgcgacctct

SEQ ID NO: 118946 - DNA, 25 bp, Homo sapien
acaaccccagagagcgccgggccag

SEQ ID NO: 118947 - DNA, 25 bp, Homo sapien
tatctatgtacaaatcaggagggcc

SEQ ID NO: 118948 - DNA, 25 bp, Homo sapien
tatgtccatgaatccagagcgacct

SEQ ID NO: 118949 - DNA, 25 bp, Homo sapien
gatgatcggctctagtatctatgta

SEQ ID NO: 118950 - DNA, 25 bp, Homo sapien
tttcaaggcagaagataagtgagtc

SEQ ID NO: 118951 - DNA, 25 bp, Homo sapien
tatcaaaggcttttaggagaccagg

SEQ ID NO: 118952 - DNA, 25 bp, Homo sapien
gaagcttcacgagagagaaaaggca

SEQ ID NO: 118953 - DNA, 25 bp, Homo sapien
tagccaaatggcaggatgtacaatc

SEQ ID NO: 118954 - DNA, 25 bp, Homo sapien
catggtcaatttccgtttgccaaga

SEQ ID NO: 118955 - DNA, 25 bp, Homo sapien
ctcccacctgtgcaaccgccttcat

SEQ ID NO: 118956 - DNA, 25 bp, Homo sapien
catctactggggaaaggacaacctc

SEQ ID NO: 118957 - DNA, 25 bp, Homo sapien
ttaaagacttaagcacaccaggcgc

SEQ ID NO: 118958 - DNA, 25 bp, Homo sapien
ccatggattggtagccaactgattt

SEQ ID NO: 118959 - DNA, 25 bp, Homo sapien
gcggctcacgcctattatctcacca

SEQ ID NO: 118960 - DNA, 25 bp, Homo sapien
taacctgccactgtatttggcctac

SEQ ID NO: 118961 - DNA, 25 bp, Homo sapien
ccttgaagcttatggagctctctcg

SEQ ID NO: 118962 - DNA, 25 bp, Homo sapien
tctgccttggaccatagacactggg

SEQ ID NO: 118963 - DNA, 25 bp, Homo sapien
gcaatggtcaatgagtaacctgcca

SEQ ID NO: 118964 - DNA, 25 bp, Homo sapien
tgtgtgctccacttccctactgggt

SEQ ID NO: 118965 - DNA, 25 bp, Homo sapien
cagtgaaatctaagctgctggagcc

SEQ ID NO: 118966 - DNA, 25 bp, Homo sapien
acagtgtagtttcccccacacctat

SEQ ID NO: 118967 - DNA, 25 bp, Homo sapien
cctactgggtatcaaggcccaggca

SEQ ID NO: 118968 - DNA, 25 bp, Homo sapien
ggttcctaccaacaggcgcttggca

SEQ ID NO: 118969 - DNA, 25 bp, Homo sapien
tctcgcaggcgcctgtttcagccag

SEQ ID NO: 118970 - DNA, 25 bp, Homo sapien
ctgtttcagccagagccacctacaa

SEQ ID NO: 118971 - DNA, 25 bp, Homo sapien
ctcagacgcgaccaagcaggttcct

SEQ ID NO: 118972 - DNA, 25 bp, Homo sapien
catcagcttcaaggaggggttccga

SEQ ID NO: 118973 - DNA, 25 bp, Homo sapien
tacaccgagggcaaccctgatcgtc

SEQ ID NO: 118974 - DNA, 25 bp, Homo sapien
gagtgtgtccgcacacattcaccat

SEQ ID NO: 118975 - DNA, 25 bp, Homo sapien
ggttccgatatttggtggtcttaca

SEQ ID NO: 118976 - DNA, 25 bp, Homo sapien
tcttccctgaatggctaagtgctgc

SEQ ID NO: 118977 - DNA, 25 bp, Homo sapien
tgttctctcagccaatacgctacag

SEQ ID NO: 118978 - DNA, 25 bp, Homo sapien
tcagacaggctcattccaaagcttg

SEQ ID NO: 118979 - DNA, 25 bp, Homo sapien
caaaaagggctgaggatacaacaaa

SEQ ID NO: 118980 - DNA, 25 bp, Homo sapien
gaacaaccatgcctgtcttgacata

SEQ ID NO: 118981 - DNA, 25 bp, Homo sapien
tcttatgatatactggcctaaatgc

SEQ ID NO: 118982 - DNA, 25 bp, Homo sapien
catatgcatattgatctagagagat

SEQ ID NO: 118983 - DNA, 25 bp, Homo sapien
cttttttgagaacaactgggccata

SEQ ID NO: 118984 - DNA, 25 bp, Homo sapien
gtaaaccagttagtgctagatgcag

SEQ ID NO: 118985 - DNA, 25 bp, Homo sapien
tgtcagttaacaccaggaagtaaac

SEQ ID NO: 118986 - DNA, 25 bp, Homo sapien
gatctcaaaaatacagcatctggca

SEQ ID NO: 118987 - DNA, 25 bp, Homo sapien
tataaatcagtggtgcagaggcact

SEQ ID NO: 118988 - DNA, 25 bp, Homo sapien
caagttgcccaagaacatagagagt

SEQ ID NO: 118989 - DNA, 25 bp, Homo sapien
tcagggagaaactaagcaaggacat

SEQ ID NO: 118990 - DNA, 25 bp, Homo sapien
gatggctcactgacttggcggttag

SEQ ID NO: 118991 - DNA, 25 bp, Homo sapien
taaggctgctgacgacacataaact

SEQ ID NO: 118992 - DNA, 25 bp, Homo sapien
cccagaggtttgaagttacagtgag

SEQ ID NO: 118993 - DNA, 25 bp, Homo sapien
gcagaagggttcctgagcccagagg

SEQ ID NO: 118994 - DNA, 25 bp, Homo sapien
agaagggttcctgagcccagaggtt

SEQ ID NO: 118995 - DNA, 25 bp, Homo sapien
aggttgaggcagaagggttcctgag

SEQ ID NO: 118996 - DNA, 25 bp, Homo sapien
ctcaattattaagggctctcaggta

SEQ ID NO: 118997 - DNA, 25 bp, Homo sapien
gagagatgattatggtgtcccaaac

SEQ ID NO: 118998 - DNA, 25 bp, Homo sapien
tataacctaaacaaagagagctgct

SEQ ID NO: 118999 - DNA, 25 bp, Homo sapien
tagagatgacattagtgggccaggc

SEQ ID NO: 119000 - DNA, 25 bp, Homo sapien
aatggagtgcagaggtgtgatctct

SEQ ID NO: 119001 - DNA, 25 bp, Homo sapien
cagaatggagtgcagaggtgtgatc

SEQ ID NO: 119002 - DNA, 25 bp, Homo sapien
tgatctctgctcactgcagcctccg

SEQ ID NO: 119003 - DNA, 25 bp, Homo sapien
gaatggagtgcagaggtgtgatctc

SEQ ID NO: 119004 - DNA, 25 bp, Homo sapien
agtggctttatctcaactcattata

SEQ ID NO: 119005 - DNA, 25 bp, Homo sapien
aattctctgtctacgcctcccaagt

SEQ ID NO: 119006 - DNA, 25 bp, Homo sapien
tggctttatctcaactcattataac

SEQ ID NO: 119007 - DNA, 25 bp, Homo sapien
gctttatctcaactcattataacct

SEQ ID NO: 119008 - DNA, 25 bp, Homo sapien
aacaaagttagaccgccatatctga

SEQ ID NO: 119009 - DNA, 25 bp, Homo sapien
tgtgcaacaaagttagaccgccata

SEQ ID NO: 119010 - DNA, 25 bp, Homo sapien
agttagaccgccatatctgaaaaaa

SEQ ID NO: 119011 - DNA, 25 bp, Homo sapien
ccacagtaaaataattcttagccag

SEQ ID NO: 119012 - DNA, 25 bp, Homo sapien
gaaatgaggagccactacagagttt

SEQ ID NO: 119013 - DNA, 25 bp, Homo sapien
tgaaagcagactatagggacaaagg

SEQ ID NO: 119014 - DNA, 25 bp, Homo sapien
gcttctactctgcatgaaatgagga

SEQ ID NO: 119015 - DNA, 25 bp, Homo sapien
gcaaactaatgtatgagccactacc

SEQ ID NO: 119016 - DNA, 25 bp, Homo sapien
taggtttcactcacagctttcaggt

SEQ ID NO: 119017 - DNA, 25 bp, Homo sapien
cacatgggcatcagcatatgacaca

SEQ ID NO: 119018 - DNA, 25 bp, Homo sapien
tgtctagcccttcctaacaggtttg

SEQ ID NO: 119019 - DNA, 25 bp, Homo sapien
cataagagacaagtggaatcagcag

SEQ ID NO: 119020 - DNA, 25 bp, Homo sapien
taagcataaccatctagctatttgt

SEQ ID NO: 119021 - DNA, 25 bp, Homo sapien
atcagtgtagagataaccttttccc

SEQ ID NO: 119022 - DNA, 25 bp, Homo sapien
cagttagatactttgatggcacaag

SEQ ID NO: 119023 - DNA, 25 bp, Homo sapien
taatctttccactagaagatgcttc

SEQ ID NO: 119024 - DNA, 25 bp, Homo sapien
cacactgtgagttaaatctgggcca

SEQ ID NO: 119025 - DNA, 25 bp, Homo sapien
tgagaattctgccaactaccatgta

SEQ ID NO: 119026 - DNA, 25 bp, Homo sapien
gagtaggtcatagcactttaggtcc

SEQ ID NO: 119027 - DNA, 25 bp, Homo sapien
taaccaaactggtcaaggagccaag

SEQ ID NO: 119028 - DNA, 25 bp, Homo sapien
ttcctggccataacagatcatcatc

SEQ ID NO: 119029 - DNA, 25 bp, Homo sapien
cgcccagccggaaacagcttcttaa

SEQ ID NO: 119030 - DNA, 25 bp, Homo sapien
gaagaagacaaactatagtcccaat

SEQ ID NO: 119031 - DNA, 25 bp, Homo sapien
gctgtagttgatttcctggccataa

SEQ ID NO: 119032 - DNA, 25 bp, Homo sapien
aacaaaggcacgcgctttcactaca

SEQ ID NO: 119033 - DNA, 25 bp, Homo sapien
gccagggacacatggccagggacac

SEQ ID NO: 119034 - DNA, 25 bp, Homo sapien
aggcacgcgctttcactacacggac

SEQ ID NO: 119035 - DNA, 25 bp, Homo sapien
aaaggcacgcgctttcactacacgg

SEQ ID NO: 119036 - DNA, 25 bp, Homo sapien
gagtccgtatttctgcactcgagta

SEQ ID NO: 119037 - DNA, 25 bp, Homo sapien
caaggtgagtccgtatttctgcact

SEQ ID NO: 119038 - DNA, 25 bp, Homo sapien
caagcaaggtgagtccgtatttctg

SEQ ID NO: 119039 - DNA, 25 bp, Homo sapien
tccgtatttctgcactcgagtaaag

SEQ ID NO: 119040 - DNA, 25 bp, Homo sapien
tgtataaccaatcttttagttgttc

SEQ ID NO: 119041 - DNA, 25 bp, Homo sapien
tataaccaatcttttagttgttcca

SEQ ID NO: 119042 - DNA, 25 bp, Homo sapien
cttgtataaccaatcttttagttgt

SEQ ID NO: 119043 - DNA, 25 bp, Homo sapien
aactacaaccagtttctgaactgaa

SEQ ID NO: 119044 - DNA, 25 bp, Homo sapien
actacaaccagtttctgaactgaac

SEQ ID NO: 119045 - DNA, 25 bp, Homo sapien
atatttgagataactacaaccagtt

SEQ ID NO: 119046 - DNA, 25 bp, Homo sapien
tcaatatttgagataactacaacca

SEQ ID NO: 119047 - DNA, 25 bp, Homo sapien
tgcagtcttatcacactcaatatca

SEQ ID NO: 119048 - DNA, 25 bp, Homo sapien
ttgcagtcttatcacactcaatatc

SEQ ID NO: 119049 - DNA, 25 bp, Homo sapien
cttttgcagtcttatcacactcaat

SEQ ID NO: 119050 - DNA, 25 bp, Homo sapien
cagtcttatcacactcaatatcaaa

SEQ ID NO: 119051 - DNA, 25 bp, Homo sapien
aagaaacttccaacagtggcagaaa

SEQ ID NO: 119052 - DNA, 25 bp, Homo sapien
cttcctcagaattggtaataaactg

SEQ ID NO: 119053 - DNA, 25 bp, Homo sapien
tcctcagaattggtaataaactgtg

SEQ ID NO: 119054 - DNA, 25 bp, Homo sapien
taataaactgtggtcccgactcttc

SEQ ID NO: 119055 - DNA, 25 bp, Homo sapien
ttcctcagaattggtaataaactgt

SEQ ID NO: 119056 - DNA, 25 bp, Homo sapien
tcagtcattgacaggaattttgtag

SEQ ID NO: 119057 - DNA, 25 bp, Homo sapien
aggaattttgtaggccaccatgcta

SEQ ID NO: 119058 - DNA, 25 bp, Homo sapien
cagtcattgacaggaattttgtagg

SEQ ID NO: 119059 - DNA, 25 bp, Homo sapien
ttttgtaggccaccatgctatttac

SEQ ID NO: 119060 - DNA, 25 bp, Homo sapien
aatatccatcccttcacaggttcaa

SEQ ID NO: 119061 - DNA, 25 bp, Homo sapien
actgattcgatagggaaaattatgc

SEQ ID NO: 119062 - DNA, 25 bp, Homo sapien
aactgattcgatagggaaaattatg

SEQ ID NO: 119063 - DNA, 25 bp, Homo sapien
catcccttcacaggttcaagttaca

SEQ ID NO: 119064 - DNA, 25 bp, Homo sapien
cattccaggaagatgtctatggatt

SEQ ID NO: 119065 - DNA, 25 bp, Homo sapien
catattctttaggtaaaattgacat

SEQ ID NO: 119066 - DNA, 25 bp, Homo sapien
tgtctatggattcatgtaccaccaa

SEQ ID NO: 119067 - DNA, 25 bp, Homo sapien
gtaccaccaacataacagcacactg

SEQ ID NO: 119068 - DNA, 25 bp, Homo sapien
gaatgttacaggtctagccaaaccc

SEQ ID NO: 119069 - DNA, 25 bp, Homo sapien
tacagatagcaagacaaaatgacct

SEQ ID NO: 119070 - DNA, 25 bp, Homo sapien
tctggagtattcaaaccaacaggtc

SEQ ID NO: 119071 - DNA, 25 bp, Homo sapien
gtcatagtttaagtgcaggccagaa

SEQ ID NO: 119072 - DNA, 25 bp, Homo sapien
cagttaactttgtctacgataatca

SEQ ID NO: 119073 - DNA, 25 bp, Homo sapien
catacatggatttcaagccaattag

SEQ ID NO: 119074 - DNA, 25 bp, Homo sapien
atccagttaactttgtctacgataa

SEQ ID NO: 119075 - DNA, 25 bp, Homo sapien
tggatttcaagccaattagccacgg

SEQ ID NO: 119076 - DNA, 25 bp, Homo sapien
tctctgctctaaccgaatcatagaa

SEQ ID NO: 119077 - DNA, 25 bp, Homo sapien
taacacctggtgcattttagaaaag

SEQ ID NO: 119078 - DNA, 25 bp, Homo sapien
taagcccatgtgtactaaattctgt

SEQ ID NO: 119079 - DNA, 25 bp, Homo sapien
cgtttaaggattcatggaaaacaca

SEQ ID NO: 119080 - DNA, 25 bp, Homo sapien
tggcaaaacctcattcctacaaaaa

SEQ ID NO: 119081 - DNA, 25 bp, Homo sapien
caacaacaacaacaccaacaaatta

SEQ ID NO: 119082 - DNA, 25 bp, Homo sapien
acatggcaaaacctcattcctacaa

SEQ ID NO: 119083 - DNA, 25 bp, Homo sapien
aacaacaacaacaccaacaaattag

SEQ ID NO: 119084 - DNA, 25 bp, Homo sapien
ctgggataacaagcacacactgtca

SEQ ID NO: 119085 - DNA, 25 bp, Homo sapien
caggcaatcgtcctacatcaggctc

SEQ ID NO: 119086 - DNA, 25 bp, Homo sapien
aacaagcacacactgtcacgctctg

SEQ ID NO: 119087 - DNA, 25 bp, Homo sapien
cccagattcaggcaatcgtcctaca

SEQ ID NO: 119088 - DNA, 25 bp, Homo sapien
cctgaagttgctctttctgagtgga

SEQ ID NO: 119089 - DNA, 25 bp, Homo sapien
ggatcttcaaagagttgtaccctga

SEQ ID NO: 119090 - DNA, 25 bp, Homo sapien
tctgagtggagtaccacactcaggg

SEQ ID NO: 119091 - DNA, 25 bp, Homo sapien
cctccttgtcaacagtgggatcttc

SEQ ID NO: 119092 - DNA, 25 bp, Homo sapien
gcaaaatccttgttaagacttcagg

SEQ ID NO: 119093 - DNA, 25 bp, Homo sapien
gacaccaggtttgtaaccagaccaa

SEQ ID NO: 119094 - DNA, 25 bp, Homo sapien
tgactacggagaagaagtaggatca

SEQ ID NO: 119095 - DNA, 25 bp, Homo sapien
taaattgggagcttgaaagattggg

SEQ ID NO: 119096 - DNA, 25 bp, Homo sapien
tcttccaagaaatcattgtattctc

SEQ ID NO: 119097 - DNA, 25 bp, Homo sapien
cttccaagaaatcattgtattctct

SEQ ID NO: 119098 - DNA, 25 bp, Homo sapien
ttccaagaaatcattgtattctctt

SEQ ID NO: 119099 - DNA, 25 bp, Homo sapien
aaatccacattgttggtcaagttga

SEQ ID NO: 119100 - DNA, 25 bp, Homo sapien
tactcaacagcagcggaatacacga

SEQ ID NO: 119101 - DNA, 25 bp, Homo sapien
tacaggataggtcacaagttaggtc

SEQ ID NO: 119102 - DNA, 25 bp, Homo sapien
taacagtaggagacttaactcacat

SEQ ID NO: 119103 - DNA, 25 bp, Homo sapien
tcagtaatggatggaactttcagaa

SEQ ID NO: 119104 - DNA, 25 bp, Homo sapien
tgttcattttcctgtcgttccactt

SEQ ID NO: 119105 - DNA, 25 bp, Homo sapien
cagctcatctaaaaaagcctgctta

SEQ ID NO: 119106 - DNA, 25 bp, Homo sapien
tagaatctgctgcagttgttcttct

SEQ ID NO: 119107 - DNA, 25 bp, Homo sapien
tcctgtcgttccacttctaaagctt

SEQ ID NO: 119108 - DNA, 25 bp, Homo sapien
tgagccaaaagcagagcaacaggga

SEQ ID NO: 119109 - DNA, 25 bp, Homo sapien
agcagagcaacagggagatcagaac

SEQ ID NO: 119110 - DNA, 25 bp, Homo sapien
ctgagccaaaagcagagcaacaggg

SEQ ID NO: 119111 - DNA, 25 bp, Homo sapien
gagcaacagggagatcagaactctc

SEQ ID NO: 119112 - DNA, 25 bp, Homo sapien
tgggtttctcaagttgcatttctaa

SEQ ID NO: 119113 - DNA, 25 bp, Homo sapien
caagttgcatttctaattgggtaga

SEQ ID NO: 119114 - DNA, 25 bp, Homo sapien
ctaattgggtagatctatctttatg

SEQ ID NO: 119115 - DNA, 25 bp, Homo sapien
gtttgggtttctcaagttgcatttc

SEQ ID NO: 119116 - DNA, 25 bp, Homo sapien
cattttgatgcctgtggaaaacgtc

SEQ ID NO: 119117 - DNA, 25 bp, Homo sapien
attttgatgcctgtggaaaacgtca

SEQ ID NO: 119118 - DNA, 25 bp, Homo sapien
ttttgatgcctgtggaaaacgtcac

SEQ ID NO: 119119 - DNA, 25 bp, Homo sapien
gactatctaagagggctagccaggt

SEQ ID NO: 119120 - DNA, 25 bp, Homo sapien
gaacacattgtgtccttaaggaagc

SEQ ID NO: 119121 - DNA, 25 bp, Homo sapien
catctaaaatgagaccggcatggaa

SEQ ID NO: 119122 - DNA, 25 bp, Homo sapien
caaatgtgaatctcccaatggcaaa

SEQ ID NO: 119123 - DNA, 25 bp, Homo sapien
gagaaccacttgaacgtgagatggg

SEQ ID NO: 119124 - DNA, 25 bp, Homo sapien
acaacagcaatataggacctcctac

SEQ ID NO: 119125 - DNA, 25 bp, Homo sapien
agaaactaaggatacacaacagcaa

SEQ ID NO: 119126 - DNA, 25 bp, Homo sapien
caatataggacctcctaccgaagaa

SEQ ID NO: 119127 - DNA, 25 bp, Homo sapien
caaaagcataactcacagagccaga

SEQ ID NO: 119128 - DNA, 25 bp, Homo sapien
catgttatccatggaggaactcatc

SEQ ID NO: 119129 - DNA, 25 bp, Homo sapien
cactgtaaggttattccaagcatga

SEQ ID NO: 119130 - DNA, 25 bp, Homo sapien
ggagccagtcacctaatcactctct

SEQ ID NO: 119131 - DNA, 25 bp, Homo sapien
tgtttgtttcatgaactgagtcctc

SEQ ID NO: 119132 - DNA, 25 bp, Homo sapien
caaaacattgtgcttactctgtggc

SEQ ID NO: 119133 - DNA, 25 bp, Homo sapien
tgttttccagacatcttagtagtta

SEQ ID NO: 119134 - DNA, 25 bp, Homo sapien
cattacagtgagactgtgcattcca

SEQ ID NO: 119135 - DNA, 25 bp, Homo sapien
ccagcattggtgtcacatgttttag

SEQ ID NO: 119136 - DNA, 25 bp, Homo sapien
cagtggctggtattcatacagagct

SEQ ID NO: 119137 - DNA, 25 bp, Homo sapien
gtggtccatatgtctctatctgcag

SEQ ID NO: 119138 - DNA, 25 bp, Homo sapien
gtcttcctagcatctcaagctcagg

SEQ ID NO: 119139 - DNA, 25 bp, Homo sapien
tcaagcttgtgaataggtgccagtg

SEQ ID NO: 119140 - DNA, 25 bp, Homo sapien
gaacagcaataagtcccacatatca

SEQ ID NO: 119141 - DNA, 25 bp, Homo sapien
tattccaggctcaatctcaagagac

SEQ ID NO: 119142 - DNA, 25 bp, Homo sapien
caatttggtattgagtactgttcat

SEQ ID NO: 119143 - DNA, 25 bp, Homo sapien
caagagacctaacaagtccacagaa

SEQ ID NO: 119144 - DNA, 25 bp, Homo sapien
tatgactgttgaaccacagggccag

SEQ ID NO: 119145 - DNA, 25 bp, Homo sapien
ggcttcatgcttgcaggctgtagga

SEQ ID NO: 119146 - DNA, 25 bp, Homo sapien
caacatctgtgcctgcgcttttcaa

SEQ ID NO: 119147 - DNA, 25 bp, Homo sapien
tcacaaaagccaggatcccaggttc

SEQ ID NO: 119148 - DNA, 25 bp, Homo sapien
aatgataccaagtacgtacactggg

SEQ ID NO: 119149 - DNA, 25 bp, Homo sapien
tatacgggtacagtttgtggcaacc

SEQ ID NO: 119150 - DNA, 25 bp, Homo sapien
gaaataaagccacatgtttacggcc

SEQ ID NO: 119151 - DNA, 25 bp, Homo sapien
tgaatgcagtctatggccacacaag

SEQ ID NO: 119152 - DNA, 25 bp, Homo sapien
caactgcttcaagcagaaacatatt

SEQ ID NO: 119153 - DNA, 25 bp, Homo sapien
tgtctgactgttgatgaaagaagat

SEQ ID NO: 119154 - DNA, 25 bp, Homo sapien
tgaaagaagattgtttgacaactgc

SEQ ID NO: 119155 - DNA, 25 bp, Homo sapien
ctgccctgtgtctgactgttgatga

SEQ ID NO: 119156 - DNA, 25 bp, Homo sapien
gacatcataactcaaggttcttggg

SEQ ID NO: 119157 - DNA, 25 bp, Homo sapien
ggttctcctggttgctgatagcata

SEQ ID NO: 119158 - DNA, 25 bp, Homo sapien
gagttatactatgaacttccctggt

SEQ ID NO: 119159 - DNA, 25 bp, Homo sapien
tcaaactgagagtcacatcactggc

SEQ ID NO: 119160 - DNA, 25 bp, Homo sapien
tttaaccttctatataggacctatc

SEQ ID NO: 119161 - DNA, 25 bp, Homo sapien
gatttgctacccatgttcactctgc

SEQ ID NO: 119162 - DNA, 25 bp, Homo sapien
tgctctcccaaagtatagccatttg

SEQ ID NO: 119163 - DNA, 25 bp, Homo sapien
tcttgaccactacttaagtttgtgg

SEQ ID NO: 119164 - DNA, 25 bp, Homo sapien
cgctggctggtcatctagtccacat

SEQ ID NO: 119165 - DNA, 25 bp, Homo sapien
tatttcagaataatcagccaacgct

SEQ ID NO: 119166 - DNA, 25 bp, Homo sapien
agccaacgctggctggtcatctagt

SEQ ID NO: 119167 - DNA, 25 bp, Homo sapien
gaataatcagccaacgctggctggt

SEQ ID NO: 119168 - DNA, 25 bp, Homo sapien
gaatccaggaacagcaatctgcatt

SEQ ID NO: 119169 - DNA, 25 bp, Homo sapien
gatttagaagctgggcagagtaaaa

SEQ ID NO: 119170 - DNA, 25 bp, Homo sapien
gcaccttgctctcggtcaaataaaa

SEQ ID NO: 119171 - DNA, 25 bp, Homo sapien
acctacatagaatcaatcagcatct

SEQ ID NO: 119172 - DNA, 25 bp, Homo sapien
ggaagtgatagagccaacatcaggc

SEQ ID NO: 119173 - DNA, 25 bp, Homo sapien
aacatcaggctatagatgttaactg

SEQ ID NO: 119174 - DNA, 25 bp, Homo sapien
caacagtagcaagctcataaaacag

SEQ ID NO: 119175 - DNA, 25 bp, Homo sapien
gataaaggcaacaactaagccttcc

SEQ ID NO: 119176 - DNA, 25 bp, Homo sapien
caacatgatggcgttggatggcatc

SEQ ID NO: 119177 - DNA, 25 bp, Homo sapien
tgtcatctgcagtaagacctatggc

SEQ ID NO: 119178 - DNA, 25 bp, Homo sapien
tggcatcatccagtatacagagagg

SEQ ID NO: 119179 - DNA, 25 bp, Homo sapien
cacagtactaggatacctttgtcat

SEQ ID NO: 119180 - DNA, 25 bp, Homo sapien
aatataaggcgaggcgtcgtggctc

SEQ ID NO: 119181 - DNA, 25 bp, Homo sapien
catggtagaaggacttagagaaatt

SEQ ID NO: 119182 - DNA, 25 bp, Homo sapien
tgataacgataaattaccagagtac

SEQ ID NO: 119183 - DNA, 25 bp, Homo sapien
gaaagagtcaccaagctatacatgt

SEQ ID NO: 119184 - DNA, 25 bp, Homo sapien
gtcacttacacctcaaatgggcctt

SEQ ID NO: 119185 - DNA, 25 bp, Homo sapien
tgccatgtccatccgttaatccagg

SEQ ID NO: 119186 - DNA, 25 bp, Homo sapien
tcaagtgccagggatgttaagtcac

SEQ ID NO: 119187 - DNA, 25 bp, Homo sapien
cctcctttaaagtggcagtcataat

SEQ ID NO: 119188 - DNA, 25 bp, Homo sapien
tggaaaccctcatgccagtaggaat

SEQ ID NO: 119189 - DNA, 25 bp, Homo sapien
tattaatggtgtccaaaaagtggca

SEQ ID NO: 119190 - DNA, 25 bp, Homo sapien
taccaatttttactcgcaacaatgg

SEQ ID NO: 119191 - DNA, 25 bp, Homo sapien
cactttataaaacagtttggcagct

SEQ ID NO: 119192 - DNA, 25 bp, Homo sapien
ggcacaatcttagcaccagccttga

SEQ ID NO: 119193 - DNA, 25 bp, Homo sapien
tgtgccgagccatcagaaactattt

SEQ ID NO: 119194 - DNA, 25 bp, Homo sapien
tattgaaagcatcctagtcagtagt

SEQ ID NO: 119195 - DNA, 25 bp, Homo sapien
tcacagggactaagagatcaaggga

SEQ ID NO: 119196 - DNA, 25 bp, Homo sapien
atgggtgccctagcaaccagcaaca

SEQ ID NO: 119197 - DNA, 25 bp, Homo sapien
tattttaaattaggcatgggtgccc

SEQ ID NO: 119198 - DNA, 25 bp, Homo sapien
agtccatgactaaatcttgcttcgg

SEQ ID NO: 119199 - DNA, 25 bp, Homo sapien
tgatttgctcacattcctggtccaa

SEQ ID NO: 119200 - DNA, 25 bp, Homo sapien
ttcatgtggaataacaaaagacctt

SEQ ID NO: 119201 - DNA, 25 bp, Homo sapien
gaggcatgtaaatatcacctgatct

SEQ ID NO: 119202 - DNA, 25 bp, Homo sapien
aagaccttgaataggcaaataaagc

SEQ ID NO: 119203 - DNA, 25 bp, Homo sapien
tgatctcaaagtatactacaaagct

SEQ ID NO: 119204 - DNA, 25 bp, Homo sapien
tatctcaaaggatagacctctaagg

SEQ ID NO: 119205 - DNA, 25 bp, Homo sapien
taaacagtagctaataggccaaaag

SEQ ID NO: 119206 - DNA, 25 bp, Homo sapien
caggaacatgggctatgagatagat

SEQ ID NO: 119207 - DNA, 25 bp, Homo sapien
gattgctcggagaagactttctgcc

SEQ ID NO: 119208 - DNA, 25 bp, Homo sapien
tatgagtcgttgagagtcctgctta

SEQ ID NO: 119209 - DNA, 25 bp, Homo sapien
cctttaattattgtagcatgtcgaa

SEQ ID NO: 119210 - DNA, 25 bp, Homo sapien
cacaaaactgttactgtgaagtatt

SEQ ID NO: 119211 - DNA, 25 bp, Homo sapien
tcaaactattttcaccacggcaacc

SEQ ID NO: 119212 - DNA, 25 bp, Homo sapien
agctaatttttatccgcacaccaga

SEQ ID NO: 119213 - DNA, 25 bp, Homo sapien
aactcttgatagaaccttaggtcgc

SEQ ID NO: 119214 - DNA, 25 bp, Homo sapien
tagctgtaatacaaaccactgtgca

SEQ ID NO: 119215 - DNA, 25 bp, Homo sapien
taccccatggccataaagttatctg

SEQ ID NO: 119216 - DNA, 25 bp, Homo sapien
tcaaggtaggatgcagctaagttcc

SEQ ID NO: 119217 - DNA, 25 bp, Homo sapien
ttggacaatctagccaaagaagggc

SEQ ID NO: 119218 - DNA, 25 bp, Homo sapien
ccaactgtacatggagtgcctaaac

SEQ ID NO: 119219 - DNA, 25 bp, Homo sapien
gcatgactactaacacttctggaaa

SEQ ID NO: 119220 - DNA, 25 bp, Homo sapien
tgtagtgctctgtgacaagcaagag

SEQ ID NO: 119221 - DNA, 25 bp, Homo sapien
gacaagcaagagaagaagtatagcc

SEQ ID NO: 119222 - DNA, 25 bp, Homo sapien
agtatagcctccagcaaggtcctgt

SEQ ID NO: 119223 - DNA, 25 bp, Homo sapien
gagaagaagtatagcctccagcaag

SEQ ID NO: 119224 - DNA, 25 bp, Homo sapien
tagctccctggttcagctccaaggt

SEQ ID NO: 119225 - DNA, 25 bp, Homo sapien
gctagctccctggttcagctccaag

SEQ ID NO: 119226 - DNA, 25 bp, Homo sapien
tttgctagctccctggttcagctcc

SEQ ID NO: 119227 - DNA, 25 bp, Homo sapien
agctccctggttcagctccaaggtc

SEQ ID NO: 119228 - DNA, 25 bp, Homo sapien
atatcccctatattactcaacttag

SEQ ID NO: 119229 - DNA, 25 bp, Homo sapien
gcagctgcacatagctataatttta

SEQ ID NO: 119230 - DNA, 25 bp, Homo sapien
taacacagctgctagtggaaggact

SEQ ID NO: 119231 - DNA, 25 bp, Homo sapien
tactcaacttagttctgaaattttc

SEQ ID NO: 119232 - DNA, 25 bp, Homo sapien
tataagtctgtcacaacctcaaaca

SEQ ID NO: 119233 - DNA, 25 bp, Homo sapien
cctcaaacacatataggtgaattat

SEQ ID NO: 119234 - DNA, 25 bp, Homo sapien
cttccatcagatgaggcttatcgtg

SEQ ID NO: 119235 - DNA, 25 bp, Homo sapien
gatgaggcttatcgtgtcaaatcct

SEQ ID NO: 119236 - DNA, 25 bp, Homo sapien
taacagtaaatgttgtaatcaaaat

SEQ ID NO: 119237 - DNA, 25 bp, Homo sapien
aacagtaaatgttgtaatcaaaatg

SEQ ID NO: 119238 - DNA, 25 bp, Homo sapien
acagtaaatgttgtaatcaaaatgg

SEQ ID NO: 119239 - DNA, 25 bp, Homo sapien
taatcctcagttcgggaatacctaa

SEQ ID NO: 119240 - DNA, 25 bp, Homo sapien
aaaaacctgcattctaattctggct

SEQ ID NO: 119241 - DNA, 25 bp, Homo sapien
ggtgcatgcaatttccacaataagg

SEQ ID NO: 119242 - DNA, 25 bp, Homo sapien
gaatttatttgccaaaccaggtgca

SEQ ID NO: 119243 - DNA, 25 bp, Homo sapien
catatgctcctggattgatagcagt

SEQ ID NO: 119244 - DNA, 25 bp, Homo sapien
tcaattaaaaaagcgtgggagcagt

SEQ ID NO: 119245 - DNA, 25 bp, Homo sapien
agaagaggcaagaacgacccctgga

SEQ ID NO: 119246 - DNA, 25 bp, Homo sapien
cacttacttagaaccctgattagag

SEQ ID NO: 119247 - DNA, 25 bp, Homo sapien
gaataaccattgacattaccagaca

SEQ ID NO: 119248 - DNA, 25 bp, Homo sapien
tgaggctgcaacaacagtaagtctc

SEQ ID NO: 119249 - DNA, 25 bp, Homo sapien
gattactggcctttggcaagaacag

SEQ ID NO: 119250 - DNA, 25 bp, Homo sapien
gatgcagcagctgaatatatccaga

SEQ ID NO: 119251 - DNA, 25 bp, Homo sapien
ggaccattctgatcttctctgtacc

SEQ ID NO: 119252 - DNA, 25 bp, Homo sapien
cgcagggaccattctgatcttctct

SEQ ID NO: 119253 - DNA, 25 bp, Homo sapien
cttgcgcagggaccattctgatctt

SEQ ID NO: 119254 - DNA, 25 bp, Homo sapien
ctctgtaccattccagttttttagt

SEQ ID NO: 119255 - DNA, 25 bp, Homo sapien
caggacatgtggcagtaaagcatcg

SEQ ID NO: 119256 - DNA, 25 bp, Homo sapien
taagaacacaagcaccgaagtcagt

SEQ ID NO: 119257 - DNA, 25 bp, Homo sapien
tgggcacagaaacatcgcgaggtca

SEQ ID NO: 119258 - DNA, 25 bp, Homo sapien
ggtcagctgctagaaccaatttgat

SEQ ID NO: 119259 - DNA, 25 bp, Homo sapien
ggcggagctttgagcccggcccttc

SEQ ID NO: 119260 - DNA, 25 bp, Homo sapien
tgcgctccagtcgtcggtcgcgcca

SEQ ID NO: 119261 - DNA, 25 bp, Homo sapien
tccagtcgtcggtcgcgccagaggc

SEQ ID NO: 119262 - DNA, 25 bp, Homo sapien
tgccctgcgctccagtcgtcggtcg

SEQ ID NO: 119263 - DNA, 25 bp, Homo sapien
tcagcgttgaagctcccccaggacg

SEQ ID NO: 119264 - DNA, 25 bp, Homo sapien
actcttcggcctccgcttcttcagg

SEQ ID NO: 119265 - DNA, 25 bp, Homo sapien
ttagcaacggactcaactcttcggc

SEQ ID NO: 119266 - DNA, 25 bp, Homo sapien
ataccagccccgctcagcgttgaag

SEQ ID NO: 119267 - DNA, 25 bp, Homo sapien
cataactgcgccaatctcatctgaa

SEQ ID NO: 119268 - DNA, 25 bp, Homo sapien
cagtgagtacataatcctagggccg

SEQ ID NO: 119269 - DNA, 25 bp, Homo sapien
tcatctgaatctcggcggctgcctt

SEQ ID NO: 119270 - DNA, 25 bp, Homo sapien
tagagtatgctaggctgctatcacg

SEQ ID NO: 119271 - DNA, 25 bp, Homo sapien
tgcaaagacctcacgagactggtgg

SEQ ID NO: 119272 - DNA, 25 bp, Homo sapien
tagggtcaggaacgtgctatgcact

SEQ ID NO: 119273 - DNA, 25 bp, Homo sapien
tcgagttaaaaagcggagtgcccac

SEQ ID NO: 119274 - DNA, 25 bp, Homo sapien
cctgggaacagtgtctaggactcga

SEQ ID NO: 119275 - DNA, 25 bp, Homo sapien
acacctggggatcgctgtctgtgaa

SEQ ID NO: 119276 - DNA, 25 bp, Homo sapien
aacacctggggatcgctgtctgtga

SEQ ID NO: 119277 - DNA, 25 bp, Homo sapien
gaaacacctggggatcgctgtctgt

SEQ ID NO: 119278 - DNA, 25 bp, Homo sapien
cctggggatcgctgtctgtgaagtt

SEQ ID NO: 119279 - DNA, 25 bp, Homo sapien
gccaaaacataagctaagccaagga

SEQ ID NO: 119280 - DNA, 25 bp, Homo sapien
taagctaagccaaggatgccacttc

SEQ ID NO: 119281 - DNA, 25 bp, Homo sapien
gacaccggtattagccaaaacataa

SEQ ID NO: 119282 - DNA, 25 bp, Homo sapien
taaatccaaagacaccggtattagc

SEQ ID NO: 119283 - DNA, 25 bp, Homo sapien
gaatacacatactaagcagaagatg

SEQ ID NO: 119284 - DNA, 25 bp, Homo sapien
caggagagcaactgtcagcagcaag

SEQ ID NO: 119285 - DNA, 25 bp, Homo sapien
aagatggactgagtaagaagccagg

SEQ ID NO: 119286 - DNA, 25 bp, Homo sapien
gagagcaactgtcagcagcaagaag

SEQ ID NO: 119287 - DNA, 25 bp, Homo sapien
accatgaagtagttagttcatgggc

SEQ ID NO: 119288 - DNA, 25 bp, Homo sapien
tttacaaagattgaaggaattcaat

SEQ ID NO: 119289 - DNA, 25 bp, Homo sapien
tcaacggaagacaggtgagtcaatg

SEQ ID NO: 119290 - DNA, 25 bp, Homo sapien
aggaattcaatcaacggaagacagg

SEQ ID NO: 119291 - DNA, 25 bp, Homo sapien
cagatgacaaacgaaggctagagag

SEQ ID NO: 119292 - DNA, 25 bp, Homo sapien
caacaaactgttgggagagagttag

SEQ ID NO: 119293 - DNA, 25 bp, Homo sapien
catgaaaagtcctgatagaccccaa

SEQ ID NO: 119294 - DNA, 25 bp, Homo sapien
gaccccaaacgctccataaaatcta

SEQ ID NO: 119295 - DNA, 25 bp, Homo sapien
tgattaaacaggaggtactcagctc

SEQ ID NO: 119296 - DNA, 25 bp, Homo sapien
caagctagttaatcactcagtgcct

SEQ ID NO: 119297 - DNA, 25 bp, Homo sapien
gcttccaggttcctataatagtggg

SEQ ID NO: 119298 - DNA, 25 bp, Homo sapien
tcagaactcctactaactgggactc

SEQ ID NO: 119299 - DNA, 25 bp, Homo sapien
cccagtgggcatgctacagtgctct

SEQ ID NO: 119300 - DNA, 25 bp, Homo sapien
gaatacatgcctgcaactcctgaag

SEQ ID NO: 119301 - DNA, 25 bp, Homo sapien
gctttgtatccttgcacatgctgga

SEQ ID NO: 119302 - DNA, 25 bp, Homo sapien
gaagactacgttttctttgccagag

SEQ ID NO: 119303 - DNA, 25 bp, Homo sapien
ttcagggactaggatgtggctacct

SEQ ID NO: 119304 - DNA, 25 bp, Homo sapien
cacgatgtctaaatcaaggtgtcca

SEQ ID NO: 119305 - DNA, 25 bp, Homo sapien
gactgaatttagagtccaccaggat

SEQ ID NO: 119306 - DNA, 25 bp, Homo sapien
ttcgggaagcattactcagctcact

SEQ ID NO: 119307 - DNA, 25 bp, Homo sapien
ctatttggttcttctctcttttccg

SEQ ID NO: 119308 - DNA, 25 bp, Homo sapien
ctggtcctggattctttttggttgg

SEQ ID NO: 119309 - DNA, 25 bp, Homo sapien
ccatctggtcctggattctttttgg

SEQ ID NO: 119310 - DNA, 25 bp, Homo sapien
tccatctggtcctggattctttttg

SEQ ID NO: 119311 - DNA, 25 bp, Homo sapien
ggcacatgcaaatacaccaggccca

SEQ ID NO: 119312 - DNA, 25 bp, Homo sapien
aggcacatgcaaatacaccaggccc

SEQ ID NO: 119313 - DNA, 25 bp, Homo sapien
caggcacatgcaaatacaccaggcc

SEQ ID NO: 119314 - DNA, 25 bp, Homo sapien
aagagtccaagatcttcataagatg

SEQ ID NO: 119315 - DNA, 25 bp, Homo sapien
ctttccaggtaatccaaatgcaaag
